United States Patent Application Publication US 2010/0105134 A1 - sequence listing, part 4

SEQ ID NO: 72812 - RNA, 25 nt, Artificial Sequence
  Description of Artificial Sequence: Synthetic oligonucleotide
acaaucuugcugagcauaaaacagu

SEQ ID NO: 72813 - RNA, 25 nt, Artificial Sequence
  Description of Artificial Sequence: Synthetic oligonucleotide
ccaauaaugaagaguccuuuauccu

SEQ ID NO: 72814 - RNA, 25 nt, Artificial Sequence
  Description of Artificial Sequence: Synthetic oligonucleotide
acuuuggauguuccaacgcaaguug

SEQ ID NO: 72815 - RNA, 25 nt, Artificial Sequence
  Description of Artificial Sequence: Synthetic oligonucleotide
aaugcuuccacuaaacugaaaccau

SEQ ID NO: 72816 - RNA, 25 nt, Artificial Sequence
  Description of Artificial Sequence: Synthetic oligonucleotide
gagaaaguuugacuuuguuaaauau

SEQ ID NO: 72817 - RNA, 25 nt, Artificial Sequence
  Description of Artificial Sequence: Synthetic oligonucleotide
aaagaacuacuguauauuaaaaguu

SEQ ID NO: 72818 - RNA, 25 nt, Artificial Sequence
  Description of Artificial Sequence: Synthetic oligonucleotide
uuagaaauacggguuuugacuuaac

SEQ ID NO: 72819 - RNA, 25 nt, Artificial Sequence
  Description of Artificial Sequence: Synthetic oligonucleotide
aacauggguacagcaaacucagcac

SEQ ID NO: 72820 - RNA, 25 nt, Artificial Sequence
  Description of Artificial Sequence: Synthetic oligonucleotide
aaagacacagaagaugcugaccuca

SEQ ID NO: 72821 - RNA, 25 nt, Artificial Sequence
  Description of Artificial Sequence: Synthetic oligonucleotide
uaguagggagguuuauucagaucgc

SEQ ID NO: 72822 - RNA, 25 nt, Artificial Sequence
  Description of Artificial Sequence: Synthetic oligonucleotide
gccuucugcagcaggguucugggau

SEQ ID NO: 72823 - RNA, 25 nt, Artificial Sequence
  Description of Artificial Sequence: Synthetic oligonucleotide
ggucugguacauauuggaaauuaug

SEQ ID NO: 72824 - RNA, 25 nt, Artificial Sequence
  Description of Artificial Sequence: Synthetic oligonucleotide
cuaguccuuccgauggaagcacuag

SEQ ID NO: 72825 - RNA, 25 nt, Artificial Sequence
  Description of Artificial Sequence: Synthetic oligonucleotide
ccagugaauauuguuuuuaugugga

SEQ ID NO: 72826 - RNA, 25 nt, Artificial Sequence
  Description of Artificial Sequence: Synthetic oligonucleotide
augaauucaaguuggaauugguaga

SEQ ID NO: 72827 - RNA, 25 nt, Artificial Sequence
  Description of Artificial Sequence: Synthetic oligonucleotide
caggacacagauuuagacuuggaga

SEQ ID NO: 72828 - RNA, 25 nt, Artificial Sequence
  Description of Artificial Sequence: Synthetic oligonucleotide
cucaaagcacaguuacaguauucca

SEQ ID NO: 72829 - RNA, 25 nt, Artificial Sequence
  Description of Artificial Sequence: Synthetic oligonucleotide
accacugccaccacugaugaauuaa

SEQ ID NO: 72830 - RNA, 25 nt, Artificial Sequence
  Description of Artificial Sequence: Synthetic oligonucleotide
gaaacuacuagugccacaucaucac

SEQ ID NO: 72831 - RNA, 25 nt, Artificial Sequence
  Description of Artificial Sequence: Synthetic oligonucleotide
aagucggacagccucaccaaacaga

SEQ ID NO: 72832 - RNA, 25 nt, Artificial Sequence
  Description of Artificial Sequence: Synthetic oligonucleotide
gaaagcgaaaaauggaacaugaugg

SEQ ID NO: 72833 - RNA, 25 nt, Artificial Sequence
  Description of Artificial Sequence: Synthetic oligonucleotide
cccucugauuuagcauguagacugc

SEQ ID NO: 72834 - RNA, 25 nt, Artificial Sequence
  Description of Artificial Sequence: Synthetic oligonucleotide
ugagcuauuuaaggaucuauuuaug

SEQ ID NO: 72835 - RNA, 25 nt, Artificial Sequence
  Description of Artificial Sequence: Synthetic oligonucleotide
aaaaggugaaaaagcacuauuauca

SEQ ID NO: 72836 - RNA, 25 nt, Artificial Sequence
  Description of Artificial Sequence: Synthetic oligonucleotide
gaaaaagcacuauuaucaguucugc

SEQ ID NO: 72837 - RNA, 25 nt, Artificial Sequence
  Description of Artificial Sequence: Synthetic oligonucleotide
ggcugaaaagaaagauuaaaccuac

SEQ ID NO: 72838 - RNA, 25 nt, Artificial Sequence
  Description of Artificial Sequence: Synthetic oligonucleotide
uaaacccuuauaauaaaauccuucu

SEQ ID NO: 72839 - RNA, 25 nt, Artificial Sequence
  Description of Artificial Sequence: Synthetic oligonucleotide
cauacuauuagccaaugcuguagac

SEQ ID NO: 72840 - RNA, 25 nt, Artificial Sequence
  Description of Artificial Sequence: Synthetic oligonucleotide
gacagaagcauuuugauaggaauag

SEQ ID NO: 72841 - RNA, 25 nt, Artificial Sequence
  Description of Artificial Sequence: Synthetic oligonucleotide
agagcaaauaagauaauggcccuga

SEQ ID NO: 72842 - RNA, 25 nt, Artificial Sequence
  Description of Artificial Sequence: Synthetic oligonucleotide
ccaacauuuuucucuuccucaagca

SEQ ID NO: 72843 - RNA, 25 nt, Artificial Sequence
  Description of Artificial Sequence: Synthetic oligonucleotide
uuaaguaugagaaaaguucagccca

SEQ ID NO: 72844 - RNA, 25 nt, Artificial Sequence
  Description of Artificial Sequence: Synthetic oligonucleotide
caggaauaaagauggcugcugaacc

SEQ ID NO: 72845 - RNA, 25 nt, Artificial Sequence
  Description of Artificial Sequence: Synthetic oligonucleotide
aauuugaaugaccaaguucucuuca

SEQ ID NO: 72846 - RNA, 25 nt, Artificial Sequence
  Description of Artificial Sequence: Synthetic oligonucleotide
auguauaaagauagccagccuagag

SEQ ID NO: 72847 - RNA, 25 nt, Artificial Sequence
  Description of Artificial Sequence: Synthetic oligonucleotide
ggcuguaacuaucucugugaagugu

SEQ ID NO: 72848 - RNA, 25 nt, Artificial Sequence
  Description of Artificial Sequence: Synthetic oligonucleotide
ucugugaagugugagaaaauuucaa

SEQ ID NO: 72849 - RNA, 25 nt, Artificial Sequence
  Description of Artificial Sequence: Synthetic oligonucleotide
ccuuuaaggaaaugaauccuccuga

SEQ ID NO: 72850 - RNA, 25 nt, Artificial Sequence
  Description of Artificial Sequence: Synthetic oligonucleotide
aaggauacaaaaagugacaucauau

SEQ ID NO: 72851 - RNA, 25 nt, Artificial Sequence
  Description of Artificial Sequence: Synthetic oligonucleotide
agaugcaauuugaaucuucaucaua

SEQ ID NO: 72852 - RNA, 25 nt, Artificial Sequence
  Description of Artificial Sequence: Synthetic oligonucleotide
guucaaaacgaagacuagcuauuaa

SEQ ID NO: 72853 - RNA, 25 nt, Artificial Sequence
  Description of Artificial Sequence: Synthetic oligonucleotide
gugaaaccucaucucuacuaaaaau

SEQ ID NO: 72854 - RNA, 25 nt, Artificial Sequence
  Description of Artificial Sequence: Synthetic oligonucleotide
acgaaagagaagcucuaucucgccu

SEQ ID NO: 72855 - RNA, 25 nt, Artificial Sequence
  Description of Artificial Sequence: Synthetic oligonucleotide
cuccacaagcgccuucgguccaguu

SEQ ID NO: 72856 - RNA, 25 nt, Artificial Sequence
  Description of Artificial Sequence: Synthetic oligonucleotide
gagaagauuccaaagauguagccgc

SEQ ID NO: 72857 - RNA, 25 nt, Artificial Sequence
  Description of Artificial Sequence: Synthetic oligonucleotide
aaucuggauucaaugaggagacuug

SEQ ID NO: 72858 - RNA, 25 nt, Artificial Sequence
  Description of Artificial Sequence: Synthetic oligonucleotide
agaacagauuugagaguagugagga

SEQ ID NO: 72859 - RNA, 25 nt, Artificial Sequence
  Description of Artificial Sequence: Synthetic oligonucleotide
ccagagcugugcagaugaguacaaa

SEQ ID NO: 72860 - RNA, 25 nt, Artificial Sequence
  Description of Artificial Sequence: Synthetic oligonucleotide
ccucagauuguuguuguuaaugggc

SEQ ID NO: 72861 - RNA, 25 nt, Artificial Sequence
  Description of Artificial Sequence: Synthetic oligonucleotide
cuauuuuaauuauuuuuaauuuauu

SEQ ID NO: 72862 - RNA, 25 nt, Artificial Sequence
  Description of Artificial Sequence: Synthetic oligonucleotide
uuuaauuuauuaauauuuaaauaug

SEQ ID NO: 72863 - RNA, 25 nt, Artificial Sequence
  Description of Artificial Sequence: Synthetic oligonucleotide
augcaguuugaauauccuuuguuuc

SEQ ID NO: 72864 - RNA, 25 nt, Artificial Sequence
  Description of Artificial Sequence: Synthetic oligonucleotide
caugcugcuggcgucuaaguguuug

SEQ ID NO: 72865 - RNA, 25 nt, Artificial Sequence
  Description of Artificial Sequence: Synthetic oligonucleotide
agaugugcauuucaccugugacaaa

SEQ ID NO: 72866 - RNA, 25 nt, Artificial Sequence
  Description of Artificial Sequence: Synthetic oligonucleotide
ucaaaaccugugccaggcugaauua

SEQ ID NO: 72867 - RNA, 25 nt, Artificial Sequence
  Description of Artificial Sequence: Synthetic oligonucleotide
gaauguggguagucauucuuacaau

SEQ ID NO: 72868 - RNA, 25 nt, Artificial Sequence
  Description of Artificial Sequence: Synthetic oligonucleotide
auguggguagucauucuuacaauug

SEQ ID NO: 72869 - RNA, 25 nt, Artificial Sequence
  Description of Artificial Sequence: Synthetic oligonucleotide
ugaaaaugagcaucagagaguguac

SEQ ID NO: 72870 - RNA, 25 nt, Artificial Sequence
  Description of Artificial Sequence: Synthetic oligonucleotide
uugcuuuucauguagaacucagcag

SEQ ID NO: 72871 - RNA, 25 nt, Artificial Sequence
  Description of Artificial Sequence: Synthetic oligonucleotide
uguauuucuauauuuauuuucagua

SEQ ID NO: 72872 - RNA, 25 nt, Artificial Sequence
  Description of Artificial Sequence: Synthetic oligonucleotide
uuugauuaauguuucuuaaauggaa

SEQ ID NO: 72873 - RNA, 25 nt, Artificial Sequence
  Description of Artificial Sequence: Synthetic oligonucleotide
caacguguauagugccuaaaauugu

SEQ ID NO: 72874 - RNA, 25 nt, Artificial Sequence
  Description of Artificial Sequence: Synthetic oligonucleotide
cauauccuuggcuacuaacaucugg

SEQ ID NO: 72875 - RNA, 25 nt, Artificial Sequence
  Description of Artificial Sequence: Synthetic oligonucleotide
uacuaacaucuggagacugugagcu

SEQ ID NO: 72876 - RNA, 25 nt, Artificial Sequence
  Description of Artificial Sequence: Synthetic oligonucleotide
cauaaguugugugcuuuuuauuaau

SEQ ID NO: 72877 - RNA, 25 nt, Artificial Sequence
  Description of Artificial Sequence: Synthetic oligonucleotide
gcaucauuuuggcucuucuuacauu

SEQ ID NO: 72878 - RNA, 25 nt, Artificial Sequence
  Description of Artificial Sequence: Synthetic oligonucleotide
gcucuucuuacauuuguaaaaaugu

SEQ ID NO: 72879 - RNA, 25 nt, Artificial Sequence
  Description of Artificial Sequence: Synthetic oligonucleotide
agauuaggucaucuuaauucauauu

SEQ ID NO: 72880 - RNA, 25 nt, Artificial Sequence
  Description of Artificial Sequence: Synthetic oligonucleotide
auggaauugaaagaacuaaucauga

SEQ ID NO: 72881 - RNA, 25 nt, Artificial Sequence
  Description of Artificial Sequence: Synthetic oligonucleotide
cacacucauuccuucugcucuuggg

SEQ ID NO: 72882 - RNA, 25 nt, Artificial Sequence
  Description of Artificial Sequence: Synthetic oligonucleotide
uguagagguaaccaguagcuuugag

SEQ ID NO: 72883 - RNA, 25 nt, Artificial Sequence
  Description of Artificial Sequence: Synthetic oligonucleotide
caaccacaugccacguaauauuuca

SEQ ID NO: 72884 - RNA, 25 nt, Artificial Sequence
  Description of Artificial Sequence: Synthetic oligonucleotide
ucggaaacaaguuauucucuucacu

SEQ ID NO: 72885 - RNA, 25 nt, Artificial Sequence
  Description of Artificial Sequence: Synthetic oligonucleotide
acucccaauaacuaaugcuaagaaa

SEQ ID NO: 72886 - RNA, 25 nt, Artificial Sequence
  Description of Artificial Sequence: Synthetic oligonucleotide
aaugcuaagaaaugcugaaaaucaa

SEQ ID NO: 72887 - RNA, 25 nt, Artificial Sequence
  Description of Artificial Sequence: Synthetic oligonucleotide
gucuuucucuaaauaugauuacuuu

SEQ ID NO: 72888 - RNA, 25 nt, Artificial Sequence
  Description of Artificial Sequence: Synthetic oligonucleotide
ugaauuucaggcauuuuguucuaca

SEQ ID NO: 72889 - RNA, 25 nt, Artificial Sequence
  Description of Artificial Sequence: Synthetic oligonucleotide
cgauucccucucacccgggacucuc

SEQ ID NO: 72890 - RNA, 25 nt, Artificial Sequence
  Description of Artificial Sequence: Synthetic oligonucleotide
aggaaagugaaccuuuaaaguaaag

SEQ ID NO: 72891 - RNA, 25 nt, Artificial Sequence
  Description of Artificial Sequence: Synthetic oligonucleotide
gaggcugcaugcucuggaagccugg

SEQ ID NO: 72892 - RNA, 25 nt, Artificial Sequence
  Description of Artificial Sequence: Synthetic oligonucleotide
ucucugaacagaaaacaaaagagag

SEQ ID NO: 72893 - RNA, 25 nt, Artificial Sequence
  Description of Artificial Sequence: Synthetic oligonucleotide
aacuuggcuguaaucaguuaugccg

SEQ ID NO: 72894 - RNA, 25 nt, Artificial Sequence
  Description of Artificial Sequence: Synthetic oligonucleotide
agaagccaaaauuaaaagaagucca

SEQ ID NO: 72895 - RNA, 25 nt, Artificial Sequence
  Description of Artificial Sequence: Synthetic oligonucleotide
auuaaaagaaguccaggugagguua

SEQ ID NO: 72896 - RNA, 25 nt, Artificial Sequence
  Description of Artificial Sequence: Synthetic oligonucleotide
gaauccggauuaucgggaagaggac

SEQ ID NO: 72897 - RNA, 25 nt, Artificial Sequence
  Description of Artificial Sequence: Synthetic oligonucleotide
aaugugacaucaaagcaaguauugu

SEQ ID NO: 72898 - RNA, 25 nt, Artificial Sequence
  Description of Artificial Sequence: Synthetic oligonucleotide
caucaaagcaaguauuguagcacuc

SEQ ID NO: 72899 - RNA, 25 nt, Artificial Sequence
  Description of Artificial Sequence: Synthetic oligonucleotide
agagagagaaaacaaaaccacaaau

SEQ ID NO: 72900 - RNA, 25 nt, Artificial Sequence
  Description of Artificial Sequence: Synthetic oligonucleotide
ucgcuguaguauuuaagcccauaca

SEQ ID NO: 72901 - RNA, 25 nt, Artificial Sequence
  Description of Artificial Sequence: Synthetic oligonucleotide
cgcuguaguauuuaagcccauacag

SEQ ID NO: 72902 - RNA, 25 nt, Artificial Sequence
  Description of Artificial Sequence: Synthetic oligonucleotide
auuuaagcccauacagaaaccuucc

SEQ ID NO: 72903 - RNA, 25 nt, Artificial Sequence
  Description of Artificial Sequence: Synthetic oligonucleotide
auuaaaauaaacaugguauaccuac

SEQ ID NO: 72904 - RNA, 25 nt, Artificial Sequence
  Description of Artificial Sequence: Synthetic oligonucleotide
cuguucugaucggccaguuuucgga

SEQ ID NO: 72905 - RNA, 25 nt, Artificial Sequence
  Description of Artificial Sequence: Synthetic oligonucleotide
aaauaauuugaacuuuggaacaggg

SEQ ID NO: 72906 - RNA, 25 nt, Artificial Sequence
  Description of Artificial Sequence: Synthetic oligonucleotide
ugcgaccuuaauuuaacuuuccagu

SEQ ID NO: 72907 - RNA, 25 nt, Artificial Sequence
  Description of Artificial Sequence: Synthetic oligonucleotide
cugagaaagcuaaaguuugguuuug

SEQ ID NO: 72908 - RNA, 25 nt, Artificial Sequence
  Description of Artificial Sequence: Synthetic oligonucleotide
aguaaagaugcuacuucccacugua

SEQ ID NO: 72909 - RNA, 25 nt, Artificial Sequence
  Description of Artificial Sequence: Synthetic oligonucleotide
cugcuuaauugcugauaccauauga

SEQ ID NO: 72910 - RNA, 25 nt, Artificial Sequence
  Description of Artificial Sequence: Synthetic oligonucleotide
uaccauaugaaugaaacaugggcug

SEQ ID NO: 72911 - RNA, 25 nt, Artificial Sequence
  Description of Artificial Sequence: Synthetic oligonucleotide
aacuuucuuauccaacuuuuucaua

SEQ ID NO: 72912 - RNA, 25 nt, Artificial Sequence
  Description of Artificial Sequence: Synthetic oligonucleotide
ccuugcaugacaucaugaggccgga

SEQ ID NO: 72913 - RNA, 25 nt, Artificial Sequence
  Description of Artificial Sequence: Synthetic oligonucleotide
ugaauuuguauaugacugcauuugu

SEQ ID NO: 72914 - RNA, 25 nt, Artificial Sequence
  Description of Artificial Sequence: Synthetic oligonucleotide
gaauccuaguagaauguuuacuacc

SEQ ID NO: 72915 - RNA, 25 nt, Artificial Sequence
  Description of Artificial Sequence: Synthetic oligonucleotide
gaaagggaagaauuuuuugaugaaa

SEQ ID NO: 72916 - RNA, 25 nt, Artificial Sequence
  Description of Artificial Sequence: Synthetic oligonucleotide
uaucggcaugccagugugugaauuu

SEQ ID NO: 72917 - RNA, 25 nt, Artificial Sequence
  Description of Artificial Sequence: Synthetic oligonucleotide
caccucauaguagagcaauguaugu

SEQ ID NO: 72918 - RNA, 25 nt, Artificial Sequence
  Description of Artificial Sequence: Synthetic oligonucleotide
ccagaauugccaaagcacauauaua

SEQ ID NO: 72919 - RNA, 25 nt, Artificial Sequence
  Description of Artificial Sequence: Synthetic oligonucleotide
uggugaucuggguaauaguuucucc

SEQ ID NO: 72920 - RNA, 25 nt, Artificial Sequence
  Description of Artificial Sequence: Synthetic oligonucleotide
gaucuggguaauaguuucuccaaau

SEQ ID NO: 72921 - RNA, 25 nt, Artificial Sequence
  Description of Artificial Sequence: Synthetic oligonucleotide
ggaugugaugaauacuuccuagaaa

SEQ ID NO: 72922 - RNA, 25 nt, Artificial Sequence
  Description of Artificial Sequence: Synthetic oligonucleotide
cauuuccacagcuacaccauauaug

SEQ ID NO: 72923 - RNA, 25 nt, Artificial Sequence
  Description of Artificial Sequence: Synthetic oligonucleotide
acagcuacaccauauaugaauggag

SEQ ID NO: 72924 - RNA, 25 nt, Artificial Sequence
  Description of Artificial Sequence: Synthetic oligonucleotide
ugcaguucuuacacgagaagaagau

SEQ ID NO: 72925 - RNA, 25 nt, Artificial Sequence
  Description of Artificial Sequence: Synthetic oligonucleotide
acgagaagaagaucauuuacaggga

SEQ ID NO: 72926 - RNA, 25 nt, Artificial Sequence
  Description of Artificial Sequence: Synthetic oligonucleotide
cgagaagaagaucauuuacagggac

SEQ ID NO: 72927 - RNA, 25 nt, Artificial Sequence
  Description of Artificial Sequence: Synthetic oligonucleotide
aagaagaucauuuacagggaccuga

SEQ ID NO: 72928 - RNA, 25 nt, Artificial Sequence
  Description of Artificial Sequence: Synthetic oligonucleotide
agaggaagagguguuugacugcauc

SEQ ID NO: 72929 - RNA, 25 nt, Artificial Sequence
  Description of Artificial Sequence: Synthetic oligonucleotide
gaggaagagguguuugacugcaucg

SEQ ID NO: 72930 - RNA, 25 nt, Artificial Sequence
  Description of Artificial Sequence: Synthetic oligonucleotide
cuacuuugagggcgaguucacaggg

SEQ ID NO: 72931 - RNA, 25 nt, Artificial Sequence
  Description of Artificial Sequence: Synthetic oligonucleotide
agggcaucuccuggcaccucugucc

SEQ ID NO: 72932 - RNA, 25 nt, Artificial Sequence
  Description of Artificial Sequence: Synthetic oligonucleotide
ggagugauaugguuugucuuuuuaa

SEQ ID NO: 72933 - RNA, 25 nt, Artificial Sequence
  Description of Artificial Sequence: Synthetic oligonucleotide
gagugauaugguuugucuuuuuaag

SEQ ID NO: 72934 - RNA, 25 nt, Artificial Sequence
  Description of Artificial Sequence: Synthetic oligonucleotide
ugcaguaaagauccuaaagguuguc

SEQ ID NO: 72935 - RNA, 25 nt, Artificial Sequence
  Description of Artificial Sequence: Synthetic oligonucleotide
aguaaagauccuaaagguugucgac

SEQ ID NO: 72936 - RNA, 25 nt, Artificial Sequence
  Description of Artificial Sequence: Synthetic oligonucleotide
ugacaaaggacaaccuggcaauugu

SEQ ID NO: 72937 - RNA, 25 nt, Artificial Sequence
  Description of Artificial Sequence: Synthetic oligonucleotide
gcaauugugacccaguggugcgagg

SEQ ID NO: 72938 - RNA, 25 nt, Artificial Sequence
  Description of Artificial Sequence: Synthetic oligonucleotide
aacaucauccauagagacaugaaau

SEQ ID NO: 72939 - RNA, 25 nt, Artificial Sequence
  Description of Artificial Sequence: Synthetic oligonucleotide
ugaaauccaacaauauauuucucca

SEQ ID NO: 72940 - RNA, 25 nt, Artificial Sequence
  Description of Artificial Sequence: Synthetic oligonucleotide
aacaauauauuucuccaugaaggcu

SEQ ID NO: 72941 - RNA, 25 nt, Artificial Sequence
  Description of Artificial Sequence: Synthetic oligonucleotide
aacaguaaagucacgcuggaguggu

SEQ ID NO: 72942 - RNA, 25 nt, Artificial Sequence
  Description of Artificial Sequence: Synthetic oligonucleotide
ugugaagaaaguaaaggaagagagg

SEQ ID NO: 72943 - RNA, 25 nt, Artificial Sequence
  Description of Artificial Sequence: Synthetic oligonucleotide
cuuccgagccauccuugcaucgggc

SEQ ID NO: 72944 - RNA, 25 nt, Artificial Sequence
  Description of Artificial Sequence: Synthetic oligonucleotide
aauggagguugaauauccuacugug

SEQ ID NO: 72945 - RNA, 25 nt, Artificial Sequence
  Description of Artificial Sequence: Synthetic oligonucleotide
ggagguugaauauccuacuguguaa

SEQ ID NO: 72946 - RNA, 25 nt, Artificial Sequence
  Description of Artificial Sequence: Synthetic oligonucleotide
auuuugaguuuucccuuguagugua

SEQ ID NO: 72947 - RNA, 25 nt, Artificial Sequence
  Description of Artificial Sequence: Synthetic oligonucleotide
uauccuguuuguucuuuguugauug

SEQ ID NO: 72948 - RNA, 25 nt, Artificial Sequence
  Description of Artificial Sequence: Synthetic oligonucleotide
ccuguuuguucuuuguugauugaaa

SEQ ID NO: 72949 - RNA, 25 nt, Artificial Sequence
  Description of Artificial Sequence: Synthetic oligonucleotide
cucuacagccuucuuuuucuuccau

SEQ ID NO: 72950 - RNA, 25 nt, Artificial Sequence
  Description of Artificial Sequence: Synthetic oligonucleotide
ucuuccauagcuaaucuuccuucua

SEQ ID NO: 72951 - RNA, 25 nt, Artificial Sequence
  Description of Artificial Sequence: Synthetic oligonucleotide
auaaucuuccuguugaaugcuucau

SEQ ID NO: 72952 - RNA, 25 nt, Artificial Sequence
  Description of Artificial Sequence: Synthetic oligonucleotide
uaaucuuccuguugaaugcuucaug

SEQ ID NO: 72953 - RNA, 25 nt, Artificial Sequence
  Description of Artificial Sequence: Synthetic oligonucleotide
cuucaugacuugaauucuacuuuga

SEQ ID NO: 72954 - RNA, 25 nt, Artificial Sequence
  Description of Artificial Sequence: Synthetic oligonucleotide
aagagggagagaagcaacuacagac

SEQ ID NO: 72955 - RNA, 25 nt, Artificial Sequence
  Description of Artificial Sequence: Synthetic oligonucleotide
cgucuccuaccagaccaaggucaac

SEQ ID NO: 72956 - RNA, 25 nt, Artificial Sequence
  Description of Artificial Sequence: Synthetic oligonucleotide
gaucaaucggcccgacuaucucgac

SEQ ID NO: 72957 - RNA, 25 nt, Artificial Sequence
  Description of Artificial Sequence: Synthetic oligonucleotide
ggacgaacauccaaccuucccaaac

SEQ ID NO: 72958 - RNA, 25 nt, Artificial Sequence
  Description of Artificial Sequence: Synthetic oligonucleotide
agggucggaacccaagcuuagaacu

SEQ ID NO: 72959 - RNA, 25 nt, Artificial Sequence
  Description of Artificial Sequence: Synthetic oligonucleotide
ucggaacccaagcuuagaacuuuaa

SEQ ID NO: 72960 - RNA, 25 nt, Artificial Sequence
  Description of Artificial Sequence: Synthetic oligonucleotide
acccaagcuuagaacuuuaagcaac

SEQ ID NO: 72961 - RNA, 25 nt, Artificial Sequence
  Description of Artificial Sequence: Synthetic oligonucleotide
gaacuuuaagcaacaagaccaccac

SEQ ID NO: 72962 - RNA, 25 nt, Artificial Sequence
  Description of Artificial Sequence: Synthetic oligonucleotide
acuauucaguggcgagaaauaaagu

SEQ ID NO: 72963 - RNA, 25 nt, Artificial Sequence
  Description of Artificial Sequence: Synthetic oligonucleotide
cuauucaguggcgagaaauaaaguu

SEQ ID NO: 72964 - RNA, 25 nt, Artificial Sequence
  Description of Artificial Sequence: Synthetic oligonucleotide
aaacacagauaacaggaaaugaucc

SEQ ID NO: 72965 - RNA, 25 nt, Artificial Sequence
  Description of Artificial Sequence: Synthetic oligonucleotide
cuuaagaaaagagaagaaaugaaac

SEQ ID NO: 72966 - RNA, 25 nt, Artificial Sequence
  Description of Artificial Sequence: Synthetic oligonucleotide
cugaaggaguguguuuccauccucc

SEQ ID NO: 72967 - RNA, 25 nt, Artificial Sequence
  Description of Artificial Sequence: Synthetic oligonucleotide
ucaccgcgggacugaaaaucuuuga

SEQ ID NO: 72968 - RNA, 25 nt, Artificial Sequence
  Description of Artificial Sequence: Synthetic oligonucleotide
agcagaaauaagcgugccguucagg

SEQ ID NO: 72969 - RNA, 25 nt, Artificial Sequence
  Description of Artificial Sequence: Synthetic oligonucleotide
aagcgugccguucaggguccagaag

SEQ ID NO: 72970 - RNA, 25 nt, Artificial Sequence
  Description of Artificial Sequence: Synthetic oligonucleotide
agaaacagucacucaagacugcuug

SEQ ID NO: 72971 - RNA, 25 nt, Artificial Sequence
  Description of Artificial Sequence: Synthetic oligonucleotide
agaggaagaagguccaugucuuugg

SEQ ID NO: 72972 - RNA, 25 nt, Artificial Sequence
  Description of Artificial Sequence: Synthetic oligonucleotide
uguauucaaaauaugccugaaacac

SEQ ID NO: 72973 - RNA, 25 nt, Artificial Sequence
  Description of Artificial Sequence: Synthetic oligonucleotide
auuuuccucccuuucucuguaccuc

SEQ ID NO: 72974 - RNA, 25 nt, Artificial Sequence
  Description of Artificial Sequence: Synthetic oligonucleotide
caaagaaagauagagcaagacaaga

SEQ ID NO: 72975 - RNA, 25 nt, Artificial Sequence
  Description of Artificial Sequence: Synthetic oligonucleotide
aagaaagauagagcaagacaagaaa

SEQ ID NO: 72976 - RNA, 25 nt, Artificial Sequence
  Description of Artificial Sequence: Synthetic oligonucleotide
gaaagcauuuguuuguacaagaucc

SEQ ID NO: 72977 - RNA, 25 nt, Artificial Sequence
  Description of Artificial Sequence: Synthetic oligonucleotide
ugaguuaaacgaacguacuugcaga

SEQ ID NO: 72978 - RNA, 25 nt, Artificial Sequence
  Description of Artificial Sequence: Synthetic oligonucleotide
acugauacagaacgaucgauacaga

SEQ ID NO: 72979 - RNA, 25 nt, Artificial Sequence
  Description of Artificial Sequence: Synthetic oligonucleotide
auauuauauauauauaaaaauaaau

SEQ ID NO: 72980 - RNA, 25 nt, Artificial Sequence
  Description of Artificial Sequence: Synthetic oligonucleotide
auuauauauauauaaaaauaaauau

SEQ ID NO: 72981 - RNA, 25 nt, Artificial Sequence
  Description of Artificial Sequence: Synthetic oligonucleotide
ucacuggauguauuugacugcugug

SEQ ID NO: 72982 - RNA, 25 nt, Artificial Sequence
  Description of Artificial Sequence: Synthetic oligonucleotide
cagggaagaggaggagaugagagac

SEQ ID NO: 72983 - RNA, 25 nt, Artificial Sequence
  Description of Artificial Sequence: Synthetic oligonucleotide
augaucuuuuuuuugucccacuugg

SEQ ID NO: 72984 - RNA, 27 nt, Artificial Sequence
  Description of Artificial Sequence: Synthetic oligonucleotide
ggccgugaacuccucaucaaaauaccu

SEQ ID NO: 72985 - RNA, 27 nt, Artificial Sequence
  Description of Artificial Sequence: Synthetic oligonucleotide
uggugugauggugaucaucugggccgu

SEQ ID NO: 72986 - RNA, 27 nt, Artificial Sequence
  Description of Artificial Sequence: Synthetic oligonucleotide
aaacccgcaggauaguuuucuucccua

SEQ ID NO: 72987 - RNA, 27 nt, Artificial Sequence
  Description of Artificial Sequence: Synthetic oligonucleotide
caaacuggaugaaauaaauuaaaaccc

SEQ ID NO: 72988 - RNA, 27 nt, Artificial Sequence
  Description of Artificial Sequence: Synthetic oligonucleotide
agaaguccuuaacauuucccuacguga

SEQ ID NO: 72989 - RNA, 27 nt, Artificial Sequence
  Description of Artificial Sequence: Synthetic oligonucleotide
cucugucccacuggguaaacccuggcc

SEQ ID NO: 72990 - RNA, 27 nt, Artificial Sequence
  Description of Artificial Sequence: Synthetic oligonucleotide
cacaauaacaaauuuaaaccuugcucc

SEQ ID NO: 72991 - RNA, 27 nt, Artificial Sequence
  Description of Artificial Sequence: Synthetic oligonucleotide
aaaugcauuugaacaacauaauacaca

SEQ ID NO: 72992 - RNA, 27 nt, Artificial Sequence
  Description of Artificial Sequence: Synthetic oligonucleotide
ggcuuuccugucacaaagauuaaaaac

SEQ ID NO: 72993 - RNA, 27 nt, Artificial Sequence
  Description of Artificial Sequence: Synthetic oligonucleotide
agggcuuuccugucacaaagauuaaaa

SEQ ID NO: 72994 - RNA, 27 nt, Artificial Sequence
  Description of Artificial Sequence: Synthetic oligonucleotide
ggccaugcugggagacauaagcagcag

SEQ ID NO: 72995 - RNA, 27 nt, Artificial Sequence
  Description of Artificial Sequence: Synthetic oligonucleotide
ucagggagaagcuucugaaacacuucu

SEQ ID NO: 72996 - RNA, 27 nt, Artificial Sequence
  Description of Artificial Sequence: Synthetic oligonucleotide
aagggcuucuuccuuauugauggucag

SEQ ID NO: 72997 - RNA, 27 nt, Artificial Sequence
  Description of Artificial Sequence: Synthetic oligonucleotide
ugaagggcuucuuccuuauugaugguc

SEQ ID NO: 72998 - RNA, 27 nt, Artificial Sequence
  Description of Artificial Sequence: Synthetic oligonucleotide
cgcugaagggcuucuuccuuauugaug

SEQ ID NO: 72999 - RNA, 27 nt, Artificial Sequence
  Description of Artificial Sequence: Synthetic oligonucleotide
gccgcugaagggcuucuuccuuauuga

SEQ ID NO: 73000 - RNA, 27 nt, Artificial Sequence
  Description of Artificial Sequence: Synthetic oligonucleotide
acuggccgcugaagggcuucuuccuua

SEQ ID NO: 73001 - RNA, 27 nt, Artificial Sequence
  Description of Artificial Sequence: Synthetic oligonucleotide
cggagcuuuucaccuuuaguuaugcuu

SEQ ID NO: 73002 - RNA, 27 nt, Artificial Sequence
  Description of Artificial Sequence: Synthetic oligonucleotide
ccggagcuuuucaccuuuaguuaugcu

SEQ ID NO: 73003 - RNA, 27 nt, Artificial Sequence
  Description of Artificial Sequence: Synthetic oligonucleotide
cagacuguugacuggcgugauguaguu

SEQ ID NO: 73004 - RNA, 27 nt, Artificial Sequence
  Description of Artificial Sequence: Synthetic oligonucleotide
cuuuugaacucugcuuaaauccagugg

SEQ ID NO: 73005 - RNA, 27 nt, Artificial Sequence
  Description of Artificial Sequence: Synthetic oligonucleotide
gcuuuugaacucugcuuaaauccagug

SEQ ID NO: 73006 - RNA, 27 nt, Artificial Sequence
  Description of Artificial Sequence: Synthetic oligonucleotide
agggcuuuugaacucugcuuaaaucca

SEQ ID NO: 73007 - RNA, 27 nt, Artificial Sequence
  Description of Artificial Sequence: Synthetic oligonucleotide
aagggcuuuugaacucugcuuaaaucc

SEQ ID NO: 73008 - RNA, 27 nt, Artificial Sequence
  Description of Artificial Sequence: Synthetic oligonucleotide
ugaagggcuuuugaacucugcuuaaau

SEQ ID NO: 73009 - RNA, 27 nt, Artificial Sequence
  Description of Artificial Sequence: Synthetic oligonucleotide
cugaagggcuuuugaacucugcuuaaa

SEQ ID NO: 73010 - RNA, 27 nt, Artificial Sequence
  Description of Artificial Sequence: Synthetic oligonucleotide
cgcugaagggcuuuugaacucugcuua

SEQ ID NO: 73011 - RNA, 27 nt, Artificial Sequence
  Description of Artificial Sequence: Synthetic oligonucleotide
cgagcggcuucacucagacccugaggc

SEQ ID NO: 73012 - RNA, 27 nt, Artificial Sequence
  Description of Artificial Sequence: Synthetic oligonucleotide
uugacuggcgugauguaguugcuuggg

SEQ ID NO: 73013 - RNA, 27 nt, Artificial Sequence
  Description of Artificial Sequence: Synthetic oligonucleotide
cacgcaccaagaagcugccauugaucc

SEQ ID NO: 73014 - RNA, 27 nt, Artificial Sequence
  Description of Artificial Sequence: Synthetic oligonucleotide
cugaugaauccaaugugggcuggaauc

SEQ ID NO: 73015 - RNA, 27 nt, Artificial Sequence
  Description of Artificial Sequence: Synthetic oligonucleotide
cuuagguauuccacauucucagcugug

SEQ ID NO: 73016 - RNA, 27 nt, Artificial Sequence
  Description of Artificial Sequence: Synthetic oligonucleotide
ugagccucaaauuaggagauacguuuu

SEQ ID NO: 73017 - RNA, 27 nt, Artificial Sequence
  Description of Artificial Sequence: Synthetic oligonucleotide
ccaauuguagagaaauuauuuuaggaa

SEQ ID NO: 73018 - RNA, 27 nt, Artificial Sequence
  Description of Artificial Sequence: Synthetic oligonucleotide
ggcuccuaacuagcugaaucuuccaau

SEQ ID NO: 73019 - RNA, 27 nt, Artificial Sequence
  Description of Artificial Sequence: Synthetic oligonucleotide
guggauauugacuaggagaguuuaaaa

SEQ ID NO: 73020 - RNA, 27 nt, Artificial Sequence
  Description of Artificial Sequence: Synthetic oligonucleotide
ugugacugaacauaacuguaggcugaa

SEQ ID NO: 73021 - RNA, 27 nt, Artificial Sequence
  Description of Artificial Sequence: Synthetic oligonucleotide
guaugugugugugacugaacauaacug

SEQ ID NO: 73022 - RNA, 27 nt, Artificial Sequence
  Description of Artificial Sequence: Synthetic oligonucleotide
aagcaaaaggaacauuuuguaugugug

SEQ ID NO: 73023 - RNA, 27 nt, Artificial Sequence
  Description of Artificial Sequence: Synthetic oligonucleotide
aaaaauuacuuuaaaagcaaaaggaac

SEQ ID NO: 73024 - RNA, 27 nt, Artificial Sequence
  Description of Artificial Sequence: Synthetic oligonucleotide
ccauugacuguugcuucacaggucaga

SEQ ID NO: 73025 - RNA, 27 nt, Artificial Sequence
  Description of Artificial Sequence: Synthetic oligonucleotide
auugguuugucgaugugugagauaguu

SEQ ID NO: 73026 - RNA, 27 nt, Artificial Sequence
  Description of Artificial Sequence: Synthetic oligonucleotide
agugguagcaguacaauugaggacaag

SEQ ID NO: 73027 - RNA, 27 nt, Artificial Sequence
  Description of Artificial Sequence: Synthetic oligonucleotide
uaagaccgcuugccagcuacgguuuca

SEQ ID NO: 73028 - RNA, 27 nt, Artificial Sequence
  Description of Artificial Sequence: Synthetic oligonucleotide
agccgguaagaccgcuugccagcuacg

SEQ ID NO: 73029 - RNA, 27 nt, Artificial Sequence
  Description of Artificial Sequence: Synthetic oligonucleotide
gguaacccaucuuuuaaccauacaacu

SEQ ID NO: 73030 - RNA, 27 nt, Artificial Sequence
  Description of Artificial Sequence: Synthetic oligonucleotide
ucgcagguaacccaucuuuuaaccaua

SEQ ID NO: 73031 - RNA, 27 nt, Artificial Sequence
  Description of Artificial Sequence: Synthetic oligonucleotide
cucagcaagauuguauaauucccugca

SEQ ID NO: 73032 - RNA, 27 nt, Artificial Sequence
  Description of Artificial Sequence: Synthetic oligonucleotide
acuguuuuaugcucagcaagauuguau

SEQ ID NO: 73033 - RNA, 27 nt, Artificial Sequence
  Description of Artificial Sequence: Synthetic oligonucleotide
aggauaaaggacucuucauuauuggaa

SEQ ID NO: 73034 - RNA, 27 nt, Artificial Sequence
  Description of Artificial Sequence: Synthetic oligonucleotide
caacuugcguuggaacauccaaagugu

SEQ ID NO: 73035 - RNA, 27 nt, Artificial Sequence
  Description of Artificial Sequence: Synthetic oligonucleotide
augguuucaguuuaguggaagcauuua

SEQ ID NO: 73036 - RNA, 27 nt, Artificial Sequence
  Description of Artificial Sequence: Synthetic oligonucleotide
auauuuaacaaagucaaacuuucucac

SEQ ID NO: 73037 - RNA, 27 nt, Artificial Sequence
  Description of Artificial Sequence: Synthetic oligonucleotide
aacuuuuaauauacaguaguucuuuuc

SEQ ID NO: 73038 - RNA, 27 nt, Artificial Sequence
  Description of Artificial Sequence: Synthetic oligonucleotide
guuaagucaaaacccguauuucuaaag

SEQ ID NO: 73039 - RNA, 27 nt, Artificial Sequence
  Description of Artificial Sequence: Synthetic oligonucleotide
gugcugaguuugcuguacccauguuga

SEQ ID NO: 73040 - RNA, 27 nt, Artificial Sequence
  Description of Artificial Sequence: Synthetic oligonucleotide
ugaggucagcaucuucugugucuuuac

SEQ ID NO: 73041 - RNA, 27 nt, Artificial Sequence
  Description of Artificial Sequence: Synthetic oligonucleotide
gcgaucugaauaaaccucccuacuagc

SEQ ID NO: 73042 - RNA, 27 nt, Artificial Sequence
  Description of Artificial Sequence: Synthetic oligonucleotide
aucccagaacccugcugcagaaggcca

SEQ ID NO: 73043 - RNA, 27 nt, Artificial Sequence
  Description of Artificial Sequence: Synthetic oligonucleotide
cauaauuuccaauauguaccagaccuu

SEQ ID NO: 73044 - RNA, 27 nt, Artificial Sequence
  Description of Artificial Sequence: Synthetic oligonucleotide
cuagugcuuccaucggaaggacuaggu

SEQ ID NO: 73045 - RNA, 27 nt, Artificial Sequence
  Description of Artificial Sequence: Synthetic oligonucleotide
uccacauaaaaacaauauucacuggga

SEQ ID NO: 73046 - RNA, 27 nt, Artificial Sequence
  Description of Artificial Sequence: Synthetic oligonucleotide
ucuaccaauuccaacuugaauucauug

SEQ ID NO: 73047 - RNA, 27 nt, Artificial Sequence
  Description of Artificial Sequence: Synthetic oligonucleotide
ucuccaagucuaaaucuguguccugag

SEQ ID NO: 73048 - RNA, 27 nt, Artificial Sequence
  Description of Artificial Sequence: Synthetic oligonucleotide
uggaauacuguaacugugcuuugagga

SEQ ID NO: 73049 - RNA, 27 nt, Artificial Sequence
  Description of Artificial Sequence: Synthetic oligonucleotide
uuaauucaucagugguggcagugguag

SEQ ID NO: 73050 - RNA, 27 nt, Artificial Sequence
  Description of Artificial Sequence: Synthetic oligonucleotide
gugaugauguggcacuaguaguuucuu

SEQ ID NO: 73051 - RNA, 27 nt, Artificial Sequence
  Description of Artificial Sequence: Synthetic oligonucleotide
ucuguuuggugaggcuguccgacuuug

SEQ ID NO: 73052 - RNA, 27 nt, Artificial Sequence
  Description of Artificial Sequence: Synthetic oligonucleotide
ccaucauguuccauuuuucgcuuucuc

SEQ ID NO: 73053 - RNA, 27 nt, Artificial Sequence
  Description of Artificial Sequence: Synthetic oligonucleotide
gcagucuacaugcuaaaucagagggua

SEQ ID NO: 73054 - RNA, 27 nt, Artificial Sequence
  Description of Artificial Sequence: Synthetic oligonucleotide
cauaaauagauccuuaaauagcucaaa

SEQ ID NO: 73055 - RNA, 27 nt, Artificial Sequence
  Description of Artificial Sequence: Synthetic oligonucleotide
ugauaauagugcuuuuucaccuuuuuc

SEQ ID NO: 73056 - RNA, 27 nt, Artificial Sequence
  Description of Artificial Sequence: Synthetic oligonucleotide
gcagaacugauaauagugcuuuuucac

SEQ ID NO: 73057 - RNA, 27 nt, Artificial Sequence
  Description of Artificial Sequence: Synthetic oligonucleotide
guagguuuaaucuuucuuuucagccau

SEQ ID NO: 73058 - RNA, 27 nt, Artificial Sequence
  Description of Artificial Sequence: Synthetic oligonucleotide
agaaggauuuuauuauaaggguuuaau

SEQ ID NO: 73059 - RNA, 27 nt, Artificial Sequence
  Description of Artificial Sequence: Synthetic oligonucleotide
gucuacagcauuggcuaauaguaugaa

SEQ ID NO: 73060 - RNA, 27 nt, Artificial Sequence
  Description of Artificial Sequence: Synthetic oligonucleotide
cuauuccuaucaaaaugcuucugucua

SEQ ID NO: 73061 - RNA, 27 nt, Artificial Sequence
  Description of Artificial Sequence: Synthetic oligonucleotide
ucagggccauuaucuuauuugcucuau

SEQ ID NO: 73062 - RNA, 27 nt, Artificial Sequence
  Description of Artificial Sequence: Synthetic oligonucleotide
ugcuugaggaagagaaaaauguugguc

SEQ ID NO: 73063 - RNA, 27 nt, Artificial Sequence
  Description of Artificial Sequence: Synthetic oligonucleotide
ugggcugaacuuuucucauacuuaaag

SEQ ID NO: 73064 - RNA, 27 nt, Artificial Sequence
  Description of Artificial Sequence: Synthetic oligonucleotide
gguucagcagccaucuuuauuccugcg

SEQ ID NO: 73065 - RNA, 27 nt, Artificial Sequence
  Description of Artificial Sequence: Synthetic oligonucleotide
ugaagagaacuuggucauucaaauuuc

SEQ ID NO: 73066 - RNA, 27 nt, Artificial Sequence
  Description of Artificial Sequence: Synthetic oligonucleotide
cucuaggcuggcuaucuuuauacauac

SEQ ID NO: 73067 - RNA, 27 nt, Artificial Sequence
  Description of Artificial Sequence: Synthetic oligonucleotide
acacuucacagagauaguuacagccau

SEQ ID NO: 73068 - RNA, 27 nt, Artificial Sequence
  Description of Artificial Sequence: Synthetic oligonucleotide
uugaaauuuucucacacuucacagaga

SEQ ID NO: 73069 - RNA, 27 nt, Artificial Sequence
  Description of Artificial Sequence: Synthetic oligonucleotide
ucaggaggauucauuuccuuaaaggaa

SEQ ID NO: 73070 - RNA, 27 nt, Artificial Sequence
  Description of Artificial Sequence: Synthetic oligonucleotide
auaugaugucacuuuuuguauccuuga

SEQ ID NO: 73071 - RNA, 27 nt, Artificial Sequence
  Description of Artificial Sequence: Synthetic oligonucleotide
uaugaugaagauucaaauugcaucuua

SEQ ID NO: 73072 - RNA, 27 nt, Artificial Sequence
  Description of Artificial Sequence: Synthetic oligonucleotide
uuaauagcuagucuucguuuugaacag

SEQ ID NO: 73073 - RNA, 27 nt, Artificial Sequence
  Description of Artificial Sequence: Synthetic oligonucleotide
auuuuuaguagagaugagguuucacca

SEQ ID NO: 73074 - RNA, 27 nt, Artificial Sequence
  Description of Artificial Sequence: Synthetic oligonucleotide
aggcgagauagagcuucucuuucguuc

SEQ ID NO: 73075 - RNA, 27 nt, Artificial Sequence
  Description of Artificial Sequence: Synthetic oligonucleotide
aacuggaccgaaggcgcuuguggagaa

SEQ ID NO: 73076 - RNA, 27 nt, Artificial Sequence
  Description of Artificial Sequence: Synthetic oligonucleotide
gcggcuacaucuuuggaaucuucuccu

SEQ ID NO: 73077 - RNA, 27 nt, Artificial Sequence
  Description of Artificial Sequence: Synthetic oligonucleotide
caagucuccucauugaauccagauugg

SEQ ID NO: 73078 - RNA, 27 nt, Artificial Sequence
  Description of Artificial Sequence: Synthetic oligonucleotide
uccucacuacucucaaaucuguucugg

SEQ ID NO: 73079 - RNA, 27 nt, Artificial Sequence
  Description of Artificial Sequence: Synthetic oligonucleotide
uuuguacucaucugcacagcucuggcu

SEQ ID NO: 73080 - RNA, 27 nt, Artificial Sequence
  Description of Artificial Sequence: Synthetic oligonucleotide
gcccauuaacaacaacaaucugaggug

SEQ ID NO: 73081 - RNA, 27 nt, Artificial Sequence
  Description of Artificial Sequence: Synthetic oligonucleotide
aauaaauuaaaaauaauuaaaauagug

SEQ ID NO: 73082 - RNA, 27 nt, Artificial Sequence
  Description of Artificial Sequence: Synthetic oligonucleotide
cauauuuaaauauuaauaaauuaaaaa

SEQ ID NO: 73083 - RNA, 27 nt, Artificial Sequence
  Description of Artificial Sequence: Synthetic oligonucleotide
gaaacaaaggauauucaaacugcauag

SEQ ID NO: 73084 - RNA, 27 nt, Artificial Sequence
  Description of Artificial Sequence: Synthetic oligonucleotide
caaacacuuagacgccagcagcauggg

SEQ ID NO: 73085 - RNA, 27 nt, Artificial Sequence
  Description of Artificial Sequence: Synthetic oligonucleotide
uuugucacaggugaaaugcacaucuga

SEQ ID NO: 73086 - RNA, 27 nt, Artificial Sequence
  Description of Artificial Sequence: Synthetic oligonucleotide
uaauucagccuggcacagguuuugauc

SEQ ID NO: 73087 - RNA, 27 nt, Artificial Sequence
  Description of Artificial Sequence: Synthetic oligonucleotide
auuguaagaaugacuacccacauucac

SEQ ID NO: 73088 - RNA, 27 nt, Artificial Sequence
  Description of Artificial Sequence: Synthetic oligonucleotide
caauuguaagaaugacuacccacauuc

SEQ ID NO: 73089 - RNA, 27 nt, Artificial Sequence
  Description of Artificial Sequence: Synthetic oligonucleotide
guacacucucugaugcucauuuucaua

SEQ ID NO: 73090 - RNA, 27 nt, Artificial Sequence
  Description of Artificial Sequence: Synthetic oligonucleotide
cugcugaguucuacaugaaaagcaaau

SEQ ID NO: 73091 - RNA, 27 nt, Artificial Sequence
  Description of Artificial Sequence: Synthetic oligonucleotide
uacugaaaauaaauauagaaauacaac

SEQ ID NO: 73092 - RNA, 27 nt, Artificial Sequence
  Description of Artificial Sequence: Synthetic oligonucleotide
uuccauuuaagaaacauuaaucaaaac

SEQ ID NO: 73093 - RNA, 27 nt, Artificial Sequence
  Description of Artificial Sequence: Synthetic oligonucleotide
acaauuuuaggcacuauacacguuguu

SEQ ID NO: 73094 - RNA, 27 nt, Artificial Sequence
  Description of Artificial Sequence: Synthetic oligonucleotide
ccagauguuaguagccaaggauauggu

SEQ ID NO: 73095 - RNA, 27 nt, Artificial Sequence
  Description of Artificial Sequence: Synthetic oligonucleotide
agcucacagucuccagauguuaguagc

SEQ ID NO: 73096 - RNA, 27 nt, Artificial Sequence
  Description of Artificial Sequence: Synthetic oligonucleotide
auuaauaaaaagcacacaacuuauggc

SEQ ID NO: 73097 - RNA, 27 nt, Artificial Sequence
  Description of Artificial Sequence: Synthetic oligonucleotide
aauguaagaagagccaaaaugaugcau

SEQ ID NO: 73098 - RNA, 27 nt, Artificial Sequence
  Description of Artificial Sequence: Synthetic oligonucleotide
acauuuuuacaaauguaagaagagcca

SEQ ID NO: 73099 - RNA, 27 nt, Artificial Sequence
  Description of Artificial Sequence: Synthetic oligonucleotide
aauaugaauuaagaugaccuaaucugu

SEQ ID NO: 73100 - RNA, 27 nt, Artificial Sequence
  Description of Artificial Sequence: Synthetic oligonucleotide
ucaugauuaguucuuucaauuccaucc

SEQ ID NO: 73101 - RNA, 27 nt, Artificial Sequence
  Description of Artificial Sequence: Synthetic oligonucleotide
cccaagagcagaaggaaugagugugca

SEQ ID NO: 73102 - RNA, 27 nt, Artificial Sequence
  Description of Artificial Sequence: Synthetic oligonucleotide
cucaaagcuacugguuaccucuacacc

SEQ ID NO: 73103 - RNA, 27 nt, Artificial Sequence
  Description of Artificial Sequence: Synthetic oligonucleotide
ugaaauauuacguggcaugugguuggg

SEQ ID NO: 73104 - RNA, 27 nt, Artificial Sequence
  Description of Artificial Sequence: Synthetic oligonucleotide
agugaagagaauaacuuguuuccgaag

SEQ ID NO: 73105 - RNA, 27 nt, Artificial Sequence
  Description of Artificial Sequence: Synthetic oligonucleotide
uuucuuagcauuaguuauugggaguga

SEQ ID NO: 73106 - RNA, 27 nt, Artificial Sequence
  Description of Artificial Sequence: Synthetic oligonucleotide
uugauuuucagcauuucuuagcauuag

SEQ ID NO: 73107 - RNA, 27 nt, Artificial Sequence
  Description of Artificial Sequence: Synthetic oligonucleotide
aaaguaaucauauuuagagaaagacag

SEQ ID NO: 73108 - RNA, 27 nt, Artificial Sequence
  Description of Artificial Sequence: Synthetic oligonucleotide
uguagaacaaaaugccugaaauucagc

SEQ ID NO: 73109 - RNA, 27 nt, Artificial Sequence
  Description of Artificial Sequence: Synthetic oligonucleotide
gagagucccgggugagagggaaucgcc

SEQ ID NO: 73110 - RNA, 27 nt, Artificial Sequence
  Description of Artificial Sequence: Synthetic oligonucleotide
cuuuacuuuaaagguucacuuuccuug

SEQ ID NO: 73111 - RNA, 27 nt, Artificial Sequence
  Description of Artificial Sequence: Synthetic oligonucleotide
ccaggcuuccagagcaugcagccuccu

SEQ ID NO: 73112 - RNA, 27 nt, Artificial Sequence
  Description of Artificial Sequence: Synthetic oligonucleotide
cucucuuuuguuuucuguucagagaaa

SEQ ID NO: 73113 - RNA, 27 nt, Artificial Sequence
  Description of Artificial Sequence: Synthetic oligonucleotide
cggcauaacugauuacagccaaguuca

SEQ ID NO: 73114 - RNA, 27 nt, Artificial Sequence
  Description of Artificial Sequence: Synthetic oligonucleotide
uggacuucuuuuaauuuuggcuucuuc

SEQ ID NO: 73115 - RNA, 27 nt, Artificial Sequence
  Description of Artificial Sequence: Synthetic oligonucleotide
uaaccucaccuggacuucuuuuaauuu

SEQ ID NO: 73116 - RNA, 27 nt, Artificial Sequence
  Description of Artificial Sequence: Synthetic oligonucleotide
guccucuucccgauaauccggauucag

SEQ ID NO: 73117 - RNA, 27 nt, Artificial Sequence
  Description of Artificial Sequence: Synthetic oligonucleotide
acaauacuugcuuugaugucacauuaa

SEQ ID NO: 73118 - RNA, 27 nt, Artificial Sequence
  Description of Artificial Sequence: Synthetic oligonucleotide
gagugcuacaauacuugcuuugauguc

SEQ ID NO: 73119 - RNA, 27 nt, Artificial Sequence
  Description of Artificial Sequence: Synthetic oligonucleotide
auuugugguuuuguuuucucucucucu

SEQ ID NO: 73120 - RNA, 27 nt, Artificial Sequence
  Description of Artificial Sequence: Synthetic oligonucleotide
uguaugggcuuaaauacuacagcgagg

SEQ ID NO: 73121 - RNA, 27 nt, Artificial Sequence
  Description of Artificial Sequence: Synthetic oligonucleotide
cuguaugggcuuaaauacuacagcgag

SEQ ID NO: 73122 - RNA, 27 nt, Artificial Sequence
  Description of Artificial Sequence: Synthetic oligonucleotide
ggaagguuucuguaugggcuuaaauac

SEQ ID NO: 73123 - RNA, 27 nt, Artificial Sequence
  Description of Artificial Sequence: Synthetic oligonucleotide
guagguauaccauguuuauuuuaauac

SEQ ID NO: 73124 - RNA, 27 nt, Artificial Sequence
  Description of Artificial Sequence: Synthetic oligonucleotide
uccgaaaacuggccgaucagaacagcc

SEQ ID NO: 73125 - RNA, 27 nt, Artificial Sequence
  Description of Artificial Sequence: Synthetic oligonucleotide
cccuguuccaaaguucaaauuauuugu

SEQ ID NO: 73126 - RNA, 27 nt, Artificial Sequence
  Description of Artificial Sequence: Synthetic oligonucleotide
acuggaaaguuaaauuaaggucgcaau

SEQ ID NO: 73127 - RNA, 27 nt, Artificial Sequence
  Description of Artificial Sequence: Synthetic oligonucleotide
caaaaccaaacuuuagcuuucucagcc

SEQ ID NO: 73128 - RNA, 27 nt, Artificial Sequence
  Description of Artificial Sequence: Synthetic oligonucleotide
uacagugggaaguagcaucuuuacuuu

SEQ ID NO: 73129 - RNA, 27 nt, Artificial Sequence
  Description of Artificial Sequence: Synthetic oligonucleotide
ucauaugguaucagcaauuaagcagua

SEQ ID NO: 73130 - RNA, 27 nt, Artificial Sequence
  Description of Artificial Sequence: Synthetic oligonucleotide
cagcccauguuucauucauaugguauc

SEQ ID NO: 73131 - RNA, 27 nt, Artificial Sequence
  Description of Artificial Sequence: Synthetic oligonucleotide
uaugaaaaaguuggauaagaaaguugg

SEQ ID NO: 73132 - RNA, 27 nt, Artificial Sequence
  Description of Artificial Sequence: Synthetic oligonucleotide
uccggccucaugaugucaugcaaggcu

SEQ ID NO: 73133 - RNA, 27 nt, Artificial Sequence
  Description of Artificial Sequence: Synthetic oligonucleotide
acaaaugcagucauauacaaauucagg

SEQ ID NO: 73134 - RNA, 27 nt, Artificial Sequence
  Description of Artificial Sequence: Synthetic oligonucleotide
gguaguaaacauucuacuaggauucuu

SEQ ID NO: 73135 - RNA, 27 nt, Artificial Sequence
  Description of Artificial Sequence: Synthetic oligonucleotide
uuucaucaaaaaauucuucccuuucug

SEQ ID NO: 73136 - RNA, 27 nt, Artificial Sequence
  Description of Artificial Sequence: Synthetic oligonucleotide
aaauucacacacuggcaugccgauagc

SEQ ID NO: 73137 - RNA, 27 nt, Artificial Sequence
  Description of Artificial Sequence: Synthetic oligonucleotide
acauacauugcucuacuaugaggugaa

SEQ ID NO: 73138 - RNA, 27 nt, Artificial Sequence
  Description of Artificial Sequence: Synthetic oligonucleotide
uauauaugugcuuuggcaauucuggug

SEQ ID NO: 73139 - RNA, 27 nt, Artificial Sequence
  Description of Artificial Sequence: Synthetic oligonucleotide
ggagaaacuauuacccagaucaccacu

SEQ ID NO: 73140 - RNA, 27 nt, Artificial Sequence
  Description of Artificial Sequence: Synthetic oligonucleotide
auuuggagaaacuauuacccagaucac

SEQ ID NO: 73141 - RNA, 27 nt, Artificial Sequence
  Description of Artificial Sequence: Synthetic oligonucleotide
uuucuaggaaguauucaucacauccac

SEQ ID NO: 73142 - RNA, 27 nt, Artificial Sequence
  Description of Artificial Sequence: Synthetic oligonucleotide
cauauaugguguagcuguggaaaugcg

SEQ ID NO: 73143 - RNA, 27 nt, Artificial Sequence
  Description of Artificial Sequence: Synthetic oligonucleotide
cuccauucauauaugguguagcugugg

SEQ ID NO: 73144 - RNA, 27 nt, Artificial Sequence
  Description of Artificial Sequence: Synthetic oligonucleotide
aucuucuucucguguaagaacugcagc

SEQ ID NO: 73145 - RNA, 27 nt, Artificial Sequence
  Description of Artificial Sequence: Synthetic oligonucleotide
ucccuguaaaugaucuucuucucgugu

SEQ ID NO: 73146 - RNA, 27 nt, Artificial Sequence
  Description of Artificial Sequence: Synthetic oligonucleotide
gucccuguaaaugaucuucuucucgug

SEQ ID NO: 73147 - RNA, 27 nt, Artificial Sequence
  Description of Artificial Sequence: Synthetic oligonucleotide
ucaggucccuguaaaugaucuucuucu

SEQ ID NO: 73148 - RNA, 27 nt, Artificial Sequence
  Description of Artificial Sequence: Synthetic oligonucleotide
gaugcagucaaacaccucuuccucugu

SEQ ID NO: 73149 - RNA, 27 nt, Artificial Sequence
  Description of Artificial Sequence: Synthetic oligonucleotide
cgaugcagucaaacaccucuuccucug

SEQ ID NO: 73150 - RNA, 27 nt, Artificial Sequence
  Description of Artificial Sequence: Synthetic oligonucleotide
cccugugaacucgcccucaaaguagcg

SEQ ID NO: 73151 - RNA, 27 nt, Artificial Sequence
  Description of Artificial Sequence: Synthetic oligonucleotide
ggacagaggugccaggagaugcccuca

SEQ ID NO: 73152 - RNA, 27 nt, Artificial Sequence
  Description of Artificial Sequence: Synthetic oligonucleotide
uuaaaaagacaaaccauaucacuccuu

SEQ ID NO: 73153 - RNA, 27 nt, Artificial Sequence
  Description of Artificial Sequence: Synthetic oligonucleotide
cuuaaaaagacaaaccauaucacuccu

SEQ ID NO: 73154 - RNA, 27 nt, Artificial Sequence
  Description of Artificial Sequence: Synthetic oligonucleotide
gacaaccuuuaggaucuuuacugcaac

SEQ ID NO: 73155 - RNA, 27 nt, Artificial Sequence
  Description of Artificial Sequence: Synthetic oligonucleotide
gucgacaaccuuuaggaucuuuacugc

SEQ ID NO: 73156 - RNA, 27 nt, Artificial Sequence
  Description of Artificial Sequence: Synthetic oligonucleotide
acaauugccagguuguccuuugucaug

SEQ ID NO: 73157 - RNA, 27 nt, Artificial Sequence
  Description of Artificial Sequence: Synthetic oligonucleotide
ccucgcaccacugggucacaauugcca

SEQ ID NO: 73158 - RNA, 27 nt, Artificial Sequence
  Description of Artificial Sequence: Synthetic oligonucleotide
auuucaugucucuauggaugauguucu

SEQ ID NO: 73159 - RNA, 27 nt, Artificial Sequence
  Description of Artificial Sequence: Synthetic oligonucleotide
uggagaaauauauuguuggauuucaug

SEQ ID NO: 73160 - RNA, 27 nt, Artificial Sequence
  Description of Artificial Sequence: Synthetic oligonucleotide
agccuucauggagaaauauauuguugg

SEQ ID NO: 73161 - RNA, 27 nt, Artificial Sequence
  Description of Artificial Sequence: Synthetic oligonucleotide
accacuccagcgugacuuuacuguugc

SEQ ID NO: 73162 - RNA, 27 nt, Artificial Sequence
  Description of Artificial Sequence: Synthetic oligonucleotide
ccucucuuccuuuacuuucuucacaca

SEQ ID NO: 73163 - RNA, 27 nt, Artificial Sequence
  Description of Artificial Sequence: Synthetic oligonucleotide
gcccgaugcaaggauggcucggaagcg

SEQ ID NO: 73164 - RNA, 27 nt, Artificial Sequence
  Description of Artificial Sequence: Synthetic oligonucleotide
cacaguaggauauucaaccuccauuuc

SEQ ID NO: 73165 - RNA, 27 nt, Artificial Sequence
  Description of Artificial Sequence: Synthetic oligonucleotide
uuacacaguaggauauucaaccuccau

SEQ ID NO: 73166 - RNA, 27 nt, Artificial Sequence
  Description of Artificial Sequence: Synthetic oligonucleotide
uacacuacaagggaaaacucaaaaucu

SEQ ID NO: 73167 - RNA, 27 nt, Artificial Sequence
  Description of Artificial Sequence: Synthetic oligonucleotide
caaucaacaaagaacaaacaggauaaa

SEQ ID NO: 73168 - RNA, 27 nt, Artificial Sequence
  Description of Artificial Sequence: Synthetic oligonucleotide
uuucaaucaacaaagaacaaacaggau

SEQ ID NO: 73169 - RNA, 27 nt, Artificial Sequence
  Description of Artificial Sequence: Synthetic oligonucleotide
auggaagaaaaagaaggcuguagagaa

SEQ ID NO: 73170 - RNA, 27 nt, Artificial Sequence
  Description of Artificial Sequence: Synthetic oligonucleotide
uagaaggaagauuagcuauggaagaaa

SEQ ID NO: 73171 - RNA, 27 nt, Artificial Sequence
  Description of Artificial Sequence: Synthetic oligonucleotide
augaagcauucaacaggaagauuauuu

SEQ ID NO: 73172 - RNA, 27 nt, Artificial Sequence
  Description of Artificial Sequence: Synthetic oligonucleotide
caugaagcauucaacaggaagauuauu

SEQ ID NO: 73173 - RNA, 27 nt, Artificial Sequence
  Description of Artificial Sequence: Synthetic oligonucleotide
ucaaaguagaauucaagucaugaagca

SEQ ID NO: 73174 - RNA, 27 nt, Artificial Sequence
  Description of Artificial Sequence: Synthetic oligonucleotide
gucuguaguugcuucucucccucuuag

SEQ ID NO: 73175 - RNA, 27 nt, Artificial Sequence
  Description of Artificial Sequence: Synthetic oligonucleotide
guugaccuuggucugguaggagacggc

SEQ ID NO: 73176 - RNA, 27 nt, Artificial Sequence
  Description of Artificial Sequence: Synthetic oligonucleotide
gucgagauagucgggccgauugaucuc

SEQ ID NO: 73177 - RNA, 27 nt, Artificial Sequence
  Description of Artificial Sequence: Synthetic oligonucleotide
guuugggaagguuggauguucguccuc

SEQ ID NO: 73178 - RNA, 27 nt, Artificial Sequence
  Description of Artificial Sequence: Synthetic oligonucleotide
aguucuaagcuuggguuccgacccuaa

SEQ ID NO: 73179 - RNA, 27 nt, Artificial Sequence
  Description of Artificial Sequence: Synthetic oligonucleotide
uuaaaguucuaagcuuggguuccgacc

SEQ ID NO: 73180 - RNA, 27 nt, Artificial Sequence
  Description of Artificial Sequence: Synthetic oligonucleotide
guugcuuaaaguucuaagcuuggguuc

SEQ ID NO: 73181 - RNA, 27 nt, Artificial Sequence
  Description of Artificial Sequence: Synthetic oligonucleotide
gugguggucuuguugcuuaaaguucua

SEQ ID NO: 73182 - RNA, 27 nt, Artificial Sequence
  Description of Artificial Sequence: Synthetic oligonucleotide
acuuuauuucucgccacugaauaguag

SEQ ID NO: 73183 - RNA, 27 nt, Artificial Sequence
  Description of Artificial Sequence: Synthetic oligonucleotide
aacuuuauuucucgccacugaauagua

SEQ ID NO: 73184 - RNA, 27 nt, Artificial Sequence
  Description of Artificial Sequence: Synthetic oligonucleotide
ggaucauuuccuguuaucuguguuugu

SEQ ID NO: 73185 - RNA, 27 nt, Artificial Sequence
  Description of Artificial Sequence: Synthetic oligonucleotide
guuucauuucuucucuuuucuuaaggc

SEQ ID NO: 73186 - RNA, 27 nt, Artificial Sequence
  Description of Artificial Sequence: Synthetic oligonucleotide
ggaggauggaaacacacuccuucaguu

SEQ ID NO: 73187 - RNA, 27 nt, Artificial Sequence
  Description of Artificial Sequence: Synthetic oligonucleotide
ucaaagauuuucagucccgcggugaca

SEQ ID NO: 73188 - RNA, 27 nt, Artificial Sequence
  Description of Artificial Sequence: Synthetic oligonucleotide
ccugaacggcacgcuuauuucugcugu

SEQ ID NO: 73189 - RNA, 27 nt, Artificial Sequence
  Description of Artificial Sequence: Synthetic oligonucleotide
cuucuggacccugaacggcacgcuuau

SEQ ID NO: 73190 - RNA, 27 nt, Artificial Sequence
  Description of Artificial Sequence: Synthetic oligonucleotide
caagcagucuugagugacuguuucuuc

SEQ ID NO: 73191 - RNA, 27 nt, Artificial Sequence
  Description of Artificial Sequence: Synthetic oligonucleotide
ccaaagacauggaccuucuuccucuga

SEQ ID NO: 73192 - RNA, 27 nt, Artificial Sequence
  Description of Artificial Sequence: Synthetic oligonucleotide
guguuucaggcauauuuugaauacauc

SEQ ID NO: 73193 - RNA, 27 nt, Artificial Sequence
  Description of Artificial Sequence: Synthetic oligonucleotide
gagguacagagaaagggaggaaaauag

SEQ ID NO: 73194 - RNA, 27 nt, Artificial Sequence
  Description of Artificial Sequence: Synthetic oligonucleotide
ucuugucuugcucuaucuuucuuuggu

SEQ ID NO: 73195 - RNA, 27 nt, Artificial Sequence
  Description of Artificial Sequence: Synthetic oligonucleotide
uuucuugucuugcucuaucuuucuuug

SEQ ID NO: 73196 - RNA, 27 nt, Artificial Sequence
  Description of Artificial Sequence: Synthetic oligonucleotide
ggaucuuguacaaacaaaugcuuucuc

SEQ ID NO: 73197 - RNA, 27 nt, Artificial Sequence
  Description of Artificial Sequence: Synthetic oligonucleotide
ucugcaaguacguucguuuaacucaag

SEQ ID NO: 73198 - RNA, 27 nt, Artificial Sequence
  Description of Artificial Sequence: Synthetic oligonucleotide
ucuguaucgaucguucuguaucagucu

SEQ ID NO: 73199 - RNA, 27 nt, Artificial Sequence
  Description of Artificial Sequence: Synthetic oligonucleotide
auuuauuuuuauauauauauaauauau

SEQ ID NO: 73200 - RNA, 27 nt, Artificial Sequence
  Description of Artificial Sequence: Synthetic oligonucleotide
auauuuauuuuuauauauauauaauau

SEQ ID NO: 73201 - RNA, 27 nt, Artificial Sequence
  Description of Artificial Sequence: Synthetic oligonucleotide
cacagcagucaaauacauccagugaag

SEQ ID NO: 73202 - RNA, 27 nt, Artificial Sequence
  Description of Artificial Sequence: Synthetic oligonucleotide
gucucucaucuccuccucuucccuguc

SEQ ID NO: 73203 - RNA, 27 nt, Artificial Sequence
  Description of Artificial Sequence: Synthetic oligonucleotide
ccaagugggacaaaaaaaagaucaugc

SEQ ID NO: 73204 - RNA, 14 nt, Artificial Sequence
  Description of Artificial Sequence: Synthetic oligonucleotide
guauuuugaugagg

SEQ ID NO: 73205 - RNA, 12 nt, Artificial Sequence
  Description of Artificial Sequence: Synthetic oligonucleotide
ggcccagaugau

SEQ ID NO: 73206 - RNA, 14 nt, Artificial Sequence
  Description of Artificial Sequence: Synthetic oligonucleotide
gggaagaaaacuau

SEQ ID NO: 73207 - RNA, 15 nt, Artificial Sequence
  Description of Artificial Sequence: Synthetic oligonucleotide
guuuuaauuuauuuc

SEQ ID NO: 73208 - RNA, 12 nt, Artificial Sequence
  Description of Artificial Sequence: Synthetic oligonucleotide
acguagggaaau

SEQ ID NO: 73209 - RNA, 12 nt, Artificial Sequence
  Description of Artificial Sequence: Synthetic oligonucleotide
ccaggguuuacc

SEQ ID NO: 73210 - RNA, 11 nt, Artificial Sequence
  Description of Artificial Sequence: Synthetic oligonucleotide
agcaagguuua

SEQ ID NO: 73211 - RNA, 12 nt, Artificial Sequence
  Description of Artificial Sequence: Synthetic oligonucleotide
uguauuauguug

SEQ ID NO: 73212 - RNA, 15 nt, Artificial Sequence
  Description of Artificial Sequence: Synthetic oligonucleotide
uuuuaaucuuuguga

SEQ ID NO: 73213 - RNA, 14 nt, Artificial Sequence
  Description of Artificial Sequence: Synthetic oligonucleotide
uuaaucuuugugac

SEQ ID NO: 73214 - RNA, 13 nt, Artificial Sequence
  Description of Artificial Sequence: Synthetic oligonucleotide
gcugcuuaugucu

SEQ ID NO: 73215 - RNA, 14 nt, Artificial Sequence
  Description of Artificial Sequence: Synthetic oligonucleotide
aaguguuucagaag

SEQ ID NO: 73216 - RNA, 13 nt, Artificial Sequence
  Description of Artificial Sequence: Synthetic oligonucleotide
gaccaucaauaag

SEQ ID NO: 73217 - RNA, 13 nt, Artificial Sequence
  Description of Artificial Sequence: Synthetic oligonucleotide
ccaucaauaagga

SEQ ID NO: 73218 - RNA, 14 nt, Artificial Sequence
  Description of Artificial Sequence: Synthetic oligonucleotide
ucaauaaggaagaa

SEQ ID NO: 73219 - RNA, 14 nt, Artificial Sequence
  Description of Artificial Sequence: Synthetic oligonucleotide
aauaaggaagaagc

SEQ ID NO: 73220 - RNA, 13 nt, Artificial Sequence
  Description of Artificial Sequence: Synthetic oligonucleotide
aggaagaagcccu

SEQ ID NO: 73221 - RNA, 13 nt, Artificial Sequence
  Description of Artificial Sequence: Synthetic oligonucleotide
gcauaacuaaagg

SEQ ID NO: 73222 - RNA, 14 nt, Artificial Sequence
  Description of Artificial Sequence: Synthetic oligonucleotide
cauaacuaaaggug

SEQ ID NO: 73223 - RNA, 12 nt, Artificial Sequence
  Description of Artificial Sequence: Synthetic oligonucleotide
cuacaucacgcc

SEQ ID NO: 73224 - RNA, 12 nt, Artificial Sequence
  Description of Artificial Sequence: Synthetic oligonucleotide
acuggauuuaag

SEQ ID NO: 73225 - RNA, 12 nt, Artificial Sequence
  Description of Artificial Sequence: Synthetic oligonucleotide
cuggauuuaagc

SEQ ID NO: 73226 - RNA, 13 nt, Artificial Sequence
  Description of Artificial Sequence: Synthetic oligonucleotide
gauuuaagcagag

SEQ ID NO: 73227 - RNA, 13 nt, Artificial Sequence
  Description of Artificial Sequence: Synthetic oligonucleotide
auuuaagcagagu

SEQ ID NO: 73228 - RNA, 13 nt, Artificial Sequence
  Description of Artificial Sequence: Synthetic oligonucleotide
uuaagcagaguuc

SEQ ID NO: 73229 - RNA, 13 nt, Artificial Sequence
  Description of Artificial Sequence: Synthetic oligonucleotide
uaagcagaguuca

SEQ ID NO: 73230 - RNA, 14 nt, Artificial Sequence
  Description of Artificial Sequence: Synthetic oligonucleotide
agcagaguucaaaa

SEQ ID NO: 73231 - RNA, 12 nt, Artificial Sequence
  Description of Artificial Sequence: Synthetic oligonucleotide
cucagggucuga

SEQ ID NO: 73232 - RNA, 13 nt, Artificial Sequence
  Description of Artificial Sequence: Synthetic oligonucleotide
caagcaacuacau

SEQ ID NO: 73233 - RNA, 12 nt, Artificial Sequence
  Description of Artificial Sequence: Synthetic oligonucleotide
aucaauggcagc

SEQ ID NO: 73234 - RNA, 11 nt, Artificial Sequence
  Description of Artificial Sequence: Synthetic oligonucleotide
uuccagcccac

SEQ ID NO: 73235 - RNA, 12 nt, Artificial Sequence
  Description of Artificial Sequence: Synthetic oligonucleotide
cagcugagaaug

SEQ ID NO: 73236 - RNA, 13 nt, Artificial Sequence
  Description of Artificial Sequence: Synthetic oligonucleotide
aacguaucuccua

SEQ ID NO: 73237 - RNA, 14 nt, Artificial Sequence
  Description of Artificial Sequence: Synthetic oligonucleotide
ccuaaaauaauuuc

SEQ ID NO: 73238 - RNA, 13 nt, Artificial Sequence
  Description of Artificial Sequence: Synthetic oligonucleotide
uggaagauucagc

SEQ ID NO: 73239 - RNA, 12 nt, Artificial Sequence
  Description of Artificial Sequence: Synthetic oligonucleotide
uuaaacucuccu

SEQ ID NO: 73240 - RNA, 12 nt, Artificial Sequence
  Description of Artificial Sequence: Synthetic oligonucleotide
cagccuacaguu

SEQ ID NO: 73241 - RNA, 13 nt, Artificial Sequence
  Description of Artificial Sequence: Synthetic oligonucleotide
guuauguucaguc

SEQ ID NO: 73242 - RNA, 13 nt, Artificial Sequence
  Description of Artificial Sequence: Synthetic oligonucleotide
cacauacaaaaug

SEQ ID NO: 73243 - RNA, 9 nt, Artificial Sequence
  Description of Artificial Sequence: Synthetic oligonucleotide
uccuuuugc

SEQ ID NO: 73244 - RNA, 12 nt, Artificial Sequence
  Description of Artificial Sequence: Synthetic oligonucleotide
ugaccugugaag

SEQ ID NO: 73245 - RNA, 12 nt, Artificial Sequence
  Description of Artificial Sequence: Synthetic oligonucleotide
cuaucucacaca

SEQ ID NO: 73246 - RNA, 13 nt, Artificial Sequence
  Description of Artificial Sequence: Synthetic oligonucleotide
uguccucaauugu

SEQ ID NO: 73247 - RNA, 12 nt, Artificial Sequence
  Description of Artificial Sequence: Synthetic oligonucleotide
aaaccguagcug

SEQ ID NO: 73248 - RNA, 12 nt, Artificial Sequence
  Description of Artificial Sequence: Synthetic oligonucleotide
uagcuggcaagc

SEQ ID NO: 73249 - RNA, 14 nt, Artificial Sequence
  Description of Artificial Sequence: Synthetic oligonucleotide
uuguaugguuaaaa

SEQ ID NO: 73250 - RNA, 14 nt, Artificial Sequence
  Description of Artificial Sequence: Synthetic oligonucleotide
ugguuaaaagaugg

SEQ ID NO: 73251 - RNA, 13 nt, Artificial Sequence
  Description of Artificial Sequence: Synthetic oligonucleotide
cagggaauuauac

SEQ ID NO: 73252 - RNA, 12 nt, Artificial Sequence
  Description of Artificial Sequence: Synthetic oligonucleotide
acaaucuugcug

SEQ ID NO: 73253 - RNA, 13 nt, Artificial Sequence
  Description of Artificial Sequence: Synthetic oligonucleotide
ccaauaaugaaga

SEQ ID NO: 73254 - RNA, 13 nt, Artificial Sequence
  Description of Artificial Sequence: Synthetic oligonucleotide
acuuuggauguuc

SEQ ID NO: 73255 - RNA, 12 nt, Artificial Sequence
  Description of Artificial Sequence: Synthetic oligonucleotide
aaugcuuccacu

SEQ ID NO: 73256 - RNA, 11 nt, Artificial Sequence
  Description of Artificial Sequence: Synthetic oligonucleotide
gagaaaguuug

SEQ ID NO: 73257 - RNA, 11 nt, Artificial Sequence
  Description of Artificial Sequence: Synthetic oligonucleotide
aaagaacuacu

SEQ ID NO: 73258 - RNA, 12 nt, Artificial Sequence
  Description of Artificial Sequence: Synthetic oligonucleotide
uuagaaauacgg

SEQ ID NO: 73259 - RNA, 12 nt, Artificial Sequence
  Description of Artificial Sequence: Synthetic oligonucleotide
aacauggguaca

SEQ ID NO: 73260 - RNA, 14 nt, Artificial Sequence
  Description of Artificial Sequence: Synthetic oligonucleotide
aaagacacagaaga

SEQ ID NO: 73261 - RNA, 11 nt, Artificial Sequence
  Description of Artificial Sequence: Synthetic oligonucleotide
uaguagggagg

SEQ ID NO: 73262 - RNA, 12 nt, Artificial Sequence
  Description of Artificial Sequence: Synthetic oligonucleotide
gccuucugcagc

SEQ ID NO: 73263 - RNA, 10 nt, Artificial Sequence
  Description of Artificial Sequence: Synthetic oligonucleotide
ggucugguac

SEQ ID NO: 73264 - RNA, 12 nt, Artificial Sequence
  Description of Artificial Sequence: Synthetic oligonucleotide
cuaguccuuccg

SEQ ID NO: 73265 - RNA, 12 nt, Artificial Sequence
  Description of Artificial Sequence: Synthetic oligonucleotide
ccagugaauauu

SEQ ID NO: 73266 - RNA, 13 nt, Artificial Sequence
  Description of Artificial Sequence: Synthetic oligonucleotide
augaauucaaguu

SEQ ID NO: 73267 - RNA, 12 nt, Artificial Sequence
  Description of Artificial Sequence: Synthetic oligonucleotide
caggacacagau

SEQ ID NO: 73268 - RNA, 12 nt, Artificial Sequence
  Description of Artificial Sequence: Synthetic oligonucleotide
cucaaagcacag

SEQ ID NO: 73269 - RNA, 10 nt, Artificial Sequence
  Description of Artificial Sequence: Synthetic oligonucleotide
accacugcca

SEQ ID NO: 73270 - RNA, 13 nt, Artificial Sequence
  Description of Artificial Sequence: Synthetic oligonucleotide
gaaacuacuagug

SEQ ID NO: 73271 - RNA, 12 nt, Artificial Sequence
  Description of Artificial Sequence: Synthetic oligonucleotide
aagucggacagc

SEQ ID NO: 73272 - RNA, 13 nt, Artificial Sequence
  Description of Artificial Sequence: Synthetic oligonucleotide
gaaagcgaaaaau

SEQ ID NO: 73273 - RNA, 13 nt, Artificial Sequence
  Description of Artificial Sequence: Synthetic oligonucleotide
cccucugauuuag

SEQ ID NO: 73274 - RNA, 12 nt, Artificial Sequence
  Description of Artificial Sequence: Synthetic oligonucleotide
ugagcuauuuaa

SEQ ID NO: 73275 - RNA, 13 nt, Artificial Sequence
  Description of Artificial Sequence: Synthetic oligonucleotide
aaaaggugaaaaa

SEQ ID NO: 73276 - RNA, 14 nt, Artificial Sequence
  Description of Artificial Sequence: Synthetic oligonucleotide
gaaaaagcacuauu

SEQ ID NO: 73277 - RNA, 12 nt, Artificial Sequence
  Description of Artificial Sequence: Synthetic oligonucleotide
ggcugaaaagaa

SEQ ID NO: 73278 - RNA, 12 nt, Artificial Sequence
  Description of Artificial Sequence: Synthetic oligonucleotide
uaaacccuuaua

SEQ ID NO: 73279 - RNA, 13 nt, Artificial Sequence
  Description of Artificial Sequence: Synthetic oligonucleotide
cauacuauuagcc

SEQ ID NO: 73280 - RNA, 12 nt, Artificial Sequence
  Description of Artificial Sequence: Synthetic oligonucleotide
gacagaagcauu

SEQ ID NO: 73281 - RNA, 14 nt, Artificial Sequence
  Description of Artificial Sequence: Synthetic oligonucleotide
agagcaaauaagau

SEQ ID NO: 73282 - RNA, 14 nt, Artificial Sequence
  Description of Artificial Sequence: Synthetic oligonucleotide
ccaacauuuuucuc

SEQ ID NO: 73283 - RNA, 15 nt, Artificial Sequence
  Description of Artificial Sequence: Synthetic oligonucleotide
uuaaguaugagaaaa

SEQ ID NO: 73284 - RNA, 14 nt, Artificial Sequence
  Description of Artificial Sequence: Synthetic oligonucleotide
caggaauaaagaug

SEQ ID NO: 73285 - RNA, 13 nt, Artificial Sequence
  Description of Artificial Sequence: Synthetic oligonucleotide
aauuugaaugacc

SEQ ID NO: 73286 - RNA, 14 nt, Artificial Sequence
  Description of Artificial Sequence: Synthetic oligonucleotide
auguauaaagauag

SEQ ID NO: 73287 - RNA, 12 nt, Artificial Sequence
  Description of Artificial Sequence: Synthetic oligonucleotide
ggcuguaacuau

SEQ ID NO: 73288 - RNA, 11 nt, Artificial Sequence
  Description of Artificial Sequence: Synthetic oligonucleotide
ucugugaagug

SEQ ID NO: 73289 - RNA, 14 nt, Artificial Sequence
  Description of Artificial Sequence: Synthetic oligonucleotide
ccuuuaaggaaaug

SEQ ID NO: 73290 - RNA, 13 nt, Artificial Sequence
  Description of Artificial Sequence: Synthetic oligonucleotide
aaggauacaaaaa

SEQ ID NO: 73291 - RNA, 12 nt, Artificial Sequence
  Description of Artificial Sequence: Synthetic oligonucleotide
agaugcaauuug

SEQ ID NO: 73292 - RNA, 12 nt, Artificial Sequence
  Description of Artificial Sequence: Synthetic oligonucleotide
guucaaaacgaa

SEQ ID NO: 73293 - RNA, 11 nt, Artificial Sequence
  Description of Artificial Sequence: Synthetic oligonucleotide
gugaaaccuca

SEQ ID NO: 73294 - RNA, 13 nt, Artificial Sequence
  Description of Artificial Sequence: Synthetic oligonucleotide
acgaaagagaagc

SEQ ID NO: 73295 - RNA, 12 nt, Artificial Sequence
  Description of Artificial Sequence: Synthetic oligonucleotide
cuccacaagcgc

SEQ ID NO: 73296 - RNA, 14 nt, Artificial Sequence
  Description of Artificial Sequence: Synthetic oligonucleotide
gagaagauuccaaa

SEQ ID NO: 73297 - RNA, 13 nt, Artificial Sequence
  Description of Artificial Sequence: Synthetic oligonucleotide
aaucuggauucaa

SEQ ID NO: 73298 - RNA, 13 nt, Artificial Sequence
  Description of Artificial Sequence: Synthetic oligonucleotide
agaacagauuuga

SEQ ID NO: 73299 - RNA, 11 nt, Artificial Sequence
  Description of Artificial Sequence: Synthetic oligonucleotide
ccagagcugug

SEQ ID NO: 73300 - RNA, 12 nt, Artificial Sequence
  Description of Artificial Sequence: Synthetic oligonucleotide
ccucagauuguu

SEQ ID NO: 73301 - RNA, 12 nt, Artificial Sequence
  Description of Artificial Sequence: Synthetic oligonucleotide
cuauuuuaauua

SEQ ID NO: 73302 - RNA, 13 nt, Artificial Sequence
  Description of Artificial Sequence: Synthetic oligonucleotide
uuuaauuuauuaa

SEQ ID NO: 73303 - RNA, 12 nt, Artificial Sequence
  Description of Artificial Sequence: Synthetic oligonucleotide
augcaguuugaa

SEQ ID NO: 73304 - RNA, 11 nt, Artificial Sequence
  Description of Artificial Sequence: Synthetic oligonucleotide
caugcugcugg

SEQ ID NO: 73305 - RNA, 13 nt, Artificial Sequence
  Description of Artificial Sequence: Synthetic oligonucleotide
agaugugcauuuc

SEQ ID NO: 73306 - RNA, 12 nt, Artificial Sequence
  Description of Artificial Sequence: Synthetic oligonucleotide
ucaaaaccugug

SEQ ID NO: 73307 - RNA, 11 nt, Artificial Sequence
  Description of Artificial Sequence: Synthetic oligonucleotide
gaaugugggua

SEQ ID NO: 73308 - RNA, 10 nt, Artificial Sequence
  Description of Artificial Sequence: Synthetic oligonucleotide
auguggguag

SEQ ID NO: 73309 - RNA, 13 nt, Artificial Sequence
  Description of Artificial Sequence: Synthetic oligonucleotide
ugaaaaugagcau

SEQ ID NO: 73310 - RNA, 13 nt, Artificial Sequence
  Description of Artificial Sequence: Synthetic oligonucleotide
uugcuuuucaugu

SEQ ID NO: 73311 - RNA, 12 nt, Artificial Sequence
  Description of Artificial Sequence: Synthetic oligonucleotide
uguauuucuaua

SEQ ID NO: 73312 - RNA, 13 nt, Artificial Sequence
  Description of Artificial Sequence: Synthetic oligonucleotide
uuugauuaauguu

SEQ ID NO: 73313 - RNA, 12 nt, Artificial Sequence
  Description of Artificial Sequence: Synthetic oligonucleotide
caacguguauag

SEQ ID NO: 73314 - RNA, 12 nt, Artificial Sequence
  Description of Artificial Sequence: Synthetic oligonucleotide
cauauccuuggc

SEQ ID NO: 73315 - RNA, 13 nt, Artificial Sequence
  Description of Artificial Sequence: Synthetic oligonucleotide
uacuaacaucugg

SEQ ID NO: 73316 - RNA, 11 nt, Artificial Sequence
  Description of Artificial Sequence: Synthetic oligonucleotide
cauaaguugug

SEQ ID NO: 73317 - RNA, 12 nt, Artificial Sequence
  Description of Artificial Sequence: Synthetic oligonucleotide
gcaucauuuugg

SEQ ID NO: 73318 - RNA, 10 nt, Artificial Sequence
  Description of Artificial Sequence: Synthetic oligonucleotide
gcucuucuua

SEQ ID NO: 73319 - RNA, 10 nt, Artificial Sequence
  Description of Artificial Sequence: Synthetic oligonucleotide
agauuagguc

SEQ ID NO: 73320 - RNA, 12 nt, Artificial Sequence
  Description of Artificial Sequence: Synthetic oligonucleotide
auggaauugaaa

SEQ ID NO: 73321 - RNA, 13 nt, Artificial Sequence
  Description of Artificial Sequence: Synthetic oligonucleotide
cacacucauuccu

SEQ ID NO: 73322 - RNA, 12 nt, Artificial Sequence
  Description of Artificial Sequence: Synthetic oligonucleotide
uguagagguaac

SEQ ID NO: 73323 - RNA, 11 nt, Artificial Sequence
  Description of Artificial Sequence: Synthetic oligonucleotide
caaccacaugc

SEQ ID NO: 73324 - RNA, 12 nt, Artificial Sequence
  Description of Artificial Sequence: Synthetic oligonucleotide
ucggaaacaagu

SEQ ID NO: 73325 - RNA, 11 nt, Artificial Sequence
  Description of Artificial Sequence: Synthetic oligonucleotide
acucccaauaa

SEQ ID NO: 73326 - RNA, 13 nt, Artificial Sequence
  Description of Artificial Sequence: Synthetic oligonucleotide
aaugcuaagaaau

SEQ ID NO: 73327 - RNA, 11 nt, Artificial Sequence
  Description of Artificial Sequence: Synthetic oligonucleotide
gucuuucucua

SEQ ID NO: 73328 - RNA, 11 nt, Artificial Sequence
  Description of Artificial Sequence: Synthetic oligonucleotide
ugaauuucagg

SEQ ID NO: 73329 - RNA, 13 nt, Artificial Sequence
  Description of Artificial Sequence: Synthetic oligonucleotide
cgauucccucuca

SEQ ID NO: 73330 - RNA, 11 nt, Artificial Sequence
  Description of Artificial Sequence: Synthetic oligonucleotide
aggaaagugaa

SEQ ID NO: 73331 - RNA, 12 nt, Artificial Sequence
  Description of Artificial Sequence: Synthetic oligonucleotide
gaggcugcaugc

SEQ ID NO: 73332 - RNA, 11 nt, Artificial Sequence
  Description of Artificial Sequence: Synthetic oligonucleotide
ucucugaacag

SEQ ID NO: 73333 - RNA, 12 nt, Artificial Sequence
  Description of Artificial Sequence: Synthetic oligonucleotide
aacuuggcugua

SEQ ID NO: 73334 - RNA, 12 nt, Artificial Sequence
  Description of Artificial Sequence: Synthetic oligonucleotide
agaagccaaaau

SEQ ID NO: 73335 - RNA, 14 nt, Artificial Sequence
  Description of Artificial Sequence: Synthetic oligonucleotide
auuaaaagaagucc

SEQ ID NO: 73336 - RNA, 14 nt, Artificial Sequence
  Description of Artificial Sequence: Synthetic oligonucleotide
gaauccggauuauc

SEQ ID NO: 73337 - RNA, 12 nt, Artificial Sequence
  Description of Artificial Sequence: Synthetic oligonucleotide
aaugugacauca

SEQ ID NO: 73338 - RNA, 13 nt, Artificial Sequence
  Description of Artificial Sequence: Synthetic oligonucleotide
caucaaagcaagu

SEQ ID NO: 73339 - RNA, 11 nt, Artificial Sequence
  Description of Artificial Sequence: Synthetic oligonucleotide
agagagagaaa

SEQ ID NO: 73340 - RNA, 13 nt, Artificial Sequence
  Description of Artificial Sequence: Synthetic oligonucleotide
ucgcuguaguauu

SEQ ID NO: 73341 - RNA, 14 nt, Artificial Sequence
  Description of Artificial Sequence: Synthetic oligonucleotide
cgcuguaguauuua

SEQ ID NO: 73342 - RNA, 13 nt, Artificial Sequence
  Description of Artificial Sequence: Synthetic oligonucleotide
auuuaagcccaua

SEQ ID NO: 73343 - RNA, 15 nt, Artificial Sequence
  Description of Artificial Sequence: Synthetic oligonucleotide
auuaaaauaaacaug

SEQ ID NO: 73344 - RNA, 12 nt, Artificial Sequence
  Description of Artificial Sequence: Synthetic oligonucleotide
cuguucugaucg

SEQ ID NO: 73345 - RNA, 16 nt, Artificial Sequence
  Description of Artificial Sequence: Synthetic oligonucleotide
aaauaauuugaacuuu

SEQ ID NO: 73346 - RNA, 12 nt, Artificial Sequence
  Description of Artificial Sequence: Synthetic oligonucleotide
ugcgaccuuaau

SEQ ID NO: 73347 - RNA, 11 nt, Artificial Sequence
  Description of Artificial Sequence: Synthetic oligonucleotide
cugagaaagcu

SEQ ID NO: 73348 - RNA, 13 nt, Artificial Sequence
  Description of Artificial Sequence: Synthetic oligonucleotide
aguaaagaugcua

SEQ ID NO: 73349 - RNA, 12 nt, Artificial Sequence
  Description of Artificial Sequence: Synthetic oligonucleotide
cugcuuaauugc

SEQ ID NO: 73350 - RNA, 14 nt, Artificial Sequence
  Description of Artificial Sequence: Synthetic oligonucleotide
uaccauaugaauga

SEQ ID NO: 73351 - RNA, 12 nt, Artificial Sequence
  Description of Artificial Sequence: Synthetic oligonucleotide
aacuuucuuauc

SEQ ID NO: 73352 - RNA, 13 nt, Artificial Sequence
  Description of Artificial Sequence: Synthetic oligonucleotide
ccuugcaugacau

SEQ ID NO: 73353 - RNA, 14 nt, Artificial Sequence
  Description of Artificial Sequence: Synthetic oligonucleotide
ugaauuuguauaug

SEQ ID NO: 73354 - RNA, 12 nt, Artificial Sequence
  Description of Artificial Sequence: Synthetic oligonucleotide
gaauccuaguag

SEQ ID NO: 73355 - RNA, 10 nt, Artificial Sequence
  Description of Artificial Sequence: Synthetic oligonucleotide
gaaagggaag

SEQ ID NO: 73356 - RNA, 11 nt, Artificial Sequence
  Description of Artificial Sequence: Synthetic oligonucleotide
uaucggcaugc

SEQ ID NO: 73357 - RNA, 12 nt, Artificial Sequence
  Description of Artificial Sequence: Synthetic oligonucleotide
caccucauagua

SEQ ID NO: 73358 - RNA, 11 nt, Artificial Sequence
  Description of Artificial Sequence: Synthetic oligonucleotide
ccagaauugcc

SEQ ID NO: 73359 - RNA, 11 nt, Artificial Sequence
  Description of Artificial Sequence: Synthetic oligonucleotide
uggugaucugg

SEQ ID NO: 73360 - RNA, 12 nt, Artificial Sequence
  Description of Artificial Sequence: Synthetic oligonucleotide
gaucuggguaau

SEQ ID NO: 73361 - RNA, 12 nt, Artificial Sequence
  Description of Artificial Sequence: Synthetic oligonucleotide
ggaugugaugaa

SEQ ID NO: 73362 - RNA, 12 nt, Artificial Sequence
  Description of Artificial Sequence: Synthetic oligonucleotide
cauuuccacagc

SEQ ID NO: 73363 - RNA, 11 nt, Artificial Sequence
  Description of Artificial Sequence: Synthetic oligonucleotide
acagcuacacc

SEQ ID NO: 73364 - RNA, 12 nt, Artificial Sequence
  Description of Artificial Sequence: Synthetic oligonucleotide
ugcaguucuuac

SEQ ID NO: 73365 - RNA, 12 nt, Artificial Sequence
  Description of Artificial Sequence: Synthetic oligonucleotide
acgagaagaaga

SEQ ID NO: 73366 - RNA, 12 nt, Artificial Sequence
  Description of Artificial Sequence: Synthetic oligonucleotide
cgagaagaagau

SEQ ID NO: 73367 - RNA, 15 nt, Artificial Sequence
  Description of Artificial Sequence: Synthetic oligonucleotide
aagaagaucauuuac

SEQ ID NO: 73368 - RNA, 11 nt, Artificial Sequence
  Description of Artificial Sequence: Synthetic oligonucleotide
agaggaagagg

SEQ ID NO: 73369 - RNA, 12 nt, Artificial Sequence
  Description of Artificial Sequence: Synthetic oligonucleotide
gaggaagaggug

SEQ ID NO: 73370 - RNA, 13 nt, Artificial Sequence
  Description of Artificial Sequence: Synthetic oligonucleotide
cuacuuugagggc

SEQ ID NO: 73371 - RNA, 12 nt, Artificial Sequence
  Description of Artificial Sequence: Synthetic oligonucleotide
agggcaucuccu

SEQ ID NO: 73372 - RNA, 10 nt, Artificial Sequence
  Description of Artificial Sequence: Synthetic oligonucleotide
ggagugauau

SEQ ID NO: 73373 - RNA, 11 nt, Artificial Sequence
  Description of Artificial Sequence: Synthetic oligonucleotide
gagugauaugg

SEQ ID NO: 73374 - RNA, 12 nt, Artificial Sequence
  Description of Artificial Sequence: Synthetic oligonucleotide
ugcaguaaagau

SEQ ID NO: 73375 - RNA, 13 nt, Artificial Sequence
  Description of Artificial Sequence: Synthetic oligonucleotide
aguaaagauccua

SEQ ID NO: 73376 - RNA, 12 nt, Artificial Sequence
  Description of Artificial Sequence: Synthetic oligonucleotide
ugacaaaggaca

SEQ ID NO: 73377 - RNA, 13 nt, Artificial Sequence
  Description of Artificial Sequence: Synthetic oligonucleotide
gcaauugugaccc

SEQ ID NO: 73378 - RNA, 12 nt, Artificial Sequence
  Description of Artificial Sequence: Synthetic oligonucleotide
aacaucauccau

SEQ ID NO: 73379 - RNA, 12 nt, Artificial Sequence
  Description of Artificial Sequence: Synthetic oligonucleotide
ugaaauccaaca

SEQ ID NO: 73380 - RNA, 15 nt, Artificial Sequence
  Description of Artificial Sequence: Synthetic oligonucleotide
aacaauauauuucuc

SEQ ID NO: 73381 - RNA, 14 nt, Artificial Sequence
  Description of Artificial Sequence: Synthetic oligonucleotide
aacaguaaagucac

SEQ ID NO: 73382 - RNA, 14 nt, Artificial Sequence
  Description of Artificial Sequence: Synthetic oligonucleotide
ugugaagaaaguaa

SEQ ID NO: 73383 - RNA, 13 nt, Artificial Sequence
  Description of Artificial Sequence: Synthetic oligonucleotide
cuuccgagccauc

SEQ ID NO: 73384 - RNA, 12 nt, Artificial Sequence
  Description of Artificial Sequence: Synthetic oligonucleotide
aauggagguuga

SEQ ID NO: 73385 - RNA, 12 nt, Artificial Sequence
  Description of Artificial Sequence: Synthetic oligonucleotide
ggagguugaaua

SEQ ID NO: 73386 - RNA, 13 nt, Artificial Sequence
  Description of Artificial Sequence: Synthetic oligonucleotide
auuuugaguuuuc

SEQ ID NO: 73387 - RNA, 12 nt, Artificial Sequence
  Description of Artificial Sequence: Synthetic oligonucleotide
uauccuguuugu

SEQ ID NO: 73388 - RNA, 11 nt, Artificial Sequence
  Description of Artificial Sequence: Synthetic oligonucleotide
ccuguuuguuc

SEQ ID NO: 73389 - RNA, 10 nt, Artificial Sequence
  Description of Artificial Sequence: Synthetic oligonucleotide
cucuacagcc

SEQ ID NO: 73390 - RNA, 12 nt, Artificial Sequence
  Description of Artificial Sequence: Synthetic oligonucleotide
ucuuccauagcu

SEQ ID NO: 73391 - RNA, 12 nt, Artificial Sequence
  Description of Artificial Sequence: Synthetic oligonucleotide
auaaucuuccug

SEQ ID NO: 73392 - RNA, 12 nt, Artificial Sequence
  Description of Artificial Sequence: Synthetic oligonucleotide
uaaucuuccugu

SEQ ID NO: 73393 - RNA, 12 nt, Artificial Sequence
  Description of Artificial Sequence: Synthetic oligonucleotide
cuucaugacuug

SEQ ID NO: 73394 - RNA, 12 nt, Artificial Sequence
  Description of Artificial Sequence: Synthetic oligonucleotide
aagagggagaga

SEQ ID NO: 73395 - RNA, 12 nt, Artificial Sequence
  Description of Artificial Sequence: Synthetic oligonucleotide
cgucuccuacca

SEQ ID NO: 73396 - RNA, 12 nt, Artificial Sequence
  Description of Artificial Sequence: Synthetic oligonucleotide
gaucaaucggcc

SEQ ID NO: 73397 - RNA, 12 nt, Artificial Sequence
  Description of Artificial Sequence: Synthetic oligonucleotide
ggacgaacaucc

SEQ ID NO: 73398 - RNA, 11 nt, Artificial Sequence
  Description of Artificial Sequence: Synthetic oligonucleotide
agggucggaac

SEQ ID NO: 73399 - RNA, 10 nt, Artificial Sequence
  Description of Artificial Sequence: Synthetic oligonucleotide
ucggaaccca

SEQ ID NO: 73400 - RNA, 11 nt, Artificial Sequence
  Description of Artificial Sequence: Synthetic oligonucleotide
acccaagcuua

SEQ ID NO: 73401 - RNA, 14 nt, Artificial Sequence
  Description of Artificial Sequence: Synthetic oligonucleotide
gaacuuuaagcaac

SEQ ID NO: 73402 - RNA, 11 nt, Artificial Sequence
  Description of Artificial Sequence: Synthetic oligonucleotide
acuauucagug

SEQ ID NO: 73403 - RNA, 11 nt, Artificial Sequence
  Description of Artificial Sequence: Synthetic oligonucleotide
cuauucagugg

SEQ ID NO: 73404 - RNA, 13 nt, Artificial Sequence
  Description of Artificial Sequence: Synthetic oligonucleotide
aaacacagauaac

SEQ ID NO: 73405 - RNA, 12 nt, Artificial Sequence
  Description of Artificial Sequence: Synthetic oligonucleotide
cuuaagaaaaga

SEQ ID NO: 73406 - RNA, 12 nt, Artificial Sequence
  Description of Artificial Sequence: Synthetic oligonucleotide
cugaaggagugu

SEQ ID NO: 73407 - RNA, 10 nt, Artificial Sequence
  Description of Artificial Sequence: Synthetic oligonucleotide
ucaccgcggg

SEQ ID NO: 73408 - RNA, 14 nt, Artificial Sequence
  Description of Artificial Sequence: Synthetic oligonucleotide
agcagaaauaagcg

SEQ ID NO: 73409 - RNA, 12 nt, Artificial Sequence
  Description of Artificial Sequence: Synthetic oligonucleotide
aagcgugccguu

SEQ ID NO: 73410 - RNA, 12 nt, Artificial Sequence
  Description of Artificial Sequence: Synthetic oligonucleotide
agaaacagucac

SEQ ID NO: 73411 - RNA, 12 nt, Artificial Sequence
  Description of Artificial Sequence: Synthetic oligonucleotide
agaggaagaagg

SEQ ID NO: 73412 - RNA, 14 nt, Artificial Sequence
  Description of Artificial Sequence: Synthetic oligonucleotide
uguauucaaaauau

SEQ ID NO: 73413 - RNA, 13 nt, Artificial Sequence
  Description of Artificial Sequence: Synthetic oligonucleotide
auuuuccucccuu

SEQ ID NO: 73414 - RNA, 13 nt, Artificial Sequence
  Description of Artificial Sequence: Synthetic oligonucleotide
caaagaaagauag

SEQ ID NO: 73415 - RNA, 12 nt, Artificial Sequence
  Description of Artificial Sequence: Synthetic oligonucleotide
aagaaagauaga

SEQ ID NO: 73416 - RNA, 13 nt, Artificial Sequence
  Description of Artificial Sequence: Synthetic oligonucleotide
gaaagcauuuguu

SEQ ID NO: 73417 - RNA, 13 nt, Artificial Sequence
  Description of Artificial Sequence: Synthetic oligonucleotide
ugaguuaaacgaa

SEQ ID NO: 73418 - RNA, 12 nt, Artificial Sequence
  Description of Artificial Sequence: Synthetic oligonucleotide
acugauacagaa

SEQ ID NO: 73419 - RNA, 12 nt, Artificial Sequence
  Description of Artificial Sequence: Synthetic oligonucleotide
auauuauauaua

SEQ ID NO: 73420 - RNA, 12 nt, Artificial Sequence
  Description of Artificial Sequence: Synthetic oligonucleotide
auuauauauaua

SEQ ID NO: 73421 - RNA, 12 nt, Artificial Sequence
  Description of Artificial Sequence: Synthetic oligonucleotide
ucacuggaugua

SEQ ID NO: 73422 - RNA, 12 nt, Artificial Sequence
  Description of Artificial Sequence: Synthetic oligonucleotide
cagggaagagga

SEQ ID NO: 73423 - RNA, 15 nt, Artificial Sequence
  Description of Artificial Sequence: Synthetic oligonucleotide
augaucuuuuuuuug

SEQ ID NO: 73424 - RNA, 11 nt, Artificial Sequence
  Description of Artificial Sequence: Synthetic oligonucleotide
aguucacggcc

SEQ ID NO: 73425 - RNA, 13 nt, Artificial Sequence
  Description of Artificial Sequence: Synthetic oligonucleotide
caccaucacacca

SEQ ID NO: 73426 - RNA, 11 nt, Artificial Sequence
  Description of Artificial Sequence: Synthetic oligonucleotide
ccugcggguuu

SEQ ID NO: 73427 - RNA, 10 nt, Artificial Sequence
  Description of Artificial Sequence: Synthetic oligonucleotide
auccaguuug

SEQ ID NO: 73428 - RNA, 13 nt, Artificial Sequence
  Description of Artificial Sequence: Synthetic oligonucleotide
guuaaggacuucu

SEQ ID NO: 73429 - RNA, 13 nt, Artificial Sequence
  Description of Artificial Sequence: Synthetic oligonucleotide
cagugggacagag

SEQ ID NO: 73430 - RNA, 14 nt, Artificial Sequence
  Description of Artificial Sequence: Synthetic oligonucleotide
aauuuguuauugug

SEQ ID NO: 73431 - RNA, 13 nt, Artificial Sequence
  Description of Artificial Sequence: Synthetic oligonucleotide
uucaaaugcauuu

SEQ ID NO: 73432 - RNA, 10 nt, Artificial Sequence
  Description of Artificial Sequence: Synthetic oligonucleotide
caggaaagcc

SEQ ID NO: 73433 - RNA, 11 nt, Artificial Sequence
  Description of Artificial Sequence: Synthetic oligonucleotide
aggaaagcccu

SEQ ID NO: 73434 - RNA, 12 nt, Artificial Sequence
  Description of Artificial Sequence: Synthetic oligonucleotide
cccagcauggcc

SEQ ID NO: 73435 - RNA, 11 nt, Artificial Sequence
  Description of Artificial Sequence: Synthetic oligonucleotide
cuucucccuga

SEQ ID NO: 73436 - RNA, 12 nt, Artificial Sequence
  Description of Artificial Sequence: Synthetic oligonucleotide
gaagaagcccuu

SEQ ID NO: 73437 - RNA, 12 nt, Artificial Sequence
  Description of Artificial Sequence: Synthetic oligonucleotide
agaagcccuuca

SEQ ID NO: 73438 - RNA, 11 nt, Artificial Sequence
  Description of Artificial Sequence: Synthetic oligonucleotide
gcccuucagcg

SEQ ID NO: 73439 - RNA, 11 nt, Artificial Sequence
  Description of Artificial Sequence: Synthetic oligonucleotide
ccuucagcggc

SEQ ID NO: 73440 - RNA, 12 nt, Artificial Sequence
  Description of Artificial Sequence: Synthetic oligonucleotide
ucagcggccagu

SEQ ID NO: 73441 - RNA, 12 nt, Artificial Sequence
  Description of Artificial Sequence: Synthetic oligonucleotide
ugaaaagcuccg

SEQ ID NO: 73442 - RNA, 11 nt, Artificial Sequence
  Description of Artificial Sequence: Synthetic oligonucleotide
aaaagcuccgg

SEQ ID NO: 73443 - RNA, 13 nt, Artificial Sequence
  Description of Artificial Sequence: Synthetic oligonucleotide
agucaacagucug

SEQ ID NO: 73444 - RNA, 13 nt, Artificial Sequence
  Description of Artificial Sequence: Synthetic oligonucleotide
cagaguucaaaag

SEQ ID NO: 73445 - RNA, 13 nt, Artificial Sequence
  Description of Artificial Sequence: Synthetic oligonucleotide
agaguucaaaagc

SEQ ID NO: 73446 - RNA, 12 nt, Artificial Sequence
  Description of Artificial Sequence: Synthetic oligonucleotide
uucaaaagcccu

SEQ ID NO: 73447 - RNA, 12 nt, Artificial Sequence
  Description of Artificial Sequence: Synthetic oligonucleotide
ucaaaagcccuu

SEQ ID NO: 73448 - RNA, 12 nt, Artificial Sequence
  Description of Artificial Sequence: Synthetic oligonucleotide
aaaagcccuuca

SEQ ID NO: 73449 - RNA, 12 nt, Artificial Sequence
  Description of Artificial Sequence: Synthetic oligonucleotide
aaagcccuucag

SEQ ID NO: 73450 - RNA, 13 nt, Artificial Sequence
  Description of Artificial Sequence: Synthetic oligonucleotide
gugaagccgcucg

SEQ ID NO: 73451 - RNA, 12 nt, Artificial Sequence
  Description of Artificial Sequence: Synthetic oligonucleotide
cacgccagucaa

SEQ ID NO: 73452 - RNA, 13 nt, Artificial Sequence
  Description of Artificial Sequence: Synthetic oligonucleotide
uucuuggugcgug

SEQ ID NO: 73453 - RNA, 14 nt, Artificial Sequence
  Description of Artificial Sequence: Synthetic oligonucleotide
auuggauucaucag

SEQ ID NO: 73454 - RNA, 13 nt, Artificial Sequence
  Description of Artificial Sequence: Synthetic oligonucleotide
uggaauaccuaag

SEQ ID NO: 73455 - RNA, 12 nt, Artificial Sequence
  Description of Artificial Sequence: Synthetic oligonucleotide
auuugaggcuca

SEQ ID NO: 73456 - RNA, 11 nt, Artificial Sequence
  Description of Artificial Sequence: Synthetic oligonucleotide
ucuacaauugg

SEQ ID NO: 73457 - RNA, 12 nt, Artificial Sequence
  Description of Artificial Sequence: Synthetic oligonucleotide
uaguuaggagcc

SEQ ID NO: 73458 - RNA, 13 nt, Artificial Sequence
  Description of Artificial Sequence: Synthetic oligonucleotide
agucaauauccac

SEQ ID NO: 73459 - RNA, 13 nt, Artificial Sequence
  Description of Artificial Sequence: Synthetic oligonucleotide
auguucagucaca

SEQ ID NO: 73460 - RNA, 12 nt, Artificial Sequence
  Description of Artificial Sequence: Synthetic oligonucleotide
acacacacauac

SEQ ID NO: 73461 - RNA, 12 nt, Artificial Sequence
  Description of Artificial Sequence: Synthetic oligonucleotide
uuccuuuugcuu

SEQ ID NO: 73462 - RNA, 16 nt, Artificial Sequence
  Description of Artificial Sequence: Synthetic oligonucleotide
uuuuaaaguaauuuuu

SEQ ID NO: 73463 - RNA, 13 nt, Artificial Sequence
  Description of Artificial Sequence: Synthetic oligonucleotide
caacagucaaugg

SEQ ID NO: 73464 - RNA, 13 nt, Artificial Sequence
  Description of Artificial Sequence: Synthetic oligonucleotide
ucgacaaaccaau

SEQ ID NO: 73465 - RNA, 12 nt, Artificial Sequence
  Description of Artificial Sequence: Synthetic oligonucleotide
acugcuaccacu

SEQ ID NO: 73466 - RNA, 13 nt, Artificial Sequence
  Description of Artificial Sequence: Synthetic oligonucleotide
gcaagcggucuua

SEQ ID NO: 73467 - RNA, 13 nt, Artificial Sequence
  Description of Artificial Sequence: Synthetic oligonucleotide
ggucuuaccggcu

SEQ ID NO: 73468 - RNA, 11 nt, Artificial Sequence
  Description of Artificial Sequence: Synthetic oligonucleotide
gauggguuacc

SEQ ID NO: 73469 - RNA, 11 nt, Artificial Sequence
  Description of Artificial Sequence: Synthetic oligonucleotide
guuaccugcga

SEQ ID NO: 73470 - RNA, 12 nt, Artificial Sequence
  Description of Artificial Sequence: Synthetic oligonucleotide
aaucuugcugag

SEQ ID NO: 73471 - RNA, 13 nt, Artificial Sequence
  Description of Artificial Sequence: Synthetic oligonucleotide
agcauaaaacagu

SEQ ID NO: 73472 - RNA, 12 nt, Artificial Sequence
  Description of Artificial Sequence: Synthetic oligonucleotide
guccuuuauccu

SEQ ID NO: 73473 - RNA, 12 nt, Artificial Sequence
  Description of Artificial Sequence: Synthetic oligonucleotide
caacgcaaguug

SEQ ID NO: 73474 - RNA, 13 nt, Artificial Sequence
  Description of Artificial Sequence: Synthetic oligonucleotide
aaacugaaaccau

SEQ ID NO: 73475 - RNA, 14 nt, Artificial Sequence
  Description of Artificial Sequence: Synthetic oligonucleotide
acuuuguuaaauau

SEQ ID NO: 73476 - RNA, 14 nt, Artificial Sequence
  Description of Artificial Sequence: Synthetic oligonucleotide
guauauuaaaaguu

SEQ ID NO: 73477 - RNA, 13 nt, Artificial Sequence
  Description of Artificial Sequence: Synthetic oligonucleotide
guuuugacuuaac

SEQ ID NO: 73478 - RNA, 13 nt, Artificial Sequence
  Description of Artificial Sequence: Synthetic oligonucleotide
gcaaacucagcac

SEQ ID NO: 73479 - RNA, 11 nt, Artificial Sequence
  Description of Artificial Sequence: Synthetic oligonucleotide
ugcugaccuca

SEQ ID NO: 73480 - RNA, 14 nt, Artificial Sequence
  Description of Artificial Sequence: Synthetic oligonucleotide
uuuauucagaucgc

SEQ ID NO: 73481 - RNA, 13 nt, Artificial Sequence
  Description of Artificial Sequence: Synthetic oligonucleotide
aggguucugggau

SEQ ID NO: 73482 - RNA, 15 nt, Artificial Sequence
  Description of Artificial Sequence: Synthetic oligonucleotide
auauuggaaauuaug

SEQ ID NO: 73483 - RNA, 13 nt, Artificial Sequence
  Description of Artificial Sequence: Synthetic oligonucleotide
auggaagcacuag

SEQ ID NO: 73484 - RNA, 13 nt, Artificial Sequence
  Description of Artificial Sequence: Synthetic oligonucleotide
guuuuuaugugga

SEQ ID NO: 73485 - RNA, 12 nt, Artificial Sequence
  Description of Artificial Sequence: Synthetic oligonucleotide
ggaauugguaga

SEQ ID NO: 73486 - RNA, 13 nt, Artificial Sequence
  Description of Artificial Sequence: Synthetic oligonucleotide
uuagacuuggaga

SEQ ID NO: 73487 - RNA, 13 nt, Artificial Sequence
  Description of Artificial Sequence: Synthetic oligonucleotide
uuacaguauucca

SEQ ID NO: 73488 - RNA, 15 nt, Artificial Sequence
  Description of Artificial Sequence: Synthetic oligonucleotide
ccacugaugaauuaa

SEQ ID NO: 73489 - RNA, 12 nt, Artificial Sequence
  Description of Artificial Sequence: Synthetic oligonucleotide
ccacaucaucac

SEQ ID NO: 73490 - RNA, 13 nt, Artificial Sequence
  Description of Artificial Sequence: Synthetic oligonucleotide
cucaccaaacaga

SEQ ID NO: 73491 - RNA, 12 nt, Artificial Sequence
  Description of Artificial Sequence: Synthetic oligonucleotide
ggaacaugaugg

SEQ ID NO: 73492 - RNA, 12 nt, Artificial Sequence
  Description of Artificial Sequence: Synthetic oligonucleotide
cauguagacugc

SEQ ID NO: 73493 - RNA, 13 nt, Artificial Sequence
  Description of Artificial Sequence: Synthetic oligonucleotide
ggaucuauuuaug

SEQ ID NO: 73494 - RNA, 12 nt, Artificial Sequence
  Description of Artificial Sequence: Synthetic oligonucleotide
gcacuauuauca

SEQ ID NO: 73495 - RNA, 11 nt, Artificial Sequence
  Description of Artificial Sequence: Synthetic oligonucleotide
aucaguucugc

SEQ ID NO: 73496 - RNA, 13 nt, Artificial Sequence
  Description of Artificial Sequence: Synthetic oligonucleotide
agauuaaaccuac

SEQ ID NO: 73497 - RNA, 13 nt, Artificial Sequence
  Description of Artificial Sequence: Synthetic oligonucleotide
auaaaauccuucu

SEQ ID NO: 73498 - RNA, 12 nt, Artificial Sequence
  Description of Artificial Sequence: Synthetic oligonucleotide
aaugcuguagac

SEQ ID NO: 73499 - RNA, 13 nt, Artificial Sequence
  Description of Artificial Sequence: Synthetic oligonucleotide
uugauaggaauag

SEQ ID NO: 73500 - RNA, 11 nt, Artificial Sequence
  Description of Artificial Sequence: Synthetic oligonucleotide
aauggcccuga

SEQ ID NO: 73501 - RNA, 11 nt, Artificial Sequence
  Description of Artificial Sequence: Synthetic oligonucleotide
uuccucaagca

SEQ ID NO: 73502 - RNA, 10 nt, Artificial Sequence
  Description of Artificial Sequence: Synthetic oligonucleotide
guucagccca

SEQ ID NO: 73503 - RNA, 11 nt, Artificial Sequence
  Description of Artificial Sequence: Synthetic oligonucleotide
gcugcugaacc

SEQ ID NO: 73504 - RNA, 12 nt, Artificial Sequence
  Description of Artificial Sequence: Synthetic oligonucleotide
aaguucucuuca

SEQ ID NO: 73505 - RNA, 11 nt, Artificial Sequence
  Description of Artificial Sequence: Synthetic oligonucleotide
ccagccuagag

SEQ ID NO: 73506 - RNA, 13 nt, Artificial Sequence
  Description of Artificial Sequence: Synthetic oligonucleotide
cucugugaagugu

SEQ ID NO: 73507 - RNA, 14 nt, Artificial Sequence
  Description of Artificial Sequence: Synthetic oligonucleotide
ugagaaaauuucaa

SEQ ID NO: 73508 - RNA, 11 nt, Artificial Sequence
  Description of Artificial Sequence: Synthetic oligonucleotide
aauccuccuga

SEQ ID NO: 73509 - RNA, 12 nt, Artificial Sequence
  Description of Artificial Sequence: Synthetic oligonucleotide
gugacaucauau

SEQ ID NO: 73510 - RNA, 13 nt, Artificial Sequence
  Description of Artificial Sequence: Synthetic oligonucleotide
aaucuucaucaua

SEQ ID NO: 73511 - RNA, 13 nt, Artificial Sequence
  Description of Artificial Sequence: Synthetic oligonucleotide
gacuagcuauuaa

SEQ ID NO: 73512 - RNA, 14 nt, Artificial Sequence
  Description of Artificial Sequence: Synthetic oligonucleotide
ucucuacuaaaaau

SEQ ID NO: 73513 - RNA, 12 nt, Artificial Sequence
  Description of Artificial Sequence: Synthetic oligonucleotide
ucuaucucgccu

SEQ ID NO: 73514 - RNA, 13 nt, Artificial Sequence
  Description of Artificial Sequence: Synthetic oligonucleotide
cuucgguccaguu

SEQ ID NO: 73515 - RNA, 11 nt, Artificial Sequence
  Description of Artificial Sequence: Synthetic oligonucleotide
gauguagccgc

SEQ ID NO: 73516 - RNA, 12 nt, Artificial Sequence
  Description of Artificial Sequence: Synthetic oligonucleotide
ugaggagacuug

SEQ ID NO: 73517 - RNA, 12 nt, Artificial Sequence
  Description of Artificial Sequence: Synthetic oligonucleotide
gaguagugagga

SEQ ID NO: 73518 - RNA, 14 nt, Artificial Sequence
  Description of Artificial Sequence: Synthetic oligonucleotide
cagaugaguacaaa

SEQ ID NO: 73519 - RNA, 13 nt, Artificial Sequence
  Description of Artificial Sequence: Synthetic oligonucleotide
guuguuaaugggc

SEQ ID NO: 73520 - RNA, 13 nt, Artificial Sequence
  Description of Artificial Sequence: Synthetic oligonucleotide
uuuuuaauuuauu

SEQ ID NO: 73521 - RNA, 12 nt, Artificial Sequence
  Description of Artificial Sequence: Synthetic oligonucleotide
uauuuaaauaug

SEQ ID NO: 73522 - RNA, 13 nt, Artificial Sequence
  Description of Artificial Sequence: Synthetic oligonucleotide
uauccuuuguuuc

SEQ ID NO: 73523 - RNA, 14 nt, Artificial Sequence
  Description of Artificial Sequence: Synthetic oligonucleotide
cgucuaaguguuug

SEQ ID NO: 73524 - RNA, 12 nt, Artificial Sequence
  Description of Artificial Sequence: Synthetic oligonucleotide
accugugacaaa

SEQ ID NO: 73525 - RNA, 13 nt, Artificial Sequence
  Description of Artificial Sequence: Synthetic oligonucleotide
ccaggcugaauua

SEQ ID NO: 73526 - RNA, 14 nt, Artificial Sequence
  Description of Artificial Sequence: Synthetic oligonucleotide
gucauucuuacaau

SEQ ID NO: 73527 - RNA, 15 nt, Artificial Sequence
  Description of Artificial Sequence: Synthetic oligonucleotide
ucauucuuacaauug

SEQ ID NO: 73528 - RNA, 12 nt, Artificial Sequence
  Description of Artificial Sequence: Synthetic oligonucleotide
cagagaguguac

SEQ ID NO: 73529 - RNA, 12 nt, Artificial Sequence
  Description of Artificial Sequence: Synthetic oligonucleotide
agaacucagcag

SEQ ID NO: 73530 - RNA, 13 nt, Artificial Sequence
  Description of Artificial Sequence: Synthetic oligonucleotide
uuuauuuucagua

SEQ ID NO: 73531 - RNA, 12 nt, Artificial Sequence
  Description of Artificial Sequence: Synthetic oligonucleotide
ucuuaaauggaa

SEQ ID NO: 73532 - RNA, 13 nt, Artificial Sequence
  Description of Artificial Sequence: Synthetic oligonucleotide
ugccuaaaauugu

SEQ ID NO: 73533 - RNA, 12 nt, Artificial Sequence
  Description of Artificial Sequence: Synthetic oligonucleotide
agacugugagcu

SEQ ID NO: 73534 - RNA, 14 nt, Artificial Sequence
  Description of Artificial Sequence: Synthetic oligonucleotide
ugcuuuuuauuaau

SEQ ID NO: 73535 - RNA, 13 nt, Artificial Sequence
  Description of Artificial Sequence: Synthetic oligonucleotide
cucuucuuacauu

SEQ ID NO: 73536 - RNA, 15 nt, Artificial Sequence
  Description of Artificial Sequence: Synthetic oligonucleotide
cauuuguaaaaaugu

SEQ ID NO: 73537 - RNA, 15 nt, Artificial Sequence
  Description of Artificial Sequence: Synthetic oligonucleotide
aucuuaauucauauu

SEQ ID NO: 73538 - RNA, 13 nt, Artificial Sequence
  Description of Artificial Sequence: Synthetic oligonucleotide
gaacuaaucauga

SEQ ID NO: 73539 - RNA, 12 nt, Artificial Sequence
  Description of Artificial Sequence: Synthetic oligonucleotide
ucugcucuuggg

SEQ ID NO: 73540 - RNA, 13 nt, Artificial Sequence
  Description of Artificial Sequence: Synthetic oligonucleotide
caguagcuuugag

SEQ ID NO: 73541 - RNA, 14 nt, Artificial Sequence
  Description of Artificial Sequence: Synthetic oligonucleotide
cacguaauauuuca

SEQ ID NO: 73542 - RNA, 13 nt, Artificial Sequence
  Description of Artificial Sequence: Synthetic oligonucleotide
uauucucuucacu

SEQ ID NO: 73543 - RNA, 14 nt, Artificial Sequence
  Description of Artificial Sequence: Synthetic oligonucleotide
cuaaugcuaagaaa

SEQ ID NO: 73544 - RNA, 12 nt, Artificial Sequence
  Description of Artificial Sequence: Synthetic oligonucleotide
gcugaaaaucaa

SEQ ID NO: 73545 - RNA, 14 nt, Artificial Sequence
  Description of Artificial Sequence: Synthetic oligonucleotide
aauaugauuacuuu

SEQ ID NO: 73546 - RNA, 14 nt, Artificial Sequence
  Description of Artificial Sequence: Synthetic oligonucleotide
cauuuuguucuaca

SEQ ID NO: 73547 - RNA, 12 nt, Artificial Sequence
  Description of Artificial Sequence: Synthetic oligonucleotide
cccgggacucuc

SEQ ID NO: 73548 - RNA, 14 nt, Artificial Sequence
  Description of Artificial Sequence: Synthetic oligonucleotide
ccuuuaaaguaaag

SEQ ID NO: 73549 - RNA, 13 nt, Artificial Sequence
  Description of Artificial Sequence: Synthetic oligonucleotide
ucuggaagccugg

SEQ ID NO: 73550 - RNA, 14 nt, Artificial Sequence
  Description of Artificial Sequence: Synthetic oligonucleotide
aaaacaaaagagag

SEQ ID NO: 73551 - RNA, 13 nt, Artificial Sequence
  Description of Artificial Sequence: Synthetic oligonucleotide
aucaguuaugccg

SEQ ID NO: 73552 - RNA, 13 nt, Artificial Sequence
  Description of Artificial Sequence: Synthetic oligonucleotide
uaaaagaagucca

SEQ ID NO: 73553 - RNA, 11 nt, Artificial Sequence
  Description of Artificial Sequence: Synthetic oligonucleotide
aggugagguua

SEQ ID NO: 73554 - RNA, 11 nt, Artificial Sequence
  Description of Artificial Sequence: Synthetic oligonucleotide
gggaagaggac

SEQ ID NO: 73555 - RNA, 13 nt, Artificial Sequence
  Description of Artificial Sequence: Synthetic oligonucleotide
aagcaaguauugu

SEQ ID NO: 73556 - RNA, 12 nt, Artificial Sequence
  Description of Artificial Sequence: Synthetic oligonucleotide
auuguagcacuc

SEQ ID NO: 73557 - RNA, 14 nt, Artificial Sequence
  Description of Artificial Sequence: Synthetic oligonucleotide
acaaaaccacaaau

SEQ ID NO: 73558 - RNA, 12 nt, Artificial Sequence
  Description of Artificial Sequence: Synthetic oligonucleotide
uaagcccauaca

SEQ ID NO: 73559 - RNA, 11 nt, Artificial Sequence
  Description of Artificial Sequence: Synthetic oligonucleotide
agcccauacag

SEQ ID NO: 73560 - RNA, 12 nt, Artificial Sequence
  Description of Artificial Sequence: Synthetic oligonucleotide
cagaaaccuucc

SEQ ID NO: 73561 - RNA, 10 nt, Artificial Sequence
  Description of Artificial Sequence: Synthetic oligonucleotide
guauaccuac

SEQ ID NO: 73562 - RNA, 13 nt, Artificial Sequence
  Description of Artificial Sequence: Synthetic oligonucleotide
gccaguuuucgga

SEQ ID NO: 73563 - RNA, 9 nt, Artificial Sequence
  Description of Artificial Sequence: Synthetic oligonucleotide
ggaacaggg

SEQ ID NO: 73564 - RNA, 13 nt, Artificial Sequence
  Description of Artificial Sequence: Synthetic oligonucleotide
uuaacuuuccagu

SEQ ID NO: 73565 - RNA, 14 nt, Artificial Sequence
  Description of Artificial Sequence: Synthetic oligonucleotide
aaaguuugguuuug

SEQ ID NO: 73566 - RNA, 12 nt, Artificial Sequence
  Description of Artificial Sequence: Synthetic oligonucleotide
cuucccacugua

SEQ ID NO: 73567 - RNA, 13 nt, Artificial Sequence
  Description of Artificial Sequence: Synthetic oligonucleotide
ugauaccauauga

SEQ ID NO: 73568 - RNA, 11 nt, Artificial Sequence
  Description of Artificial Sequence: Synthetic oligonucleotide
aacaugggcug

SEQ ID NO: 73569 - RNA, 13 nt, Artificial Sequence
  Description of Artificial Sequence: Synthetic oligonucleotide
caacuuuuucaua

SEQ ID NO: 73570 - RNA, 12 nt, Artificial Sequence
  Description of Artificial Sequence: Synthetic oligonucleotide
caugaggccgga

SEQ ID NO: 73571 - RNA, 11 nt, Artificial Sequence
  Description of Artificial Sequence: Synthetic oligonucleotide
acugcauuugu

SEQ ID NO: 73572 - RNA, 13 nt, Artificial Sequence
  Description of Artificial Sequence: Synthetic oligonucleotide
aauguuuacuacc

SEQ ID NO: 73573 - RNA, 15 nt, Artificial Sequence
  Description of Artificial Sequence: Synthetic oligonucleotide
aauuuuuugaugaaa

SEQ ID NO: 73574 - RNA, 14 nt, Artificial Sequence
  Description of Artificial Sequence: Synthetic oligonucleotide
cagugugugaauuu

SEQ ID NO: 73575 - RNA, 13 nt, Artificial Sequence
  Description of Artificial Sequence: Synthetic oligonucleotide
gagcaauguaugu

SEQ ID NO: 73576 - RNA, 14 nt, Artificial Sequence
  Description of Artificial Sequence: Synthetic oligonucleotide
aaagcacauauaua

SEQ ID NO: 73577 - RNA, 14 nt, Artificial Sequence
  Description of Artificial Sequence: Synthetic oligonucleotide
guaauaguuucucc

SEQ ID NO: 73578 - RNA, 13 nt, Artificial Sequence
  Description of Artificial Sequence: Synthetic oligonucleotide
aguuucuccaaau

SEQ ID NO: 73579 - RNA, 13 nt, Artificial Sequence
  Description of Artificial Sequence: Synthetic oligonucleotide
uacuuccuagaaa

SEQ ID NO: 73580 - RNA, 13 nt, Artificial Sequence
  Description of Artificial Sequence: Synthetic oligonucleotide
uacaccauauaug

SEQ ID NO: 73581 - RNA, 14 nt, Artificial Sequence
  Description of Artificial Sequence: Synthetic oligonucleotide
auauaugaauggag

SEQ ID NO: 73582 - RNA, 13 nt, Artificial Sequence
  Description of Artificial Sequence: Synthetic oligonucleotide
acgagaagaagau

SEQ ID NO: 73583 - RNA, 13 nt, Artificial Sequence
  Description of Artificial Sequence: Synthetic oligonucleotide
ucauuuacaggga

SEQ ID NO: 73584 - RNA, 13 nt, Artificial Sequence
  Description of Artificial Sequence: Synthetic oligonucleotide
cauuuacagggac

SEQ ID NO: 73585 - RNA, 10 nt, Artificial Sequence
  Description of Artificial Sequence: Synthetic oligonucleotide
agggaccuga

SEQ ID NO: 73586 - RNA, 14 nt, Artificial Sequence
  Description of Artificial Sequence: Synthetic oligonucleotide
uguuugacugcauc

SEQ ID NO: 73587 - RNA, 13 nt, Artificial Sequence
  Description of Artificial Sequence: Synthetic oligonucleotide
uuugacugcaucg

SEQ ID NO: 73588 - RNA, 12 nt, Artificial Sequence
  Description of Artificial Sequence: Synthetic oligonucleotide
gaguucacaggg

SEQ ID NO: 73589 - RNA, 13 nt, Artificial Sequence
  Description of Artificial Sequence: Synthetic oligonucleotide
ggcaccucugucc

SEQ ID NO: 73590 - RNA, 15 nt, Artificial Sequence
  Description of Artificial Sequence: Synthetic oligonucleotide
gguuugucuuuuuaa

SEQ ID NO: 73591 - RNA, 14 nt, Artificial Sequence
  Description of Artificial Sequence: Synthetic oligonucleotide
uuugucuuuuuaag

SEQ ID NO: 73592 - RNA, 13 nt, Artificial Sequence
  Description of Artificial Sequence: Synthetic oligonucleotide
ccuaaagguuguc

SEQ ID NO: 73593 - RNA, 12 nt, Artificial Sequence
  Description of Artificial Sequence: Synthetic oligonucleotide
aagguugucgac

SEQ ID NO: 73594 - RNA, 13 nt, Artificial Sequence
  Description of Artificial Sequence: Synthetic oligonucleotide
accuggcaauugu

SEQ ID NO: 73595 - RNA, 12 nt, Artificial Sequence
  Description of Artificial Sequence: Synthetic oligonucleotide
aguggugcgagg

SEQ ID NO: 73596 - RNA, 13 nt, Artificial Sequence
  Description of Artificial Sequence: Synthetic oligonucleotide
agagacaugaaau

SEQ ID NO: 73597 - RNA, 13 nt, Artificial Sequence
  Description of Artificial Sequence: Synthetic oligonucleotide
auauauuucucca

SEQ ID NO: 73598 - RNA, 10 nt, Artificial Sequence
  Description of Artificial Sequence: Synthetic oligonucleotide
caugaaggcu

SEQ ID NO: 73599 - RNA, 11 nt, Artificial Sequence
  Description of Artificial Sequence: Synthetic oligonucleotide
gcuggaguggu

SEQ ID NO: 73600 - RNA, 11 nt, Artificial Sequence
  Description of Artificial Sequence: Synthetic oligonucleotide
aggaagagagg

SEQ ID NO: 73601 - RNA, 12 nt, Artificial Sequence
  Description of Artificial Sequence: Synthetic oligonucleotide
cuugcaucgggc

SEQ ID NO: 73602 - RNA, 13 nt, Artificial Sequence
  Description of Artificial Sequence: Synthetic oligonucleotide
auauccuacugug

SEQ ID NO: 73603 - RNA, 13 nt, Artificial Sequence
  Description of Artificial Sequence: Synthetic oligonucleotide
uccuacuguguaa

SEQ ID NO: 73604 - RNA, 12 nt, Artificial Sequence
  Description of Artificial Sequence: Synthetic oligonucleotide
ccuuguagugua

SEQ ID NO: 73605 - RNA, 13 nt, Artificial Sequence
  Description of Artificial Sequence: Synthetic oligonucleotide
ucuuuguugauug

SEQ ID NO: 73606 - RNA, 14 nt, Artificial Sequence
  Description of Artificial Sequence: Synthetic oligonucleotide
uuuguugauugaaa

SEQ ID NO: 73607 - RNA, 15 nt, Artificial Sequence
  Description of Artificial Sequence: Synthetic oligonucleotide
uucuuuuucuuccau

SEQ ID NO: 73608 - RNA, 13 nt, Artificial Sequence
  Description of Artificial Sequence: Synthetic oligonucleotide
aaucuuccuucua

SEQ ID NO: 73609 - RNA, 13 nt, Artificial Sequence
  Description of Artificial Sequence: Synthetic oligonucleotide
uugaaugcuucau

SEQ ID NO: 73610 - RNA, 13 nt, Artificial Sequence
  Description of Artificial Sequence: Synthetic oligonucleotide
ugaaugcuucaug

SEQ ID NO: 73611 - RNA, 13 nt, Artificial Sequence
  Description of Artificial Sequence: Synthetic oligonucleotide
aauucuacuuuga

SEQ ID NO: 73612 - RNA, 13 nt, Artificial Sequence
  Description of Artificial Sequence: Synthetic oligonucleotide
agcaacuacagac

SEQ ID NO: 73613 - RNA, 13 nt, Artificial Sequence
  Description of Artificial Sequence: Synthetic oligonucleotide
gaccaaggucaac

SEQ ID NO: 73614 - RNA, 13 nt, Artificial Sequence
  Description of Artificial Sequence: Synthetic oligonucleotide
cgacuaucucgac

SEQ ID NO: 73615 - RNA, 13 nt, Artificial Sequence
  Description of Artificial Sequence: Synthetic oligonucleotide
aaccuucccaaac

SEQ ID NO: 73616 - RNA, 14 nt, Artificial Sequence
  Description of Artificial Sequence: Synthetic oligonucleotide
ccaagcuuagaacu

SEQ ID NO: 73617 - RNA, 15 nt, Artificial Sequence
  Description of Artificial Sequence: Synthetic oligonucleotide
agcuuagaacuuuaa

SEQ ID NO: 73618 - RNA, 11 nt, Artificial Sequence
  Description of Artificial Sequence: Synthetic oligonucleotide
aagaccaccac

SEQ ID NO: 73619 - RNA, 14 nt, Artificial Sequence
  Description of Artificial Sequence: Synthetic oligonucleotide
gcgagaaauaaagu

SEQ ID NO: 73620 - RNA, 14 nt, Artificial Sequence
  Description of Artificial Sequence: Synthetic oligonucleotide
cgagaaauaaaguu

SEQ ID NO: 73621 - RNA, 12 nt, Artificial Sequence
  Description of Artificial Sequence: Synthetic oligonucleotide
aggaaaugaucc

SEQ ID NO: 73622 - RNA, 13 nt, Artificial Sequence
  Description of Artificial Sequence: Synthetic oligonucleotide
gaagaaaugaaac

SEQ ID NO: 73623 - RNA, 13 nt, Artificial Sequence
  Description of Artificial Sequence: Synthetic oligonucleotide
guuuccauccucc

SEQ ID NO: 73624 - RNA, 15 nt, Artificial Sequence
  Description of Artificial Sequence: Synthetic oligonucleotide
acugaaaaucuuuga

SEQ ID NO: 73625 - RNA, 11 nt, Artificial Sequence
  Description of Artificial Sequence: Synthetic oligonucleotide
ugccguucagg

SEQ ID NO: 73626 - RNA, 13 nt, Artificial Sequence
  Description of Artificial Sequence: Synthetic oligonucleotide
caggguccagaag

SEQ ID NO: 73627 - RNA, 13 nt, Artificial Sequence
  Description of Artificial Sequence: Synthetic oligonucleotide
ucaagacugcuug

SEQ ID NO: 73628 - RNA, 13 nt, Artificial Sequence
  Description of Artificial Sequence: Synthetic oligonucleotide
uccaugucuuugg

SEQ ID NO: 73629 - RNA, 11 nt, Artificial Sequence
  Description of Artificial Sequence: Synthetic oligonucleotide
gccugaaacac

SEQ ID NO: 73630 - RNA, 12 nt, Artificial Sequence
  Description of Artificial Sequence: Synthetic oligonucleotide
ucucuguaccuc

SEQ ID NO: 73631 - RNA, 12 nt, Artificial Sequence
  Description of Artificial Sequence: Synthetic oligonucleotide
agcaagacaaga

SEQ ID NO: 73632 - RNA, 13 nt, Artificial Sequence
  Description of Artificial Sequence: Synthetic oligonucleotide
gcaagacaagaaa

SEQ ID NO: 73633 - RNA, 12 nt, Artificial Sequence
  Description of Artificial Sequence: Synthetic oligonucleotide
uguacaagaucc

SEQ ID NO: 73634 - RNA, 12 nt, Artificial Sequence
  Description of Artificial Sequence: Synthetic oligonucleotide
cguacuugcaga

SEQ ID NO: 73635 - RNA, 13 nt, Artificial Sequence
  Description of Artificial Sequence: Synthetic oligonucleotide
cgaucgauacaga

SEQ ID NO: 73636 - RNA, 13 nt, Artificial Sequence
  Description of Artificial Sequence: Synthetic oligonucleotide
uauaaaaauaaau

SEQ ID NO: 73637 - RNA, 13 nt, Artificial Sequence
  Description of Artificial Sequence: Synthetic oligonucleotide
uaaaaauaaauau

SEQ ID NO: 73638 - RNA, 13 nt, Artificial Sequence
  Description of Artificial Sequence: Synthetic oligonucleotide
uuugacugcugug

SEQ ID NO: 73639 - RNA, 13 nt, Artificial Sequence
  Description of Artificial Sequence: Synthetic oligonucleotide
ggagaugagagac

SEQ ID NO: 73640 - RNA, 10 nt, Artificial Sequence
  Description of Artificial Sequence: Synthetic oligonucleotide
ucccacuugg

SEQ ID NO: 73641 - RNA, 10 nt, Artificial Sequence
  Description of Artificial Sequence: Synthetic oligonucleotide
guucacggcc

SEQ ID NO: 73642 - RNA, 12 nt, Artificial Sequence
  Description of Artificial Sequence: Synthetic oligonucleotide
accaucacacca

SEQ ID NO: 73643 - RNA, 10 nt, Artificial Sequence
  Description of Artificial Sequence: Synthetic oligonucleotide
cugcggguuu

SEQ ID NO: 73644 - RNA, 9 nt, Artificial Sequence
  Description of Artificial Sequence: Synthetic oligonucleotide
uccaguuug

SEQ ID NO: 73645 - RNA, 12 nt, Artificial Sequence
  Description of Artificial Sequence: Synthetic oligonucleotide
uuaaggacuucu

SEQ ID NO: 73646 - RNA, 12 nt, Artificial Sequence
  Description of Artificial Sequence: Synthetic oligonucleotide
agugggacagag

SEQ ID NO: 73647 - RNA, 13 nt, Artificial Sequence
  Description of Artificial Sequence: Synthetic oligonucleotide
auuuguuauugug

SEQ ID NO: 73648 - RNA, 12 nt, Artificial Sequence
  Description of Artificial Sequence: Synthetic oligonucleotide
ucaaaugcauuu

SEQ ID NO: 73649 - RNA, 9 nt, Artificial Sequence
  Description of Artificial Sequence: Synthetic oligonucleotide
aggaaagcc

SEQ ID NO: 73650 - RNA, 10 nt, Artificial Sequence
  Description of Artificial Sequence: Synthetic oligonucleotide
ggaaagcccu

SEQ ID NO: 73651 - RNA, 11 nt, Artificial Sequence
  Description of Artificial Sequence: Synthetic oligonucleotide
ccagcauggcc

SEQ ID NO: 73652 - RNA, 10 nt, Artificial Sequence
  Description of Artificial Sequence: Synthetic oligonucleotide
uucucccuga

SEQ ID NO: 73653 - RNA, 11 nt, Artificial Sequence
  Description of Artificial Sequence: Synthetic oligonucleotide
aagaagcccuu

SEQ ID NO: 73654 - RNA, 11 nt, Artificial Sequence
  Description of Artificial Sequence: Synthetic oligonucleotide
gaagcccuuca

SEQ ID NO: 73655 - RNA, 10 nt, Artificial Sequence
  Description of Artificial Sequence: Synthetic oligonucleotide
cccuucagcg

SEQ ID NO: 73656 - RNA, 10 nt, Artificial Sequence
  Description of Artificial Sequence: Synthetic oligonucleotide
cuucagcggc

SEQ ID NO: 73657 - RNA, 11 nt, Artificial Sequence
  Description of Artificial Sequence: Synthetic oligonucleotide
cagcggccagu

SEQ ID NO: 73658 - RNA, 11 nt, Artificial Sequence
  Description of Artificial Sequence: Synthetic oligonucleotide
gaaaagcuccg

SEQ ID NO: 73659 - RNA, 10 nt, Artificial Sequence
  Description of Artificial Sequence: Synthetic oligonucleotide
aaagcuccgg

SEQ ID NO: 73660 - RNA, 12 nt, Artificial Sequence
  Description of Artificial Sequence: Synthetic oligonucleotide
gucaacagucug

SEQ ID NO: 73661 - RNA, 12 nt, Artificial Sequence
  Description of Artificial Sequence: Synthetic oligonucleotide
agaguucaaaag

SEQ ID NO: 73662 - RNA, 12 nt, Artificial Sequence
  Description of Artificial Sequence: Synthetic oligonucleotide
gaguucaaaagc

SEQ ID NO: 73663 - RNA, 11 nt, Artificial Sequence
  Description of Artificial Sequence: Synthetic oligonucleotide
ucaaaagcccu

SEQ ID NO: 73664 - RNA, 11 nt, Artificial Sequence
  Description of Artificial Sequence: Synthetic oligonucleotide
caaaagcccuu

SEQ ID NO: 73665 - RNA, 11 nt, Artificial Sequence
  Description of Artificial Sequence: Synthetic oligonucleotide
aaagcccuuca

SEQ ID NO: 73666 - RNA, 11 nt, Artificial Sequence
  Description of Artificial Sequence: Synthetic oligonucleotide
aagcccuucag

SEQ ID NO: 73667 - RNA, 12 nt, Artificial Sequence
  Description of Artificial Sequence: Synthetic oligonucleotide
ugaagccgcucg

SEQ ID NO: 73668 - RNA, 11 nt, Artificial Sequence
  Description of Artificial Sequence: Synthetic oligonucleotide
acgccagucaa

SEQ ID NO: 73669 - RNA, 12 nt, Artificial Sequence
  Description of Artificial Sequence: Synthetic oligonucleotide
ucuuggugcgug

SEQ ID NO: 73670 - RNA, 13 nt, Artificial Sequence
  Description of Artificial Sequence: Synthetic oligonucleotide
uuggauucaucag

SEQ ID NO: 73671 - RNA, 12 nt, Artificial Sequence
  Description of Artificial Sequence: Synthetic oligonucleotide
ggaauaccuaag

SEQ ID NO: 73672 - RNA, 11 nt, Artificial Sequence
  Description of Artificial Sequence: Synthetic oligonucleotide
uuugaggcuca

SEQ ID NO: 73673 - RNA, 10 nt, Artificial Sequence
  Description of Artificial Sequence: Synthetic oligonucleotide
cuacaauugg

SEQ ID NO: 73674 - RNA, 11 nt, Artificial Sequence
  Description of Artificial Sequence: Synthetic oligonucleotide
aguuaggagcc

SEQ ID NO: 73675 - RNA, 12 nt, Artificial Sequence
  Description of Artificial Sequence: Synthetic oligonucleotide
gucaauauccac

SEQ ID NO: 73676 - RNA, 12 nt, Artificial Sequence
  Description of Artificial Sequence: Synthetic oligonucleotide
uguucagucaca

SEQ ID NO: 73677 - RNA, 11 nt, Artificial Sequence
  Description of Artificial Sequence: Synthetic oligonucleotide
cacacacauac

SEQ ID NO: 73678 - RNA, 11 nt, Artificial Sequence
  Description of Artificial Sequence: Synthetic oligonucleotide
uccuuuugcuu

SEQ ID NO: 73679 - RNA, 15 nt, Artificial Sequence
  Description of Artificial Sequence: Synthetic oligonucleotide
uuuaaaguaauuuuu

SEQ ID NO: 73680 - RNA, 12 nt, Artificial Sequence
  Description of Artificial Sequence: Synthetic oligonucleotide
aacagucaaugg

SEQ ID NO: 73681 - RNA, 12 nt, Artificial Sequence
  Description of Artificial Sequence: Synthetic oligonucleotide
cgacaaaccaau

SEQ ID NO: 73682 - RNA, 11 nt, Artificial Sequence
  Description of Artificial Sequence: Synthetic oligonucleotide
cugcuaccacu

SEQ ID NO: 73683 - RNA, 12 nt, Artificial Sequence
  Description of Artificial Sequence: Synthetic oligonucleotide
caagcggucuua

SEQ ID NO: 73684 - RNA, 12 nt, Artificial Sequence
  Description of Artificial Sequence: Synthetic oligonucleotide
gucuuaccggcu

SEQ ID NO: 73685 - RNA, 10 nt, Artificial Sequence
  Description of Artificial Sequence: Synthetic oligonucleotide
auggguuacc

SEQ ID NO: 73686 - RNA, 10 nt, Artificial Sequence
  Description of Artificial Sequence: Synthetic oligonucleotide
uuaccugcga

SEQ ID NO: 73687 - RNA, 11 nt, Artificial Sequence
  Description of Artificial Sequence: Synthetic oligonucleotide
aucuugcugag

SEQ ID NO: 73688 - RNA, 12 nt, Artificial Sequence
  Description of Artificial Sequence: Synthetic oligonucleotide
gcauaaaacagu

SEQ ID NO: 73689 - RNA, 11 nt, Artificial Sequence
  Description of Artificial Sequence: Synthetic oligonucleotide
uccuuuauccu

SEQ ID NO: 73690 - RNA, 11 nt, Artificial Sequence
  Description of Artificial Sequence: Synthetic oligonucleotide
aacgcaaguug

SEQ ID NO: 73691 - RNA, 12 nt, Artificial Sequence
  Description of Artificial Sequence: Synthetic oligonucleotide
aacugaaaccau

SEQ ID NO: 73692 - RNA, 13 nt, Artificial Sequence
  Description of Artificial Sequence: Synthetic oligonucleotide
cuuuguuaaauau

SEQ ID NO: 73693 - RNA, 13 nt, Artificial Sequence
  Description of Artificial Sequence: Synthetic oligonucleotide
uauauuaaaaguu

SEQ ID NO: 73694 - RNA, 12 nt, Artificial Sequence
  Description of Artificial Sequence: Synthetic oligonucleotide
uuuugacuuaac

SEQ ID NO: 73695 - RNA, 12 nt, Artificial Sequence
  Description of Artificial Sequence: Synthetic oligonucleotide
caaacucagcac

SEQ ID NO: 73696 - RNA, 10 nt, Artificial Sequence
  Description of Artificial Sequence: Synthetic oligonucleotide
gcugaccuca

SEQ ID NO: 73697 - RNA, 13 nt, Artificial Sequence
  Description of Artificial Sequence: Synthetic oligonucleotide
uuauucagaucgc

SEQ ID NO: 73698 - RNA, 12 nt, Artificial Sequence
  Description of Artificial Sequence: Synthetic oligonucleotide
ggguucugggau

SEQ ID NO: 73699 - RNA, 14 nt, Artificial Sequence
  Description of Artificial Sequence: Synthetic oligonucleotide
uauuggaaauuaug

SEQ ID NO: 73700 - RNA, 12 nt, Artificial Sequence
  Description of Artificial Sequence: Synthetic oligonucleotide
uggaagcacuag

SEQ ID NO: 73701 - RNA, 12 nt, Artificial Sequence
  Description of Artificial Sequence: Synthetic oligonucleotide
uuuuuaugugga

SEQ ID NO: 73702 - RNA, 11 nt, Artificial Sequence
  Description of Artificial Sequence: Synthetic oligonucleotide
gaauugguaga

SEQ ID NO: 73703 - RNA, 12 nt, Artificial Sequence
  Description of Artificial Sequence: Synthetic oligonucleotide
uagacuuggaga

SEQ ID NO: 73704 - RNA, 12 nt, Artificial Sequence
  Description of Artificial Sequence: Synthetic oligonucleotide
uacaguauucca

SEQ ID NO: 73705 - RNA, 14 nt, Artificial Sequence
  Description of Artificial Sequence: Synthetic oligonucleotide
cacugaugaauuaa

SEQ ID NO: 73706 - RNA, 11 nt, Artificial Sequence
  Description of Artificial Sequence: Synthetic oligonucleotide
cacaucaucac

SEQ ID NO: 73707 - RNA, 12 nt, Artificial Sequence
  Description of Artificial Sequence: Synthetic oligonucleotide
ucaccaaacaga

SEQ ID NO: 73708 - RNA, 11 nt, Artificial Sequence
  Description of Artificial Sequence: Synthetic oligonucleotide
gaacaugaugg

SEQ ID NO: 73709 - RNA, 11 nt, Artificial Sequence
  Description of Artificial Sequence: Synthetic oligonucleotide
auguagacugc

SEQ ID NO: 73710 - RNA, 12 nt, Artificial Sequence
  Description of Artificial Sequence: Synthetic oligonucleotide
gaucuauuuaug

SEQ ID NO: 73711 - RNA, 11 nt, Artificial Sequence
  Description of Artificial Sequence: Synthetic oligonucleotide
cacuauuauca

SEQ ID NO: 73712 - RNA, 10 nt, Artificial Sequence
  Description of Artificial Sequence: Synthetic oligonucleotide
ucaguucugc

SEQ ID NO: 73713 - RNA, 12 nt, Artificial Sequence
  Description of Artificial Sequence: Synthetic oligonucleotide
gauuaaaccuac

SEQ ID NO: 73714 - RNA, 12 nt, Artificial Sequence
  Description of Artificial Sequence: Synthetic oligonucleotide
uaaaauccuucu

SEQ ID NO: 73715 - RNA, 11 nt, Artificial Sequence
  Description of Artificial Sequence: Synthetic oligonucleotide
augcuguagac

SEQ ID NO: 73716 - RNA, 12 nt, Artificial Sequence
  Description of Artificial Sequence: Synthetic oligonucleotide
ugauaggaauag

SEQ ID NO: 73717 - RNA, 10 nt, Artificial Sequence
  Description of Artificial Sequence: Synthetic oligonucleotide
auggcccuga

SEQ ID NO: 73718 - RNA, 10 nt, Artificial Sequence
  Description of Artificial Sequence: Synthetic oligonucleotide
uccucaagca

SEQ ID NO: 73719 - RNA, 9 nt, Artificial Sequence
  Description of Artificial Sequence: Synthetic oligonucleotide
uucagccca

SEQ ID NO: 73720 - RNA, 10 nt, Artificial Sequence
  Description of Artificial Sequence: Synthetic oligonucleotide
cugcugaacc

SEQ ID NO: 73721 - RNA, 11 nt, Artificial Sequence
  Description of Artificial Sequence: Synthetic oligonucleotide
aguucucuuca

SEQ ID NO: 73722 - RNA, 10 nt, Artificial Sequence
  Description of Artificial Sequence: Synthetic oligonucleotide
cagccuagag

SEQ ID NO: 73723 - RNA, 12 nt, Artificial Sequence
  Description of Artificial Sequence: Synthetic oligonucleotide
ucugugaagugu

SEQ ID NO: 73724 - RNA, 13 nt, Artificial Sequence
  Description of Artificial Sequence: Synthetic oligonucleotide
gagaaaauuucaa

SEQ ID NO: 73725 - RNA, 10 nt, Artificial Sequence
  Description of Artificial Sequence: Synthetic oligonucleotide
auccuccuga

SEQ ID NO: 73726 - RNA, 11 nt, Artificial Sequence
  Description of Artificial Sequence: Synthetic oligonucleotide
ugacaucauau

SEQ ID NO: 73727 - RNA, 12 nt, Artificial Sequence
  Description of Artificial Sequence: Synthetic oligonucleotide
aucuucaucaua

SEQ ID NO: 73728 - RNA, 12 nt, Artificial Sequence
  Description of Artificial Sequence: Synthetic oligonucleotide
acuagcuauuaa

SEQ ID NO: 73729 - RNA, 13 nt, Artificial Sequence
  Description of Artificial Sequence: Synthetic oligonucleotide
cucuacuaaaaau

SEQ ID NO: 73730 - RNA, 11 nt, Artificial Sequence
  Description of Artificial Sequence: Synthetic oligonucleotide
cuaucucgccu

SEQ ID NO: 73731 - RNA, 12 nt, Artificial Sequence
  Description of Artificial Sequence: Synthetic oligonucleotide
uucgguccaguu

SEQ ID NO: 73732 - RNA, 10 nt, Artificial Sequence
  Description of Artificial Sequence: Synthetic oligonucleotide
auguagccgc

SEQ ID NO: 73733 - RNA, 11 nt, Artificial Sequence
  Description of Artificial Sequence: Synthetic oligonucleotide
gaggagacuug

SEQ ID NO: 73734 - RNA, 11 nt, Artificial Sequence
  Description of Artificial Sequence: Synthetic oligonucleotide
aguagugagga

SEQ ID NO: 73735 - RNA, 13 nt, Artificial Sequence
  Description of Artificial Sequence: Synthetic oligonucleotide
agaugaguacaaa

SEQ ID NO: 73736 - RNA, 12 nt, Artificial Sequence
  Description of Artificial Sequence: Synthetic oligonucleotide
uuguuaaugggc

SEQ ID NO: 73737 - RNA, 12 nt, Artificial Sequence
  Description of Artificial Sequence: Synthetic oligonucleotide
uuuuaauuuauu

SEQ ID NO: 73738 - RNA, 11 nt, Artificial Sequence
  Description of Artificial Sequence: Synthetic oligonucleotide
auuuaaauaug

SEQ ID NO: 73739 - RNA, 12 nt, Artificial Sequence
  Description of Artificial Sequence: Synthetic oligonucleotide
auccuuuguuuc

SEQ ID NO: 73740 - RNA, 13 nt, Artificial Sequence
  Description of Artificial Sequence: Synthetic oligonucleotide
gucuaaguguuug

SEQ ID NO: 73741 - RNA, 11 nt, Artificial Sequence
  Description of Artificial Sequence: Synthetic oligonucleotide
ccugugacaaa

SEQ ID NO: 73742 - RNA, 12 nt, Artificial Sequence
  Description of Artificial Sequence: Synthetic oligonucleotide
caggcugaauua

SEQ ID NO: 73743 - RNA, 13 nt, Artificial Sequence
  Description of Artificial Sequence: Synthetic oligonucleotide
ucauucuuacaau

SEQ ID NO: 73744 - RNA, 14 nt, Artificial Sequence
  Description of Artificial Sequence: Synthetic oligonucleotide
cauucuuacaauug

SEQ ID NO: 73745 - RNA, 11 nt, Artificial Sequence
  Description of Artificial Sequence: Synthetic oligonucleotide
agagaguguac

SEQ ID NO: 73746 - RNA, 11 nt, Artificial Sequence
  Description of Artificial Sequence: Synthetic oligonucleotide
gaacucagcag

SEQ ID NO: 73747 - RNA, 12 nt, Artificial Sequence
  Description of Artificial Sequence: Synthetic oligonucleotide
uuauuuucagua

SEQ ID NO: 73748 - RNA, 11 nt, Artificial Sequence
  Description of Artificial Sequence: Synthetic oligonucleotide
cuuaaauggaa

SEQ ID NO: 73749 - RNA, 12 nt, Artificial Sequence
  Description of Artificial Sequence: Synthetic oligonucleotide
gccuaaaauugu

SEQ ID NO: 73750 - RNA, 12 nt, Artificial Sequence
  Description of Artificial Sequence: Synthetic oligonucleotide
acuaacaucugg

SEQ ID NO: 73751 - RNA, 11 nt, Artificial Sequence
  Description of Artificial Sequence: Synthetic oligonucleotide
gacugugagcu

SEQ ID NO: 73752 - RNA, 13 nt, Artificial Sequence
  Description of Artificial Sequence: Synthetic oligonucleotide
gcuuuuuauuaau

SEQ ID NO: 73753 - RNA, 12 nt, Artificial Sequence
  Description of Artificial Sequence: Synthetic oligonucleotide
ucuucuuacauu

SEQ ID NO: 73754 - RNA, 14 nt, Artificial Sequence
  Description of Artificial Sequence: Synthetic oligonucleotide
auuuguaaaaaugu

SEQ ID NO: 73755 - RNA, 14 nt, Artificial Sequence
  Description of Artificial Sequence: Synthetic oligonucleotide
ucuuaauucauauu

SEQ ID NO: 73756 - RNA, 12 nt, Artificial Sequence
  Description of Artificial Sequence: Synthetic oligonucleotide
aacuaaucauga

SEQ ID NO: 73757 - RNA, 11 nt, Artificial Sequence
  Description of Artificial Sequence: Synthetic oligonucleotide
cugcucuuggg

SEQ ID NO: 73758 - RNA, 12 nt, Artificial Sequence
  Description of Artificial Sequence: Synthetic oligonucleotide
aguagcuuugag

SEQ ID NO: 73759 - RNA, 13 nt, Artificial Sequence
  Description of Artificial Sequence: Synthetic oligonucleotide
acguaauauuuca

SEQ ID NO: 73760 - RNA, 12 nt, Artificial Sequence
  Description of Artificial Sequence: Synthetic oligonucleotide
auucucuucacu

SEQ ID NO: 73761 - RNA, 13 nt, Artificial Sequence
  Description of Artificial Sequence: Synthetic oligonucleotide
uaaugcuaagaaa

SEQ ID NO: 73762 - RNA, 11 nt, Artificial Sequence
  Description of Artificial Sequence: Synthetic oligonucleotide
cugaaaaucaa

SEQ ID NO: 73763 - RNA, 13 nt, Artificial Sequence
  Description of Artificial Sequence: Synthetic oligonucleotide
auaugauuacuuu

SEQ ID NO: 73764 - RNA, 13 nt, Artificial Sequence
  Description of Artificial Sequence: Synthetic oligonucleotide
auuuuguucuaca

SEQ ID NO: 73765 - RNA, 11 nt, Artificial Sequence
  Description of Artificial Sequence: Synthetic oligonucleotide
ccgggacucuc

SEQ ID NO: 73766 - RNA, 13 nt, Artificial Sequence
  Description of Artificial Sequence: Synthetic oligonucleotide
cuuuaaaguaaag

SEQ ID NO: 73767 - RNA, 12 nt, Artificial Sequence
  Description of Artificial Sequence: Synthetic oligonucleotide
cuggaagccugg

SEQ ID NO: 73768 - RNA, 13 nt, Artificial Sequence
  Description of Artificial Sequence: Synthetic oligonucleotide
aaacaaaagagag

SEQ ID NO: 73769 - RNA, 12 nt, Artificial Sequence
  Description of Artificial Sequence: Synthetic oligonucleotide
ucaguuaugccg

SEQ ID NO: 73770 - RNA, 12 nt, Artificial Sequence
  Description of Artificial Sequence: Synthetic oligonucleotide
aaaagaagucca

SEQ ID NO: 73771 - RNA, 10 nt, Artificial Sequence
  Description of Artificial Sequence: Synthetic oligonucleotide
ggugagguua

SEQ ID NO: 73772 - RNA, 10 nt, Artificial Sequence
  Description of Artificial Sequence: Synthetic oligonucleotide
ggaagaggac

SEQ ID NO: 73773 - RNA, 12 nt, Artificial Sequence
  Description of Artificial Sequence: Synthetic oligonucleotide
agcaaguauugu

SEQ ID NO: 73774 - RNA, 11 nt, Artificial Sequence
  Description of Artificial Sequence: Synthetic oligonucleotide
uuguagcacuc

SEQ ID NO: 73775 - RNA, 13 nt, Artificial Sequence
  Description of Artificial Sequence: Synthetic oligonucleotide
caaaaccacaaau

SEQ ID NO: 73776 - RNA, 11 nt, Artificial Sequence
  Description of Artificial Sequence: Synthetic oligonucleotide
aagcccauaca

SEQ ID NO: 73777 - RNA, 10 nt, Artificial Sequence
  Description of Artificial Sequence: Synthetic oligonucleotide
gcccauacag

SEQ ID NO: 73778 - RNA, 11 nt, Artificial Sequence
  Description of Artificial Sequence: Synthetic oligonucleotide
agaaaccuucc

SEQ ID NO: 73779 - RNA, 9 nt, Artificial Sequence
  Description of Artificial Sequence: Synthetic oligonucleotide
uauaccuac

SEQ ID NO: 73780 - RNA, 12 nt, Artificial Sequence
  Description of Artificial Sequence: Synthetic oligonucleotide
ccaguuuucgga

SEQ ID NO: 73781 - RNA, 8 nt, Artificial Sequence
  Description of Artificial Sequence: Synthetic oligonucleotide
gaacaggg

SEQ ID NO: 73782 - RNA, 12 nt, Artificial Sequence
  Description of Artificial Sequence: Synthetic oligonucleotide
uaacuuuccagu

SEQ ID NO: 73783 - RNA, 13 nt, Artificial Sequence
  Description of Artificial Sequence: Synthetic oligonucleotide
aaguuugguuuug

SEQ ID NO: 73784 - RNA, 11 nt, Artificial Sequence
  Description of Artificial Sequence: Synthetic oligonucleotide
uucccacugua

SEQ ID NO: 73785 - RNA, 12 nt, Artificial Sequence
  Description of Artificial Sequence: Synthetic oligonucleotide
gauaccauauga

SEQ ID NO: 73786 - RNA, 10 nt, Artificial Sequence
  Description of Artificial Sequence: Synthetic oligonucleotide
acaugggcug

SEQ ID NO: 73787 - RNA, 12 nt, Artificial Sequence
  Description of Artificial Sequence: Synthetic oligonucleotide
aacuuuuucaua

SEQ ID NO: 73788 - RNA, 11 nt, Artificial Sequence
  Description of Artificial Sequence: Synthetic oligonucleotide
augaggccgga

SEQ ID NO: 73789 - RNA, 10 nt, Artificial Sequence
  Description of Artificial Sequence: Synthetic oligonucleotide
cugcauuugu

SEQ ID NO: 73790 - RNA, 12 nt, Artificial Sequence
  Description of Artificial Sequence: Synthetic oligonucleotide
auguuuacuacc

SEQ ID NO: 73791 - RNA, 14 nt, Artificial Sequence
  Description of Artificial Sequence: Synthetic oligonucleotide
auuuuuugaugaaa

SEQ ID NO: 73792 - RNA, 13 nt, Artificial Sequence
  Description of Artificial Sequence: Synthetic oligonucleotide
agugugugaauuu

SEQ ID NO: 73793 - RNA, 12 nt, Artificial Sequence
  Description of Artificial Sequence: Synthetic oligonucleotide
agcaauguaugu

SEQ ID NO: 73794 - RNA, 13 nt, Artificial Sequence
  Description of Artificial Sequence: Synthetic oligonucleotide
aagcacauauaua

SEQ ID NO: 73795 - RNA, 13 nt, Artificial Sequence
  Description of Artificial Sequence: Synthetic oligonucleotide
uaauaguuucucc

SEQ ID NO: 73796 - RNA, 12 nt, Artificial Sequence
  Description of Artificial Sequence: Synthetic oligonucleotide
guuucuccaaau

SEQ ID NO: 73797 - RNA, 12 nt, Artificial Sequence
  Description of Artificial Sequence: Synthetic oligonucleotide
acuuccuagaaa

SEQ ID NO: 73798 - RNA, 12 nt, Artificial Sequence
  Description of Artificial Sequence: Synthetic oligonucleotide
acaccauauaug

SEQ ID NO: 73799 - RNA, 13 nt, Artificial Sequence
  Description of Artificial Sequence: Synthetic oligonucleotide
uauaugaauggag

SEQ ID NO: 73800 - RNA, 12 nt, Artificial Sequence
  Description of Artificial Sequence: Synthetic oligonucleotide
cauuuacaggga

SEQ ID NO: 73801 - RNA, 12 nt, Artificial Sequence
  Description of Artificial Sequence: Synthetic oligonucleotide
auuuacagggac

SEQ ID NO: 73802 - RNA, 9 nt, Artificial Sequence
  Description of Artificial Sequence: Synthetic oligonucleotide
gggaccuga

SEQ ID NO: 73803 - RNA, 13 nt, Artificial Sequence
  Description of Artificial Sequence: Synthetic oligonucleotide
guuugacugcauc

SEQ ID NO: 73804 - RNA, 12 nt, Artificial Sequence
  Description of Artificial Sequence: Synthetic oligonucleotide
uugacugcaucg

SEQ ID NO: 73805 - RNA, 11 nt, Artificial Sequence
  Description of Artificial Sequence: Synthetic oligonucleotide
aguucacaggg

SEQ ID NO: 73806 - RNA, 12 nt, Artificial Sequence
  Description of Artificial Sequence: Synthetic oligonucleotide
gcaccucugucc

SEQ ID NO: 73807 - RNA, 14 nt, Artificial Sequence
  Description of Artificial Sequence: Synthetic oligonucleotide
guuugucuuuuuaa

SEQ ID NO: 73808 - RNA, 13 nt, Artificial Sequence
  Description of Artificial Sequence: Synthetic oligonucleotide
uugucuuuuuaag

SEQ ID NO: 73809 - RNA, 12 nt, Artificial Sequence
  Description of Artificial Sequence: Synthetic oligonucleotide
cuaaagguuguc

SEQ ID NO: 73810 - RNA, 11 nt, Artificial Sequence
  Description of Artificial Sequence: Synthetic oligonucleotide
agguugucgac

SEQ ID NO: 73811 - RNA, 12 nt, Artificial Sequence
  Description of Artificial Sequence: Synthetic oligonucleotide
ccuggcaauugu

SEQ ID NO: 73812 - RNA, 11 nt, Artificial Sequence
  Description of Artificial Sequence: Synthetic oligonucleotide
guggugcgagg

SEQ ID NO: 73813 - RNA, 12 nt, Artificial Sequence
  Description of Artificial Sequence: Synthetic oligonucleotide
gagacaugaaau

SEQ ID NO: 73814 - RNA, 12 nt, Artificial Sequence
  Description of Artificial Sequence: Synthetic oligonucleotide
uauauuucucca

SEQ ID NO: 73815 - RNA, 9 nt, Artificial Sequence
  Description of Artificial Sequence: Synthetic oligonucleotide
augaaggcu

SEQ ID NO: 73816 - RNA, 10 nt, Artificial Sequence
  Description of Artificial Sequence: Synthetic oligonucleotide
cuggaguggu

SEQ ID NO: 73817 - RNA, 10 nt, Artificial Sequence
  Description of Artificial Sequence: Synthetic oligonucleotide
ggaagagagg

SEQ ID NO: 73818 - RNA, 11 nt, Artificial Sequence
  Description of Artificial Sequence: Synthetic oligonucleotide
uugcaucgggc

SEQ ID NO: 73819 - RNA, 12 nt, Artificial Sequence
  Description of Artificial Sequence: Synthetic oligonucleotide
uauccuacugug

SEQ ID NO: 73820 - RNA, 12 nt, Artificial Sequence
  Description of Artificial Sequence: Synthetic oligonucleotide
ccuacuguguaa

SEQ ID NO: 73821 - RNA, 11 nt, Artificial Sequence
  Description of Artificial Sequence: Synthetic oligonucleotide
cuuguagugua

SEQ ID NO: 73822 - RNA, 12 nt, Artificial Sequence
  Description of Artificial Sequence: Synthetic oligonucleotide
cuuuguugauug

SEQ ID NO: 73823 - RNA, 13 nt, Artificial Sequence
  Description of Artificial Sequence: Synthetic oligonucleotide
uuguugauugaaa

SEQ ID NO: 73824 - RNA, 14 nt, Artificial Sequence
  Description of Artificial Sequence: Synthetic oligonucleotide
ucuuuuucuuccau

SEQ ID NO: 73825 - RNA, 12 nt, Artificial Sequence
  Description of Artificial Sequence: Synthetic oligonucleotide
aucuuccuucua

SEQ ID NO: 73826 - RNA, 12 nt, Artificial Sequence
  Description of Artificial Sequence: Synthetic oligonucleotide
ugaaugcuucau

SEQ ID NO: 73827 - RNA, 12 nt, Artificial Sequence
  Description of Artificial Sequence: Synthetic oligonucleotide
gaaugcuucaug

SEQ ID NO: 73828 - RNA, 12 nt, Artificial Sequence
  Description of Artificial Sequence: Synthetic oligonucleotide
auucuacuuuga

SEQ ID NO: 73829 - RNA, 12 nt, Artificial Sequence
  Description of Artificial Sequence: Synthetic oligonucleotide
gcaacuacagac

SEQ ID NO: 73830 - RNA, 12 nt, Artificial Sequence
  Description of Artificial Sequence: Synthetic oligonucleotide
accaaggucaac

SEQ ID NO: 73831 - RNA, 12 nt, Artificial Sequence
  Description of Artificial Sequence: Synthetic oligonucleotide
gacuaucucgac

SEQ ID NO: 73832 - RNA, 12 nt, Artificial Sequence
  Description of Artificial Sequence: Synthetic oligonucleotide
accuucccaaac

SEQ ID NO: 73833 - RNA, 13 nt, Artificial Sequence
  Description of Artificial Sequence: Synthetic oligonucleotide
caagcuuagaacu

SEQ ID NO: 73834 - RNA, 14 nt, Artificial Sequence
  Description of Artificial Sequence: Synthetic oligonucleotide
gcuuagaacuuuaa

SEQ ID NO: 73835 - RNA, 13 nt, Artificial Sequence
  Description of Artificial Sequence: Synthetic oligonucleotide
aacuuuaagcaac

SEQ ID NO: 73836 - RNA, 10 nt, Artificial Sequence
  Description of Artificial Sequence: Synthetic oligonucleotide
agaccaccac

SEQ ID NO: 73837 - RNA, 13 nt, Artificial Sequence
  Description of Artificial Sequence: Synthetic oligonucleotide
cgagaaauaaagu

SEQ ID NO: 73838 - RNA, 13 nt, Artificial Sequence
  Description of Artificial Sequence: Synthetic oligonucleotide
gagaaauaaaguu

SEQ ID NO: 73839 - RNA, 11 nt, Artificial Sequence
  Description of Artificial Sequence: Synthetic oligonucleotide
ggaaaugaucc

SEQ ID NO: 73840 - RNA, 12 nt, Artificial Sequence
  Description of Artificial Sequence: Synthetic oligonucleotide
aagaaaugaaac

SEQ ID NO: 73841 - RNA, 12 nt, Artificial Sequence
  Description of Artificial Sequence: Synthetic oligonucleotide
uuuccauccucc

SEQ ID NO: 73842 - RNA, 14 nt, Artificial Sequence
  Description of Artificial Sequence: Synthetic oligonucleotide
cugaaaaucuuuga

SEQ ID NO: 73843 - RNA, 10 nt, Artificial Sequence
  Description of Artificial Sequence: Synthetic oligonucleotide
gccguucagg

SEQ ID NO: 73844 - RNA, 12 nt, Artificial Sequence
  Description of Artificial Sequence: Synthetic oligonucleotide
aggguccagaag

SEQ ID NO: 73845 - RNA, 12 nt, Artificial Sequence
  Description of Artificial Sequence: Synthetic oligonucleotide
caagacugcuug

SEQ ID NO: 73846 - RNA, 12 nt, Artificial Sequence
  Description of Artificial Sequence: Synthetic oligonucleotide
ccaugucuuugg

SEQ ID NO: 73847 - RNA, 10 nt, Artificial Sequence
  Description of Artificial Sequence: Synthetic oligonucleotide
ccugaaacac

SEQ ID NO: 73848 - RNA, 11 nt, Artificial Sequence
  Description of Artificial Sequence: Synthetic oligonucleotide
cucuguaccuc

SEQ ID NO: 73849 - RNA, 11 nt, Artificial Sequence
  Description of Artificial Sequence: Synthetic oligonucleotide
gcaagacaaga

SEQ ID NO: 73850 - RNA, 12 nt, Artificial Sequence
  Description of Artificial Sequence: Synthetic oligonucleotide
caagacaagaaa

SEQ ID NO: 73851 - RNA, 11 nt, Artificial Sequence
  Description of Artificial Sequence: Synthetic oligonucleotide
guacaagaucc

SEQ ID NO: 73852 - RNA, 11 nt, Artificial Sequence
  Description of Artificial Sequence: Synthetic oligonucleotide
guacuugcaga

SEQ ID NO: 73853 - RNA, 12 nt, Artificial Sequence
  Description of Artificial Sequence: Synthetic oligonucleotide
gaucgauacaga

SEQ ID NO: 73854 - RNA, 12 nt, Artificial Sequence
  Description of Artificial Sequence: Synthetic oligonucleotide
auaaaaauaaau

SEQ ID NO: 73855 - RNA, 12 nt, Artificial Sequence
  Description of Artificial Sequence: Synthetic oligonucleotide
aaaaauaaauau

SEQ ID NO: 73856 - RNA, 12 nt, Artificial Sequence
  Description of Artificial Sequence: Synthetic oligonucleotide
uugacugcugug

SEQ ID NO: 73857 - RNA, 12 nt, Artificial Sequence
  Description of Artificial Sequence: Synthetic oligonucleotide
gagaugagagac

SEQ ID NO: 73858 - RNA, 9 nt, Artificial Sequence
  Description of Artificial Sequence: Synthetic oligonucleotide
cccacuugg

SEQ ID NO: 73859 - RNA, 4978 nt, Homo sapiens
gguuuccggagcugcggcggcgcagacugggagggggagccggggguuccgacgucgcagccgagggaacaagccccaaccggauccuggacaggcaccccggcuuggcgcugucucucccccucggcucggagaggcccuucggccugagggagccucgccgcccguccccggcacacgcgcagccccggccucucggccucugccggagaaacaguugggaccccugauuuuagcaggauggcccaauggaaucagcuacagcagcuugacacacgguaccuggagcagcuccaucagcucuacagugacagcuucccaauggagcugcggcaguuucuggccccuuggauugagagucaagauugggcauaugcggccagcaaagaaucacaugccacuuugguguuucauaaucuccugggagagauugaccagcaguauagccgcuuccugcaagagucgaauguucucuaucagcacaaucuacgaagaaucaagcaguuucuucagagcagguaucuugagaagccaauggagauugcccggauuguggcccggugccugugggaagaaucacgccuucuacagacugcagccacugcggcccagcaagggggccaggccaaccaccccacagcagccguggugacggagaagcagcagaugcuggagcagcaccuucaggauguccggaagagagugcaggaucuagaacagaaaaugaaagugguagagaaucuccaggaugacuuugauuucaacuauaaaacccucaagagucaaggagacaugcaagaucugaauggaaacaaccagucagugaccaggcagaagaugcagcagcuggaacagaugcucacugcgcuggaccagaugcggagaagcaucgugagugagcuggcggggcuuuugucagcgauggaguacgugcagaaaacucucacggacgaggagcuggcugacuggaagaggcggcaacagauugccugcauuggaggcccgcccaacaucugccuagaucggcuagaaaacuggauaacgucauuagcagaaucucaacuucagacccgucaacaaauuaagaaacuggaggaguugcagcaaaaaguuuccuacaaaggggaccccauuguacagcaccggccgaugcuggaggagagaaucguggagcuguuuagaaacuuaaugaaaagugccuuugugguggagcggcagcccugcaugcccaugcauccugaccggccccucgucaucaagaccggcguccaguucacuacuaaagucagguugcuggucaaauucccugaguugaauuaucagcuuaaaauuaaagugugcauugacaaagacucuggggacguugcagcucucagaggaucccggaaauuuaacauucugggcacaaacacaaaagugaugaacauggaagaauccaacaacggcagccucucugcagaauucaaacacuugacccugagggagcagagaugugggaaugggggccgagccaauugugaugcuucccugauugugacugaggagcugcaccugaucaccuuugagaccgagguguaucaccaaggccucaagauugaccuagagacccacuccuugccaguuguggugaucuccaacaucugucagaugccaaaugccugggcguccauccugugguacaacaugcugaccaacaaucccaagaauguaaacuuuuuuaccaagcccccaauuggaaccugggaucaaguggccgagguccugagcuggcaguucuccuccaccaccaagcgaggacugagcaucgagcagcugacuacacuggcagagaaacucuugggaccuggugugaauuauucagggugucagaucacaugggcuaaauuuugcaaagaaaacauggcuggcaagggcuucuccuucugggucuggcuggacaauaucauugaccuugugaaaaaguacauccuggcccuuuggaacgaaggguacaucaugggcuuuaucaguaaggagcgggagcgggccaucuugagcacuaagccuccaggcaccuuccugcuaagauucagugaaagcagcaaagaaggaggcgucacuuucacuuggguggagaaggacaucagcgguaagacccagauccaguccguggaaccauacacaaagcagcagcugaacaacaugucauuugcugaaaucaucaugggcuauaagaucauggaugcuaccaauauccuggugucuccacuggucuaucucuauccugacauucccaaggaggaggcauucggaaaguauugucggccagagagccaggagcauccugaagcugacccagguagcgcugccccauaccugaagaccaaguuuaucugugugacaccaacgaccugcagcaauaccauugaccugccgauguccccccgcacuuuagauucauugaugcaguuuggaaauaauggugaaggugcugaacccucagcaggagggcaguuugagucccucaccuuugacauggaguugaccucggagugcgcuaccucccccaugugaggagcugagaacggaagcugcagaaagauacgacugaggcgccuaccugcauucugccaccccucacacagccaaaccccagaucaucugaaacuacuaacuuugugguuccagauuuuuuuuaaucuccuacuucugcuaucuuugagcaaucugggcacuuuuaaaaauagagaaaugagugaaugugggugaucugcuuuuaucuaaaugcaaauaaggauguguucucugagacccaugaucaggggauguggcgggggguggcuagagggagaaaaaggaaaugucuuguguuguuuuguuccccugcccuccuuucucagcagcuuuuuguuauuguuguuguuguucuuagacaagugccuccuggugccugcggcauccuucugccuguuucuguaagcaaaugccacaggccaccuauagcuacauacuccuggcauugcacuuuuuaaccuugcugacauccaaauagaagauaggacuaucuaagcccuagguuucuuuuuaaauuaagaaauaauaacaauuaaagggcaaaaaacacuguaucagcauagccuuucuguauuuaagaaacuuaagcagccgggcaugguggcucacgccuguaaucccagcacuuugggaggccgaggcggaucauaaggucaggagaucaagaccauccuggcuaacacggugaaaccccgucucuacuaaaaguacaaaaaauuagcugggugugguggugggcgccuguagucccagcuacucgggaggcugaggcaggagaaucgcuugaaccugagaggcggagguugcagugagccaaaauugcaccacugcacacugcacuccauccugggcgacagucugagacucugucucaaaaaaaaaaaaaaaaaaaagaaacuucaguuaacagccuccuuggugcuuuaagcauucagcuuccuucaggcugguaauuuauauaaucccugaaacgggcuucaggucaaacccuuaagacaucugaagcugcaaccuggccuuugguguugaaauaggaagguuuaaggagaaucuaagcauuuuagacuuuuuuuuauaaauagacuuauuuuccuuuguaauguauuggccuuuuagugaguaaggcugggcagagggugcuuacaaccuugacucccuuucucccuggacuugaucugcuguuucagaggcuagguuguuucugugggugccuuaucagggcugggauacuucugauucuggcuuccuuccugccccacccucccgaccccagucccccugauccugcuagaggcaugucuccuugcgugucuaaaggucccucauccuguuuguuuuaggaauccuggucucaggaccucauggaagaagagggggagagaguuacagguuggacaugaugcacacuauggggccccagcgacgugucugguugagcucagggaauaugguucuuagccaguuucuuggugauauccaguggcacuuguaauggcgucuucauucaguucaugcagggcaaaggcuuacugauaaacuugagucugcccucguaugaggguguauaccuggccucccucugaggcuggugacuccucccugcuggggccccacaggugaggcagaacagcuagagggccuccccgccugcccgccuuggcuggcuagcucgccucuccugugcguaugggaacaccuagcacgugcuggaugggcugccucugacucagaggcauggccggauuuggcaacucaaaaccaccuugccucagcugaucagaguuucuguggaauucuguuuguuaaaucaaauuagcuggucucugaauuaagggggagacgaccuucucuaagaugaacaggguucgccccaguccuccugccuggagacaguugaugugucaugcagagcucuuacuucuccagcaacacucuucaguacauaauaagcuuaacugauaaacagaauauuuagaaaggugagacuugggcuuaccauuggguuuaaaucauagggaccuagggcgaggguucagggcuucucuggagcagauauugucaaguucauggccuuagguagcauguaucuggucuuaacucugauuguagcaaaaguucugagaggagcugagcccuguuguggcccauuaaagaacaggguccucaggcccugcccgcuuccuguccacugcccccuccccauccccagcccagccgagggaaucccguggguugcuuaccuaccuauaaggugguuuauaagcugcuguccuggccacugcauucaaauuccaauguguacuucauaguguaaaaauuuauauuauugugagguuuuuugucuuuuuuuuuuuuuuuuuuuuuugguauauugcuguaucuacuuuaacuuccagaaauaaacguuauauaggaaccguaaaaa

SEQ ID NO: 73860 - RNA, 4953 nt, Homo sapiens
gguuuccggagcugcggcggcgcagacugggagggggagccggggguuccgacgucgcagccgagggaacaagccccaaccggauccuggacaggcaccccggcuuggcgcugucucucccccucggcucggagaggcccuucggccugagggagccucgccgcccguccccggcacacgcgcagccccggccucucggccucugccggagaaacaggauggcccaauggaaucagcuacagcagcuugacacacgguaccuggagcagcuccaucagcucuacagugacagcuucccaauggagcugcggcaguuucuggccccuuggauugagagucaagauugggcauaugcggccagcaaagaaucacaugccacuuugguguuucauaaucuccugggagagauugaccagcaguauagccgcuuccugcaagagucgaauguucucuaucagcacaaucuacgaagaaucaagcaguuucuucagagcagguaucuugagaagccaauggagauugcccggauuguggcccggugccugugggaagaaucacgccuucuacagacugcagccacugcggcccagcaagggggccaggccaaccaccccacagcagccguggugacggagaagcagcagaugcuggagcagcaccuucaggauguccggaagagagugcaggaucuagaacagaaaaugaaagugguagagaaucuccaggaugacuuugauuucaacuauaaaacccucaagagucaaggagacaugcaagaucugaauggaaacaaccagucagugaccaggcagaagaugcagcagcuggaacagaugcucacugcgcuggaccagaugcggagaagcaucgugagugagcuggcggggcuuuugucagcgauggaguacgugcagaaaacucucacggacgaggagcuggcugacuggaagaggcggcaacagauugccugcauuggaggcccgcccaacaucugccuagaucggcuagaaaacuggauaacgucauuagcagaaucucaacuucagacccgucaacaaauuaagaaacuggaggaguugcagcaaaaaguuuccuacaaaggggaccccauuguacagcaccggccgaugcuggaggagagaaucguggagcuguuuagaaacuuaaugaaaagugccuuugugguggagcggcagcccugcaugcccaugcauccugaccggccccucgucaucaagaccggcguccaguucacuacuaaagucagguugcuggucaaauucccugaguugaauuaucagcuuaaaauuaaagugugcauugacaaagacucuggggacguugcagcucucagaggaucccggaaauuuaacauucugggcacaaacacaaaagugaugaacauggaagaauccaacaacggcagccucucugcagaauucaaacacuugacccugagggagcagagaugugggaaugggggccgagccaauugugaugcuucccugauugugacugaggagcugcaccugaucaccuuugagaccgagguguaucaccaaggccucaagauugaccuagagacccacuccuugccaguuguggugaucuccaacaucugucagaugccaaaugccugggcguccauccugugguacaacaugcugaccaacaaucccaagaauguaaacuuuuuuaccaagcccccaauuggaaccugggaucaaguggccgagguccugagcuggcaguucuccuccaccaccaagcgaggacugagcaucgagcagcugacuacacuggcagagaaacucuugggaccuggugugaauuauucagggugucagaucacaugggcuaaauuuugcaaagaaaacauggcuggcaagggcuucuccuucugggucuggcuggacaauaucauugaccuugugaaaaaguacauccuggcccuuuggaacgaaggguacaucaugggcuuuaucaguaaggagcgggagcgggccaucuugagcacuaagccuccaggcaccuuccugcuaagauucagugaaagcagcaaagaaggaggcgucacuuucacuuggguggagaaggacaucagcgguaagacccagauccaguccguggaaccauacacaaagcagcagcugaacaacaugucauuugcugaaaucaucaugggcuauaagaucauggaugcuaccaauauccuggugucuccacuggucuaucucuauccugacauucccaaggaggaggcauucggaaaguauugucggccagagagccaggagcauccugaagcugacccaggcgcugccccauaccugaagaccaaguuuaucugugugacaccaacgaccugcagcaauaccauugaccugccgauguccccccgcacuuuagauucauugaugcaguuuggaaauaauggugaaggugcugaacccucagcaggagggcaguuugagucccucaccuuugacauggaguugaccucggagugcgcuaccucccccaugugaggagcugagaacggaagcugcagaaagauacgacugaggcgccuaccugcauucugccaccccucacacagccaaaccccagaucaucugaaacuacuaacuuugugguuccagauuuuuuuuaaucuccuacuucugcuaucuuugagcaaucugggcacuuuuaaaaauagagaaaugagugaaugugggugaucugcuuuuaucuaaaugcaaauaaggauguguucucugagacccaugaucaggggauguggcgggggguggcuagagggagaaaaaggaaaugucuuguguuguuuuguuccccugcccuccuuucucagcagcuuuuuguuauuguuguuguuguucuuagacaagugccuccuggugccugcggcauccuucugccuguuucuguaagcaaaugccacaggccaccuauagcuacauacuccuggcauugcacuuuuuaaccuugcugacauccaaauagaagauaggacuaucuaagcccuagguuucuuuuuaaauuaagaaauaauaacaauuaaagggcaaaaaacacuguaucagcauagccuuucuguauuuaagaaacuuaagcagccgggcaugguggcucacgccuguaaucccagcacuuugggaggccgaggcggaucauaaggucaggagaucaagaccauccuggcuaacacggugaaaccccgucucuacuaaaaguacaaaaaauuagcugggugugguggugggcgccuguagucccagcuacucgggaggcugaggcaggagaaucgcuugaaccugagaggcggagguugcagugagccaaaauugcaccacugcacacugcacuccauccugggcgacagucugagacucugucucaaaaaaaaaaaaaaaaaaaagaaacuucaguuaacagccuccuuggugcuuuaagcauucagcuuccuucaggcugguaauuuauauaaucccugaaacgggcuucaggucaaacccuuaagacaucugaagcugcaaccuggccuuugguguugaaauaggaagguuuaaggagaaucuaagcauuuuagacuuuuuuuuauaaauagacuuauuuuccuuuguaauguauuggccuuuuagugaguaaggcugggcagagggugcuuacaaccuugacucccuuucucccuggacuugaucugcuguuucagaggcuagguuguuucugugggugccuuaucagggcugggauacuucugauucuggcuuccuuccugccccacccucccgaccccagucccccugauccugcuagaggcaugucuccuugcgugucuaaaggucccucauccuguuuguuuuaggaauccuggucucaggaccucauggaagaagagggggagagaguuacagguuggacaugaugcacacuauggggccccagcgacgugucugguugagcucagggaauaugguucuuagccaguuucuuggugauauccaguggcacuuguaauggcgucuucauucaguucaugcagggcaaaggcuuacugauaaacuugagucugcccucguaugaggguguauaccuggccucccucugaggcuggugacuccucccugcuggggccccacaggugaggcagaacagcuagagggccuccccgccugcccgccuuggcuggcuagcucgccucuccugugcguaugggaacaccuagcacgugcuggaugggcugccucugacucagaggcauggccggauuuggcaacucaaaaccaccuugccucagcugaucagaguuucuguggaauucuguuuguuaaaucaaauuagcuggucucugaauuaagggggagacgaccuucucuaagaugaacaggguucgccccaguccuccugccuggagacaguugaugugucaugcagagcucuuacuucuccagcaacacucuucaguacauaauaagcuuaacugauaaacagaauauuuagaaaggugagacuugggcuuaccauuggguuuaaaucauagggaccuagggcgaggguucagggcuucucuggagcagauauugucaaguucauggccuuagguagcauguaucuggucuuaacucugauuguagcaaaaguucugagaggagcugagcccuguuguggcccauuaaagaacaggguccucaggcccugcccgcuuccuguccacugcccccuccccauccccagcccagccgagggaaucccguggguugcuuaccuaccuauaaggugguuuauaagcugcuguccuggccacugcauucaaauuccaauguguacuucauaguguaaaaauuuauauuauugugagguuuuuugucuuuuuuuuuuuuuuuuuuuuuugguauauugcuguaucuacuuuaacuuccagaaauaaacguuauauaggaaccguaaaaa

SEQ ID NO: 73861 - RNA, 4819 nt, Homo sapiens
cgcugucucucccccucggcucggagaggcccuucggccugagggagccucgccgcccguccccggcacacgcgcagccccggccucucggccucugccggagaaacaguugggaccccugauuuuagcaggauggcccaauggaaucagcuacagcagcuugacacacgguaccuggagcagcuccaucagcucuacagugacagcuucccaauggagcugcggcaguuucuggccccuuggauugagagucaagauugggcauaugcggccagcaaagaaucacaugccacuuugguguuucauaaucuccugggagagauugaccagcaguauagccgcuuccugcaagagucgaauguucucuaucagcacaaucuacgaagaaucaagcaguuucuucagagcagguaucuugagaagccaauggagauugcccggauuguggcccggugccugugggaagaaucacgccuucuacagacugcagccacugcggcccagcaagggggccaggccaaccaccccacagcagccguggugacggagaagcagcagaugcuggagcagcaccuucaggauguccggaagagagugcaggaucuagaacagaaaaugaaagugguagagaaucuccaggaugacuuugauuucaacuauaaaacccucaagagucaaggagacaugcaagaucugaauggaaacaaccagucagugaccaggcagaagaugcagcagcuggaacagaugcucacugcgcuggaccagaugcggagaagcaucgugagugagcuggcggggcuuuugucagcgauggaguacgugcagaaaacucucacggacgaggagcuggcugacuggaagaggcggcaacagauugccugcauuggaggcccgcccaacaucugccuagaucggcuagaaaacuggauaacgucauuagcagaaucucaacuucagacccgucaacaaauuaagaaacuggaggaguugcagcaaaaaguuuccuacaaaggggaccccauuguacagcaccggccgaugcuggaggagagaaucguggagcuguuuagaaacuuaaugaaaagugccuuugugguggagcggcagcccugcaugcccaugcauccugaccggccccucgucaucaagaccggcguccaguucacuacuaaagucagguugcuggucaaauucccugaguugaauuaucagcuuaaaauuaaagugugcauugacaaagacucuggggacguugcagcucucagaggaucccggaaauuuaacauucugggcacaaacacaaaagugaugaacauggaagaauccaacaacggcagccucucugcagaauucaaacacuugacccugagggagcagagaugugggaaugggggccgagccaauugugaugcuucccugauugugacugaggagcugcaccugaucaccuuugagaccgagguguaucaccaaggccucaagauugaccuagagacccacuccuugccaguuguggugaucuccaacaucugucagaugccaaaugccugggcguccauccugugguacaacaugcugaccaacaaucccaagaauguaaacuuuuuuaccaagcccccaauuggaaccugggaucaaguggccgagguccugagcuggcaguucuccuccaccaccaagcgaggacugagcaucgagcagcugacuacacuggcagagaaacucuugggaccuggugugaauuauucagggugucagaucacaugggcuaaauuuugcaaagaaaacauggcuggcaagggcuucuccuucugggucuggcuggacaauaucauugaccuugugaaaaaguacauccuggcccuuuggaacgaaggguacaucaugggcuuuaucaguaaggagcgggagcgggccaucuugagcacuaagccuccaggcaccuuccugcuaagauucagugaaagcagcaaagaaggaggcgucacuuucacuuggguggagaaggacaucagcgguaagacccagauccaguccguggaaccauacacaaagcagcagcugaacaacaugucauuugcugaaaucaucaugggcuauaagaucauggaugcuaccaauauccuggugucuccacuggucuaucucuauccugacauucccaaggaggaggcauucggaaaguauugucggccagagagccaggagcauccugaagcugacccagguagcgcugccccauaccugaagaccaaguuuaucugugugacaccauucauugaugcaguuuggaaauaauggugaaggugcugaacccucagcaggagggcaguuugagucccucaccuuugacauggaguugaccucggagugcgcuaccucccccaugugaggagcugagaacggaagcugcagaaagauacgacugaggcgccuaccugcauucugccaccccucacacagccaaaccccagaucaucugaaacuacuaacuuugugguuccagauuuuuuuuaaucuccuacuucugcuaucuuugagcaaucugggcacuuuuaaaaauagagaaaugagugaaugugggugaucugcuuuuaucuaaaugcaaauaaggauguguucucugagacccaugaucaggggauguggcgggggguggcuagagggagaaaaaggaaaugucuuguguuguuuuguuccccugcccuccuuucucagcagcuuuuuguuauuguuguuguuguucuuagacaagugccuccuggugccugcggcauccuucugccuguuucuguaagcaaaugccacaggccaccuauagcuacauacuccuggcauugcacuuuuuaaccuugcugacauccaaauagaagauaggacuaucuaagcccuagguuucuuuuuaaauuaagaaauaauaacaauuaaagggcaaaaaacacuguaucagcauagccuuucuguauuuaagaaacuuaagcagccgggcaugguggcucacgccuguaaucccagcacuuugggaggccgaggcggaucauaaggucaggagaucaagaccauccuggcuaacacggugaaaccccgucucuacuaaaaguacaaaaaauuagcugggugugguggugggcgccuguagucccagcuacucgggaggcugaggcaggagaaucgcuugaaccugagaggcggagguugcagugagccaaaauugcaccacugcacacugcacuccauccugggcgacagucugagacucugucucaaaaaaaaaaaaaaaaaaaagaaacuucaguuaacagccuccuuggugcuuuaagcauucagcuuccuucaggcugguaauuuauauaaucccugaaacgggcuucaggucaaacccuuaagacaucugaagcugcaaccuggccuuugguguugaaauaggaagguuuaaggagaaucuaagcauuuuagacuuuuuuuuauaaauagacuuauuuuccuuuguaauguauuggccuuuuagugaguaaggcugggcagagggugcuuacaaccuugacucccuuucucccuggacuugaucugcuguuucagaggcuagguuguuucugugggugccuuaucagggcugggauacuucugauucuggcuuccuuccugccccacccucccgaccccagucccccugauccugcuagaggcaugucuccuugcgugucuaaaggucccucauccuguuuguuuuaggaauccuggucucaggaccucauggaagaagagggggagagaguuacagguuggacaugaugcacacuauggggccccagcgacgugucugguugagcucagggaauaugguucuuagccaguuucuuggugauauccaguggcacuuguaauggcgucuucauucaguucaugcagggcaaaggcuuacugauaaacuugagucugcccucguaugaggguguauaccuggccucccucugaggcuggugacuccucccugcuggggccccacaggugaggcagaacagcuagagggccuccccgccugcccgccuuggcuggcuagcucgccucuccugugcguaugggaacaccuagcacgugcuggaugggcugccucugacucagaggcauggccggauuuggcaacucaaaaccaccuugccucagcugaucagaguuucuguggaauucuguuuguuaaaucaaauuagcuggucucugaauuaagggggagacgaccuucucuaagaugaacaggguucgccccaguccuccugccuggagacaguugaugugucaugcagagcucuuacuucuccagcaacacucuucaguacauaauaagcuuaacugauaaacagaauauuuagaaaggugagacuugggcuuaccauuggguuuaaaucauagggaccuagggcgaggguucagggcuucucuggagcagauauugucaaguucauggccuuagguagcauguaucuggucuuaacucugauuguagcaaaaguucugagaggagcugagcccuguuguggcccauuaaagaacaggguccucaggcccugcccgcuuccuguccacugcccccuccccauccccagcccagccgagggaaucccguggguugcuuaccuaccuauaaggugguuuauaagcugcuguccuggccacugcauucaaauuccaauguguacuucauaguguaaaaauuuauauuauugugagguuuuuugucuuuuuuuuuuuuuuuuuuuuuugguauauugcuguaucuacuuuaacuuccagaaauaaacguuauauaggaaccguaaaa

SEQ ID NO: 73862 - RNA, 19 nt, Artificial Sequence
  Description of Artificial Sequence: Synthetic oligonucleotide
gguuuccggagcugcggcg

SEQ ID NO: 73863 - RNA, 19 nt, Artificial Sequence
  Description of Artificial Sequence: Synthetic oligonucleotide
ggcgcagacugggaggggg

SEQ ID NO: 73864 - RNA, 19 nt, Artificial Sequence
  Description of Artificial Sequence: Synthetic oligonucleotide
gagccggggguuccgacgu

SEQ ID NO: 73865 - RNA, 19 nt, Artificial Sequence
  Description of Artificial Sequence: Synthetic oligonucleotide
ucgcagccgagggaacaag

SEQ ID NO: 73866 - RNA, 19 nt, Artificial Sequence
  Description of Artificial Sequence: Synthetic oligonucleotide
gccccaaccggauccugga

SEQ ID NO: 73867 - RNA, 19 nt, Artificial Sequence
  Description of Artificial Sequence: Synthetic oligonucleotide
acaggcaccccggcuuggc

SEQ ID NO: 73868 - RNA, 19 nt, Artificial Sequence
  Description of Artificial Sequence: Synthetic oligonucleotide
cgcugucucucccccucgg

SEQ ID NO: 73869 - RNA, 19 nt, Artificial Sequence
  Description of Artificial Sequence: Synthetic oligonucleotide
gcucggagaggcccuucgg

SEQ ID NO: 73870 - RNA, 19 nt, Artificial Sequence
  Description of Artificial Sequence: Synthetic oligonucleotide
gccugagggagccucgccg

SEQ ID NO: 73871 - RNA, 19 nt, Artificial Sequence
  Description of Artificial Sequence: Synthetic oligonucleotide
gcccguccccggcacacgc

SEQ ID NO: 73872 - RNA, 19 nt, Artificial Sequence
  Description of Artificial Sequence: Synthetic oligonucleotide
cgcagccccggccucucgg

SEQ ID NO: 73873 - RNA, 19 nt, Artificial Sequence
  Description of Artificial Sequence: Synthetic oligonucleotide
gccucugccggagaaacag

SEQ ID NO: 73874 - RNA, 19 nt, Artificial Sequence
  Description of Artificial Sequence: Synthetic oligonucleotide
guugggaccccugauuuua

SEQ ID NO: 73875 - RNA, 19 nt, Artificial Sequence
  Description of Artificial Sequence: Synthetic oligonucleotide
agcaggauggcccaaugga

SEQ ID NO: 73876 - RNA, 19 nt, Artificial Sequence
  Description of Artificial Sequence: Synthetic oligonucleotide
aaucagcuacagcagcuug

SEQ ID NO: 73877 - RNA, 19 nt, Artificial Sequence
  Description of Artificial Sequence: Synthetic oligonucleotide
gacacacgguaccuggagc

SEQ ID NO: 73878 - RNA, 19 nt, Artificial Sequence
  Description of Artificial Sequence: Synthetic oligonucleotide
cagcuccaucagcucuaca

SEQ ID NO: 73879 - RNA, 19 nt, Artificial Sequence
  Description of Artificial Sequence: Synthetic oligonucleotide
agugacagcuucccaaugg

SEQ ID NO: 73880 - RNA, 19 nt, Artificial Sequence
  Description of Artificial Sequence: Synthetic oligonucleotide
gagcugcggcaguuucugg

SEQ ID NO: 73881 - RNA, 19 nt, Artificial Sequence
  Description of Artificial Sequence: Synthetic oligonucleotide
gccccuuggauugagaguc

SEQ ID NO: 73882 - RNA, 19 nt, Artificial Sequence
  Description of Artificial Sequence: Synthetic oligonucleotide
caagauugggcauaugcgg

SEQ ID NO: 73883 - RNA, 19 nt, Artificial Sequence
  Description of Artificial Sequence: Synthetic oligonucleotide
gccagcaaagaaucacaug

SEQ ID NO: 73884 - RNA, 19 nt, Artificial Sequence
  Description of Artificial Sequence: Synthetic oligonucleotide
gccacuuugguguuucaua

SEQ ID NO: 73885 - RNA, 19 nt, Artificial Sequence
  Description of Artificial Sequence: Synthetic oligonucleotide
aaucuccugggagagauug

SEQ ID NO: 73886 - RNA, 19 nt, Artificial Sequence
  Description of Artificial Sequence: Synthetic oligonucleotide
gaccagcaguauagccgcu

SEQ ID NO: 73887 - RNA, 19 nt, Artificial Sequence
  Description of Artificial Sequence: Synthetic oligonucleotide
uuccugcaagagucgaaug

SEQ ID NO: 73888 - RNA, 19 nt, Artificial Sequence
  Description of Artificial Sequence: Synthetic oligonucleotide
guucucuaucagcacaauc

SEQ ID NO: 73889 - RNA, 19 nt, Artificial Sequence
  Description of Artificial Sequence: Synthetic oligonucleotide
cuacgaagaaucaagcagu

SEQ ID NO: 73890 - RNA, 19 nt, Artificial Sequence
  Description of Artificial Sequence: Synthetic oligonucleotide
uuucuucagagcagguauc

SEQ ID NO: 73891 - RNA, 19 nt, Artificial Sequence
  Description of Artificial Sequence: Synthetic oligonucleotide
cuugagaagccaauggaga

SEQ ID NO: 73892 - RNA, 19 nt, Artificial Sequence
  Description of Artificial Sequence: Synthetic oligonucleotide
auugcccggauuguggccc

SEQ ID NO: 73893 - RNA, 19 nt, Artificial Sequence
  Description of Artificial Sequence: Synthetic oligonucleotide
cggugccugugggaagaau

SEQ ID NO: 73894 - RNA, 19 nt, Artificial Sequence
  Description of Artificial Sequence: Synthetic oligonucleotide
ucacgccuucuacagacug

SEQ ID NO: 73895 - RNA, 19 nt, Artificial Sequence
  Description of Artificial Sequence: Synthetic oligonucleotide
gcagccacugcggcccagc

SEQ ID NO: 73896 - RNA, 19 nt, Artificial Sequence
  Description of Artificial Sequence: Synthetic oligonucleotide
caagggggccaggccaacc

SEQ ID NO: 73897 - RNA, 19 nt, Artificial Sequence
  Description of Artificial Sequence: Synthetic oligonucleotide
caccccacagcagccgugg

SEQ ID NO: 73898 - RNA, 19 nt, Artificial Sequence
  Description of Artificial Sequence: Synthetic oligonucleotide
gugacggagaagcagcaga

SEQ ID NO: 73899 - RNA, 19 nt, Artificial Sequence
  Description of Artificial Sequence: Synthetic oligonucleotide
augcuggagcagcaccuuc

SEQ ID NO: 73900 - RNA, 19 nt, Artificial Sequence
  Description of Artificial Sequence: Synthetic oligonucleotide
caggauguccggaagagag

SEQ ID NO: 73901 - RNA, 19 nt, Artificial Sequence
  Description of Artificial Sequence: Synthetic oligonucleotide
gugcaggaucuagaacaga

SEQ ID NO: 73902 - RNA, 19 nt, Artificial Sequence
  Description of Artificial Sequence: Synthetic oligonucleotide
aaaaugaaagugguagaga

SEQ ID NO: 73903 - RNA, 19 nt, Artificial Sequence
  Description of Artificial Sequence: Synthetic oligonucleotide
aaucuccaggaugacuuug

SEQ ID NO: 73904 - RNA, 19 nt, Artificial Sequence
  Description of Artificial Sequence: Synthetic oligonucleotide
gauuucaacuauaaaaccc

SEQ ID NO: 73905 - RNA, 19 nt, Artificial Sequence
  Description of Artificial Sequence: Synthetic oligonucleotide
cucaagagucaaggagaca

SEQ ID NO: 73906 - RNA, 19 nt, Artificial Sequence
  Description of Artificial Sequence: Synthetic oligonucleotide
augcaagaucugaauggaa

SEQ ID NO: 73907 - RNA, 19 nt, Artificial Sequence
  Description of Artificial Sequence: Synthetic oligonucleotide
aacaaccagucagugacca

SEQ ID NO: 73908 - RNA, 19 nt, Artificial Sequence
  Description of Artificial Sequence: Synthetic oligonucleotide
aggcagaagaugcagcagc

SEQ ID NO: 73909 - RNA, 19 nt, Artificial Sequence
  Description of Artificial Sequence: Synthetic oligonucleotide
cuggaacagaugcucacug

SEQ ID NO: 73910 - RNA, 19 nt, Artificial Sequence
  Description of Artificial Sequence: Synthetic oligonucleotide
gcgcuggaccagaugcgga

SEQ ID NO: 73911 - RNA, 19 nt, Artificial Sequence
  Description of Artificial Sequence: Synthetic oligonucleotide
agaagcaucgugagugagc

SEQ ID NO: 73912 - RNA, 19 nt, Artificial Sequence
  Description of Artificial Sequence: Synthetic oligonucleotide
cuggcggggcuuuugucag

SEQ ID NO: 73913 - RNA, 19 nt, Artificial Sequence
  Description of Artificial Sequence: Synthetic oligonucleotide
gcgauggaguacgugcaga

SEQ ID NO: 73914 - RNA, 19 nt, Artificial Sequence
  Description of Artificial Sequence: Synthetic oligonucleotide
aaaacucucacggacgagg

SEQ ID NO: 73915 - RNA, 19 nt, Artificial Sequence
  Description of Artificial Sequence: Synthetic oligonucleotide
gagcuggcugacuggaaga

SEQ ID NO: 73916 - RNA, 19 nt, Artificial Sequence
  Description of Artificial Sequence: Synthetic oligonucleotide
aggcggcaacagauugccu

SEQ ID NO: 73917 - RNA, 19 nt, Artificial Sequence
  Description of Artificial Sequence: Synthetic oligonucleotide
ugcauuggaggcccgccca

SEQ ID NO: 73918 - RNA, 19 nt, Artificial Sequence
  Description of Artificial Sequence: Synthetic oligonucleotide
aacaucugccuagaucggc

SEQ ID NO: 73919 - RNA, 19 nt, Artificial Sequence
  Description of Artificial Sequence: Synthetic oligonucleotide
cuagaaaacuggauaacgu

SEQ ID NO: 73920 - RNA, 19 nt, Artificial Sequence
  Description of Artificial Sequence: Synthetic oligonucleotide
ucauuagcagaaucucaac

SEQ ID NO: 73921 - RNA, 19 nt, Artificial Sequence
  Description of Artificial Sequence: Synthetic oligonucleotide
cuucagacccgucaacaaa

SEQ ID NO: 73922 - RNA, 19 nt, Artificial Sequence
  Description of Artificial Sequence: Synthetic oligonucleotide
auuaagaaacuggaggagu

SEQ ID NO: 73923 - RNA, 19 nt, Artificial Sequence
  Description of Artificial Sequence: Synthetic oligonucleotide
uugcagcaaaaaguuuccu

SEQ ID NO: 73924 - RNA, 19 nt, Artificial Sequence
  Description of Artificial Sequence: Synthetic oligonucleotide
uacaaaggggaccccauug

SEQ ID NO: 73925 - RNA, 19 nt, Artificial Sequence
  Description of Artificial Sequence: Synthetic oligonucleotide
guacagcaccggccgaugc

SEQ ID NO: 73926 - RNA, 19 nt, Artificial Sequence
  Description of Artificial Sequence: Synthetic oligonucleotide
cuggaggagagaaucgugg

SEQ ID NO: 73927 - RNA, 19 nt, Artificial Sequence
  Description of Artificial Sequence: Synthetic oligonucleotide
gagcuguuuagaaacuuaa

SEQ ID NO: 73928 - RNA, 19 nt, Artificial Sequence
  Description of Artificial Sequence: Synthetic oligonucleotide
augaaaagugccuuugugg

SEQ ID NO: 73929 - RNA, 19 nt, Artificial Sequence
  Description of Artificial Sequence: Synthetic oligonucleotide
guggagcggcagcccugca

SEQ ID NO: 73930 - RNA, 19 nt, Artificial Sequence
  Description of Artificial Sequence: Synthetic oligonucleotide
augcccaugcauccugacc

SEQ ID NO: 73931 - RNA, 19 nt, Artificial Sequence
  Description of Artificial Sequence: Synthetic oligonucleotide
cggccccucgucaucaaga

SEQ ID NO: 73932 - RNA, 19 nt, Artificial Sequence
  Description of Artificial Sequence: Synthetic oligonucleotide
accggcguccaguucacua

SEQ ID NO: 73933 - RNA, 19 nt, Artificial Sequence
  Description of Artificial Sequence: Synthetic oligonucleotide
acuaaagucagguugcugg

SEQ ID NO: 73934 - RNA, 19 nt, Artificial Sequence
  Description of Artificial Sequence: Synthetic oligonucleotide
gucaaauucccugaguuga

SEQ ID NO: 73935 - RNA, 19 nt, Artificial Sequence
  Description of Artificial Sequence: Synthetic oligonucleotide
aauuaucagcuuaaaauua

SEQ ID NO: 73936 - RNA, 19 nt, Artificial Sequence
  Description of Artificial Sequence: Synthetic oligonucleotide
aaagugugcauugacaaag

SEQ ID NO: 73937 - RNA, 19 nt, Artificial Sequence
  Description of Artificial Sequence: Synthetic oligonucleotide
gacucuggggacguugcag

SEQ ID NO: 73938 - RNA, 19 nt, Artificial Sequence
  Description of Artificial Sequence: Synthetic oligonucleotide
gcucucagaggaucccgga

SEQ ID NO: 73939 - RNA, 19 nt, Artificial Sequence
  Description of Artificial Sequence: Synthetic oligonucleotide
aaauuuaacauucugggca

SEQ ID NO: 73940 - RNA, 19 nt, Artificial Sequence
  Description of Artificial Sequence: Synthetic oligonucleotide
acaaacacaaaagugauga

SEQ ID NO: 73941 - RNA, 19 nt, Artificial Sequence
  Description of Artificial Sequence: Synthetic oligonucleotide
aacauggaagaauccaaca

SEQ ID NO: 73942 - RNA, 19 nt, Artificial Sequence
  Description of Artificial Sequence: Synthetic oligonucleotide
aacggcagccucucugcag

SEQ ID NO: 73943 - RNA, 19 nt, Artificial Sequence
  Description of Artificial Sequence: Synthetic oligonucleotide
gaauucaaacacuugaccc

SEQ ID NO: 73944 - RNA, 19 nt, Artificial Sequence
  Description of Artificial Sequence: Synthetic oligonucleotide
cugagggagcagagaugug

SEQ ID NO: 73945 - RNA, 19 nt, Artificial Sequence
  Description of Artificial Sequence: Synthetic oligonucleotide
gggaaugggggccgagcca

SEQ ID NO: 73946 - RNA, 19 nt, Artificial Sequence
  Description of Artificial Sequence: Synthetic oligonucleotide
aauugugaugcuucccuga

SEQ ID NO: 73947 - RNA, 19 nt, Artificial Sequence
  Description of Artificial Sequence: Synthetic oligonucleotide
auugugacugaggagcugc

SEQ ID NO: 73948 - RNA, 19 nt, Artificial Sequence
  Description of Artificial Sequence: Synthetic oligonucleotide
caccugaucaccuuugaga

SEQ ID NO: 73949 - RNA, 19 nt, Artificial Sequence
  Description of Artificial Sequence: Synthetic oligonucleotide
accgagguguaucaccaag

SEQ ID NO: 73950 - RNA, 19 nt, Artificial Sequence
  Description of Artificial Sequence: Synthetic oligonucleotide
ggccucaagauugaccuag

SEQ ID NO: 73951 - RNA, 19 nt, Artificial Sequence
  Description of Artificial Sequence: Synthetic oligonucleotide
gagacccacuccuugccag

SEQ ID NO: 73952 - RNA, 19 nt, Artificial Sequence
  Description of Artificial Sequence: Synthetic oligonucleotide
guuguggugaucuccaaca

SEQ ID NO: 73953 - RNA, 19 nt, Artificial Sequence
  Description of Artificial Sequence: Synthetic oligonucleotide
aucugucagaugccaaaug

SEQ ID NO: 73954 - RNA, 19 nt, Artificial Sequence
  Description of Artificial Sequence: Synthetic oligonucleotide
gccugggcguccauccugu

SEQ ID NO: 73955 - RNA, 19 nt, Artificial Sequence
  Description of Artificial Sequence: Synthetic oligonucleotide
ugguacaacaugcugacca

SEQ ID NO: 73956 - RNA, 19 nt, Artificial Sequence
  Description of Artificial Sequence: Synthetic oligonucleotide
aacaaucccaagaauguaa

SEQ ID NO: 73957 - RNA, 19 nt, Artificial Sequence
  Description of Artificial Sequence: Synthetic oligonucleotide
aacuuuuuuaccaagcccc

SEQ ID NO: 73958 - RNA, 19 nt, Artificial Sequence
  Description of Artificial Sequence: Synthetic oligonucleotide
ccaauuggaaccugggauc

SEQ ID NO: 73959 - RNA, 19 nt, Artificial Sequence
  Description of Artificial Sequence: Synthetic oligonucleotide
caaguggccgagguccuga

SEQ ID NO: 73960 - RNA, 19 nt, Artificial Sequence
  Description of Artificial Sequence: Synthetic oligonucleotide
agcuggcaguucuccucca

SEQ ID NO: 73961 - RNA, 19 nt, Artificial Sequence
  Description of Artificial Sequence: Synthetic oligonucleotide
accaccaagcgaggacuga

SEQ ID NO: 73962 - RNA, 19 nt, Artificial Sequence
  Description of Artificial Sequence: Synthetic oligonucleotide
agcaucgagcagcugacua

SEQ ID NO: 73963 - RNA, 19 nt, Artificial Sequence
  Description of Artificial Sequence: Synthetic oligonucleotide
acacuggcagagaaacucu

SEQ ID NO: 73964 - RNA, 19 nt, Artificial Sequence
  Description of Artificial Sequence: Synthetic oligonucleotide
uugggaccuggugugaauu

SEQ ID NO: 73965 - RNA, 19 nt, Artificial Sequence
  Description of Artificial Sequence: Synthetic oligonucleotide
uauucagggugucagauca

SEQ ID NO: 73966 - RNA, 19 nt, Artificial Sequence
  Description of Artificial Sequence: Synthetic oligonucleotide
acaugggcuaaauuuugca

SEQ ID NO: 73967 - RNA, 19 nt, Artificial Sequence
  Description of Artificial Sequence: Synthetic oligonucleotide
aaagaaaacauggcuggca

SEQ ID NO: 73968 - RNA, 19 nt, Artificial Sequence
  Description of Artificial Sequence: Synthetic oligonucleotide
aagggcuucuccuucuggg

SEQ ID NO: 73969 - RNA, 19 nt, Artificial Sequence
  Description of Artificial Sequence: Synthetic oligonucleotide
gucuggcuggacaauauca

SEQ ID NO: 73970 - RNA, 19 nt, Artificial Sequence
  Description of Artificial Sequence: Synthetic oligonucleotide
auugaccuugugaaaaagu

SEQ ID NO: 73971 - RNA, 19 nt, Artificial Sequence
  Description of Artificial Sequence: Synthetic oligonucleotide
uacauccuggcccuuugga

SEQ ID NO: 73972 - RNA, 19 nt, Artificial Sequence
  Description of Artificial Sequence: Synthetic oligonucleotide
aacgaaggguacaucaugg

SEQ ID NO: 73973 - RNA, 19 nt, Artificial Sequence
  Description of Artificial Sequence: Synthetic oligonucleotide
ggcuuuaucaguaaggagc

SEQ ID NO: 73974 - RNA, 19 nt, Artificial Sequence
  Description of Artificial Sequence: Synthetic oligonucleotide
cgggagcgggccaucuuga

SEQ ID NO: 73975 - RNA, 19 nt, Artificial Sequence
  Description of Artificial Sequence: Synthetic oligonucleotide
agcacuaagccuccaggca

SEQ ID NO: 73976 - RNA, 19 nt, Artificial Sequence
  Description of Artificial Sequence: Synthetic oligonucleotide
accuuccugcuaagauuca

SEQ ID NO: 73977 - RNA, 19 nt, Artificial Sequence
  Description of Artificial Sequence: Synthetic oligonucleotide
agugaaagcagcaaagaag

SEQ ID NO: 73978 - RNA, 19 nt, Artificial Sequence
  Description of Artificial Sequence: Synthetic oligonucleotide
ggaggcgucacuuucacuu

SEQ ID NO: 73979 - RNA, 19 nt, Artificial Sequence
  Description of Artificial Sequence: Synthetic oligonucleotide
uggguggagaaggacauca

SEQ ID NO: 73980 - RNA, 19 nt, Artificial Sequence
  Description of Artificial Sequence: Synthetic oligonucleotide
agcgguaagacccagaucc

SEQ ID NO: 73981 - RNA, 19 nt, Artificial Sequence
  Description of Artificial Sequence: Synthetic oligonucleotide
caguccguggaaccauaca

SEQ ID NO: 73982 - RNA, 19 nt, Artificial Sequence
  Description of Artificial Sequence: Synthetic oligonucleotide
acaaagcagcagcugaaca

SEQ ID NO: 73983 - RNA, 19 nt, Artificial Sequence
  Description of Artificial Sequence: Synthetic oligonucleotide
aacaugucauuugcugaaa

SEQ ID NO: 73984 - RNA, 19 nt, Artificial Sequence
  Description of Artificial Sequence: Synthetic oligonucleotide
aucaucaugggcuauaaga

SEQ ID NO: 73985 - RNA, 19 nt, Artificial Sequence
  Description of Artificial Sequence: Synthetic oligonucleotide
aucauggaugcuaccaaua

SEQ ID NO: 73986 - RNA, 19 nt, Artificial Sequence
  Description of Artificial Sequence: Synthetic oligonucleotide
auccuggugucuccacugg

SEQ ID NO: 73987 - RNA, 19 nt, Artificial Sequence
  Description of Artificial Sequence: Synthetic oligonucleotide
gucuaucucuauccugaca

SEQ ID NO: 73988 - RNA, 19 nt, Artificial Sequence
  Description of Artificial Sequence: Synthetic oligonucleotide
auucccaaggaggaggcau

SEQ ID NO: 73989 - RNA, 19 nt, Artificial Sequence
  Description of Artificial Sequence: Synthetic oligonucleotide
uucggaaaguauugucggc

SEQ ID NO: 73990 - RNA, 19 nt, Artificial Sequence
  Description of Artificial Sequence: Synthetic oligonucleotide
ccagagagccaggagcauc

SEQ ID NO: 73991 - RNA, 19 nt, Artificial Sequence
  Description of Artificial Sequence: Synthetic oligonucleotide
ccugaagcugacccaggua

SEQ ID NO: 73992 - RNA, 19 nt, Artificial Sequence
  Description of Artificial Sequence: Synthetic oligonucleotide
agcgcugccccauaccuga

SEQ ID NO: 73993 - RNA, 19 nt, Artificial Sequence
  Description of Artificial Sequence: Synthetic oligonucleotide
aagaccaaguuuaucugug

SEQ ID NO: 73994 - RNA, 19 nt, Artificial Sequence
  Description of Artificial Sequence: Synthetic oligonucleotide
gugacaccaacgaccugca

SEQ ID NO: 73995 - RNA, 19 nt, Artificial Sequence
  Description of Artificial Sequence: Synthetic oligonucleotide
agcaauaccauugaccugc

SEQ ID NO: 73996 - RNA, 19 nt, Artificial Sequence
  Description of Artificial Sequence: Synthetic oligonucleotide
ccgauguccccccgcacuu

SEQ ID NO: 73997 - RNA, 19 nt, Artificial Sequence
  Description of Artificial Sequence: Synthetic oligonucleotide
uuagauucauugaugcagu

SEQ ID NO: 73998 - RNA, 19 nt, Artificial Sequence
  Description of Artificial Sequence: Synthetic oligonucleotide
uuuggaaauaauggugaag

SEQ ID NO: 73999 - RNA, 19 nt, Artificial Sequence
  Description of Artificial Sequence: Synthetic oligonucleotide
ggugcugaacccucagcag

SEQ ID NO: 74000 - RNA, 19 nt, Artificial Sequence
  Description of Artificial Sequence: Synthetic oligonucleotide
ggagggcaguuugaguccc

SEQ ID NO: 74001 - RNA, 19 nt, Artificial Sequence
  Description of Artificial Sequence: Synthetic oligonucleotide
cucaccuuugacauggagu

SEQ ID NO: 74002 - RNA, 19 nt, Artificial Sequence
  Description of Artificial Sequence: Synthetic oligonucleotide
uugaccucggagugcgcua

SEQ ID NO: 74003 - RNA, 19 nt, Artificial Sequence
  Description of Artificial Sequence: Synthetic oligonucleotide
accucccccaugugaggag

SEQ ID NO: 74004 - RNA, 19 nt, Artificial Sequence
  Description of Artificial Sequence: Synthetic oligonucleotide
gcugagaacggaagcugca

SEQ ID NO: 74005 - RNA, 19 nt, Artificial Sequence
  Description of Artificial Sequence: Synthetic oligonucleotide
agaaagauacgacugaggc

SEQ ID NO: 74006 - RNA, 19 nt, Artificial Sequence
  Description of Artificial Sequence: Synthetic oligonucleotide
cgccuaccugcauucugcc

SEQ ID NO: 74007 - RNA, 19 nt, Artificial Sequence
  Description of Artificial Sequence: Synthetic oligonucleotide
caccccucacacagccaaa

SEQ ID NO: 74008 - RNA, 19 nt, Artificial Sequence
  Description of Artificial Sequence: Synthetic oligonucleotide
accccagaucaucugaaac

SEQ ID NO: 74009 - RNA, 19 nt, Artificial Sequence
  Description of Artificial Sequence: Synthetic oligonucleotide
cuacuaacuuugugguucc

SEQ ID NO: 74010 - RNA, 19 nt, Artificial Sequence
  Description of Artificial Sequence: Synthetic oligonucleotide
cagauuuuuuuuaaucucc

SEQ ID NO: 74011 - RNA, 19 nt, Artificial Sequence
  Description of Artificial Sequence: Synthetic oligonucleotide
cuacuucugcuaucuuuga

SEQ ID NO: 74012 - RNA, 19 nt, Artificial Sequence
  Description of Artificial Sequence: Synthetic oligonucleotide
agcaaucugggcacuuuua

SEQ ID NO: 74013 - RNA, 19 nt, Artificial Sequence
  Description of Artificial Sequence: Synthetic oligonucleotide
aaaaauagagaaaugagug

SEQ ID NO: 74014 - RNA, 19 nt, Artificial Sequence
  Description of Artificial Sequence: Synthetic oligonucleotide
gaaugugggugaucugcuu

SEQ ID NO: 74015 - RNA, 19 nt, Artificial Sequence
  Description of Artificial Sequence: Synthetic oligonucleotide
uuuaucuaaaugcaaauaa

SEQ ID NO: 74016 - RNA, 19 nt, Artificial Sequence
  Description of Artificial Sequence: Synthetic oligonucleotide
aggauguguucucugagac

SEQ ID NO: 74017 - RNA, 19 nt, Artificial Sequence
  Description of Artificial Sequence: Synthetic oligonucleotide
cccaugaucaggggaugug

SEQ ID NO: 74018 - RNA, 19 nt, Artificial Sequence
  Description of Artificial Sequence: Synthetic oligonucleotide
ggcgggggguggcuagagg

SEQ ID NO: 74019 - RNA, 19 nt, Artificial Sequence
  Description of Artificial Sequence: Synthetic oligonucleotide
ggagaaaaaggaaaugucu

SEQ ID NO: 74020 - RNA, 19 nt, Artificial Sequence
  Description of Artificial Sequence: Synthetic oligonucleotide
uuguguuguuuuguucccc

SEQ ID NO: 74021 - RNA, 19 nt, Artificial Sequence
  Description of Artificial Sequence: Synthetic oligonucleotide
cugcccuccuuucucagca

SEQ ID NO: 74022 - RNA, 19 nt, Artificial Sequence
  Description of Artificial Sequence: Synthetic oligonucleotide
agcuuuuuguuauuguugu

SEQ ID NO: 74023 - RNA, 19 nt, Artificial Sequence
  Description of Artificial Sequence: Synthetic oligonucleotide
uuguuguucuuagacaagu

SEQ ID NO: 74024 - RNA, 19 nt, Artificial Sequence
  Description of Artificial Sequence: Synthetic oligonucleotide
ugccuccuggugccugcgg

SEQ ID NO: 74025 - RNA, 19 nt, Artificial Sequence
  Description of Artificial Sequence: Synthetic oligonucleotide
gcauccuucugccuguuuc

SEQ ID NO: 74026 - RNA, 19 nt, Artificial Sequence
  Description of Artificial Sequence: Synthetic oligonucleotide
cuguaagcaaaugccacag

SEQ ID NO: 74027 - RNA, 19 nt, Artificial Sequence
  Description of Artificial Sequence: Synthetic oligonucleotide
ggccaccuauagcuacaua

SEQ ID NO: 74028 - RNA, 19 nt, Artificial Sequence
  Description of Artificial Sequence: Synthetic oligonucleotide
acuccuggcauugcacuuu

SEQ ID NO: 74029 - RNA, 19 nt, Artificial Sequence
  Description of Artificial Sequence: Synthetic oligonucleotide
uuuaaccuugcugacaucc

SEQ ID NO: 74030 - RNA, 19 nt, Artificial Sequence
  Description of Artificial Sequence: Synthetic oligonucleotide
caaauagaagauaggacua

SEQ ID NO: 74031 - RNA, 19 nt, Artificial Sequence
  Description of Artificial Sequence: Synthetic oligonucleotide
aucuaagcccuagguuucu

SEQ ID NO: 74032 - RNA, 19 nt, Artificial Sequence
  Description of Artificial Sequence: Synthetic oligonucleotide
uuuuuaaauuaagaaauaa

SEQ ID NO: 74033 - RNA, 19 nt, Artificial Sequence
  Description of Artificial Sequence: Synthetic oligonucleotide
auaacaauuaaagggcaaa

SEQ ID NO: 74034 - RNA, 19 nt, Artificial Sequence
  Description of Artificial Sequence: Synthetic oligonucleotide
aaaacacuguaucagcaua

SEQ ID NO: 74035 - RNA, 19 nt, Artificial Sequence
  Description of Artificial Sequence: Synthetic oligonucleotide
agccuuucuguauuuaaga

SEQ ID NO: 74036 - RNA, 19 nt, Artificial Sequence
  Description of Artificial Sequence: Synthetic oligonucleotide
aaacuuaagcagccgggca

SEQ ID NO: 74037 - RNA, 19 nt, Artificial Sequence
  Description of Artificial Sequence: Synthetic oligonucleotide
augguggcucacgccugua

SEQ ID NO: 74038 - RNA, 19 nt, Artificial Sequence
  Description of Artificial Sequence: Synthetic oligonucleotide
aaucccagcacuuugggag

SEQ ID NO: 74039 - RNA, 19 nt, Artificial Sequence
  Description of Artificial Sequence: Synthetic oligonucleotide
ggccgaggcggaucauaag

SEQ ID NO: 74040 - RNA, 19 nt, Artificial Sequence
  Description of Artificial Sequence: Synthetic oligonucleotide
ggucaggagaucaagacca

SEQ ID NO: 74041 - RNA, 19 nt, Artificial Sequence
  Description of Artificial Sequence: Synthetic oligonucleotide
auccuggcuaacacgguga

SEQ ID NO: 74042 - RNA, 19 nt, Artificial Sequence
  Description of Artificial Sequence: Synthetic oligonucleotide
aaaccccgucucuacuaaa

SEQ ID NO: 74043 - RNA, 19 nt, Artificial Sequence
  Description of Artificial Sequence: Synthetic oligonucleotide
aaguacaaaaaauuagcug

SEQ ID NO: 74044 - RNA, 19 nt, Artificial Sequence
  Description of Artificial Sequence: Synthetic oligonucleotide
gggugugguggugggcgcc

SEQ ID NO: 74045 - RNA, 19 nt, Artificial Sequence
  Description of Artificial Sequence: Synthetic oligonucleotide
cuguagucccagcuacucg

SEQ ID NO: 74046 - RNA, 19 nt, Artificial Sequence
  Description of Artificial Sequence: Synthetic oligonucleotide
gggaggcugaggcaggaga

SEQ ID NO: 74047 - RNA, 19 nt, Artificial Sequence
  Description of Artificial Sequence: Synthetic oligonucleotide
aaucgcuugaaccugagag

SEQ ID NO: 74048 - RNA, 19 nt, Artificial Sequence
  Description of Artificial Sequence: Synthetic oligonucleotide
ggcggagguugcagugagc

SEQ ID NO: 74049 - RNA, 19 nt, Artificial Sequence
  Description of Artificial Sequence: Synthetic oligonucleotide
ccaaaauugcaccacugca

SEQ ID NO: 74050 - RNA, 19 nt, Artificial Sequence
  Description of Artificial Sequence: Synthetic oligonucleotide
acacugcacuccauccugg

SEQ ID NO: 74051 - RNA, 19 nt, Artificial Sequence
  Description of Artificial Sequence: Synthetic oligonucleotide
ggcgacagucugagacucu

SEQ ID NO: 74052 - RNA, 19 nt, Artificial Sequence
  Description of Artificial Sequence: Synthetic oligonucleotide
aaaaaaaagaaacuucagu

SEQ ID NO: 74053 - RNA, 19 nt, Artificial Sequence
  Description of Artificial Sequence: Synthetic oligonucleotide
uuaacagccuccuuggugc

SEQ ID NO: 74054 - RNA, 19 nt, Artificial Sequence
  Description of Artificial Sequence: Synthetic oligonucleotide
cuuuaagcauucagcuucc

SEQ ID NO: 74055 - RNA, 19 nt, Artificial Sequence
  Description of Artificial Sequence: Synthetic oligonucleotide
cuucaggcugguaauuuau

SEQ ID NO: 74056 - RNA, 19 nt, Artificial Sequence
  Description of Artificial Sequence: Synthetic oligonucleotide
uauaaucccugaaacgggc

SEQ ID NO: 74057 - RNA, 19 nt, Artificial Sequence
  Description of Artificial Sequence: Synthetic oligonucleotide
cuucaggucaaacccuuaa

SEQ ID NO: 74058 - RNA, 19 nt, Artificial Sequence
  Description of Artificial Sequence: Synthetic oligonucleotide
agacaucugaagcugcaac

SEQ ID NO: 74059 - RNA, 19 nt, Artificial Sequence
  Description of Artificial Sequence: Synthetic oligonucleotide
ccuggccuuugguguugaa

SEQ ID NO: 74060 - RNA, 19 nt, Artificial Sequence
  Description of Artificial Sequence: Synthetic oligonucleotide
aauaggaagguuuaaggag

SEQ ID NO: 74061 - RNA, 19 nt, Artificial Sequence
  Description of Artificial Sequence: Synthetic oligonucleotide
gaaucuaagcauuuuagac

SEQ ID NO: 74062 - RNA, 19 nt, Artificial Sequence
  Description of Artificial Sequence: Synthetic oligonucleotide
cuuuuuuuuauaaauagac

SEQ ID NO: 74063 - RNA, 19 nt, Artificial Sequence
  Description of Artificial Sequence: Synthetic oligonucleotide
cuuauuuuccuuuguaaug

SEQ ID NO: 74064 - RNA, 19 nt, Artificial Sequence
  Description of Artificial Sequence: Synthetic oligonucleotide
guauuggccuuuuagugag

SEQ ID NO: 74065 - RNA, 19 nt, Artificial Sequence
  Description of Artificial Sequence: Synthetic oligonucleotide
guaaggcugggcagagggu

SEQ ID NO: 74066 - RNA, 19 nt, Artificial Sequence
  Description of Artificial Sequence: Synthetic oligonucleotide
ugcuuacaaccuugacucc

SEQ ID NO: 74067 - RNA, 19 nt, Artificial Sequence
  Description of Artificial Sequence: Synthetic oligonucleotide
ccuuucucccuggacuuga

SEQ ID NO: 74068 - RNA, 19 nt, Artificial Sequence
  Description of Artificial Sequence: Synthetic oligonucleotide
aucugcuguuucagaggcu

SEQ ID NO: 74069 - RNA, 19 nt, Artificial Sequence
  Description of Artificial Sequence: Synthetic oligonucleotide
uagguuguuucugugggug

SEQ ID NO: 74070 - RNA, 19 nt, Artificial Sequence
  Description of Artificial Sequence: Synthetic oligonucleotide
gccuuaucagggcugggau

SEQ ID NO: 74071 - RNA, 19 nt, Artificial Sequence
  Description of Artificial Sequence: Synthetic oligonucleotide
uacuucugauucuggcuuc

SEQ ID NO: 74072 - RNA, 19 nt, Artificial Sequence
  Description of Artificial Sequence: Synthetic oligonucleotide
ccuuccugccccacccucc

SEQ ID NO: 74073 - RNA, 19 nt, Artificial Sequence
  Description of Artificial Sequence: Synthetic oligonucleotide
ccgaccccagucccccuga

SEQ ID NO: 74074 - RNA, 19 nt, Artificial Sequence
  Description of Artificial Sequence: Synthetic oligonucleotide
auccugcuagaggcauguc

SEQ ID NO: 74075 - RNA, 19 nt, Artificial Sequence
  Description of Artificial Sequence: Synthetic oligonucleotide
cuccuugcgugucuaaagg

SEQ ID NO: 74076 - RNA, 19 nt, Artificial Sequence
  Description of Artificial Sequence: Synthetic oligonucleotide
gucccucauccuguuuguu

SEQ ID NO: 74077 - RNA, 19 nt, Artificial Sequence
  Description of Artificial Sequence: Synthetic oligonucleotide
uuuaggaauccuggucuca

SEQ ID NO: 74078 - RNA, 19 nt, Artificial Sequence
  Description of Artificial Sequence: Synthetic oligonucleotide
aggaccucauggaagaaga

SEQ ID NO: 74079 - RNA, 19 nt, Artificial Sequence
  Description of Artificial Sequence: Synthetic oligonucleotide
agggggagagaguuacagg

SEQ ID NO: 74080 - RNA, 19 nt, Artificial Sequence
  Description of Artificial Sequence: Synthetic oligonucleotide
guuggacaugaugcacacu

SEQ ID NO: 74081 - RNA, 19 nt, Artificial Sequence
  Description of Artificial Sequence: Synthetic oligonucleotide
uauggggccccagcgacgu

SEQ ID NO: 74082 - RNA, 19 nt, Artificial Sequence
  Description of Artificial Sequence: Synthetic oligonucleotide
ugucugguugagcucaggg

SEQ ID NO: 74083 - RNA, 19 nt, Artificial Sequence
  Description of Artificial Sequence: Synthetic oligonucleotide
gaauaugguucuuagccag

SEQ ID NO: 74084 - RNA, 19 nt, Artificial Sequence
  Description of Artificial Sequence: Synthetic oligonucleotide
guuucuuggugauauccag

SEQ ID NO: 74085 - RNA, 19 nt, Artificial Sequence
  Description of Artificial Sequence: Synthetic oligonucleotide
guggcacuuguaauggcgu

SEQ ID NO: 74086 - RNA, 19 nt, Artificial Sequence
  Description of Artificial Sequence: Synthetic oligonucleotide
ucuucauucaguucaugca

SEQ ID NO: 74087 - RNA, 19 nt, Artificial Sequence
  Description of Artificial Sequence: Synthetic oligonucleotide
agggcaaaggcuuacugau

SEQ ID NO: 74088 - RNA, 19 nt, Artificial Sequence
  Description of Artificial Sequence: Synthetic oligonucleotide
uaaacuugagucugcccuc

SEQ ID NO: 74089 - RNA, 19 nt, Artificial Sequence
  Description of Artificial Sequence: Synthetic oligonucleotide
cguaugaggguguauaccu

SEQ ID NO: 74090 - RNA, 19 nt, Artificial Sequence
  Description of Artificial Sequence: Synthetic oligonucleotide
uggccucccucugaggcug

SEQ ID NO: 74091 - RNA, 19 nt, Artificial Sequence
  Description of Artificial Sequence: Synthetic oligonucleotide
ggugacuccucccugcugg

SEQ ID NO: 74092 - RNA, 19 nt, Artificial Sequence
  Description of Artificial Sequence: Synthetic oligonucleotide
gggccccacaggugaggca

SEQ ID NO: 74093 - RNA, 19 nt, Artificial Sequence
  Description of Artificial Sequence: Synthetic oligonucleotide
agaacagcuagagggccuc

SEQ ID NO: 74094 - RNA, 19 nt, Artificial Sequence
  Description of Artificial Sequence: Synthetic oligonucleotide
ccccgccugcccgccuugg

SEQ ID NO: 74095 - RNA, 19 nt, Artificial Sequence
  Description of Artificial Sequence: Synthetic oligonucleotide
gcuggcuagcucgccucuc

SEQ ID NO: 74096 - RNA, 19 nt, Artificial Sequence
  Description of Artificial Sequence: Synthetic oligonucleotide
ccugugcguaugggaacac

SEQ ID NO: 74097 - RNA, 19 nt, Artificial Sequence
  Description of Artificial Sequence: Synthetic oligonucleotide
ccuagcacgugcuggaugg

SEQ ID NO: 74098 - RNA, 19 nt, Artificial Sequence
  Description of Artificial Sequence: Synthetic oligonucleotide
ggcugccucugacucagag

SEQ ID NO: 74099 - RNA, 19 nt, Artificial Sequence
  Description of Artificial Sequence: Synthetic oligonucleotide
ggcauggccggauuuggca

SEQ ID NO: 74100 - RNA, 19 nt, Artificial Sequence
  Description of Artificial Sequence: Synthetic oligonucleotide
aacucaaaaccaccuugcc

SEQ ID NO: 74101 - RNA, 19 nt, Artificial Sequence
  Description of Artificial Sequence: Synthetic oligonucleotide
cucagcugaucagaguuuc

SEQ ID NO: 74102 - RNA, 19 nt, Artificial Sequence
  Description of Artificial Sequence: Synthetic oligonucleotide
cuguggaauucuguuuguu

SEQ ID NO: 74103 - RNA, 19 nt, Artificial Sequence
  Description of Artificial Sequence: Synthetic oligonucleotide
uaaaucaaauuagcugguc

SEQ ID NO: 74104 - RNA, 19 nt, Artificial Sequence
  Description of Artificial Sequence: Synthetic oligonucleotide
cucugaauuaagggggaga

SEQ ID NO: 74105 - RNA, 19 nt, Artificial Sequence
  Description of Artificial Sequence: Synthetic oligonucleotide
acgaccuucucuaagauga

SEQ ID NO: 74106 - RNA, 19 nt, Artificial Sequence
  Description of Artificial Sequence: Synthetic oligonucleotide
aacaggguucgccccaguc

SEQ ID NO: 74107 - RNA, 19 nt, Artificial Sequence
  Description of Artificial Sequence: Synthetic oligonucleotide
ccuccugccuggagacagu

SEQ ID NO: 74108 - RNA, 19 nt, Artificial Sequence
  Description of Artificial Sequence: Synthetic oligonucleotide
uugaugugucaugcagagc

SEQ ID NO: 74109 - RNA, 19 nt, Artificial Sequence
  Description of Artificial Sequence: Synthetic oligonucleotide
cucuuacuucuccagcaac

SEQ ID NO: 74110 - RNA, 19 nt, Artificial Sequence
  Description of Artificial Sequence: Synthetic oligonucleotide
cacucuucaguacauaaua

SEQ ID NO: 74111 - RNA, 19 nt, Artificial Sequence
  Description of Artificial Sequence: Synthetic oligonucleotide
aagcuuaacugauaaacag

SEQ ID NO: 74112 - RNA, 19 nt, Artificial Sequence
  Description of Artificial Sequence: Synthetic oligonucleotide
gaauauuuagaaaggugag

SEQ ID NO: 74113 - RNA, 19 nt, Artificial Sequence
  Description of Artificial Sequence: Synthetic oligonucleotide
gacuugggcuuaccauugg

SEQ ID NO: 74114 - RNA, 19 nt, Artificial Sequence
  Description of Artificial Sequence: Synthetic oligonucleotide
gguuuaaaucauagggacc

SEQ ID NO: 74115 - RNA, 19 nt, Artificial Sequence
  Description of Artificial Sequence: Synthetic oligonucleotide
cuagggcgaggguucaggg

SEQ ID NO: 74116 - RNA, 19 nt, Artificial Sequence
  Description of Artificial Sequence: Synthetic oligonucleotide
gcuucucuggagcagauau

SEQ ID NO: 74117 - RNA, 19 nt, Artificial Sequence
  Description of Artificial Sequence: Synthetic oligonucleotide
uugucaaguucauggccuu

SEQ ID NO: 74118 - RNA, 19 nt, Artificial Sequence
  Description of Artificial Sequence: Synthetic oligonucleotide
uagguagcauguaucuggu

SEQ ID NO: 74119 - RNA, 19 nt, Artificial Sequence
  Description of Artificial Sequence: Synthetic oligonucleotide
ucuuaacucugauuguagc

SEQ ID NO: 74120 - RNA, 19 nt, Artificial Sequence
  Description of Artificial Sequence: Synthetic oligonucleotide
caaaaguucugagaggagc

SEQ ID NO: 74121 - RNA, 19 nt, Artificial Sequence
  Description of Artificial Sequence: Synthetic oligonucleotide
cugagcccuguuguggccc

SEQ ID NO: 74122 - RNA, 19 nt, Artificial Sequence
  Description of Artificial Sequence: Synthetic oligonucleotide
cauuaaagaacaggguccu

SEQ ID NO: 74123 - RNA, 19 nt, Artificial Sequence
  Description of Artificial Sequence: Synthetic oligonucleotide
ucaggcccugcccgcuucc

SEQ ID NO: 74124 - RNA, 19 nt, Artificial Sequence
  Description of Artificial Sequence: Synthetic oligonucleotide
cuguccacugcccccuccc

SEQ ID NO: 74125 - RNA, 19 nt, Artificial Sequence
  Description of Artificial Sequence: Synthetic oligonucleotide
ccauccccagcccagccga

SEQ ID NO: 74126 - RNA, 19 nt, Artificial Sequence
  Description of Artificial Sequence: Synthetic oligonucleotide
agggaaucccguggguugc

SEQ ID NO: 74127 - RNA, 19 nt, Artificial Sequence
  Description of Artificial Sequence: Synthetic oligonucleotide
cuuaccuaccuauaaggug

SEQ ID NO: 74128 - RNA, 19 nt, Artificial Sequence
  Description of Artificial Sequence: Synthetic oligonucleotide
gguuuauaagcugcugucc

SEQ ID NO: 74129 - RNA, 19 nt, Artificial Sequence
  Description of Artificial Sequence: Synthetic oligonucleotide
cuggccacugcauucaaau

SEQ ID NO: 74130 - RNA, 19 nt, Artificial Sequence
  Description of Artificial Sequence: Synthetic oligonucleotide
uuccaauguguacuucaua

SEQ ID NO: 74131 - RNA, 19 nt, Artificial Sequence
  Description of Artificial Sequence: Synthetic oligonucleotide
aguguaaaaauuuauauua

SEQ ID NO: 74132 - RNA, 19 nt, Artificial Sequence
  Description of Artificial Sequence: Synthetic oligonucleotide
auugugagguuuuuugucu

SEQ ID NO: 74133 - RNA, 19 nt, Artificial Sequence
  Description of Artificial Sequence: Synthetic oligonucleotide
uuuugguauauugcuguau

SEQ ID NO: 74134 - RNA, 19 nt, Artificial Sequence
  Description of Artificial Sequence: Synthetic oligonucleotide
ucuacuuuaacuuccagaa

SEQ ID NO: 74135 - RNA, 19 nt, Artificial Sequence
  Description of Artificial Sequence: Synthetic oligonucleotide
aauaaacguuauauaggaa

SEQ ID NO: 74136 - RNA, 19 nt, Artificial Sequence
  Description of Artificial Sequence: Synthetic oligonucleotide
uauauaggaaccguaaaaa

SEQ ID NO: 74137 - RNA, 19 nt, Artificial Sequence
  Description of Artificial Sequence: Synthetic oligonucleotide
gugacaccauucauugaug

SEQ ID NO: 74138 - RNA, 19 nt, Artificial Sequence
  Description of Artificial Sequence: Synthetic oligonucleotide
gcaguuuggaaauaauggu

SEQ ID NO: 74139 - RNA, 19 nt, Artificial Sequence
  Description of Artificial Sequence: Synthetic oligonucleotide
ugaaggugcugaacccuca

SEQ ID NO: 74140 - RNA, 19 nt, Artificial Sequence
  Description of Artificial Sequence: Synthetic oligonucleotide
agcaggagggcaguuugag

SEQ ID NO: 74141 - RNA, 19 nt, Artificial Sequence
  Description of Artificial Sequence: Synthetic oligonucleotide
gucccucaccuuugacaug

SEQ ID NO: 74142 - RNA, 19 nt, Artificial Sequence
  Description of Artificial Sequence: Synthetic oligonucleotide
ggaguugaccucggagugc

SEQ ID NO: 74143 - RNA, 19 nt, Artificial Sequence
  Description of Artificial Sequence: Synthetic oligonucleotide
cgcuaccucccccauguga

SEQ ID NO: 74144 - RNA, 19 nt, Artificial Sequence
  Description of Artificial Sequence: Synthetic oligonucleotide
aggagcugagaacggaagc

SEQ ID NO: 74145 - RNA, 19 nt, Artificial Sequence
  Description of Artificial Sequence: Synthetic oligonucleotide
cugcagaaagauacgacug

SEQ ID NO: 74146 - RNA, 19 nt, Artificial Sequence
  Description of Artificial Sequence: Synthetic oligonucleotide
gaggcgccuaccugcauuc

SEQ ID NO: 74147 - RNA, 19 nt, Artificial Sequence
  Description of Artificial Sequence: Synthetic oligonucleotide
cugccaccccucacacagc

SEQ ID NO: 74148 - RNA, 19 nt, Artificial Sequence
  Description of Artificial Sequence: Synthetic oligonucleotide
ccaaaccccagaucaucug

SEQ ID NO: 74149 - RNA, 19 nt, Artificial Sequence
  Description of Artificial Sequence: Synthetic oligonucleotide
gaaacuacuaacuuugugg

SEQ ID NO: 74150 - RNA, 19 nt, Artificial Sequence
  Description of Artificial Sequence: Synthetic oligonucleotide
guuccagauuuuuuuuaau

SEQ ID NO: 74151 - RNA, 19 nt, Artificial Sequence
  Description of Artificial Sequence: Synthetic oligonucleotide
ucuccuacuucugcuaucu

SEQ ID NO: 74152 - RNA, 19 nt, Artificial Sequence
  Description of Artificial Sequence: Synthetic oligonucleotide
uuugagcaaucugggcacu

SEQ ID NO: 74153 - RNA, 19 nt, Artificial Sequence
  Description of Artificial Sequence: Synthetic oligonucleotide
uuuuaaaaauagagaaaug

SEQ ID NO: 74154 - RNA, 19 nt, Artificial Sequence
  Description of Artificial Sequence: Synthetic oligonucleotide
gagugaaugugggugaucu

SEQ ID NO: 74155 - RNA, 19 nt, Artificial Sequence
  Description of Artificial Sequence: Synthetic oligonucleotide
ugcuuuuaucuaaaugcaa

SEQ ID NO: 74156 - RNA, 19 nt, Artificial Sequence
  Description of Artificial Sequence: Synthetic oligonucleotide
aauaaggauguguucucug

SEQ ID NO: 74157 - RNA, 19 nt, Artificial Sequence
  Description of Artificial Sequence: Synthetic oligonucleotide
gagacccaugaucagggga

SEQ ID NO: 74158 - RNA, 19 nt, Artificial Sequence
  Description of Artificial Sequence: Synthetic oligonucleotide
auguggcgggggguggcua

SEQ ID NO: 74159 - RNA, 19 nt, Artificial Sequence
  Description of Artificial Sequence: Synthetic oligonucleotide
agagggagaaaaaggaaau

SEQ ID NO: 74160 - RNA, 19 nt, Artificial Sequence
  Description of Artificial Sequence: Synthetic oligonucleotide
ugucuuguguuguuuuguu

SEQ ID NO: 74161 - RNA, 19 nt, Artificial Sequence
  Description of Artificial Sequence: Synthetic oligonucleotide
uccccugcccuccuuucuc

SEQ ID NO: 74162 - RNA, 19 nt, Artificial Sequence
  Description of Artificial Sequence: Synthetic oligonucleotide
cagcagcuuuuuguuauug

SEQ ID NO: 74163 - RNA, 19 nt, Artificial Sequence
  Description of Artificial Sequence: Synthetic oligonucleotide
guuguuguuguucuuagac

SEQ ID NO: 74164 - RNA, 19 nt, Artificial Sequence
  Description of Artificial Sequence: Synthetic oligonucleotide
caagugccuccuggugccu

SEQ ID NO: 74165 - RNA, 19 nt, Artificial Sequence
  Description of Artificial Sequence: Synthetic oligonucleotide
ugcggcauccuucugccug

SEQ ID NO: 74166 - RNA, 19 nt, Artificial Sequence
  Description of Artificial Sequence: Synthetic oligonucleotide
guuucuguaagcaaaugcc

SEQ ID NO: 74167 - RNA, 19 nt, Artificial Sequence
  Description of Artificial Sequence: Synthetic oligonucleotide
cacaggccaccuauagcua

SEQ ID NO: 74168 - RNA, 19 nt, Artificial Sequence
  Description of Artificial Sequence: Synthetic oligonucleotide
acauacuccuggcauugca

SEQ ID NO: 74169 - RNA, 19 nt, Artificial Sequence
  Description of Artificial Sequence: Synthetic oligonucleotide
acuuuuuaaccuugcugac

SEQ ID NO: 74170 - RNA, 19 nt, Artificial Sequence
  Description of Artificial Sequence: Synthetic oligonucleotide
cauccaaauagaagauagg

SEQ ID NO: 74171 - RNA, 19 nt, Artificial Sequence
  Description of Artificial Sequence: Synthetic oligonucleotide
gacuaucuaagcccuaggu

SEQ ID NO: 74172 - RNA, 19 nt, Artificial Sequence
  Description of Artificial Sequence: Synthetic oligonucleotide
uuucuuuuuaaauuaagaa

SEQ ID NO: 74173 - RNA, 19 nt, Artificial Sequence
  Description of Artificial Sequence: Synthetic oligonucleotide
aauaauaacaauuaaaggg

SEQ ID NO: 74174 - RNA, 19 nt, Artificial Sequence
  Description of Artificial Sequence: Synthetic oligonucleotide
gcaaaaaacacuguaucag

SEQ ID NO: 74175 - RNA, 19 nt, Artificial Sequence
  Description of Artificial Sequence: Synthetic oligonucleotide
gcauagccuuucuguauuu

SEQ ID NO: 74176 - RNA, 19 nt, Artificial Sequence
  Description of Artificial Sequence: Synthetic oligonucleotide
uaagaaacuuaagcagccg

SEQ ID NO: 74177 - RNA, 19 nt, Artificial Sequence
  Description of Artificial Sequence: Synthetic oligonucleotide
gggcaugguggcucacgcc

SEQ ID NO: 74178 - RNA, 19 nt, Artificial Sequence
  Description of Artificial Sequence: Synthetic oligonucleotide
cuguaaucccagcacuuug

SEQ ID NO: 74179 - RNA, 19 nt, Artificial Sequence
  Description of Artificial Sequence: Synthetic oligonucleotide
gggaggccgaggcggauca

SEQ ID NO: 74180 - RNA, 19 nt, Artificial Sequence
  Description of Artificial Sequence: Synthetic oligonucleotide
auaaggucaggagaucaag

SEQ ID NO: 74181 - RNA, 19 nt, Artificial Sequence
  Description of Artificial Sequence: Synthetic oligonucleotide
gaccauccuggcuaacacg

SEQ ID NO: 74182 - RNA, 19 nt, Artificial Sequence
  Description of Artificial Sequence: Synthetic oligonucleotide
ggugaaaccccgucucuac

SEQ ID NO: 74183 - RNA, 19 nt, Artificial Sequence
  Description of Artificial Sequence: Synthetic oligonucleotide
cuaaaaguacaaaaaauua

SEQ ID NO: 74184 - RNA, 19 nt, Artificial Sequence
  Description of Artificial Sequence: Synthetic oligonucleotide
agcuggguguggugguggg

SEQ ID NO: 74185 - RNA, 19 nt, Artificial Sequence
  Description of Artificial Sequence: Synthetic oligonucleotide
gcgccuguagucccagcua

SEQ ID NO: 74186 - RNA, 19 nt, Artificial Sequence
  Description of Artificial Sequence: Synthetic oligonucleotide
acucgggaggcugaggcag

SEQ ID NO: 74187 - RNA, 19 nt, Artificial Sequence
  Description of Artificial Sequence: Synthetic oligonucleotide
ggagaaucgcuugaaccug

SEQ ID NO: 74188 - RNA, 19 nt, Artificial Sequence
  Description of Artificial Sequence: Synthetic oligonucleotide
gagaggcggagguugcagu

SEQ ID NO: 74189 - RNA, 19 nt, Artificial Sequence
  Description of Artificial Sequence: Synthetic oligonucleotide
ugagccaaaauugcaccac

SEQ ID NO: 74190 - RNA, 19 nt, Artificial Sequence
  Description of Artificial Sequence: Synthetic oligonucleotide
cugcacacugcacuccauc

SEQ ID NO: 74191 - RNA, 19 nt, Artificial Sequence
  Description of Artificial Sequence: Synthetic oligonucleotide
ccugggcgacagucugaga

SEQ ID NO: 74192 - RNA, 19 nt, Artificial Sequence
  Description of Artificial Sequence: Synthetic oligonucleotide
acucugucucaaaaaaaaa

SEQ ID NO: 74193 - RNA, 19 nt, Artificial Sequence
  Description of Artificial Sequence: Synthetic oligonucleotide
ucaguuaacagccuccuug

SEQ ID NO: 74194 - RNA, 19 nt, Artificial Sequence
  Description of Artificial Sequence: Synthetic oligonucleotide
ggugcuuuaagcauucagc

SEQ ID NO: 74195 - RNA, 19 nt, Artificial Sequence
  Description of Artificial Sequence: Synthetic oligonucleotide
cuuccuucaggcugguaau

SEQ ID NO: 74196 - RNA, 19 nt, Artificial Sequence
  Description of Artificial Sequence: Synthetic oligonucleotide
uuuauauaaucccugaaac

SEQ ID NO: 74197 - RNA, 19 nt, Artificial Sequence
  Description of Artificial Sequence: Synthetic oligonucleotide
cgggcuucaggucaaaccc

SEQ ID NO: 74198 - RNA, 19 nt, Artificial Sequence
  Description of Artificial Sequence: Synthetic oligonucleotide
cuuaagacaucugaagcug

SEQ ID NO: 74199 - RNA, 19 nt, Artificial Sequence
  Description of Artificial Sequence: Synthetic oligonucleotide
gcaaccuggccuuuggugu

SEQ ID NO: 74200 - RNA, 19 nt, Artificial Sequence
  Description of Artificial Sequence: Synthetic oligonucleotide
uugaaauaggaagguuuaa

SEQ ID NO: 74201 - RNA, 19 nt, Artificial Sequence
  Description of Artificial Sequence: Synthetic oligonucleotide
aggagaaucuaagcauuuu

SEQ ID NO: 74202 - RNA, 19 nt, Artificial Sequence
  Description of Artificial Sequence: Synthetic oligonucleotide
uagacuuuuuuuuauaaau

SEQ ID NO: 74203 - RNA, 19 nt, Artificial Sequence
  Description of Artificial Sequence: Synthetic oligonucleotide
uagacuuauuuuccuuugu

SEQ ID NO: 74204 - RNA, 19 nt, Artificial Sequence
  Description of Artificial Sequence: Synthetic oligonucleotide
uaauguauuggccuuuuag

SEQ ID NO: 74205 - RNA, 19 nt, Artificial Sequence
  Description of Artificial Sequence: Synthetic oligonucleotide
gugaguaaggcugggcaga

SEQ ID NO: 74206 - RNA, 19 nt, Artificial Sequence
  Description of Artificial Sequence: Synthetic oligonucleotide
agggugcuuacaaccuuga

SEQ ID NO: 74207 - RNA, 19 nt, Artificial Sequence
  Description of Artificial Sequence: Synthetic oligonucleotide
acucccuuucucccuggac

SEQ ID NO: 74208 - RNA, 19 nt, Artificial Sequence
  Description of Artificial Sequence: Synthetic oligonucleotide
cuugaucugcuguuucaga

SEQ ID NO: 74209 - RNA, 19 nt, Artificial Sequence
  Description of Artificial Sequence: Synthetic oligonucleotide
aggcuagguuguuucugug

SEQ ID NO: 74210 - RNA, 19 nt, Artificial Sequence
  Description of Artificial Sequence: Synthetic oligonucleotide
gggugccuuaucagggcug

SEQ ID NO: 74211 - RNA, 19 nt, Artificial Sequence
  Description of Artificial Sequence: Synthetic oligonucleotide
gggauacuucugauucugg

SEQ ID NO: 74212 - RNA, 19 nt, Artificial Sequence
  Description of Artificial Sequence: Synthetic oligonucleotide
gcuuccuuccugccccacc

SEQ ID NO: 74213 - RNA, 19 nt, Artificial Sequence
  Description of Artificial Sequence: Synthetic oligonucleotide
ccucccgaccccagucccc

SEQ ID NO: 74214 - RNA, 19 nt, Artificial Sequence
  Description of Artificial Sequence: Synthetic oligonucleotide
ccugauccugcuagaggca

SEQ ID NO: 74215 - RNA, 19 nt, Artificial Sequence
  Description of Artificial Sequence: Synthetic oligonucleotide
augucuccuugcgugucua

SEQ ID NO: 74216 - RNA, 19 nt, Artificial Sequence
  Description of Artificial Sequence: Synthetic oligonucleotide
aaaggucccucauccuguu

SEQ ID NO: 74217 - RNA, 19 nt, Artificial Sequence
  Description of Artificial Sequence: Synthetic oligonucleotide
uuguuuuaggaauccuggu

SEQ ID NO: 74218 - RNA, 19 nt, Artificial Sequence
  Description of Artificial Sequence: Synthetic oligonucleotide
ucucaggaccucauggaag

SEQ ID NO: 74219 - RNA, 19 nt, Artificial Sequence
  Description of Artificial Sequence: Synthetic oligonucleotide
gaagagggggagagaguua

SEQ ID NO: 74220 - RNA, 19 nt, Artificial Sequence
  Description of Artificial Sequence: Synthetic oligonucleotide
acagguuggacaugaugca

SEQ ID NO: 74221 - RNA, 19 nt, Artificial Sequence
  Description of Artificial Sequence: Synthetic oligonucleotide
acacuauggggccccagcg

SEQ ID NO: 74222 - RNA, 19 nt, Artificial Sequence
  Description of Artificial Sequence: Synthetic oligonucleotide
gacgugucugguugagcuc

SEQ ID NO: 74223 - RNA, 19 nt, Artificial Sequence
  Description of Artificial Sequence: Synthetic oligonucleotide
cagggaauaugguucuuag

SEQ ID NO: 74224 - RNA, 19 nt, Artificial Sequence
  Description of Artificial Sequence: Synthetic oligonucleotide
gccaguuucuuggugauau

SEQ ID NO: 74225 - RNA, 19 nt, Artificial Sequence
  Description of Artificial Sequence: Synthetic oligonucleotide
uccaguggcacuuguaaug

SEQ ID NO: 74226 - RNA, 19 nt, Artificial Sequence
  Description of Artificial Sequence: Synthetic oligonucleotide
ggcgucuucauucaguuca

SEQ ID NO: 74227 - RNA, 19 nt, Artificial Sequence
  Description of Artificial Sequence: Synthetic oligonucleotide
augcagggcaaaggcuuac

SEQ ID NO: 74228 - RNA, 19 nt, Artificial Sequence
  Description of Artificial Sequence: Synthetic oligonucleotide
cugauaaacuugagucugc

SEQ ID NO: 74229 - RNA, 19 nt, Artificial Sequence
  Description of Artificial Sequence: Synthetic oligonucleotide
cccucguaugaggguguau

SEQ ID NO: 74230 - RNA, 19 nt, Artificial Sequence
  Description of Artificial Sequence: Synthetic oligonucleotide
uaccuggccucccucugag

SEQ ID NO: 74231 - RNA, 19 nt, Artificial Sequence
  Description of Artificial Sequence: Synthetic oligonucleotide
ggcuggugacuccucccug

SEQ ID NO: 74232 - RNA, 19 nt, Artificial Sequence
  Description of Artificial Sequence: Synthetic oligonucleotide
gcuggggccccacagguga

SEQ ID NO: 74233 - RNA, 19 nt, Artificial Sequence
  Description of Artificial Sequence: Synthetic oligonucleotide
aggcagaacagcuagaggg

SEQ ID NO: 74234 - RNA, 19 nt, Artificial Sequence
  Description of Artificial Sequence: Synthetic oligonucleotide
gccuccccgccugcccgcc

SEQ ID NO: 74235 - RNA, 19 nt, Artificial Sequence
  Description of Artificial Sequence: Synthetic oligonucleotide
cuuggcuggcuagcucgcc

SEQ ID NO: 74236 - RNA, 19 nt, Artificial Sequence
  Description of Artificial Sequence: Synthetic oligonucleotide
cucuccugugcguauggga

SEQ ID NO: 74237 - RNA, 19 nt, Artificial Sequence
  Description of Artificial Sequence: Synthetic oligonucleotide
aacaccuagcacgugcugg

SEQ ID NO: 74238 - RNA, 19 nt, Artificial Sequence
  Description of Artificial Sequence: Synthetic oligonucleotide
gaugggcugccucugacuc

SEQ ID NO: 74239 - RNA, 19 nt, Artificial Sequence
  Description of Artificial Sequence: Synthetic oligonucleotide
cagaggcauggccggauuu

SEQ ID NO: 74240 - RNA, 19 nt, Artificial Sequence
  Description of Artificial Sequence: Synthetic oligonucleotide
uggcaacucaaaaccaccu

SEQ ID NO: 74241 - RNA, 19 nt, Artificial Sequence
  Description of Artificial Sequence: Synthetic oligonucleotide
uugccucagcugaucagag

SEQ ID NO: 74242 - RNA, 19 nt, Artificial Sequence
  Description of Artificial Sequence: Synthetic oligonucleotide
guuucuguggaauucuguu

SEQ ID NO: 74243 - RNA, 19 nt, Artificial Sequence
  Description of Artificial Sequence: Synthetic oligonucleotide
uuguuaaaucaaauuagcu

SEQ ID NO: 74244 - RNA, 19 nt, Artificial Sequence
  Description of Artificial Sequence: Synthetic oligonucleotide
uggucucugaauuaagggg

SEQ ID NO: 74245 - RNA, 19 nt, Artificial Sequence
  Description of Artificial Sequence: Synthetic oligonucleotide
ggagacgaccuucucuaag

SEQ ID NO: 74246 - RNA, 19 nt, Artificial Sequence
  Description of Artificial Sequence: Synthetic oligonucleotide
gaugaacaggguucgcccc

SEQ ID NO: 74247 - RNA, 19 nt, Artificial Sequence
  Description of Artificial Sequence: Synthetic oligonucleotide
caguccuccugccuggaga

SEQ ID NO: 74248 - RNA, 19 nt, Artificial Sequence
  Description of Artificial Sequence: Synthetic oligonucleotide
acaguugaugugucaugca

SEQ ID NO: 74249 - RNA, 19 nt, Artificial Sequence
  Description of Artificial Sequence: Synthetic oligonucleotide
agagcucuuacuucuccag

SEQ ID NO: 74250 - RNA, 19 nt, Artificial Sequence
  Description of Artificial Sequence: Synthetic oligonucleotide
gcaacacucuucaguacau

SEQ ID NO: 74251 - RNA, 19 nt, Artificial Sequence
  Description of Artificial Sequence: Synthetic oligonucleotide
uaauaagcuuaacugauaa

SEQ ID NO: 74252 - RNA, 19 nt, Artificial Sequence
  Description of Artificial Sequence: Synthetic oligonucleotide
aacagaauauuuagaaagg

SEQ ID NO: 74253 - RNA, 19 nt, Artificial Sequence
  Description of Artificial Sequence: Synthetic oligonucleotide
gugagacuugggcuuacca

SEQ ID NO: 74254 - RNA, 19 nt, Artificial Sequence
  Description of Artificial Sequence: Synthetic oligonucleotide
auuggguuuaaaucauagg

SEQ ID NO: 74255 - RNA, 19 nt, Artificial Sequence
  Description of Artificial Sequence: Synthetic oligonucleotide
ggaccuagggcgaggguuc

SEQ ID NO: 74256 - RNA, 19 nt, Artificial Sequence
  Description of Artificial Sequence: Synthetic oligonucleotide
cagggcuucucuggagcag

SEQ ID NO: 74257 - RNA, 19 nt, Artificial Sequence
  Description of Artificial Sequence: Synthetic oligonucleotide
gauauugucaaguucaugg

SEQ ID NO: 74258 - RNA, 19 nt, Artificial Sequence
  Description of Artificial Sequence: Synthetic oligonucleotide
gccuuagguagcauguauc

SEQ ID NO: 74259 - RNA, 19 nt, Artificial Sequence
  Description of Artificial Sequence: Synthetic oligonucleotide
cuggucuuaacucugauug

SEQ ID NO: 74260 - RNA, 19 nt, Artificial Sequence
  Description of Artificial Sequence: Synthetic oligonucleotide
guagcaaaaguucugagag

SEQ ID NO: 74261 - RNA, 19 nt, Artificial Sequence
  Description of Artificial Sequence: Synthetic oligonucleotide
ggagcugagcccuguugug

SEQ ID NO: 74262 - RNA, 19 nt, Artificial Sequence
  Description of Artificial Sequence: Synthetic oligonucleotide
ggcccauuaaagaacaggg

SEQ ID NO: 74263 - RNA, 19 nt, Artificial Sequence
  Description of Artificial Sequence: Synthetic oligonucleotide
guccucaggcccugcccgc

SEQ ID NO: 74264 - RNA, 19 nt, Artificial Sequence
  Description of Artificial Sequence: Synthetic oligonucleotide
cuuccuguccacugccccc

SEQ ID NO: 74265 - RNA, 19 nt, Artificial Sequence
  Description of Artificial Sequence: Synthetic oligonucleotide
cuccccauccccagcccag

SEQ ID NO: 74266 - RNA, 19 nt, Artificial Sequence
  Description of Artificial Sequence: Synthetic oligonucleotide
gccgagggaaucccguggg

SEQ ID NO: 74267 - RNA, 19 nt, Artificial Sequence
  Description of Artificial Sequence: Synthetic oligonucleotide
guugcuuaccuaccuauaa

SEQ ID NO: 74268 - RNA, 19 nt, Artificial Sequence
  Description of Artificial Sequence: Synthetic oligonucleotide
aggugguuuauaagcugcu

SEQ ID NO: 74269 - RNA, 19 nt, Artificial Sequence
  Description of Artificial Sequence: Synthetic oligonucleotide
uguccuggccacugcauuc

SEQ ID NO: 74270 - RNA, 19 nt, Artificial Sequence
  Description of Artificial Sequence: Synthetic oligonucleotide
caaauuccaauguguacuu

SEQ ID NO: 74271 - RNA, 19 nt, Artificial Sequence
  Description of Artificial Sequence: Synthetic oligonucleotide
ucauaguguaaaaauuuau

SEQ ID NO: 74272 - RNA, 19 nt, Artificial Sequence
  Description of Artificial Sequence: Synthetic oligonucleotide
uauuauugugagguuuuuu

SEQ ID NO: 74273 - RNA, 19 nt, Artificial Sequence
  Description of Artificial Sequence: Synthetic oligonucleotide
uuuuuuuugguauauugcu

SEQ ID NO: 74274 - RNA, 19 nt, Artificial Sequence
  Description of Artificial Sequence: Synthetic oligonucleotide
uguaucuacuuuaacuucc

SEQ ID NO: 74275 - RNA, 19 nt, Artificial Sequence
  Description of Artificial Sequence: Synthetic oligonucleotide
cagaaauaaacguuauaua

SEQ ID NO: 74276 - RNA, 19 nt, Artificial Sequence
  Description of Artificial Sequence: Synthetic oligonucleotide
uuauauaggaaccguaaaa

SEQ ID NO: 74277 - RNA, 19 nt, Artificial Sequence
  Description of Artificial Sequence: Synthetic oligonucleotide
ggauggcccaauggaauca

SEQ ID NO: 74278 - RNA, 19 nt, Artificial Sequence
  Description of Artificial Sequence: Synthetic oligonucleotide
agcuacagcagcuugacac

SEQ ID NO: 74279 - RNA, 19 nt, Artificial Sequence
  Description of Artificial Sequence: Synthetic oligonucleotide
cacgguaccuggagcagcu

SEQ ID NO: 74280 - RNA, 19 nt, Artificial Sequence
  Description of Artificial Sequence: Synthetic oligonucleotide
uccaucagcucuacaguga

SEQ ID NO: 74281 - RNA, 19 nt, Artificial Sequence
  Description of Artificial Sequence: Synthetic oligonucleotide
acagcuucccaauggagcu

SEQ ID NO: 74282 - RNA, 19 nt, Artificial Sequence
  Description of Artificial Sequence: Synthetic oligonucleotide
ugcggcaguuucuggcccc

SEQ ID NO: 74283 - RNA, 19 nt, Artificial Sequence
  Description of Artificial Sequence: Synthetic oligonucleotide
cuuggauugagagucaaga

SEQ ID NO: 74284 - RNA, 19 nt, Artificial Sequence
  Description of Artificial Sequence: Synthetic oligonucleotide
auugggcauaugcggccag

SEQ ID NO: 74285 - RNA, 19 nt, Artificial Sequence
  Description of Artificial Sequence: Synthetic oligonucleotide
gcaaagaaucacaugccac

SEQ ID NO: 74286 - RNA, 19 nt, Artificial Sequence
  Description of Artificial Sequence: Synthetic oligonucleotide
cuuugguguuucauaaucu

SEQ ID NO: 74287 - RNA, 19 nt, Artificial Sequence
  Description of Artificial Sequence: Synthetic oligonucleotide
uccugggagagauugacca

SEQ ID NO: 74288 - RNA, 19 nt, Artificial Sequence
  Description of Artificial Sequence: Synthetic oligonucleotide
agcaguauagccgcuuccu

SEQ ID NO: 74289 - RNA, 19 nt, Artificial Sequence
  Description of Artificial Sequence: Synthetic oligonucleotide
ugcaagagucgaauguucu

SEQ ID NO: 74290 - RNA, 19 nt, Artificial Sequence
  Description of Artificial Sequence: Synthetic oligonucleotide
ucuaucagcacaaucuacg

SEQ ID NO: 74291 - RNA, 19 nt, Artificial Sequence
  Description of Artificial Sequence: Synthetic oligonucleotide
gaagaaucaagcaguuucu

SEQ ID NO: 74292 - RNA, 19 nt, Artificial Sequence
  Description of Artificial Sequence: Synthetic oligonucleotide
uucagagcagguaucuuga

SEQ ID NO: 74293 - RNA, 19 nt, Artificial Sequence
  Description of Artificial Sequence: Synthetic oligonucleotide
agaagccaauggagauugc

SEQ ID NO: 74294 - RNA, 19 nt, Artificial Sequence
  Description of Artificial Sequence: Synthetic oligonucleotide
cccggauuguggcccggug

SEQ ID NO: 74295 - RNA, 19 nt, Artificial Sequence
  Description of Artificial Sequence: Synthetic oligonucleotide
gccugugggaagaaucacg

SEQ ID NO: 74296 - RNA, 19 nt, Artificial Sequence
  Description of Artificial Sequence: Synthetic oligonucleotide
gccuucuacagacugcagc

SEQ ID NO: 74297 - RNA, 19 nt, Artificial Sequence
  Description of Artificial Sequence: Synthetic oligonucleotide
ccacugcggcccagcaagg

SEQ ID NO: 74298 - RNA, 19 nt, Artificial Sequence
  Description of Artificial Sequence: Synthetic oligonucleotide
ggggccaggccaaccaccc

SEQ ID NO: 74299 - RNA, 19 nt, Artificial Sequence
  Description of Artificial Sequence: Synthetic oligonucleotide
ccacagcagccguggugac

SEQ ID NO: 74300 - RNA, 19 nt, Artificial Sequence
  Description of Artificial Sequence: Synthetic oligonucleotide
cggagaagcagcagaugcu

SEQ ID NO: 74301 - RNA, 19 nt, Artificial Sequence
  Description of Artificial Sequence: Synthetic oligonucleotide
uggagcagcaccuucagga

SEQ ID NO: 74302 - RNA, 19 nt, Artificial Sequence
  Description of Artificial Sequence: Synthetic oligonucleotide
auguccggaagagagugca

SEQ ID NO: 74303 - RNA, 19 nt, Artificial Sequence
  Description of Artificial Sequence: Synthetic oligonucleotide
aggaucuagaacagaaaau

SEQ ID NO: 74304 - RNA, 19 nt, Artificial Sequence
  Description of Artificial Sequence: Synthetic oligonucleotide
ugaaagugguagagaaucu

SEQ ID NO: 74305 - RNA, 19 nt, Artificial Sequence
  Description of Artificial Sequence: Synthetic oligonucleotide
uccaggaugacuuugauuu

SEQ ID NO: 74306 - RNA, 19 nt, Artificial Sequence
  Description of Artificial Sequence: Synthetic oligonucleotide
ucaacuauaaaacccucaa

SEQ ID NO: 74307 - RNA, 19 nt, Artificial Sequence
  Description of Artificial Sequence: Synthetic oligonucleotide
agagucaaggagacaugca

SEQ ID NO: 74308 - RNA, 19 nt, Artificial Sequence
  Description of Artificial Sequence: Synthetic oligonucleotide
aagaucugaauggaaacaa

SEQ ID NO: 74309 - RNA, 19 nt, Artificial Sequence
  Description of Artificial Sequence: Synthetic oligonucleotide
accagucagugaccaggca

SEQ ID NO: 74310 - RNA, 19 nt, Artificial Sequence
  Description of Artificial Sequence: Synthetic oligonucleotide
agaagaugcagcagcugga

SEQ ID NO: 74311 - RNA, 19 nt, Artificial Sequence
  Description of Artificial Sequence: Synthetic oligonucleotide
aacagaugcucacugcgcu

SEQ ID NO: 74312 - RNA, 19 nt, Artificial Sequence
  Description of Artificial Sequence: Synthetic oligonucleotide
uggaccagaugcggagaag

SEQ ID NO: 74313 - RNA, 19 nt, Artificial Sequence
  Description of Artificial Sequence: Synthetic oligonucleotide
gcaucgugagugagcuggc

SEQ ID NO: 74314 - RNA, 19 nt, Artificial Sequence
  Description of Artificial Sequence: Synthetic oligonucleotide
cggggcuuuugucagcgau

SEQ ID NO: 74315 - RNA, 19 nt, Artificial Sequence
  Description of Artificial Sequence: Synthetic oligonucleotide
uggaguacgugcagaaaac

SEQ ID NO: 74316 - RNA, 19 nt, Artificial Sequence
  Description of Artificial Sequence: Synthetic oligonucleotide
cucucacggacgaggagcu

SEQ ID NO: 74317 - RNA, 19 nt, Artificial Sequence
  Description of Artificial Sequence: Synthetic oligonucleotide
uggcugacuggaagaggcg

SEQ ID NO: 74318 - RNA, 19 nt, Artificial Sequence
  Description of Artificial Sequence: Synthetic oligonucleotide
ggcaacagauugccugcau

SEQ ID NO: 74319 - RNA, 19 nt, Artificial Sequence
  Description of Artificial Sequence: Synthetic oligonucleotide
uuggaggcccgcccaacau

SEQ ID NO: 74320 - RNA, 19 nt, Artificial Sequence
  Description of Artificial Sequence: Synthetic oligonucleotide
ucugccuagaucggcuaga

SEQ ID NO: 74321 - RNA, 19 nt, Artificial Sequence
  Description of Artificial Sequence: Synthetic oligonucleotide
aaaacuggauaacgucauu

SEQ ID NO: 74322 - RNA, 19 nt, Artificial Sequence
  Description of Artificial Sequence: Synthetic oligonucleotide
uagcagaaucucaacuuca

SEQ ID NO: 74323 - RNA, 19 nt, Artificial Sequence
  Description of Artificial Sequence: Synthetic oligonucleotide
agacccgucaacaaauuaa

SEQ ID NO: 74324 - RNA, 19 nt, Artificial Sequence
  Description of Artificial Sequence: Synthetic oligonucleotide
agaaacuggaggaguugca

SEQ ID NO: 74325 - RNA, 19 nt, Artificial Sequence
  Description of Artificial Sequence: Synthetic oligonucleotide
agcaaaaaguuuccuacaa

SEQ ID NO: 74326 - RNA, 19 nt, Artificial Sequence
  Description of Artificial Sequence: Synthetic oligonucleotide
aaggggaccccauuguaca

SEQ ID NO: 74327 - RNA, 19 nt, Artificial Sequence
  Description of Artificial Sequence: Synthetic oligonucleotide
agcaccggccgaugcugga

SEQ ID NO: 74328 - RNA, 19 nt, Artificial Sequence
  Description of Artificial Sequence: Synthetic oligonucleotide
aggagagaaucguggagcu

SEQ ID NO: 74329 - RNA, 19 nt, Artificial Sequence
  Description of Artificial Sequence: Synthetic oligonucleotide
uguuuagaaacuuaaugaa

SEQ ID NO: 74330 - RNA, 19 nt, Artificial Sequence
  Description of Artificial Sequence: Synthetic oligonucleotide
aaagugccuuuguggugga

SEQ ID NO: 74331 - RNA, 19 nt, Artificial Sequence
  Description of Artificial Sequence: Synthetic oligonucleotide
agcggcagcccugcaugcc

SEQ ID NO: 74332 - RNA, 19 nt, Artificial Sequence
  Description of Artificial Sequence: Synthetic oligonucleotide
ccaugcauccugaccggcc

SEQ ID NO: 74333 - RNA, 19 nt, Artificial Sequence
  Description of Artificial Sequence: Synthetic oligonucleotide
cccucgucaucaagaccgg

SEQ ID NO: 74334 - RNA, 19 nt, Artificial Sequence
  Description of Artificial Sequence: Synthetic oligonucleotide
gcguccaguucacuacuaa

SEQ ID NO: 74335 - RNA, 19 nt, Artificial Sequence
  Description of Artificial Sequence: Synthetic oligonucleotide
aagucagguugcuggucaa

SEQ ID NO: 74336 - RNA, 19 nt, Artificial Sequence
  Description of Artificial Sequence: Synthetic oligonucleotide
aauucccugaguugaauua

SEQ ID NO: 74337 - RNA, 19 nt, Artificial Sequence
  Description of Artificial Sequence: Synthetic oligonucleotide
aucagcuuaaaauuaaagu

SEQ ID NO: 74338 - RNA, 19 nt, Artificial Sequence
  Description of Artificial Sequence: Synthetic oligonucleotide
ugugcauugacaaagacuc

SEQ ID NO: 74339 - RNA, 19 nt, Artificial Sequence
  Description of Artificial Sequence: Synthetic oligonucleotide
cuggggacguugcagcucu

SEQ ID NO: 74340 - RNA, 19 nt, Artificial Sequence
  Description of Artificial Sequence: Synthetic oligonucleotide
ucagaggaucccggaaauu

SEQ ID NO: 74341 - RNA, 19 nt, Artificial Sequence
  Description of Artificial Sequence: Synthetic oligonucleotide
uuaacauucugggcacaaa

SEQ ID NO: 74342 - RNA, 19 nt, Artificial Sequence
  Description of Artificial Sequence: Synthetic oligonucleotide
acacaaaagugaugaacau

SEQ ID NO: 74343 - RNA, 19 nt, Artificial Sequence
  Description of Artificial Sequence: Synthetic oligonucleotide
uggaagaauccaacaacgg

SEQ ID NO: 74344 - RNA, 19 nt, Artificial Sequence
  Description of Artificial Sequence: Synthetic oligonucleotide
gcagccucucugcagaauu

SEQ ID NO: 74345 - RNA, 19 nt, Artificial Sequence
  Description of Artificial Sequence: Synthetic oligonucleotide
ucaaacacuugacccugag

SEQ ID NO: 74346 - RNA, 19 nt, Artificial Sequence
  Description of Artificial Sequence: Synthetic oligonucleotide
gggagcagagaugugggaa

SEQ ID NO: 74347 - RNA, 19 nt, Artificial Sequence
  Description of Artificial Sequence: Synthetic oligonucleotide
augggggccgagccaauug

SEQ ID NO: 74348 - RNA, 19 nt, Artificial Sequence
  Description of Artificial Sequence: Synthetic oligonucleotide
gugaugcuucccugauugu

SEQ ID NO: 74349 - RNA, 19 nt, Artificial Sequence
  Description of Artificial Sequence: Synthetic oligonucleotide
ugacugaggagcugcaccu

SEQ ID NO: 74350 - RNA, 19 nt, Artificial Sequence
  Description of Artificial Sequence: Synthetic oligonucleotide
ugaucaccuuugagaccga

SEQ ID NO: 74351 - RNA, 19 nt, Artificial Sequence
  Description of Artificial Sequence: Synthetic oligonucleotide
agguguaucaccaaggccu

SEQ ID NO: 74352 - RNA, 19 nt, Artificial Sequence
  Description of Artificial Sequence: Synthetic oligonucleotide
ucaagauugaccuagagac

SEQ ID NO: 74353 - RNA, 19 nt, Artificial Sequence
  Description of Artificial Sequence: Synthetic oligonucleotide
cccacuccuugccaguugu

SEQ ID NO: 74354 - RNA, 19 nt, Artificial Sequence
  Description of Artificial Sequence: Synthetic oligonucleotide
uggugaucuccaacaucug

SEQ ID NO: 74355 - RNA, 19 nt, Artificial Sequence
  Description of Artificial Sequence: Synthetic oligonucleotide
gucagaugccaaaugccug

SEQ ID NO: 74356 - RNA, 19 nt, Artificial Sequence
  Description of Artificial Sequence: Synthetic oligonucleotide
gggcguccauccuguggua

SEQ ID NO: 74357 - RNA, 19 nt, Artificial Sequence
  Description of Artificial Sequence: Synthetic oligonucleotide
acaacaugcugaccaacaa

SEQ ID NO: 74358 - RNA, 19 nt, Artificial Sequence
  Description of Artificial Sequence: Synthetic oligonucleotide
aucccaagaauguaaacuu

SEQ ID NO: 74359 - RNA, 19 nt, Artificial Sequence
  Description of Artificial Sequence: Synthetic oligonucleotide
uuuuuaccaagcccccaau

SEQ ID NO: 74360 - RNA, 19 nt, Artificial Sequence
  Description of Artificial Sequence: Synthetic oligonucleotide
uuggaaccugggaucaagu

SEQ ID NO: 74361 - RNA, 19 nt, Artificial Sequence
  Description of Artificial Sequence: Synthetic oligonucleotide
uggccgagguccugagcug

SEQ ID NO: 74362 - RNA, 19 nt, Artificial Sequence
  Description of Artificial Sequence: Synthetic oligonucleotide
ggcaguucuccuccaccac

SEQ ID NO: 74363 - RNA, 19 nt, Artificial Sequence
  Description of Artificial Sequence: Synthetic oligonucleotide
ccaagcgaggacugagcau

SEQ ID NO: 74364 - RNA, 19 nt, Artificial Sequence
  Description of Artificial Sequence: Synthetic oligonucleotide
ucgagcagcugacuacacu

SEQ ID NO: 74365 - RNA, 19 nt, Artificial Sequence
  Description of Artificial Sequence: Synthetic oligonucleotide
uggcagagaaacucuuggg

SEQ ID NO: 74366 - RNA, 19 nt, Artificial Sequence
  Description of Artificial Sequence: Synthetic oligonucleotide
gaccuggugugaauuauuc

SEQ ID NO: 74367 - RNA, 19 nt, Artificial Sequence
  Description of Artificial Sequence: Synthetic oligonucleotide
cagggugucagaucacaug

SEQ ID NO: 74368 - RNA, 19 nt, Artificial Sequence
  Description of Artificial Sequence: Synthetic oligonucleotide
gggcuaaauuuugcaaaga

SEQ ID NO: 74369 - RNA, 19 nt, Artificial Sequence
  Description of Artificial Sequence: Synthetic oligonucleotide
aaaacauggcuggcaaggg

SEQ ID NO: 74370 - RNA, 19 nt, Artificial Sequence
  Description of Artificial Sequence: Synthetic oligonucleotide
gcuucuccuucugggucug

SEQ ID NO: 74371 - RNA, 19 nt, Artificial Sequence
  Description of Artificial Sequence: Synthetic oligonucleotide
ggcuggacaauaucauuga

SEQ ID NO: 74372 - RNA, 19 nt, Artificial Sequence
  Description of Artificial Sequence: Synthetic oligonucleotide
accuugugaaaaaguacau

SEQ ID NO: 74373 - RNA, 19 nt, Artificial Sequence
  Description of Artificial Sequence: Synthetic oligonucleotide
uccuggcccuuuggaacga

SEQ ID NO: 74374 - RNA, 19 nt, Artificial Sequence
  Description of Artificial Sequence: Synthetic oligonucleotide
aaggguacaucaugggcuu

SEQ ID NO: 74375 - RNA, 19 nt, Artificial Sequence
  Description of Artificial Sequence: Synthetic oligonucleotide
uuaucaguaaggagcggga

SEQ ID NO: 74376 - RNA, 19 nt, Artificial Sequence
  Description of Artificial Sequence: Synthetic oligonucleotide
agcgggccaucuugagcac

SEQ ID NO: 74377 - RNA, 19 nt, Artificial Sequence
  Description of Artificial Sequence: Synthetic oligonucleotide
cuaagccuccaggcaccuu

SEQ ID NO: 74378 - RNA, 19 nt, Artificial Sequence
  Description of Artificial Sequence: Synthetic oligonucleotide
uccugcuaagauucaguga

SEQ ID NO: 74379 - RNA, 19 nt, Artificial Sequence
  Description of Artificial Sequence: Synthetic oligonucleotide
aaagcagcaaagaaggagg

SEQ ID NO: 74380 - RNA, 19 nt, Artificial Sequence
  Description of Artificial Sequence: Synthetic oligonucleotide
gcgucacuuucacuugggu

SEQ ID NO: 74381 - RNA, 19 nt, Artificial Sequence
  Description of Artificial Sequence: Synthetic oligonucleotide
uggagaaggacaucagcgg

SEQ ID NO: 74382 - RNA, 19 nt, Artificial Sequence
  Description of Artificial Sequence: Synthetic oligonucleotide
guaagacccagauccaguc

SEQ ID NO: 74383 - RNA, 19 nt, Artificial Sequence
  Description of Artificial Sequence: Synthetic oligonucleotide
ccguggaaccauacacaaa

SEQ ID NO: 74384 - RNA, 19 nt, Artificial Sequence
  Description of Artificial Sequence: Synthetic oligonucleotide
agcagcagcugaacaacau

SEQ ID NO: 74385 - RNA, 19 nt, Artificial Sequence
  Description of Artificial Sequence: Synthetic oligonucleotide
ugucauuugcugaaaucau

SEQ ID NO: 74386 - RNA, 19 nt, Artificial Sequence
  Description of Artificial Sequence: Synthetic oligonucleotide
ucaugggcuauaagaucau

SEQ ID NO: 74387 - RNA, 19 nt, Artificial Sequence
  Description of Artificial Sequence: Synthetic oligonucleotide
uggaugcuaccaauauccu

SEQ ID NO: 74388 - RNA, 19 nt, Artificial Sequence
  Description of Artificial Sequence: Synthetic oligonucleotide
uggugucuccacuggucua

SEQ ID NO: 74389 - RNA, 19 nt, Artificial Sequence
  Description of Artificial Sequence: Synthetic oligonucleotide
aucucuauccugacauucc

SEQ ID NO: 74390 - RNA, 19 nt, Artificial Sequence
  Description of Artificial Sequence: Synthetic oligonucleotide
ccaaggaggaggcauucgg

SEQ ID NO: 74391 - RNA, 19 nt, Artificial Sequence
  Description of Artificial Sequence: Synthetic oligonucleotide
gaaaguauugucggccaga

SEQ ID NO: 74392 - RNA, 19 nt, Artificial Sequence
  Description of Artificial Sequence: Synthetic oligonucleotide
agagccaggagcauccuga

SEQ ID NO: 74393 - RNA, 19 nt, Artificial Sequence
  Description of Artificial Sequence: Synthetic oligonucleotide
aagcugacccaggcgcugc

SEQ ID NO: 74394 - RNA, 19 nt, Artificial Sequence
  Description of Artificial Sequence: Synthetic oligonucleotide
ccccauaccugaagaccaa

SEQ ID NO: 74395 - RNA, 19 nt, Artificial Sequence
  Description of Artificial Sequence: Synthetic oligonucleotide
aguuuaucugugugacacc

SEQ ID NO: 74396 - RNA, 19 nt, Artificial Sequence
  Description of Artificial Sequence: Synthetic oligonucleotide
caacgaccugcagcaauac

SEQ ID NO: 74397 - RNA, 19 nt, Artificial Sequence
  Description of Artificial Sequence: Synthetic oligonucleotide
ccauugaccugccgauguc

SEQ ID NO: 74398 - RNA, 19 nt, Artificial Sequence
  Description of Artificial Sequence: Synthetic oligonucleotide
ccccccgcacuuuagauuc

SEQ ID NO: 74399 - RNA, 19 nt, Artificial Sequence
  Description of Artificial Sequence: Synthetic oligonucleotide
cauugaugcaguuuggaaa

SEQ ID NO: 74400 - RNA, 19 nt, Artificial Sequence
  Description of Artificial Sequence: Synthetic oligonucleotide
auaauggugaaggugcuga

SEQ ID NO: 74401 - RNA, 19 nt, Artificial Sequence
  Description of Artificial Sequence: Synthetic oligonucleotide
aacccucagcaggagggca

SEQ ID NO: 74402 - RNA, 19 nt, Artificial Sequence
  Description of Artificial Sequence: Synthetic oligonucleotide
aguuugagucccucaccuu

SEQ ID NO: 74403 - RNA, 19 nt, Artificial Sequence
  Description of Artificial Sequence: Synthetic oligonucleotide
uugacauggaguugaccuc

SEQ ID NO: 74404 - RNA, 19 nt, Artificial Sequence
  Description of Artificial Sequence: Synthetic oligonucleotide
cggagugcgcuaccucccc

SEQ ID NO: 74405 - RNA, 19 nt, Artificial Sequence
  Description of Artificial Sequence: Synthetic oligonucleotide
ccaugugaggagcugagaa

SEQ ID NO: 74406 - RNA, 19 nt, Artificial Sequence
  Description of Artificial Sequence: Synthetic oligonucleotide
acggaagcugcagaaagau

SEQ ID NO: 74407 - RNA, 19 nt, Artificial Sequence
  Description of Artificial Sequence: Synthetic oligonucleotide
uacgacugaggcgccuacc

SEQ ID NO: 74408 - RNA, 19 nt, Artificial Sequence
  Description of Artificial Sequence: Synthetic oligonucleotide
cugcauucugccaccccuc

SEQ ID NO: 74409 - RNA, 19 nt, Artificial Sequence
  Description of Artificial Sequence: Synthetic oligonucleotide
cacacagccaaaccccaga

SEQ ID NO: 74410 - RNA, 19 nt, Artificial Sequence
  Description of Artificial Sequence: Synthetic oligonucleotide
aucaucugaaacuacuaac

SEQ ID NO: 74411 - RNA, 19 nt, Artificial Sequence
  Description of Artificial Sequence: Synthetic oligonucleotide
cuuugugguuccagauuuu

SEQ ID NO: 74412 - RNA, 19 nt, Artificial Sequence
  Description of Artificial Sequence: Synthetic oligonucleotide
uuuuuaaucuccuacuucu

SEQ ID NO: 74413 - RNA, 19 nt, Artificial Sequence
  Description of Artificial Sequence: Synthetic oligonucleotide
ugcuaucuuugagcaaucu

SEQ ID NO: 74414 - RNA, 19 nt, Artificial Sequence
  Description of Artificial Sequence: Synthetic oligonucleotide
ugggcacuuuuaaaaauag

SEQ ID NO: 74415 - RNA, 19 nt, Artificial Sequence
  Description of Artificial Sequence: Synthetic oligonucleotide
gagaaaugagugaaugugg

SEQ ID NO: 74416 - RNA, 19 nt, Artificial Sequence
  Description of Artificial Sequence: Synthetic oligonucleotide
ggugaucugcuuuuaucua

SEQ ID NO: 74417 - RNA, 19 nt, Artificial Sequence
  Description of Artificial Sequence: Synthetic oligonucleotide
aaaugcaaauaaggaugug

SEQ ID NO: 74418 - RNA, 19 nt, Artificial Sequence
  Description of Artificial Sequence: Synthetic oligonucleotide
guucucugagacccaugau

SEQ ID NO: 74419 - RNA, 19 nt, Artificial Sequence
  Description of Artificial Sequence: Synthetic oligonucleotide
ucaggggauguggcggggg

SEQ ID NO: 74420 - RNA, 19 nt, Artificial Sequence
  Description of Artificial Sequence: Synthetic oligonucleotide
gguggcuagagggagaaaa

SEQ ID NO: 74421 - RNA, 19 nt, Artificial Sequence
  Description of Artificial Sequence: Synthetic oligonucleotide
aaggaaaugucuuguguug

SEQ ID NO: 74422 - RNA, 19 nt, Artificial Sequence
  Description of Artificial Sequence: Synthetic oligonucleotide
guuuuguuccccugcccuc

SEQ ID NO: 74423 - RNA, 19 nt, Artificial Sequence
  Description of Artificial Sequence: Synthetic oligonucleotide
ccuuucucagcagcuuuuu

SEQ ID NO: 74424 - RNA, 19 nt, Artificial Sequence
  Description of Artificial Sequence: Synthetic oligonucleotide
uguuauuguuguuguuguu

SEQ ID NO: 74425 - RNA, 19 nt, Artificial Sequence
  Description of Artificial Sequence: Synthetic oligonucleotide
ucuuagacaagugccuccu

SEQ ID NO: 74426 - RNA, 19 nt, Artificial Sequence
  Description of Artificial Sequence: Synthetic oligonucleotide
uggugccugcggcauccuu

SEQ ID NO: 74427 - RNA, 19 nt, Artificial Sequence
  Description of Artificial Sequence: Synthetic oligonucleotide
ucugccuguuucuguaagc

SEQ ID NO: 74428 - RNA, 19 nt, Artificial Sequence
  Description of Artificial Sequence: Synthetic oligonucleotide
caaaugccacaggccaccu

SEQ ID NO: 74429 - RNA, 19 nt, Artificial Sequence
  Description of Artificial Sequence: Synthetic oligonucleotide
uauagcuacauacuccugg

SEQ ID NO: 74430 - RNA, 19 nt, Artificial Sequence
  Description of Artificial Sequence: Synthetic oligonucleotide
gcauugcacuuuuuaaccu

SEQ ID NO: 74431 - RNA, 19 nt, Artificial Sequence
  Description of Artificial Sequence: Synthetic oligonucleotide
uugcugacauccaaauaga

SEQ ID NO: 74432 - RNA, 19 nt, Artificial Sequence
  Description of Artificial Sequence: Synthetic oligonucleotide
aagauaggacuaucuaagc

SEQ ID NO: 74433 - RNA, 19 nt, Artificial Sequence
  Description of Artificial Sequence: Synthetic oligonucleotide
cccuagguuucuuuuuaaa

SEQ ID NO: 74434 - RNA, 19 nt, Artificial Sequence
  Description of Artificial Sequence: Synthetic oligonucleotide
auuaagaaauaauaacaau

SEQ ID NO: 74435 - RNA, 19 nt, Artificial Sequence
  Description of Artificial Sequence: Synthetic oligonucleotide
uuaaagggcaaaaaacacu

SEQ ID NO: 74436 - RNA, 19 nt, Artificial Sequence
  Description of Artificial Sequence: Synthetic oligonucleotide
uguaucagcauagccuuuc

SEQ ID NO: 74437 - RNA, 19 nt, Artificial Sequence
  Description of Artificial Sequence: Synthetic oligonucleotide
cuguauuuaagaaacuuaa

SEQ ID NO: 74438 - RNA, 19 nt, Artificial Sequence
  Description of Artificial Sequence: Synthetic oligonucleotide
agcagccgggcaugguggc

SEQ ID NO: 74439 - RNA, 19 nt, Artificial Sequence
  Description of Artificial Sequence: Synthetic oligonucleotide
cucacgccuguaaucccag

SEQ ID NO: 74440 - RNA, 19 nt, Artificial Sequence
  Description of Artificial Sequence: Synthetic oligonucleotide
gcacuuugggaggccgagg

SEQ ID NO: 74441 - RNA, 19 nt, Artificial Sequence
  Description of Artificial Sequence: Synthetic oligonucleotide
gcggaucauaaggucagga

SEQ ID NO: 74442 - RNA, 19 nt, Artificial Sequence
  Description of Artificial Sequence: Synthetic oligonucleotide
agaucaagaccauccuggc

SEQ ID NO: 74443 - RNA, 19 nt, Artificial Sequence
  Description of Artificial Sequence: Synthetic oligonucleotide
cuaacacggugaaaccccg

SEQ ID NO: 74444 - RNA, 19 nt, Artificial Sequence
  Description of Artificial Sequence: Synthetic oligonucleotide
gucucuacuaaaaguacaa

SEQ ID NO: 74445 - RNA, 19 nt, Artificial Sequence
  Description of Artificial Sequence: Synthetic oligonucleotide
aaaaauuagcugggugugg

SEQ ID NO: 74446 - RNA, 19 nt, Artificial Sequence
  Description of Artificial Sequence: Synthetic oligonucleotide
guggugggcgccuguaguc

SEQ ID NO: 74447 - RNA, 19 nt, Artificial Sequence
  Description of Artificial Sequence: Synthetic oligonucleotide
cccagcuacucgggaggcu

SEQ ID NO: 74448 - RNA, 19 nt, Artificial Sequence
  Description of Artificial Sequence: Synthetic oligonucleotide
ugaggcaggagaaucgcuu

SEQ ID NO: 74449 - RNA, 19 nt, Artificial Sequence
  Description of Artificial Sequence: Synthetic oligonucleotide
ugaaccugagaggcggagg

SEQ ID NO: 74450 - RNA, 19 nt, Artificial Sequence
  Description of Artificial Sequence: Synthetic oligonucleotide
guugcagugagccaaaauu

SEQ ID NO: 74451 - RNA, 19 nt, Artificial Sequence
  Description of Artificial Sequence: Synthetic oligonucleotide
ugcaccacugcacacugca

SEQ ID NO: 74452 - RNA, 19 nt, Artificial Sequence
  Description of Artificial Sequence: Synthetic oligonucleotide
acuccauccugggcgacag

SEQ ID NO: 74453 - RNA, 19 nt, Artificial Sequence
  Description of Artificial Sequence: Synthetic oligonucleotide
gucugagacucugucucaa

SEQ ID NO: 74454 - RNA, 19 nt, Artificial Sequence
  Description of Artificial Sequence: Synthetic oligonucleotide
agaaacuucaguuaacagc

SEQ ID NO: 74455 - RNA, 19 nt, Artificial Sequence
  Description of Artificial Sequence: Synthetic oligonucleotide
ccuccuuggugcuuuaagc

SEQ ID NO: 74456 - RNA, 19 nt, Artificial Sequence
  Description of Artificial Sequence: Synthetic oligonucleotide
cauucagcuuccuucaggc

SEQ ID NO: 74457 - RNA, 19 nt, Artificial Sequence
  Description of Artificial Sequence: Synthetic oligonucleotide
cugguaauuuauauaaucc

SEQ ID NO: 74458 - RNA, 19 nt, Artificial Sequence
  Description of Artificial Sequence: Synthetic oligonucleotide
ccugaaacgggcuucaggu

SEQ ID NO: 74459 - RNA, 19 nt, Artificial Sequence
  Description of Artificial Sequence: Synthetic oligonucleotide
ucaaacccuuaagacaucu

SEQ ID NO: 74460 - RNA, 19 nt, Artificial Sequence
  Description of Artificial Sequence: Synthetic oligonucleotide
ugaagcugcaaccuggccu

SEQ ID NO: 74461 - RNA, 19 nt, Artificial Sequence
  Description of Artificial Sequence: Synthetic oligonucleotide
uuugguguugaaauaggaa

SEQ ID NO: 74462 - RNA, 19 nt, Artificial Sequence
  Description of Artificial Sequence: Synthetic oligonucleotide
agguuuaaggagaaucuaa

SEQ ID NO: 74463 - RNA, 19 nt, Artificial Sequence
  Description of Artificial Sequence: Synthetic oligonucleotide
agcauuuuagacuuuuuuu

SEQ ID NO: 74464 - RNA, 19 nt, Artificial Sequence
  Description of Artificial Sequence: Synthetic oligonucleotide
uuauaaauagacuuauuuu

SEQ ID NO: 74465 - RNA, 19 nt, Artificial Sequence
  Description of Artificial Sequence: Synthetic oligonucleotide
uccuuuguaauguauuggc

SEQ ID NO: 74466 - RNA, 19 nt, Artificial Sequence
  Description of Artificial Sequence: Synthetic oligonucleotide
ccuuuuagugaguaaggcu

SEQ ID NO: 74467 - RNA, 19 nt, Artificial Sequence
  Description of Artificial Sequence: Synthetic oligonucleotide
ugggcagagggugcuuaca

SEQ ID NO: 74468 - RNA, 19 nt, Artificial Sequence
  Description of Artificial Sequence: Synthetic oligonucleotide
aaccuugacucccuuucuc

SEQ ID NO: 74469 - RNA, 19 nt, Artificial Sequence
  Description of Artificial Sequence: Synthetic oligonucleotide
cccuggacuugaucugcug

SEQ ID NO: 74470 - RNA, 19 nt, Artificial Sequence
  Description of Artificial Sequence: Synthetic oligonucleotide
guuucagaggcuagguugu

SEQ ID NO: 74471 - RNA, 19 nt, Artificial Sequence
  Description of Artificial Sequence: Synthetic oligonucleotide
uuucugugggugccuuauc

SEQ ID NO: 74472 - RNA, 19 nt, Artificial Sequence
  Description of Artificial Sequence: Synthetic oligonucleotide
cagggcugggauacuucug

SEQ ID NO: 74473 - RNA, 19 nt, Artificial Sequence
  Description of Artificial Sequence: Synthetic oligonucleotide
gauucuggcuuccuuccug

SEQ ID NO: 74474 - RNA, 19 nt, Artificial Sequence
  Description of Artificial Sequence: Synthetic oligonucleotide
gccccacccucccgacccc

SEQ ID NO: 74475 - RNA, 19 nt, Artificial Sequence
  Description of Artificial Sequence: Synthetic oligonucleotide
cagucccccugauccugcu

SEQ ID NO: 74476 - RNA, 19 nt, Artificial Sequence
  Description of Artificial Sequence: Synthetic oligonucleotide
uagaggcaugucuccuugc

SEQ ID NO: 74477 - RNA, 19 nt, Artificial Sequence
  Description of Artificial Sequence: Synthetic oligonucleotide
cgugucuaaaggucccuca

SEQ ID NO: 74478 - RNA, 19 nt, Artificial Sequence
  Description of Artificial Sequence: Synthetic oligonucleotide
auccuguuuguuuuaggaa

SEQ ID NO: 74479 - RNA, 19 nt, Artificial Sequence
  Description of Artificial Sequence: Synthetic oligonucleotide
auccuggucucaggaccuc

SEQ ID NO: 74480 - RNA, 19 nt, Artificial Sequence
  Description of Artificial Sequence: Synthetic oligonucleotide
cauggaagaagagggggag

SEQ ID NO: 74481 - RNA, 19 nt, Artificial Sequence
  Description of Artificial Sequence: Synthetic oligonucleotide
gagaguuacagguuggaca

SEQ ID NO: 74482 - RNA, 19 nt, Artificial Sequence
  Description of Artificial Sequence: Synthetic oligonucleotide
augaugcacacuauggggc

SEQ ID NO: 74483 - RNA, 19 nt, Artificial Sequence
  Description of Artificial Sequence: Synthetic oligonucleotide
ccccagcgacgugucuggu

SEQ ID NO: 74484 - RNA, 19 nt, Artificial Sequence
  Description of Artificial Sequence: Synthetic oligonucleotide
uugagcucagggaauaugg

SEQ ID NO: 74485 - RNA, 19 nt, Artificial Sequence
  Description of Artificial Sequence: Synthetic oligonucleotide
guucuuagccaguuucuug

SEQ ID NO: 74486 - RNA, 19 nt, Artificial Sequence
  Description of Artificial Sequence: Synthetic oligonucleotide
ggugauauccaguggcacu

SEQ ID NO: 74487 - RNA, 19 nt, Artificial Sequence
  Description of Artificial Sequence: Synthetic oligonucleotide
uuguaauggcgucuucauu

SEQ ID NO: 74488 - RNA, 19 nt, Artificial Sequence
  Description of Artificial Sequence: Synthetic oligonucleotide
ucaguucaugcagggcaaa

SEQ ID NO: 74489 - RNA, 19 nt, Artificial Sequence
  Description of Artificial Sequence: Synthetic oligonucleotide
aggcuuacugauaaacuug

SEQ ID NO: 74490 - RNA, 19 nt, Artificial Sequence
  Description of Artificial Sequence: Synthetic oligonucleotide
gagucugcccucguaugag

SEQ ID NO: 74491 - RNA, 19 nt, Artificial Sequence
  Description of Artificial Sequence: Synthetic oligonucleotide
ggguguauaccuggccucc

SEQ ID NO: 74492 - RNA, 19 nt, Artificial Sequence
  Description of Artificial Sequence: Synthetic oligonucleotide
ccucugaggcuggugacuc

SEQ ID NO: 74493 - RNA, 19 nt, Artificial Sequence
  Description of Artificial Sequence: Synthetic oligonucleotide
ccucccugcuggggcccca

SEQ ID NO: 74494 - RNA, 19 nt, Artificial Sequence
  Description of Artificial Sequence: Synthetic oligonucleotide
acaggugaggcagaacagc

SEQ ID NO: 74495 - RNA, 19 nt, Artificial Sequence
  Description of Artificial Sequence: Synthetic oligonucleotide
cuagagggccuccccgccu

SEQ ID NO: 74496 - RNA, 19 nt, Artificial Sequence
  Description of Artificial Sequence: Synthetic oligonucleotide
ugcccgccuuggcuggcua

SEQ ID NO: 74497 - RNA, 19 nt, Artificial Sequence
  Description of Artificial Sequence: Synthetic oligonucleotide
agcucgccucuccugugcg

SEQ ID NO: 74498 - RNA, 19 nt, Artificial Sequence
  Description of Artificial Sequence: Synthetic oligonucleotide
guaugggaacaccuagcac

SEQ ID NO: 74499 - RNA, 19 nt, Artificial Sequence
  Description of Artificial Sequence: Synthetic oligonucleotide
cgugcuggaugggcugccu

SEQ ID NO: 74500 - RNA, 19 nt, Artificial Sequence
  Description of Artificial Sequence: Synthetic oligonucleotide
ucugacucagaggcauggc

SEQ ID NO: 74501 - RNA, 19 nt, Artificial Sequence
  Description of Artificial Sequence: Synthetic oligonucleotide
ccggauuuggcaacucaaa

SEQ ID NO: 74502 - RNA, 19 nt, Artificial Sequence
  Description of Artificial Sequence: Synthetic oligonucleotide
aaccaccuugccucagcug

SEQ ID NO: 74503 - RNA, 19 nt, Artificial Sequence
  Description of Artificial Sequence: Synthetic oligonucleotide
gaucagaguuucuguggaa

SEQ ID NO: 74504 - RNA, 19 nt, Artificial Sequence
  Description of Artificial Sequence: Synthetic oligonucleotide
auucuguuuguuaaaucaa

SEQ ID NO: 74505 - RNA, 19 nt, Artificial Sequence
  Description of Artificial Sequence: Synthetic oligonucleotide
aauuagcuggucucugaau

SEQ ID NO: 74506 - RNA, 19 nt, Artificial Sequence
  Description of Artificial Sequence: Synthetic oligonucleotide
uuaagggggagacgaccuu

SEQ ID NO: 74507 - RNA, 19 nt, Artificial Sequence
  Description of Artificial Sequence: Synthetic oligonucleotide
ucucuaagaugaacagggu

SEQ ID NO: 74508 - RNA, 19 nt, Artificial Sequence
  Description of Artificial Sequence: Synthetic oligonucleotide
uucgccccaguccuccugc

SEQ ID NO: 74509 - RNA, 19 nt, Artificial Sequence
  Description of Artificial Sequence: Synthetic oligonucleotide
ccuggagacaguugaugug

SEQ ID NO: 74510 - RNA, 19 nt, Artificial Sequence
  Description of Artificial Sequence: Synthetic oligonucleotide
gucaugcagagcucuuacu

SEQ ID NO: 74511 - RNA, 19 nt, Artificial Sequence
  Description of Artificial Sequence: Synthetic oligonucleotide
uucuccagcaacacucuuc

SEQ ID NO: 74512 - RNA, 19 nt, Artificial Sequence
  Description of Artificial Sequence: Synthetic oligonucleotide
caguacauaauaagcuuaa

SEQ ID NO: 74513 - RNA, 19 nt, Artificial Sequence
  Description of Artificial Sequence: Synthetic oligonucleotide
acugauaaacagaauauuu

SEQ ID NO: 74514 - RNA, 19 nt, Artificial Sequence
  Description of Artificial Sequence: Synthetic oligonucleotide
uagaaaggugagacuuggg

SEQ ID NO: 74515 - RNA, 19 nt, Artificial Sequence
  Description of Artificial Sequence: Synthetic oligonucleotide
gcuuaccauuggguuuaaa

SEQ ID NO: 74516 - RNA, 19 nt, Artificial Sequence
  Description of Artificial Sequence: Synthetic oligonucleotide
aucauagggaccuagggcg

SEQ ID NO: 74517 - RNA, 19 nt, Artificial Sequence
  Description of Artificial Sequence: Synthetic oligonucleotide
gaggguucagggcuucucu

SEQ ID NO: 74518 - RNA, 19 nt, Artificial Sequence
  Description of Artificial Sequence: Synthetic oligonucleotide
uggagcagauauugucaag

SEQ ID NO: 74519 - RNA, 19 nt, Artificial Sequence
  Description of Artificial Sequence: Synthetic oligonucleotide
guucauggccuuagguagc

SEQ ID NO: 74520 - RNA, 19 nt, Artificial Sequence
  Description of Artificial Sequence: Synthetic oligonucleotide
cauguaucuggucuuaacu

SEQ ID NO: 74521 - RNA, 19 nt, Artificial Sequence
  Description of Artificial Sequence: Synthetic oligonucleotide
ucugauuguagcaaaaguu

SEQ ID NO: 74522 - RNA, 19 nt, Artificial Sequence
  Description of Artificial Sequence: Synthetic oligonucleotide
ucugagaggagcugagccc

SEQ ID NO: 74523 - RNA, 19 nt, Artificial Sequence
  Description of Artificial Sequence: Synthetic oligonucleotide
cuguuguggcccauuaaag

SEQ ID NO: 74524 - RNA, 19 nt, Artificial Sequence
  Description of Artificial Sequence: Synthetic oligonucleotide
gaacaggguccucaggccc

SEQ ID NO: 74525 - RNA, 19 nt, Artificial Sequence
  Description of Artificial Sequence: Synthetic oligonucleotide
cugcccgcuuccuguccac

SEQ ID NO: 74526 - RNA, 19 nt, Artificial Sequence
  Description of Artificial Sequence: Synthetic oligonucleotide
cugcccccuccccaucccc

SEQ ID NO: 74527 - RNA, 19 nt, Artificial Sequence
  Description of Artificial Sequence: Synthetic oligonucleotide
cagcccagccgagggaauc

SEQ ID NO: 74528 - RNA, 19 nt, Artificial Sequence
  Description of Artificial Sequence: Synthetic oligonucleotide
cccguggguugcuuaccua

SEQ ID NO: 74529 - RNA, 19 nt, Artificial Sequence
  Description of Artificial Sequence: Synthetic oligonucleotide
accuauaaggugguuuaua

SEQ ID NO: 74530 - RNA, 19 nt, Artificial Sequence
  Description of Artificial Sequence: Synthetic oligonucleotide
aagcugcuguccuggccac

SEQ ID NO: 74531 - RNA, 19 nt, Artificial Sequence
  Description of Artificial Sequence: Synthetic oligonucleotide
cugcauucaaauuccaaug

SEQ ID NO: 74532 - RNA, 19 nt, Artificial Sequence
  Description of Artificial Sequence: Synthetic oligonucleotide
guguacuucauaguguaaa

SEQ ID NO: 74533 - RNA, 19 nt, Artificial Sequence
  Description of Artificial Sequence: Synthetic oligonucleotide
aaauuuauauuauugugag

SEQ ID NO: 74534 - RNA, 19 nt, Artificial Sequence
  Description of Artificial Sequence: Synthetic oligonucleotide
gguuuuuugucuuuuuuuu

SEQ ID NO: 74535 - RNA, 19 nt, Artificial Sequence
  Description of Artificial Sequence: Synthetic oligonucleotide
auauugcuguaucuacuuu

SEQ ID NO: 74536 - RNA, 19 nt, Artificial Sequence
  Description of Artificial Sequence: Synthetic oligonucleotide
uaacuuccagaaauaaacg

SEQ ID NO: 74537 - RNA, 19 nt, Artificial Sequence
  Description of Artificial Sequence: Synthetic oligonucleotide
guuauauaggaaccguaaa

SEQ ID NO: 74538 - RNA, 25 nt, Artificial Sequence
  Description of Artificial Sequence: Synthetic oligonucleotide
gguuuccggagcugcggcggcgcag

SEQ ID NO: 74539 - RNA, 25 nt, Artificial Sequence
  Description of Artificial Sequence: Synthetic oligonucleotide
gacugggagggggagccggggguuc

SEQ ID NO: 74540 - RNA, 25 nt, Artificial Sequence
  Description of Artificial Sequence: Synthetic oligonucleotide
ccgacgucgcagccgagggaacaag

SEQ ID NO: 74541 - RNA, 25 nt, Artificial Sequence
  Description of Artificial Sequence: Synthetic oligonucleotide
gccccaaccggauccuggacaggca

SEQ ID NO: 74542 - RNA, 25 nt, Artificial Sequence
  Description of Artificial Sequence: Synthetic oligonucleotide
accccggcuuggcgcugucucuccc

SEQ ID NO: 74543 - RNA, 25 nt, Artificial Sequence
  Description of Artificial Sequence: Synthetic oligonucleotide
cccucggcucggagaggcccuucgg

SEQ ID NO: 74544 - RNA, 25 nt, Artificial Sequence
  Description of Artificial Sequence: Synthetic oligonucleotide
gccugagggagccucgccgcccguc

SEQ ID NO: 74545 - RNA, 25 nt, Artificial Sequence
  Description of Artificial Sequence: Synthetic oligonucleotide
ccccggcacacgcgcagccccggcc

SEQ ID NO: 74546 - RNA, 25 nt, Artificial Sequence
  Description of Artificial Sequence: Synthetic oligonucleotide
cucucggccucugccggagaaacag

SEQ ID NO: 74547 - RNA, 25 nt, Artificial Sequence
  Description of Artificial Sequence: Synthetic oligonucleotide
guugggaccccugauuuuagcagga

SEQ ID NO: 74548 - RNA, 25 nt, Artificial Sequence
  Description of Artificial Sequence: Synthetic oligonucleotide
auggcccaauggaaucagcuacagc

SEQ ID NO: 74549 - RNA, 25 nt, Artificial Sequence
  Description of Artificial Sequence: Synthetic oligonucleotide
cagcuugacacacgguaccuggagc

SEQ ID NO: 74550 - RNA, 25 nt, Artificial Sequence
  Description of Artificial Sequence: Synthetic oligonucleotide
cagcuccaucagcucuacagugaca

SEQ ID NO: 74551 - RNA, 25 nt, Artificial Sequence
  Description of Artificial Sequence: Synthetic oligonucleotide
agcuucccaauggagcugcggcagu

SEQ ID NO: 74552 - RNA, 25 nt, Artificial Sequence
  Description of Artificial Sequence: Synthetic oligonucleotide
uuucuggccccuuggauugagaguc

SEQ ID NO: 74553 - RNA, 25 nt, Artificial Sequence
  Description of Artificial Sequence: Synthetic oligonucleotide
caagauugggcauaugcggccagca

SEQ ID NO: 74554 - RNA, 25 nt, Artificial Sequence
  Description of Artificial Sequence: Synthetic oligonucleotide
aaagaaucacaugccacuuuggugu

SEQ ID NO: 74555 - RNA, 25 nt, Artificial Sequence
  Description of Artificial Sequence: Synthetic oligonucleotide
uuucauaaucuccugggagagauug

SEQ ID NO: 74556 - RNA, 25 nt, Artificial Sequence
  Description of Artificial Sequence: Synthetic oligonucleotide
gaccagcaguauagccgcuuccugc

SEQ ID NO: 74557 - RNA, 25 nt, Artificial Sequence
  Description of Artificial Sequence: Synthetic oligonucleotide
caagagucgaauguucucuaucagc

SEQ ID NO: 74558 - RNA, 25 nt, Artificial Sequence
  Description of Artificial Sequence: Synthetic oligonucleotide
cacaaucuacgaagaaucaagcagu

SEQ ID NO: 74559 - RNA, 25 nt, Artificial Sequence
  Description of Artificial Sequence: Synthetic oligonucleotide
uuucuucagagcagguaucuugaga

SEQ ID NO: 74560 - RNA, 25 nt, Artificial Sequence
  Description of Artificial Sequence: Synthetic oligonucleotide
aagccaauggagauugcccggauug

SEQ ID NO: 74561 - RNA, 25 nt, Artificial Sequence
  Description of Artificial Sequence: Synthetic oligonucleotide
guggcccggugccugugggaagaau

SEQ ID NO: 74562 - RNA, 25 nt, Artificial Sequence
  Description of Artificial Sequence: Synthetic oligonucleotide
ucacgccuucuacagacugcagcca

SEQ ID NO: 74563 - RNA, 25 nt, Artificial Sequence
  Description of Artificial Sequence: Synthetic oligonucleotide
acugcggcccagcaagggggccagg

SEQ ID NO: 74564 - RNA, 25 nt, Artificial Sequence
  Description of Artificial Sequence: Synthetic oligonucleotide
gccaaccaccccacagcagccgugg

SEQ ID NO: 74565 - RNA, 25 nt, Artificial Sequence
  Description of Artificial Sequence: Synthetic oligonucleotide
gugacggagaagcagcagaugcugg

SEQ ID NO: 74566 - RNA, 25 nt, Artificial Sequence
  Description of Artificial Sequence: Synthetic oligonucleotide
gagcagcaccuucaggauguccgga

SEQ ID NO: 74567 - RNA, 25 nt, Artificial Sequence
  Description of Artificial Sequence: Synthetic oligonucleotide
aagagagugcaggaucuagaacaga

SEQ ID NO: 74568 - RNA, 25 nt, Artificial Sequence
  Description of Artificial Sequence: Synthetic oligonucleotide
aaaaugaaagugguagagaaucucc

SEQ ID NO: 74569 - RNA, 25 nt, Artificial Sequence
  Description of Artificial Sequence: Synthetic oligonucleotide
caggaugacuuugauuucaacuaua

SEQ ID NO: 74570 - RNA, 25 nt, Artificial Sequence
  Description of Artificial Sequence: Synthetic oligonucleotide
aaaacccucaagagucaaggagaca

SEQ ID NO: 74571 - RNA, 25 nt, Artificial Sequence
  Description of Artificial Sequence: Synthetic oligonucleotide
augcaagaucugaauggaaacaacc

SEQ ID NO: 74572 - RNA, 25 nt, Artificial Sequence
  Description of Artificial Sequence: Synthetic oligonucleotide
cagucagugaccaggcagaagaugc

SEQ ID NO: 74573 - RNA, 25 nt, Artificial Sequence
  Description of Artificial Sequence: Synthetic oligonucleotide
cagcagcuggaacagaugcucacug

SEQ ID NO: 74574 - RNA, 25 nt, Artificial Sequence
  Description of Artificial Sequence: Synthetic oligonucleotide
gcgcuggaccagaugcggagaagca

SEQ ID NO: 74575 - RNA, 25 nt, Artificial Sequence
  Description of Artificial Sequence: Synthetic oligonucleotide
aucgugagugagcuggcggggcuuu

SEQ ID NO: 74576 - RNA, 25 nt, Artificial Sequence
  Description of Artificial Sequence: Synthetic oligonucleotide
uugucagcgauggaguacgugcaga

SEQ ID NO: 74577 - RNA, 25 nt, Artificial Sequence
  Description of Artificial Sequence: Synthetic oligonucleotide
aaaacucucacggacgaggagcugg

SEQ ID NO: 74578 - RNA, 25 nt, Artificial Sequence
  Description of Artificial Sequence: Synthetic oligonucleotide
gcugacuggaagaggcggcaacaga

SEQ ID NO: 74579 - RNA, 25 nt, Artificial Sequence
  Description of Artificial Sequence: Synthetic oligonucleotide
auugccugcauuggaggcccgccca

SEQ ID NO: 74580 - RNA, 25 nt, Artificial Sequence
  Description of Artificial Sequence: Synthetic oligonucleotide
aacaucugccuagaucggcuagaaa

SEQ ID NO: 74581 - RNA, 25 nt, Artificial Sequence
  Description of Artificial Sequence: Synthetic oligonucleotide
aacuggauaacgucauuagcagaau

SEQ ID NO: 74582 - RNA, 25 nt, Artificial Sequence
  Description of Artificial Sequence: Synthetic oligonucleotide
ucucaacuucagacccgucaacaaa

SEQ ID NO: 74583 - RNA, 25 nt, Artificial Sequence
  Description of Artificial Sequence: Synthetic oligonucleotide
auuaagaaacuggaggaguugcagc

SEQ ID NO: 74584 - RNA, 25 nt, Artificial Sequence
  Description of Artificial Sequence: Synthetic oligonucleotide
caaaaaguuuccuacaaaggggacc

SEQ ID NO: 74585 - RNA, 25 nt, Artificial Sequence
  Description of Artificial Sequence: Synthetic oligonucleotide
cccauuguacagcaccggccgaugc

SEQ ID NO: 74586 - RNA, 25 nt, Artificial Sequence
  Description of Artificial Sequence: Synthetic oligonucleotide
cuggaggagagaaucguggagcugu

SEQ ID NO: 74587 - RNA, 25 nt, Artificial Sequence
  Description of Artificial Sequence: Synthetic oligonucleotide
uuuagaaacuuaaugaaaagugccu

SEQ ID NO: 74588 - RNA, 25 nt, Artificial Sequence
  Description of Artificial Sequence: Synthetic oligonucleotide
uuugugguggagcggcagcccugca

SEQ ID NO: 74589 - RNA, 25 nt, Artificial Sequence
  Description of Artificial Sequence: Synthetic oligonucleotide
augcccaugcauccugaccggcccc

SEQ ID NO: 74590 - RNA, 25 nt, Artificial Sequence
  Description of Artificial Sequence: Synthetic oligonucleotide
cucgucaucaagaccggcguccagu

SEQ ID NO: 74591 - RNA, 25 nt, Artificial Sequence
  Description of Artificial Sequence: Synthetic oligonucleotide
uucacuacuaaagucagguugcugg

SEQ ID NO: 74592 - RNA, 25 nt, Artificial Sequence
  Description of Artificial Sequence: Synthetic oligonucleotide
gucaaauucccugaguugaauuauc

SEQ ID NO: 74593 - RNA, 25 nt, Artificial Sequence
  Description of Artificial Sequence: Synthetic oligonucleotide
cagcuuaaaauuaaagugugcauug

SEQ ID NO: 74594 - RNA, 25 nt, Artificial Sequence
  Description of Artificial Sequence: Synthetic oligonucleotide
gacaaagacucuggggacguugcag

SEQ ID NO: 74595 - RNA, 25 nt, Artificial Sequence
  Description of Artificial Sequence: Synthetic oligonucleotide
gcucucagaggaucccggaaauuua

SEQ ID NO: 74596 - RNA, 25 nt, Artificial Sequence
  Description of Artificial Sequence: Synthetic oligonucleotide
aacauucugggcacaaacacaaaag

SEQ ID NO: 74597 - RNA, 25 nt, Artificial Sequence
  Description of Artificial Sequence: Synthetic oligonucleotide
gugaugaacauggaagaauccaaca

SEQ ID NO: 74598 - RNA, 25 nt, Artificial Sequence
  Description of Artificial Sequence: Synthetic oligonucleotide
aacggcagccucucugcagaauuca

SEQ ID NO: 74599 - RNA, 25 nt, Artificial Sequence
  Description of Artificial Sequence: Synthetic oligonucleotide
aaacacuugacccugagggagcaga

SEQ ID NO: 74600 - RNA, 25 nt, Artificial Sequence
  Description of Artificial Sequence: Synthetic oligonucleotide
agaugugggaaugggggccgagcca

SEQ ID NO: 74601 - RNA, 25 nt, Artificial Sequence
  Description of Artificial Sequence: Synthetic oligonucleotide
aauugugaugcuucccugauuguga

SEQ ID NO: 74602 - RNA, 25 nt, Artificial Sequence
  Description of Artificial Sequence: Synthetic oligonucleotide
acugaggagcugcaccugaucaccu

SEQ ID NO: 74603 - RNA, 25 nt, Artificial Sequence
  Description of Artificial Sequence: Synthetic oligonucleotide
uuugagaccgagguguaucaccaag

SEQ ID NO: 74604 - RNA, 25 nt, Artificial Sequence
  Description of Artificial Sequence: Synthetic oligonucleotide
ggccucaagauugaccuagagaccc

SEQ ID NO: 74605 - RNA, 25 nt, Artificial Sequence
  Description of Artificial Sequence: Synthetic oligonucleotide
cacuccuugccaguuguggugaucu

SEQ ID NO: 74606 - RNA, 25 nt, Artificial Sequence
  Description of Artificial Sequence: Synthetic oligonucleotide
uccaacaucugucagaugccaaaug

SEQ ID NO: 74607 - RNA, 25 nt, Artificial Sequence
  Description of Artificial Sequence: Synthetic oligonucleotide
gccugggcguccauccugugguaca

SEQ ID NO: 74608 - RNA, 25 nt, Artificial Sequence
  Description of Artificial Sequence: Synthetic oligonucleotide
aacaugcugaccaacaaucccaaga

SEQ ID NO: 74609 - RNA, 25 nt, Artificial Sequence
  Description of Artificial Sequence: Synthetic oligonucleotide
aauguaaacuuuuuuaccaagcccc

SEQ ID NO: 74610 - RNA, 25 nt, Artificial Sequence
  Description of Artificial Sequence: Synthetic oligonucleotide
ccaauuggaaccugggaucaagugg

SEQ ID NO: 74611 - RNA, 25 nt, Artificial Sequence
  Description of Artificial Sequence: Synthetic oligonucleotide
gccgagguccugagcuggcaguucu

SEQ ID NO: 74612 - RNA, 25 nt, Artificial Sequence
  Description of Artificial Sequence: Synthetic oligonucleotide
uccuccaccaccaagcgaggacuga

SEQ ID NO: 74613 - RNA, 25 nt, Artificial Sequence
  Description of Artificial Sequence: Synthetic oligonucleotide
agcaucgagcagcugacuacacugg

SEQ ID NO: 74614 - RNA, 25 nt, Artificial Sequence
  Description of Artificial Sequence: Synthetic oligonucleotide
gcagagaaacucuugggaccuggug

SEQ ID NO: 74615 - RNA, 25 nt, Artificial Sequence
  Description of Artificial Sequence: Synthetic oligonucleotide
gugaauuauucagggugucagauca

SEQ ID NO: 74616 - RNA, 25 nt, Artificial Sequence
  Description of Artificial Sequence: Synthetic oligonucleotide
acaugggcuaaauuuugcaaagaaa

SEQ ID NO: 74617 - RNA, 25 nt, Artificial Sequence
  Description of Artificial Sequence: Synthetic oligonucleotide
aacauggcuggcaagggcuucuccu

SEQ ID NO: 74618 - RNA, 25 nt, Artificial Sequence
  Description of Artificial Sequence: Synthetic oligonucleotide
uucugggucuggcuggacaauauca

SEQ ID NO: 74619 - RNA, 25 nt, Artificial Sequence
  Description of Artificial Sequence: Synthetic oligonucleotide
auugaccuugugaaaaaguacaucc

SEQ ID NO: 74620 - RNA, 25 nt, Artificial Sequence
  Description of Artificial Sequence: Synthetic oligonucleotide
cuggcccuuuggaacgaaggguaca

SEQ ID NO: 74621 - RNA, 25 nt, Artificial Sequence
  Description of Artificial Sequence: Synthetic oligonucleotide
aucaugggcuuuaucaguaaggagc

SEQ ID NO: 74622 - RNA, 25 nt, Artificial Sequence
  Description of Artificial Sequence: Synthetic oligonucleotide
cgggagcgggccaucuugagcacua

SEQ ID NO: 74623 - RNA, 25 nt, Artificial Sequence
  Description of Artificial Sequence: Synthetic oligonucleotide
aagccuccaggcaccuuccugcuaa

SEQ ID NO: 74624 - RNA, 25 nt, Artificial Sequence
  Description of Artificial Sequence: Synthetic oligonucleotide
agauucagugaaagcagcaaagaag

SEQ ID NO: 74625 - RNA, 25 nt, Artificial Sequence
  Description of Artificial Sequence: Synthetic oligonucleotide
ggaggcgucacuuucacuugggugg

SEQ ID NO: 74626 - RNA, 25 nt, Artificial Sequence
  Description of Artificial Sequence: Synthetic oligonucleotide
gagaaggacaucagcgguaagaccc

SEQ ID NO: 74627 - RNA, 25 nt, Artificial Sequence
  Description of Artificial Sequence: Synthetic oligonucleotide
cagauccaguccguggaaccauaca

SEQ ID NO: 74628 - RNA, 25 nt, Artificial Sequence
  Description of Artificial Sequence: Synthetic oligonucleotide
acaaagcagcagcugaacaacaugu

SEQ ID NO: 74629 - RNA, 25 nt, Artificial Sequence
  Description of Artificial Sequence: Synthetic oligonucleotide
ucauuugcugaaaucaucaugggcu

SEQ ID NO: 74630 - RNA, 25 nt, Artificial Sequence
  Description of Artificial Sequence: Synthetic oligonucleotide
uauaagaucauggaugcuaccaaua

SEQ ID NO: 74631 - RNA, 25 nt, Artificial Sequence
  Description of Artificial Sequence: Synthetic oligonucleotide
auccuggugucuccacuggucuauc

SEQ ID NO: 74632 - RNA, 25 nt, Artificial Sequence
  Description of Artificial Sequence: Synthetic oligonucleotide
cucuauccugacauucccaaggagg

SEQ ID NO: 74633 - RNA, 25 nt, Artificial Sequence
  Description of Artificial Sequence: Synthetic oligonucleotide
gaggcauucggaaaguauugucggc

SEQ ID NO: 74634 - RNA, 25 nt, Artificial Sequence
  Description of Artificial Sequence: Synthetic oligonucleotide
ccagagagccaggagcauccugaag

SEQ ID NO: 74635 - RNA, 25 nt, Artificial Sequence
  Description of Artificial Sequence: Synthetic oligonucleotide
gcugacccagguagcgcugccccau

SEQ ID NO: 74636 - RNA, 25 nt, Artificial Sequence
  Description of Artificial Sequence: Synthetic oligonucleotide
uaccugaagaccaaguuuaucugug

SEQ ID NO: 74637 - RNA, 25 nt, Artificial Sequence
  Description of Artificial Sequence: Synthetic oligonucleotide
gugacaccaacgaccugcagcaaua

SEQ ID NO: 74638 - RNA, 25 nt, Artificial Sequence
  Description of Artificial Sequence: Synthetic oligonucleotide
accauugaccugccgaugucccccc

SEQ ID NO: 74639 - RNA, 25 nt, Artificial Sequence
  Description of Artificial Sequence: Synthetic oligonucleotide
cgcacuuuagauucauugaugcagu

SEQ ID NO: 74640 - RNA, 25 nt, Artificial Sequence
  Description of Artificial Sequence: Synthetic oligonucleotide
uuuggaaauaauggugaaggugcug

SEQ ID NO: 74641 - RNA, 25 nt, Artificial Sequence
  Description of Artificial Sequence: Synthetic oligonucleotide
gaacccucagcaggagggcaguuug

SEQ ID NO: 74642 - RNA, 25 nt, Artificial Sequence
  Description of Artificial Sequence: Synthetic oligonucleotide
gagucccucaccuuugacauggagu

SEQ ID NO: 74643 - RNA, 25 nt, Artificial Sequence
  Description of Artificial Sequence: Synthetic oligonucleotide
uugaccucggagugcgcuaccuccc

SEQ ID NO: 74644 - RNA, 25 nt, Artificial Sequence
  Description of Artificial Sequence: Synthetic oligonucleotide
cccaugugaggagcugagaacggaa

SEQ ID NO: 74645 - RNA, 25 nt, Artificial Sequence
  Description of Artificial Sequence: Synthetic oligonucleotide
agcugcagaaagauacgacugaggc

SEQ ID NO: 74646 - RNA, 25 nt, Artificial Sequence
  Description of Artificial Sequence: Synthetic oligonucleotide
cgccuaccugcauucugccaccccu

SEQ ID NO: 74647 - RNA, 25 nt, Artificial Sequence
  Description of Artificial Sequence: Synthetic oligonucleotide
ucacacagccaaaccccagaucauc

SEQ ID NO: 74648 - RNA, 25 nt, Artificial Sequence
  Description of Artificial Sequence: Synthetic oligonucleotide
cugaaacuacuaacuuugugguucc

SEQ ID NO: 74649 - RNA, 25 nt, Artificial Sequence
  Description of Artificial Sequence: Synthetic oligonucleotide
cagauuuuuuuuaaucuccuacuuc

SEQ ID NO: 74650 - RNA, 25 nt, Artificial Sequence
  Description of Artificial Sequence: Synthetic oligonucleotide
cugcuaucuuugagcaaucugggca

SEQ ID NO: 74651 - RNA, 25 nt, Artificial Sequence
  Description of Artificial Sequence: Synthetic oligonucleotide
acuuuuaaaaauagagaaaugagug

SEQ ID NO: 74652 - RNA, 25 nt, Artificial Sequence
  Description of Artificial Sequence: Synthetic oligonucleotide
gaaugugggugaucugcuuuuaucu

SEQ ID NO: 74653 - RNA, 25 nt, Artificial Sequence
  Description of Artificial Sequence: Synthetic oligonucleotide
uaaaugcaaauaaggauguguucuc

SEQ ID NO: 74654 - RNA, 25 nt, Artificial Sequence
  Description of Artificial Sequence: Synthetic oligonucleotide
cugagacccaugaucaggggaugug

SEQ ID NO: 74655 - RNA, 25 nt, Artificial Sequence
  Description of Artificial Sequence: Synthetic oligonucleotide
ggcgggggguggcuagagggagaaa

SEQ ID NO: 74656 - RNA, 25 nt, Artificial Sequence
  Description of Artificial Sequence: Synthetic oligonucleotide
aaaggaaaugucuuguguuguuuug

SEQ ID NO: 74657 - RNA, 25 nt, Artificial Sequence
  Description of Artificial Sequence: Synthetic oligonucleotide
guuccccugcccuccuuucucagca

SEQ ID NO: 74658 - RNA, 25 nt, Artificial Sequence
  Description of Artificial Sequence: Synthetic oligonucleotide
agcuuuuuguuauuguuguuguugu

SEQ ID NO: 74659 - RNA, 25 nt, Artificial Sequence
  Description of Artificial Sequence: Synthetic oligonucleotide
uucuuagacaagugccuccuggugc

SEQ ID NO: 74660 - RNA, 25 nt, Artificial Sequence
  Description of Artificial Sequence: Synthetic oligonucleotide
ccugcggcauccuucugccuguuuc

SEQ ID NO: 74661 - RNA, 25 nt, Artificial Sequence
  Description of Artificial Sequence: Synthetic oligonucleotide
cuguaagcaaaugccacaggccacc

SEQ ID NO: 74662 - RNA, 25 nt, Artificial Sequence
  Description of Artificial Sequence: Synthetic oligonucleotide
cuauagcuacauacuccuggcauug

SEQ ID NO: 74663 - RNA, 25 nt, Artificial Sequence
  Description of Artificial Sequence: Synthetic oligonucleotide
gcacuuuuuaaccuugcugacaucc

SEQ ID NO: 74664 - RNA, 25 nt, Artificial Sequence
  Description of Artificial Sequence: Synthetic oligonucleotide
caaauagaagauaggacuaucuaag

SEQ ID NO: 74665 - RNA, 25 nt, Artificial Sequence
  Description of Artificial Sequence: Synthetic oligonucleotide
gcccuagguuucuuuuuaaauuaag

SEQ ID NO: 74666 - RNA, 25 nt, Artificial Sequence
  Description of Artificial Sequence: Synthetic oligonucleotide
gaaauaauaacaauuaaagggcaaa

SEQ ID NO: 74667 - RNA, 25 nt, Artificial Sequence
  Description of Artificial Sequence: Synthetic oligonucleotide
aaaacacuguaucagcauagccuuu

SEQ ID NO: 74668 - RNA, 25 nt, Artificial Sequence
  Description of Artificial Sequence: Synthetic oligonucleotide
ucuguauuuaagaaacuuaagcagc

SEQ ID NO: 74669 - RNA, 25 nt, Artificial Sequence
  Description of Artificial Sequence: Synthetic oligonucleotide
ccgggcaugguggcucacgccugua

SEQ ID NO: 74670 - RNA, 25 nt, Artificial Sequence
  Description of Artificial Sequence: Synthetic oligonucleotide
aaucccagcacuuugggaggccgag

SEQ ID NO: 74671 - RNA, 25 nt, Artificial Sequence
  Description of Artificial Sequence: Synthetic oligonucleotide
ggcggaucauaaggucaggagauca

SEQ ID NO: 74672 - RNA, 25 nt, Artificial Sequence
  Description of Artificial Sequence: Synthetic oligonucleotide
aagaccauccuggcuaacacgguga

SEQ ID NO: 74673 - RNA, 25 nt, Artificial Sequence
  Description of Artificial Sequence: Synthetic oligonucleotide
aaaccccgucucuacuaaaaguaca

SEQ ID NO: 74674 - RNA, 25 nt, Artificial Sequence
  Description of Artificial Sequence: Synthetic oligonucleotide
aaaaaauuagcugggugugguggug

SEQ ID NO: 74675 - RNA, 25 nt, Artificial Sequence
  Description of Artificial Sequence: Synthetic oligonucleotide
gggcgccuguagucccagcuacucg

SEQ ID NO: 74676 - RNA, 25 nt, Artificial Sequence
  Description of Artificial Sequence: Synthetic oligonucleotide
gggaggcugaggcaggagaaucgcu

SEQ ID NO: 74677 - RNA, 25 nt, Artificial Sequence
  Description of Artificial Sequence: Synthetic oligonucleotide
uugaaccugagaggcggagguugca

SEQ ID NO: 74678 - RNA, 25 nt, Artificial Sequence
  Description of Artificial Sequence: Synthetic oligonucleotide
agugagccaaaauugcaccacugca

SEQ ID NO: 74679 - RNA, 25 nt, Artificial Sequence
  Description of Artificial Sequence: Synthetic oligonucleotide
acacugcacuccauccugggcgaca

SEQ ID NO: 74680 - RNA, 25 nt, Artificial Sequence
  Description of Artificial Sequence: Synthetic oligonucleotide
agucugagacucugucucaaaaaaa

SEQ ID NO: 74681 - RNA, 25 nt, Artificial Sequence
  Description of Artificial Sequence: Synthetic oligonucleotide
uuaacagccuccuuggugcuuuaag

SEQ ID NO: 74682 - RNA, 25 nt, Artificial Sequence
  Description of Artificial Sequence: Synthetic oligonucleotide
gcauucagcuuccuucaggcuggua

SEQ ID NO: 74683 - RNA, 25 nt, Artificial Sequence
  Description of Artificial Sequence: Synthetic oligonucleotide
aauuuauauaaucccugaaacgggc

SEQ ID NO: 74684 - RNA, 25 nt, Artificial Sequence
  Description of Artificial Sequence: Synthetic oligonucleotide
cuucaggucaaacccuuaagacauc

SEQ ID NO: 74685 - RNA, 25 nt, Artificial Sequence
  Description of Artificial Sequence: Synthetic oligonucleotide
cugaagcugcaaccuggccuuuggu

SEQ ID NO: 74686 - RNA, 25 nt, Artificial Sequence
  Description of Artificial Sequence: Synthetic oligonucleotide
uguugaaauaggaagguuuaaggag

SEQ ID NO: 74687 - RNA, 25 nt, Artificial Sequence
  Description of Artificial Sequence: Synthetic oligonucleotide
gaaucuaagcauuuuagacuuuuuu

SEQ ID NO: 74688 - RNA, 25 nt, Artificial Sequence
  Description of Artificial Sequence: Synthetic oligonucleotide
uuuauaaauagacuuauuuuccuuu

SEQ ID NO: 74689 - RNA, 25 nt, Artificial Sequence
  Description of Artificial Sequence: Synthetic oligonucleotide
uguaauguauuggccuuuuagugag

SEQ ID NO: 74690 - RNA, 25 nt, Artificial Sequence
  Description of Artificial Sequence: Synthetic oligonucleotide
guaaggcugggcagagggugcuuac

SEQ ID NO: 74691 - RNA, 25 nt, Artificial Sequence
  Description of Artificial Sequence: Synthetic oligonucleotide
caaccuugacucccuuucucccugg

SEQ ID NO: 74692 - RNA, 25 nt, Artificial Sequence
  Description of Artificial Sequence: Synthetic oligonucleotide
gacuugaucugcuguuucagaggcu

SEQ ID NO: 74693 - RNA, 25 nt, Artificial Sequence
  Description of Artificial Sequence: Synthetic oligonucleotide
uagguuguuucugugggugccuuau

SEQ ID NO: 74694 - RNA, 25 nt, Artificial Sequence
  Description of Artificial Sequence: Synthetic oligonucleotide
ucagggcugggauacuucugauucu

SEQ ID NO: 74695 - RNA, 25 nt, Artificial Sequence
  Description of Artificial Sequence: Synthetic oligonucleotide
uggcuuccuuccugccccacccucc

SEQ ID NO: 74696 - RNA, 25 nt, Artificial Sequence
  Description of Artificial Sequence: Synthetic oligonucleotide
ccgaccccagucccccugauccugc

SEQ ID NO: 74697 - RNA, 25 nt, Artificial Sequence
  Description of Artificial Sequence: Synthetic oligonucleotide
cuagaggcaugucuccuugcguguc

SEQ ID NO: 74698 - RNA, 25 nt, Artificial Sequence
  Description of Artificial Sequence: Synthetic oligonucleotide
cuaaaggucccucauccuguuuguu

SEQ ID NO: 74699 - RNA, 25 nt, Artificial Sequence
  Description of Artificial Sequence: Synthetic oligonucleotide
uuuaggaauccuggucucaggaccu

SEQ ID NO: 74700 - RNA, 25 nt, Artificial Sequence
  Description of Artificial Sequence: Synthetic oligonucleotide
ucauggaagaagagggggagagagu

SEQ ID NO: 74701 - RNA, 25 nt, Artificial Sequence
  Description of Artificial Sequence: Synthetic oligonucleotide
uuacagguuggacaugaugcacacu

SEQ ID NO: 74702 - RNA, 25 nt, Artificial Sequence
  Description of Artificial Sequence: Synthetic oligonucleotide
uauggggccccagcgacgugucugg

SEQ ID NO: 74703 - RNA, 25 nt, Artificial Sequence
  Description of Artificial Sequence: Synthetic oligonucleotide
guugagcucagggaauaugguucuu

SEQ ID NO: 74704 - RNA, 25 nt, Artificial Sequence
  Description of Artificial Sequence: Synthetic oligonucleotide
uagccaguuucuuggugauauccag

SEQ ID NO: 74705 - RNA, 25 nt, Artificial Sequence
  Description of Artificial Sequence: Synthetic oligonucleotide
guggcacuuguaauggcgucuucau

SEQ ID NO: 74706 - RNA, 25 nt, Artificial Sequence
  Description of Artificial Sequence: Synthetic oligonucleotide
uucaguucaugcagggcaaaggcuu

SEQ ID NO: 74707 - RNA, 25 nt, Artificial Sequence
  Description of Artificial Sequence: Synthetic oligonucleotide
uacugauaaacuugagucugcccuc

SEQ ID NO: 74708 - RNA, 25 nt, Artificial Sequence
  Description of Artificial Sequence: Synthetic oligonucleotide
cguaugaggguguauaccuggccuc

SEQ ID NO: 74709 - RNA, 25 nt, Artificial Sequence
  Description of Artificial Sequence: Synthetic oligonucleotide
cccucugaggcuggugacuccuccc

SEQ ID NO: 74710 - RNA, 25 nt, Artificial Sequence
  Description of Artificial Sequence: Synthetic oligonucleotide
cugcuggggccccacaggugaggca

SEQ ID NO: 74711 - RNA, 25 nt, Artificial Sequence
  Description of Artificial Sequence: Synthetic oligonucleotide
agaacagcuagagggccuccccgcc

SEQ ID NO: 74712 - RNA, 25 nt, Artificial Sequence
  Description of Artificial Sequence: Synthetic oligonucleotide
cugcccgccuuggcuggcuagcucg

SEQ ID NO: 74713 - RNA, 25 nt, Artificial Sequence
  Description of Artificial Sequence: Synthetic oligonucleotide
gccucuccugugcguaugggaacac

SEQ ID NO: 74714 - RNA, 25 nt, Artificial Sequence
  Description of Artificial Sequence: Synthetic oligonucleotide
ccuagcacgugcuggaugggcugcc

SEQ ID NO: 74715 - RNA, 25 nt, Artificial Sequence
  Description of Artificial Sequence: Synthetic oligonucleotide
cucugacucagaggcauggccggau

SEQ ID NO: 74716 - RNA, 25 nt, Artificial Sequence
  Description of Artificial Sequence: Synthetic oligonucleotide
uuuggcaacucaaaaccaccuugcc

SEQ ID NO: 74717 - RNA, 25 nt, Artificial Sequence
  Description of Artificial Sequence: Synthetic oligonucleotide
cucagcugaucagaguuucugugga

SEQ ID NO: 74718 - RNA, 25 nt, Artificial Sequence
  Description of Artificial Sequence: Synthetic oligonucleotide
aauucuguuuguuaaaucaaauuag

SEQ ID NO: 74719 - RNA, 25 nt, Artificial Sequence
  Description of Artificial Sequence: Synthetic oligonucleotide
gcuggucucugaauuaagggggaga

SEQ ID NO: 74720 - RNA, 25 nt, Artificial Sequence
  Description of Artificial Sequence: Synthetic oligonucleotide
acgaccuucucuaagaugaacaggg

SEQ ID NO: 74721 - RNA, 25 nt, Artificial Sequence
  Description of Artificial Sequence: Synthetic oligonucleotide
guucgccccaguccuccugccugga

SEQ ID NO: 74722 - RNA, 25 nt, Artificial Sequence
  Description of Artificial Sequence: Synthetic oligonucleotide
agacaguugaugugucaugcagagc

SEQ ID NO: 74723 - RNA, 25 nt, Artificial Sequence
  Description of Artificial Sequence: Synthetic oligonucleotide
cucuuacuucuccagcaacacucuu

SEQ ID NO: 74724 - RNA, 25 nt, Artificial Sequence
  Description of Artificial Sequence: Synthetic oligonucleotide
ucaguacauaauaagcuuaacugau

SEQ ID NO: 74725 - RNA, 25 nt, Artificial Sequence
  Description of Artificial Sequence: Synthetic oligonucleotide
uaaacagaauauuuagaaaggugag

SEQ ID NO: 74726 - RNA, 25 nt, Artificial Sequence
  Description of Artificial Sequence: Synthetic oligonucleotide
gacuugggcuuaccauuggguuuaa

SEQ ID NO: 74727 - RNA, 25 nt, Artificial Sequence
  Description of Artificial Sequence: Synthetic oligonucleotide
aaucauagggaccuagggcgagggu

SEQ ID NO: 74728 - RNA, 25 nt, Artificial Sequence
  Description of Artificial Sequence: Synthetic oligonucleotide
uucagggcuucucuggagcagauau

SEQ ID NO: 74729 - RNA, 25 nt, Artificial Sequence
  Description of Artificial Sequence: Synthetic oligonucleotide
uugucaaguucauggccuuagguag

SEQ ID NO: 74730 - RNA, 25 nt, Artificial Sequence
  Description of Artificial Sequence: Synthetic oligonucleotide
gcauguaucuggucuuaacucugau

SEQ ID NO: 74731 - RNA, 25 nt, Artificial Sequence
  Description of Artificial Sequence: Synthetic oligonucleotide
uuguagcaaaaguucugagaggagc

SEQ ID NO: 74732 - RNA, 25 nt, Artificial Sequence
  Description of Artificial Sequence: Synthetic oligonucleotide
cugagcccuguuguggcccauuaaa

SEQ ID NO: 74733 - RNA, 25 nt, Artificial Sequence
  Description of Artificial Sequence: Synthetic oligonucleotide
agaacaggguccucaggcccugccc

SEQ ID NO: 74734 - RNA, 25 nt, Artificial Sequence
  Description of Artificial Sequence: Synthetic oligonucleotide
cgcuuccuguccacugcccccuccc

SEQ ID NO: 74735 - RNA, 25 nt, Artificial Sequence
  Description of Artificial Sequence: Synthetic oligonucleotide
ccauccccagcccagccgagggaau

SEQ ID NO: 74736 - RNA, 25 nt, Artificial Sequence
  Description of Artificial Sequence: Synthetic oligonucleotide
ucccguggguugcuuaccuaccuau

SEQ ID NO: 74737 - RNA, 25 nt, Artificial Sequence
  Description of Artificial Sequence: Synthetic oligonucleotide
uaaggugguuuauaagcugcugucc

SEQ ID NO: 74738 - RNA, 25 nt, Artificial Sequence
  Description of Artificial Sequence: Synthetic oligonucleotide
cuggccacugcauucaaauuccaau

SEQ ID NO: 74739 - RNA, 25 nt, Artificial Sequence
  Description of Artificial Sequence: Synthetic oligonucleotide
uguguacuucauaguguaaaaauuu

SEQ ID NO: 74740 - RNA, 25 nt, Artificial Sequence
  Description of Artificial Sequence: Synthetic oligonucleotide
uauauuauugugagguuuuuugucu

SEQ ID NO: 74741 - RNA, 25 nt, Artificial Sequence
  Description of Artificial Sequence: Synthetic oligonucleotide
uauauugcuguaucuacuuuaacuu

SEQ ID NO: 74742 - RNA, 25 nt, Artificial Sequence
  Description of Artificial Sequence: Synthetic oligonucleotide
uccagaaauaaacguuauauaggaa

SEQ ID NO: 74743 - RNA, 25 nt, Artificial Sequence
  Description of Artificial Sequence: Synthetic oligonucleotide
aaacguuauauaggaaccguaaaaa

SEQ ID NO: 74744 - RNA, 25 nt, Artificial Sequence
  Description of Artificial Sequence: Synthetic oligonucleotide
cgcugucucucccccucggcucgga

SEQ ID NO: 74745 - RNA, 25 nt, Artificial Sequence
  Description of Artificial Sequence: Synthetic oligonucleotide
agaggcccuucggccugagggagcc

SEQ ID NO: 74746 - RNA, 25 nt, Artificial Sequence
  Description of Artificial Sequence: Synthetic oligonucleotide
cucgccgcccguccccggcacacgc

SEQ ID NO: 74747 - RNA, 25 nt, Artificial Sequence
  Description of Artificial Sequence: Synthetic oligonucleotide
cgcagccccggccucucggccucug

SEQ ID NO: 74748 - RNA, 25 nt, Artificial Sequence
  Description of Artificial Sequence: Synthetic oligonucleotide
gccggagaaacaguugggaccccug

SEQ ID NO: 74749 - RNA, 25 nt, Artificial Sequence
  Description of Artificial Sequence: Synthetic oligonucleotide
gauuuuagcaggauggcccaaugga

SEQ ID NO: 74750 - RNA, 25 nt, Artificial Sequence
  Description of Artificial Sequence: Synthetic oligonucleotide
aaucagcuacagcagcuugacacac

SEQ ID NO: 74751 - RNA, 25 nt, Artificial Sequence
  Description of Artificial Sequence: Synthetic oligonucleotide
cgguaccuggagcagcuccaucagc

SEQ ID NO: 74752 - RNA, 25 nt, Artificial Sequence
  Description of Artificial Sequence: Synthetic oligonucleotide
cucuacagugacagcuucccaaugg

SEQ ID NO: 74753 - RNA, 25 nt, Artificial Sequence
  Description of Artificial Sequence: Synthetic oligonucleotide
gagcugcggcaguuucuggccccuu

SEQ ID NO: 74754 - RNA, 25 nt, Artificial Sequence
  Description of Artificial Sequence: Synthetic oligonucleotide
uggauugagagucaagauugggcau

SEQ ID NO: 74755 - RNA, 25 nt, Artificial Sequence
  Description of Artificial Sequence: Synthetic oligonucleotide
uaugcggccagcaaagaaucacaug

SEQ ID NO: 74756 - RNA, 25 nt, Artificial Sequence
  Description of Artificial Sequence: Synthetic oligonucleotide
gccacuuugguguuucauaaucucc

SEQ ID NO: 74757 - RNA, 25 nt, Artificial Sequence
  Description of Artificial Sequence: Synthetic oligonucleotide
cugggagagauugaccagcaguaua

SEQ ID NO: 74758 - RNA, 25 nt, Artificial Sequence
  Description of Artificial Sequence: Synthetic oligonucleotide
agccgcuuccugcaagagucgaaug

SEQ ID NO: 74759 - RNA, 25 nt, Artificial Sequence
  Description of Artificial Sequence: Synthetic oligonucleotide
guucucuaucagcacaaucuacgaa

SEQ ID NO: 74760 - RNA, 25 nt, Artificial Sequence
  Description of Artificial Sequence: Synthetic oligonucleotide
agaaucaagcaguuucuucagagca

SEQ ID NO: 74761 - RNA, 25 nt, Artificial Sequence
  Description of Artificial Sequence: Synthetic oligonucleotide
agguaucuugagaagccaauggaga

SEQ ID NO: 74762 - RNA, 25 nt, Artificial Sequence
  Description of Artificial Sequence: Synthetic oligonucleotide
auugcccggauuguggcccggugcc

SEQ ID NO: 74763 - RNA, 25 nt, Artificial Sequence
  Description of Artificial Sequence: Synthetic oligonucleotide
cugugggaagaaucacgccuucuac

SEQ ID NO: 74764 - RNA, 25 nt, Artificial Sequence
  Description of Artificial Sequence: Synthetic oligonucleotide
cagacugcagccacugcggcccagc

SEQ ID NO: 74765 - RNA, 25 nt, Artificial Sequence
  Description of Artificial Sequence: Synthetic oligonucleotide
caagggggccaggccaaccacccca

SEQ ID NO: 74766 - RNA, 25 nt, Artificial Sequence
  Description of Artificial Sequence: Synthetic oligonucleotide
acagcagccguggugacggagaagc

SEQ ID NO: 74767 - RNA, 25 nt, Artificial Sequence
  Description of Artificial Sequence: Synthetic oligonucleotide
cagcagaugcuggagcagcaccuuc

SEQ ID NO: 74768 - RNA, 25 nt, Artificial Sequence
  Description of Artificial Sequence: Synthetic oligonucleotide
caggauguccggaagagagugcagg

SEQ ID NO: 74769 - RNA, 25 nt, Artificial Sequence
  Description of Artificial Sequence: Synthetic oligonucleotide
gaucuagaacagaaaaugaaagugg

SEQ ID NO: 74770 - RNA, 25 nt, Artificial Sequence
  Description of Artificial Sequence: Synthetic oligonucleotide
guagagaaucuccaggaugacuuug

SEQ ID NO: 74771 - RNA, 25 nt, Artificial Sequence
  Description of Artificial Sequence: Synthetic oligonucleotide
gauuucaacuauaaaacccucaaga

SEQ ID NO: 74772 - RNA, 25 nt, Artificial Sequence
  Description of Artificial Sequence: Synthetic oligonucleotide
agucaaggagacaugcaagaucuga

SEQ ID NO: 74773 - RNA, 25 nt, Artificial Sequence
  Description of Artificial Sequence: Synthetic oligonucleotide
aauggaaacaaccagucagugacca

SEQ ID NO: 74774 - RNA, 25 nt, Artificial Sequence
  Description of Artificial Sequence: Synthetic oligonucleotide
aggcagaagaugcagcagcuggaac

SEQ ID NO: 74775 - RNA, 25 nt, Artificial Sequence
  Description of Artificial Sequence: Synthetic oligonucleotide
cagaugcucacugcgcuggaccaga

SEQ ID NO: 74776 - RNA, 25 nt, Artificial Sequence
  Description of Artificial Sequence: Synthetic oligonucleotide
augcggagaagcaucgugagugagc

SEQ ID NO: 74777 - RNA, 25 nt, Artificial Sequence
  Description of Artificial Sequence: Synthetic oligonucleotide
cuggcggggcuuuugucagcgaugg

SEQ ID NO: 74778 - RNA, 25 nt, Artificial Sequence
  Description of Artificial Sequence: Synthetic oligonucleotide
gaguacgugcagaaaacucucacgg

SEQ ID NO: 74779 - RNA, 25 nt, Artificial Sequence
  Description of Artificial Sequence: Synthetic oligonucleotide
gacgaggagcuggcugacuggaaga

SEQ ID NO: 74780 - RNA, 25 nt, Artificial Sequence
  Description of Artificial Sequence: Synthetic oligonucleotide
aggcggcaacagauugccugcauug

SEQ ID NO: 74781 - RNA, 25 nt, Artificial Sequence
  Description of Artificial Sequence: Synthetic oligonucleotide
ggaggcccgcccaacaucugccuag

SEQ ID NO: 74782 - RNA, 25 nt, Artificial Sequence
  Description of Artificial Sequence: Synthetic oligonucleotide
gaucggcuagaaaacuggauaacgu

SEQ ID NO: 74783 - RNA, 25 nt, Artificial Sequence
  Description of Artificial Sequence: Synthetic oligonucleotide
ucauuagcagaaucucaacuucaga

SEQ ID NO: 74784 - RNA, 25 nt, Artificial Sequence
  Description of Artificial Sequence: Synthetic oligonucleotide
acccgucaacaaauuaagaaacugg

SEQ ID NO: 74785 - RNA, 25 nt, Artificial Sequence
  Description of Artificial Sequence: Synthetic oligonucleotide
gaggaguugcagcaaaaaguuuccu

SEQ ID NO: 74786 - RNA, 25 nt, Artificial Sequence
  Description of Artificial Sequence: Synthetic oligonucleotide
uacaaaggggaccccauuguacagc

SEQ ID NO: 74787 - RNA, 25 nt, Artificial Sequence
  Description of Artificial Sequence: Synthetic oligonucleotide
caccggccgaugcuggaggagagaa

SEQ ID NO: 74788 - RNA, 25 nt, Artificial Sequence
  Description of Artificial Sequence: Synthetic oligonucleotide
aucguggagcuguuuagaaacuuaa

SEQ ID NO: 74789 - RNA, 25 nt, Artificial Sequence
  Description of Artificial Sequence: Synthetic oligonucleotide
augaaaagugccuuugugguggagc

SEQ ID NO: 74790 - RNA, 25 nt, Artificial Sequence
  Description of Artificial Sequence: Synthetic oligonucleotide
cggcagcccugcaugcccaugcauc

SEQ ID NO: 74791 - RNA, 25 nt, Artificial Sequence
  Description of Artificial Sequence: Synthetic oligonucleotide
ccugaccggccccucgucaucaaga

SEQ ID NO: 74792 - RNA, 25 nt, Artificial Sequence
  Description of Artificial Sequence: Synthetic oligonucleotide
accggcguccaguucacuacuaaag

SEQ ID NO: 74793 - RNA, 25 nt, Artificial Sequence
  Description of Artificial Sequence: Synthetic oligonucleotide
gucagguugcuggucaaauucccug

SEQ ID NO: 74794 - RNA, 25 nt, Artificial Sequence
  Description of Artificial Sequence: Synthetic oligonucleotide
gaguugaauuaucagcuuaaaauua

SEQ ID NO: 74795 - RNA, 25 nt, Artificial Sequence
  Description of Artificial Sequence: Synthetic oligonucleotide
aaagugugcauugacaaagacucug

SEQ ID NO: 74796 - RNA, 25 nt, Artificial Sequence
  Description of Artificial Sequence: Synthetic oligonucleotide
ggggacguugcagcucucagaggau

SEQ ID NO: 74797 - RNA, 25 nt, Artificial Sequence
  Description of Artificial Sequence: Synthetic oligonucleotide
ucccggaaauuuaacauucugggca

SEQ ID NO: 74798 - RNA, 25 nt, Artificial Sequence
  Description of Artificial Sequence: Synthetic oligonucleotide
acaaacacaaaagugaugaacaugg

SEQ ID NO: 74799 - RNA, 25 nt, Artificial Sequence
  Description of Artificial Sequence: Synthetic oligonucleotide
gaagaauccaacaacggcagccucu

SEQ ID NO: 74800 - RNA, 25 nt, Artificial Sequence
  Description of Artificial Sequence: Synthetic oligonucleotide
ucugcagaauucaaacacuugaccc

SEQ ID NO: 74801 - RNA, 25 nt, Artificial Sequence
  Description of Artificial Sequence: Synthetic oligonucleotide
cugagggagcagagaugugggaaug

SEQ ID NO: 74802 - RNA, 25 nt, Artificial Sequence
  Description of Artificial Sequence: Synthetic oligonucleotide
gggggccgagccaauugugaugcuu

SEQ ID NO: 74803 - RNA, 25 nt, Artificial Sequence
  Description of Artificial Sequence: Synthetic oligonucleotide
ucccugauugugacugaggagcugc

SEQ ID NO: 74804 - RNA, 25 nt, Artificial Sequence
  Description of Artificial Sequence: Synthetic oligonucleotide
caccugaucaccuuugagaccgagg

SEQ ID NO: 74805 - RNA, 25 nt, Artificial Sequence
  Description of Artificial Sequence: Synthetic oligonucleotide
guguaucaccaaggccucaagauug

SEQ ID NO: 74806 - RNA, 25 nt, Artificial Sequence
  Description of Artificial Sequence: Synthetic oligonucleotide
gaccuagagacccacuccuugccag

SEQ ID NO: 74807 - RNA, 25 nt, Artificial Sequence
  Description of Artificial Sequence: Synthetic oligonucleotide
guuguggugaucuccaacaucuguc

SEQ ID NO: 74808 - RNA, 25 nt, Artificial Sequence
  Description of Artificial Sequence: Synthetic oligonucleotide
cagaugccaaaugccugggcgucca

SEQ ID NO: 74809 - RNA, 25 nt, Artificial Sequence
  Description of Artificial Sequence: Synthetic oligonucleotide
auccugugguacaacaugcugacca

SEQ ID NO: 74810 - RNA, 25 nt, Artificial Sequence
  Description of Artificial Sequence: Synthetic oligonucleotide
aacaaucccaagaauguaaacuuuu

SEQ ID NO: 74811 - RNA, 25 nt, Artificial Sequence
  Description of Artificial Sequence: Synthetic oligonucleotide
uuuaccaagcccccaauuggaaccu

SEQ ID NO: 74812 - RNA, 25 nt, Artificial Sequence
  Description of Artificial Sequence: Synthetic oligonucleotide
ugggaucaaguggccgagguccuga

SEQ ID NO: 74813 - RNA, 25 nt, Artificial Sequence
  Description of Artificial Sequence: Synthetic oligonucleotide
agcuggcaguucuccuccaccacca

SEQ ID NO: 74814 - RNA, 25 nt, Artificial Sequence
  Description of Artificial Sequence: Synthetic oligonucleotide
aagcgaggacugagcaucgagcagc

SEQ ID NO: 74815 - RNA, 25 nt, Artificial Sequence
  Description of Artificial Sequence: Synthetic oligonucleotide
cugacuacacuggcagagaaacucu

SEQ ID NO: 74816 - RNA, 25 nt, Artificial Sequence
  Description of Artificial Sequence: Synthetic oligonucleotide
uugggaccuggugugaauuauucag

SEQ ID NO: 74817 - RNA, 25 nt, Artificial Sequence
  Description of Artificial Sequence: Synthetic oligonucleotide
gggugucagaucacaugggcuaaau

SEQ ID NO: 74818 - RNA, 25 nt, Artificial Sequence
  Description of Artificial Sequence: Synthetic oligonucleotide
uuuugcaaagaaaacauggcuggca

SEQ ID NO: 74819 - RNA, 25 nt, Artificial Sequence
  Description of Artificial Sequence: Synthetic oligonucleotide
aagggcuucuccuucugggucuggc

SEQ ID NO: 74820 - RNA, 25 nt, Artificial Sequence
  Description of Artificial Sequence: Synthetic oligonucleotide
cuggacaauaucauugaccuuguga

SEQ ID NO: 74821 - RNA, 25 nt, Artificial Sequence
  Description of Artificial Sequence: Synthetic oligonucleotide
aaaaaguacauccuggcccuuugga

SEQ ID NO: 74822 - RNA, 25 nt, Artificial Sequence
  Description of Artificial Sequence: Synthetic oligonucleotide
aacgaaggguacaucaugggcuuua

SEQ ID NO: 74823 - RNA, 25 nt, Artificial Sequence
  Description of Artificial Sequence: Synthetic oligonucleotide
aucaguaaggagcgggagcgggcca

SEQ ID NO: 74824 - RNA, 25 nt, Artificial Sequence
  Description of Artificial Sequence: Synthetic oligonucleotide
aucuugagcacuaagccuccaggca

SEQ ID NO: 74825 - RNA, 25 nt, Artificial Sequence
  Description of Artificial Sequence: Synthetic oligonucleotide
accuuccugcuaagauucagugaaa

SEQ ID NO: 74826 - RNA, 25 nt, Artificial Sequence
  Description of Artificial Sequence: Synthetic oligonucleotide
agcagcaaagaaggaggcgucacuu

SEQ ID NO: 74827 - RNA, 25 nt, Artificial Sequence
  Description of Artificial Sequence: Synthetic oligonucleotide
uucacuuggguggagaaggacauca

SEQ ID NO: 74828 - RNA, 25 nt, Artificial Sequence
  Description of Artificial Sequence: Synthetic oligonucleotide
agcgguaagacccagauccaguccg

SEQ ID NO: 74829 - RNA, 25 nt, Artificial Sequence
  Description of Artificial Sequence: Synthetic oligonucleotide
guggaaccauacacaaagcagcagc

SEQ ID NO: 74830 - RNA, 25 nt, Artificial Sequence
  Description of Artificial Sequence: Synthetic oligonucleotide
cugaacaacaugucauuugcugaaa

SEQ ID NO: 74831 - RNA, 25 nt, Artificial Sequence
  Description of Artificial Sequence: Synthetic oligonucleotide
aucaucaugggcuauaagaucaugg

SEQ ID NO: 74832 - RNA, 25 nt, Artificial Sequence
  Description of Artificial Sequence: Synthetic oligonucleotide
gaugcuaccaauauccuggugucuc

SEQ ID NO: 74833 - RNA, 25 nt, Artificial Sequence
  Description of Artificial Sequence: Synthetic oligonucleotide
ccacuggucuaucucuauccugaca

SEQ ID NO: 74834 - RNA, 25 nt, Artificial Sequence
  Description of Artificial Sequence: Synthetic oligonucleotide
auucccaaggaggaggcauucggaa

SEQ ID NO: 74835 - RNA, 25 nt, Artificial Sequence
  Description of Artificial Sequence: Synthetic oligonucleotide
aaguauugucggccagagagccagg

SEQ ID NO: 74836 - RNA, 25 nt, Artificial Sequence
  Description of Artificial Sequence: Synthetic oligonucleotide
gagcauccugaagcugacccaggua

SEQ ID NO: 74837 - RNA, 25 nt, Artificial Sequence
  Description of Artificial Sequence: Synthetic oligonucleotide
agcgcugccccauaccugaagacca

SEQ ID NO: 74838 - RNA, 25 nt, Artificial Sequence
  Description of Artificial Sequence: Synthetic oligonucleotide
aaguuuaucugugugacaccauuca

SEQ ID NO: 74839 - RNA, 25 nt, Artificial Sequence
  Description of Artificial Sequence: Synthetic oligonucleotide
auugaugcaguuuggaaauaauggu

SEQ ID NO: 74840 - RNA, 25 nt, Artificial Sequence
  Description of Artificial Sequence: Synthetic oligonucleotide
ugaaggugcugaacccucagcagga

SEQ ID NO: 74841 - RNA, 25 nt, Artificial Sequence
  Description of Artificial Sequence: Synthetic oligonucleotide
agggcaguuugagucccucaccuuu

SEQ ID NO: 74842 - RNA, 25 nt, Artificial Sequence
  Description of Artificial Sequence: Synthetic oligonucleotide
ugacauggaguugaccucggagugc

SEQ ID NO: 74843 - RNA, 25 nt, Artificial Sequence
  Description of Artificial Sequence: Synthetic oligonucleotide
cgcuaccucccccaugugaggagcu

SEQ ID NO: 74844 - RNA, 25 nt, Artificial Sequence
  Description of Artificial Sequence: Synthetic oligonucleotide
ugagaacggaagcugcagaaagaua

SEQ ID NO: 74845 - RNA, 25 nt, Artificial Sequence
  Description of Artificial Sequence: Synthetic oligonucleotide
acgacugaggcgccuaccugcauuc

SEQ ID NO: 74846 - RNA, 25 nt, Artificial Sequence
  Description of Artificial Sequence: Synthetic oligonucleotide
cugccaccccucacacagccaaacc

SEQ ID NO: 74847 - RNA, 25 nt, Artificial Sequence
  Description of Artificial Sequence: Synthetic oligonucleotide
cccagaucaucugaaacuacuaacu

SEQ ID NO: 74848 - RNA, 25 nt, Artificial Sequence
  Description of Artificial Sequence: Synthetic oligonucleotide
uuugugguuccagauuuuuuuuaau

SEQ ID NO: 74849 - RNA, 25 nt, Artificial Sequence
  Description of Artificial Sequence: Synthetic oligonucleotide
ucuccuacuucugcuaucuuugagc

SEQ ID NO: 74850 - RNA, 25 nt, Artificial Sequence
  Description of Artificial Sequence: Synthetic oligonucleotide
caaucugggcacuuuuaaaaauaga

SEQ ID NO: 74851 - RNA, 25 nt, Artificial Sequence
  Description of Artificial Sequence: Synthetic oligonucleotide
agaaaugagugaaugugggugaucu

SEQ ID NO: 74852 - RNA, 25 nt, Artificial Sequence
  Description of Artificial Sequence: Synthetic oligonucleotide
ugcuuuuaucuaaaugcaaauaagg

SEQ ID NO: 74853 - RNA, 25 nt, Artificial Sequence
  Description of Artificial Sequence: Synthetic oligonucleotide
gauguguucucugagacccaugauc

SEQ ID NO: 74854 - RNA, 25 nt, Artificial Sequence
  Description of Artificial Sequence: Synthetic oligonucleotide
caggggauguggcgggggguggcua

SEQ ID NO: 74855 - RNA, 25 nt, Artificial Sequence
  Description of Artificial Sequence: Synthetic oligonucleotide
agagggagaaaaaggaaaugucuug

SEQ ID NO: 74856 - RNA, 25 nt, Artificial Sequence
  Description of Artificial Sequence: Synthetic oligonucleotide
guguuguuuuguuccccugcccucc

SEQ ID NO: 74857 - RNA, 25 nt, Artificial Sequence
  Description of Artificial Sequence: Synthetic oligonucleotide
cuuucucagcagcuuuuuguuauug

SEQ ID NO: 74858 - RNA, 25 nt, Artificial Sequence
  Description of Artificial Sequence: Synthetic oligonucleotide
guuguuguuguucuuagacaagugc

SEQ ID NO: 74859 - RNA, 25 nt, Artificial Sequence
  Description of Artificial Sequence: Synthetic oligonucleotide
ccuccuggugccugcggcauccuuc

SEQ ID NO: 74860 - RNA, 25 nt, Artificial Sequence
  Description of Artificial Sequence: Synthetic oligonucleotide
cugccuguuucuguaagcaaaugcc

SEQ ID NO: 74861 - RNA, 25 nt, Artificial Sequence
  Description of Artificial Sequence: Synthetic oligonucleotide
cacaggccaccuauagcuacauacu

SEQ ID NO: 74862 - RNA, 25 nt, Artificial Sequence
  Description of Artificial Sequence: Synthetic oligonucleotide
uccuggcauugcacuuuuuaaccuu

SEQ ID NO: 74863 - RNA, 25 nt, Artificial Sequence
  Description of Artificial Sequence: Synthetic oligonucleotide
ugcugacauccaaauagaagauagg

SEQ ID NO: 74864 - RNA, 25 nt, Artificial Sequence
  Description of Artificial Sequence: Synthetic oligonucleotide
gacuaucuaagcccuagguuucuuu

SEQ ID NO: 74865 - RNA, 25 nt, Artificial Sequence
  Description of Artificial Sequence: Synthetic oligonucleotide
uuuaaauuaagaaauaauaacaauu

SEQ ID NO: 74866 - RNA, 25 nt, Artificial Sequence
  Description of Artificial Sequence: Synthetic oligonucleotide
uaaagggcaaaaaacacuguaucag

SEQ ID NO: 74867 - RNA, 25 nt, Artificial Sequence
  Description of Artificial Sequence: Synthetic oligonucleotide
gcauagccuuucuguauuuaagaaa

SEQ ID NO: 74868 - RNA, 25 nt, Artificial Sequence
  Description of Artificial Sequence: Synthetic oligonucleotide
acuuaagcagccgggcaugguggcu

SEQ ID NO: 74869 - RNA, 25 nt, Artificial Sequence
  Description of Artificial Sequence: Synthetic oligonucleotide
ucacgccuguaaucccagcacuuug

SEQ ID NO: 74870 - RNA, 25 nt, Artificial Sequence
  Description of Artificial Sequence: Synthetic oligonucleotide
gggaggccgaggcggaucauaaggu

SEQ ID NO: 74871 - RNA, 25 nt, Artificial Sequence
  Description of Artificial Sequence: Synthetic oligonucleotide
ucaggagaucaagaccauccuggcu

SEQ ID NO: 74872 - RNA, 25 nt, Artificial Sequence
  Description of Artificial Sequence: Synthetic oligonucleotide
uaacacggugaaaccccgucucuac

SEQ ID NO: 74873 - RNA, 25 nt, Artificial Sequence
  Description of Artificial Sequence: Synthetic oligonucleotide
cuaaaaguacaaaaaauuagcuggg

SEQ ID NO: 74874 - RNA, 25 nt, Artificial Sequence
  Description of Artificial Sequence: Synthetic oligonucleotide
gugugguggugggcgccuguagucc

SEQ ID NO: 74875 - RNA, 25 nt, Artificial Sequence
  Description of Artificial Sequence: Synthetic oligonucleotide
ccagcuacucgggaggcugaggcag

SEQ ID NO: 74876 - RNA, 25 nt, Artificial Sequence
  Description of Artificial Sequence: Synthetic oligonucleotide
ggagaaucgcuugaaccugagaggc

SEQ ID NO: 74877 - RNA, 25 nt, Artificial Sequence
  Description of Artificial Sequence: Synthetic oligonucleotide
cggagguugcagugagccaaaauug

SEQ ID NO: 74878 - RNA, 25 nt, Artificial Sequence
  Description of Artificial Sequence: Synthetic oligonucleotide
gcaccacugcacacugcacuccauc

SEQ ID NO: 74879 - RNA, 25 nt, Artificial Sequence
  Description of Artificial Sequence: Synthetic oligonucleotide
ccugggcgacagucugagacucugu

SEQ ID NO: 74880 - RNA, 25 nt, Artificial Sequence
  Description of Artificial Sequence: Synthetic oligonucleotide
gaaacuucaguuaacagccuccuug

SEQ ID NO: 74881 - RNA, 25 nt, Artificial Sequence
  Description of Artificial Sequence: Synthetic oligonucleotide
ggugcuuuaagcauucagcuuccuu

SEQ ID NO: 74882 - RNA, 25 nt, Artificial Sequence
  Description of Artificial Sequence: Synthetic oligonucleotide
ucaggcugguaauuuauauaauccc

SEQ ID NO: 74883 - RNA, 25 nt, Artificial Sequence
  Description of Artificial Sequence: Synthetic oligonucleotide
cugaaacgggcuucaggucaaaccc

SEQ ID NO: 74884 - RNA, 25 nt, Artificial Sequence
  Description of Artificial Sequence: Synthetic oligonucleotide
cuuaagacaucugaagcugcaaccu

SEQ ID NO: 74885 - RNA, 25 nt, Artificial Sequence
  Description of Artificial Sequence: Synthetic oligonucleotide
uggccuuugguguugaaauaggaag

SEQ ID NO: 74886 - RNA, 25 nt, Artificial Sequence
  Description of Artificial Sequence: Synthetic oligonucleotide
gguuuaaggagaaucuaagcauuuu

SEQ ID NO: 74887 - RNA, 25 nt, Artificial Sequence
  Description of Artificial Sequence: Synthetic oligonucleotide
uagacuuuuuuuuauaaauagacuu

SEQ ID NO: 74888 - RNA, 25 nt, Artificial Sequence
  Description of Artificial Sequence: Synthetic oligonucleotide
uauuuuccuuuguaauguauuggcc

SEQ ID NO: 74889 - RNA, 25 nt, Artificial Sequence
  Description of Artificial Sequence: Synthetic oligonucleotide
cuuuuagugaguaaggcugggcaga

SEQ ID NO: 74890 - RNA, 25 nt, Artificial Sequence
  Description of Artificial Sequence: Synthetic oligonucleotide
agggugcuuacaaccuugacucccu

SEQ ID NO: 74891 - RNA, 25 nt, Artificial Sequence
  Description of Artificial Sequence: Synthetic oligonucleotide
uuucucccuggacuugaucugcugu

SEQ ID NO: 74892 - RNA, 25 nt, Artificial Sequence
  Description of Artificial Sequence: Synthetic oligonucleotide
uuucagaggcuagguuguuucugug

SEQ ID NO: 74893 - RNA, 25 nt, Artificial Sequence
  Description of Artificial Sequence: Synthetic oligonucleotide
gggugccuuaucagggcugggauac

SEQ ID NO: 74894 - RNA, 25 nt, Artificial Sequence
  Description of Artificial Sequence: Synthetic oligonucleotide
cuucugauucuggcuuccuuccugc

SEQ ID NO: 74895 - RNA, 25 nt, Artificial Sequence
  Description of Artificial Sequence: Synthetic oligonucleotide
ccccacccucccgaccccagucccc

SEQ ID NO: 74896 - RNA, 25 nt, Artificial Sequence
  Description of Artificial Sequence: Synthetic oligonucleotide
ccugauccugcuagaggcaugucuc

SEQ ID NO: 74897 - RNA, 25 nt, Artificial Sequence
  Description of Artificial Sequence: Synthetic oligonucleotide
ccuugcgugucuaaaggucccucau

SEQ ID NO: 74898 - RNA, 25 nt, Artificial Sequence
  Description of Artificial Sequence: Synthetic oligonucleotide
uccuguuuguuuuaggaauccuggu

SEQ ID NO: 74899 - RNA, 25 nt, Artificial Sequence
  Description of Artificial Sequence: Synthetic oligonucleotide
ucucaggaccucauggaagaagagg

SEQ ID NO: 74900 - RNA, 25 nt, Artificial Sequence
  Description of Artificial Sequence: Synthetic oligonucleotide
ggggagagaguuacagguuggacau

SEQ ID NO: 74901 - RNA, 25 nt, Artificial Sequence
  Description of Artificial Sequence: Synthetic oligonucleotide
ugaugcacacuauggggccccagcg

SEQ ID NO: 74902 - RNA, 25 nt, Artificial Sequence
  Description of Artificial Sequence: Synthetic oligonucleotide
gacgugucugguugagcucagggaa

SEQ ID NO: 74903 - RNA, 25 nt, Artificial Sequence
  Description of Artificial Sequence: Synthetic oligonucleotide
auaugguucuuagccaguuucuugg

SEQ ID NO: 74904 - RNA, 25 nt, Artificial Sequence
  Description of Artificial Sequence: Synthetic oligonucleotide
gugauauccaguggcacuuguaaug

SEQ ID NO: 74905 - RNA, 25 nt, Artificial Sequence
  Description of Artificial Sequence: Synthetic oligonucleotide
ggcgucuucauucaguucaugcagg

SEQ ID NO: 74906 - RNA, 25 nt, Artificial Sequence
  Description of Artificial Sequence: Synthetic oligonucleotide
ggcaaaggcuuacugauaaacuuga

SEQ ID NO: 74907 - RNA, 25 nt, Artificial Sequence
  Description of Artificial Sequence: Synthetic oligonucleotide
agucugcccucguaugaggguguau

SEQ ID NO: 74908 - RNA, 25 nt, Artificial Sequence
  Description of Artificial Sequence: Synthetic oligonucleotide
uaccuggccucccucugaggcuggu

SEQ ID NO: 74909 - RNA, 25 nt, Artificial Sequence
  Description of Artificial Sequence: Synthetic oligonucleotide
ugacuccucccugcuggggccccac

SEQ ID NO: 74910 - RNA, 25 nt, Artificial Sequence
  Description of Artificial Sequence: Synthetic oligonucleotide
caggugaggcagaacagcuagaggg

SEQ ID NO: 74911 - RNA, 25 nt, Artificial Sequence
  Description of Artificial Sequence: Synthetic oligonucleotide
gccuccccgccugcccgccuuggcu

SEQ ID NO: 74912 - RNA, 25 nt, Artificial Sequence
  Description of Artificial Sequence: Synthetic oligonucleotide
uggcuagcucgccucuccugugcgu

SEQ ID NO: 74913 - RNA, 25 nt, Artificial Sequence
  Description of Artificial Sequence: Synthetic oligonucleotide
uaugggaacaccuagcacgugcugg

SEQ ID NO: 74914 - RNA, 25 nt, Artificial Sequence
  Description of Artificial Sequence: Synthetic oligonucleotide
gaugggcugccucugacucagaggc

SEQ ID NO: 74915 - RNA, 25 nt, Artificial Sequence
  Description of Artificial Sequence: Synthetic oligonucleotide
cauggccggauuuggcaacucaaaa

SEQ ID NO: 74916 - RNA, 25 nt, Artificial Sequence
  Description of Artificial Sequence: Synthetic oligonucleotide
accaccuugccucagcugaucagag

SEQ ID NO: 74917 - RNA, 25 nt, Artificial Sequence
  Description of Artificial Sequence: Synthetic oligonucleotide
guuucuguggaauucuguuuguuaa

SEQ ID NO: 74918 - RNA, 25 nt, Artificial Sequence
  Description of Artificial Sequence: Synthetic oligonucleotide
aaucaaauuagcuggucucugaauu

SEQ ID NO: 74919 - RNA, 25 nt, Artificial Sequence
  Description of Artificial Sequence: Synthetic oligonucleotide
uaagggggagacgaccuucucuaag

SEQ ID NO: 74920 - RNA, 25 nt, Artificial Sequence
  Description of Artificial Sequence: Synthetic oligonucleotide
gaugaacaggguucgccccaguccu

SEQ ID NO: 74921 - RNA, 25 nt, Artificial Sequence
  Description of Artificial Sequence: Synthetic oligonucleotide
uccugccuggagacaguugaugugu

SEQ ID NO: 74922 - RNA, 25 nt, Artificial Sequence
  Description of Artificial Sequence: Synthetic oligonucleotide
ucaugcagagcucuuacuucuccag

SEQ ID NO: 74923 - RNA, 25 nt, Artificial Sequence
  Description of Artificial Sequence: Synthetic oligonucleotide
gcaacacucuucaguacauaauaag

SEQ ID NO: 74924 - RNA, 25 nt, Artificial Sequence
  Description of Artificial Sequence: Synthetic oligonucleotide
gcuuaacugauaaacagaauauuua

SEQ ID NO: 74925 - RNA, 25 nt, Artificial Sequence
  Description of Artificial Sequence: Synthetic oligonucleotide
agaaaggugagacuugggcuuacca

SEQ ID NO: 74926 - RNA, 25 nt, Artificial Sequence
  Description of Artificial Sequence: Synthetic oligonucleotide
auuggguuuaaaucauagggaccua

SEQ ID NO: 74927 - RNA, 25 nt, Artificial Sequence
  Description of Artificial Sequence: Synthetic oligonucleotide
agggcgaggguucagggcuucucug

SEQ ID NO: 74928 - RNA, 25 nt, Artificial Sequence
  Description of Artificial Sequence: Synthetic oligonucleotide
ggagcagauauugucaaguucaugg

SEQ ID NO: 74929 - RNA, 25 nt, Artificial Sequence
  Description of Artificial Sequence: Synthetic oligonucleotide
gccuuagguagcauguaucuggucu

SEQ ID NO: 74930 - RNA, 25 nt, Artificial Sequence
  Description of Artificial Sequence: Synthetic oligonucleotide
uuaacucugauuguagcaaaaguuc

SEQ ID NO: 74931 - RNA, 25 nt, Artificial Sequence
  Description of Artificial Sequence: Synthetic oligonucleotide
cugagaggagcugagcccuguugug

SEQ ID NO: 74932 - RNA, 25 nt, Artificial Sequence
  Description of Artificial Sequence: Synthetic oligonucleotide
ggcccauuaaagaacaggguccuca

SEQ ID NO: 74933 - RNA, 25 nt, Artificial Sequence
  Description of Artificial Sequence: Synthetic oligonucleotide
aggcccugcccgcuuccuguccacu

SEQ ID NO: 74934 - RNA, 25 nt, Artificial Sequence
  Description of Artificial Sequence: Synthetic oligonucleotide
ugcccccuccccauccccagcccag

SEQ ID NO: 74935 - RNA, 25 nt, Artificial Sequence
  Description of Artificial Sequence: Synthetic oligonucleotide
gccgagggaaucccguggguugcuu

SEQ ID NO: 74936 - RNA, 25 nt, Artificial Sequence
  Description of Artificial Sequence: Synthetic oligonucleotide
uaccuaccuauaaggugguuuauaa

SEQ ID NO: 74937 - RNA, 25 nt, Artificial Sequence
  Description of Artificial Sequence: Synthetic oligonucleotide
agcugcuguccuggccacugcauuc

SEQ ID NO: 74938 - RNA, 25 nt, Artificial Sequence
  Description of Artificial Sequence: Synthetic oligonucleotide
caaauuccaauguguacuucauagu

SEQ ID NO: 74939 - RNA, 25 nt, Artificial Sequence
  Description of Artificial Sequence: Synthetic oligonucleotide
uguaaaaauuuauauuauugugagg

SEQ ID NO: 74940 - RNA, 25 nt, Artificial Sequence
  Description of Artificial Sequence: Synthetic oligonucleotide
uuuuuuuugguauauugcuguaucu

SEQ ID NO: 74941 - RNA, 25 nt, Artificial Sequence
  Description of Artificial Sequence: Synthetic oligonucleotide
uacuuuaacuuccagaaauaaacgu

SEQ ID NO: 74942 - RNA, 25 nt, Artificial Sequence
  Description of Artificial Sequence: Synthetic oligonucleotide
uaaacguuauauaggaaccguaaaa

SEQ ID NO: 74943 - RNA, 25 nt, Artificial Sequence
  Description of Artificial Sequence: Synthetic oligonucleotide
ggauggcccaauggaaucagcuaca

SEQ ID NO: 74944 - RNA, 25 nt, Artificial Sequence
  Description of Artificial Sequence: Synthetic oligonucleotide
agcagcuugacacacgguaccugga

SEQ ID NO: 74945 - RNA, 25 nt, Artificial Sequence
  Description of Artificial Sequence: Synthetic oligonucleotide
agcagcuccaucagcucuacaguga

SEQ ID NO: 74946 - RNA, 25 nt, Artificial Sequence
  Description of Artificial Sequence: Synthetic oligonucleotide
acagcuucccaauggagcugcggca

SEQ ID NO: 74947 - RNA, 25 nt, Artificial Sequence
  Description of Artificial Sequence: Synthetic oligonucleotide
aguuucuggccccuuggauugagag

SEQ ID NO: 74948 - RNA, 25 nt, Artificial Sequence
  Description of Artificial Sequence: Synthetic oligonucleotide
gucaagauugggcauaugcggccag

SEQ ID NO: 74949 - RNA, 25 nt, Artificial Sequence
  Description of Artificial Sequence: Synthetic oligonucleotide
gcaaagaaucacaugccacuuuggu

SEQ ID NO: 74950 - RNA, 25 nt, Artificial Sequence
  Description of Artificial Sequence: Synthetic oligonucleotide
uguuucauaaucuccugggagagau

SEQ ID NO: 74951 - RNA, 25 nt, Artificial Sequence
  Description of Artificial Sequence: Synthetic oligonucleotide
uugaccagcaguauagccgcuuccu

SEQ ID NO: 74952 - RNA, 25 nt, Artificial Sequence
  Description of Artificial Sequence: Synthetic oligonucleotide
ugcaagagucgaauguucucuauca

SEQ ID NO: 74953 - RNA, 25 nt, Artificial Sequence
  Description of Artificial Sequence: Synthetic oligonucleotide
agcacaaucuacgaagaaucaagca

SEQ ID NO: 74954 - RNA, 25 nt, Artificial Sequence
  Description of Artificial Sequence: Synthetic oligonucleotide
aguuucuucagagcagguaucuuga

SEQ ID NO: 74955 - RNA, 25 nt, Artificial Sequence
  Description of Artificial Sequence: Synthetic oligonucleotide
agaagccaauggagauugcccggau

SEQ ID NO: 74956 - RNA, 25 nt, Artificial Sequence
  Description of Artificial Sequence: Synthetic oligonucleotide
uuguggcccggugccugugggaaga

SEQ ID NO: 74957 - RNA, 25 nt, Artificial Sequence
  Description of Artificial Sequence: Synthetic oligonucleotide
aaucacgccuucuacagacugcagc

SEQ ID NO: 74958 - RNA, 25 nt, Artificial Sequence
  Description of Artificial Sequence: Synthetic oligonucleotide
ccacugcggcccagcaagggggcca

SEQ ID NO: 74959 - RNA, 25 nt, Artificial Sequence
  Description of Artificial Sequence: Synthetic oligonucleotide
aggccaaccaccccacagcagccgu

SEQ ID NO: 74960 - RNA, 25 nt, Artificial Sequence
  Description of Artificial Sequence: Synthetic oligonucleotide
uggugacggagaagcagcagaugcu

SEQ ID NO: 74961 - RNA, 25 nt, Artificial Sequence
  Description of Artificial Sequence: Synthetic oligonucleotide
uggagcagcaccuucaggauguccg

SEQ ID NO: 74962 - RNA, 25 nt, Artificial Sequence
  Description of Artificial Sequence: Synthetic oligonucleotide
ggaagagagugcaggaucuagaaca

SEQ ID NO: 74963 - RNA, 25 nt, Artificial Sequence
  Description of Artificial Sequence: Synthetic oligonucleotide
agaaaaugaaagugguagagaaucu

SEQ ID NO: 74964 - RNA, 25 nt, Artificial Sequence
  Description of Artificial Sequence: Synthetic oligonucleotide
uccaggaugacuuugauuucaacua

SEQ ID NO: 74965 - RNA, 25 nt, Artificial Sequence
  Description of Artificial Sequence: Synthetic oligonucleotide
auaaaacccucaagagucaaggaga

SEQ ID NO: 74966 - RNA, 25 nt, Artificial Sequence
  Description of Artificial Sequence: Synthetic oligonucleotide
acaugcaagaucugaauggaaacaa

SEQ ID NO: 74967 - RNA, 25 nt, Artificial Sequence
  Description of Artificial Sequence: Synthetic oligonucleotide
accagucagugaccaggcagaagau

SEQ ID NO: 74968 - RNA, 25 nt, Artificial Sequence
  Description of Artificial Sequence: Synthetic oligonucleotide
ugcagcagcuggaacagaugcucac

SEQ ID NO: 74969 - RNA, 25 nt, Artificial Sequence
  Description of Artificial Sequence: Synthetic oligonucleotide
cugcgcuggaccagaugcggagaag

SEQ ID NO: 74970 - RNA, 25 nt, Artificial Sequence
  Description of Artificial Sequence: Synthetic oligonucleotide
gcaucgugagugagcuggcggggcu

SEQ ID NO: 74971 - RNA, 25 nt, Artificial Sequence
  Description of Artificial Sequence: Synthetic oligonucleotide
uuuugucagcgauggaguacgugca

SEQ ID NO: 74972 - RNA, 25 nt, Artificial Sequence
  Description of Artificial Sequence: Synthetic oligonucleotide
agaaaacucucacggacgaggagcu

SEQ ID NO: 74973 - RNA, 25 nt, Artificial Sequence
  Description of Artificial Sequence: Synthetic oligonucleotide
uggcugacuggaagaggcggcaaca

SEQ ID NO: 74974 - RNA, 25 nt, Artificial Sequence
  Description of Artificial Sequence: Synthetic oligonucleotide
agauugccugcauuggaggcccgcc

SEQ ID NO: 74975 - RNA, 25 nt, Artificial Sequence
  Description of Artificial Sequence: Synthetic oligonucleotide
ccaacaucugccuagaucggcuaga

SEQ ID NO: 74976 - RNA, 25 nt, Artificial Sequence
  Description of Artificial Sequence: Synthetic oligonucleotide
aaaacuggauaacgucauuagcaga

SEQ ID NO: 74977 - RNA, 25 nt, Artificial Sequence
  Description of Artificial Sequence: Synthetic oligonucleotide
aaucucaacuucagacccgucaaca

SEQ ID NO: 74978 - RNA, 25 nt, Artificial Sequence
  Description of Artificial Sequence: Synthetic oligonucleotide
aaauuaagaaacuggaggaguugca

SEQ ID NO: 74979 - RNA, 25 nt, Artificial Sequence
  Description of Artificial Sequence: Synthetic oligonucleotide
agcaaaaaguuuccuacaaagggga

SEQ ID NO: 74980 - RNA, 25 nt, Artificial Sequence
  Description of Artificial Sequence: Synthetic oligonucleotide
accccauuguacagcaccggccgau

SEQ ID NO: 74981 - RNA, 25 nt, Artificial Sequence
  Description of Artificial Sequence: Synthetic oligonucleotide
ugcuggaggagagaaucguggagcu

SEQ ID NO: 74982 - RNA, 25 nt, Artificial Sequence
  Description of Artificial Sequence: Synthetic oligonucleotide
uguuuagaaacuuaaugaaaagugc

SEQ ID NO: 74983 - RNA, 25 nt, Artificial Sequence
  Description of Artificial Sequence: Synthetic oligonucleotide
ccuuugugguggagcggcagcccug

SEQ ID NO: 74984 - RNA, 25 nt, Artificial Sequence
  Description of Artificial Sequence: Synthetic oligonucleotide
gcaugcccaugcauccugaccggcc

SEQ ID NO: 74985 - RNA, 25 nt, Artificial Sequence
  Description of Artificial Sequence: Synthetic oligonucleotide
cccucgucaucaagaccggcgucca

SEQ ID NO: 74986 - RNA, 25 nt, Artificial Sequence
  Description of Artificial Sequence: Synthetic oligonucleotide
aguucacuacuaaagucagguugcu

SEQ ID NO: 74987 - RNA, 25 nt, Artificial Sequence
  Description of Artificial Sequence: Synthetic oligonucleotide
uggucaaauucccugaguugaauua

SEQ ID NO: 74988 - RNA, 25 nt, Artificial Sequence
  Description of Artificial Sequence: Synthetic oligonucleotide
aucagcuuaaaauuaaagugugcau

SEQ ID NO: 74989 - RNA, 25 nt, Artificial Sequence
  Description of Artificial Sequence: Synthetic oligonucleotide
uugacaaagacucuggggacguugc

SEQ ID NO: 74990 - RNA, 25 nt, Artificial Sequence
  Description of Artificial Sequence: Synthetic oligonucleotide
cagcucucagaggaucccggaaauu

SEQ ID NO: 74991 - RNA, 25 nt, Artificial Sequence
  Description of Artificial Sequence: Synthetic oligonucleotide
uuaacauucugggcacaaacacaaa

SEQ ID NO: 74992 - RNA, 25 nt, Artificial Sequence
  Description of Artificial Sequence: Synthetic oligonucleotide
aagugaugaacauggaagaauccaa

SEQ ID NO: 74993 - RNA, 25 nt, Artificial Sequence
  Description of Artificial Sequence: Synthetic oligonucleotide
acaacggcagccucucugcagaauu

SEQ ID NO: 74994 - RNA, 25 nt, Artificial Sequence
  Description of Artificial Sequence: Synthetic oligonucleotide
ucaaacacuugacccugagggagca

SEQ ID NO: 74995 - RNA, 25 nt, Artificial Sequence
  Description of Artificial Sequence: Synthetic oligonucleotide
agagaugugggaaugggggccgagc

SEQ ID NO: 74996 - RNA, 25 nt, Artificial Sequence
  Description of Artificial Sequence: Synthetic oligonucleotide
ccaauugugaugcuucccugauugu

SEQ ID NO: 74997 - RNA, 25 nt, Artificial Sequence
  Description of Artificial Sequence: Synthetic oligonucleotide
ugacugaggagcugcaccugaucac

SEQ ID NO: 74998 - RNA, 25 nt, Artificial Sequence
  Description of Artificial Sequence: Synthetic oligonucleotide
ccuuugagaccgagguguaucacca

SEQ ID NO: 74999 - RNA, 25 nt, Artificial Sequence
  Description of Artificial Sequence: Synthetic oligonucleotide
aaggccucaagauugaccuagagac

SEQ ID NO: 75000 - RNA, 25 nt, Artificial Sequence
  Description of Artificial Sequence: Synthetic oligonucleotide
cccacuccuugccaguuguggugau

SEQ ID NO: 75001 - RNA, 25 nt, Artificial Sequence
  Description of Artificial Sequence: Synthetic oligonucleotide
ucuccaacaucugucagaugccaaa

SEQ ID NO: 75002 - RNA, 25 nt, Artificial Sequence
  Description of Artificial Sequence: Synthetic oligonucleotide
augccugggcguccauccuguggua

SEQ ID NO: 75003 - RNA, 25 nt, Artificial Sequence
  Description of Artificial Sequence: Synthetic oligonucleotide
acaacaugcugaccaacaaucccaa

SEQ ID NO: 75004 - RNA, 25 nt, Artificial Sequence
  Description of Artificial Sequence: Synthetic oligonucleotide
agaauguaaacuuuuuuaccaagcc

SEQ ID NO: 75005 - RNA, 25 nt, Artificial Sequence
  Description of Artificial Sequence: Synthetic oligonucleotide
ccccaauuggaaccugggaucaagu

SEQ ID NO: 75006 - RNA, 25 nt, Artificial Sequence
  Description of Artificial Sequence: Synthetic oligonucleotide
uggccgagguccugagcuggcaguu

SEQ ID NO: 75007 - RNA, 25 nt, Artificial Sequence
  Description of Artificial Sequence: Synthetic oligonucleotide
ucuccuccaccaccaagcgaggacu

SEQ ID NO: 75008 - RNA, 25 nt, Artificial Sequence
  Description of Artificial Sequence: Synthetic oligonucleotide
ugagcaucgagcagcugacuacacu

SEQ ID NO: 75009 - RNA, 25 nt, Artificial Sequence
  Description of Artificial Sequence: Synthetic oligonucleotide
uggcagagaaacucuugggaccugg

SEQ ID NO: 75010 - RNA, 25 nt, Artificial Sequence
  Description of Artificial Sequence: Synthetic oligonucleotide
gugugaauuauucagggugucagau

SEQ ID NO: 75011 - RNA, 25 nt, Artificial Sequence
  Description of Artificial Sequence: Synthetic oligonucleotide
ucacaugggcuaaauuuugcaaaga

SEQ ID NO: 75012 - RNA, 25 nt, Artificial Sequence
  Description of Artificial Sequence: Synthetic oligonucleotide
aaaacauggcuggcaagggcuucuc

SEQ ID NO: 75013 - RNA, 25 nt, Artificial Sequence
  Description of Artificial Sequence: Synthetic oligonucleotide
ccuucugggucuggcuggacaauau

SEQ ID NO: 75014 - RNA, 25 nt, Artificial Sequence
  Description of Artificial Sequence: Synthetic oligonucleotide
ucauugaccuugugaaaaaguacau

SEQ ID NO: 75015 - RNA, 25 nt, Artificial Sequence
  Description of Artificial Sequence: Synthetic oligonucleotide
uccuggcccuuuggaacgaagggua

SEQ ID NO: 75016 - RNA, 25 nt, Artificial Sequence
  Description of Artificial Sequence: Synthetic oligonucleotide
acaucaugggcuuuaucaguaagga

SEQ ID NO: 75017 - RNA, 25 nt, Artificial Sequence
  Description of Artificial Sequence: Synthetic oligonucleotide
agcgggagcgggccaucuugagcac

SEQ ID NO: 75018 - RNA, 25 nt, Artificial Sequence
  Description of Artificial Sequence: Synthetic oligonucleotide
cuaagccuccaggcaccuuccugcu

SEQ ID NO: 75019 - RNA, 25 nt, Artificial Sequence
  Description of Artificial Sequence: Synthetic oligonucleotide
uaagauucagugaaagcagcaaaga

SEQ ID NO: 75020 - RNA, 25 nt, Artificial Sequence
  Description of Artificial Sequence: Synthetic oligonucleotide
aaggaggcgucacuuucacuugggu

SEQ ID NO: 75021 - RNA, 25 nt, Artificial Sequence
  Description of Artificial Sequence: Synthetic oligonucleotide
uggagaaggacaucagcgguaagac

SEQ ID NO: 75022 - RNA, 25 nt, Artificial Sequence
  Description of Artificial Sequence: Synthetic oligonucleotide
cccagauccaguccguggaaccaua

SEQ ID NO: 75023 - RNA, 25 nt, Artificial Sequence
  Description of Artificial Sequence: Synthetic oligonucleotide
acacaaagcagcagcugaacaacau

SEQ ID NO: 75024 - RNA, 25 nt, Artificial Sequence
  Description of Artificial Sequence: Synthetic oligonucleotide
ugucauuugcugaaaucaucauggg

SEQ ID NO: 75025 - RNA, 25 nt, Artificial Sequence
  Description of Artificial Sequence: Synthetic oligonucleotide
gcuauaagaucauggaugcuaccaa

SEQ ID NO: 75026 - RNA, 25 nt, Artificial Sequence
  Description of Artificial Sequence: Synthetic oligonucleotide
auauccuggugucuccacuggucua

SEQ ID NO: 75027 - RNA, 25 nt, Artificial Sequence
  Description of Artificial Sequence: Synthetic oligonucleotide
aucucuauccugacauucccaagga

SEQ ID NO: 75028 - RNA, 25 nt, Artificial Sequence
  Description of Artificial Sequence: Synthetic oligonucleotide
aggaggcauucggaaaguauugucg

SEQ ID NO: 75029 - RNA, 25 nt, Artificial Sequence
  Description of Artificial Sequence: Synthetic oligonucleotide
ggccagagagccaggagcauccuga

SEQ ID NO: 75030 - RNA, 25 nt, Artificial Sequence
  Description of Artificial Sequence: Synthetic oligonucleotide
aagcugacccaggcgcugccccaua

SEQ ID NO: 75031 - RNA, 25 nt, Artificial Sequence
  Description of Artificial Sequence: Synthetic oligonucleotide
accugaagaccaaguuuaucugugu

SEQ ID NO: 75032 - RNA, 25 nt, Artificial Sequence
  Description of Artificial Sequence: Synthetic oligonucleotide
ugacaccaacgaccugcagcaauac

SEQ ID NO: 75033 - RNA, 25 nt, Artificial Sequence
  Description of Artificial Sequence: Synthetic oligonucleotide
ccauugaccugccgauguccccccg

SEQ ID NO: 75034 - RNA, 25 nt, Artificial Sequence
  Description of Artificial Sequence: Synthetic oligonucleotide
gcacuuuagauucauugaugcaguu

SEQ ID NO: 75035 - RNA, 25 nt, Artificial Sequence
  Description of Artificial Sequence: Synthetic oligonucleotide
uuggaaauaauggugaaggugcuga

SEQ ID NO: 75036 - RNA, 25 nt, Artificial Sequence
  Description of Artificial Sequence: Synthetic oligonucleotide
aacccucagcaggagggcaguuuga

SEQ ID NO: 75037 - RNA, 25 nt, Artificial Sequence
  Description of Artificial Sequence: Synthetic oligonucleotide
agucccucaccuuugacauggaguu

SEQ ID NO: 75038 - RNA, 25 nt, Artificial Sequence
  Description of Artificial Sequence: Synthetic oligonucleotide
ugaccucggagugcgcuaccucccc

SEQ ID NO: 75039 - RNA, 25 nt, Artificial Sequence
  Description of Artificial Sequence: Synthetic oligonucleotide
ccaugugaggagcugagaacggaag

SEQ ID NO: 75040 - RNA, 25 nt, Artificial Sequence
  Description of Artificial Sequence: Synthetic oligonucleotide
gcugcagaaagauacgacugaggcg

SEQ ID NO: 75041 - RNA, 25 nt, Artificial Sequence
  Description of Artificial Sequence: Synthetic oligonucleotide
gccuaccugcauucugccaccccuc

SEQ ID NO: 75042 - RNA, 25 nt, Artificial Sequence
  Description of Artificial Sequence: Synthetic oligonucleotide
cacacagccaaaccccagaucaucu

SEQ ID NO: 75043 - RNA, 25 nt, Artificial Sequence
  Description of Artificial Sequence: Synthetic oligonucleotide
ugaaacuacuaacuuugugguucca

SEQ ID NO: 75044 - RNA, 25 nt, Artificial Sequence
  Description of Artificial Sequence: Synthetic oligonucleotide
agauuuuuuuuaaucuccuacuucu

SEQ ID NO: 75045 - RNA, 25 nt, Artificial Sequence
  Description of Artificial Sequence: Synthetic oligonucleotide
ugcuaucuuugagcaaucugggcac

SEQ ID NO: 75046 - RNA, 25 nt, Artificial Sequence
  Description of Artificial Sequence: Synthetic oligonucleotide
cuuuuaaaaauagagaaaugaguga

SEQ ID NO: 75047 - RNA, 25 nt, Artificial Sequence
  Description of Artificial Sequence: Synthetic oligonucleotide
aaugugggugaucugcuuuuaucua

SEQ ID NO: 75048 - RNA, 25 nt, Artificial Sequence
  Description of Artificial Sequence: Synthetic oligonucleotide
aaaugcaaauaaggauguguucucu

SEQ ID NO: 75049 - RNA, 25 nt, Artificial Sequence
  Description of Artificial Sequence: Synthetic oligonucleotide
ugagacccaugaucaggggaugugg

SEQ ID NO: 75050 - RNA, 25 nt, Artificial Sequence
  Description of Artificial Sequence: Synthetic oligonucleotide
gcgggggguggcuagagggagaaaa

SEQ ID NO: 75051 - RNA, 25 nt, Artificial Sequence
  Description of Artificial Sequence: Synthetic oligonucleotide
aaggaaaugucuuguguuguuuugu

SEQ ID NO: 75052 - RNA, 25 nt, Artificial Sequence
  Description of Artificial Sequence: Synthetic oligonucleotide
uuccccugcccuccuuucucagcag

SEQ ID NO: 75053 - RNA, 25 nt, Artificial Sequence
  Description of Artificial Sequence: Synthetic oligonucleotide
gcuuuuuguuauuguuguuguuguu

SEQ ID NO: 75054 - RNA, 25 nt, Artificial Sequence
  Description of Artificial Sequence: Synthetic oligonucleotide
ucuuagacaagugccuccuggugcc

SEQ ID NO: 75055 - RNA, 25 nt, Artificial Sequence
  Description of Artificial Sequence: Synthetic oligonucleotide
cugcggcauccuucugccuguuucu

SEQ ID NO: 75056 - RNA, 25 nt, Artificial Sequence
  Description of Artificial Sequence: Synthetic oligonucleotide
uguaagcaaaugccacaggccaccu

SEQ ID NO: 75057 - RNA, 25 nt, Artificial Sequence
  Description of Artificial Sequence: Synthetic oligonucleotide
uauagcuacauacuccuggcauugc

SEQ ID NO: 75058 - RNA, 25 nt, Artificial Sequence
  Description of Artificial Sequence: Synthetic oligonucleotide
cacuuuuuaaccuugcugacaucca

SEQ ID NO: 75059 - RNA, 25 nt, Artificial Sequence
  Description of Artificial Sequence: Synthetic oligonucleotide
aaauagaagauaggacuaucuaagc

SEQ ID NO: 75060 - RNA, 25 nt, Artificial Sequence
  Description of Artificial Sequence: Synthetic oligonucleotide
cccuagguuucuuuuuaaauuaaga

SEQ ID NO: 75061 - RNA, 25 nt, Artificial Sequence
  Description of Artificial Sequence: Synthetic oligonucleotide
aaauaauaacaauuaaagggcaaaa

SEQ ID NO: 75062 - RNA, 25 nt, Artificial Sequence
  Description of Artificial Sequence: Synthetic oligonucleotide
aaacacuguaucagcauagccuuuc

SEQ ID NO: 75063 - RNA, 25 nt, Artificial Sequence
  Description of Artificial Sequence: Synthetic oligonucleotide
cuguauuuaagaaacuuaagcagcc

SEQ ID NO: 75064 - RNA, 25 nt, Artificial Sequence
  Description of Artificial Sequence: Synthetic oligonucleotide
cgggcaugguggcucacgccuguaa

SEQ ID NO: 75065 - RNA, 25 nt, Artificial Sequence
  Description of Artificial Sequence: Synthetic oligonucleotide
aucccagcacuuugggaggccgagg

SEQ ID NO: 75066 - RNA, 25 nt, Artificial Sequence
  Description of Artificial Sequence: Synthetic oligonucleotide
gcggaucauaaggucaggagaucaa

SEQ ID NO: 75067 - RNA, 25 nt, Artificial Sequence
  Description of Artificial Sequence: Synthetic oligonucleotide
agaccauccuggcuaacacggugaa

SEQ ID NO: 75068 - RNA, 25 nt, Artificial Sequence
  Description of Artificial Sequence: Synthetic oligonucleotide
aaccccgucucuacuaaaaguacaa

SEQ ID NO: 75069 - RNA, 25 nt, Artificial Sequence
  Description of Artificial Sequence: Synthetic oligonucleotide
aaaaauuagcugggugugguggugg

SEQ ID NO: 75070 - RNA, 25 nt, Artificial Sequence
  Description of Artificial Sequence: Synthetic oligonucleotide
ggcgccuguagucccagcuacucgg

SEQ ID NO: 75071 - RNA, 25 nt, Artificial Sequence
  Description of Artificial Sequence: Synthetic oligonucleotide
ggaggcugaggcaggagaaucgcuu

SEQ ID NO: 75072 - RNA, 25 nt, Artificial Sequence
  Description of Artificial Sequence: Synthetic oligonucleotide
ugaaccugagaggcggagguugcag

SEQ ID NO: 75073 - RNA, 25 nt, Artificial Sequence
  Description of Artificial Sequence: Synthetic oligonucleotide
gugagccaaaauugcaccacugcac

SEQ ID NO: 75074 - RNA, 25 nt, Artificial Sequence
  Description of Artificial Sequence: Synthetic oligonucleotide
cacugcacuccauccugggcgacag

SEQ ID NO: 75075 - RNA, 25 nt, Artificial Sequence
  Description of Artificial Sequence: Synthetic oligonucleotide
gucugagacucugucucaaaaaaaa

SEQ ID NO: 75076 - RNA, 25 nt, Artificial Sequence
  Description of Artificial Sequence: Synthetic oligonucleotide
uaacagccuccuuggugcuuuaagc

SEQ ID NO: 75077 - RNA, 25 nt, Artificial Sequence
  Description of Artificial Sequence: Synthetic oligonucleotide
cauucagcuuccuucaggcugguaa

SEQ ID NO: 75078 - RNA, 25 nt, Artificial Sequence
  Description of Artificial Sequence: Synthetic oligonucleotide
auuuauauaaucccugaaacgggcu

SEQ ID NO: 75079 - RNA, 25 nt, Artificial Sequence
  Description of Artificial Sequence: Synthetic oligonucleotide
uucaggucaaacccuuaagacaucu

SEQ ID NO: 75080 - RNA, 25 nt, Artificial Sequence
  Description of Artificial Sequence: Synthetic oligonucleotide
ugaagcugcaaccuggccuuuggug

SEQ ID NO: 75081 - RNA, 25 nt, Artificial Sequence
  Description of Artificial Sequence: Synthetic oligonucleotide
guugaaauaggaagguuuaaggaga

SEQ ID NO: 75082 - RNA, 25 nt, Artificial Sequence
  Description of Artificial Sequence: Synthetic oligonucleotide
aaucuaagcauuuuagacuuuuuuu

SEQ ID NO: 75083 - RNA, 25 nt, Artificial Sequence
  Description of Artificial Sequence: Synthetic oligonucleotide
uuauaaauagacuuauuuuccuuug

SEQ ID NO: 75084 - RNA, 25 nt, Artificial Sequence
  Description of Artificial Sequence: Synthetic oligonucleotide
guaauguauuggccuuuuagugagu

SEQ ID NO: 75085 - RNA, 25 nt, Artificial Sequence
  Description of Artificial Sequence: Synthetic oligonucleotide
uaaggcugggcagagggugcuuaca

SEQ ID NO: 75086 - RNA, 25 nt, Artificial Sequence
  Description of Artificial Sequence: Synthetic oligonucleotide
aaccuugacucccuuucucccugga

SEQ ID NO: 75087 - RNA, 25 nt, Artificial Sequence
  Description of Artificial Sequence: Synthetic oligonucleotide
acuugaucugcuguuucagaggcua

SEQ ID NO: 75088 - RNA, 25 nt, Artificial Sequence
  Description of Artificial Sequence: Synthetic oligonucleotide
agguuguuucugugggugccuuauc

SEQ ID NO: 75089 - RNA, 25 nt, Artificial Sequence
  Description of Artificial Sequence: Synthetic oligonucleotide
cagggcugggauacuucugauucug

SEQ ID NO: 75090 - RNA, 25 nt, Artificial Sequence
  Description of Artificial Sequence: Synthetic oligonucleotide
ggcuuccuuccugccccacccuccc

SEQ ID NO: 75091 - RNA, 25 nt, Artificial Sequence
  Description of Artificial Sequence: Synthetic oligonucleotide
cgaccccagucccccugauccugcu

SEQ ID NO: 75092 - RNA, 25 nt, Artificial Sequence
  Description of Artificial Sequence: Synthetic oligonucleotide
uagaggcaugucuccuugcgugucu

SEQ ID NO: 75093 - RNA, 25 nt, Artificial Sequence
  Description of Artificial Sequence: Synthetic oligonucleotide
uaaaggucccucauccuguuuguuu

SEQ ID NO: 75094 - RNA, 25 nt, Artificial Sequence
  Description of Artificial Sequence: Synthetic oligonucleotide
uuaggaauccuggucucaggaccuc

SEQ ID NO: 75095 - RNA, 25 nt, Artificial Sequence
  Description of Artificial Sequence: Synthetic oligonucleotide
cauggaagaagagggggagagaguu

SEQ ID NO: 75096 - RNA, 25 nt, Artificial Sequence
  Description of Artificial Sequence: Synthetic oligonucleotide
uacagguuggacaugaugcacacua

SEQ ID NO: 75097 - RNA, 25 nt, Artificial Sequence
  Description of Artificial Sequence: Synthetic oligonucleotide
auggggccccagcgacgugucuggu

SEQ ID NO: 75098 - RNA, 25 nt, Artificial Sequence
  Description of Artificial Sequence: Synthetic oligonucleotide
uugagcucagggaauaugguucuua

SEQ ID NO: 75099 - RNA, 25 nt, Artificial Sequence
  Description of Artificial Sequence: Synthetic oligonucleotide
agccaguuucuuggugauauccagu

SEQ ID NO: 75100 - RNA, 25 nt, Artificial Sequence
  Description of Artificial Sequence: Synthetic oligonucleotide
uggcacuuguaauggcgucuucauu

SEQ ID NO: 75101 - RNA, 25 nt, Artificial Sequence
  Description of Artificial Sequence: Synthetic oligonucleotide
ucaguucaugcagggcaaaggcuua

SEQ ID NO: 75102 - RNA, 25 nt, Artificial Sequence
  Description of Artificial Sequence: Synthetic oligonucleotide
acugauaaacuugagucugcccucg

SEQ ID NO: 75103 - RNA, 25 nt, Artificial Sequence
  Description of Artificial Sequence: Synthetic oligonucleotide
guaugaggguguauaccuggccucc

SEQ ID NO: 75104 - RNA, 25 nt, Artificial Sequence
  Description of Artificial Sequence: Synthetic oligonucleotide
ccucugaggcuggugacuccucccu

SEQ ID NO: 75105 - RNA, 25 nt, Artificial Sequence
  Description of Artificial Sequence: Synthetic oligonucleotide
ugcuggggccccacaggugaggcag

SEQ ID NO: 75106 - RNA, 25 nt, Artificial Sequence
  Description of Artificial Sequence: Synthetic oligonucleotide
gaacagcuagagggccuccccgccu

SEQ ID NO: 75107 - RNA, 25 nt, Artificial Sequence
  Description of Artificial Sequence: Synthetic oligonucleotide
ugcccgccuuggcuggcuagcucgc

SEQ ID NO: 75108 - RNA, 25 nt, Artificial Sequence
  Description of Artificial Sequence: Synthetic oligonucleotide
ccucuccugugcguaugggaacacc

SEQ ID NO: 75109 - RNA, 25 nt, Artificial Sequence
  Description of Artificial Sequence: Synthetic oligonucleotide
cuagcacgugcuggaugggcugccu

SEQ ID NO: 75110 - RNA, 25 nt, Artificial Sequence
  Description of Artificial Sequence: Synthetic oligonucleotide
ucugacucagaggcauggccggauu

SEQ ID NO: 75111 - RNA, 25 nt, Artificial Sequence
  Description of Artificial Sequence: Synthetic oligonucleotide
uuggcaacucaaaaccaccuugccu

SEQ ID NO: 75112 - RNA, 25 nt, Artificial Sequence
  Description of Artificial Sequence: Synthetic oligonucleotide
ucagcugaucagaguuucuguggaa

SEQ ID NO: 75113 - RNA, 25 nt, Artificial Sequence
  Description of Artificial Sequence: Synthetic oligonucleotide
auucuguuuguuaaaucaaauuagc

SEQ ID NO: 75114 - RNA, 25 nt, Artificial Sequence
  Description of Artificial Sequence: Synthetic oligonucleotide
cuggucucugaauuaagggggagac

SEQ ID NO: 75115 - RNA, 25 nt, Artificial Sequence
  Description of Artificial Sequence: Synthetic oligonucleotide
cgaccuucucuaagaugaacagggu

SEQ ID NO: 75116 - RNA, 25 nt, Artificial Sequence
  Description of Artificial Sequence: Synthetic oligonucleotide
uucgccccaguccuccugccuggag

SEQ ID NO: 75117 - RNA, 25 nt, Artificial Sequence
  Description of Artificial Sequence: Synthetic oligonucleotide
gacaguugaugugucaugcagagcu

SEQ ID NO: 75118 - RNA, 25 nt, Artificial Sequence
  Description of Artificial Sequence: Synthetic oligonucleotide
ucuuacuucuccagcaacacucuuc

SEQ ID NO: 75119 - RNA, 25 nt, Artificial Sequence
  Description of Artificial Sequence: Synthetic oligonucleotide
caguacauaauaagcuuaacugaua

SEQ ID NO: 75120 - RNA, 25 nt, Artificial Sequence
  Description of Artificial Sequence: Synthetic oligonucleotide
aaacagaauauuuagaaaggugaga

SEQ ID NO: 75121 - RNA, 25 nt, Artificial Sequence
  Description of Artificial Sequence: Synthetic oligonucleotide
acuugggcuuaccauuggguuuaaa

SEQ ID NO: 75122 - RNA, 25 nt, Artificial Sequence
  Description of Artificial Sequence: Synthetic oligonucleotide
aucauagggaccuagggcgaggguu

SEQ ID NO: 75123 - RNA, 25 nt, Artificial Sequence
  Description of Artificial Sequence: Synthetic oligonucleotide
ucagggcuucucuggagcagauauu

SEQ ID NO: 75124 - RNA, 25 nt, Artificial Sequence
  Description of Artificial Sequence: Synthetic oligonucleotide
ugucaaguucauggccuuagguagc

SEQ ID NO: 75125 - RNA, 25 nt, Artificial Sequence
  Description of Artificial Sequence: Synthetic oligonucleotide
cauguaucuggucuuaacucugauu

SEQ ID NO: 75126 - RNA, 25 nt, Artificial Sequence
  Description of Artificial Sequence: Synthetic oligonucleotide
uguagcaaaaguucugagaggagcu

SEQ ID NO: 75127 - RNA, 25 nt, Artificial Sequence
  Description of Artificial Sequence: Synthetic oligonucleotide
ugagcccuguuguggcccauuaaag

SEQ ID NO: 75128 - RNA, 25 nt, Artificial Sequence
  Description of Artificial Sequence: Synthetic oligonucleotide
gaacaggguccucaggcccugcccg

SEQ ID NO: 75129 - RNA, 25 nt, Artificial Sequence
  Description of Artificial Sequence: Synthetic oligonucleotide
gcuuccuguccacugcccccucccc

SEQ ID NO: 75130 - RNA, 25 nt, Artificial Sequence
  Description of Artificial Sequence: Synthetic oligonucleotide
cauccccagcccagccgagggaauc

SEQ ID NO: 75131 - RNA, 25 nt, Artificial Sequence
  Description of Artificial Sequence: Synthetic oligonucleotide
cccguggguugcuuaccuaccuaua

SEQ ID NO: 75132 - RNA, 25 nt, Artificial Sequence
  Description of Artificial Sequence: Synthetic oligonucleotide
aaggugguuuauaagcugcuguccu

SEQ ID NO: 75133 - RNA, 25 nt, Artificial Sequence
  Description of Artificial Sequence: Synthetic oligonucleotide
uggccacugcauucaaauuccaaug

SEQ ID NO: 75134 - RNA, 25 nt, Artificial Sequence
  Description of Artificial Sequence: Synthetic oligonucleotide
guguacuucauaguguaaaaauuua

SEQ ID NO: 75135 - RNA, 25 nt, Artificial Sequence
  Description of Artificial Sequence: Synthetic oligonucleotide
auauuauugugagguuuuuugucuu

SEQ ID NO: 75136 - RNA, 25 nt, Artificial Sequence
  Description of Artificial Sequence: Synthetic oligonucleotide
auauugcuguaucuacuuuaacuuc

SEQ ID NO: 75137 - RNA, 25 nt, Artificial Sequence
  Description of Artificial Sequence: Synthetic oligonucleotide
ccagaaauaaacguuauauaggaac

SEQ ID NO: 75138 - DNA, 21 bp, Artificial Sequence
  Description of Artificial Sequence: Synthetic oligonucleotide
  Description of Combined DNA/RNA Molecule: Synthetic oligonucleotide
cuacacaaaucagcgauuutt

SEQ ID NO: 75139 - DNA, 21 bp, Artificial Sequence
  Description of Artificial Sequence: Synthetic oligonucleotide
  Description of Combined DNA/RNA Molecule: Synthetic oligonucleotide
aaaucgcugauuuguguagtt

SEQ ID NO: 75140 - DNA, 25 bp, Artificial Sequence
  Description of Artificial Sequence: Synthetic oligonucleotide
  Description of Combined DNA/RNA Molecule: Synthetic oligonucleotide
cuacacaaaucagcgauuuccaugt

SEQ ID NO: 75141 - RNA, 27 nt, Artificial Sequence
  Description of Artificial Sequence: Synthetic oligonucleotide
acauggaaaucgcugauuuguguaguc

SEQ ID NO: 75142 - RNA, 13 nt, Artificial Sequence
  Description of Artificial Sequence: Synthetic oligonucleotide
cuacacaaaucag

SEQ ID NO: 75143 - DNA, 11 bp, Artificial Sequence
  Description of Artificial Sequence: Synthetic oligonucleotide
  Description of Combined DNA/RNA Molecule: Synthetic oligonucleotide
gauuuccaugt

SEQ ID NO: 75144 - DNA, 21 bp, Artificial Sequence
  Description of Artificial Sequence: Synthetic oligonucleotide
  Description of Combined DNA/RNA Molecule: Synthetic oligonucleotide
ggaucuuauuucuucggagtt

SEQ ID NO: 75145 - DNA, 21 bp, Artificial Sequence
  Description of Artificial Sequence: Synthetic oligonucleotide
  Description of Combined DNA/RNA Molecule: Synthetic oligonucleotide
cuccgaagaaauaagaucctt

SEQ ID NO: 75146 - RNA, 11 nt, Artificial Sequence
  Description of Artificial Sequence: Synthetic oligonucleotide
ggaucuuauuu

SEQ ID NO: 75147 - DNA, 10 bp, Artificial Sequence
  Description of Artificial Sequence: Synthetic oligonucleotide
  Description of Combined DNA/RNA Molecule: Synthetic oligonucleotide
cuucggagtt

SEQ ID NO: 75148 - RNA, 27 nt, Artificial Sequence
  Description of Artificial Sequence: Synthetic oligonucleotide
cauugucuccgaagaaauaagauccuu

SEQ ID NO: 75149 - RNA, 8 nt, Artificial Sequence
  Description of Artificial Sequence: Synthetic oligonucleotide
  modified_base (2): LNA-G
ggaucuua

SEQ ID NO: 75150 - DNA, 17 bp, Artificial Sequence
  Description of Artificial Sequence: Synthetic oligonucleotide
  Description of Combined DNA/RNA Molecule: Synthetic oligonucleotide
uuucuucggagacaatg

SEQ ID NO: 75151 - DNA, 16 bp, Artificial Sequence
  Description of Artificial Sequence: Synthetic oligonucleotide
  Description of Combined DNA/RNA Molecule: Synthetic oligonucleotide
uucuucggagacaatg

SEQ ID NO: 75152 - DNA, 15 bp, Artificial Sequence
  Description of Artificial Sequence: Synthetic oligonucleotide
  Description of Combined DNA/RNA Molecule: Synthetic oligonucleotide
ucuucggagacaatg

SEQ ID NO: 75153 - DNA, 14 bp, Artificial Sequence
  Description of Artificial Sequence: Synthetic oligonucleotide
  Description of Combined DNA/RNA Molecule: Synthetic oligonucleotide
cuucggagacaatg

SEQ ID NO: 75154 - DNA, 13 bp, Artificial Sequence
  Description of Artificial Sequence: Synthetic oligonucleotide
  Description of Combined DNA/RNA Molecule: Synthetic oligonucleotide
uucggagacaatg

SEQ ID NO: 75155 - DNA, 12 bp, Artificial Sequence
  Description of Artificial Sequence: Synthetic oligonucleotide
  Description of Combined DNA/RNA Molecule: Synthetic oligonucleotide
ucggagacaatg

SEQ ID NO: 75156 - DNA, 11 bp, Artificial Sequence
  Description of Artificial Sequence: Synthetic oligonucleotide
  Description of Combined DNA/RNA Molecule: Synthetic oligonucleotide
cggagacaatg

SEQ ID NO: 75157 - RNA, 9 nt, Artificial Sequence
  Description of Artificial Sequence: Synthetic oligonucleotide
  modified_base (2): LNA-G
ggaucuuau

SEQ ID NO: 75158 - RNA, 10 nt, Artificial Sequence
  Description of Artificial Sequence: Synthetic oligonucleotide
  modified_base (2): LNA-G
ggaucuuauu

SEQ ID NO: 75159 - RNA, 11 nt, Artificial Sequence
  Description of Artificial Sequence: Synthetic oligonucleotide
  modified_base (2): LNA-G
ggaucuuauuu

SEQ ID NO: 75160 - RNA, 12 nt, Artificial Sequence
  Description of Artificial Sequence: Synthetic oligonucleotide
  modified_base (2): LNA-G
ggaucuuauuuc

SEQ ID NO: 75161 - RNA, 8 nt, Artificial Sequence
  Description of Artificial Sequence: Synthetic oligonucleotide
  modified_base (3): LNA-A
cuacacaa

SEQ ID NO: 75162 - DNA, 13 bp, Artificial Sequence
  Description of Artificial Sequence: Synthetic oligonucleotide
  Description of Combined DNA/RNA Molecule: Synthetic oligonucleotide
  modified_base (8): LNA-A
aucagcgauuutt

SEQ ID NO: 75163 - DNA, 12 bp, Artificial Sequence
  Description of Artificial Sequence: Synthetic oligonucleotide
  Description of Combined DNA/RNA Molecule: Synthetic oligonucleotide
  modified_base (7): LNA-A
ucagcgauuutt

SEQ ID NO: 75164 - DNA, 11 bp, Artificial Sequence
  Description of Artificial Sequence: Synthetic oligonucleotide
  Description of Combined DNA/RNA Molecule: Synthetic oligonucleotide
  modified_base (6): LNA-A
cagcgauuutt

SEQ ID NO: 75165 - DNA, 10 bp, Artificial Sequence
  Description of Artificial Sequence: Synthetic oligonucleotide
  Description of Combined DNA/RNA Molecule: Synthetic oligonucleotide
  modified_base (5): LNA-A
agcgauuutt

SEQ ID NO: 75166 - DNA, 9 bp, Artificial Sequence
  Description of Artificial Sequence: Synthetic oligonucleotide
  Description of Combined DNA/RNA Molecule: Synthetic oligonucleotide
  modified_base (4): LNA-A
gcgauuutt

SEQ ID NO: 75167 - DNA, 8 bp, Artificial Sequence
  Description of Artificial Sequence: Synthetic oligonucleotide
  Description of Combined DNA/RNA Molecule: Synthetic oligonucleotide
  modified_base (3): LNA-A
cgauuutt

SEQ ID NO: 75168 - DNA, 7 bp, Artificial Sequence
  Description of Artificial Sequence: Synthetic oligonucleotide
  Description of Combined DNA/RNA Molecule: Synthetic oligonucleotide
  modified_base (2): LNA-A
gauuutt

SEQ ID NO: 75169 - RNA, 9 nt, Artificial Sequence
  Description of Artificial Sequence: Synthetic oligonucleotide
  modified_base (3): LNA-A
cuacacaaa

SEQ ID NO: 75170 - RNA, 10 nt, Artificial Sequence
  Description of Artificial Sequence: Synthetic oligonucleotide
  modified_base (3): LNA-A
cuacacaaau

SEQ ID NO: 75171 - RNA, 11 nt, Artificial Sequence
  Description of Artificial Sequence: Synthetic oligonucleotide
  modified_base (3): LNA-A
cuacacaaauc

SEQ ID NO: 75172 - RNA, 12 nt, Artificial Sequence
  Description of Artificial Sequence: Synthetic oligonucleotide
  modified_base (3): LNA-A
cuacacaaauca

SEQ ID NO: 75173 - RNA, 13 nt, Artificial Sequence
  Description of Artificial Sequence: Synthetic oligonucleotide
  modified_base (3): LNA-A
cuacacaaaucag

SEQ ID NO: 75174 - RNA, 14 nt, Artificial Sequence
  Description of Artificial Sequence: Synthetic oligonucleotide
  modified_base (3): LNA-A
cuacacaaaucagc

SEQ ID NO: 75175 - RNA, 13 nt, Artificial Sequence
  Description of Artificial Sequence: Synthetic oligonucleotide
  modified_base (2): LNA-G
ggaucuuauuucu

SEQ ID NO: 75176 - RNA, 14 nt, Artificial Sequence
  Description of Artificial Sequence: Synthetic oligonucleotide
  modified_base (2): LNA-G
ggaucuuauuucuu

SEQ ID NO: 75177 - RNA, 8 nt, Artificial Sequence
  Description of Artificial Sequence: Synthetic oligonucleotide
  modified_base (2): LNA-G
  modified_base (8): LNA-A
ggaucuua

SEQ ID NO: 75178 - RNA, 9 nt, Artificial Sequence
  Description of Artificial Sequence: Synthetic oligonucleotide
  modified_base (2): LNA-G
  modified_base (9): LNA-U
ggaucuuau

SEQ ID NO: 75179 - RNA, 10 nt, Artificial Sequence
  Description of Artificial Sequence: Synthetic oligonucleotide
  modified_base (2): LNA-G
  modified_base (10): LNA-U
ggaucuuauu

SEQ ID NO: 75180 - RNA, 11 nt, Artificial Sequence
  Description of Artificial Sequence: Synthetic oligonucleotide
  modified_base (2): LNA-G
  modified_base (11): LNA-U
ggaucuuauuu

SEQ ID NO: 75181 - RNA, 12 nt, Artificial Sequence
  Description of Artificial Sequence: Synthetic oligonucleotide
  modified_base (2): LNA-G
  modified_base (12): LNA-C
ggaucuuauuuc

SEQ ID NO: 75182 - RNA, 13 nt, Artificial Sequence
  Description of Artificial Sequence: Synthetic oligonucleotide
  modified_base (2): LNA-G
  modified_base (13): LNA-U
ggaucuuauuucu

SEQ ID NO: 75183 - RNA, 14 nt, Artificial Sequence
  Description of Artificial Sequence: Synthetic oligonucleotide
  modified_base (2): LNA-G
  modified_base (14): LNA-U
ggaucuuauuucuu

SEQ ID NO: 75184 - DNA, 13 bp, Artificial Sequence
  Description of Artificial Sequence: Synthetic oligonucleotide
  Description of Combined DNA/RNA Molecule: Synthetic oligonucleotide
  modified_base (8): LNA-G
uuucuucggagtt

SEQ ID NO: 75185 - DNA, 12 bp, Artificial Sequence
  Description of Artificial Sequence: Synthetic oligonucleotide
  Description of Combined DNA/RNA Molecule: Synthetic oligonucleotide
  modified_base (7): LNA-G
uucuucggagtt

SEQ ID NO: 75186 - DNA, 11 bp, Artificial Sequence
  Description of Artificial Sequence: Synthetic oligonucleotide
  Description of Combined DNA/RNA Molecule: Synthetic oligonucleotide
  modified_base (6): LNA-G
ucuucggagtt

SEQ ID NO: 75187 - DNA, 10 bp, Artificial Sequence
  Description of Artificial Sequence: Synthetic oligonucleotide
  Description of Combined DNA/RNA Molecule: Synthetic oligonucleotide
  modified_base (5): LNA-G
cuucggagtt

SEQ ID NO: 75188 - DNA, 9 bp, Artificial Sequence
  Description of Artificial Sequence: Synthetic oligonucleotide
  Description of Combined DNA/RNA Molecule: Synthetic oligonucleotide
  modified_base (4): LNA-G
uucggagtt

SEQ ID NO: 75189 - DNA, 8 bp, Artificial Sequence
  Description of Artificial Sequence: Synthetic oligonucleotide
  Description of Combined DNA/RNA Molecule: Synthetic oligonucleotide
  modified_base (3): LNA-G
ucggagtt

SEQ ID NO: 75190 - DNA, 7 bp, Artificial Sequence
  Description of Artificial Sequence: Synthetic oligonucleotide
  Description of Combined DNA/RNA Molecule: Synthetic oligonucleotide
  modified_base (2): LNA-G
cggagtt

SEQ ID NO: 75191 - DNA, 13 bp, Artificial Sequence
  Description of Artificial Sequence: Synthetic oligonucleotide
  Description of Combined DNA/RNA Molecule: Synthetic oligonucleotide
  modified_base (1): LNA-U
  modified_base (8): LNA-G
uuucuucggagtt

SEQ ID NO: 75192 - DNA, 12 bp, Artificial Sequence
  Description of Artificial Sequence: Synthetic oligonucleotide
  Description of Combined DNA/RNA Molecule: Synthetic oligonucleotide
  modified_base (1): LNA-U
  modified_base (7): LNA-G
uucuucggagtt

SEQ ID NO: 75193 - DNA, 11 bp, Artificial Sequence
  Description of Artificial Sequence: Synthetic oligonucleotide
  Description of Combined DNA/RNA Molecule: Synthetic oligonucleotide
  modified_base (1): LNA-U
  modified_base (6): LNA-G
ucuucggagtt

SEQ ID NO: 75194 - DNA, 10 bp, Artificial Sequence
  Description of Artificial Sequence: Synthetic oligonucleotide
  Description of Combined DNA/RNA Molecule: Synthetic oligonucleotide
  modified_base (1): LNA-C
  modified_base (5): LNA-G
cuucggagtt

SEQ ID NO: 75195 - DNA, 9 bp, Artificial Sequence
  Description of Artificial Sequence: Synthetic oligonucleotide
  Description of Combined DNA/RNA Molecule: Synthetic oligonucleotide
  modified_base (1): LNA-U
  modified_base (4): LNA-G
uucggagtt

SEQ ID NO: 75196 - DNA, 8 bp, Artificial Sequence
  Description of Artificial Sequence: Synthetic oligonucleotide
  Description of Combined DNA/RNA Molecule: Synthetic oligonucleotide
  modified_base (1): LNA-U
  modified_base (3): LNA-G
ucggagtt

SEQ ID NO: 75197 - DNA, 7 bp, Artificial Sequence
  Description of Artificial Sequence: Synthetic oligonucleotide
  Description of Combined DNA/RNA Molecule: Synthetic oligonucleotide
  modified_base (1): LNA-C
  modified_base (2): LNA-G
cggagtt

SEQ ID NO: 75198 - DNA, 21 bp, Artificial Sequence
  Description of Artificial Sequence: Synthetic oligonucleotide
  Description of Combined DNA/RNA Molecule: Synthetic oligonucleotide
  modified_base (2): LNA-G
  modified_base (16): LNA-G
ggaucuuauuucuucggagtt

SEQ ID NO: 75199 - DNA, 25 bp, Artificial Sequence
  Description of Artificial Sequence: Synthetic oligonucleotide
  Description of Combined DNA/RNA Molecule: Synthetic oligonucleotide
ggaucuuauuucuucggagacaatg

SEQ ID NO: 75200 - RNA, 25 nt, Artificial Sequence
  Description of Artificial Sequence: Synthetic oligonucleotide
uuaagcagaguucaaaagcccuuca

SEQ ID NO: 75201 - RNA, 25 nt, Artificial Sequence
  Description of Artificial Sequence: Synthetic oligonucleotide
uaagcagaguucaaaagcccuucag

SEQ ID NO: 75202 - RNA, 25 nt, Artificial Sequence
  Description of Artificial Sequence: Synthetic oligonucleotide
agcagaguucaaaagcccuucagcg

SEQ ID NO: 75203 - RNA, 25 nt, Artificial Sequence
  Description of Artificial Sequence: Synthetic oligonucleotide
cucagggucugagugaagccgcucg

SEQ ID NO: 75204 - RNA, 25 nt, Artificial Sequence
  Description of Artificial Sequence: Synthetic oligonucleotide
caagcaacuacaucacgccagucaa

SEQ ID NO: 75205 - RNA, 25 nt, Artificial Sequence
  Description of Artificial Sequence: Synthetic oligonucleotide
aucaauggcagcuucuuggugcgug

SEQ ID NO: 75206 - RNA, 25 nt, Artificial Sequence
  Description of Artificial Sequence: Synthetic oligonucleotide
uuccagcccacauuggauucaucag

SEQ ID NO: 75207 - RNA, 25 nt, Artificial Sequence
  Description of Artificial Sequence: Synthetic oligonucleotide
cagcugagaauguggaauaccuaag

SEQ ID NO: 75208 - RNA, 25 nt, Artificial Sequence
  Description of Artificial Sequence: Synthetic oligonucleotide
aacguaucuccuaauuugaggcuca

SEQ ID NO: 75209 - RNA, 25 nt, Artificial Sequence
  Description of Artificial Sequence: Synthetic oligonucleotide
ccuaaaauaauuucucuacaauugg

SEQ ID NO: 75210 - RNA, 25 nt, Artificial Sequence
  Description of Artificial Sequence: Synthetic oligonucleotide
uggaagauucagcuaguuaggagcc

SEQ ID NO: 75211 - RNA, 25 nt, Artificial Sequence
  Description of Artificial Sequence: Synthetic oligonucleotide
uuaaacucuccuagucaauauccac

SEQ ID NO: 75212 - RNA, 25 nt, Artificial Sequence
  Description of Artificial Sequence: Synthetic oligonucleotide
cagccuacaguuauguucagucaca

SEQ ID NO: 75213 - RNA, 25 nt, Artificial Sequence
  Description of Artificial Sequence: Synthetic oligonucleotide
guuauguucagucacacacacauac

SEQ ID NO: 75214 - RNA, 25 nt, Artificial Sequence
  Description of Artificial Sequence: Synthetic oligonucleotide
cacauacaaaauguuccuuuugcuu

SEQ ID NO: 75215 - RNA, 25 nt, Artificial Sequence
  Description of Artificial Sequence: Synthetic oligonucleotide
uccuuuugcuuuuaaaguaauuuuu

SEQ ID NO: 75216 - RNA, 25 nt, Artificial Sequence
  Description of Artificial Sequence: Synthetic oligonucleotide
ugaccugugaagcaacagucaaugg

SEQ ID NO: 75217 - RNA, 25 nt, Artificial Sequence
  Description of Artificial Sequence: Synthetic oligonucleotide
cuaucucacacaucgacaaaccaau

SEQ ID NO: 75218 - RNA, 25 nt, Artificial Sequence
  Description of Artificial Sequence: Synthetic oligonucleotide
uguccucaauuguacugcuaccacu

SEQ ID NO: 75219 - RNA, 25 nt, Artificial Sequence
  Description of Artificial Sequence: Synthetic oligonucleotide
aaaccguagcuggcaagcggucuua

SEQ ID NO: 75220 - RNA, 25 nt, Artificial Sequence
  Description of Artificial Sequence: Synthetic oligonucleotide
uagcuggcaagcggucuuaccggcu

SEQ ID NO: 75221 - RNA, 25 nt, Artificial Sequence
  Description of Artificial Sequence: Synthetic oligonucleotide
uuguaugguuaaaagauggguuacc

SEQ ID NO: 75222 - RNA, 25 nt, Artificial Sequence
  Description of Artificial Sequence: Synthetic oligonucleotide
ugguuaaaagauggguuaccugcga

SEQ ID NO: 75223 - RNA, 25 nt, Artificial Sequence
  Description of Artificial Sequence: Synthetic oligonucleotide
cagggaauuauacaaucuugcugag

SEQ ID NO: 75224 - RNA, 25 nt, Artificial Sequence
  Description of Artificial Sequence: Synthetic oligonucleotide
acaaucuugcugagcauaaaacagu

SEQ ID NO: 75225 - RNA, 25 nt, Artificial Sequence
  Description of Artificial Sequence: Synthetic oligonucleotide
ccaauaaugaagaguccuuuauccu

SEQ ID NO: 75226 - RNA, 25 nt, Artificial Sequence
  Description of Artificial Sequence: Synthetic oligonucleotide
acuuuggauguuccaacgcaaguug

SEQ ID NO: 75227 - RNA, 25 nt, Artificial Sequence
  Description of Artificial Sequence: Synthetic oligonucleotide
aaugcuuccacuaaacugaaaccau

SEQ ID NO: 75228 - RNA, 25 nt, Artificial Sequence
  Description of Artificial Sequence: Synthetic oligonucleotide
gagaaaguuugacuuuguuaaauau

SEQ ID NO: 75229 - RNA, 25 nt, Artificial Sequence
  Description of Artificial Sequence: Synthetic oligonucleotide
aaagaacuacuguauauuaaaaguu

SEQ ID NO: 75230 - RNA, 25 nt, Artificial Sequence
  Description of Artificial Sequence: Synthetic oligonucleotide
uuagaaauacggguuuugacuuaac

SEQ ID NO: 75231 - RNA, 25 nt, Artificial Sequence
  Description of Artificial Sequence: Synthetic oligonucleotide
aacauggguacagcaaacucagcac

SEQ ID NO: 75232 - RNA, 25 nt, Artificial Sequence
  Description of Artificial Sequence: Synthetic oligonucleotide
aaagacacagaagaugcugaccuca

SEQ ID NO: 75233 - RNA, 25 nt, Artificial Sequence
  Description of Artificial Sequence: Synthetic oligonucleotide
uaguagggagguuuauucagaucgc

SEQ ID NO: 75234 - RNA, 25 nt, Artificial Sequence
  Description of Artificial Sequence: Synthetic oligonucleotide
gccuucugcagcaggguucugggau

SEQ ID NO: 75235 - RNA, 25 nt, Artificial Sequence
  Description of Artificial Sequence: Synthetic oligonucleotide
ggucugguacauauuggaaauuaug

SEQ ID NO: 75236 - RNA, 25 nt, Artificial Sequence
  Description of Artificial Sequence: Synthetic oligonucleotide
cuaguccuuccgauggaagcacuag

SEQ ID NO: 75237 - RNA, 25 nt, Artificial Sequence
  Description of Artificial Sequence: Synthetic oligonucleotide
ccagugaauauuguuuuuaugugga

SEQ ID NO: 75238 - RNA, 25 nt, Artificial Sequence
  Description of Artificial Sequence: Synthetic oligonucleotide
augaauucaaguuggaauugguaga

SEQ ID NO: 75239 - RNA, 25 nt, Artificial Sequence
  Description of Artificial Sequence: Synthetic oligonucleotide
caggacacagauuuagacuuggaga

SEQ ID NO: 75240 - RNA, 25 nt, Artificial Sequence
  Description of Artificial Sequence: Synthetic oligonucleotide
cucaaagcacaguuacaguauucca

SEQ ID NO: 75241 - RNA, 25 nt, Artificial Sequence
  Description of Artificial Sequence: Synthetic oligonucleotide
accacugccaccacugaugaauuaa

SEQ ID NO: 75242 - RNA, 25 nt, Artificial Sequence
  Description of Artificial Sequence: Synthetic oligonucleotide
gaaacuacuagugccacaucaucac

SEQ ID NO: 75243 - RNA, 25 nt, Artificial Sequence
  Description of Artificial Sequence: Synthetic oligonucleotide
aagucggacagccucaccaaacaga

SEQ ID NO: 75244 - RNA, 25 nt, Artificial Sequence
  Description of Artificial Sequence: Synthetic oligonucleotide
gaaagcgaaaaauggaacaugaugg

SEQ ID NO: 75245 - RNA, 25 nt, Artificial Sequence
  Description of Artificial Sequence: Synthetic oligonucleotide
cccucugauuuagcauguagacugc

SEQ ID NO: 75246 - RNA, 25 nt, Artificial Sequence
  Description of Artificial Sequence: Synthetic oligonucleotide
ugagcuauuuaaggaucuauuuaug

SEQ ID NO: 75247 - RNA, 25 nt, Artificial Sequence
  Description of Artificial Sequence: Synthetic oligonucleotide
aaaaggugaaaaagcacuauuauca

SEQ ID NO: 75248 - RNA, 25 nt, Artificial Sequence
  Description of Artificial Sequence: Synthetic oligonucleotide
gaaaaagcacuauuaucaguucugc

SEQ ID NO: 75249 - RNA, 25 nt, Artificial Sequence
  Description of Artificial Sequence: Synthetic oligonucleotide
ggcugaaaagaaagauuaaaccuac

SEQ ID NO: 75250 - RNA, 25 nt, Artificial Sequence
  Description of Artificial Sequence: Synthetic oligonucleotide
uaaacccuuauaauaaaauccuucu

SEQ ID NO: 75251 - RNA, 25 nt, Artificial Sequence
  Description of Artificial Sequence: Synthetic oligonucleotide
cauacuauuagccaaugcuguagac

SEQ ID NO: 75252 - RNA, 25 nt, Artificial Sequence
  Description of Artificial Sequence: Synthetic oligonucleotide
gacagaagcauuuugauaggaauag

SEQ ID NO: 75253 - RNA, 25 nt, Artificial Sequence
  Description of Artificial Sequence: Synthetic oligonucleotide
agagcaaauaagauaauggcccuga

SEQ ID NO: 75254 - RNA, 25 nt, Artificial Sequence
  Description of Artificial Sequence: Synthetic oligonucleotide
ccaacauuuuucucuuccucaagca

SEQ ID NO: 75255 - RNA, 25 nt, Artificial Sequence
  Description of Artificial Sequence: Synthetic oligonucleotide
uuaaguaugagaaaaguucagccca

SEQ ID NO: 75256 - RNA, 25 nt, Artificial Sequence
  Description of Artificial Sequence: Synthetic oligonucleotide
caggaauaaagauggcugcugaacc

SEQ ID NO: 75257 - RNA, 25 nt, Artificial Sequence
  Description of Artificial Sequence: Synthetic oligonucleotide
aauuugaaugaccaaguucucuuca

SEQ ID NO: 75258 - RNA, 25 nt, Artificial Sequence
  Description of Artificial Sequence: Synthetic oligonucleotide
auguauaaagauagccagccuagag

SEQ ID NO: 75259 - RNA, 25 nt, Artificial Sequence
  Description of Artificial Sequence: Synthetic oligonucleotide
ggcuguaacuaucucugugaagugu

SEQ ID NO: 75260 - RNA, 25 nt, Artificial Sequence
  Description of Artificial Sequence: Synthetic oligonucleotide
ucugugaagugugagaaaauuucaa

SEQ ID NO: 75261 - RNA, 25 nt, Artificial Sequence
  Description of Artificial Sequence: Synthetic oligonucleotide
ccuuuaaggaaaugaauccuccuga

SEQ ID NO: 75262 - RNA, 25 nt, Artificial Sequence
  Description of Artificial Sequence: Synthetic oligonucleotide
aaggauacaaaaagugacaucauau

SEQ ID NO: 75263 - RNA, 25 nt, Artificial Sequence
  Description of Artificial Sequence: Synthetic oligonucleotide
agaugcaauuugaaucuucaucaua

SEQ ID NO: 75264 - RNA, 25 nt, Artificial Sequence
  Description of Artificial Sequence: Synthetic oligonucleotide
guucaaaacgaagacuagcuauuaa

SEQ ID NO: 75265 - RNA, 25 nt, Artificial Sequence
  Description of Artificial Sequence: Synthetic oligonucleotide
gugaaaccucaucucuacuaaaaau

SEQ ID NO: 75266 - RNA, 25 nt, Artificial Sequence
  Description of Artificial Sequence: Synthetic oligonucleotide
acgaaagagaagcucuaucucgccu

SEQ ID NO: 75267 - RNA, 25 nt, Artificial Sequence
  Description of Artificial Sequence: Synthetic oligonucleotide
cuccacaagcgccuucgguccaguu

SEQ ID NO: 75268 - RNA, 25 nt, Artificial Sequence
  Description of Artificial Sequence: Synthetic oligonucleotide
gagaagauuccaaagauguagccgc

SEQ ID NO: 75269 - RNA, 25 nt, Artificial Sequence
  Description of Artificial Sequence: Synthetic oligonucleotide
aaucuggauucaaugaggagacuug

SEQ ID NO: 75270 - RNA, 25 nt, Artificial Sequence
  Description of Artificial Sequence: Synthetic oligonucleotide
agaacagauuugagaguagugagga

SEQ ID NO: 75271 - RNA, 25 nt, Artificial Sequence
  Description of Artificial Sequence: Synthetic oligonucleotide
ccagagcugugcagaugaguacaaa

SEQ ID NO: 75272 - RNA, 25 nt, Artificial Sequence
  Description of Artificial Sequence: Synthetic oligonucleotide
ccucagauuguuguuguuaaugggc

SEQ ID NO: 75273 - RNA, 25 nt, Artificial Sequence
  Description of Artificial Sequence: Synthetic oligonucleotide
cuauuuuaauuauuuuuaauuuauu

SEQ ID NO: 75274 - RNA, 25 nt, Artificial Sequence
  Description of Artificial Sequence: Synthetic oligonucleotide
uuuaauuuauuaauauuuaaauaug

SEQ ID NO: 75275 - RNA, 25 nt, Artificial Sequence
  Description of Artificial Sequence: Synthetic oligonucleotide
augcaguuugaauauccuuuguuuc

SEQ ID NO: 75276 - RNA, 25 nt, Artificial Sequence
  Description of Artificial Sequence: Synthetic oligonucleotide
caugcugcuggcgucuaaguguuug

SEQ ID NO: 75277 - RNA, 25 nt, Artificial Sequence
  Description of Artificial Sequence: Synthetic oligonucleotide
agaugugcauuucaccugugacaaa

SEQ ID NO: 75278 - RNA, 25 nt, Artificial Sequence
  Description of Artificial Sequence: Synthetic oligonucleotide
ucaaaaccugugccaggcugaauua

SEQ ID NO: 75279 - RNA, 25 nt, Artificial Sequence
  Description of Artificial Sequence: Synthetic oligonucleotide
gaauguggguagucauucuuacaau

SEQ ID NO: 75280 - RNA, 25 nt, Artificial Sequence
  Description of Artificial Sequence: Synthetic oligonucleotide
auguggguagucauucuuacaauug

SEQ ID NO: 75281 - RNA, 25 nt, Artificial Sequence
  Description of Artificial Sequence: Synthetic oligonucleotide
ugaaaaugagcaucagagaguguac

SEQ ID NO: 75282 - RNA, 25 nt, Artificial Sequence
  Description of Artificial Sequence: Synthetic oligonucleotide
uugcuuuucauguagaacucagcag

SEQ ID NO: 75283 - RNA, 25 nt, Artificial Sequence
  Description of Artificial Sequence: Synthetic oligonucleotide
uguauuucuauauuuauuuucagua

SEQ ID NO: 75284 - RNA, 25 nt, Artificial Sequence
  Description of Artificial Sequence: Synthetic oligonucleotide
uuugauuaauguuucuuaaauggaa

SEQ ID NO: 75285 - RNA, 25 nt, Artificial Sequence
  Description of Artificial Sequence: Synthetic oligonucleotide
caacguguauagugccuaaaauugu

SEQ ID NO: 75286 - RNA, 25 nt, Artificial Sequence
  Description of Artificial Sequence: Synthetic oligonucleotide
cauauccuuggcuacuaacaucugg

SEQ ID NO: 75287 - RNA, 25 nt, Artificial Sequence
  Description of Artificial Sequence: Synthetic oligonucleotide
uacuaacaucuggagacugugagcu

SEQ ID NO: 75288 - RNA, 25 nt, Artificial Sequence
  Description of Artificial Sequence: Synthetic oligonucleotide
cauaaguugugugcuuuuuauuaau

SEQ ID NO: 75289 - RNA, 25 nt, Artificial Sequence
  Description of Artificial Sequence: Synthetic oligonucleotide
gcaucauuuuggcucuucuuacauu

SEQ ID NO: 75290 - RNA, 25 nt, Artificial Sequence
  Description of Artificial Sequence: Synthetic oligonucleotide
gcucuucuuacauuuguaaaaaugu

SEQ ID NO: 75291 - RNA, 25 nt, Artificial Sequence
  Description of Artificial Sequence: Synthetic oligonucleotide
agauuaggucaucuuaauucauauu

SEQ ID NO: 75292 - RNA, 25 nt, Artificial Sequence
  Description of Artificial Sequence: Synthetic oligonucleotide
auggaauugaaagaacuaaucauga

SEQ ID NO: 75293 - RNA, 25 nt, Artificial Sequence
  Description of Artificial Sequence: Synthetic oligonucleotide
cacacucauuccuucugcucuuggg

SEQ ID NO: 75294 - RNA, 25 nt, Artificial Sequence
  Description of Artificial Sequence: Synthetic oligonucleotide
uguagagguaaccaguagcuuugag

SEQ ID NO: 75295 - RNA, 25 nt, Artificial Sequence
  Description of Artificial Sequence: Synthetic oligonucleotide
caaccacaugccacguaauauuuca

SEQ ID NO: 75296 - RNA, 25 nt, Artificial Sequence
  Description of Artificial Sequence: Synthetic oligonucleotide
ucggaaacaaguuauucucuucacu

SEQ ID NO: 75297 - RNA, 25 nt, Artificial Sequence
  Description of Artificial Sequence: Synthetic oligonucleotide
acucccaauaacuaaugcuaagaaa

SEQ ID NO: 75298 - RNA, 25 nt, Artificial Sequence
  Description of Artificial Sequence: Synthetic oligonucleotide
aaugcuaagaaaugcugaaaaucaa

SEQ ID NO: 75299 - RNA, 25 nt, Artificial Sequence
  Description of Artificial Sequence: Synthetic oligonucleotide
gucuuucucuaaauaugauuacuuu

SEQ ID NO: 75300 - RNA, 25 nt, Artificial Sequence
  Description of Artificial Sequence: Synthetic oligonucleotide
ugaauuucaggcauuuuguucuaca

SEQ ID NO: 75301 - RNA, 25 nt, Artificial Sequence
  Description of Artificial Sequence: Synthetic oligonucleotide
cgauucccucucacccgggacucuc

SEQ ID NO: 75302 - RNA, 25 nt, Artificial Sequence
  Description of Artificial Sequence: Synthetic oligonucleotide
aggaaagugaaccuuuaaaguaaag

SEQ ID NO: 75303 - RNA, 25 nt, Artificial Sequence
  Description of Artificial Sequence: Synthetic oligonucleotide
gaggcugcaugcucuggaagccugg

SEQ ID NO: 75304 - RNA, 25 nt, Artificial Sequence
  Description of Artificial Sequence: Synthetic oligonucleotide
ucucugaacagaaaacaaaagagag

SEQ ID NO: 75305 - RNA, 25 nt, Artificial Sequence
  Description of Artificial Sequence: Synthetic oligonucleotide
aacuuggcuguaaucaguuaugccg

SEQ ID NO: 75306 - RNA, 25 nt, Artificial Sequence
  Description of Artificial Sequence: Synthetic oligonucleotide
agaagccaaaauuaaaagaagucca

SEQ ID NO: 75307 - RNA, 25 nt, Artificial Sequence
  Description of Artificial Sequence: Synthetic oligonucleotide
auuaaaagaaguccaggugagguua

SEQ ID NO: 75308 - RNA, 25 nt, Artificial Sequence
  Description of Artificial Sequence: Synthetic oligonucleotide
gaauccggauuaucgggaagaggac

SEQ ID NO: 75309 - RNA, 25 nt, Artificial Sequence
  Description of Artificial Sequence: Synthetic oligonucleotide
aaugugacaucaaagcaaguauugu

SEQ ID NO: 75310 - RNA, 25 nt, Artificial Sequence
  Description of Artificial Sequence: Synthetic oligonucleotide
caucaaagcaaguauuguagcacuc

SEQ ID NO: 75311 - RNA, 25 nt, Artificial Sequence
  Description of Artificial Sequence: Synthetic oligonucleotide
agagagagaaaacaaaaccacaaau

SEQ ID NO: 75312 - RNA, 25 nt, Artificial Sequence
  Description of Artificial Sequence: Synthetic oligonucleotide
ucgcuguaguauuuaagcccauaca

SEQ ID NO: 75313 - RNA, 25 nt, Artificial Sequence
  Description of Artificial Sequence: Synthetic oligonucleotide
cgcuguaguauuuaagcccauacag

SEQ ID NO: 75314 - RNA, 25 nt, Artificial Sequence
  Description of Artificial Sequence: Synthetic oligonucleotide
auuuaagcccauacagaaaccuucc

SEQ ID NO: 75315 - RNA, 25 nt, Artificial Sequence
  Description of Artificial Sequence: Synthetic oligonucleotide
auuaaaauaaacaugguauaccuac

SEQ ID NO: 75316 - RNA, 25 nt, Artificial Sequence
  Description of Artificial Sequence: Synthetic oligonucleotide
cuguucugaucggccaguuuucgga

SEQ ID NO: 75317 - RNA, 25 nt, Artificial Sequence
  Description of Artificial Sequence: Synthetic oligonucleotide
aaauaauuugaacuuuggaacaggg

SEQ ID NO: 75318 - RNA, 25 nt, Artificial Sequence
  Description of Artificial Sequence: Synthetic oligonucleotide
ugcgaccuuaauuuaacuuuccagu

SEQ ID NO: 75319 - RNA, 25 nt, Artificial Sequence
  Description of Artificial Sequence: Synthetic oligonucleotide
cugagaaagcuaaaguuugguuuug

SEQ ID NO: 75320 - RNA, 25 nt, Artificial Sequence
  Description of Artificial Sequence: Synthetic oligonucleotide
aguaaagaugcuacuucccacugua

SEQ ID NO: 75321 - RNA, 25 nt, Artificial Sequence
  Description of Artificial Sequence: Synthetic oligonucleotide
cugcuuaauugcugauaccauauga

SEQ ID NO: 75322 - RNA, 25 nt, Artificial Sequence
  Description of Artificial Sequence: Synthetic oligonucleotide
uaccauaugaaugaaacaugggcug

SEQ ID NO: 75323 - RNA, 25 nt, Artificial Sequence
  Description of Artificial Sequence: Synthetic oligonucleotide
aacuuucuuauccaacuuuuucaua

SEQ ID NO: 75324 - RNA, 25 nt, Artificial Sequence
  Description of Artificial Sequence: Synthetic oligonucleotide
ccuugcaugacaucaugaggccgga

SEQ ID NO: 75325 - RNA, 25 nt, Artificial Sequence
  Description of Artificial Sequence: Synthetic oligonucleotide
ugaauuuguauaugacugcauuugu

SEQ ID NO: 75326 - RNA, 25 nt, Artificial Sequence
  Description of Artificial Sequence: Synthetic oligonucleotide
gaauccuaguagaauguuuacuacc

SEQ ID NO: 75327 - RNA, 25 nt, Artificial Sequence
  Description of Artificial Sequence: Synthetic oligonucleotide
gaaagggaagaauuuuuugaugaaa

SEQ ID NO: 75328 - RNA, 25 nt, Artificial Sequence
  Description of Artificial Sequence: Synthetic oligonucleotide
uaucggcaugccagugugugaauuu

SEQ ID NO: 75329 - RNA, 25 nt, Artificial Sequence
  Description of Artificial Sequence: Synthetic oligonucleotide
caccucauaguagagcaauguaugu

SEQ ID NO: 75330 - RNA, 25 nt, Artificial Sequence
  Description of Artificial Sequence: Synthetic oligonucleotide
ccagaauugccaaagcacauauaua

SEQ ID NO: 75331 - RNA, 25 nt, Artificial Sequence
  Description of Artificial Sequence: Synthetic oligonucleotide
uggugaucuggguaauaguuucucc

SEQ ID NO: 75332 - RNA, 25 nt, Artificial Sequence
  Description of Artificial Sequence: Synthetic oligonucleotide
gaucuggguaauaguuucuccaaau

SEQ ID NO: 75333 - RNA, 25 nt, Artificial Sequence
  Description of Artificial Sequence: Synthetic oligonucleotide
ggaugugaugaauacuuccuagaaa

SEQ ID NO: 75334 - RNA, 25 nt, Artificial Sequence
  Description of Artificial Sequence: Synthetic oligonucleotide
cauuuccacagcuacaccauauaug

SEQ ID NO: 75335 - RNA, 25 nt, Artificial Sequence
  Description of Artificial Sequence: Synthetic oligonucleotide
acagcuacaccauauaugaauggag

SEQ ID NO: 75336 - RNA, 25 nt, Artificial Sequence
  Description of Artificial Sequence: Synthetic oligonucleotide
ugcaguucuuacacgagaagaagau

SEQ ID NO: 75337 - RNA, 25 nt, Artificial Sequence
  Description of Artificial Sequence: Synthetic oligonucleotide
acgagaagaagaucauuuacaggga

SEQ ID NO: 75338 - RNA, 25 nt, Artificial Sequence
  Description of Artificial Sequence: Synthetic oligonucleotide
cgagaagaagaucauuuacagggac

SEQ ID NO: 75339 - RNA, 25 nt, Artificial Sequence
  Description of Artificial Sequence: Synthetic oligonucleotide
aagaagaucauuuacagggaccuga

SEQ ID NO: 75340 - RNA, 25 nt, Artificial Sequence
  Description of Artificial Sequence: Synthetic oligonucleotide
agaggaagagguguuugacugcauc

SEQ ID NO: 75341 - RNA, 25 nt, Artificial Sequence
  Description of Artificial Sequence: Synthetic oligonucleotide
gaggaagagguguuugacugcaucg

SEQ ID NO: 75342 - RNA, 25 nt, Artificial Sequence
  Description of Artificial Sequence: Synthetic oligonucleotide
cuacuuugagggcgaguucacaggg

SEQ ID NO: 75343 - RNA, 25 nt, Artificial Sequence
  Description of Artificial Sequence: Synthetic oligonucleotide
agggcaucuccuggcaccucugucc

SEQ ID NO: 75344 - RNA, 25 nt, Artificial Sequence
  Description of Artificial Sequence: Synthetic oligonucleotide
ggagugauaugguuugucuuuuuaa

SEQ ID NO: 75345 - RNA, 25 nt, Artificial Sequence
  Description of Artificial Sequence: Synthetic oligonucleotide
gagugauaugguuugucuuuuuaag

SEQ ID NO: 75346 - RNA, 25 nt, Artificial Sequence
  Description of Artificial Sequence: Synthetic oligonucleotide
ugcaguaaagauccuaaagguuguc

SEQ ID NO: 75347 - RNA, 25 nt, Artificial Sequence
  Description of Artificial Sequence: Synthetic oligonucleotide
aguaaagauccuaaagguugucgac

SEQ ID NO: 75348 - RNA, 25 nt, Artificial Sequence
  Description of Artificial Sequence: Synthetic oligonucleotide
ugacaaaggacaaccuggcaauugu

SEQ ID NO: 75349 - RNA, 25 nt, Artificial Sequence
  Description of Artificial Sequence: Synthetic oligonucleotide
gcaauugugacccaguggugcgagg

SEQ ID NO: 75350 - RNA, 25 nt, Artificial Sequence
  Description of Artificial Sequence: Synthetic oligonucleotide
aacaucauccauagagacaugaaau

SEQ ID NO: 75351 - RNA, 25 nt, Artificial Sequence
  Description of Artificial Sequence: Synthetic oligonucleotide
ugaaauccaacaauauauuucucca

SEQ ID NO: 75352 - RNA, 25 nt, Artificial Sequence
  Description of Artificial Sequence: Synthetic oligonucleotide
aacaauauauuucuccaugaaggcu

SEQ ID NO: 75353 - RNA, 25 nt, Artificial Sequence
  Description of Artificial Sequence: Synthetic oligonucleotide
aacaguaaagucacgcuggaguggu

SEQ ID NO: 75354 - RNA, 25 nt, Artificial Sequence
  Description of Artificial Sequence: Synthetic oligonucleotide
ugugaagaaaguaaaggaagagagg

SEQ ID NO: 75355 - RNA, 25 nt, Artificial Sequence
  Description of Artificial Sequence: Synthetic oligonucleotide
cuuccgagccauccuugcaucgggc

SEQ ID NO: 75356 - RNA, 25 nt, Artificial Sequence
  Description of Artificial Sequence: Synthetic oligonucleotide
aauggagguugaauauccuacugug

SEQ ID NO: 75357 - RNA, 25 nt, Artificial Sequence
  Description of Artificial Sequence: Synthetic oligonucleotide
ggagguugaauauccuacuguguaa

SEQ ID NO: 75358 - RNA, 25 nt, Artificial Sequence
  Description of Artificial Sequence: Synthetic oligonucleotide
auuuugaguuuucccuuguagugua

SEQ ID NO: 75359 - RNA, 25 nt, Artificial Sequence
  Description of Artificial Sequence: Synthetic oligonucleotide
uauccuguuuguucuuuguugauug

SEQ ID NO: 75360 - RNA, 25 nt, Artificial Sequence
  Description of Artificial Sequence: Synthetic oligonucleotide
ccuguuuguucuuuguugauugaaa

SEQ ID NO: 75361 - RNA, 25 nt, Artificial Sequence
  Description of Artificial Sequence: Synthetic oligonucleotide
cucuacagccuucuuuuucuuccau

SEQ ID NO: 75362 - RNA, 25 nt, Artificial Sequence
  Description of Artificial Sequence: Synthetic oligonucleotide
ucuuccauagcuaaucuuccuucua

SEQ ID NO: 75363 - RNA, 25 nt, Artificial Sequence
  Description of Artificial Sequence: Synthetic oligonucleotide
auaaucuuccuguugaaugcuucau

SEQ ID NO: 75364 - RNA, 25 nt, Artificial Sequence
  Description of Artificial Sequence: Synthetic oligonucleotide
uaaucuuccuguugaaugcuucaug

SEQ ID NO: 75365 - RNA, 25 nt, Artificial Sequence
  Description of Artificial Sequence: Synthetic oligonucleotide
cuucaugacuugaauucuacuuuga

SEQ ID NO: 75366 - RNA, 25 nt, Artificial Sequence
  Description of Artificial Sequence: Synthetic oligonucleotide
aagagggagagaagcaacuacagac

SEQ ID NO: 75367 - RNA, 25 nt, Artificial Sequence
  Description of Artificial Sequence: Synthetic oligonucleotide
cgucuccuaccagaccaaggucaac

SEQ ID NO: 75368 - RNA, 25 nt, Artificial Sequence
  Description of Artificial Sequence: Synthetic oligonucleotide
gaucaaucggcccgacuaucucgac

SEQ ID NO: 75369 - RNA, 25 nt, Artificial Sequence
  Description of Artificial Sequence: Synthetic oligonucleotide
ggacgaacauccaaccuucccaaac

SEQ ID NO: 75370 - RNA, 25 nt, Artificial Sequence
  Description of Artificial Sequence: Synthetic oligonucleotide
agggucggaacccaagcuuagaacu

SEQ ID NO: 75371 - RNA, 25 nt, Artificial Sequence
  Description of Artificial Sequence: Synthetic oligonucleotide
ucggaacccaagcuuagaacuuuaa

SEQ ID NO: 75372 - RNA, 25 nt, Artificial Sequence
  Description of Artificial Sequence: Synthetic oligonucleotide
acccaagcuuagaacuuuaagcaac

SEQ ID NO: 75373 - RNA, 25 nt, Artificial Sequence
  Description of Artificial Sequence: Synthetic oligonucleotide
gaacuuuaagcaacaagaccaccac

SEQ ID NO: 75374 - RNA, 25 nt, Artificial Sequence
  Description of Artificial Sequence: Synthetic oligonucleotide
acuauucaguggcgagaaauaaagu

SEQ ID NO: 75375 - RNA, 25 nt, Artificial Sequence
  Description of Artificial Sequence: Synthetic oligonucleotide
cuauucaguggcgagaaauaaaguu

SEQ ID NO: 75376 - RNA, 25 nt, Artificial Sequence
  Description of Artificial Sequence: Synthetic oligonucleotide
aaacacagauaacaggaaaugaucc

SEQ ID NO: 75377 - RNA, 25 nt, Artificial Sequence
  Description of Artificial Sequence: Synthetic oligonucleotide
cuuaagaaaagagaagaaaugaaac

SEQ ID NO: 75378 - RNA, 25 nt, Artificial Sequence
  Description of Artificial Sequence: Synthetic oligonucleotide
cugaaggaguguguuuccauccucc

SEQ ID NO: 75379 - RNA, 25 nt, Artificial Sequence
  Description of Artificial Sequence: Synthetic oligonucleotide
ucaccgcgggacugaaaaucuuuga

SEQ ID NO: 75380 - RNA, 25 nt, Artificial Sequence
  Description of Artificial Sequence: Synthetic oligonucleotide
agcagaaauaagcgugccguucagg

SEQ ID NO: 75381 - RNA, 25 nt, Artificial Sequence
  Description of Artificial Sequence: Synthetic oligonucleotide
aagcgugccguucaggguccagaag

SEQ ID NO: 75382 - RNA, 25 nt, Artificial Sequence
  Description of Artificial Sequence: Synthetic oligonucleotide
agaaacagucacucaagacugcuug

SEQ ID NO: 75383 - RNA, 25 nt, Artificial Sequence
  Description of Artificial Sequence: Synthetic oligonucleotide
agaggaagaagguccaugucuuugg

SEQ ID NO: 75384 - RNA, 25 nt, Artificial Sequence
  Description of Artificial Sequence: Synthetic oligonucleotide
uguauucaaaauaugccugaaacac

SEQ ID NO: 75385 - RNA, 25 nt, Artificial Sequence
  Description of Artificial Sequence: Synthetic oligonucleotide
auuuuccucccuuucucuguaccuc

SEQ ID NO: 75386 - RNA, 25 nt, Artificial Sequence
  Description of Artificial Sequence: Synthetic oligonucleotide
caaagaaagauagagcaagacaaga

SEQ ID NO: 75387 - RNA, 25 nt, Artificial Sequence
  Description of Artificial Sequence: Synthetic oligonucleotide
aagaaagauagagcaagacaagaaa

SEQ ID NO: 75388 - RNA, 25 nt, Artificial Sequence
  Description of Artificial Sequence: Synthetic oligonucleotide
gaaagcauuuguuuguacaagaucc

SEQ ID NO: 75389 - RNA, 25 nt, Artificial Sequence
  Description of Artificial Sequence: Synthetic oligonucleotide
ugaguuaaacgaacguacuugcaga

SEQ ID NO: 75390 - RNA, 25 nt, Artificial Sequence
  Description of Artificial Sequence: Synthetic oligonucleotide
acugauacagaacgaucgauacaga

SEQ ID NO: 75391 - RNA, 25 nt, Artificial Sequence
  Description of Artificial Sequence: Synthetic oligonucleotide
auauuauauauauauaaaaauaaau

SEQ ID NO: 75392 - RNA, 25 nt, Artificial Sequence
  Description of Artificial Sequence: Synthetic oligonucleotide
auuauauauauauaaaaauaaauau

SEQ ID NO: 75393 - RNA, 25 nt, Artificial Sequence
  Description of Artificial Sequence: Synthetic oligonucleotide
ucacuggauguauuugacugcugug

SEQ ID NO: 75394 - RNA, 25 nt, Artificial Sequence
  Description of Artificial Sequence: Synthetic oligonucleotide
cagggaagaggaggagaugagagac

SEQ ID NO: 75395 - RNA, 25 nt, Artificial Sequence
  Description of Artificial Sequence: Synthetic oligonucleotide
augaucuuuuuuuugucccacuugg

SEQ ID NO: 75396 - RNA, 27 nt, Artificial Sequence
  Description of Artificial Sequence: Synthetic oligonucleotide
ggccgugaacuccucaucaaaauaccu

SEQ ID NO: 75397 - RNA, 27 nt, Artificial Sequence
  Description of Artificial Sequence: Synthetic oligonucleotide
uggugugauggugaucaucugggccgu

SEQ ID NO: 75398 - RNA, 27 nt, Artificial Sequence
  Description of Artificial Sequence: Synthetic oligonucleotide
aaacccgcaggauaguuuucuucccua

SEQ ID NO: 75399 - RNA, 27 nt, Artificial Sequence
  Description of Artificial Sequence: Synthetic oligonucleotide
caaacuggaugaaauaaauuaaaaccc

SEQ ID NO: 75400 - RNA, 27 nt, Artificial Sequence
  Description of Artificial Sequence: Synthetic oligonucleotide
agaaguccuuaacauuucccuacguga

SEQ ID NO: 75401 - RNA, 27 nt, Artificial Sequence
  Description of Artificial Sequence: Synthetic oligonucleotide
cucugucccacuggguaaacccuggcc

SEQ ID NO: 75402 - RNA, 27 nt, Artificial Sequence
  Description of Artificial Sequence: Synthetic oligonucleotide
cacaauaacaaauuuaaaccuugcucc

SEQ ID NO: 75403 - RNA, 27 nt, Artificial Sequence
  Description of Artificial Sequence: Synthetic oligonucleotide
aaaugcauuugaacaacauaauacaca

SEQ ID NO: 75404 - RNA, 27 nt, Artificial Sequence
  Description of Artificial Sequence: Synthetic oligonucleotide
ggcuuuccugucacaaagauuaaaaac

SEQ ID NO: 75405 - RNA, 27 nt, Artificial Sequence
  Description of Artificial Sequence: Synthetic oligonucleotide
agggcuuuccugucacaaagauuaaaa

SEQ ID NO: 75406 - RNA, 27 nt, Artificial Sequence
  Description of Artificial Sequence: Synthetic oligonucleotide
ggccaugcugggagacauaagcagcag

SEQ ID NO: 75407 - RNA, 27 nt, Artificial Sequence
  Description of Artificial Sequence: Synthetic oligonucleotide
ucagggagaagcuucugaaacacuucu

SEQ ID NO: 75408 - RNA, 27 nt, Artificial Sequence
  Description of Artificial Sequence: Synthetic oligonucleotide
aagggcuucuuccuuauugauggucag

SEQ ID NO: 75409 - RNA, 27 nt, Artificial Sequence
  Description of Artificial Sequence: Synthetic oligonucleotide
ugaagggcuucuuccuuauugaugguc

SEQ ID NO: 75410 - RNA, 27 nt, Artificial Sequence
  Description of Artificial Sequence: Synthetic oligonucleotide
cgcugaagggcuucuuccuuauugaug

SEQ ID NO: 75411 - RNA, 27 nt, Artificial Sequence
  Description of Artificial Sequence: Synthetic oligonucleotide
gccgcugaagggcuucuuccuuauuga

SEQ ID NO: 75412 - RNA, 27 nt, Artificial Sequence
  Description of Artificial Sequence: Synthetic oligonucleotide
acuggccgcugaagggcuucuuccuua

SEQ ID NO: 75413 - RNA, 27 nt, Artificial Sequence
  Description of Artificial Sequence: Synthetic oligonucleotide
cggagcuuuucaccuuuaguuaugcuu

SEQ ID NO: 75414 - RNA, 27 nt, Artificial Sequence
  Description of Artificial Sequence: Synthetic oligonucleotide
ccggagcuuuucaccuuuaguuaugcu

SEQ ID NO: 75415 - RNA, 27 nt, Artificial Sequence
  Description of Artificial Sequence: Synthetic oligonucleotide
cagacuguugacuggcgugauguaguu

SEQ ID NO: 75416 - RNA, 27 nt, Artificial Sequence
  Description of Artificial Sequence: Synthetic oligonucleotide
cuuuugaacucugcuuaaauccagugg

SEQ ID NO: 75417 - RNA, 27 nt, Artificial Sequence
  Description of Artificial Sequence: Synthetic oligonucleotide
gcuuuugaacucugcuuaaauccagug

SEQ ID NO: 75418 - RNA, 27 nt, Artificial Sequence
  Description of Artificial Sequence: Synthetic oligonucleotide
agggcuuuugaacucugcuuaaaucca

SEQ ID NO: 75419 - RNA, 27 nt, Artificial Sequence
  Description of Artificial Sequence: Synthetic oligonucleotide
aagggcuuuugaacucugcuuaaaucc

SEQ ID NO: 75420 - RNA, 27 nt, Artificial Sequence
  Description of Artificial Sequence: Synthetic oligonucleotide
ugaagggcuuuugaacucugcuuaaau

SEQ ID NO: 75421 - RNA, 27 nt, Artificial Sequence
  Description of Artificial Sequence: Synthetic oligonucleotide
cugaagggcuuuugaacucugcuuaaa

SEQ ID NO: 75422 - RNA, 27 nt, Artificial Sequence
  Description of Artificial Sequence: Synthetic oligonucleotide
cgcugaagggcuuuugaacucugcuua

SEQ ID NO: 75423 - RNA, 27 nt, Artificial Sequence
  Description of Artificial Sequence: Synthetic oligonucleotide
cgagcggcuucacucagacccugaggc

SEQ ID NO: 75424 - RNA, 27 nt, Artificial Sequence
  Description of Artificial Sequence: Synthetic oligonucleotide
uugacuggcgugauguaguugcuuggg

SEQ ID NO: 75425 - RNA, 27 nt, Artificial Sequence
  Description of Artificial Sequence: Synthetic oligonucleotide
cacgcaccaagaagcugccauugaucc

SEQ ID NO: 75426 - RNA, 27 nt, Artificial Sequence
  Description of Artificial Sequence: Synthetic oligonucleotide
cugaugaauccaaugugggcuggaauc

SEQ ID NO: 75427 - RNA, 27 nt, Artificial Sequence
  Description of Artificial Sequence: Synthetic oligonucleotide
cuuagguauuccacauucucagcugug

SEQ ID NO: 75428 - RNA, 27 nt, Artificial Sequence
  Description of Artificial Sequence: Synthetic oligonucleotide
ugagccucaaauuaggagauacguuuu

SEQ ID NO: 75429 - RNA, 27 nt, Artificial Sequence
  Description of Artificial Sequence: Synthetic oligonucleotide
ccaauuguagagaaauuauuuuaggaa

SEQ ID NO: 75430 - RNA, 27 nt, Artificial Sequence
  Description of Artificial Sequence: Synthetic oligonucleotide
ggcuccuaacuagcugaaucuuccaau

SEQ ID NO: 75431 - RNA, 27 nt, Artificial Sequence
  Description of Artificial Sequence: Synthetic oligonucleotide
guggauauugacuaggagaguuuaaaa

SEQ ID NO: 75432 - RNA, 27 nt, Artificial Sequence
  Description of Artificial Sequence: Synthetic oligonucleotide
ugugacugaacauaacuguaggcugaa

SEQ ID NO: 75433 - RNA, 27 nt, Artificial Sequence
  Description of Artificial Sequence: Synthetic oligonucleotide
guaugugugugugacugaacauaacug

SEQ ID NO: 75434 - RNA, 27 nt, Artificial Sequence
  Description of Artificial Sequence: Synthetic oligonucleotide
aagcaaaaggaacauuuuguaugugug

SEQ ID NO: 75435 - RNA, 27 nt, Artificial Sequence
  Description of Artificial Sequence: Synthetic oligonucleotide
aaaaauuacuuuaaaagcaaaaggaac

SEQ ID NO: 75436 - RNA, 27 nt, Artificial Sequence
  Description of Artificial Sequence: Synthetic oligonucleotide
ccauugacuguugcuucacaggucaga

SEQ ID NO: 75437 - RNA, 27 nt, Artificial Sequence
  Description of Artificial Sequence: Synthetic oligonucleotide
auugguuugucgaugugugagauaguu

SEQ ID NO: 75438 - RNA, 27 nt, Artificial Sequence
  Description of Artificial Sequence: Synthetic oligonucleotide
agugguagcaguacaauugaggacaag

SEQ ID NO: 75439 - RNA, 27 nt, Artificial Sequence
  Description of Artificial Sequence: Synthetic oligonucleotide
uaagaccgcuugccagcuacgguuuca

SEQ ID NO: 75440 - RNA, 27 nt, Artificial Sequence
  Description of Artificial Sequence: Synthetic oligonucleotide
agccgguaagaccgcuugccagcuacg

SEQ ID NO: 75441 - RNA, 27 nt, Artificial Sequence
  Description of Artificial Sequence: Synthetic oligonucleotide
gguaacccaucuuuuaaccauacaacu

SEQ ID NO: 75442 - RNA, 27 nt, Artificial Sequence
  Description of Artificial Sequence: Synthetic oligonucleotide
ucgcagguaacccaucuuuuaaccaua

SEQ ID NO: 75443 - RNA, 27 nt, Artificial Sequence
  Description of Artificial Sequence: Synthetic oligonucleotide
cucagcaagauuguauaauucccugca

SEQ ID NO: 75444 - RNA, 27 nt, Artificial Sequence
  Description of Artificial Sequence: Synthetic oligonucleotide
acuguuuuaugcucagcaagauuguau

SEQ ID NO: 75445 - RNA, 27 nt, Artificial Sequence
  Description of Artificial Sequence: Synthetic oligonucleotide
aggauaaaggacucuucauuauuggaa

SEQ ID NO: 75446 - RNA, 27 nt, Artificial Sequence
  Description of Artificial Sequence: Synthetic oligonucleotide
caacuugcguuggaacauccaaagugu

SEQ ID NO: 75447 - RNA, 27 nt, Artificial Sequence
  Description of Artificial Sequence: Synthetic oligonucleotide
augguuucaguuuaguggaagcauuua

SEQ ID NO: 75448 - RNA, 27 nt, Artificial Sequence
  Description of Artificial Sequence: Synthetic oligonucleotide
auauuuaacaaagucaaacuuucucac

SEQ ID NO: 75449 - RNA, 27 nt, Artificial Sequence
  Description of Artificial Sequence: Synthetic oligonucleotide
aacuuuuaauauacaguaguucuuuuc

SEQ ID NO: 75450 - RNA, 27 nt, Artificial Sequence
  Description of Artificial Sequence: Synthetic oligonucleotide
guuaagucaaaacccguauuucuaaag

SEQ ID NO: 75451 - RNA, 27 nt, Artificial Sequence
  Description of Artificial Sequence: Synthetic oligonucleotide
gugcugaguuugcuguacccauguuga

SEQ ID NO: 75452 - RNA, 27 nt, Artificial Sequence
  Description of Artificial Sequence: Synthetic oligonucleotide
ugaggucagcaucuucugugucuuuac

SEQ ID NO: 75453 - RNA, 27 nt, Artificial Sequence
  Description of Artificial Sequence: Synthetic oligonucleotide
gcgaucugaauaaaccucccuacuagc

SEQ ID NO: 75454 - RNA, 27 nt, Artificial Sequence
  Description of Artificial Sequence: Synthetic oligonucleotide
aucccagaacccugcugcagaaggcca

SEQ ID NO: 75455 - RNA, 27 nt, Artificial Sequence
  Description of Artificial Sequence: Synthetic oligonucleotide
cauaauuuccaauauguaccagaccuu

SEQ ID NO: 75456 - RNA, 27 nt, Artificial Sequence
  Description of Artificial Sequence: Synthetic oligonucleotide
cuagugcuuccaucggaaggacuaggu

SEQ ID NO: 75457 - RNA, 27 nt, Artificial Sequence
  Description of Artificial Sequence: Synthetic oligonucleotide
uccacauaaaaacaauauucacuggga

SEQ ID NO: 75458 - RNA, 27 nt, Artificial Sequence
  Description of Artificial Sequence: Synthetic oligonucleotide
ucuaccaauuccaacuugaauucauug

SEQ ID NO: 75459 - RNA, 27 nt, Artificial Sequence
  Description of Artificial Sequence: Synthetic oligonucleotide
ucuccaagucuaaaucuguguccugag

SEQ ID NO: 75460 - RNA, 27 nt, Artificial Sequence
  Description of Artificial Sequence: Synthetic oligonucleotide
uggaauacuguaacugugcuuugagga

SEQ ID NO: 75461 - RNA, 27 nt, Artificial Sequence
  Description of Artificial Sequence: Synthetic oligonucleotide
uuaauucaucagugguggcagugguag

SEQ ID NO: 75462 - RNA, 27 nt, Artificial Sequence
  Description of Artificial Sequence: Synthetic oligonucleotide
gugaugauguggcacuaguaguuucuu

SEQ ID NO: 75463 - RNA, 27 nt, Artificial Sequence
  Description of Artificial Sequence: Synthetic oligonucleotide
ucuguuuggugaggcuguccgacuuug

SEQ ID NO: 75464 - RNA, 27 nt, Artificial Sequence
  Description of Artificial Sequence: Synthetic oligonucleotide
ccaucauguuccauuuuucgcuuucuc

SEQ ID NO: 75465 - RNA, 27 nt, Artificial Sequence
  Description of Artificial Sequence: Synthetic oligonucleotide
gcagucuacaugcuaaaucagagggua

SEQ ID NO: 75466 - RNA, 27 nt, Artificial Sequence
  Description of Artificial Sequence: Synthetic oligonucleotide
cauaaauagauccuuaaauagcucaaa

SEQ ID NO: 75467 - RNA, 27 nt, Artificial Sequence
  Description of Artificial Sequence: Synthetic oligonucleotide
ugauaauagugcuuuuucaccuuuuuc

SEQ ID NO: 75468 - RNA, 27 nt, Artificial Sequence
  Description of Artificial Sequence: Synthetic oligonucleotide
gcagaacugauaauagugcuuuuucac

SEQ ID NO: 75469 - RNA, 27 nt, Artificial Sequence
  Description of Artificial Sequence: Synthetic oligonucleotide
guagguuuaaucuuucuuuucagccau

SEQ ID NO: 75470 - RNA, 27 nt, Artificial Sequence
  Description of Artificial Sequence: Synthetic oligonucleotide
agaaggauuuuauuauaaggguuuaau

SEQ ID NO: 75471 - RNA, 27 nt, Artificial Sequence
  Description of Artificial Sequence: Synthetic oligonucleotide
gucuacagcauuggcuaauaguaugaa

SEQ ID NO: 75472 - RNA, 27 nt, Artificial Sequence
  Description of Artificial Sequence: Synthetic oligonucleotide
cuauuccuaucaaaaugcuucugucua

SEQ ID NO: 75473 - RNA, 27 nt, Artificial Sequence
  Description of Artificial Sequence: Synthetic oligonucleotide
ucagggccauuaucuuauuugcucuau

SEQ ID NO: 75474 - RNA, 27 nt, Artificial Sequence
  Description of Artificial Sequence: Synthetic oligonucleotide
ugcuugaggaagagaaaaauguugguc

SEQ ID NO: 75475 - RNA, 27 nt, Artificial Sequence
  Description of Artificial Sequence: Synthetic oligonucleotide
ugggcugaacuuuucucauacuuaaag

SEQ ID NO: 75476 - RNA, 27 nt, Artificial Sequence
  Description of Artificial Sequence: Synthetic oligonucleotide
gguucagcagccaucuuuauuccugcg

SEQ ID NO: 75477 - RNA, 27 nt, Artificial Sequence
  Description of Artificial Sequence: Synthetic oligonucleotide
ugaagagaacuuggucauucaaauuuc

SEQ ID NO: 75478 - RNA, 27 nt, Artificial Sequence
  Description of Artificial Sequence: Synthetic oligonucleotide
cucuaggcuggcuaucuuuauacauac

SEQ ID NO: 75479 - RNA, 27 nt, Artificial Sequence
  Description of Artificial Sequence: Synthetic oligonucleotide
acacuucacagagauaguuacagccau

SEQ ID NO: 75480 - RNA, 27 nt, Artificial Sequence
  Description of Artificial Sequence: Synthetic oligonucleotide
uugaaauuuucucacacuucacagaga

SEQ ID NO: 75481 - RNA, 27 nt, Artificial Sequence
  Description of Artificial Sequence: Synthetic oligonucleotide
ucaggaggauucauuuccuuaaaggaa

SEQ ID NO: 75482 - RNA, 27 nt, Artificial Sequence
  Description of Artificial Sequence: Synthetic oligonucleotide
auaugaugucacuuuuuguauccuuga

SEQ ID NO: 75483 - RNA, 27 nt, Artificial Sequence
  Description of Artificial Sequence: Synthetic oligonucleotide
uaugaugaagauucaaauugcaucuua

SEQ ID NO: 75484 - RNA, 27 nt, Artificial Sequence
  Description of Artificial Sequence: Synthetic oligonucleotide
uuaauagcuagucuucguuuugaacag

SEQ ID NO: 75485 - RNA, 27 nt, Artificial Sequence
  Description of Artificial Sequence: Synthetic oligonucleotide
auuuuuaguagagaugagguuucacca

SEQ ID NO: 75486 - RNA, 27 nt, Artificial Sequence
  Description of Artificial Sequence: Synthetic oligonucleotide
aggcgagauagagcuucucuuucguuc

SEQ ID NO: 75487 - RNA, 27 nt, Artificial Sequence
  Description of Artificial Sequence: Synthetic oligonucleotide
aacuggaccgaaggcgcuuguggagaa

SEQ ID NO: 75488 - RNA, 27 nt, Artificial Sequence
  Description of Artificial Sequence: Synthetic oligonucleotide
gcggcuacaucuuuggaaucuucuccu

SEQ ID NO: 75489 - RNA, 27 nt, Artificial Sequence
  Description of Artificial Sequence: Synthetic oligonucleotide
caagucuccucauugaauccagauugg

SEQ ID NO: 75490 - RNA, 27 nt, Artificial Sequence
  Description of Artificial Sequence: Synthetic oligonucleotide
uccucacuacucucaaaucuguucugg

SEQ ID NO: 75491 - RNA, 27 nt, Artificial Sequence
  Description of Artificial Sequence: Synthetic oligonucleotide
uuuguacucaucugcacagcucuggcu

SEQ ID NO: 75492 - RNA, 27 nt, Artificial Sequence
  Description of Artificial Sequence: Synthetic oligonucleotide
gcccauuaacaacaacaaucugaggug

SEQ ID NO: 75493 - RNA, 27 nt, Artificial Sequence
  Description of Artificial Sequence: Synthetic oligonucleotide
aauaaauuaaaaauaauuaaaauagug

SEQ ID NO: 75494 - RNA, 27 nt, Artificial Sequence
  Description of Artificial Sequence: Synthetic oligonucleotide
cauauuuaaauauuaauaaauuaaaaa

SEQ ID NO: 75495 - RNA, 27 nt, Artificial Sequence
  Description of Artificial Sequence: Synthetic oligonucleotide
gaaacaaaggauauucaaacugcauag

SEQ ID NO: 75496 - RNA, 27 nt, Artificial Sequence
  Description of Artificial Sequence: Synthetic oligonucleotide
caaacacuuagacgccagcagcauggg

SEQ ID NO: 75497 - RNA, 27 nt, Artificial Sequence
  Description of Artificial Sequence: Synthetic oligonucleotide
uuugucacaggugaaaugcacaucuga

SEQ ID NO: 75498 - RNA, 27 nt, Artificial Sequence
  Description of Artificial Sequence: Synthetic oligonucleotide
uaauucagccuggcacagguuuugauc

SEQ ID NO: 75499 - RNA, 27 nt, Artificial Sequence
  Description of Artificial Sequence: Synthetic oligonucleotide
auuguaagaaugacuacccacauucac

SEQ ID NO: 75500 - RNA, 27 nt, Artificial Sequence
  Description of Artificial Sequence: Synthetic oligonucleotide
caauuguaagaaugacuacccacauuc

SEQ ID NO: 75501 - RNA, 27 nt, Artificial Sequence
  Description of Artificial Sequence: Synthetic oligonucleotide
guacacucucugaugcucauuuucaua

SEQ ID NO: 75502 - RNA, 27 nt, Artificial Sequence
  Description of Artificial Sequence: Synthetic oligonucleotide
cugcugaguucuacaugaaaagcaaau

SEQ ID NO: 75503 - RNA, 27 nt, Artificial Sequence
  Description of Artificial Sequence: Synthetic oligonucleotide
uacugaaaauaaauauagaaauacaac

SEQ ID NO: 75504 - RNA, 27 nt, Artificial Sequence
  Description of Artificial Sequence: Synthetic oligonucleotide
uuccauuuaagaaacauuaaucaaaac

SEQ ID NO: 75505 - RNA, 27 nt, Artificial Sequence
  Description of Artificial Sequence: Synthetic oligonucleotide
acaauuuuaggcacuauacacguuguu

SEQ ID NO: 75506 - RNA, 27 nt, Artificial Sequence
  Description of Artificial Sequence: Synthetic oligonucleotide
ccagauguuaguagccaaggauauggu

SEQ ID NO: 75507 - RNA, 27 nt, Artificial Sequence
  Description of Artificial Sequence: Synthetic oligonucleotide
agcucacagucuccagauguuaguagc

SEQ ID NO: 75508 - RNA, 27 nt, Artificial Sequence
  Description of Artificial Sequence: Synthetic oligonucleotide
auuaauaaaaagcacacaacuuauggc

SEQ ID NO: 75509 - RNA, 27 nt, Artificial Sequence
  Description of Artificial Sequence: Synthetic oligonucleotide
aauguaagaagagccaaaaugaugcau

SEQ ID NO: 75510 - RNA, 27 nt, Artificial Sequence
  Description of Artificial Sequence: Synthetic oligonucleotide
acauuuuuacaaauguaagaagagcca

SEQ ID NO: 75511 - RNA, 27 nt, Artificial Sequence
  Description of Artificial Sequence: Synthetic oligonucleotide
aauaugaauuaagaugaccuaaucugu

SEQ ID NO: 75512 - RNA, 27 nt, Artificial Sequence
  Description of Artificial Sequence: Synthetic oligonucleotide
ucaugauuaguucuuucaauuccaucc

SEQ ID NO: 75513 - RNA, 27 nt, Artificial Sequence
  Description of Artificial Sequence: Synthetic oligonucleotide
cccaagagcagaaggaaugagugugca

SEQ ID NO: 75514 - RNA, 27 nt, Artificial Sequence
  Description of Artificial Sequence: Synthetic oligonucleotide
cucaaagcuacugguuaccucuacacc

SEQ ID NO: 75515 - RNA, 27 nt, Artificial Sequence
  Description of Artificial Sequence: Synthetic oligonucleotide
ugaaauauuacguggcaugugguuggg

SEQ ID NO: 75516 - RNA, 27 nt, Artificial Sequence
  Description of Artificial Sequence: Synthetic oligonucleotide
agugaagagaauaacuuguuuccgaag

SEQ ID NO: 75517 - RNA, 27 nt, Artificial Sequence
  Description of Artificial Sequence: Synthetic oligonucleotide
uuucuuagcauuaguuauugggaguga

SEQ ID NO: 75518 - RNA, 27 nt, Artificial Sequence
  Description of Artificial Sequence: Synthetic oligonucleotide
uugauuuucagcauuucuuagcauuag

SEQ ID NO: 75519 - RNA, 27 nt, Artificial Sequence
  Description of Artificial Sequence: Synthetic oligonucleotide
aaaguaaucauauuuagagaaagacag

SEQ ID NO: 75520 - RNA, 27 nt, Artificial Sequence
  Description of Artificial Sequence: Synthetic oligonucleotide
uguagaacaaaaugccugaaauucagc

SEQ ID NO: 75521 - RNA, 27 nt, Artificial Sequence
  Description of Artificial Sequence: Synthetic oligonucleotide
gagagucccgggugagagggaaucgcc

SEQ ID NO: 75522 - RNA, 27 nt, Artificial Sequence
  Description of Artificial Sequence: Synthetic oligonucleotide
cuuuacuuuaaagguucacuuuccuug

SEQ ID NO: 75523 - RNA, 27 nt, Artificial Sequence
  Description of Artificial Sequence: Synthetic oligonucleotide
ccaggcuuccagagcaugcagccuccu

SEQ ID NO: 75524 - RNA, 27 nt, Artificial Sequence
  Description of Artificial Sequence: Synthetic oligonucleotide
cucucuuuuguuuucuguucagagaaa

SEQ ID NO: 75525 - RNA, 27 nt, Artificial Sequence
  Description of Artificial Sequence: Synthetic oligonucleotide
cggcauaacugauuacagccaaguuca

SEQ ID NO: 75526 - RNA, 27 nt, Artificial Sequence
  Description of Artificial Sequence: Synthetic oligonucleotide
uggacuucuuuuaauuuuggcuucuuc

SEQ ID NO: 75527 - RNA, 27 nt, Artificial Sequence
  Description of Artificial Sequence: Synthetic oligonucleotide
uaaccucaccuggacuucuuuuaauuu

SEQ ID NO: 75528 - RNA, 27 nt, Artificial Sequence
  Description of Artificial Sequence: Synthetic oligonucleotide
guccucuucccgauaauccggauucag

SEQ ID NO: 75529 - RNA, 27 nt, Artificial Sequence
  Description of Artificial Sequence: Synthetic oligonucleotide
acaauacuugcuuugaugucacauuaa

SEQ ID NO: 75530 - RNA, 27 nt, Artificial Sequence
  Description of Artificial Sequence: Synthetic oligonucleotide
gagugcuacaauacuugcuuugauguc

SEQ ID NO: 75531 - RNA, 27 nt, Artificial Sequence
  Description of Artificial Sequence: Synthetic oligonucleotide
auuugugguuuuguuuucucucucucu

SEQ ID NO: 75532 - RNA, 27 nt, Artificial Sequence
  Description of Artificial Sequence: Synthetic oligonucleotide
uguaugggcuuaaauacuacagcgagg

SEQ ID NO: 75533 - RNA, 27 nt, Artificial Sequence
  Description of Artificial Sequence: Synthetic oligonucleotide
cuguaugggcuuaaauacuacagcgag

SEQ ID NO: 75534 - RNA, 27 nt, Artificial Sequence
  Description of Artificial Sequence: Synthetic oligonucleotide
ggaagguuucuguaugggcuuaaauac

SEQ ID NO: 75535 - RNA, 27 nt, Artificial Sequence
  Description of Artificial Sequence: Synthetic oligonucleotide
guagguauaccauguuuauuuuaauac

SEQ ID NO: 75536 - RNA, 27 nt, Artificial Sequence
  Description of Artificial Sequence: Synthetic oligonucleotide
uccgaaaacuggccgaucagaacagcc

SEQ ID NO: 75537 - RNA, 27 nt, Artificial Sequence
  Description of Artificial Sequence: Synthetic oligonucleotide
cccuguuccaaaguucaaauuauuugu

SEQ ID NO: 75538 - RNA, 27 nt, Artificial Sequence
  Description of Artificial Sequence: Synthetic oligonucleotide
acuggaaaguuaaauuaaggucgcaau

SEQ ID NO: 75539 - RNA, 27 nt, Artificial Sequence
  Description of Artificial Sequence: Synthetic oligonucleotide
caaaaccaaacuuuagcuuucucagcc

SEQ ID NO: 75540 - RNA, 27 nt, Artificial Sequence
  Description of Artificial Sequence: Synthetic oligonucleotide
uacagugggaaguagcaucuuuacuuu

SEQ ID NO: 75541 - RNA, 27 nt, Artificial Sequence
  Description of Artificial Sequence: Synthetic oligonucleotide
ucauaugguaucagcaauuaagcagua

SEQ ID NO: 75542 - RNA, 27 nt, Artificial Sequence
  Description of Artificial Sequence: Synthetic oligonucleotide
cagcccauguuucauucauaugguauc

SEQ ID NO: 75543 - RNA, 27 nt, Artificial Sequence
  Description of Artificial Sequence: Synthetic oligonucleotide
uaugaaaaaguuggauaagaaaguugg

SEQ ID NO: 75544 - RNA, 27 nt, Artificial Sequence
  Description of Artificial Sequence: Synthetic oligonucleotide
uccggccucaugaugucaugcaaggcu

SEQ ID NO: 75545 - RNA, 27 nt, Artificial Sequence
  Description of Artificial Sequence: Synthetic oligonucleotide
acaaaugcagucauauacaaauucagg

SEQ ID NO: 75546 - RNA, 27 nt, Artificial Sequence
  Description of Artificial Sequence: Synthetic oligonucleotide
gguaguaaacauucuacuaggauucuu

SEQ ID NO: 75547 - RNA, 27 nt, Artificial Sequence
  Description of Artificial Sequence: Synthetic oligonucleotide
uuucaucaaaaaauucuucccuuucug

SEQ ID NO: 75548 - RNA, 27 nt, Artificial Sequence
  Description of Artificial Sequence: Synthetic oligonucleotide
aaauucacacacuggcaugccgauagc

SEQ ID NO: 75549 - RNA, 27 nt, Artificial Sequence
  Description of Artificial Sequence: Synthetic oligonucleotide
acauacauugcucuacuaugaggugaa

SEQ ID NO: 75550 - RNA, 27 nt, Artificial Sequence
  Description of Artificial Sequence: Synthetic oligonucleotide
uauauaugugcuuuggcaauucuggug

SEQ ID NO: 75551 - RNA, 27 nt, Artificial Sequence
  Description of Artificial Sequence: Synthetic oligonucleotide
ggagaaacuauuacccagaucaccacu

SEQ ID NO: 75552 - RNA, 27 nt, Artificial Sequence
  Description of Artificial Sequence: Synthetic oligonucleotide
auuuggagaaacuauuacccagaucac

SEQ ID NO: 75553 - RNA, 27 nt, Artificial Sequence
  Description of Artificial Sequence: Synthetic oligonucleotide
uuucuaggaaguauucaucacauccac

SEQ ID NO: 75554 - RNA, 27 nt, Artificial Sequence
  Description of Artificial Sequence: Synthetic oligonucleotide
cauauaugguguagcuguggaaaugcg

SEQ ID NO: 75555 - RNA, 27 nt, Artificial Sequence
  Description of Artificial Sequence: Synthetic oligonucleotide
cuccauucauauaugguguagcugugg

SEQ ID NO: 75556 - RNA, 27 nt, Artificial Sequence
  Description of Artificial Sequence: Synthetic oligonucleotide
aucuucuucucguguaagaacugcagc

SEQ ID NO: 75557 - RNA, 27 nt, Artificial Sequence
  Description of Artificial Sequence: Synthetic oligonucleotide
ucccuguaaaugaucuucuucucgugu

SEQ ID NO: 75558 - RNA, 27 nt, Artificial Sequence
  Description of Artificial Sequence: Synthetic oligonucleotide
gucccuguaaaugaucuucuucucgug

SEQ ID NO: 75559 - RNA, 27 nt, Artificial Sequence
  Description of Artificial Sequence: Synthetic oligonucleotide
ucaggucccuguaaaugaucuucuucu

SEQ ID NO: 75560 - RNA, 27 nt, Artificial Sequence
  Description of Artificial Sequence: Synthetic oligonucleotide
gaugcagucaaacaccucuuccucugu

SEQ ID NO: 75561 - RNA, 27 nt, Artificial Sequence
  Description of Artificial Sequence: Synthetic oligonucleotide
cgaugcagucaaacaccucuuccucug

SEQ ID NO: 75562 - RNA, 27 nt, Artificial Sequence
  Description of Artificial Sequence: Synthetic oligonucleotide
cccugugaacucgcccucaaaguagcg

SEQ ID NO: 75563 - RNA, 27 nt, Artificial Sequence
  Description of Artificial Sequence: Synthetic oligonucleotide
ggacagaggugccaggagaugcccuca

SEQ ID NO: 75564 - RNA, 27 nt, Artificial Sequence
  Description of Artificial Sequence: Synthetic oligonucleotide
uuaaaaagacaaaccauaucacuccuu

SEQ ID NO: 75565 - RNA, 27 nt, Artificial Sequence
  Description of Artificial Sequence: Synthetic oligonucleotide
cuuaaaaagacaaaccauaucacuccu

SEQ ID NO: 75566 - RNA, 27 nt, Artificial Sequence
  Description of Artificial Sequence: Synthetic oligonucleotide
gacaaccuuuaggaucuuuacugcaac

SEQ ID NO: 75567 - RNA, 27 nt, Artificial Sequence
  Description of Artificial Sequence: Synthetic oligonucleotide
gucgacaaccuuuaggaucuuuacugc

SEQ ID NO: 75568 - RNA, 27 nt, Artificial Sequence
  Description of Artificial Sequence: Synthetic oligonucleotide
acaauugccagguuguccuuugucaug

SEQ ID NO: 75569 - RNA, 27 nt, Artificial Sequence
  Description of Artificial Sequence: Synthetic oligonucleotide
ccucgcaccacugggucacaauugcca

SEQ ID NO: 75570 - RNA, 27 nt, Artificial Sequence
  Description of Artificial Sequence: Synthetic oligonucleotide
auuucaugucucuauggaugauguucu

SEQ ID NO: 75571 - RNA, 27 nt, Artificial Sequence
  Description of Artificial Sequence: Synthetic oligonucleotide
uggagaaauauauuguuggauuucaug

SEQ ID NO: 75572 - RNA, 27 nt, Artificial Sequence
  Description of Artificial Sequence: Synthetic oligonucleotide
agccuucauggagaaauauauuguugg

SEQ ID NO: 75573 - RNA, 27 nt, Artificial Sequence
  Description of Artificial Sequence: Synthetic oligonucleotide
accacuccagcgugacuuuacuguugc

SEQ ID NO: 75574 - RNA, 27 nt, Artificial Sequence
  Description of Artificial Sequence: Synthetic oligonucleotide
ccucucuuccuuuacuuucuucacaca

SEQ ID NO: 75575 - RNA, 27 nt, Artificial Sequence
  Description of Artificial Sequence: Synthetic oligonucleotide
gcccgaugcaaggauggcucggaagcg

SEQ ID NO: 75576 - RNA, 27 nt, Artificial Sequence
  Description of Artificial Sequence: Synthetic oligonucleotide
cacaguaggauauucaaccuccauuuc

SEQ ID NO: 75577 - RNA, 27 nt, Artificial Sequence
  Description of Artificial Sequence: Synthetic oligonucleotide
uuacacaguaggauauucaaccuccau

SEQ ID NO: 75578 - RNA, 27 nt, Artificial Sequence
  Description of Artificial Sequence: Synthetic oligonucleotide
uacacuacaagggaaaacucaaaaucu

SEQ ID NO: 75579 - RNA, 27 nt, Artificial Sequence
  Description of Artificial Sequence: Synthetic oligonucleotide
caaucaacaaagaacaaacaggauaaa

SEQ ID NO: 75580 - RNA, 27 nt, Artificial Sequence
  Description of Artificial Sequence: Synthetic oligonucleotide
uuucaaucaacaaagaacaaacaggau

SEQ ID NO: 75581 - RNA, 27 nt, Artificial Sequence
  Description of Artificial Sequence: Synthetic oligonucleotide
auggaagaaaaagaaggcuguagagaa

SEQ ID NO: 75582 - RNA, 27 nt, Artificial Sequence
  Description of Artificial Sequence: Synthetic oligonucleotide
uagaaggaagauuagcuauggaagaaa

SEQ ID NO: 75583 - RNA, 27 nt, Artificial Sequence
  Description of Artificial Sequence: Synthetic oligonucleotide
augaagcauucaacaggaagauuauuu

SEQ ID NO: 75584 - RNA, 27 nt, Artificial Sequence
  Description of Artificial Sequence: Synthetic oligonucleotide
caugaagcauucaacaggaagauuauu

SEQ ID NO: 75585 - RNA, 27 nt, Artificial Sequence
  Description of Artificial Sequence: Synthetic oligonucleotide
ucaaaguagaauucaagucaugaagca

SEQ ID NO: 75586 - RNA, 27 nt, Artificial Sequence
  Description of Artificial Sequence: Synthetic oligonucleotide
gucuguaguugcuucucucccucuuag

SEQ ID NO: 75587 - RNA, 27 nt, Artificial Sequence
  Description of Artificial Sequence: Synthetic oligonucleotide
guugaccuuggucugguaggagacggc

SEQ ID NO: 75588 - RNA, 27 nt, Artificial Sequence
  Description of Artificial Sequence: Synthetic oligonucleotide
gucgagauagucgggccgauugaucuc

SEQ ID NO: 75589 - RNA, 27 nt, Artificial Sequence
  Description of Artificial Sequence: Synthetic oligonucleotide
guuugggaagguuggauguucguccuc

SEQ ID NO: 75590 - RNA, 27 nt, Artificial Sequence
  Description of Artificial Sequence: Synthetic oligonucleotide
aguucuaagcuuggguuccgacccuaa

SEQ ID NO: 75591 - RNA, 27 nt, Artificial Sequence
  Description of Artificial Sequence: Synthetic oligonucleotide
uuaaaguucuaagcuuggguuccgacc

SEQ ID NO: 75592 - RNA, 27 nt, Artificial Sequence
  Description of Artificial Sequence: Synthetic oligonucleotide
guugcuuaaaguucuaagcuuggguuc

SEQ ID NO: 75593 - RNA, 27 nt, Artificial Sequence
  Description of Artificial Sequence: Synthetic oligonucleotide
gugguggucuuguugcuuaaaguucua

SEQ ID NO: 75594 - RNA, 27 nt, Artificial Sequence
  Description of Artificial Sequence: Synthetic oligonucleotide
acuuuauuucucgccacugaauaguag

SEQ ID NO: 75595 - RNA, 27 nt, Artificial Sequence
  Description of Artificial Sequence: Synthetic oligonucleotide
aacuuuauuucucgccacugaauagua

SEQ ID NO: 75596 - RNA, 27 nt, Artificial Sequence
  Description of Artificial Sequence: Synthetic oligonucleotide
ggaucauuuccuguuaucuguguuugu

SEQ ID NO: 75597 - RNA, 27 nt, Artificial Sequence
  Description of Artificial Sequence: Synthetic oligonucleotide
guuucauuucuucucuuuucuuaaggc

SEQ ID NO: 75598 - RNA, 27 nt, Artificial Sequence
  Description of Artificial Sequence: Synthetic oligonucleotide
ggaggauggaaacacacuccuucaguu

SEQ ID NO: 75599 - RNA, 27 nt, Artificial Sequence
  Description of Artificial Sequence: Synthetic oligonucleotide
ucaaagauuuucagucccgcggugaca

SEQ ID NO: 75600 - RNA, 27 nt, Artificial Sequence
  Description of Artificial Sequence: Synthetic oligonucleotide
ccugaacggcacgcuuauuucugcugu

SEQ ID NO: 75601 - RNA, 27 nt, Artificial Sequence
  Description of Artificial Sequence: Synthetic oligonucleotide
cuucuggacccugaacggcacgcuuau

SEQ ID NO: 75602 - RNA, 27 nt, Artificial Sequence
  Description of Artificial Sequence: Synthetic oligonucleotide
caagcagucuugagugacuguuucuuc

SEQ ID NO: 75603 - RNA, 27 nt, Artificial Sequence
  Description of Artificial Sequence: Synthetic oligonucleotide
ccaaagacauggaccuucuuccucuga

SEQ ID NO: 75604 - RNA, 27 nt, Artificial Sequence
  Description of Artificial Sequence: Synthetic oligonucleotide
guguuucaggcauauuuugaauacauc

SEQ ID NO: 75605 - RNA, 27 nt, Artificial Sequence
  Description of Artificial Sequence: Synthetic oligonucleotide
gagguacagagaaagggaggaaaauag

SEQ ID NO: 75606 - RNA, 27 nt, Artificial Sequence
  Description of Artificial Sequence: Synthetic oligonucleotide
ucuugucuugcucuaucuuucuuuggu

SEQ ID NO: 75607 - RNA, 27 nt, Artificial Sequence
  Description of Artificial Sequence: Synthetic oligonucleotide
uuucuugucuugcucuaucuuucuuug

SEQ ID NO: 75608 - RNA, 27 nt, Artificial Sequence
  Description of Artificial Sequence: Synthetic oligonucleotide
ggaucuuguacaaacaaaugcuuucuc

SEQ ID NO: 75609 - RNA, 27 nt, Artificial Sequence
  Description of Artificial Sequence: Synthetic oligonucleotide
ucugcaaguacguucguuuaacucaag

SEQ ID NO: 75610 - RNA, 27 nt, Artificial Sequence
  Description of Artificial Sequence: Synthetic oligonucleotide
ucuguaucgaucguucuguaucagucu

SEQ ID NO: 75611 - RNA, 27 nt, Artificial Sequence
  Description of Artificial Sequence: Synthetic oligonucleotide
auuuauuuuuauauauauauaauauau

SEQ ID NO: 75612 - RNA, 27 nt, Artificial Sequence
  Description of Artificial Sequence: Synthetic oligonucleotide
auauuuauuuuuauauauauauaauau

SEQ ID NO: 75613 - RNA, 27 nt, Artificial Sequence
  Description of Artificial Sequence: Synthetic oligonucleotide
cacagcagucaaauacauccagugaag

SEQ ID NO: 75614 - RNA, 27 nt, Artificial Sequence
  Description of Artificial Sequence: Synthetic oligonucleotide
gucucucaucuccuccucuucccuguc

SEQ ID NO: 75615 - RNA, 27 nt, Artificial Sequence
  Description of Artificial Sequence: Synthetic oligonucleotide
ccaagugggacaaaaaaaagaucaugc

SEQ ID NO: 75616 - RNA, 14 nt, Artificial Sequence
  Description of Artificial Sequence: Synthetic oligonucleotide
guauuuugaugagg

SEQ ID NO: 75617 - RNA, 12 nt, Artificial Sequence
  Description of Artificial Sequence: Synthetic oligonucleotide
ggcccagaugau

SEQ ID NO: 75618 - RNA, 14 nt, Artificial Sequence
  Description of Artificial Sequence: Synthetic oligonucleotide
gggaagaaaacuau

SEQ ID NO: 75619 - RNA, 15 nt, Artificial Sequence
  Description of Artificial Sequence: Synthetic oligonucleotide
guuuuaauuuauuuc

SEQ ID NO: 75620 - RNA, 12 nt, Artificial Sequence
  Description of Artificial Sequence: Synthetic oligonucleotide
acguagggaaau

SEQ ID NO: 75621 - RNA, 12 nt, Artificial Sequence
  Description of Artificial Sequence: Synthetic oligonucleotide
ccaggguuuacc

SEQ ID NO: 75622 - RNA, 11 nt, Artificial Sequence
  Description of Artificial Sequence: Synthetic oligonucleotide
agcaagguuua

SEQ ID NO: 75623 - RNA, 12 nt, Artificial Sequence
  Description of Artificial Sequence: Synthetic oligonucleotide
uguauuauguug

SEQ ID NO: 75624 - RNA, 15 nt, Artificial Sequence
  Description of Artificial Sequence: Synthetic oligonucleotide
uuuuaaucuuuguga

SEQ ID NO: 75625 - RNA, 14 nt, Artificial Sequence
  Description of Artificial Sequence: Synthetic oligonucleotide
uuaaucuuugugac

SEQ ID NO: 75626 - RNA, 13 nt, Artificial Sequence
  Description of Artificial Sequence: Synthetic oligonucleotide
gcugcuuaugucu

SEQ ID NO: 75627 - RNA, 14 nt, Artificial Sequence
  Description of Artificial Sequence: Synthetic oligonucleotide
aaguguuucagaag

SEQ ID NO: 75628 - RNA, 13 nt, Artificial Sequence
  Description of Artificial Sequence: Synthetic oligonucleotide
gaccaucaauaag

SEQ ID NO: 75629 - RNA, 13 nt, Artificial Sequence
  Description of Artificial Sequence: Synthetic oligonucleotide
ccaucaauaagga

SEQ ID NO: 75630 - RNA, 14 nt, Artificial Sequence
  Description of Artificial Sequence: Synthetic oligonucleotide
ucaauaaggaagaa

SEQ ID NO: 75631 - RNA, 14 nt, Artificial Sequence
  Description of Artificial Sequence: Synthetic oligonucleotide
aauaaggaagaagc

SEQ ID NO: 75632 - RNA, 13 nt, Artificial Sequence
  Description of Artificial Sequence: Synthetic oligonucleotide
aggaagaagcccu

SEQ ID NO: 75633 - RNA, 13 nt, Artificial Sequence
  Description of Artificial Sequence: Synthetic oligonucleotide
gcauaacuaaagg

SEQ ID NO: 75634 - RNA, 14 nt, Artificial Sequence
  Description of Artificial Sequence: Synthetic oligonucleotide
cauaacuaaaggug

SEQ ID NO: 75635 - RNA, 12 nt, Artificial Sequence
  Description of Artificial Sequence: Synthetic oligonucleotide
cuacaucacgcc

SEQ ID NO: 75636 - RNA, 12 nt, Artificial Sequence
  Description of Artificial Sequence: Synthetic oligonucleotide
acuggauuuaag

SEQ ID NO: 75637 - RNA, 12 nt, Artificial Sequence
  Description of Artificial Sequence: Synthetic oligonucleotide
cuggauuuaagc

SEQ ID NO: 75638 - RNA, 13 nt, Artificial Sequence
  Description of Artificial Sequence: Synthetic oligonucleotide
gauuuaagcagag

SEQ ID NO: 75639 - RNA, 13 nt, Artificial Sequence
  Description of Artificial Sequence: Synthetic oligonucleotide
auuuaagcagagu

SEQ ID NO: 75640 - RNA, 13 nt, Artificial Sequence
  Description of Artificial Sequence: Synthetic oligonucleotide
uuaagcagaguuc

SEQ ID NO: 75641 - RNA, 13 nt, Artificial Sequence
  Description of Artificial Sequence: Synthetic oligonucleotide
uaagcagaguuca

SEQ ID NO: 75642 - RNA, 14 nt, Artificial Sequence
  Description of Artificial Sequence: Synthetic oligonucleotide
agcagaguucaaaa

SEQ ID NO: 75643 - RNA, 12 nt, Artificial Sequence
  Description of Artificial Sequence: Synthetic oligonucleotide
cucagggucuga

SEQ ID NO: 75644 - RNA, 13 nt, Artificial Sequence
  Description of Artificial Sequence: Synthetic oligonucleotide
caagcaacuacau

SEQ ID NO: 75645 - RNA, 12 nt, Artificial Sequence
  Description of Artificial Sequence: Synthetic oligonucleotide
aucaauggcagc

SEQ ID NO: 75646 - RNA, 11 nt, Artificial Sequence
  Description of Artificial Sequence: Synthetic oligonucleotide
uuccagcccac

SEQ ID NO: 75647 - RNA, 12 nt, Artificial Sequence
  Description of Artificial Sequence: Synthetic oligonucleotide
cagcugagaaug

SEQ ID NO: 75648 - RNA, 13 nt, Artificial Sequence
  Description of Artificial Sequence: Synthetic oligonucleotide
aacguaucuccua

SEQ ID NO: 75649 - RNA, 14 nt, Artificial Sequence
  Description of Artificial Sequence: Synthetic oligonucleotide
ccuaaaauaauuuc

SEQ ID NO: 75650 - RNA, 13 nt, Artificial Sequence
  Description of Artificial Sequence: Synthetic oligonucleotide
uggaagauucagc

SEQ ID NO: 75651 - RNA, 12 nt, Artificial Sequence
  Description of Artificial Sequence: Synthetic oligonucleotide
uuaaacucuccu

SEQ ID NO: 75652 - RNA, 12 nt, Artificial Sequence
  Description of Artificial Sequence: Synthetic oligonucleotide
cagccuacaguu

SEQ ID NO: 75653 - RNA, 13 nt, Artificial Sequence
  Description of Artificial Sequence: Synthetic oligonucleotide
guuauguucaguc

SEQ ID NO: 75654 - RNA, 13 nt, Artificial Sequence
  Description of Artificial Sequence: Synthetic oligonucleotide
cacauacaaaaug

SEQ ID NO: 75655 - RNA, 9 nt, Artificial Sequence
  Description of Artificial Sequence: Synthetic oligonucleotide
uccuuuugc

SEQ ID NO: 75656 - RNA, 12 nt, Artificial Sequence
  Description of Artificial Sequence: Synthetic oligonucleotide
ugaccugugaag

SEQ ID NO: 75657 - RNA, 12 nt, Artificial Sequence
  Description of Artificial Sequence: Synthetic oligonucleotide
cuaucucacaca

SEQ ID NO: 75658 - RNA, 13 nt, Artificial Sequence
  Description of Artificial Sequence: Synthetic oligonucleotide
uguccucaauugu

SEQ ID NO: 75659 - RNA, 12 nt, Artificial Sequence
  Description of Artificial Sequence: Synthetic oligonucleotide
aaaccguagcug

SEQ ID NO: 75660 - RNA, 12 nt, Artificial Sequence
  Description of Artificial Sequence: Synthetic oligonucleotide
uagcuggcaagc

SEQ ID NO: 75661 - RNA, 14 nt, Artificial Sequence
  Description of Artificial Sequence: Synthetic oligonucleotide
uuguaugguuaaaa

SEQ ID NO: 75662 - RNA, 14 nt, Artificial Sequence
  Description of Artificial Sequence: Synthetic oligonucleotide
ugguuaaaagaugg

SEQ ID NO: 75663 - RNA, 13 nt, Artificial Sequence
  Description of Artificial Sequence: Synthetic oligonucleotide
cagggaauuauac

SEQ ID NO: 75664 - RNA, 12 nt, Artificial Sequence
  Description of Artificial Sequence: Synthetic oligonucleotide
acaaucuugcug

SEQ ID NO: 75665 - RNA, 13 nt, Artificial Sequence
  Description of Artificial Sequence: Synthetic oligonucleotide
ccaauaaugaaga

SEQ ID NO: 75666 - RNA, 13 nt, Artificial Sequence
  Description of Artificial Sequence: Synthetic oligonucleotide
acuuuggauguuc

SEQ ID NO: 75667 - RNA, 12 nt, Artificial Sequence
  Description of Artificial Sequence: Synthetic oligonucleotide
aaugcuuccacu

SEQ ID NO: 75668 - RNA, 11 nt, Artificial Sequence
  Description of Artificial Sequence: Synthetic oligonucleotide
gagaaaguuug

SEQ ID NO: 75669 - RNA, 11 nt, Artificial Sequence
  Description of Artificial Sequence: Synthetic oligonucleotide
aaagaacuacu

SEQ ID NO: 75670 - RNA, 12 nt, Artificial Sequence
  Description of Artificial Sequence: Synthetic oligonucleotide
uuagaaauacgg

SEQ ID NO: 75671 - RNA, 12 nt, Artificial Sequence
  Description of Artificial Sequence: Synthetic oligonucleotide
aacauggguaca

SEQ ID NO: 75672 - RNA, 14 nt, Artificial Sequence
  Description of Artificial Sequence: Synthetic oligonucleotide
aaagacacagaaga

SEQ ID NO: 75673 - RNA, 11 nt, Artificial Sequence
  Description of Artificial Sequence: Synthetic oligonucleotide
uaguagggagg

SEQ ID NO: 75674 - RNA, 12 nt, Artificial Sequence
  Description of Artificial Sequence: Synthetic oligonucleotide
gccuucugcagc

SEQ ID NO: 75675 - RNA, 10 nt, Artificial Sequence
  Description of Artificial Sequence: Synthetic oligonucleotide
ggucugguac

SEQ ID NO: 75676 - RNA, 12 nt, Artificial Sequence
  Description of Artificial Sequence: Synthetic oligonucleotide
cuaguccuuccg

SEQ ID NO: 75677 - RNA, 12 nt, Artificial Sequence
  Description of Artificial Sequence: Synthetic oligonucleotide
ccagugaauauu

SEQ ID NO: 75678 - RNA, 13 nt, Artificial Sequence
  Description of Artificial Sequence: Synthetic oligonucleotide
augaauucaaguu

SEQ ID NO: 75679 - RNA, 12 nt, Artificial Sequence
  Description of Artificial Sequence: Synthetic oligonucleotide
caggacacagau

SEQ ID NO: 75680 - RNA, 12 nt, Artificial Sequence
  Description of Artificial Sequence: Synthetic oligonucleotide
cucaaagcacag

SEQ ID NO: 75681 - RNA, 10 nt, Artificial Sequence
  Description of Artificial Sequence: Synthetic oligonucleotide
accacugcca

SEQ ID NO: 75682 - RNA, 13 nt, Artificial Sequence
  Description of Artificial Sequence: Synthetic oligonucleotide
gaaacuacuagug

SEQ ID NO: 75683 - RNA, 12 nt, Artificial Sequence
  Description of Artificial Sequence: Synthetic oligonucleotide
aagucggacagc

SEQ ID NO: 75684 - RNA, 13 nt, Artificial Sequence
  Description of Artificial Sequence: Synthetic oligonucleotide
gaaagcgaaaaau

SEQ ID NO: 75685 - RNA, 13 nt, Artificial Sequence
  Description of Artificial Sequence: Synthetic oligonucleotide
cccucugauuuag

SEQ ID NO: 75686 - RNA, 12 nt, Artificial Sequence
  Description of Artificial Sequence: Synthetic oligonucleotide
ugagcuauuuaa

SEQ ID NO: 75687 - RNA, 13 nt, Artificial Sequence
  Description of Artificial Sequence: Synthetic oligonucleotide
aaaaggugaaaaa

SEQ ID NO: 75688 - RNA, 14 nt, Artificial Sequence
  Description of Artificial Sequence: Synthetic oligonucleotide
gaaaaagcacuauu

SEQ ID NO: 75689 - RNA, 12 nt, Artificial Sequence
  Description of Artificial Sequence: Synthetic oligonucleotide
ggcugaaaagaa

SEQ ID NO: 75690 - RNA, 12 nt, Artificial Sequence
  Description of Artificial Sequence: Synthetic oligonucleotide
uaaacccuuaua

SEQ ID NO: 75691 - RNA, 13 nt, Artificial Sequence
  Description of Artificial Sequence: Synthetic oligonucleotide
cauacuauuagcc

SEQ ID NO: 75692 - RNA, 12 nt, Artificial Sequence
  Description of Artificial Sequence: Synthetic oligonucleotide
gacagaagcauu

SEQ ID NO: 75693 - RNA, 14 nt, Artificial Sequence
  Description of Artificial Sequence: Synthetic oligonucleotide
agagcaaauaagau

SEQ ID NO: 75694 - RNA, 14 nt, Artificial Sequence
  Description of Artificial Sequence: Synthetic oligonucleotide
ccaacauuuuucuc

SEQ ID NO: 75695 - RNA, 15 nt, Artificial Sequence
  Description of Artificial Sequence: Synthetic oligonucleotide
uuaaguaugagaaaa

SEQ ID NO: 75696 - RNA, 14 nt, Artificial Sequence
  Description of Artificial Sequence: Synthetic oligonucleotide
caggaauaaagaug

SEQ ID NO: 75697 - RNA, 13 nt, Artificial Sequence
  Description of Artificial Sequence: Synthetic oligonucleotide
aauuugaaugacc

SEQ ID NO: 75698 - RNA, 14 nt, Artificial Sequence
  Description of Artificial Sequence: Synthetic oligonucleotide
auguauaaagauag

SEQ ID NO: 75699 - RNA, 12 nt, Artificial Sequence
  Description of Artificial Sequence: Synthetic oligonucleotide
ggcuguaacuau

SEQ ID NO: 75700 - RNA, 11 nt, Artificial Sequence
  Description of Artificial Sequence: Synthetic oligonucleotide
ucugugaagug

SEQ ID NO: 75701 - RNA, 14 nt, Artificial Sequence
  Description of Artificial Sequence: Synthetic oligonucleotide
ccuuuaaggaaaug

SEQ ID NO: 75702 - RNA, 13 nt, Artificial Sequence
  Description of Artificial Sequence: Synthetic oligonucleotide
aaggauacaaaaa

SEQ ID NO: 75703 - RNA, 12 nt, Artificial Sequence
  Description of Artificial Sequence: Synthetic oligonucleotide
agaugcaauuug

SEQ ID NO: 75704 - RNA, 12 nt, Artificial Sequence
  Description of Artificial Sequence: Synthetic oligonucleotide
guucaaaacgaa

SEQ ID NO: 75705 - RNA, 11 nt, Artificial Sequence
  Description of Artificial Sequence: Synthetic oligonucleotide
gugaaaccuca

SEQ ID NO: 75706 - RNA, 13 nt, Artificial Sequence
  Description of Artificial Sequence: Synthetic oligonucleotide
acgaaagagaagc

SEQ ID NO: 75707 - RNA, 12 nt, Artificial Sequence
  Description of Artificial Sequence: Synthetic oligonucleotide
cuccacaagcgc

SEQ ID NO: 75708 - RNA, 14 nt, Artificial Sequence
  Description of Artificial Sequence: Synthetic oligonucleotide
gagaagauuccaaa

SEQ ID NO: 75709 - RNA, 13 nt, Artificial Sequence
  Description of Artificial Sequence: Synthetic oligonucleotide
aaucuggauucaa

SEQ ID NO: 75710 - RNA, 13 nt, Artificial Sequence
  Description of Artificial Sequence: Synthetic oligonucleotide
agaacagauuuga

SEQ ID NO: 75711 - RNA, 11 nt, Artificial Sequence
  Description of Artificial Sequence: Synthetic oligonucleotide
ccagagcugug

SEQ ID NO: 75712 - RNA, 12 nt, Artificial Sequence
  Description of Artificial Sequence: Synthetic oligonucleotide
ccucagauuguu

SEQ ID NO: 75713 - RNA, 12 nt, Artificial Sequence
  Description of Artificial Sequence: Synthetic oligonucleotide
cuauuuuaauua

SEQ ID NO: 75714 - RNA, 13 nt, Artificial Sequence
  Description of Artificial Sequence: Synthetic oligonucleotide
uuuaauuuauuaa

SEQ ID NO: 75715 - RNA, 12 nt, Artificial Sequence
  Description of Artificial Sequence: Synthetic oligonucleotide
augcaguuugaa

SEQ ID NO: 75716 - RNA, 11 nt, Artificial Sequence
  Description of Artificial Sequence: Synthetic oligonucleotide
caugcugcugg

SEQ ID NO: 75717 - RNA, 13 nt, Artificial Sequence
  Description of Artificial Sequence: Synthetic oligonucleotide
agaugugcauuuc

SEQ ID NO: 75718 - RNA, 12 nt, Artificial Sequence
  Description of Artificial Sequence: Synthetic oligonucleotide
ucaaaaccugug

SEQ ID NO: 75719 - RNA, 11 nt, Artificial Sequence
  Description of Artificial Sequence: Synthetic oligonucleotide
gaaugugggua

SEQ ID NO: 75720 - RNA, 10 nt, Artificial Sequence
  Description of Artificial Sequence: Synthetic oligonucleotide
auguggguag

SEQ ID NO: 75721 - RNA, 13 nt, Artificial Sequence
  Description of Artificial Sequence: Synthetic oligonucleotide
ugaaaaugagcau

SEQ ID NO: 75722 - RNA, 13 nt, Artificial Sequence
  Description of Artificial Sequence: Synthetic oligonucleotide
uugcuuuucaugu

SEQ ID NO: 75723 - RNA, 12 nt, Artificial Sequence
  Description of Artificial Sequence: Synthetic oligonucleotide
uguauuucuaua

SEQ ID NO: 75724 - RNA, 13 nt, Artificial Sequence
  Description of Artificial Sequence: Synthetic oligonucleotide
uuugauuaauguu

SEQ ID NO: 75725 - RNA, 12 nt, Artificial Sequence
  Description of Artificial Sequence: Synthetic oligonucleotide
caacguguauag

SEQ ID NO: 75726 - RNA, 12 nt, Artificial Sequence
  Description of Artificial Sequence: Synthetic oligonucleotide
cauauccuuggc

SEQ ID NO: 75727 - RNA, 13 nt, Artificial Sequence
  Description of Artificial Sequence: Synthetic oligonucleotide
uacuaacaucugg

SEQ ID NO: 75728 - RNA, 11 nt, Artificial Sequence
  Description of Artificial Sequence: Synthetic oligonucleotide
cauaaguugug

SEQ ID NO: 75729 - RNA, 12 nt, Artificial Sequence
  Description of Artificial Sequence: Synthetic oligonucleotide
gcaucauuuugg

SEQ ID NO: 75730 - RNA, 10 nt, Artificial Sequence
  Description of Artificial Sequence: Synthetic oligonucleotide
gcucuucuua

SEQ ID NO: 75731 - RNA, 10 nt, Artificial Sequence
  Description of Artificial Sequence: Synthetic oligonucleotide
agauuagguc

SEQ ID NO: 75732 - RNA, 12 nt, Artificial Sequence
  Description of Artificial Sequence: Synthetic oligonucleotide
auggaauugaaa

SEQ ID NO: 75733 - RNA, 13 nt, Artificial Sequence
  Description of Artificial Sequence: Synthetic oligonucleotide
cacacucauuccu

SEQ ID NO: 75734 - RNA, 12 nt, Artificial Sequence
  Description of Artificial Sequence: Synthetic oligonucleotide
uguagagguaac

SEQ ID NO: 75735 - RNA, 11 nt, Artificial Sequence
  Description of Artificial Sequence: Synthetic oligonucleotide
caaccacaugc

SEQ ID NO: 75736 - RNA, 12 nt, Artificial Sequence
  Description of Artificial Sequence: Synthetic oligonucleotide
ucggaaacaagu

SEQ ID NO: 75737 - RNA, 11 nt, Artificial Sequence
  Description of Artificial Sequence: Synthetic oligonucleotide
acucccaauaa

SEQ ID NO: 75738 - RNA, 13 nt, Artificial Sequence
  Description of Artificial Sequence: Synthetic oligonucleotide
aaugcuaagaaau

SEQ ID NO: 75739 - RNA, 11 nt, Artificial Sequence
  Description of Artificial Sequence: Synthetic oligonucleotide
gucuuucucua

SEQ ID NO: 75740 - RNA, 11 nt, Artificial Sequence
  Description of Artificial Sequence: Synthetic oligonucleotide
ugaauuucagg

SEQ ID NO: 75741 - RNA, 13 nt, Artificial Sequence
  Description of Artificial Sequence: Synthetic oligonucleotide
cgauucccucuca

SEQ ID NO: 75742 - RNA, 11 nt, Artificial Sequence
  Description of Artificial Sequence: Synthetic oligonucleotide
aggaaagugaa

SEQ ID NO: 75743 - RNA, 12 nt, Artificial Sequence
  Description of Artificial Sequence: Synthetic oligonucleotide
gaggcugcaugc

SEQ ID NO: 75744 - RNA, 11 nt, Artificial Sequence
  Description of Artificial Sequence: Synthetic oligonucleotide
ucucugaacag

SEQ ID NO: 75745 - RNA, 12 nt, Artificial Sequence
  Description of Artificial Sequence: Synthetic oligonucleotide
aacuuggcugua

SEQ ID NO: 75746 - RNA, 12 nt, Artificial Sequence
  Description of Artificial Sequence: Synthetic oligonucleotide
agaagccaaaau

SEQ ID NO: 75747 - RNA, 14 nt, Artificial Sequence
  Description of Artificial Sequence: Synthetic oligonucleotide
auuaaaagaagucc

SEQ ID NO: 75748 - RNA, 14 nt, Artificial Sequence
  Description of Artificial Sequence: Synthetic oligonucleotide
gaauccggauuauc

SEQ ID NO: 75749 - RNA, 12 nt, Artificial Sequence
  Description of Artificial Sequence: Synthetic oligonucleotide
aaugugacauca

SEQ ID NO: 75750 - RNA, 13 nt, Artificial Sequence
  Description of Artificial Sequence: Synthetic oligonucleotide
caucaaagcaagu

SEQ ID NO: 75751 - RNA, 11 nt, Artificial Sequence
  Description of Artificial Sequence: Synthetic oligonucleotide
agagagagaaa

SEQ ID NO: 75752 - RNA, 13 nt, Artificial Sequence
  Description of Artificial Sequence: Synthetic oligonucleotide
ucgcuguaguauu

SEQ ID NO: 75753 - RNA, 14 nt, Artificial Sequence
  Description of Artificial Sequence: Synthetic oligonucleotide
cgcuguaguauuua

SEQ ID NO: 75754 - RNA, 13 nt, Artificial Sequence
  Description of Artificial Sequence: Synthetic oligonucleotide
auuuaagcccaua

SEQ ID NO: 75755 - RNA, 15 nt, Artificial Sequence
  Description of Artificial Sequence: Synthetic oligonucleotide
auuaaaauaaacaug

SEQ ID NO: 75756 - RNA, 12 nt, Artificial Sequence
  Description of Artificial Sequence: Synthetic oligonucleotide
cuguucugaucg

SEQ ID NO: 75757 - RNA, 16 nt, Artificial Sequence
  Description of Artificial Sequence: Synthetic oligonucleotide
aaauaauuugaacuuu

SEQ ID NO: 75758 - RNA, 12 nt, Artificial Sequence
  Description of Artificial Sequence: Synthetic oligonucleotide
ugcgaccuuaau

SEQ ID NO: 75759 - RNA, 11 nt, Artificial Sequence
  Description of Artificial Sequence: Synthetic oligonucleotide
cugagaaagcu

SEQ ID NO: 75760 - RNA, 13 nt, Artificial Sequence
  Description of Artificial Sequence: Synthetic oligonucleotide
aguaaagaugcua

SEQ ID NO: 75761 - RNA, 12 nt, Artificial Sequence
  Description of Artificial Sequence: Synthetic oligonucleotide
cugcuuaauugc

SEQ ID NO: 75762 - RNA, 14 nt, Artificial Sequence
  Description of Artificial Sequence: Synthetic oligonucleotide
uaccauaugaauga

SEQ ID NO: 75763 - RNA, 12 nt, Artificial Sequence
  Description of Artificial Sequence: Synthetic oligonucleotide
aacuuucuuauc

SEQ ID NO: 75764 - RNA, 13 nt, Artificial Sequence
  Description of Artificial Sequence: Synthetic oligonucleotide
ccuugcaugacau

SEQ ID NO: 75765 - RNA, 14 nt, Artificial Sequence
  Description of Artificial Sequence: Synthetic oligonucleotide
ugaauuuguauaug

SEQ ID NO: 75766 - RNA, 12 nt, Artificial Sequence
  Description of Artificial Sequence: Synthetic oligonucleotide
gaauccuaguag

SEQ ID NO: 75767 - RNA, 10 nt, Artificial Sequence
  Description of Artificial Sequence: Synthetic oligonucleotide
gaaagggaag

SEQ ID NO: 75768 - RNA, 11 nt, Artificial Sequence
  Description of Artificial Sequence: Synthetic oligonucleotide
uaucggcaugc

SEQ ID NO: 75769 - RNA, 12 nt, Artificial Sequence
  Description of Artificial Sequence: Synthetic oligonucleotide
caccucauagua

SEQ ID NO: 75770 - RNA, 11 nt, Artificial Sequence
  Description of Artificial Sequence: Synthetic oligonucleotide
ccagaauugcc

SEQ ID NO: 75771 - RNA, 11 nt, Artificial Sequence
  Description of Artificial Sequence: Synthetic oligonucleotide
uggugaucugg

SEQ ID NO: 75772 - RNA, 12 nt, Artificial Sequence
  Description of Artificial Sequence: Synthetic oligonucleotide
gaucuggguaau

SEQ ID NO: 75773 - RNA, 12 nt, Artificial Sequence
  Description of Artificial Sequence: Synthetic oligonucleotide
ggaugugaugaa

SEQ ID NO: 75774 - RNA, 12 nt, Artificial Sequence
  Description of Artificial Sequence: Synthetic oligonucleotide
cauuuccacagc

SEQ ID NO: 75775 - RNA, 11 nt, Artificial Sequence
  Description of Artificial Sequence: Synthetic oligonucleotide
acagcuacacc

SEQ ID NO: 75776 - RNA, 12 nt, Artificial Sequence
  Description of Artificial Sequence: Synthetic oligonucleotide
ugcaguucuuac

SEQ ID NO: 75777 - RNA, 12 nt, Artificial Sequence
  Description of Artificial Sequence: Synthetic oligonucleotide
acgagaagaaga

SEQ ID NO: 75778 - RNA, 12 nt, Artificial Sequence
  Description of Artificial Sequence: Synthetic oligonucleotide
cgagaagaagau

SEQ ID NO: 75779 - RNA, 15 nt, Artificial Sequence
  Description of Artificial Sequence: Synthetic oligonucleotide
aagaagaucauuuac

SEQ ID NO: 75780 - RNA, 11 nt, Artificial Sequence
  Description of Artificial Sequence: Synthetic oligonucleotide
agaggaagagg

SEQ ID NO: 75781 - RNA, 12 nt, Artificial Sequence
  Description of Artificial Sequence: Synthetic oligonucleotide
gaggaagaggug

SEQ ID NO: 75782 - RNA, 13 nt, Artificial Sequence
  Description of Artificial Sequence: Synthetic oligonucleotide
cuacuuugagggc

SEQ ID NO: 75783 - RNA, 12 nt, Artificial Sequence
  Description of Artificial Sequence: Synthetic oligonucleotide
agggcaucuccu

SEQ ID NO: 75784 - RNA, 10 nt, Artificial Sequence
  Description of Artificial Sequence: Synthetic oligonucleotide
ggagugauau

SEQ ID NO: 75785 - RNA, 11 nt, Artificial Sequence
  Description of Artificial Sequence: Synthetic oligonucleotide
gagugauaugg

SEQ ID NO: 75786 - RNA, 12 nt, Artificial Sequence
  Description of Artificial Sequence: Synthetic oligonucleotide
ugcaguaaagau

SEQ ID NO: 75787 - RNA, 13 nt, Artificial Sequence
  Description of Artificial Sequence: Synthetic oligonucleotide
aguaaagauccua

SEQ ID NO: 75788 - RNA, 12 nt, Artificial Sequence
  Description of Artificial Sequence: Synthetic oligonucleotide
ugacaaaggaca

SEQ ID NO: 75789 - RNA, 13 nt, Artificial Sequence
  Description of Artificial Sequence: Synthetic oligonucleotide
gcaauugugaccc

SEQ ID NO: 75790 - RNA, 12 nt, Artificial Sequence
  Description of Artificial Sequence: Synthetic oligonucleotide
aacaucauccau

SEQ ID NO: 75791 - RNA, 12 nt, Artificial Sequence
  Description of Artificial Sequence: Synthetic oligonucleotide
ugaaauccaaca

SEQ ID NO: 75792 - RNA, 15 nt, Artificial Sequence
  Description of Artificial Sequence: Synthetic oligonucleotide
aacaauauauuucuc

SEQ ID NO: 75793 - RNA, 14 nt, Artificial Sequence
  Description of Artificial Sequence: Synthetic oligonucleotide
aacaguaaagucac

SEQ ID NO: 75794 - RNA, 14 nt, Artificial Sequence
  Description of Artificial Sequence: Synthetic oligonucleotide
ugugaagaaaguaa

SEQ ID NO: 75795 - RNA, 13 nt, Artificial Sequence
  Description of Artificial Sequence: Synthetic oligonucleotide
cuuccgagccauc

SEQ ID NO: 75796 - RNA, 12 nt, Artificial Sequence
  Description of Artificial Sequence: Synthetic oligonucleotide
aauggagguuga

SEQ ID NO: 75797 - RNA, 12 nt, Artificial Sequence
  Description of Artificial Sequence: Synthetic oligonucleotide
ggagguugaaua

SEQ ID NO: 75798 - RNA, 13 nt, Artificial Sequence
  Description of Artificial Sequence: Synthetic oligonucleotide
auuuugaguuuuc

SEQ ID NO: 75799 - RNA, 12 nt, Artificial Sequence
  Description of Artificial Sequence: Synthetic oligonucleotide
uauccuguuugu

SEQ ID NO: 75800 - RNA, 11 nt, Artificial Sequence
  Description of Artificial Sequence: Synthetic oligonucleotide
ccuguuuguuc

SEQ ID NO: 75801 - RNA, 10 nt, Artificial Sequence
  Description of Artificial Sequence: Synthetic oligonucleotide
cucuacagcc

SEQ ID NO: 75802 - RNA, 12 nt, Artificial Sequence
  Description of Artificial Sequence: Synthetic oligonucleotide
ucuuccauagcu

SEQ ID NO: 75803 - RNA, 12 nt, Artificial Sequence
  Description of Artificial Sequence: Synthetic oligonucleotide
auaaucuuccug

SEQ ID NO: 75804 - RNA, 12 nt, Artificial Sequence
  Description of Artificial Sequence: Synthetic oligonucleotide
uaaucuuccugu

SEQ ID NO: 75805 - RNA, 12 nt, Artificial Sequence
  Description of Artificial Sequence: Synthetic oligonucleotide
cuucaugacuug

SEQ ID NO: 75806 - RNA, 12 nt, Artificial Sequence
  Description of Artificial Sequence: Synthetic oligonucleotide
aagagggagaga

SEQ ID NO: 75807 - RNA, 12 nt, Artificial Sequence
  Description of Artificial Sequence: Synthetic oligonucleotide
cgucuccuacca

SEQ ID NO: 75808 - RNA, 12 nt, Artificial Sequence
  Description of Artificial Sequence: Synthetic oligonucleotide
gaucaaucggcc

SEQ ID NO: 75809 - RNA, 12 nt, Artificial Sequence
  Description of Artificial Sequence: Synthetic oligonucleotide
ggacgaacaucc

SEQ ID NO: 75810 - RNA, 11 nt, Artificial Sequence
  Description of Artificial Sequence: Synthetic oligonucleotide
agggucggaac

SEQ ID NO: 75811 - RNA, 10 nt, Artificial Sequence
  Description of Artificial Sequence: Synthetic oligonucleotide
ucggaaccca

SEQ ID NO: 75812 - RNA, 11 nt, Artificial Sequence
  Description of Artificial Sequence: Synthetic oligonucleotide
acccaagcuua

SEQ ID NO: 75813 - RNA, 14 nt, Artificial Sequence
  Description of Artificial Sequence: Synthetic oligonucleotide
gaacuuuaagcaac

SEQ ID NO: 75814 - RNA, 11 nt, Artificial Sequence
  Description of Artificial Sequence: Synthetic oligonucleotide
acuauucagug

SEQ ID NO: 75815 - RNA, 11 nt, Artificial Sequence
  Description of Artificial Sequence: Synthetic oligonucleotide
cuauucagugg

SEQ ID NO: 75816 - RNA, 13 nt, Artificial Sequence
  Description of Artificial Sequence: Synthetic oligonucleotide
aaacacagauaac

SEQ ID NO: 75817 - RNA, 12 nt, Artificial Sequence
  Description of Artificial Sequence: Synthetic oligonucleotide
cuuaagaaaaga

SEQ ID NO: 75818 - RNA, 12 nt, Artificial Sequence
  Description of Artificial Sequence: Synthetic oligonucleotide
cugaaggagugu

SEQ ID NO: 75819 - RNA, 10 nt, Artificial Sequence
  Description of Artificial Sequence: Synthetic oligonucleotide
ucaccgcggg

SEQ ID NO: 75820 - RNA, 14 nt, Artificial Sequence
  Description of Artificial Sequence: Synthetic oligonucleotide
agcagaaauaagcg

SEQ ID NO: 75821 - RNA, 12 nt, Artificial Sequence
  Description of Artificial Sequence: Synthetic oligonucleotide
aagcgugccguu

SEQ ID NO: 75822 - RNA, 12 nt, Artificial Sequence
  Description of Artificial Sequence: Synthetic oligonucleotide
agaaacagucac

SEQ ID NO: 75823 - RNA, 12 nt, Artificial Sequence
  Description of Artificial Sequence: Synthetic oligonucleotide
agaggaagaagg

SEQ ID NO: 75824 - RNA, 14 nt, Artificial Sequence
  Description of Artificial Sequence: Synthetic oligonucleotide
uguauucaaaauau

SEQ ID NO: 75825 - RNA, 13 nt, Artificial Sequence
  Description of Artificial Sequence: Synthetic oligonucleotide
auuuuccucccuu

SEQ ID NO: 75826 - RNA, 13 nt, Artificial Sequence
  Description of Artificial Sequence: Synthetic oligonucleotide
caaagaaagauag

SEQ ID NO: 75827 - RNA, 12 nt, Artificial Sequence
  Description of Artificial Sequence: Synthetic oligonucleotide
aagaaagauaga

SEQ ID NO: 75828 - RNA, 13 nt, Artificial Sequence
  Description of Artificial Sequence: Synthetic oligonucleotide
gaaagcauuuguu

SEQ ID NO: 75829 - RNA, 13 nt, Artificial Sequence
  Description of Artificial Sequence: Synthetic oligonucleotide
ugaguuaaacgaa

SEQ ID NO: 75830 - RNA, 12 nt, Artificial Sequence
  Description of Artificial Sequence: Synthetic oligonucleotide
acugauacagaa

SEQ ID NO: 75831 - RNA, 12 nt, Artificial Sequence
  Description of Artificial Sequence: Synthetic oligonucleotide
auauuauauaua

SEQ ID NO: 75832 - RNA, 12 nt, Artificial Sequence
  Description of Artificial Sequence: Synthetic oligonucleotide
auuauauauaua

SEQ ID NO: 75833 - RNA, 12 nt, Artificial Sequence
  Description of Artificial Sequence: Synthetic oligonucleotide
ucacuggaugua

SEQ ID NO: 75834 - RNA, 12 nt, Artificial Sequence
  Description of Artificial Sequence: Synthetic oligonucleotide
cagggaagagga

SEQ ID NO: 75835 - RNA, 15 nt, Artificial Sequence
  Description of Artificial Sequence: Synthetic oligonucleotide
augaucuuuuuuuug

SEQ ID NO: 75836 - RNA, 11 nt, Artificial Sequence
  Description of Artificial Sequence: Synthetic oligonucleotide
aguucacggcc

SEQ ID NO: 75837 - RNA, 13 nt, Artificial Sequence
  Description of Artificial Sequence: Synthetic oligonucleotide
caccaucacacca

SEQ ID NO: 75838 - RNA, 11 nt, Artificial Sequence
  Description of Artificial Sequence: Synthetic oligonucleotide
ccugcggguuu

SEQ ID NO: 75839 - RNA, 10 nt, Artificial Sequence
  Description of Artificial Sequence: Synthetic oligonucleotide
auccaguuug

SEQ ID NO: 75840 - RNA, 13 nt, Artificial Sequence
  Description of Artificial Sequence: Synthetic oligonucleotide
guuaaggacuucu

SEQ ID NO: 75841 - RNA, 13 nt, Artificial Sequence
  Description of Artificial Sequence: Synthetic oligonucleotide
cagugggacagag

SEQ ID NO: 75842 - RNA, 14 nt, Artificial Sequence
  Description of Artificial Sequence: Synthetic oligonucleotide
aauuuguuauugug

SEQ ID NO: 75843 - RNA, 13 nt, Artificial Sequence
  Description of Artificial Sequence: Synthetic oligonucleotide
uucaaaugcauuu

SEQ ID NO: 75844 - RNA, 10 nt, Artificial Sequence
  Description of Artificial Sequence: Synthetic oligonucleotide
caggaaagcc

SEQ ID NO: 75845 - RNA, 11 nt, Artificial Sequence
  Description of Artificial Sequence: Synthetic oligonucleotide
aggaaagcccu

SEQ ID NO: 75846 - RNA, 12 nt, Artificial Sequence
  Description of Artificial Sequence: Synthetic oligonucleotide
cccagcauggcc

SEQ ID NO: 75847 - RNA, 11 nt, Artificial Sequence
  Description of Artificial Sequence: Synthetic oligonucleotide
cuucucccuga

SEQ ID NO: 75848 - RNA, 12 nt, Artificial Sequence
  Description of Artificial Sequence: Synthetic oligonucleotide
gaagaagcccuu

SEQ ID NO: 75849 - RNA, 12 nt, Artificial Sequence
  Description of Artificial Sequence: Synthetic oligonucleotide
agaagcccuuca

SEQ ID NO: 75850 - RNA, 11 nt, Artificial Sequence
  Description of Artificial Sequence: Synthetic oligonucleotide
gcccuucagcg

SEQ ID NO: 75851 - RNA, 11 nt, Artificial Sequence
  Description of Artificial Sequence: Synthetic oligonucleotide
ccuucagcggc

SEQ ID NO: 75852 - RNA, 12 nt, Artificial Sequence
  Description of Artificial Sequence: Synthetic oligonucleotide
ucagcggccagu

SEQ ID NO: 75853 - RNA, 12 nt, Artificial Sequence
  Description of Artificial Sequence: Synthetic oligonucleotide
ugaaaagcuccg

SEQ ID NO: 75854 - RNA, 11 nt, Artificial Sequence
  Description of Artificial Sequence: Synthetic oligonucleotide
aaaagcuccgg

SEQ ID NO: 75855 - RNA, 13 nt, Artificial Sequence
  Description of Artificial Sequence: Synthetic oligonucleotide
agucaacagucug

SEQ ID NO: 75856 - RNA, 13 nt, Artificial Sequence
  Description of Artificial Sequence: Synthetic oligonucleotide
cagaguucaaaag

SEQ ID NO: 75857 - RNA, 13 nt, Artificial Sequence
  Description of Artificial Sequence: Synthetic oligonucleotide
agaguucaaaagc

SEQ ID NO: 75858 - RNA, 12 nt, Artificial Sequence
  Description of Artificial Sequence: Synthetic oligonucleotide
uucaaaagcccu

SEQ ID NO: 75859 - RNA, 12 nt, Artificial Sequence
  Description of Artificial Sequence: Synthetic oligonucleotide
ucaaaagcccuu

SEQ ID NO: 75860 - RNA, 12 nt, Artificial Sequence
  Description of Artificial Sequence: Synthetic oligonucleotide
aaaagcccuuca

SEQ ID NO: 75861 - RNA, 12 nt, Artificial Sequence
  Description of Artificial Sequence: Synthetic oligonucleotide
aaagcccuucag

SEQ ID NO: 75862 - RNA, 13 nt, Artificial Sequence
  Description of Artificial Sequence: Synthetic oligonucleotide
gugaagccgcucg

SEQ ID NO: 75863 - RNA, 12 nt, Artificial Sequence
  Description of Artificial Sequence: Synthetic oligonucleotide
cacgccagucaa

SEQ ID NO: 75864 - RNA, 13 nt, Artificial Sequence
  Description of Artificial Sequence: Synthetic oligonucleotide
uucuuggugcgug

SEQ ID NO: 75865 - RNA, 14 nt, Artificial Sequence
  Description of Artificial Sequence: Synthetic oligonucleotide
auuggauucaucag

SEQ ID NO: 75866 - RNA, 13 nt, Artificial Sequence
  Description of Artificial Sequence: Synthetic oligonucleotide
uggaauaccuaag

SEQ ID NO: 75867 - RNA, 12 nt, Artificial Sequence
  Description of Artificial Sequence: Synthetic oligonucleotide
auuugaggcuca

SEQ ID NO: 75868 - RNA, 11 nt, Artificial Sequence
  Description of Artificial Sequence: Synthetic oligonucleotide
ucuacaauugg

SEQ ID NO: 75869 - RNA, 12 nt, Artificial Sequence
  Description of Artificial Sequence: Synthetic oligonucleotide
uaguuaggagcc

SEQ ID NO: 75870 - RNA, 13 nt, Artificial Sequence
  Description of Artificial Sequence: Synthetic oligonucleotide
agucaauauccac

SEQ ID NO: 75871 - RNA, 13 nt, Artificial Sequence
  Description of Artificial Sequence: Synthetic oligonucleotide
auguucagucaca

SEQ ID NO: 75872 - RNA, 12 nt, Artificial Sequence
  Description of Artificial Sequence: Synthetic oligonucleotide
acacacacauac

SEQ ID NO: 75873 - RNA, 12 nt, Artificial Sequence
  Description of Artificial Sequence: Synthetic oligonucleotide
uuccuuuugcuu

SEQ ID NO: 75874 - RNA, 16 nt, Artificial Sequence
  Description of Artificial Sequence: Synthetic oligonucleotide
uuuuaaaguaauuuuu

SEQ ID NO: 75875 - RNA, 13 nt, Artificial Sequence
  Description of Artificial Sequence: Synthetic oligonucleotide
caacagucaaugg

SEQ ID NO: 75876 - RNA, 13 nt, Artificial Sequence
  Description of Artificial Sequence: Synthetic oligonucleotide
ucgacaaaccaau

SEQ ID NO: 75877 - RNA, 12 nt, Artificial Sequence
  Description of Artificial Sequence: Synthetic oligonucleotide
acugcuaccacu

SEQ ID NO: 75878 - RNA, 13 nt, Artificial Sequence
  Description of Artificial Sequence: Synthetic oligonucleotide
gcaagcggucuua

SEQ ID NO: 75879 - RNA, 13 nt, Artificial Sequence
  Description of Artificial Sequence: Synthetic oligonucleotide
ggucuuaccggcu

SEQ ID NO: 75880 - RNA, 11 nt, Artificial Sequence
  Description of Artificial Sequence: Synthetic oligonucleotide
gauggguuacc

SEQ ID NO: 75881 - RNA, 11 nt, Artificial Sequence
  Description of Artificial Sequence: Synthetic oligonucleotide
guuaccugcga

SEQ ID NO: 75882 - RNA, 12 nt, Artificial Sequence
  Description of Artificial Sequence: Synthetic oligonucleotide
aaucuugcugag

SEQ ID NO: 75883 - RNA, 13 nt, Artificial Sequence
  Description of Artificial Sequence: Synthetic oligonucleotide
agcauaaaacagu

SEQ ID NO: 75884 - RNA, 12 nt, Artificial Sequence
  Description of Artificial Sequence: Synthetic oligonucleotide
guccuuuauccu

SEQ ID NO: 75885 - RNA, 12 nt, Artificial Sequence
  Description of Artificial Sequence: Synthetic oligonucleotide
caacgcaaguug

SEQ ID NO: 75886 - RNA, 13 nt, Artificial Sequence
  Description of Artificial Sequence: Synthetic oligonucleotide
aaacugaaaccau

SEQ ID NO: 75887 - RNA, 14 nt, Artificial Sequence
  Description of Artificial Sequence: Synthetic oligonucleotide
acuuuguuaaauau

SEQ ID NO: 75888 - RNA, 14 nt, Artificial Sequence
  Description of Artificial Sequence: Synthetic oligonucleotide
guauauuaaaaguu

SEQ ID NO: 75889 - RNA, 13 nt, Artificial Sequence
  Description of Artificial Sequence: Synthetic oligonucleotide
guuuugacuuaac

SEQ ID NO: 75890 - RNA, 13 nt, Artificial Sequence
  Description of Artificial Sequence: Synthetic oligonucleotide
gcaaacucagcac

SEQ ID NO: 75891 - RNA, 11 nt, Artificial Sequence
  Description of Artificial Sequence: Synthetic oligonucleotide
ugcugaccuca

SEQ ID NO: 75892 - RNA, 14 nt, Artificial Sequence
  Description of Artificial Sequence: Synthetic oligonucleotide
uuuauucagaucgc

SEQ ID NO: 75893 - RNA, 13 nt, Artificial Sequence
  Description of Artificial Sequence: Synthetic oligonucleotide
aggguucugggau

SEQ ID NO: 75894 - RNA, 15 nt, Artificial Sequence
  Description of Artificial Sequence: Synthetic oligonucleotide
auauuggaaauuaug

SEQ ID NO: 75895 - RNA, 13 nt, Artificial Sequence
  Description of Artificial Sequence: Synthetic oligonucleotide
auggaagcacuag

SEQ ID NO: 75896 - RNA, 13 nt, Artificial Sequence
  Description of Artificial Sequence: Synthetic oligonucleotide
guuuuuaugugga

SEQ ID NO: 75897 - RNA, 12 nt, Artificial Sequence
  Description of Artificial Sequence: Synthetic oligonucleotide
ggaauugguaga

SEQ ID NO: 75898 - RNA, 13 nt, Artificial Sequence
  Description of Artificial Sequence: Synthetic oligonucleotide
uuagacuuggaga

SEQ ID NO: 75899 - RNA, 13 nt, Artificial Sequence
  Description of Artificial Sequence: Synthetic oligonucleotide
uuacaguauucca

SEQ ID NO: 75900 - RNA, 15 nt, Artificial Sequence
  Description of Artificial Sequence: Synthetic oligonucleotide
ccacugaugaauuaa

SEQ ID NO: 75901 - RNA, 12 nt, Artificial Sequence
  Description of Artificial Sequence: Synthetic oligonucleotide
ccacaucaucac

SEQ ID NO: 75902 - RNA, 13 nt, Artificial Sequence
  Description of Artificial Sequence: Synthetic oligonucleotide
cucaccaaacaga

SEQ ID NO: 75903 - RNA, 12 nt, Artificial Sequence
  Description of Artificial Sequence: Synthetic oligonucleotide
ggaacaugaugg

SEQ ID NO: 75904 - RNA, 12 nt, Artificial Sequence
  Description of Artificial Sequence: Synthetic oligonucleotide
cauguagacugc

SEQ ID NO: 75905 - RNA, 13 nt, Artificial Sequence
  Description of Artificial Sequence: Synthetic oligonucleotide
ggaucuauuuaug

SEQ ID NO: 75906 - RNA, 12 nt, Artificial Sequence
  Description of Artificial Sequence: Synthetic oligonucleotide
gcacuauuauca

SEQ ID NO: 75907 - RNA, 11 nt, Artificial Sequence
  Description of Artificial Sequence: Synthetic oligonucleotide
aucaguucugc

SEQ ID NO: 75908 - RNA, 13 nt, Artificial Sequence
  Description of Artificial Sequence: Synthetic oligonucleotide
agauuaaaccuac

SEQ ID NO: 75909 - RNA, 13 nt, Artificial Sequence
  Description of Artificial Sequence: Synthetic oligonucleotide
auaaaauccuucu

SEQ ID NO: 75910 - RNA, 12 nt, Artificial Sequence
  Description of Artificial Sequence: Synthetic oligonucleotide
aaugcuguagac

SEQ ID NO: 75911 - RNA, 13 nt, Artificial Sequence
  Description of Artificial Sequence: Synthetic oligonucleotide
uugauaggaauag

SEQ ID NO: 75912 - RNA, 11 nt, Artificial Sequence
  Description of Artificial Sequence: Synthetic oligonucleotide
aauggcccuga

SEQ ID NO: 75913 - RNA, 11 nt, Artificial Sequence
  Description of Artificial Sequence: Synthetic oligonucleotide
uuccucaagca

SEQ ID NO: 75914 - RNA, 10 nt, Artificial Sequence
  Description of Artificial Sequence: Synthetic oligonucleotide
guucagccca

SEQ ID NO: 75915 - RNA, 11 nt, Artificial Sequence
  Description of Artificial Sequence: Synthetic oligonucleotide
gcugcugaacc

SEQ ID NO: 75916 - RNA, 12 nt, Artificial Sequence
  Description of Artificial Sequence: Synthetic oligonucleotide
aaguucucuuca

SEQ ID NO: 75917 - RNA, 11 nt, Artificial Sequence
  Description of Artificial Sequence: Synthetic oligonucleotide
ccagccuagag

SEQ ID NO: 75918 - RNA, 13 nt, Artificial Sequence
  Description of Artificial Sequence: Synthetic oligonucleotide
cucugugaagugu

SEQ ID NO: 75919 - RNA, 14 nt, Artificial Sequence
  Description of Artificial Sequence: Synthetic oligonucleotide
ugagaaaauuucaa

SEQ ID NO: 75920 - RNA, 11 nt, Artificial Sequence
  Description of Artificial Sequence: Synthetic oligonucleotide
aauccuccuga

SEQ ID NO: 75921 - RNA, 12 nt, Artificial Sequence
  Description of Artificial Sequence: Synthetic oligonucleotide
gugacaucauau

SEQ ID NO: 75922 - RNA, 13 nt, Artificial Sequence
  Description of Artificial Sequence: Synthetic oligonucleotide
aaucuucaucaua

SEQ ID NO: 75923 - RNA, 13 nt, Artificial Sequence
  Description of Artificial Sequence: Synthetic oligonucleotide
gacuagcuauuaa

SEQ ID NO: 75924 - RNA, 14 nt, Artificial Sequence
  Description of Artificial Sequence: Synthetic oligonucleotide
ucucuacuaaaaau

SEQ ID NO: 75925 - RNA, 12 nt, Artificial Sequence
  Description of Artificial Sequence: Synthetic oligonucleotide
ucuaucucgccu

SEQ ID NO: 75926 - RNA, 13 nt, Artificial Sequence
  Description of Artificial Sequence: Synthetic oligonucleotide
cuucgguccaguu

SEQ ID NO: 75927 - RNA, 11 nt, Artificial Sequence
  Description of Artificial Sequence: Synthetic oligonucleotide
gauguagccgc

SEQ ID NO: 75928 - RNA, 12 nt, Artificial Sequence
  Description of Artificial Sequence: Synthetic oligonucleotide
ugaggagacuug

SEQ ID NO: 75929 - RNA, 12 nt, Artificial Sequence
  Description of Artificial Sequence: Synthetic oligonucleotide
gaguagugagga

SEQ ID NO: 75930 - RNA, 14 nt, Artificial Sequence
  Description of Artificial Sequence: Synthetic oligonucleotide
cagaugaguacaaa

SEQ ID NO: 75931 - RNA, 13 nt, Artificial Sequence
  Description of Artificial Sequence: Synthetic oligonucleotide
guuguuaaugggc

SEQ ID NO: 75932 - RNA, 13 nt, Artificial Sequence
  Description of Artificial Sequence: Synthetic oligonucleotide
uuuuuaauuuauu

SEQ ID NO: 75933 - RNA, 12 nt, Artificial Sequence
  Description of Artificial Sequence: Synthetic oligonucleotide
uauuuaaauaug

SEQ ID NO: 75934 - RNA, 13 nt, Artificial Sequence
  Description of Artificial Sequence: Synthetic oligonucleotide
uauccuuuguuuc

SEQ ID NO: 75935 - RNA, 14 nt, Artificial Sequence
  Description of Artificial Sequence: Synthetic oligonucleotide
cgucuaaguguuug

SEQ ID NO: 75936 - RNA, 12 nt, Artificial Sequence
  Description of Artificial Sequence: Synthetic oligonucleotide
accugugacaaa

SEQ ID NO: 75937 - RNA, 13 nt, Artificial Sequence
  Description of Artificial Sequence: Synthetic oligonucleotide
ccaggcugaauua

SEQ ID NO: 75938 - RNA, 14 nt, Artificial Sequence
  Description of Artificial Sequence: Synthetic oligonucleotide
gucauucuuacaau

SEQ ID NO: 75939 - RNA, 15 nt, Artificial Sequence
  Description of Artificial Sequence: Synthetic oligonucleotide
ucauucuuacaauug

SEQ ID NO: 75940 - RNA, 12 nt, Artificial Sequence
  Description of Artificial Sequence: Synthetic oligonucleotide
cagagaguguac

SEQ ID NO: 75941 - RNA, 12 nt, Artificial Sequence
  Description of Artificial Sequence: Synthetic oligonucleotide
agaacucagcag

SEQ ID NO: 75942 - RNA, 13 nt, Artificial Sequence
  Description of Artificial Sequence: Synthetic oligonucleotide
uuuauuuucagua

SEQ ID NO: 75943 - RNA, 12 nt, Artificial Sequence
  Description of Artificial Sequence: Synthetic oligonucleotide
ucuuaaauggaa

SEQ ID NO: 75944 - RNA, 13 nt, Artificial Sequence
  Description of Artificial Sequence: Synthetic oligonucleotide
ugccuaaaauugu

SEQ ID NO: 75945 - RNA, 12 nt, Artificial Sequence
  Description of Artificial Sequence: Synthetic oligonucleotide
agacugugagcu

SEQ ID NO: 75946 - RNA, 14 nt, Artificial Sequence
  Description of Artificial Sequence: Synthetic oligonucleotide
ugcuuuuuauuaau

SEQ ID NO: 75947 - RNA, 13 nt, Artificial Sequence
  Description of Artificial Sequence: Synthetic oligonucleotide
cucuucuuacauu

SEQ ID NO: 75948 - RNA, 15 nt, Artificial Sequence
  Description of Artificial Sequence: Synthetic oligonucleotide
cauuuguaaaaaugu

SEQ ID NO: 75949 - RNA, 15 nt, Artificial Sequence
  Description of Artificial Sequence: Synthetic oligonucleotide
aucuuaauucauauu

SEQ ID NO: 75950 - RNA, 13 nt, Artificial Sequence
  Description of Artificial Sequence: Synthetic oligonucleotide
gaacuaaucauga

SEQ ID NO: 75951 - RNA, 12 nt, Artificial Sequence
  Description of Artificial Sequence: Synthetic oligonucleotide
ucugcucuuggg

SEQ ID NO: 75952 - RNA, 13 nt, Artificial Sequence
  Description of Artificial Sequence: Synthetic oligonucleotide
caguagcuuugag

SEQ ID NO: 75953 - RNA, 14 nt, Artificial Sequence
  Description of Artificial Sequence: Synthetic oligonucleotide
cacguaauauuuca

SEQ ID NO: 75954 - RNA, 13 nt, Artificial Sequence
  Description of Artificial Sequence: Synthetic oligonucleotide
uauucucuucacu

SEQ ID NO: 75955 - RNA, 14 nt, Artificial Sequence
  Description of Artificial Sequence: Synthetic oligonucleotide
cuaaugcuaagaaa

SEQ ID NO: 75956 - RNA, 12 nt, Artificial Sequence
  Description of Artificial Sequence: Synthetic oligonucleotide
gcugaaaaucaa

SEQ ID NO: 75957 - RNA, 14 nt, Artificial Sequence
  Description of Artificial Sequence: Synthetic oligonucleotide
aauaugauuacuuu

SEQ ID NO: 75958 - RNA, 14 nt, Artificial Sequence
  Description of Artificial Sequence: Synthetic oligonucleotide
cauuuuguucuaca

SEQ ID NO: 75959 - RNA, 12 nt, Artificial Sequence
  Description of Artificial Sequence: Synthetic oligonucleotide
cccgggacucuc

SEQ ID NO: 75960 - RNA, 14 nt, Artificial Sequence
  Description of Artificial Sequence: Synthetic oligonucleotide
ccuuuaaaguaaag

SEQ ID NO: 75961 - RNA, 13 nt, Artificial Sequence
  Description of Artificial Sequence: Synthetic oligonucleotide
ucuggaagccugg

SEQ ID NO: 75962 - RNA, 14 nt, Artificial Sequence
  Description of Artificial Sequence: Synthetic oligonucleotide
aaaacaaaagagag

SEQ ID NO: 75963 - RNA, 13 nt, Artificial Sequence
  Description of Artificial Sequence: Synthetic oligonucleotide
aucaguuaugccg

SEQ ID NO: 75964 - RNA, 13 nt, Artificial Sequence
  Description of Artificial Sequence: Synthetic oligonucleotide
uaaaagaagucca

SEQ ID NO: 75965 - RNA, 11 nt, Artificial Sequence
  Description of Artificial Sequence: Synthetic oligonucleotide
aggugagguua

SEQ ID NO: 75966 - RNA, 11 nt, Artificial Sequence
  Description of Artificial Sequence: Synthetic oligonucleotide
gggaagaggac

SEQ ID NO: 75967 - RNA, 13 nt, Artificial Sequence
  Description of Artificial Sequence: Synthetic oligonucleotide
aagcaaguauugu

SEQ ID NO: 75968 - RNA, 12 nt, Artificial Sequence
  Description of Artificial Sequence: Synthetic oligonucleotide
auuguagcacuc

SEQ ID NO: 75969 - RNA, 14 nt, Artificial Sequence
  Description of Artificial Sequence: Synthetic oligonucleotide
acaaaaccacaaau

SEQ ID NO: 75970 - RNA, 12 nt, Artificial Sequence
  Description of Artificial Sequence: Synthetic oligonucleotide
uaagcccauaca

SEQ ID NO: 75971 - RNA, 11 nt, Artificial Sequence
  Description of Artificial Sequence: Synthetic oligonucleotide
agcccauacag

SEQ ID NO: 75972 - RNA, 12 nt, Artificial Sequence
  Description of Artificial Sequence: Synthetic oligonucleotide
cagaaaccuucc

SEQ ID NO: 75973 - RNA, 10 nt, Artificial Sequence
  Description of Artificial Sequence: Synthetic oligonucleotide
guauaccuac

SEQ ID NO: 75974 - RNA, 13 nt, Artificial Sequence
  Description of Artificial Sequence: Synthetic oligonucleotide
gccaguuuucgga

SEQ ID NO: 75975 - RNA, 9 nt, Artificial Sequence
  Description of Artificial Sequence: Synthetic oligonucleotide
ggaacaggg

SEQ ID NO: 75976 - RNA, 13 nt, Artificial Sequence
  Description of Artificial Sequence: Synthetic oligonucleotide
uuaacuuuccagu

SEQ ID NO: 75977 - RNA, 14 nt, Artificial Sequence
  Description of Artificial Sequence: Synthetic oligonucleotide
aaaguuugguuuug

SEQ ID NO: 75978 - RNA, 12 nt, Artificial Sequence
  Description of Artificial Sequence: Synthetic oligonucleotide
cuucccacugua

SEQ ID NO: 75979 - RNA, 13 nt, Artificial Sequence
  Description of Artificial Sequence: Synthetic oligonucleotide
ugauaccauauga

SEQ ID NO: 75980 - RNA, 11 nt, Artificial Sequence
  Description of Artificial Sequence: Synthetic oligonucleotide
aacaugggcug

SEQ ID NO: 75981 - RNA, 13 nt, Artificial Sequence
  Description of Artificial Sequence: Synthetic oligonucleotide
caacuuuuucaua

SEQ ID NO: 75982 - RNA, 12 nt, Artificial Sequence
  Description of Artificial Sequence: Synthetic oligonucleotide
caugaggccgga

SEQ ID NO: 75983 - RNA, 11 nt, Artificial Sequence
  Description of Artificial Sequence: Synthetic oligonucleotide
acugcauuugu

SEQ ID NO: 75984 - RNA, 13 nt, Artificial Sequence
  Description of Artificial Sequence: Synthetic oligonucleotide
aauguuuacuacc

SEQ ID NO: 75985 - RNA, 15 nt, Artificial Sequence
  Description of Artificial Sequence: Synthetic oligonucleotide
aauuuuuugaugaaa

SEQ ID NO: 75986 - RNA, 14 nt, Artificial Sequence
  Description of Artificial Sequence: Synthetic oligonucleotide
cagugugugaauuu

SEQ ID NO: 75987 - RNA, 13 nt, Artificial Sequence
  Description of Artificial Sequence: Synthetic oligonucleotide
gagcaauguaugu

SEQ ID NO: 75988 - RNA, 14 nt, Artificial Sequence
  Description of Artificial Sequence: Synthetic oligonucleotide
aaagcacauauaua

SEQ ID NO: 75989 - RNA, 14 nt, Artificial Sequence
  Description of Artificial Sequence: Synthetic oligonucleotide
guaauaguuucucc

SEQ ID NO: 75990 - RNA, 13 nt, Artificial Sequence
  Description of Artificial Sequence: Synthetic oligonucleotide
aguuucuccaaau

SEQ ID NO: 75991 - RNA, 13 nt, Artificial Sequence
  Description of Artificial Sequence: Synthetic oligonucleotide
uacuuccuagaaa

SEQ ID NO: 75992 - RNA, 13 nt, Artificial Sequence
  Description of Artificial Sequence: Synthetic oligonucleotide
uacaccauauaug

SEQ ID NO: 75993 - RNA, 14 nt, Artificial Sequence
  Description of Artificial Sequence: Synthetic oligonucleotide
auauaugaauggag

SEQ ID NO: 75994 - RNA, 13 nt, Artificial Sequence
  Description of Artificial Sequence: Synthetic oligonucleotide
acgagaagaagau

SEQ ID NO: 75995 - RNA, 13 nt, Artificial Sequence
  Description of Artificial Sequence: Synthetic oligonucleotide
ucauuuacaggga

SEQ ID NO: 75996 - RNA, 13 nt, Artificial Sequence
  Description of Artificial Sequence: Synthetic oligonucleotide
cauuuacagggac

SEQ ID NO: 75997 - RNA, 10 nt, Artificial Sequence
  Description of Artificial Sequence: Synthetic oligonucleotide
agggaccuga

SEQ ID NO: 75998 - RNA, 14 nt, Artificial Sequence
  Description of Artificial Sequence: Synthetic oligonucleotide
uguuugacugcauc

SEQ ID NO: 75999 - RNA, 13 nt, Artificial Sequence
  Description of Artificial Sequence: Synthetic oligonucleotide
uuugacugcaucg

SEQ ID NO: 76000 - RNA, 12 nt, Artificial Sequence
  Description of Artificial Sequence: Synthetic oligonucleotide
gaguucacaggg

SEQ ID NO: 76001 - RNA, 13 nt, Artificial Sequence
  Description of Artificial Sequence: Synthetic oligonucleotide
ggcaccucugucc

SEQ ID NO: 76002 - RNA, 15 nt, Artificial Sequence
  Description of Artificial Sequence: Synthetic oligonucleotide
gguuugucuuuuuaa

SEQ ID NO: 76003 - RNA, 14 nt, Artificial Sequence
  Description of Artificial Sequence: Synthetic oligonucleotide
uuugucuuuuuaag

SEQ ID NO: 76004 - RNA, 13 nt, Artificial Sequence
  Description of Artificial Sequence: Synthetic oligonucleotide
ccuaaagguuguc

SEQ ID NO: 76005 - RNA, 12 nt, Artificial Sequence
  Description of Artificial Sequence: Synthetic oligonucleotide
aagguugucgac

SEQ ID NO: 76006 - RNA, 13 nt, Artificial Sequence
  Description of Artificial Sequence: Synthetic oligonucleotide
accuggcaauugu

SEQ ID NO: 76007 - RNA, 12 nt, Artificial Sequence
  Description of Artificial Sequence: Synthetic oligonucleotide
aguggugcgagg

SEQ ID NO: 76008 - RNA, 13 nt, Artificial Sequence
  Description of Artificial Sequence: Synthetic oligonucleotide
agagacaugaaau

SEQ ID NO: 76009 - RNA, 13 nt, Artificial Sequence
  Description of Artificial Sequence: Synthetic oligonucleotide
auauauuucucca

SEQ ID NO: 76010 - RNA, 10 nt, Artificial Sequence
  Description of Artificial Sequence: Synthetic oligonucleotide
caugaaggcu

SEQ ID NO: 76011 - RNA, 11 nt, Artificial Sequence
  Description of Artificial Sequence: Synthetic oligonucleotide
gcuggaguggu

SEQ ID NO: 76012 - RNA, 11 nt, Artificial Sequence
  Description of Artificial Sequence: Synthetic oligonucleotide
aggaagagagg

SEQ ID NO: 76013 - RNA, 12 nt, Artificial Sequence
  Description of Artificial Sequence: Synthetic oligonucleotide
cuugcaucgggc

SEQ ID NO: 76014 - RNA, 13 nt, Artificial Sequence
  Description of Artificial Sequence: Synthetic oligonucleotide
auauccuacugug

SEQ ID NO: 76015 - RNA, 13 nt, Artificial Sequence
  Description of Artificial Sequence: Synthetic oligonucleotide
uccuacuguguaa

SEQ ID NO: 76016 - RNA, 12 nt, Artificial Sequence
  Description of Artificial Sequence: Synthetic oligonucleotide
ccuuguagugua

SEQ ID NO: 76017 - RNA, 13 nt, Artificial Sequence
  Description of Artificial Sequence: Synthetic oligonucleotide
ucuuuguugauug

SEQ ID NO: 76018 - RNA, 14 nt, Artificial Sequence
  Description of Artificial Sequence: Synthetic oligonucleotide
uuuguugauugaaa

SEQ ID NO: 76019 - RNA, 15 nt, Artificial Sequence
  Description of Artificial Sequence: Synthetic oligonucleotide
uucuuuuucuuccau

SEQ ID NO: 76020 - RNA, 13 nt, Artificial Sequence
  Description of Artificial Sequence: Synthetic oligonucleotide
aaucuuccuucua

SEQ ID NO: 76021 - RNA, 13 nt, Artificial Sequence
  Description of Artificial Sequence: Synthetic oligonucleotide
uugaaugcuucau

SEQ ID NO: 76022 - RNA, 13 nt, Artificial Sequence
  Description of Artificial Sequence: Synthetic oligonucleotide
ugaaugcuucaug

SEQ ID NO: 76023 - RNA, 13 nt, Artificial Sequence
  Description of Artificial Sequence: Synthetic oligonucleotide
aauucuacuuuga

SEQ ID NO: 76024 - RNA, 13 nt, Artificial Sequence
  Description of Artificial Sequence: Synthetic oligonucleotide
agcaacuacagac

SEQ ID NO: 76025 - RNA, 13 nt, Artificial Sequence
  Description of Artificial Sequence: Synthetic oligonucleotide
gaccaaggucaac

SEQ ID NO: 76026 - RNA, 13 nt, Artificial Sequence
  Description of Artificial Sequence: Synthetic oligonucleotide
cgacuaucucgac

SEQ ID NO: 76027 - RNA, 13 nt, Artificial Sequence
  Description of Artificial Sequence: Synthetic oligonucleotide
aaccuucccaaac

SEQ ID NO: 76028 - RNA, 14 nt, Artificial Sequence
  Description of Artificial Sequence: Synthetic oligonucleotide
ccaagcuuagaacu

SEQ ID NO: 76029 - RNA, 15 nt, Artificial Sequence
  Description of Artificial Sequence: Synthetic oligonucleotide
agcuuagaacuuuaa

SEQ ID NO: 76030 - RNA, 11 nt, Artificial Sequence
  Description of Artificial Sequence: Synthetic oligonucleotide
aagaccaccac

SEQ ID NO: 76031 - RNA, 14 nt, Artificial Sequence
  Description of Artificial Sequence: Synthetic oligonucleotide
gcgagaaauaaagu

SEQ ID NO: 76032 - RNA, 14 nt, Artificial Sequence
  Description of Artificial Sequence: Synthetic oligonucleotide
cgagaaauaaaguu

SEQ ID NO: 76033 - RNA, 12 nt, Artificial Sequence
  Description of Artificial Sequence: Synthetic oligonucleotide
aggaaaugaucc

SEQ ID NO: 76034 - RNA, 13 nt, Artificial Sequence
  Description of Artificial Sequence: Synthetic oligonucleotide
gaagaaaugaaac

SEQ ID NO: 76035 - RNA, 13 nt, Artificial Sequence
  Description of Artificial Sequence: Synthetic oligonucleotide
guuuccauccucc

SEQ ID NO: 76036 - RNA, 15 nt, Artificial Sequence
  Description of Artificial Sequence: Synthetic oligonucleotide
acugaaaaucuuuga

SEQ ID NO: 76037 - RNA, 11 nt, Artificial Sequence
  Description of Artificial Sequence: Synthetic oligonucleotide
ugccguucagg

SEQ ID NO: 76038 - RNA, 13 nt, Artificial Sequence
  Description of Artificial Sequence: Synthetic oligonucleotide
caggguccagaag

SEQ ID NO: 76039 - RNA, 13 nt, Artificial Sequence
  Description of Artificial Sequence: Synthetic oligonucleotide
ucaagacugcuug

SEQ ID NO: 76040 - RNA, 13 nt, Artificial Sequence
  Description of Artificial Sequence: Synthetic oligonucleotide
uccaugucuuugg

SEQ ID NO: 76041 - RNA, 11 nt, Artificial Sequence
  Description of Artificial Sequence: Synthetic oligonucleotide
gccugaaacac

SEQ ID NO: 76042 - RNA, 12 nt, Artificial Sequence
  Description of Artificial Sequence: Synthetic oligonucleotide
ucucuguaccuc

SEQ ID NO: 76043 - RNA, 12 nt, Artificial Sequence
  Description of Artificial Sequence: Synthetic oligonucleotide
agcaagacaaga

SEQ ID NO: 76044 - RNA, 13 nt, Artificial Sequence
  Description of Artificial Sequence: Synthetic oligonucleotide
gcaagacaagaaa

SEQ ID NO: 76045 - RNA, 12 nt, Artificial Sequence
  Description of Artificial Sequence: Synthetic oligonucleotide
uguacaagaucc

SEQ ID NO: 76046 - RNA, 12 nt, Artificial Sequence
  Description of Artificial Sequence: Synthetic oligonucleotide
cguacuugcaga

SEQ ID NO: 76047 - RNA, 13 nt, Artificial Sequence
  Description of Artificial Sequence: Synthetic oligonucleotide
cgaucgauacaga

SEQ ID NO: 76048 - RNA, 13 nt, Artificial Sequence
  Description of Artificial Sequence: Synthetic oligonucleotide
uauaaaaauaaau

SEQ ID NO: 76049 - RNA, 13 nt, Artificial Sequence
  Description of Artificial Sequence: Synthetic oligonucleotide
uaaaaauaaauau

SEQ ID NO: 76050 - RNA, 13 nt, Artificial Sequence
  Description of Artificial Sequence: Synthetic oligonucleotide
uuugacugcugug

SEQ ID NO: 76051 - RNA, 13 nt, Artificial Sequence
  Description of Artificial Sequence: Synthetic oligonucleotide
ggagaugagagac

SEQ ID NO: 76052 - RNA, 10 nt, Artificial Sequence
  Description of Artificial Sequence: Synthetic oligonucleotide
ucccacuugg

SEQ ID NO: 76053 - RNA, 10 nt, Artificial Sequence
  Description of Artificial Sequence: Synthetic oligonucleotide
guucacggcc

SEQ ID NO: 76054 - RNA, 12 nt, Artificial Sequence
  Description of Artificial Sequence: Synthetic oligonucleotide
accaucacacca

SEQ ID NO: 76055 - RNA, 10 nt, Artificial Sequence
  Description of Artificial Sequence: Synthetic oligonucleotide
cugcggguuu

SEQ ID NO: 76056 - RNA, 9 nt, Artificial Sequence
  Description of Artificial Sequence: Synthetic oligonucleotide
uccaguuug

SEQ ID NO: 76057 - RNA, 12 nt, Artificial Sequence
  Description of Artificial Sequence: Synthetic oligonucleotide
uuaaggacuucu

SEQ ID NO: 76058 - RNA, 12 nt, Artificial Sequence
  Description of Artificial Sequence: Synthetic oligonucleotide
agugggacagag

SEQ ID NO: 76059 - RNA, 13 nt, Artificial Sequence
  Description of Artificial Sequence: Synthetic oligonucleotide
auuuguuauugug

SEQ ID NO: 76060 - RNA, 12 nt, Artificial Sequence
  Description of Artificial Sequence: Synthetic oligonucleotide
ucaaaugcauuu

SEQ ID NO: 76061 - RNA, 9 nt, Artificial Sequence
  Description of Artificial Sequence: Synthetic oligonucleotide
aggaaagcc

SEQ ID NO: 76062 - RNA, 10 nt, Artificial Sequence
  Description of Artificial Sequence: Synthetic oligonucleotide
ggaaagcccu

SEQ ID NO: 76063 - RNA, 11 nt, Artificial Sequence
  Description of Artificial Sequence: Synthetic oligonucleotide
ccagcauggcc

SEQ ID NO: 76064 - RNA, 10 nt, Artificial Sequence
  Description of Artificial Sequence: Synthetic oligonucleotide
uucucccuga

SEQ ID NO: 76065 - RNA, 11 nt, Artificial Sequence
  Description of Artificial Sequence: Synthetic oligonucleotide
aagaagcccuu

SEQ ID NO: 76066 - RNA, 11 nt, Artificial Sequence
  Description of Artificial Sequence: Synthetic oligonucleotide
gaagcccuuca

SEQ ID NO: 76067 - RNA, 10 nt, Artificial Sequence
  Description of Artificial Sequence: Synthetic oligonucleotide
cccuucagcg

SEQ ID NO: 76068 - RNA, 10 nt, Artificial Sequence
  Description of Artificial Sequence: Synthetic oligonucleotide
cuucagcggc

SEQ ID NO: 76069 - RNA, 11 nt, Artificial Sequence
  Description of Artificial Sequence: Synthetic oligonucleotide
cagcggccagu

SEQ ID NO: 76070 - RNA, 11 nt, Artificial Sequence
  Description of Artificial Sequence: Synthetic oligonucleotide
gaaaagcuccg

SEQ ID NO: 76071 - RNA, 10 nt, Artificial Sequence
  Description of Artificial Sequence: Synthetic oligonucleotide
aaagcuccgg

SEQ ID NO: 76072 - RNA, 12 nt, Artificial Sequence
  Description of Artificial Sequence: Synthetic oligonucleotide
gucaacagucug

SEQ ID NO: 76073 - RNA, 12 nt, Artificial Sequence
  Description of Artificial Sequence: Synthetic oligonucleotide
agaguucaaaag

SEQ ID NO: 76074 - RNA, 12 nt, Artificial Sequence
  Description of Artificial Sequence: Synthetic oligonucleotide
gaguucaaaagc

SEQ ID NO: 76075 - RNA, 11 nt, Artificial Sequence
  Description of Artificial Sequence: Synthetic oligonucleotide
ucaaaagcccu

SEQ ID NO: 76076 - RNA, 11 nt, Artificial Sequence
  Description of Artificial Sequence: Synthetic oligonucleotide
caaaagcccuu

SEQ ID NO: 76077 - RNA, 11 nt, Artificial Sequence
  Description of Artificial Sequence: Synthetic oligonucleotide
aaagcccuuca

SEQ ID NO: 76078 - RNA, 11 nt, Artificial Sequence
  Description of Artificial Sequence: Synthetic oligonucleotide
aagcccuucag

SEQ ID NO: 76079 - RNA, 12 nt, Artificial Sequence
  Description of Artificial Sequence: Synthetic oligonucleotide
ugaagccgcucg

SEQ ID NO: 76080 - RNA, 11 nt, Artificial Sequence
  Description of Artificial Sequence: Synthetic oligonucleotide
acgccagucaa

SEQ ID NO: 76081 - RNA, 12 nt, Artificial Sequence
  Description of Artificial Sequence: Synthetic oligonucleotide
ucuuggugcgug

SEQ ID NO: 76082 - RNA, 13 nt, Artificial Sequence
  Description of Artificial Sequence: Synthetic oligonucleotide
uuggauucaucag

SEQ ID NO: 76083 - RNA, 12 nt, Artificial Sequence
  Description of Artificial Sequence: Synthetic oligonucleotide
ggaauaccuaag

SEQ ID NO: 76084 - RNA, 11 nt, Artificial Sequence
  Description of Artificial Sequence: Synthetic oligonucleotide
uuugaggcuca

SEQ ID NO: 76085 - RNA, 10 nt, Artificial Sequence
  Description of Artificial Sequence: Synthetic oligonucleotide
cuacaauugg

SEQ ID NO: 76086 - RNA, 11 nt, Artificial Sequence
  Description of Artificial Sequence: Synthetic oligonucleotide
aguuaggagcc

SEQ ID NO: 76087 - RNA, 12 nt, Artificial Sequence
  Description of Artificial Sequence: Synthetic oligonucleotide
gucaauauccac

SEQ ID NO: 76088 - RNA, 12 nt, Artificial Sequence
  Description of Artificial Sequence: Synthetic oligonucleotide
uguucagucaca

SEQ ID NO: 76089 - RNA, 11 nt, Artificial Sequence
  Description of Artificial Sequence: Synthetic oligonucleotide
cacacacauac

SEQ ID NO: 76090 - RNA, 11 nt, Artificial Sequence
  Description of Artificial Sequence: Synthetic oligonucleotide
uccuuuugcuu

SEQ ID NO: 76091 - RNA, 15 nt, Artificial Sequence
  Description of Artificial Sequence: Synthetic oligonucleotide
uuuaaaguaauuuuu

SEQ ID NO: 76092 - RNA, 12 nt, Artificial Sequence
  Description of Artificial Sequence: Synthetic oligonucleotide
aacagucaaugg

SEQ ID NO: 76093 - RNA, 12 nt, Artificial Sequence
  Description of Artificial Sequence: Synthetic oligonucleotide
cgacaaaccaau

SEQ ID NO: 76094 - RNA, 11 nt, Artificial Sequence
  Description of Artificial Sequence: Synthetic oligonucleotide
cugcuaccacu

SEQ ID NO: 76095 - RNA, 12 nt, Artificial Sequence
  Description of Artificial Sequence: Synthetic oligonucleotide
caagcggucuua

SEQ ID NO: 76096 - RNA, 12 nt, Artificial Sequence
  Description of Artificial Sequence: Synthetic oligonucleotide
gucuuaccggcu

SEQ ID NO: 76097 - RNA, 10 nt, Artificial Sequence
  Description of Artificial Sequence: Synthetic oligonucleotide
auggguuacc

SEQ ID NO: 76098 - RNA, 10 nt, Artificial Sequence
  Description of Artificial Sequence: Synthetic oligonucleotide
uuaccugcga

SEQ ID NO: 76099 - RNA, 11 nt, Artificial Sequence
  Description of Artificial Sequence: Synthetic oligonucleotide
aucuugcugag

SEQ ID NO: 76100 - RNA, 12 nt, Artificial Sequence
  Description of Artificial Sequence: Synthetic oligonucleotide
gcauaaaacagu

SEQ ID NO: 76101 - RNA, 11 nt, Artificial Sequence
  Description of Artificial Sequence: Synthetic oligonucleotide
uccuuuauccu

SEQ ID NO: 76102 - RNA, 11 nt, Artificial Sequence
  Description of Artificial Sequence: Synthetic oligonucleotide
aacgcaaguug

SEQ ID NO: 76103 - RNA, 12 nt, Artificial Sequence
  Description of Artificial Sequence: Synthetic oligonucleotide
aacugaaaccau

SEQ ID NO: 76104 - RNA, 13 nt, Artificial Sequence
  Description of Artificial Sequence: Synthetic oligonucleotide
cuuuguuaaauau

SEQ ID NO: 76105 - RNA, 13 nt, Artificial Sequence
  Description of Artificial Sequence: Synthetic oligonucleotide
uauauuaaaaguu

SEQ ID NO: 76106 - RNA, 12 nt, Artificial Sequence
  Description of Artificial Sequence: Synthetic oligonucleotide
uuuugacuuaac

SEQ ID NO: 76107 - RNA, 12 nt, Artificial Sequence
  Description of Artificial Sequence: Synthetic oligonucleotide
caaacucagcac

SEQ ID NO: 76108 - RNA, 10 nt, Artificial Sequence
  Description of Artificial Sequence: Synthetic oligonucleotide
gcugaccuca

SEQ ID NO: 76109 - RNA, 13 nt, Artificial Sequence
  Description of Artificial Sequence: Synthetic oligonucleotide
uuauucagaucgc

SEQ ID NO: 76110 - RNA, 12 nt, Artificial Sequence
  Description of Artificial Sequence: Synthetic oligonucleotide
ggguucugggau

SEQ ID NO: 76111 - RNA, 14 nt, Artificial Sequence
  Description of Artificial Sequence: Synthetic oligonucleotide
uauuggaaauuaug

SEQ ID NO: 76112 - RNA, 12 nt, Artificial Sequence
  Description of Artificial Sequence: Synthetic oligonucleotide
uggaagcacuag

SEQ ID NO: 76113 - RNA, 12 nt, Artificial Sequence
  Description of Artificial Sequence: Synthetic oligonucleotide
uuuuuaugugga

SEQ ID NO: 76114 - RNA, 11 nt, Artificial Sequence
  Description of Artificial Sequence: Synthetic oligonucleotide
gaauugguaga

SEQ ID NO: 76115 - RNA, 12 nt, Artificial Sequence
  Description of Artificial Sequence: Synthetic oligonucleotide
uagacuuggaga

SEQ ID NO: 76116 - RNA, 12 nt, Artificial Sequence
  Description of Artificial Sequence: Synthetic oligonucleotide
uacaguauucca

SEQ ID NO: 76117 - RNA, 14 nt, Artificial Sequence
  Description of Artificial Sequence: Synthetic oligonucleotide
cacugaugaauuaa

SEQ ID NO: 76118 - RNA, 11 nt, Artificial Sequence
  Description of Artificial Sequence: Synthetic oligonucleotide
cacaucaucac

SEQ ID NO: 76119 - RNA, 12 nt, Artificial Sequence
  Description of Artificial Sequence: Synthetic oligonucleotide
ucaccaaacaga

SEQ ID NO: 76120 - RNA, 11 nt, Artificial Sequence
  Description of Artificial Sequence: Synthetic oligonucleotide
gaacaugaugg

SEQ ID NO: 76121 - RNA, 11 nt, Artificial Sequence
  Description of Artificial Sequence: Synthetic oligonucleotide
auguagacugc

SEQ ID NO: 76122 - RNA, 12 nt, Artificial Sequence
  Description of Artificial Sequence: Synthetic oligonucleotide
gaucuauuuaug

SEQ ID NO: 76123 - RNA, 11 nt, Artificial Sequence
  Description of Artificial Sequence: Synthetic oligonucleotide
cacuauuauca

SEQ ID NO: 76124 - RNA, 10 nt, Artificial Sequence
  Description of Artificial Sequence: Synthetic oligonucleotide
ucaguucugc

SEQ ID NO: 76125 - RNA, 12 nt, Artificial Sequence
  Description of Artificial Sequence: Synthetic oligonucleotide
gauuaaaccuac

SEQ ID NO: 76126 - RNA, 12 nt, Artificial Sequence
  Description of Artificial Sequence: Synthetic oligonucleotide
uaaaauccuucu

SEQ ID NO: 76127 - RNA, 11 nt, Artificial Sequence
  Description of Artificial Sequence: Synthetic oligonucleotide
augcuguagac

SEQ ID NO: 76128 - RNA, 12 nt, Artificial Sequence
  Description of Artificial Sequence: Synthetic oligonucleotide
ugauaggaauag

SEQ ID NO: 76129 - RNA, 10 nt, Artificial Sequence
  Description of Artificial Sequence: Synthetic oligonucleotide
auggcccuga

SEQ ID NO: 76130 - RNA, 10 nt, Artificial Sequence
  Description of Artificial Sequence: Synthetic oligonucleotide
uccucaagca

SEQ ID NO: 76131 - RNA, 9 nt, Artificial Sequence
  Description of Artificial Sequence: Synthetic oligonucleotide
uucagccca

SEQ ID NO: 76132 - RNA, 10 nt, Artificial Sequence
  Description of Artificial Sequence: Synthetic oligonucleotide
cugcugaacc

SEQ ID NO: 76133 - RNA, 11 nt, Artificial Sequence
  Description of Artificial Sequence: Synthetic oligonucleotide
aguucucuuca

SEQ ID NO: 76134 - RNA, 10 nt, Artificial Sequence
  Description of Artificial Sequence: Synthetic oligonucleotide
cagccuagag

SEQ ID NO: 76135 - RNA, 12 nt, Artificial Sequence
  Description of Artificial Sequence: Synthetic oligonucleotide
ucugugaagugu

SEQ ID NO: 76136 - RNA, 13 nt, Artificial Sequence
  Description of Artificial Sequence: Synthetic oligonucleotide
gagaaaauuucaa

SEQ ID NO: 76137 - RNA, 10 nt, Artificial Sequence
  Description of Artificial Sequence: Synthetic oligonucleotide
auccuccuga

SEQ ID NO: 76138 - RNA, 11 nt, Artificial Sequence
  Description of Artificial Sequence: Synthetic oligonucleotide
ugacaucauau

SEQ ID NO: 76139 - RNA, 12 nt, Artificial Sequence
  Description of Artificial Sequence: Synthetic oligonucleotide
aucuucaucaua

SEQ ID NO: 76140 - RNA, 12 nt, Artificial Sequence
  Description of Artificial Sequence: Synthetic oligonucleotide
acuagcuauuaa

SEQ ID NO: 76141 - RNA, 13 nt, Artificial Sequence
  Description of Artificial Sequence: Synthetic oligonucleotide
cucuacuaaaaau

SEQ ID NO: 76142 - RNA, 11 nt, Artificial Sequence
  Description of Artificial Sequence: Synthetic oligonucleotide
cuaucucgccu

SEQ ID NO: 76143 - RNA, 12 nt, Artificial Sequence
  Description of Artificial Sequence: Synthetic oligonucleotide
uucgguccaguu

SEQ ID NO: 76144 - RNA, 10 nt, Artificial Sequence
  Description of Artificial Sequence: Synthetic oligonucleotide
auguagccgc

SEQ ID NO: 76145 - RNA, 11 nt, Artificial Sequence
  Description of Artificial Sequence: Synthetic oligonucleotide
gaggagacuug

SEQ ID NO: 76146 - RNA, 11 nt, Artificial Sequence
  Description of Artificial Sequence: Synthetic oligonucleotide
aguagugagga

SEQ ID NO: 76147 - RNA, 13 nt, Artificial Sequence
  Description of Artificial Sequence: Synthetic oligonucleotide
agaugaguacaaa

SEQ ID NO: 76148 - RNA, 12 nt, Artificial Sequence
  Description of Artificial Sequence: Synthetic oligonucleotide
uuguuaaugggc

SEQ ID NO: 76149 - RNA, 12 nt, Artificial Sequence
  Description of Artificial Sequence: Synthetic oligonucleotide
uuuuaauuuauu

SEQ ID NO: 76150 - RNA, 11 nt, Artificial Sequence
  Description of Artificial Sequence: Synthetic oligonucleotide
auuuaaauaug

SEQ ID NO: 76151 - RNA, 12 nt, Artificial Sequence
  Description of Artificial Sequence: Synthetic oligonucleotide
auccuuuguuuc

SEQ ID NO: 76152 - RNA, 13 nt, Artificial Sequence
  Description of Artificial Sequence: Synthetic oligonucleotide
gucuaaguguuug

SEQ ID NO: 76153 - RNA, 11 nt, Artificial Sequence
  Description of Artificial Sequence: Synthetic oligonucleotide
ccugugacaaa

SEQ ID NO: 76154 - RNA, 12 nt, Artificial Sequence
  Description of Artificial Sequence: Synthetic oligonucleotide
caggcugaauua

SEQ ID NO: 76155 - RNA, 13 nt, Artificial Sequence
  Description of Artificial Sequence: Synthetic oligonucleotide
ucauucuuacaau

SEQ ID NO: 76156 - RNA, 14 nt, Artificial Sequence
  Description of Artificial Sequence: Synthetic oligonucleotide
cauucuuacaauug

SEQ ID NO: 76157 - RNA, 11 nt, Artificial Sequence
  Description of Artificial Sequence: Synthetic oligonucleotide
agagaguguac

SEQ ID NO: 76158 - RNA, 11 nt, Artificial Sequence
  Description of Artificial Sequence: Synthetic oligonucleotide
gaacucagcag

SEQ ID NO: 76159 - RNA, 12 nt, Artificial Sequence
  Description of Artificial Sequence: Synthetic oligonucleotide
uuauuuucagua

SEQ ID NO: 76160 - RNA, 11 nt, Artificial Sequence
  Description of Artificial Sequence: Synthetic oligonucleotide
cuuaaauggaa

SEQ ID NO: 76161 - RNA, 12 nt, Artificial Sequence
  Description of Artificial Sequence: Synthetic oligonucleotide
gccuaaaauugu

SEQ ID NO: 76162 - RNA, 12 nt, Artificial Sequence
  Description of Artificial Sequence: Synthetic oligonucleotide
acuaacaucugg

SEQ ID NO: 76163 - RNA, 11 nt, Artificial Sequence
  Description of Artificial Sequence: Synthetic oligonucleotide
gacugugagcu

SEQ ID NO: 76164 - RNA, 13 nt, Artificial Sequence
  Description of Artificial Sequence: Synthetic oligonucleotide
gcuuuuuauuaau

SEQ ID NO: 76165 - RNA, 12 nt, Artificial Sequence
  Description of Artificial Sequence: Synthetic oligonucleotide
ucuucuuacauu

SEQ ID NO: 76166 - RNA, 14 nt, Artificial Sequence
  Description of Artificial Sequence: Synthetic oligonucleotide
auuuguaaaaaugu

SEQ ID NO: 76167 - RNA, 14 nt, Artificial Sequence
  Description of Artificial Sequence: Synthetic oligonucleotide
ucuuaauucauauu

SEQ ID NO: 76168 - RNA, 12 nt, Artificial Sequence
  Description of Artificial Sequence: Synthetic oligonucleotide
aacuaaucauga

SEQ ID NO: 76169 - RNA, 11 nt, Artificial Sequence
  Description of Artificial Sequence: Synthetic oligonucleotide
cugcucuuggg

SEQ ID NO: 76170 - RNA, 12 nt, Artificial Sequence
  Description of Artificial Sequence: Synthetic oligonucleotide
aguagcuuugag

SEQ ID NO: 76171 - RNA, 13 nt, Artificial Sequence
  Description of Artificial Sequence: Synthetic oligonucleotide
acguaauauuuca

SEQ ID NO: 76172 - RNA, 12 nt, Artificial Sequence
  Description of Artificial Sequence: Synthetic oligonucleotide
auucucuucacu

SEQ ID NO: 76173 - RNA, 13 nt, Artificial Sequence
  Description of Artificial Sequence: Synthetic oligonucleotide
uaaugcuaagaaa

SEQ ID NO: 76174 - RNA, 11 nt, Artificial Sequence
  Description of Artificial Sequence: Synthetic oligonucleotide
cugaaaaucaa

SEQ ID NO: 76175 - RNA, 13 nt, Artificial Sequence
  Description of Artificial Sequence: Synthetic oligonucleotide
auaugauuacuuu

SEQ ID NO: 76176 - RNA, 13 nt, Artificial Sequence
  Description of Artificial Sequence: Synthetic oligonucleotide
auuuuguucuaca

SEQ ID NO: 76177 - RNA, 11 nt, Artificial Sequence
  Description of Artificial Sequence: Synthetic oligonucleotide
ccgggacucuc

SEQ ID NO: 76178 - RNA, 13 nt, Artificial Sequence
  Description of Artificial Sequence: Synthetic oligonucleotide
cuuuaaaguaaag

SEQ ID NO: 76179 - RNA, 12 nt, Artificial Sequence
  Description of Artificial Sequence: Synthetic oligonucleotide
cuggaagccugg

SEQ ID NO: 76180 - RNA, 13 nt, Artificial Sequence
  Description of Artificial Sequence: Synthetic oligonucleotide
aaacaaaagagag

SEQ ID NO: 76181 - RNA, 12 nt, Artificial Sequence
  Description of Artificial Sequence: Synthetic oligonucleotide
ucaguuaugccg

SEQ ID NO: 76182 - RNA, 12 nt, Artificial Sequence
  Description of Artificial Sequence: Synthetic oligonucleotide
aaaagaagucca

SEQ ID NO: 76183 - RNA, 10 nt, Artificial Sequence
  Description of Artificial Sequence: Synthetic oligonucleotide
ggugagguua

SEQ ID NO: 76184 - RNA, 10 nt, Artificial Sequence
  Description of Artificial Sequence: Synthetic oligonucleotide
ggaagaggac

SEQ ID NO: 76185 - RNA, 12 nt, Artificial Sequence
  Description of Artificial Sequence: Synthetic oligonucleotide
agcaaguauugu

SEQ ID NO: 76186 - RNA, 11 nt, Artificial Sequence
  Description of Artificial Sequence: Synthetic oligonucleotide
uuguagcacuc

SEQ ID NO: 76187 - RNA, 13 nt, Artificial Sequence
  Description of Artificial Sequence: Synthetic oligonucleotide
caaaaccacaaau

SEQ ID NO: 76188 - RNA, 11 nt, Artificial Sequence
  Description of Artificial Sequence: Synthetic oligonucleotide
aagcccauaca

SEQ ID NO: 76189 - RNA, 10 nt, Artificial Sequence
  Description of Artificial Sequence: Synthetic oligonucleotide
gcccauacag

SEQ ID NO: 76190 - RNA, 11 nt, Artificial Sequence
  Description of Artificial Sequence: Synthetic oligonucleotide
agaaaccuucc

SEQ ID NO: 76191 - RNA, 9 nt, Artificial Sequence
  Description of Artificial Sequence: Synthetic oligonucleotide
uauaccuac

SEQ ID NO: 76192 - RNA, 12 nt, Artificial Sequence
  Description of Artificial Sequence: Synthetic oligonucleotide
ccaguuuucgga

SEQ ID NO: 76193 - RNA, 8 nt, Artificial Sequence
  Description of Artificial Sequence: Synthetic oligonucleotide
gaacaggg

SEQ ID NO: 76194 - RNA, 12 nt, Artificial Sequence
  Description of Artificial Sequence: Synthetic oligonucleotide
uaacuuuccagu

SEQ ID NO: 76195 - RNA, 13 nt, Artificial Sequence
  Description of Artificial Sequence: Synthetic oligonucleotide
aaguuugguuuug

SEQ ID NO: 76196 - RNA, 11 nt, Artificial Sequence
  Description of Artificial Sequence: Synthetic oligonucleotide
uucccacugua

SEQ ID NO: 76197 - RNA, 12 nt, Artificial Sequence
  Description of Artificial Sequence: Synthetic oligonucleotide
gauaccauauga

SEQ ID NO: 76198 - RNA, 10 nt, Artificial Sequence
  Description of Artificial Sequence: Synthetic oligonucleotide
acaugggcug

SEQ ID NO: 76199 - RNA, 12 nt, Artificial Sequence
  Description of Artificial Sequence: Synthetic oligonucleotide
aacuuuuucaua

SEQ ID NO: 76200 - RNA, 11 nt, Artificial Sequence
  Description of Artificial Sequence: Synthetic oligonucleotide
augaggccgga

SEQ ID NO: 76201 - RNA, 10 nt, Artificial Sequence
  Description of Artificial Sequence: Synthetic oligonucleotide
cugcauuugu

SEQ ID NO: 76202 - RNA, 12 nt, Artificial Sequence
  Description of Artificial Sequence: Synthetic oligonucleotide
auguuuacuacc

SEQ ID NO: 76203 - RNA, 14 nt, Artificial Sequence
  Description of Artificial Sequence: Synthetic oligonucleotide
auuuuuugaugaaa

SEQ ID NO: 76204 - RNA, 13 nt, Artificial Sequence
  Description of Artificial Sequence: Synthetic oligonucleotide
agugugugaauuu

SEQ ID NO: 76205 - RNA, 12 nt, Artificial Sequence
  Description of Artificial Sequence: Synthetic oligonucleotide
agcaauguaugu

SEQ ID NO: 76206 - RNA, 13 nt, Artificial Sequence
  Description of Artificial Sequence: Synthetic oligonucleotide
aagcacauauaua

SEQ ID NO: 76207 - RNA, 13 nt, Artificial Sequence
  Description of Artificial Sequence: Synthetic oligonucleotide
uaauaguuucucc

SEQ ID NO: 76208 - RNA, 12 nt, Artificial Sequence
  Description of Artificial Sequence: Synthetic oligonucleotide
guuucuccaaau

SEQ ID NO: 76209 - RNA, 12 nt, Artificial Sequence
  Description of Artificial Sequence: Synthetic oligonucleotide
acuuccuagaaa

SEQ ID NO: 76210 - RNA, 12 nt, Artificial Sequence
  Description of Artificial Sequence: Synthetic oligonucleotide
acaccauauaug

SEQ ID NO: 76211 - RNA, 13 nt, Artificial Sequence
  Description of Artificial Sequence: Synthetic oligonucleotide
uauaugaauggag

SEQ ID NO: 76212 - RNA, 12 nt, Artificial Sequence
  Description of Artificial Sequence: Synthetic oligonucleotide
cauuuacaggga

SEQ ID NO: 76213 - RNA, 12 nt, Artificial Sequence
  Description of Artificial Sequence: Synthetic oligonucleotide
auuuacagggac

SEQ ID NO: 76214 - RNA, 9 nt, Artificial Sequence
  Description of Artificial Sequence: Synthetic oligonucleotide
gggaccuga

SEQ ID NO: 76215 - RNA, 13 nt, Artificial Sequence
  Description of Artificial Sequence: Synthetic oligonucleotide
guuugacugcauc

SEQ ID NO: 76216 - RNA, 12 nt, Artificial Sequence
  Description of Artificial Sequence: Synthetic oligonucleotide
uugacugcaucg

SEQ ID NO: 76217 - RNA, 11 nt, Artificial Sequence
  Description of Artificial Sequence: Synthetic oligonucleotide
aguucacaggg

SEQ ID NO: 76218 - RNA, 12 nt, Artificial Sequence
  Description of Artificial Sequence: Synthetic oligonucleotide
gcaccucugucc

SEQ ID NO: 76219 - RNA, 14 nt, Artificial Sequence
  Description of Artificial Sequence: Synthetic oligonucleotide
guuugucuuuuuaa

SEQ ID NO: 76220 - RNA, 13 nt, Artificial Sequence
  Description of Artificial Sequence: Synthetic oligonucleotide
uugucuuuuuaag

SEQ ID NO: 76221 - RNA, 12 nt, Artificial Sequence
  Description of Artificial Sequence: Synthetic oligonucleotide
cuaaagguuguc

SEQ ID NO: 76222 - RNA, 11 nt, Artificial Sequence
  Description of Artificial Sequence: Synthetic oligonucleotide
agguugucgac

SEQ ID NO: 76223 - RNA, 12 nt, Artificial Sequence
  Description of Artificial Sequence: Synthetic oligonucleotide
ccuggcaauugu

SEQ ID NO: 76224 - RNA, 11 nt, Artificial Sequence
  Description of Artificial Sequence: Synthetic oligonucleotide
guggugcgagg

SEQ ID NO: 76225 - RNA, 12 nt, Artificial Sequence
  Description of Artificial Sequence: Synthetic oligonucleotide
gagacaugaaau

SEQ ID NO: 76226 - RNA, 12 nt, Artificial Sequence
  Description of Artificial Sequence: Synthetic oligonucleotide
uauauuucucca

SEQ ID NO: 76227 - RNA, 9 nt, Artificial Sequence
  Description of Artificial Sequence: Synthetic oligonucleotide
augaaggcu

SEQ ID NO: 76228 - RNA, 10 nt, Artificial Sequence
  Description of Artificial Sequence: Synthetic oligonucleotide
cuggaguggu

SEQ ID NO: 76229 - RNA, 10 nt, Artificial Sequence
  Description of Artificial Sequence: Synthetic oligonucleotide
ggaagagagg

SEQ ID NO: 76230 - RNA, 11 nt, Artificial Sequence
  Description of Artificial Sequence: Synthetic oligonucleotide
uugcaucgggc

SEQ ID NO: 76231 - RNA, 12 nt, Artificial Sequence
  Description of Artificial Sequence: Synthetic oligonucleotide
uauccuacugug

SEQ ID NO: 76232 - RNA, 12 nt, Artificial Sequence
  Description of Artificial Sequence: Synthetic oligonucleotide
ccuacuguguaa

SEQ ID NO: 76233 - RNA, 11 nt, Artificial Sequence
  Description of Artificial Sequence: Synthetic oligonucleotide
cuuguagugua

SEQ ID NO: 76234 - RNA, 12 nt, Artificial Sequence
  Description of Artificial Sequence: Synthetic oligonucleotide
cuuuguugauug

SEQ ID NO: 76235 - RNA, 13 nt, Artificial Sequence
  Description of Artificial Sequence: Synthetic oligonucleotide
uuguugauugaaa

SEQ ID NO: 76236 - RNA, 14 nt, Artificial Sequence
  Description of Artificial Sequence: Synthetic oligonucleotide
ucuuuuucuuccau

SEQ ID NO: 76237 - RNA, 12 nt, Artificial Sequence
  Description of Artificial Sequence: Synthetic oligonucleotide
aucuuccuucua

SEQ ID NO: 76238 - RNA, 12 nt, Artificial Sequence
  Description of Artificial Sequence: Synthetic oligonucleotide
ugaaugcuucau

SEQ ID NO: 76239 - RNA, 12 nt, Artificial Sequence
  Description of Artificial Sequence: Synthetic oligonucleotide
gaaugcuucaug

SEQ ID NO: 76240 - RNA, 12 nt, Artificial Sequence
  Description of Artificial Sequence: Synthetic oligonucleotide
auucuacuuuga

SEQ ID NO: 76241 - RNA, 12 nt, Artificial Sequence
  Description of Artificial Sequence: Synthetic oligonucleotide
gcaacuacagac

SEQ ID NO: 76242 - RNA, 12 nt, Artificial Sequence
  Description of Artificial Sequence: Synthetic oligonucleotide
accaaggucaac

SEQ ID NO: 76243 - RNA, 12 nt, Artificial Sequence
  Description of Artificial Sequence: Synthetic oligonucleotide
gacuaucucgac

SEQ ID NO: 76244 - RNA, 12 nt, Artificial Sequence
  Description of Artificial Sequence: Synthetic oligonucleotide
accuucccaaac

SEQ ID NO: 76245 - RNA, 13 nt, Artificial Sequence
  Description of Artificial Sequence: Synthetic oligonucleotide
caagcuuagaacu

SEQ ID NO: 76246 - RNA, 14 nt, Artificial Sequence
  Description of Artificial Sequence: Synthetic oligonucleotide
gcuuagaacuuuaa

SEQ ID NO: 76247 - RNA, 13 nt, Artificial Sequence
  Description of Artificial Sequence: Synthetic oligonucleotide
aacuuuaagcaac

SEQ ID NO: 76248 - RNA, 10 nt, Artificial Sequence
  Description of Artificial Sequence: Synthetic oligonucleotide
agaccaccac

SEQ ID NO: 76249 - RNA, 13 nt, Artificial Sequence
  Description of Artificial Sequence: Synthetic oligonucleotide
cgagaaauaaagu

SEQ ID NO: 76250 - RNA, 13 nt, Artificial Sequence
  Description of Artificial Sequence: Synthetic oligonucleotide
gagaaauaaaguu

SEQ ID NO: 76251 - RNA, 11 nt, Artificial Sequence
  Description of Artificial Sequence: Synthetic oligonucleotide
ggaaaugaucc

SEQ ID NO: 76252 - RNA, 12 nt, Artificial Sequence
  Description of Artificial Sequence: Synthetic oligonucleotide
aagaaaugaaac

SEQ ID NO: 76253 - RNA, 12 nt, Artificial Sequence
  Description of Artificial Sequence: Synthetic oligonucleotide
uuuccauccucc

SEQ ID NO: 76254 - RNA, 14 nt, Artificial Sequence
  Description of Artificial Sequence: Synthetic oligonucleotide
cugaaaaucuuuga

SEQ ID NO: 76255 - RNA, 10 nt, Artificial Sequence
  Description of Artificial Sequence: Synthetic oligonucleotide
gccguucagg

SEQ ID NO: 76256 - RNA, 12 nt, Artificial Sequence
  Description of Artificial Sequence: Synthetic oligonucleotide
aggguccagaag

SEQ ID NO: 76257 - RNA, 12 nt, Artificial Sequence
  Description of Artificial Sequence: Synthetic oligonucleotide
caagacugcuug

SEQ ID NO: 76258 - RNA, 12 nt, Artificial Sequence
  Description of Artificial Sequence: Synthetic oligonucleotide
ccaugucuuugg

SEQ ID NO: 76259 - RNA, 10 nt, Artificial Sequence
  Description of Artificial Sequence: Synthetic oligonucleotide
ccugaaacac

SEQ ID NO: 76260 - RNA, 11 nt, Artificial Sequence
  Description of Artificial Sequence: Synthetic oligonucleotide
cucuguaccuc

SEQ ID NO: 76261 - RNA, 11 nt, Artificial Sequence
  Description of Artificial Sequence: Synthetic oligonucleotide
gcaagacaaga

SEQ ID NO: 76262 - RNA, 12 nt, Artificial Sequence
  Description of Artificial Sequence: Synthetic oligonucleotide
caagacaagaaa

SEQ ID NO: 76263 - RNA, 11 nt, Artificial Sequence
  Description of Artificial Sequence: Synthetic oligonucleotide
guacaagaucc

SEQ ID NO: 76264 - RNA, 11 nt, Artificial Sequence
  Description of Artificial Sequence: Synthetic oligonucleotide
guacuugcaga

SEQ ID NO: 76265 - RNA, 12 nt, Artificial Sequence
  Description of Artificial Sequence: Synthetic oligonucleotide
gaucgauacaga

SEQ ID NO: 76266 - RNA, 12 nt, Artificial Sequence
  Description of Artificial Sequence: Synthetic oligonucleotide
auaaaaauaaau

SEQ ID NO: 76267 - RNA, 12 nt, Artificial Sequence
  Description of Artificial Sequence: Synthetic oligonucleotide
aaaaauaaauau

SEQ ID NO: 76268 - RNA, 12 nt, Artificial Sequence
  Description of Artificial Sequence: Synthetic oligonucleotide
uugacugcugug

SEQ ID NO: 76269 - RNA, 12 nt, Artificial Sequence
  Description of Artificial Sequence: Synthetic oligonucleotide
gagaugagagac

SEQ ID NO: 76270 - RNA, 9 nt, Artificial Sequence
  Description of Artificial Sequence: Synthetic oligonucleotide
cccacuugg

SEQ ID NO: 76271 - RNA, 2387 nt, Homo sapiens
agacaccucugcccucaccaugagccucuggcagccccugguccuggugcuccuggugcugggcugcugcuuugcugcccccagacagcgccaguccacccuugugcucuucccuggagaccugagaaccaaucucaccgacaggcagcuggcagaggaauaccuguaccgcuaugguuacacucggguggcagagaugcguggagagucgaaaucucuggggccugcgcugcugcuucuccagaagcaacugucccugcccgagaccggugagcuggauagcgccacgcugaaggccaugcgaaccccacggugcggggucccagaccugggcagauuccaaaccuuugagggcgaccucaaguggcaccaccacaacaucaccuauuggauccaaaacuacucggaagacuugccgcgggcggugauugacgacgccuuugcccgcgccuucgcacuguggagcgcggugacgccgcucaccuucacucgcguguacagccgggacgcagacaucgucauccaguuuggugucgcggagcacggagacggguaucccuucgacgggaaggacgggcuccuggcacacgccuuuccuccuggccccggcauucagggagacgcccauuucgacgaugacgaguuguggucccugggcaagggcgucgugguuccaacucgguuuggaaacgcagauggcgcggccugccacuuccccuucaucuucgagggccgcuccuacucugccugcaccaccgacggucgcuccgacggcuugcccuggugcaguaccacggccaacuacgacaccgacgaccgguuuggcuucugccccagcgagagacucuacacccaggacggcaaugcugaugggaaacccugccaguuuccauucaucuuccaaggccaauccuacuccgccugcaccacggacggucgcuccgacggcuaccgcuggugcgccaccaccgccaacuacgaccgggacaagcucuucggcuucugcccgacccgagcugacucgacggugauggggggcaacucggcgggggagcugugcgucuuccccuucacuuuccuggguaaggaguacucgaccuguaccagcgagggccgcggagaugggcgccucuggugcgcuaccaccucgaacuuugacagcgacaagaaguggggcuucugcccggaccaaggauacaguuuguuccucguggcggcgcaugaguucggccacgcgcugggcuuagaucauuccucagugccggaggcgcucauguacccuauguaccgcuucacugaggggccccccuugcauaaggacgacgugaauggcauccggcaccucuaugguccucgcccugaaccugagccacggccuccaaccaccaccacaccgcagcccacggcucccccgacggucugccccaccggaccccccacuguccaccccucagagcgccccacagcuggccccacagguccccccucagcuggccccacagguccccccacugcuggcccuucuacggccacuacugugccuuugaguccgguggacgaugccugcaacgugaacaucuucgacgccaucgcggagauugggaaccagcuguauuuguucaaggaugggaaguacuggcgauucucugagggcagggggagccggccgcagggccccuuccuuaucgccgacaaguggcccgcgcugccccgcaagcuggacucggucuuugaggagcggcucuccaagaagcuuuucuucuucucugggcgccagguguggguguacacaggcgcgucggugcugggcccgaggcgucuggacaagcugggccugggagccgacguggcccaggugaccggggcccuccggaguggcagggggaagaugcugcuguucagcgggcggcgccucuggagguucgacgugaaggcgcagaugguggauccccggagcgccagcgagguggaccggauguuccccggggugccuuuggacacgcacgacgucuuccaguaccgagagaaagccuauuucugccaggaccgcuucuacuggcgcgugaguucccggagugaguugaaccagguggaccaagugggcuacgugaccuaugacauccugcagugcccugaggacuagggcucccguccugcuuuggcagugccauguaaauccccacugggaccaacccuggggaaggagccaguuugccggauacaaacugguauucuguucuggaggaaagggaggaguggaggugggcugggcccucucuucucaccuuuguuuuuuguuggaguguuucuaauaaacuuggauucucuaaccuuuaaaaaaaaaaaaaaaaaaaaaaaaaaaaaaaaaaaaaaaaaaaaaaaaaaaa

SEQ ID NO: 76272 - RNA, 19 nt, Artificial Sequence
  Description of Artificial Sequence: Synthetic oligonucleotide
agacaccucugcccucacc

SEQ ID NO: 76273 - RNA, 19 nt, Artificial Sequence
  Description of Artificial Sequence: Synthetic oligonucleotide
caugagccucuggcagccc

SEQ ID NO: 76274 - RNA, 19 nt, Artificial Sequence
  Description of Artificial Sequence: Synthetic oligonucleotide
ccugguccuggugcuccug

SEQ ID NO: 76275 - RNA, 19 nt, Artificial Sequence
  Description of Artificial Sequence: Synthetic oligonucleotide
ggugcugggcugcugcuuu

SEQ ID NO: 76276 - RNA, 19 nt, Artificial Sequence
  Description of Artificial Sequence: Synthetic oligonucleotide
ugcugcccccagacagcgc

SEQ ID NO: 76277 - RNA, 19 nt, Artificial Sequence
  Description of Artificial Sequence: Synthetic oligonucleotide
ccaguccacccuugugcuc

SEQ ID NO: 76278 - RNA, 19 nt, Artificial Sequence
  Description of Artificial Sequence: Synthetic oligonucleotide
cuucccuggagaccugaga

SEQ ID NO: 76279 - RNA, 19 nt, Artificial Sequence
  Description of Artificial Sequence: Synthetic oligonucleotide
aaccaaucucaccgacagg

SEQ ID NO: 76280 - RNA, 19 nt, Artificial Sequence
  Description of Artificial Sequence: Synthetic oligonucleotide
gcagcuggcagaggaauac

SEQ ID NO: 76281 - RNA, 19 nt, Artificial Sequence
  Description of Artificial Sequence: Synthetic oligonucleotide
ccuguaccgcuaugguuac

SEQ ID NO: 76282 - RNA, 19 nt, Artificial Sequence
  Description of Artificial Sequence: Synthetic oligonucleotide
cacucggguggcagagaug

SEQ ID NO: 76283 - RNA, 19 nt, Artificial Sequence
  Description of Artificial Sequence: Synthetic oligonucleotide
gcguggagagucgaaaucu

SEQ ID NO: 76284 - RNA, 19 nt, Artificial Sequence
  Description of Artificial Sequence: Synthetic oligonucleotide
ucuggggccugcgcugcug

SEQ ID NO: 76285 - RNA, 19 nt, Artificial Sequence
  Description of Artificial Sequence: Synthetic oligonucleotide
gcuucuccagaagcaacug

SEQ ID NO: 76286 - RNA, 19 nt, Artificial Sequence
  Description of Artificial Sequence: Synthetic oligonucleotide
gucccugcccgagaccggu

SEQ ID NO: 76287 - RNA, 19 nt, Artificial Sequence
  Description of Artificial Sequence: Synthetic oligonucleotide
ugagcuggauagcgccacg

SEQ ID NO: 76288 - RNA, 19 nt, Artificial Sequence
  Description of Artificial Sequence: Synthetic oligonucleotide
gcugaaggccaugcgaacc

SEQ ID NO: 76289 - RNA, 19 nt, Artificial Sequence
  Description of Artificial Sequence: Synthetic oligonucleotide
cccacggugcgggguccca

SEQ ID NO: 76290 - RNA, 19 nt, Artificial Sequence
  Description of Artificial Sequence: Synthetic oligonucleotide
agaccugggcagauuccaa

SEQ ID NO: 76291 - RNA, 19 nt, Artificial Sequence
  Description of Artificial Sequence: Synthetic oligonucleotide
aaccuuugagggcgaccuc

SEQ ID NO: 76292 - RNA, 19 nt, Artificial Sequence
  Description of Artificial Sequence: Synthetic oligonucleotide
caaguggcaccaccacaac

SEQ ID NO: 76293 - RNA, 19 nt, Artificial Sequence
  Description of Artificial Sequence: Synthetic oligonucleotide
caucaccuauuggauccaa

SEQ ID NO: 76294 - RNA, 19 nt, Artificial Sequence
  Description of Artificial Sequence: Synthetic oligonucleotide
aaacuacucggaagacuug

SEQ ID NO: 76295 - RNA, 19 nt, Artificial Sequence
  Description of Artificial Sequence: Synthetic oligonucleotide
gccgcgggcggugauugac

SEQ ID NO: 76296 - RNA, 19 nt, Artificial Sequence
  Description of Artificial Sequence: Synthetic oligonucleotide
cgacgccuuugcccgcgcc

SEQ ID NO: 76297 - RNA, 19 nt, Artificial Sequence
  Description of Artificial Sequence: Synthetic oligonucleotide
cuucgcacuguggagcgcg

SEQ ID NO: 76298 - RNA, 19 nt, Artificial Sequence
  Description of Artificial Sequence: Synthetic oligonucleotide
ggugacgccgcucaccuuc

SEQ ID NO: 76299 - RNA, 19 nt, Artificial Sequence
  Description of Artificial Sequence: Synthetic oligonucleotide
cacucgcguguacagccgg

SEQ ID NO: 76300 - RNA, 19 nt, Artificial Sequence
  Description of Artificial Sequence: Synthetic oligonucleotide
ggacgcagacaucgucauc

SEQ ID NO: 76301 - RNA, 19 nt, Artificial Sequence
  Description of Artificial Sequence: Synthetic oligonucleotide
ccaguuuggugucgcggag

SEQ ID NO: 76302 - RNA, 19 nt, Artificial Sequence
  Description of Artificial Sequence: Synthetic oligonucleotide
gcacggagacggguauccc

SEQ ID NO: 76303 - RNA, 19 nt, Artificial Sequence
  Description of Artificial Sequence: Synthetic oligonucleotide
cuucgacgggaaggacggg

SEQ ID NO: 76304 - RNA, 19 nt, Artificial Sequence
  Description of Artificial Sequence: Synthetic oligonucleotide
gcuccuggcacacgccuuu

SEQ ID NO: 76305 - RNA, 19 nt, Artificial Sequence
  Description of Artificial Sequence: Synthetic oligonucleotide
uccuccuggccccggcauu

SEQ ID NO: 76306 - RNA, 19 nt, Artificial Sequence
  Description of Artificial Sequence: Synthetic oligonucleotide
ucagggagacgcccauuuc

SEQ ID NO: 76307 - RNA, 19 nt, Artificial Sequence
  Description of Artificial Sequence: Synthetic oligonucleotide
cgacgaugacgaguugugg

SEQ ID NO: 76308 - RNA, 19 nt, Artificial Sequence
  Description of Artificial Sequence: Synthetic oligonucleotide
gucccugggcaagggcguc

SEQ ID NO: 76309 - RNA, 19 nt, Artificial Sequence
  Description of Artificial Sequence: Synthetic oligonucleotide
cgugguuccaacucgguuu

SEQ ID NO: 76310 - RNA, 19 nt, Artificial Sequence
  Description of Artificial Sequence: Synthetic oligonucleotide
uggaaacgcagauggcgcg

SEQ ID NO: 76311 - RNA, 19 nt, Artificial Sequence
  Description of Artificial Sequence: Synthetic oligonucleotide
ggccugccacuuccccuuc

SEQ ID NO: 76312 - RNA, 19 nt, Artificial Sequence
  Description of Artificial Sequence: Synthetic oligonucleotide
caucuucgagggccgcucc

SEQ ID NO: 76313 - RNA, 19 nt, Artificial Sequence
  Description of Artificial Sequence: Synthetic oligonucleotide
cuacucugccugcaccacc

SEQ ID NO: 76314 - RNA, 19 nt, Artificial Sequence
  Description of Artificial Sequence: Synthetic oligonucleotide
cgacggucgcuccgacggc

SEQ ID NO: 76315 - RNA, 19 nt, Artificial Sequence
  Description of Artificial Sequence: Synthetic oligonucleotide
cuugcccuggugcaguacc

SEQ ID NO: 76316 - RNA, 19 nt, Artificial Sequence
  Description of Artificial Sequence: Synthetic oligonucleotide
cacggccaacuacgacacc

SEQ ID NO: 76317 - RNA, 19 nt, Artificial Sequence
  Description of Artificial Sequence: Synthetic oligonucleotide
cgacgaccgguuuggcuuc

SEQ ID NO: 76318 - RNA, 19 nt, Artificial Sequence
  Description of Artificial Sequence: Synthetic oligonucleotide
cugccccagcgagagacuc

SEQ ID NO: 76319 - RNA, 19 nt, Artificial Sequence
  Description of Artificial Sequence: Synthetic oligonucleotide
cuacacccaggacggcaau

SEQ ID NO: 76320 - RNA, 19 nt, Artificial Sequence
  Description of Artificial Sequence: Synthetic oligonucleotide
ugcugaugggaaacccugc

SEQ ID NO: 76321 - RNA, 19 nt, Artificial Sequence
  Description of Artificial Sequence: Synthetic oligonucleotide
ccaguuuccauucaucuuc

SEQ ID NO: 76322 - RNA, 19 nt, Artificial Sequence
  Description of Artificial Sequence: Synthetic oligonucleotide
ccaaggccaauccuacucc

SEQ ID NO: 76323 - RNA, 19 nt, Artificial Sequence
  Description of Artificial Sequence: Synthetic oligonucleotide
cgccugcaccacggacggu

SEQ ID NO: 76324 - RNA, 19 nt, Artificial Sequence
  Description of Artificial Sequence: Synthetic oligonucleotide
ucgcuccgacggcuaccgc

SEQ ID NO: 76325 - RNA, 19 nt, Artificial Sequence
  Description of Artificial Sequence: Synthetic oligonucleotide
cuggugcgccaccaccgcc

SEQ ID NO: 76326 - RNA, 19 nt, Artificial Sequence
  Description of Artificial Sequence: Synthetic oligonucleotide
caacuacgaccgggacaag

SEQ ID NO: 76327 - RNA, 19 nt, Artificial Sequence
  Description of Artificial Sequence: Synthetic oligonucleotide
gcucuucggcuucugcccg

SEQ ID NO: 76328 - RNA, 19 nt, Artificial Sequence
  Description of Artificial Sequence: Synthetic oligonucleotide
gacccgagcugacucgacg

SEQ ID NO: 76329 - RNA, 19 nt, Artificial Sequence
  Description of Artificial Sequence: Synthetic oligonucleotide
ggugauggggggcaacucg

SEQ ID NO: 76330 - RNA, 19 nt, Artificial Sequence
  Description of Artificial Sequence: Synthetic oligonucleotide
ggcgggggagcugugcguc

SEQ ID NO: 76331 - RNA, 19 nt, Artificial Sequence
  Description of Artificial Sequence: Synthetic oligonucleotide
cuuccccuucacuuuccug

SEQ ID NO: 76332 - RNA, 19 nt, Artificial Sequence
  Description of Artificial Sequence: Synthetic oligonucleotide
ggguaaggaguacucgacc

SEQ ID NO: 76333 - RNA, 19 nt, Artificial Sequence
  Description of Artificial Sequence: Synthetic oligonucleotide
cuguaccagcgagggccgc

SEQ ID NO: 76334 - RNA, 19 nt, Artificial Sequence
  Description of Artificial Sequence: Synthetic oligonucleotide
cggagaugggcgccucugg

SEQ ID NO: 76335 - RNA, 19 nt, Artificial Sequence
  Description of Artificial Sequence: Synthetic oligonucleotide
gugcgcuaccaccucgaac

SEQ ID NO: 76336 - RNA, 19 nt, Artificial Sequence
  Description of Artificial Sequence: Synthetic oligonucleotide
cuuugacagcgacaagaag

SEQ ID NO: 76337 - RNA, 19 nt, Artificial Sequence
  Description of Artificial Sequence: Synthetic oligonucleotide
guggggcuucugcccggac

SEQ ID NO: 76338 - RNA, 19 nt, Artificial Sequence
  Description of Artificial Sequence: Synthetic oligonucleotide
ccaaggauacaguuuguuc

SEQ ID NO: 76339 - RNA, 19 nt, Artificial Sequence
  Description of Artificial Sequence: Synthetic oligonucleotide
ccucguggcggcgcaugag

SEQ ID NO: 76340 - RNA, 19 nt, Artificial Sequence
  Description of Artificial Sequence: Synthetic oligonucleotide
guucggccacgcgcugggc

SEQ ID NO: 76341 - RNA, 19 nt, Artificial Sequence
  Description of Artificial Sequence: Synthetic oligonucleotide
cuuagaucauuccucagug

SEQ ID NO: 76342 - RNA, 19 nt, Artificial Sequence
  Description of Artificial Sequence: Synthetic oligonucleotide
gccggaggcgcucauguac

SEQ ID NO: 76343 - RNA, 19 nt, Artificial Sequence
  Description of Artificial Sequence: Synthetic oligonucleotide
cccuauguaccgcuucacu

SEQ ID NO: 76344 - RNA, 19 nt, Artificial Sequence
  Description of Artificial Sequence: Synthetic oligonucleotide
ugaggggccccccuugcau

SEQ ID NO: 76345 - RNA, 19 nt, Artificial Sequence
  Description of Artificial Sequence: Synthetic oligonucleotide
uaaggacgacgugaauggc

SEQ ID NO: 76346 - RNA, 19 nt, Artificial Sequence
  Description of Artificial Sequence: Synthetic oligonucleotide
cauccggcaccucuauggu

SEQ ID NO: 76347 - RNA, 19 nt, Artificial Sequence
  Description of Artificial Sequence: Synthetic oligonucleotide
uccucgcccugaaccugag

SEQ ID NO: 76348 - RNA, 19 nt, Artificial Sequence
  Description of Artificial Sequence: Synthetic oligonucleotide
gccacggccuccaaccacc

SEQ ID NO: 76349 - RNA, 19 nt, Artificial Sequence
  Description of Artificial Sequence: Synthetic oligonucleotide
caccacaccgcagcccacg

SEQ ID NO: 76350 - RNA, 19 nt, Artificial Sequence
  Description of Artificial Sequence: Synthetic oligonucleotide
ggcucccccgacggucugc

SEQ ID NO: 76351 - RNA, 19 nt, Artificial Sequence
  Description of Artificial Sequence: Synthetic oligonucleotide
ccccaccggaccccccacu

SEQ ID NO: 76352 - RNA, 19 nt, Artificial Sequence
  Description of Artificial Sequence: Synthetic oligonucleotide
uguccaccccucagagcgc

SEQ ID NO: 76353 - RNA, 19 nt, Artificial Sequence
  Description of Artificial Sequence: Synthetic oligonucleotide
ccccacagcuggccccaca

SEQ ID NO: 76354 - RNA, 19 nt, Artificial Sequence
  Description of Artificial Sequence: Synthetic oligonucleotide
agguccccccucagcuggc

SEQ ID NO: 76355 - RNA, 19 nt, Artificial Sequence
  Description of Artificial Sequence: Synthetic oligonucleotide
ccccacagguccccccacu

SEQ ID NO: 76356 - RNA, 19 nt, Artificial Sequence
  Description of Artificial Sequence: Synthetic oligonucleotide
ugcuggcccuucuacggcc

SEQ ID NO: 76357 - RNA, 19 nt, Artificial Sequence
  Description of Artificial Sequence: Synthetic oligonucleotide
cacuacugugccuuugagu

SEQ ID NO: 76358 - RNA, 19 nt, Artificial Sequence
  Description of Artificial Sequence: Synthetic oligonucleotide
uccgguggacgaugccugc

SEQ ID NO: 76359 - RNA, 19 nt, Artificial Sequence
  Description of Artificial Sequence: Synthetic oligonucleotide
caacgugaacaucuucgac

SEQ ID NO: 76360 - RNA, 19 nt, Artificial Sequence
  Description of Artificial Sequence: Synthetic oligonucleotide
cgccaucgcggagauuggg

SEQ ID NO: 76361 - RNA, 19 nt, Artificial Sequence
  Description of Artificial Sequence: Synthetic oligonucleotide
gaaccagcuguauuuguuc

SEQ ID NO: 76362 - RNA, 19 nt, Artificial Sequence
  Description of Artificial Sequence: Synthetic oligonucleotide
caaggaugggaaguacugg

SEQ ID NO: 76363 - RNA, 19 nt, Artificial Sequence
  Description of Artificial Sequence: Synthetic oligonucleotide
gcgauucucugagggcagg

SEQ ID NO: 76364 - RNA, 19 nt, Artificial Sequence
  Description of Artificial Sequence: Synthetic oligonucleotide
ggggagccggccgcagggc

SEQ ID NO: 76365 - RNA, 19 nt, Artificial Sequence
  Description of Artificial Sequence: Synthetic oligonucleotide
ccccuuccuuaucgccgac

SEQ ID NO: 76366 - RNA, 19 nt, Artificial Sequence
  Description of Artificial Sequence: Synthetic oligonucleotide
caaguggcccgcgcugccc

SEQ ID NO: 76367 - RNA, 19 nt, Artificial Sequence
  Description of Artificial Sequence: Synthetic oligonucleotide
ccgcaagcuggacucgguc

SEQ ID NO: 76368 - RNA, 19 nt, Artificial Sequence
  Description of Artificial Sequence: Synthetic oligonucleotide
cuuugaggagcggcucucc

SEQ ID NO: 76369 - RNA, 19 nt, Artificial Sequence
  Description of Artificial Sequence: Synthetic oligonucleotide
caagaagcuuuucuucuuc

SEQ ID NO: 76370 - RNA, 19 nt, Artificial Sequence
  Description of Artificial Sequence: Synthetic oligonucleotide
cucugggcgccaggugugg

SEQ ID NO: 76371 - RNA, 19 nt, Artificial Sequence
  Description of Artificial Sequence: Synthetic oligonucleotide
gguguacacaggcgcgucg

SEQ ID NO: 76372 - RNA, 19 nt, Artificial Sequence
  Description of Artificial Sequence: Synthetic oligonucleotide
ggugcugggcccgaggcgu

SEQ ID NO: 76373 - RNA, 19 nt, Artificial Sequence
  Description of Artificial Sequence: Synthetic oligonucleotide
ucuggacaagcugggccug

SEQ ID NO: 76374 - RNA, 19 nt, Artificial Sequence
  Description of Artificial Sequence: Synthetic oligonucleotide
gggagccgacguggcccag

SEQ ID NO: 76375 - RNA, 19 nt, Artificial Sequence
  Description of Artificial Sequence: Synthetic oligonucleotide
ggugaccggggcccuccgg

SEQ ID NO: 76376 - RNA, 19 nt, Artificial Sequence
  Description of Artificial Sequence: Synthetic oligonucleotide
gaguggcagggggaagaug

SEQ ID NO: 76377 - RNA, 19 nt, Artificial Sequence
  Description of Artificial Sequence: Synthetic oligonucleotide
gcugcuguucagcgggcgg

SEQ ID NO: 76378 - RNA, 19 nt, Artificial Sequence
  Description of Artificial Sequence: Synthetic oligonucleotide
gcgccucuggagguucgac

SEQ ID NO: 76379 - RNA, 19 nt, Artificial Sequence
  Description of Artificial Sequence: Synthetic oligonucleotide
cgugaaggcgcagauggug

SEQ ID NO: 76380 - RNA, 19 nt, Artificial Sequence
  Description of Artificial Sequence: Synthetic oligonucleotide
ggauccccggagcgccagc

SEQ ID NO: 76381 - RNA, 19 nt, Artificial Sequence
  Description of Artificial Sequence: Synthetic oligonucleotide
cgagguggaccggauguuc

SEQ ID NO: 76382 - RNA, 19 nt, Artificial Sequence
  Description of Artificial Sequence: Synthetic oligonucleotide
ccccggggugccuuuggac

SEQ ID NO: 76383 - RNA, 19 nt, Artificial Sequence
  Description of Artificial Sequence: Synthetic oligonucleotide
cacgcacgacgucuuccag

SEQ ID NO: 76384 - RNA, 19 nt, Artificial Sequence
  Description of Artificial Sequence: Synthetic oligonucleotide
guaccgagagaaagccuau

SEQ ID NO: 76385 - RNA, 19 nt, Artificial Sequence
  Description of Artificial Sequence: Synthetic oligonucleotide
uuucugccaggaccgcuuc

SEQ ID NO: 76386 - RNA, 19 nt, Artificial Sequence
  Description of Artificial Sequence: Synthetic oligonucleotide
cuacuggcgcgugaguucc

SEQ ID NO: 76387 - RNA, 19 nt, Artificial Sequence
  Description of Artificial Sequence: Synthetic oligonucleotide
ccggagugaguugaaccag

SEQ ID NO: 76388 - RNA, 19 nt, Artificial Sequence
  Description of Artificial Sequence: Synthetic oligonucleotide
gguggaccaagugggcuac

SEQ ID NO: 76389 - RNA, 19 nt, Artificial Sequence
  Description of Artificial Sequence: Synthetic oligonucleotide
cgugaccuaugacauccug

SEQ ID NO: 76390 - RNA, 19 nt, Artificial Sequence
  Description of Artificial Sequence: Synthetic oligonucleotide
gcagugcccugaggacuag

SEQ ID NO: 76391 - RNA, 19 nt, Artificial Sequence
  Description of Artificial Sequence: Synthetic oligonucleotide
gggcucccguccugcuuug

SEQ ID NO: 76392 - RNA, 19 nt, Artificial Sequence
  Description of Artificial Sequence: Synthetic oligonucleotide
ggcagugccauguaaaucc

SEQ ID NO: 76393 - RNA, 19 nt, Artificial Sequence
  Description of Artificial Sequence: Synthetic oligonucleotide
cccacugggaccaacccug

SEQ ID NO: 76394 - RNA, 19 nt, Artificial Sequence
  Description of Artificial Sequence: Synthetic oligonucleotide
ggggaaggagccaguuugc

SEQ ID NO: 76395 - RNA, 19 nt, Artificial Sequence
  Description of Artificial Sequence: Synthetic oligonucleotide
ccggauacaaacugguauu

SEQ ID NO: 76396 - RNA, 19 nt, Artificial Sequence
  Description of Artificial Sequence: Synthetic oligonucleotide
ucuguucuggaggaaaggg

SEQ ID NO: 76397 - RNA, 19 nt, Artificial Sequence
  Description of Artificial Sequence: Synthetic oligonucleotide
gaggaguggaggugggcug

SEQ ID NO: 76398 - RNA, 19 nt, Artificial Sequence
  Description of Artificial Sequence: Synthetic oligonucleotide
gggcccucucuucucaccu

SEQ ID NO: 76399 - RNA, 19 nt, Artificial Sequence
  Description of Artificial Sequence: Synthetic oligonucleotide
uuuguuuuuuguuggagug

SEQ ID NO: 76400 - RNA, 19 nt, Artificial Sequence
  Description of Artificial Sequence: Synthetic oligonucleotide
guuucuaauaaacuuggau

SEQ ID NO: 76401 - RNA, 19 nt, Artificial Sequence
  Description of Artificial Sequence: Synthetic oligonucleotide
uucucuaaccuuuaaaaaa

SEQ ID NO: 76402 - RNA, 25 nt, Artificial Sequence
  Description of Artificial Sequence: Synthetic oligonucleotide
agacaccucugcccucaccaugagc

SEQ ID NO: 76403 - RNA, 25 nt, Artificial Sequence
  Description of Artificial Sequence: Synthetic oligonucleotide
ccucuggcagccccugguccuggug

SEQ ID NO: 76404 - RNA, 25 nt, Artificial Sequence
  Description of Artificial Sequence: Synthetic oligonucleotide
gcuccuggugcugggcugcugcuuu

SEQ ID NO: 76405 - RNA, 25 nt, Artificial Sequence
  Description of Artificial Sequence: Synthetic oligonucleotide
ugcugcccccagacagcgccagucc

SEQ ID NO: 76406 - RNA, 25 nt, Artificial Sequence
  Description of Artificial Sequence: Synthetic oligonucleotide
cacccuugugcucuucccuggagac

SEQ ID NO: 76407 - RNA, 25 nt, Artificial Sequence
  Description of Artificial Sequence: Synthetic oligonucleotide
ccugagaaccaaucucaccgacagg

SEQ ID NO: 76408 - RNA, 25 nt, Artificial Sequence
  Description of Artificial Sequence: Synthetic oligonucleotide
gcagcuggcagaggaauaccuguac

SEQ ID NO: 76409 - RNA, 25 nt, Artificial Sequence
  Description of Artificial Sequence: Synthetic oligonucleotide
ccgcuaugguuacacucggguggca

SEQ ID NO: 76410 - RNA, 25 nt, Artificial Sequence
  Description of Artificial Sequence: Synthetic oligonucleotide
agagaugcguggagagucgaaaucu

SEQ ID NO: 76411 - RNA, 25 nt, Artificial Sequence
  Description of Artificial Sequence: Synthetic oligonucleotide
ucuggggccugcgcugcugcuucuc

SEQ ID NO: 76412 - RNA, 25 nt, Artificial Sequence
  Description of Artificial Sequence: Synthetic oligonucleotide
ccagaagcaacugucccugcccgag

SEQ ID NO: 76413 - RNA, 25 nt, Artificial Sequence
  Description of Artificial Sequence: Synthetic oligonucleotide
gaccggugagcuggauagcgccacg

SEQ ID NO: 76414 - RNA, 25 nt, Artificial Sequence
  Description of Artificial Sequence: Synthetic oligonucleotide
gcugaaggccaugcgaaccccacgg

SEQ ID NO: 76415 - RNA, 25 nt, Artificial Sequence
  Description of Artificial Sequence: Synthetic oligonucleotide
gugcggggucccagaccugggcaga

SEQ ID NO: 76416 - RNA, 25 nt, Artificial Sequence
  Description of Artificial Sequence: Synthetic oligonucleotide
auuccaaaccuuugagggcgaccuc

SEQ ID NO: 76417 - RNA, 25 nt, Artificial Sequence
  Description of Artificial Sequence: Synthetic oligonucleotide
caaguggcaccaccacaacaucacc

SEQ ID NO: 76418 - RNA, 25 nt, Artificial Sequence
  Description of Artificial Sequence: Synthetic oligonucleotide
cuauuggauccaaaacuacucggaa

SEQ ID NO: 76419 - RNA, 25 nt, Artificial Sequence
  Description of Artificial Sequence: Synthetic oligonucleotide
agacuugccgcgggcggugauugac

SEQ ID NO: 76420 - RNA, 25 nt, Artificial Sequence
  Description of Artificial Sequence: Synthetic oligonucleotide
cgacgccuuugcccgcgccuucgca

SEQ ID NO: 76421 - RNA, 25 nt, Artificial Sequence
  Description of Artificial Sequence: Synthetic oligonucleotide
acuguggagcgcggugacgccgcuc

SEQ ID NO: 76422 - RNA, 25 nt, Artificial Sequence
  Description of Artificial Sequence: Synthetic oligonucleotide
caccuucacucgcguguacagccgg

SEQ ID NO: 76423 - RNA, 25 nt, Artificial Sequence
  Description of Artificial Sequence: Synthetic oligonucleotide
ggacgcagacaucgucauccaguuu

SEQ ID NO: 76424 - RNA, 25 nt, Artificial Sequence
  Description of Artificial Sequence: Synthetic oligonucleotide
uggugucgcggagcacggagacggg

SEQ ID NO: 76425 - RNA, 25 nt, Artificial Sequence
  Description of Artificial Sequence: Synthetic oligonucleotide
guaucccuucgacgggaaggacggg

SEQ ID NO: 76426 - RNA, 25 nt, Artificial Sequence
  Description of Artificial Sequence: Synthetic oligonucleotide
gcuccuggcacacgccuuuccuccu

SEQ ID NO: 76427 - RNA, 25 nt, Artificial Sequence
  Description of Artificial Sequence: Synthetic oligonucleotide
uggccccggcauucagggagacgcc

SEQ ID NO: 76428 - RNA, 25 nt, Artificial Sequence
  Description of Artificial Sequence: Synthetic oligonucleotide
ccauuucgacgaugacgaguugugg

SEQ ID NO: 76429 - RNA, 25 nt, Artificial Sequence
  Description of Artificial Sequence: Synthetic oligonucleotide
gucccugggcaagggcgucgugguu

SEQ ID NO: 76430 - RNA, 25 nt, Artificial Sequence
  Description of Artificial Sequence: Synthetic oligonucleotide
uccaacucgguuuggaaacgcagau

SEQ ID NO: 76431 - RNA, 25 nt, Artificial Sequence
  Description of Artificial Sequence: Synthetic oligonucleotide
uggcgcggccugccacuuccccuuc

SEQ ID NO: 76432 - RNA, 25 nt, Artificial Sequence
  Description of Artificial Sequence: Synthetic oligonucleotide
caucuucgagggccgcuccuacucu

SEQ ID NO: 76433 - RNA, 25 nt, Artificial Sequence
  Description of Artificial Sequence: Synthetic oligonucleotide
ugccugcaccaccgacggucgcucc

SEQ ID NO: 76434 - RNA, 25 nt, Artificial Sequence
  Description of Artificial Sequence: Synthetic oligonucleotide
cgacggcuugcccuggugcaguacc

SEQ ID NO: 76435 - RNA, 25 nt, Artificial Sequence
  Description of Artificial Sequence: Synthetic oligonucleotide
cacggccaacuacgacaccgacgac

SEQ ID NO: 76436 - RNA, 25 nt, Artificial Sequence
  Description of Artificial Sequence: Synthetic oligonucleotide
ccgguuuggcuucugccccagcgag

SEQ ID NO: 76437 - RNA, 25 nt, Artificial Sequence
  Description of Artificial Sequence: Synthetic oligonucleotide
gagacucuacacccaggacggcaau

SEQ ID NO: 76438 - RNA, 25 nt, Artificial Sequence
  Description of Artificial Sequence: Synthetic oligonucleotide
ugcugaugggaaacccugccaguuu

SEQ ID NO: 76439 - RNA, 25 nt, Artificial Sequence
  Description of Artificial Sequence: Synthetic oligonucleotide
uccauucaucuuccaaggccaaucc

SEQ ID NO: 76440 - RNA, 25 nt, Artificial Sequence
  Description of Artificial Sequence: Synthetic oligonucleotide
cuacuccgccugcaccacggacggu

SEQ ID NO: 76441 - RNA, 25 nt, Artificial Sequence
  Description of Artificial Sequence: Synthetic oligonucleotide
ucgcuccgacggcuaccgcuggugc

SEQ ID NO: 76442 - RNA, 25 nt, Artificial Sequence
  Description of Artificial Sequence: Synthetic oligonucleotide
cgccaccaccgccaacuacgaccgg

SEQ ID NO: 76443 - RNA, 25 nt, Artificial Sequence
  Description of Artificial Sequence: Synthetic oligonucleotide
ggacaagcucuucggcuucugcccg

SEQ ID NO: 76444 - RNA, 25 nt, Artificial Sequence
  Description of Artificial Sequence: Synthetic oligonucleotide
gacccgagcugacucgacggugaug

SEQ ID NO: 76445 - RNA, 25 nt, Artificial Sequence
  Description of Artificial Sequence: Synthetic oligonucleotide
ggggggcaacucggcgggggagcug

SEQ ID NO: 76446 - RNA, 25 nt, Artificial Sequence
  Description of Artificial Sequence: Synthetic oligonucleotide
gugcgucuuccccuucacuuuccug

SEQ ID NO: 76447 - RNA, 25 nt, Artificial Sequence
  Description of Artificial Sequence: Synthetic oligonucleotide
ggguaaggaguacucgaccuguacc

SEQ ID NO: 76448 - RNA, 25 nt, Artificial Sequence
  Description of Artificial Sequence: Synthetic oligonucleotide
cagcgagggccgcggagaugggcgc

SEQ ID NO: 76449 - RNA, 25 nt, Artificial Sequence
  Description of Artificial Sequence: Synthetic oligonucleotide
ccucuggugcgcuaccaccucgaac

SEQ ID NO: 76450 - RNA, 25 nt, Artificial Sequence
  Description of Artificial Sequence: Synthetic oligonucleotide
cuuugacagcgacaagaaguggggc

SEQ ID NO: 76451 - RNA, 25 nt, Artificial Sequence
  Description of Artificial Sequence: Synthetic oligonucleotide
cuucugcccggaccaaggauacagu

SEQ ID NO: 76452 - RNA, 25 nt, Artificial Sequence
  Description of Artificial Sequence: Synthetic oligonucleotide
uuuguuccucguggcggcgcaugag

SEQ ID NO: 76453 - RNA, 25 nt, Artificial Sequence
  Description of Artificial Sequence: Synthetic oligonucleotide
guucggccacgcgcugggcuuagau

SEQ ID NO: 76454 - RNA, 25 nt, Artificial Sequence
  Description of Artificial Sequence: Synthetic oligonucleotide
ucauuccucagugccggaggcgcuc

SEQ ID NO: 76455 - RNA, 25 nt, Artificial Sequence
  Description of Artificial Sequence: Synthetic oligonucleotide
cauguacccuauguaccgcuucacu

SEQ ID NO: 76456 - RNA, 25 nt, Artificial Sequence
  Description of Artificial Sequence: Synthetic oligonucleotide
ugaggggccccccuugcauaaggac

SEQ ID NO: 76457 - RNA, 25 nt, Artificial Sequence
  Description of Artificial Sequence: Synthetic oligonucleotide
cgacgugaauggcauccggcaccuc

SEQ ID NO: 76458 - RNA, 25 nt, Artificial Sequence
  Description of Artificial Sequence: Synthetic oligonucleotide
cuaugguccucgcccugaaccugag

SEQ ID NO: 76459 - RNA, 25 nt, Artificial Sequence
  Description of Artificial Sequence: Synthetic oligonucleotide
gccacggccuccaaccaccaccaca

SEQ ID NO: 76460 - RNA, 25 nt, Artificial Sequence
  Description of Artificial Sequence: Synthetic oligonucleotide
accgcagcccacggcucccccgacg

SEQ ID NO: 76461 - RNA, 25 nt, Artificial Sequence
  Description of Artificial Sequence: Synthetic oligonucleotide
ggucugccccaccggaccccccacu

SEQ ID NO: 76462 - RNA, 25 nt, Artificial Sequence
  Description of Artificial Sequence: Synthetic oligonucleotide
uguccaccccucagagcgccccaca

SEQ ID NO: 76463 - RNA, 25 nt, Artificial Sequence
  Description of Artificial Sequence: Synthetic oligonucleotide
agcuggccccacagguccccccuca

SEQ ID NO: 76464 - RNA, 25 nt, Artificial Sequence
  Description of Artificial Sequence: Synthetic oligonucleotide
agcuggccccacagguccccccacu

SEQ ID NO: 76465 - RNA, 25 nt, Artificial Sequence
  Description of Artificial Sequence: Synthetic oligonucleotide
ugcuggcccuucuacggccacuacu

SEQ ID NO: 76466 - RNA, 25 nt, Artificial Sequence
  Description of Artificial Sequence: Synthetic oligonucleotide
ugugccuuugaguccgguggacgau

SEQ ID NO: 76467 - RNA, 25 nt, Artificial Sequence
  Description of Artificial Sequence: Synthetic oligonucleotide
ugccugcaacgugaacaucuucgac

SEQ ID NO: 76468 - RNA, 25 nt, Artificial Sequence
  Description of Artificial Sequence: Synthetic oligonucleotide
cgccaucgcggagauugggaaccag

SEQ ID NO: 76469 - RNA, 25 nt, Artificial Sequence
  Description of Artificial Sequence: Synthetic oligonucleotide
gcuguauuuguucaaggaugggaag

SEQ ID NO: 76470 - RNA, 25 nt, Artificial Sequence
  Description of Artificial Sequence: Synthetic oligonucleotide
guacuggcgauucucugagggcagg

SEQ ID NO: 76471 - RNA, 25 nt, Artificial Sequence
  Description of Artificial Sequence: Synthetic oligonucleotide
ggggagccggccgcagggccccuuc

SEQ ID NO: 76472 - RNA, 25 nt, Artificial Sequence
  Description of Artificial Sequence: Synthetic oligonucleotide
ccuuaucgccgacaaguggcccgcg

SEQ ID NO: 76473 - RNA, 25 nt, Artificial Sequence
  Description of Artificial Sequence: Synthetic oligonucleotide
gcugccccgcaagcuggacucgguc

SEQ ID NO: 76474 - RNA, 25 nt, Artificial Sequence
  Description of Artificial Sequence: Synthetic oligonucleotide
cuuugaggagcggcucuccaagaag

SEQ ID NO: 76475 - RNA, 25 nt, Artificial Sequence
  Description of Artificial Sequence: Synthetic oligonucleotide
gcuuuucuucuucucugggcgccag

SEQ ID NO: 76476 - RNA, 25 nt, Artificial Sequence
  Description of Artificial Sequence: Synthetic oligonucleotide
gguguggguguacacaggcgcgucg

SEQ ID NO: 76477 - RNA, 25 nt, Artificial Sequence
  Description of Artificial Sequence: Synthetic oligonucleotide
ggugcugggcccgaggcgucuggac

SEQ ID NO: 76478 - RNA, 25 nt, Artificial Sequence
  Description of Artificial Sequence: Synthetic oligonucleotide
caagcugggccugggagccgacgug

SEQ ID NO: 76479 - RNA, 25 nt, Artificial Sequence
  Description of Artificial Sequence: Synthetic oligonucleotide
ggcccaggugaccggggcccuccgg

SEQ ID NO: 76480 - RNA, 25 nt, Artificial Sequence
  Description of Artificial Sequence: Synthetic oligonucleotide
gaguggcagggggaagaugcugcug

SEQ ID NO: 76481 - RNA, 25 nt, Artificial Sequence
  Description of Artificial Sequence: Synthetic oligonucleotide
guucagcgggcggcgccucuggagg

SEQ ID NO: 76482 - RNA, 25 nt, Artificial Sequence
  Description of Artificial Sequence: Synthetic oligonucleotide
guucgacgugaaggcgcagauggug

SEQ ID NO: 76483 - RNA, 25 nt, Artificial Sequence
  Description of Artificial Sequence: Synthetic oligonucleotide
ggauccccggagcgccagcgaggug

SEQ ID NO: 76484 - RNA, 25 nt, Artificial Sequence
  Description of Artificial Sequence: Synthetic oligonucleotide
ggaccggauguuccccggggugccu

SEQ ID NO: 76485 - RNA, 25 nt, Artificial Sequence
  Description of Artificial Sequence: Synthetic oligonucleotide
uuuggacacgcacgacgucuuccag

SEQ ID NO: 76486 - RNA, 25 nt, Artificial Sequence
  Description of Artificial Sequence: Synthetic oligonucleotide
guaccgagagaaagccuauuucugc

SEQ ID NO: 76487 - RNA, 25 nt, Artificial Sequence
  Description of Artificial Sequence: Synthetic oligonucleotide
ccaggaccgcuucuacuggcgcgug

SEQ ID NO: 76488 - RNA, 25 nt, Artificial Sequence
  Description of Artificial Sequence: Synthetic oligonucleotide
gaguucccggagugaguugaaccag

SEQ ID NO: 76489 - RNA, 25 nt, Artificial Sequence
  Description of Artificial Sequence: Synthetic oligonucleotide
gguggaccaagugggcuacgugacc

SEQ ID NO: 76490 - RNA, 25 nt, Artificial Sequence
  Description of Artificial Sequence: Synthetic oligonucleotide
cuaugacauccugcagugcccugag

SEQ ID NO: 76491 - RNA, 25 nt, Artificial Sequence
  Description of Artificial Sequence: Synthetic oligonucleotide
ggacuagggcucccguccugcuuug

SEQ ID NO: 76492 - RNA, 25 nt, Artificial Sequence
  Description of Artificial Sequence: Synthetic oligonucleotide
ggcagugccauguaaauccccacug

SEQ ID NO: 76493 - RNA, 25 nt, Artificial Sequence
  Description of Artificial Sequence: Synthetic oligonucleotide
gggaccaacccuggggaaggagcca

SEQ ID NO: 76494 - RNA, 25 nt, Artificial Sequence
  Description of Artificial Sequence: Synthetic oligonucleotide
aguuugccggauacaaacugguauu

SEQ ID NO: 76495 - RNA, 25 nt, Artificial Sequence
  Description of Artificial Sequence: Synthetic oligonucleotide
ucuguucuggaggaaagggaggagu

SEQ ID NO: 76496 - RNA, 25 nt, Artificial Sequence
  Description of Artificial Sequence: Synthetic oligonucleotide
uggaggugggcugggcccucucuuc

SEQ ID NO: 76497 - RNA, 25 nt, Artificial Sequence
  Description of Artificial Sequence: Synthetic oligonucleotide
cucaccuuuguuuuuuguuggagug

SEQ ID NO: 76498 - RNA, 25 nt, Artificial Sequence
  Description of Artificial Sequence: Synthetic oligonucleotide
guuucuaauaaacuuggauucucua

SEQ ID NO: 76499 - RNA, 2722 nt, Homo sapiens
caacaguccccaggcaucaccauucaagaugcauccagggguccuggcugccuuccucuucuugagcuggacucauugucgggcccugccccuucccagugguggugaugaagaugauuugucugaggaagaccuccaguuugcagagcgcuaccugagaucauacuaccauccuacaaaucucgcgggaauccugaaggagaaugcagcaagcuccaugacugagaggcuccgagaaaugcagucuuucuucggcuuagaggugacuggcaaacuugacgauaacaccuuagaugucaugaaaaagccaagaugcgggguuccugaugugggugaauacaauguuuucccucgaacucuuaaaugguccaaaaugaauuuaaccuacagaauugugaauuacaccccugauaugacucauucugaagucgaaaaggcauucaaaaaagccuucaaaguuugguccgauguaacuccucugaauuuuaccagacuucacgauggcauugcugacaucaugaucucuuuuggaauuaaggagcauggcgacuucuacccauuugaugggcccucuggccugcuggcucaugcuuuuccuccugggccaaauuauggaggagaugcccauuuugaugaugaugaaaccuggacaaguaguuccaaaggcuacaacuuguuucuuguugcugcgcaugaguucggccacuccuuaggucuugaccacuccaaggacccuggagcacucauguuuccuaucuacaccuacaccggcaaaagccacuuuaugcuuccugaugacgauguacaagggauccagucucucuaugguccaggagaugaagaccccaacccuaaacauccaaaaacgccagacaaaugugacccuuccuuaucccuugaugccauuaccagucuccgaggagaaacaaugaucuuuaaagacagauucuucuggcgccugcauccucagcagguugaugcggagcuguuuuuaacgaaaucauuuuggccagaacuucccaaccguauugaugcugcauaugagcacccuucucaugaccucaucuucaucuucagagguagaaaauuuugggcucuuaaugguuaugacauucuggaagguuaucccaaaaaaauaucugaacugggucuuccaaaagaaguuaagaagauaagugcagcuguucacuuugaggauacaggcaagacucuccuguucucaggaaaccaggucuggagauaugaugauacuaaccauauuauggauaaagacuauccgagacuaauagaagaagacuucccaggaauuggugauaaaguagaugcugucuaugagaaaaaugguuauaucuauuuuuucaacggacccauacaguuugaauacagcaucuggaguaaccguauuguucgcgucaugccagcaaauuccauuuugugguguuaagugucuuuuuaaaaauuguuauuuaaauccugaagagcauuugggguaauacuuccagaagugcgggguaggggaagaagagcuaucaggagaaagcuugguucugugaacaagcuucaguaaguuaucuuugaauauguaguaucuauaugacuaugcguggcuggaaccacauugaagaauguuagaguaaugaaauggaggaucucuaaagagcaucugauucuuguugcuguacaaaagcaaugguugaugauacuucccacaccacaaaugggacacauggucugucaaugagagcauaauuuaaaaauauauuuauaaggaaauuuuacaagggcauaaaguaaauacaugcauauaaugaauaaaucauucuuacuaaaaaguauaaaauaguaugaaaauggaaauuugggagagccauacauaaaagaaauaaaccaaaggaaaaugucuguaauaauagacuguaacuuccaaauaaauaauuuucauuuugcacugaggauauucagauguaugugcccuucuucacacagacacuaacgaaauaucaaagucauuaaagacaggagacaaaagagcagugguaagaauaguagauguggccuuugaauucuguuuaauuuucacuuuuggcaaugacucaaagucugcucucauauaagacaaauauuccuuugcauauuauaaaggauaaagaaggaugaugucuuuuuauuaaaauauuucagguucuucagaagucacacauuacaaaguuaaaauuguuaucaaaauagucuaaggccauggcaucccuuuuucauaaauuauuugauuauuuaagacuaaaaguugcauuuuaacccuauuuuaccuagcuaauuauuuaauuguccgguuugucuuggauauauaggcuauuuucuaaagacuuguauagcaugaaauaaaauauaucuuauaaaguggaaguauguauauuaaaaaagagacauccaaauuuuuuuuuaaagcagucuacuagauugugaucccuugagauauggaaggaugccuuuuuuucucugcauuuaaaaaaaucccccagcacuucccacagugccuauugauacuuggggagggugcuuggcacuuauugaauauaugaucggccaucaagggaagaacuauugugcucagagacacuguugauaaaaacucaggcaaagaaaaugaaaugcauauuugcaaaguguauuaggaaguguuuauguuguuuauaauaaaaauauauuuucaacagaaaaaaaa

SEQ ID NO: 76500 - RNA, 19 nt, Artificial Sequence
  Description of Artificial Sequence: Synthetic oligonucleotide
caacaguccccaggcauca

SEQ ID NO: 76501 - RNA, 19 nt, Artificial Sequence
  Description of Artificial Sequence: Synthetic oligonucleotide
accauucaagaugcaucca

SEQ ID NO: 76502 - RNA, 19 nt, Artificial Sequence
  Description of Artificial Sequence: Synthetic oligonucleotide
agggguccuggcugccuuc

SEQ ID NO: 76503 - RNA, 19 nt, Artificial Sequence
  Description of Artificial Sequence: Synthetic oligonucleotide
ccucuucuugagcuggacu

SEQ ID NO: 76504 - RNA, 19 nt, Artificial Sequence
  Description of Artificial Sequence: Synthetic oligonucleotide
ucauugucgggcccugccc

SEQ ID NO: 76505 - RNA, 19 nt, Artificial Sequence
  Description of Artificial Sequence: Synthetic oligonucleotide
ccuucccagugguggugau

SEQ ID NO: 76506 - RNA, 19 nt, Artificial Sequence
  Description of Artificial Sequence: Synthetic oligonucleotide
ugaagaugauuugucugag

SEQ ID NO: 76507 - RNA, 19 nt, Artificial Sequence
  Description of Artificial Sequence: Synthetic oligonucleotide
ggaagaccuccaguuugca

SEQ ID NO: 76508 - RNA, 19 nt, Artificial Sequence
  Description of Artificial Sequence: Synthetic oligonucleotide
agagcgcuaccugagauca

SEQ ID NO: 76509 - RNA, 19 nt, Artificial Sequence
  Description of Artificial Sequence: Synthetic oligonucleotide
auacuaccauccuacaaau

SEQ ID NO: 76510 - RNA, 19 nt, Artificial Sequence
  Description of Artificial Sequence: Synthetic oligonucleotide
ucucgcgggaauccugaag

SEQ ID NO: 76511 - RNA, 19 nt, Artificial Sequence
  Description of Artificial Sequence: Synthetic oligonucleotide
ggagaaugcagcaagcucc

SEQ ID NO: 76512 - RNA, 19 nt, Artificial Sequence
  Description of Artificial Sequence: Synthetic oligonucleotide
caugacugagaggcuccga

SEQ ID NO: 76513 - RNA, 19 nt, Artificial Sequence
  Description of Artificial Sequence: Synthetic oligonucleotide
agaaaugcagucuuucuuc

SEQ ID NO: 76514 - RNA, 19 nt, Artificial Sequence
  Description of Artificial Sequence: Synthetic oligonucleotide
cggcuuagaggugacuggc

SEQ ID NO: 76515 - RNA, 19 nt, Artificial Sequence
  Description of Artificial Sequence: Synthetic oligonucleotide
caaacuugacgauaacacc

SEQ ID NO: 76516 - RNA, 19 nt, Artificial Sequence
  Description of Artificial Sequence: Synthetic oligonucleotide
cuuagaugucaugaaaaag

SEQ ID NO: 76517 - RNA, 19 nt, Artificial Sequence
  Description of Artificial Sequence: Synthetic oligonucleotide
gccaagaugcgggguuccu

SEQ ID NO: 76518 - RNA, 19 nt, Artificial Sequence
  Description of Artificial Sequence: Synthetic oligonucleotide
ugaugugggugaauacaau

SEQ ID NO: 76519 - RNA, 19 nt, Artificial Sequence
  Description of Artificial Sequence: Synthetic oligonucleotide
uguuuucccucgaacucuu

SEQ ID NO: 76520 - RNA, 19 nt, Artificial Sequence
  Description of Artificial Sequence: Synthetic oligonucleotide
uaaaugguccaaaaugaau

SEQ ID NO: 76521 - RNA, 19 nt, Artificial Sequence
  Description of Artificial Sequence: Synthetic oligonucleotide
uuuaaccuacagaauugug

SEQ ID NO: 76522 - RNA, 19 nt, Artificial Sequence
  Description of Artificial Sequence: Synthetic oligonucleotide
gaauuacaccccugauaug

SEQ ID NO: 76523 - RNA, 19 nt, Artificial Sequence
  Description of Artificial Sequence: Synthetic oligonucleotide
gacucauucugaagucgaa

SEQ ID NO: 76524 - RNA, 19 nt, Artificial Sequence
  Description of Artificial Sequence: Synthetic oligonucleotide
aaaggcauucaaaaaagcc

SEQ ID NO: 76525 - RNA, 19 nt, Artificial Sequence
  Description of Artificial Sequence: Synthetic oligonucleotide
cuucaaaguuugguccgau

SEQ ID NO: 76526 - RNA, 19 nt, Artificial Sequence
  Description of Artificial Sequence: Synthetic oligonucleotide
uguaacuccucugaauuuu

SEQ ID NO: 76527 - RNA, 19 nt, Artificial Sequence
  Description of Artificial Sequence: Synthetic oligonucleotide
uaccagacuucacgauggc

SEQ ID NO: 76528 - RNA, 19 nt, Artificial Sequence
  Description of Artificial Sequence: Synthetic oligonucleotide
cauugcugacaucaugauc

SEQ ID NO: 76529 - RNA, 19 nt, Artificial Sequence
  Description of Artificial Sequence: Synthetic oligonucleotide
cucuuuuggaauuaaggag

SEQ ID NO: 76530 - RNA, 19 nt, Artificial Sequence
  Description of Artificial Sequence: Synthetic oligonucleotide
gcauggcgacuucuaccca

SEQ ID NO: 76531 - RNA, 19 nt, Artificial Sequence
  Description of Artificial Sequence: Synthetic oligonucleotide
auuugaugggcccucuggc

SEQ ID NO: 76532 - RNA, 19 nt, Artificial Sequence
  Description of Artificial Sequence: Synthetic oligonucleotide
ccugcuggcucaugcuuuu

SEQ ID NO: 76533 - RNA, 19 nt, Artificial Sequence
  Description of Artificial Sequence: Synthetic oligonucleotide
uccuccugggccaaauuau

SEQ ID NO: 76534 - RNA, 19 nt, Artificial Sequence
  Description of Artificial Sequence: Synthetic oligonucleotide
uggaggagaugcccauuuu

SEQ ID NO: 76535 - RNA, 19 nt, Artificial Sequence
  Description of Artificial Sequence: Synthetic oligonucleotide
ugaugaugaugaaaccugg

SEQ ID NO: 76536 - RNA, 19 nt, Artificial Sequence
  Description of Artificial Sequence: Synthetic oligonucleotide
gacaaguaguuccaaaggc

SEQ ID NO: 76537 - RNA, 19 nt, Artificial Sequence
  Description of Artificial Sequence: Synthetic oligonucleotide
cuacaacuuguuucuuguu

SEQ ID NO: 76538 - RNA, 19 nt, Artificial Sequence
  Description of Artificial Sequence: Synthetic oligonucleotide
ugcugcgcaugaguucggc

SEQ ID NO: 76539 - RNA, 19 nt, Artificial Sequence
  Description of Artificial Sequence: Synthetic oligonucleotide
ccacuccuuaggucuugac

SEQ ID NO: 76540 - RNA, 19 nt, Artificial Sequence
  Description of Artificial Sequence: Synthetic oligonucleotide
ccacuccaaggacccugga

SEQ ID NO: 76541 - RNA, 19 nt, Artificial Sequence
  Description of Artificial Sequence: Synthetic oligonucleotide
agcacucauguuuccuauc

SEQ ID NO: 76542 - RNA, 19 nt, Artificial Sequence
  Description of Artificial Sequence: Synthetic oligonucleotide
cuacaccuacaccggcaaa

SEQ ID NO: 76543 - RNA, 19 nt, Artificial Sequence
  Description of Artificial Sequence: Synthetic oligonucleotide
aagccacuuuaugcuuccu

SEQ ID NO: 76544 - RNA, 19 nt, Artificial Sequence
  Description of Artificial Sequence: Synthetic oligonucleotide
ugaugacgauguacaaggg

SEQ ID NO: 76545 - RNA, 19 nt, Artificial Sequence
  Description of Artificial Sequence: Synthetic oligonucleotide
gauccagucucucuauggu

SEQ ID NO: 76546 - RNA, 19 nt, Artificial Sequence
  Description of Artificial Sequence: Synthetic oligonucleotide
uccaggagaugaagacccc

SEQ ID NO: 76547 - RNA, 19 nt, Artificial Sequence
  Description of Artificial Sequence: Synthetic oligonucleotide
caacccuaaacauccaaaa

SEQ ID NO: 76548 - RNA, 19 nt, Artificial Sequence
  Description of Artificial Sequence: Synthetic oligonucleotide
aacgccagacaaaugugac

SEQ ID NO: 76549 - RNA, 19 nt, Artificial Sequence
  Description of Artificial Sequence: Synthetic oligonucleotide
cccuuccuuaucccuugau

SEQ ID NO: 76550 - RNA, 19 nt, Artificial Sequence
  Description of Artificial Sequence: Synthetic oligonucleotide
ugccauuaccagucuccga

SEQ ID NO: 76551 - RNA, 19 nt, Artificial Sequence
  Description of Artificial Sequence: Synthetic oligonucleotide
aggagaaacaaugaucuuu

SEQ ID NO: 76552 - RNA, 19 nt, Artificial Sequence
  Description of Artificial Sequence: Synthetic oligonucleotide
uaaagacagauucuucugg

SEQ ID NO: 76553 - RNA, 19 nt, Artificial Sequence
  Description of Artificial Sequence: Synthetic oligonucleotide
gcgccugcauccucagcag

SEQ ID NO: 76554 - RNA, 19 nt, Artificial Sequence
  Description of Artificial Sequence: Synthetic oligonucleotide
gguugaugcggagcuguuu

SEQ ID NO: 76555 - RNA, 19 nt, Artificial Sequence
  Description of Artificial Sequence: Synthetic oligonucleotide
uuuaacgaaaucauuuugg

SEQ ID NO: 76556 - RNA, 19 nt, Artificial Sequence
  Description of Artificial Sequence: Synthetic oligonucleotide
gccagaacuucccaaccgu

SEQ ID NO: 76557 - RNA, 19 nt, Artificial Sequence
  Description of Artificial Sequence: Synthetic oligonucleotide
uauugaugcugcauaugag

SEQ ID NO: 76558 - RNA, 19 nt, Artificial Sequence
  Description of Artificial Sequence: Synthetic oligonucleotide
gcacccuucucaugaccuc

SEQ ID NO: 76559 - RNA, 19 nt, Artificial Sequence
  Description of Artificial Sequence: Synthetic oligonucleotide
caucuucaucuucagaggu

SEQ ID NO: 76560 - RNA, 19 nt, Artificial Sequence
  Description of Artificial Sequence: Synthetic oligonucleotide
uagaaaauuuugggcucuu

SEQ ID NO: 76561 - RNA, 19 nt, Artificial Sequence
  Description of Artificial Sequence: Synthetic oligonucleotide
uaaugguuaugacauucug

SEQ ID NO: 76562 - RNA, 19 nt, Artificial Sequence
  Description of Artificial Sequence: Synthetic oligonucleotide
ggaagguuaucccaaaaaa

SEQ ID NO: 76563 - RNA, 19 nt, Artificial Sequence
  Description of Artificial Sequence: Synthetic oligonucleotide
aauaucugaacugggucuu

SEQ ID NO: 76564 - RNA, 19 nt, Artificial Sequence
  Description of Artificial Sequence: Synthetic oligonucleotide
uccaaaagaaguuaagaag

SEQ ID NO: 76565 - RNA, 19 nt, Artificial Sequence
  Description of Artificial Sequence: Synthetic oligonucleotide
gauaagugcagcuguucac

SEQ ID NO: 76566 - RNA, 19 nt, Artificial Sequence
  Description of Artificial Sequence: Synthetic oligonucleotide
cuuugaggauacaggcaag

SEQ ID NO: 76567 - RNA, 19 nt, Artificial Sequence
  Description of Artificial Sequence: Synthetic oligonucleotide
gacucuccuguucucagga

SEQ ID NO: 76568 - RNA, 19 nt, Artificial Sequence
  Description of Artificial Sequence: Synthetic oligonucleotide
aaaccaggucuggagauau

SEQ ID NO: 76569 - RNA, 19 nt, Artificial Sequence
  Description of Artificial Sequence: Synthetic oligonucleotide
ugaugauacuaaccauauu

SEQ ID NO: 76570 - RNA, 19 nt, Artificial Sequence
  Description of Artificial Sequence: Synthetic oligonucleotide
uauggauaaagacuauccg

SEQ ID NO: 76571 - RNA, 19 nt, Artificial Sequence
  Description of Artificial Sequence: Synthetic oligonucleotide
gagacuaauagaagaagac

SEQ ID NO: 76572 - RNA, 19 nt, Artificial Sequence
  Description of Artificial Sequence: Synthetic oligonucleotide
cuucccaggaauuggugau

SEQ ID NO: 76573 - RNA, 19 nt, Artificial Sequence
  Description of Artificial Sequence: Synthetic oligonucleotide
uaaaguagaugcugucuau

SEQ ID NO: 76574 - RNA, 19 nt, Artificial Sequence
  Description of Artificial Sequence: Synthetic oligonucleotide
ugagaaaaaugguuauauc

SEQ ID NO: 76575 - RNA, 19 nt, Artificial Sequence
  Description of Artificial Sequence: Synthetic oligonucleotide
cuauuuuuucaacggaccc

SEQ ID NO: 76576 - RNA, 19 nt, Artificial Sequence
  Description of Artificial Sequence: Synthetic oligonucleotide
cauacaguuugaauacagc

SEQ ID NO: 76577 - RNA, 19 nt, Artificial Sequence
  Description of Artificial Sequence: Synthetic oligonucleotide
caucuggaguaaccguauu

SEQ ID NO: 76578 - RNA, 19 nt, Artificial Sequence
  Description of Artificial Sequence: Synthetic oligonucleotide
uguucgcgucaugccagca

SEQ ID NO: 76579 - RNA, 19 nt, Artificial Sequence
  Description of Artificial Sequence: Synthetic oligonucleotide
aaauuccauuuuguggugu

SEQ ID NO: 76580 - RNA, 19 nt, Artificial Sequence
  Description of Artificial Sequence: Synthetic oligonucleotide
uuaagugucuuuuuaaaaa

SEQ ID NO: 76581 - RNA, 19 nt, Artificial Sequence
  Description of Artificial Sequence: Synthetic oligonucleotide
auuguuauuuaaauccuga

SEQ ID NO: 76582 - RNA, 19 nt, Artificial Sequence
  Description of Artificial Sequence: Synthetic oligonucleotide
aagagcauuugggguaaua

SEQ ID NO: 76583 - RNA, 19 nt, Artificial Sequence
  Description of Artificial Sequence: Synthetic oligonucleotide
acuuccagaagugcggggu

SEQ ID NO: 76584 - RNA, 19 nt, Artificial Sequence
  Description of Artificial Sequence: Synthetic oligonucleotide
uaggggaagaagagcuauc

SEQ ID NO: 76585 - RNA, 19 nt, Artificial Sequence
  Description of Artificial Sequence: Synthetic oligonucleotide
caggagaaagcuugguucu

SEQ ID NO: 76586 - RNA, 19 nt, Artificial Sequence
  Description of Artificial Sequence: Synthetic oligonucleotide
ugugaacaagcuucaguaa

SEQ ID NO: 76587 - RNA, 19 nt, Artificial Sequence
  Description of Artificial Sequence: Synthetic oligonucleotide
aguuaucuuugaauaugua

SEQ ID NO: 76588 - RNA, 19 nt, Artificial Sequence
  Description of Artificial Sequence: Synthetic oligonucleotide
aguaucuauaugacuaugc

SEQ ID NO: 76589 - RNA, 19 nt, Artificial Sequence
  Description of Artificial Sequence: Synthetic oligonucleotide
cguggcuggaaccacauug

SEQ ID NO: 76590 - RNA, 19 nt, Artificial Sequence
  Description of Artificial Sequence: Synthetic oligonucleotide
gaagaauguuagaguaaug

SEQ ID NO: 76591 - RNA, 19 nt, Artificial Sequence
  Description of Artificial Sequence: Synthetic oligonucleotide
gaaauggaggaucucuaaa

SEQ ID NO: 76592 - RNA, 19 nt, Artificial Sequence
  Description of Artificial Sequence: Synthetic oligonucleotide
agagcaucugauucuuguu

SEQ ID NO: 76593 - RNA, 19 nt, Artificial Sequence
  Description of Artificial Sequence: Synthetic oligonucleotide
ugcuguacaaaagcaaugg

SEQ ID NO: 76594 - RNA, 19 nt, Artificial Sequence
  Description of Artificial Sequence: Synthetic oligonucleotide
guugaugauacuucccaca

SEQ ID NO: 76595 - RNA, 19 nt, Artificial Sequence
  Description of Artificial Sequence: Synthetic oligonucleotide
accacaaaugggacacaug

SEQ ID NO: 76596 - RNA, 19 nt, Artificial Sequence
  Description of Artificial Sequence: Synthetic oligonucleotide
ggucugucaaugagagcau

SEQ ID NO: 76597 - RNA, 19 nt, Artificial Sequence
  Description of Artificial Sequence: Synthetic oligonucleotide
uaauuuaaaaauauauuua

SEQ ID NO: 76598 - RNA, 19 nt, Artificial Sequence
  Description of Artificial Sequence: Synthetic oligonucleotide
auaaggaaauuuuacaagg

SEQ ID NO: 76599 - RNA, 19 nt, Artificial Sequence
  Description of Artificial Sequence: Synthetic oligonucleotide
ggcauaaaguaaauacaug

SEQ ID NO: 76600 - RNA, 19 nt, Artificial Sequence
  Description of Artificial Sequence: Synthetic oligonucleotide
gcauauaaugaauaaauca

SEQ ID NO: 76601 - RNA, 19 nt, Artificial Sequence
  Description of Artificial Sequence: Synthetic oligonucleotide
auucuuacuaaaaaguaua

SEQ ID NO: 76602 - RNA, 19 nt, Artificial Sequence
  Description of Artificial Sequence: Synthetic oligonucleotide
aaaauaguaugaaaaugga

SEQ ID NO: 76603 - RNA, 19 nt, Artificial Sequence
  Description of Artificial Sequence: Synthetic oligonucleotide
aaauuugggagagccauac

SEQ ID NO: 76604 - RNA, 19 nt, Artificial Sequence
  Description of Artificial Sequence: Synthetic oligonucleotide
cauaaaagaaauaaaccaa

SEQ ID NO: 76605 - RNA, 19 nt, Artificial Sequence
  Description of Artificial Sequence: Synthetic oligonucleotide
aaggaaaaugucuguaaua

SEQ ID NO: 76606 - RNA, 19 nt, Artificial Sequence
  Description of Artificial Sequence: Synthetic oligonucleotide
aauagacuguaacuuccaa

SEQ ID NO: 76607 - RNA, 19 nt, Artificial Sequence
  Description of Artificial Sequence: Synthetic oligonucleotide
aauaaauaauuuucauuuu

SEQ ID NO: 76608 - RNA, 19 nt, Artificial Sequence
  Description of Artificial Sequence: Synthetic oligonucleotide
ugcacugaggauauucaga

SEQ ID NO: 76609 - RNA, 19 nt, Artificial Sequence
  Description of Artificial Sequence: Synthetic oligonucleotide
auguaugugcccuucuuca

SEQ ID NO: 76610 - RNA, 19 nt, Artificial Sequence
  Description of Artificial Sequence: Synthetic oligonucleotide
acacagacacuaacgaaau

SEQ ID NO: 76611 - RNA, 19 nt, Artificial Sequence
  Description of Artificial Sequence: Synthetic oligonucleotide
uaucaaagucauuaaagac

SEQ ID NO: 76612 - RNA, 19 nt, Artificial Sequence
  Description of Artificial Sequence: Synthetic oligonucleotide
caggagacaaaagagcagu

SEQ ID NO: 76613 - RNA, 19 nt, Artificial Sequence
  Description of Artificial Sequence: Synthetic oligonucleotide
ugguaagaauaguagaugu

SEQ ID NO: 76614 - RNA, 19 nt, Artificial Sequence
  Description of Artificial Sequence: Synthetic oligonucleotide
uggccuuugaauucuguuu

SEQ ID NO: 76615 - RNA, 19 nt, Artificial Sequence
  Description of Artificial Sequence: Synthetic oligonucleotide
uaauuuucacuuuuggcaa

SEQ ID NO: 76616 - RNA, 19 nt, Artificial Sequence
  Description of Artificial Sequence: Synthetic oligonucleotide
augacucaaagucugcucu

SEQ ID NO: 76617 - RNA, 19 nt, Artificial Sequence
  Description of Artificial Sequence: Synthetic oligonucleotide
ucauauaagacaaauauuc

SEQ ID NO: 76618 - RNA, 19 nt, Artificial Sequence
  Description of Artificial Sequence: Synthetic oligonucleotide
ccuuugcauauuauaaagg

SEQ ID NO: 76619 - RNA, 19 nt, Artificial Sequence
  Description of Artificial Sequence: Synthetic oligonucleotide
gauaaagaaggaugauguc

SEQ ID NO: 76620 - RNA, 19 nt, Artificial Sequence
  Description of Artificial Sequence: Synthetic oligonucleotide
cuuuuuauuaaaauauuuc

SEQ ID NO: 76621 - RNA, 19 nt, Artificial Sequence
  Description of Artificial Sequence: Synthetic oligonucleotide
cagguucuucagaagucac

SEQ ID NO: 76622 - RNA, 19 nt, Artificial Sequence
  Description of Artificial Sequence: Synthetic oligonucleotide
cacauuacaaaguuaaaau

SEQ ID NO: 76623 - RNA, 19 nt, Artificial Sequence
  Description of Artificial Sequence: Synthetic oligonucleotide
uuguuaucaaaauagucua

SEQ ID NO: 76624 - RNA, 19 nt, Artificial Sequence
  Description of Artificial Sequence: Synthetic oligonucleotide
aaggccauggcaucccuuu

SEQ ID NO: 76625 - RNA, 19 nt, Artificial Sequence
  Description of Artificial Sequence: Synthetic oligonucleotide
uuucauaaauuauuugauu

SEQ ID NO: 76626 - RNA, 19 nt, Artificial Sequence
  Description of Artificial Sequence: Synthetic oligonucleotide
uauuuaagacuaaaaguug

SEQ ID NO: 76627 - RNA, 19 nt, Artificial Sequence
  Description of Artificial Sequence: Synthetic oligonucleotide
gcauuuuaacccuauuuua

SEQ ID NO: 76628 - RNA, 19 nt, Artificial Sequence
  Description of Artificial Sequence: Synthetic oligonucleotide
accuagcuaauuauuuaau

SEQ ID NO: 76629 - RNA, 19 nt, Artificial Sequence
  Description of Artificial Sequence: Synthetic oligonucleotide
uuguccgguuugucuugga

SEQ ID NO: 76630 - RNA, 19 nt, Artificial Sequence
  Description of Artificial Sequence: Synthetic oligonucleotide
auauauaggcuauuuucua

SEQ ID NO: 76631 - RNA, 19 nt, Artificial Sequence
  Description of Artificial Sequence: Synthetic oligonucleotide
aaagacuuguauagcauga

SEQ ID NO: 76632 - RNA, 19 nt, Artificial Sequence
  Description of Artificial Sequence: Synthetic oligonucleotide
aaauaaaauauaucuuaua

SEQ ID NO: 76633 - RNA, 19 nt, Artificial Sequence
  Description of Artificial Sequence: Synthetic oligonucleotide
aaaguggaaguauguauau

SEQ ID NO: 76634 - RNA, 19 nt, Artificial Sequence
  Description of Artificial Sequence: Synthetic oligonucleotide
uuaaaaaagagacauccaa

SEQ ID NO: 76635 - RNA, 19 nt, Artificial Sequence
  Description of Artificial Sequence: Synthetic oligonucleotide
aauuuuuuuuuaaagcagu

SEQ ID NO: 76636 - RNA, 19 nt, Artificial Sequence
  Description of Artificial Sequence: Synthetic oligonucleotide
ucuacuagauugugauccc

SEQ ID NO: 76637 - RNA, 19 nt, Artificial Sequence
  Description of Artificial Sequence: Synthetic oligonucleotide
cuugagauauggaaggaug

SEQ ID NO: 76638 - RNA, 19 nt, Artificial Sequence
  Description of Artificial Sequence: Synthetic oligonucleotide
gccuuuuuuucucugcauu

SEQ ID NO: 76639 - RNA, 19 nt, Artificial Sequence
  Description of Artificial Sequence: Synthetic oligonucleotide
uuaaaaaaaucccccagca

SEQ ID NO: 76640 - RNA, 19 nt, Artificial Sequence
  Description of Artificial Sequence: Synthetic oligonucleotide
acuucccacagugccuauu

SEQ ID NO: 76641 - RNA, 19 nt, Artificial Sequence
  Description of Artificial Sequence: Synthetic oligonucleotide
ugauacuuggggagggugc

SEQ ID NO: 76642 - RNA, 19 nt, Artificial Sequence
  Description of Artificial Sequence: Synthetic oligonucleotide
cuuggcacuuauugaauau

SEQ ID NO: 76643 - RNA, 19 nt, Artificial Sequence
  Description of Artificial Sequence: Synthetic oligonucleotide
uaugaucggccaucaaggg

SEQ ID NO: 76644 - RNA, 19 nt, Artificial Sequence
  Description of Artificial Sequence: Synthetic oligonucleotide
gaagaacuauugugcucag

SEQ ID NO: 76645 - RNA, 19 nt, Artificial Sequence
  Description of Artificial Sequence: Synthetic oligonucleotide
gagacacuguugauaaaaa

SEQ ID NO: 76646 - RNA, 19 nt, Artificial Sequence
  Description of Artificial Sequence: Synthetic oligonucleotide
acucaggcaaagaaaauga

SEQ ID NO: 76647 - RNA, 19 nt, Artificial Sequence
  Description of Artificial Sequence: Synthetic oligonucleotide
aaaugcauauuugcaaagu

SEQ ID NO: 76648 - RNA, 19 nt, Artificial Sequence
  Description of Artificial Sequence: Synthetic oligonucleotide
uguauuaggaaguguuuau

SEQ ID NO: 76649 - RNA, 19 nt, Artificial Sequence
  Description of Artificial Sequence: Synthetic oligonucleotide
uguuguuuauaauaaaaau

SEQ ID NO: 76650 - RNA, 19 nt, Artificial Sequence
  Description of Artificial Sequence: Synthetic oligonucleotide
uauauuuucaacagaaaaa

SEQ ID NO: 76651 - RNA, 19 nt, Artificial Sequence
  Description of Artificial Sequence: Synthetic oligonucleotide
auuuucaacagaaaaaaaa

SEQ ID NO: 76652 - RNA, 25 nt, Artificial Sequence
  Description of Artificial Sequence: Synthetic oligonucleotide
caacaguccccaggcaucaccauuc

SEQ ID NO: 76653 - RNA, 25 nt, Artificial Sequence
  Description of Artificial Sequence: Synthetic oligonucleotide
caagaugcauccagggguccuggcu

SEQ ID NO: 76654 - RNA, 25 nt, Artificial Sequence
  Description of Artificial Sequence: Synthetic oligonucleotide
ugccuuccucuucuugagcuggacu

SEQ ID NO: 76655 - RNA, 25 nt, Artificial Sequence
  Description of Artificial Sequence: Synthetic oligonucleotide
ucauugucgggcccugccccuuccc

SEQ ID NO: 76656 - RNA, 25 nt, Artificial Sequence
  Description of Artificial Sequence: Synthetic oligonucleotide
cagugguggugaugaagaugauuug

SEQ ID NO: 76657 - RNA, 25 nt, Artificial Sequence
  Description of Artificial Sequence: Synthetic oligonucleotide
gucugaggaagaccuccaguuugca

SEQ ID NO: 76658 - RNA, 25 nt, Artificial Sequence
  Description of Artificial Sequence: Synthetic oligonucleotide
agagcgcuaccugagaucauacuac

SEQ ID NO: 76659 - RNA, 25 nt, Artificial Sequence
  Description of Artificial Sequence: Synthetic oligonucleotide
ccauccuacaaaucucgcgggaauc

SEQ ID NO: 76660 - RNA, 25 nt, Artificial Sequence
  Description of Artificial Sequence: Synthetic oligonucleotide
ccugaaggagaaugcagcaagcucc

SEQ ID NO: 76661 - RNA, 25 nt, Artificial Sequence
  Description of Artificial Sequence: Synthetic oligonucleotide
caugacugagaggcuccgagaaaug

SEQ ID NO: 76662 - RNA, 25 nt, Artificial Sequence
  Description of Artificial Sequence: Synthetic oligonucleotide
gcagucuuucuucggcuuagaggug

SEQ ID NO: 76663 - RNA, 25 nt, Artificial Sequence
  Description of Artificial Sequence: Synthetic oligonucleotide
gacuggcaaacuugacgauaacacc

SEQ ID NO: 76664 - RNA, 25 nt, Artificial Sequence
  Description of Artificial Sequence: Synthetic oligonucleotide
cuuagaugucaugaaaaagccaaga

SEQ ID NO: 76665 - RNA, 25 nt, Artificial Sequence
  Description of Artificial Sequence: Synthetic oligonucleotide
augcgggguuccugaugugggugaa

SEQ ID NO: 76666 - RNA, 25 nt, Artificial Sequence
  Description of Artificial Sequence: Synthetic oligonucleotide
auacaauguuuucccucgaacucuu

SEQ ID NO: 76667 - RNA, 25 nt, Artificial Sequence
  Description of Artificial Sequence: Synthetic oligonucleotide
uaaaugguccaaaaugaauuuaacc

SEQ ID NO: 76668 - RNA, 25 nt, Artificial Sequence
  Description of Artificial Sequence: Synthetic oligonucleotide
cuacagaauugugaauuacaccccu

SEQ ID NO: 76669 - RNA, 25 nt, Artificial Sequence
  Description of Artificial Sequence: Synthetic oligonucleotide
ugauaugacucauucugaagucgaa

SEQ ID NO: 76670 - RNA, 25 nt, Artificial Sequence
  Description of Artificial Sequence: Synthetic oligonucleotide
aaaggcauucaaaaaagccuucaaa

SEQ ID NO: 76671 - RNA, 25 nt, Artificial Sequence
  Description of Artificial Sequence: Synthetic oligonucleotide
aguuugguccgauguaacuccucug

SEQ ID NO: 76672 - RNA, 25 nt, Artificial Sequence
  Description of Artificial Sequence: Synthetic oligonucleotide
gaauuuuaccagacuucacgauggc

SEQ ID NO: 76673 - RNA, 25 nt, Artificial Sequence
  Description of Artificial Sequence: Synthetic oligonucleotide
cauugcugacaucaugaucucuuuu

SEQ ID NO: 76674 - RNA, 25 nt, Artificial Sequence
  Description of Artificial Sequence: Synthetic oligonucleotide
uggaauuaaggagcauggcgacuuc

SEQ ID NO: 76675 - RNA, 25 nt, Artificial Sequence
  Description of Artificial Sequence: Synthetic oligonucleotide
cuacccauuugaugggcccucuggc

SEQ ID NO: 76676 - RNA, 25 nt, Artificial Sequence
  Description of Artificial Sequence: Synthetic oligonucleotide
ccugcuggcucaugcuuuuccuccu

SEQ ID NO: 76677 - RNA, 25 nt, Artificial Sequence
  Description of Artificial Sequence: Synthetic oligonucleotide
ugggccaaauuauggaggagaugcc

SEQ ID NO: 76678 - RNA, 25 nt, Artificial Sequence
  Description of Artificial Sequence: Synthetic oligonucleotide
ccauuuugaugaugaugaaaccugg

SEQ ID NO: 76679 - RNA, 25 nt, Artificial Sequence
  Description of Artificial Sequence: Synthetic oligonucleotide
gacaaguaguuccaaaggcuacaac

SEQ ID NO: 76680 - RNA, 25 nt, Artificial Sequence
  Description of Artificial Sequence: Synthetic oligonucleotide
cuuguuucuuguugcugcgcaugag

SEQ ID NO: 76681 - RNA, 25 nt, Artificial Sequence
  Description of Artificial Sequence: Synthetic oligonucleotide
guucggccacuccuuaggucuugac

SEQ ID NO: 76682 - RNA, 25 nt, Artificial Sequence
  Description of Artificial Sequence: Synthetic oligonucleotide
ccacuccaaggacccuggagcacuc

SEQ ID NO: 76683 - RNA, 25 nt, Artificial Sequence
  Description of Artificial Sequence: Synthetic oligonucleotide
cauguuuccuaucuacaccuacacc

SEQ ID NO: 76684 - RNA, 25 nt, Artificial Sequence
  Description of Artificial Sequence: Synthetic oligonucleotide
cggcaaaagccacuuuaugcuuccu

SEQ ID NO: 76685 - RNA, 25 nt, Artificial Sequence
  Description of Artificial Sequence: Synthetic oligonucleotide
ugaugacgauguacaagggauccag

SEQ ID NO: 76686 - RNA, 25 nt, Artificial Sequence
  Description of Artificial Sequence: Synthetic oligonucleotide
gucucucuaugguccaggagaugaa

SEQ ID NO: 76687 - RNA, 25 nt, Artificial Sequence
  Description of Artificial Sequence: Synthetic oligonucleotide
agaccccaacccuaaacauccaaaa

SEQ ID NO: 76688 - RNA, 25 nt, Artificial Sequence
  Description of Artificial Sequence: Synthetic oligonucleotide
aacgccagacaaaugugacccuucc

SEQ ID NO: 76689 - RNA, 25 nt, Artificial Sequence
  Description of Artificial Sequence: Synthetic oligonucleotide
cuuaucccuugaugccauuaccagu

SEQ ID NO: 76690 - RNA, 25 nt, Artificial Sequence
  Description of Artificial Sequence: Synthetic oligonucleotide
ucuccgaggagaaacaaugaucuuu

SEQ ID NO: 76691 - RNA, 25 nt, Artificial Sequence
  Description of Artificial Sequence: Synthetic oligonucleotide
uaaagacagauucuucuggcgccug

SEQ ID NO: 76692 - RNA, 25 nt, Artificial Sequence
  Description of Artificial Sequence: Synthetic oligonucleotide
gcauccucagcagguugaugcggag

SEQ ID NO: 76693 - RNA, 25 nt, Artificial Sequence
  Description of Artificial Sequence: Synthetic oligonucleotide
gcuguuuuuaacgaaaucauuuugg

SEQ ID NO: 76694 - RNA, 25 nt, Artificial Sequence
  Description of Artificial Sequence: Synthetic oligonucleotide
gccagaacuucccaaccguauugau

SEQ ID NO: 76695 - RNA, 25 nt, Artificial Sequence
  Description of Artificial Sequence: Synthetic oligonucleotide
ugcugcauaugagcacccuucucau

SEQ ID NO: 76696 - RNA, 25 nt, Artificial Sequence
  Description of Artificial Sequence: Synthetic oligonucleotide
ugaccucaucuucaucuucagaggu

SEQ ID NO: 76697 - RNA, 25 nt, Artificial Sequence
  Description of Artificial Sequence: Synthetic oligonucleotide
uagaaaauuuugggcucuuaauggu

SEQ ID NO: 76698 - RNA, 25 nt, Artificial Sequence
  Description of Artificial Sequence: Synthetic oligonucleotide
uuaugacauucuggaagguuauccc

SEQ ID NO: 76699 - RNA, 25 nt, Artificial Sequence
  Description of Artificial Sequence: Synthetic oligonucleotide
caaaaaaauaucugaacugggucuu

SEQ ID NO: 76700 - RNA, 25 nt, Artificial Sequence
  Description of Artificial Sequence: Synthetic oligonucleotide
uccaaaagaaguuaagaagauaagu

SEQ ID NO: 76701 - RNA, 25 nt, Artificial Sequence
  Description of Artificial Sequence: Synthetic oligonucleotide
ugcagcuguucacuuugaggauaca

SEQ ID NO: 76702 - RNA, 25 nt, Artificial Sequence
  Description of Artificial Sequence: Synthetic oligonucleotide
aggcaagacucuccuguucucagga

SEQ ID NO: 76703 - RNA, 25 nt, Artificial Sequence
  Description of Artificial Sequence: Synthetic oligonucleotide
aaaccaggucuggagauaugaugau

SEQ ID NO: 76704 - RNA, 25 nt, Artificial Sequence
  Description of Artificial Sequence: Synthetic oligonucleotide
uacuaaccauauuauggauaaagac

SEQ ID NO: 76705 - RNA, 25 nt, Artificial Sequence
  Description of Artificial Sequence: Synthetic oligonucleotide
cuauccgagacuaauagaagaagac

SEQ ID NO: 76706 - RNA, 25 nt, Artificial Sequence
  Description of Artificial Sequence: Synthetic oligonucleotide
cuucccaggaauuggugauaaagua

SEQ ID NO: 76707 - RNA, 25 nt, Artificial Sequence
  Description of Artificial Sequence: Synthetic oligonucleotide
agaugcugucuaugagaaaaauggu

SEQ ID NO: 76708 - RNA, 25 nt, Artificial Sequence
  Description of Artificial Sequence: Synthetic oligonucleotide
uuauaucuauuuuuucaacggaccc

SEQ ID NO: 76709 - RNA, 25 nt, Artificial Sequence
  Description of Artificial Sequence: Synthetic oligonucleotide
cauacaguuugaauacagcaucugg

SEQ ID NO: 76710 - RNA, 25 nt, Artificial Sequence
  Description of Artificial Sequence: Synthetic oligonucleotide
gaguaaccguauuguucgcgucaug

SEQ ID NO: 76711 - RNA, 25 nt, Artificial Sequence
  Description of Artificial Sequence: Synthetic oligonucleotide
gccagcaaauuccauuuuguggugu

SEQ ID NO: 76712 - RNA, 25 nt, Artificial Sequence
  Description of Artificial Sequence: Synthetic oligonucleotide
uuaagugucuuuuuaaaaauuguua

SEQ ID NO: 76713 - RNA, 25 nt, Artificial Sequence
  Description of Artificial Sequence: Synthetic oligonucleotide
auuuaaauccugaagagcauuuggg

SEQ ID NO: 76714 - RNA, 25 nt, Artificial Sequence
  Description of Artificial Sequence: Synthetic oligonucleotide
gguaauacuuccagaagugcggggu

SEQ ID NO: 76715 - RNA, 25 nt, Artificial Sequence
  Description of Artificial Sequence: Synthetic oligonucleotide
uaggggaagaagagcuaucaggaga

SEQ ID NO: 76716 - RNA, 25 nt, Artificial Sequence
  Description of Artificial Sequence: Synthetic oligonucleotide
aaagcuugguucugugaacaagcuu

SEQ ID NO: 76717 - RNA, 25 nt, Artificial Sequence
  Description of Artificial Sequence: Synthetic oligonucleotide
ucaguaaguuaucuuugaauaugua

SEQ ID NO: 76718 - RNA, 25 nt, Artificial Sequence
  Description of Artificial Sequence: Synthetic oligonucleotide
aguaucuauaugacuaugcguggcu

SEQ ID NO: 76719 - RNA, 25 nt, Artificial Sequence
  Description of Artificial Sequence: Synthetic oligonucleotide
uggaaccacauugaagaauguuaga

SEQ ID NO: 76720 - RNA, 25 nt, Artificial Sequence
  Description of Artificial Sequence: Synthetic oligonucleotide
aguaaugaaauggaggaucucuaaa

SEQ ID NO: 76721 - RNA, 25 nt, Artificial Sequence
  Description of Artificial Sequence: Synthetic oligonucleotide
agagcaucugauucuuguugcugua

SEQ ID NO: 76722 - RNA, 25 nt, Artificial Sequence
  Description of Artificial Sequence: Synthetic oligonucleotide
acaaaagcaaugguugaugauacuu

SEQ ID NO: 76723 - RNA, 25 nt, Artificial Sequence
  Description of Artificial Sequence: Synthetic oligonucleotide
ucccacaccacaaaugggacacaug

SEQ ID NO: 76724 - RNA, 25 nt, Artificial Sequence
  Description of Artificial Sequence: Synthetic oligonucleotide
ggucugucaaugagagcauaauuua

SEQ ID NO: 76725 - RNA, 25 nt, Artificial Sequence
  Description of Artificial Sequence: Synthetic oligonucleotide
aaaaauauauuuauaaggaaauuuu

SEQ ID NO: 76726 - RNA, 25 nt, Artificial Sequence
  Description of Artificial Sequence: Synthetic oligonucleotide
uacaagggcauaaaguaaauacaug

SEQ ID NO: 76727 - RNA, 25 nt, Artificial Sequence
  Description of Artificial Sequence: Synthetic oligonucleotide
gcauauaaugaauaaaucauucuua

SEQ ID NO: 76728 - RNA, 25 nt, Artificial Sequence
  Description of Artificial Sequence: Synthetic oligonucleotide
acuaaaaaguauaaaauaguaugaa

SEQ ID NO: 76729 - RNA, 25 nt, Artificial Sequence
  Description of Artificial Sequence: Synthetic oligonucleotide
aaauggaaauuugggagagccauac

SEQ ID NO: 76730 - RNA, 25 nt, Artificial Sequence
  Description of Artificial Sequence: Synthetic oligonucleotide
cauaaaagaaauaaaccaaaggaaa

SEQ ID NO: 76731 - RNA, 25 nt, Artificial Sequence
  Description of Artificial Sequence: Synthetic oligonucleotide
aaugucuguaauaauagacuguaac

SEQ ID NO: 76732 - RNA, 25 nt, Artificial Sequence
  Description of Artificial Sequence: Synthetic oligonucleotide
cuuccaaauaaauaauuuucauuuu

SEQ ID NO: 76733 - RNA, 25 nt, Artificial Sequence
  Description of Artificial Sequence: Synthetic oligonucleotide
ugcacugaggauauucagauguaug

SEQ ID NO: 76734 - RNA, 25 nt, Artificial Sequence
  Description of Artificial Sequence: Synthetic oligonucleotide
gugcccuucuucacacagacacuaa

SEQ ID NO: 76735 - RNA, 25 nt, Artificial Sequence
  Description of Artificial Sequence: Synthetic oligonucleotide
acgaaauaucaaagucauuaaagac

SEQ ID NO: 76736 - RNA, 25 nt, Artificial Sequence
  Description of Artificial Sequence: Synthetic oligonucleotide
caggagacaaaagagcagugguaag

SEQ ID NO: 76737 - RNA, 25 nt, Artificial Sequence
  Description of Artificial Sequence: Synthetic oligonucleotide
gaauaguagauguggccuuugaauu

SEQ ID NO: 76738 - RNA, 25 nt, Artificial Sequence
  Description of Artificial Sequence: Synthetic oligonucleotide
ucuguuuaauuuucacuuuuggcaa

SEQ ID NO: 76739 - RNA, 25 nt, Artificial Sequence
  Description of Artificial Sequence: Synthetic oligonucleotide
augacucaaagucugcucucauaua

SEQ ID NO: 76740 - RNA, 25 nt, Artificial Sequence
  Description of Artificial Sequence: Synthetic oligonucleotide
aagacaaauauuccuuugcauauua

SEQ ID NO: 76741 - RNA, 25 nt, Artificial Sequence
  Description of Artificial Sequence: Synthetic oligonucleotide
auaaaggauaaagaaggaugauguc

SEQ ID NO: 76742 - RNA, 25 nt, Artificial Sequence
  Description of Artificial Sequence: Synthetic oligonucleotide
cuuuuuauuaaaauauuucagguuc

SEQ ID NO: 76743 - RNA, 25 nt, Artificial Sequence
  Description of Artificial Sequence: Synthetic oligonucleotide
cuucagaagucacacauuacaaagu

SEQ ID NO: 76744 - RNA, 25 nt, Artificial Sequence
  Description of Artificial Sequence: Synthetic oligonucleotide
uuaaaauuguuaucaaaauagucua

SEQ ID NO: 76745 - RNA, 25 nt, Artificial Sequence
  Description of Artificial Sequence: Synthetic oligonucleotide
aaggccauggcaucccuuuuucaua

SEQ ID NO: 76746 - RNA, 25 nt, Artificial Sequence
  Description of Artificial Sequence: Synthetic oligonucleotide
aaauuauuugauuauuuaagacuaa

SEQ ID NO: 76747 - RNA, 25 nt, Artificial Sequence
  Description of Artificial Sequence: Synthetic oligonucleotide
aaaguugcauuuuaacccuauuuua

SEQ ID NO: 76748 - RNA, 25 nt, Artificial Sequence
  Description of Artificial Sequence: Synthetic oligonucleotide
accuagcuaauuauuuaauuguccg

SEQ ID NO: 76749 - RNA, 25 nt, Artificial Sequence
  Description of Artificial Sequence: Synthetic oligonucleotide
gguuugucuuggauauauaggcuau

SEQ ID NO: 76750 - RNA, 25 nt, Artificial Sequence
  Description of Artificial Sequence: Synthetic oligonucleotide
uuuucuaaagacuuguauagcauga

SEQ ID NO: 76751 - RNA, 25 nt, Artificial Sequence
  Description of Artificial Sequence: Synthetic oligonucleotide
aaauaaaauauaucuuauaaagugg

SEQ ID NO: 76752 - RNA, 25 nt, Artificial Sequence
  Description of Artificial Sequence: Synthetic oligonucleotide
gaaguauguauauuaaaaaagagac

SEQ ID NO: 76753 - RNA, 25 nt, Artificial Sequence
  Description of Artificial Sequence: Synthetic oligonucleotide
cauccaaauuuuuuuuuaaagcagu

SEQ ID NO: 76754 - RNA, 25 nt, Artificial Sequence
  Description of Artificial Sequence: Synthetic oligonucleotide
ucuacuagauugugaucccuugaga

SEQ ID NO: 76755 - RNA, 25 nt, Artificial Sequence
  Description of Artificial Sequence: Synthetic oligonucleotide
auauggaaggaugccuuuuuuucuc

SEQ ID NO: 76756 - RNA, 25 nt, Artificial Sequence
  Description of Artificial Sequence: Synthetic oligonucleotide
cugcauuuaaaaaaaucccccagca

SEQ ID NO: 76757 - RNA, 25 nt, Artificial Sequence
  Description of Artificial Sequence: Synthetic oligonucleotide
acuucccacagugccuauugauacu

SEQ ID NO: 76758 - RNA, 25 nt, Artificial Sequence
  Description of Artificial Sequence: Synthetic oligonucleotide
uuggggagggugcuuggcacuuauu

SEQ ID NO: 76759 - RNA, 25 nt, Artificial Sequence
  Description of Artificial Sequence: Synthetic oligonucleotide
ugaauauaugaucggccaucaaggg

SEQ ID NO: 76760 - RNA, 25 nt, Artificial Sequence
  Description of Artificial Sequence: Synthetic oligonucleotide
gaagaacuauugugcucagagacac

SEQ ID NO: 76761 - RNA, 25 nt, Artificial Sequence
  Description of Artificial Sequence: Synthetic oligonucleotide
cuguugauaaaaacucaggcaaaga

SEQ ID NO: 76762 - RNA, 25 nt, Artificial Sequence
  Description of Artificial Sequence: Synthetic oligonucleotide
aaaaugaaaugcauauuugcaaagu

SEQ ID NO: 76763 - RNA, 25 nt, Artificial Sequence
  Description of Artificial Sequence: Synthetic oligonucleotide
uguauuaggaaguguuuauguuguu

SEQ ID NO: 76764 - RNA, 25 nt, Artificial Sequence
  Description of Artificial Sequence: Synthetic oligonucleotide
uuauaauaaaaauauauuuucaaca

SEQ ID NO: 76765 - RNA, 25 nt, Artificial Sequence
  Description of Artificial Sequence: Synthetic oligonucleotide
aaauauauuuucaacagaaaaaaaa

SEQ ID NO: 76766 - RNA, 3558 nt, Homo sapiens
cagaccccaguucgccgacuaagcagaagaaagaucaaaaaccggaaaagaggagaagagcaaacaggcacuuugaggaacaauccccuuuaacuccaagccgacagcggucuaggaauucaaguucagugccuaccgaagacaaaggcgccccgagggaguggcggugcgaccccagggcgugggcccggccgcggagcccacacugcccggcugacccgguggucucggaccaugucucccgccccaagacccccccguugucuccugcucccccugcucacgcucggcaccgcgcucgccucccucggcucggcccaaagcagcagcuucagccccgaagccuggcuacagcaauauggcuaccugccucccggggaccuacguacccacacacagcgcucaccccagucacucucagcggccaucgcugccaugcagaaguuuuacggcuugcaaguaacaggcaaagcugaugcagacaccaugaaggccaugaggcgcccccgaugugguguuccagacaaguuuggggcugagaucaaggccaauguucgaaggaagcgcuacgccauccagggucucaaauggcaacauaaugaaaucacuuucugcauccagaauuacacccccaaggugggcgaguaugccacauacgaggccauucgcaaggcguuccgcgugugggagagugccacaccacugcgcuuccgcgaggugcccuaugccuacauccgugagggccaugagaagcaggccgacaucaugaucuucuuugccgagggcuuccauggcgacagcacgcccuucgauggugagggcggcuuccuggcccaugccuacuucccaggccccaacauuggaggagacacccacuuugacucugccgagccuuggacugucaggaaugaggaucugaauggaaaugacaucuuccugguggcugugcacgagcugggccaugcccuggggcucgagcauuccagugaccccucggccaucauggcacccuuuuaccaguggauggacacggagaauuuugugcugcccgaugaugaccgccggggcauccagcaacuuuaugggggugagucaggguuccccaccaagaugcccccucaacccaggacuaccucccggccuucuguuccugauaaacccaaaaaccccaccuaugggcccaacaucugugacgggaacuuugacaccguggccaugcuccgaggggagauguuugucuucaaggagcgcugguucuggcgggugaggaauaaccaagugauggauggauacccaaugcccauuggccaguucuggcggggccugccugcguccaucaacacugccuacgagaggaaggauggcaaauucgucuucuucaaaggagacaagcauuggguguuugaugaggcgucccuggaaccuggcuaccccaagcacauuaaggagcugggccgagggcugccuaccgacaagauugaugcugcucucuucuggaugcccaauggaaagaccuacuucuuccguggaaacaaguacuaccguuucaacgaagagcucagggcaguggauagcgaguaccccaagaacaucaaagucugggaagggaucccugagucucccagagggucauucaugggcagcgaugaagucuucacuuacuucuacaaggggaacaaauacuggaaauucaacaaccagaagcugaagguagaaccgggcuaccccaagucagcccugagggacuggaugggcugcccaucgggaggccggccggaugaggggacugaggaggagacggaggugaucaucauugagguggacgaggagggcggcggggcggugagcgcggcugccguggugcugcccgugcugcugcugcuccuggugcuggcggugggccuugcagucuucuucuucagacgccaugggacccccaggcgacugcucuacugccagcguucccugcuggacaaggucugacgcccaccgccggcccgcccacuccuaccacaaggacuuugccucugaaggccaguggcagcaggugguggugggugggcugcucccaucgucccgagcccccuccccgcagccuccuugcuucucucuguccccuggcuggccuccuucacccugaccgccucccucccuccugccccggcauugcaucuucccuagauagguccccugagggcugagugggagggcggcccuuuccagccucugccccucaggggaacccuguagcuuugugucuguccagccccaucugaauguguugggggcucugcacuugaaggcaggacccucagaccucgcugguaaaggucaaauggggucaucugcuccuuuuccauccccugacauaccuuaaccucugaacucugaccucaggaggcucugggcacuccagcccugaaagccccagguguacccaauuggcagccucucacuacucuuucuggcuaaaaggaaucuaaucuuguugaggguagagacccugagacagugugaggggguggggacugccaagccacccuaagaccuugggaggaaaacucagagagggucuucguugcucagucagucaaguuccucggagaucugccucugccucaccuaccccagggaacuuccaaggaaggagccugagccacuggggacuaagugggcagaagaaacccuuggcagcccugugccucucgaauguuagccuuggauggggcuuucacaguuagaagagcugaaaccaggggugcagcugucagguaggguggggccggugggagaggcccgggucagagcccugggggugagccugaaggccacagagaaagaaccuugcccaaacucaggcagcuggggcugaggcccaaaggcagaacagccagagggggcaggaggggaccaaaaaggaaaaugaggacgugcagcagcauuggaaggcuggggccgggcaggccaggccaagccaagcagggggccacagggugggcuguggagcucucaggaagggcccugaggaaggcacacuugcuccuguuggucccuguccuugcugcccaggcagcguggaggggaaggguagggcagccagagaaaggagcagagaaggcacacaaacgaggaaugaggggcuucacgagaggccacagggccuggcuggccacgcugucccggccugcucaccaucucagugaggggcaggagcuggggcucgcuuaggcuggguccacgcuucccuggugccagcaccccucaagccugucucaccaguggccugcccucucgcucccccacccagcccacccauugaagucuccuugggccaccaaaggugguggccaugguaccggggacuugggagagugagacccaguggagggagcaagaggagagggaugucggggggguggggcacgggguaggggaaauggggugaacggugcuggcaguucggcuagauuucugucuuguuuguuuuuuuguuuuguuuaauguauauuuuuauuauaauuauuauauaugaauuccaaaaaaaaaaaaaaaaaaaaa

SEQ ID NO: 76767 - RNA, 19 nt, Artificial Sequence
  Description of Artificial Sequence: Synthetic oligonucleotide
cagaccccaguucgccgac

SEQ ID NO: 76768 - RNA, 19 nt, Artificial Sequence
  Description of Artificial Sequence: Synthetic oligonucleotide
cuaagcagaagaaagauca

SEQ ID NO: 76769 - RNA, 19 nt, Artificial Sequence
  Description of Artificial Sequence: Synthetic oligonucleotide
aaaaaccggaaaagaggag

SEQ ID NO: 76770 - RNA, 19 nt, Artificial Sequence
  Description of Artificial Sequence: Synthetic oligonucleotide
gaagagcaaacaggcacuu

SEQ ID NO: 76771 - RNA, 19 nt, Artificial Sequence
  Description of Artificial Sequence: Synthetic oligonucleotide
uugaggaacaauccccuuu

SEQ ID NO: 76772 - RNA, 19 nt, Artificial Sequence
  Description of Artificial Sequence: Synthetic oligonucleotide
uaacuccaagccgacagcg

SEQ ID NO: 76773 - RNA, 19 nt, Artificial Sequence
  Description of Artificial Sequence: Synthetic oligonucleotide
ggucuaggaauucaaguuc

SEQ ID NO: 76774 - RNA, 19 nt, Artificial Sequence
  Description of Artificial Sequence: Synthetic oligonucleotide
cagugccuaccgaagacaa

SEQ ID NO: 76775 - RNA, 19 nt, Artificial Sequence
  Description of Artificial Sequence: Synthetic oligonucleotide
aaggcgccccgagggagug

SEQ ID NO: 76776 - RNA, 19 nt, Artificial Sequence
  Description of Artificial Sequence: Synthetic oligonucleotide
ggcggugcgaccccagggc

SEQ ID NO: 76777 - RNA, 19 nt, Artificial Sequence
  Description of Artificial Sequence: Synthetic oligonucleotide
cgugggcccggccgcggag

SEQ ID NO: 76778 - RNA, 19 nt, Artificial Sequence
  Description of Artificial Sequence: Synthetic oligonucleotide
gcccacacugcccggcuga

SEQ ID NO: 76779 - RNA, 19 nt, Artificial Sequence
  Description of Artificial Sequence: Synthetic oligonucleotide
acccgguggucucggacca

SEQ ID NO: 76780 - RNA, 19 nt, Artificial Sequence
  Description of Artificial Sequence: Synthetic oligonucleotide
augucucccgccccaagac

SEQ ID NO: 76781 - RNA, 19 nt, Artificial Sequence
  Description of Artificial Sequence: Synthetic oligonucleotide
cccccccguugucuccugc

SEQ ID NO: 76782 - RNA, 19 nt, Artificial Sequence
  Description of Artificial Sequence: Synthetic oligonucleotide
cucccccugcucacgcucg

SEQ ID NO: 76783 - RNA, 19 nt, Artificial Sequence
  Description of Artificial Sequence: Synthetic oligonucleotide
ggcaccgcgcucgccuccc

SEQ ID NO: 76784 - RNA, 19 nt, Artificial Sequence
  Description of Artificial Sequence: Synthetic oligonucleotide
cucggcucggcccaaagca

SEQ ID NO: 76785 - RNA, 19 nt, Artificial Sequence
  Description of Artificial Sequence: Synthetic oligonucleotide
agcagcuucagccccgaag

SEQ ID NO: 76786 - RNA, 19 nt, Artificial Sequence
  Description of Artificial Sequence: Synthetic oligonucleotide
gccuggcuacagcaauaug

SEQ ID NO: 76787 - RNA, 19 nt, Artificial Sequence
  Description of Artificial Sequence: Synthetic oligonucleotide
ggcuaccugccucccgggg

SEQ ID NO: 76788 - RNA, 19 nt, Artificial Sequence
  Description of Artificial Sequence: Synthetic oligonucleotide
gaccuacguacccacacac

SEQ ID NO: 76789 - RNA, 19 nt, Artificial Sequence
  Description of Artificial Sequence: Synthetic oligonucleotide
cagcgcucaccccagucac

SEQ ID NO: 76790 - RNA, 19 nt, Artificial Sequence
  Description of Artificial Sequence: Synthetic oligonucleotide
cucucagcggccaucgcug

SEQ ID NO: 76791 - RNA, 19 nt, Artificial Sequence
  Description of Artificial Sequence: Synthetic oligonucleotide
gccaugcagaaguuuuacg

SEQ ID NO: 76792 - RNA, 19 nt, Artificial Sequence
  Description of Artificial Sequence: Synthetic oligonucleotide
ggcuugcaaguaacaggca

SEQ ID NO: 76793 - RNA, 19 nt, Artificial Sequence
  Description of Artificial Sequence: Synthetic oligonucleotide
aaagcugaugcagacacca

SEQ ID NO: 76794 - RNA, 19 nt, Artificial Sequence
  Description of Artificial Sequence: Synthetic oligonucleotide
augaaggccaugaggcgcc

SEQ ID NO: 76795 - RNA, 19 nt, Artificial Sequence
  Description of Artificial Sequence: Synthetic oligonucleotide
ccccgaugugguguuccag

SEQ ID NO: 76796 - RNA, 19 nt, Artificial Sequence
  Description of Artificial Sequence: Synthetic oligonucleotide
gacaaguuuggggcugaga

SEQ ID NO: 76797 - RNA, 19 nt, Artificial Sequence
  Description of Artificial Sequence: Synthetic oligonucleotide
aucaaggccaauguucgaa

SEQ ID NO: 76798 - RNA, 19 nt, Artificial Sequence
  Description of Artificial Sequence: Synthetic oligonucleotide
aggaagcgcuacgccaucc

SEQ ID NO: 76799 - RNA, 19 nt, Artificial Sequence
  Description of Artificial Sequence: Synthetic oligonucleotide
cagggucucaaauggcaac

SEQ ID NO: 76800 - RNA, 19 nt, Artificial Sequence
  Description of Artificial Sequence: Synthetic oligonucleotide
cauaaugaaaucacuuucu

SEQ ID NO: 76801 - RNA, 19 nt, Artificial Sequence
  Description of Artificial Sequence: Synthetic oligonucleotide
ugcauccagaauuacaccc

SEQ ID NO: 76802 - RNA, 19 nt, Artificial Sequence
  Description of Artificial Sequence: Synthetic oligonucleotide
cccaaggugggcgaguaug

SEQ ID NO: 76803 - RNA, 19 nt, Artificial Sequence
  Description of Artificial Sequence: Synthetic oligonucleotide
gccacauacgaggccauuc

SEQ ID NO: 76804 - RNA, 19 nt, Artificial Sequence
  Description of Artificial Sequence: Synthetic oligonucleotide
cgcaaggcguuccgcgugu

SEQ ID NO: 76805 - RNA, 19 nt, Artificial Sequence
  Description of Artificial Sequence: Synthetic oligonucleotide
ugggagagugccacaccac

SEQ ID NO: 76806 - RNA, 19 nt, Artificial Sequence
  Description of Artificial Sequence: Synthetic oligonucleotide
cugcgcuuccgcgaggugc

SEQ ID NO: 76807 - RNA, 19 nt, Artificial Sequence
  Description of Artificial Sequence: Synthetic oligonucleotide
cccuaugccuacauccgug

SEQ ID NO: 76808 - RNA, 19 nt, Artificial Sequence
  Description of Artificial Sequence: Synthetic oligonucleotide
gagggccaugagaagcagg

SEQ ID NO: 76809 - RNA, 19 nt, Artificial Sequence
  Description of Artificial Sequence: Synthetic oligonucleotide
gccgacaucaugaucuucu

SEQ ID NO: 76810 - RNA, 19 nt, Artificial Sequence
  Description of Artificial Sequence: Synthetic oligonucleotide
uuugccgagggcuuccaug

SEQ ID NO: 76811 - RNA, 19 nt, Artificial Sequence
  Description of Artificial Sequence: Synthetic oligonucleotide
ggcgacagcacgcccuucg

SEQ ID NO: 76812 - RNA, 19 nt, Artificial Sequence
  Description of Artificial Sequence: Synthetic oligonucleotide
gauggugagggcggcuucc

SEQ ID NO: 76813 - RNA, 19 nt, Artificial Sequence
  Description of Artificial Sequence: Synthetic oligonucleotide
cuggcccaugccuacuucc

SEQ ID NO: 76814 - RNA, 19 nt, Artificial Sequence
  Description of Artificial Sequence: Synthetic oligonucleotide
ccaggccccaacauuggag

SEQ ID NO: 76815 - RNA, 19 nt, Artificial Sequence
  Description of Artificial Sequence: Synthetic oligonucleotide
ggagacacccacuuugacu

SEQ ID NO: 76816 - RNA, 19 nt, Artificial Sequence
  Description of Artificial Sequence: Synthetic oligonucleotide
ucugccgagccuuggacug

SEQ ID NO: 76817 - RNA, 19 nt, Artificial Sequence
  Description of Artificial Sequence: Synthetic oligonucleotide
gucaggaaugaggaucuga

SEQ ID NO: 76818 - RNA, 19 nt, Artificial Sequence
  Description of Artificial Sequence: Synthetic oligonucleotide
aauggaaaugacaucuucc

SEQ ID NO: 76819 - RNA, 19 nt, Artificial Sequence
  Description of Artificial Sequence: Synthetic oligonucleotide
cugguggcugugcacgagc

SEQ ID NO: 76820 - RNA, 19 nt, Artificial Sequence
  Description of Artificial Sequence: Synthetic oligonucleotide
cugggccaugcccuggggc

SEQ ID NO: 76821 - RNA, 19 nt, Artificial Sequence
  Description of Artificial Sequence: Synthetic oligonucleotide
cucgagcauuccagugacc

SEQ ID NO: 76822 - RNA, 19 nt, Artificial Sequence
  Description of Artificial Sequence: Synthetic oligonucleotide
cccucggccaucauggcac

SEQ ID NO: 76823 - RNA, 19 nt, Artificial Sequence
  Description of Artificial Sequence: Synthetic oligonucleotide
cccuuuuaccaguggaugg

SEQ ID NO: 76824 - RNA, 19 nt, Artificial Sequence
  Description of Artificial Sequence: Synthetic oligonucleotide
gacacggagaauuuugugc

SEQ ID NO: 76825 - RNA, 19 nt, Artificial Sequence
  Description of Artificial Sequence: Synthetic oligonucleotide
cugcccgaugaugaccgcc

SEQ ID NO: 76826 - RNA, 19 nt, Artificial Sequence
  Description of Artificial Sequence: Synthetic oligonucleotide
cggggcauccagcaacuuu

SEQ ID NO: 76827 - RNA, 19 nt, Artificial Sequence
  Description of Artificial Sequence: Synthetic oligonucleotide
uaugggggugagucagggu

SEQ ID NO: 76828 - RNA, 19 nt, Artificial Sequence
  Description of Artificial Sequence: Synthetic oligonucleotide
uuccccaccaagaugcccc

SEQ ID NO: 76829 - RNA, 19 nt, Artificial Sequence
  Description of Artificial Sequence: Synthetic oligonucleotide
ccucaacccaggacuaccu

SEQ ID NO: 76830 - RNA, 19 nt, Artificial Sequence
  Description of Artificial Sequence: Synthetic oligonucleotide
ucccggccuucuguuccug

SEQ ID NO: 76831 - RNA, 19 nt, Artificial Sequence
  Description of Artificial Sequence: Synthetic oligonucleotide
gauaaacccaaaaacccca

SEQ ID NO: 76832 - RNA, 19 nt, Artificial Sequence
  Description of Artificial Sequence: Synthetic oligonucleotide
accuaugggcccaacaucu

SEQ ID NO: 76833 - RNA, 19 nt, Artificial Sequence
  Description of Artificial Sequence: Synthetic oligonucleotide
ugugacgggaacuuugaca

SEQ ID NO: 76834 - RNA, 19 nt, Artificial Sequence
  Description of Artificial Sequence: Synthetic oligonucleotide
accguggccaugcuccgag

SEQ ID NO: 76835 - RNA, 19 nt, Artificial Sequence
  Description of Artificial Sequence: Synthetic oligonucleotide
ggggagauguuugucuuca

SEQ ID NO: 76836 - RNA, 19 nt, Artificial Sequence
  Description of Artificial Sequence: Synthetic oligonucleotide
aaggagcgcugguucuggc

SEQ ID NO: 76837 - RNA, 19 nt, Artificial Sequence
  Description of Artificial Sequence: Synthetic oligonucleotide
cgggugaggaauaaccaag

SEQ ID NO: 76838 - RNA, 19 nt, Artificial Sequence
  Description of Artificial Sequence: Synthetic oligonucleotide
gugauggauggauacccaa

SEQ ID NO: 76839 - RNA, 19 nt, Artificial Sequence
  Description of Artificial Sequence: Synthetic oligonucleotide
augcccauuggccaguucu

SEQ ID NO: 76840 - RNA, 19 nt, Artificial Sequence
  Description of Artificial Sequence: Synthetic oligonucleotide
uggcggggccugccugcgu

SEQ ID NO: 76841 - RNA, 19 nt, Artificial Sequence
  Description of Artificial Sequence: Synthetic oligonucleotide
uccaucaacacugccuacg

SEQ ID NO: 76842 - RNA, 19 nt, Artificial Sequence
  Description of Artificial Sequence: Synthetic oligonucleotide
gagaggaaggauggcaaau

SEQ ID NO: 76843 - RNA, 19 nt, Artificial Sequence
  Description of Artificial Sequence: Synthetic oligonucleotide
uucgucuucuucaaaggag

SEQ ID NO: 76844 - RNA, 19 nt, Artificial Sequence
  Description of Artificial Sequence: Synthetic oligonucleotide
gacaagcauuggguguuug

SEQ ID NO: 76845 - RNA, 19 nt, Artificial Sequence
  Description of Artificial Sequence: Synthetic oligonucleotide
gaugaggcgucccuggaac

SEQ ID NO: 76846 - RNA, 19 nt, Artificial Sequence
  Description of Artificial Sequence: Synthetic oligonucleotide
ccuggcuaccccaagcaca

SEQ ID NO: 76847 - RNA, 19 nt, Artificial Sequence
  Description of Artificial Sequence: Synthetic oligonucleotide
auuaaggagcugggccgag

SEQ ID NO: 76848 - RNA, 19 nt, Artificial Sequence
  Description of Artificial Sequence: Synthetic oligonucleotide
gggcugccuaccgacaaga

SEQ ID NO: 76849 - RNA, 19 nt, Artificial Sequence
  Description of Artificial Sequence: Synthetic oligonucleotide
auugaugcugcucucuucu

SEQ ID NO: 76850 - RNA, 19 nt, Artificial Sequence
  Description of Artificial Sequence: Synthetic oligonucleotide
uggaugcccaauggaaaga

SEQ ID NO: 76851 - RNA, 19 nt, Artificial Sequence
  Description of Artificial Sequence: Synthetic oligonucleotide
accuacuucuuccguggaa

SEQ ID NO: 76852 - RNA, 19 nt, Artificial Sequence
  Description of Artificial Sequence: Synthetic oligonucleotide
aacaaguacuaccguuuca

SEQ ID NO: 76853 - RNA, 19 nt, Artificial Sequence
  Description of Artificial Sequence: Synthetic oligonucleotide
aacgaagagcucagggcag

SEQ ID NO: 76854 - RNA, 19 nt, Artificial Sequence
  Description of Artificial Sequence: Synthetic oligonucleotide
guggauagcgaguacccca

SEQ ID NO: 76855 - RNA, 19 nt, Artificial Sequence
  Description of Artificial Sequence: Synthetic oligonucleotide
aagaacaucaaagucuggg

SEQ ID NO: 76856 - RNA, 19 nt, Artificial Sequence
  Description of Artificial Sequence: Synthetic oligonucleotide
gaagggaucccugagucuc

SEQ ID NO: 76857 - RNA, 19 nt, Artificial Sequence
  Description of Artificial Sequence: Synthetic oligonucleotide
cccagagggucauucaugg

SEQ ID NO: 76858 - RNA, 19 nt, Artificial Sequence
  Description of Artificial Sequence: Synthetic oligonucleotide
ggcagcgaugaagucuuca

SEQ ID NO: 76859 - RNA, 19 nt, Artificial Sequence
  Description of Artificial Sequence: Synthetic oligonucleotide
acuuacuucuacaagggga

SEQ ID NO: 76860 - RNA, 19 nt, Artificial Sequence
  Description of Artificial Sequence: Synthetic oligonucleotide
aacaaauacuggaaauuca

SEQ ID NO: 76861 - RNA, 19 nt, Artificial Sequence
  Description of Artificial Sequence: Synthetic oligonucleotide
aacaaccagaagcugaagg

SEQ ID NO: 76862 - RNA, 19 nt, Artificial Sequence
  Description of Artificial Sequence: Synthetic oligonucleotide
guagaaccgggcuacccca

SEQ ID NO: 76863 - RNA, 19 nt, Artificial Sequence
  Description of Artificial Sequence: Synthetic oligonucleotide
aagucagcccugagggacu

SEQ ID NO: 76864 - RNA, 19 nt, Artificial Sequence
  Description of Artificial Sequence: Synthetic oligonucleotide
uggaugggcugcccaucgg

SEQ ID NO: 76865 - RNA, 19 nt, Artificial Sequence
  Description of Artificial Sequence: Synthetic oligonucleotide
ggaggccggccggaugagg

SEQ ID NO: 76866 - RNA, 19 nt, Artificial Sequence
  Description of Artificial Sequence: Synthetic oligonucleotide
gggacugaggaggagacgg

SEQ ID NO: 76867 - RNA, 19 nt, Artificial Sequence
  Description of Artificial Sequence: Synthetic oligonucleotide
gaggugaucaucauugagg

SEQ ID NO: 76868 - RNA, 19 nt, Artificial Sequence
  Description of Artificial Sequence: Synthetic oligonucleotide
guggacgaggagggcggcg

SEQ ID NO: 76869 - RNA, 19 nt, Artificial Sequence
  Description of Artificial Sequence: Synthetic oligonucleotide
ggggcggugagcgcggcug

SEQ ID NO: 76870 - RNA, 19 nt, Artificial Sequence
  Description of Artificial Sequence: Synthetic oligonucleotide
gccguggugcugcccgugc

SEQ ID NO: 76871 - RNA, 19 nt, Artificial Sequence
  Description of Artificial Sequence: Synthetic oligonucleotide
cugcugcugcuccuggugc

SEQ ID NO: 76872 - RNA, 19 nt, Artificial Sequence
  Description of Artificial Sequence: Synthetic oligonucleotide
cuggcggugggccuugcag

SEQ ID NO: 76873 - RNA, 19 nt, Artificial Sequence
  Description of Artificial Sequence: Synthetic oligonucleotide
gucuucuucuucagacgcc

SEQ ID NO: 76874 - RNA, 19 nt, Artificial Sequence
  Description of Artificial Sequence: Synthetic oligonucleotide
caugggacccccaggcgac

SEQ ID NO: 76875 - RNA, 19 nt, Artificial Sequence
  Description of Artificial Sequence: Synthetic oligonucleotide
cugcucuacugccagcguu

SEQ ID NO: 76876 - RNA, 19 nt, Artificial Sequence
  Description of Artificial Sequence: Synthetic oligonucleotide
ucccugcuggacaaggucu

SEQ ID NO: 76877 - RNA, 19 nt, Artificial Sequence
  Description of Artificial Sequence: Synthetic oligonucleotide
ugacgcccaccgccggccc

SEQ ID NO: 76878 - RNA, 19 nt, Artificial Sequence
  Description of Artificial Sequence: Synthetic oligonucleotide
cgcccacuccuaccacaag

SEQ ID NO: 76879 - RNA, 19 nt, Artificial Sequence
  Description of Artificial Sequence: Synthetic oligonucleotide
ggacuuugccucugaaggc

SEQ ID NO: 76880 - RNA, 19 nt, Artificial Sequence
  Description of Artificial Sequence: Synthetic oligonucleotide
ccaguggcagcagguggug

SEQ ID NO: 76881 - RNA, 19 nt, Artificial Sequence
  Description of Artificial Sequence: Synthetic oligonucleotide
ggugggugggcugcuccca

SEQ ID NO: 76882 - RNA, 19 nt, Artificial Sequence
  Description of Artificial Sequence: Synthetic oligonucleotide
aucgucccgagcccccucc

SEQ ID NO: 76883 - RNA, 19 nt, Artificial Sequence
  Description of Artificial Sequence: Synthetic oligonucleotide
cccgcagccuccuugcuuc

SEQ ID NO: 76884 - RNA, 19 nt, Artificial Sequence
  Description of Artificial Sequence: Synthetic oligonucleotide
cucucuguccccuggcugg

SEQ ID NO: 76885 - RNA, 19 nt, Artificial Sequence
  Description of Artificial Sequence: Synthetic oligonucleotide
gccuccuucacccugaccg

SEQ ID NO: 76886 - RNA, 19 nt, Artificial Sequence
  Description of Artificial Sequence: Synthetic oligonucleotide
gccucccucccuccugccc

SEQ ID NO: 76887 - RNA, 19 nt, Artificial Sequence
  Description of Artificial Sequence: Synthetic oligonucleotide
ccggcauugcaucuucccu

SEQ ID NO: 76888 - RNA, 19 nt, Artificial Sequence
  Description of Artificial Sequence: Synthetic oligonucleotide
uagauagguccccugaggg

SEQ ID NO: 76889 - RNA, 19 nt, Artificial Sequence
  Description of Artificial Sequence: Synthetic oligonucleotide
gcugagugggagggcggcc

SEQ ID NO: 76890 - RNA, 19 nt, Artificial Sequence
  Description of Artificial Sequence: Synthetic oligonucleotide
ccuuuccagccucugcccc

SEQ ID NO: 76891 - RNA, 19 nt, Artificial Sequence
  Description of Artificial Sequence: Synthetic oligonucleotide
cucaggggaacccuguagc

SEQ ID NO: 76892 - RNA, 19 nt, Artificial Sequence
  Description of Artificial Sequence: Synthetic oligonucleotide
cuuugugucuguccagccc

SEQ ID NO: 76893 - RNA, 19 nt, Artificial Sequence
  Description of Artificial Sequence: Synthetic oligonucleotide
ccaucugaauguguugggg

SEQ ID NO: 76894 - RNA, 19 nt, Artificial Sequence
  Description of Artificial Sequence: Synthetic oligonucleotide
ggcucugcacuugaaggca

SEQ ID NO: 76895 - RNA, 19 nt, Artificial Sequence
  Description of Artificial Sequence: Synthetic oligonucleotide
aggacccucagaccucgcu

SEQ ID NO: 76896 - RNA, 19 nt, Artificial Sequence
  Description of Artificial Sequence: Synthetic oligonucleotide
ugguaaaggucaaaugggg

SEQ ID NO: 76897 - RNA, 19 nt, Artificial Sequence
  Description of Artificial Sequence: Synthetic oligonucleotide
gucaucugcuccuuuucca

SEQ ID NO: 76898 - RNA, 19 nt, Artificial Sequence
  Description of Artificial Sequence: Synthetic oligonucleotide
auccccugacauaccuuaa

SEQ ID NO: 76899 - RNA, 19 nt, Artificial Sequence
  Description of Artificial Sequence: Synthetic oligonucleotide
accucugaacucugaccuc

SEQ ID NO: 76900 - RNA, 19 nt, Artificial Sequence
  Description of Artificial Sequence: Synthetic oligonucleotide
caggaggcucugggcacuc

SEQ ID NO: 76901 - RNA, 19 nt, Artificial Sequence
  Description of Artificial Sequence: Synthetic oligonucleotide
ccagcccugaaagccccag

SEQ ID NO: 76902 - RNA, 19 nt, Artificial Sequence
  Description of Artificial Sequence: Synthetic oligonucleotide
gguguacccaauuggcagc

SEQ ID NO: 76903 - RNA, 19 nt, Artificial Sequence
  Description of Artificial Sequence: Synthetic oligonucleotide
ccucucacuacucuuucug

SEQ ID NO: 76904 - RNA, 19 nt, Artificial Sequence
  Description of Artificial Sequence: Synthetic oligonucleotide
ggcuaaaaggaaucuaauc

SEQ ID NO: 76905 - RNA, 19 nt, Artificial Sequence
  Description of Artificial Sequence: Synthetic oligonucleotide
cuuguugaggguagagacc

SEQ ID NO: 76906 - RNA, 19 nt, Artificial Sequence
  Description of Artificial Sequence: Synthetic oligonucleotide
ccugagacagugugagggg

SEQ ID NO: 76907 - RNA, 19 nt, Artificial Sequence
  Description of Artificial Sequence: Synthetic oligonucleotide
gguggggacugccaagcca

SEQ ID NO: 76908 - RNA, 19 nt, Artificial Sequence
  Description of Artificial Sequence: Synthetic oligonucleotide
acccuaagaccuugggagg

SEQ ID NO: 76909 - RNA, 19 nt, Artificial Sequence
  Description of Artificial Sequence: Synthetic oligonucleotide
gaaaacucagagagggucu

SEQ ID NO: 76910 - RNA, 19 nt, Artificial Sequence
  Description of Artificial Sequence: Synthetic oligonucleotide
uucguugcucagucaguca

SEQ ID NO: 76911 - RNA, 19 nt, Artificial Sequence
  Description of Artificial Sequence: Synthetic oligonucleotide
aaguuccucggagaucugc

SEQ ID NO: 76912 - RNA, 19 nt, Artificial Sequence
  Description of Artificial Sequence: Synthetic oligonucleotide
ccucugccucaccuacccc

SEQ ID NO: 76913 - RNA, 19 nt, Artificial Sequence
  Description of Artificial Sequence: Synthetic oligonucleotide
cagggaacuuccaaggaag

SEQ ID NO: 76914 - RNA, 19 nt, Artificial Sequence
  Description of Artificial Sequence: Synthetic oligonucleotide
ggagccugagccacugggg

SEQ ID NO: 76915 - RNA, 19 nt, Artificial Sequence
  Description of Artificial Sequence: Synthetic oligonucleotide
gacuaagugggcagaagaa

SEQ ID NO: 76916 - RNA, 19 nt, Artificial Sequence
  Description of Artificial Sequence: Synthetic oligonucleotide
aacccuuggcagcccugug

SEQ ID NO: 76917 - RNA, 19 nt, Artificial Sequence
  Description of Artificial Sequence: Synthetic oligonucleotide
gccucucgaauguuagccu

SEQ ID NO: 76918 - RNA, 19 nt, Artificial Sequence
  Description of Artificial Sequence: Synthetic oligonucleotide
uuggauggggcuuucacag

SEQ ID NO: 76919 - RNA, 19 nt, Artificial Sequence
  Description of Artificial Sequence: Synthetic oligonucleotide
guuagaagagcugaaacca

SEQ ID NO: 76920 - RNA, 19 nt, Artificial Sequence
  Description of Artificial Sequence: Synthetic oligonucleotide
aggggugcagcugucaggu

SEQ ID NO: 76921 - RNA, 19 nt, Artificial Sequence
  Description of Artificial Sequence: Synthetic oligonucleotide
uaggguggggccgguggga

SEQ ID NO: 76922 - RNA, 19 nt, Artificial Sequence
  Description of Artificial Sequence: Synthetic oligonucleotide
agaggcccgggucagagcc

SEQ ID NO: 76923 - RNA, 19 nt, Artificial Sequence
  Description of Artificial Sequence: Synthetic oligonucleotide
ccugggggugagccugaag

SEQ ID NO: 76924 - RNA, 19 nt, Artificial Sequence
  Description of Artificial Sequence: Synthetic oligonucleotide
ggccacagagaaagaaccu

SEQ ID NO: 76925 - RNA, 19 nt, Artificial Sequence
  Description of Artificial Sequence: Synthetic oligonucleotide
uugcccaaacucaggcagc

SEQ ID NO: 76926 - RNA, 19 nt, Artificial Sequence
  Description of Artificial Sequence: Synthetic oligonucleotide
cuggggcugaggcccaaag

SEQ ID NO: 76927 - RNA, 19 nt, Artificial Sequence
  Description of Artificial Sequence: Synthetic oligonucleotide
ggcagaacagccagagggg

SEQ ID NO: 76928 - RNA, 19 nt, Artificial Sequence
  Description of Artificial Sequence: Synthetic oligonucleotide
ggcaggaggggaccaaaaa

SEQ ID NO: 76929 - RNA, 19 nt, Artificial Sequence
  Description of Artificial Sequence: Synthetic oligonucleotide
aggaaaaugaggacgugca

SEQ ID NO: 76930 - RNA, 19 nt, Artificial Sequence
  Description of Artificial Sequence: Synthetic oligonucleotide
agcagcauuggaaggcugg

SEQ ID NO: 76931 - RNA, 19 nt, Artificial Sequence
  Description of Artificial Sequence: Synthetic oligonucleotide
gggccgggcaggccaggcc

SEQ ID NO: 76932 - RNA, 19 nt, Artificial Sequence
  Description of Artificial Sequence: Synthetic oligonucleotide
caagccaagcagggggcca

SEQ ID NO: 76933 - RNA, 19 nt, Artificial Sequence
  Description of Artificial Sequence: Synthetic oligonucleotide
acagggugggcuguggagc

SEQ ID NO: 76934 - RNA, 19 nt, Artificial Sequence
  Description of Artificial Sequence: Synthetic oligonucleotide
cucucaggaagggcccuga

SEQ ID NO: 76935 - RNA, 19 nt, Artificial Sequence
  Description of Artificial Sequence: Synthetic oligonucleotide
aggaaggcacacuugcucc

SEQ ID NO: 76936 - RNA, 19 nt, Artificial Sequence
  Description of Artificial Sequence: Synthetic oligonucleotide
cuguuggucccuguccuug

SEQ ID NO: 76937 - RNA, 19 nt, Artificial Sequence
  Description of Artificial Sequence: Synthetic oligonucleotide
gcugcccaggcagcgugga

SEQ ID NO: 76938 - RNA, 19 nt, Artificial Sequence
  Description of Artificial Sequence: Synthetic oligonucleotide
aggggaaggguagggcagc

SEQ ID NO: 76939 - RNA, 19 nt, Artificial Sequence
  Description of Artificial Sequence: Synthetic oligonucleotide
ccagagaaaggagcagaga

SEQ ID NO: 76940 - RNA, 19 nt, Artificial Sequence
  Description of Artificial Sequence: Synthetic oligonucleotide
aaggcacacaaacgaggaa

SEQ ID NO: 76941 - RNA, 19 nt, Artificial Sequence
  Description of Artificial Sequence: Synthetic oligonucleotide
augaggggcuucacgagag

SEQ ID NO: 76942 - RNA, 19 nt, Artificial Sequence
  Description of Artificial Sequence: Synthetic oligonucleotide
ggccacagggccuggcugg

SEQ ID NO: 76943 - RNA, 19 nt, Artificial Sequence
  Description of Artificial Sequence: Synthetic oligonucleotide
gccacgcugucccggccug

SEQ ID NO: 76944 - RNA, 19 nt, Artificial Sequence
  Description of Artificial Sequence: Synthetic oligonucleotide
gcucaccaucucagugagg

SEQ ID NO: 76945 - RNA, 19 nt, Artificial Sequence
  Description of Artificial Sequence: Synthetic oligonucleotide
gggcaggagcuggggcucg

SEQ ID NO: 76946 - RNA, 19 nt, Artificial Sequence
  Description of Artificial Sequence: Synthetic oligonucleotide
gcuuaggcuggguccacgc

SEQ ID NO: 76947 - RNA, 19 nt, Artificial Sequence
  Description of Artificial Sequence: Synthetic oligonucleotide
cuucccuggugccagcacc

SEQ ID NO: 76948 - RNA, 19 nt, Artificial Sequence
  Description of Artificial Sequence: Synthetic oligonucleotide
cccucaagccugucucacc

SEQ ID NO: 76949 - RNA, 19 nt, Artificial Sequence
  Description of Artificial Sequence: Synthetic oligonucleotide
caguggccugcccucucgc

SEQ ID NO: 76950 - RNA, 19 nt, Artificial Sequence
  Description of Artificial Sequence: Synthetic oligonucleotide
cucccccacccagcccacc

SEQ ID NO: 76951 - RNA, 19 nt, Artificial Sequence
  Description of Artificial Sequence: Synthetic oligonucleotide
ccauugaagucuccuuggg

SEQ ID NO: 76952 - RNA, 19 nt, Artificial Sequence
  Description of Artificial Sequence: Synthetic oligonucleotide
gccaccaaaggugguggcc

SEQ ID NO: 76953 - RNA, 19 nt, Artificial Sequence
  Description of Artificial Sequence: Synthetic oligonucleotide
caugguaccggggacuugg

SEQ ID NO: 76954 - RNA, 19 nt, Artificial Sequence
  Description of Artificial Sequence: Synthetic oligonucleotide
ggagagugagacccagugg

SEQ ID NO: 76955 - RNA, 19 nt, Artificial Sequence
  Description of Artificial Sequence: Synthetic oligonucleotide
gagggagcaagaggagagg

SEQ ID NO: 76956 - RNA, 19 nt, Artificial Sequence
  Description of Artificial Sequence: Synthetic oligonucleotide
ggaugucgggggggugggg

SEQ ID NO: 76957 - RNA, 19 nt, Artificial Sequence
  Description of Artificial Sequence: Synthetic oligonucleotide
gcacgggguaggggaaaug

SEQ ID NO: 76958 - RNA, 19 nt, Artificial Sequence
  Description of Artificial Sequence: Synthetic oligonucleotide
ggggugaacggugcuggca

SEQ ID NO: 76959 - RNA, 19 nt, Artificial Sequence
  Description of Artificial Sequence: Synthetic oligonucleotide
aguucggcuagauuucugu

SEQ ID NO: 76960 - RNA, 19 nt, Artificial Sequence
  Description of Artificial Sequence: Synthetic oligonucleotide
ucuuguuuguuuuuuuguu

SEQ ID NO: 76961 - RNA, 19 nt, Artificial Sequence
  Description of Artificial Sequence: Synthetic oligonucleotide
uuuguuuaauguauauuuu

SEQ ID NO: 76962 - RNA, 19 nt, Artificial Sequence
  Description of Artificial Sequence: Synthetic oligonucleotide
uuauuauaauuauuauaua

SEQ ID NO: 76963 - RNA, 25 nt, Artificial Sequence
  Description of Artificial Sequence: Synthetic oligonucleotide
cagaccccaguucgccgacuaagca

SEQ ID NO: 76964 - RNA, 25 nt, Artificial Sequence
  Description of Artificial Sequence: Synthetic oligonucleotide
agaagaaagaucaaaaaccggaaaa

SEQ ID NO: 76965 - RNA, 25 nt, Artificial Sequence
  Description of Artificial Sequence: Synthetic oligonucleotide
agaggagaagagcaaacaggcacuu

SEQ ID NO: 76966 - RNA, 25 nt, Artificial Sequence
  Description of Artificial Sequence: Synthetic oligonucleotide
uugaggaacaauccccuuuaacucc

SEQ ID NO: 76967 - RNA, 25 nt, Artificial Sequence
  Description of Artificial Sequence: Synthetic oligonucleotide
caagccgacagcggucuaggaauuc

SEQ ID NO: 76968 - RNA, 25 nt, Artificial Sequence
  Description of Artificial Sequence: Synthetic oligonucleotide
caaguucagugccuaccgaagacaa

SEQ ID NO: 76969 - RNA, 25 nt, Artificial Sequence
  Description of Artificial Sequence: Synthetic oligonucleotide
aaggcgccccgagggaguggcggug

SEQ ID NO: 76970 - RNA, 25 nt, Artificial Sequence
  Description of Artificial Sequence: Synthetic oligonucleotide
gcgaccccagggcgugggcccggcc

SEQ ID NO: 76971 - RNA, 25 nt, Artificial Sequence
  Description of Artificial Sequence: Synthetic oligonucleotide
cgcggagcccacacugcccggcuga

SEQ ID NO: 76972 - RNA, 25 nt, Artificial Sequence
  Description of Artificial Sequence: Synthetic oligonucleotide
acccgguggucucggaccaugucuc

SEQ ID NO: 76973 - RNA, 25 nt, Artificial Sequence
  Description of Artificial Sequence: Synthetic oligonucleotide
cccgccccaagacccccccguuguc

SEQ ID NO: 76974 - RNA, 25 nt, Artificial Sequence
  Description of Artificial Sequence: Synthetic oligonucleotide
cuccugcucccccugcucacgcucg

SEQ ID NO: 76975 - RNA, 25 nt, Artificial Sequence
  Description of Artificial Sequence: Synthetic oligonucleotide
ggcaccgcgcucgccucccucggcu

SEQ ID NO: 76976 - RNA, 25 nt, Artificial Sequence
  Description of Artificial Sequence: Synthetic oligonucleotide
ucggcccaaagcagcagcuucagcc

SEQ ID NO: 76977 - RNA, 25 nt, Artificial Sequence
  Description of Artificial Sequence: Synthetic oligonucleotide
cccgaagccuggcuacagcaauaug

SEQ ID NO: 76978 - RNA, 25 nt, Artificial Sequence
  Description of Artificial Sequence: Synthetic oligonucleotide
ggcuaccugccucccggggaccuac

SEQ ID NO: 76979 - RNA, 25 nt, Artificial Sequence
  Description of Artificial Sequence: Synthetic oligonucleotide
cguacccacacacagcgcucacccc

SEQ ID NO: 76980 - RNA, 25 nt, Artificial Sequence
  Description of Artificial Sequence: Synthetic oligonucleotide
cagucacucucagcggccaucgcug

SEQ ID NO: 76981 - RNA, 25 nt, Artificial Sequence
  Description of Artificial Sequence: Synthetic oligonucleotide
gccaugcagaaguuuuacggcuugc

SEQ ID NO: 76982 - RNA, 25 nt, Artificial Sequence
  Description of Artificial Sequence: Synthetic oligonucleotide
caaguaacaggcaaagcugaugcag

SEQ ID NO: 76983 - RNA, 25 nt, Artificial Sequence
  Description of Artificial Sequence: Synthetic oligonucleotide
gacaccaugaaggccaugaggcgcc

SEQ ID NO: 76984 - RNA, 25 nt, Artificial Sequence
  Description of Artificial Sequence: Synthetic oligonucleotide
ccccgaugugguguuccagacaagu

SEQ ID NO: 76985 - RNA, 25 nt, Artificial Sequence
  Description of Artificial Sequence: Synthetic oligonucleotide
uuuggggcugagaucaaggccaaug

SEQ ID NO: 76986 - RNA, 25 nt, Artificial Sequence
  Description of Artificial Sequence: Synthetic oligonucleotide
guucgaaggaagcgcuacgccaucc

SEQ ID NO: 76987 - RNA, 25 nt, Artificial Sequence
  Description of Artificial Sequence: Synthetic oligonucleotide
cagggucucaaauggcaacauaaug

SEQ ID NO: 76988 - RNA, 25 nt, Artificial Sequence
  Description of Artificial Sequence: Synthetic oligonucleotide
gaaaucacuuucugcauccagaauu

SEQ ID NO: 76989 - RNA, 25 nt, Artificial Sequence
  Description of Artificial Sequence: Synthetic oligonucleotide
uacacccccaaggugggcgaguaug

SEQ ID NO: 76990 - RNA, 25 nt, Artificial Sequence
  Description of Artificial Sequence: Synthetic oligonucleotide
gccacauacgaggccauucgcaagg

SEQ ID NO: 76991 - RNA, 25 nt, Artificial Sequence
  Description of Artificial Sequence: Synthetic oligonucleotide
gcguuccgcgugugggagagugcca

SEQ ID NO: 76992 - RNA, 25 nt, Artificial Sequence
  Description of Artificial Sequence: Synthetic oligonucleotide
acaccacugcgcuuccgcgaggugc

SEQ ID NO: 76993 - RNA, 25 nt, Artificial Sequence
  Description of Artificial Sequence: Synthetic oligonucleotide
cccuaugccuacauccgugagggcc

SEQ ID NO: 76994 - RNA, 25 nt, Artificial Sequence
  Description of Artificial Sequence: Synthetic oligonucleotide
caugagaagcaggccgacaucauga

SEQ ID NO: 76995 - RNA, 25 nt, Artificial Sequence
  Description of Artificial Sequence: Synthetic oligonucleotide
aucuucuuugccgagggcuuccaug

SEQ ID NO: 76996 - RNA, 25 nt, Artificial Sequence
  Description of Artificial Sequence: Synthetic oligonucleotide
ggcgacagcacgcccuucgauggug

SEQ ID NO: 76997 - RNA, 25 nt, Artificial Sequence
  Description of Artificial Sequence: Synthetic oligonucleotide
gagggcggcuuccuggcccaugccu

SEQ ID NO: 76998 - RNA, 25 nt, Artificial Sequence
  Description of Artificial Sequence: Synthetic oligonucleotide
uacuucccaggccccaacauuggag

SEQ ID NO: 76999 - RNA, 25 nt, Artificial Sequence
  Description of Artificial Sequence: Synthetic oligonucleotide
ggagacacccacuuugacucugccg

SEQ ID NO: 77000 - RNA, 25 nt, Artificial Sequence
  Description of Artificial Sequence: Synthetic oligonucleotide
gagccuuggacugucaggaaugagg

SEQ ID NO: 77001 - RNA, 25 nt, Artificial Sequence
  Description of Artificial Sequence: Synthetic oligonucleotide
gaucugaauggaaaugacaucuucc

SEQ ID NO: 77002 - RNA, 25 nt, Artificial Sequence
  Description of Artificial Sequence: Synthetic oligonucleotide
cugguggcugugcacgagcugggcc

SEQ ID NO: 77003 - RNA, 25 nt, Artificial Sequence
  Description of Artificial Sequence: Synthetic oligonucleotide
caugcccuggggcucgagcauucca

SEQ ID NO: 77004 - RNA, 25 nt, Artificial Sequence
  Description of Artificial Sequence: Synthetic oligonucleotide
agugaccccucggccaucauggcac

SEQ ID NO: 77005 - RNA, 25 nt, Artificial Sequence
  Description of Artificial Sequence: Synthetic oligonucleotide
cccuuuuaccaguggauggacacgg

SEQ ID NO: 77006 - RNA, 25 nt, Artificial Sequence
  Description of Artificial Sequence: Synthetic oligonucleotide
gagaauuuugugcugcccgaugaug

SEQ ID NO: 77007 - RNA, 25 nt, Artificial Sequence
  Description of Artificial Sequence: Synthetic oligonucleotide
gaccgccggggcauccagcaacuuu

SEQ ID NO: 77008 - RNA, 25 nt, Artificial Sequence
  Description of Artificial Sequence: Synthetic oligonucleotide
uaugggggugagucaggguucccca

SEQ ID NO: 77009 - RNA, 25 nt, Artificial Sequence
  Description of Artificial Sequence: Synthetic oligonucleotide
accaagaugcccccucaacccagga

SEQ ID NO: 77010 - RNA, 25 nt, Artificial Sequence
  Description of Artificial Sequence: Synthetic oligonucleotide
acuaccucccggccuucuguuccug

SEQ ID NO: 77011 - RNA, 25 nt, Artificial Sequence
  Description of Artificial Sequence: Synthetic oligonucleotide
gauaaacccaaaaaccccaccuaug

SEQ ID NO: 77012 - RNA, 25 nt, Artificial Sequence
  Description of Artificial Sequence: Synthetic oligonucleotide
gggcccaacaucugugacgggaacu

SEQ ID NO: 77013 - RNA, 25 nt, Artificial Sequence
  Description of Artificial Sequence: Synthetic oligonucleotide
uuugacaccguggccaugcuccgag

SEQ ID NO: 77014 - RNA, 25 nt, Artificial Sequence
  Description of Artificial Sequence: Synthetic oligonucleotide
ggggagauguuugucuucaaggagc

SEQ ID NO: 77015 - RNA, 25 nt, Artificial Sequence
  Description of Artificial Sequence: Synthetic oligonucleotide
cgcugguucuggcgggugaggaaua

SEQ ID NO: 77016 - RNA, 25 nt, Artificial Sequence
  Description of Artificial Sequence: Synthetic oligonucleotide
aaccaagugauggauggauacccaa

SEQ ID NO: 77017 - RNA, 25 nt, Artificial Sequence
  Description of Artificial Sequence: Synthetic oligonucleotide
augcccauuggccaguucuggcggg

SEQ ID NO: 77018 - RNA, 25 nt, Artificial Sequence
  Description of Artificial Sequence: Synthetic oligonucleotide
ggccugccugcguccaucaacacug

SEQ ID NO: 77019 - RNA, 25 nt, Artificial Sequence
  Description of Artificial Sequence: Synthetic oligonucleotide
gccuacgagaggaaggauggcaaau

SEQ ID NO: 77020 - RNA, 25 nt, Artificial Sequence
  Description of Artificial Sequence: Synthetic oligonucleotide
uucgucuucuucaaaggagacaagc

SEQ ID NO: 77021 - RNA, 25 nt, Artificial Sequence
  Description of Artificial Sequence: Synthetic oligonucleotide
cauuggguguuugaugaggcguccc

SEQ ID NO: 77022 - RNA, 25 nt, Artificial Sequence
  Description of Artificial Sequence: Synthetic oligonucleotide
cuggaaccuggcuaccccaagcaca

SEQ ID NO: 77023 - RNA, 25 nt, Artificial Sequence
  Description of Artificial Sequence: Synthetic oligonucleotide
auuaaggagcugggccgagggcugc

SEQ ID NO: 77024 - RNA, 25 nt, Artificial Sequence
  Description of Artificial Sequence: Synthetic oligonucleotide
ccuaccgacaagauugaugcugcuc

SEQ ID NO: 77025 - RNA, 25 nt, Artificial Sequence
  Description of Artificial Sequence: Synthetic oligonucleotide
cucuucuggaugcccaauggaaaga

SEQ ID NO: 77026 - RNA, 25 nt, Artificial Sequence
  Description of Artificial Sequence: Synthetic oligonucleotide
accuacuucuuccguggaaacaagu

SEQ ID NO: 77027 - RNA, 25 nt, Artificial Sequence
  Description of Artificial Sequence: Synthetic oligonucleotide
uacuaccguuucaacgaagagcuca

SEQ ID NO: 77028 - RNA, 25 nt, Artificial Sequence
  Description of Artificial Sequence: Synthetic oligonucleotide
agggcaguggauagcgaguacccca

SEQ ID NO: 77029 - RNA, 25 nt, Artificial Sequence
  Description of Artificial Sequence: Synthetic oligonucleotide
aagaacaucaaagucugggaaggga

SEQ ID NO: 77030 - RNA, 25 nt, Artificial Sequence
  Description of Artificial Sequence: Synthetic oligonucleotide
aucccugagucucccagagggucau

SEQ ID NO: 77031 - RNA, 25 nt, Artificial Sequence
  Description of Artificial Sequence: Synthetic oligonucleotide
uucaugggcagcgaugaagucuuca

SEQ ID NO: 77032 - RNA, 25 nt, Artificial Sequence
  Description of Artificial Sequence: Synthetic oligonucleotide
acuuacuucuacaaggggaacaaau

SEQ ID NO: 77033 - RNA, 25 nt, Artificial Sequence
  Description of Artificial Sequence: Synthetic oligonucleotide
uacuggaaauucaacaaccagaagc

SEQ ID NO: 77034 - RNA, 25 nt, Artificial Sequence
  Description of Artificial Sequence: Synthetic oligonucleotide
cugaagguagaaccgggcuacccca

SEQ ID NO: 77035 - RNA, 25 nt, Artificial Sequence
  Description of Artificial Sequence: Synthetic oligonucleotide
aagucagcccugagggacuggaugg

SEQ ID NO: 77036 - RNA, 25 nt, Artificial Sequence
  Description of Artificial Sequence: Synthetic oligonucleotide
ggcugcccaucgggaggccggccgg

SEQ ID NO: 77037 - RNA, 25 nt, Artificial Sequence
  Description of Artificial Sequence: Synthetic oligonucleotide
gaugaggggacugaggaggagacgg

SEQ ID NO: 77038 - RNA, 25 nt, Artificial Sequence
  Description of Artificial Sequence: Synthetic oligonucleotide
gaggugaucaucauugagguggacg

SEQ ID NO: 77039 - RNA, 25 nt, Artificial Sequence
  Description of Artificial Sequence: Synthetic oligonucleotide
gaggagggcggcggggcggugagcg

SEQ ID NO: 77040 - RNA, 25 nt, Artificial Sequence
  Description of Artificial Sequence: Synthetic oligonucleotide
gcggcugccguggugcugcccgugc

SEQ ID NO: 77041 - RNA, 25 nt, Artificial Sequence
  Description of Artificial Sequence: Synthetic oligonucleotide
cugcugcugcuccuggugcuggcgg

SEQ ID NO: 77042 - RNA, 25 nt, Artificial Sequence
  Description of Artificial Sequence: Synthetic oligonucleotide
gugggccuugcagucuucuucuuca

SEQ ID NO: 77043 - RNA, 25 nt, Artificial Sequence
  Description of Artificial Sequence: Synthetic oligonucleotide
agacgccaugggacccccaggcgac

SEQ ID NO: 77044 - RNA, 25 nt, Artificial Sequence
  Description of Artificial Sequence: Synthetic oligonucleotide
cugcucuacugccagcguucccugc

SEQ ID NO: 77045 - RNA, 25 nt, Artificial Sequence
  Description of Artificial Sequence: Synthetic oligonucleotide
cuggacaaggucugacgcccaccgc

SEQ ID NO: 77046 - RNA, 25 nt, Artificial Sequence
  Description of Artificial Sequence: Synthetic oligonucleotide
ccggcccgcccacuccuaccacaag

SEQ ID NO: 77047 - RNA, 25 nt, Artificial Sequence
  Description of Artificial Sequence: Synthetic oligonucleotide
ggacuuugccucugaaggccagugg

SEQ ID NO: 77048 - RNA, 25 nt, Artificial Sequence
  Description of Artificial Sequence: Synthetic oligonucleotide
gcagcaggugguggugggugggcug

SEQ ID NO: 77049 - RNA, 25 nt, Artificial Sequence
  Description of Artificial Sequence: Synthetic oligonucleotide
gcucccaucgucccgagcccccucc

SEQ ID NO: 77050 - RNA, 25 nt, Artificial Sequence
  Description of Artificial Sequence: Synthetic oligonucleotide
cccgcagccuccuugcuucucucug

SEQ ID NO: 77051 - RNA, 25 nt, Artificial Sequence
  Description of Artificial Sequence: Synthetic oligonucleotide
guccccuggcuggccuccuucaccc

SEQ ID NO: 77052 - RNA, 25 nt, Artificial Sequence
  Description of Artificial Sequence: Synthetic oligonucleotide
cugaccgccucccucccuccugccc

SEQ ID NO: 77053 - RNA, 25 nt, Artificial Sequence
  Description of Artificial Sequence: Synthetic oligonucleotide
ccggcauugcaucuucccuagauag

SEQ ID NO: 77054 - RNA, 25 nt, Artificial Sequence
  Description of Artificial Sequence: Synthetic oligonucleotide
gguccccugagggcugagugggagg

SEQ ID NO: 77055 - RNA, 25 nt, Artificial Sequence
  Description of Artificial Sequence: Synthetic oligonucleotide
ggcggcccuuuccagccucugcccc

SEQ ID NO: 77056 - RNA, 25 nt, Artificial Sequence
  Description of Artificial Sequence: Synthetic oligonucleotide
cucaggggaacccuguagcuuugug

SEQ ID NO: 77057 - RNA, 25 nt, Artificial Sequence
  Description of Artificial Sequence: Synthetic oligonucleotide
gucuguccagccccaucugaaugug

SEQ ID NO: 77058 - RNA, 25 nt, Artificial Sequence
  Description of Artificial Sequence: Synthetic oligonucleotide
guugggggcucugcacuugaaggca

SEQ ID NO: 77059 - RNA, 25 nt, Artificial Sequence
  Description of Artificial Sequence: Synthetic oligonucleotide
aggacccucagaccucgcugguaaa

SEQ ID NO: 77060 - RNA, 25 nt, Artificial Sequence
  Description of Artificial Sequence: Synthetic oligonucleotide
aggucaaauggggucaucugcuccu

SEQ ID NO: 77061 - RNA, 25 nt, Artificial Sequence
  Description of Artificial Sequence: Synthetic oligonucleotide
uuuuccauccccugacauaccuuaa

SEQ ID NO: 77062 - RNA, 25 nt, Artificial Sequence
  Description of Artificial Sequence: Synthetic oligonucleotide
accucugaacucugaccucaggagg

SEQ ID NO: 77063 - RNA, 25 nt, Artificial Sequence
  Description of Artificial Sequence: Synthetic oligonucleotide
gcucugggcacuccagcccugaaag

SEQ ID NO: 77064 - RNA, 25 nt, Artificial Sequence
  Description of Artificial Sequence: Synthetic oligonucleotide
gccccagguguacccaauuggcagc

SEQ ID NO: 77065 - RNA, 25 nt, Artificial Sequence
  Description of Artificial Sequence: Synthetic oligonucleotide
ccucucacuacucuuucuggcuaaa

SEQ ID NO: 77066 - RNA, 25 nt, Artificial Sequence
  Description of Artificial Sequence: Synthetic oligonucleotide
aaggaaucuaaucuuguugagggua

SEQ ID NO: 77067 - RNA, 25 nt, Artificial Sequence
  Description of Artificial Sequence: Synthetic oligonucleotide
agagacccugagacagugugagggg

SEQ ID NO: 77068 - RNA, 25 nt, Artificial Sequence
  Description of Artificial Sequence: Synthetic oligonucleotide
gguggggacugccaagccacccuaa

SEQ ID NO: 77069 - RNA, 25 nt, Artificial Sequence
  Description of Artificial Sequence: Synthetic oligonucleotide
agaccuugggaggaaaacucagaga

SEQ ID NO: 77070 - RNA, 25 nt, Artificial Sequence
  Description of Artificial Sequence: Synthetic oligonucleotide
agggucuucguugcucagucaguca

SEQ ID NO: 77071 - RNA, 25 nt, Artificial Sequence
  Description of Artificial Sequence: Synthetic oligonucleotide
aaguuccucggagaucugccucugc

SEQ ID NO: 77072 - RNA, 25 nt, Artificial Sequence
  Description of Artificial Sequence: Synthetic oligonucleotide
ccucaccuaccccagggaacuucca

SEQ ID NO: 77073 - RNA, 25 nt, Artificial Sequence
  Description of Artificial Sequence: Synthetic oligonucleotide
aaggaaggagccugagccacugggg

SEQ ID NO: 77074 - RNA, 25 nt, Artificial Sequence
  Description of Artificial Sequence: Synthetic oligonucleotide
gacuaagugggcagaagaaacccuu

SEQ ID NO: 77075 - RNA, 25 nt, Artificial Sequence
  Description of Artificial Sequence: Synthetic oligonucleotide
uggcagcccugugccucucgaaugu

SEQ ID NO: 77076 - RNA, 25 nt, Artificial Sequence
  Description of Artificial Sequence: Synthetic oligonucleotide
uuagccuuggauggggcuuucacag

SEQ ID NO: 77077 - RNA, 25 nt, Artificial Sequence
  Description of Artificial Sequence: Synthetic oligonucleotide
guuagaagagcugaaaccaggggug

SEQ ID NO: 77078 - RNA, 25 nt, Artificial Sequence
  Description of Artificial Sequence: Synthetic oligonucleotide
gcagcugucagguaggguggggccg

SEQ ID NO: 77079 - RNA, 25 nt, Artificial Sequence
  Description of Artificial Sequence: Synthetic oligonucleotide
ggugggagaggcccgggucagagcc

SEQ ID NO: 77080 - RNA, 25 nt, Artificial Sequence
  Description of Artificial Sequence: Synthetic oligonucleotide
ccugggggugagccugaaggccaca

SEQ ID NO: 77081 - RNA, 25 nt, Artificial Sequence
  Description of Artificial Sequence: Synthetic oligonucleotide
agagaaagaaccuugcccaaacuca

SEQ ID NO: 77082 - RNA, 25 nt, Artificial Sequence
  Description of Artificial Sequence: Synthetic oligonucleotide
aggcagcuggggcugaggcccaaag

SEQ ID NO: 77083 - RNA, 25 nt, Artificial Sequence
  Description of Artificial Sequence: Synthetic oligonucleotide
ggcagaacagccagagggggcagga

SEQ ID NO: 77084 - RNA, 25 nt, Artificial Sequence
  Description of Artificial Sequence: Synthetic oligonucleotide
aggggaccaaaaaggaaaaugagga

SEQ ID NO: 77085 - RNA, 25 nt, Artificial Sequence
  Description of Artificial Sequence: Synthetic oligonucleotide
acgugcagcagcauuggaaggcugg

SEQ ID NO: 77086 - RNA, 25 nt, Artificial Sequence
  Description of Artificial Sequence: Synthetic oligonucleotide
gggccgggcaggccaggccaagcca

SEQ ID NO: 77087 - RNA, 25 nt, Artificial Sequence
  Description of Artificial Sequence: Synthetic oligonucleotide
aagcagggggccacagggugggcug

SEQ ID NO: 77088 - RNA, 25 nt, Artificial Sequence
  Description of Artificial Sequence: Synthetic oligonucleotide
guggagcucucaggaagggcccuga

SEQ ID NO: 77089 - RNA, 25 nt, Artificial Sequence
  Description of Artificial Sequence: Synthetic oligonucleotide
aggaaggcacacuugcuccuguugg

SEQ ID NO: 77090 - RNA, 25 nt, Artificial Sequence
  Description of Artificial Sequence: Synthetic oligonucleotide
gucccuguccuugcugcccaggcag

SEQ ID NO: 77091 - RNA, 25 nt, Artificial Sequence
  Description of Artificial Sequence: Synthetic oligonucleotide
gcguggaggggaaggguagggcagc

SEQ ID NO: 77092 - RNA, 25 nt, Artificial Sequence
  Description of Artificial Sequence: Synthetic oligonucleotide
ccagagaaaggagcagagaaggcac

SEQ ID NO: 77093 - RNA, 25 nt, Artificial Sequence
  Description of Artificial Sequence: Synthetic oligonucleotide
cacaaacgaggaaugaggggcuuca

SEQ ID NO: 77094 - RNA, 25 nt, Artificial Sequence
  Description of Artificial Sequence: Synthetic oligonucleotide
acgagaggccacagggccuggcugg

SEQ ID NO: 77095 - RNA, 25 nt, Artificial Sequence
  Description of Artificial Sequence: Synthetic oligonucleotide
gccacgcugucccggccugcucacc

SEQ ID NO: 77096 - RNA, 25 nt, Artificial Sequence
  Description of Artificial Sequence: Synthetic oligonucleotide
caucucagugaggggcaggagcugg

SEQ ID NO: 77097 - RNA, 25 nt, Artificial Sequence
  Description of Artificial Sequence: Synthetic oligonucleotide
gggcucgcuuaggcuggguccacgc

SEQ ID NO: 77098 - RNA, 25 nt, Artificial Sequence
  Description of Artificial Sequence: Synthetic oligonucleotide
cuucccuggugccagcaccccucaa

SEQ ID NO: 77099 - RNA, 25 nt, Artificial Sequence
  Description of Artificial Sequence: Synthetic oligonucleotide
agccugucucaccaguggccugccc

SEQ ID NO: 77100 - RNA, 25 nt, Artificial Sequence
  Description of Artificial Sequence: Synthetic oligonucleotide
cucucgcucccccacccagcccacc

SEQ ID NO: 77101 - RNA, 25 nt, Artificial Sequence
  Description of Artificial Sequence: Synthetic oligonucleotide
ccauugaagucuccuugggccacca

SEQ ID NO: 77102 - RNA, 25 nt, Artificial Sequence
  Description of Artificial Sequence: Synthetic oligonucleotide
aaaggugguggccaugguaccgggg

SEQ ID NO: 77103 - RNA, 25 nt, Artificial Sequence
  Description of Artificial Sequence: Synthetic oligonucleotide
gacuugggagagugagacccagugg

SEQ ID NO: 77104 - RNA, 25 nt, Artificial Sequence
  Description of Artificial Sequence: Synthetic oligonucleotide
gagggagcaagaggagagggauguc

SEQ ID NO: 77105 - RNA, 25 nt, Artificial Sequence
  Description of Artificial Sequence: Synthetic oligonucleotide
cggggggguggggcacgggguaggg

SEQ ID NO: 77106 - RNA, 25 nt, Artificial Sequence
  Description of Artificial Sequence: Synthetic oligonucleotide
ggaaauggggugaacggugcuggca

SEQ ID NO: 77107 - RNA, 25 nt, Artificial Sequence
  Description of Artificial Sequence: Synthetic oligonucleotide
aguucggcuagauuucugucuuguu

SEQ ID NO: 77108 - RNA, 25 nt, Artificial Sequence
  Description of Artificial Sequence: Synthetic oligonucleotide
uuguuuuuuuguuuuguuuaaugua

SEQ ID NO: 77109 - RNA, 25 nt, Artificial Sequence
  Description of Artificial Sequence: Synthetic oligonucleotide
auauuuuuauuauaauuauuauaua

SEQ ID NO: 77110 - RNA, 3262 nt, Homo sapiens
ggcuggagaguaaaaagaacuggggguaagagccccucugccuagcacugcucccccaaggcucccagaaaucucaggucagaggcacggacagccucuggagcucucgucuggugggaccaugaacugccagcagcuguggcugggcuuccuacuccccaugacagucucaggccggguccuggggcuugcagagguggcgcccguggacuaccugucacaauauggguaccuacagaagccucuagaaggaucuaauaacuucaagccagaagauaucaccgaggcucugagagcuuuucaggaagcaucugaacuuccagucucaggucagcuggaugaugccacaagggcccgcaugaggcagccucguuguggccuagaggaucccuucaaccagaagacccuuaaauaccuguugcugggccgcuggagaaagaagcaccugacuuuccgcaucuugaaccugcccuccacccuuccaccccacacagcccgggcagcccugcgucaagccuuccaggacuggagcaauguggcucccuugaccuuccaagaggugcaggcuggugcggcugacauccgccucuccuuccauggccgccaaagcucguacuguuccaauacuuuugaugggccugggagaguccuggcccaugccgacaucccagagcugggcagugugcacuucgacgaagacgaguucuggacugaggggaccuaccguggggugaaccugcgcaucauugcagcccaugaagugggccaugcucuggggcuugggcacucccgauauucccaggcccucauggccccagucuacgagggcuaccggccccacuuuaagcugcacccagaugauguggcagggauccaggcucucuauggcaagaagaguccagugauaagggaugaggaagaagaagagacagagcugcccacugugcccccagugcccacagaacccagucccaugccagacccuugcaguagugaacuggaugccaugaugcuggggccccgugggaagaccuaugcuuucaagggggacuauguguggacuguaucagauucaggaccgggccccuuguuccgagugucugcccuuugggaggggcuccccggaaaccuggaugcugcugucuacucgccucgaacacaauggauucacuucuuuaagggagacaagguguggcgcuacauuaauuucaagaugucuccuggcuuccccaagaagcugaauaggguagaaccuaaccuggaugcagcucucuauuggccucucaaccaaaagguguuccucuuuaagggcuccggguacuggcagugggacgagcuagcccgaacugacuucagcagcuaccccaaaccaaucaaggguuuguuuacgggagugccaaaccagcccucggcugcuaugaguuggcaagauggccgagucuacuucuucaagggcaaagucuacuggcgccucaaccagcagcuucgaguagagaaaggcuaucccagaaauauuucccacaacuggaugcacugucguccccggacuauagacacuaccccaucaggugggaauaccacucccucagguacgggcauaaccuuggauaccacucucucagccacagaaaccacguuugaauacugacugcucacccacagacacaaucuuggacauuaaccccugaggcuccaccacccacccuuucauuucccccccagaagccuaaggccuaauagcugaaugaaauaccugucugcucaguagaaccuugcaggugcuguagcaggcgcaagaccguagaucucaggccucuaacacuuccaacuccagccaccacuuuccugugcauuuucacuccugagaagugcuccccuaacucagauccccuaacuuagauuuggcccccaacuccauuuccugucugucuuagacagcccuuccaacugugucaucucuucucuggaggucaaugguggagggagaugccuggguccuguucuuccuacauaaaaugcaagaaaacagcauggccaguaaacugagcaagggccuuggaauccuugagaaucacauuuaugugcuuaugauuacgggcaagcuaauuaaccuuguugaaucucagauuccccauuugcaacauuagguuaagaccaguacugcaggauuguugcacuaaaugaaauacuguaugugaagugccuggcacagugucugguacauuuguguuuaauaaaagcuaacuccauguucauaagagaggacugaacagcucuuccucuagcugucuggcuguauaacucuuacaguagucuguauaauaagggcaucucuauuagaucuuuaggggacagaggauuugucaagaugguuagcucuuuguuuuggggugcagagaaagaaaagagcagcaacagcagaggcuggacucccugguucaguauuuaaugccauuuuauucacaugcucccauguucucccucccucccauuguagccuugcugcccaggggagggauaugucuuccuuuaugcaucugggaaaccaggaacagacccugcgcaggagagucagagggggaagaguuagaaugggucaguggcuggaacaaaguucugguuaaggaggaaauuagugccacccacggugagaagcagagaaggcacuugcauccuaugcagcccugaagaccaggcuccuuugggcaaaaggcaagacucuggcaggugggucaaugcucucuccuuggagcaagaagccagcuuuuggggaaggcagguccugaggcaggcacugcccuguggucuuccccagguugaggagagaaguggaagccccauggaagacagugcucccagcugagguaggaggcggagguggggguggggguaguuuaagccuauggggcccagggggaaaggccaaacagaaacccaacuacccccuaaugaagggccuggagguugggguaucuuggagcuccucagagcccuucuucccaucaaaaagguaucaaaugccuuggaagcucccugauccuacaaaacaaaaaaaugcuuauuuuuaccacugugaggcaagcugaggugaacauuuaaaaggcuauuucaagacgaggugcgguggcuauaauccuagcacuuugggaggcugaagcaggaggaucacuugagcccaggaguucaagaccagcuugggcaacauagggagacccugucucugcaaaaaaauaaaaacgaauacauaaaaauuaaaaaaaaa

SEQ ID NO: 77111 - RNA, 19 nt, Artificial Sequence
  Description of Artificial Sequence: Synthetic oligonucleotide
ggcuggagaguaaaaagaa

SEQ ID NO: 77112 - RNA, 19 nt, Artificial Sequence
  Description of Artificial Sequence: Synthetic oligonucleotide
acuggggguaagagccccu

SEQ ID NO: 77113 - RNA, 19 nt, Artificial Sequence
  Description of Artificial Sequence: Synthetic oligonucleotide
ucugccuagcacugcuccc

SEQ ID NO: 77114 - RNA, 19 nt, Artificial Sequence
  Description of Artificial Sequence: Synthetic oligonucleotide
cccaaggcucccagaaauc

SEQ ID NO: 77115 - RNA, 19 nt, Artificial Sequence
  Description of Artificial Sequence: Synthetic oligonucleotide
cucaggucagaggcacgga

SEQ ID NO: 77116 - RNA, 19 nt, Artificial Sequence
  Description of Artificial Sequence: Synthetic oligonucleotide
acagccucuggagcucucg

SEQ ID NO: 77117 - RNA, 19 nt, Artificial Sequence
  Description of Artificial Sequence: Synthetic oligonucleotide
gucuggugggaccaugaac

SEQ ID NO: 77118 - RNA, 19 nt, Artificial Sequence
  Description of Artificial Sequence: Synthetic oligonucleotide
cugccagcagcuguggcug

SEQ ID NO: 77119 - RNA, 19 nt, Artificial Sequence
  Description of Artificial Sequence: Synthetic oligonucleotide
gggcuuccuacuccccaug

SEQ ID NO: 77120 - RNA, 19 nt, Artificial Sequence
  Description of Artificial Sequence: Synthetic oligonucleotide
gacagucucaggccggguc

SEQ ID NO: 77121 - RNA, 19 nt, Artificial Sequence
  Description of Artificial Sequence: Synthetic oligonucleotide
ccuggggcuugcagaggug

SEQ ID NO: 77122 - RNA, 19 nt, Artificial Sequence
  Description of Artificial Sequence: Synthetic oligonucleotide
ggcgcccguggacuaccug

SEQ ID NO: 77123 - RNA, 19 nt, Artificial Sequence
  Description of Artificial Sequence: Synthetic oligonucleotide
gucacaauauggguaccua

SEQ ID NO: 77124 - RNA, 19 nt, Artificial Sequence
  Description of Artificial Sequence: Synthetic oligonucleotide
acagaagccucuagaagga

SEQ ID NO: 77125 - RNA, 19 nt, Artificial Sequence
  Description of Artificial Sequence: Synthetic oligonucleotide
aucuaauaacuucaagcca

SEQ ID NO: 77126 - RNA, 19 nt, Artificial Sequence
  Description of Artificial Sequence: Synthetic oligonucleotide
agaagauaucaccgaggcu

SEQ ID NO: 77127 - RNA, 19 nt, Artificial Sequence
  Description of Artificial Sequence: Synthetic oligonucleotide
ucugagagcuuuucaggaa

SEQ ID NO: 77128 - RNA, 19 nt, Artificial Sequence
  Description of Artificial Sequence: Synthetic oligonucleotide
agcaucugaacuuccaguc

SEQ ID NO: 77129 - RNA, 19 nt, Artificial Sequence
  Description of Artificial Sequence: Synthetic oligonucleotide
cucaggucagcuggaugau

SEQ ID NO: 77130 - RNA, 19 nt, Artificial Sequence
  Description of Artificial Sequence: Synthetic oligonucleotide
ugccacaagggcccgcaug

SEQ ID NO: 77131 - RNA, 19 nt, Artificial Sequence
  Description of Artificial Sequence: Synthetic oligonucleotide
gaggcagccucguuguggc

SEQ ID NO: 77132 - RNA, 19 nt, Artificial Sequence
  Description of Artificial Sequence: Synthetic oligonucleotide
ccuagaggaucccuucaac

SEQ ID NO: 77133 - RNA, 19 nt, Artificial Sequence
  Description of Artificial Sequence: Synthetic oligonucleotide
ccagaagacccuuaaauac

SEQ ID NO: 77134 - RNA, 19 nt, Artificial Sequence
  Description of Artificial Sequence: Synthetic oligonucleotide
ccuguugcugggccgcugg

SEQ ID NO: 77135 - RNA, 19 nt, Artificial Sequence
  Description of Artificial Sequence: Synthetic oligonucleotide
gagaaagaagcaccugacu

SEQ ID NO: 77136 - RNA, 19 nt, Artificial Sequence
  Description of Artificial Sequence: Synthetic oligonucleotide
uuuccgcaucuugaaccug

SEQ ID NO: 77137 - RNA, 19 nt, Artificial Sequence
  Description of Artificial Sequence: Synthetic oligonucleotide
gcccuccacccuuccaccc

SEQ ID NO: 77138 - RNA, 19 nt, Artificial Sequence
  Description of Artificial Sequence: Synthetic oligonucleotide
ccacacagcccgggcagcc

SEQ ID NO: 77139 - RNA, 19 nt, Artificial Sequence
  Description of Artificial Sequence: Synthetic oligonucleotide
ccugcgucaagccuuccag

SEQ ID NO: 77140 - RNA, 19 nt, Artificial Sequence
  Description of Artificial Sequence: Synthetic oligonucleotide
ggacuggagcaauguggcu

SEQ ID NO: 77141 - RNA, 19 nt, Artificial Sequence
  Description of Artificial Sequence: Synthetic oligonucleotide
ucccuugaccuuccaagag

SEQ ID NO: 77142 - RNA, 19 nt, Artificial Sequence
  Description of Artificial Sequence: Synthetic oligonucleotide
ggugcaggcuggugcggcu

SEQ ID NO: 77143 - RNA, 19 nt, Artificial Sequence
  Description of Artificial Sequence: Synthetic oligonucleotide
ugacauccgccucuccuuc

SEQ ID NO: 77144 - RNA, 19 nt, Artificial Sequence
  Description of Artificial Sequence: Synthetic oligonucleotide
ccauggccgccaaagcucg

SEQ ID NO: 77145 - RNA, 19 nt, Artificial Sequence
  Description of Artificial Sequence: Synthetic oligonucleotide
guacuguuccaauacuuuu

SEQ ID NO: 77146 - RNA, 19 nt, Artificial Sequence
  Description of Artificial Sequence: Synthetic oligonucleotide
ugaugggccugggagaguc

SEQ ID NO: 77147 - RNA, 19 nt, Artificial Sequence
  Description of Artificial Sequence: Synthetic oligonucleotide
ccuggcccaugccgacauc

SEQ ID NO: 77148 - RNA, 19 nt, Artificial Sequence
  Description of Artificial Sequence: Synthetic oligonucleotide
cccagagcugggcagugug

SEQ ID NO: 77149 - RNA, 19 nt, Artificial Sequence
  Description of Artificial Sequence: Synthetic oligonucleotide
gcacuucgacgaagacgag

SEQ ID NO: 77150 - RNA, 19 nt, Artificial Sequence
  Description of Artificial Sequence: Synthetic oligonucleotide
guucuggacugaggggacc

SEQ ID NO: 77151 - RNA, 19 nt, Artificial Sequence
  Description of Artificial Sequence: Synthetic oligonucleotide
cuaccguggggugaaccug

SEQ ID NO: 77152 - RNA, 19 nt, Artificial Sequence
  Description of Artificial Sequence: Synthetic oligonucleotide
gcgcaucauugcagcccau

SEQ ID NO: 77153 - RNA, 19 nt, Artificial Sequence
  Description of Artificial Sequence: Synthetic oligonucleotide
ugaagugggccaugcucug

SEQ ID NO: 77154 - RNA, 19 nt, Artificial Sequence
  Description of Artificial Sequence: Synthetic oligonucleotide
ggggcuugggcacucccga

SEQ ID NO: 77155 - RNA, 19 nt, Artificial Sequence
  Description of Artificial Sequence: Synthetic oligonucleotide
auauucccaggcccucaug

SEQ ID NO: 77156 - RNA, 19 nt, Artificial Sequence
  Description of Artificial Sequence: Synthetic oligonucleotide
ggccccagucuacgagggc

SEQ ID NO: 77157 - RNA, 19 nt, Artificial Sequence
  Description of Artificial Sequence: Synthetic oligonucleotide
cuaccggccccacuuuaag

SEQ ID NO: 77158 - RNA, 19 nt, Artificial Sequence
  Description of Artificial Sequence: Synthetic oligonucleotide
gcugcacccagaugaugug

SEQ ID NO: 77159 - RNA, 19 nt, Artificial Sequence
  Description of Artificial Sequence: Synthetic oligonucleotide
ggcagggauccaggcucuc

SEQ ID NO: 77160 - RNA, 19 nt, Artificial Sequence
  Description of Artificial Sequence: Synthetic oligonucleotide
cuauggcaagaagagucca

SEQ ID NO: 77161 - RNA, 19 nt, Artificial Sequence
  Description of Artificial Sequence: Synthetic oligonucleotide
agugauaagggaugaggaa

SEQ ID NO: 77162 - RNA, 19 nt, Artificial Sequence
  Description of Artificial Sequence: Synthetic oligonucleotide
agaagaagagacagagcug

SEQ ID NO: 77163 - RNA, 19 nt, Artificial Sequence
  Description of Artificial Sequence: Synthetic oligonucleotide
gcccacugugcccccagug

SEQ ID NO: 77164 - RNA, 19 nt, Artificial Sequence
  Description of Artificial Sequence: Synthetic oligonucleotide
gcccacagaacccaguccc

SEQ ID NO: 77165 - RNA, 19 nt, Artificial Sequence
  Description of Artificial Sequence: Synthetic oligonucleotide
caugccagacccuugcagu

SEQ ID NO: 77166 - RNA, 19 nt, Artificial Sequence
  Description of Artificial Sequence: Synthetic oligonucleotide
uagugaacuggaugccaug

SEQ ID NO: 77167 - RNA, 19 nt, Artificial Sequence
  Description of Artificial Sequence: Synthetic oligonucleotide
gaugcuggggccccguggg

SEQ ID NO: 77168 - RNA, 19 nt, Artificial Sequence
  Description of Artificial Sequence: Synthetic oligonucleotide
gaagaccuaugcuuucaag

SEQ ID NO: 77169 - RNA, 19 nt, Artificial Sequence
  Description of Artificial Sequence: Synthetic oligonucleotide
gggggacuauguguggacu

SEQ ID NO: 77170 - RNA, 19 nt, Artificial Sequence
  Description of Artificial Sequence: Synthetic oligonucleotide
uguaucagauucaggaccg

SEQ ID NO: 77171 - RNA, 19 nt, Artificial Sequence
  Description of Artificial Sequence: Synthetic oligonucleotide
gggccccuuguuccgagug

SEQ ID NO: 77172 - RNA, 19 nt, Artificial Sequence
  Description of Artificial Sequence: Synthetic oligonucleotide
gucugcccuuugggagggg

SEQ ID NO: 77173 - RNA, 19 nt, Artificial Sequence
  Description of Artificial Sequence: Synthetic oligonucleotide
gcuccccggaaaccuggau

SEQ ID NO: 77174 - RNA, 19 nt, Artificial Sequence
  Description of Artificial Sequence: Synthetic oligonucleotide
ugcugcugucuacucgccu

SEQ ID NO: 77175 - RNA, 19 nt, Artificial Sequence
  Description of Artificial Sequence: Synthetic oligonucleotide
ucgaacacaauggauucac

SEQ ID NO: 77176 - RNA, 19 nt, Artificial Sequence
  Description of Artificial Sequence: Synthetic oligonucleotide
cuucuuuaagggagacaag

SEQ ID NO: 77177 - RNA, 19 nt, Artificial Sequence
  Description of Artificial Sequence: Synthetic oligonucleotide
gguguggcgcuacauuaau

SEQ ID NO: 77178 - RNA, 19 nt, Artificial Sequence
  Description of Artificial Sequence: Synthetic oligonucleotide
uuucaagaugucuccuggc

SEQ ID NO: 77179 - RNA, 19 nt, Artificial Sequence
  Description of Artificial Sequence: Synthetic oligonucleotide
cuuccccaagaagcugaau

SEQ ID NO: 77180 - RNA, 19 nt, Artificial Sequence
  Description of Artificial Sequence: Synthetic oligonucleotide
uaggguagaaccuaaccug

SEQ ID NO: 77181 - RNA, 19 nt, Artificial Sequence
  Description of Artificial Sequence: Synthetic oligonucleotide
ggaugcagcucucuauugg

SEQ ID NO: 77182 - RNA, 19 nt, Artificial Sequence
  Description of Artificial Sequence: Synthetic oligonucleotide
gccucucaaccaaaaggug

SEQ ID NO: 77183 - RNA, 19 nt, Artificial Sequence
  Description of Artificial Sequence: Synthetic oligonucleotide
guuccucuuuaagggcucc

SEQ ID NO: 77184 - RNA, 19 nt, Artificial Sequence
  Description of Artificial Sequence: Synthetic oligonucleotide
cggguacuggcagugggac

SEQ ID NO: 77185 - RNA, 19 nt, Artificial Sequence
  Description of Artificial Sequence: Synthetic oligonucleotide
cgagcuagcccgaacugac

SEQ ID NO: 77186 - RNA, 19 nt, Artificial Sequence
  Description of Artificial Sequence: Synthetic oligonucleotide
cuucagcagcuaccccaaa

SEQ ID NO: 77187 - RNA, 19 nt, Artificial Sequence
  Description of Artificial Sequence: Synthetic oligonucleotide
accaaucaaggguuuguuu

SEQ ID NO: 77188 - RNA, 19 nt, Artificial Sequence
  Description of Artificial Sequence: Synthetic oligonucleotide
uacgggagugccaaaccag

SEQ ID NO: 77189 - RNA, 19 nt, Artificial Sequence
  Description of Artificial Sequence: Synthetic oligonucleotide
gcccucggcugcuaugagu

SEQ ID NO: 77190 - RNA, 19 nt, Artificial Sequence
  Description of Artificial Sequence: Synthetic oligonucleotide
uuggcaagauggccgaguc

SEQ ID NO: 77191 - RNA, 19 nt, Artificial Sequence
  Description of Artificial Sequence: Synthetic oligonucleotide
cuacuucuucaagggcaaa

SEQ ID NO: 77192 - RNA, 19 nt, Artificial Sequence
  Description of Artificial Sequence: Synthetic oligonucleotide
agucuacuggcgccucaac

SEQ ID NO: 77193 - RNA, 19 nt, Artificial Sequence
  Description of Artificial Sequence: Synthetic oligonucleotide
ccagcagcuucgaguagag

SEQ ID NO: 77194 - RNA, 19 nt, Artificial Sequence
  Description of Artificial Sequence: Synthetic oligonucleotide
gaaaggcuaucccagaaau

SEQ ID NO: 77195 - RNA, 19 nt, Artificial Sequence
  Description of Artificial Sequence: Synthetic oligonucleotide
uauuucccacaacuggaug

SEQ ID NO: 77196 - RNA, 19 nt, Artificial Sequence
  Description of Artificial Sequence: Synthetic oligonucleotide
gcacugucguccccggacu

SEQ ID NO: 77197 - RNA, 19 nt, Artificial Sequence
  Description of Artificial Sequence: Synthetic oligonucleotide
uauagacacuaccccauca

SEQ ID NO: 77198 - RNA, 19 nt, Artificial Sequence
  Description of Artificial Sequence: Synthetic oligonucleotide
aggugggaauaccacuccc

SEQ ID NO: 77199 - RNA, 19 nt, Artificial Sequence
  Description of Artificial Sequence: Synthetic oligonucleotide
cucagguacgggcauaacc

SEQ ID NO: 77200 - RNA, 19 nt, Artificial Sequence
  Description of Artificial Sequence: Synthetic oligonucleotide
cuuggauaccacucucuca

SEQ ID NO: 77201 - RNA, 19 nt, Artificial Sequence
  Description of Artificial Sequence: Synthetic oligonucleotide
agccacagaaaccacguuu

SEQ ID NO: 77202 - RNA, 19 nt, Artificial Sequence
  Description of Artificial Sequence: Synthetic oligonucleotide
ugaauacugacugcucacc

SEQ ID NO: 77203 - RNA, 19 nt, Artificial Sequence
  Description of Artificial Sequence: Synthetic oligonucleotide
ccacagacacaaucuugga

SEQ ID NO: 77204 - RNA, 19 nt, Artificial Sequence
  Description of Artificial Sequence: Synthetic oligonucleotide
acauuaaccccugaggcuc

SEQ ID NO: 77205 - RNA, 19 nt, Artificial Sequence
  Description of Artificial Sequence: Synthetic oligonucleotide
ccaccacccacccuuucau

SEQ ID NO: 77206 - RNA, 19 nt, Artificial Sequence
  Description of Artificial Sequence: Synthetic oligonucleotide
uuucccccccagaagccua

SEQ ID NO: 77207 - RNA, 19 nt, Artificial Sequence
  Description of Artificial Sequence: Synthetic oligonucleotide
aaggccuaauagcugaaug

SEQ ID NO: 77208 - RNA, 19 nt, Artificial Sequence
  Description of Artificial Sequence: Synthetic oligonucleotide
gaaauaccugucugcucag

SEQ ID NO: 77209 - RNA, 19 nt, Artificial Sequence
  Description of Artificial Sequence: Synthetic oligonucleotide
guagaaccuugcaggugcu

SEQ ID NO: 77210 - RNA, 19 nt, Artificial Sequence
  Description of Artificial Sequence: Synthetic oligonucleotide
uguagcaggcgcaagaccg

SEQ ID NO: 77211 - RNA, 19 nt, Artificial Sequence
  Description of Artificial Sequence: Synthetic oligonucleotide
guagaucucaggccucuaa

SEQ ID NO: 77212 - RNA, 19 nt, Artificial Sequence
  Description of Artificial Sequence: Synthetic oligonucleotide
acacuuccaacuccagcca

SEQ ID NO: 77213 - RNA, 19 nt, Artificial Sequence
  Description of Artificial Sequence: Synthetic oligonucleotide
accacuuuccugugcauuu

SEQ ID NO: 77214 - RNA, 19 nt, Artificial Sequence
  Description of Artificial Sequence: Synthetic oligonucleotide
uucacuccugagaagugcu

SEQ ID NO: 77215 - RNA, 19 nt, Artificial Sequence
  Description of Artificial Sequence: Synthetic oligonucleotide
uccccuaacucagaucccc

SEQ ID NO: 77216 - RNA, 19 nt, Artificial Sequence
  Description of Artificial Sequence: Synthetic oligonucleotide
cuaacuuagauuuggcccc

SEQ ID NO: 77217 - RNA, 19 nt, Artificial Sequence
  Description of Artificial Sequence: Synthetic oligonucleotide
ccaacuccauuuccugucu

SEQ ID NO: 77218 - RNA, 19 nt, Artificial Sequence
  Description of Artificial Sequence: Synthetic oligonucleotide
ugucuuagacagcccuucc

SEQ ID NO: 77219 - RNA, 19 nt, Artificial Sequence
  Description of Artificial Sequence: Synthetic oligonucleotide
caacugugucaucucuucu

SEQ ID NO: 77220 - RNA, 19 nt, Artificial Sequence
  Description of Artificial Sequence: Synthetic oligonucleotide
ucuggaggucaauggugga

SEQ ID NO: 77221 - RNA, 19 nt, Artificial Sequence
  Description of Artificial Sequence: Synthetic oligonucleotide
agggagaugccuggguccu

SEQ ID NO: 77222 - RNA, 19 nt, Artificial Sequence
  Description of Artificial Sequence: Synthetic oligonucleotide
uguucuuccuacauaaaau

SEQ ID NO: 77223 - RNA, 19 nt, Artificial Sequence
  Description of Artificial Sequence: Synthetic oligonucleotide
ugcaagaaaacagcauggc

SEQ ID NO: 77224 - RNA, 19 nt, Artificial Sequence
  Description of Artificial Sequence: Synthetic oligonucleotide
ccaguaaacugagcaaggg

SEQ ID NO: 77225 - RNA, 19 nt, Artificial Sequence
  Description of Artificial Sequence: Synthetic oligonucleotide
gccuuggaauccuugagaa

SEQ ID NO: 77226 - RNA, 19 nt, Artificial Sequence
  Description of Artificial Sequence: Synthetic oligonucleotide
aucacauuuaugugcuuau

SEQ ID NO: 77227 - RNA, 19 nt, Artificial Sequence
  Description of Artificial Sequence: Synthetic oligonucleotide
ugauuacgggcaagcuaau

SEQ ID NO: 77228 - RNA, 19 nt, Artificial Sequence
  Description of Artificial Sequence: Synthetic oligonucleotide
uuaaccuuguugaaucuca

SEQ ID NO: 77229 - RNA, 19 nt, Artificial Sequence
  Description of Artificial Sequence: Synthetic oligonucleotide
agauuccccauuugcaaca

SEQ ID NO: 77230 - RNA, 19 nt, Artificial Sequence
  Description of Artificial Sequence: Synthetic oligonucleotide
auuagguuaagaccaguac

SEQ ID NO: 77231 - RNA, 19 nt, Artificial Sequence
  Description of Artificial Sequence: Synthetic oligonucleotide
cugcaggauuguugcacua

SEQ ID NO: 77232 - RNA, 19 nt, Artificial Sequence
  Description of Artificial Sequence: Synthetic oligonucleotide
aaaugaaauacuguaugug

SEQ ID NO: 77233 - RNA, 19 nt, Artificial Sequence
  Description of Artificial Sequence: Synthetic oligonucleotide
gaagugccuggcacagugu

SEQ ID NO: 77234 - RNA, 19 nt, Artificial Sequence
  Description of Artificial Sequence: Synthetic oligonucleotide
ucugguacauuuguguuua

SEQ ID NO: 77235 - RNA, 19 nt, Artificial Sequence
  Description of Artificial Sequence: Synthetic oligonucleotide
aauaaaagcuaacuccaug

SEQ ID NO: 77236 - RNA, 19 nt, Artificial Sequence
  Description of Artificial Sequence: Synthetic oligonucleotide
guucauaagagaggacuga

SEQ ID NO: 77237 - RNA, 19 nt, Artificial Sequence
  Description of Artificial Sequence: Synthetic oligonucleotide
aacagcucuuccucuagcu

SEQ ID NO: 77238 - RNA, 19 nt, Artificial Sequence
  Description of Artificial Sequence: Synthetic oligonucleotide
ugucuggcuguauaacucu

SEQ ID NO: 77239 - RNA, 19 nt, Artificial Sequence
  Description of Artificial Sequence: Synthetic oligonucleotide
uuacaguagucuguauaau

SEQ ID NO: 77240 - RNA, 19 nt, Artificial Sequence
  Description of Artificial Sequence: Synthetic oligonucleotide
uaagggcaucucuauuaga

SEQ ID NO: 77241 - RNA, 19 nt, Artificial Sequence
  Description of Artificial Sequence: Synthetic oligonucleotide
aucuuuaggggacagagga

SEQ ID NO: 77242 - RNA, 19 nt, Artificial Sequence
  Description of Artificial Sequence: Synthetic oligonucleotide
auuugucaagaugguuagc

SEQ ID NO: 77243 - RNA, 19 nt, Artificial Sequence
  Description of Artificial Sequence: Synthetic oligonucleotide
cucuuuguuuuggggugca

SEQ ID NO: 77244 - RNA, 19 nt, Artificial Sequence
  Description of Artificial Sequence: Synthetic oligonucleotide
agagaaagaaaagagcagc

SEQ ID NO: 77245 - RNA, 19 nt, Artificial Sequence
  Description of Artificial Sequence: Synthetic oligonucleotide
caacagcagaggcuggacu

SEQ ID NO: 77246 - RNA, 19 nt, Artificial Sequence
  Description of Artificial Sequence: Synthetic oligonucleotide
ucccugguucaguauuuaa

SEQ ID NO: 77247 - RNA, 19 nt, Artificial Sequence
  Description of Artificial Sequence: Synthetic oligonucleotide
augccauuuuauucacaug

SEQ ID NO: 77248 - RNA, 19 nt, Artificial Sequence
  Description of Artificial Sequence: Synthetic oligonucleotide
gcucccauguucucccucc

SEQ ID NO: 77249 - RNA, 19 nt, Artificial Sequence
  Description of Artificial Sequence: Synthetic oligonucleotide
ccucccauuguagccuugc

SEQ ID NO: 77250 - RNA, 19 nt, Artificial Sequence
  Description of Artificial Sequence: Synthetic oligonucleotide
cugcccaggggagggauau

SEQ ID NO: 77251 - RNA, 19 nt, Artificial Sequence
  Description of Artificial Sequence: Synthetic oligonucleotide
ugucuuccuuuaugcaucu

SEQ ID NO: 77252 - RNA, 19 nt, Artificial Sequence
  Description of Artificial Sequence: Synthetic oligonucleotide
ugggaaaccaggaacagac

SEQ ID NO: 77253 - RNA, 19 nt, Artificial Sequence
  Description of Artificial Sequence: Synthetic oligonucleotide
cccugcgcaggagagucag

SEQ ID NO: 77254 - RNA, 19 nt, Artificial Sequence
  Description of Artificial Sequence: Synthetic oligonucleotide
gagggggaagaguuagaau

SEQ ID NO: 77255 - RNA, 19 nt, Artificial Sequence
  Description of Artificial Sequence: Synthetic oligonucleotide
ugggucaguggcuggaaca

SEQ ID NO: 77256 - RNA, 19 nt, Artificial Sequence
  Description of Artificial Sequence: Synthetic oligonucleotide
aaaguucugguuaaggagg

SEQ ID NO: 77257 - RNA, 19 nt, Artificial Sequence
  Description of Artificial Sequence: Synthetic oligonucleotide
gaaauuagugccacccacg

SEQ ID NO: 77258 - RNA, 19 nt, Artificial Sequence
  Description of Artificial Sequence: Synthetic oligonucleotide
ggugagaagcagagaaggc

SEQ ID NO: 77259 - RNA, 19 nt, Artificial Sequence
  Description of Artificial Sequence: Synthetic oligonucleotide
cacuugcauccuaugcagc

SEQ ID NO: 77260 - RNA, 19 nt, Artificial Sequence
  Description of Artificial Sequence: Synthetic oligonucleotide
cccugaagaccaggcuccu

SEQ ID NO: 77261 - RNA, 19 nt, Artificial Sequence
  Description of Artificial Sequence: Synthetic oligonucleotide
uuugggcaaaaggcaagac

SEQ ID NO: 77262 - RNA, 19 nt, Artificial Sequence
  Description of Artificial Sequence: Synthetic oligonucleotide
cucuggcaggugggucaau

SEQ ID NO: 77263 - RNA, 19 nt, Artificial Sequence
  Description of Artificial Sequence: Synthetic oligonucleotide
ugcucucuccuuggagcaa

SEQ ID NO: 77264 - RNA, 19 nt, Artificial Sequence
  Description of Artificial Sequence: Synthetic oligonucleotide
agaagccagcuuuugggga

SEQ ID NO: 77265 - RNA, 19 nt, Artificial Sequence
  Description of Artificial Sequence: Synthetic oligonucleotide
aaggcagguccugaggcag

SEQ ID NO: 77266 - RNA, 19 nt, Artificial Sequence
  Description of Artificial Sequence: Synthetic oligonucleotide
ggcacugcccuguggucuu

SEQ ID NO: 77267 - RNA, 19 nt, Artificial Sequence
  Description of Artificial Sequence: Synthetic oligonucleotide
uccccagguugaggagaga

SEQ ID NO: 77268 - RNA, 19 nt, Artificial Sequence
  Description of Artificial Sequence: Synthetic oligonucleotide
aaguggaagccccauggaa

SEQ ID NO: 77269 - RNA, 19 nt, Artificial Sequence
  Description of Artificial Sequence: Synthetic oligonucleotide
agacagugcucccagcuga

SEQ ID NO: 77270 - RNA, 19 nt, Artificial Sequence
  Description of Artificial Sequence: Synthetic oligonucleotide
agguaggaggcggaggugg

SEQ ID NO: 77271 - RNA, 19 nt, Artificial Sequence
  Description of Artificial Sequence: Synthetic oligonucleotide
gggguggggguaguuuaag

SEQ ID NO: 77272 - RNA, 19 nt, Artificial Sequence
  Description of Artificial Sequence: Synthetic oligonucleotide
gccuauggggcccaggggg

SEQ ID NO: 77273 - RNA, 19 nt, Artificial Sequence
  Description of Artificial Sequence: Synthetic oligonucleotide
gaaaggccaaacagaaacc

SEQ ID NO: 77274 - RNA, 19 nt, Artificial Sequence
  Description of Artificial Sequence: Synthetic oligonucleotide
ccaacuacccccuaaugaa

SEQ ID NO: 77275 - RNA, 19 nt, Artificial Sequence
  Description of Artificial Sequence: Synthetic oligonucleotide
agggccuggagguuggggu

SEQ ID NO: 77276 - RNA, 19 nt, Artificial Sequence
  Description of Artificial Sequence: Synthetic oligonucleotide
uaucuuggagcuccucaga

SEQ ID NO: 77277 - RNA, 19 nt, Artificial Sequence
  Description of Artificial Sequence: Synthetic oligonucleotide
agcccuucuucccaucaaa

SEQ ID NO: 77278 - RNA, 19 nt, Artificial Sequence
  Description of Artificial Sequence: Synthetic oligonucleotide
aaagguaucaaaugccuug

SEQ ID NO: 77279 - RNA, 19 nt, Artificial Sequence
  Description of Artificial Sequence: Synthetic oligonucleotide
ggaagcucccugauccuac

SEQ ID NO: 77280 - RNA, 19 nt, Artificial Sequence
  Description of Artificial Sequence: Synthetic oligonucleotide
caaaacaaaaaaaugcuua

SEQ ID NO: 77281 - RNA, 19 nt, Artificial Sequence
  Description of Artificial Sequence: Synthetic oligonucleotide
auuuuuaccacugugaggc

SEQ ID NO: 77282 - RNA, 19 nt, Artificial Sequence
  Description of Artificial Sequence: Synthetic oligonucleotide
caagcugaggugaacauuu

SEQ ID NO: 77283 - RNA, 19 nt, Artificial Sequence
  Description of Artificial Sequence: Synthetic oligonucleotide
uaaaaggcuauuucaagac

SEQ ID NO: 77284 - RNA, 19 nt, Artificial Sequence
  Description of Artificial Sequence: Synthetic oligonucleotide
cgaggugcgguggcuauaa

SEQ ID NO: 77285 - RNA, 19 nt, Artificial Sequence
  Description of Artificial Sequence: Synthetic oligonucleotide
auccuagcacuuugggagg

SEQ ID NO: 77286 - RNA, 19 nt, Artificial Sequence
  Description of Artificial Sequence: Synthetic oligonucleotide
gcugaagcaggaggaucac

SEQ ID NO: 77287 - RNA, 19 nt, Artificial Sequence
  Description of Artificial Sequence: Synthetic oligonucleotide
cuugagcccaggaguucaa

SEQ ID NO: 77288 - RNA, 19 nt, Artificial Sequence
  Description of Artificial Sequence: Synthetic oligonucleotide
agaccagcuugggcaacau

SEQ ID NO: 77289 - RNA, 19 nt, Artificial Sequence
  Description of Artificial Sequence: Synthetic oligonucleotide
uagggagacccugucucug

SEQ ID NO: 77290 - RNA, 19 nt, Artificial Sequence
  Description of Artificial Sequence: Synthetic oligonucleotide
gcaaaaaaauaaaaacgaa

SEQ ID NO: 77291 - RNA, 19 nt, Artificial Sequence
  Description of Artificial Sequence: Synthetic oligonucleotide
auacauaaaaauuaaaaaa

SEQ ID NO: 77292 - RNA, 19 nt, Artificial Sequence
  Description of Artificial Sequence: Synthetic oligonucleotide
cauaaaaauuaaaaaaaaa

SEQ ID NO: 77293 - RNA, 25 nt, Artificial Sequence
  Description of Artificial Sequence: Synthetic oligonucleotide
ggcuggagaguaaaaagaacugggg

SEQ ID NO: 77294 - RNA, 25 nt, Artificial Sequence
  Description of Artificial Sequence: Synthetic oligonucleotide
gguaagagccccucugccuagcacu

SEQ ID NO: 77295 - RNA, 25 nt, Artificial Sequence
  Description of Artificial Sequence: Synthetic oligonucleotide
ugcucccccaaggcucccagaaauc

SEQ ID NO: 77296 - RNA, 25 nt, Artificial Sequence
  Description of Artificial Sequence: Synthetic oligonucleotide
cucaggucagaggcacggacagccu

SEQ ID NO: 77297 - RNA, 25 nt, Artificial Sequence
  Description of Artificial Sequence: Synthetic oligonucleotide
ucuggagcucucgucuggugggacc

SEQ ID NO: 77298 - RNA, 25 nt, Artificial Sequence
  Description of Artificial Sequence: Synthetic oligonucleotide
caugaacugccagcagcuguggcug

SEQ ID NO: 77299 - RNA, 25 nt, Artificial Sequence
  Description of Artificial Sequence: Synthetic oligonucleotide
gggcuuccuacuccccaugacaguc

SEQ ID NO: 77300 - RNA, 25 nt, Artificial Sequence
  Description of Artificial Sequence: Synthetic oligonucleotide
cucaggccggguccuggggcuugca

SEQ ID NO: 77301 - RNA, 25 nt, Artificial Sequence
  Description of Artificial Sequence: Synthetic oligonucleotide
agagguggcgcccguggacuaccug

SEQ ID NO: 77302 - RNA, 25 nt, Artificial Sequence
  Description of Artificial Sequence: Synthetic oligonucleotide
gucacaauauggguaccuacagaag

SEQ ID NO: 77303 - RNA, 25 nt, Artificial Sequence
  Description of Artificial Sequence: Synthetic oligonucleotide
gccucuagaaggaucuaauaacuuc

SEQ ID NO: 77304 - RNA, 25 nt, Artificial Sequence
  Description of Artificial Sequence: Synthetic oligonucleotide
caagccagaagauaucaccgaggcu

SEQ ID NO: 77305 - RNA, 25 nt, Artificial Sequence
  Description of Artificial Sequence: Synthetic oligonucleotide
ucugagagcuuuucaggaagcaucu

SEQ ID NO: 77306 - RNA, 25 nt, Artificial Sequence
  Description of Artificial Sequence: Synthetic oligonucleotide
ugaacuuccagucucaggucagcug

SEQ ID NO: 77307 - RNA, 25 nt, Artificial Sequence
  Description of Artificial Sequence: Synthetic oligonucleotide
ggaugaugccacaagggcccgcaug

SEQ ID NO: 77308 - RNA, 25 nt, Artificial Sequence
  Description of Artificial Sequence: Synthetic oligonucleotide
gaggcagccucguuguggccuagag

SEQ ID NO: 77309 - RNA, 25 nt, Artificial Sequence
  Description of Artificial Sequence: Synthetic oligonucleotide
ggaucccuucaaccagaagacccuu

SEQ ID NO: 77310 - RNA, 25 nt, Artificial Sequence
  Description of Artificial Sequence: Synthetic oligonucleotide
uaaauaccuguugcugggccgcugg

SEQ ID NO: 77311 - RNA, 25 nt, Artificial Sequence
  Description of Artificial Sequence: Synthetic oligonucleotide
gagaaagaagcaccugacuuuccgc

SEQ ID NO: 77312 - RNA, 25 nt, Artificial Sequence
  Description of Artificial Sequence: Synthetic oligonucleotide
caucuugaaccugcccuccacccuu

SEQ ID NO: 77313 - RNA, 25 nt, Artificial Sequence
  Description of Artificial Sequence: Synthetic oligonucleotide
uccaccccacacagcccgggcagcc

SEQ ID NO: 77314 - RNA, 25 nt, Artificial Sequence
  Description of Artificial Sequence: Synthetic oligonucleotide
ccugcgucaagccuuccaggacugg

SEQ ID NO: 77315 - RNA, 25 nt, Artificial Sequence
  Description of Artificial Sequence: Synthetic oligonucleotide
gagcaauguggcucccuugaccuuc

SEQ ID NO: 77316 - RNA, 25 nt, Artificial Sequence
  Description of Artificial Sequence: Synthetic oligonucleotide
ccaagaggugcaggcuggugcggcu

SEQ ID NO: 77317 - RNA, 25 nt, Artificial Sequence
  Description of Artificial Sequence: Synthetic oligonucleotide
ugacauccgccucuccuuccauggc

SEQ ID NO: 77318 - RNA, 25 nt, Artificial Sequence
  Description of Artificial Sequence: Synthetic oligonucleotide
ccgccaaagcucguacuguuccaau

SEQ ID NO: 77319 - RNA, 25 nt, Artificial Sequence
  Description of Artificial Sequence: Synthetic oligonucleotide
uacuuuugaugggccugggagaguc

SEQ ID NO: 77320 - RNA, 25 nt, Artificial Sequence
  Description of Artificial Sequence: Synthetic oligonucleotide
ccuggcccaugccgacaucccagag

SEQ ID NO: 77321 - RNA, 25 nt, Artificial Sequence
  Description of Artificial Sequence: Synthetic oligonucleotide
gcugggcagugugcacuucgacgaa

SEQ ID NO: 77322 - RNA, 25 nt, Artificial Sequence
  Description of Artificial Sequence: Synthetic oligonucleotide
agacgaguucuggacugaggggacc

SEQ ID NO: 77323 - RNA, 25 nt, Artificial Sequence
  Description of Artificial Sequence: Synthetic oligonucleotide
cuaccguggggugaaccugcgcauc

SEQ ID NO: 77324 - RNA, 25 nt, Artificial Sequence
  Description of Artificial Sequence: Synthetic oligonucleotide
cauugcagcccaugaagugggccau

SEQ ID NO: 77325 - RNA, 25 nt, Artificial Sequence
  Description of Artificial Sequence: Synthetic oligonucleotide
ugcucuggggcuugggcacucccga

SEQ ID NO: 77326 - RNA, 25 nt, Artificial Sequence
  Description of Artificial Sequence: Synthetic oligonucleotide
auauucccaggcccucauggcccca

SEQ ID NO: 77327 - RNA, 25 nt, Artificial Sequence
  Description of Artificial Sequence: Synthetic oligonucleotide
agucuacgagggcuaccggccccac

SEQ ID NO: 77328 - RNA, 25 nt, Artificial Sequence
  Description of Artificial Sequence: Synthetic oligonucleotide
cuuuaagcugcacccagaugaugug

SEQ ID NO: 77329 - RNA, 25 nt, Artificial Sequence
  Description of Artificial Sequence: Synthetic oligonucleotide
ggcagggauccaggcucucuauggc

SEQ ID NO: 77330 - RNA, 25 nt, Artificial Sequence
  Description of Artificial Sequence: Synthetic oligonucleotide
caagaagaguccagugauaagggau

SEQ ID NO: 77331 - RNA, 25 nt, Artificial Sequence
  Description of Artificial Sequence: Synthetic oligonucleotide
ugaggaagaagaagagacagagcug

SEQ ID NO: 77332 - RNA, 25 nt, Artificial Sequence
  Description of Artificial Sequence: Synthetic oligonucleotide
gcccacugugcccccagugcccaca

SEQ ID NO: 77333 - RNA, 25 nt, Artificial Sequence
  Description of Artificial Sequence: Synthetic oligonucleotide
agaacccagucccaugccagacccu

SEQ ID NO: 77334 - RNA, 25 nt, Artificial Sequence
  Description of Artificial Sequence: Synthetic oligonucleotide
uugcaguagugaacuggaugccaug

SEQ ID NO: 77335 - RNA, 25 nt, Artificial Sequence
  Description of Artificial Sequence: Synthetic oligonucleotide
gaugcuggggccccgugggaagacc

SEQ ID NO: 77336 - RNA, 25 nt, Artificial Sequence
  Description of Artificial Sequence: Synthetic oligonucleotide
cuaugcuuucaagggggacuaugug

SEQ ID NO: 77337 - RNA, 25 nt, Artificial Sequence
  Description of Artificial Sequence: Synthetic oligonucleotide
guggacuguaucagauucaggaccg

SEQ ID NO: 77338 - RNA, 25 nt, Artificial Sequence
  Description of Artificial Sequence: Synthetic oligonucleotide
gggccccuuguuccgagugucugcc

SEQ ID NO: 77339 - RNA, 25 nt, Artificial Sequence
  Description of Artificial Sequence: Synthetic oligonucleotide
ccuuugggaggggcuccccggaaac

SEQ ID NO: 77340 - RNA, 25 nt, Artificial Sequence
  Description of Artificial Sequence: Synthetic oligonucleotide
ccuggaugcugcugucuacucgccu

SEQ ID NO: 77341 - RNA, 25 nt, Artificial Sequence
  Description of Artificial Sequence: Synthetic oligonucleotide
ucgaacacaauggauucacuucuuu

SEQ ID NO: 77342 - RNA, 25 nt, Artificial Sequence
  Description of Artificial Sequence: Synthetic oligonucleotide
uaagggagacaagguguggcgcuac

SEQ ID NO: 77343 - RNA, 25 nt, Artificial Sequence
  Description of Artificial Sequence: Synthetic oligonucleotide
cauuaauuucaagaugucuccuggc

SEQ ID NO: 77344 - RNA, 25 nt, Artificial Sequence
  Description of Artificial Sequence: Synthetic oligonucleotide
cuuccccaagaagcugaauagggua

SEQ ID NO: 77345 - RNA, 25 nt, Artificial Sequence
  Description of Artificial Sequence: Synthetic oligonucleotide
agaaccuaaccuggaugcagcucuc

SEQ ID NO: 77346 - RNA, 25 nt, Artificial Sequence
  Description of Artificial Sequence: Synthetic oligonucleotide
cuauuggccucucaaccaaaaggug

SEQ ID NO: 77347 - RNA, 25 nt, Artificial Sequence
  Description of Artificial Sequence: Synthetic oligonucleotide
guuccucuuuaagggcuccggguac

SEQ ID NO: 77348 - RNA, 25 nt, Artificial Sequence
  Description of Artificial Sequence: Synthetic oligonucleotide
cuggcagugggacgagcuagcccga

SEQ ID NO: 77349 - RNA, 25 nt, Artificial Sequence
  Description of Artificial Sequence: Synthetic oligonucleotide
aacugacuucagcagcuaccccaaa

SEQ ID NO: 77350 - RNA, 25 nt, Artificial Sequence
  Description of Artificial Sequence: Synthetic oligonucleotide
accaaucaaggguuuguuuacggga

SEQ ID NO: 77351 - RNA, 25 nt, Artificial Sequence
  Description of Artificial Sequence: Synthetic oligonucleotide
agugccaaaccagcccucggcugcu

SEQ ID NO: 77352 - RNA, 25 nt, Artificial Sequence
  Description of Artificial Sequence: Synthetic oligonucleotide
uaugaguuggcaagauggccgaguc

SEQ ID NO: 77353 - RNA, 25 nt, Artificial Sequence
  Description of Artificial Sequence: Synthetic oligonucleotide
cuacuucuucaagggcaaagucuac

SEQ ID NO: 77354 - RNA, 25 nt, Artificial Sequence
  Description of Artificial Sequence: Synthetic oligonucleotide
cuggcgccucaaccagcagcuucga

SEQ ID NO: 77355 - RNA, 25 nt, Artificial Sequence
  Description of Artificial Sequence: Synthetic oligonucleotide
aguagagaaaggcuaucccagaaau

SEQ ID NO: 77356 - RNA, 25 nt, Artificial Sequence
  Description of Artificial Sequence: Synthetic oligonucleotide
uauuucccacaacuggaugcacugu

SEQ ID NO: 77357 - RNA, 25 nt, Artificial Sequence
  Description of Artificial Sequence: Synthetic oligonucleotide
ucguccccggacuauagacacuacc

SEQ ID NO: 77358 - RNA, 25 nt, Artificial Sequence
  Description of Artificial Sequence: Synthetic oligonucleotide
cccaucaggugggaauaccacuccc

SEQ ID NO: 77359 - RNA, 25 nt, Artificial Sequence
  Description of Artificial Sequence: Synthetic oligonucleotide
cucagguacgggcauaaccuuggau

SEQ ID NO: 77360 - RNA, 25 nt, Artificial Sequence
  Description of Artificial Sequence: Synthetic oligonucleotide
uaccacucucucagccacagaaacc

SEQ ID NO: 77361 - RNA, 25 nt, Artificial Sequence
  Description of Artificial Sequence: Synthetic oligonucleotide
cacguuugaauacugacugcucacc

SEQ ID NO: 77362 - RNA, 25 nt, Artificial Sequence
  Description of Artificial Sequence: Synthetic oligonucleotide
ccacagacacaaucuuggacauuaa

SEQ ID NO: 77363 - RNA, 25 nt, Artificial Sequence
  Description of Artificial Sequence: Synthetic oligonucleotide
accccugaggcuccaccacccaccc

SEQ ID NO: 77364 - RNA, 25 nt, Artificial Sequence
  Description of Artificial Sequence: Synthetic oligonucleotide
cuuucauuucccccccagaagccua

SEQ ID NO: 77365 - RNA, 25 nt, Artificial Sequence
  Description of Artificial Sequence: Synthetic oligonucleotide
aaggccuaauagcugaaugaaauac

SEQ ID NO: 77366 - RNA, 25 nt, Artificial Sequence
  Description of Artificial Sequence: Synthetic oligonucleotide
ccugucugcucaguagaaccuugca

SEQ ID NO: 77367 - RNA, 25 nt, Artificial Sequence
  Description of Artificial Sequence: Synthetic oligonucleotide
aggugcuguagcaggcgcaagaccg

SEQ ID NO: 77368 - RNA, 25 nt, Artificial Sequence
  Description of Artificial Sequence: Synthetic oligonucleotide
guagaucucaggccucuaacacuuc

SEQ ID NO: 77369 - RNA, 25 nt, Artificial Sequence
  Description of Artificial Sequence: Synthetic oligonucleotide
ccaacuccagccaccacuuuccugu

SEQ ID NO: 77370 - RNA, 25 nt, Artificial Sequence
  Description of Artificial Sequence: Synthetic oligonucleotide
ugcauuuucacuccugagaagugcu

SEQ ID NO: 77371 - RNA, 25 nt, Artificial Sequence
  Description of Artificial Sequence: Synthetic oligonucleotide
uccccuaacucagauccccuaacuu

SEQ ID NO: 77372 - RNA, 25 nt, Artificial Sequence
  Description of Artificial Sequence: Synthetic oligonucleotide
uagauuuggcccccaacuccauuuc

SEQ ID NO: 77373 - RNA, 25 nt, Artificial Sequence
  Description of Artificial Sequence: Synthetic oligonucleotide
ccugucugucuuagacagcccuucc

SEQ ID NO: 77374 - RNA, 25 nt, Artificial Sequence
  Description of Artificial Sequence: Synthetic oligonucleotide
caacugugucaucucuucucuggag

SEQ ID NO: 77375 - RNA, 25 nt, Artificial Sequence
  Description of Artificial Sequence: Synthetic oligonucleotide
ggucaaugguggagggagaugccug

SEQ ID NO: 77376 - RNA, 25 nt, Artificial Sequence
  Description of Artificial Sequence: Synthetic oligonucleotide
ggguccuguucuuccuacauaaaau

SEQ ID NO: 77377 - RNA, 25 nt, Artificial Sequence
  Description of Artificial Sequence: Synthetic oligonucleotide
ugcaagaaaacagcauggccaguaa

SEQ ID NO: 77378 - RNA, 25 nt, Artificial Sequence
  Description of Artificial Sequence: Synthetic oligonucleotide
aacugagcaagggccuuggaauccu

SEQ ID NO: 77379 - RNA, 25 nt, Artificial Sequence
  Description of Artificial Sequence: Synthetic oligonucleotide
uugagaaucacauuuaugugcuuau

SEQ ID NO: 77380 - RNA, 25 nt, Artificial Sequence
  Description of Artificial Sequence: Synthetic oligonucleotide
ugauuacgggcaagcuaauuaaccu

SEQ ID NO: 77381 - RNA, 25 nt, Artificial Sequence
  Description of Artificial Sequence: Synthetic oligonucleotide
uuguugaaucucagauuccccauuu

SEQ ID NO: 77382 - RNA, 25 nt, Artificial Sequence
  Description of Artificial Sequence: Synthetic oligonucleotide
ugcaacauuagguuaagaccaguac

SEQ ID NO: 77383 - RNA, 25 nt, Artificial Sequence
  Description of Artificial Sequence: Synthetic oligonucleotide
cugcaggauuguugcacuaaaugaa

SEQ ID NO: 77384 - RNA, 25 nt, Artificial Sequence
  Description of Artificial Sequence: Synthetic oligonucleotide
aauacuguaugugaagugccuggca

SEQ ID NO: 77385 - RNA, 25 nt, Artificial Sequence
  Description of Artificial Sequence: Synthetic oligonucleotide
acagugucugguacauuuguguuua

SEQ ID NO: 77386 - RNA, 25 nt, Artificial Sequence
  Description of Artificial Sequence: Synthetic oligonucleotide
aauaaaagcuaacuccauguucaua

SEQ ID NO: 77387 - RNA, 25 nt, Artificial Sequence
  Description of Artificial Sequence: Synthetic oligonucleotide
aagagaggacugaacagcucuuccu

SEQ ID NO: 77388 - RNA, 25 nt, Artificial Sequence
  Description of Artificial Sequence: Synthetic oligonucleotide
ucuagcugucuggcuguauaacucu

SEQ ID NO: 77389 - RNA, 25 nt, Artificial Sequence
  Description of Artificial Sequence: Synthetic oligonucleotide
uuacaguagucuguauaauaagggc

SEQ ID NO: 77390 - RNA, 25 nt, Artificial Sequence
  Description of Artificial Sequence: Synthetic oligonucleotide
caucucuauuagaucuuuaggggac

SEQ ID NO: 77391 - RNA, 25 nt, Artificial Sequence
  Description of Artificial Sequence: Synthetic oligonucleotide
cagaggauuugucaagaugguuagc

SEQ ID NO: 77392 - RNA, 25 nt, Artificial Sequence
  Description of Artificial Sequence: Synthetic oligonucleotide
cucuuuguuuuggggugcagagaaa

SEQ ID NO: 77393 - RNA, 25 nt, Artificial Sequence
  Description of Artificial Sequence: Synthetic oligonucleotide
agaaaagagcagcaacagcagaggc

SEQ ID NO: 77394 - RNA, 25 nt, Artificial Sequence
  Description of Artificial Sequence: Synthetic oligonucleotide
cuggacucccugguucaguauuuaa

SEQ ID NO: 77395 - RNA, 25 nt, Artificial Sequence
  Description of Artificial Sequence: Synthetic oligonucleotide
augccauuuuauucacaugcuccca

SEQ ID NO: 77396 - RNA, 25 nt, Artificial Sequence
  Description of Artificial Sequence: Synthetic oligonucleotide
auguucucccucccucccauuguag

SEQ ID NO: 77397 - RNA, 25 nt, Artificial Sequence
  Description of Artificial Sequence: Synthetic oligonucleotide
gccuugcugcccaggggagggauau

SEQ ID NO: 77398 - RNA, 25 nt, Artificial Sequence
  Description of Artificial Sequence: Synthetic oligonucleotide
ugucuuccuuuaugcaucugggaaa

SEQ ID NO: 77399 - RNA, 25 nt, Artificial Sequence
  Description of Artificial Sequence: Synthetic oligonucleotide
accaggaacagacccugcgcaggag

SEQ ID NO: 77400 - RNA, 25 nt, Artificial Sequence
  Description of Artificial Sequence: Synthetic oligonucleotide
gagucagagggggaagaguuagaau

SEQ ID NO: 77401 - RNA, 25 nt, Artificial Sequence
  Description of Artificial Sequence: Synthetic oligonucleotide
ugggucaguggcuggaacaaaguuc

SEQ ID NO: 77402 - RNA, 25 nt, Artificial Sequence
  Description of Artificial Sequence: Synthetic oligonucleotide
cugguuaaggaggaaauuagugcca

SEQ ID NO: 77403 - RNA, 25 nt, Artificial Sequence
  Description of Artificial Sequence: Synthetic oligonucleotide
acccacggugagaagcagagaaggc

SEQ ID NO: 77404 - RNA, 25 nt, Artificial Sequence
  Description of Artificial Sequence: Synthetic oligonucleotide
cacuugcauccuaugcagcccugaa

SEQ ID NO: 77405 - RNA, 25 nt, Artificial Sequence
  Description of Artificial Sequence: Synthetic oligonucleotide
agaccaggcuccuuugggcaaaagg

SEQ ID NO: 77406 - RNA, 25 nt, Artificial Sequence
  Description of Artificial Sequence: Synthetic oligonucleotide
gcaagacucuggcaggugggucaau

SEQ ID NO: 77407 - RNA, 25 nt, Artificial Sequence
  Description of Artificial Sequence: Synthetic oligonucleotide
ugcucucuccuuggagcaagaagcc

SEQ ID NO: 77408 - RNA, 25 nt, Artificial Sequence
  Description of Artificial Sequence: Synthetic oligonucleotide
cagcuuuuggggaaggcagguccug

SEQ ID NO: 77409 - RNA, 25 nt, Artificial Sequence
  Description of Artificial Sequence: Synthetic oligonucleotide
gaggcaggcacugcccuguggucuu

SEQ ID NO: 77410 - RNA, 25 nt, Artificial Sequence
  Description of Artificial Sequence: Synthetic oligonucleotide
uccccagguugaggagagaagugga

SEQ ID NO: 77411 - RNA, 25 nt, Artificial Sequence
  Description of Artificial Sequence: Synthetic oligonucleotide
aagccccauggaagacagugcuccc

SEQ ID NO: 77412 - RNA, 25 nt, Artificial Sequence
  Description of Artificial Sequence: Synthetic oligonucleotide
cagcugagguaggaggcggaggugg

SEQ ID NO: 77413 - RNA, 25 nt, Artificial Sequence
  Description of Artificial Sequence: Synthetic oligonucleotide
gggguggggguaguuuaagccuaug

SEQ ID NO: 77414 - RNA, 25 nt, Artificial Sequence
  Description of Artificial Sequence: Synthetic oligonucleotide
ggggcccagggggaaaggccaaaca

SEQ ID NO: 77415 - RNA, 25 nt, Artificial Sequence
  Description of Artificial Sequence: Synthetic oligonucleotide
agaaacccaacuacccccuaaugaa

SEQ ID NO: 77416 - RNA, 25 nt, Artificial Sequence
  Description of Artificial Sequence: Synthetic oligonucleotide
agggccuggagguugggguaucuug

SEQ ID NO: 77417 - RNA, 25 nt, Artificial Sequence
  Description of Artificial Sequence: Synthetic oligonucleotide
ggagcuccucagagcccuucuuccc

SEQ ID NO: 77418 - RNA, 25 nt, Artificial Sequence
  Description of Artificial Sequence: Synthetic oligonucleotide
caucaaaaagguaucaaaugccuug

SEQ ID NO: 77419 - RNA, 25 nt, Artificial Sequence
  Description of Artificial Sequence: Synthetic oligonucleotide
ggaagcucccugauccuacaaaaca

SEQ ID NO: 77420 - RNA, 25 nt, Artificial Sequence
  Description of Artificial Sequence: Synthetic oligonucleotide
aaaaaaaugcuuauuuuuaccacug

SEQ ID NO: 77421 - RNA, 25 nt, Artificial Sequence
  Description of Artificial Sequence: Synthetic oligonucleotide
gugaggcaagcugaggugaacauuu

SEQ ID NO: 77422 - RNA, 25 nt, Artificial Sequence
  Description of Artificial Sequence: Synthetic oligonucleotide
uaaaaggcuauuucaagacgaggug

SEQ ID NO: 77423 - RNA, 25 nt, Artificial Sequence
  Description of Artificial Sequence: Synthetic oligonucleotide
gcgguggcuauaauccuagcacuuu

SEQ ID NO: 77424 - RNA, 25 nt, Artificial Sequence
  Description of Artificial Sequence: Synthetic oligonucleotide
ugggaggcugaagcaggaggaucac

SEQ ID NO: 77425 - RNA, 25 nt, Artificial Sequence
  Description of Artificial Sequence: Synthetic oligonucleotide
cuugagcccaggaguucaagaccag

SEQ ID NO: 77426 - RNA, 25 nt, Artificial Sequence
  Description of Artificial Sequence: Synthetic oligonucleotide
gcuugggcaacauagggagacccug

SEQ ID NO: 77427 - RNA, 25 nt, Artificial Sequence
  Description of Artificial Sequence: Synthetic oligonucleotide
gucucugcaaaaaaauaaaaacgaa

SEQ ID NO: 77428 - RNA, 25 nt, Artificial Sequence
  Description of Artificial Sequence: Synthetic oligonucleotide
cgaauacauaaaaauuaaaaaaaaa

SEQ ID NO: 77429 - RNA, 998 nt, Homo sapiens
gacaaaugaggguuuggcaugcagcucgucaucuuaagaguuacuaucuucuugcccugguguuucgccguuccagugcccccugcugcagaccauaaaggaugggacuuuguugagggcuauuuccaucaauuuuuccugaccaagaaggagucgccacuccuuacccaggagacacaaacacagcuccugcaacaauuccaucggaaugggacagaccuacuugacaugcagaugcaugcucugcuacaccagccccacuguggggugccugauggguccgacaccuccaucucgccaggaagaugcaaguggaauaagcacacucuaacuuacaggauuaucaauuacccacaugauaugaagccauccgcagugaaagacaguauauauaaugcaguuuccaucuggagcaaugugaccccuuugauauuccagcaagugcagaauggagaugcagacaucaagguuucuuucuggcagugggcccaugaagaugguuggcccuuugaugggccaggugguaucuuaggccaugccuuuuuaccaaauucuggaaauccuggaguuguccauuuugacaagaaugaacacuggucagcuucagacacuggauauaaucuguuccugguugcaacucaugagauugggcauucuuugggccugcagcacucugggaaucagagcuccauaauguaccccacuuacugguaucacgacccuagaaccuuccagcucagugccgaugauauccaaaggauccagcauuuguauggagaaaaauguucaucugacauaccuuaauguuagcacagaggacuuauucaaccuguccuuucagggaguuuauuggaggaucaaagaacugaaagcacuagagcagccuuggggacugcuaggaugaagcccuaaagaaugcaaccuagucagguuagcugaaccgacacucaaaacgcuacugagucacaauaaagauuguuuuaaagaguaaaaaaaaa

SEQ ID NO: 77430 - RNA, 19 nt, Artificial Sequence
  Description of Artificial Sequence: Synthetic oligonucleotide
gacaaaugaggguuuggca

SEQ ID NO: 77431 - RNA, 19 nt, Artificial Sequence
  Description of Artificial Sequence: Synthetic oligonucleotide
augcagcucgucaucuuaa

SEQ ID NO: 77432 - RNA, 19 nt, Artificial Sequence
  Description of Artificial Sequence: Synthetic oligonucleotide
agaguuacuaucuucuugc

SEQ ID NO: 77433 - RNA, 19 nt, Artificial Sequence
  Description of Artificial Sequence: Synthetic oligonucleotide
cccugguguuucgccguuc

SEQ ID NO: 77434 - RNA, 19 nt, Artificial Sequence
  Description of Artificial Sequence: Synthetic oligonucleotide
ccagugcccccugcugcag

SEQ ID NO: 77435 - RNA, 19 nt, Artificial Sequence
  Description of Artificial Sequence: Synthetic oligonucleotide
gaccauaaaggaugggacu

SEQ ID NO: 77436 - RNA, 19 nt, Artificial Sequence
  Description of Artificial Sequence: Synthetic oligonucleotide
uuuguugagggcuauuucc

SEQ ID NO: 77437 - RNA, 19 nt, Artificial Sequence
  Description of Artificial Sequence: Synthetic oligonucleotide
caucaauuuuuccugacca

SEQ ID NO: 77438 - RNA, 19 nt, Artificial Sequence
  Description of Artificial Sequence: Synthetic oligonucleotide
aagaaggagucgccacucc

SEQ ID NO: 77439 - RNA, 19 nt, Artificial Sequence
  Description of Artificial Sequence: Synthetic oligonucleotide
cuuacccaggagacacaaa

SEQ ID NO: 77440 - RNA, 19 nt, Artificial Sequence
  Description of Artificial Sequence: Synthetic oligonucleotide
acacagcuccugcaacaau

SEQ ID NO: 77441 - RNA, 19 nt, Artificial Sequence
  Description of Artificial Sequence: Synthetic oligonucleotide
uuccaucggaaugggacag

SEQ ID NO: 77442 - RNA, 19 nt, Artificial Sequence
  Description of Artificial Sequence: Synthetic oligonucleotide
gaccuacuugacaugcaga

SEQ ID NO: 77443 - RNA, 19 nt, Artificial Sequence
  Description of Artificial Sequence: Synthetic oligonucleotide
augcaugcucugcuacacc

SEQ ID NO: 77444 - RNA, 19 nt, Artificial Sequence
  Description of Artificial Sequence: Synthetic oligonucleotide
cagccccacuguggggugc

SEQ ID NO: 77445 - RNA, 19 nt, Artificial Sequence
  Description of Artificial Sequence: Synthetic oligonucleotide
ccugauggguccgacaccu

SEQ ID NO: 77446 - RNA, 19 nt, Artificial Sequence
  Description of Artificial Sequence: Synthetic oligonucleotide
uccaucucgccaggaagau

SEQ ID NO: 77447 - RNA, 19 nt, Artificial Sequence
  Description of Artificial Sequence: Synthetic oligonucleotide
ugcaaguggaauaagcaca

SEQ ID NO: 77448 - RNA, 19 nt, Artificial Sequence
  Description of Artificial Sequence: Synthetic oligonucleotide
acucuaacuuacaggauua

SEQ ID NO: 77449 - RNA, 19 nt, Artificial Sequence
  Description of Artificial Sequence: Synthetic oligonucleotide
aucaauuacccacaugaua

SEQ ID NO: 77450 - RNA, 19 nt, Artificial Sequence
  Description of Artificial Sequence: Synthetic oligonucleotide
augaagccauccgcaguga

SEQ ID NO: 77451 - RNA, 19 nt, Artificial Sequence
  Description of Artificial Sequence: Synthetic oligonucleotide
aaagacaguauauauaaug

SEQ ID NO: 77452 - RNA, 19 nt, Artificial Sequence
  Description of Artificial Sequence: Synthetic oligonucleotide
gcaguuuccaucuggagca

SEQ ID NO: 77453 - RNA, 19 nt, Artificial Sequence
  Description of Artificial Sequence: Synthetic oligonucleotide
aaugugaccccuuugauau

SEQ ID NO: 77454 - RNA, 19 nt, Artificial Sequence
  Description of Artificial Sequence: Synthetic oligonucleotide
uuccagcaagugcagaaug

SEQ ID NO: 77455 - RNA, 19 nt, Artificial Sequence
  Description of Artificial Sequence: Synthetic oligonucleotide
ggagaugcagacaucaagg

SEQ ID NO: 77456 - RNA, 19 nt, Artificial Sequence
  Description of Artificial Sequence: Synthetic oligonucleotide
guuucuuucuggcaguggg

SEQ ID NO: 77457 - RNA, 19 nt, Artificial Sequence
  Description of Artificial Sequence: Synthetic oligonucleotide
gcccaugaagaugguuggc

SEQ ID NO: 77458 - RNA, 19 nt, Artificial Sequence
  Description of Artificial Sequence: Synthetic oligonucleotide
cccuuugaugggccaggug

SEQ ID NO: 77459 - RNA, 19 nt, Artificial Sequence
  Description of Artificial Sequence: Synthetic oligonucleotide
gguaucuuaggccaugccu

SEQ ID NO: 77460 - RNA, 19 nt, Artificial Sequence
  Description of Artificial Sequence: Synthetic oligonucleotide
uuuuuaccaaauucuggaa

SEQ ID NO: 77461 - RNA, 19 nt, Artificial Sequence
  Description of Artificial Sequence: Synthetic oligonucleotide
aauccuggaguuguccauu

SEQ ID NO: 77462 - RNA, 19 nt, Artificial Sequence
  Description of Artificial Sequence: Synthetic oligonucleotide
uuugacaagaaugaacacu

SEQ ID NO: 77463 - RNA, 19 nt, Artificial Sequence
  Description of Artificial Sequence: Synthetic oligonucleotide
uggucagcuucagacacug

SEQ ID NO: 77464 - RNA, 19 nt, Artificial Sequence
  Description of Artificial Sequence: Synthetic oligonucleotide
ggauauaaucuguuccugg

SEQ ID NO: 77465 - RNA, 19 nt, Artificial Sequence
  Description of Artificial Sequence: Synthetic oligonucleotide
guugcaacucaugagauug

SEQ ID NO: 77466 - RNA, 19 nt, Artificial Sequence
  Description of Artificial Sequence: Synthetic oligonucleotide
gggcauucuuugggccugc

SEQ ID NO: 77467 - RNA, 19 nt, Artificial Sequence
  Description of Artificial Sequence: Synthetic oligonucleotide
cagcacucugggaaucaga

SEQ ID NO: 77468 - RNA, 19 nt, Artificial Sequence
  Description of Artificial Sequence: Synthetic oligonucleotide
agcuccauaauguacccca

SEQ ID NO: 77469 - RNA, 19 nt, Artificial Sequence
  Description of Artificial Sequence: Synthetic oligonucleotide
acuuacugguaucacgacc

SEQ ID NO: 77470 - RNA, 19 nt, Artificial Sequence
  Description of Artificial Sequence: Synthetic oligonucleotide
ccuagaaccuuccagcuca

SEQ ID NO: 77471 - RNA, 19 nt, Artificial Sequence
  Description of Artificial Sequence: Synthetic oligonucleotide
agugccgaugauauccaaa

SEQ ID NO: 77472 - RNA, 19 nt, Artificial Sequence
  Description of Artificial Sequence: Synthetic oligonucleotide
aggauccagcauuuguaug

SEQ ID NO: 77473 - RNA, 19 nt, Artificial Sequence
  Description of Artificial Sequence: Synthetic oligonucleotide
ggagaaaaauguucaucug

SEQ ID NO: 77474 - RNA, 19 nt, Artificial Sequence
  Description of Artificial Sequence: Synthetic oligonucleotide
gacauaccuuaauguuagc

SEQ ID NO: 77475 - RNA, 19 nt, Artificial Sequence
  Description of Artificial Sequence: Synthetic oligonucleotide
cacagaggacuuauucaac

SEQ ID NO: 77476 - RNA, 19 nt, Artificial Sequence
  Description of Artificial Sequence: Synthetic oligonucleotide
ccuguccuuucagggaguu

SEQ ID NO: 77477 - RNA, 19 nt, Artificial Sequence
  Description of Artificial Sequence: Synthetic oligonucleotide
uuauuggaggaucaaagaa

SEQ ID NO: 77478 - RNA, 19 nt, Artificial Sequence
  Description of Artificial Sequence: Synthetic oligonucleotide
acugaaagcacuagagcag

SEQ ID NO: 77479 - RNA, 19 nt, Artificial Sequence
  Description of Artificial Sequence: Synthetic oligonucleotide
gccuuggggacugcuagga

SEQ ID NO: 77480 - RNA, 19 nt, Artificial Sequence
  Description of Artificial Sequence: Synthetic oligonucleotide
augaagcccuaaagaaugc

SEQ ID NO: 77481 - RNA, 19 nt, Artificial Sequence
  Description of Artificial Sequence: Synthetic oligonucleotide
caaccuagucagguuagcu

SEQ ID NO: 77482 - RNA, 19 nt, Artificial Sequence
  Description of Artificial Sequence: Synthetic oligonucleotide
ugaaccgacacucaaaacg

SEQ ID NO: 77483 - RNA, 19 nt, Artificial Sequence
  Description of Artificial Sequence: Synthetic oligonucleotide
gcuacugagucacaauaaa

SEQ ID NO: 77484 - RNA, 19 nt, Artificial Sequence
  Description of Artificial Sequence: Synthetic oligonucleotide
agauuguuuuaaagaguaa

SEQ ID NO: 77485 - RNA, 19 nt, Artificial Sequence
  Description of Artificial Sequence: Synthetic oligonucleotide
uuuaaagaguaaaaaaaaa

SEQ ID NO: 77486 - RNA, 25 nt, Artificial Sequence
  Description of Artificial Sequence: Synthetic oligonucleotide
gacaaaugaggguuuggcaugcagc

SEQ ID NO: 77487 - RNA, 25 nt, Artificial Sequence
  Description of Artificial Sequence: Synthetic oligonucleotide
cucgucaucuuaagaguuacuaucu

SEQ ID NO: 77488 - RNA, 25 nt, Artificial Sequence
  Description of Artificial Sequence: Synthetic oligonucleotide
uucuugcccugguguuucgccguuc

SEQ ID NO: 77489 - RNA, 25 nt, Artificial Sequence
  Description of Artificial Sequence: Synthetic oligonucleotide
ccagugcccccugcugcagaccaua

SEQ ID NO: 77490 - RNA, 25 nt, Artificial Sequence
  Description of Artificial Sequence: Synthetic oligonucleotide
aaaggaugggacuuuguugagggcu

SEQ ID NO: 77491 - RNA, 25 nt, Artificial Sequence
  Description of Artificial Sequence: Synthetic oligonucleotide
uauuuccaucaauuuuuccugacca

SEQ ID NO: 77492 - RNA, 25 nt, Artificial Sequence
  Description of Artificial Sequence: Synthetic oligonucleotide
aagaaggagucgccacuccuuaccc

SEQ ID NO: 77493 - RNA, 25 nt, Artificial Sequence
  Description of Artificial Sequence: Synthetic oligonucleotide
caggagacacaaacacagcuccugc

SEQ ID NO: 77494 - RNA, 25 nt, Artificial Sequence
  Description of Artificial Sequence: Synthetic oligonucleotide
caacaauuccaucggaaugggacag

SEQ ID NO: 77495 - RNA, 25 nt, Artificial Sequence
  Description of Artificial Sequence: Synthetic oligonucleotide
gaccuacuugacaugcagaugcaug

SEQ ID NO: 77496 - RNA, 25 nt, Artificial Sequence
  Description of Artificial Sequence: Synthetic oligonucleotide
gcucugcuacaccagccccacugug

SEQ ID NO: 77497 - RNA, 25 nt, Artificial Sequence
  Description of Artificial Sequence: Synthetic oligonucleotide
ggggugccugauggguccgacaccu

SEQ ID NO: 77498 - RNA, 25 nt, Artificial Sequence
  Description of Artificial Sequence: Synthetic oligonucleotide
uccaucucgccaggaagaugcaagu

SEQ ID NO: 77499 - RNA, 25 nt, Artificial Sequence
  Description of Artificial Sequence: Synthetic oligonucleotide
uggaauaagcacacucuaacuuaca

SEQ ID NO: 77500 - RNA, 25 nt, Artificial Sequence
  Description of Artificial Sequence: Synthetic oligonucleotide
aggauuaucaauuacccacaugaua

SEQ ID NO: 77501 - RNA, 25 nt, Artificial Sequence
  Description of Artificial Sequence: Synthetic oligonucleotide
augaagccauccgcagugaaagaca

SEQ ID NO: 77502 - RNA, 25 nt, Artificial Sequence
  Description of Artificial Sequence: Synthetic oligonucleotide
aguauauauaaugcaguuuccaucu

SEQ ID NO: 77503 - RNA, 25 nt, Artificial Sequence
  Description of Artificial Sequence: Synthetic oligonucleotide
uggagcaaugugaccccuuugauau

SEQ ID NO: 77504 - RNA, 25 nt, Artificial Sequence
  Description of Artificial Sequence: Synthetic oligonucleotide
uuccagcaagugcagaauggagaug

SEQ ID NO: 77505 - RNA, 25 nt, Artificial Sequence
  Description of Artificial Sequence: Synthetic oligonucleotide
gcagacaucaagguuucuuucuggc

SEQ ID NO: 77506 - RNA, 25 nt, Artificial Sequence
  Description of Artificial Sequence: Synthetic oligonucleotide
cagugggcccaugaagaugguuggc

SEQ ID NO: 77507 - RNA, 25 nt, Artificial Sequence
  Description of Artificial Sequence: Synthetic oligonucleotide
cccuuugaugggccaggugguaucu

SEQ ID NO: 77508 - RNA, 25 nt, Artificial Sequence
  Description of Artificial Sequence: Synthetic oligonucleotide
uuaggccaugccuuuuuaccaaauu

SEQ ID NO: 77509 - RNA, 25 nt, Artificial Sequence
  Description of Artificial Sequence: Synthetic oligonucleotide
ucuggaaauccuggaguuguccauu

SEQ ID NO: 77510 - RNA, 25 nt, Artificial Sequence
  Description of Artificial Sequence: Synthetic oligonucleotide
uuugacaagaaugaacacuggucag

SEQ ID NO: 77511 - RNA, 25 nt, Artificial Sequence
  Description of Artificial Sequence: Synthetic oligonucleotide
gcuucagacacuggauauaaucugu

SEQ ID NO: 77512 - RNA, 25 nt, Artificial Sequence
  Description of Artificial Sequence: Synthetic oligonucleotide
uuccugguugcaacucaugagauug

SEQ ID NO: 77513 - RNA, 25 nt, Artificial Sequence
  Description of Artificial Sequence: Synthetic oligonucleotide
gggcauucuuugggccugcagcacu

SEQ ID NO: 77514 - RNA, 25 nt, Artificial Sequence
  Description of Artificial Sequence: Synthetic oligonucleotide
ucugggaaucagagcuccauaaugu

SEQ ID NO: 77515 - RNA, 25 nt, Artificial Sequence
  Description of Artificial Sequence: Synthetic oligonucleotide
uaccccacuuacugguaucacgacc

SEQ ID NO: 77516 - RNA, 25 nt, Artificial Sequence
  Description of Artificial Sequence: Synthetic oligonucleotide
ccuagaaccuuccagcucagugccg

SEQ ID NO: 77517 - RNA, 25 nt, Artificial Sequence
  Description of Artificial Sequence: Synthetic oligonucleotide
gaugauauccaaaggauccagcauu

SEQ ID NO: 77518 - RNA, 25 nt, Artificial Sequence
  Description of Artificial Sequence: Synthetic oligonucleotide
uuguauggagaaaaauguucaucug

SEQ ID NO: 77519 - RNA, 25 nt, Artificial Sequence
  Description of Artificial Sequence: Synthetic oligonucleotide
gacauaccuuaauguuagcacagag

SEQ ID NO: 77520 - RNA, 25 nt, Artificial Sequence
  Description of Artificial Sequence: Synthetic oligonucleotide
ggacuuauucaaccuguccuuucag

SEQ ID NO: 77521 - RNA, 25 nt, Artificial Sequence
  Description of Artificial Sequence: Synthetic oligonucleotide
gggaguuuauuggaggaucaaagaa

SEQ ID NO: 77522 - RNA, 25 nt, Artificial Sequence
  Description of Artificial Sequence: Synthetic oligonucleotide
acugaaagcacuagagcagccuugg

SEQ ID NO: 77523 - RNA, 25 nt, Artificial Sequence
  Description of Artificial Sequence: Synthetic oligonucleotide
gggacugcuaggaugaagcccuaaa

SEQ ID NO: 77524 - RNA, 25 nt, Artificial Sequence
  Description of Artificial Sequence: Synthetic oligonucleotide
agaaugcaaccuagucagguuagcu

SEQ ID NO: 77525 - RNA, 25 nt, Artificial Sequence
  Description of Artificial Sequence: Synthetic oligonucleotide
ugaaccgacacucaaaacgcuacug

SEQ ID NO: 77526 - RNA, 25 nt, Artificial Sequence
  Description of Artificial Sequence: Synthetic oligonucleotide
gagucacaauaaagauuguuuuaaa

SEQ ID NO: 77527 - RNA, 25 nt, Artificial Sequence
  Description of Artificial Sequence: Synthetic oligonucleotide
gauuguuuuaaagaguaaaaaaaaa

SEQ ID NO: 77528 - DNA, 21 bp, Artificial Sequence
  Description of Artificial Sequence: Synthetic oligonucleotide
  Description of Combined DNA/RNA Molecule: Synthetic oligonucleotide
cuacacaaaucagcgauuutt

SEQ ID NO: 77529 - DNA, 21 bp, Artificial Sequence
  Description of Artificial Sequence: Synthetic oligonucleotide
  Description of Combined DNA/RNA Molecule: Synthetic oligonucleotide
aaaucgcugauuuguguagtt

SEQ ID NO: 77530 - DNA, 25 bp, Artificial Sequence
  Description of Artificial Sequence: Synthetic oligonucleotide
  Description of Combined DNA/RNA Molecule: Synthetic oligonucleotide
cuacacaaaucagcgauuuccaugt

SEQ ID NO: 77531 - RNA, 27 nt, Artificial Sequence
  Description of Artificial Sequence: Synthetic oligonucleotide
acauggaaaucgcugauuuguguaguc

SEQ ID NO: 77532 - RNA, 13 nt, Artificial Sequence
  Description of Artificial Sequence: Synthetic oligonucleotide
cuacacaaaucag

SEQ ID NO: 77533 - DNA, 11 bp, Artificial Sequence
  Description of Artificial Sequence: Synthetic oligonucleotide
  Description of Combined DNA/RNA Molecule: Synthetic oligonucleotide
gauuuccaugt

SEQ ID NO: 77534 - DNA, 21 bp, Artificial Sequence
  Description of Artificial Sequence: Synthetic oligonucleotide
  Description of Combined DNA/RNA Molecule: Synthetic oligonucleotide
ggaucuuauuucuucggagtt

SEQ ID NO: 77535 - DNA, 21 bp, Artificial Sequence
  Description of Artificial Sequence: Synthetic oligonucleotide
  Description of Combined DNA/RNA Molecule: Synthetic oligonucleotide
cuccgaagaaauaagaucctt

SEQ ID NO: 77536 - RNA, 11 nt, Artificial Sequence
  Description of Artificial Sequence: Synthetic oligonucleotide
ggaucuuauuu

SEQ ID NO: 77537 - DNA, 10 bp, Artificial Sequence
  Description of Artificial Sequence: Synthetic oligonucleotide
  Description of Combined DNA/RNA Molecule: Synthetic oligonucleotide
cuucggagtt

SEQ ID NO: 77538 - RNA, 27 nt, Artificial Sequence
  Description of Artificial Sequence: Synthetic oligonucleotide
cauugucuccgaagaaauaagauccuu

SEQ ID NO: 77539 - RNA, 8 nt, Artificial Sequence
  Description of Artificial Sequence: Synthetic oligonucleotide
  modified_base (2): LNA-G
ggaucuua

SEQ ID NO: 77540 - DNA, 17 bp, Artificial Sequence
  Description of Artificial Sequence: Synthetic oligonucleotide
  Description of Combined DNA/RNA Molecule: Synthetic oligonucleotide
uuucuucggagacaatg

SEQ ID NO: 77541 - DNA, 16 bp, Artificial Sequence
  Description of Artificial Sequence: Synthetic oligonucleotide
  Description of Combined DNA/RNA Molecule: Synthetic oligonucleotide
uucuucggagacaatg

SEQ ID NO: 77542 - DNA, 15 bp, Artificial Sequence
  Description of Artificial Sequence: Synthetic oligonucleotide
  Description of Combined DNA/RNA Molecule: Synthetic oligonucleotide
ucuucggagacaatg

SEQ ID NO: 77543 - DNA, 14 bp, Artificial Sequence
  Description of Artificial Sequence: Synthetic oligonucleotide
  Description of Combined DNA/RNA Molecule: Synthetic oligonucleotide
cuucggagacaatg

SEQ ID NO: 77544 - DNA, 13 bp, Artificial Sequence
  Description of Artificial Sequence: Synthetic oligonucleotide
  Description of Combined DNA/RNA Molecule: Synthetic oligonucleotide
uucggagacaatg

SEQ ID NO: 77545 - DNA, 12 bp, Artificial Sequence
  Description of Artificial Sequence: Synthetic oligonucleotide
  Description of Combined DNA/RNA Molecule: Synthetic oligonucleotide
ucggagacaatg

SEQ ID NO: 77546 - DNA, 11 bp, Artificial Sequence
  Description of Artificial Sequence: Synthetic oligonucleotide
  Description of Combined DNA/RNA Molecule: Synthetic oligonucleotide
cggagacaatg

SEQ ID NO: 77547 - RNA, 9 nt, Artificial Sequence
  Description of Artificial Sequence: Synthetic oligonucleotide
  modified_base (2): LNA-G
ggaucuuau

SEQ ID NO: 77548 - RNA, 10 nt, Artificial Sequence
  Description of Artificial Sequence: Synthetic oligonucleotide
  modified_base (2): LNA-G
ggaucuuauu

SEQ ID NO: 77549 - RNA, 11 nt, Artificial Sequence
  Description of Artificial Sequence: Synthetic oligonucleotide
  modified_base (2): LNA-G
ggaucuuauuu

SEQ ID NO: 77550 - RNA, 12 nt, Artificial Sequence
  Description of Artificial Sequence: Synthetic oligonucleotide
  modified_base (2): LNA-G
ggaucuuauuuc

SEQ ID NO: 77551 - RNA, 8 nt, Artificial Sequence
  Description of Artificial Sequence: Synthetic oligonucleotide
  modified_base (3): LNA-A
cuacacaa

SEQ ID NO: 77552 - DNA, 13 bp, Artificial Sequence
  Description of Artificial Sequence: Synthetic oligonucleotide
  Description of Combined DNA/RNA Molecule: Synthetic oligonucleotide
  modified_base (8): LNA-A
aucagcgauuutt

SEQ ID NO: 77553 - DNA, 12 bp, Artificial Sequence
  Description of Artificial Sequence: Synthetic oligonucleotide
  Description of Combined DNA/RNA Molecule: Synthetic oligonucleotide
  modified_base (7): LNA-A
ucagcgauuutt

SEQ ID NO: 77554 - DNA, 11 bp, Artificial Sequence
  Description of Artificial Sequence: Synthetic oligonucleotide
  Description of Combined DNA/RNA Molecule: Synthetic oligonucleotide
  modified_base (6): LNA-A
cagcgauuutt

SEQ ID NO: 77555 - DNA, 10 bp, Artificial Sequence
  Description of Artificial Sequence: Synthetic oligonucleotide
  Description of Combined DNA/RNA Molecule: Synthetic oligonucleotide
  modified_base (5): LNA-A
agcgauuutt

SEQ ID NO: 77556 - DNA, 9 bp, Artificial Sequence
  Description of Artificial Sequence: Synthetic oligonucleotide
  Description of Combined DNA/RNA Molecule: Synthetic oligonucleotide
  modified_base (4): LNA-A
gcgauuutt

SEQ ID NO: 77557 - DNA, 8 bp, Artificial Sequence
  Description of Artificial Sequence: Synthetic oligonucleotide
  Description of Combined DNA/RNA Molecule: Synthetic oligonucleotide
  modified_base (3): LNA-A
cgauuutt

SEQ ID NO: 77558 - DNA, 7 bp, Artificial Sequence
  Description of Artificial Sequence: Synthetic oligonucleotide
  Description of Combined DNA/RNA Molecule: Synthetic oligonucleotide
  modified_base (2): LNA-A
gauuutt

SEQ ID NO: 77559 - RNA, 9 nt, Artificial Sequence
  Description of Artificial Sequence: Synthetic oligonucleotide
  modified_base (3): LNA-A
cuacacaaa

SEQ ID NO: 77560 - RNA, 10 nt, Artificial Sequence
  Description of Artificial Sequence: Synthetic oligonucleotide
  modified_base (3): LNA-A
cuacacaaau

SEQ ID NO: 77561 - RNA, 11 nt, Artificial Sequence
  Description of Artificial Sequence: Synthetic oligonucleotide
  modified_base (3): LNA-A
cuacacaaauc

SEQ ID NO: 77562 - RNA, 12 nt, Artificial Sequence
  Description of Artificial Sequence: Synthetic oligonucleotide
  modified_base (3): LNA-A
cuacacaaauca

SEQ ID NO: 77563 - RNA, 13 nt, Artificial Sequence
  Description of Artificial Sequence: Synthetic oligonucleotide
  modified_base (3): LNA-A
cuacacaaaucag

SEQ ID NO: 77564 - RNA, 14 nt, Artificial Sequence
  Description of Artificial Sequence: Synthetic oligonucleotide
  modified_base (3): LNA-A
cuacacaaaucagc

SEQ ID NO: 77565 - RNA, 13 nt, Artificial Sequence
  Description of Artificial Sequence: Synthetic oligonucleotide
  modified_base (2): LNA-G
ggaucuuauuucu

SEQ ID NO: 77566 - RNA, 14 nt, Artificial Sequence
  Description of Artificial Sequence: Synthetic oligonucleotide
  modified_base (2): LNA-G
ggaucuuauuucuu

SEQ ID NO: 77567 - RNA, 8 nt, Artificial Sequence
  Description of Artificial Sequence: Synthetic oligonucleotide
  modified_base (2): LNA-G
  modified_base (8): LNA-A
ggaucuua

SEQ ID NO: 77568 - RNA, 9 nt, Artificial Sequence
  Description of Artificial Sequence: Synthetic oligonucleotide
  modified_base (2): LNA-G
  modified_base (9): LNA-U
ggaucuuau

SEQ ID NO: 77569 - RNA, 10 nt, Artificial Sequence
  Description of Artificial Sequence: Synthetic oligonucleotide
  modified_base (2): LNA-G
  modified_base (10): LNA-U
ggaucuuauu

SEQ ID NO: 77570 - RNA, 11 nt, Artificial Sequence
  Description of Artificial Sequence: Synthetic oligonucleotide
  modified_base (2): LNA-G
  modified_base (11): LNA-U
ggaucuuauuu

SEQ ID NO: 77571 - RNA, 12 nt, Artificial Sequence
  Description of Artificial Sequence: Synthetic oligonucleotide
  modified_base (2): LNA-G
  modified_base (12): LNA-C
ggaucuuauuuc

SEQ ID NO: 77572 - RNA, 13 nt, Artificial Sequence
  Description of Artificial Sequence: Synthetic oligonucleotide
  modified_base (2): LNA-G
  modified_base (13): LNA-U
ggaucuuauuucu

SEQ ID NO: 77573 - RNA, 14 nt, Artificial Sequence
  Description of Artificial Sequence: Synthetic oligonucleotide
  modified_base (2): LNA-G
  modified_base (14): LNA-U
ggaucuuauuucuu

SEQ ID NO: 77574 - DNA, 13 bp, Artificial Sequence
  Description of Artificial Sequence: Synthetic oligonucleotide
  Description of Combined DNA/RNA Molecule: Synthetic oligonucleotide
  modified_base (8): LNA-G
uuucuucggagtt

SEQ ID NO: 77575 - DNA, 12 bp, Artificial Sequence
  Description of Artificial Sequence: Synthetic oligonucleotide
  Description of Combined DNA/RNA Molecule: Synthetic oligonucleotide
  modified_base (7): LNA-G
uucuucggagtt

SEQ ID NO: 77576 - DNA, 11 bp, Artificial Sequence
  Description of Artificial Sequence: Synthetic oligonucleotide
  Description of Combined DNA/RNA Molecule: Synthetic oligonucleotide
  modified_base (6): LNA-G
ucuucggagtt

SEQ ID NO: 77577 - DNA, 10 bp, Artificial Sequence
  Description of Artificial Sequence: Synthetic oligonucleotide
  Description of Combined DNA/RNA Molecule: Synthetic oligonucleotide
  modified_base (5): LNA-G
cuucggagtt

SEQ ID NO: 77578 - DNA, 9 bp, Artificial Sequence
  Description of Artificial Sequence: Synthetic oligonucleotide
  Description of Combined DNA/RNA Molecule: Synthetic oligonucleotide
  modified_base (4): LNA-G
uucggagtt

SEQ ID NO: 77579 - DNA, 8 bp, Artificial Sequence
  Description of Artificial Sequence: Synthetic oligonucleotide
  Description of Combined DNA/RNA Molecule: Synthetic oligonucleotide
  modified_base (3): LNA-G
ucggagtt

SEQ ID NO: 77580 - DNA, 7 bp, Artificial Sequence
  Description of Artificial Sequence: Synthetic oligonucleotide
  Description of Combined DNA/RNA Molecule: Synthetic oligonucleotide
  modified_base (2): LNA-G
cggagtt

SEQ ID NO: 77581 - DNA, 13 bp, Artificial Sequence
  Description of Artificial Sequence: Synthetic oligonucleotide
  Description of Combined DNA/RNA Molecule: Synthetic oligonucleotide
  modified_base (1): LNA-U
  modified_base (8): LNA-G
uuucuucggagtt

SEQ ID NO: 77582 - DNA, 12 bp, Artificial Sequence
  Description of Artificial Sequence: Synthetic oligonucleotide
  Description of Combined DNA/RNA Molecule: Synthetic oligonucleotide
  modified_base (1): LNA-U
  modified_base (7): LNA-G
uucuucggagtt

SEQ ID NO: 77583 - DNA, 11 bp, Artificial Sequence
  Description of Artificial Sequence: Synthetic oligonucleotide
  Description of Combined DNA/RNA Molecule: Synthetic oligonucleotide
  modified_base (1): LNA-U
  modified_base (6): LNA-G
ucuucggagtt

SEQ ID NO: 77584 - DNA, 10 bp, Artificial Sequence
  Description of Artificial Sequence: Synthetic oligonucleotide
  Description of Combined DNA/RNA Molecule: Synthetic oligonucleotide
  modified_base (1): LNA-C
  modified_base (5): LNA-G
cuucggagtt

SEQ ID NO: 77585 - DNA, 9 bp, Artificial Sequence
  Description of Artificial Sequence: Synthetic oligonucleotide
  Description of Combined DNA/RNA Molecule: Synthetic oligonucleotide
  modified_base (1): LNA-U
  modified_base (4): LNA-G
uucggagtt

SEQ ID NO: 77586 - DNA, 8 bp, Artificial Sequence
  Description of Artificial Sequence: Synthetic oligonucleotide
  Description of Combined DNA/RNA Molecule: Synthetic oligonucleotide
  modified_base (1): LNA-U
  modified_base (3): LNA-G
ucggagtt

SEQ ID NO: 77587 - DNA, 7 bp, Artificial Sequence
  Description of Artificial Sequence: Synthetic oligonucleotide
  Description of Combined DNA/RNA Molecule: Synthetic oligonucleotide
  modified_base (1): LNA-C
  modified_base (2): LNA-G
cggagtt

SEQ ID NO: 77588 - DNA, 21 bp, Artificial Sequence
  Description of Artificial Sequence: Synthetic oligonucleotide
  Description of Combined DNA/RNA Molecule: Synthetic oligonucleotide
  modified_base (2): LNA-G
  modified_base (16): LNA-G
ggaucuuauuucuucggagtt

SEQ ID NO: 77589 - DNA, 25 bp, Artificial Sequence
  Description of Artificial Sequence: Synthetic oligonucleotide
  Description of Combined DNA/RNA Molecule: Synthetic oligonucleotide
ggaucuuauuucuucggagacaatg

SEQ ID NO: 77590 - RNA, 25 nt, Artificial Sequence
  Description of Artificial Sequence: Synthetic oligonucleotide
uuaagcagaguucaaaagcccuuca

SEQ ID NO: 77591 - RNA, 25 nt, Artificial Sequence
  Description of Artificial Sequence: Synthetic oligonucleotide
uaagcagaguucaaaagcccuucag

SEQ ID NO: 77592 - RNA, 25 nt, Artificial Sequence
  Description of Artificial Sequence: Synthetic oligonucleotide
agcagaguucaaaagcccuucagcg

SEQ ID NO: 77593 - RNA, 25 nt, Artificial Sequence
  Description of Artificial Sequence: Synthetic oligonucleotide
cucagggucugagugaagccgcucg

SEQ ID NO: 77594 - RNA, 25 nt, Artificial Sequence
  Description of Artificial Sequence: Synthetic oligonucleotide
caagcaacuacaucacgccagucaa

SEQ ID NO: 77595 - RNA, 25 nt, Artificial Sequence
  Description of Artificial Sequence: Synthetic oligonucleotide
aucaauggcagcuucuuggugcgug

SEQ ID NO: 77596 - RNA, 25 nt, Artificial Sequence
  Description of Artificial Sequence: Synthetic oligonucleotide
uuccagcccacauuggauucaucag

SEQ ID NO: 77597 - RNA, 25 nt, Artificial Sequence
  Description of Artificial Sequence: Synthetic oligonucleotide
cagcugagaauguggaauaccuaag

SEQ ID NO: 77598 - RNA, 25 nt, Artificial Sequence
  Description of Artificial Sequence: Synthetic oligonucleotide
aacguaucuccuaauuugaggcuca

SEQ ID NO: 77599 - RNA, 25 nt, Artificial Sequence
  Description of Artificial Sequence: Synthetic oligonucleotide
ccuaaaauaauuucucuacaauugg

SEQ ID NO: 77600 - RNA, 25 nt, Artificial Sequence
  Description of Artificial Sequence: Synthetic oligonucleotide
uggaagauucagcuaguuaggagcc

SEQ ID NO: 77601 - RNA, 25 nt, Artificial Sequence
  Description of Artificial Sequence: Synthetic oligonucleotide
uuaaacucuccuagucaauauccac

SEQ ID NO: 77602 - RNA, 25 nt, Artificial Sequence
  Description of Artificial Sequence: Synthetic oligonucleotide
cagccuacaguuauguucagucaca

SEQ ID NO: 77603 - RNA, 25 nt, Artificial Sequence
  Description of Artificial Sequence: Synthetic oligonucleotide
guuauguucagucacacacacauac

SEQ ID NO: 77604 - RNA, 25 nt, Artificial Sequence
  Description of Artificial Sequence: Synthetic oligonucleotide
cacauacaaaauguuccuuuugcuu

SEQ ID NO: 77605 - RNA, 25 nt, Artificial Sequence
  Description of Artificial Sequence: Synthetic oligonucleotide
uccuuuugcuuuuaaaguaauuuuu

SEQ ID NO: 77606 - RNA, 25 nt, Artificial Sequence
  Description of Artificial Sequence: Synthetic oligonucleotide
ugaccugugaagcaacagucaaugg

SEQ ID NO: 77607 - RNA, 25 nt, Artificial Sequence
  Description of Artificial Sequence: Synthetic oligonucleotide
cuaucucacacaucgacaaaccaau

SEQ ID NO: 77608 - RNA, 25 nt, Artificial Sequence
  Description of Artificial Sequence: Synthetic oligonucleotide
uguccucaauuguacugcuaccacu

SEQ ID NO: 77609 - RNA, 25 nt, Artificial Sequence
  Description of Artificial Sequence: Synthetic oligonucleotide
aaaccguagcuggcaagcggucuua

SEQ ID NO: 77610 - RNA, 25 nt, Artificial Sequence
  Description of Artificial Sequence: Synthetic oligonucleotide
uagcuggcaagcggucuuaccggcu

SEQ ID NO: 77611 - RNA, 25 nt, Artificial Sequence
  Description of Artificial Sequence: Synthetic oligonucleotide
uuguaugguuaaaagauggguuacc

SEQ ID NO: 77612 - RNA, 25 nt, Artificial Sequence
  Description of Artificial Sequence: Synthetic oligonucleotide
ugguuaaaagauggguuaccugcga

SEQ ID NO: 77613 - RNA, 25 nt, Artificial Sequence
  Description of Artificial Sequence: Synthetic oligonucleotide
cagggaauuauacaaucuugcugag

SEQ ID NO: 77614 - RNA, 25 nt, Artificial Sequence
  Description of Artificial Sequence: Synthetic oligonucleotide
acaaucuugcugagcauaaaacagu

SEQ ID NO: 77615 - RNA, 25 nt, Artificial Sequence
  Description of Artificial Sequence: Synthetic oligonucleotide
ccaauaaugaagaguccuuuauccu

SEQ ID NO: 77616 - RNA, 25 nt, Artificial Sequence
  Description of Artificial Sequence: Synthetic oligonucleotide
acuuuggauguuccaacgcaaguug

SEQ ID NO: 77617 - RNA, 25 nt, Artificial Sequence
  Description of Artificial Sequence: Synthetic oligonucleotide
aaugcuuccacuaaacugaaaccau

SEQ ID NO: 77618 - RNA, 25 nt, Artificial Sequence
  Description of Artificial Sequence: Synthetic oligonucleotide
gagaaaguuugacuuuguuaaauau

SEQ ID NO: 77619 - RNA, 25 nt, Artificial Sequence
  Description of Artificial Sequence: Synthetic oligonucleotide
aaagaacuacuguauauuaaaaguu

SEQ ID NO: 77620 - RNA, 25 nt, Artificial Sequence
  Description of Artificial Sequence: Synthetic oligonucleotide
uuagaaauacggguuuugacuuaac

SEQ ID NO: 77621 - RNA, 25 nt, Artificial Sequence
  Description of Artificial Sequence: Synthetic oligonucleotide
aacauggguacagcaaacucagcac

SEQ ID NO: 77622 - RNA, 25 nt, Artificial Sequence
  Description of Artificial Sequence: Synthetic oligonucleotide
aaagacacagaagaugcugaccuca

SEQ ID NO: 77623 - RNA, 25 nt, Artificial Sequence
  Description of Artificial Sequence: Synthetic oligonucleotide
uaguagggagguuuauucagaucgc

SEQ ID NO: 77624 - RNA, 25 nt, Artificial Sequence
  Description of Artificial Sequence: Synthetic oligonucleotide
gccuucugcagcaggguucugggau

SEQ ID NO: 77625 - RNA, 25 nt, Artificial Sequence
  Description of Artificial Sequence: Synthetic oligonucleotide
ggucugguacauauuggaaauuaug

SEQ ID NO: 77626 - RNA, 25 nt, Artificial Sequence
  Description of Artificial Sequence: Synthetic oligonucleotide
cuaguccuuccgauggaagcacuag

SEQ ID NO: 77627 - RNA, 25 nt, Artificial Sequence
  Description of Artificial Sequence: Synthetic oligonucleotide
ccagugaauauuguuuuuaugugga

SEQ ID NO: 77628 - RNA, 25 nt, Artificial Sequence
  Description of Artificial Sequence: Synthetic oligonucleotide
augaauucaaguuggaauugguaga

SEQ ID NO: 77629 - RNA, 25 nt, Artificial Sequence
  Description of Artificial Sequence: Synthetic oligonucleotide
caggacacagauuuagacuuggaga

SEQ ID NO: 77630 - RNA, 25 nt, Artificial Sequence
  Description of Artificial Sequence: Synthetic oligonucleotide
cucaaagcacaguuacaguauucca

SEQ ID NO: 77631 - RNA, 25 nt, Artificial Sequence
  Description of Artificial Sequence: Synthetic oligonucleotide
accacugccaccacugaugaauuaa

SEQ ID NO: 77632 - RNA, 25 nt, Artificial Sequence
  Description of Artificial Sequence: Synthetic oligonucleotide
gaaacuacuagugccacaucaucac

SEQ ID NO: 77633 - RNA, 25 nt, Artificial Sequence
  Description of Artificial Sequence: Synthetic oligonucleotide
aagucggacagccucaccaaacaga

SEQ ID NO: 77634 - RNA, 25 nt, Artificial Sequence
  Description of Artificial Sequence: Synthetic oligonucleotide
gaaagcgaaaaauggaacaugaugg

SEQ ID NO: 77635 - RNA, 25 nt, Artificial Sequence
  Description of Artificial Sequence: Synthetic oligonucleotide
cccucugauuuagcauguagacugc

SEQ ID NO: 77636 - RNA, 25 nt, Artificial Sequence
  Description of Artificial Sequence: Synthetic oligonucleotide
ugagcuauuuaaggaucuauuuaug

SEQ ID NO: 77637 - RNA, 25 nt, Artificial Sequence
  Description of Artificial Sequence: Synthetic oligonucleotide
aaaaggugaaaaagcacuauuauca

SEQ ID NO: 77638 - RNA, 25 nt, Artificial Sequence
  Description of Artificial Sequence: Synthetic oligonucleotide
gaaaaagcacuauuaucaguucugc

SEQ ID NO: 77639 - RNA, 25 nt, Artificial Sequence
  Description of Artificial Sequence: Synthetic oligonucleotide
ggcugaaaagaaagauuaaaccuac

SEQ ID NO: 77640 - RNA, 25 nt, Artificial Sequence
  Description of Artificial Sequence: Synthetic oligonucleotide
uaaacccuuauaauaaaauccuucu

SEQ ID NO: 77641 - RNA, 25 nt, Artificial Sequence
  Description of Artificial Sequence: Synthetic oligonucleotide
cauacuauuagccaaugcuguagac

SEQ ID NO: 77642 - RNA, 25 nt, Artificial Sequence
  Description of Artificial Sequence: Synthetic oligonucleotide
gacagaagcauuuugauaggaauag

SEQ ID NO: 77643 - RNA, 25 nt, Artificial Sequence
  Description of Artificial Sequence: Synthetic oligonucleotide
agagcaaauaagauaauggcccuga

SEQ ID NO: 77644 - RNA, 25 nt, Artificial Sequence
  Description of Artificial Sequence: Synthetic oligonucleotide
ccaacauuuuucucuuccucaagca

SEQ ID NO: 77645 - RNA, 25 nt, Artificial Sequence
  Description of Artificial Sequence: Synthetic oligonucleotide
uuaaguaugagaaaaguucagccca

SEQ ID NO: 77646 - RNA, 25 nt, Artificial Sequence
  Description of Artificial Sequence: Synthetic oligonucleotide
caggaauaaagauggcugcugaacc

SEQ ID NO: 77647 - RNA, 25 nt, Artificial Sequence
  Description of Artificial Sequence: Synthetic oligonucleotide
aauuugaaugaccaaguucucuuca

SEQ ID NO: 77648 - RNA, 25 nt, Artificial Sequence
  Description of Artificial Sequence: Synthetic oligonucleotide
auguauaaagauagccagccuagag

SEQ ID NO: 77649 - RNA, 25 nt, Artificial Sequence
  Description of Artificial Sequence: Synthetic oligonucleotide
ggcuguaacuaucucugugaagugu

SEQ ID NO: 77650 - RNA, 25 nt, Artificial Sequence
  Description of Artificial Sequence: Synthetic oligonucleotide
ucugugaagugugagaaaauuucaa

SEQ ID NO: 77651 - RNA, 25 nt, Artificial Sequence
  Description of Artificial Sequence: Synthetic oligonucleotide
ccuuuaaggaaaugaauccuccuga

SEQ ID NO: 77652 - RNA, 25 nt, Artificial Sequence
  Description of Artificial Sequence: Synthetic oligonucleotide
aaggauacaaaaagugacaucauau

SEQ ID NO: 77653 - RNA, 25 nt, Artificial Sequence
  Description of Artificial Sequence: Synthetic oligonucleotide
agaugcaauuugaaucuucaucaua

SEQ ID NO: 77654 - RNA, 25 nt, Artificial Sequence
  Description of Artificial Sequence: Synthetic oligonucleotide
guucaaaacgaagacuagcuauuaa

SEQ ID NO: 77655 - RNA, 25 nt, Artificial Sequence
  Description of Artificial Sequence: Synthetic oligonucleotide
gugaaaccucaucucuacuaaaaau

SEQ ID NO: 77656 - RNA, 25 nt, Artificial Sequence
  Description of Artificial Sequence: Synthetic oligonucleotide
acgaaagagaagcucuaucucgccu

SEQ ID NO: 77657 - RNA, 25 nt, Artificial Sequence
  Description of Artificial Sequence: Synthetic oligonucleotide
cuccacaagcgccuucgguccaguu

SEQ ID NO: 77658 - RNA, 25 nt, Artificial Sequence
  Description of Artificial Sequence: Synthetic oligonucleotide
gagaagauuccaaagauguagccgc

SEQ ID NO: 77659 - RNA, 25 nt, Artificial Sequence
  Description of Artificial Sequence: Synthetic oligonucleotide
aaucuggauucaaugaggagacuug

SEQ ID NO: 77660 - RNA, 25 nt, Artificial Sequence
  Description of Artificial Sequence: Synthetic oligonucleotide
agaacagauuugagaguagugagga

SEQ ID NO: 77661 - RNA, 25 nt, Artificial Sequence
  Description of Artificial Sequence: Synthetic oligonucleotide
ccagagcugugcagaugaguacaaa

SEQ ID NO: 77662 - RNA, 25 nt, Artificial Sequence
  Description of Artificial Sequence: Synthetic oligonucleotide
ccucagauuguuguuguuaaugggc

SEQ ID NO: 77663 - RNA, 25 nt, Artificial Sequence
  Description of Artificial Sequence: Synthetic oligonucleotide
cuauuuuaauuauuuuuaauuuauu

SEQ ID NO: 77664 - RNA, 25 nt, Artificial Sequence
  Description of Artificial Sequence: Synthetic oligonucleotide
uuuaauuuauuaauauuuaaauaug

SEQ ID NO: 77665 - RNA, 25 nt, Artificial Sequence
  Description of Artificial Sequence: Synthetic oligonucleotide
augcaguuugaauauccuuuguuuc

SEQ ID NO: 77666 - RNA, 25 nt, Artificial Sequence
  Description of Artificial Sequence: Synthetic oligonucleotide
caugcugcuggcgucuaaguguuug

SEQ ID NO: 77667 - RNA, 25 nt, Artificial Sequence
  Description of Artificial Sequence: Synthetic oligonucleotide
agaugugcauuucaccugugacaaa

SEQ ID NO: 77668 - RNA, 25 nt, Artificial Sequence
  Description of Artificial Sequence: Synthetic oligonucleotide
ucaaaaccugugccaggcugaauua

SEQ ID NO: 77669 - RNA, 25 nt, Artificial Sequence
  Description of Artificial Sequence: Synthetic oligonucleotide
gaauguggguagucauucuuacaau

SEQ ID NO: 77670 - RNA, 25 nt, Artificial Sequence
  Description of Artificial Sequence: Synthetic oligonucleotide
auguggguagucauucuuacaauug

SEQ ID NO: 77671 - RNA, 25 nt, Artificial Sequence
  Description of Artificial Sequence: Synthetic oligonucleotide
ugaaaaugagcaucagagaguguac

SEQ ID NO: 77672 - RNA, 25 nt, Artificial Sequence
  Description of Artificial Sequence: Synthetic oligonucleotide
uugcuuuucauguagaacucagcag

SEQ ID NO: 77673 - RNA, 25 nt, Artificial Sequence
  Description of Artificial Sequence: Synthetic oligonucleotide
uguauuucuauauuuauuuucagua

SEQ ID NO: 77674 - RNA, 25 nt, Artificial Sequence
  Description of Artificial Sequence: Synthetic oligonucleotide
uuugauuaauguuucuuaaauggaa

SEQ ID NO: 77675 - RNA, 25 nt, Artificial Sequence
  Description of Artificial Sequence: Synthetic oligonucleotide
caacguguauagugccuaaaauugu

SEQ ID NO: 77676 - RNA, 25 nt, Artificial Sequence
  Description of Artificial Sequence: Synthetic oligonucleotide
cauauccuuggcuacuaacaucugg

SEQ ID NO: 77677 - RNA, 25 nt, Artificial Sequence
  Description of Artificial Sequence: Synthetic oligonucleotide
uacuaacaucuggagacugugagcu

SEQ ID NO: 77678 - RNA, 25 nt, Artificial Sequence
  Description of Artificial Sequence: Synthetic oligonucleotide
cauaaguugugugcuuuuuauuaau

SEQ ID NO: 77679 - RNA, 25 nt, Artificial Sequence
  Description of Artificial Sequence: Synthetic oligonucleotide
gcaucauuuuggcucuucuuacauu

SEQ ID NO: 77680 - RNA, 25 nt, Artificial Sequence
  Description of Artificial Sequence: Synthetic oligonucleotide
gcucuucuuacauuuguaaaaaugu

SEQ ID NO: 77681 - RNA, 25 nt, Artificial Sequence
  Description of Artificial Sequence: Synthetic oligonucleotide
agauuaggucaucuuaauucauauu

SEQ ID NO: 77682 - RNA, 25 nt, Artificial Sequence
  Description of Artificial Sequence: Synthetic oligonucleotide
auggaauugaaagaacuaaucauga

SEQ ID NO: 77683 - RNA, 25 nt, Artificial Sequence
  Description of Artificial Sequence: Synthetic oligonucleotide
cacacucauuccuucugcucuuggg

SEQ ID NO: 77684 - RNA, 25 nt, Artificial Sequence
  Description of Artificial Sequence: Synthetic oligonucleotide
uguagagguaaccaguagcuuugag

SEQ ID NO: 77685 - RNA, 25 nt, Artificial Sequence
  Description of Artificial Sequence: Synthetic oligonucleotide
caaccacaugccacguaauauuuca

SEQ ID NO: 77686 - RNA, 25 nt, Artificial Sequence
  Description of Artificial Sequence: Synthetic oligonucleotide
ucggaaacaaguuauucucuucacu

SEQ ID NO: 77687 - RNA, 25 nt, Artificial Sequence
  Description of Artificial Sequence: Synthetic oligonucleotide
acucccaauaacuaaugcuaagaaa

SEQ ID NO: 77688 - RNA, 25 nt, Artificial Sequence
  Description of Artificial Sequence: Synthetic oligonucleotide
aaugcuaagaaaugcugaaaaucaa

SEQ ID NO: 77689 - RNA, 25 nt, Artificial Sequence
  Description of Artificial Sequence: Synthetic oligonucleotide
gucuuucucuaaauaugauuacuuu

SEQ ID NO: 77690 - RNA, 25 nt, Artificial Sequence
  Description of Artificial Sequence: Synthetic oligonucleotide
ugaauuucaggcauuuuguucuaca

SEQ ID NO: 77691 - RNA, 25 nt, Artificial Sequence
  Description of Artificial Sequence: Synthetic oligonucleotide
cgauucccucucacccgggacucuc

SEQ ID NO: 77692 - RNA, 25 nt, Artificial Sequence
  Description of Artificial Sequence: Synthetic oligonucleotide
aggaaagugaaccuuuaaaguaaag

SEQ ID NO: 77693 - RNA, 25 nt, Artificial Sequence
  Description of Artificial Sequence: Synthetic oligonucleotide
gaggcugcaugcucuggaagccugg

SEQ ID NO: 77694 - RNA, 25 nt, Artificial Sequence
  Description of Artificial Sequence: Synthetic oligonucleotide
ucucugaacagaaaacaaaagagag

SEQ ID NO: 77695 - RNA, 25 nt, Artificial Sequence
  Description of Artificial Sequence: Synthetic oligonucleotide
aacuuggcuguaaucaguuaugccg

SEQ ID NO: 77696 - RNA, 25 nt, Artificial Sequence
  Description of Artificial Sequence: Synthetic oligonucleotide
agaagccaaaauuaaaagaagucca

SEQ ID NO: 77697 - RNA, 25 nt, Artificial Sequence
  Description of Artificial Sequence: Synthetic oligonucleotide
auuaaaagaaguccaggugagguua

SEQ ID NO: 77698 - RNA, 25 nt, Artificial Sequence
  Description of Artificial Sequence: Synthetic oligonucleotide
gaauccggauuaucgggaagaggac

SEQ ID NO: 77699 - RNA, 25 nt, Artificial Sequence
  Description of Artificial Sequence: Synthetic oligonucleotide
aaugugacaucaaagcaaguauugu

SEQ ID NO: 77700 - RNA, 25 nt, Artificial Sequence
  Description of Artificial Sequence: Synthetic oligonucleotide
caucaaagcaaguauuguagcacuc

SEQ ID NO: 77701 - RNA, 25 nt, Artificial Sequence
  Description of Artificial Sequence: Synthetic oligonucleotide
agagagagaaaacaaaaccacaaau

SEQ ID NO: 77702 - RNA, 25 nt, Artificial Sequence
  Description of Artificial Sequence: Synthetic oligonucleotide
ucgcuguaguauuuaagcccauaca

SEQ ID NO: 77703 - RNA, 25 nt, Artificial Sequence
  Description of Artificial Sequence: Synthetic oligonucleotide
cgcuguaguauuuaagcccauacag

SEQ ID NO: 77704 - RNA, 25 nt, Artificial Sequence
  Description of Artificial Sequence: Synthetic oligonucleotide
auuuaagcccauacagaaaccuucc

SEQ ID NO: 77705 - RNA, 25 nt, Artificial Sequence
  Description of Artificial Sequence: Synthetic oligonucleotide
auuaaaauaaacaugguauaccuac

SEQ ID NO: 77706 - RNA, 25 nt, Artificial Sequence
  Description of Artificial Sequence: Synthetic oligonucleotide
cuguucugaucggccaguuuucgga

SEQ ID NO: 77707 - RNA, 25 nt, Artificial Sequence
  Description of Artificial Sequence: Synthetic oligonucleotide
aaauaauuugaacuuuggaacaggg

SEQ ID NO: 77708 - RNA, 25 nt, Artificial Sequence
  Description of Artificial Sequence: Synthetic oligonucleotide
ugcgaccuuaauuuaacuuuccagu

SEQ ID NO: 77709 - RNA, 25 nt, Artificial Sequence
  Description of Artificial Sequence: Synthetic oligonucleotide
cugagaaagcuaaaguuugguuuug

SEQ ID NO: 77710 - RNA, 25 nt, Artificial Sequence
  Description of Artificial Sequence: Synthetic oligonucleotide
aguaaagaugcuacuucccacugua

SEQ ID NO: 77711 - RNA, 25 nt, Artificial Sequence
  Description of Artificial Sequence: Synthetic oligonucleotide
cugcuuaauugcugauaccauauga

SEQ ID NO: 77712 - RNA, 25 nt, Artificial Sequence
  Description of Artificial Sequence: Synthetic oligonucleotide
uaccauaugaaugaaacaugggcug

SEQ ID NO: 77713 - RNA, 25 nt, Artificial Sequence
  Description of Artificial Sequence: Synthetic oligonucleotide
aacuuucuuauccaacuuuuucaua

SEQ ID NO: 77714 - RNA, 25 nt, Artificial Sequence
  Description of Artificial Sequence: Synthetic oligonucleotide
ccuugcaugacaucaugaggccgga

SEQ ID NO: 77715 - RNA, 25 nt, Artificial Sequence
  Description of Artificial Sequence: Synthetic oligonucleotide
ugaauuuguauaugacugcauuugu

SEQ ID NO: 77716 - RNA, 25 nt, Artificial Sequence
  Description of Artificial Sequence: Synthetic oligonucleotide
gaauccuaguagaauguuuacuacc

SEQ ID NO: 77717 - RNA, 25 nt, Artificial Sequence
  Description of Artificial Sequence: Synthetic oligonucleotide
gaaagggaagaauuuuuugaugaaa

SEQ ID NO: 77718 - RNA, 25 nt, Artificial Sequence
  Description of Artificial Sequence: Synthetic oligonucleotide
uaucggcaugccagugugugaauuu

SEQ ID NO: 77719 - RNA, 25 nt, Artificial Sequence
  Description of Artificial Sequence: Synthetic oligonucleotide
caccucauaguagagcaauguaugu

SEQ ID NO: 77720 - RNA, 25 nt, Artificial Sequence
  Description of Artificial Sequence: Synthetic oligonucleotide
ccagaauugccaaagcacauauaua

SEQ ID NO: 77721 - RNA, 25 nt, Artificial Sequence
  Description of Artificial Sequence: Synthetic oligonucleotide
uggugaucuggguaauaguuucucc

SEQ ID NO: 77722 - RNA, 25 nt, Artificial Sequence
  Description of Artificial Sequence: Synthetic oligonucleotide
gaucuggguaauaguuucuccaaau

SEQ ID NO: 77723 - RNA, 25 nt, Artificial Sequence
  Description of Artificial Sequence: Synthetic oligonucleotide
ggaugugaugaauacuuccuagaaa

SEQ ID NO: 77724 - RNA, 25 nt, Artificial Sequence
  Description of Artificial Sequence: Synthetic oligonucleotide
cauuuccacagcuacaccauauaug

SEQ ID NO: 77725 - RNA, 25 nt, Artificial Sequence
  Description of Artificial Sequence: Synthetic oligonucleotide
acagcuacaccauauaugaauggag

SEQ ID NO: 77726 - RNA, 25 nt, Artificial Sequence
  Description of Artificial Sequence: Synthetic oligonucleotide
ugcaguucuuacacgagaagaagau

SEQ ID NO: 77727 - RNA, 25 nt, Artificial Sequence
  Description of Artificial Sequence: Synthetic oligonucleotide
acgagaagaagaucauuuacaggga

SEQ ID NO: 77728 - RNA, 25 nt, Artificial Sequence
  Description of Artificial Sequence: Synthetic oligonucleotide
cgagaagaagaucauuuacagggac

SEQ ID NO: 77729 - RNA, 25 nt, Artificial Sequence
  Description of Artificial Sequence: Synthetic oligonucleotide
aagaagaucauuuacagggaccuga

SEQ ID NO: 77730 - RNA, 25 nt, Artificial Sequence
  Description of Artificial Sequence: Synthetic oligonucleotide
agaggaagagguguuugacugcauc

SEQ ID NO: 77731 - RNA, 25 nt, Artificial Sequence
  Description of Artificial Sequence: Synthetic oligonucleotide
gaggaagagguguuugacugcaucg

SEQ ID NO: 77732 - RNA, 25 nt, Artificial Sequence
  Description of Artificial Sequence: Synthetic oligonucleotide
cuacuuugagggcgaguucacaggg

SEQ ID NO: 77733 - RNA, 25 nt, Artificial Sequence
  Description of Artificial Sequence: Synthetic oligonucleotide
agggcaucuccuggcaccucugucc

SEQ ID NO: 77734 - RNA, 25 nt, Artificial Sequence
  Description of Artificial Sequence: Synthetic oligonucleotide
ggagugauaugguuugucuuuuuaa

SEQ ID NO: 77735 - RNA, 25 nt, Artificial Sequence
  Description of Artificial Sequence: Synthetic oligonucleotide
gagugauaugguuugucuuuuuaag

SEQ ID NO: 77736 - RNA, 25 nt, Artificial Sequence
  Description of Artificial Sequence: Synthetic oligonucleotide
ugcaguaaagauccuaaagguuguc

SEQ ID NO: 77737 - RNA, 25 nt, Artificial Sequence
  Description of Artificial Sequence: Synthetic oligonucleotide
aguaaagauccuaaagguugucgac

SEQ ID NO: 77738 - RNA, 25 nt, Artificial Sequence
  Description of Artificial Sequence: Synthetic oligonucleotide
ugacaaaggacaaccuggcaauugu

SEQ ID NO: 77739 - RNA, 25 nt, Artificial Sequence
  Description of Artificial Sequence: Synthetic oligonucleotide
gcaauugugacccaguggugcgagg

SEQ ID NO: 77740 - RNA, 25 nt, Artificial Sequence
  Description of Artificial Sequence: Synthetic oligonucleotide
aacaucauccauagagacaugaaau

SEQ ID NO: 77741 - RNA, 25 nt, Artificial Sequence
  Description of Artificial Sequence: Synthetic oligonucleotide
ugaaauccaacaauauauuucucca

SEQ ID NO: 77742 - RNA, 25 nt, Artificial Sequence
  Description of Artificial Sequence: Synthetic oligonucleotide
aacaauauauuucuccaugaaggcu

SEQ ID NO: 77743 - RNA, 25 nt, Artificial Sequence
  Description of Artificial Sequence: Synthetic oligonucleotide
aacaguaaagucacgcuggaguggu

SEQ ID NO: 77744 - RNA, 25 nt, Artificial Sequence
  Description of Artificial Sequence: Synthetic oligonucleotide
ugugaagaaaguaaaggaagagagg

SEQ ID NO: 77745 - RNA, 25 nt, Artificial Sequence
  Description of Artificial Sequence: Synthetic oligonucleotide
cuuccgagccauccuugcaucgggc

SEQ ID NO: 77746 - RNA, 25 nt, Artificial Sequence
  Description of Artificial Sequence: Synthetic oligonucleotide
aauggagguugaauauccuacugug

SEQ ID NO: 77747 - RNA, 25 nt, Artificial Sequence
  Description of Artificial Sequence: Synthetic oligonucleotide
ggagguugaauauccuacuguguaa

SEQ ID NO: 77748 - RNA, 25 nt, Artificial Sequence
  Description of Artificial Sequence: Synthetic oligonucleotide
auuuugaguuuucccuuguagugua

SEQ ID NO: 77749 - RNA, 25 nt, Artificial Sequence
  Description of Artificial Sequence: Synthetic oligonucleotide
uauccuguuuguucuuuguugauug

SEQ ID NO: 77750 - RNA, 25 nt, Artificial Sequence
  Description of Artificial Sequence: Synthetic oligonucleotide
ccuguuuguucuuuguugauugaaa

SEQ ID NO: 77751 - RNA, 25 nt, Artificial Sequence
  Description of Artificial Sequence: Synthetic oligonucleotide
cucuacagccuucuuuuucuuccau

SEQ ID NO: 77752 - RNA, 25 nt, Artificial Sequence
  Description of Artificial Sequence: Synthetic oligonucleotide
ucuuccauagcuaaucuuccuucua

SEQ ID NO: 77753 - RNA, 25 nt, Artificial Sequence
  Description of Artificial Sequence: Synthetic oligonucleotide
auaaucuuccuguugaaugcuucau

SEQ ID NO: 77754 - RNA, 25 nt, Artificial Sequence
  Description of Artificial Sequence: Synthetic oligonucleotide
uaaucuuccuguugaaugcuucaug

SEQ ID NO: 77755 - RNA, 25 nt, Artificial Sequence
  Description of Artificial Sequence: Synthetic oligonucleotide
cuucaugacuugaauucuacuuuga

SEQ ID NO: 77756 - RNA, 25 nt, Artificial Sequence
  Description of Artificial Sequence: Synthetic oligonucleotide
aagagggagagaagcaacuacagac

SEQ ID NO: 77757 - RNA, 25 nt, Artificial Sequence
  Description of Artificial Sequence: Synthetic oligonucleotide
cgucuccuaccagaccaaggucaac

SEQ ID NO: 77758 - RNA, 25 nt, Artificial Sequence
  Description of Artificial Sequence: Synthetic oligonucleotide
gaucaaucggcccgacuaucucgac

SEQ ID NO: 77759 - RNA, 25 nt, Artificial Sequence
  Description of Artificial Sequence: Synthetic oligonucleotide
ggacgaacauccaaccuucccaaac

SEQ ID NO: 77760 - RNA, 25 nt, Artificial Sequence
  Description of Artificial Sequence: Synthetic oligonucleotide
agggucggaacccaagcuuagaacu

SEQ ID NO: 77761 - RNA, 25 nt, Artificial Sequence
  Description of Artificial Sequence: Synthetic oligonucleotide
ucggaacccaagcuuagaacuuuaa

SEQ ID NO: 77762 - RNA, 25 nt, Artificial Sequence
  Description of Artificial Sequence: Synthetic oligonucleotide
acccaagcuuagaacuuuaagcaac

SEQ ID NO: 77763 - RNA, 25 nt, Artificial Sequence
  Description of Artificial Sequence: Synthetic oligonucleotide
gaacuuuaagcaacaagaccaccac

SEQ ID NO: 77764 - RNA, 25 nt, Artificial Sequence
  Description of Artificial Sequence: Synthetic oligonucleotide
acuauucaguggcgagaaauaaagu

SEQ ID NO: 77765 - RNA, 25 nt, Artificial Sequence
  Description of Artificial Sequence: Synthetic oligonucleotide
cuauucaguggcgagaaauaaaguu

SEQ ID NO: 77766 - RNA, 25 nt, Artificial Sequence
  Description of Artificial Sequence: Synthetic oligonucleotide
aaacacagauaacaggaaaugaucc

SEQ ID NO: 77767 - RNA, 25 nt, Artificial Sequence
  Description of Artificial Sequence: Synthetic oligonucleotide
cuuaagaaaagagaagaaaugaaac

SEQ ID NO: 77768 - RNA, 25 nt, Artificial Sequence
  Description of Artificial Sequence: Synthetic oligonucleotide
cugaaggaguguguuuccauccucc

SEQ ID NO: 77769 - RNA, 25 nt, Artificial Sequence
  Description of Artificial Sequence: Synthetic oligonucleotide
ucaccgcgggacugaaaaucuuuga

SEQ ID NO: 77770 - RNA, 25 nt, Artificial Sequence
  Description of Artificial Sequence: Synthetic oligonucleotide
agcagaaauaagcgugccguucagg

SEQ ID NO: 77771 - RNA, 25 nt, Artificial Sequence
  Description of Artificial Sequence: Synthetic oligonucleotide
aagcgugccguucaggguccagaag

SEQ ID NO: 77772 - RNA, 25 nt, Artificial Sequence
  Description of Artificial Sequence: Synthetic oligonucleotide
agaaacagucacucaagacugcuug

SEQ ID NO: 77773 - RNA, 25 nt, Artificial Sequence
  Description of Artificial Sequence: Synthetic oligonucleotide
agaggaagaagguccaugucuuugg

SEQ ID NO: 77774 - RNA, 25 nt, Artificial Sequence
  Description of Artificial Sequence: Synthetic oligonucleotide
uguauucaaaauaugccugaaacac

SEQ ID NO: 77775 - RNA, 25 nt, Artificial Sequence
  Description of Artificial Sequence: Synthetic oligonucleotide
auuuuccucccuuucucuguaccuc

SEQ ID NO: 77776 - RNA, 25 nt, Artificial Sequence
  Description of Artificial Sequence: Synthetic oligonucleotide
caaagaaagauagagcaagacaaga

SEQ ID NO: 77777 - RNA, 25 nt, Artificial Sequence
  Description of Artificial Sequence: Synthetic oligonucleotide
aagaaagauagagcaagacaagaaa

SEQ ID NO: 77778 - RNA, 25 nt, Artificial Sequence
  Description of Artificial Sequence: Synthetic oligonucleotide
gaaagcauuuguuuguacaagaucc

SEQ ID NO: 77779 - RNA, 25 nt, Artificial Sequence
  Description of Artificial Sequence: Synthetic oligonucleotide
ugaguuaaacgaacguacuugcaga

SEQ ID NO: 77780 - RNA, 25 nt, Artificial Sequence
  Description of Artificial Sequence: Synthetic oligonucleotide
acugauacagaacgaucgauacaga

SEQ ID NO: 77781 - RNA, 25 nt, Artificial Sequence
  Description of Artificial Sequence: Synthetic oligonucleotide
auauuauauauauauaaaaauaaau

SEQ ID NO: 77782 - RNA, 25 nt, Artificial Sequence
  Description of Artificial Sequence: Synthetic oligonucleotide
auuauauauauauaaaaauaaauau

SEQ ID NO: 77783 - RNA, 25 nt, Artificial Sequence
  Description of Artificial Sequence: Synthetic oligonucleotide
ucacuggauguauuugacugcugug

SEQ ID NO: 77784 - RNA, 25 nt, Artificial Sequence
  Description of Artificial Sequence: Synthetic oligonucleotide
cagggaagaggaggagaugagagac

SEQ ID NO: 77785 - RNA, 25 nt, Artificial Sequence
  Description of Artificial Sequence: Synthetic oligonucleotide
augaucuuuuuuuugucccacuugg

SEQ ID NO: 77786 - RNA, 27 nt, Artificial Sequence
  Description of Artificial Sequence: Synthetic oligonucleotide
ggccgugaacuccucaucaaaauaccu

SEQ ID NO: 77787 - RNA, 27 nt, Artificial Sequence
  Description of Artificial Sequence: Synthetic oligonucleotide
uggugugauggugaucaucugggccgu

SEQ ID NO: 77788 - RNA, 27 nt, Artificial Sequence
  Description of Artificial Sequence: Synthetic oligonucleotide
aaacccgcaggauaguuuucuucccua

SEQ ID NO: 77789 - RNA, 27 nt, Artificial Sequence
  Description of Artificial Sequence: Synthetic oligonucleotide
caaacuggaugaaauaaauuaaaaccc

SEQ ID NO: 77790 - RNA, 27 nt, Artificial Sequence
  Description of Artificial Sequence: Synthetic oligonucleotide
agaaguccuuaacauuucccuacguga

SEQ ID NO: 77791 - RNA, 27 nt, Artificial Sequence
  Description of Artificial Sequence: Synthetic oligonucleotide
cucugucccacuggguaaacccuggcc

SEQ ID NO: 77792 - RNA, 27 nt, Artificial Sequence
  Description of Artificial Sequence: Synthetic oligonucleotide
cacaauaacaaauuuaaaccuugcucc

SEQ ID NO: 77793 - RNA, 27 nt, Artificial Sequence
  Description of Artificial Sequence: Synthetic oligonucleotide
aaaugcauuugaacaacauaauacaca

SEQ ID NO: 77794 - RNA, 27 nt, Artificial Sequence
  Description of Artificial Sequence: Synthetic oligonucleotide
ggcuuuccugucacaaagauuaaaaac

SEQ ID NO: 77795 - RNA, 27 nt, Artificial Sequence
  Description of Artificial Sequence: Synthetic oligonucleotide
agggcuuuccugucacaaagauuaaaa

SEQ ID NO: 77796 - RNA, 27 nt, Artificial Sequence
  Description of Artificial Sequence: Synthetic oligonucleotide
ggccaugcugggagacauaagcagcag

SEQ ID NO: 77797 - RNA, 27 nt, Artificial Sequence
  Description of Artificial Sequence: Synthetic oligonucleotide
ucagggagaagcuucugaaacacuucu

SEQ ID NO: 77798 - RNA, 27 nt, Artificial Sequence
  Description of Artificial Sequence: Synthetic oligonucleotide
aagggcuucuuccuuauugauggucag

SEQ ID NO: 77799 - RNA, 27 nt, Artificial Sequence
  Description of Artificial Sequence: Synthetic oligonucleotide
ugaagggcuucuuccuuauugaugguc

SEQ ID NO: 77800 - RNA, 27 nt, Artificial Sequence
  Description of Artificial Sequence: Synthetic oligonucleotide
cgcugaagggcuucuuccuuauugaug

SEQ ID NO: 77801 - RNA, 27 nt, Artificial Sequence
  Description of Artificial Sequence: Synthetic oligonucleotide
gccgcugaagggcuucuuccuuauuga

SEQ ID NO: 77802 - RNA, 27 nt, Artificial Sequence
  Description of Artificial Sequence: Synthetic oligonucleotide
acuggccgcugaagggcuucuuccuua

SEQ ID NO: 77803 - RNA, 27 nt, Artificial Sequence
  Description of Artificial Sequence: Synthetic oligonucleotide
cggagcuuuucaccuuuaguuaugcuu

SEQ ID NO: 77804 - RNA, 27 nt, Artificial Sequence
  Description of Artificial Sequence: Synthetic oligonucleotide
ccggagcuuuucaccuuuaguuaugcu

SEQ ID NO: 77805 - RNA, 27 nt, Artificial Sequence
  Description of Artificial Sequence: Synthetic oligonucleotide
cagacuguugacuggcgugauguaguu

SEQ ID NO: 77806 - RNA, 27 nt, Artificial Sequence
  Description of Artificial Sequence: Synthetic oligonucleotide
cuuuugaacucugcuuaaauccagugg

SEQ ID NO: 77807 - RNA, 27 nt, Artificial Sequence
  Description of Artificial Sequence: Synthetic oligonucleotide
gcuuuugaacucugcuuaaauccagug

SEQ ID NO: 77808 - RNA, 27 nt, Artificial Sequence
  Description of Artificial Sequence: Synthetic oligonucleotide
agggcuuuugaacucugcuuaaaucca

SEQ ID NO: 77809 - RNA, 27 nt, Artificial Sequence
  Description of Artificial Sequence: Synthetic oligonucleotide
aagggcuuuugaacucugcuuaaaucc

SEQ ID NO: 77810 - RNA, 27 nt, Artificial Sequence
  Description of Artificial Sequence: Synthetic oligonucleotide
ugaagggcuuuugaacucugcuuaaau

SEQ ID NO: 77811 - RNA, 27 nt, Artificial Sequence
  Description of Artificial Sequence: Synthetic oligonucleotide
cugaagggcuuuugaacucugcuuaaa

SEQ ID NO: 77812 - RNA, 27 nt, Artificial Sequence
  Description of Artificial Sequence: Synthetic oligonucleotide
cgcugaagggcuuuugaacucugcuua

SEQ ID NO: 77813 - RNA, 27 nt, Artificial Sequence
  Description of Artificial Sequence: Synthetic oligonucleotide
cgagcggcuucacucagacccugaggc

SEQ ID NO: 77814 - RNA, 27 nt, Artificial Sequence
  Description of Artificial Sequence: Synthetic oligonucleotide
uugacuggcgugauguaguugcuuggg

SEQ ID NO: 77815 - RNA, 27 nt, Artificial Sequence
  Description of Artificial Sequence: Synthetic oligonucleotide
cacgcaccaagaagcugccauugaucc

SEQ ID NO: 77816 - RNA, 27 nt, Artificial Sequence
  Description of Artificial Sequence: Synthetic oligonucleotide
cugaugaauccaaugugggcuggaauc

SEQ ID NO: 77817 - RNA, 27 nt, Artificial Sequence
  Description of Artificial Sequence: Synthetic oligonucleotide
cuuagguauuccacauucucagcugug

SEQ ID NO: 77818 - RNA, 27 nt, Artificial Sequence
  Description of Artificial Sequence: Synthetic oligonucleotide
ugagccucaaauuaggagauacguuuu

SEQ ID NO: 77819 - RNA, 27 nt, Artificial Sequence
  Description of Artificial Sequence: Synthetic oligonucleotide
ccaauuguagagaaauuauuuuaggaa

SEQ ID NO: 77820 - RNA, 27 nt, Artificial Sequence
  Description of Artificial Sequence: Synthetic oligonucleotide
ggcuccuaacuagcugaaucuuccaau

SEQ ID NO: 77821 - RNA, 27 nt, Artificial Sequence
  Description of Artificial Sequence: Synthetic oligonucleotide
guggauauugacuaggagaguuuaaaa

SEQ ID NO: 77822 - RNA, 27 nt, Artificial Sequence
  Description of Artificial Sequence: Synthetic oligonucleotide
ugugacugaacauaacuguaggcugaa

SEQ ID NO: 77823 - RNA, 27 nt, Artificial Sequence
  Description of Artificial Sequence: Synthetic oligonucleotide
guaugugugugugacugaacauaacug

SEQ ID NO: 77824 - RNA, 27 nt, Artificial Sequence
  Description of Artificial Sequence: Synthetic oligonucleotide
aagcaaaaggaacauuuuguaugugug

SEQ ID NO: 77825 - RNA, 27 nt, Artificial Sequence
  Description of Artificial Sequence: Synthetic oligonucleotide
aaaaauuacuuuaaaagcaaaaggaac

SEQ ID NO: 77826 - RNA, 27 nt, Artificial Sequence
  Description of Artificial Sequence: Synthetic oligonucleotide
ccauugacuguugcuucacaggucaga

SEQ ID NO: 77827 - RNA, 27 nt, Artificial Sequence
  Description of Artificial Sequence: Synthetic oligonucleotide
auugguuugucgaugugugagauaguu

SEQ ID NO: 77828 - RNA, 27 nt, Artificial Sequence
  Description of Artificial Sequence: Synthetic oligonucleotide
agugguagcaguacaauugaggacaag

SEQ ID NO: 77829 - RNA, 27 nt, Artificial Sequence
  Description of Artificial Sequence: Synthetic oligonucleotide
uaagaccgcuugccagcuacgguuuca

SEQ ID NO: 77830 - RNA, 27 nt, Artificial Sequence
  Description of Artificial Sequence: Synthetic oligonucleotide
agccgguaagaccgcuugccagcuacg

SEQ ID NO: 77831 - RNA, 27 nt, Artificial Sequence
  Description of Artificial Sequence: Synthetic oligonucleotide
gguaacccaucuuuuaaccauacaacu

SEQ ID NO: 77832 - RNA, 27 nt, Artificial Sequence
  Description of Artificial Sequence: Synthetic oligonucleotide
ucgcagguaacccaucuuuuaaccaua

SEQ ID NO: 77833 - RNA, 27 nt, Artificial Sequence
  Description of Artificial Sequence: Synthetic oligonucleotide
cucagcaagauuguauaauucccugca

SEQ ID NO: 77834 - RNA, 27 nt, Artificial Sequence
  Description of Artificial Sequence: Synthetic oligonucleotide
acuguuuuaugcucagcaagauuguau

SEQ ID NO: 77835 - RNA, 27 nt, Artificial Sequence
  Description of Artificial Sequence: Synthetic oligonucleotide
aggauaaaggacucuucauuauuggaa

SEQ ID NO: 77836 - RNA, 27 nt, Artificial Sequence
  Description of Artificial Sequence: Synthetic oligonucleotide
caacuugcguuggaacauccaaagugu

SEQ ID NO: 77837 - RNA, 27 nt, Artificial Sequence
  Description of Artificial Sequence: Synthetic oligonucleotide
augguuucaguuuaguggaagcauuua

SEQ ID NO: 77838 - RNA, 27 nt, Artificial Sequence
  Description of Artificial Sequence: Synthetic oligonucleotide
auauuuaacaaagucaaacuuucucac

SEQ ID NO: 77839 - RNA, 27 nt, Artificial Sequence
  Description of Artificial Sequence: Synthetic oligonucleotide
aacuuuuaauauacaguaguucuuuuc

SEQ ID NO: 77840 - RNA, 27 nt, Artificial Sequence
  Description of Artificial Sequence: Synthetic oligonucleotide
guuaagucaaaacccguauuucuaaag

SEQ ID NO: 77841 - RNA, 27 nt, Artificial Sequence
  Description of Artificial Sequence: Synthetic oligonucleotide
gugcugaguuugcuguacccauguuga

SEQ ID NO: 77842 - RNA, 27 nt, Artificial Sequence
  Description of Artificial Sequence: Synthetic oligonucleotide
ugaggucagcaucuucugugucuuuac

SEQ ID NO: 77843 - RNA, 27 nt, Artificial Sequence
  Description of Artificial Sequence: Synthetic oligonucleotide
gcgaucugaauaaaccucccuacuagc

SEQ ID NO: 77844 - RNA, 27 nt, Artificial Sequence
  Description of Artificial Sequence: Synthetic oligonucleotide
aucccagaacccugcugcagaaggcca

SEQ ID NO: 77845 - RNA, 27 nt, Artificial Sequence
  Description of Artificial Sequence: Synthetic oligonucleotide
cauaauuuccaauauguaccagaccuu

SEQ ID NO: 77846 - RNA, 27 nt, Artificial Sequence
  Description of Artificial Sequence: Synthetic oligonucleotide
cuagugcuuccaucggaaggacuaggu

SEQ ID NO: 77847 - RNA, 27 nt, Artificial Sequence
  Description of Artificial Sequence: Synthetic oligonucleotide
uccacauaaaaacaauauucacuggga

SEQ ID NO: 77848 - RNA, 27 nt, Artificial Sequence
  Description of Artificial Sequence: Synthetic oligonucleotide
ucuaccaauuccaacuugaauucauug

SEQ ID NO: 77849 - RNA, 27 nt, Artificial Sequence
  Description of Artificial Sequence: Synthetic oligonucleotide
ucuccaagucuaaaucuguguccugag

SEQ ID NO: 77850 - RNA, 27 nt, Artificial Sequence
  Description of Artificial Sequence: Synthetic oligonucleotide
uggaauacuguaacugugcuuugagga

SEQ ID NO: 77851 - RNA, 27 nt, Artificial Sequence
  Description of Artificial Sequence: Synthetic oligonucleotide
uuaauucaucagugguggcagugguag

SEQ ID NO: 77852 - RNA, 27 nt, Artificial Sequence
  Description of Artificial Sequence: Synthetic oligonucleotide
gugaugauguggcacuaguaguuucuu

SEQ ID NO: 77853 - RNA, 27 nt, Artificial Sequence
  Description of Artificial Sequence: Synthetic oligonucleotide
ucuguuuggugaggcuguccgacuuug

SEQ ID NO: 77854 - RNA, 27 nt, Artificial Sequence
  Description of Artificial Sequence: Synthetic oligonucleotide
ccaucauguuccauuuuucgcuuucuc

SEQ ID NO: 77855 - RNA, 27 nt, Artificial Sequence
  Description of Artificial Sequence: Synthetic oligonucleotide
gcagucuacaugcuaaaucagagggua

SEQ ID NO: 77856 - RNA, 27 nt, Artificial Sequence
  Description of Artificial Sequence: Synthetic oligonucleotide
cauaaauagauccuuaaauagcucaaa

SEQ ID NO: 77857 - RNA, 27 nt, Artificial Sequence
  Description of Artificial Sequence: Synthetic oligonucleotide
ugauaauagugcuuuuucaccuuuuuc

SEQ ID NO: 77858 - RNA, 27 nt, Artificial Sequence
  Description of Artificial Sequence: Synthetic oligonucleotide
gcagaacugauaauagugcuuuuucac

SEQ ID NO: 77859 - RNA, 27 nt, Artificial Sequence
  Description of Artificial Sequence: Synthetic oligonucleotide
guagguuuaaucuuucuuuucagccau

SEQ ID NO: 77860 - RNA, 27 nt, Artificial Sequence
  Description of Artificial Sequence: Synthetic oligonucleotide
agaaggauuuuauuauaaggguuuaau

SEQ ID NO: 77861 - RNA, 27 nt, Artificial Sequence
  Description of Artificial Sequence: Synthetic oligonucleotide
gucuacagcauuggcuaauaguaugaa

SEQ ID NO: 77862 - RNA, 27 nt, Artificial Sequence
  Description of Artificial Sequence: Synthetic oligonucleotide
cuauuccuaucaaaaugcuucugucua

SEQ ID NO: 77863 - RNA, 27 nt, Artificial Sequence
  Description of Artificial Sequence: Synthetic oligonucleotide
ucagggccauuaucuuauuugcucuau

SEQ ID NO: 77864 - RNA, 27 nt, Artificial Sequence
  Description of Artificial Sequence: Synthetic oligonucleotide
ugcuugaggaagagaaaaauguugguc

SEQ ID NO: 77865 - RNA, 27 nt, Artificial Sequence
  Description of Artificial Sequence: Synthetic oligonucleotide
ugggcugaacuuuucucauacuuaaag

SEQ ID NO: 77866 - RNA, 27 nt, Artificial Sequence
  Description of Artificial Sequence: Synthetic oligonucleotide
gguucagcagccaucuuuauuccugcg

SEQ ID NO: 77867 - RNA, 27 nt, Artificial Sequence
  Description of Artificial Sequence: Synthetic oligonucleotide
ugaagagaacuuggucauucaaauuuc

SEQ ID NO: 77868 - RNA, 27 nt, Artificial Sequence
  Description of Artificial Sequence: Synthetic oligonucleotide
cucuaggcuggcuaucuuuauacauac

SEQ ID NO: 77869 - RNA, 27 nt, Artificial Sequence
  Description of Artificial Sequence: Synthetic oligonucleotide
acacuucacagagauaguuacagccau

SEQ ID NO: 77870 - RNA, 27 nt, Artificial Sequence
  Description of Artificial Sequence: Synthetic oligonucleotide
uugaaauuuucucacacuucacagaga

SEQ ID NO: 77871 - RNA, 27 nt, Artificial Sequence
  Description of Artificial Sequence: Synthetic oligonucleotide
ucaggaggauucauuuccuuaaaggaa

SEQ ID NO: 77872 - RNA, 27 nt, Artificial Sequence
  Description of Artificial Sequence: Synthetic oligonucleotide
auaugaugucacuuuuuguauccuuga

SEQ ID NO: 77873 - RNA, 27 nt, Artificial Sequence
  Description of Artificial Sequence: Synthetic oligonucleotide
uaugaugaagauucaaauugcaucuua

SEQ ID NO: 77874 - RNA, 27 nt, Artificial Sequence
  Description of Artificial Sequence: Synthetic oligonucleotide
uuaauagcuagucuucguuuugaacag

SEQ ID NO: 77875 - RNA, 27 nt, Artificial Sequence
  Description of Artificial Sequence: Synthetic oligonucleotide
auuuuuaguagagaugagguuucacca

SEQ ID NO: 77876 - RNA, 27 nt, Artificial Sequence
  Description of Artificial Sequence: Synthetic oligonucleotide
aggcgagauagagcuucucuuucguuc

SEQ ID NO: 77877 - RNA, 27 nt, Artificial Sequence
  Description of Artificial Sequence: Synthetic oligonucleotide
aacuggaccgaaggcgcuuguggagaa

SEQ ID NO: 77878 - RNA, 27 nt, Artificial Sequence
  Description of Artificial Sequence: Synthetic oligonucleotide
gcggcuacaucuuuggaaucuucuccu

SEQ ID NO: 77879 - RNA, 27 nt, Artificial Sequence
  Description of Artificial Sequence: Synthetic oligonucleotide
caagucuccucauugaauccagauugg

SEQ ID NO: 77880 - RNA, 27 nt, Artificial Sequence
  Description of Artificial Sequence: Synthetic oligonucleotide
uccucacuacucucaaaucuguucugg

SEQ ID NO: 77881 - RNA, 27 nt, Artificial Sequence
  Description of Artificial Sequence: Synthetic oligonucleotide
uuuguacucaucugcacagcucuggcu

SEQ ID NO: 77882 - RNA, 27 nt, Artificial Sequence
  Description of Artificial Sequence: Synthetic oligonucleotide
gcccauuaacaacaacaaucugaggug

SEQ ID NO: 77883 - RNA, 27 nt, Artificial Sequence
  Description of Artificial Sequence: Synthetic oligonucleotide
aauaaauuaaaaauaauuaaaauagug

SEQ ID NO: 77884 - RNA, 27 nt, Artificial Sequence
  Description of Artificial Sequence: Synthetic oligonucleotide
cauauuuaaauauuaauaaauuaaaaa

SEQ ID NO: 77885 - RNA, 27 nt, Artificial Sequence
  Description of Artificial Sequence: Synthetic oligonucleotide
gaaacaaaggauauucaaacugcauag

SEQ ID NO: 77886 - RNA, 27 nt, Artificial Sequence
  Description of Artificial Sequence: Synthetic oligonucleotide
caaacacuuagacgccagcagcauggg

SEQ ID NO: 77887 - RNA, 27 nt, Artificial Sequence
  Description of Artificial Sequence: Synthetic oligonucleotide
uuugucacaggugaaaugcacaucuga

SEQ ID NO: 77888 - RNA, 27 nt, Artificial Sequence
  Description of Artificial Sequence: Synthetic oligonucleotide
uaauucagccuggcacagguuuugauc

SEQ ID NO: 77889 - RNA, 27 nt, Artificial Sequence
  Description of Artificial Sequence: Synthetic oligonucleotide
auuguaagaaugacuacccacauucac

SEQ ID NO: 77890 - RNA, 27 nt, Artificial Sequence
  Description of Artificial Sequence: Synthetic oligonucleotide
caauuguaagaaugacuacccacauuc

SEQ ID NO: 77891 - RNA, 27 nt, Artificial Sequence
  Description of Artificial Sequence: Synthetic oligonucleotide
guacacucucugaugcucauuuucaua

SEQ ID NO: 77892 - RNA, 27 nt, Artificial Sequence
  Description of Artificial Sequence: Synthetic oligonucleotide
cugcugaguucuacaugaaaagcaaau

SEQ ID NO: 77893 - RNA, 27 nt, Artificial Sequence
  Description of Artificial Sequence: Synthetic oligonucleotide
uacugaaaauaaauauagaaauacaac

SEQ ID NO: 77894 - RNA, 27 nt, Artificial Sequence
  Description of Artificial Sequence: Synthetic oligonucleotide
uuccauuuaagaaacauuaaucaaaac

SEQ ID NO: 77895 - RNA, 27 nt, Artificial Sequence
  Description of Artificial Sequence: Synthetic oligonucleotide
acaauuuuaggcacuauacacguuguu

SEQ ID NO: 77896 - RNA, 27 nt, Artificial Sequence
  Description of Artificial Sequence: Synthetic oligonucleotide
ccagauguuaguagccaaggauauggu

SEQ ID NO: 77897 - RNA, 27 nt, Artificial Sequence
  Description of Artificial Sequence: Synthetic oligonucleotide
agcucacagucuccagauguuaguagc

SEQ ID NO: 77898 - RNA, 27 nt, Artificial Sequence
  Description of Artificial Sequence: Synthetic oligonucleotide
auuaauaaaaagcacacaacuuauggc

SEQ ID NO: 77899 - RNA, 27 nt, Artificial Sequence
  Description of Artificial Sequence: Synthetic oligonucleotide
aauguaagaagagccaaaaugaugcau

SEQ ID NO: 77900 - RNA, 27 nt, Artificial Sequence
  Description of Artificial Sequence: Synthetic oligonucleotide
acauuuuuacaaauguaagaagagcca

SEQ ID NO: 77901 - RNA, 27 nt, Artificial Sequence
  Description of Artificial Sequence: Synthetic oligonucleotide
aauaugaauuaagaugaccuaaucugu

SEQ ID NO: 77902 - RNA, 27 nt, Artificial Sequence
  Description of Artificial Sequence: Synthetic oligonucleotide
ucaugauuaguucuuucaauuccaucc

SEQ ID NO: 77903 - RNA, 27 nt, Artificial Sequence
  Description of Artificial Sequence: Synthetic oligonucleotide
cccaagagcagaaggaaugagugugca

SEQ ID NO: 77904 - RNA, 27 nt, Artificial Sequence
  Description of Artificial Sequence: Synthetic oligonucleotide
cucaaagcuacugguuaccucuacacc

SEQ ID NO: 77905 - RNA, 27 nt, Artificial Sequence
  Description of Artificial Sequence: Synthetic oligonucleotide
ugaaauauuacguggcaugugguuggg

SEQ ID NO: 77906 - RNA, 27 nt, Artificial Sequence
  Description of Artificial Sequence: Synthetic oligonucleotide
agugaagagaauaacuuguuuccgaag

SEQ ID NO: 77907 - RNA, 27 nt, Artificial Sequence
  Description of Artificial Sequence: Synthetic oligonucleotide
uuucuuagcauuaguuauugggaguga

SEQ ID NO: 77908 - RNA, 27 nt, Artificial Sequence
  Description of Artificial Sequence: Synthetic oligonucleotide
uugauuuucagcauuucuuagcauuag

SEQ ID NO: 77909 - RNA, 27 nt, Artificial Sequence
  Description of Artificial Sequence: Synthetic oligonucleotide
aaaguaaucauauuuagagaaagacag

SEQ ID NO: 77910 - RNA, 27 nt, Artificial Sequence
  Description of Artificial Sequence: Synthetic oligonucleotide
uguagaacaaaaugccugaaauucagc

SEQ ID NO: 77911 - RNA, 27 nt, Artificial Sequence
  Description of Artificial Sequence: Synthetic oligonucleotide
gagagucccgggugagagggaaucgcc

SEQ ID NO: 77912 - RNA, 27 nt, Artificial Sequence
  Description of Artificial Sequence: Synthetic oligonucleotide
cuuuacuuuaaagguucacuuuccuug

SEQ ID NO: 77913 - RNA, 27 nt, Artificial Sequence
  Description of Artificial Sequence: Synthetic oligonucleotide
ccaggcuuccagagcaugcagccuccu

SEQ ID NO: 77914 - RNA, 27 nt, Artificial Sequence
  Description of Artificial Sequence: Synthetic oligonucleotide
cucucuuuuguuuucuguucagagaaa

SEQ ID NO: 77915 - RNA, 27 nt, Artificial Sequence
  Description of Artificial Sequence: Synthetic oligonucleotide
cggcauaacugauuacagccaaguuca

SEQ ID NO: 77916 - RNA, 27 nt, Artificial Sequence
  Description of Artificial Sequence: Synthetic oligonucleotide
uggacuucuuuuaauuuuggcuucuuc

SEQ ID NO: 77917 - RNA, 27 nt, Artificial Sequence
  Description of Artificial Sequence: Synthetic oligonucleotide
uaaccucaccuggacuucuuuuaauuu

SEQ ID NO: 77918 - RNA, 27 nt, Artificial Sequence
  Description of Artificial Sequence: Synthetic oligonucleotide
guccucuucccgauaauccggauucag

SEQ ID NO: 77919 - RNA, 27 nt, Artificial Sequence
  Description of Artificial Sequence: Synthetic oligonucleotide
acaauacuugcuuugaugucacauuaa

SEQ ID NO: 77920 - RNA, 27 nt, Artificial Sequence
  Description of Artificial Sequence: Synthetic oligonucleotide
gagugcuacaauacuugcuuugauguc

SEQ ID NO: 77921 - RNA, 27 nt, Artificial Sequence
  Description of Artificial Sequence: Synthetic oligonucleotide
auuugugguuuuguuuucucucucucu

SEQ ID NO: 77922 - RNA, 27 nt, Artificial Sequence
  Description of Artificial Sequence: Synthetic oligonucleotide
uguaugggcuuaaauacuacagcgagg

SEQ ID NO: 77923 - RNA, 27 nt, Artificial Sequence
  Description of Artificial Sequence: Synthetic oligonucleotide
cuguaugggcuuaaauacuacagcgag

SEQ ID NO: 77924 - RNA, 27 nt, Artificial Sequence
  Description of Artificial Sequence: Synthetic oligonucleotide
ggaagguuucuguaugggcuuaaauac

SEQ ID NO: 77925 - RNA, 27 nt, Artificial Sequence
  Description of Artificial Sequence: Synthetic oligonucleotide
guagguauaccauguuuauuuuaauac

SEQ ID NO: 77926 - RNA, 27 nt, Artificial Sequence
  Description of Artificial Sequence: Synthetic oligonucleotide
uccgaaaacuggccgaucagaacagcc

SEQ ID NO: 77927 - RNA, 27 nt, Artificial Sequence
  Description of Artificial Sequence: Synthetic oligonucleotide
cccuguuccaaaguucaaauuauuugu

SEQ ID NO: 77928 - RNA, 27 nt, Artificial Sequence
  Description of Artificial Sequence: Synthetic oligonucleotide
acuggaaaguuaaauuaaggucgcaau

SEQ ID NO: 77929 - RNA, 27 nt, Artificial Sequence
  Description of Artificial Sequence: Synthetic oligonucleotide
caaaaccaaacuuuagcuuucucagcc

SEQ ID NO: 77930 - RNA, 27 nt, Artificial Sequence
  Description of Artificial Sequence: Synthetic oligonucleotide
uacagugggaaguagcaucuuuacuuu

SEQ ID NO: 77931 - RNA, 27 nt, Artificial Sequence
  Description of Artificial Sequence: Synthetic oligonucleotide
ucauaugguaucagcaauuaagcagua

SEQ ID NO: 77932 - RNA, 27 nt, Artificial Sequence
  Description of Artificial Sequence: Synthetic oligonucleotide
cagcccauguuucauucauaugguauc

SEQ ID NO: 77933 - RNA, 27 nt, Artificial Sequence
  Description of Artificial Sequence: Synthetic oligonucleotide
uaugaaaaaguuggauaagaaaguugg

SEQ ID NO: 77934 - RNA, 27 nt, Artificial Sequence
  Description of Artificial Sequence: Synthetic oligonucleotide
uccggccucaugaugucaugcaaggcu

SEQ ID NO: 77935 - RNA, 27 nt, Artificial Sequence
  Description of Artificial Sequence: Synthetic oligonucleotide
acaaaugcagucauauacaaauucagg

SEQ ID NO: 77936 - RNA, 27 nt, Artificial Sequence
  Description of Artificial Sequence: Synthetic oligonucleotide
gguaguaaacauucuacuaggauucuu

SEQ ID NO: 77937 - RNA, 27 nt, Artificial Sequence
  Description of Artificial Sequence: Synthetic oligonucleotide
uuucaucaaaaaauucuucccuuucug

SEQ ID NO: 77938 - RNA, 27 nt, Artificial Sequence
  Description of Artificial Sequence: Synthetic oligonucleotide
aaauucacacacuggcaugccgauagc

SEQ ID NO: 77939 - RNA, 27 nt, Artificial Sequence
  Description of Artificial Sequence: Synthetic oligonucleotide
acauacauugcucuacuaugaggugaa

SEQ ID NO: 77940 - RNA, 27 nt, Artificial Sequence
  Description of Artificial Sequence: Synthetic oligonucleotide
uauauaugugcuuuggcaauucuggug

SEQ ID NO: 77941 - RNA, 27 nt, Artificial Sequence
  Description of Artificial Sequence: Synthetic oligonucleotide
ggagaaacuauuacccagaucaccacu

SEQ ID NO: 77942 - RNA, 27 nt, Artificial Sequence
  Description of Artificial Sequence: Synthetic oligonucleotide
auuuggagaaacuauuacccagaucac

SEQ ID NO: 77943 - RNA, 27 nt, Artificial Sequence
  Description of Artificial Sequence: Synthetic oligonucleotide
uuucuaggaaguauucaucacauccac

SEQ ID NO: 77944 - RNA, 27 nt, Artificial Sequence
  Description of Artificial Sequence: Synthetic oligonucleotide
cauauaugguguagcuguggaaaugcg

SEQ ID NO: 77945 - RNA, 27 nt, Artificial Sequence
  Description of Artificial Sequence: Synthetic oligonucleotide
cuccauucauauaugguguagcugugg

SEQ ID NO: 77946 - RNA, 27 nt, Artificial Sequence
  Description of Artificial Sequence: Synthetic oligonucleotide
aucuucuucucguguaagaacugcagc

SEQ ID NO: 77947 - RNA, 27 nt, Artificial Sequence
  Description of Artificial Sequence: Synthetic oligonucleotide
ucccuguaaaugaucuucuucucgugu

SEQ ID NO: 77948 - RNA, 27 nt, Artificial Sequence
  Description of Artificial Sequence: Synthetic oligonucleotide
gucccuguaaaugaucuucuucucgug

SEQ ID NO: 77949 - RNA, 27 nt, Artificial Sequence
  Description of Artificial Sequence: Synthetic oligonucleotide
ucaggucccuguaaaugaucuucuucu

SEQ ID NO: 77950 - RNA, 27 nt, Artificial Sequence
  Description of Artificial Sequence: Synthetic oligonucleotide
gaugcagucaaacaccucuuccucugu

SEQ ID NO: 77951 - RNA, 27 nt, Artificial Sequence
  Description of Artificial Sequence: Synthetic oligonucleotide
cgaugcagucaaacaccucuuccucug

SEQ ID NO: 77952 - RNA, 27 nt, Artificial Sequence
  Description of Artificial Sequence: Synthetic oligonucleotide
cccugugaacucgcccucaaaguagcg

SEQ ID NO: 77953 - RNA, 27 nt, Artificial Sequence
  Description of Artificial Sequence: Synthetic oligonucleotide
ggacagaggugccaggagaugcccuca

SEQ ID NO: 77954 - RNA, 27 nt, Artificial Sequence
  Description of Artificial Sequence: Synthetic oligonucleotide
uuaaaaagacaaaccauaucacuccuu

SEQ ID NO: 77955 - RNA, 27 nt, Artificial Sequence
  Description of Artificial Sequence: Synthetic oligonucleotide
cuuaaaaagacaaaccauaucacuccu

SEQ ID NO: 77956 - RNA, 27 nt, Artificial Sequence
  Description of Artificial Sequence: Synthetic oligonucleotide
gacaaccuuuaggaucuuuacugcaac

SEQ ID NO: 77957 - RNA, 27 nt, Artificial Sequence
  Description of Artificial Sequence: Synthetic oligonucleotide
gucgacaaccuuuaggaucuuuacugc

SEQ ID NO: 77958 - RNA, 27 nt, Artificial Sequence
  Description of Artificial Sequence: Synthetic oligonucleotide
acaauugccagguuguccuuugucaug

SEQ ID NO: 77959 - RNA, 27 nt, Artificial Sequence
  Description of Artificial Sequence: Synthetic oligonucleotide
ccucgcaccacugggucacaauugcca

SEQ ID NO: 77960 - RNA, 27 nt, Artificial Sequence
  Description of Artificial Sequence: Synthetic oligonucleotide
auuucaugucucuauggaugauguucu

SEQ ID NO: 77961 - RNA, 27 nt, Artificial Sequence
  Description of Artificial Sequence: Synthetic oligonucleotide
uggagaaauauauuguuggauuucaug

SEQ ID NO: 77962 - RNA, 27 nt, Artificial Sequence
  Description of Artificial Sequence: Synthetic oligonucleotide
agccuucauggagaaauauauuguugg

SEQ ID NO: 77963 - RNA, 27 nt, Artificial Sequence
  Description of Artificial Sequence: Synthetic oligonucleotide
accacuccagcgugacuuuacuguugc

SEQ ID NO: 77964 - RNA, 27 nt, Artificial Sequence
  Description of Artificial Sequence: Synthetic oligonucleotide
ccucucuuccuuuacuuucuucacaca

SEQ ID NO: 77965 - RNA, 27 nt, Artificial Sequence
  Description of Artificial Sequence: Synthetic oligonucleotide
gcccgaugcaaggauggcucggaagcg

SEQ ID NO: 77966 - RNA, 27 nt, Artificial Sequence
  Description of Artificial Sequence: Synthetic oligonucleotide
cacaguaggauauucaaccuccauuuc

SEQ ID NO: 77967 - RNA, 27 nt, Artificial Sequence
  Description of Artificial Sequence: Synthetic oligonucleotide
uuacacaguaggauauucaaccuccau

SEQ ID NO: 77968 - RNA, 27 nt, Artificial Sequence
  Description of Artificial Sequence: Synthetic oligonucleotide
uacacuacaagggaaaacucaaaaucu

SEQ ID NO: 77969 - RNA, 27 nt, Artificial Sequence
  Description of Artificial Sequence: Synthetic oligonucleotide
caaucaacaaagaacaaacaggauaaa

SEQ ID NO: 77970 - RNA, 27 nt, Artificial Sequence
  Description of Artificial Sequence: Synthetic oligonucleotide
uuucaaucaacaaagaacaaacaggau

SEQ ID NO: 77971 - RNA, 27 nt, Artificial Sequence
  Description of Artificial Sequence: Synthetic oligonucleotide
auggaagaaaaagaaggcuguagagaa

SEQ ID NO: 77972 - RNA, 27 nt, Artificial Sequence
  Description of Artificial Sequence: Synthetic oligonucleotide
uagaaggaagauuagcuauggaagaaa

SEQ ID NO: 77973 - RNA, 27 nt, Artificial Sequence
  Description of Artificial Sequence: Synthetic oligonucleotide
augaagcauucaacaggaagauuauuu

SEQ ID NO: 77974 - RNA, 27 nt, Artificial Sequence
  Description of Artificial Sequence: Synthetic oligonucleotide
caugaagcauucaacaggaagauuauu

SEQ ID NO: 77975 - RNA, 27 nt, Artificial Sequence
  Description of Artificial Sequence: Synthetic oligonucleotide
ucaaaguagaauucaagucaugaagca

SEQ ID NO: 77976 - RNA, 27 nt, Artificial Sequence
  Description of Artificial Sequence: Synthetic oligonucleotide
gucuguaguugcuucucucccucuuag

SEQ ID NO: 77977 - RNA, 27 nt, Artificial Sequence
  Description of Artificial Sequence: Synthetic oligonucleotide
guugaccuuggucugguaggagacggc

SEQ ID NO: 77978 - RNA, 27 nt, Artificial Sequence
  Description of Artificial Sequence: Synthetic oligonucleotide
gucgagauagucgggccgauugaucuc

SEQ ID NO: 77979 - RNA, 27 nt, Artificial Sequence
  Description of Artificial Sequence: Synthetic oligonucleotide
guuugggaagguuggauguucguccuc

SEQ ID NO: 77980 - RNA, 27 nt, Artificial Sequence
  Description of Artificial Sequence: Synthetic oligonucleotide
aguucuaagcuuggguuccgacccuaa

SEQ ID NO: 77981 - RNA, 27 nt, Artificial Sequence
  Description of Artificial Sequence: Synthetic oligonucleotide
uuaaaguucuaagcuuggguuccgacc

SEQ ID NO: 77982 - RNA, 27 nt, Artificial Sequence
  Description of Artificial Sequence: Synthetic oligonucleotide
guugcuuaaaguucuaagcuuggguuc

SEQ ID NO: 77983 - RNA, 27 nt, Artificial Sequence
  Description of Artificial Sequence: Synthetic oligonucleotide
gugguggucuuguugcuuaaaguucua

SEQ ID NO: 77984 - RNA, 27 nt, Artificial Sequence
  Description of Artificial Sequence: Synthetic oligonucleotide
acuuuauuucucgccacugaauaguag

SEQ ID NO: 77985 - RNA, 27 nt, Artificial Sequence
  Description of Artificial Sequence: Synthetic oligonucleotide
aacuuuauuucucgccacugaauagua

SEQ ID NO: 77986 - RNA, 27 nt, Artificial Sequence
  Description of Artificial Sequence: Synthetic oligonucleotide
ggaucauuuccuguuaucuguguuugu

SEQ ID NO: 77987 - RNA, 27 nt, Artificial Sequence
  Description of Artificial Sequence: Synthetic oligonucleotide
guuucauuucuucucuuuucuuaaggc

SEQ ID NO: 77988 - RNA, 27 nt, Artificial Sequence
  Description of Artificial Sequence: Synthetic oligonucleotide
ggaggauggaaacacacuccuucaguu

SEQ ID NO: 77989 - RNA, 27 nt, Artificial Sequence
  Description of Artificial Sequence: Synthetic oligonucleotide
ucaaagauuuucagucccgcggugaca

SEQ ID NO: 77990 - RNA, 27 nt, Artificial Sequence
  Description of Artificial Sequence: Synthetic oligonucleotide
ccugaacggcacgcuuauuucugcugu

SEQ ID NO: 77991 - RNA, 27 nt, Artificial Sequence
  Description of Artificial Sequence: Synthetic oligonucleotide
cuucuggacccugaacggcacgcuuau

SEQ ID NO: 77992 - RNA, 27 nt, Artificial Sequence
  Description of Artificial Sequence: Synthetic oligonucleotide
caagcagucuugagugacuguuucuuc

SEQ ID NO: 77993 - RNA, 27 nt, Artificial Sequence
  Description of Artificial Sequence: Synthetic oligonucleotide
ccaaagacauggaccuucuuccucuga

SEQ ID NO: 77994 - RNA, 27 nt, Artificial Sequence
  Description of Artificial Sequence: Synthetic oligonucleotide
guguuucaggcauauuuugaauacauc

SEQ ID NO: 77995 - RNA, 27 nt, Artificial Sequence
  Description of Artificial Sequence: Synthetic oligonucleotide
gagguacagagaaagggaggaaaauag

SEQ ID NO: 77996 - RNA, 27 nt, Artificial Sequence
  Description of Artificial Sequence: Synthetic oligonucleotide
ucuugucuugcucuaucuuucuuuggu

SEQ ID NO: 77997 - RNA, 27 nt, Artificial Sequence
  Description of Artificial Sequence: Synthetic oligonucleotide
uuucuugucuugcucuaucuuucuuug

SEQ ID NO: 77998 - RNA, 27 nt, Artificial Sequence
  Description of Artificial Sequence: Synthetic oligonucleotide
ggaucuuguacaaacaaaugcuuucuc

SEQ ID NO: 77999 - RNA, 27 nt, Artificial Sequence
  Description of Artificial Sequence: Synthetic oligonucleotide
ucugcaaguacguucguuuaacucaag

SEQ ID NO: 78000 - RNA, 27 nt, Artificial Sequence
  Description of Artificial Sequence: Synthetic oligonucleotide
ucuguaucgaucguucuguaucagucu

SEQ ID NO: 78001 - RNA, 27 nt, Artificial Sequence
  Description of Artificial Sequence: Synthetic oligonucleotide
auuuauuuuuauauauauauaauauau

SEQ ID NO: 78002 - RNA, 27 nt, Artificial Sequence
  Description of Artificial Sequence: Synthetic oligonucleotide
auauuuauuuuuauauauauauaauau

SEQ ID NO: 78003 - RNA, 27 nt, Artificial Sequence
  Description of Artificial Sequence: Synthetic oligonucleotide
cacagcagucaaauacauccagugaag

SEQ ID NO: 78004 - RNA, 27 nt, Artificial Sequence
  Description of Artificial Sequence: Synthetic oligonucleotide
gucucucaucuccuccucuucccuguc

SEQ ID NO: 78005 - RNA, 27 nt, Artificial Sequence
  Description of Artificial Sequence: Synthetic oligonucleotide
ccaagugggacaaaaaaaagaucaugc

SEQ ID NO: 78006 - RNA, 14 nt, Artificial Sequence
  Description of Artificial Sequence: Synthetic oligonucleotide
guauuuugaugagg

SEQ ID NO: 78007 - RNA, 12 nt, Artificial Sequence
  Description of Artificial Sequence: Synthetic oligonucleotide
ggcccagaugau

SEQ ID NO: 78008 - RNA, 14 nt, Artificial Sequence
  Description of Artificial Sequence: Synthetic oligonucleotide
gggaagaaaacuau

SEQ ID NO: 78009 - RNA, 15 nt, Artificial Sequence
  Description of Artificial Sequence: Synthetic oligonucleotide
guuuuaauuuauuuc

SEQ ID NO: 78010 - RNA, 12 nt, Artificial Sequence
  Description of Artificial Sequence: Synthetic oligonucleotide
acguagggaaau

SEQ ID NO: 78011 - RNA, 12 nt, Artificial Sequence
  Description of Artificial Sequence: Synthetic oligonucleotide
ccaggguuuacc

SEQ ID NO: 78012 - RNA, 11 nt, Artificial Sequence
  Description of Artificial Sequence: Synthetic oligonucleotide
agcaagguuua

SEQ ID NO: 78013 - RNA, 12 nt, Artificial Sequence
  Description of Artificial Sequence: Synthetic oligonucleotide
uguauuauguug

SEQ ID NO: 78014 - RNA, 15 nt, Artificial Sequence
  Description of Artificial Sequence: Synthetic oligonucleotide
uuuuaaucuuuguga

SEQ ID NO: 78015 - RNA, 14 nt, Artificial Sequence
  Description of Artificial Sequence: Synthetic oligonucleotide
uuaaucuuugugac

SEQ ID NO: 78016 - RNA, 13 nt, Artificial Sequence
  Description of Artificial Sequence: Synthetic oligonucleotide
gcugcuuaugucu

SEQ ID NO: 78017 - RNA, 14 nt, Artificial Sequence
  Description of Artificial Sequence: Synthetic oligonucleotide
aaguguuucagaag

SEQ ID NO: 78018 - RNA, 13 nt, Artificial Sequence
  Description of Artificial Sequence: Synthetic oligonucleotide
gaccaucaauaag

SEQ ID NO: 78019 - RNA, 13 nt, Artificial Sequence
  Description of Artificial Sequence: Synthetic oligonucleotide
ccaucaauaagga

SEQ ID NO: 78020 - RNA, 14 nt, Artificial Sequence
  Description of Artificial Sequence: Synthetic oligonucleotide
ucaauaaggaagaa

SEQ ID NO: 78021 - RNA, 14 nt, Artificial Sequence
  Description of Artificial Sequence: Synthetic oligonucleotide
aauaaggaagaagc

SEQ ID NO: 78022 - RNA, 13 nt, Artificial Sequence
  Description of Artificial Sequence: Synthetic oligonucleotide
aggaagaagcccu

SEQ ID NO: 78023 - RNA, 13 nt, Artificial Sequence
  Description of Artificial Sequence: Synthetic oligonucleotide
gcauaacuaaagg

SEQ ID NO: 78024 - RNA, 14 nt, Artificial Sequence
  Description of Artificial Sequence: Synthetic oligonucleotide
cauaacuaaaggug

SEQ ID NO: 78025 - RNA, 12 nt, Artificial Sequence
  Description of Artificial Sequence: Synthetic oligonucleotide
cuacaucacgcc

SEQ ID NO: 78026 - RNA, 12 nt, Artificial Sequence
  Description of Artificial Sequence: Synthetic oligonucleotide
acuggauuuaag

SEQ ID NO: 78027 - RNA, 12 nt, Artificial Sequence
  Description of Artificial Sequence: Synthetic oligonucleotide
cuggauuuaagc

SEQ ID NO: 78028 - RNA, 13 nt, Artificial Sequence
  Description of Artificial Sequence: Synthetic oligonucleotide
gauuuaagcagag

SEQ ID NO: 78029 - RNA, 13 nt, Artificial Sequence
  Description of Artificial Sequence: Synthetic oligonucleotide
auuuaagcagagu

SEQ ID NO: 78030 - RNA, 13 nt, Artificial Sequence
  Description of Artificial Sequence: Synthetic oligonucleotide
uuaagcagaguuc

SEQ ID NO: 78031 - RNA, 13 nt, Artificial Sequence
  Description of Artificial Sequence: Synthetic oligonucleotide
uaagcagaguuca

SEQ ID NO: 78032 - RNA, 14 nt, Artificial Sequence
  Description of Artificial Sequence: Synthetic oligonucleotide
agcagaguucaaaa

SEQ ID NO: 78033 - RNA, 12 nt, Artificial Sequence
  Description of Artificial Sequence: Synthetic oligonucleotide
cucagggucuga

SEQ ID NO: 78034 - RNA, 13 nt, Artificial Sequence
  Description of Artificial Sequence: Synthetic oligonucleotide
caagcaacuacau

SEQ ID NO: 78035 - RNA, 12 nt, Artificial Sequence
  Description of Artificial Sequence: Synthetic oligonucleotide
aucaauggcagc

SEQ ID NO: 78036 - RNA, 11 nt, Artificial Sequence
  Description of Artificial Sequence: Synthetic oligonucleotide
uuccagcccac

SEQ ID NO: 78037 - RNA, 12 nt, Artificial Sequence
  Description of Artificial Sequence: Synthetic oligonucleotide
cagcugagaaug

SEQ ID NO: 78038 - RNA, 13 nt, Artificial Sequence
  Description of Artificial Sequence: Synthetic oligonucleotide
aacguaucuccua

SEQ ID NO: 78039 - RNA, 14 nt, Artificial Sequence
  Description of Artificial Sequence: Synthetic oligonucleotide
ccuaaaauaauuuc

SEQ ID NO: 78040 - RNA, 13 nt, Artificial Sequence
  Description of Artificial Sequence: Synthetic oligonucleotide
uggaagauucagc

SEQ ID NO: 78041 - RNA, 12 nt, Artificial Sequence
  Description of Artificial Sequence: Synthetic oligonucleotide
uuaaacucuccu

SEQ ID NO: 78042 - RNA, 12 nt, Artificial Sequence
  Description of Artificial Sequence: Synthetic oligonucleotide
cagccuacaguu

SEQ ID NO: 78043 - RNA, 13 nt, Artificial Sequence
  Description of Artificial Sequence: Synthetic oligonucleotide
guuauguucaguc

SEQ ID NO: 78044 - RNA, 13 nt, Artificial Sequence
  Description of Artificial Sequence: Synthetic oligonucleotide
cacauacaaaaug

SEQ ID NO: 78045 - RNA, 9 nt, Artificial Sequence
  Description of Artificial Sequence: Synthetic oligonucleotide
uccuuuugc

SEQ ID NO: 78046 - RNA, 12 nt, Artificial Sequence
  Description of Artificial Sequence: Synthetic oligonucleotide
ugaccugugaag

SEQ ID NO: 78047 - RNA, 12 nt, Artificial Sequence
  Description of Artificial Sequence: Synthetic oligonucleotide
cuaucucacaca

SEQ ID NO: 78048 - RNA, 13 nt, Artificial Sequence
  Description of Artificial Sequence: Synthetic oligonucleotide
uguccucaauugu

SEQ ID NO: 78049 - RNA, 12 nt, Artificial Sequence
  Description of Artificial Sequence: Synthetic oligonucleotide
aaaccguagcug

SEQ ID NO: 78050 - RNA, 12 nt, Artificial Sequence
  Description of Artificial Sequence: Synthetic oligonucleotide
uagcuggcaagc

SEQ ID NO: 78051 - RNA, 14 nt, Artificial Sequence
  Description of Artificial Sequence: Synthetic oligonucleotide
uuguaugguuaaaa

SEQ ID NO: 78052 - RNA, 14 nt, Artificial Sequence
  Description of Artificial Sequence: Synthetic oligonucleotide
ugguuaaaagaugg

SEQ ID NO: 78053 - RNA, 13 nt, Artificial Sequence
  Description of Artificial Sequence: Synthetic oligonucleotide
cagggaauuauac

SEQ ID NO: 78054 - RNA, 12 nt, Artificial Sequence
  Description of Artificial Sequence: Synthetic oligonucleotide
acaaucuugcug

SEQ ID NO: 78055 - RNA, 13 nt, Artificial Sequence
  Description of Artificial Sequence: Synthetic oligonucleotide
ccaauaaugaaga

SEQ ID NO: 78056 - RNA, 13 nt, Artificial Sequence
  Description of Artificial Sequence: Synthetic oligonucleotide
acuuuggauguuc

SEQ ID NO: 78057 - RNA, 12 nt, Artificial Sequence
  Description of Artificial Sequence: Synthetic oligonucleotide
aaugcuuccacu

SEQ ID NO: 78058 - RNA, 11 nt, Artificial Sequence
  Description of Artificial Sequence: Synthetic oligonucleotide
gagaaaguuug

SEQ ID NO: 78059 - RNA, 11 nt, Artificial Sequence
  Description of Artificial Sequence: Synthetic oligonucleotide
aaagaacuacu

SEQ ID NO: 78060 - RNA, 12 nt, Artificial Sequence
  Description of Artificial Sequence: Synthetic oligonucleotide
uuagaaauacgg

SEQ ID NO: 78061 - RNA, 12 nt, Artificial Sequence
  Description of Artificial Sequence: Synthetic oligonucleotide
aacauggguaca

SEQ ID NO: 78062 - RNA, 14 nt, Artificial Sequence
  Description of Artificial Sequence: Synthetic oligonucleotide
aaagacacagaaga

SEQ ID NO: 78063 - RNA, 11 nt, Artificial Sequence
  Description of Artificial Sequence: Synthetic oligonucleotide
uaguagggagg

SEQ ID NO: 78064 - RNA, 12 nt, Artificial Sequence
  Description of Artificial Sequence: Synthetic oligonucleotide
gccuucugcagc

SEQ ID NO: 78065 - RNA, 10 nt, Artificial Sequence
  Description of Artificial Sequence: Synthetic oligonucleotide
ggucugguac

SEQ ID NO: 78066 - RNA, 12 nt, Artificial Sequence
  Description of Artificial Sequence: Synthetic oligonucleotide
cuaguccuuccg

SEQ ID NO: 78067 - RNA, 12 nt, Artificial Sequence
  Description of Artificial Sequence: Synthetic oligonucleotide
ccagugaauauu

SEQ ID NO: 78068 - RNA, 13 nt, Artificial Sequence
  Description of Artificial Sequence: Synthetic oligonucleotide
augaauucaaguu

SEQ ID NO: 78069 - RNA, 12 nt, Artificial Sequence
  Description of Artificial Sequence: Synthetic oligonucleotide
caggacacagau

SEQ ID NO: 78070 - RNA, 12 nt, Artificial Sequence
  Description of Artificial Sequence: Synthetic oligonucleotide
cucaaagcacag

SEQ ID NO: 78071 - RNA, 10 nt, Artificial Sequence
  Description of Artificial Sequence: Synthetic oligonucleotide
accacugcca

SEQ ID NO: 78072 - RNA, 13 nt, Artificial Sequence
  Description of Artificial Sequence: Synthetic oligonucleotide
gaaacuacuagug

SEQ ID NO: 78073 - RNA, 12 nt, Artificial Sequence
  Description of Artificial Sequence: Synthetic oligonucleotide
aagucggacagc

SEQ ID NO: 78074 - RNA, 13 nt, Artificial Sequence
  Description of Artificial Sequence: Synthetic oligonucleotide
gaaagcgaaaaau

SEQ ID NO: 78075 - RNA, 13 nt, Artificial Sequence
  Description of Artificial Sequence: Synthetic oligonucleotide
cccucugauuuag

SEQ ID NO: 78076 - RNA, 12 nt, Artificial Sequence
  Description of Artificial Sequence: Synthetic oligonucleotide
ugagcuauuuaa

SEQ ID NO: 78077 - RNA, 13 nt, Artificial Sequence
  Description of Artificial Sequence: Synthetic oligonucleotide
aaaaggugaaaaa

SEQ ID NO: 78078 - RNA, 14 nt, Artificial Sequence
  Description of Artificial Sequence: Synthetic oligonucleotide
gaaaaagcacuauu

SEQ ID NO: 78079 - RNA, 12 nt, Artificial Sequence
  Description of Artificial Sequence: Synthetic oligonucleotide
ggcugaaaagaa

SEQ ID NO: 78080 - RNA, 12 nt, Artificial Sequence
  Description of Artificial Sequence: Synthetic oligonucleotide
uaaacccuuaua

SEQ ID NO: 78081 - RNA, 13 nt, Artificial Sequence
  Description of Artificial Sequence: Synthetic oligonucleotide
cauacuauuagcc

SEQ ID NO: 78082 - RNA, 12 nt, Artificial Sequence
  Description of Artificial Sequence: Synthetic oligonucleotide
gacagaagcauu

SEQ ID NO: 78083 - RNA, 14 nt, Artificial Sequence
  Description of Artificial Sequence: Synthetic oligonucleotide
agagcaaauaagau

SEQ ID NO: 78084 - RNA, 14 nt, Artificial Sequence
  Description of Artificial Sequence: Synthetic oligonucleotide
ccaacauuuuucuc

SEQ ID NO: 78085 - RNA, 15 nt, Artificial Sequence
  Description of Artificial Sequence: Synthetic oligonucleotide
uuaaguaugagaaaa

SEQ ID NO: 78086 - RNA, 14 nt, Artificial Sequence
  Description of Artificial Sequence: Synthetic oligonucleotide
caggaauaaagaug

SEQ ID NO: 78087 - RNA, 13 nt, Artificial Sequence
  Description of Artificial Sequence: Synthetic oligonucleotide
aauuugaaugacc

SEQ ID NO: 78088 - RNA, 14 nt, Artificial Sequence
  Description of Artificial Sequence: Synthetic oligonucleotide
auguauaaagauag

SEQ ID NO: 78089 - RNA, 12 nt, Artificial Sequence
  Description of Artificial Sequence: Synthetic oligonucleotide
ggcuguaacuau

SEQ ID NO: 78090 - RNA, 11 nt, Artificial Sequence
  Description of Artificial Sequence: Synthetic oligonucleotide
ucugugaagug

SEQ ID NO: 78091 - RNA, 14 nt, Artificial Sequence
  Description of Artificial Sequence: Synthetic oligonucleotide
ccuuuaaggaaaug

SEQ ID NO: 78092 - RNA, 13 nt, Artificial Sequence
  Description of Artificial Sequence: Synthetic oligonucleotide
aaggauacaaaaa

SEQ ID NO: 78093 - RNA, 12 nt, Artificial Sequence
  Description of Artificial Sequence: Synthetic oligonucleotide
agaugcaauuug

SEQ ID NO: 78094 - RNA, 12 nt, Artificial Sequence
  Description of Artificial Sequence: Synthetic oligonucleotide
guucaaaacgaa

SEQ ID NO: 78095 - RNA, 11 nt, Artificial Sequence
  Description of Artificial Sequence: Synthetic oligonucleotide
gugaaaccuca

SEQ ID NO: 78096 - RNA, 13 nt, Artificial Sequence
  Description of Artificial Sequence: Synthetic oligonucleotide
acgaaagagaagc

SEQ ID NO: 78097 - RNA, 12 nt, Artificial Sequence
  Description of Artificial Sequence: Synthetic oligonucleotide
cuccacaagcgc

SEQ ID NO: 78098 - RNA, 14 nt, Artificial Sequence
  Description of Artificial Sequence: Synthetic oligonucleotide
gagaagauuccaaa

SEQ ID NO: 78099 - RNA, 13 nt, Artificial Sequence
  Description of Artificial Sequence: Synthetic oligonucleotide
aaucuggauucaa

SEQ ID NO: 78100 - RNA, 13 nt, Artificial Sequence
  Description of Artificial Sequence: Synthetic oligonucleotide
agaacagauuuga

SEQ ID NO: 78101 - RNA, 11 nt, Artificial Sequence
  Description of Artificial Sequence: Synthetic oligonucleotide
ccagagcugug

SEQ ID NO: 78102 - RNA, 12 nt, Artificial Sequence
  Description of Artificial Sequence: Synthetic oligonucleotide
ccucagauuguu

SEQ ID NO: 78103 - RNA, 12 nt, Artificial Sequence
  Description of Artificial Sequence: Synthetic oligonucleotide
cuauuuuaauua

SEQ ID NO: 78104 - RNA, 13 nt, Artificial Sequence
  Description of Artificial Sequence: Synthetic oligonucleotide
uuuaauuuauuaa

SEQ ID NO: 78105 - RNA, 12 nt, Artificial Sequence
  Description of Artificial Sequence: Synthetic oligonucleotide
augcaguuugaa

SEQ ID NO: 78106 - RNA, 11 nt, Artificial Sequence
  Description of Artificial Sequence: Synthetic oligonucleotide
caugcugcugg

SEQ ID NO: 78107 - RNA, 13 nt, Artificial Sequence
  Description of Artificial Sequence: Synthetic oligonucleotide
agaugugcauuuc

SEQ ID NO: 78108 - RNA, 12 nt, Artificial Sequence
  Description of Artificial Sequence: Synthetic oligonucleotide
ucaaaaccugug

SEQ ID NO: 78109 - RNA, 11 nt, Artificial Sequence
  Description of Artificial Sequence: Synthetic oligonucleotide
gaaugugggua

SEQ ID NO: 78110 - RNA, 10 nt, Artificial Sequence
  Description of Artificial Sequence: Synthetic oligonucleotide
auguggguag

SEQ ID NO: 78111 - RNA, 13 nt, Artificial Sequence
  Description of Artificial Sequence: Synthetic oligonucleotide
ugaaaaugagcau

SEQ ID NO: 78112 - RNA, 13 nt, Artificial Sequence
  Description of Artificial Sequence: Synthetic oligonucleotide
uugcuuuucaugu

SEQ ID NO: 78113 - RNA, 12 nt, Artificial Sequence
  Description of Artificial Sequence: Synthetic oligonucleotide
uguauuucuaua

SEQ ID NO: 78114 - RNA, 13 nt, Artificial Sequence
  Description of Artificial Sequence: Synthetic oligonucleotide
uuugauuaauguu

SEQ ID NO: 78115 - RNA, 12 nt, Artificial Sequence
  Description of Artificial Sequence: Synthetic oligonucleotide
caacguguauag

SEQ ID NO: 78116 - RNA, 12 nt, Artificial Sequence
  Description of Artificial Sequence: Synthetic oligonucleotide
cauauccuuggc

SEQ ID NO: 78117 - RNA, 13 nt, Artificial Sequence
  Description of Artificial Sequence: Synthetic oligonucleotide
uacuaacaucugg

SEQ ID NO: 78118 - RNA, 11 nt, Artificial Sequence
  Description of Artificial Sequence: Synthetic oligonucleotide
cauaaguugug

SEQ ID NO: 78119 - RNA, 12 nt, Artificial Sequence
  Description of Artificial Sequence: Synthetic oligonucleotide
gcaucauuuugg

SEQ ID NO: 78120 - RNA, 10 nt, Artificial Sequence
  Description of Artificial Sequence: Synthetic oligonucleotide
gcucuucuua

SEQ ID NO: 78121 - RNA, 10 nt, Artificial Sequence
  Description of Artificial Sequence: Synthetic oligonucleotide
agauuagguc

SEQ ID NO: 78122 - RNA, 12 nt, Artificial Sequence
  Description of Artificial Sequence: Synthetic oligonucleotide
auggaauugaaa

SEQ ID NO: 78123 - RNA, 13 nt, Artificial Sequence
  Description of Artificial Sequence: Synthetic oligonucleotide
cacacucauuccu

SEQ ID NO: 78124 - RNA, 12 nt, Artificial Sequence
  Description of Artificial Sequence: Synthetic oligonucleotide
uguagagguaac

SEQ ID NO: 78125 - RNA, 11 nt, Artificial Sequence
  Description of Artificial Sequence: Synthetic oligonucleotide
caaccacaugc

SEQ ID NO: 78126 - RNA, 12 nt, Artificial Sequence
  Description of Artificial Sequence: Synthetic oligonucleotide
ucggaaacaagu

SEQ ID NO: 78127 - RNA, 11 nt, Artificial Sequence
  Description of Artificial Sequence: Synthetic oligonucleotide
acucccaauaa

SEQ ID NO: 78128 - RNA, 13 nt, Artificial Sequence
  Description of Artificial Sequence: Synthetic oligonucleotide
aaugcuaagaaau

SEQ ID NO: 78129 - RNA, 11 nt, Artificial Sequence
  Description of Artificial Sequence: Synthetic oligonucleotide
gucuuucucua

SEQ ID NO: 78130 - RNA, 11 nt, Artificial Sequence
  Description of Artificial Sequence: Synthetic oligonucleotide
ugaauuucagg

SEQ ID NO: 78131 - RNA, 13 nt, Artificial Sequence
  Description of Artificial Sequence: Synthetic oligonucleotide
cgauucccucuca

SEQ ID NO: 78132 - RNA, 11 nt, Artificial Sequence
  Description of Artificial Sequence: Synthetic oligonucleotide
aggaaagugaa

SEQ ID NO: 78133 - RNA, 12 nt, Artificial Sequence
  Description of Artificial Sequence: Synthetic oligonucleotide
gaggcugcaugc

SEQ ID NO: 78134 - RNA, 11 nt, Artificial Sequence
  Description of Artificial Sequence: Synthetic oligonucleotide
ucucugaacag

SEQ ID NO: 78135 - RNA, 12 nt, Artificial Sequence
  Description of Artificial Sequence: Synthetic oligonucleotide
aacuuggcugua

SEQ ID NO: 78136 - RNA, 12 nt, Artificial Sequence
  Description of Artificial Sequence: Synthetic oligonucleotide
agaagccaaaau

SEQ ID NO: 78137 - RNA, 14 nt, Artificial Sequence
  Description of Artificial Sequence: Synthetic oligonucleotide
auuaaaagaagucc

SEQ ID NO: 78138 - RNA, 14 nt, Artificial Sequence
  Description of Artificial Sequence: Synthetic oligonucleotide
gaauccggauuauc

SEQ ID NO: 78139 - RNA, 12 nt, Artificial Sequence
  Description of Artificial Sequence: Synthetic oligonucleotide
aaugugacauca

SEQ ID NO: 78140 - RNA, 13 nt, Artificial Sequence
  Description of Artificial Sequence: Synthetic oligonucleotide
caucaaagcaagu

SEQ ID NO: 78141 - RNA, 11 nt, Artificial Sequence
  Description of Artificial Sequence: Synthetic oligonucleotide
agagagagaaa

SEQ ID NO: 78142 - RNA, 13 nt, Artificial Sequence
  Description of Artificial Sequence: Synthetic oligonucleotide
ucgcuguaguauu

SEQ ID NO: 78143 - RNA, 14 nt, Artificial Sequence
  Description of Artificial Sequence: Synthetic oligonucleotide
cgcuguaguauuua

SEQ ID NO: 78144 - RNA, 13 nt, Artificial Sequence
  Description of Artificial Sequence: Synthetic oligonucleotide
auuuaagcccaua

SEQ ID NO: 78145 - RNA, 15 nt, Artificial Sequence
  Description of Artificial Sequence: Synthetic oligonucleotide
auuaaaauaaacaug

SEQ ID NO: 78146 - RNA, 12 nt, Artificial Sequence
  Description of Artificial Sequence: Synthetic oligonucleotide
cuguucugaucg

SEQ ID NO: 78147 - RNA, 16 nt, Artificial Sequence
  Description of Artificial Sequence: Synthetic oligonucleotide
aaauaauuugaacuuu

SEQ ID NO: 78148 - RNA, 12 nt, Artificial Sequence
  Description of Artificial Sequence: Synthetic oligonucleotide
ugcgaccuuaau

SEQ ID NO: 78149 - RNA, 11 nt, Artificial Sequence
  Description of Artificial Sequence: Synthetic oligonucleotide
cugagaaagcu

SEQ ID NO: 78150 - RNA, 13 nt, Artificial Sequence
  Description of Artificial Sequence: Synthetic oligonucleotide
aguaaagaugcua

SEQ ID NO: 78151 - RNA, 12 nt, Artificial Sequence
  Description of Artificial Sequence: Synthetic oligonucleotide
cugcuuaauugc

SEQ ID NO: 78152 - RNA, 14 nt, Artificial Sequence
  Description of Artificial Sequence: Synthetic oligonucleotide
uaccauaugaauga

SEQ ID NO: 78153 - RNA, 12 nt, Artificial Sequence
  Description of Artificial Sequence: Synthetic oligonucleotide
aacuuucuuauc

SEQ ID NO: 78154 - RNA, 13 nt, Artificial Sequence
  Description of Artificial Sequence: Synthetic oligonucleotide
ccuugcaugacau

SEQ ID NO: 78155 - RNA, 14 nt, Artificial Sequence
  Description of Artificial Sequence: Synthetic oligonucleotide
ugaauuuguauaug

SEQ ID NO: 78156 - RNA, 12 nt, Artificial Sequence
  Description of Artificial Sequence: Synthetic oligonucleotide
gaauccuaguag

SEQ ID NO: 78157 - RNA, 10 nt, Artificial Sequence
  Description of Artificial Sequence: Synthetic oligonucleotide
gaaagggaag

SEQ ID NO: 78158 - RNA, 11 nt, Artificial Sequence
  Description of Artificial Sequence: Synthetic oligonucleotide
uaucggcaugc

SEQ ID NO: 78159 - RNA, 12 nt, Artificial Sequence
  Description of Artificial Sequence: Synthetic oligonucleotide
caccucauagua

SEQ ID NO: 78160 - RNA, 11 nt, Artificial Sequence
  Description of Artificial Sequence: Synthetic oligonucleotide
ccagaauugcc

SEQ ID NO: 78161 - RNA, 11 nt, Artificial Sequence
  Description of Artificial Sequence: Synthetic oligonucleotide
uggugaucugg

SEQ ID NO: 78162 - RNA, 12 nt, Artificial Sequence
  Description of Artificial Sequence: Synthetic oligonucleotide
gaucuggguaau

SEQ ID NO: 78163 - RNA, 12 nt, Artificial Sequence
  Description of Artificial Sequence: Synthetic oligonucleotide
ggaugugaugaa

SEQ ID NO: 78164 - RNA, 12 nt, Artificial Sequence
  Description of Artificial Sequence: Synthetic oligonucleotide
cauuuccacagc

SEQ ID NO: 78165 - RNA, 11 nt, Artificial Sequence
  Description of Artificial Sequence: Synthetic oligonucleotide
acagcuacacc

SEQ ID NO: 78166 - RNA, 12 nt, Artificial Sequence
  Description of Artificial Sequence: Synthetic oligonucleotide
ugcaguucuuac

SEQ ID NO: 78167 - RNA, 12 nt, Artificial Sequence
  Description of Artificial Sequence: Synthetic oligonucleotide
acgagaagaaga

SEQ ID NO: 78168 - RNA, 12 nt, Artificial Sequence
  Description of Artificial Sequence: Synthetic oligonucleotide
cgagaagaagau

SEQ ID NO: 78169 - RNA, 15 nt, Artificial Sequence
  Description of Artificial Sequence: Synthetic oligonucleotide
aagaagaucauuuac

SEQ ID NO: 78170 - RNA, 11 nt, Artificial Sequence
  Description of Artificial Sequence: Synthetic oligonucleotide
agaggaagagg

SEQ ID NO: 78171 - RNA, 12 nt, Artificial Sequence
  Description of Artificial Sequence: Synthetic oligonucleotide
gaggaagaggug

SEQ ID NO: 78172 - RNA, 13 nt, Artificial Sequence
  Description of Artificial Sequence: Synthetic oligonucleotide
cuacuuugagggc

SEQ ID NO: 78173 - RNA, 12 nt, Artificial Sequence
  Description of Artificial Sequence: Synthetic oligonucleotide
agggcaucuccu

SEQ ID NO: 78174 - RNA, 10 nt, Artificial Sequence
  Description of Artificial Sequence: Synthetic oligonucleotide
ggagugauau

SEQ ID NO: 78175 - RNA, 11 nt, Artificial Sequence
  Description of Artificial Sequence: Synthetic oligonucleotide
gagugauaugg

SEQ ID NO: 78176 - RNA, 12 nt, Artificial Sequence
  Description of Artificial Sequence: Synthetic oligonucleotide
ugcaguaaagau

SEQ ID NO: 78177 - RNA, 13 nt, Artificial Sequence
  Description of Artificial Sequence: Synthetic oligonucleotide
aguaaagauccua

SEQ ID NO: 78178 - RNA, 12 nt, Artificial Sequence
  Description of Artificial Sequence: Synthetic oligonucleotide
ugacaaaggaca

SEQ ID NO: 78179 - RNA, 13 nt, Artificial Sequence
  Description of Artificial Sequence: Synthetic oligonucleotide
gcaauugugaccc

SEQ ID NO: 78180 - RNA, 12 nt, Artificial Sequence
  Description of Artificial Sequence: Synthetic oligonucleotide
aacaucauccau

SEQ ID NO: 78181 - RNA, 12 nt, Artificial Sequence
  Description of Artificial Sequence: Synthetic oligonucleotide
ugaaauccaaca

SEQ ID NO: 78182 - RNA, 15 nt, Artificial Sequence
  Description of Artificial Sequence: Synthetic oligonucleotide
aacaauauauuucuc

SEQ ID NO: 78183 - RNA, 14 nt, Artificial Sequence
  Description of Artificial Sequence: Synthetic oligonucleotide
aacaguaaagucac

SEQ ID NO: 78184 - RNA, 14 nt, Artificial Sequence
  Description of Artificial Sequence: Synthetic oligonucleotide
ugugaagaaaguaa

SEQ ID NO: 78185 - RNA, 13 nt, Artificial Sequence
  Description of Artificial Sequence: Synthetic oligonucleotide
cuuccgagccauc

SEQ ID NO: 78186 - RNA, 12 nt, Artificial Sequence
  Description of Artificial Sequence: Synthetic oligonucleotide
aauggagguuga

SEQ ID NO: 78187 - RNA, 12 nt, Artificial Sequence
  Description of Artificial Sequence: Synthetic oligonucleotide
ggagguugaaua

SEQ ID NO: 78188 - RNA, 13 nt, Artificial Sequence
  Description of Artificial Sequence: Synthetic oligonucleotide
auuuugaguuuuc

SEQ ID NO: 78189 - RNA, 12 nt, Artificial Sequence
  Description of Artificial Sequence: Synthetic oligonucleotide
uauccuguuugu

SEQ ID NO: 78190 - RNA, 11 nt, Artificial Sequence
  Description of Artificial Sequence: Synthetic oligonucleotide
ccuguuuguuc

SEQ ID NO: 78191 - RNA, 10 nt, Artificial Sequence
  Description of Artificial Sequence: Synthetic oligonucleotide
cucuacagcc

SEQ ID NO: 78192 - RNA, 12 nt, Artificial Sequence
  Description of Artificial Sequence: Synthetic oligonucleotide
ucuuccauagcu

SEQ ID NO: 78193 - RNA, 12 nt, Artificial Sequence
  Description of Artificial Sequence: Synthetic oligonucleotide
auaaucuuccug

SEQ ID NO: 78194 - RNA, 12 nt, Artificial Sequence
  Description of Artificial Sequence: Synthetic oligonucleotide
uaaucuuccugu

SEQ ID NO: 78195 - RNA, 12 nt, Artificial Sequence
  Description of Artificial Sequence: Synthetic oligonucleotide
cuucaugacuug

SEQ ID NO: 78196 - RNA, 12 nt, Artificial Sequence
  Description of Artificial Sequence: Synthetic oligonucleotide
aagagggagaga

SEQ ID NO: 78197 - RNA, 12 nt, Artificial Sequence
  Description of Artificial Sequence: Synthetic oligonucleotide
cgucuccuacca

SEQ ID NO: 78198 - RNA, 12 nt, Artificial Sequence
  Description of Artificial Sequence: Synthetic oligonucleotide
gaucaaucggcc

SEQ ID NO: 78199 - RNA, 12 nt, Artificial Sequence
  Description of Artificial Sequence: Synthetic oligonucleotide
ggacgaacaucc

SEQ ID NO: 78200 - RNA, 11 nt, Artificial Sequence
  Description of Artificial Sequence: Synthetic oligonucleotide
agggucggaac

SEQ ID NO: 78201 - RNA, 10 nt, Artificial Sequence
  Description of Artificial Sequence: Synthetic oligonucleotide
ucggaaccca

SEQ ID NO: 78202 - RNA, 11 nt, Artificial Sequence
  Description of Artificial Sequence: Synthetic oligonucleotide
acccaagcuua

SEQ ID NO: 78203 - RNA, 14 nt, Artificial Sequence
  Description of Artificial Sequence: Synthetic oligonucleotide
gaacuuuaagcaac

SEQ ID NO: 78204 - RNA, 11 nt, Artificial Sequence
  Description of Artificial Sequence: Synthetic oligonucleotide
acuauucagug

SEQ ID NO: 78205 - RNA, 11 nt, Artificial Sequence
  Description of Artificial Sequence: Synthetic oligonucleotide
cuauucagugg

SEQ ID NO: 78206 - RNA, 13 nt, Artificial Sequence
  Description of Artificial Sequence: Synthetic oligonucleotide
aaacacagauaac

SEQ ID NO: 78207 - RNA, 12 nt, Artificial Sequence
  Description of Artificial Sequence: Synthetic oligonucleotide
cuuaagaaaaga

SEQ ID NO: 78208 - RNA, 12 nt, Artificial Sequence
  Description of Artificial Sequence: Synthetic oligonucleotide
cugaaggagugu

SEQ ID NO: 78209 - RNA, 10 nt, Artificial Sequence
  Description of Artificial Sequence: Synthetic oligonucleotide
ucaccgcggg

SEQ ID NO: 78210 - RNA, 14 nt, Artificial Sequence
  Description of Artificial Sequence: Synthetic oligonucleotide
agcagaaauaagcg

SEQ ID NO: 78211 - RNA, 12 nt, Artificial Sequence
  Description of Artificial Sequence: Synthetic oligonucleotide
aagcgugccguu

SEQ ID NO: 78212 - RNA, 12 nt, Artificial Sequence
  Description of Artificial Sequence: Synthetic oligonucleotide
agaaacagucac

SEQ ID NO: 78213 - RNA, 12 nt, Artificial Sequence
  Description of Artificial Sequence: Synthetic oligonucleotide
agaggaagaagg

SEQ ID NO: 78214 - RNA, 14 nt, Artificial Sequence
  Description of Artificial Sequence: Synthetic oligonucleotide
uguauucaaaauau

SEQ ID NO: 78215 - RNA, 13 nt, Artificial Sequence
  Description of Artificial Sequence: Synthetic oligonucleotide
auuuuccucccuu

SEQ ID NO: 78216 - RNA, 13 nt, Artificial Sequence
  Description of Artificial Sequence: Synthetic oligonucleotide
caaagaaagauag

SEQ ID NO: 78217 - RNA, 12 nt, Artificial Sequence
  Description of Artificial Sequence: Synthetic oligonucleotide
aagaaagauaga

SEQ ID NO: 78218 - RNA, 13 nt, Artificial Sequence
  Description of Artificial Sequence: Synthetic oligonucleotide
gaaagcauuuguu

SEQ ID NO: 78219 - RNA, 13 nt, Artificial Sequence
  Description of Artificial Sequence: Synthetic oligonucleotide
ugaguuaaacgaa

SEQ ID NO: 78220 - RNA, 12 nt, Artificial Sequence
  Description of Artificial Sequence: Synthetic oligonucleotide
acugauacagaa

SEQ ID NO: 78221 - RNA, 12 nt, Artificial Sequence
  Description of Artificial Sequence: Synthetic oligonucleotide
auauuauauaua

SEQ ID NO: 78222 - RNA, 12 nt, Artificial Sequence
  Description of Artificial Sequence: Synthetic oligonucleotide
auuauauauaua

SEQ ID NO: 78223 - RNA, 12 nt, Artificial Sequence
  Description of Artificial Sequence: Synthetic oligonucleotide
ucacuggaugua

SEQ ID NO: 78224 - RNA, 12 nt, Artificial Sequence
  Description of Artificial Sequence: Synthetic oligonucleotide
cagggaagagga

SEQ ID NO: 78225 - RNA, 15 nt, Artificial Sequence
  Description of Artificial Sequence: Synthetic oligonucleotide
augaucuuuuuuuug

SEQ ID NO: 78226 - RNA, 11 nt, Artificial Sequence
  Description of Artificial Sequence: Synthetic oligonucleotide
aguucacggcc

SEQ ID NO: 78227 - RNA, 13 nt, Artificial Sequence
  Description of Artificial Sequence: Synthetic oligonucleotide
caccaucacacca

SEQ ID NO: 78228 - RNA, 11 nt, Artificial Sequence
  Description of Artificial Sequence: Synthetic oligonucleotide
ccugcggguuu

SEQ ID NO: 78229 - RNA, 10 nt, Artificial Sequence
  Description of Artificial Sequence: Synthetic oligonucleotide
auccaguuug

SEQ ID NO: 78230 - RNA, 13 nt, Artificial Sequence
  Description of Artificial Sequence: Synthetic oligonucleotide
guuaaggacuucu

SEQ ID NO: 78231 - RNA, 13 nt, Artificial Sequence
  Description of Artificial Sequence: Synthetic oligonucleotide
cagugggacagag

SEQ ID NO: 78232 - RNA, 14 nt, Artificial Sequence
  Description of Artificial Sequence: Synthetic oligonucleotide
aauuuguuauugug

SEQ ID NO: 78233 - RNA, 13 nt, Artificial Sequence
  Description of Artificial Sequence: Synthetic oligonucleotide
uucaaaugcauuu

SEQ ID NO: 78234 - RNA, 10 nt, Artificial Sequence
  Description of Artificial Sequence: Synthetic oligonucleotide
caggaaagcc

SEQ ID NO: 78235 - RNA, 11 nt, Artificial Sequence
  Description of Artificial Sequence: Synthetic oligonucleotide
aggaaagcccu

SEQ ID NO: 78236 - RNA, 12 nt, Artificial Sequence
  Description of Artificial Sequence: Synthetic oligonucleotide
cccagcauggcc

SEQ ID NO: 78237 - RNA, 11 nt, Artificial Sequence
  Description of Artificial Sequence: Synthetic oligonucleotide
cuucucccuga

SEQ ID NO: 78238 - RNA, 12 nt, Artificial Sequence
  Description of Artificial Sequence: Synthetic oligonucleotide
gaagaagcccuu

SEQ ID NO: 78239 - RNA, 12 nt, Artificial Sequence
  Description of Artificial Sequence: Synthetic oligonucleotide
agaagcccuuca

SEQ ID NO: 78240 - RNA, 11 nt, Artificial Sequence
  Description of Artificial Sequence: Synthetic oligonucleotide
gcccuucagcg

SEQ ID NO: 78241 - RNA, 11 nt, Artificial Sequence
  Description of Artificial Sequence: Synthetic oligonucleotide
ccuucagcggc

SEQ ID NO: 78242 - RNA, 12 nt, Artificial Sequence
  Description of Artificial Sequence: Synthetic oligonucleotide
ucagcggccagu

SEQ ID NO: 78243 - RNA, 12 nt, Artificial Sequence
  Description of Artificial Sequence: Synthetic oligonucleotide
ugaaaagcuccg

SEQ ID NO: 78244 - RNA, 11 nt, Artificial Sequence
  Description of Artificial Sequence: Synthetic oligonucleotide
aaaagcuccgg

SEQ ID NO: 78245 - RNA, 13 nt, Artificial Sequence
  Description of Artificial Sequence: Synthetic oligonucleotide
agucaacagucug

SEQ ID NO: 78246 - RNA, 13 nt, Artificial Sequence
  Description of Artificial Sequence: Synthetic oligonucleotide
cagaguucaaaag

SEQ ID NO: 78247 - RNA, 13 nt, Artificial Sequence
  Description of Artificial Sequence: Synthetic oligonucleotide
agaguucaaaagc

SEQ ID NO: 78248 - RNA, 12 nt, Artificial Sequence
  Description of Artificial Sequence: Synthetic oligonucleotide
uucaaaagcccu

SEQ ID NO: 78249 - RNA, 12 nt, Artificial Sequence
  Description of Artificial Sequence: Synthetic oligonucleotide
ucaaaagcccuu

SEQ ID NO: 78250 - RNA, 12 nt, Artificial Sequence
  Description of Artificial Sequence: Synthetic oligonucleotide
aaaagcccuuca

SEQ ID NO: 78251 - RNA, 12 nt, Artificial Sequence
  Description of Artificial Sequence: Synthetic oligonucleotide
aaagcccuucag

SEQ ID NO: 78252 - RNA, 13 nt, Artificial Sequence
  Description of Artificial Sequence: Synthetic oligonucleotide
gugaagccgcucg

SEQ ID NO: 78253 - RNA, 12 nt, Artificial Sequence
  Description of Artificial Sequence: Synthetic oligonucleotide
cacgccagucaa

SEQ ID NO: 78254 - RNA, 13 nt, Artificial Sequence
  Description of Artificial Sequence: Synthetic oligonucleotide
uucuuggugcgug

SEQ ID NO: 78255 - RNA, 14 nt, Artificial Sequence
  Description of Artificial Sequence: Synthetic oligonucleotide
auuggauucaucag

SEQ ID NO: 78256 - RNA, 13 nt, Artificial Sequence
  Description of Artificial Sequence: Synthetic oligonucleotide
uggaauaccuaag

SEQ ID NO: 78257 - RNA, 12 nt, Artificial Sequence
  Description of Artificial Sequence: Synthetic oligonucleotide
auuugaggcuca

SEQ ID NO: 78258 - RNA, 11 nt, Artificial Sequence
  Description of Artificial Sequence: Synthetic oligonucleotide
ucuacaauugg

SEQ ID NO: 78259 - RNA, 12 nt, Artificial Sequence
  Description of Artificial Sequence: Synthetic oligonucleotide
uaguuaggagcc

SEQ ID NO: 78260 - RNA, 13 nt, Artificial Sequence
  Description of Artificial Sequence: Synthetic oligonucleotide
agucaauauccac

SEQ ID NO: 78261 - RNA, 13 nt, Artificial Sequence
  Description of Artificial Sequence: Synthetic oligonucleotide
auguucagucaca

SEQ ID NO: 78262 - RNA, 12 nt, Artificial Sequence
  Description of Artificial Sequence: Synthetic oligonucleotide
acacacacauac

SEQ ID NO: 78263 - RNA, 12 nt, Artificial Sequence
  Description of Artificial Sequence: Synthetic oligonucleotide
uuccuuuugcuu

SEQ ID NO: 78264 - RNA, 16 nt, Artificial Sequence
  Description of Artificial Sequence: Synthetic oligonucleotide
uuuuaaaguaauuuuu

SEQ ID NO: 78265 - RNA, 13 nt, Artificial Sequence
  Description of Artificial Sequence: Synthetic oligonucleotide
caacagucaaugg

SEQ ID NO: 78266 - RNA, 13 nt, Artificial Sequence
  Description of Artificial Sequence: Synthetic oligonucleotide
ucgacaaaccaau

SEQ ID NO: 78267 - RNA, 12 nt, Artificial Sequence
  Description of Artificial Sequence: Synthetic oligonucleotide
acugcuaccacu

SEQ ID NO: 78268 - RNA, 13 nt, Artificial Sequence
  Description of Artificial Sequence: Synthetic oligonucleotide
gcaagcggucuua

SEQ ID NO: 78269 - RNA, 13 nt, Artificial Sequence
  Description of Artificial Sequence: Synthetic oligonucleotide
ggucuuaccggcu

SEQ ID NO: 78270 - RNA, 11 nt, Artificial Sequence
  Description of Artificial Sequence: Synthetic oligonucleotide
gauggguuacc

SEQ ID NO: 78271 - RNA, 11 nt, Artificial Sequence
  Description of Artificial Sequence: Synthetic oligonucleotide
guuaccugcga

SEQ ID NO: 78272 - RNA, 12 nt, Artificial Sequence
  Description of Artificial Sequence: Synthetic oligonucleotide
aaucuugcugag

SEQ ID NO: 78273 - RNA, 13 nt, Artificial Sequence
  Description of Artificial Sequence: Synthetic oligonucleotide
agcauaaaacagu

SEQ ID NO: 78274 - RNA, 12 nt, Artificial Sequence
  Description of Artificial Sequence: Synthetic oligonucleotide
guccuuuauccu

SEQ ID NO: 78275 - RNA, 12 nt, Artificial Sequence
  Description of Artificial Sequence: Synthetic oligonucleotide
caacgcaaguug

SEQ ID NO: 78276 - RNA, 13 nt, Artificial Sequence
  Description of Artificial Sequence: Synthetic oligonucleotide
aaacugaaaccau

SEQ ID NO: 78277 - RNA, 14 nt, Artificial Sequence
  Description of Artificial Sequence: Synthetic oligonucleotide
acuuuguuaaauau

SEQ ID NO: 78278 - RNA, 14 nt, Artificial Sequence
  Description of Artificial Sequence: Synthetic oligonucleotide
guauauuaaaaguu

SEQ ID NO: 78279 - RNA, 13 nt, Artificial Sequence
  Description of Artificial Sequence: Synthetic oligonucleotide
guuuugacuuaac

SEQ ID NO: 78280 - RNA, 13 nt, Artificial Sequence
  Description of Artificial Sequence: Synthetic oligonucleotide
gcaaacucagcac

SEQ ID NO: 78281 - RNA, 11 nt, Artificial Sequence
  Description of Artificial Sequence: Synthetic oligonucleotide
ugcugaccuca

SEQ ID NO: 78282 - RNA, 14 nt, Artificial Sequence
  Description of Artificial Sequence: Synthetic oligonucleotide
uuuauucagaucgc

SEQ ID NO: 78283 - RNA, 13 nt, Artificial Sequence
  Description of Artificial Sequence: Synthetic oligonucleotide
aggguucugggau

SEQ ID NO: 78284 - RNA, 15 nt, Artificial Sequence
  Description of Artificial Sequence: Synthetic oligonucleotide
auauuggaaauuaug

SEQ ID NO: 78285 - RNA, 13 nt, Artificial Sequence
  Description of Artificial Sequence: Synthetic oligonucleotide
auggaagcacuag

SEQ ID NO: 78286 - RNA, 13 nt, Artificial Sequence
  Description of Artificial Sequence: Synthetic oligonucleotide
guuuuuaugugga

SEQ ID NO: 78287 - RNA, 12 nt, Artificial Sequence
  Description of Artificial Sequence: Synthetic oligonucleotide
ggaauugguaga

SEQ ID NO: 78288 - RNA, 13 nt, Artificial Sequence
  Description of Artificial Sequence: Synthetic oligonucleotide
uuagacuuggaga

SEQ ID NO: 78289 - RNA, 13 nt, Artificial Sequence
  Description of Artificial Sequence: Synthetic oligonucleotide
uuacaguauucca

SEQ ID NO: 78290 - RNA, 15 nt, Artificial Sequence
  Description of Artificial Sequence: Synthetic oligonucleotide
ccacugaugaauuaa

SEQ ID NO: 78291 - RNA, 12 nt, Artificial Sequence
  Description of Artificial Sequence: Synthetic oligonucleotide
ccacaucaucac

SEQ ID NO: 78292 - RNA, 13 nt, Artificial Sequence
  Description of Artificial Sequence: Synthetic oligonucleotide
cucaccaaacaga

SEQ ID NO: 78293 - RNA, 12 nt, Artificial Sequence
  Description of Artificial Sequence: Synthetic oligonucleotide
ggaacaugaugg

SEQ ID NO: 78294 - RNA, 12 nt, Artificial Sequence
  Description of Artificial Sequence: Synthetic oligonucleotide
cauguagacugc

SEQ ID NO: 78295 - RNA, 13 nt, Artificial Sequence
  Description of Artificial Sequence: Synthetic oligonucleotide
ggaucuauuuaug

SEQ ID NO: 78296 - RNA, 12 nt, Artificial Sequence
  Description of Artificial Sequence: Synthetic oligonucleotide
gcacuauuauca

SEQ ID NO: 78297 - RNA, 11 nt, Artificial Sequence
  Description of Artificial Sequence: Synthetic oligonucleotide
aucaguucugc

SEQ ID NO: 78298 - RNA, 13 nt, Artificial Sequence
  Description of Artificial Sequence: Synthetic oligonucleotide
agauuaaaccuac

SEQ ID NO: 78299 - RNA, 13 nt, Artificial Sequence
  Description of Artificial Sequence: Synthetic oligonucleotide
auaaaauccuucu

SEQ ID NO: 78300 - RNA, 12 nt, Artificial Sequence
  Description of Artificial Sequence: Synthetic oligonucleotide
aaugcuguagac

SEQ ID NO: 78301 - RNA, 13 nt, Artificial Sequence
  Description of Artificial Sequence: Synthetic oligonucleotide
uugauaggaauag

SEQ ID NO: 78302 - RNA, 11 nt, Artificial Sequence
  Description of Artificial Sequence: Synthetic oligonucleotide
aauggcccuga

SEQ ID NO: 78303 - RNA, 11 nt, Artificial Sequence
  Description of Artificial Sequence: Synthetic oligonucleotide
uuccucaagca

SEQ ID NO: 78304 - RNA, 10 nt, Artificial Sequence
  Description of Artificial Sequence: Synthetic oligonucleotide
guucagccca

SEQ ID NO: 78305 - RNA, 11 nt, Artificial Sequence
  Description of Artificial Sequence: Synthetic oligonucleotide
gcugcugaacc

SEQ ID NO: 78306 - RNA, 12 nt, Artificial Sequence
  Description of Artificial Sequence: Synthetic oligonucleotide
aaguucucuuca

SEQ ID NO: 78307 - RNA, 11 nt, Artificial Sequence
  Description of Artificial Sequence: Synthetic oligonucleotide
ccagccuagag

SEQ ID NO: 78308 - RNA, 13 nt, Artificial Sequence
  Description of Artificial Sequence: Synthetic oligonucleotide
cucugugaagugu

SEQ ID NO: 78309 - RNA, 14 nt, Artificial Sequence
  Description of Artificial Sequence: Synthetic oligonucleotide
ugagaaaauuucaa

SEQ ID NO: 78310 - RNA, 11 nt, Artificial Sequence
  Description of Artificial Sequence: Synthetic oligonucleotide
aauccuccuga

SEQ ID NO: 78311 - RNA, 12 nt, Artificial Sequence
  Description of Artificial Sequence: Synthetic oligonucleotide
gugacaucauau

SEQ ID NO: 78312 - RNA, 13 nt, Artificial Sequence
  Description of Artificial Sequence: Synthetic oligonucleotide
aaucuucaucaua

SEQ ID NO: 78313 - RNA, 13 nt, Artificial Sequence
  Description of Artificial Sequence: Synthetic oligonucleotide
gacuagcuauuaa

SEQ ID NO: 78314 - RNA, 14 nt, Artificial Sequence
  Description of Artificial Sequence: Synthetic oligonucleotide
ucucuacuaaaaau

SEQ ID NO: 78315 - RNA, 12 nt, Artificial Sequence
  Description of Artificial Sequence: Synthetic oligonucleotide
ucuaucucgccu

SEQ ID NO: 78316 - RNA, 13 nt, Artificial Sequence
  Description of Artificial Sequence: Synthetic oligonucleotide
cuucgguccaguu

SEQ ID NO: 78317 - RNA, 11 nt, Artificial Sequence
  Description of Artificial Sequence: Synthetic oligonucleotide
gauguagccgc

SEQ ID NO: 78318 - RNA, 12 nt, Artificial Sequence
  Description of Artificial Sequence: Synthetic oligonucleotide
ugaggagacuug

SEQ ID NO: 78319 - RNA, 12 nt, Artificial Sequence
  Description of Artificial Sequence: Synthetic oligonucleotide
gaguagugagga

SEQ ID NO: 78320 - RNA, 14 nt, Artificial Sequence
  Description of Artificial Sequence: Synthetic oligonucleotide
cagaugaguacaaa

SEQ ID NO: 78321 - RNA, 13 nt, Artificial Sequence
  Description of Artificial Sequence: Synthetic oligonucleotide
guuguuaaugggc

SEQ ID NO: 78322 - RNA, 13 nt, Artificial Sequence
  Description of Artificial Sequence: Synthetic oligonucleotide
uuuuuaauuuauu

SEQ ID NO: 78323 - RNA, 12 nt, Artificial Sequence
  Description of Artificial Sequence: Synthetic oligonucleotide
uauuuaaauaug

SEQ ID NO: 78324 - RNA, 13 nt, Artificial Sequence
  Description of Artificial Sequence: Synthetic oligonucleotide
uauccuuuguuuc

SEQ ID NO: 78325 - RNA, 14 nt, Artificial Sequence
  Description of Artificial Sequence: Synthetic oligonucleotide
cgucuaaguguuug

SEQ ID NO: 78326 - RNA, 12 nt, Artificial Sequence
  Description of Artificial Sequence: Synthetic oligonucleotide
accugugacaaa

SEQ ID NO: 78327 - RNA, 13 nt, Artificial Sequence
  Description of Artificial Sequence: Synthetic oligonucleotide
ccaggcugaauua

SEQ ID NO: 78328 - RNA, 14 nt, Artificial Sequence
  Description of Artificial Sequence: Synthetic oligonucleotide
gucauucuuacaau

SEQ ID NO: 78329 - RNA, 15 nt, Artificial Sequence
  Description of Artificial Sequence: Synthetic oligonucleotide
ucauucuuacaauug

SEQ ID NO: 78330 - RNA, 12 nt, Artificial Sequence
  Description of Artificial Sequence: Synthetic oligonucleotide
cagagaguguac

SEQ ID NO: 78331 - RNA, 12 nt, Artificial Sequence
  Description of Artificial Sequence: Synthetic oligonucleotide
agaacucagcag

SEQ ID NO: 78332 - RNA, 13 nt, Artificial Sequence
  Description of Artificial Sequence: Synthetic oligonucleotide
uuuauuuucagua

SEQ ID NO: 78333 - RNA, 12 nt, Artificial Sequence
  Description of Artificial Sequence: Synthetic oligonucleotide
ucuuaaauggaa

SEQ ID NO: 78334 - RNA, 13 nt, Artificial Sequence
  Description of Artificial Sequence: Synthetic oligonucleotide
ugccuaaaauugu

SEQ ID NO: 78335 - RNA, 12 nt, Artificial Sequence
  Description of Artificial Sequence: Synthetic oligonucleotide
agacugugagcu

SEQ ID NO: 78336 - RNA, 14 nt, Artificial Sequence
  Description of Artificial Sequence: Synthetic oligonucleotide
ugcuuuuuauuaau

SEQ ID NO: 78337 - RNA, 13 nt, Artificial Sequence
  Description of Artificial Sequence: Synthetic oligonucleotide
cucuucuuacauu

SEQ ID NO: 78338 - RNA, 15 nt, Artificial Sequence
  Description of Artificial Sequence: Synthetic oligonucleotide
cauuuguaaaaaugu

SEQ ID NO: 78339 - RNA, 15 nt, Artificial Sequence
  Description of Artificial Sequence: Synthetic oligonucleotide
aucuuaauucauauu

SEQ ID NO: 78340 - RNA, 13 nt, Artificial Sequence
  Description of Artificial Sequence: Synthetic oligonucleotide
gaacuaaucauga

SEQ ID NO: 78341 - RNA, 12 nt, Artificial Sequence
  Description of Artificial Sequence: Synthetic oligonucleotide
ucugcucuuggg

SEQ ID NO: 78342 - RNA, 13 nt, Artificial Sequence
  Description of Artificial Sequence: Synthetic oligonucleotide
caguagcuuugag

SEQ ID NO: 78343 - RNA, 14 nt, Artificial Sequence
  Description of Artificial Sequence: Synthetic oligonucleotide
cacguaauauuuca

SEQ ID NO: 78344 - RNA, 13 nt, Artificial Sequence
  Description of Artificial Sequence: Synthetic oligonucleotide
uauucucuucacu

SEQ ID NO: 78345 - RNA, 14 nt, Artificial Sequence
  Description of Artificial Sequence: Synthetic oligonucleotide
cuaaugcuaagaaa

SEQ ID NO: 78346 - RNA, 12 nt, Artificial Sequence
  Description of Artificial Sequence: Synthetic oligonucleotide
gcugaaaaucaa

SEQ ID NO: 78347 - RNA, 14 nt, Artificial Sequence
  Description of Artificial Sequence: Synthetic oligonucleotide
aauaugauuacuuu

SEQ ID NO: 78348 - RNA, 14 nt, Artificial Sequence
  Description of Artificial Sequence: Synthetic oligonucleotide
cauuuuguucuaca

SEQ ID NO: 78349 - RNA, 12 nt, Artificial Sequence
  Description of Artificial Sequence: Synthetic oligonucleotide
cccgggacucuc

SEQ ID NO: 78350 - RNA, 14 nt, Artificial Sequence
  Description of Artificial Sequence: Synthetic oligonucleotide
ccuuuaaaguaaag

SEQ ID NO: 78351 - RNA, 13 nt, Artificial Sequence
  Description of Artificial Sequence: Synthetic oligonucleotide
ucuggaagccugg

SEQ ID NO: 78352 - RNA, 14 nt, Artificial Sequence
  Description of Artificial Sequence: Synthetic oligonucleotide
aaaacaaaagagag

SEQ ID NO: 78353 - RNA, 13 nt, Artificial Sequence
  Description of Artificial Sequence: Synthetic oligonucleotide
aucaguuaugccg

SEQ ID NO: 78354 - RNA, 13 nt, Artificial Sequence
  Description of Artificial Sequence: Synthetic oligonucleotide
uaaaagaagucca

SEQ ID NO: 78355 - RNA, 11 nt, Artificial Sequence
  Description of Artificial Sequence: Synthetic oligonucleotide
aggugagguua

SEQ ID NO: 78356 - RNA, 11 nt, Artificial Sequence
  Description of Artificial Sequence: Synthetic oligonucleotide
gggaagaggac

SEQ ID NO: 78357 - RNA, 13 nt, Artificial Sequence
  Description of Artificial Sequence: Synthetic oligonucleotide
aagcaaguauugu

SEQ ID NO: 78358 - RNA, 12 nt, Artificial Sequence
  Description of Artificial Sequence: Synthetic oligonucleotide
auuguagcacuc

SEQ ID NO: 78359 - RNA, 14 nt, Artificial Sequence
  Description of Artificial Sequence: Synthetic oligonucleotide
acaaaaccacaaau

SEQ ID NO: 78360 - RNA, 12 nt, Artificial Sequence
  Description of Artificial Sequence: Synthetic oligonucleotide
uaagcccauaca

SEQ ID NO: 78361 - RNA, 11 nt, Artificial Sequence
  Description of Artificial Sequence: Synthetic oligonucleotide
agcccauacag

SEQ ID NO: 78362 - RNA, 12 nt, Artificial Sequence
  Description of Artificial Sequence: Synthetic oligonucleotide
cagaaaccuucc

SEQ ID NO: 78363 - RNA, 10 nt, Artificial Sequence
  Description of Artificial Sequence: Synthetic oligonucleotide
guauaccuac

SEQ ID NO: 78364 - RNA, 13 nt, Artificial Sequence
  Description of Artificial Sequence: Synthetic oligonucleotide
gccaguuuucgga

SEQ ID NO: 78365 - RNA, 9 nt, Artificial Sequence
  Description of Artificial Sequence: Synthetic oligonucleotide
ggaacaggg

SEQ ID NO: 78366 - RNA, 13 nt, Artificial Sequence
  Description of Artificial Sequence: Synthetic oligonucleotide
uuaacuuuccagu

SEQ ID NO: 78367 - RNA, 14 nt, Artificial Sequence
  Description of Artificial Sequence: Synthetic oligonucleotide
aaaguuugguuuug

SEQ ID NO: 78368 - RNA, 12 nt, Artificial Sequence
  Description of Artificial Sequence: Synthetic oligonucleotide
cuucccacugua

SEQ ID NO: 78369 - RNA, 13 nt, Artificial Sequence
  Description of Artificial Sequence: Synthetic oligonucleotide
ugauaccauauga

SEQ ID NO: 78370 - RNA, 11 nt, Artificial Sequence
  Description of Artificial Sequence: Synthetic oligonucleotide
aacaugggcug

SEQ ID NO: 78371 - RNA, 13 nt, Artificial Sequence
  Description of Artificial Sequence: Synthetic oligonucleotide
caacuuuuucaua

SEQ ID NO: 78372 - RNA, 12 nt, Artificial Sequence
  Description of Artificial Sequence: Synthetic oligonucleotide
caugaggccgga

SEQ ID NO: 78373 - RNA, 11 nt, Artificial Sequence
  Description of Artificial Sequence: Synthetic oligonucleotide
acugcauuugu

SEQ ID NO: 78374 - RNA, 13 nt, Artificial Sequence
  Description of Artificial Sequence: Synthetic oligonucleotide
aauguuuacuacc

SEQ ID NO: 78375 - RNA, 15 nt, Artificial Sequence
  Description of Artificial Sequence: Synthetic oligonucleotide
aauuuuuugaugaaa

SEQ ID NO: 78376 - RNA, 14 nt, Artificial Sequence
  Description of Artificial Sequence: Synthetic oligonucleotide
cagugugugaauuu

SEQ ID NO: 78377 - RNA, 13 nt, Artificial Sequence
  Description of Artificial Sequence: Synthetic oligonucleotide
gagcaauguaugu

SEQ ID NO: 78378 - RNA, 14 nt, Artificial Sequence
  Description of Artificial Sequence: Synthetic oligonucleotide
aaagcacauauaua

SEQ ID NO: 78379 - RNA, 14 nt, Artificial Sequence
  Description of Artificial Sequence: Synthetic oligonucleotide
guaauaguuucucc

SEQ ID NO: 78380 - RNA, 13 nt, Artificial Sequence
  Description of Artificial Sequence: Synthetic oligonucleotide
aguuucuccaaau

SEQ ID NO: 78381 - RNA, 13 nt, Artificial Sequence
  Description of Artificial Sequence: Synthetic oligonucleotide
uacuuccuagaaa

SEQ ID NO: 78382 - RNA, 13 nt, Artificial Sequence
  Description of Artificial Sequence: Synthetic oligonucleotide
uacaccauauaug

SEQ ID NO: 78383 - RNA, 14 nt, Artificial Sequence
  Description of Artificial Sequence: Synthetic oligonucleotide
auauaugaauggag

SEQ ID NO: 78384 - RNA, 13 nt, Artificial Sequence
  Description of Artificial Sequence: Synthetic oligonucleotide
acgagaagaagau

SEQ ID NO: 78385 - RNA, 13 nt, Artificial Sequence
  Description of Artificial Sequence: Synthetic oligonucleotide
ucauuuacaggga

SEQ ID NO: 78386 - RNA, 13 nt, Artificial Sequence
  Description of Artificial Sequence: Synthetic oligonucleotide
cauuuacagggac

SEQ ID NO: 78387 - RNA, 10 nt, Artificial Sequence
  Description of Artificial Sequence: Synthetic oligonucleotide
agggaccuga

SEQ ID NO: 78388 - RNA, 14 nt, Artificial Sequence
  Description of Artificial Sequence: Synthetic oligonucleotide
uguuugacugcauc

SEQ ID NO: 78389 - RNA, 13 nt, Artificial Sequence
  Description of Artificial Sequence: Synthetic oligonucleotide
uuugacugcaucg

SEQ ID NO: 78390 - RNA, 12 nt, Artificial Sequence
  Description of Artificial Sequence: Synthetic oligonucleotide
gaguucacaggg

SEQ ID NO: 78391 - RNA, 13 nt, Artificial Sequence
  Description of Artificial Sequence: Synthetic oligonucleotide
ggcaccucugucc

SEQ ID NO: 78392 - RNA, 15 nt, Artificial Sequence
  Description of Artificial Sequence: Synthetic oligonucleotide
gguuugucuuuuuaa

SEQ ID NO: 78393 - RNA, 14 nt, Artificial Sequence
  Description of Artificial Sequence: Synthetic oligonucleotide
uuugucuuuuuaag

SEQ ID NO: 78394 - RNA, 13 nt, Artificial Sequence
  Description of Artificial Sequence: Synthetic oligonucleotide
ccuaaagguuguc

SEQ ID NO: 78395 - RNA, 12 nt, Artificial Sequence
  Description of Artificial Sequence: Synthetic oligonucleotide
aagguugucgac

SEQ ID NO: 78396 - RNA, 13 nt, Artificial Sequence
  Description of Artificial Sequence: Synthetic oligonucleotide
accuggcaauugu

SEQ ID NO: 78397 - RNA, 12 nt, Artificial Sequence
  Description of Artificial Sequence: Synthetic oligonucleotide
aguggugcgagg

SEQ ID NO: 78398 - RNA, 13 nt, Artificial Sequence
  Description of Artificial Sequence: Synthetic oligonucleotide
agagacaugaaau

SEQ ID NO: 78399 - RNA, 13 nt, Artificial Sequence
  Description of Artificial Sequence: Synthetic oligonucleotide
auauauuucucca

SEQ ID NO: 78400 - RNA, 10 nt, Artificial Sequence
  Description of Artificial Sequence: Synthetic oligonucleotide
caugaaggcu

SEQ ID NO: 78401 - RNA, 11 nt, Artificial Sequence
  Description of Artificial Sequence: Synthetic oligonucleotide
gcuggaguggu

SEQ ID NO: 78402 - RNA, 11 nt, Artificial Sequence
  Description of Artificial Sequence: Synthetic oligonucleotide
aggaagagagg

SEQ ID NO: 78403 - RNA, 12 nt, Artificial Sequence
  Description of Artificial Sequence: Synthetic oligonucleotide
cuugcaucgggc

SEQ ID NO: 78404 - RNA, 13 nt, Artificial Sequence
  Description of Artificial Sequence: Synthetic oligonucleotide
auauccuacugug

SEQ ID NO: 78405 - RNA, 13 nt, Artificial Sequence
  Description of Artificial Sequence: Synthetic oligonucleotide
uccuacuguguaa

SEQ ID NO: 78406 - RNA, 12 nt, Artificial Sequence
  Description of Artificial Sequence: Synthetic oligonucleotide
ccuuguagugua

SEQ ID NO: 78407 - RNA, 13 nt, Artificial Sequence
  Description of Artificial Sequence: Synthetic oligonucleotide
ucuuuguugauug

SEQ ID NO: 78408 - RNA, 14 nt, Artificial Sequence
  Description of Artificial Sequence: Synthetic oligonucleotide
uuuguugauugaaa

SEQ ID NO: 78409 - RNA, 15 nt, Artificial Sequence
  Description of Artificial Sequence: Synthetic oligonucleotide
uucuuuuucuuccau

SEQ ID NO: 78410 - RNA, 13 nt, Artificial Sequence
  Description of Artificial Sequence: Synthetic oligonucleotide
aaucuuccuucua

SEQ ID NO: 78411 - RNA, 13 nt, Artificial Sequence
  Description of Artificial Sequence: Synthetic oligonucleotide
uugaaugcuucau

SEQ ID NO: 78412 - RNA, 13 nt, Artificial Sequence
  Description of Artificial Sequence: Synthetic oligonucleotide
ugaaugcuucaug

SEQ ID NO: 78413 - RNA, 13 nt, Artificial Sequence
  Description of Artificial Sequence: Synthetic oligonucleotide
aauucuacuuuga

SEQ ID NO: 78414 - RNA, 13 nt, Artificial Sequence
  Description of Artificial Sequence: Synthetic oligonucleotide
agcaacuacagac

SEQ ID NO: 78415 - RNA, 13 nt, Artificial Sequence
  Description of Artificial Sequence: Synthetic oligonucleotide
gaccaaggucaac

SEQ ID NO: 78416 - RNA, 13 nt, Artificial Sequence
  Description of Artificial Sequence: Synthetic oligonucleotide
cgacuaucucgac

SEQ ID NO: 78417 - RNA, 13 nt, Artificial Sequence
  Description of Artificial Sequence: Synthetic oligonucleotide
aaccuucccaaac

SEQ ID NO: 78418 - RNA, 14 nt, Artificial Sequence
  Description of Artificial Sequence: Synthetic oligonucleotide
ccaagcuuagaacu

SEQ ID NO: 78419 - RNA, 15 nt, Artificial Sequence
  Description of Artificial Sequence: Synthetic oligonucleotide
agcuuagaacuuuaa

SEQ ID NO: 78420 - RNA, 11 nt, Artificial Sequence
  Description of Artificial Sequence: Synthetic oligonucleotide
aagaccaccac

SEQ ID NO: 78421 - RNA, 14 nt, Artificial Sequence
  Description of Artificial Sequence: Synthetic oligonucleotide
gcgagaaauaaagu

SEQ ID NO: 78422 - RNA, 14 nt, Artificial Sequence
  Description of Artificial Sequence: Synthetic oligonucleotide
cgagaaauaaaguu

SEQ ID NO: 78423 - RNA, 12 nt, Artificial Sequence
  Description of Artificial Sequence: Synthetic oligonucleotide
aggaaaugaucc

SEQ ID NO: 78424 - RNA, 13 nt, Artificial Sequence
  Description of Artificial Sequence: Synthetic oligonucleotide
gaagaaaugaaac

SEQ ID NO: 78425 - RNA, 13 nt, Artificial Sequence
  Description of Artificial Sequence: Synthetic oligonucleotide
guuuccauccucc

SEQ ID NO: 78426 - RNA, 15 nt, Artificial Sequence
  Description of Artificial Sequence: Synthetic oligonucleotide
acugaaaaucuuuga

SEQ ID NO: 78427 - RNA, 11 nt, Artificial Sequence
  Description of Artificial Sequence: Synthetic oligonucleotide
ugccguucagg

SEQ ID NO: 78428 - RNA, 13 nt, Artificial Sequence
  Description of Artificial Sequence: Synthetic oligonucleotide
caggguccagaag

SEQ ID NO: 78429 - RNA, 13 nt, Artificial Sequence
  Description of Artificial Sequence: Synthetic oligonucleotide
ucaagacugcuug

SEQ ID NO: 78430 - RNA, 13 nt, Artificial Sequence
  Description of Artificial Sequence: Synthetic oligonucleotide
uccaugucuuugg

SEQ ID NO: 78431 - RNA, 11 nt, Artificial Sequence
  Description of Artificial Sequence: Synthetic oligonucleotide
gccugaaacac

SEQ ID NO: 78432 - RNA, 12 nt, Artificial Sequence
  Description of Artificial Sequence: Synthetic oligonucleotide
ucucuguaccuc

SEQ ID NO: 78433 - RNA, 12 nt, Artificial Sequence
  Description of Artificial Sequence: Synthetic oligonucleotide
agcaagacaaga

SEQ ID NO: 78434 - RNA, 13 nt, Artificial Sequence
  Description of Artificial Sequence: Synthetic oligonucleotide
gcaagacaagaaa

SEQ ID NO: 78435 - RNA, 12 nt, Artificial Sequence
  Description of Artificial Sequence: Synthetic oligonucleotide
uguacaagaucc

SEQ ID NO: 78436 - RNA, 12 nt, Artificial Sequence
  Description of Artificial Sequence: Synthetic oligonucleotide
cguacuugcaga

SEQ ID NO: 78437 - RNA, 13 nt, Artificial Sequence
  Description of Artificial Sequence: Synthetic oligonucleotide
cgaucgauacaga

SEQ ID NO: 78438 - RNA, 13 nt, Artificial Sequence
  Description of Artificial Sequence: Synthetic oligonucleotide
uauaaaaauaaau

SEQ ID NO: 78439 - RNA, 13 nt, Artificial Sequence
  Description of Artificial Sequence: Synthetic oligonucleotide
uaaaaauaaauau

SEQ ID NO: 78440 - RNA, 13 nt, Artificial Sequence
  Description of Artificial Sequence: Synthetic oligonucleotide
uuugacugcugug

SEQ ID NO: 78441 - RNA, 13 nt, Artificial Sequence
  Description of Artificial Sequence: Synthetic oligonucleotide
ggagaugagagac

SEQ ID NO: 78442 - RNA, 10 nt, Artificial Sequence
  Description of Artificial Sequence: Synthetic oligonucleotide
ucccacuugg

SEQ ID NO: 78443 - RNA, 10 nt, Artificial Sequence
  Description of Artificial Sequence: Synthetic oligonucleotide
guucacggcc

SEQ ID NO: 78444 - RNA, 12 nt, Artificial Sequence
  Description of Artificial Sequence: Synthetic oligonucleotide
accaucacacca

SEQ ID NO: 78445 - RNA, 10 nt, Artificial Sequence
  Description of Artificial Sequence: Synthetic oligonucleotide
cugcggguuu

SEQ ID NO: 78446 - RNA, 9 nt, Artificial Sequence
  Description of Artificial Sequence: Synthetic oligonucleotide
uccaguuug

SEQ ID NO: 78447 - RNA, 12 nt, Artificial Sequence
  Description of Artificial Sequence: Synthetic oligonucleotide
uuaaggacuucu

SEQ ID NO: 78448 - RNA, 12 nt, Artificial Sequence
  Description of Artificial Sequence: Synthetic oligonucleotide
agugggacagag

SEQ ID NO: 78449 - RNA, 13 nt, Artificial Sequence
  Description of Artificial Sequence: Synthetic oligonucleotide
auuuguuauugug

SEQ ID NO: 78450 - RNA, 12 nt, Artificial Sequence
  Description of Artificial Sequence: Synthetic oligonucleotide
ucaaaugcauuu

SEQ ID NO: 78451 - RNA, 9 nt, Artificial Sequence
  Description of Artificial Sequence: Synthetic oligonucleotide
aggaaagcc

SEQ ID NO: 78452 - RNA, 10 nt, Artificial Sequence
  Description of Artificial Sequence: Synthetic oligonucleotide
ggaaagcccu

SEQ ID NO: 78453 - RNA, 11 nt, Artificial Sequence
  Description of Artificial Sequence: Synthetic oligonucleotide
ccagcauggcc

SEQ ID NO: 78454 - RNA, 10 nt, Artificial Sequence
  Description of Artificial Sequence: Synthetic oligonucleotide
uucucccuga

SEQ ID NO: 78455 - RNA, 11 nt, Artificial Sequence
  Description of Artificial Sequence: Synthetic oligonucleotide
aagaagcccuu

SEQ ID NO: 78456 - RNA, 11 nt, Artificial Sequence
  Description of Artificial Sequence: Synthetic oligonucleotide
gaagcccuuca

SEQ ID NO: 78457 - RNA, 10 nt, Artificial Sequence
  Description of Artificial Sequence: Synthetic oligonucleotide
cccuucagcg

SEQ ID NO: 78458 - RNA, 10 nt, Artificial Sequence
  Description of Artificial Sequence: Synthetic oligonucleotide
cuucagcggc

SEQ ID NO: 78459 - RNA, 11 nt, Artificial Sequence
  Description of Artificial Sequence: Synthetic oligonucleotide
cagcggccagu

SEQ ID NO: 78460 - RNA, 11 nt, Artificial Sequence
  Description of Artificial Sequence: Synthetic oligonucleotide
gaaaagcuccg

SEQ ID NO: 78461 - RNA, 10 nt, Artificial Sequence
  Description of Artificial Sequence: Synthetic oligonucleotide
aaagcuccgg

SEQ ID NO: 78462 - RNA, 12 nt, Artificial Sequence
  Description of Artificial Sequence: Synthetic oligonucleotide
gucaacagucug

SEQ ID NO: 78463 - RNA, 12 nt, Artificial Sequence
  Description of Artificial Sequence: Synthetic oligonucleotide
agaguucaaaag

SEQ ID NO: 78464 - RNA, 12 nt, Artificial Sequence
  Description of Artificial Sequence: Synthetic oligonucleotide
gaguucaaaagc

SEQ ID NO: 78465 - RNA, 11 nt, Artificial Sequence
  Description of Artificial Sequence: Synthetic oligonucleotide
ucaaaagcccu

SEQ ID NO: 78466 - RNA, 11 nt, Artificial Sequence
  Description of Artificial Sequence: Synthetic oligonucleotide
caaaagcccuu

SEQ ID NO: 78467 - RNA, 11 nt, Artificial Sequence
  Description of Artificial Sequence: Synthetic oligonucleotide
aaagcccuuca

SEQ ID NO: 78468 - RNA, 11 nt, Artificial Sequence
  Description of Artificial Sequence: Synthetic oligonucleotide
aagcccuucag

SEQ ID NO: 78469 - RNA, 12 nt, Artificial Sequence
  Description of Artificial Sequence: Synthetic oligonucleotide
ugaagccgcucg

SEQ ID NO: 78470 - RNA, 11 nt, Artificial Sequence
  Description of Artificial Sequence: Synthetic oligonucleotide
acgccagucaa

SEQ ID NO: 78471 - RNA, 12 nt, Artificial Sequence
  Description of Artificial Sequence: Synthetic oligonucleotide
ucuuggugcgug

SEQ ID NO: 78472 - RNA, 13 nt, Artificial Sequence
  Description of Artificial Sequence: Synthetic oligonucleotide
uuggauucaucag

SEQ ID NO: 78473 - RNA, 12 nt, Artificial Sequence
  Description of Artificial Sequence: Synthetic oligonucleotide
ggaauaccuaag

SEQ ID NO: 78474 - RNA, 11 nt, Artificial Sequence
  Description of Artificial Sequence: Synthetic oligonucleotide
uuugaggcuca

SEQ ID NO: 78475 - RNA, 10 nt, Artificial Sequence
  Description of Artificial Sequence: Synthetic oligonucleotide
cuacaauugg

SEQ ID NO: 78476 - RNA, 11 nt, Artificial Sequence
  Description of Artificial Sequence: Synthetic oligonucleotide
aguuaggagcc

SEQ ID NO: 78477 - RNA, 12 nt, Artificial Sequence
  Description of Artificial Sequence: Synthetic oligonucleotide
gucaauauccac

SEQ ID NO: 78478 - RNA, 12 nt, Artificial Sequence
  Description of Artificial Sequence: Synthetic oligonucleotide
uguucagucaca

SEQ ID NO: 78479 - RNA, 11 nt, Artificial Sequence
  Description of Artificial Sequence: Synthetic oligonucleotide
cacacacauac

SEQ ID NO: 78480 - RNA, 11 nt, Artificial Sequence
  Description of Artificial Sequence: Synthetic oligonucleotide
uccuuuugcuu

SEQ ID NO: 78481 - RNA, 15 nt, Artificial Sequence
  Description of Artificial Sequence: Synthetic oligonucleotide
uuuaaaguaauuuuu

SEQ ID NO: 78482 - RNA, 12 nt, Artificial Sequence
  Description of Artificial Sequence: Synthetic oligonucleotide
aacagucaaugg

SEQ ID NO: 78483 - RNA, 12 nt, Artificial Sequence
  Description of Artificial Sequence: Synthetic oligonucleotide
cgacaaaccaau

SEQ ID NO: 78484 - RNA, 11 nt, Artificial Sequence
  Description of Artificial Sequence: Synthetic oligonucleotide
cugcuaccacu

SEQ ID NO: 78485 - RNA, 12 nt, Artificial Sequence
  Description of Artificial Sequence: Synthetic oligonucleotide
caagcggucuua

SEQ ID NO: 78486 - RNA, 12 nt, Artificial Sequence
  Description of Artificial Sequence: Synthetic oligonucleotide
gucuuaccggcu

SEQ ID NO: 78487 - RNA, 10 nt, Artificial Sequence
  Description of Artificial Sequence: Synthetic oligonucleotide
auggguuacc

SEQ ID NO: 78488 - RNA, 10 nt, Artificial Sequence
  Description of Artificial Sequence: Synthetic oligonucleotide
uuaccugcga

SEQ ID NO: 78489 - RNA, 11 nt, Artificial Sequence
  Description of Artificial Sequence: Synthetic oligonucleotide
aucuugcugag

SEQ ID NO: 78490 - RNA, 12 nt, Artificial Sequence
  Description of Artificial Sequence: Synthetic oligonucleotide
gcauaaaacagu

SEQ ID NO: 78491 - RNA, 11 nt, Artificial Sequence
  Description of Artificial Sequence: Synthetic oligonucleotide
uccuuuauccu

SEQ ID NO: 78492 - RNA, 11 nt, Artificial Sequence
  Description of Artificial Sequence: Synthetic oligonucleotide
aacgcaaguug

SEQ ID NO: 78493 - RNA, 12 nt, Artificial Sequence
  Description of Artificial Sequence: Synthetic oligonucleotide
aacugaaaccau

SEQ ID NO: 78494 - RNA, 13 nt, Artificial Sequence
  Description of Artificial Sequence: Synthetic oligonucleotide
cuuuguuaaauau

SEQ ID NO: 78495 - RNA, 13 nt, Artificial Sequence
  Description of Artificial Sequence: Synthetic oligonucleotide
uauauuaaaaguu

SEQ ID NO: 78496 - RNA, 12 nt, Artificial Sequence
  Description of Artificial Sequence: Synthetic oligonucleotide
uuuugacuuaac

SEQ ID NO: 78497 - RNA, 12 nt, Artificial Sequence
  Description of Artificial Sequence: Synthetic oligonucleotide
caaacucagcac

SEQ ID NO: 78498 - RNA, 10 nt, Artificial Sequence
  Description of Artificial Sequence: Synthetic oligonucleotide
gcugaccuca

SEQ ID NO: 78499 - RNA, 13 nt, Artificial Sequence
  Description of Artificial Sequence: Synthetic oligonucleotide
uuauucagaucgc

SEQ ID NO: 78500 - RNA, 12 nt, Artificial Sequence
  Description of Artificial Sequence: Synthetic oligonucleotide
ggguucugggau

SEQ ID NO: 78501 - RNA, 14 nt, Artificial Sequence
  Description of Artificial Sequence: Synthetic oligonucleotide
uauuggaaauuaug

SEQ ID NO: 78502 - RNA, 12 nt, Artificial Sequence
  Description of Artificial Sequence: Synthetic oligonucleotide
uggaagcacuag

SEQ ID NO: 78503 - RNA, 12 nt, Artificial Sequence
  Description of Artificial Sequence: Synthetic oligonucleotide
uuuuuaugugga

SEQ ID NO: 78504 - RNA, 11 nt, Artificial Sequence
  Description of Artificial Sequence: Synthetic oligonucleotide
gaauugguaga

SEQ ID NO: 78505 - RNA, 12 nt, Artificial Sequence
  Description of Artificial Sequence: Synthetic oligonucleotide
uagacuuggaga

SEQ ID NO: 78506 - RNA, 12 nt, Artificial Sequence
  Description of Artificial Sequence: Synthetic oligonucleotide
uacaguauucca

SEQ ID NO: 78507 - RNA, 14 nt, Artificial Sequence
  Description of Artificial Sequence: Synthetic oligonucleotide
cacugaugaauuaa

SEQ ID NO: 78508 - RNA, 11 nt, Artificial Sequence
  Description of Artificial Sequence: Synthetic oligonucleotide
cacaucaucac

SEQ ID NO: 78509 - RNA, 12 nt, Artificial Sequence
  Description of Artificial Sequence: Synthetic oligonucleotide
ucaccaaacaga

SEQ ID NO: 78510 - RNA, 11 nt, Artificial Sequence
  Description of Artificial Sequence: Synthetic oligonucleotide
gaacaugaugg

SEQ ID NO: 78511 - RNA, 11 nt, Artificial Sequence
  Description of Artificial Sequence: Synthetic oligonucleotide
auguagacugc

SEQ ID NO: 78512 - RNA, 12 nt, Artificial Sequence
  Description of Artificial Sequence: Synthetic oligonucleotide
gaucuauuuaug

SEQ ID NO: 78513 - RNA, 11 nt, Artificial Sequence
  Description of Artificial Sequence: Synthetic oligonucleotide
cacuauuauca

SEQ ID NO: 78514 - RNA, 10 nt, Artificial Sequence
  Description of Artificial Sequence: Synthetic oligonucleotide
ucaguucugc

SEQ ID NO: 78515 - RNA, 12 nt, Artificial Sequence
  Description of Artificial Sequence: Synthetic oligonucleotide
gauuaaaccuac

SEQ ID NO: 78516 - RNA, 12 nt, Artificial Sequence
  Description of Artificial Sequence: Synthetic oligonucleotide
uaaaauccuucu

SEQ ID NO: 78517 - RNA, 11 nt, Artificial Sequence
  Description of Artificial Sequence: Synthetic oligonucleotide
augcuguagac

SEQ ID NO: 78518 - RNA, 12 nt, Artificial Sequence
  Description of Artificial Sequence: Synthetic oligonucleotide
ugauaggaauag

SEQ ID NO: 78519 - RNA, 10 nt, Artificial Sequence
  Description of Artificial Sequence: Synthetic oligonucleotide
auggcccuga

SEQ ID NO: 78520 - RNA, 10 nt, Artificial Sequence
  Description of Artificial Sequence: Synthetic oligonucleotide
uccucaagca

SEQ ID NO: 78521 - RNA, 9 nt, Artificial Sequence
  Description of Artificial Sequence: Synthetic oligonucleotide
uucagccca

SEQ ID NO: 78522 - RNA, 10 nt, Artificial Sequence
  Description of Artificial Sequence: Synthetic oligonucleotide
cugcugaacc

SEQ ID NO: 78523 - RNA, 11 nt, Artificial Sequence
  Description of Artificial Sequence: Synthetic oligonucleotide
aguucucuuca

SEQ ID NO: 78524 - RNA, 10 nt, Artificial Sequence
  Description of Artificial Sequence: Synthetic oligonucleotide
cagccuagag

SEQ ID NO: 78525 - RNA, 12 nt, Artificial Sequence
  Description of Artificial Sequence: Synthetic oligonucleotide
ucugugaagugu

SEQ ID NO: 78526 - RNA, 13 nt, Artificial Sequence
  Description of Artificial Sequence: Synthetic oligonucleotide
gagaaaauuucaa

SEQ ID NO: 78527 - RNA, 10 nt, Artificial Sequence
  Description of Artificial Sequence: Synthetic oligonucleotide
auccuccuga

SEQ ID NO: 78528 - RNA, 11 nt, Artificial Sequence
  Description of Artificial Sequence: Synthetic oligonucleotide
ugacaucauau

SEQ ID NO: 78529 - RNA, 12 nt, Artificial Sequence
  Description of Artificial Sequence: Synthetic oligonucleotide
aucuucaucaua

SEQ ID NO: 78530 - RNA, 12 nt, Artificial Sequence
  Description of Artificial Sequence: Synthetic oligonucleotide
acuagcuauuaa

SEQ ID NO: 78531 - RNA, 13 nt, Artificial Sequence
  Description of Artificial Sequence: Synthetic oligonucleotide
cucuacuaaaaau

SEQ ID NO: 78532 - RNA, 11 nt, Artificial Sequence
  Description of Artificial Sequence: Synthetic oligonucleotide
cuaucucgccu

SEQ ID NO: 78533 - RNA, 12 nt, Artificial Sequence
  Description of Artificial Sequence: Synthetic oligonucleotide
uucgguccaguu

SEQ ID NO: 78534 - RNA, 10 nt, Artificial Sequence
  Description of Artificial Sequence: Synthetic oligonucleotide
auguagccgc

SEQ ID NO: 78535 - RNA, 11 nt, Artificial Sequence
  Description of Artificial Sequence: Synthetic oligonucleotide
gaggagacuug

SEQ ID NO: 78536 - RNA, 11 nt, Artificial Sequence
  Description of Artificial Sequence: Synthetic oligonucleotide
aguagugagga

SEQ ID NO: 78537 - RNA, 13 nt, Artificial Sequence
  Description of Artificial Sequence: Synthetic oligonucleotide
agaugaguacaaa

SEQ ID NO: 78538 - RNA, 12 nt, Artificial Sequence
  Description of Artificial Sequence: Synthetic oligonucleotide
uuguuaaugggc

SEQ ID NO: 78539 - RNA, 12 nt, Artificial Sequence
  Description of Artificial Sequence: Synthetic oligonucleotide
uuuuaauuuauu

SEQ ID NO: 78540 - RNA, 11 nt, Artificial Sequence
  Description of Artificial Sequence: Synthetic oligonucleotide
auuuaaauaug

SEQ ID NO: 78541 - RNA, 12 nt, Artificial Sequence
  Description of Artificial Sequence: Synthetic oligonucleotide
auccuuuguuuc

SEQ ID NO: 78542 - RNA, 13 nt, Artificial Sequence
  Description of Artificial Sequence: Synthetic oligonucleotide
gucuaaguguuug

SEQ ID NO: 78543 - RNA, 11 nt, Artificial Sequence
  Description of Artificial Sequence: Synthetic oligonucleotide
ccugugacaaa

SEQ ID NO: 78544 - RNA, 12 nt, Artificial Sequence
  Description of Artificial Sequence: Synthetic oligonucleotide
caggcugaauua

SEQ ID NO: 78545 - RNA, 13 nt, Artificial Sequence
  Description of Artificial Sequence: Synthetic oligonucleotide
ucauucuuacaau

SEQ ID NO: 78546 - RNA, 14 nt, Artificial Sequence
  Description of Artificial Sequence: Synthetic oligonucleotide
cauucuuacaauug

SEQ ID NO: 78547 - RNA, 11 nt, Artificial Sequence
  Description of Artificial Sequence: Synthetic oligonucleotide
agagaguguac

SEQ ID NO: 78548 - RNA, 11 nt, Artificial Sequence
  Description of Artificial Sequence: Synthetic oligonucleotide
gaacucagcag

SEQ ID NO: 78549 - RNA, 12 nt, Artificial Sequence
  Description of Artificial Sequence: Synthetic oligonucleotide
uuauuuucagua

SEQ ID NO: 78550 - RNA, 11 nt, Artificial Sequence
  Description of Artificial Sequence: Synthetic oligonucleotide
cuuaaauggaa

SEQ ID NO: 78551 - RNA, 12 nt, Artificial Sequence
  Description of Artificial Sequence: Synthetic oligonucleotide
gccuaaaauugu

SEQ ID NO: 78552 - RNA, 12 nt, Artificial Sequence
  Description of Artificial Sequence: Synthetic oligonucleotide
acuaacaucugg

SEQ ID NO: 78553 - RNA, 11 nt, Artificial Sequence
  Description of Artificial Sequence: Synthetic oligonucleotide
gacugugagcu

SEQ ID NO: 78554 - RNA, 13 nt, Artificial Sequence
  Description of Artificial Sequence: Synthetic oligonucleotide
gcuuuuuauuaau

SEQ ID NO: 78555 - RNA, 12 nt, Artificial Sequence
  Description of Artificial Sequence: Synthetic oligonucleotide
ucuucuuacauu

SEQ ID NO: 78556 - RNA, 14 nt, Artificial Sequence
  Description of Artificial Sequence: Synthetic oligonucleotide
auuuguaaaaaugu

SEQ ID NO: 78557 - RNA, 14 nt, Artificial Sequence
  Description of Artificial Sequence: Synthetic oligonucleotide
ucuuaauucauauu

SEQ ID NO: 78558 - RNA, 12 nt, Artificial Sequence
  Description of Artificial Sequence: Synthetic oligonucleotide
aacuaaucauga

SEQ ID NO: 78559 - RNA, 11 nt, Artificial Sequence
  Description of Artificial Sequence: Synthetic oligonucleotide
cugcucuuggg

SEQ ID NO: 78560 - RNA, 12 nt, Artificial Sequence
  Description of Artificial Sequence: Synthetic oligonucleotide
aguagcuuugag

SEQ ID NO: 78561 - RNA, 13 nt, Artificial Sequence
  Description of Artificial Sequence: Synthetic oligonucleotide
acguaauauuuca

SEQ ID NO: 78562 - RNA, 12 nt, Artificial Sequence
  Description of Artificial Sequence: Synthetic oligonucleotide
auucucuucacu

SEQ ID NO: 78563 - RNA, 13 nt, Artificial Sequence
  Description of Artificial Sequence: Synthetic oligonucleotide
uaaugcuaagaaa

SEQ ID NO: 78564 - RNA, 11 nt, Artificial Sequence
  Description of Artificial Sequence: Synthetic oligonucleotide
cugaaaaucaa

SEQ ID NO: 78565 - RNA, 13 nt, Artificial Sequence
  Description of Artificial Sequence: Synthetic oligonucleotide
auaugauuacuuu

SEQ ID NO: 78566 - RNA, 13 nt, Artificial Sequence
  Description of Artificial Sequence: Synthetic oligonucleotide
auuuuguucuaca

SEQ ID NO: 78567 - RNA, 11 nt, Artificial Sequence
  Description of Artificial Sequence: Synthetic oligonucleotide
ccgggacucuc

SEQ ID NO: 78568 - RNA, 13 nt, Artificial Sequence
  Description of Artificial Sequence: Synthetic oligonucleotide
cuuuaaaguaaag

SEQ ID NO: 78569 - RNA, 12 nt, Artificial Sequence
  Description of Artificial Sequence: Synthetic oligonucleotide
cuggaagccugg

SEQ ID NO: 78570 - RNA, 13 nt, Artificial Sequence
  Description of Artificial Sequence: Synthetic oligonucleotide
aaacaaaagagag

SEQ ID NO: 78571 - RNA, 12 nt, Artificial Sequence
  Description of Artificial Sequence: Synthetic oligonucleotide
ucaguuaugccg

SEQ ID NO: 78572 - RNA, 12 nt, Artificial Sequence
  Description of Artificial Sequence: Synthetic oligonucleotide
aaaagaagucca

SEQ ID NO: 78573 - RNA, 10 nt, Artificial Sequence
  Description of Artificial Sequence: Synthetic oligonucleotide
ggugagguua

SEQ ID NO: 78574 - RNA, 10 nt, Artificial Sequence
  Description of Artificial Sequence: Synthetic oligonucleotide
ggaagaggac

SEQ ID NO: 78575 - RNA, 12 nt, Artificial Sequence
  Description of Artificial Sequence: Synthetic oligonucleotide
agcaaguauugu

SEQ ID NO: 78576 - RNA, 11 nt, Artificial Sequence
  Description of Artificial Sequence: Synthetic oligonucleotide
uuguagcacuc

SEQ ID NO: 78577 - RNA, 13 nt, Artificial Sequence
  Description of Artificial Sequence: Synthetic oligonucleotide
caaaaccacaaau

SEQ ID NO: 78578 - RNA, 11 nt, Artificial Sequence
  Description of Artificial Sequence: Synthetic oligonucleotide
aagcccauaca

SEQ ID NO: 78579 - RNA, 10 nt, Artificial Sequence
  Description of Artificial Sequence: Synthetic oligonucleotide
gcccauacag

SEQ ID NO: 78580 - RNA, 11 nt, Artificial Sequence
  Description of Artificial Sequence: Synthetic oligonucleotide
agaaaccuucc

SEQ ID NO: 78581 - RNA, 9 nt, Artificial Sequence
  Description of Artificial Sequence: Synthetic oligonucleotide
uauaccuac

SEQ ID NO: 78582 - RNA, 12 nt, Artificial Sequence
  Description of Artificial Sequence: Synthetic oligonucleotide
ccaguuuucgga

SEQ ID NO: 78583 - RNA, 8 nt, Artificial Sequence
  Description of Artificial Sequence: Synthetic oligonucleotide
gaacaggg

SEQ ID NO: 78584 - RNA, 12 nt, Artificial Sequence
  Description of Artificial Sequence: Synthetic oligonucleotide
uaacuuuccagu

SEQ ID NO: 78585 - RNA, 13 nt, Artificial Sequence
  Description of Artificial Sequence: Synthetic oligonucleotide
aaguuugguuuug

SEQ ID NO: 78586 - RNA, 11 nt, Artificial Sequence
  Description of Artificial Sequence: Synthetic oligonucleotide
uucccacugua

SEQ ID NO: 78587 - RNA, 12 nt, Artificial Sequence
  Description of Artificial Sequence: Synthetic oligonucleotide
gauaccauauga

SEQ ID NO: 78588 - RNA, 10 nt, Artificial Sequence
  Description of Artificial Sequence: Synthetic oligonucleotide
acaugggcug

SEQ ID NO: 78589 - RNA, 12 nt, Artificial Sequence
  Description of Artificial Sequence: Synthetic oligonucleotide
aacuuuuucaua

SEQ ID NO: 78590 - RNA, 11 nt, Artificial Sequence
  Description of Artificial Sequence: Synthetic oligonucleotide
augaggccgga

SEQ ID NO: 78591 - RNA, 10 nt, Artificial Sequence
  Description of Artificial Sequence: Synthetic oligonucleotide
cugcauuugu

SEQ ID NO: 78592 - RNA, 12 nt, Artificial Sequence
  Description of Artificial Sequence: Synthetic oligonucleotide
auguuuacuacc

SEQ ID NO: 78593 - RNA, 14 nt, Artificial Sequence
  Description of Artificial Sequence: Synthetic oligonucleotide
auuuuuugaugaaa

SEQ ID NO: 78594 - RNA, 13 nt, Artificial Sequence
  Description of Artificial Sequence: Synthetic oligonucleotide
agugugugaauuu

SEQ ID NO: 78595 - RNA, 12 nt, Artificial Sequence
  Description of Artificial Sequence: Synthetic oligonucleotide
agcaauguaugu

SEQ ID NO: 78596 - RNA, 13 nt, Artificial Sequence
  Description of Artificial Sequence: Synthetic oligonucleotide
aagcacauauaua

SEQ ID NO: 78597 - RNA, 13 nt, Artificial Sequence
  Description of Artificial Sequence: Synthetic oligonucleotide
uaauaguuucucc

SEQ ID NO: 78598 - RNA, 12 nt, Artificial Sequence
  Description of Artificial Sequence: Synthetic oligonucleotide
guuucuccaaau

SEQ ID NO: 78599 - RNA, 12 nt, Artificial Sequence
  Description of Artificial Sequence: Synthetic oligonucleotide
acuuccuagaaa

SEQ ID NO: 78600 - RNA, 12 nt, Artificial Sequence
  Description of Artificial Sequence: Synthetic oligonucleotide
acaccauauaug

SEQ ID NO: 78601 - RNA, 13 nt, Artificial Sequence
  Description of Artificial Sequence: Synthetic oligonucleotide
uauaugaauggag

SEQ ID NO: 78602 - RNA, 12 nt, Artificial Sequence
  Description of Artificial Sequence: Synthetic oligonucleotide
cauuuacaggga

SEQ ID NO: 78603 - RNA, 12 nt, Artificial Sequence
  Description of Artificial Sequence: Synthetic oligonucleotide
auuuacagggac

SEQ ID NO: 78604 - RNA, 9 nt, Artificial Sequence
  Description of Artificial Sequence: Synthetic oligonucleotide
gggaccuga

SEQ ID NO: 78605 - RNA, 13 nt, Artificial Sequence
  Description of Artificial Sequence: Synthetic oligonucleotide
guuugacugcauc

SEQ ID NO: 78606 - RNA, 12 nt, Artificial Sequence
  Description of Artificial Sequence: Synthetic oligonucleotide
uugacugcaucg

SEQ ID NO: 78607 - RNA, 11 nt, Artificial Sequence
  Description of Artificial Sequence: Synthetic oligonucleotide
aguucacaggg

SEQ ID NO: 78608 - RNA, 12 nt, Artificial Sequence
  Description of Artificial Sequence: Synthetic oligonucleotide
gcaccucugucc

SEQ ID NO: 78609 - RNA, 14 nt, Artificial Sequence
  Description of Artificial Sequence: Synthetic oligonucleotide
guuugucuuuuuaa

SEQ ID NO: 78610 - RNA, 13 nt, Artificial Sequence
  Description of Artificial Sequence: Synthetic oligonucleotide
uugucuuuuuaag

SEQ ID NO: 78611 - RNA, 12 nt, Artificial Sequence
  Description of Artificial Sequence: Synthetic oligonucleotide
cuaaagguuguc

SEQ ID NO: 78612 - RNA, 11 nt, Artificial Sequence
  Description of Artificial Sequence: Synthetic oligonucleotide
agguugucgac

SEQ ID NO: 78613 - RNA, 12 nt, Artificial Sequence
  Description of Artificial Sequence: Synthetic oligonucleotide
ccuggcaauugu

SEQ ID NO: 78614 - RNA, 11 nt, Artificial Sequence
  Description of Artificial Sequence: Synthetic oligonucleotide
guggugcgagg

SEQ ID NO: 78615 - RNA, 12 nt, Artificial Sequence
  Description of Artificial Sequence: Synthetic oligonucleotide
gagacaugaaau

SEQ ID NO: 78616 - RNA, 12 nt, Artificial Sequence
  Description of Artificial Sequence: Synthetic oligonucleotide
uauauuucucca

SEQ ID NO: 78617 - RNA, 9 nt, Artificial Sequence
  Description of Artificial Sequence: Synthetic oligonucleotide
augaaggcu

SEQ ID NO: 78618 - RNA, 10 nt, Artificial Sequence
  Description of Artificial Sequence: Synthetic oligonucleotide
cuggaguggu

SEQ ID NO: 78619 - RNA, 10 nt, Artificial Sequence
  Description of Artificial Sequence: Synthetic oligonucleotide
ggaagagagg

SEQ ID NO: 78620 - RNA, 11 nt, Artificial Sequence
  Description of Artificial Sequence: Synthetic oligonucleotide
uugcaucgggc

SEQ ID NO: 78621 - RNA, 12 nt, Artificial Sequence
  Description of Artificial Sequence: Synthetic oligonucleotide
uauccuacugug

SEQ ID NO: 78622 - RNA, 12 nt, Artificial Sequence
  Description of Artificial Sequence: Synthetic oligonucleotide
ccuacuguguaa

SEQ ID NO: 78623 - RNA, 11 nt, Artificial Sequence
  Description of Artificial Sequence: Synthetic oligonucleotide
cuuguagugua

SEQ ID NO: 78624 - RNA, 12 nt, Artificial Sequence
  Description of Artificial Sequence: Synthetic oligonucleotide
cuuuguugauug

SEQ ID NO: 78625 - RNA, 13 nt, Artificial Sequence
  Description of Artificial Sequence: Synthetic oligonucleotide
uuguugauugaaa

SEQ ID NO: 78626 - RNA, 14 nt, Artificial Sequence
  Description of Artificial Sequence: Synthetic oligonucleotide
ucuuuuucuuccau

SEQ ID NO: 78627 - RNA, 12 nt, Artificial Sequence
  Description of Artificial Sequence: Synthetic oligonucleotide
aucuuccuucua

SEQ ID NO: 78628 - RNA, 12 nt, Artificial Sequence
  Description of Artificial Sequence: Synthetic oligonucleotide
ugaaugcuucau

SEQ ID NO: 78629 - RNA, 12 nt, Artificial Sequence
  Description of Artificial Sequence: Synthetic oligonucleotide
gaaugcuucaug

SEQ ID NO: 78630 - RNA, 12 nt, Artificial Sequence
  Description of Artificial Sequence: Synthetic oligonucleotide
auucuacuuuga

SEQ ID NO: 78631 - RNA, 12 nt, Artificial Sequence
  Description of Artificial Sequence: Synthetic oligonucleotide
gcaacuacagac

SEQ ID NO: 78632 - RNA, 12 nt, Artificial Sequence
  Description of Artificial Sequence: Synthetic oligonucleotide
accaaggucaac

SEQ ID NO: 78633 - RNA, 12 nt, Artificial Sequence
  Description of Artificial Sequence: Synthetic oligonucleotide
gacuaucucgac

SEQ ID NO: 78634 - RNA, 12 nt, Artificial Sequence
  Description of Artificial Sequence: Synthetic oligonucleotide
accuucccaaac

SEQ ID NO: 78635 - RNA, 13 nt, Artificial Sequence
  Description of Artificial Sequence: Synthetic oligonucleotide
caagcuuagaacu

SEQ ID NO: 78636 - RNA, 14 nt, Artificial Sequence
  Description of Artificial Sequence: Synthetic oligonucleotide
gcuuagaacuuuaa

SEQ ID NO: 78637 - RNA, 13 nt, Artificial Sequence
  Description of Artificial Sequence: Synthetic oligonucleotide
aacuuuaagcaac

SEQ ID NO: 78638 - RNA, 10 nt, Artificial Sequence
  Description of Artificial Sequence: Synthetic oligonucleotide
agaccaccac

SEQ ID NO: 78639 - RNA, 13 nt, Artificial Sequence
  Description of Artificial Sequence: Synthetic oligonucleotide
cgagaaauaaagu

SEQ ID NO: 78640 - RNA, 13 nt, Artificial Sequence
  Description of Artificial Sequence: Synthetic oligonucleotide
gagaaauaaaguu

SEQ ID NO: 78641 - RNA, 11 nt, Artificial Sequence
  Description of Artificial Sequence: Synthetic oligonucleotide
ggaaaugaucc

SEQ ID NO: 78642 - RNA, 12 nt, Artificial Sequence
  Description of Artificial Sequence: Synthetic oligonucleotide
aagaaaugaaac

SEQ ID NO: 78643 - RNA, 12 nt, Artificial Sequence
  Description of Artificial Sequence: Synthetic oligonucleotide
uuuccauccucc

SEQ ID NO: 78644 - RNA, 14 nt, Artificial Sequence
  Description of Artificial Sequence: Synthetic oligonucleotide
cugaaaaucuuuga

SEQ ID NO: 78645 - RNA, 10 nt, Artificial Sequence
  Description of Artificial Sequence: Synthetic oligonucleotide
gccguucagg

SEQ ID NO: 78646 - RNA, 12 nt, Artificial Sequence
  Description of Artificial Sequence: Synthetic oligonucleotide
aggguccagaag

SEQ ID NO: 78647 - RNA, 12 nt, Artificial Sequence
  Description of Artificial Sequence: Synthetic oligonucleotide
caagacugcuug

SEQ ID NO: 78648 - RNA, 12 nt, Artificial Sequence
  Description of Artificial Sequence: Synthetic oligonucleotide
ccaugucuuugg

SEQ ID NO: 78649 - RNA, 10 nt, Artificial Sequence
  Description of Artificial Sequence: Synthetic oligonucleotide
ccugaaacac

SEQ ID NO: 78650 - RNA, 11 nt, Artificial Sequence
  Description of Artificial Sequence: Synthetic oligonucleotide
cucuguaccuc

SEQ ID NO: 78651 - RNA, 11 nt, Artificial Sequence
  Description of Artificial Sequence: Synthetic oligonucleotide
gcaagacaaga

SEQ ID NO: 78652 - RNA, 12 nt, Artificial Sequence
  Description of Artificial Sequence: Synthetic oligonucleotide
caagacaagaaa

SEQ ID NO: 78653 - RNA, 11 nt, Artificial Sequence
  Description of Artificial Sequence: Synthetic oligonucleotide
guacaagaucc

SEQ ID NO: 78654 - RNA, 11 nt, Artificial Sequence
  Description of Artificial Sequence: Synthetic oligonucleotide
guacuugcaga

SEQ ID NO: 78655 - RNA, 12 nt, Artificial Sequence
  Description of Artificial Sequence: Synthetic oligonucleotide
gaucgauacaga

SEQ ID NO: 78656 - RNA, 12 nt, Artificial Sequence
  Description of Artificial Sequence: Synthetic oligonucleotide
auaaaaauaaau

SEQ ID NO: 78657 - RNA, 12 nt, Artificial Sequence
  Description of Artificial Sequence: Synthetic oligonucleotide
aaaaauaaauau

SEQ ID NO: 78658 - RNA, 12 nt, Artificial Sequence
  Description of Artificial Sequence: Synthetic oligonucleotide
uugacugcugug

SEQ ID NO: 78659 - RNA, 12 nt, Artificial Sequence
  Description of Artificial Sequence: Synthetic oligonucleotide
gagaugagagac

SEQ ID NO: 78660 - RNA, 9 nt, Artificial Sequence
  Description of Artificial Sequence: Synthetic oligonucleotide
cccacuugg

SEQ ID NO: 78661 - RNA, 2653 nt, Homo sapiens
cucaaaaggggccggauuuccuucuccuggaggcagauguugccucucucucucgcucggauugguucagugcacucuagaaacacugcugugguggagaaacuggaccccaggucuggagcgaauuccagccugcagggcugauaagcgaggcauuagugagauugagagagacuuuaccccgccguggugguuggagggcgcgcaguagagcagcagcacaggcgcgggucccgggaggccggcucugcucgcgccgagauguggaaucuccuucacgaaaccgacucggcuguggccaccgcgcgccgcccgcgcuggcugugcgcuggggcgcuggugcuggcggguggcuucuuucuccucggcuuccucuucgggugguuuauaaaauccuccaaugaagcuacuaacauuacuccaaagcauaauaugaaagcauuuuuggaugaauugaaagcugagaacaucaagaaguucuuauauaauuuuacacagauaccacauuuagcaggaacagaacaaaacuuucagcuugcaaagcaaauucaaucccaguggaaagaauuuggccuggauucuguugagcuagcacauuaugauguccuguuguccuacccaaauaagacucaucccaacuacaucucaauaauuaaugaagauggaaaugagauuuucaacacaucauuauuugaaccaccuccuccaggauaugaaaauguuucggauauuguaccaccuuucagugcuuucucuccucaaggaaugccagagggcgaucuaguguauguuaacuaugcacgaacugaagacuucuuuaaauuggaacgggacaugaaaaucaauugcucugggaaaauuguaauugccagauaugggaaaguuuucagaggaaauaagguuaaaaaugcccagcuggcaggggccaaaggagucauucucuacuccgacccugcugacuacuuugcuccuggggugaaguccuauccagaugguuggaaucuuccuggaggugguguccagcguggaaauauccuaaaucugaauggugcaggagacccucucacaccagguuacccagcaaaugaauaugcuuauaggcguggaauugcagaggcuguuggucuuccaaguauuccuguucauccaauuggauacuaugaugcacagaagcuccuagaaaaaauggguggcucagcaccaccagauagcagcuggagaggaagucucaaagugcccuacaauguuggaccuggcuuuacuggaaacuuuucuacacaaaaagucaagaugcacauccacucuaccaaugaagugacaagaauuuacaaugugauagguacucucagaggagcaguggaaccagacagauaugucauucugggaggucaccgggacucauggguguuuggugguauugacccucagaguggagcagcuguuguucaugaaauugugaggagcuuuggaacacugaaaaaggaaggguggagaccuagaagaacaauuuuguuugcaagcugggaugcagaagaauuuggucuucuugguucuacugagugggcagaggagaauucaagacuccuucaagagcguggcguggcuuauauuaaugcugacucaucuauagaaggaaacuacacucugagaguugauuguacaccgcugauguacagcuugguacacaaccuaacaaaagagcugaaaagcccugaugaaggcuuugaaggcaaaucucuuuaugaaaguuggacuaaaaaaaguccuuccccagaguucaguggcaugcccaggauaagcaaauugggaucuggaaaugauuuugagguguucuuccaacgacuuggaauugcuucaggcagagcacgguauacuaaaaauugggaaacaaacaaauucagcggcuauccacuguaucacagugucuaugaaacauaugaguugguggaaaaguuuuaugauccaauguuuaaauaucaccucacuguggcccagguucgaggagggaugguguuugagcuagccaauuccauagugcucccuuuugauugucgagauuaugcuguaguuuuaagaaaguaugcugacaaaaucuacaguauuucuaugaaacauccacaggaaaugaagacauacaguguaucauuugauucacuuuuuucugcaguaaagaauuuuacagaaauugcuuccaaguucagugagagacuccaggacuuugacaaaagcaacccaauaguauuaagaaugaugaaugaucaacucauguuucuggaaagagcauuuauugauccauuaggguuaccagacaggccuuuuuauaggcaugucaucuaugcuccaagcagccacaacaaguaugcaggggagucauucccaggaauuuaugaugcucuguuugauauugaaagcaaaguggacccuuccaaggccuggggagaagugaagagacagauuuauguugcagccuucacagugcaggcagcugcagagacuuugagugaaguagccuaagaggauucuuuagagaauccguauugaauuugugugguaugucacucagaaagaaucguaauggguauauugauaaauuuuaaaauugguauauuugaaauaaaguugaauauuauauauaaaaaaaaaaaaaaaaaaa

SEQ ID NO: 78662 - RNA, 2560 nt, Homo sapiens
cucaaaaggggccggauuuccuucuccuggaggcagauguugccucucucucucgcucggauugguucagugcacucuagaaacacugcugugguggagaaacuggaccccaggucuggagcgaauuccagccugcagggcugauaagcgaggcauuagugagauugagagagacuuuaccccgccguggugguuggagggcgcgcaguagagcagcagcacaggcgcgggucccgggaggccggcucugcucgcgccgagauguggaaucuccuucacgaaaccgacucggcuguggccaccgcgcgccgcccgcgcuggcugugcgcuggggcgcuggugcuggcggguggcuucuuucuccucggcuuccucuucgggugguuuauaaaauccuccaaugaagcuacuaacauuacuccaaagcauaauaugaaagcauuuuuggaugaauugaaagcugagaacaucaagaaguucuuauauaauuuuacacagauaccacauuuagcaggaacagaacaaaacuuucagcuugcaaagcaaauucaaucccaguggaaagaauuuggccuggauucuguugagcuagcacauuaugauguccuguuguccuacccaaauaagacucaucccaacuacaucucaauaauuaaugaagauggaaaugagauuuucaacacaucauuauuugaaccaccuccuccaggauaugaaaauguuucggauauuguaccaccuuucagugcuuucucuccucaaggaaugccagagggcgaucuaguguauguuaacuaugcacgaacugaagacuucuuuaaauuggaacgggacaugaaaaucaauugcucugggaaaauuguaauugccagauaugggaaaguuuucagaggaaauaagguuaaaaaugcccagcuggcaggggccaaaggagucauucucuacuccgacccugcugacuacuuugcuccuggggugaaguccuauccagaugguuggaaucuuccuggaggugguguccagcguggaaauauccuaaaucugaauggugcaggagacccucucacaccagguuacccagcaaaugaauaugcuuauaggcguggaauugcagaggcuguuggucuuccaaguauuccuguucauccaauuggauacuaugaugcacagaagcuccuagaaaaaauggguggcucagcaccaccagauagcagcuggagaggaagucucaaagugcccuacaauguuggaccuggcuuuacuggaaacuuuucuacacaaaaagucaagaugcacauccacucuaccaaugaagugacaagaauuuacaaugugauagguacucucagaggagcaguggaaccagacagauaugucauucugggaggucaccgggacucauggguguuuggugguauugacccucagaguggagcagcuguuguucaugaaauugugaggagcuuuggaacacugaaaaaggaaggguggagaccuagaagaacaauuuuguuugcaagcugggaugcagaagaauuuggucuucuugguucuacugagugggcagaggagaauucaagacuccuucaagagcguggcguggcuuauauuaaugcugacucaucuauagaaggaaacuacacucugagaguugauuguacaccgcugauguacagcuugguacacaaccuaacaaaagagcugaaaagcccugaugaaggcuuugaaggcaaaucucuuuaugaaaguuggacuaaaaaaaguccuuccccagaguucaguggcaugcccaggauaagcaaauugggaucuggaaaugauuuugagguguucuuccaacgacuuggaauugcuucaggcagagcacgguauacuaaaaauugggaaacaaacaaauucagcggcuauccacuguaucacagugucuaugaaacauaugaguugguggaaaaguuuuaugauccaauguuuaaauaucaccucacuguggcccagguucgaggagggaugguguuugagcuagccaauuccauagugcucccuuuugauugucgagauuaugcuguaguuuuaagaaaguaugcugacaaaaucuacaguauuucuaugaaacauccacaggaaaugaagacauacaguguaucauuugauucacuuuuuucugcaguaaagaauuuuacagaaauugcuuccaaguucagugagagacuccaggacuuugacaaaagcaagcaugucaucuaugcuccaagcagccacaacaaguaugcaggggagucauucccaggaauuuaugaugcucuguuugauauugaaagcaaaguggacccuuccaaggccuggggagaagugaagagacagauuuauguugcagccuucacagugcaggcagcugcagagacuuugagugaaguagccuaagaggauucuuuagagaauccguauugaauuugugugguaugucacucagaaagaaucguaauggguauauugauaaauuuuaaaauugguauauuugaaauaaaguugaauauuauauauaaaaaaaaaaaaaaaaaaa

SEQ ID NO: 78663 - RNA, 19 nt, Artificial Sequence
  Description of Artificial Sequence: Synthetic oligonucleotide
cucaaaaggggccggauuu

SEQ ID NO: 78664 - RNA, 19 nt, Artificial Sequence
  Description of Artificial Sequence: Synthetic oligonucleotide
uccuucuccuggaggcaga

SEQ ID NO: 78665 - RNA, 19 nt, Artificial Sequence
  Description of Artificial Sequence: Synthetic oligonucleotide
auguugccucucucucucg

SEQ ID NO: 78666 - RNA, 19 nt, Artificial Sequence
  Description of Artificial Sequence: Synthetic oligonucleotide
gcucggauugguucagugc

SEQ ID NO: 78667 - RNA, 19 nt, Artificial Sequence
  Description of Artificial Sequence: Synthetic oligonucleotide
cacucuagaaacacugcug

SEQ ID NO: 78668 - RNA, 19 nt, Artificial Sequence
  Description of Artificial Sequence: Synthetic oligonucleotide
gugguggagaaacuggacc

SEQ ID NO: 78669 - RNA, 19 nt, Artificial Sequence
  Description of Artificial Sequence: Synthetic oligonucleotide
cccaggucuggagcgaauu

SEQ ID NO: 78670 - RNA, 19 nt, Artificial Sequence
  Description of Artificial Sequence: Synthetic oligonucleotide
uccagccugcagggcugau

SEQ ID NO: 78671 - RNA, 19 nt, Artificial Sequence
  Description of Artificial Sequence: Synthetic oligonucleotide
uaagcgaggcauuagugag

SEQ ID NO: 78672 - RNA, 19 nt, Artificial Sequence
  Description of Artificial Sequence: Synthetic oligonucleotide
gauugagagagacuuuacc

SEQ ID NO: 78673 - RNA, 19 nt, Artificial Sequence
  Description of Artificial Sequence: Synthetic oligonucleotide
cccgccguggugguuggag

SEQ ID NO: 78674 - RNA, 19 nt, Artificial Sequence
  Description of Artificial Sequence: Synthetic oligonucleotide
gggcgcgcaguagagcagc

SEQ ID NO: 78675 - RNA, 19 nt, Artificial Sequence
  Description of Artificial Sequence: Synthetic oligonucleotide
cagcacaggcgcggguccc

SEQ ID NO: 78676 - RNA, 19 nt, Artificial Sequence
  Description of Artificial Sequence: Synthetic oligonucleotide
cgggaggccggcucugcuc

SEQ ID NO: 78677 - RNA, 19 nt, Artificial Sequence
  Description of Artificial Sequence: Synthetic oligonucleotide
cgcgccgagauguggaauc

SEQ ID NO: 78678 - RNA, 19 nt, Artificial Sequence
  Description of Artificial Sequence: Synthetic oligonucleotide
cuccuucacgaaaccgacu

SEQ ID NO: 78679 - RNA, 19 nt, Artificial Sequence
  Description of Artificial Sequence: Synthetic oligonucleotide
ucggcuguggccaccgcgc

SEQ ID NO: 78680 - RNA, 19 nt, Artificial Sequence
  Description of Artificial Sequence: Synthetic oligonucleotide
cgccgcccgcgcuggcugu

SEQ ID NO: 78681 - RNA, 19 nt, Artificial Sequence
  Description of Artificial Sequence: Synthetic oligonucleotide
ugcgcuggggcgcuggugc

SEQ ID NO: 78682 - RNA, 19 nt, Artificial Sequence
  Description of Artificial Sequence: Synthetic oligonucleotide
cuggcggguggcuucuuuc

SEQ ID NO: 78683 - RNA, 19 nt, Artificial Sequence
  Description of Artificial Sequence: Synthetic oligonucleotide
cuccucggcuuccucuucg

SEQ ID NO: 78684 - RNA, 19 nt, Artificial Sequence
  Description of Artificial Sequence: Synthetic oligonucleotide
gggugguuuauaaaauccu

SEQ ID NO: 78685 - RNA, 19 nt, Artificial Sequence
  Description of Artificial Sequence: Synthetic oligonucleotide
uccaaugaagcuacuaaca

SEQ ID NO: 78686 - RNA, 19 nt, Artificial Sequence
  Description of Artificial Sequence: Synthetic oligonucleotide
auuacuccaaagcauaaua

SEQ ID NO: 78687 - RNA, 19 nt, Artificial Sequence
  Description of Artificial Sequence: Synthetic oligonucleotide
augaaagcauuuuuggaug

SEQ ID NO: 78688 - RNA, 19 nt, Artificial Sequence
  Description of Artificial Sequence: Synthetic oligonucleotide
gaauugaaagcugagaaca

SEQ ID NO: 78689 - RNA, 19 nt, Artificial Sequence
  Description of Artificial Sequence: Synthetic oligonucleotide
aucaagaaguucuuauaua

SEQ ID NO: 78690 - RNA, 19 nt, Artificial Sequence
  Description of Artificial Sequence: Synthetic oligonucleotide
aauuuuacacagauaccac

SEQ ID NO: 78691 - RNA, 19 nt, Artificial Sequence
  Description of Artificial Sequence: Synthetic oligonucleotide
cauuuagcaggaacagaac

SEQ ID NO: 78692 - RNA, 19 nt, Artificial Sequence
  Description of Artificial Sequence: Synthetic oligonucleotide
caaaacuuucagcuugcaa

SEQ ID NO: 78693 - RNA, 19 nt, Artificial Sequence
  Description of Artificial Sequence: Synthetic oligonucleotide
aagcaaauucaaucccagu

SEQ ID NO: 78694 - RNA, 19 nt, Artificial Sequence
  Description of Artificial Sequence: Synthetic oligonucleotide
uggaaagaauuuggccugg

SEQ ID NO: 78695 - RNA, 19 nt, Artificial Sequence
  Description of Artificial Sequence: Synthetic oligonucleotide
gauucuguugagcuagcac

SEQ ID NO: 78696 - RNA, 19 nt, Artificial Sequence
  Description of Artificial Sequence: Synthetic oligonucleotide
cauuaugauguccuguugu

SEQ ID NO: 78697 - RNA, 19 nt, Artificial Sequence
  Description of Artificial Sequence: Synthetic oligonucleotide
uccuacccaaauaagacuc

SEQ ID NO: 78698 - RNA, 19 nt, Artificial Sequence
  Description of Artificial Sequence: Synthetic oligonucleotide
caucccaacuacaucucaa

SEQ ID NO: 78699 - RNA, 19 nt, Artificial Sequence
  Description of Artificial Sequence: Synthetic oligonucleotide
auaauuaaugaagauggaa

SEQ ID NO: 78700 - RNA, 19 nt, Artificial Sequence
  Description of Artificial Sequence: Synthetic oligonucleotide
aaugagauuuucaacacau

SEQ ID NO: 78701 - RNA, 19 nt, Artificial Sequence
  Description of Artificial Sequence: Synthetic oligonucleotide
ucauuauuugaaccaccuc

SEQ ID NO: 78702 - RNA, 19 nt, Artificial Sequence
  Description of Artificial Sequence: Synthetic oligonucleotide
ccuccaggauaugaaaaug

SEQ ID NO: 78703 - RNA, 19 nt, Artificial Sequence
  Description of Artificial Sequence: Synthetic oligonucleotide
guuucggauauuguaccac

SEQ ID NO: 78704 - RNA, 19 nt, Artificial Sequence
  Description of Artificial Sequence: Synthetic oligonucleotide
ccuuucagugcuuucucuc

SEQ ID NO: 78705 - RNA, 19 nt, Artificial Sequence
  Description of Artificial Sequence: Synthetic oligonucleotide
ccucaaggaaugccagagg

SEQ ID NO: 78706 - RNA, 19 nt, Artificial Sequence
  Description of Artificial Sequence: Synthetic oligonucleotide
ggcgaucuaguguauguua

SEQ ID NO: 78707 - RNA, 19 nt, Artificial Sequence
  Description of Artificial Sequence: Synthetic oligonucleotide
aacuaugcacgaacugaag

SEQ ID NO: 78708 - RNA, 19 nt, Artificial Sequence
  Description of Artificial Sequence: Synthetic oligonucleotide
gacuucuuuaaauuggaac

SEQ ID NO: 78709 - RNA, 19 nt, Artificial Sequence
  Description of Artificial Sequence: Synthetic oligonucleotide
cgggacaugaaaaucaauu

SEQ ID NO: 78710 - RNA, 19 nt, Artificial Sequence
  Description of Artificial Sequence: Synthetic oligonucleotide
ugcucugggaaaauuguaa

SEQ ID NO: 78711 - RNA, 19 nt, Artificial Sequence
  Description of Artificial Sequence: Synthetic oligonucleotide
auugccagauaugggaaag

SEQ ID NO: 78712 - RNA, 19 nt, Artificial Sequence
  Description of Artificial Sequence: Synthetic oligonucleotide
guuuucagaggaaauaagg

SEQ ID NO: 78713 - RNA, 19 nt, Artificial Sequence
  Description of Artificial Sequence: Synthetic oligonucleotide
guuaaaaaugcccagcugg

SEQ ID NO: 78714 - RNA, 19 nt, Artificial Sequence
  Description of Artificial Sequence: Synthetic oligonucleotide
gcaggggccaaaggaguca

SEQ ID NO: 78715 - RNA, 19 nt, Artificial Sequence
  Description of Artificial Sequence: Synthetic oligonucleotide
auucucuacuccgacccug

SEQ ID NO: 78716 - RNA, 19 nt, Artificial Sequence
  Description of Artificial Sequence: Synthetic oligonucleotide
gcugacuacuuugcuccug

SEQ ID NO: 78717 - RNA, 19 nt, Artificial Sequence
  Description of Artificial Sequence: Synthetic oligonucleotide
ggggugaaguccuauccag

SEQ ID NO: 78718 - RNA, 19 nt, Artificial Sequence
  Description of Artificial Sequence: Synthetic oligonucleotide
gaugguuggaaucuuccug

SEQ ID NO: 78719 - RNA, 19 nt, Artificial Sequence
  Description of Artificial Sequence: Synthetic oligonucleotide
ggaggugguguccagcgug

SEQ ID NO: 78720 - RNA, 19 nt, Artificial Sequence
  Description of Artificial Sequence: Synthetic oligonucleotide
ggaaauauccuaaaucuga

SEQ ID NO: 78721 - RNA, 19 nt, Artificial Sequence
  Description of Artificial Sequence: Synthetic oligonucleotide
aauggugcaggagacccuc

SEQ ID NO: 78722 - RNA, 19 nt, Artificial Sequence
  Description of Artificial Sequence: Synthetic oligonucleotide
cucacaccagguuacccag

SEQ ID NO: 78723 - RNA, 19 nt, Artificial Sequence
  Description of Artificial Sequence: Synthetic oligonucleotide
gcaaaugaauaugcuuaua

SEQ ID NO: 78724 - RNA, 19 nt, Artificial Sequence
  Description of Artificial Sequence: Synthetic oligonucleotide
aggcguggaauugcagagg

SEQ ID NO: 78725 - RNA, 19 nt, Artificial Sequence
  Description of Artificial Sequence: Synthetic oligonucleotide
gcuguuggucuuccaagua

SEQ ID NO: 78726 - RNA, 19 nt, Artificial Sequence
  Description of Artificial Sequence: Synthetic oligonucleotide
auuccuguucauccaauug

SEQ ID NO: 78727 - RNA, 19 nt, Artificial Sequence
  Description of Artificial Sequence: Synthetic oligonucleotide
ggauacuaugaugcacaga

SEQ ID NO: 78728 - RNA, 19 nt, Artificial Sequence
  Description of Artificial Sequence: Synthetic oligonucleotide
aagcuccuagaaaaaaugg

SEQ ID NO: 78729 - RNA, 19 nt, Artificial Sequence
  Description of Artificial Sequence: Synthetic oligonucleotide
gguggcucagcaccaccag

SEQ ID NO: 78730 - RNA, 19 nt, Artificial Sequence
  Description of Artificial Sequence: Synthetic oligonucleotide
gauagcagcuggagaggaa

SEQ ID NO: 78731 - RNA, 19 nt, Artificial Sequence
  Description of Artificial Sequence: Synthetic oligonucleotide
agucucaaagugcccuaca

SEQ ID NO: 78732 - RNA, 19 nt, Artificial Sequence
  Description of Artificial Sequence: Synthetic oligonucleotide
aauguuggaccuggcuuua

SEQ ID NO: 78733 - RNA, 19 nt, Artificial Sequence
  Description of Artificial Sequence: Synthetic oligonucleotide
acuggaaacuuuucuacac

SEQ ID NO: 78734 - RNA, 19 nt, Artificial Sequence
  Description of Artificial Sequence: Synthetic oligonucleotide
caaaaagucaagaugcaca

SEQ ID NO: 78735 - RNA, 19 nt, Artificial Sequence
  Description of Artificial Sequence: Synthetic oligonucleotide
auccacucuaccaaugaag

SEQ ID NO: 78736 - RNA, 19 nt, Artificial Sequence
  Description of Artificial Sequence: Synthetic oligonucleotide
gugacaagaauuuacaaug

SEQ ID NO: 78737 - RNA, 19 nt, Artificial Sequence
  Description of Artificial Sequence: Synthetic oligonucleotide
gugauagguacucucagag

SEQ ID NO: 78738 - RNA, 19 nt, Artificial Sequence
  Description of Artificial Sequence: Synthetic oligonucleotide
ggagcaguggaaccagaca

SEQ ID NO: 78739 - RNA, 19 nt, Artificial Sequence
  Description of Artificial Sequence: Synthetic oligonucleotide
agauaugucauucugggag

SEQ ID NO: 78740 - RNA, 19 nt, Artificial Sequence
  Description of Artificial Sequence: Synthetic oligonucleotide
ggucaccgggacucauggg

SEQ ID NO: 78741 - RNA, 19 nt, Artificial Sequence
  Description of Artificial Sequence: Synthetic oligonucleotide
guguuuggugguauugacc

SEQ ID NO: 78742 - RNA, 19 nt, Artificial Sequence
  Description of Artificial Sequence: Synthetic oligonucleotide
ccucagaguggagcagcug

SEQ ID NO: 78743 - RNA, 19 nt, Artificial Sequence
  Description of Artificial Sequence: Synthetic oligonucleotide
guuguucaugaaauuguga

SEQ ID NO: 78744 - RNA, 19 nt, Artificial Sequence
  Description of Artificial Sequence: Synthetic oligonucleotide
aggagcuuuggaacacuga

SEQ ID NO: 78745 - RNA, 19 nt, Artificial Sequence
  Description of Artificial Sequence: Synthetic oligonucleotide
aaaaaggaaggguggagac

SEQ ID NO: 78746 - RNA, 19 nt, Artificial Sequence
  Description of Artificial Sequence: Synthetic oligonucleotide
ccuagaagaacaauuuugu

SEQ ID NO: 78747 - RNA, 19 nt, Artificial Sequence
  Description of Artificial Sequence: Synthetic oligonucleotide
uuugcaagcugggaugcag

SEQ ID NO: 78748 - RNA, 19 nt, Artificial Sequence
  Description of Artificial Sequence: Synthetic oligonucleotide
gaagaauuuggucuucuug

SEQ ID NO: 78749 - RNA, 19 nt, Artificial Sequence
  Description of Artificial Sequence: Synthetic oligonucleotide
gguucuacugagugggcag

SEQ ID NO: 78750 - RNA, 19 nt, Artificial Sequence
  Description of Artificial Sequence: Synthetic oligonucleotide
gaggagaauucaagacucc

SEQ ID NO: 78751 - RNA, 19 nt, Artificial Sequence
  Description of Artificial Sequence: Synthetic oligonucleotide
cuucaagagcguggcgugg

SEQ ID NO: 78752 - RNA, 19 nt, Artificial Sequence
  Description of Artificial Sequence: Synthetic oligonucleotide
gcuuauauuaaugcugacu

SEQ ID NO: 78753 - RNA, 19 nt, Artificial Sequence
  Description of Artificial Sequence: Synthetic oligonucleotide
ucaucuauagaaggaaacu

SEQ ID NO: 78754 - RNA, 19 nt, Artificial Sequence
  Description of Artificial Sequence: Synthetic oligonucleotide
uacacucugagaguugauu

SEQ ID NO: 78755 - RNA, 19 nt, Artificial Sequence
  Description of Artificial Sequence: Synthetic oligonucleotide
uguacaccgcugauguaca

SEQ ID NO: 78756 - RNA, 19 nt, Artificial Sequence
  Description of Artificial Sequence: Synthetic oligonucleotide
agcuugguacacaaccuaa

SEQ ID NO: 78757 - RNA, 19 nt, Artificial Sequence
  Description of Artificial Sequence: Synthetic oligonucleotide
acaaaagagcugaaaagcc

SEQ ID NO: 78758 - RNA, 19 nt, Artificial Sequence
  Description of Artificial Sequence: Synthetic oligonucleotide
ccugaugaaggcuuugaag

SEQ ID NO: 78759 - RNA, 19 nt, Artificial Sequence
  Description of Artificial Sequence: Synthetic oligonucleotide
ggcaaaucucuuuaugaaa

SEQ ID NO: 78760 - RNA, 19 nt, Artificial Sequence
  Description of Artificial Sequence: Synthetic oligonucleotide
aguuggacuaaaaaaaguc

SEQ ID NO: 78761 - RNA, 19 nt, Artificial Sequence
  Description of Artificial Sequence: Synthetic oligonucleotide
ccuuccccagaguucagug

SEQ ID NO: 78762 - RNA, 19 nt, Artificial Sequence
  Description of Artificial Sequence: Synthetic oligonucleotide
ggcaugcccaggauaagca

SEQ ID NO: 78763 - RNA, 19 nt, Artificial Sequence
  Description of Artificial Sequence: Synthetic oligonucleotide
aaauugggaucuggaaaug

SEQ ID NO: 78764 - RNA, 19 nt, Artificial Sequence
  Description of Artificial Sequence: Synthetic oligonucleotide
gauuuugagguguucuucc

SEQ ID NO: 78765 - RNA, 19 nt, Artificial Sequence
  Description of Artificial Sequence: Synthetic oligonucleotide
caacgacuuggaauugcuu

SEQ ID NO: 78766 - RNA, 19 nt, Artificial Sequence
  Description of Artificial Sequence: Synthetic oligonucleotide
ucaggcagagcacgguaua

SEQ ID NO: 78767 - RNA, 19 nt, Artificial Sequence
  Description of Artificial Sequence: Synthetic oligonucleotide
acuaaaaauugggaaacaa

SEQ ID NO: 78768 - RNA, 19 nt, Artificial Sequence
  Description of Artificial Sequence: Synthetic oligonucleotide
aacaaauucagcggcuauc

SEQ ID NO: 78769 - RNA, 19 nt, Artificial Sequence
  Description of Artificial Sequence: Synthetic oligonucleotide
ccacuguaucacagugucu

SEQ ID NO: 78770 - RNA, 19 nt, Artificial Sequence
  Description of Artificial Sequence: Synthetic oligonucleotide
uaugaaacauaugaguugg

SEQ ID NO: 78771 - RNA, 19 nt, Artificial Sequence
  Description of Artificial Sequence: Synthetic oligonucleotide
guggaaaaguuuuaugauc

SEQ ID NO: 78772 - RNA, 19 nt, Artificial Sequence
  Description of Artificial Sequence: Synthetic oligonucleotide
ccaauguuuaaauaucacc

SEQ ID NO: 78773 - RNA, 19 nt, Artificial Sequence
  Description of Artificial Sequence: Synthetic oligonucleotide
cucacuguggcccagguuc

SEQ ID NO: 78774 - RNA, 19 nt, Artificial Sequence
  Description of Artificial Sequence: Synthetic oligonucleotide
cgaggagggaugguguuug

SEQ ID NO: 78775 - RNA, 19 nt, Artificial Sequence
  Description of Artificial Sequence: Synthetic oligonucleotide
gagcuagccaauuccauag

SEQ ID NO: 78776 - RNA, 19 nt, Artificial Sequence
  Description of Artificial Sequence: Synthetic oligonucleotide
gugcucccuuuugauuguc

SEQ ID NO: 78777 - RNA, 19 nt, Artificial Sequence
  Description of Artificial Sequence: Synthetic oligonucleotide
cgagauuaugcuguaguuu

SEQ ID NO: 78778 - RNA, 19 nt, Artificial Sequence
  Description of Artificial Sequence: Synthetic oligonucleotide
uuaagaaaguaugcugaca

SEQ ID NO: 78779 - RNA, 19 nt, Artificial Sequence
  Description of Artificial Sequence: Synthetic oligonucleotide
aaaaucuacaguauuucua

SEQ ID NO: 78780 - RNA, 19 nt, Artificial Sequence
  Description of Artificial Sequence: Synthetic oligonucleotide
augaaacauccacaggaaa

SEQ ID NO: 78781 - RNA, 19 nt, Artificial Sequence
  Description of Artificial Sequence: Synthetic oligonucleotide
augaagacauacaguguau

SEQ ID NO: 78782 - RNA, 19 nt, Artificial Sequence
  Description of Artificial Sequence: Synthetic oligonucleotide
ucauuugauucacuuuuuu

SEQ ID NO: 78783 - RNA, 19 nt, Artificial Sequence
  Description of Artificial Sequence: Synthetic oligonucleotide
ucugcaguaaagaauuuua

SEQ ID NO: 78784 - RNA, 19 nt, Artificial Sequence
  Description of Artificial Sequence: Synthetic oligonucleotide
acagaaauugcuuccaagu

SEQ ID NO: 78785 - RNA, 19 nt, Artificial Sequence
  Description of Artificial Sequence: Synthetic oligonucleotide
uucagugagagacuccagg

SEQ ID NO: 78786 - RNA, 19 nt, Artificial Sequence
  Description of Artificial Sequence: Synthetic oligonucleotide
gacuuugacaaaagcaagc

SEQ ID NO: 78787 - RNA, 19 nt, Artificial Sequence
  Description of Artificial Sequence: Synthetic oligonucleotide
caugucaucuaugcuccaa

SEQ ID NO: 78788 - RNA, 19 nt, Artificial Sequence
  Description of Artificial Sequence: Synthetic oligonucleotide
agcagccacaacaaguaug

SEQ ID NO: 78789 - RNA, 19 nt, Artificial Sequence
  Description of Artificial Sequence: Synthetic oligonucleotide
gcaggggagucauucccag

SEQ ID NO: 78790 - RNA, 19 nt, Artificial Sequence
  Description of Artificial Sequence: Synthetic oligonucleotide
ggaauuuaugaugcucugu

SEQ ID NO: 78791 - RNA, 19 nt, Artificial Sequence
  Description of Artificial Sequence: Synthetic oligonucleotide
uuugauauugaaagcaaag

SEQ ID NO: 78792 - RNA, 19 nt, Artificial Sequence
  Description of Artificial Sequence: Synthetic oligonucleotide
guggacccuuccaaggccu

SEQ ID NO: 78793 - RNA, 19 nt, Artificial Sequence
  Description of Artificial Sequence: Synthetic oligonucleotide
uggggagaagugaagagac

SEQ ID NO: 78794 - RNA, 19 nt, Artificial Sequence
  Description of Artificial Sequence: Synthetic oligonucleotide
cagauuuauguugcagccu

SEQ ID NO: 78795 - RNA, 19 nt, Artificial Sequence
  Description of Artificial Sequence: Synthetic oligonucleotide
uucacagugcaggcagcug

SEQ ID NO: 78796 - RNA, 19 nt, Artificial Sequence
  Description of Artificial Sequence: Synthetic oligonucleotide
gcagagacuuugagugaag

SEQ ID NO: 78797 - RNA, 19 nt, Artificial Sequence
  Description of Artificial Sequence: Synthetic oligonucleotide
guagccuaagaggauucuu

SEQ ID NO: 78798 - RNA, 19 nt, Artificial Sequence
  Description of Artificial Sequence: Synthetic oligonucleotide
uuagagaauccguauugaa

SEQ ID NO: 78799 - RNA, 19 nt, Artificial Sequence
  Description of Artificial Sequence: Synthetic oligonucleotide
auuugugugguaugucacu

SEQ ID NO: 78800 - RNA, 19 nt, Artificial Sequence
  Description of Artificial Sequence: Synthetic oligonucleotide
ucagaaagaaucguaaugg

SEQ ID NO: 78801 - RNA, 19 nt, Artificial Sequence
  Description of Artificial Sequence: Synthetic oligonucleotide
gguauauugauaaauuuua

SEQ ID NO: 78802 - RNA, 19 nt, Artificial Sequence
  Description of Artificial Sequence: Synthetic oligonucleotide
aaaauugguauauuugaaa

SEQ ID NO: 78803 - RNA, 19 nt, Artificial Sequence
  Description of Artificial Sequence: Synthetic oligonucleotide
auaaaguugaauauuauau

SEQ ID NO: 78804 - RNA, 19 nt, Artificial Sequence
  Description of Artificial Sequence: Synthetic oligonucleotide
gacuuugacaaaagcaacc

SEQ ID NO: 78805 - RNA, 19 nt, Artificial Sequence
  Description of Artificial Sequence: Synthetic oligonucleotide
ccaauaguauuaagaauga

SEQ ID NO: 78806 - RNA, 19 nt, Artificial Sequence
  Description of Artificial Sequence: Synthetic oligonucleotide
augaaugaucaacucaugu

SEQ ID NO: 78807 - RNA, 19 nt, Artificial Sequence
  Description of Artificial Sequence: Synthetic oligonucleotide
uuucuggaaagagcauuua

SEQ ID NO: 78808 - RNA, 19 nt, Artificial Sequence
  Description of Artificial Sequence: Synthetic oligonucleotide
auugauccauuaggguuac

SEQ ID NO: 78809 - RNA, 19 nt, Artificial Sequence
  Description of Artificial Sequence: Synthetic oligonucleotide
ccagacaggccuuuuuaua

SEQ ID NO: 78810 - RNA, 19 nt, Artificial Sequence
  Description of Artificial Sequence: Synthetic oligonucleotide
aggcaugucaucuaugcuc

SEQ ID NO: 78811 - RNA, 19 nt, Artificial Sequence
  Description of Artificial Sequence: Synthetic oligonucleotide
ccaagcagccacaacaagu

SEQ ID NO: 78812 - RNA, 19 nt, Artificial Sequence
  Description of Artificial Sequence: Synthetic oligonucleotide
uaugcaggggagucauucc

SEQ ID NO: 78813 - RNA, 19 nt, Artificial Sequence
  Description of Artificial Sequence: Synthetic oligonucleotide
ccaggaauuuaugaugcuc

SEQ ID NO: 78814 - RNA, 19 nt, Artificial Sequence
  Description of Artificial Sequence: Synthetic oligonucleotide
cuguuugauauugaaagca

SEQ ID NO: 78815 - RNA, 19 nt, Artificial Sequence
  Description of Artificial Sequence: Synthetic oligonucleotide
aaaguggacccuuccaagg

SEQ ID NO: 78816 - RNA, 19 nt, Artificial Sequence
  Description of Artificial Sequence: Synthetic oligonucleotide
gccuggggagaagugaaga

SEQ ID NO: 78817 - RNA, 19 nt, Artificial Sequence
  Description of Artificial Sequence: Synthetic oligonucleotide
agacagauuuauguugcag

SEQ ID NO: 78818 - RNA, 19 nt, Artificial Sequence
  Description of Artificial Sequence: Synthetic oligonucleotide
gccuucacagugcaggcag

SEQ ID NO: 78819 - RNA, 19 nt, Artificial Sequence
  Description of Artificial Sequence: Synthetic oligonucleotide
gcugcagagacuuugagug

SEQ ID NO: 78820 - RNA, 19 nt, Artificial Sequence
  Description of Artificial Sequence: Synthetic oligonucleotide
gaaguagccuaagaggauu

SEQ ID NO: 78821 - RNA, 19 nt, Artificial Sequence
  Description of Artificial Sequence: Synthetic oligonucleotide
ucuuuagagaauccguauu

SEQ ID NO: 78822 - RNA, 19 nt, Artificial Sequence
  Description of Artificial Sequence: Synthetic oligonucleotide
ugaauuugugugguauguc

SEQ ID NO: 78823 - RNA, 19 nt, Artificial Sequence
  Description of Artificial Sequence: Synthetic oligonucleotide
cacucagaaagaaucguaa

SEQ ID NO: 78824 - RNA, 19 nt, Artificial Sequence
  Description of Artificial Sequence: Synthetic oligonucleotide
auggguauauugauaaauu

SEQ ID NO: 78825 - RNA, 19 nt, Artificial Sequence
  Description of Artificial Sequence: Synthetic oligonucleotide
uuuaaaauugguauauuug

SEQ ID NO: 78826 - RNA, 19 nt, Artificial Sequence
  Description of Artificial Sequence: Synthetic oligonucleotide
gaaauaaaguugaauauua

SEQ ID NO: 78827 - RNA, 25 nt, Artificial Sequence
  Description of Artificial Sequence: Synthetic oligonucleotide
cucaaaaggggccggauuuccuucu

SEQ ID NO: 78828 - RNA, 25 nt, Artificial Sequence
  Description of Artificial Sequence: Synthetic oligonucleotide
uccuggaggcagauguugccucucu

SEQ ID NO: 78829 - RNA, 25 nt, Artificial Sequence
  Description of Artificial Sequence: Synthetic oligonucleotide
ucucucgcucggauugguucagugc

SEQ ID NO: 78830 - RNA, 25 nt, Artificial Sequence
  Description of Artificial Sequence: Synthetic oligonucleotide
cacucuagaaacacugcuguggugg

SEQ ID NO: 78831 - RNA, 25 nt, Artificial Sequence
  Description of Artificial Sequence: Synthetic oligonucleotide
gagaaacuggaccccaggucuggag

SEQ ID NO: 78832 - RNA, 25 nt, Artificial Sequence
  Description of Artificial Sequence: Synthetic oligonucleotide
gcgaauuccagccugcagggcugau

SEQ ID NO: 78833 - RNA, 25 nt, Artificial Sequence
  Description of Artificial Sequence: Synthetic oligonucleotide
uaagcgaggcauuagugagauugag

SEQ ID NO: 78834 - RNA, 25 nt, Artificial Sequence
  Description of Artificial Sequence: Synthetic oligonucleotide
gagagacuuuaccccgccguggugg

SEQ ID NO: 78835 - RNA, 25 nt, Artificial Sequence
  Description of Artificial Sequence: Synthetic oligonucleotide
guuggagggcgcgcaguagagcagc

SEQ ID NO: 78836 - RNA, 25 nt, Artificial Sequence
  Description of Artificial Sequence: Synthetic oligonucleotide
cagcacaggcgcgggucccgggagg

SEQ ID NO: 78837 - RNA, 25 nt, Artificial Sequence
  Description of Artificial Sequence: Synthetic oligonucleotide
gccggcucugcucgcgccgagaugu

SEQ ID NO: 78838 - RNA, 25 nt, Artificial Sequence
  Description of Artificial Sequence: Synthetic oligonucleotide
uggaaucuccuucacgaaaccgacu

SEQ ID NO: 78839 - RNA, 25 nt, Artificial Sequence
  Description of Artificial Sequence: Synthetic oligonucleotide
ucggcuguggccaccgcgcgccgcc

SEQ ID NO: 78840 - RNA, 25 nt, Artificial Sequence
  Description of Artificial Sequence: Synthetic oligonucleotide
ccgcgcuggcugugcgcuggggcgc

SEQ ID NO: 78841 - RNA, 25 nt, Artificial Sequence
  Description of Artificial Sequence: Synthetic oligonucleotide
cuggugcuggcggguggcuucuuuc

SEQ ID NO: 78842 - RNA, 25 nt, Artificial Sequence
  Description of Artificial Sequence: Synthetic oligonucleotide
cuccucggcuuccucuucggguggu

SEQ ID NO: 78843 - RNA, 25 nt, Artificial Sequence
  Description of Artificial Sequence: Synthetic oligonucleotide
uuuauaaaauccuccaaugaagcua

SEQ ID NO: 78844 - RNA, 25 nt, Artificial Sequence
  Description of Artificial Sequence: Synthetic oligonucleotide
acuaacauuacuccaaagcauaaua

SEQ ID NO: 78845 - RNA, 25 nt, Artificial Sequence
  Description of Artificial Sequence: Synthetic oligonucleotide
augaaagcauuuuuggaugaauuga

SEQ ID NO: 78846 - RNA, 25 nt, Artificial Sequence
  Description of Artificial Sequence: Synthetic oligonucleotide
aaagcugagaacaucaagaaguucu

SEQ ID NO: 78847 - RNA, 25 nt, Artificial Sequence
  Description of Artificial Sequence: Synthetic oligonucleotide
uuauauaauuuuacacagauaccac

SEQ ID NO: 78848 - RNA, 25 nt, Artificial Sequence
  Description of Artificial Sequence: Synthetic oligonucleotide
cauuuagcaggaacagaacaaaacu

SEQ ID NO: 78849 - RNA, 25 nt, Artificial Sequence
  Description of Artificial Sequence: Synthetic oligonucleotide
uuucagcuugcaaagcaaauucaau

SEQ ID NO: 78850 - RNA, 25 nt, Artificial Sequence
  Description of Artificial Sequence: Synthetic oligonucleotide
ucccaguggaaagaauuuggccugg

SEQ ID NO: 78851 - RNA, 25 nt, Artificial Sequence
  Description of Artificial Sequence: Synthetic oligonucleotide
gauucuguugagcuagcacauuaug

SEQ ID NO: 78852 - RNA, 25 nt, Artificial Sequence
  Description of Artificial Sequence: Synthetic oligonucleotide
gauguccuguuguccuacccaaaua

SEQ ID NO: 78853 - RNA, 25 nt, Artificial Sequence
  Description of Artificial Sequence: Synthetic oligonucleotide
aagacucaucccaacuacaucucaa

SEQ ID NO: 78854 - RNA, 25 nt, Artificial Sequence
  Description of Artificial Sequence: Synthetic oligonucleotide
auaauuaaugaagauggaaaugaga

SEQ ID NO: 78855 - RNA, 25 nt, Artificial Sequence
  Description of Artificial Sequence: Synthetic oligonucleotide
auuuucaacacaucauuauuugaac

SEQ ID NO: 78856 - RNA, 25 nt, Artificial Sequence
  Description of Artificial Sequence: Synthetic oligonucleotide
ccaccuccuccaggauaugaaaaug

SEQ ID NO: 78857 - RNA, 25 nt, Artificial Sequence
  Description of Artificial Sequence: Synthetic oligonucleotide
guuucggauauuguaccaccuuuca

SEQ ID NO: 78858 - RNA, 25 nt, Artificial Sequence
  Description of Artificial Sequence: Synthetic oligonucleotide
agugcuuucucuccucaaggaaugc

SEQ ID NO: 78859 - RNA, 25 nt, Artificial Sequence
  Description of Artificial Sequence: Synthetic oligonucleotide
ccagagggcgaucuaguguauguua

SEQ ID NO: 78860 - RNA, 25 nt, Artificial Sequence
  Description of Artificial Sequence: Synthetic oligonucleotide
aacuaugcacgaacugaagacuucu

SEQ ID NO: 78861 - RNA, 25 nt, Artificial Sequence
  Description of Artificial Sequence: Synthetic oligonucleotide
uuuaaauuggaacgggacaugaaaa

SEQ ID NO: 78862 - RNA, 25 nt, Artificial Sequence
  Description of Artificial Sequence: Synthetic oligonucleotide
aucaauugcucugggaaaauuguaa

SEQ ID NO: 78863 - RNA, 25 nt, Artificial Sequence
  Description of Artificial Sequence: Synthetic oligonucleotide
auugccagauaugggaaaguuuuca

SEQ ID NO: 78864 - RNA, 25 nt, Artificial Sequence
  Description of Artificial Sequence: Synthetic oligonucleotide
agaggaaauaagguuaaaaaugccc

SEQ ID NO: 78865 - RNA, 25 nt, Artificial Sequence
  Description of Artificial Sequence: Synthetic oligonucleotide
cagcuggcaggggccaaaggaguca

SEQ ID NO: 78866 - RNA, 25 nt, Artificial Sequence
  Description of Artificial Sequence: Synthetic oligonucleotide
auucucuacuccgacccugcugacu

SEQ ID NO: 78867 - RNA, 25 nt, Artificial Sequence
  Description of Artificial Sequence: Synthetic oligonucleotide
uacuuugcuccuggggugaaguccu

SEQ ID NO: 78868 - RNA, 25 nt, Artificial Sequence
  Description of Artificial Sequence: Synthetic oligonucleotide
uauccagaugguuggaaucuuccug

SEQ ID NO: 78869 - RNA, 25 nt, Artificial Sequence
  Description of Artificial Sequence: Synthetic oligonucleotide
ggaggugguguccagcguggaaaua

SEQ ID NO: 78870 - RNA, 25 nt, Artificial Sequence
  Description of Artificial Sequence: Synthetic oligonucleotide
auccuaaaucugaauggugcaggag

SEQ ID NO: 78871 - RNA, 25 nt, Artificial Sequence
  Description of Artificial Sequence: Synthetic oligonucleotide
gacccucucacaccagguuacccag

SEQ ID NO: 78872 - RNA, 25 nt, Artificial Sequence
  Description of Artificial Sequence: Synthetic oligonucleotide
gcaaaugaauaugcuuauaggcgug

SEQ ID NO: 78873 - RNA, 25 nt, Artificial Sequence
  Description of Artificial Sequence: Synthetic oligonucleotide
ggaauugcagaggcuguuggucuuc

SEQ ID NO: 78874 - RNA, 25 nt, Artificial Sequence
  Description of Artificial Sequence: Synthetic oligonucleotide
ccaaguauuccuguucauccaauug

SEQ ID NO: 78875 - RNA, 25 nt, Artificial Sequence
  Description of Artificial Sequence: Synthetic oligonucleotide
ggauacuaugaugcacagaagcucc

SEQ ID NO: 78876 - RNA, 25 nt, Artificial Sequence
  Description of Artificial Sequence: Synthetic oligonucleotide
cuagaaaaaauggguggcucagcac

SEQ ID NO: 78877 - RNA, 25 nt, Artificial Sequence
  Description of Artificial Sequence: Synthetic oligonucleotide
ccaccagauagcagcuggagaggaa

SEQ ID NO: 78878 - RNA, 25 nt, Artificial Sequence
  Description of Artificial Sequence: Synthetic oligonucleotide
agucucaaagugcccuacaauguug

SEQ ID NO: 78879 - RNA, 25 nt, Artificial Sequence
  Description of Artificial Sequence: Synthetic oligonucleotide
ggaccuggcuuuacuggaaacuuuu

SEQ ID NO: 78880 - RNA, 25 nt, Artificial Sequence
  Description of Artificial Sequence: Synthetic oligonucleotide
ucuacacaaaaagucaagaugcaca

SEQ ID NO: 78881 - RNA, 25 nt, Artificial Sequence
  Description of Artificial Sequence: Synthetic oligonucleotide
auccacucuaccaaugaagugacaa

SEQ ID NO: 78882 - RNA, 25 nt, Artificial Sequence
  Description of Artificial Sequence: Synthetic oligonucleotide
agaauuuacaaugugauagguacuc

SEQ ID NO: 78883 - RNA, 25 nt, Artificial Sequence
  Description of Artificial Sequence: Synthetic oligonucleotide
cucagaggagcaguggaaccagaca

SEQ ID NO: 78884 - RNA, 25 nt, Artificial Sequence
  Description of Artificial Sequence: Synthetic oligonucleotide
agauaugucauucugggaggucacc

SEQ ID NO: 78885 - RNA, 25 nt, Artificial Sequence
  Description of Artificial Sequence: Synthetic oligonucleotide
cgggacucauggguguuugguggua

SEQ ID NO: 78886 - RNA, 25 nt, Artificial Sequence
  Description of Artificial Sequence: Synthetic oligonucleotide
auugacccucagaguggagcagcug

SEQ ID NO: 78887 - RNA, 25 nt, Artificial Sequence
  Description of Artificial Sequence: Synthetic oligonucleotide
guuguucaugaaauugugaggagcu

SEQ ID NO: 78888 - RNA, 25 nt, Artificial Sequence
  Description of Artificial Sequence: Synthetic oligonucleotide
uuuggaacacugaaaaaggaagggu

SEQ ID NO: 78889 - RNA, 25 nt, Artificial Sequence
  Description of Artificial Sequence: Synthetic oligonucleotide
uggagaccuagaagaacaauuuugu

SEQ ID NO: 78890 - RNA, 25 nt, Artificial Sequence
  Description of Artificial Sequence: Synthetic oligonucleotide
uuugcaagcugggaugcagaagaau

SEQ ID NO: 78891 - RNA, 25 nt, Artificial Sequence
  Description of Artificial Sequence: Synthetic oligonucleotide
uuuggucuucuugguucuacugagu

SEQ ID NO: 78892 - RNA, 25 nt, Artificial Sequence
  Description of Artificial Sequence: Synthetic oligonucleotide
ugggcagaggagaauucaagacucc

SEQ ID NO: 78893 - RNA, 25 nt, Artificial Sequence
  Description of Artificial Sequence: Synthetic oligonucleotide
cuucaagagcguggcguggcuuaua

SEQ ID NO: 78894 - RNA, 25 nt, Artificial Sequence
  Description of Artificial Sequence: Synthetic oligonucleotide
auuaaugcugacucaucuauagaag

SEQ ID NO: 78895 - RNA, 25 nt, Artificial Sequence
  Description of Artificial Sequence: Synthetic oligonucleotide
ggaaacuacacucugagaguugauu

SEQ ID NO: 78896 - RNA, 25 nt, Artificial Sequence
  Description of Artificial Sequence: Synthetic oligonucleotide
uguacaccgcugauguacagcuugg

SEQ ID NO: 78897 - RNA, 25 nt, Artificial Sequence
  Description of Artificial Sequence: Synthetic oligonucleotide
guacacaaccuaacaaaagagcuga

SEQ ID NO: 78898 - RNA, 25 nt, Artificial Sequence
  Description of Artificial Sequence: Synthetic oligonucleotide
aaaagcccugaugaaggcuuugaag

SEQ ID NO: 78899 - RNA, 25 nt, Artificial Sequence
  Description of Artificial Sequence: Synthetic oligonucleotide
ggcaaaucucuuuaugaaaguugga

SEQ ID NO: 78900 - RNA, 25 nt, Artificial Sequence
  Description of Artificial Sequence: Synthetic oligonucleotide
acuaaaaaaaguccuuccccagagu

SEQ ID NO: 78901 - RNA, 25 nt, Artificial Sequence
  Description of Artificial Sequence: Synthetic oligonucleotide
uucaguggcaugcccaggauaagca

SEQ ID NO: 78902 - RNA, 25 nt, Artificial Sequence
  Description of Artificial Sequence: Synthetic oligonucleotide
aaauugggaucuggaaaugauuuug

SEQ ID NO: 78903 - RNA, 25 nt, Artificial Sequence
  Description of Artificial Sequence: Synthetic oligonucleotide
gagguguucuuccaacgacuuggaa

SEQ ID NO: 78904 - RNA, 25 nt, Artificial Sequence
  Description of Artificial Sequence: Synthetic oligonucleotide
auugcuucaggcagagcacgguaua

SEQ ID NO: 78905 - RNA, 25 nt, Artificial Sequence
  Description of Artificial Sequence: Synthetic oligonucleotide
acuaaaaauugggaaacaaacaaau

SEQ ID NO: 78906 - RNA, 25 nt, Artificial Sequence
  Description of Artificial Sequence: Synthetic oligonucleotide
uucagcggcuauccacuguaucaca

SEQ ID NO: 78907 - RNA, 25 nt, Artificial Sequence
  Description of Artificial Sequence: Synthetic oligonucleotide
agugucuaugaaacauaugaguugg

SEQ ID NO: 78908 - RNA, 25 nt, Artificial Sequence
  Description of Artificial Sequence: Synthetic oligonucleotide
guggaaaaguuuuaugauccaaugu

SEQ ID NO: 78909 - RNA, 25 nt, Artificial Sequence
  Description of Artificial Sequence: Synthetic oligonucleotide
uuuaaauaucaccucacuguggccc

SEQ ID NO: 78910 - RNA, 25 nt, Artificial Sequence
  Description of Artificial Sequence: Synthetic oligonucleotide
cagguucgaggagggaugguguuug

SEQ ID NO: 78911 - RNA, 25 nt, Artificial Sequence
  Description of Artificial Sequence: Synthetic oligonucleotide
gagcuagccaauuccauagugcucc

SEQ ID NO: 78912 - RNA, 25 nt, Artificial Sequence
  Description of Artificial Sequence: Synthetic oligonucleotide
ccuuuugauugucgagauuaugcug

SEQ ID NO: 78913 - RNA, 25 nt, Artificial Sequence
  Description of Artificial Sequence: Synthetic oligonucleotide
guaguuuuaagaaaguaugcugaca

SEQ ID NO: 78914 - RNA, 25 nt, Artificial Sequence
  Description of Artificial Sequence: Synthetic oligonucleotide
aaaaucuacaguauuucuaugaaac

SEQ ID NO: 78915 - RNA, 25 nt, Artificial Sequence
  Description of Artificial Sequence: Synthetic oligonucleotide
cauccacaggaaaugaagacauaca

SEQ ID NO: 78916 - RNA, 25 nt, Artificial Sequence
  Description of Artificial Sequence: Synthetic oligonucleotide
aguguaucauuugauucacuuuuuu

SEQ ID NO: 78917 - RNA, 25 nt, Artificial Sequence
  Description of Artificial Sequence: Synthetic oligonucleotide
ucugcaguaaagaauuuuacagaaa

SEQ ID NO: 78918 - RNA, 25 nt, Artificial Sequence
  Description of Artificial Sequence: Synthetic oligonucleotide
auugcuuccaaguucagugagagac

SEQ ID NO: 78919 - RNA, 25 nt, Artificial Sequence
  Description of Artificial Sequence: Synthetic oligonucleotide
cuccaggacuuugacaaaagcaagc

SEQ ID NO: 78920 - RNA, 25 nt, Artificial Sequence
  Description of Artificial Sequence: Synthetic oligonucleotide
caugucaucuaugcuccaagcagcc

SEQ ID NO: 78921 - RNA, 25 nt, Artificial Sequence
  Description of Artificial Sequence: Synthetic oligonucleotide
cacaacaaguaugcaggggagucau

SEQ ID NO: 78922 - RNA, 25 nt, Artificial Sequence
  Description of Artificial Sequence: Synthetic oligonucleotide
uucccaggaauuuaugaugcucugu

SEQ ID NO: 78923 - RNA, 25 nt, Artificial Sequence
  Description of Artificial Sequence: Synthetic oligonucleotide
uuugauauugaaagcaaaguggacc

SEQ ID NO: 78924 - RNA, 25 nt, Artificial Sequence
  Description of Artificial Sequence: Synthetic oligonucleotide
ccuuccaaggccuggggagaaguga

SEQ ID NO: 78925 - RNA, 25 nt, Artificial Sequence
  Description of Artificial Sequence: Synthetic oligonucleotide
aagagacagauuuauguugcagccu

SEQ ID NO: 78926 - RNA, 25 nt, Artificial Sequence
  Description of Artificial Sequence: Synthetic oligonucleotide
uucacagugcaggcagcugcagaga

SEQ ID NO: 78927 - RNA, 25 nt, Artificial Sequence
  Description of Artificial Sequence: Synthetic oligonucleotide
acuuugagugaaguagccuaagagg

SEQ ID NO: 78928 - RNA, 25 nt, Artificial Sequence
  Description of Artificial Sequence: Synthetic oligonucleotide
gauucuuuagagaauccguauugaa

SEQ ID NO: 78929 - RNA, 25 nt, Artificial Sequence
  Description of Artificial Sequence: Synthetic oligonucleotide
auuugugugguaugucacucagaaa

SEQ ID NO: 78930 - RNA, 25 nt, Artificial Sequence
  Description of Artificial Sequence: Synthetic oligonucleotide
agaaucguaauggguauauugauaa

SEQ ID NO: 78931 - RNA, 25 nt, Artificial Sequence
  Description of Artificial Sequence: Synthetic oligonucleotide
aauuuuaaaauugguauauuugaaa

SEQ ID NO: 78932 - RNA, 25 nt, Artificial Sequence
  Description of Artificial Sequence: Synthetic oligonucleotide
auaaaguugaauauuauauauaaaa

SEQ ID NO: 78933 - RNA, 25 nt, Artificial Sequence
  Description of Artificial Sequence: Synthetic oligonucleotide
cuccaggacuuugacaaaagcaacc

SEQ ID NO: 78934 - RNA, 25 nt, Artificial Sequence
  Description of Artificial Sequence: Synthetic oligonucleotide
ccaauaguauuaagaaugaugaaug

SEQ ID NO: 78935 - RNA, 25 nt, Artificial Sequence
  Description of Artificial Sequence: Synthetic oligonucleotide
gaucaacucauguuucuggaaagag

SEQ ID NO: 78936 - RNA, 25 nt, Artificial Sequence
  Description of Artificial Sequence: Synthetic oligonucleotide
gcauuuauugauccauuaggguuac

SEQ ID NO: 78937 - RNA, 25 nt, Artificial Sequence
  Description of Artificial Sequence: Synthetic oligonucleotide
ccagacaggccuuuuuauaggcaug

SEQ ID NO: 78938 - RNA, 25 nt, Artificial Sequence
  Description of Artificial Sequence: Synthetic oligonucleotide
gucaucuaugcuccaagcagccaca

SEQ ID NO: 78939 - RNA, 25 nt, Artificial Sequence
  Description of Artificial Sequence: Synthetic oligonucleotide
aacaaguaugcaggggagucauucc

SEQ ID NO: 78940 - RNA, 25 nt, Artificial Sequence
  Description of Artificial Sequence: Synthetic oligonucleotide
ccaggaauuuaugaugcucuguuug

SEQ ID NO: 78941 - RNA, 25 nt, Artificial Sequence
  Description of Artificial Sequence: Synthetic oligonucleotide
gauauugaaagcaaaguggacccuu

SEQ ID NO: 78942 - RNA, 25 nt, Artificial Sequence
  Description of Artificial Sequence: Synthetic oligonucleotide
uccaaggccuggggagaagugaaga

SEQ ID NO: 78943 - RNA, 25 nt, Artificial Sequence
  Description of Artificial Sequence: Synthetic oligonucleotide
agacagauuuauguugcagccuuca

SEQ ID NO: 78944 - RNA, 25 nt, Artificial Sequence
  Description of Artificial Sequence: Synthetic oligonucleotide
acagugcaggcagcugcagagacuu

SEQ ID NO: 78945 - RNA, 25 nt, Artificial Sequence
  Description of Artificial Sequence: Synthetic oligonucleotide
uugagugaaguagccuaagaggauu

SEQ ID NO: 78946 - RNA, 25 nt, Artificial Sequence
  Description of Artificial Sequence: Synthetic oligonucleotide
ucuuuagagaauccguauugaauuu

SEQ ID NO: 78947 - RNA, 25 nt, Artificial Sequence
  Description of Artificial Sequence: Synthetic oligonucleotide
ugugugguaugucacucagaaagaa

SEQ ID NO: 78948 - RNA, 25 nt, Artificial Sequence
  Description of Artificial Sequence: Synthetic oligonucleotide
aucguaauggguauauugauaaauu

SEQ ID NO: 78949 - RNA, 25 nt, Artificial Sequence
  Description of Artificial Sequence: Synthetic oligonucleotide
uuuaaaauugguauauuugaaauaa

SEQ ID NO: 78950 - RNA, 25 nt, Artificial Sequence
  Description of Artificial Sequence: Synthetic oligonucleotide
aaguugaauauuauauauaaaaaaa

SEQ ID NO: 78951 - DNA, 21 bp, Artificial Sequence
  Description of Artificial Sequence: Synthetic oligonucleotide
  Description of Combined DNA/RNA Molecule: Synthetic oligonucleotide
cuacacaaaucagcgauuutt

SEQ ID NO: 78952 - DNA, 21 bp, Artificial Sequence
  Description of Artificial Sequence: Synthetic oligonucleotide
  Description of Combined DNA/RNA Molecule: Synthetic oligonucleotide
aaaucgcugauuuguguagtt

SEQ ID NO: 78953 - DNA, 25 bp, Artificial Sequence
  Description of Artificial Sequence: Synthetic oligonucleotide
  Description of Combined DNA/RNA Molecule: Synthetic oligonucleotide
cuacacaaaucagcgauuuccaugt

SEQ ID NO: 78954 - RNA, 27 nt, Artificial Sequence
  Description of Artificial Sequence: Synthetic oligonucleotide
acauggaaaucgcugauuuguguaguc

SEQ ID NO: 78955 - RNA, 13 nt, Artificial Sequence
  Description of Artificial Sequence: Synthetic oligonucleotide
cuacacaaaucag

SEQ ID NO: 78956 - DNA, 11 bp, Artificial Sequence
  Description of Artificial Sequence: Synthetic oligonucleotide
  Description of Combined DNA/RNA Molecule: Synthetic oligonucleotide
gauuuccaugt

SEQ ID NO: 78957 - DNA, 21 bp, Artificial Sequence
  Description of Artificial Sequence: Synthetic oligonucleotide
  Description of Combined DNA/RNA Molecule: Synthetic oligonucleotide
ggaucuuauuucuucggagtt

SEQ ID NO: 78958 - DNA, 21 bp, Artificial Sequence
  Description of Artificial Sequence: Synthetic oligonucleotide
  Description of Combined DNA/RNA Molecule: Synthetic oligonucleotide
cuccgaagaaauaagaucctt

SEQ ID NO: 78959 - RNA, 11 nt, Artificial Sequence
  Description of Artificial Sequence: Synthetic oligonucleotide
ggaucuuauuu

SEQ ID NO: 78960 - DNA, 10 bp, Artificial Sequence
  Description of Artificial Sequence: Synthetic oligonucleotide
  Description of Combined DNA/RNA Molecule: Synthetic oligonucleotide
cuucggagtt

SEQ ID NO: 78961 - RNA, 27 nt, Artificial Sequence
  Description of Artificial Sequence: Synthetic oligonucleotide
cauugucuccgaagaaauaagauccuu

SEQ ID NO: 78962 - RNA, 8 nt, Artificial Sequence
  Description of Artificial Sequence: Synthetic oligonucleotide
  modified_base (2): LNA-G
ggaucuua

SEQ ID NO: 78963 - DNA, 17 bp, Artificial Sequence
  Description of Artificial Sequence: Synthetic oligonucleotide
  Description of Combined DNA/RNA Molecule: Synthetic oligonucleotide
uuucuucggagacaatg

SEQ ID NO: 78964 - DNA, 16 bp, Artificial Sequence
  Description of Artificial Sequence: Synthetic oligonucleotide
  Description of Combined DNA/RNA Molecule: Synthetic oligonucleotide
uucuucggagacaatg

SEQ ID NO: 78965 - DNA, 15 bp, Artificial Sequence
  Description of Artificial Sequence: Synthetic oligonucleotide
  Description of Combined DNA/RNA Molecule: Synthetic oligonucleotide
ucuucggagacaatg

SEQ ID NO: 78966 - DNA, 14 bp, Artificial Sequence
  Description of Artificial Sequence: Synthetic oligonucleotide
  Description of Combined DNA/RNA Molecule: Synthetic oligonucleotide
cuucggagacaatg

SEQ ID NO: 78967 - DNA, 13 bp, Artificial Sequence
  Description of Artificial Sequence: Synthetic oligonucleotide
  Description of Combined DNA/RNA Molecule: Synthetic oligonucleotide
uucggagacaatg

SEQ ID NO: 78968 - DNA, 12 bp, Artificial Sequence
  Description of Artificial Sequence: Synthetic oligonucleotide
  Description of Combined DNA/RNA Molecule: Synthetic oligonucleotide
ucggagacaatg

SEQ ID NO: 78969 - DNA, 11 bp, Artificial Sequence
  Description of Artificial Sequence: Synthetic oligonucleotide
  Description of Combined DNA/RNA Molecule: Synthetic oligonucleotide
cggagacaatg

SEQ ID NO: 78970 - RNA, 9 nt, Artificial Sequence
  Description of Artificial Sequence: Synthetic oligonucleotide
  modified_base (2): LNA-G
ggaucuuau

SEQ ID NO: 78971 - RNA, 10 nt, Artificial Sequence
  Description of Artificial Sequence: Synthetic oligonucleotide
  modified_base (2): LNA-G
ggaucuuauu

SEQ ID NO: 78972 - RNA, 11 nt, Artificial Sequence
  Description of Artificial Sequence: Synthetic oligonucleotide
  modified_base (2): LNA-G
ggaucuuauuu

SEQ ID NO: 78973 - RNA, 12 nt, Artificial Sequence
  Description of Artificial Sequence: Synthetic oligonucleotide
  modified_base (2): LNA-G
ggaucuuauuuc

SEQ ID NO: 78974 - RNA, 8 nt, Artificial Sequence
  Description of Artificial Sequence: Synthetic oligonucleotide
  modified_base (3): LNA-A
cuacacaa

SEQ ID NO: 78975 - DNA, 13 bp, Artificial Sequence
  Description of Artificial Sequence: Synthetic oligonucleotide
  Description of Combined DNA/RNA Molecule: Synthetic oligonucleotide
  modified_base (8): LNA-A
aucagcgauuutt

SEQ ID NO: 78976 - DNA, 12 bp, Artificial Sequence
  Description of Artificial Sequence: Synthetic oligonucleotide
  Description of Combined DNA/RNA Molecule: Synthetic oligonucleotide
  modified_base (7): LNA-A
ucagcgauuutt

SEQ ID NO: 78977 - DNA, 11 bp, Artificial Sequence
  Description of Artificial Sequence: Synthetic oligonucleotide
  Description of Combined DNA/RNA Molecule: Synthetic oligonucleotide
  modified_base (6): LNA-A
cagcgauuutt

SEQ ID NO: 78978 - DNA, 10 bp, Artificial Sequence
  Description of Artificial Sequence: Synthetic oligonucleotide
  Description of Combined DNA/RNA Molecule: Synthetic oligonucleotide
  modified_base (5): LNA-A
agcgauuutt

SEQ ID NO: 78979 - DNA, 9 bp, Artificial Sequence
  Description of Artificial Sequence: Synthetic oligonucleotide
  Description of Combined DNA/RNA Molecule: Synthetic oligonucleotide
  modified_base (4): LNA-A
gcgauuutt

SEQ ID NO: 78980 - DNA, 8 bp, Artificial Sequence
  Description of Artificial Sequence: Synthetic oligonucleotide
  Description of Combined DNA/RNA Molecule: Synthetic oligonucleotide
  modified_base (3): LNA-A
cgauuutt

SEQ ID NO: 78981 - DNA, 7 bp, Artificial Sequence
  Description of Artificial Sequence: Synthetic oligonucleotide
  Description of Combined DNA/RNA Molecule: Synthetic oligonucleotide
  modified_base (2): LNA-A
gauuutt

SEQ ID NO: 78982 - RNA, 9 nt, Artificial Sequence
  Description of Artificial Sequence: Synthetic oligonucleotide
  modified_base (3): LNA-A
cuacacaaa

SEQ ID NO: 78983 - RNA, 10 nt, Artificial Sequence
  Description of Artificial Sequence: Synthetic oligonucleotide
  modified_base (3): LNA-A
cuacacaaau

SEQ ID NO: 78984 - RNA, 11 nt, Artificial Sequence
  Description of Artificial Sequence: Synthetic oligonucleotide
  modified_base (3): LNA-A
cuacacaaauc

SEQ ID NO: 78985 - RNA, 12 nt, Artificial Sequence
  Description of Artificial Sequence: Synthetic oligonucleotide
  modified_base (3): LNA-A
cuacacaaauca

SEQ ID NO: 78986 - RNA, 13 nt, Artificial Sequence
  Description of Artificial Sequence: Synthetic oligonucleotide
  modified_base (3): LNA-A
cuacacaaaucag

SEQ ID NO: 78987 - RNA, 14 nt, Artificial Sequence
  Description of Artificial Sequence: Synthetic oligonucleotide
  modified_base (3): LNA-A
cuacacaaaucagc

SEQ ID NO: 78988 - RNA, 13 nt, Artificial Sequence
  Description of Artificial Sequence: Synthetic oligonucleotide
  modified_base (2): LNA-G
ggaucuuauuucu

SEQ ID NO: 78989 - RNA, 14 nt, Artificial Sequence
  Description of Artificial Sequence: Synthetic oligonucleotide
  modified_base (2): LNA-G
ggaucuuauuucuu

SEQ ID NO: 78990 - RNA, 8 nt, Artificial Sequence
  Description of Artificial Sequence: Synthetic oligonucleotide
  modified_base (2): LNA-G
  modified_base (8): LNA-A
ggaucuua

SEQ ID NO: 78991 - RNA, 9 nt, Artificial Sequence
  Description of Artificial Sequence: Synthetic oligonucleotide
  modified_base (2): LNA-G
  modified_base (9): LNA-U
ggaucuuau

SEQ ID NO: 78992 - RNA, 10 nt, Artificial Sequence
  Description of Artificial Sequence: Synthetic oligonucleotide
  modified_base (2): LNA-G
  modified_base (10): LNA-U
ggaucuuauu

SEQ ID NO: 78993 - RNA, 11 nt, Artificial Sequence
  Description of Artificial Sequence: Synthetic oligonucleotide
  modified_base (2): LNA-G
  modified_base (11): LNA-U
ggaucuuauuu

SEQ ID NO: 78994 - RNA, 12 nt, Artificial Sequence
  Description of Artificial Sequence: Synthetic oligonucleotide
  modified_base (2): LNA-G
  modified_base (12): LNA-C
ggaucuuauuuc

SEQ ID NO: 78995 - RNA, 13 nt, Artificial Sequence
  Description of Artificial Sequence: Synthetic oligonucleotide
  modified_base (2): LNA-G
  modified_base (13): LNA-U
ggaucuuauuucu

SEQ ID NO: 78996 - RNA, 14 nt, Artificial Sequence
  Description of Artificial Sequence: Synthetic oligonucleotide
  modified_base (2): LNA-G
  modified_base (14): LNA-U
ggaucuuauuucuu

SEQ ID NO: 78997 - DNA, 13 bp, Artificial Sequence
  Description of Artificial Sequence: Synthetic oligonucleotide
  Description of Combined DNA/RNA Molecule: Synthetic oligonucleotide
  modified_base (8): LNA-G
uuucuucggagtt

SEQ ID NO: 78998 - DNA, 12 bp, Artificial Sequence
  Description of Artificial Sequence: Synthetic oligonucleotide
  Description of Combined DNA/RNA Molecule: Synthetic oligonucleotide
  modified_base (7): LNA-G
uucuucggagtt

SEQ ID NO: 78999 - DNA, 11 bp, Artificial Sequence
  Description of Artificial Sequence: Synthetic oligonucleotide
  Description of Combined DNA/RNA Molecule: Synthetic oligonucleotide
  modified_base (6): LNA-G
ucuucggagtt

SEQ ID NO: 79000 - DNA, 10 bp, Artificial Sequence
  Description of Artificial Sequence: Synthetic oligonucleotide
  Description of Combined DNA/RNA Molecule: Synthetic oligonucleotide
  modified_base (5): LNA-G
cuucggagtt

SEQ ID NO: 79001 - DNA, 9 bp, Artificial Sequence
  Description of Artificial Sequence: Synthetic oligonucleotide
  Description of Combined DNA/RNA Molecule: Synthetic oligonucleotide
  modified_base (4): LNA-G
uucggagtt

SEQ ID NO: 79002 - DNA, 8 bp, Artificial Sequence
  Description of Artificial Sequence: Synthetic oligonucleotide
  Description of Combined DNA/RNA Molecule: Synthetic oligonucleotide
  modified_base (3): LNA-G
ucggagtt

SEQ ID NO: 79003 - DNA, 7 bp, Artificial Sequence
  Description of Artificial Sequence: Synthetic oligonucleotide
  Description of Combined DNA/RNA Molecule: Synthetic oligonucleotide
  modified_base (2): LNA-G
cggagtt

SEQ ID NO: 79004 - DNA, 13 bp, Artificial Sequence
  Description of Artificial Sequence: Synthetic oligonucleotide
  Description of Combined DNA/RNA Molecule: Synthetic oligonucleotide
  modified_base (1): LNA-U
  modified_base (8): LNA-G
uuucuucggagtt

SEQ ID NO: 79005 - DNA, 12 bp, Artificial Sequence
  Description of Artificial Sequence: Synthetic oligonucleotide
  Description of Combined DNA/RNA Molecule: Synthetic oligonucleotide
  modified_base (1): LNA-U
  modified_base (7): LNA-G
uucuucggagtt

SEQ ID NO: 79006 - DNA, 11 bp, Artificial Sequence
  Description of Artificial Sequence: Synthetic oligonucleotide
  Description of Combined DNA/RNA Molecule: Synthetic oligonucleotide
  modified_base (1): LNA-U
  modified_base (6): LNA-G
ucuucggagtt

SEQ ID NO: 79007 - DNA, 10 bp, Artificial Sequence
  Description of Artificial Sequence: Synthetic oligonucleotide
  Description of Combined DNA/RNA Molecule: Synthetic oligonucleotide
  modified_base (1): LNA-C
  modified_base (5): LNA-G
cuucggagtt

SEQ ID NO: 79008 - DNA, 9 bp, Artificial Sequence
  Description of Artificial Sequence: Synthetic oligonucleotide
  Description of Combined DNA/RNA Molecule: Synthetic oligonucleotide
  modified_base (1): LNA-U
  modified_base (4): LNA-G
uucggagtt

SEQ ID NO: 79009 - DNA, 8 bp, Artificial Sequence
  Description of Artificial Sequence: Synthetic oligonucleotide
  Description of Combined DNA/RNA Molecule: Synthetic oligonucleotide
  modified_base (1): LNA-U
  modified_base (3): LNA-G
ucggagtt

SEQ ID NO: 79010 - DNA, 7 bp, Artificial Sequence
  Description of Artificial Sequence: Synthetic oligonucleotide
  Description of Combined DNA/RNA Molecule: Synthetic oligonucleotide
  modified_base (1): LNA-C
  modified_base (2): LNA-G
cggagtt

SEQ ID NO: 79011 - DNA, 21 bp, Artificial Sequence
  Description of Artificial Sequence: Synthetic oligonucleotide
  Description of Combined DNA/RNA Molecule: Synthetic oligonucleotide
  modified_base (2): LNA-G
  modified_base (16): LNA-G
ggaucuuauuucuucggagtt

SEQ ID NO: 79012 - DNA, 25 bp, Artificial Sequence
  Description of Artificial Sequence: Synthetic oligonucleotide
  Description of Combined DNA/RNA Molecule: Synthetic oligonucleotide
ggaucuuauuucuucggagacaatg

SEQ ID NO: 79013 - RNA, 25 nt, Artificial Sequence
  Description of Artificial Sequence: Synthetic oligonucleotide
uuaagcagaguucaaaagcccuuca

SEQ ID NO: 79014 - RNA, 25 nt, Artificial Sequence
  Description of Artificial Sequence: Synthetic oligonucleotide
uaagcagaguucaaaagcccuucag

SEQ ID NO: 79015 - RNA, 25 nt, Artificial Sequence
  Description of Artificial Sequence: Synthetic oligonucleotide
agcagaguucaaaagcccuucagcg

SEQ ID NO: 79016 - RNA, 25 nt, Artificial Sequence
  Description of Artificial Sequence: Synthetic oligonucleotide
cucagggucugagugaagccgcucg

SEQ ID NO: 79017 - RNA, 25 nt, Artificial Sequence
  Description of Artificial Sequence: Synthetic oligonucleotide
caagcaacuacaucacgccagucaa

SEQ ID NO: 79018 - RNA, 25 nt, Artificial Sequence
  Description of Artificial Sequence: Synthetic oligonucleotide
aucaauggcagcuucuuggugcgug

SEQ ID NO: 79019 - RNA, 25 nt, Artificial Sequence
  Description of Artificial Sequence: Synthetic oligonucleotide
uuccagcccacauuggauucaucag

SEQ ID NO: 79020 - RNA, 25 nt, Artificial Sequence
  Description of Artificial Sequence: Synthetic oligonucleotide
cagcugagaauguggaauaccuaag

SEQ ID NO: 79021 - RNA, 25 nt, Artificial Sequence
  Description of Artificial Sequence: Synthetic oligonucleotide
aacguaucuccuaauuugaggcuca

SEQ ID NO: 79022 - RNA, 25 nt, Artificial Sequence
  Description of Artificial Sequence: Synthetic oligonucleotide
ccuaaaauaauuucucuacaauugg

SEQ ID NO: 79023 - RNA, 25 nt, Artificial Sequence
  Description of Artificial Sequence: Synthetic oligonucleotide
uggaagauucagcuaguuaggagcc

SEQ ID NO: 79024 - RNA, 25 nt, Artificial Sequence
  Description of Artificial Sequence: Synthetic oligonucleotide
uuaaacucuccuagucaauauccac

SEQ ID NO: 79025 - RNA, 25 nt, Artificial Sequence
  Description of Artificial Sequence: Synthetic oligonucleotide
cagccuacaguuauguucagucaca

SEQ ID NO: 79026 - RNA, 25 nt, Artificial Sequence
  Description of Artificial Sequence: Synthetic oligonucleotide
guuauguucagucacacacacauac

SEQ ID NO: 79027 - RNA, 25 nt, Artificial Sequence
  Description of Artificial Sequence: Synthetic oligonucleotide
cacauacaaaauguuccuuuugcuu

SEQ ID NO: 79028 - RNA, 25 nt, Artificial Sequence
  Description of Artificial Sequence: Synthetic oligonucleotide
uccuuuugcuuuuaaaguaauuuuu

SEQ ID NO: 79029 - RNA, 25 nt, Artificial Sequence
  Description of Artificial Sequence: Synthetic oligonucleotide
ugaccugugaagcaacagucaaugg

SEQ ID NO: 79030 - RNA, 25 nt, Artificial Sequence
  Description of Artificial Sequence: Synthetic oligonucleotide
cuaucucacacaucgacaaaccaau

SEQ ID NO: 79031 - RNA, 25 nt, Artificial Sequence
  Description of Artificial Sequence: Synthetic oligonucleotide
uguccucaauuguacugcuaccacu

SEQ ID NO: 79032 - RNA, 25 nt, Artificial Sequence
  Description of Artificial Sequence: Synthetic oligonucleotide
aaaccguagcuggcaagcggucuua

SEQ ID NO: 79033 - RNA, 25 nt, Artificial Sequence
  Description of Artificial Sequence: Synthetic oligonucleotide
uagcuggcaagcggucuuaccggcu

SEQ ID NO: 79034 - RNA, 25 nt, Artificial Sequence
  Description of Artificial Sequence: Synthetic oligonucleotide
uuguaugguuaaaagauggguuacc

SEQ ID NO: 79035 - RNA, 25 nt, Artificial Sequence
  Description of Artificial Sequence: Synthetic oligonucleotide
ugguuaaaagauggguuaccugcga

SEQ ID NO: 79036 - RNA, 25 nt, Artificial Sequence
  Description of Artificial Sequence: Synthetic oligonucleotide
cagggaauuauacaaucuugcugag

SEQ ID NO: 79037 - RNA, 25 nt, Artificial Sequence
  Description of Artificial Sequence: Synthetic oligonucleotide
acaaucuugcugagcauaaaacagu

SEQ ID NO: 79038 - RNA, 25 nt, Artificial Sequence
  Description of Artificial Sequence: Synthetic oligonucleotide
ccaauaaugaagaguccuuuauccu

SEQ ID NO: 79039 - RNA, 25 nt, Artificial Sequence
  Description of Artificial Sequence: Synthetic oligonucleotide
acuuuggauguuccaacgcaaguug

SEQ ID NO: 79040 - RNA, 25 nt, Artificial Sequence
  Description of Artificial Sequence: Synthetic oligonucleotide
aaugcuuccacuaaacugaaaccau

SEQ ID NO: 79041 - RNA, 25 nt, Artificial Sequence
  Description of Artificial Sequence: Synthetic oligonucleotide
gagaaaguuugacuuuguuaaauau

SEQ ID NO: 79042 - RNA, 25 nt, Artificial Sequence
  Description of Artificial Sequence: Synthetic oligonucleotide
aaagaacuacuguauauuaaaaguu

SEQ ID NO: 79043 - RNA, 25 nt, Artificial Sequence
  Description of Artificial Sequence: Synthetic oligonucleotide
uuagaaauacggguuuugacuuaac

SEQ ID NO: 79044 - RNA, 25 nt, Artificial Sequence
  Description of Artificial Sequence: Synthetic oligonucleotide
aacauggguacagcaaacucagcac

SEQ ID NO: 79045 - RNA, 25 nt, Artificial Sequence
  Description of Artificial Sequence: Synthetic oligonucleotide
aaagacacagaagaugcugaccuca

SEQ ID NO: 79046 - RNA, 25 nt, Artificial Sequence
  Description of Artificial Sequence: Synthetic oligonucleotide
uaguagggagguuuauucagaucgc

SEQ ID NO: 79047 - RNA, 25 nt, Artificial Sequence
  Description of Artificial Sequence: Synthetic oligonucleotide
gccuucugcagcaggguucugggau

SEQ ID NO: 79048 - RNA, 25 nt, Artificial Sequence
  Description of Artificial Sequence: Synthetic oligonucleotide
ggucugguacauauuggaaauuaug

SEQ ID NO: 79049 - RNA, 25 nt, Artificial Sequence
  Description of Artificial Sequence: Synthetic oligonucleotide
cuaguccuuccgauggaagcacuag

SEQ ID NO: 79050 - RNA, 25 nt, Artificial Sequence
  Description of Artificial Sequence: Synthetic oligonucleotide
ccagugaauauuguuuuuaugugga

SEQ ID NO: 79051 - RNA, 25 nt, Artificial Sequence
  Description of Artificial Sequence: Synthetic oligonucleotide
augaauucaaguuggaauugguaga

SEQ ID NO: 79052 - RNA, 25 nt, Artificial Sequence
  Description of Artificial Sequence: Synthetic oligonucleotide
caggacacagauuuagacuuggaga

SEQ ID NO: 79053 - RNA, 25 nt, Artificial Sequence
  Description of Artificial Sequence: Synthetic oligonucleotide
cucaaagcacaguuacaguauucca

SEQ ID NO: 79054 - RNA, 25 nt, Artificial Sequence
  Description of Artificial Sequence: Synthetic oligonucleotide
accacugccaccacugaugaauuaa

SEQ ID NO: 79055 - RNA, 25 nt, Artificial Sequence
  Description of Artificial Sequence: Synthetic oligonucleotide
gaaacuacuagugccacaucaucac

SEQ ID NO: 79056 - RNA, 25 nt, Artificial Sequence
  Description of Artificial Sequence: Synthetic oligonucleotide
aagucggacagccucaccaaacaga

SEQ ID NO: 79057 - RNA, 25 nt, Artificial Sequence
  Description of Artificial Sequence: Synthetic oligonucleotide
gaaagcgaaaaauggaacaugaugg

SEQ ID NO: 79058 - RNA, 25 nt, Artificial Sequence
  Description of Artificial Sequence: Synthetic oligonucleotide
cccucugauuuagcauguagacugc

SEQ ID NO: 79059 - RNA, 25 nt, Artificial Sequence
  Description of Artificial Sequence: Synthetic oligonucleotide
ugagcuauuuaaggaucuauuuaug

SEQ ID NO: 79060 - RNA, 25 nt, Artificial Sequence
  Description of Artificial Sequence: Synthetic oligonucleotide
aaaaggugaaaaagcacuauuauca

SEQ ID NO: 79061 - RNA, 25 nt, Artificial Sequence
  Description of Artificial Sequence: Synthetic oligonucleotide
gaaaaagcacuauuaucaguucugc

SEQ ID NO: 79062 - RNA, 25 nt, Artificial Sequence
  Description of Artificial Sequence: Synthetic oligonucleotide
ggcugaaaagaaagauuaaaccuac

SEQ ID NO: 79063 - RNA, 25 nt, Artificial Sequence
  Description of Artificial Sequence: Synthetic oligonucleotide
uaaacccuuauaauaaaauccuucu

SEQ ID NO: 79064 - RNA, 25 nt, Artificial Sequence
  Description of Artificial Sequence: Synthetic oligonucleotide
cauacuauuagccaaugcuguagac

SEQ ID NO: 79065 - RNA, 25 nt, Artificial Sequence
  Description of Artificial Sequence: Synthetic oligonucleotide
gacagaagcauuuugauaggaauag

SEQ ID NO: 79066 - RNA, 25 nt, Artificial Sequence
  Description of Artificial Sequence: Synthetic oligonucleotide
agagcaaauaagauaauggcccuga

SEQ ID NO: 79067 - RNA, 25 nt, Artificial Sequence
  Description of Artificial Sequence: Synthetic oligonucleotide
ccaacauuuuucucuuccucaagca

SEQ ID NO: 79068 - RNA, 25 nt, Artificial Sequence
  Description of Artificial Sequence: Synthetic oligonucleotide
uuaaguaugagaaaaguucagccca

SEQ ID NO: 79069 - RNA, 25 nt, Artificial Sequence
  Description of Artificial Sequence: Synthetic oligonucleotide
caggaauaaagauggcugcugaacc

SEQ ID NO: 79070 - RNA, 25 nt, Artificial Sequence
  Description of Artificial Sequence: Synthetic oligonucleotide
aauuugaaugaccaaguucucuuca

SEQ ID NO: 79071 - RNA, 25 nt, Artificial Sequence
  Description of Artificial Sequence: Synthetic oligonucleotide
auguauaaagauagccagccuagag

SEQ ID NO: 79072 - RNA, 25 nt, Artificial Sequence
  Description of Artificial Sequence: Synthetic oligonucleotide
ggcuguaacuaucucugugaagugu

SEQ ID NO: 79073 - RNA, 25 nt, Artificial Sequence
  Description of Artificial Sequence: Synthetic oligonucleotide
ucugugaagugugagaaaauuucaa

SEQ ID NO: 79074 - RNA, 25 nt, Artificial Sequence
  Description of Artificial Sequence: Synthetic oligonucleotide
ccuuuaaggaaaugaauccuccuga

SEQ ID NO: 79075 - RNA, 25 nt, Artificial Sequence
  Description of Artificial Sequence: Synthetic oligonucleotide
aaggauacaaaaagugacaucauau

SEQ ID NO: 79076 - RNA, 25 nt, Artificial Sequence
  Description of Artificial Sequence: Synthetic oligonucleotide
agaugcaauuugaaucuucaucaua

SEQ ID NO: 79077 - RNA, 25 nt, Artificial Sequence
  Description of Artificial Sequence: Synthetic oligonucleotide
guucaaaacgaagacuagcuauuaa

SEQ ID NO: 79078 - RNA, 25 nt, Artificial Sequence
  Description of Artificial Sequence: Synthetic oligonucleotide
gugaaaccucaucucuacuaaaaau

SEQ ID NO: 79079 - RNA, 25 nt, Artificial Sequence
  Description of Artificial Sequence: Synthetic oligonucleotide
acgaaagagaagcucuaucucgccu

SEQ ID NO: 79080 - RNA, 25 nt, Artificial Sequence
  Description of Artificial Sequence: Synthetic oligonucleotide
cuccacaagcgccuucgguccaguu

SEQ ID NO: 79081 - RNA, 25 nt, Artificial Sequence
  Description of Artificial Sequence: Synthetic oligonucleotide
gagaagauuccaaagauguagccgc

SEQ ID NO: 79082 - RNA, 25 nt, Artificial Sequence
  Description of Artificial Sequence: Synthetic oligonucleotide
aaucuggauucaaugaggagacuug

SEQ ID NO: 79083 - RNA, 25 nt, Artificial Sequence
  Description of Artificial Sequence: Synthetic oligonucleotide
agaacagauuugagaguagugagga

SEQ ID NO: 79084 - RNA, 25 nt, Artificial Sequence
  Description of Artificial Sequence: Synthetic oligonucleotide
ccagagcugugcagaugaguacaaa

SEQ ID NO: 79085 - RNA, 25 nt, Artificial Sequence
  Description of Artificial Sequence: Synthetic oligonucleotide
ccucagauuguuguuguuaaugggc

SEQ ID NO: 79086 - RNA, 25 nt, Artificial Sequence
  Description of Artificial Sequence: Synthetic oligonucleotide
cuauuuuaauuauuuuuaauuuauu

SEQ ID NO: 79087 - RNA, 25 nt, Artificial Sequence
  Description of Artificial Sequence: Synthetic oligonucleotide
uuuaauuuauuaauauuuaaauaug

SEQ ID NO: 79088 - RNA, 25 nt, Artificial Sequence
  Description of Artificial Sequence: Synthetic oligonucleotide
augcaguuugaauauccuuuguuuc

SEQ ID NO: 79089 - RNA, 25 nt, Artificial Sequence
  Description of Artificial Sequence: Synthetic oligonucleotide
caugcugcuggcgucuaaguguuug

SEQ ID NO: 79090 - RNA, 25 nt, Artificial Sequence
  Description of Artificial Sequence: Synthetic oligonucleotide
agaugugcauuucaccugugacaaa

SEQ ID NO: 79091 - RNA, 25 nt, Artificial Sequence
  Description of Artificial Sequence: Synthetic oligonucleotide
ucaaaaccugugccaggcugaauua

SEQ ID NO: 79092 - RNA, 25 nt, Artificial Sequence
  Description of Artificial Sequence: Synthetic oligonucleotide
gaauguggguagucauucuuacaau

SEQ ID NO: 79093 - RNA, 25 nt, Artificial Sequence
  Description of Artificial Sequence: Synthetic oligonucleotide
auguggguagucauucuuacaauug

SEQ ID NO: 79094 - RNA, 25 nt, Artificial Sequence
  Description of Artificial Sequence: Synthetic oligonucleotide
ugaaaaugagcaucagagaguguac

SEQ ID NO: 79095 - RNA, 25 nt, Artificial Sequence
  Description of Artificial Sequence: Synthetic oligonucleotide
uugcuuuucauguagaacucagcag

SEQ ID NO: 79096 - RNA, 25 nt, Artificial Sequence
  Description of Artificial Sequence: Synthetic oligonucleotide
uguauuucuauauuuauuuucagua

SEQ ID NO: 79097 - RNA, 25 nt, Artificial Sequence
  Description of Artificial Sequence: Synthetic oligonucleotide
uuugauuaauguuucuuaaauggaa

SEQ ID NO: 79098 - RNA, 25 nt, Artificial Sequence
  Description of Artificial Sequence: Synthetic oligonucleotide
caacguguauagugccuaaaauugu

SEQ ID NO: 79099 - RNA, 25 nt, Artificial Sequence
  Description of Artificial Sequence: Synthetic oligonucleotide
cauauccuuggcuacuaacaucugg

SEQ ID NO: 79100 - RNA, 25 nt, Artificial Sequence
  Description of Artificial Sequence: Synthetic oligonucleotide
uacuaacaucuggagacugugagcu

SEQ ID NO: 79101 - RNA, 25 nt, Artificial Sequence
  Description of Artificial Sequence: Synthetic oligonucleotide
cauaaguugugugcuuuuuauuaau

SEQ ID NO: 79102 - RNA, 25 nt, Artificial Sequence
  Description of Artificial Sequence: Synthetic oligonucleotide
gcaucauuuuggcucuucuuacauu

SEQ ID NO: 79103 - RNA, 25 nt, Artificial Sequence
  Description of Artificial Sequence: Synthetic oligonucleotide
gcucuucuuacauuuguaaaaaugu

SEQ ID NO: 79104 - RNA, 25 nt, Artificial Sequence
  Description of Artificial Sequence: Synthetic oligonucleotide
agauuaggucaucuuaauucauauu

SEQ ID NO: 79105 - RNA, 25 nt, Artificial Sequence
  Description of Artificial Sequence: Synthetic oligonucleotide
auggaauugaaagaacuaaucauga

SEQ ID NO: 79106 - RNA, 25 nt, Artificial Sequence
  Description of Artificial Sequence: Synthetic oligonucleotide
cacacucauuccuucugcucuuggg

SEQ ID NO: 79107 - RNA, 25 nt, Artificial Sequence
  Description of Artificial Sequence: Synthetic oligonucleotide
uguagagguaaccaguagcuuugag

SEQ ID NO: 79108 - RNA, 25 nt, Artificial Sequence
  Description of Artificial Sequence: Synthetic oligonucleotide
caaccacaugccacguaauauuuca

SEQ ID NO: 79109 - RNA, 25 nt, Artificial Sequence
  Description of Artificial Sequence: Synthetic oligonucleotide
ucggaaacaaguuauucucuucacu

SEQ ID NO: 79110 - RNA, 25 nt, Artificial Sequence
  Description of Artificial Sequence: Synthetic oligonucleotide
acucccaauaacuaaugcuaagaaa

SEQ ID NO: 79111 - RNA, 25 nt, Artificial Sequence
  Description of Artificial Sequence: Synthetic oligonucleotide
aaugcuaagaaaugcugaaaaucaa

SEQ ID NO: 79112 - RNA, 25 nt, Artificial Sequence
  Description of Artificial Sequence: Synthetic oligonucleotide
gucuuucucuaaauaugauuacuuu

SEQ ID NO: 79113 - RNA, 25 nt, Artificial Sequence
  Description of Artificial Sequence: Synthetic oligonucleotide
ugaauuucaggcauuuuguucuaca

SEQ ID NO: 79114 - RNA, 25 nt, Artificial Sequence
  Description of Artificial Sequence: Synthetic oligonucleotide
cgauucccucucacccgggacucuc

SEQ ID NO: 79115 - RNA, 25 nt, Artificial Sequence
  Description of Artificial Sequence: Synthetic oligonucleotide
aggaaagugaaccuuuaaaguaaag

SEQ ID NO: 79116 - RNA, 25 nt, Artificial Sequence
  Description of Artificial Sequence: Synthetic oligonucleotide
gaggcugcaugcucuggaagccugg

SEQ ID NO: 79117 - RNA, 25 nt, Artificial Sequence
  Description of Artificial Sequence: Synthetic oligonucleotide
ucucugaacagaaaacaaaagagag

SEQ ID NO: 79118 - RNA, 25 nt, Artificial Sequence
  Description of Artificial Sequence: Synthetic oligonucleotide
aacuuggcuguaaucaguuaugccg

SEQ ID NO: 79119 - RNA, 25 nt, Artificial Sequence
  Description of Artificial Sequence: Synthetic oligonucleotide
agaagccaaaauuaaaagaagucca

SEQ ID NO: 79120 - RNA, 25 nt, Artificial Sequence
  Description of Artificial Sequence: Synthetic oligonucleotide
auuaaaagaaguccaggugagguua

SEQ ID NO: 79121 - RNA, 25 nt, Artificial Sequence
  Description of Artificial Sequence: Synthetic oligonucleotide
gaauccggauuaucgggaagaggac

SEQ ID NO: 79122 - RNA, 25 nt, Artificial Sequence
  Description of Artificial Sequence: Synthetic oligonucleotide
aaugugacaucaaagcaaguauugu

SEQ ID NO: 79123 - RNA, 25 nt, Artificial Sequence
  Description of Artificial Sequence: Synthetic oligonucleotide
caucaaagcaaguauuguagcacuc

SEQ ID NO: 79124 - RNA, 25 nt, Artificial Sequence
  Description of Artificial Sequence: Synthetic oligonucleotide
agagagagaaaacaaaaccacaaau

SEQ ID NO: 79125 - RNA, 25 nt, Artificial Sequence
  Description of Artificial Sequence: Synthetic oligonucleotide
ucgcuguaguauuuaagcccauaca

SEQ ID NO: 79126 - RNA, 25 nt, Artificial Sequence
  Description of Artificial Sequence: Synthetic oligonucleotide
cgcuguaguauuuaagcccauacag

SEQ ID NO: 79127 - RNA, 25 nt, Artificial Sequence
  Description of Artificial Sequence: Synthetic oligonucleotide
auuuaagcccauacagaaaccuucc

SEQ ID NO: 79128 - RNA, 25 nt, Artificial Sequence
  Description of Artificial Sequence: Synthetic oligonucleotide
auuaaaauaaacaugguauaccuac

SEQ ID NO: 79129 - RNA, 25 nt, Artificial Sequence
  Description of Artificial Sequence: Synthetic oligonucleotide
cuguucugaucggccaguuuucgga

SEQ ID NO: 79130 - RNA, 25 nt, Artificial Sequence
  Description of Artificial Sequence: Synthetic oligonucleotide
aaauaauuugaacuuuggaacaggg

SEQ ID NO: 79131 - RNA, 25 nt, Artificial Sequence
  Description of Artificial Sequence: Synthetic oligonucleotide
ugcgaccuuaauuuaacuuuccagu

SEQ ID NO: 79132 - RNA, 25 nt, Artificial Sequence
  Description of Artificial Sequence: Synthetic oligonucleotide
cugagaaagcuaaaguuugguuuug

SEQ ID NO: 79133 - RNA, 25 nt, Artificial Sequence
  Description of Artificial Sequence: Synthetic oligonucleotide
aguaaagaugcuacuucccacugua

SEQ ID NO: 79134 - RNA, 25 nt, Artificial Sequence
  Description of Artificial Sequence: Synthetic oligonucleotide
cugcuuaauugcugauaccauauga

SEQ ID NO: 79135 - RNA, 25 nt, Artificial Sequence
  Description of Artificial Sequence: Synthetic oligonucleotide
uaccauaugaaugaaacaugggcug

SEQ ID NO: 79136 - RNA, 25 nt, Artificial Sequence
  Description of Artificial Sequence: Synthetic oligonucleotide
aacuuucuuauccaacuuuuucaua

SEQ ID NO: 79137 - RNA, 25 nt, Artificial Sequence
  Description of Artificial Sequence: Synthetic oligonucleotide
ccuugcaugacaucaugaggccgga

SEQ ID NO: 79138 - RNA, 25 nt, Artificial Sequence
  Description of Artificial Sequence: Synthetic oligonucleotide
ugaauuuguauaugacugcauuugu

SEQ ID NO: 79139 - RNA, 25 nt, Artificial Sequence
  Description of Artificial Sequence: Synthetic oligonucleotide
gaauccuaguagaauguuuacuacc

SEQ ID NO: 79140 - RNA, 25 nt, Artificial Sequence
  Description of Artificial Sequence: Synthetic oligonucleotide
gaaagggaagaauuuuuugaugaaa

SEQ ID NO: 79141 - RNA, 25 nt, Artificial Sequence
  Description of Artificial Sequence: Synthetic oligonucleotide
uaucggcaugccagugugugaauuu

SEQ ID NO: 79142 - RNA, 25 nt, Artificial Sequence
  Description of Artificial Sequence: Synthetic oligonucleotide
caccucauaguagagcaauguaugu

SEQ ID NO: 79143 - RNA, 25 nt, Artificial Sequence
  Description of Artificial Sequence: Synthetic oligonucleotide
ccagaauugccaaagcacauauaua

SEQ ID NO: 79144 - RNA, 25 nt, Artificial Sequence
  Description of Artificial Sequence: Synthetic oligonucleotide
uggugaucuggguaauaguuucucc

SEQ ID NO: 79145 - RNA, 25 nt, Artificial Sequence
  Description of Artificial Sequence: Synthetic oligonucleotide
gaucuggguaauaguuucuccaaau

SEQ ID NO: 79146 - RNA, 25 nt, Artificial Sequence
  Description of Artificial Sequence: Synthetic oligonucleotide
ggaugugaugaauacuuccuagaaa

SEQ ID NO: 79147 - RNA, 25 nt, Artificial Sequence
  Description of Artificial Sequence: Synthetic oligonucleotide
cauuuccacagcuacaccauauaug

SEQ ID NO: 79148 - RNA, 25 nt, Artificial Sequence
  Description of Artificial Sequence: Synthetic oligonucleotide
acagcuacaccauauaugaauggag

SEQ ID NO: 79149 - RNA, 25 nt, Artificial Sequence
  Description of Artificial Sequence: Synthetic oligonucleotide
ugcaguucuuacacgagaagaagau

SEQ ID NO: 79150 - RNA, 25 nt, Artificial Sequence
  Description of Artificial Sequence: Synthetic oligonucleotide
acgagaagaagaucauuuacaggga

SEQ ID NO: 79151 - RNA, 25 nt, Artificial Sequence
  Description of Artificial Sequence: Synthetic oligonucleotide
cgagaagaagaucauuuacagggac

SEQ ID NO: 79152 - RNA, 25 nt, Artificial Sequence
  Description of Artificial Sequence: Synthetic oligonucleotide
aagaagaucauuuacagggaccuga

SEQ ID NO: 79153 - RNA, 25 nt, Artificial Sequence
  Description of Artificial Sequence: Synthetic oligonucleotide
agaggaagagguguuugacugcauc

SEQ ID NO: 79154 - RNA, 25 nt, Artificial Sequence
  Description of Artificial Sequence: Synthetic oligonucleotide
gaggaagagguguuugacugcaucg

SEQ ID NO: 79155 - RNA, 25 nt, Artificial Sequence
  Description of Artificial Sequence: Synthetic oligonucleotide
cuacuuugagggcgaguucacaggg

SEQ ID NO: 79156 - RNA, 25 nt, Artificial Sequence
  Description of Artificial Sequence: Synthetic oligonucleotide
agggcaucuccuggcaccucugucc

SEQ ID NO: 79157 - RNA, 25 nt, Artificial Sequence
  Description of Artificial Sequence: Synthetic oligonucleotide
ggagugauaugguuugucuuuuuaa

SEQ ID NO: 79158 - RNA, 25 nt, Artificial Sequence
  Description of Artificial Sequence: Synthetic oligonucleotide
gagugauaugguuugucuuuuuaag

SEQ ID NO: 79159 - RNA, 25 nt, Artificial Sequence
  Description of Artificial Sequence: Synthetic oligonucleotide
ugcaguaaagauccuaaagguuguc

SEQ ID NO: 79160 - RNA, 25 nt, Artificial Sequence
  Description of Artificial Sequence: Synthetic oligonucleotide
aguaaagauccuaaagguugucgac

SEQ ID NO: 79161 - RNA, 25 nt, Artificial Sequence
  Description of Artificial Sequence: Synthetic oligonucleotide
ugacaaaggacaaccuggcaauugu

SEQ ID NO: 79162 - RNA, 25 nt, Artificial Sequence
  Description of Artificial Sequence: Synthetic oligonucleotide
gcaauugugacccaguggugcgagg

SEQ ID NO: 79163 - RNA, 25 nt, Artificial Sequence
  Description of Artificial Sequence: Synthetic oligonucleotide
aacaucauccauagagacaugaaau

SEQ ID NO: 79164 - RNA, 25 nt, Artificial Sequence
  Description of Artificial Sequence: Synthetic oligonucleotide
ugaaauccaacaauauauuucucca

SEQ ID NO: 79165 - RNA, 25 nt, Artificial Sequence
  Description of Artificial Sequence: Synthetic oligonucleotide
aacaauauauuucuccaugaaggcu

SEQ ID NO: 79166 - RNA, 25 nt, Artificial Sequence
  Description of Artificial Sequence: Synthetic oligonucleotide
aacaguaaagucacgcuggaguggu

SEQ ID NO: 79167 - RNA, 25 nt, Artificial Sequence
  Description of Artificial Sequence: Synthetic oligonucleotide
ugugaagaaaguaaaggaagagagg

SEQ ID NO: 79168 - RNA, 25 nt, Artificial Sequence
  Description of Artificial Sequence: Synthetic oligonucleotide
cuuccgagccauccuugcaucgggc

SEQ ID NO: 79169 - RNA, 25 nt, Artificial Sequence
  Description of Artificial Sequence: Synthetic oligonucleotide
aauggagguugaauauccuacugug

SEQ ID NO: 79170 - RNA, 25 nt, Artificial Sequence
  Description of Artificial Sequence: Synthetic oligonucleotide
ggagguugaauauccuacuguguaa

SEQ ID NO: 79171 - RNA, 25 nt, Artificial Sequence
  Description of Artificial Sequence: Synthetic oligonucleotide
auuuugaguuuucccuuguagugua

SEQ ID NO: 79172 - RNA, 25 nt, Artificial Sequence
  Description of Artificial Sequence: Synthetic oligonucleotide
uauccuguuuguucuuuguugauug

SEQ ID NO: 79173 - RNA, 25 nt, Artificial Sequence
  Description of Artificial Sequence: Synthetic oligonucleotide
ccuguuuguucuuuguugauugaaa

SEQ ID NO: 79174 - RNA, 25 nt, Artificial Sequence
  Description of Artificial Sequence: Synthetic oligonucleotide
cucuacagccuucuuuuucuuccau

SEQ ID NO: 79175 - RNA, 25 nt, Artificial Sequence
  Description of Artificial Sequence: Synthetic oligonucleotide
ucuuccauagcuaaucuuccuucua

SEQ ID NO: 79176 - RNA, 25 nt, Artificial Sequence
  Description of Artificial Sequence: Synthetic oligonucleotide
auaaucuuccuguugaaugcuucau

SEQ ID NO: 79177 - RNA, 25 nt, Artificial Sequence
  Description of Artificial Sequence: Synthetic oligonucleotide
uaaucuuccuguugaaugcuucaug

SEQ ID NO: 79178 - RNA, 25 nt, Artificial Sequence
  Description of Artificial Sequence: Synthetic oligonucleotide
cuucaugacuugaauucuacuuuga

SEQ ID NO: 79179 - RNA, 25 nt, Artificial Sequence
  Description of Artificial Sequence: Synthetic oligonucleotide
aagagggagagaagcaacuacagac

SEQ ID NO: 79180 - RNA, 25 nt, Artificial Sequence
  Description of Artificial Sequence: Synthetic oligonucleotide
cgucuccuaccagaccaaggucaac

SEQ ID NO: 79181 - RNA, 25 nt, Artificial Sequence
  Description of Artificial Sequence: Synthetic oligonucleotide
gaucaaucggcccgacuaucucgac

SEQ ID NO: 79182 - RNA, 25 nt, Artificial Sequence
  Description of Artificial Sequence: Synthetic oligonucleotide
ggacgaacauccaaccuucccaaac

SEQ ID NO: 79183 - RNA, 25 nt, Artificial Sequence
  Description of Artificial Sequence: Synthetic oligonucleotide
agggucggaacccaagcuuagaacu

SEQ ID NO: 79184 - RNA, 25 nt, Artificial Sequence
  Description of Artificial Sequence: Synthetic oligonucleotide
ucggaacccaagcuuagaacuuuaa

SEQ ID NO: 79185 - RNA, 25 nt, Artificial Sequence
  Description of Artificial Sequence: Synthetic oligonucleotide
acccaagcuuagaacuuuaagcaac

SEQ ID NO: 79186 - RNA, 25 nt, Artificial Sequence
  Description of Artificial Sequence: Synthetic oligonucleotide
gaacuuuaagcaacaagaccaccac

SEQ ID NO: 79187 - RNA, 25 nt, Artificial Sequence
  Description of Artificial Sequence: Synthetic oligonucleotide
acuauucaguggcgagaaauaaagu

SEQ ID NO: 79188 - RNA, 25 nt, Artificial Sequence
  Description of Artificial Sequence: Synthetic oligonucleotide
cuauucaguggcgagaaauaaaguu

SEQ ID NO: 79189 - RNA, 25 nt, Artificial Sequence
  Description of Artificial Sequence: Synthetic oligonucleotide
aaacacagauaacaggaaaugaucc

SEQ ID NO: 79190 - RNA, 25 nt, Artificial Sequence
  Description of Artificial Sequence: Synthetic oligonucleotide
cuuaagaaaagagaagaaaugaaac

SEQ ID NO: 79191 - RNA, 25 nt, Artificial Sequence
  Description of Artificial Sequence: Synthetic oligonucleotide
cugaaggaguguguuuccauccucc

SEQ ID NO: 79192 - RNA, 25 nt, Artificial Sequence
  Description of Artificial Sequence: Synthetic oligonucleotide
ucaccgcgggacugaaaaucuuuga

SEQ ID NO: 79193 - RNA, 25 nt, Artificial Sequence
  Description of Artificial Sequence: Synthetic oligonucleotide
agcagaaauaagcgugccguucagg

SEQ ID NO: 79194 - RNA, 25 nt, Artificial Sequence
  Description of Artificial Sequence: Synthetic oligonucleotide
aagcgugccguucaggguccagaag

SEQ ID NO: 79195 - RNA, 25 nt, Artificial Sequence
  Description of Artificial Sequence: Synthetic oligonucleotide
agaaacagucacucaagacugcuug

SEQ ID NO: 79196 - RNA, 25 nt, Artificial Sequence
  Description of Artificial Sequence: Synthetic oligonucleotide
agaggaagaagguccaugucuuugg

SEQ ID NO: 79197 - RNA, 25 nt, Artificial Sequence
  Description of Artificial Sequence: Synthetic oligonucleotide
uguauucaaaauaugccugaaacac

SEQ ID NO: 79198 - RNA, 25 nt, Artificial Sequence
  Description of Artificial Sequence: Synthetic oligonucleotide
auuuuccucccuuucucuguaccuc

SEQ ID NO: 79199 - RNA, 25 nt, Artificial Sequence
  Description of Artificial Sequence: Synthetic oligonucleotide
caaagaaagauagagcaagacaaga

SEQ ID NO: 79200 - RNA, 25 nt, Artificial Sequence
  Description of Artificial Sequence: Synthetic oligonucleotide
aagaaagauagagcaagacaagaaa

SEQ ID NO: 79201 - RNA, 25 nt, Artificial Sequence
  Description of Artificial Sequence: Synthetic oligonucleotide
gaaagcauuuguuuguacaagaucc

SEQ ID NO: 79202 - RNA, 25 nt, Artificial Sequence
  Description of Artificial Sequence: Synthetic oligonucleotide
ugaguuaaacgaacguacuugcaga

SEQ ID NO: 79203 - RNA, 25 nt, Artificial Sequence
  Description of Artificial Sequence: Synthetic oligonucleotide
acugauacagaacgaucgauacaga

SEQ ID NO: 79204 - RNA, 25 nt, Artificial Sequence
  Description of Artificial Sequence: Synthetic oligonucleotide
auauuauauauauauaaaaauaaau

SEQ ID NO: 79205 - RNA, 25 nt, Artificial Sequence
  Description of Artificial Sequence: Synthetic oligonucleotide
auuauauauauauaaaaauaaauau

SEQ ID NO: 79206 - RNA, 25 nt, Artificial Sequence
  Description of Artificial Sequence: Synthetic oligonucleotide
ucacuggauguauuugacugcugug

SEQ ID NO: 79207 - RNA, 25 nt, Artificial Sequence
  Description of Artificial Sequence: Synthetic oligonucleotide
cagggaagaggaggagaugagagac

SEQ ID NO: 79208 - RNA, 25 nt, Artificial Sequence
  Description of Artificial Sequence: Synthetic oligonucleotide
augaucuuuuuuuugucccacuugg

SEQ ID NO: 79209 - RNA, 27 nt, Artificial Sequence
  Description of Artificial Sequence: Synthetic oligonucleotide
ggccgugaacuccucaucaaaauaccu

SEQ ID NO: 79210 - RNA, 27 nt, Artificial Sequence
  Description of Artificial Sequence: Synthetic oligonucleotide
uggugugauggugaucaucugggccgu

SEQ ID NO: 79211 - RNA, 27 nt, Artificial Sequence
  Description of Artificial Sequence: Synthetic oligonucleotide
aaacccgcaggauaguuuucuucccua

SEQ ID NO: 79212 - RNA, 27 nt, Artificial Sequence
  Description of Artificial Sequence: Synthetic oligonucleotide
caaacuggaugaaauaaauuaaaaccc

SEQ ID NO: 79213 - RNA, 27 nt, Artificial Sequence
  Description of Artificial Sequence: Synthetic oligonucleotide
agaaguccuuaacauuucccuacguga

SEQ ID NO: 79214 - RNA, 27 nt, Artificial Sequence
  Description of Artificial Sequence: Synthetic oligonucleotide
cucugucccacuggguaaacccuggcc

SEQ ID NO: 79215 - RNA, 27 nt, Artificial Sequence
  Description of Artificial Sequence: Synthetic oligonucleotide
cacaauaacaaauuuaaaccuugcucc

SEQ ID NO: 79216 - RNA, 27 nt, Artificial Sequence
  Description of Artificial Sequence: Synthetic oligonucleotide
aaaugcauuugaacaacauaauacaca

SEQ ID NO: 79217 - RNA, 27 nt, Artificial Sequence
  Description of Artificial Sequence: Synthetic oligonucleotide
ggcuuuccugucacaaagauuaaaaac

SEQ ID NO: 79218 - RNA, 27 nt, Artificial Sequence
  Description of Artificial Sequence: Synthetic oligonucleotide
agggcuuuccugucacaaagauuaaaa

SEQ ID NO: 79219 - RNA, 27 nt, Artificial Sequence
  Description of Artificial Sequence: Synthetic oligonucleotide
ggccaugcugggagacauaagcagcag

SEQ ID NO: 79220 - RNA, 27 nt, Artificial Sequence
  Description of Artificial Sequence: Synthetic oligonucleotide
ucagggagaagcuucugaaacacuucu

SEQ ID NO: 79221 - RNA, 27 nt, Artificial Sequence
  Description of Artificial Sequence: Synthetic oligonucleotide
aagggcuucuuccuuauugauggucag

SEQ ID NO: 79222 - RNA, 27 nt, Artificial Sequence
  Description of Artificial Sequence: Synthetic oligonucleotide
ugaagggcuucuuccuuauugaugguc

SEQ ID NO: 79223 - RNA, 27 nt, Artificial Sequence
  Description of Artificial Sequence: Synthetic oligonucleotide
cgcugaagggcuucuuccuuauugaug

SEQ ID NO: 79224 - RNA, 27 nt, Artificial Sequence
  Description of Artificial Sequence: Synthetic oligonucleotide
gccgcugaagggcuucuuccuuauuga

SEQ ID NO: 79225 - RNA, 27 nt, Artificial Sequence
  Description of Artificial Sequence: Synthetic oligonucleotide
acuggccgcugaagggcuucuuccuua

SEQ ID NO: 79226 - RNA, 27 nt, Artificial Sequence
  Description of Artificial Sequence: Synthetic oligonucleotide
cggagcuuuucaccuuuaguuaugcuu

SEQ ID NO: 79227 - RNA, 27 nt, Artificial Sequence
  Description of Artificial Sequence: Synthetic oligonucleotide
ccggagcuuuucaccuuuaguuaugcu

SEQ ID NO: 79228 - RNA, 27 nt, Artificial Sequence
  Description of Artificial Sequence: Synthetic oligonucleotide
cagacuguugacuggcgugauguaguu

SEQ ID NO: 79229 - RNA, 27 nt, Artificial Sequence
  Description of Artificial Sequence: Synthetic oligonucleotide
cuuuugaacucugcuuaaauccagugg

SEQ ID NO: 79230 - RNA, 27 nt, Artificial Sequence
  Description of Artificial Sequence: Synthetic oligonucleotide
gcuuuugaacucugcuuaaauccagug

SEQ ID NO: 79231 - RNA, 27 nt, Artificial Sequence
  Description of Artificial Sequence: Synthetic oligonucleotide
agggcuuuugaacucugcuuaaaucca

SEQ ID NO: 79232 - RNA, 27 nt, Artificial Sequence
  Description of Artificial Sequence: Synthetic oligonucleotide
aagggcuuuugaacucugcuuaaaucc

SEQ ID NO: 79233 - RNA, 27 nt, Artificial Sequence
  Description of Artificial Sequence: Synthetic oligonucleotide
ugaagggcuuuugaacucugcuuaaau

SEQ ID NO: 79234 - RNA, 27 nt, Artificial Sequence
  Description of Artificial Sequence: Synthetic oligonucleotide
cugaagggcuuuugaacucugcuuaaa

SEQ ID NO: 79235 - RNA, 27 nt, Artificial Sequence
  Description of Artificial Sequence: Synthetic oligonucleotide
cgcugaagggcuuuugaacucugcuua

SEQ ID NO: 79236 - RNA, 27 nt, Artificial Sequence
  Description of Artificial Sequence: Synthetic oligonucleotide
cgagcggcuucacucagacccugaggc

SEQ ID NO: 79237 - RNA, 27 nt, Artificial Sequence
  Description of Artificial Sequence: Synthetic oligonucleotide
uugacuggcgugauguaguugcuuggg

SEQ ID NO: 79238 - RNA, 27 nt, Artificial Sequence
  Description of Artificial Sequence: Synthetic oligonucleotide
cacgcaccaagaagcugccauugaucc

SEQ ID NO: 79239 - RNA, 27 nt, Artificial Sequence
  Description of Artificial Sequence: Synthetic oligonucleotide
cugaugaauccaaugugggcuggaauc

SEQ ID NO: 79240 - RNA, 27 nt, Artificial Sequence
  Description of Artificial Sequence: Synthetic oligonucleotide
cuuagguauuccacauucucagcugug

SEQ ID NO: 79241 - RNA, 27 nt, Artificial Sequence
  Description of Artificial Sequence: Synthetic oligonucleotide
ugagccucaaauuaggagauacguuuu

SEQ ID NO: 79242 - RNA, 27 nt, Artificial Sequence
  Description of Artificial Sequence: Synthetic oligonucleotide
ccaauuguagagaaauuauuuuaggaa

SEQ ID NO: 79243 - RNA, 27 nt, Artificial Sequence
  Description of Artificial Sequence: Synthetic oligonucleotide
ggcuccuaacuagcugaaucuuccaau

SEQ ID NO: 79244 - RNA, 27 nt, Artificial Sequence
  Description of Artificial Sequence: Synthetic oligonucleotide
guggauauugacuaggagaguuuaaaa

SEQ ID NO: 79245 - RNA, 27 nt, Artificial Sequence
  Description of Artificial Sequence: Synthetic oligonucleotide
ugugacugaacauaacuguaggcugaa

SEQ ID NO: 79246 - RNA, 27 nt, Artificial Sequence
  Description of Artificial Sequence: Synthetic oligonucleotide
guaugugugugugacugaacauaacug

SEQ ID NO: 79247 - RNA, 27 nt, Artificial Sequence
  Description of Artificial Sequence: Synthetic oligonucleotide
aagcaaaaggaacauuuuguaugugug

SEQ ID NO: 79248 - RNA, 27 nt, Artificial Sequence
  Description of Artificial Sequence: Synthetic oligonucleotide
aaaaauuacuuuaaaagcaaaaggaac

SEQ ID NO: 79249 - RNA, 27 nt, Artificial Sequence
  Description of Artificial Sequence: Synthetic oligonucleotide
ccauugacuguugcuucacaggucaga

SEQ ID NO: 79250 - RNA, 27 nt, Artificial Sequence
  Description of Artificial Sequence: Synthetic oligonucleotide
auugguuugucgaugugugagauaguu

SEQ ID NO: 79251 - RNA, 27 nt, Artificial Sequence
  Description of Artificial Sequence: Synthetic oligonucleotide
agugguagcaguacaauugaggacaag

SEQ ID NO: 79252 - RNA, 27 nt, Artificial Sequence
  Description of Artificial Sequence: Synthetic oligonucleotide
uaagaccgcuugccagcuacgguuuca

SEQ ID NO: 79253 - RNA, 27 nt, Artificial Sequence
  Description of Artificial Sequence: Synthetic oligonucleotide
agccgguaagaccgcuugccagcuacg

SEQ ID NO: 79254 - RNA, 27 nt, Artificial Sequence
  Description of Artificial Sequence: Synthetic oligonucleotide
gguaacccaucuuuuaaccauacaacu

SEQ ID NO: 79255 - RNA, 27 nt, Artificial Sequence
  Description of Artificial Sequence: Synthetic oligonucleotide
ucgcagguaacccaucuuuuaaccaua

SEQ ID NO: 79256 - RNA, 27 nt, Artificial Sequence
  Description of Artificial Sequence: Synthetic oligonucleotide
cucagcaagauuguauaauucccugca

SEQ ID NO: 79257 - RNA, 27 nt, Artificial Sequence
  Description of Artificial Sequence: Synthetic oligonucleotide
acuguuuuaugcucagcaagauuguau

SEQ ID NO: 79258 - RNA, 27 nt, Artificial Sequence
  Description of Artificial Sequence: Synthetic oligonucleotide
aggauaaaggacucuucauuauuggaa

SEQ ID NO: 79259 - RNA, 27 nt, Artificial Sequence
  Description of Artificial Sequence: Synthetic oligonucleotide
caacuugcguuggaacauccaaagugu

SEQ ID NO: 79260 - RNA, 27 nt, Artificial Sequence
  Description of Artificial Sequence: Synthetic oligonucleotide
augguuucaguuuaguggaagcauuua

SEQ ID NO: 79261 - RNA, 27 nt, Artificial Sequence
  Description of Artificial Sequence: Synthetic oligonucleotide
auauuuaacaaagucaaacuuucucac

SEQ ID NO: 79262 - RNA, 27 nt, Artificial Sequence
  Description of Artificial Sequence: Synthetic oligonucleotide
aacuuuuaauauacaguaguucuuuuc

SEQ ID NO: 79263 - RNA, 27 nt, Artificial Sequence
  Description of Artificial Sequence: Synthetic oligonucleotide
guuaagucaaaacccguauuucuaaag

SEQ ID NO: 79264 - RNA, 27 nt, Artificial Sequence
  Description of Artificial Sequence: Synthetic oligonucleotide
gugcugaguuugcuguacccauguuga

SEQ ID NO: 79265 - RNA, 27 nt, Artificial Sequence
  Description of Artificial Sequence: Synthetic oligonucleotide
ugaggucagcaucuucugugucuuuac

SEQ ID NO: 79266 - RNA, 27 nt, Artificial Sequence
  Description of Artificial Sequence: Synthetic oligonucleotide
gcgaucugaauaaaccucccuacuagc

SEQ ID NO: 79267 - RNA, 27 nt, Artificial Sequence
  Description of Artificial Sequence: Synthetic oligonucleotide
aucccagaacccugcugcagaaggcca

SEQ ID NO: 79268 - RNA, 27 nt, Artificial Sequence
  Description of Artificial Sequence: Synthetic oligonucleotide
cauaauuuccaauauguaccagaccuu

SEQ ID NO: 79269 - RNA, 27 nt, Artificial Sequence
  Description of Artificial Sequence: Synthetic oligonucleotide
cuagugcuuccaucggaaggacuaggu

SEQ ID NO: 79270 - RNA, 27 nt, Artificial Sequence
  Description of Artificial Sequence: Synthetic oligonucleotide
uccacauaaaaacaauauucacuggga

SEQ ID NO: 79271 - RNA, 27 nt, Artificial Sequence
  Description of Artificial Sequence: Synthetic oligonucleotide
ucuaccaauuccaacuugaauucauug

SEQ ID NO: 79272 - RNA, 27 nt, Artificial Sequence
  Description of Artificial Sequence: Synthetic oligonucleotide
ucuccaagucuaaaucuguguccugag

SEQ ID NO: 79273 - RNA, 27 nt, Artificial Sequence
  Description of Artificial Sequence: Synthetic oligonucleotide
uggaauacuguaacugugcuuugagga

SEQ ID NO: 79274 - RNA, 27 nt, Artificial Sequence
  Description of Artificial Sequence: Synthetic oligonucleotide
uuaauucaucagugguggcagugguag

SEQ ID NO: 79275 - RNA, 27 nt, Artificial Sequence
  Description of Artificial Sequence: Synthetic oligonucleotide
gugaugauguggcacuaguaguuucuu

SEQ ID NO: 79276 - RNA, 27 nt, Artificial Sequence
  Description of Artificial Sequence: Synthetic oligonucleotide
ucuguuuggugaggcuguccgacuuug

SEQ ID NO: 79277 - RNA, 27 nt, Artificial Sequence
  Description of Artificial Sequence: Synthetic oligonucleotide
ccaucauguuccauuuuucgcuuucuc

SEQ ID NO: 79278 - RNA, 27 nt, Artificial Sequence
  Description of Artificial Sequence: Synthetic oligonucleotide
gcagucuacaugcuaaaucagagggua

SEQ ID NO: 79279 - RNA, 27 nt, Artificial Sequence
  Description of Artificial Sequence: Synthetic oligonucleotide
cauaaauagauccuuaaauagcucaaa

SEQ ID NO: 79280 - RNA, 27 nt, Artificial Sequence
  Description of Artificial Sequence: Synthetic oligonucleotide
ugauaauagugcuuuuucaccuuuuuc

SEQ ID NO: 79281 - RNA, 27 nt, Artificial Sequence
  Description of Artificial Sequence: Synthetic oligonucleotide
gcagaacugauaauagugcuuuuucac

SEQ ID NO: 79282 - RNA, 27 nt, Artificial Sequence
  Description of Artificial Sequence: Synthetic oligonucleotide
guagguuuaaucuuucuuuucagccau

SEQ ID NO: 79283 - RNA, 27 nt, Artificial Sequence
  Description of Artificial Sequence: Synthetic oligonucleotide
agaaggauuuuauuauaaggguuuaau

SEQ ID NO: 79284 - RNA, 27 nt, Artificial Sequence
  Description of Artificial Sequence: Synthetic oligonucleotide
gucuacagcauuggcuaauaguaugaa

SEQ ID NO: 79285 - RNA, 27 nt, Artificial Sequence
  Description of Artificial Sequence: Synthetic oligonucleotide
cuauuccuaucaaaaugcuucugucua

SEQ ID NO: 79286 - RNA, 27 nt, Artificial Sequence
  Description of Artificial Sequence: Synthetic oligonucleotide
ucagggccauuaucuuauuugcucuau

SEQ ID NO: 79287 - RNA, 27 nt, Artificial Sequence
  Description of Artificial Sequence: Synthetic oligonucleotide
ugcuugaggaagagaaaaauguugguc

SEQ ID NO: 79288 - RNA, 27 nt, Artificial Sequence
  Description of Artificial Sequence: Synthetic oligonucleotide
ugggcugaacuuuucucauacuuaaag

SEQ ID NO: 79289 - RNA, 27 nt, Artificial Sequence
  Description of Artificial Sequence: Synthetic oligonucleotide
gguucagcagccaucuuuauuccugcg

SEQ ID NO: 79290 - RNA, 27 nt, Artificial Sequence
  Description of Artificial Sequence: Synthetic oligonucleotide
ugaagagaacuuggucauucaaauuuc

SEQ ID NO: 79291 - RNA, 27 nt, Artificial Sequence
  Description of Artificial Sequence: Synthetic oligonucleotide
cucuaggcuggcuaucuuuauacauac

SEQ ID NO: 79292 - RNA, 27 nt, Artificial Sequence
  Description of Artificial Sequence: Synthetic oligonucleotide
acacuucacagagauaguuacagccau

SEQ ID NO: 79293 - RNA, 27 nt, Artificial Sequence
  Description of Artificial Sequence: Synthetic oligonucleotide
uugaaauuuucucacacuucacagaga

SEQ ID NO: 79294 - RNA, 27 nt, Artificial Sequence
  Description of Artificial Sequence: Synthetic oligonucleotide
ucaggaggauucauuuccuuaaaggaa

SEQ ID NO: 79295 - RNA, 27 nt, Artificial Sequence
  Description of Artificial Sequence: Synthetic oligonucleotide
auaugaugucacuuuuuguauccuuga

SEQ ID NO: 79296 - RNA, 27 nt, Artificial Sequence
  Description of Artificial Sequence: Synthetic oligonucleotide
uaugaugaagauucaaauugcaucuua

SEQ ID NO: 79297 - RNA, 27 nt, Artificial Sequence
  Description of Artificial Sequence: Synthetic oligonucleotide
uuaauagcuagucuucguuuugaacag

SEQ ID NO: 79298 - RNA, 27 nt, Artificial Sequence
  Description of Artificial Sequence: Synthetic oligonucleotide
auuuuuaguagagaugagguuucacca

SEQ ID NO: 79299 - RNA, 27 nt, Artificial Sequence
  Description of Artificial Sequence: Synthetic oligonucleotide
aggcgagauagagcuucucuuucguuc

SEQ ID NO: 79300 - RNA, 27 nt, Artificial Sequence
  Description of Artificial Sequence: Synthetic oligonucleotide
aacuggaccgaaggcgcuuguggagaa

SEQ ID NO: 79301 - RNA, 27 nt, Artificial Sequence
  Description of Artificial Sequence: Synthetic oligonucleotide
gcggcuacaucuuuggaaucuucuccu

SEQ ID NO: 79302 - RNA, 27 nt, Artificial Sequence
  Description of Artificial Sequence: Synthetic oligonucleotide
caagucuccucauugaauccagauugg

SEQ ID NO: 79303 - RNA, 27 nt, Artificial Sequence
  Description of Artificial Sequence: Synthetic oligonucleotide
uccucacuacucucaaaucuguucugg

SEQ ID NO: 79304 - RNA, 27 nt, Artificial Sequence
  Description of Artificial Sequence: Synthetic oligonucleotide
uuuguacucaucugcacagcucuggcu

SEQ ID NO: 79305 - RNA, 27 nt, Artificial Sequence
  Description of Artificial Sequence: Synthetic oligonucleotide
gcccauuaacaacaacaaucugaggug

SEQ ID NO: 79306 - RNA, 27 nt, Artificial Sequence
  Description of Artificial Sequence: Synthetic oligonucleotide
aauaaauuaaaaauaauuaaaauagug

SEQ ID NO: 79307 - RNA, 27 nt, Artificial Sequence
  Description of Artificial Sequence: Synthetic oligonucleotide
cauauuuaaauauuaauaaauuaaaaa

SEQ ID NO: 79308 - RNA, 27 nt, Artificial Sequence
  Description of Artificial Sequence: Synthetic oligonucleotide
gaaacaaaggauauucaaacugcauag

SEQ ID NO: 79309 - RNA, 27 nt, Artificial Sequence
  Description of Artificial Sequence: Synthetic oligonucleotide
caaacacuuagacgccagcagcauggg

SEQ ID NO: 79310 - RNA, 27 nt, Artificial Sequence
  Description of Artificial Sequence: Synthetic oligonucleotide
uuugucacaggugaaaugcacaucuga

SEQ ID NO: 79311 - RNA, 27 nt, Artificial Sequence
  Description of Artificial Sequence: Synthetic oligonucleotide
uaauucagccuggcacagguuuugauc

SEQ ID NO: 79312 - RNA, 27 nt, Artificial Sequence
  Description of Artificial Sequence: Synthetic oligonucleotide
auuguaagaaugacuacccacauucac

SEQ ID NO: 79313 - RNA, 27 nt, Artificial Sequence
  Description of Artificial Sequence: Synthetic oligonucleotide
caauuguaagaaugacuacccacauuc

SEQ ID NO: 79314 - RNA, 27 nt, Artificial Sequence
  Description of Artificial Sequence: Synthetic oligonucleotide
guacacucucugaugcucauuuucaua

SEQ ID NO: 79315 - RNA, 27 nt, Artificial Sequence
  Description of Artificial Sequence: Synthetic oligonucleotide
cugcugaguucuacaugaaaagcaaau

SEQ ID NO: 79316 - RNA, 27 nt, Artificial Sequence
  Description of Artificial Sequence: Synthetic oligonucleotide
uacugaaaauaaauauagaaauacaac

SEQ ID NO: 79317 - RNA, 27 nt, Artificial Sequence
  Description of Artificial Sequence: Synthetic oligonucleotide
uuccauuuaagaaacauuaaucaaaac

SEQ ID NO: 79318 - RNA, 27 nt, Artificial Sequence
  Description of Artificial Sequence: Synthetic oligonucleotide
acaauuuuaggcacuauacacguuguu

SEQ ID NO: 79319 - RNA, 27 nt, Artificial Sequence
  Description of Artificial Sequence: Synthetic oligonucleotide
ccagauguuaguagccaaggauauggu

SEQ ID NO: 79320 - RNA, 27 nt, Artificial Sequence
  Description of Artificial Sequence: Synthetic oligonucleotide
agcucacagucuccagauguuaguagc

SEQ ID NO: 79321 - RNA, 27 nt, Artificial Sequence
  Description of Artificial Sequence: Synthetic oligonucleotide
auuaauaaaaagcacacaacuuauggc

SEQ ID NO: 79322 - RNA, 27 nt, Artificial Sequence
  Description of Artificial Sequence: Synthetic oligonucleotide
aauguaagaagagccaaaaugaugcau

SEQ ID NO: 79323 - RNA, 27 nt, Artificial Sequence
  Description of Artificial Sequence: Synthetic oligonucleotide
acauuuuuacaaauguaagaagagcca

SEQ ID NO: 79324 - RNA, 27 nt, Artificial Sequence
  Description of Artificial Sequence: Synthetic oligonucleotide
aauaugaauuaagaugaccuaaucugu

SEQ ID NO: 79325 - RNA, 27 nt, Artificial Sequence
  Description of Artificial Sequence: Synthetic oligonucleotide
ucaugauuaguucuuucaauuccaucc

SEQ ID NO: 79326 - RNA, 27 nt, Artificial Sequence
  Description of Artificial Sequence: Synthetic oligonucleotide
cccaagagcagaaggaaugagugugca

SEQ ID NO: 79327 - RNA, 27 nt, Artificial Sequence
  Description of Artificial Sequence: Synthetic oligonucleotide
cucaaagcuacugguuaccucuacacc

SEQ ID NO: 79328 - RNA, 27 nt, Artificial Sequence
  Description of Artificial Sequence: Synthetic oligonucleotide
ugaaauauuacguggcaugugguuggg

SEQ ID NO: 79329 - RNA, 27 nt, Artificial Sequence
  Description of Artificial Sequence: Synthetic oligonucleotide
agugaagagaauaacuuguuuccgaag

SEQ ID NO: 79330 - RNA, 27 nt, Artificial Sequence
  Description of Artificial Sequence: Synthetic oligonucleotide
uuucuuagcauuaguuauugggaguga

SEQ ID NO: 79331 - RNA, 27 nt, Artificial Sequence
  Description of Artificial Sequence: Synthetic oligonucleotide
uugauuuucagcauuucuuagcauuag

SEQ ID NO: 79332 - RNA, 27 nt, Artificial Sequence
  Description of Artificial Sequence: Synthetic oligonucleotide
aaaguaaucauauuuagagaaagacag

SEQ ID NO: 79333 - RNA, 27 nt, Artificial Sequence
  Description of Artificial Sequence: Synthetic oligonucleotide
uguagaacaaaaugccugaaauucagc

SEQ ID NO: 79334 - RNA, 27 nt, Artificial Sequence
  Description of Artificial Sequence: Synthetic oligonucleotide
gagagucccgggugagagggaaucgcc

SEQ ID NO: 79335 - RNA, 27 nt, Artificial Sequence
  Description of Artificial Sequence: Synthetic oligonucleotide
cuuuacuuuaaagguucacuuuccuug

SEQ ID NO: 79336 - RNA, 27 nt, Artificial Sequence
  Description of Artificial Sequence: Synthetic oligonucleotide
ccaggcuuccagagcaugcagccuccu

SEQ ID NO: 79337 - RNA, 27 nt, Artificial Sequence
  Description of Artificial Sequence: Synthetic oligonucleotide
cucucuuuuguuuucuguucagagaaa

SEQ ID NO: 79338 - RNA, 27 nt, Artificial Sequence
  Description of Artificial Sequence: Synthetic oligonucleotide
cggcauaacugauuacagccaaguuca

SEQ ID NO: 79339 - RNA, 27 nt, Artificial Sequence
  Description of Artificial Sequence: Synthetic oligonucleotide
uggacuucuuuuaauuuuggcuucuuc

SEQ ID NO: 79340 - RNA, 27 nt, Artificial Sequence
  Description of Artificial Sequence: Synthetic oligonucleotide
uaaccucaccuggacuucuuuuaauuu

SEQ ID NO: 79341 - RNA, 27 nt, Artificial Sequence
  Description of Artificial Sequence: Synthetic oligonucleotide
guccucuucccgauaauccggauucag

SEQ ID NO: 79342 - RNA, 27 nt, Artificial Sequence
  Description of Artificial Sequence: Synthetic oligonucleotide
acaauacuugcuuugaugucacauuaa

SEQ ID NO: 79343 - RNA, 27 nt, Artificial Sequence
  Description of Artificial Sequence: Synthetic oligonucleotide
gagugcuacaauacuugcuuugauguc

SEQ ID NO: 79344 - RNA, 27 nt, Artificial Sequence
  Description of Artificial Sequence: Synthetic oligonucleotide
auuugugguuuuguuuucucucucucu

SEQ ID NO: 79345 - RNA, 27 nt, Artificial Sequence
  Description of Artificial Sequence: Synthetic oligonucleotide
uguaugggcuuaaauacuacagcgagg

SEQ ID NO: 79346 - RNA, 27 nt, Artificial Sequence
  Description of Artificial Sequence: Synthetic oligonucleotide
cuguaugggcuuaaauacuacagcgag

SEQ ID NO: 79347 - RNA, 27 nt, Artificial Sequence
  Description of Artificial Sequence: Synthetic oligonucleotide
ggaagguuucuguaugggcuuaaauac

SEQ ID NO: 79348 - RNA, 27 nt, Artificial Sequence
  Description of Artificial Sequence: Synthetic oligonucleotide
guagguauaccauguuuauuuuaauac

SEQ ID NO: 79349 - RNA, 27 nt, Artificial Sequence
  Description of Artificial Sequence: Synthetic oligonucleotide
uccgaaaacuggccgaucagaacagcc

SEQ ID NO: 79350 - RNA, 27 nt, Artificial Sequence
  Description of Artificial Sequence: Synthetic oligonucleotide
cccuguuccaaaguucaaauuauuugu

SEQ ID NO: 79351 - RNA, 27 nt, Artificial Sequence
  Description of Artificial Sequence: Synthetic oligonucleotide
acuggaaaguuaaauuaaggucgcaau

SEQ ID NO: 79352 - RNA, 27 nt, Artificial Sequence
  Description of Artificial Sequence: Synthetic oligonucleotide
caaaaccaaacuuuagcuuucucagcc

SEQ ID NO: 79353 - RNA, 27 nt, Artificial Sequence
  Description of Artificial Sequence: Synthetic oligonucleotide
uacagugggaaguagcaucuuuacuuu

SEQ ID NO: 79354 - RNA, 27 nt, Artificial Sequence
  Description of Artificial Sequence: Synthetic oligonucleotide
ucauaugguaucagcaauuaagcagua

SEQ ID NO: 79355 - RNA, 27 nt, Artificial Sequence
  Description of Artificial Sequence: Synthetic oligonucleotide
cagcccauguuucauucauaugguauc

SEQ ID NO: 79356 - RNA, 27 nt, Artificial Sequence
  Description of Artificial Sequence: Synthetic oligonucleotide
uaugaaaaaguuggauaagaaaguugg

SEQ ID NO: 79357 - RNA, 27 nt, Artificial Sequence
  Description of Artificial Sequence: Synthetic oligonucleotide
uccggccucaugaugucaugcaaggcu

SEQ ID NO: 79358 - RNA, 27 nt, Artificial Sequence
  Description of Artificial Sequence: Synthetic oligonucleotide
acaaaugcagucauauacaaauucagg

SEQ ID NO: 79359 - RNA, 27 nt, Artificial Sequence
  Description of Artificial Sequence: Synthetic oligonucleotide
gguaguaaacauucuacuaggauucuu

SEQ ID NO: 79360 - RNA, 27 nt, Artificial Sequence
  Description of Artificial Sequence: Synthetic oligonucleotide
uuucaucaaaaaauucuucccuuucug

SEQ ID NO: 79361 - RNA, 27 nt, Artificial Sequence
  Description of Artificial Sequence: Synthetic oligonucleotide
aaauucacacacuggcaugccgauagc

SEQ ID NO: 79362 - RNA, 27 nt, Artificial Sequence
  Description of Artificial Sequence: Synthetic oligonucleotide
acauacauugcucuacuaugaggugaa

SEQ ID NO: 79363 - RNA, 27 nt, Artificial Sequence
  Description of Artificial Sequence: Synthetic oligonucleotide
uauauaugugcuuuggcaauucuggug

SEQ ID NO: 79364 - RNA, 27 nt, Artificial Sequence
  Description of Artificial Sequence: Synthetic oligonucleotide
ggagaaacuauuacccagaucaccacu

SEQ ID NO: 79365 - RNA, 27 nt, Artificial Sequence
  Description of Artificial Sequence: Synthetic oligonucleotide
auuuggagaaacuauuacccagaucac

SEQ ID NO: 79366 - RNA, 27 nt, Artificial Sequence
  Description of Artificial Sequence: Synthetic oligonucleotide
uuucuaggaaguauucaucacauccac

SEQ ID NO: 79367 - RNA, 27 nt, Artificial Sequence
  Description of Artificial Sequence: Synthetic oligonucleotide
cauauaugguguagcuguggaaaugcg

SEQ ID NO: 79368 - RNA, 27 nt, Artificial Sequence
  Description of Artificial Sequence: Synthetic oligonucleotide
cuccauucauauaugguguagcugugg

SEQ ID NO: 79369 - RNA, 27 nt, Artificial Sequence
  Description of Artificial Sequence: Synthetic oligonucleotide
aucuucuucucguguaagaacugcagc

SEQ ID NO: 79370 - RNA, 27 nt, Artificial Sequence
  Description of Artificial Sequence: Synthetic oligonucleotide
ucccuguaaaugaucuucuucucgugu

SEQ ID NO: 79371 - RNA, 27 nt, Artificial Sequence
  Description of Artificial Sequence: Synthetic oligonucleotide
gucccuguaaaugaucuucuucucgug

SEQ ID NO: 79372 - RNA, 27 nt, Artificial Sequence
  Description of Artificial Sequence: Synthetic oligonucleotide
ucaggucccuguaaaugaucuucuucu

SEQ ID NO: 79373 - RNA, 27 nt, Artificial Sequence
  Description of Artificial Sequence: Synthetic oligonucleotide
gaugcagucaaacaccucuuccucugu

SEQ ID NO: 79374 - RNA, 27 nt, Artificial Sequence
  Description of Artificial Sequence: Synthetic oligonucleotide
cgaugcagucaaacaccucuuccucug

SEQ ID NO: 79375 - RNA, 27 nt, Artificial Sequence
  Description of Artificial Sequence: Synthetic oligonucleotide
cccugugaacucgcccucaaaguagcg

SEQ ID NO: 79376 - RNA, 27 nt, Artificial Sequence
  Description of Artificial Sequence: Synthetic oligonucleotide
ggacagaggugccaggagaugcccuca

SEQ ID NO: 79377 - RNA, 27 nt, Artificial Sequence
  Description of Artificial Sequence: Synthetic oligonucleotide
uuaaaaagacaaaccauaucacuccuu

SEQ ID NO: 79378 - RNA, 27 nt, Artificial Sequence
  Description of Artificial Sequence: Synthetic oligonucleotide
cuuaaaaagacaaaccauaucacuccu

SEQ ID NO: 79379 - RNA, 27 nt, Artificial Sequence
  Description of Artificial Sequence: Synthetic oligonucleotide
gacaaccuuuaggaucuuuacugcaac

SEQ ID NO: 79380 - RNA, 27 nt, Artificial Sequence
  Description of Artificial Sequence: Synthetic oligonucleotide
gucgacaaccuuuaggaucuuuacugc

SEQ ID NO: 79381 - RNA, 27 nt, Artificial Sequence
  Description of Artificial Sequence: Synthetic oligonucleotide
acaauugccagguuguccuuugucaug

SEQ ID NO: 79382 - RNA, 27 nt, Artificial Sequence
  Description of Artificial Sequence: Synthetic oligonucleotide
ccucgcaccacugggucacaauugcca

SEQ ID NO: 79383 - RNA, 27 nt, Artificial Sequence
  Description of Artificial Sequence: Synthetic oligonucleotide
auuucaugucucuauggaugauguucu

SEQ ID NO: 79384 - RNA, 27 nt, Artificial Sequence
  Description of Artificial Sequence: Synthetic oligonucleotide
uggagaaauauauuguuggauuucaug

SEQ ID NO: 79385 - RNA, 27 nt, Artificial Sequence
  Description of Artificial Sequence: Synthetic oligonucleotide
agccuucauggagaaauauauuguugg

SEQ ID NO: 79386 - RNA, 27 nt, Artificial Sequence
  Description of Artificial Sequence: Synthetic oligonucleotide
accacuccagcgugacuuuacuguugc

SEQ ID NO: 79387 - RNA, 27 nt, Artificial Sequence
  Description of Artificial Sequence: Synthetic oligonucleotide
ccucucuuccuuuacuuucuucacaca

SEQ ID NO: 79388 - RNA, 27 nt, Artificial Sequence
  Description of Artificial Sequence: Synthetic oligonucleotide
gcccgaugcaaggauggcucggaagcg

SEQ ID NO: 79389 - RNA, 27 nt, Artificial Sequence
  Description of Artificial Sequence: Synthetic oligonucleotide
cacaguaggauauucaaccuccauuuc

SEQ ID NO: 79390 - RNA, 27 nt, Artificial Sequence
  Description of Artificial Sequence: Synthetic oligonucleotide
uuacacaguaggauauucaaccuccau

SEQ ID NO: 79391 - RNA, 27 nt, Artificial Sequence
  Description of Artificial Sequence: Synthetic oligonucleotide
uacacuacaagggaaaacucaaaaucu

SEQ ID NO: 79392 - RNA, 27 nt, Artificial Sequence
  Description of Artificial Sequence: Synthetic oligonucleotide
caaucaacaaagaacaaacaggauaaa

SEQ ID NO: 79393 - RNA, 27 nt, Artificial Sequence
  Description of Artificial Sequence: Synthetic oligonucleotide
uuucaaucaacaaagaacaaacaggau

SEQ ID NO: 79394 - RNA, 27 nt, Artificial Sequence
  Description of Artificial Sequence: Synthetic oligonucleotide
auggaagaaaaagaaggcuguagagaa

SEQ ID NO: 79395 - RNA, 27 nt, Artificial Sequence
  Description of Artificial Sequence: Synthetic oligonucleotide
uagaaggaagauuagcuauggaagaaa

SEQ ID NO: 79396 - RNA, 27 nt, Artificial Sequence
  Description of Artificial Sequence: Synthetic oligonucleotide
augaagcauucaacaggaagauuauuu

SEQ ID NO: 79397 - RNA, 27 nt, Artificial Sequence
  Description of Artificial Sequence: Synthetic oligonucleotide
caugaagcauucaacaggaagauuauu

SEQ ID NO: 79398 - RNA, 27 nt, Artificial Sequence
  Description of Artificial Sequence: Synthetic oligonucleotide
ucaaaguagaauucaagucaugaagca

SEQ ID NO: 79399 - RNA, 27 nt, Artificial Sequence
  Description of Artificial Sequence: Synthetic oligonucleotide
gucuguaguugcuucucucccucuuag

SEQ ID NO: 79400 - RNA, 27 nt, Artificial Sequence
  Description of Artificial Sequence: Synthetic oligonucleotide
guugaccuuggucugguaggagacggc

SEQ ID NO: 79401 - RNA, 27 nt, Artificial Sequence
  Description of Artificial Sequence: Synthetic oligonucleotide
gucgagauagucgggccgauugaucuc

SEQ ID NO: 79402 - RNA, 27 nt, Artificial Sequence
  Description of Artificial Sequence: Synthetic oligonucleotide
guuugggaagguuggauguucguccuc

SEQ ID NO: 79403 - RNA, 27 nt, Artificial Sequence
  Description of Artificial Sequence: Synthetic oligonucleotide
aguucuaagcuuggguuccgacccuaa

SEQ ID NO: 79404 - RNA, 27 nt, Artificial Sequence
  Description of Artificial Sequence: Synthetic oligonucleotide
uuaaaguucuaagcuuggguuccgacc

SEQ ID NO: 79405 - RNA, 27 nt, Artificial Sequence
  Description of Artificial Sequence: Synthetic oligonucleotide
guugcuuaaaguucuaagcuuggguuc

SEQ ID NO: 79406 - RNA, 27 nt, Artificial Sequence
  Description of Artificial Sequence: Synthetic oligonucleotide
gugguggucuuguugcuuaaaguucua

SEQ ID NO: 79407 - RNA, 27 nt, Artificial Sequence
  Description of Artificial Sequence: Synthetic oligonucleotide
acuuuauuucucgccacugaauaguag

SEQ ID NO: 79408 - RNA, 27 nt, Artificial Sequence
  Description of Artificial Sequence: Synthetic oligonucleotide
aacuuuauuucucgccacugaauagua

SEQ ID NO: 79409 - RNA, 27 nt, Artificial Sequence
  Description of Artificial Sequence: Synthetic oligonucleotide
ggaucauuuccuguuaucuguguuugu

SEQ ID NO: 79410 - RNA, 27 nt, Artificial Sequence
  Description of Artificial Sequence: Synthetic oligonucleotide
guuucauuucuucucuuuucuuaaggc

SEQ ID NO: 79411 - RNA, 27 nt, Artificial Sequence
  Description of Artificial Sequence: Synthetic oligonucleotide
ggaggauggaaacacacuccuucaguu

SEQ ID NO: 79412 - RNA, 27 nt, Artificial Sequence
  Description of Artificial Sequence: Synthetic oligonucleotide
ucaaagauuuucagucccgcggugaca

SEQ ID NO: 79413 - RNA, 27 nt, Artificial Sequence
  Description of Artificial Sequence: Synthetic oligonucleotide
ccugaacggcacgcuuauuucugcugu

SEQ ID NO: 79414 - RNA, 27 nt, Artificial Sequence
  Description of Artificial Sequence: Synthetic oligonucleotide
cuucuggacccugaacggcacgcuuau

SEQ ID NO: 79415 - RNA, 27 nt, Artificial Sequence
  Description of Artificial Sequence: Synthetic oligonucleotide
caagcagucuugagugacuguuucuuc

SEQ ID NO: 79416 - RNA, 27 nt, Artificial Sequence
  Description of Artificial Sequence: Synthetic oligonucleotide
ccaaagacauggaccuucuuccucuga

SEQ ID NO: 79417 - RNA, 27 nt, Artificial Sequence
  Description of Artificial Sequence: Synthetic oligonucleotide
guguuucaggcauauuuugaauacauc

SEQ ID NO: 79418 - RNA, 27 nt, Artificial Sequence
  Description of Artificial Sequence: Synthetic oligonucleotide
gagguacagagaaagggaggaaaauag

SEQ ID NO: 79419 - RNA, 27 nt, Artificial Sequence
  Description of Artificial Sequence: Synthetic oligonucleotide
ucuugucuugcucuaucuuucuuuggu

SEQ ID NO: 79420 - RNA, 27 nt, Artificial Sequence
  Description of Artificial Sequence: Synthetic oligonucleotide
uuucuugucuugcucuaucuuucuuug

SEQ ID NO: 79421 - RNA, 27 nt, Artificial Sequence
  Description of Artificial Sequence: Synthetic oligonucleotide
ggaucuuguacaaacaaaugcuuucuc

SEQ ID NO: 79422 - RNA, 27 nt, Artificial Sequence
  Description of Artificial Sequence: Synthetic oligonucleotide
ucugcaaguacguucguuuaacucaag

SEQ ID NO: 79423 - RNA, 27 nt, Artificial Sequence
  Description of Artificial Sequence: Synthetic oligonucleotide
ucuguaucgaucguucuguaucagucu

SEQ ID NO: 79424 - RNA, 27 nt, Artificial Sequence
  Description of Artificial Sequence: Synthetic oligonucleotide
auuuauuuuuauauauauauaauauau

SEQ ID NO: 79425 - RNA, 27 nt, Artificial Sequence
  Description of Artificial Sequence: Synthetic oligonucleotide
auauuuauuuuuauauauauauaauau

SEQ ID NO: 79426 - RNA, 27 nt, Artificial Sequence
  Description of Artificial Sequence: Synthetic oligonucleotide
cacagcagucaaauacauccagugaag

SEQ ID NO: 79427 - RNA, 27 nt, Artificial Sequence
  Description of Artificial Sequence: Synthetic oligonucleotide
gucucucaucuccuccucuucccuguc

SEQ ID NO: 79428 - RNA, 27 nt, Artificial Sequence
  Description of Artificial Sequence: Synthetic oligonucleotide
ccaagugggacaaaaaaaagaucaugc

SEQ ID NO: 79429 - RNA, 14 nt, Artificial Sequence
  Description of Artificial Sequence: Synthetic oligonucleotide
guauuuugaugagg

SEQ ID NO: 79430 - RNA, 12 nt, Artificial Sequence
  Description of Artificial Sequence: Synthetic oligonucleotide
ggcccagaugau

SEQ ID NO: 79431 - RNA, 14 nt, Artificial Sequence
  Description of Artificial Sequence: Synthetic oligonucleotide
gggaagaaaacuau

SEQ ID NO: 79432 - RNA, 15 nt, Artificial Sequence
  Description of Artificial Sequence: Synthetic oligonucleotide
guuuuaauuuauuuc

SEQ ID NO: 79433 - RNA, 12 nt, Artificial Sequence
  Description of Artificial Sequence: Synthetic oligonucleotide
acguagggaaau

SEQ ID NO: 79434 - RNA, 12 nt, Artificial Sequence
  Description of Artificial Sequence: Synthetic oligonucleotide
ccaggguuuacc

SEQ ID NO: 79435 - RNA, 11 nt, Artificial Sequence
  Description of Artificial Sequence: Synthetic oligonucleotide
agcaagguuua

SEQ ID NO: 79436 - RNA, 12 nt, Artificial Sequence
  Description of Artificial Sequence: Synthetic oligonucleotide
uguauuauguug

SEQ ID NO: 79437 - RNA, 15 nt, Artificial Sequence
  Description of Artificial Sequence: Synthetic oligonucleotide
uuuuaaucuuuguga

SEQ ID NO: 79438 - RNA, 14 nt, Artificial Sequence
  Description of Artificial Sequence: Synthetic oligonucleotide
uuaaucuuugugac

SEQ ID NO: 79439 - RNA, 13 nt, Artificial Sequence
  Description of Artificial Sequence: Synthetic oligonucleotide
gcugcuuaugucu

SEQ ID NO: 79440 - RNA, 14 nt, Artificial Sequence
  Description of Artificial Sequence: Synthetic oligonucleotide
aaguguuucagaag

SEQ ID NO: 79441 - RNA, 13 nt, Artificial Sequence
  Description of Artificial Sequence: Synthetic oligonucleotide
gaccaucaauaag

SEQ ID NO: 79442 - RNA, 13 nt, Artificial Sequence
  Description of Artificial Sequence: Synthetic oligonucleotide
ccaucaauaagga

SEQ ID NO: 79443 - RNA, 14 nt, Artificial Sequence
  Description of Artificial Sequence: Synthetic oligonucleotide
ucaauaaggaagaa

SEQ ID NO: 79444 - RNA, 14 nt, Artificial Sequence
  Description of Artificial Sequence: Synthetic oligonucleotide
aauaaggaagaagc

SEQ ID NO: 79445 - RNA, 13 nt, Artificial Sequence
  Description of Artificial Sequence: Synthetic oligonucleotide
aggaagaagcccu

SEQ ID NO: 79446 - RNA, 13 nt, Artificial Sequence
  Description of Artificial Sequence: Synthetic oligonucleotide
gcauaacuaaagg

SEQ ID NO: 79447 - RNA, 14 nt, Artificial Sequence
  Description of Artificial Sequence: Synthetic oligonucleotide
cauaacuaaaggug

SEQ ID NO: 79448 - RNA, 12 nt, Artificial Sequence
  Description of Artificial Sequence: Synthetic oligonucleotide
cuacaucacgcc

SEQ ID NO: 79449 - RNA, 12 nt, Artificial Sequence
  Description of Artificial Sequence: Synthetic oligonucleotide
acuggauuuaag

SEQ ID NO: 79450 - RNA, 12 nt, Artificial Sequence
  Description of Artificial Sequence: Synthetic oligonucleotide
cuggauuuaagc

SEQ ID NO: 79451 - RNA, 13 nt, Artificial Sequence
  Description of Artificial Sequence: Synthetic oligonucleotide
gauuuaagcagag

SEQ ID NO: 79452 - RNA, 13 nt, Artificial Sequence
  Description of Artificial Sequence: Synthetic oligonucleotide
auuuaagcagagu

SEQ ID NO: 79453 - RNA, 13 nt, Artificial Sequence
  Description of Artificial Sequence: Synthetic oligonucleotide
uuaagcagaguuc

SEQ ID NO: 79454 - RNA, 13 nt, Artificial Sequence
  Description of Artificial Sequence: Synthetic oligonucleotide
uaagcagaguuca

SEQ ID NO: 79455 - RNA, 14 nt, Artificial Sequence
  Description of Artificial Sequence: Synthetic oligonucleotide
agcagaguucaaaa

SEQ ID NO: 79456 - RNA, 12 nt, Artificial Sequence
  Description of Artificial Sequence: Synthetic oligonucleotide
cucagggucuga

SEQ ID NO: 79457 - RNA, 13 nt, Artificial Sequence
  Description of Artificial Sequence: Synthetic oligonucleotide
caagcaacuacau

SEQ ID NO: 79458 - RNA, 12 nt, Artificial Sequence
  Description of Artificial Sequence: Synthetic oligonucleotide
aucaauggcagc

SEQ ID NO: 79459 - RNA, 11 nt, Artificial Sequence
  Description of Artificial Sequence: Synthetic oligonucleotide
uuccagcccac

SEQ ID NO: 79460 - RNA, 12 nt, Artificial Sequence
  Description of Artificial Sequence: Synthetic oligonucleotide
cagcugagaaug

SEQ ID NO: 79461 - RNA, 13 nt, Artificial Sequence
  Description of Artificial Sequence: Synthetic oligonucleotide
aacguaucuccua

SEQ ID NO: 79462 - RNA, 14 nt, Artificial Sequence
  Description of Artificial Sequence: Synthetic oligonucleotide
ccuaaaauaauuuc

SEQ ID NO: 79463 - RNA, 13 nt, Artificial Sequence
  Description of Artificial Sequence: Synthetic oligonucleotide
uggaagauucagc

SEQ ID NO: 79464 - RNA, 12 nt, Artificial Sequence
  Description of Artificial Sequence: Synthetic oligonucleotide
uuaaacucuccu

SEQ ID NO: 79465 - RNA, 12 nt, Artificial Sequence
  Description of Artificial Sequence: Synthetic oligonucleotide
cagccuacaguu

SEQ ID NO: 79466 - RNA, 13 nt, Artificial Sequence
  Description of Artificial Sequence: Synthetic oligonucleotide
guuauguucaguc

SEQ ID NO: 79467 - RNA, 13 nt, Artificial Sequence
  Description of Artificial Sequence: Synthetic oligonucleotide
cacauacaaaaug

SEQ ID NO: 79468 - RNA, 9 nt, Artificial Sequence
  Description of Artificial Sequence: Synthetic oligonucleotide
uccuuuugc

SEQ ID NO: 79469 - RNA, 12 nt, Artificial Sequence
  Description of Artificial Sequence: Synthetic oligonucleotide
ugaccugugaag

SEQ ID NO: 79470 - RNA, 12 nt, Artificial Sequence
  Description of Artificial Sequence: Synthetic oligonucleotide
cuaucucacaca

SEQ ID NO: 79471 - RNA, 13 nt, Artificial Sequence
  Description of Artificial Sequence: Synthetic oligonucleotide
uguccucaauugu

SEQ ID NO: 79472 - RNA, 12 nt, Artificial Sequence
  Description of Artificial Sequence: Synthetic oligonucleotide
aaaccguagcug

SEQ ID NO: 79473 - RNA, 12 nt, Artificial Sequence
  Description of Artificial Sequence: Synthetic oligonucleotide
uagcuggcaagc

SEQ ID NO: 79474 - RNA, 14 nt, Artificial Sequence
  Description of Artificial Sequence: Synthetic oligonucleotide
uuguaugguuaaaa

SEQ ID NO: 79475 - RNA, 14 nt, Artificial Sequence
  Description of Artificial Sequence: Synthetic oligonucleotide
ugguuaaaagaugg

SEQ ID NO: 79476 - RNA, 13 nt, Artificial Sequence
  Description of Artificial Sequence: Synthetic oligonucleotide
cagggaauuauac

SEQ ID NO: 79477 - RNA, 12 nt, Artificial Sequence
  Description of Artificial Sequence: Synthetic oligonucleotide
acaaucuugcug

SEQ ID NO: 79478 - RNA, 13 nt, Artificial Sequence
  Description of Artificial Sequence: Synthetic oligonucleotide
ccaauaaugaaga

SEQ ID NO: 79479 - RNA, 13 nt, Artificial Sequence
  Description of Artificial Sequence: Synthetic oligonucleotide
acuuuggauguuc

SEQ ID NO: 79480 - RNA, 12 nt, Artificial Sequence
  Description of Artificial Sequence: Synthetic oligonucleotide
aaugcuuccacu

SEQ ID NO: 79481 - RNA, 11 nt, Artificial Sequence
  Description of Artificial Sequence: Synthetic oligonucleotide
gagaaaguuug

SEQ ID NO: 79482 - RNA, 11 nt, Artificial Sequence
  Description of Artificial Sequence: Synthetic oligonucleotide
aaagaacuacu

SEQ ID NO: 79483 - RNA, 12 nt, Artificial Sequence
  Description of Artificial Sequence: Synthetic oligonucleotide
uuagaaauacgg

SEQ ID NO: 79484 - RNA, 12 nt, Artificial Sequence
  Description of Artificial Sequence: Synthetic oligonucleotide
aacauggguaca

SEQ ID NO: 79485 - RNA, 14 nt, Artificial Sequence
  Description of Artificial Sequence: Synthetic oligonucleotide
aaagacacagaaga

SEQ ID NO: 79486 - RNA, 11 nt, Artificial Sequence
  Description of Artificial Sequence: Synthetic oligonucleotide
uaguagggagg

SEQ ID NO: 79487 - RNA, 12 nt, Artificial Sequence
  Description of Artificial Sequence: Synthetic oligonucleotide
gccuucugcagc

SEQ ID NO: 79488 - RNA, 10 nt, Artificial Sequence
  Description of Artificial Sequence: Synthetic oligonucleotide
ggucugguac

SEQ ID NO: 79489 - RNA, 12 nt, Artificial Sequence
  Description of Artificial Sequence: Synthetic oligonucleotide
cuaguccuuccg

SEQ ID NO: 79490 - RNA, 12 nt, Artificial Sequence
  Description of Artificial Sequence: Synthetic oligonucleotide
ccagugaauauu

SEQ ID NO: 79491 - RNA, 13 nt, Artificial Sequence
  Description of Artificial Sequence: Synthetic oligonucleotide
augaauucaaguu

SEQ ID NO: 79492 - RNA, 12 nt, Artificial Sequence
  Description of Artificial Sequence: Synthetic oligonucleotide
caggacacagau

SEQ ID NO: 79493 - RNA, 12 nt, Artificial Sequence
  Description of Artificial Sequence: Synthetic oligonucleotide
cucaaagcacag

SEQ ID NO: 79494 - RNA, 10 nt, Artificial Sequence
  Description of Artificial Sequence: Synthetic oligonucleotide
accacugcca

SEQ ID NO: 79495 - RNA, 13 nt, Artificial Sequence
  Description of Artificial Sequence: Synthetic oligonucleotide
gaaacuacuagug

SEQ ID NO: 79496 - RNA, 12 nt, Artificial Sequence
  Description of Artificial Sequence: Synthetic oligonucleotide
aagucggacagc

SEQ ID NO: 79497 - RNA, 13 nt, Artificial Sequence
  Description of Artificial Sequence: Synthetic oligonucleotide
gaaagcgaaaaau

SEQ ID NO: 79498 - RNA, 13 nt, Artificial Sequence
  Description of Artificial Sequence: Synthetic oligonucleotide
cccucugauuuag

SEQ ID NO: 79499 - RNA, 12 nt, Artificial Sequence
  Description of Artificial Sequence: Synthetic oligonucleotide
ugagcuauuuaa

SEQ ID NO: 79500 - RNA, 13 nt, Artificial Sequence
  Description of Artificial Sequence: Synthetic oligonucleotide
aaaaggugaaaaa

SEQ ID NO: 79501 - RNA, 14 nt, Artificial Sequence
  Description of Artificial Sequence: Synthetic oligonucleotide
gaaaaagcacuauu

SEQ ID NO: 79502 - RNA, 12 nt, Artificial Sequence
  Description of Artificial Sequence: Synthetic oligonucleotide
ggcugaaaagaa

SEQ ID NO: 79503 - RNA, 12 nt, Artificial Sequence
  Description of Artificial Sequence: Synthetic oligonucleotide
uaaacccuuaua

SEQ ID NO: 79504 - RNA, 13 nt, Artificial Sequence
  Description of Artificial Sequence: Synthetic oligonucleotide
cauacuauuagcc

SEQ ID NO: 79505 - RNA, 12 nt, Artificial Sequence
  Description of Artificial Sequence: Synthetic oligonucleotide
gacagaagcauu

SEQ ID NO: 79506 - RNA, 14 nt, Artificial Sequence
  Description of Artificial Sequence: Synthetic oligonucleotide
agagcaaauaagau

SEQ ID NO: 79507 - RNA, 14 nt, Artificial Sequence
  Description of Artificial Sequence: Synthetic oligonucleotide
ccaacauuuuucuc

SEQ ID NO: 79508 - RNA, 15 nt, Artificial Sequence
  Description of Artificial Sequence: Synthetic oligonucleotide
uuaaguaugagaaaa

SEQ ID NO: 79509 - RNA, 14 nt, Artificial Sequence
  Description of Artificial Sequence: Synthetic oligonucleotide
caggaauaaagaug

SEQ ID NO: 79510 - RNA, 13 nt, Artificial Sequence
  Description of Artificial Sequence: Synthetic oligonucleotide
aauuugaaugacc

SEQ ID NO: 79511 - RNA, 14 nt, Artificial Sequence
  Description of Artificial Sequence: Synthetic oligonucleotide
auguauaaagauag

SEQ ID NO: 79512 - RNA, 12 nt, Artificial Sequence
  Description of Artificial Sequence: Synthetic oligonucleotide
ggcuguaacuau

SEQ ID NO: 79513 - RNA, 11 nt, Artificial Sequence
  Description of Artificial Sequence: Synthetic oligonucleotide
ucugugaagug

SEQ ID NO: 79514 - RNA, 14 nt, Artificial Sequence
  Description of Artificial Sequence: Synthetic oligonucleotide
ccuuuaaggaaaug

SEQ ID NO: 79515 - RNA, 13 nt, Artificial Sequence
  Description of Artificial Sequence: Synthetic oligonucleotide
aaggauacaaaaa

SEQ ID NO: 79516 - RNA, 12 nt, Artificial Sequence
  Description of Artificial Sequence: Synthetic oligonucleotide
agaugcaauuug

SEQ ID NO: 79517 - RNA, 12 nt, Artificial Sequence
  Description of Artificial Sequence: Synthetic oligonucleotide
guucaaaacgaa

SEQ ID NO: 79518 - RNA, 11 nt, Artificial Sequence
  Description of Artificial Sequence: Synthetic oligonucleotide
gugaaaccuca

SEQ ID NO: 79519 - RNA, 13 nt, Artificial Sequence
  Description of Artificial Sequence: Synthetic oligonucleotide
acgaaagagaagc

SEQ ID NO: 79520 - RNA, 12 nt, Artificial Sequence
  Description of Artificial Sequence: Synthetic oligonucleotide
cuccacaagcgc

SEQ ID NO: 79521 - RNA, 14 nt, Artificial Sequence
  Description of Artificial Sequence: Synthetic oligonucleotide
gagaagauuccaaa

SEQ ID NO: 79522 - RNA, 13 nt, Artificial Sequence
  Description of Artificial Sequence: Synthetic oligonucleotide
aaucuggauucaa

SEQ ID NO: 79523 - RNA, 13 nt, Artificial Sequence
  Description of Artificial Sequence: Synthetic oligonucleotide
agaacagauuuga

SEQ ID NO: 79524 - RNA, 11 nt, Artificial Sequence
  Description of Artificial Sequence: Synthetic oligonucleotide
ccagagcugug

SEQ ID NO: 79525 - RNA, 12 nt, Artificial Sequence
  Description of Artificial Sequence: Synthetic oligonucleotide
ccucagauuguu

SEQ ID NO: 79526 - RNA, 12 nt, Artificial Sequence
  Description of Artificial Sequence: Synthetic oligonucleotide
cuauuuuaauua

SEQ ID NO: 79527 - RNA, 13 nt, Artificial Sequence
  Description of Artificial Sequence: Synthetic oligonucleotide
uuuaauuuauuaa

SEQ ID NO: 79528 - RNA, 12 nt, Artificial Sequence
  Description of Artificial Sequence: Synthetic oligonucleotide
augcaguuugaa

SEQ ID NO: 79529 - RNA, 11 nt, Artificial Sequence
  Description of Artificial Sequence: Synthetic oligonucleotide
caugcugcugg

SEQ ID NO: 79530 - RNA, 13 nt, Artificial Sequence
  Description of Artificial Sequence: Synthetic oligonucleotide
agaugugcauuuc

SEQ ID NO: 79531 - RNA, 12 nt, Artificial Sequence
  Description of Artificial Sequence: Synthetic oligonucleotide
ucaaaaccugug

SEQ ID NO: 79532 - RNA, 11 nt, Artificial Sequence
  Description of Artificial Sequence: Synthetic oligonucleotide
gaaugugggua

SEQ ID NO: 79533 - RNA, 10 nt, Artificial Sequence
  Description of Artificial Sequence: Synthetic oligonucleotide
auguggguag

SEQ ID NO: 79534 - RNA, 13 nt, Artificial Sequence
  Description of Artificial Sequence: Synthetic oligonucleotide
ugaaaaugagcau

SEQ ID NO: 79535 - RNA, 13 nt, Artificial Sequence
  Description of Artificial Sequence: Synthetic oligonucleotide
uugcuuuucaugu

SEQ ID NO: 79536 - RNA, 12 nt, Artificial Sequence
  Description of Artificial Sequence: Synthetic oligonucleotide
uguauuucuaua

SEQ ID NO: 79537 - RNA, 13 nt, Artificial Sequence
  Description of Artificial Sequence: Synthetic oligonucleotide
uuugauuaauguu

SEQ ID NO: 79538 - RNA, 12 nt, Artificial Sequence
  Description of Artificial Sequence: Synthetic oligonucleotide
caacguguauag

SEQ ID NO: 79539 - RNA, 12 nt, Artificial Sequence
  Description of Artificial Sequence: Synthetic oligonucleotide
cauauccuuggc

SEQ ID NO: 79540 - RNA, 13 nt, Artificial Sequence
  Description of Artificial Sequence: Synthetic oligonucleotide
uacuaacaucugg

SEQ ID NO: 79541 - RNA, 11 nt, Artificial Sequence
  Description of Artificial Sequence: Synthetic oligonucleotide
cauaaguugug

SEQ ID NO: 79542 - RNA, 12 nt, Artificial Sequence
  Description of Artificial Sequence: Synthetic oligonucleotide
gcaucauuuugg

SEQ ID NO: 79543 - RNA, 10 nt, Artificial Sequence
  Description of Artificial Sequence: Synthetic oligonucleotide
gcucuucuua

SEQ ID NO: 79544 - RNA, 10 nt, Artificial Sequence
  Description of Artificial Sequence: Synthetic oligonucleotide
agauuagguc

SEQ ID NO: 79545 - RNA, 12 nt, Artificial Sequence
  Description of Artificial Sequence: Synthetic oligonucleotide
auggaauugaaa

SEQ ID NO: 79546 - RNA, 13 nt, Artificial Sequence
  Description of Artificial Sequence: Synthetic oligonucleotide
cacacucauuccu

SEQ ID NO: 79547 - RNA, 12 nt, Artificial Sequence
  Description of Artificial Sequence: Synthetic oligonucleotide
uguagagguaac

SEQ ID NO: 79548 - RNA, 11 nt, Artificial Sequence
  Description of Artificial Sequence: Synthetic oligonucleotide
caaccacaugc

SEQ ID NO: 79549 - RNA, 12 nt, Artificial Sequence
  Description of Artificial Sequence: Synthetic oligonucleotide
ucggaaacaagu

SEQ ID NO: 79550 - RNA, 11 nt, Artificial Sequence
  Description of Artificial Sequence: Synthetic oligonucleotide
acucccaauaa

SEQ ID NO: 79551 - RNA, 13 nt, Artificial Sequence
  Description of Artificial Sequence: Synthetic oligonucleotide
aaugcuaagaaau

SEQ ID NO: 79552 - RNA, 11 nt, Artificial Sequence
  Description of Artificial Sequence: Synthetic oligonucleotide
gucuuucucua

SEQ ID NO: 79553 - RNA, 11 nt, Artificial Sequence
  Description of Artificial Sequence: Synthetic oligonucleotide
ugaauuucagg

SEQ ID NO: 79554 - RNA, 13 nt, Artificial Sequence
  Description of Artificial Sequence: Synthetic oligonucleotide
cgauucccucuca

SEQ ID NO: 79555 - RNA, 11 nt, Artificial Sequence
  Description of Artificial Sequence: Synthetic oligonucleotide
aggaaagugaa

SEQ ID NO: 79556 - RNA, 12 nt, Artificial Sequence
  Description of Artificial Sequence: Synthetic oligonucleotide
gaggcugcaugc

SEQ ID NO: 79557 - RNA, 11 nt, Artificial Sequence
  Description of Artificial Sequence: Synthetic oligonucleotide
ucucugaacag

SEQ ID NO: 79558 - RNA, 12 nt, Artificial Sequence
  Description of Artificial Sequence: Synthetic oligonucleotide
aacuuggcugua

SEQ ID NO: 79559 - RNA, 12 nt, Artificial Sequence
  Description of Artificial Sequence: Synthetic oligonucleotide
agaagccaaaau

SEQ ID NO: 79560 - RNA, 14 nt, Artificial Sequence
  Description of Artificial Sequence: Synthetic oligonucleotide
auuaaaagaagucc

SEQ ID NO: 79561 - RNA, 14 nt, Artificial Sequence
  Description of Artificial Sequence: Synthetic oligonucleotide
gaauccggauuauc

SEQ ID NO: 79562 - RNA, 12 nt, Artificial Sequence
  Description of Artificial Sequence: Synthetic oligonucleotide
aaugugacauca

SEQ ID NO: 79563 - RNA, 13 nt, Artificial Sequence
  Description of Artificial Sequence: Synthetic oligonucleotide
caucaaagcaagu

SEQ ID NO: 79564 - RNA, 11 nt, Artificial Sequence
  Description of Artificial Sequence: Synthetic oligonucleotide
agagagagaaa

SEQ ID NO: 79565 - RNA, 13 nt, Artificial Sequence
  Description of Artificial Sequence: Synthetic oligonucleotide
ucgcuguaguauu

SEQ ID NO: 79566 - RNA, 14 nt, Artificial Sequence
  Description of Artificial Sequence: Synthetic oligonucleotide
cgcuguaguauuua

SEQ ID NO: 79567 - RNA, 13 nt, Artificial Sequence
  Description of Artificial Sequence: Synthetic oligonucleotide
auuuaagcccaua

SEQ ID NO: 79568 - RNA, 15 nt, Artificial Sequence
  Description of Artificial Sequence: Synthetic oligonucleotide
auuaaaauaaacaug

SEQ ID NO: 79569 - RNA, 12 nt, Artificial Sequence
  Description of Artificial Sequence: Synthetic oligonucleotide
cuguucugaucg

SEQ ID NO: 79570 - RNA, 16 nt, Artificial Sequence
  Description of Artificial Sequence: Synthetic oligonucleotide
aaauaauuugaacuuu

SEQ ID NO: 79571 - RNA, 12 nt, Artificial Sequence
  Description of Artificial Sequence: Synthetic oligonucleotide
ugcgaccuuaau

SEQ ID NO: 79572 - RNA, 11 nt, Artificial Sequence
  Description of Artificial Sequence: Synthetic oligonucleotide
cugagaaagcu

SEQ ID NO: 79573 - RNA, 13 nt, Artificial Sequence
  Description of Artificial Sequence: Synthetic oligonucleotide
aguaaagaugcua

SEQ ID NO: 79574 - RNA, 12 nt, Artificial Sequence
  Description of Artificial Sequence: Synthetic oligonucleotide
cugcuuaauugc

SEQ ID NO: 79575 - RNA, 14 nt, Artificial Sequence
  Description of Artificial Sequence: Synthetic oligonucleotide
uaccauaugaauga

SEQ ID NO: 79576 - RNA, 12 nt, Artificial Sequence
  Description of Artificial Sequence: Synthetic oligonucleotide
aacuuucuuauc

SEQ ID NO: 79577 - RNA, 13 nt, Artificial Sequence
  Description of Artificial Sequence: Synthetic oligonucleotide
ccuugcaugacau

SEQ ID NO: 79578 - RNA, 14 nt, Artificial Sequence
  Description of Artificial Sequence: Synthetic oligonucleotide
ugaauuuguauaug

SEQ ID NO: 79579 - RNA, 12 nt, Artificial Sequence
  Description of Artificial Sequence: Synthetic oligonucleotide
gaauccuaguag

SEQ ID NO: 79580 - RNA, 10 nt, Artificial Sequence
  Description of Artificial Sequence: Synthetic oligonucleotide
gaaagggaag

SEQ ID NO: 79581 - RNA, 11 nt, Artificial Sequence
  Description of Artificial Sequence: Synthetic oligonucleotide
uaucggcaugc

SEQ ID NO: 79582 - RNA, 12 nt, Artificial Sequence
  Description of Artificial Sequence: Synthetic oligonucleotide
caccucauagua

SEQ ID NO: 79583 - RNA, 11 nt, Artificial Sequence
  Description of Artificial Sequence: Synthetic oligonucleotide
ccagaauugcc

SEQ ID NO: 79584 - RNA, 11 nt, Artificial Sequence
  Description of Artificial Sequence: Synthetic oligonucleotide
uggugaucugg

SEQ ID NO: 79585 - RNA, 12 nt, Artificial Sequence
  Description of Artificial Sequence: Synthetic oligonucleotide
gaucuggguaau

SEQ ID NO: 79586 - RNA, 12 nt, Artificial Sequence
  Description of Artificial Sequence: Synthetic oligonucleotide
ggaugugaugaa

SEQ ID NO: 79587 - RNA, 12 nt, Artificial Sequence
  Description of Artificial Sequence: Synthetic oligonucleotide
cauuuccacagc

SEQ ID NO: 79588 - RNA, 11 nt, Artificial Sequence
  Description of Artificial Sequence: Synthetic oligonucleotide
acagcuacacc

SEQ ID NO: 79589 - RNA, 12 nt, Artificial Sequence
  Description of Artificial Sequence: Synthetic oligonucleotide
ugcaguucuuac

SEQ ID NO: 79590 - RNA, 12 nt, Artificial Sequence
  Description of Artificial Sequence: Synthetic oligonucleotide
acgagaagaaga

SEQ ID NO: 79591 - RNA, 12 nt, Artificial Sequence
  Description of Artificial Sequence: Synthetic oligonucleotide
cgagaagaagau

SEQ ID NO: 79592 - RNA, 15 nt, Artificial Sequence
  Description of Artificial Sequence: Synthetic oligonucleotide
aagaagaucauuuac

SEQ ID NO: 79593 - RNA, 11 nt, Artificial Sequence
  Description of Artificial Sequence: Synthetic oligonucleotide
agaggaagagg

SEQ ID NO: 79594 - RNA, 12 nt, Artificial Sequence
  Description of Artificial Sequence: Synthetic oligonucleotide
gaggaagaggug

SEQ ID NO: 79595 - RNA, 13 nt, Artificial Sequence
  Description of Artificial Sequence: Synthetic oligonucleotide
cuacuuugagggc

SEQ ID NO: 79596 - RNA, 12 nt, Artificial Sequence
  Description of Artificial Sequence: Synthetic oligonucleotide
agggcaucuccu

SEQ ID NO: 79597 - RNA, 10 nt, Artificial Sequence
  Description of Artificial Sequence: Synthetic oligonucleotide
ggagugauau

SEQ ID NO: 79598 - RNA, 11 nt, Artificial Sequence
  Description of Artificial Sequence: Synthetic oligonucleotide
gagugauaugg

SEQ ID NO: 79599 - RNA, 12 nt, Artificial Sequence
  Description of Artificial Sequence: Synthetic oligonucleotide
ugcaguaaagau

SEQ ID NO: 79600 - RNA, 13 nt, Artificial Sequence
  Description of Artificial Sequence: Synthetic oligonucleotide
aguaaagauccua

SEQ ID NO: 79601 - RNA, 12 nt, Artificial Sequence
  Description of Artificial Sequence: Synthetic oligonucleotide
ugacaaaggaca

SEQ ID NO: 79602 - RNA, 13 nt, Artificial Sequence
  Description of Artificial Sequence: Synthetic oligonucleotide
gcaauugugaccc

SEQ ID NO: 79603 - RNA, 12 nt, Artificial Sequence
  Description of Artificial Sequence: Synthetic oligonucleotide
aacaucauccau

SEQ ID NO: 79604 - RNA, 12 nt, Artificial Sequence
  Description of Artificial Sequence: Synthetic oligonucleotide
ugaaauccaaca

SEQ ID NO: 79605 - RNA, 15 nt, Artificial Sequence
  Description of Artificial Sequence: Synthetic oligonucleotide
aacaauauauuucuc

SEQ ID NO: 79606 - RNA, 14 nt, Artificial Sequence
  Description of Artificial Sequence: Synthetic oligonucleotide
aacaguaaagucac

SEQ ID NO: 79607 - RNA, 14 nt, Artificial Sequence
  Description of Artificial Sequence: Synthetic oligonucleotide
ugugaagaaaguaa

SEQ ID NO: 79608 - RNA, 13 nt, Artificial Sequence
  Description of Artificial Sequence: Synthetic oligonucleotide
cuuccgagccauc

SEQ ID NO: 79609 - RNA, 12 nt, Artificial Sequence
  Description of Artificial Sequence: Synthetic oligonucleotide
aauggagguuga

SEQ ID NO: 79610 - RNA, 12 nt, Artificial Sequence
  Description of Artificial Sequence: Synthetic oligonucleotide
ggagguugaaua

SEQ ID NO: 79611 - RNA, 13 nt, Artificial Sequence
  Description of Artificial Sequence: Synthetic oligonucleotide
auuuugaguuuuc

SEQ ID NO: 79612 - RNA, 12 nt, Artificial Sequence
  Description of Artificial Sequence: Synthetic oligonucleotide
uauccuguuugu

SEQ ID NO: 79613 - RNA, 11 nt, Artificial Sequence
  Description of Artificial Sequence: Synthetic oligonucleotide
ccuguuuguuc

SEQ ID NO: 79614 - RNA, 10 nt, Artificial Sequence
  Description of Artificial Sequence: Synthetic oligonucleotide
cucuacagcc

SEQ ID NO: 79615 - RNA, 12 nt, Artificial Sequence
  Description of Artificial Sequence: Synthetic oligonucleotide
ucuuccauagcu

SEQ ID NO: 79616 - RNA, 12 nt, Artificial Sequence
  Description of Artificial Sequence: Synthetic oligonucleotide
auaaucuuccug

SEQ ID NO: 79617 - RNA, 12 nt, Artificial Sequence
  Description of Artificial Sequence: Synthetic oligonucleotide
uaaucuuccugu

SEQ ID NO: 79618 - RNA, 12 nt, Artificial Sequence
  Description of Artificial Sequence: Synthetic oligonucleotide
cuucaugacuug

SEQ ID NO: 79619 - RNA, 12 nt, Artificial Sequence
  Description of Artificial Sequence: Synthetic oligonucleotide
aagagggagaga

SEQ ID NO: 79620 - RNA, 12 nt, Artificial Sequence
  Description of Artificial Sequence: Synthetic oligonucleotide
cgucuccuacca

SEQ ID NO: 79621 - RNA, 12 nt, Artificial Sequence
  Description of Artificial Sequence: Synthetic oligonucleotide
gaucaaucggcc

SEQ ID NO: 79622 - RNA, 12 nt, Artificial Sequence
  Description of Artificial Sequence: Synthetic oligonucleotide
ggacgaacaucc

SEQ ID NO: 79623 - RNA, 11 nt, Artificial Sequence
  Description of Artificial Sequence: Synthetic oligonucleotide
agggucggaac

SEQ ID NO: 79624 - RNA, 10 nt, Artificial Sequence
  Description of Artificial Sequence: Synthetic oligonucleotide
ucggaaccca

SEQ ID NO: 79625 - RNA, 11 nt, Artificial Sequence
  Description of Artificial Sequence: Synthetic oligonucleotide
acccaagcuua

SEQ ID NO: 79626 - RNA, 14 nt, Artificial Sequence
  Description of Artificial Sequence: Synthetic oligonucleotide
gaacuuuaagcaac

SEQ ID NO: 79627 - RNA, 11 nt, Artificial Sequence
  Description of Artificial Sequence: Synthetic oligonucleotide
acuauucagug

SEQ ID NO: 79628 - RNA, 11 nt, Artificial Sequence
  Description of Artificial Sequence: Synthetic oligonucleotide
cuauucagugg

SEQ ID NO: 79629 - RNA, 13 nt, Artificial Sequence
  Description of Artificial Sequence: Synthetic oligonucleotide
aaacacagauaac

SEQ ID NO: 79630 - RNA, 12 nt, Artificial Sequence
  Description of Artificial Sequence: Synthetic oligonucleotide
cuuaagaaaaga

SEQ ID NO: 79631 - RNA, 12 nt, Artificial Sequence
  Description of Artificial Sequence: Synthetic oligonucleotide
cugaaggagugu

SEQ ID NO: 79632 - RNA, 10 nt, Artificial Sequence
  Description of Artificial Sequence: Synthetic oligonucleotide
ucaccgcggg

SEQ ID NO: 79633 - RNA, 14 nt, Artificial Sequence
  Description of Artificial Sequence: Synthetic oligonucleotide
agcagaaauaagcg

SEQ ID NO: 79634 - RNA, 12 nt, Artificial Sequence
  Description of Artificial Sequence: Synthetic oligonucleotide
aagcgugccguu

SEQ ID NO: 79635 - RNA, 12 nt, Artificial Sequence
  Description of Artificial Sequence: Synthetic oligonucleotide
agaaacagucac

SEQ ID NO: 79636 - RNA, 12 nt, Artificial Sequence
  Description of Artificial Sequence: Synthetic oligonucleotide
agaggaagaagg

SEQ ID NO: 79637 - RNA, 14 nt, Artificial Sequence
  Description of Artificial Sequence: Synthetic oligonucleotide
uguauucaaaauau

SEQ ID NO: 79638 - RNA, 13 nt, Artificial Sequence
  Description of Artificial Sequence: Synthetic oligonucleotide
auuuuccucccuu

SEQ ID NO: 79639 - RNA, 13 nt, Artificial Sequence
  Description of Artificial Sequence: Synthetic oligonucleotide
caaagaaagauag

SEQ ID NO: 79640 - RNA, 12 nt, Artificial Sequence
  Description of Artificial Sequence: Synthetic oligonucleotide
aagaaagauaga

SEQ ID NO: 79641 - RNA, 13 nt, Artificial Sequence
  Description of Artificial Sequence: Synthetic oligonucleotide
gaaagcauuuguu

SEQ ID NO: 79642 - RNA, 13 nt, Artificial Sequence
  Description of Artificial Sequence: Synthetic oligonucleotide
ugaguuaaacgaa

SEQ ID NO: 79643 - RNA, 12 nt, Artificial Sequence
  Description of Artificial Sequence: Synthetic oligonucleotide
acugauacagaa

SEQ ID NO: 79644 - RNA, 12 nt, Artificial Sequence
  Description of Artificial Sequence: Synthetic oligonucleotide
auauuauauaua

SEQ ID NO: 79645 - RNA, 12 nt, Artificial Sequence
  Description of Artificial Sequence: Synthetic oligonucleotide
auuauauauaua

SEQ ID NO: 79646 - RNA, 12 nt, Artificial Sequence
  Description of Artificial Sequence: Synthetic oligonucleotide
ucacuggaugua

SEQ ID NO: 79647 - RNA, 12 nt, Artificial Sequence
  Description of Artificial Sequence: Synthetic oligonucleotide
cagggaagagga

SEQ ID NO: 79648 - RNA, 15 nt, Artificial Sequence
  Description of Artificial Sequence: Synthetic oligonucleotide
augaucuuuuuuuug

SEQ ID NO: 79649 - RNA, 11 nt, Artificial Sequence
  Description of Artificial Sequence: Synthetic oligonucleotide
aguucacggcc

SEQ ID NO: 79650 - RNA, 13 nt, Artificial Sequence
  Description of Artificial Sequence: Synthetic oligonucleotide
caccaucacacca

SEQ ID NO: 79651 - RNA, 11 nt, Artificial Sequence
  Description of Artificial Sequence: Synthetic oligonucleotide
ccugcggguuu

SEQ ID NO: 79652 - RNA, 10 nt, Artificial Sequence
  Description of Artificial Sequence: Synthetic oligonucleotide
auccaguuug

SEQ ID NO: 79653 - RNA, 13 nt, Artificial Sequence
  Description of Artificial Sequence: Synthetic oligonucleotide
guuaaggacuucu

SEQ ID NO: 79654 - RNA, 13 nt, Artificial Sequence
  Description of Artificial Sequence: Synthetic oligonucleotide
cagugggacagag

SEQ ID NO: 79655 - RNA, 14 nt, Artificial Sequence
  Description of Artificial Sequence: Synthetic oligonucleotide
aauuuguuauugug

SEQ ID NO: 79656 - RNA, 13 nt, Artificial Sequence
  Description of Artificial Sequence: Synthetic oligonucleotide
uucaaaugcauuu

SEQ ID NO: 79657 - RNA, 10 nt, Artificial Sequence
  Description of Artificial Sequence: Synthetic oligonucleotide
caggaaagcc

SEQ ID NO: 79658 - RNA, 11 nt, Artificial Sequence
  Description of Artificial Sequence: Synthetic oligonucleotide
aggaaagcccu

SEQ ID NO: 79659 - RNA, 12 nt, Artificial Sequence
  Description of Artificial Sequence: Synthetic oligonucleotide
cccagcauggcc

SEQ ID NO: 79660 - RNA, 11 nt, Artificial Sequence
  Description of Artificial Sequence: Synthetic oligonucleotide
cuucucccuga

SEQ ID NO: 79661 - RNA, 12 nt, Artificial Sequence
  Description of Artificial Sequence: Synthetic oligonucleotide
gaagaagcccuu

SEQ ID NO: 79662 - RNA, 12 nt, Artificial Sequence
  Description of Artificial Sequence: Synthetic oligonucleotide
agaagcccuuca

SEQ ID NO: 79663 - RNA, 11 nt, Artificial Sequence
  Description of Artificial Sequence: Synthetic oligonucleotide
gcccuucagcg

SEQ ID NO: 79664 - RNA, 11 nt, Artificial Sequence
  Description of Artificial Sequence: Synthetic oligonucleotide
ccuucagcggc

SEQ ID NO: 79665 - RNA, 12 nt, Artificial Sequence
  Description of Artificial Sequence: Synthetic oligonucleotide
ucagcggccagu

SEQ ID NO: 79666 - RNA, 12 nt, Artificial Sequence
  Description of Artificial Sequence: Synthetic oligonucleotide
ugaaaagcuccg

SEQ ID NO: 79667 - RNA, 11 nt, Artificial Sequence
  Description of Artificial Sequence: Synthetic oligonucleotide
aaaagcuccgg

SEQ ID NO: 79668 - RNA, 13 nt, Artificial Sequence
  Description of Artificial Sequence: Synthetic oligonucleotide
agucaacagucug

SEQ ID NO: 79669 - RNA, 13 nt, Artificial Sequence
  Description of Artificial Sequence: Synthetic oligonucleotide
cagaguucaaaag

SEQ ID NO: 79670 - RNA, 13 nt, Artificial Sequence
  Description of Artificial Sequence: Synthetic oligonucleotide
agaguucaaaagc

SEQ ID NO: 79671 - RNA, 12 nt, Artificial Sequence
  Description of Artificial Sequence: Synthetic oligonucleotide
uucaaaagcccu

SEQ ID NO: 79672 - RNA, 12 nt, Artificial Sequence
  Description of Artificial Sequence: Synthetic oligonucleotide
ucaaaagcccuu

SEQ ID NO: 79673 - RNA, 12 nt, Artificial Sequence
  Description of Artificial Sequence: Synthetic oligonucleotide
aaaagcccuuca

SEQ ID NO: 79674 - RNA, 12 nt, Artificial Sequence
  Description of Artificial Sequence: Synthetic oligonucleotide
aaagcccuucag

SEQ ID NO: 79675 - RNA, 13 nt, Artificial Sequence
  Description of Artificial Sequence: Synthetic oligonucleotide
gugaagccgcucg

SEQ ID NO: 79676 - RNA, 12 nt, Artificial Sequence
  Description of Artificial Sequence: Synthetic oligonucleotide
cacgccagucaa

SEQ ID NO: 79677 - RNA, 13 nt, Artificial Sequence
  Description of Artificial Sequence: Synthetic oligonucleotide
uucuuggugcgug

SEQ ID NO: 79678 - RNA, 14 nt, Artificial Sequence
  Description of Artificial Sequence: Synthetic oligonucleotide
auuggauucaucag

SEQ ID NO: 79679 - RNA, 13 nt, Artificial Sequence
  Description of Artificial Sequence: Synthetic oligonucleotide
uggaauaccuaag

SEQ ID NO: 79680 - RNA, 12 nt, Artificial Sequence
  Description of Artificial Sequence: Synthetic oligonucleotide
auuugaggcuca

SEQ ID NO: 79681 - RNA, 11 nt, Artificial Sequence
  Description of Artificial Sequence: Synthetic oligonucleotide
ucuacaauugg

SEQ ID NO: 79682 - RNA, 12 nt, Artificial Sequence
  Description of Artificial Sequence: Synthetic oligonucleotide
uaguuaggagcc

SEQ ID NO: 79683 - RNA, 13 nt, Artificial Sequence
  Description of Artificial Sequence: Synthetic oligonucleotide
agucaauauccac

SEQ ID NO: 79684 - RNA, 13 nt, Artificial Sequence
  Description of Artificial Sequence: Synthetic oligonucleotide
auguucagucaca

SEQ ID NO: 79685 - RNA, 12 nt, Artificial Sequence
  Description of Artificial Sequence: Synthetic oligonucleotide
acacacacauac

SEQ ID NO: 79686 - RNA, 12 nt, Artificial Sequence
  Description of Artificial Sequence: Synthetic oligonucleotide
uuccuuuugcuu

SEQ ID NO: 79687 - RNA, 16 nt, Artificial Sequence
  Description of Artificial Sequence: Synthetic oligonucleotide
uuuuaaaguaauuuuu

SEQ ID NO: 79688 - RNA, 13 nt, Artificial Sequence
  Description of Artificial Sequence: Synthetic oligonucleotide
caacagucaaugg

SEQ ID NO: 79689 - RNA, 13 nt, Artificial Sequence
  Description of Artificial Sequence: Synthetic oligonucleotide
ucgacaaaccaau

SEQ ID NO: 79690 - RNA, 12 nt, Artificial Sequence
  Description of Artificial Sequence: Synthetic oligonucleotide
acugcuaccacu

SEQ ID NO: 79691 - RNA, 13 nt, Artificial Sequence
  Description of Artificial Sequence: Synthetic oligonucleotide
gcaagcggucuua

SEQ ID NO: 79692 - RNA, 13 nt, Artificial Sequence
  Description of Artificial Sequence: Synthetic oligonucleotide
ggucuuaccggcu

SEQ ID NO: 79693 - RNA, 11 nt, Artificial Sequence
  Description of Artificial Sequence: Synthetic oligonucleotide
gauggguuacc

SEQ ID NO: 79694 - RNA, 11 nt, Artificial Sequence
  Description of Artificial Sequence: Synthetic oligonucleotide
guuaccugcga

SEQ ID NO: 79695 - RNA, 12 nt, Artificial Sequence
  Description of Artificial Sequence: Synthetic oligonucleotide
aaucuugcugag

SEQ ID NO: 79696 - RNA, 13 nt, Artificial Sequence
  Description of Artificial Sequence: Synthetic oligonucleotide
agcauaaaacagu

SEQ ID NO: 79697 - RNA, 12 nt, Artificial Sequence
  Description of Artificial Sequence: Synthetic oligonucleotide
guccuuuauccu

SEQ ID NO: 79698 - RNA, 12 nt, Artificial Sequence
  Description of Artificial Sequence: Synthetic oligonucleotide
caacgcaaguug

SEQ ID NO: 79699 - RNA, 13 nt, Artificial Sequence
  Description of Artificial Sequence: Synthetic oligonucleotide
aaacugaaaccau

SEQ ID NO: 79700 - RNA, 14 nt, Artificial Sequence
  Description of Artificial Sequence: Synthetic oligonucleotide
acuuuguuaaauau

SEQ ID NO: 79701 - RNA, 14 nt, Artificial Sequence
  Description of Artificial Sequence: Synthetic oligonucleotide
guauauuaaaaguu

SEQ ID NO: 79702 - RNA, 13 nt, Artificial Sequence
  Description of Artificial Sequence: Synthetic oligonucleotide
guuuugacuuaac

SEQ ID NO: 79703 - RNA, 13 nt, Artificial Sequence
  Description of Artificial Sequence: Synthetic oligonucleotide
gcaaacucagcac

SEQ ID NO: 79704 - RNA, 11 nt, Artificial Sequence
  Description of Artificial Sequence: Synthetic oligonucleotide
ugcugaccuca

SEQ ID NO: 79705 - RNA, 14 nt, Artificial Sequence
  Description of Artificial Sequence: Synthetic oligonucleotide
uuuauucagaucgc

SEQ ID NO: 79706 - RNA, 13 nt, Artificial Sequence
  Description of Artificial Sequence: Synthetic oligonucleotide
aggguucugggau

SEQ ID NO: 79707 - RNA, 15 nt, Artificial Sequence
  Description of Artificial Sequence: Synthetic oligonucleotide
auauuggaaauuaug

SEQ ID NO: 79708 - RNA, 13 nt, Artificial Sequence
  Description of Artificial Sequence: Synthetic oligonucleotide
auggaagcacuag

SEQ ID NO: 79709 - RNA, 13 nt, Artificial Sequence
  Description of Artificial Sequence: Synthetic oligonucleotide
guuuuuaugugga

SEQ ID NO: 79710 - RNA, 12 nt, Artificial Sequence
  Description of Artificial Sequence: Synthetic oligonucleotide
ggaauugguaga

SEQ ID NO: 79711 - RNA, 13 nt, Artificial Sequence
  Description of Artificial Sequence: Synthetic oligonucleotide
uuagacuuggaga

SEQ ID NO: 79712 - RNA, 13 nt, Artificial Sequence
  Description of Artificial Sequence: Synthetic oligonucleotide
uuacaguauucca

SEQ ID NO: 79713 - RNA, 15 nt, Artificial Sequence
  Description of Artificial Sequence: Synthetic oligonucleotide
ccacugaugaauuaa

SEQ ID NO: 79714 - RNA, 12 nt, Artificial Sequence
  Description of Artificial Sequence: Synthetic oligonucleotide
ccacaucaucac

SEQ ID NO: 79715 - RNA, 13 nt, Artificial Sequence
  Description of Artificial Sequence: Synthetic oligonucleotide
cucaccaaacaga

SEQ ID NO: 79716 - RNA, 12 nt, Artificial Sequence
  Description of Artificial Sequence: Synthetic oligonucleotide
ggaacaugaugg

SEQ ID NO: 79717 - RNA, 12 nt, Artificial Sequence
  Description of Artificial Sequence: Synthetic oligonucleotide
cauguagacugc

SEQ ID NO: 79718 - RNA, 13 nt, Artificial Sequence
  Description of Artificial Sequence: Synthetic oligonucleotide
ggaucuauuuaug

SEQ ID NO: 79719 - RNA, 12 nt, Artificial Sequence
  Description of Artificial Sequence: Synthetic oligonucleotide
gcacuauuauca

SEQ ID NO: 79720 - RNA, 11 nt, Artificial Sequence
  Description of Artificial Sequence: Synthetic oligonucleotide
aucaguucugc

SEQ ID NO: 79721 - RNA, 13 nt, Artificial Sequence
  Description of Artificial Sequence: Synthetic oligonucleotide
agauuaaaccuac

SEQ ID NO: 79722 - RNA, 13 nt, Artificial Sequence
  Description of Artificial Sequence: Synthetic oligonucleotide
auaaaauccuucu

SEQ ID NO: 79723 - RNA, 12 nt, Artificial Sequence
  Description of Artificial Sequence: Synthetic oligonucleotide
aaugcuguagac

SEQ ID NO: 79724 - RNA, 13 nt, Artificial Sequence
  Description of Artificial Sequence: Synthetic oligonucleotide
uugauaggaauag

SEQ ID NO: 79725 - RNA, 11 nt, Artificial Sequence
  Description of Artificial Sequence: Synthetic oligonucleotide
aauggcccuga

SEQ ID NO: 79726 - RNA, 11 nt, Artificial Sequence
  Description of Artificial Sequence: Synthetic oligonucleotide
uuccucaagca

SEQ ID NO: 79727 - RNA, 10 nt, Artificial Sequence
  Description of Artificial Sequence: Synthetic oligonucleotide
guucagccca

SEQ ID NO: 79728 - RNA, 11 nt, Artificial Sequence
  Description of Artificial Sequence: Synthetic oligonucleotide
gcugcugaacc

SEQ ID NO: 79729 - RNA, 12 nt, Artificial Sequence
  Description of Artificial Sequence: Synthetic oligonucleotide
aaguucucuuca

SEQ ID NO: 79730 - RNA, 11 nt, Artificial Sequence
  Description of Artificial Sequence: Synthetic oligonucleotide
ccagccuagag

SEQ ID NO: 79731 - RNA, 13 nt, Artificial Sequence
  Description of Artificial Sequence: Synthetic oligonucleotide
cucugugaagugu

SEQ ID NO: 79732 - RNA, 14 nt, Artificial Sequence
  Description of Artificial Sequence: Synthetic oligonucleotide
ugagaaaauuucaa

SEQ ID NO: 79733 - RNA, 11 nt, Artificial Sequence
  Description of Artificial Sequence: Synthetic oligonucleotide
aauccuccuga

SEQ ID NO: 79734 - RNA, 12 nt, Artificial Sequence
  Description of Artificial Sequence: Synthetic oligonucleotide
gugacaucauau

SEQ ID NO: 79735 - RNA, 13 nt, Artificial Sequence
  Description of Artificial Sequence: Synthetic oligonucleotide
aaucuucaucaua

SEQ ID NO: 79736 - RNA, 13 nt, Artificial Sequence
  Description of Artificial Sequence: Synthetic oligonucleotide
gacuagcuauuaa

SEQ ID NO: 79737 - RNA, 14 nt, Artificial Sequence
  Description of Artificial Sequence: Synthetic oligonucleotide
ucucuacuaaaaau

SEQ ID NO: 79738 - RNA, 12 nt, Artificial Sequence
  Description of Artificial Sequence: Synthetic oligonucleotide
ucuaucucgccu

SEQ ID NO: 79739 - RNA, 13 nt, Artificial Sequence
  Description of Artificial Sequence: Synthetic oligonucleotide
cuucgguccaguu

SEQ ID NO: 79740 - RNA, 11 nt, Artificial Sequence
  Description of Artificial Sequence: Synthetic oligonucleotide
gauguagccgc

SEQ ID NO: 79741 - RNA, 12 nt, Artificial Sequence
  Description of Artificial Sequence: Synthetic oligonucleotide
ugaggagacuug

SEQ ID NO: 79742 - RNA, 12 nt, Artificial Sequence
  Description of Artificial Sequence: Synthetic oligonucleotide
gaguagugagga

SEQ ID NO: 79743 - RNA, 14 nt, Artificial Sequence
  Description of Artificial Sequence: Synthetic oligonucleotide
cagaugaguacaaa

SEQ ID NO: 79744 - RNA, 13 nt, Artificial Sequence
  Description of Artificial Sequence: Synthetic oligonucleotide
guuguuaaugggc

SEQ ID NO: 79745 - RNA, 13 nt, Artificial Sequence
  Description of Artificial Sequence: Synthetic oligonucleotide
uuuuuaauuuauu

SEQ ID NO: 79746 - RNA, 12 nt, Artificial Sequence
  Description of Artificial Sequence: Synthetic oligonucleotide
uauuuaaauaug

SEQ ID NO: 79747 - RNA, 13 nt, Artificial Sequence
  Description of Artificial Sequence: Synthetic oligonucleotide
uauccuuuguuuc

SEQ ID NO: 79748 - RNA, 14 nt, Artificial Sequence
  Description of Artificial Sequence: Synthetic oligonucleotide
cgucuaaguguuug

SEQ ID NO: 79749 - RNA, 12 nt, Artificial Sequence
  Description of Artificial Sequence: Synthetic oligonucleotide
accugugacaaa

SEQ ID NO: 79750 - RNA, 13 nt, Artificial Sequence
  Description of Artificial Sequence: Synthetic oligonucleotide
ccaggcugaauua

SEQ ID NO: 79751 - RNA, 14 nt, Artificial Sequence
  Description of Artificial Sequence: Synthetic oligonucleotide
gucauucuuacaau

SEQ ID NO: 79752 - RNA, 15 nt, Artificial Sequence
  Description of Artificial Sequence: Synthetic oligonucleotide
ucauucuuacaauug

SEQ ID NO: 79753 - RNA, 12 nt, Artificial Sequence
  Description of Artificial Sequence: Synthetic oligonucleotide
cagagaguguac

SEQ ID NO: 79754 - RNA, 12 nt, Artificial Sequence
  Description of Artificial Sequence: Synthetic oligonucleotide
agaacucagcag

SEQ ID NO: 79755 - RNA, 13 nt, Artificial Sequence
  Description of Artificial Sequence: Synthetic oligonucleotide
uuuauuuucagua

SEQ ID NO: 79756 - RNA, 12 nt, Artificial Sequence
  Description of Artificial Sequence: Synthetic oligonucleotide
ucuuaaauggaa

SEQ ID NO: 79757 - RNA, 13 nt, Artificial Sequence
  Description of Artificial Sequence: Synthetic oligonucleotide
ugccuaaaauugu

SEQ ID NO: 79758 - RNA, 12 nt, Artificial Sequence
  Description of Artificial Sequence: Synthetic oligonucleotide
agacugugagcu

SEQ ID NO: 79759 - RNA, 14 nt, Artificial Sequence
  Description of Artificial Sequence: Synthetic oligonucleotide
ugcuuuuuauuaau

SEQ ID NO: 79760 - RNA, 13 nt, Artificial Sequence
  Description of Artificial Sequence: Synthetic oligonucleotide
cucuucuuacauu

SEQ ID NO: 79761 - RNA, 15 nt, Artificial Sequence
  Description of Artificial Sequence: Synthetic oligonucleotide
cauuuguaaaaaugu

SEQ ID NO: 79762 - RNA, 15 nt, Artificial Sequence
  Description of Artificial Sequence: Synthetic oligonucleotide
aucuuaauucauauu

SEQ ID NO: 79763 - RNA, 13 nt, Artificial Sequence
  Description of Artificial Sequence: Synthetic oligonucleotide
gaacuaaucauga

SEQ ID NO: 79764 - RNA, 12 nt, Artificial Sequence
  Description of Artificial Sequence: Synthetic oligonucleotide
ucugcucuuggg

SEQ ID NO: 79765 - RNA, 13 nt, Artificial Sequence
  Description of Artificial Sequence: Synthetic oligonucleotide
caguagcuuugag

SEQ ID NO: 79766 - RNA, 14 nt, Artificial Sequence
  Description of Artificial Sequence: Synthetic oligonucleotide
cacguaauauuuca

SEQ ID NO: 79767 - RNA, 13 nt, Artificial Sequence
  Description of Artificial Sequence: Synthetic oligonucleotide
uauucucuucacu

SEQ ID NO: 79768 - RNA, 14 nt, Artificial Sequence
  Description of Artificial Sequence: Synthetic oligonucleotide
cuaaugcuaagaaa

SEQ ID NO: 79769 - RNA, 12 nt, Artificial Sequence
  Description of Artificial Sequence: Synthetic oligonucleotide
gcugaaaaucaa

SEQ ID NO: 79770 - RNA, 14 nt, Artificial Sequence
  Description of Artificial Sequence: Synthetic oligonucleotide
aauaugauuacuuu

SEQ ID NO: 79771 - RNA, 14 nt, Artificial Sequence
  Description of Artificial Sequence: Synthetic oligonucleotide
cauuuuguucuaca

SEQ ID NO: 79772 - RNA, 12 nt, Artificial Sequence
  Description of Artificial Sequence: Synthetic oligonucleotide
cccgggacucuc

SEQ ID NO: 79773 - RNA, 14 nt, Artificial Sequence
  Description of Artificial Sequence: Synthetic oligonucleotide
ccuuuaaaguaaag

SEQ ID NO: 79774 - RNA, 13 nt, Artificial Sequence
  Description of Artificial Sequence: Synthetic oligonucleotide
ucuggaagccugg

SEQ ID NO: 79775 - RNA, 14 nt, Artificial Sequence
  Description of Artificial Sequence: Synthetic oligonucleotide
aaaacaaaagagag

SEQ ID NO: 79776 - RNA, 13 nt, Artificial Sequence
  Description of Artificial Sequence: Synthetic oligonucleotide
aucaguuaugccg

SEQ ID NO: 79777 - RNA, 13 nt, Artificial Sequence
  Description of Artificial Sequence: Synthetic oligonucleotide
uaaaagaagucca

SEQ ID NO: 79778 - RNA, 11 nt, Artificial Sequence
  Description of Artificial Sequence: Synthetic oligonucleotide
aggugagguua

SEQ ID NO: 79779 - RNA, 11 nt, Artificial Sequence
  Description of Artificial Sequence: Synthetic oligonucleotide
gggaagaggac

SEQ ID NO: 79780 - RNA, 13 nt, Artificial Sequence
  Description of Artificial Sequence: Synthetic oligonucleotide
aagcaaguauugu

SEQ ID NO: 79781 - RNA, 12 nt, Artificial Sequence
  Description of Artificial Sequence: Synthetic oligonucleotide
auuguagcacuc

SEQ ID NO: 79782 - RNA, 14 nt, Artificial Sequence
  Description of Artificial Sequence: Synthetic oligonucleotide
acaaaaccacaaau

SEQ ID NO: 79783 - RNA, 12 nt, Artificial Sequence
  Description of Artificial Sequence: Synthetic oligonucleotide
uaagcccauaca

SEQ ID NO: 79784 - RNA, 11 nt, Artificial Sequence
  Description of Artificial Sequence: Synthetic oligonucleotide
agcccauacag

SEQ ID NO: 79785 - RNA, 12 nt, Artificial Sequence
  Description of Artificial Sequence: Synthetic oligonucleotide
cagaaaccuucc

SEQ ID NO: 79786 - RNA, 10 nt, Artificial Sequence
  Description of Artificial Sequence: Synthetic oligonucleotide
guauaccuac

SEQ ID NO: 79787 - RNA, 13 nt, Artificial Sequence
  Description of Artificial Sequence: Synthetic oligonucleotide
gccaguuuucgga

SEQ ID NO: 79788 - RNA, 9 nt, Artificial Sequence
  Description of Artificial Sequence: Synthetic oligonucleotide
ggaacaggg

SEQ ID NO: 79789 - RNA, 13 nt, Artificial Sequence
  Description of Artificial Sequence: Synthetic oligonucleotide
uuaacuuuccagu

SEQ ID NO: 79790 - RNA, 14 nt, Artificial Sequence
  Description of Artificial Sequence: Synthetic oligonucleotide
aaaguuugguuuug

SEQ ID NO: 79791 - RNA, 12 nt, Artificial Sequence
  Description of Artificial Sequence: Synthetic oligonucleotide
cuucccacugua

SEQ ID NO: 79792 - RNA, 13 nt, Artificial Sequence
  Description of Artificial Sequence: Synthetic oligonucleotide
ugauaccauauga

SEQ ID NO: 79793 - RNA, 11 nt, Artificial Sequence
  Description of Artificial Sequence: Synthetic oligonucleotide
aacaugggcug

SEQ ID NO: 79794 - RNA, 13 nt, Artificial Sequence
  Description of Artificial Sequence: Synthetic oligonucleotide
caacuuuuucaua

SEQ ID NO: 79795 - RNA, 12 nt, Artificial Sequence
  Description of Artificial Sequence: Synthetic oligonucleotide
caugaggccgga

SEQ ID NO: 79796 - RNA, 11 nt, Artificial Sequence
  Description of Artificial Sequence: Synthetic oligonucleotide
acugcauuugu

SEQ ID NO: 79797 - RNA, 13 nt, Artificial Sequence
  Description of Artificial Sequence: Synthetic oligonucleotide
aauguuuacuacc

SEQ ID NO: 79798 - RNA, 15 nt, Artificial Sequence
  Description of Artificial Sequence: Synthetic oligonucleotide
aauuuuuugaugaaa

SEQ ID NO: 79799 - RNA, 14 nt, Artificial Sequence
  Description of Artificial Sequence: Synthetic oligonucleotide
cagugugugaauuu

SEQ ID NO: 79800 - RNA, 13 nt, Artificial Sequence
  Description of Artificial Sequence: Synthetic oligonucleotide
gagcaauguaugu

SEQ ID NO: 79801 - RNA, 14 nt, Artificial Sequence
  Description of Artificial Sequence: Synthetic oligonucleotide
aaagcacauauaua

SEQ ID NO: 79802 - RNA, 14 nt, Artificial Sequence
  Description of Artificial Sequence: Synthetic oligonucleotide
guaauaguuucucc

SEQ ID NO: 79803 - RNA, 13 nt, Artificial Sequence
  Description of Artificial Sequence: Synthetic oligonucleotide
aguuucuccaaau

SEQ ID NO: 79804 - RNA, 13 nt, Artificial Sequence
  Description of Artificial Sequence: Synthetic oligonucleotide
uacuuccuagaaa

SEQ ID NO: 79805 - RNA, 13 nt, Artificial Sequence
  Description of Artificial Sequence: Synthetic oligonucleotide
uacaccauauaug

SEQ ID NO: 79806 - RNA, 14 nt, Artificial Sequence
  Description of Artificial Sequence: Synthetic oligonucleotide
auauaugaauggag

SEQ ID NO: 79807 - RNA, 13 nt, Artificial Sequence
  Description of Artificial Sequence: Synthetic oligonucleotide
acgagaagaagau

SEQ ID NO: 79808 - RNA, 13 nt, Artificial Sequence
  Description of Artificial Sequence: Synthetic oligonucleotide
ucauuuacaggga

SEQ ID NO: 79809 - RNA, 13 nt, Artificial Sequence
  Description of Artificial Sequence: Synthetic oligonucleotide
cauuuacagggac

SEQ ID NO: 79810 - RNA, 10 nt, Artificial Sequence
  Description of Artificial Sequence: Synthetic oligonucleotide
agggaccuga

SEQ ID NO: 79811 - RNA, 14 nt, Artificial Sequence
  Description of Artificial Sequence: Synthetic oligonucleotide
uguuugacugcauc

SEQ ID NO: 79812 - RNA, 13 nt, Artificial Sequence
  Description of Artificial Sequence: Synthetic oligonucleotide
uuugacugcaucg

SEQ ID NO: 79813 - RNA, 12 nt, Artificial Sequence
  Description of Artificial Sequence: Synthetic oligonucleotide
gaguucacaggg

SEQ ID NO: 79814 - RNA, 13 nt, Artificial Sequence
  Description of Artificial Sequence: Synthetic oligonucleotide
ggcaccucugucc

SEQ ID NO: 79815 - RNA, 15 nt, Artificial Sequence
  Description of Artificial Sequence: Synthetic oligonucleotide
gguuugucuuuuuaa

SEQ ID NO: 79816 - RNA, 14 nt, Artificial Sequence
  Description of Artificial Sequence: Synthetic oligonucleotide
uuugucuuuuuaag

SEQ ID NO: 79817 - RNA, 13 nt, Artificial Sequence
  Description of Artificial Sequence: Synthetic oligonucleotide
ccuaaagguuguc

SEQ ID NO: 79818 - RNA, 12 nt, Artificial Sequence
  Description of Artificial Sequence: Synthetic oligonucleotide
aagguugucgac

SEQ ID NO: 79819 - RNA, 13 nt, Artificial Sequence
  Description of Artificial Sequence: Synthetic oligonucleotide
accuggcaauugu

SEQ ID NO: 79820 - RNA, 12 nt, Artificial Sequence
  Description of Artificial Sequence: Synthetic oligonucleotide
aguggugcgagg

SEQ ID NO: 79821 - RNA, 13 nt, Artificial Sequence
  Description of Artificial Sequence: Synthetic oligonucleotide
agagacaugaaau

SEQ ID NO: 79822 - RNA, 13 nt, Artificial Sequence
  Description of Artificial Sequence: Synthetic oligonucleotide
auauauuucucca

SEQ ID NO: 79823 - RNA, 10 nt, Artificial Sequence
  Description of Artificial Sequence: Synthetic oligonucleotide
caugaaggcu

SEQ ID NO: 79824 - RNA, 11 nt, Artificial Sequence
  Description of Artificial Sequence: Synthetic oligonucleotide
gcuggaguggu

SEQ ID NO: 79825 - RNA, 11 nt, Artificial Sequence
  Description of Artificial Sequence: Synthetic oligonucleotide
aggaagagagg

SEQ ID NO: 79826 - RNA, 12 nt, Artificial Sequence
  Description of Artificial Sequence: Synthetic oligonucleotide
cuugcaucgggc

SEQ ID NO: 79827 - RNA, 13 nt, Artificial Sequence
  Description of Artificial Sequence: Synthetic oligonucleotide
auauccuacugug

SEQ ID NO: 79828 - RNA, 13 nt, Artificial Sequence
  Description of Artificial Sequence: Synthetic oligonucleotide
uccuacuguguaa

SEQ ID NO: 79829 - RNA, 12 nt, Artificial Sequence
  Description of Artificial Sequence: Synthetic oligonucleotide
ccuuguagugua

SEQ ID NO: 79830 - RNA, 13 nt, Artificial Sequence
  Description of Artificial Sequence: Synthetic oligonucleotide
ucuuuguugauug

SEQ ID NO: 79831 - RNA, 14 nt, Artificial Sequence
  Description of Artificial Sequence: Synthetic oligonucleotide
uuuguugauugaaa

SEQ ID NO: 79832 - RNA, 15 nt, Artificial Sequence
  Description of Artificial Sequence: Synthetic oligonucleotide
uucuuuuucuuccau

SEQ ID NO: 79833 - RNA, 13 nt, Artificial Sequence
  Description of Artificial Sequence: Synthetic oligonucleotide
aaucuuccuucua

SEQ ID NO: 79834 - RNA, 13 nt, Artificial Sequence
  Description of Artificial Sequence: Synthetic oligonucleotide
uugaaugcuucau

SEQ ID NO: 79835 - RNA, 13 nt, Artificial Sequence
  Description of Artificial Sequence: Synthetic oligonucleotide
ugaaugcuucaug

SEQ ID NO: 79836 - RNA, 13 nt, Artificial Sequence
  Description of Artificial Sequence: Synthetic oligonucleotide
aauucuacuuuga

SEQ ID NO: 79837 - RNA, 13 nt, Artificial Sequence
  Description of Artificial Sequence: Synthetic oligonucleotide
agcaacuacagac

SEQ ID NO: 79838 - RNA, 13 nt, Artificial Sequence
  Description of Artificial Sequence: Synthetic oligonucleotide
gaccaaggucaac

SEQ ID NO: 79839 - RNA, 13 nt, Artificial Sequence
  Description of Artificial Sequence: Synthetic oligonucleotide
cgacuaucucgac

SEQ ID NO: 79840 - RNA, 13 nt, Artificial Sequence
  Description of Artificial Sequence: Synthetic oligonucleotide
aaccuucccaaac

SEQ ID NO: 79841 - RNA, 14 nt, Artificial Sequence
  Description of Artificial Sequence: Synthetic oligonucleotide
ccaagcuuagaacu

SEQ ID NO: 79842 - RNA, 15 nt, Artificial Sequence
  Description of Artificial Sequence: Synthetic oligonucleotide
agcuuagaacuuuaa

SEQ ID NO: 79843 - RNA, 11 nt, Artificial Sequence
  Description of Artificial Sequence: Synthetic oligonucleotide
aagaccaccac

SEQ ID NO: 79844 - RNA, 14 nt, Artificial Sequence
  Description of Artificial Sequence: Synthetic oligonucleotide
gcgagaaauaaagu

SEQ ID NO: 79845 - RNA, 14 nt, Artificial Sequence
  Description of Artificial Sequence: Synthetic oligonucleotide
cgagaaauaaaguu

SEQ ID NO: 79846 - RNA, 12 nt, Artificial Sequence
  Description of Artificial Sequence: Synthetic oligonucleotide
aggaaaugaucc

SEQ ID NO: 79847 - RNA, 13 nt, Artificial Sequence
  Description of Artificial Sequence: Synthetic oligonucleotide
gaagaaaugaaac

SEQ ID NO: 79848 - RNA, 13 nt, Artificial Sequence
  Description of Artificial Sequence: Synthetic oligonucleotide
guuuccauccucc

SEQ ID NO: 79849 - RNA, 15 nt, Artificial Sequence
  Description of Artificial Sequence: Synthetic oligonucleotide
acugaaaaucuuuga

SEQ ID NO: 79850 - RNA, 11 nt, Artificial Sequence
  Description of Artificial Sequence: Synthetic oligonucleotide
ugccguucagg

SEQ ID NO: 79851 - RNA, 13 nt, Artificial Sequence
  Description of Artificial Sequence: Synthetic oligonucleotide
caggguccagaag

SEQ ID NO: 79852 - RNA, 13 nt, Artificial Sequence
  Description of Artificial Sequence: Synthetic oligonucleotide
ucaagacugcuug

SEQ ID NO: 79853 - RNA, 13 nt, Artificial Sequence
  Description of Artificial Sequence: Synthetic oligonucleotide
uccaugucuuugg

SEQ ID NO: 79854 - RNA, 11 nt, Artificial Sequence
  Description of Artificial Sequence: Synthetic oligonucleotide
gccugaaacac

SEQ ID NO: 79855 - RNA, 12 nt, Artificial Sequence
  Description of Artificial Sequence: Synthetic oligonucleotide
ucucuguaccuc

SEQ ID NO: 79856 - RNA, 12 nt, Artificial Sequence
  Description of Artificial Sequence: Synthetic oligonucleotide
agcaagacaaga

SEQ ID NO: 79857 - RNA, 13 nt, Artificial Sequence
  Description of Artificial Sequence: Synthetic oligonucleotide
gcaagacaagaaa

SEQ ID NO: 79858 - RNA, 12 nt, Artificial Sequence
  Description of Artificial Sequence: Synthetic oligonucleotide
uguacaagaucc

SEQ ID NO: 79859 - RNA, 12 nt, Artificial Sequence
  Description of Artificial Sequence: Synthetic oligonucleotide
cguacuugcaga

SEQ ID NO: 79860 - RNA, 13 nt, Artificial Sequence
  Description of Artificial Sequence: Synthetic oligonucleotide
cgaucgauacaga

SEQ ID NO: 79861 - RNA, 13 nt, Artificial Sequence
  Description of Artificial Sequence: Synthetic oligonucleotide
uauaaaaauaaau

SEQ ID NO: 79862 - RNA, 13 nt, Artificial Sequence
  Description of Artificial Sequence: Synthetic oligonucleotide
uaaaaauaaauau

SEQ ID NO: 79863 - RNA, 13 nt, Artificial Sequence
  Description of Artificial Sequence: Synthetic oligonucleotide
uuugacugcugug

SEQ ID NO: 79864 - RNA, 13 nt, Artificial Sequence
  Description of Artificial Sequence: Synthetic oligonucleotide
ggagaugagagac

SEQ ID NO: 79865 - RNA, 10 nt, Artificial Sequence
  Description of Artificial Sequence: Synthetic oligonucleotide
ucccacuugg

SEQ ID NO: 79866 - RNA, 10 nt, Artificial Sequence
  Description of Artificial Sequence: Synthetic oligonucleotide
guucacggcc

SEQ ID NO: 79867 - RNA, 12 nt, Artificial Sequence
  Description of Artificial Sequence: Synthetic oligonucleotide
accaucacacca

SEQ ID NO: 79868 - RNA, 10 nt, Artificial Sequence
  Description of Artificial Sequence: Synthetic oligonucleotide
cugcggguuu

SEQ ID NO: 79869 - RNA, 9 nt, Artificial Sequence
  Description of Artificial Sequence: Synthetic oligonucleotide
uccaguuug

SEQ ID NO: 79870 - RNA, 12 nt, Artificial Sequence
  Description of Artificial Sequence: Synthetic oligonucleotide
uuaaggacuucu

SEQ ID NO: 79871 - RNA, 12 nt, Artificial Sequence
  Description of Artificial Sequence: Synthetic oligonucleotide
agugggacagag

SEQ ID NO: 79872 - RNA, 13 nt, Artificial Sequence
  Description of Artificial Sequence: Synthetic oligonucleotide
auuuguuauugug

SEQ ID NO: 79873 - RNA, 12 nt, Artificial Sequence
  Description of Artificial Sequence: Synthetic oligonucleotide
ucaaaugcauuu

SEQ ID NO: 79874 - RNA, 9 nt, Artificial Sequence
  Description of Artificial Sequence: Synthetic oligonucleotide
aggaaagcc

SEQ ID NO: 79875 - RNA, 10 nt, Artificial Sequence
  Description of Artificial Sequence: Synthetic oligonucleotide
ggaaagcccu

SEQ ID NO: 79876 - RNA, 11 nt, Artificial Sequence
  Description of Artificial Sequence: Synthetic oligonucleotide
ccagcauggcc

SEQ ID NO: 79877 - RNA, 10 nt, Artificial Sequence
  Description of Artificial Sequence: Synthetic oligonucleotide
uucucccuga

SEQ ID NO: 79878 - RNA, 11 nt, Artificial Sequence
  Description of Artificial Sequence: Synthetic oligonucleotide
aagaagcccuu

SEQ ID NO: 79879 - RNA, 11 nt, Artificial Sequence
  Description of Artificial Sequence: Synthetic oligonucleotide
gaagcccuuca

SEQ ID NO: 79880 - RNA, 10 nt, Artificial Sequence
  Description of Artificial Sequence: Synthetic oligonucleotide
cccuucagcg

SEQ ID NO: 79881 - RNA, 10 nt, Artificial Sequence
  Description of Artificial Sequence: Synthetic oligonucleotide
cuucagcggc

SEQ ID NO: 79882 - RNA, 11 nt, Artificial Sequence
  Description of Artificial Sequence: Synthetic oligonucleotide
cagcggccagu

SEQ ID NO: 79883 - RNA, 11 nt, Artificial Sequence
  Description of Artificial Sequence: Synthetic oligonucleotide
gaaaagcuccg

SEQ ID NO: 79884 - RNA, 10 nt, Artificial Sequence
  Description of Artificial Sequence: Synthetic oligonucleotide
aaagcuccgg

SEQ ID NO: 79885 - RNA, 12 nt, Artificial Sequence
  Description of Artificial Sequence: Synthetic oligonucleotide
gucaacagucug

SEQ ID NO: 79886 - RNA, 12 nt, Artificial Sequence
  Description of Artificial Sequence: Synthetic oligonucleotide
agaguucaaaag

SEQ ID NO: 79887 - RNA, 12 nt, Artificial Sequence
  Description of Artificial Sequence: Synthetic oligonucleotide
gaguucaaaagc

SEQ ID NO: 79888 - RNA, 11 nt, Artificial Sequence
  Description of Artificial Sequence: Synthetic oligonucleotide
ucaaaagcccu

SEQ ID NO: 79889 - RNA, 11 nt, Artificial Sequence
  Description of Artificial Sequence: Synthetic oligonucleotide
caaaagcccuu

SEQ ID NO: 79890 - RNA, 11 nt, Artificial Sequence
  Description of Artificial Sequence: Synthetic oligonucleotide
aaagcccuuca

SEQ ID NO: 79891 - RNA, 11 nt, Artificial Sequence
  Description of Artificial Sequence: Synthetic oligonucleotide
aagcccuucag

SEQ ID NO: 79892 - RNA, 12 nt, Artificial Sequence
  Description of Artificial Sequence: Synthetic oligonucleotide
ugaagccgcucg

SEQ ID NO: 79893 - RNA, 11 nt, Artificial Sequence
  Description of Artificial Sequence: Synthetic oligonucleotide
acgccagucaa

SEQ ID NO: 79894 - RNA, 12 nt, Artificial Sequence
  Description of Artificial Sequence: Synthetic oligonucleotide
ucuuggugcgug

SEQ ID NO: 79895 - RNA, 13 nt, Artificial Sequence
  Description of Artificial Sequence: Synthetic oligonucleotide
uuggauucaucag

SEQ ID NO: 79896 - RNA, 12 nt, Artificial Sequence
  Description of Artificial Sequence: Synthetic oligonucleotide
ggaauaccuaag

SEQ ID NO: 79897 - RNA, 11 nt, Artificial Sequence
  Description of Artificial Sequence: Synthetic oligonucleotide
uuugaggcuca

SEQ ID NO: 79898 - RNA, 10 nt, Artificial Sequence
  Description of Artificial Sequence: Synthetic oligonucleotide
cuacaauugg

SEQ ID NO: 79899 - RNA, 11 nt, Artificial Sequence
  Description of Artificial Sequence: Synthetic oligonucleotide
aguuaggagcc

SEQ ID NO: 79900 - RNA, 12 nt, Artificial Sequence
  Description of Artificial Sequence: Synthetic oligonucleotide
gucaauauccac

SEQ ID NO: 79901 - RNA, 12 nt, Artificial Sequence
  Description of Artificial Sequence: Synthetic oligonucleotide
uguucagucaca

SEQ ID NO: 79902 - RNA, 11 nt, Artificial Sequence
  Description of Artificial Sequence: Synthetic oligonucleotide
cacacacauac

SEQ ID NO: 79903 - RNA, 11 nt, Artificial Sequence
  Description of Artificial Sequence: Synthetic oligonucleotide
uccuuuugcuu

SEQ ID NO: 79904 - RNA, 15 nt, Artificial Sequence
  Description of Artificial Sequence: Synthetic oligonucleotide
uuuaaaguaauuuuu

SEQ ID NO: 79905 - RNA, 12 nt, Artificial Sequence
  Description of Artificial Sequence: Synthetic oligonucleotide
aacagucaaugg

SEQ ID NO: 79906 - RNA, 12 nt, Artificial Sequence
  Description of Artificial Sequence: Synthetic oligonucleotide
cgacaaaccaau

SEQ ID NO: 79907 - RNA, 11 nt, Artificial Sequence
  Description of Artificial Sequence: Synthetic oligonucleotide
cugcuaccacu

SEQ ID NO: 79908 - RNA, 12 nt, Artificial Sequence
  Description of Artificial Sequence: Synthetic oligonucleotide
caagcggucuua

SEQ ID NO: 79909 - RNA, 12 nt, Artificial Sequence
  Description of Artificial Sequence: Synthetic oligonucleotide
gucuuaccggcu

SEQ ID NO: 79910 - RNA, 10 nt, Artificial Sequence
  Description of Artificial Sequence: Synthetic oligonucleotide
auggguuacc

SEQ ID NO: 79911 - RNA, 10 nt, Artificial Sequence
  Description of Artificial Sequence: Synthetic oligonucleotide
uuaccugcga

SEQ ID NO: 79912 - RNA, 11 nt, Artificial Sequence
  Description of Artificial Sequence: Synthetic oligonucleotide
aucuugcugag

SEQ ID NO: 79913 - RNA, 12 nt, Artificial Sequence
  Description of Artificial Sequence: Synthetic oligonucleotide
gcauaaaacagu

SEQ ID NO: 79914 - RNA, 11 nt, Artificial Sequence
  Description of Artificial Sequence: Synthetic oligonucleotide
uccuuuauccu

SEQ ID NO: 79915 - RNA, 11 nt, Artificial Sequence
  Description of Artificial Sequence: Synthetic oligonucleotide
aacgcaaguug

SEQ ID NO: 79916 - RNA, 12 nt, Artificial Sequence
  Description of Artificial Sequence: Synthetic oligonucleotide
aacugaaaccau

SEQ ID NO: 79917 - RNA, 13 nt, Artificial Sequence
  Description of Artificial Sequence: Synthetic oligonucleotide
cuuuguuaaauau

SEQ ID NO: 79918 - RNA, 13 nt, Artificial Sequence
  Description of Artificial Sequence: Synthetic oligonucleotide
uauauuaaaaguu

SEQ ID NO: 79919 - RNA, 12 nt, Artificial Sequence
  Description of Artificial Sequence: Synthetic oligonucleotide
uuuugacuuaac

SEQ ID NO: 79920 - RNA, 12 nt, Artificial Sequence
  Description of Artificial Sequence: Synthetic oligonucleotide
caaacucagcac

SEQ ID NO: 79921 - RNA, 10 nt, Artificial Sequence
  Description of Artificial Sequence: Synthetic oligonucleotide
gcugaccuca

SEQ ID NO: 79922 - RNA, 13 nt, Artificial Sequence
  Description of Artificial Sequence: Synthetic oligonucleotide
uuauucagaucgc

SEQ ID NO: 79923 - RNA, 12 nt, Artificial Sequence
  Description of Artificial Sequence: Synthetic oligonucleotide
ggguucugggau

SEQ ID NO: 79924 - RNA, 14 nt, Artificial Sequence
  Description of Artificial Sequence: Synthetic oligonucleotide
uauuggaaauuaug

SEQ ID NO: 79925 - RNA, 12 nt, Artificial Sequence
  Description of Artificial Sequence: Synthetic oligonucleotide
uggaagcacuag

SEQ ID NO: 79926 - RNA, 12 nt, Artificial Sequence
  Description of Artificial Sequence: Synthetic oligonucleotide
uuuuuaugugga

SEQ ID NO: 79927 - RNA, 11 nt, Artificial Sequence
  Description of Artificial Sequence: Synthetic oligonucleotide
gaauugguaga

SEQ ID NO: 79928 - RNA, 12 nt, Artificial Sequence
  Description of Artificial Sequence: Synthetic oligonucleotide
uagacuuggaga

SEQ ID NO: 79929 - RNA, 12 nt, Artificial Sequence
  Description of Artificial Sequence: Synthetic oligonucleotide
uacaguauucca

SEQ ID NO: 79930 - RNA, 14 nt, Artificial Sequence
  Description of Artificial Sequence: Synthetic oligonucleotide
cacugaugaauuaa

SEQ ID NO: 79931 - RNA, 11 nt, Artificial Sequence
  Description of Artificial Sequence: Synthetic oligonucleotide
cacaucaucac

SEQ ID NO: 79932 - RNA, 12 nt, Artificial Sequence
  Description of Artificial Sequence: Synthetic oligonucleotide
ucaccaaacaga

SEQ ID NO: 79933 - RNA, 11 nt, Artificial Sequence
  Description of Artificial Sequence: Synthetic oligonucleotide
gaacaugaugg

SEQ ID NO: 79934 - RNA, 11 nt, Artificial Sequence
  Description of Artificial Sequence: Synthetic oligonucleotide
auguagacugc

SEQ ID NO: 79935 - RNA, 12 nt, Artificial Sequence
  Description of Artificial Sequence: Synthetic oligonucleotide
gaucuauuuaug

SEQ ID NO: 79936 - RNA, 11 nt, Artificial Sequence
  Description of Artificial Sequence: Synthetic oligonucleotide
cacuauuauca

SEQ ID NO: 79937 - RNA, 10 nt, Artificial Sequence
  Description of Artificial Sequence: Synthetic oligonucleotide
ucaguucugc

SEQ ID NO: 79938 - RNA, 12 nt, Artificial Sequence
  Description of Artificial Sequence: Synthetic oligonucleotide
gauuaaaccuac

SEQ ID NO: 79939 - RNA, 12 nt, Artificial Sequence
  Description of Artificial Sequence: Synthetic oligonucleotide
uaaaauccuucu

SEQ ID NO: 79940 - RNA, 11 nt, Artificial Sequence
  Description of Artificial Sequence: Synthetic oligonucleotide
augcuguagac

SEQ ID NO: 79941 - RNA, 12 nt, Artificial Sequence
  Description of Artificial Sequence: Synthetic oligonucleotide
ugauaggaauag

SEQ ID NO: 79942 - RNA, 10 nt, Artificial Sequence
  Description of Artificial Sequence: Synthetic oligonucleotide
auggcccuga

SEQ ID NO: 79943 - RNA, 10 nt, Artificial Sequence
  Description of Artificial Sequence: Synthetic oligonucleotide
uccucaagca

SEQ ID NO: 79944 - RNA, 9 nt, Artificial Sequence
  Description of Artificial Sequence: Synthetic oligonucleotide
uucagccca

SEQ ID NO: 79945 - RNA, 10 nt, Artificial Sequence
  Description of Artificial Sequence: Synthetic oligonucleotide
cugcugaacc

SEQ ID NO: 79946 - RNA, 11 nt, Artificial Sequence
  Description of Artificial Sequence: Synthetic oligonucleotide
aguucucuuca

SEQ ID NO: 79947 - RNA, 10 nt, Artificial Sequence
  Description of Artificial Sequence: Synthetic oligonucleotide
cagccuagag

SEQ ID NO: 79948 - RNA, 12 nt, Artificial Sequence
  Description of Artificial Sequence: Synthetic oligonucleotide
ucugugaagugu

SEQ ID NO: 79949 - RNA, 13 nt, Artificial Sequence
  Description of Artificial Sequence: Synthetic oligonucleotide
gagaaaauuucaa

SEQ ID NO: 79950 - RNA, 10 nt, Artificial Sequence
  Description of Artificial Sequence: Synthetic oligonucleotide
auccuccuga

SEQ ID NO: 79951 - RNA, 11 nt, Artificial Sequence
  Description of Artificial Sequence: Synthetic oligonucleotide
ugacaucauau

SEQ ID NO: 79952 - RNA, 12 nt, Artificial Sequence
  Description of Artificial Sequence: Synthetic oligonucleotide
aucuucaucaua

SEQ ID NO: 79953 - RNA, 12 nt, Artificial Sequence
  Description of Artificial Sequence: Synthetic oligonucleotide
acuagcuauuaa

SEQ ID NO: 79954 - RNA, 13 nt, Artificial Sequence
  Description of Artificial Sequence: Synthetic oligonucleotide
cucuacuaaaaau

SEQ ID NO: 79955 - RNA, 11 nt, Artificial Sequence
  Description of Artificial Sequence: Synthetic oligonucleotide
cuaucucgccu

SEQ ID NO: 79956 - RNA, 12 nt, Artificial Sequence
  Description of Artificial Sequence: Synthetic oligonucleotide
uucgguccaguu

SEQ ID NO: 79957 - RNA, 10 nt, Artificial Sequence
  Description of Artificial Sequence: Synthetic oligonucleotide
auguagccgc

SEQ ID NO: 79958 - RNA, 11 nt, Artificial Sequence
  Description of Artificial Sequence: Synthetic oligonucleotide
gaggagacuug

SEQ ID NO: 79959 - RNA, 11 nt, Artificial Sequence
  Description of Artificial Sequence: Synthetic oligonucleotide
aguagugagga

SEQ ID NO: 79960 - RNA, 13 nt, Artificial Sequence
  Description of Artificial Sequence: Synthetic oligonucleotide
agaugaguacaaa

SEQ ID NO: 79961 - RNA, 12 nt, Artificial Sequence
  Description of Artificial Sequence: Synthetic oligonucleotide
uuguuaaugggc

SEQ ID NO: 79962 - RNA, 12 nt, Artificial Sequence
  Description of Artificial Sequence: Synthetic oligonucleotide
uuuuaauuuauu

SEQ ID NO: 79963 - RNA, 11 nt, Artificial Sequence
  Description of Artificial Sequence: Synthetic oligonucleotide
auuuaaauaug

SEQ ID NO: 79964 - RNA, 12 nt, Artificial Sequence
  Description of Artificial Sequence: Synthetic oligonucleotide
auccuuuguuuc

SEQ ID NO: 79965 - RNA, 13 nt, Artificial Sequence
  Description of Artificial Sequence: Synthetic oligonucleotide
gucuaaguguuug

SEQ ID NO: 79966 - RNA, 11 nt, Artificial Sequence
  Description of Artificial Sequence: Synthetic oligonucleotide
ccugugacaaa

SEQ ID NO: 79967 - RNA, 12 nt, Artificial Sequence
  Description of Artificial Sequence: Synthetic oligonucleotide
caggcugaauua

SEQ ID NO: 79968 - RNA, 13 nt, Artificial Sequence
  Description of Artificial Sequence: Synthetic oligonucleotide
ucauucuuacaau

SEQ ID NO: 79969 - RNA, 14 nt, Artificial Sequence
  Description of Artificial Sequence: Synthetic oligonucleotide
cauucuuacaauug

SEQ ID NO: 79970 - RNA, 11 nt, Artificial Sequence
  Description of Artificial Sequence: Synthetic oligonucleotide
agagaguguac

SEQ ID NO: 79971 - RNA, 11 nt, Artificial Sequence
  Description of Artificial Sequence: Synthetic oligonucleotide
gaacucagcag

SEQ ID NO: 79972 - RNA, 12 nt, Artificial Sequence
  Description of Artificial Sequence: Synthetic oligonucleotide
uuauuuucagua

SEQ ID NO: 79973 - RNA, 11 nt, Artificial Sequence
  Description of Artificial Sequence: Synthetic oligonucleotide
cuuaaauggaa

SEQ ID NO: 79974 - RNA, 12 nt, Artificial Sequence
  Description of Artificial Sequence: Synthetic oligonucleotide
gccuaaaauugu

SEQ ID NO: 79975 - RNA, 12 nt, Artificial Sequence
  Description of Artificial Sequence: Synthetic oligonucleotide
acuaacaucugg

SEQ ID NO: 79976 - RNA, 11 nt, Artificial Sequence
  Description of Artificial Sequence: Synthetic oligonucleotide
gacugugagcu

SEQ ID NO: 79977 - RNA, 13 nt, Artificial Sequence
  Description of Artificial Sequence: Synthetic oligonucleotide
gcuuuuuauuaau

SEQ ID NO: 79978 - RNA, 12 nt, Artificial Sequence
  Description of Artificial Sequence: Synthetic oligonucleotide
ucuucuuacauu

SEQ ID NO: 79979 - RNA, 14 nt, Artificial Sequence
  Description of Artificial Sequence: Synthetic oligonucleotide
auuuguaaaaaugu

SEQ ID NO: 79980 - RNA, 14 nt, Artificial Sequence
  Description of Artificial Sequence: Synthetic oligonucleotide
ucuuaauucauauu

SEQ ID NO: 79981 - RNA, 12 nt, Artificial Sequence
  Description of Artificial Sequence: Synthetic oligonucleotide
aacuaaucauga

SEQ ID NO: 79982 - RNA, 11 nt, Artificial Sequence
  Description of Artificial Sequence: Synthetic oligonucleotide
cugcucuuggg

SEQ ID NO: 79983 - RNA, 12 nt, Artificial Sequence
  Description of Artificial Sequence: Synthetic oligonucleotide
aguagcuuugag

SEQ ID NO: 79984 - RNA, 13 nt, Artificial Sequence
  Description of Artificial Sequence: Synthetic oligonucleotide
acguaauauuuca

SEQ ID NO: 79985 - RNA, 12 nt, Artificial Sequence
  Description of Artificial Sequence: Synthetic oligonucleotide
auucucuucacu

SEQ ID NO: 79986 - RNA, 13 nt, Artificial Sequence
  Description of Artificial Sequence: Synthetic oligonucleotide
uaaugcuaagaaa

SEQ ID NO: 79987 - RNA, 11 nt, Artificial Sequence
  Description of Artificial Sequence: Synthetic oligonucleotide
cugaaaaucaa

SEQ ID NO: 79988 - RNA, 13 nt, Artificial Sequence
  Description of Artificial Sequence: Synthetic oligonucleotide
auaugauuacuuu

SEQ ID NO: 79989 - RNA, 13 nt, Artificial Sequence
  Description of Artificial Sequence: Synthetic oligonucleotide
auuuuguucuaca

SEQ ID NO: 79990 - RNA, 11 nt, Artificial Sequence
  Description of Artificial Sequence: Synthetic oligonucleotide
ccgggacucuc

SEQ ID NO: 79991 - RNA, 13 nt, Artificial Sequence
  Description of Artificial Sequence: Synthetic oligonucleotide
cuuuaaaguaaag

SEQ ID NO: 79992 - RNA, 12 nt, Artificial Sequence
  Description of Artificial Sequence: Synthetic oligonucleotide
cuggaagccugg

SEQ ID NO: 79993 - RNA, 13 nt, Artificial Sequence
  Description of Artificial Sequence: Synthetic oligonucleotide
aaacaaaagagag

SEQ ID NO: 79994 - RNA, 12 nt, Artificial Sequence
  Description of Artificial Sequence: Synthetic oligonucleotide
ucaguuaugccg

SEQ ID NO: 79995 - RNA, 12 nt, Artificial Sequence
  Description of Artificial Sequence: Synthetic oligonucleotide
aaaagaagucca

SEQ ID NO: 79996 - RNA, 10 nt, Artificial Sequence
  Description of Artificial Sequence: Synthetic oligonucleotide
ggugagguua

SEQ ID NO: 79997 - RNA, 10 nt, Artificial Sequence
  Description of Artificial Sequence: Synthetic oligonucleotide
ggaagaggac

SEQ ID NO: 79998 - RNA, 12 nt, Artificial Sequence
  Description of Artificial Sequence: Synthetic oligonucleotide
agcaaguauugu

SEQ ID NO: 79999 - RNA, 11 nt, Artificial Sequence
  Description of Artificial Sequence: Synthetic oligonucleotide
uuguagcacuc

SEQ ID NO: 80000 - RNA, 13 nt, Artificial Sequence
  Description of Artificial Sequence: Synthetic oligonucleotide
caaaaccacaaau

SEQ ID NO: 80001 - RNA, 11 nt, Artificial Sequence
  Description of Artificial Sequence: Synthetic oligonucleotide
aagcccauaca

SEQ ID NO: 80002 - RNA, 10 nt, Artificial Sequence
  Description of Artificial Sequence: Synthetic oligonucleotide
gcccauacag

SEQ ID NO: 80003 - RNA, 11 nt, Artificial Sequence
  Description of Artificial Sequence: Synthetic oligonucleotide
agaaaccuucc

SEQ ID NO: 80004 - RNA, 9 nt, Artificial Sequence
  Description of Artificial Sequence: Synthetic oligonucleotide
uauaccuac

SEQ ID NO: 80005 - RNA, 12 nt, Artificial Sequence
  Description of Artificial Sequence: Synthetic oligonucleotide
ccaguuuucgga

SEQ ID NO: 80006 - RNA, 8 nt, Artificial Sequence
  Description of Artificial Sequence: Synthetic oligonucleotide
gaacaggg

SEQ ID NO: 80007 - RNA, 12 nt, Artificial Sequence
  Description of Artificial Sequence: Synthetic oligonucleotide
uaacuuuccagu

SEQ ID NO: 80008 - RNA, 13 nt, Artificial Sequence
  Description of Artificial Sequence: Synthetic oligonucleotide
aaguuugguuuug

SEQ ID NO: 80009 - RNA, 11 nt, Artificial Sequence
  Description of Artificial Sequence: Synthetic oligonucleotide
uucccacugua

SEQ ID NO: 80010 - RNA, 12 nt, Artificial Sequence
  Description of Artificial Sequence: Synthetic oligonucleotide
gauaccauauga

SEQ ID NO: 80011 - RNA, 10 nt, Artificial Sequence
  Description of Artificial Sequence: Synthetic oligonucleotide
acaugggcug

SEQ ID NO: 80012 - RNA, 12 nt, Artificial Sequence
  Description of Artificial Sequence: Synthetic oligonucleotide
aacuuuuucaua

SEQ ID NO: 80013 - RNA, 11 nt, Artificial Sequence
  Description of Artificial Sequence: Synthetic oligonucleotide
augaggccgga

SEQ ID NO: 80014 - RNA, 10 nt, Artificial Sequence
  Description of Artificial Sequence: Synthetic oligonucleotide
cugcauuugu

SEQ ID NO: 80015 - RNA, 12 nt, Artificial Sequence
  Description of Artificial Sequence: Synthetic oligonucleotide
auguuuacuacc

SEQ ID NO: 80016 - RNA, 14 nt, Artificial Sequence
  Description of Artificial Sequence: Synthetic oligonucleotide
auuuuuugaugaaa

SEQ ID NO: 80017 - RNA, 13 nt, Artificial Sequence
  Description of Artificial Sequence: Synthetic oligonucleotide
agugugugaauuu

SEQ ID NO: 80018 - RNA, 12 nt, Artificial Sequence
  Description of Artificial Sequence: Synthetic oligonucleotide
agcaauguaugu

SEQ ID NO: 80019 - RNA, 13 nt, Artificial Sequence
  Description of Artificial Sequence: Synthetic oligonucleotide
aagcacauauaua

SEQ ID NO: 80020 - RNA, 13 nt, Artificial Sequence
  Description of Artificial Sequence: Synthetic oligonucleotide
uaauaguuucucc

SEQ ID NO: 80021 - RNA, 12 nt, Artificial Sequence
  Description of Artificial Sequence: Synthetic oligonucleotide
guuucuccaaau

SEQ ID NO: 80022 - RNA, 12 nt, Artificial Sequence
  Description of Artificial Sequence: Synthetic oligonucleotide
acuuccuagaaa

SEQ ID NO: 80023 - RNA, 12 nt, Artificial Sequence
  Description of Artificial Sequence: Synthetic oligonucleotide
acaccauauaug

SEQ ID NO: 80024 - RNA, 13 nt, Artificial Sequence
  Description of Artificial Sequence: Synthetic oligonucleotide
uauaugaauggag

SEQ ID NO: 80025 - RNA, 12 nt, Artificial Sequence
  Description of Artificial Sequence: Synthetic oligonucleotide
cauuuacaggga

SEQ ID NO: 80026 - RNA, 12 nt, Artificial Sequence
  Description of Artificial Sequence: Synthetic oligonucleotide
auuuacagggac

SEQ ID NO: 80027 - RNA, 9 nt, Artificial Sequence
  Description of Artificial Sequence: Synthetic oligonucleotide
gggaccuga

SEQ ID NO: 80028 - RNA, 13 nt, Artificial Sequence
  Description of Artificial Sequence: Synthetic oligonucleotide
guuugacugcauc

SEQ ID NO: 80029 - RNA, 12 nt, Artificial Sequence
  Description of Artificial Sequence: Synthetic oligonucleotide
uugacugcaucg

SEQ ID NO: 80030 - RNA, 11 nt, Artificial Sequence
  Description of Artificial Sequence: Synthetic oligonucleotide
aguucacaggg

SEQ ID NO: 80031 - RNA, 12 nt, Artificial Sequence
  Description of Artificial Sequence: Synthetic oligonucleotide
gcaccucugucc

SEQ ID NO: 80032 - RNA, 14 nt, Artificial Sequence
  Description of Artificial Sequence: Synthetic oligonucleotide
guuugucuuuuuaa

SEQ ID NO: 80033 - RNA, 13 nt, Artificial Sequence
  Description of Artificial Sequence: Synthetic oligonucleotide
uugucuuuuuaag

SEQ ID NO: 80034 - RNA, 12 nt, Artificial Sequence
  Description of Artificial Sequence: Synthetic oligonucleotide
cuaaagguuguc

SEQ ID NO: 80035 - RNA, 11 nt, Artificial Sequence
  Description of Artificial Sequence: Synthetic oligonucleotide
agguugucgac

SEQ ID NO: 80036 - RNA, 12 nt, Artificial Sequence
  Description of Artificial Sequence: Synthetic oligonucleotide
ccuggcaauugu

SEQ ID NO: 80037 - RNA, 11 nt, Artificial Sequence
  Description of Artificial Sequence: Synthetic oligonucleotide
guggugcgagg

SEQ ID NO: 80038 - RNA, 12 nt, Artificial Sequence
  Description of Artificial Sequence: Synthetic oligonucleotide
gagacaugaaau

SEQ ID NO: 80039 - RNA, 12 nt, Artificial Sequence
  Description of Artificial Sequence: Synthetic oligonucleotide
uauauuucucca

SEQ ID NO: 80040 - RNA, 9 nt, Artificial Sequence
  Description of Artificial Sequence: Synthetic oligonucleotide
augaaggcu

SEQ ID NO: 80041 - RNA, 10 nt, Artificial Sequence
  Description of Artificial Sequence: Synthetic oligonucleotide
cuggaguggu

SEQ ID NO: 80042 - RNA, 10 nt, Artificial Sequence
  Description of Artificial Sequence: Synthetic oligonucleotide
ggaagagagg

SEQ ID NO: 80043 - RNA, 11 nt, Artificial Sequence
  Description of Artificial Sequence: Synthetic oligonucleotide
uugcaucgggc

SEQ ID NO: 80044 - RNA, 12 nt, Artificial Sequence
  Description of Artificial Sequence: Synthetic oligonucleotide
uauccuacugug

SEQ ID NO: 80045 - RNA, 12 nt, Artificial Sequence
  Description of Artificial Sequence: Synthetic oligonucleotide
ccuacuguguaa

SEQ ID NO: 80046 - RNA, 11 nt, Artificial Sequence
  Description of Artificial Sequence: Synthetic oligonucleotide
cuuguagugua

SEQ ID NO: 80047 - RNA, 12 nt, Artificial Sequence
  Description of Artificial Sequence: Synthetic oligonucleotide
cuuuguugauug

SEQ ID NO: 80048 - RNA, 13 nt, Artificial Sequence
  Description of Artificial Sequence: Synthetic oligonucleotide
uuguugauugaaa

SEQ ID NO: 80049 - RNA, 14 nt, Artificial Sequence
  Description of Artificial Sequence: Synthetic oligonucleotide
ucuuuuucuuccau

SEQ ID NO: 80050 - RNA, 12 nt, Artificial Sequence
  Description of Artificial Sequence: Synthetic oligonucleotide
aucuuccuucua

SEQ ID NO: 80051 - RNA, 12 nt, Artificial Sequence
  Description of Artificial Sequence: Synthetic oligonucleotide
ugaaugcuucau

SEQ ID NO: 80052 - RNA, 12 nt, Artificial Sequence
  Description of Artificial Sequence: Synthetic oligonucleotide
gaaugcuucaug

SEQ ID NO: 80053 - RNA, 12 nt, Artificial Sequence
  Description of Artificial Sequence: Synthetic oligonucleotide
auucuacuuuga

SEQ ID NO: 80054 - RNA, 12 nt, Artificial Sequence
  Description of Artificial Sequence: Synthetic oligonucleotide
gcaacuacagac

SEQ ID NO: 80055 - RNA, 12 nt, Artificial Sequence
  Description of Artificial Sequence: Synthetic oligonucleotide
accaaggucaac

SEQ ID NO: 80056 - RNA, 12 nt, Artificial Sequence
  Description of Artificial Sequence: Synthetic oligonucleotide
gacuaucucgac

SEQ ID NO: 80057 - RNA, 12 nt, Artificial Sequence
  Description of Artificial Sequence: Synthetic oligonucleotide
accuucccaaac

SEQ ID NO: 80058 - RNA, 13 nt, Artificial Sequence
  Description of Artificial Sequence: Synthetic oligonucleotide
caagcuuagaacu

SEQ ID NO: 80059 - RNA, 14 nt, Artificial Sequence
  Description of Artificial Sequence: Synthetic oligonucleotide
gcuuagaacuuuaa

SEQ ID NO: 80060 - RNA, 13 nt, Artificial Sequence
  Description of Artificial Sequence: Synthetic oligonucleotide
aacuuuaagcaac

SEQ ID NO: 80061 - RNA, 10 nt, Artificial Sequence
  Description of Artificial Sequence: Synthetic oligonucleotide
agaccaccac

SEQ ID NO: 80062 - RNA, 13 nt, Artificial Sequence
  Description of Artificial Sequence: Synthetic oligonucleotide
cgagaaauaaagu

SEQ ID NO: 80063 - RNA, 13 nt, Artificial Sequence
  Description of Artificial Sequence: Synthetic oligonucleotide
gagaaauaaaguu

SEQ ID NO: 80064 - RNA, 11 nt, Artificial Sequence
  Description of Artificial Sequence: Synthetic oligonucleotide
ggaaaugaucc

SEQ ID NO: 80065 - RNA, 12 nt, Artificial Sequence
  Description of Artificial Sequence: Synthetic oligonucleotide
aagaaaugaaac

SEQ ID NO: 80066 - RNA, 12 nt, Artificial Sequence
  Description of Artificial Sequence: Synthetic oligonucleotide
uuuccauccucc

SEQ ID NO: 80067 - RNA, 14 nt, Artificial Sequence
  Description of Artificial Sequence: Synthetic oligonucleotide
cugaaaaucuuuga

SEQ ID NO: 80068 - RNA, 10 nt, Artificial Sequence
  Description of Artificial Sequence: Synthetic oligonucleotide
gccguucagg

SEQ ID NO: 80069 - RNA, 12 nt, Artificial Sequence
  Description of Artificial Sequence: Synthetic oligonucleotide
aggguccagaag

SEQ ID NO: 80070 - RNA, 12 nt, Artificial Sequence
  Description of Artificial Sequence: Synthetic oligonucleotide
caagacugcuug

SEQ ID NO: 80071 - RNA, 12 nt, Artificial Sequence
  Description of Artificial Sequence: Synthetic oligonucleotide
ccaugucuuugg

SEQ ID NO: 80072 - RNA, 10 nt, Artificial Sequence
  Description of Artificial Sequence: Synthetic oligonucleotide
ccugaaacac

SEQ ID NO: 80073 - RNA, 11 nt, Artificial Sequence
  Description of Artificial Sequence: Synthetic oligonucleotide
cucuguaccuc

SEQ ID NO: 80074 - RNA, 11 nt, Artificial Sequence
  Description of Artificial Sequence: Synthetic oligonucleotide
gcaagacaaga

SEQ ID NO: 80075 - RNA, 12 nt, Artificial Sequence
  Description of Artificial Sequence: Synthetic oligonucleotide
caagacaagaaa

SEQ ID NO: 80076 - RNA, 11 nt, Artificial Sequence
  Description of Artificial Sequence: Synthetic oligonucleotide
guacaagaucc

SEQ ID NO: 80077 - RNA, 11 nt, Artificial Sequence
  Description of Artificial Sequence: Synthetic oligonucleotide
guacuugcaga

SEQ ID NO: 80078 - RNA, 12 nt, Artificial Sequence
  Description of Artificial Sequence: Synthetic oligonucleotide
gaucgauacaga

SEQ ID NO: 80079 - RNA, 12 nt, Artificial Sequence
  Description of Artificial Sequence: Synthetic oligonucleotide
auaaaaauaaau

SEQ ID NO: 80080 - RNA, 12 nt, Artificial Sequence
  Description of Artificial Sequence: Synthetic oligonucleotide
aaaaauaaauau

SEQ ID NO: 80081 - RNA, 12 nt, Artificial Sequence
  Description of Artificial Sequence: Synthetic oligonucleotide
uugacugcugug

SEQ ID NO: 80082 - RNA, 12 nt, Artificial Sequence
  Description of Artificial Sequence: Synthetic oligonucleotide
gagaugagagac

SEQ ID NO: 80083 - RNA, 9 nt, Artificial Sequence
  Description of Artificial Sequence: Synthetic oligonucleotide
cccacuugg

SEQ ID NO: 80084 - RNA, 2377 nt, Homo sapiens
acccccgagcugugcugcucgcggccgccaccgccgggccccggccgucccuggcuccccuccugccucgagaagggcagggcuucucagaggcuuggcgggaaaaagaacggagggagggaucgcgcugaguauaaaagccgguuuucggggcuuuaucuaacucgcuguaguaauuccagcgagaggcagagggagcgagcgggcggccggcuaggguggaagagccgggcgagcagagcugcgcugcgggcguccugggaagggagauccggagcgaauagggggcuucgccucuggcccagcccucccgcugaucccccagccagcgguccgcaacccuugccgcauccacgaaacuuugcccauagcagcgggcgggcacuuugcacuggaacuuacaacacccgagcaaggacgcgacucucccgacgcggggaggcuauucugcccauuuggggacacuuccccgccgcugccaggacccgcuucucugaaaggcucuccuugcagcugcuuagacgcuggauuuuuuucggguaguggaaaaccagcagccucccgcgacgaugccccucaacguuagcuucaccaacaggaacuaugaccucgacuacgacucggugcagccguauuucuacugcgacgaggaggagaacuucuaccagcagcagcagcagagcgagcugcagcccccggcgcccagcgaggauaucuggaagaaauucgagcugcugcccaccccgccccuguccccuagccgccgcuccgggcucugcucgcccuccuacguugcggucacacccuucucccuucggggagacaacgacggcgguggcgggagcuucuccacggccgaccagcuggagauggugaccgagcugcugggaggagacauggugaaccagaguuucaucugcgacccggacgacgagaccuucaucaaaaacaucaucauccaggacuguauguggagcggcuucucggccgccgccaagcucgucucagagaagcuggccuccuaccaggcugcgcgcaaagacagcggcagcccgaaccccgcccgcggccacagcgucugcuccaccuccagcuuguaccugcaggaucugagcgccgccgccucagagugcaucgaccccucgguggucuuccccuacccucucaacgacagcagcucgcccaaguccugcgccucgcaagacuccagcgccuucucuccguccucggauucucugcucuccucgacggaguccuccccgcagggcagccccgagccccuggugcuccaugaggagacaccgcccaccaccagcagcgacucugaggaggaacaagaagaugaggaagaaaucgauguuguuucuguggaaaagaggcaggcuccuggcaaaaggucagagucuggaucaccuucugcuggaggccacagcaaaccuccucacagcccacugguccucaagaggugccacgucuccacacaucagcacaacuacgcagcgccucccuccacucggaaggacuauccugcugccaagagggucaaguuggacagugucagaguccugagacagaucagcaacaaccgaaaaugcaccagccccagguccucggacaccgaggagaaugucaagaggcgaacacacaacgucuuggagcgccagaggaggaacgagcuaaaacggagcuuuuuugcccugcgugaccagaucccggaguuggaaaacaaugaaaaggcccccaagguaguuauccuuaaaaaagccacagcauacauccuguccguccaagcagaggagcaaaagcucauuucugaagaggacuuguugcggaaacgacgagaacaguugaaacacaaacuugaacagcuacggaacucuugugcguaaggaaaaguaaggaaaacgauuccuucuaacagaaauguccugagcaaucaccuaugaacuuguuucaaaugcaugaucaaaugcaaccucacaaccuuggcugagucuugagacugaaagauuuagccauaauguaaacugccucaaauuggacuuugggcauaaaagaacuuuuuuaugcuuaccaucuuuuuuuuuucuuuaacagauuuguauuuaagaauuguuuuuaaaaaauuuuaagauuuacacaauguuucucuguaaauauugccauuaaauguaaauaacuuuaauaaaacguuuauagcaguuacacagaauuucaauccuaguauauaguaccuaguauuauagguacuauaaacccuaauuuuuuuuauuuaaguacauuuugcuuuuuaaaguugauuuuuuucuauuguuuuuagaaaaaauaaaauaacuggcaaauauaucauugagccaaaaaaaaaaaaaaaaaaaaa

SEQ ID NO: 80085 - RNA, 19 nt, Artificial Sequence
  Description of Artificial Sequence: Synthetic oligonucleotide
acccccgagcugugcugcu

SEQ ID NO: 80086 - RNA, 19 nt, Artificial Sequence
  Description of Artificial Sequence: Synthetic oligonucleotide
ucgcggccgccaccgccgg

SEQ ID NO: 80087 - RNA, 19 nt, Artificial Sequence
  Description of Artificial Sequence: Synthetic oligonucleotide
ggccccggccgucccuggc

SEQ ID NO: 80088 - RNA, 19 nt, Artificial Sequence
  Description of Artificial Sequence: Synthetic oligonucleotide
cuccccuccugccucgaga

SEQ ID NO: 80089 - RNA, 19 nt, Artificial Sequence
  Description of Artificial Sequence: Synthetic oligonucleotide
aagggcagggcuucucaga

SEQ ID NO: 80090 - RNA, 19 nt, Artificial Sequence
  Description of Artificial Sequence: Synthetic oligonucleotide
aggcuuggcgggaaaaaga

SEQ ID NO: 80091 - RNA, 19 nt, Artificial Sequence
  Description of Artificial Sequence: Synthetic oligonucleotide
aacggagggagggaucgcg

SEQ ID NO: 80092 - RNA, 19 nt, Artificial Sequence
  Description of Artificial Sequence: Synthetic oligonucleotide
gcugaguauaaaagccggu

SEQ ID NO: 80093 - RNA, 19 nt, Artificial Sequence
  Description of Artificial Sequence: Synthetic oligonucleotide
uuuucggggcuuuaucuaa

SEQ ID NO: 80094 - RNA, 19 nt, Artificial Sequence
  Description of Artificial Sequence: Synthetic oligonucleotide
acucgcuguaguaauucca

SEQ ID NO: 80095 - RNA, 19 nt, Artificial Sequence
  Description of Artificial Sequence: Synthetic oligonucleotide
agcgagaggcagagggagc

SEQ ID NO: 80096 - RNA, 19 nt, Artificial Sequence
  Description of Artificial Sequence: Synthetic oligonucleotide
cgagcgggcggccggcuag

SEQ ID NO: 80097 - RNA, 19 nt, Artificial Sequence
  Description of Artificial Sequence: Synthetic oligonucleotide
ggguggaagagccgggcga

SEQ ID NO: 80098 - RNA, 19 nt, Artificial Sequence
  Description of Artificial Sequence: Synthetic oligonucleotide
agcagagcugcgcugcggg

SEQ ID NO: 80099 - RNA, 19 nt, Artificial Sequence
  Description of Artificial Sequence: Synthetic oligonucleotide
gcguccugggaagggagau

SEQ ID NO: 80100 - RNA, 19 nt, Artificial Sequence
  Description of Artificial Sequence: Synthetic oligonucleotide
uccggagcgaauagggggc

SEQ ID NO: 80101 - RNA, 19 nt, Artificial Sequence
  Description of Artificial Sequence: Synthetic oligonucleotide
cuucgccucuggcccagcc

SEQ ID NO: 80102 - RNA, 19 nt, Artificial Sequence
  Description of Artificial Sequence: Synthetic oligonucleotide
ccucccgcugaucccccag

SEQ ID NO: 80103 - RNA, 19 nt, Artificial Sequence
  Description of Artificial Sequence: Synthetic oligonucleotide
gccagcgguccgcaacccu

SEQ ID NO: 80104 - RNA, 19 nt, Artificial Sequence
  Description of Artificial Sequence: Synthetic oligonucleotide
uugccgcauccacgaaacu

SEQ ID NO: 80105 - RNA, 19 nt, Artificial Sequence
  Description of Artificial Sequence: Synthetic oligonucleotide
uuugcccauagcagcgggc

SEQ ID NO: 80106 - RNA, 19 nt, Artificial Sequence
  Description of Artificial Sequence: Synthetic oligonucleotide
cgggcacuuugcacuggaa

SEQ ID NO: 80107 - RNA, 19 nt, Artificial Sequence
  Description of Artificial Sequence: Synthetic oligonucleotide
acuuacaacacccgagcaa

SEQ ID NO: 80108 - RNA, 19 nt, Artificial Sequence
  Description of Artificial Sequence: Synthetic oligonucleotide
aggacgcgacucucccgac

SEQ ID NO: 80109 - RNA, 19 nt, Artificial Sequence
  Description of Artificial Sequence: Synthetic oligonucleotide
cgcggggaggcuauucugc

SEQ ID NO: 80110 - RNA, 19 nt, Artificial Sequence
  Description of Artificial Sequence: Synthetic oligonucleotide
cccauuuggggacacuucc

SEQ ID NO: 80111 - RNA, 19 nt, Artificial Sequence
  Description of Artificial Sequence: Synthetic oligonucleotide
cccgccgcugccaggaccc

SEQ ID NO: 80112 - RNA, 19 nt, Artificial Sequence
  Description of Artificial Sequence: Synthetic oligonucleotide
cgcuucucugaaaggcucu

SEQ ID NO: 80113 - RNA, 19 nt, Artificial Sequence
  Description of Artificial Sequence: Synthetic oligonucleotide
uccuugcagcugcuuagac

SEQ ID NO: 80114 - RNA, 19 nt, Artificial Sequence
  Description of Artificial Sequence: Synthetic oligonucleotide
cgcuggauuuuuuucgggu

SEQ ID NO: 80115 - RNA, 19 nt, Artificial Sequence
  Description of Artificial Sequence: Synthetic oligonucleotide
uaguggaaaaccagcagcc

SEQ ID NO: 80116 - RNA, 19 nt, Artificial Sequence
  Description of Artificial Sequence: Synthetic oligonucleotide
cucccgcgacgaugccccu

SEQ ID NO: 80117 - RNA, 19 nt, Artificial Sequence
  Description of Artificial Sequence: Synthetic oligonucleotide
ucaacguuagcuucaccaa

SEQ ID NO: 80118 - RNA, 19 nt, Artificial Sequence
  Description of Artificial Sequence: Synthetic oligonucleotide
acaggaacuaugaccucga

SEQ ID NO: 80119 - RNA, 19 nt, Artificial Sequence
  Description of Artificial Sequence: Synthetic oligonucleotide
acuacgacucggugcagcc

SEQ ID NO: 80120 - RNA, 19 nt, Artificial Sequence
  Description of Artificial Sequence: Synthetic oligonucleotide
cguauuucuacugcgacga

SEQ ID NO: 80121 - RNA, 19 nt, Artificial Sequence
  Description of Artificial Sequence: Synthetic oligonucleotide
aggaggagaacuucuacca

SEQ ID NO: 80122 - RNA, 19 nt, Artificial Sequence
  Description of Artificial Sequence: Synthetic oligonucleotide
agcagcagcagcagagcga

SEQ ID NO: 80123 - RNA, 19 nt, Artificial Sequence
  Description of Artificial Sequence: Synthetic oligonucleotide
agcugcagcccccggcgcc

SEQ ID NO: 80124 - RNA, 19 nt, Artificial Sequence
  Description of Artificial Sequence: Synthetic oligonucleotide
ccagcgaggauaucuggaa

SEQ ID NO: 80125 - RNA, 19 nt, Artificial Sequence
  Description of Artificial Sequence: Synthetic oligonucleotide
agaaauucgagcugcugcc

SEQ ID NO: 80126 - RNA, 19 nt, Artificial Sequence
  Description of Artificial Sequence: Synthetic oligonucleotide
ccaccccgccccugucccc

SEQ ID NO: 80127 - RNA, 19 nt, Artificial Sequence
  Description of Artificial Sequence: Synthetic oligonucleotide
cuagccgccgcuccgggcu

SEQ ID NO: 80128 - RNA, 19 nt, Artificial Sequence
  Description of Artificial Sequence: Synthetic oligonucleotide
ucugcucgcccuccuacgu

SEQ ID NO: 80129 - RNA, 19 nt, Artificial Sequence
  Description of Artificial Sequence: Synthetic oligonucleotide
uugcggucacacccuucuc

SEQ ID NO: 80130 - RNA, 19 nt, Artificial Sequence
  Description of Artificial Sequence: Synthetic oligonucleotide
cccuucggggagacaacga

SEQ ID NO: 80131 - RNA, 19 nt, Artificial Sequence
  Description of Artificial Sequence: Synthetic oligonucleotide
acggcgguggcgggagcuu

SEQ ID NO: 80132 - RNA, 19 nt, Artificial Sequence
  Description of Artificial Sequence: Synthetic oligonucleotide
ucuccacggccgaccagcu

SEQ ID NO: 80133 - RNA, 19 nt, Artificial Sequence
  Description of Artificial Sequence: Synthetic oligonucleotide
uggagauggugaccgagcu

SEQ ID NO: 80134 - RNA, 19 nt, Artificial Sequence
  Description of Artificial Sequence: Synthetic oligonucleotide
ugcugggaggagacauggu

SEQ ID NO: 80135 - RNA, 19 nt, Artificial Sequence
  Description of Artificial Sequence: Synthetic oligonucleotide
ugaaccagaguuucaucug

SEQ ID NO: 80136 - RNA, 19 nt, Artificial Sequence
  Description of Artificial Sequence: Synthetic oligonucleotide
gcgacccggacgacgagac

SEQ ID NO: 80137 - RNA, 19 nt, Artificial Sequence
  Description of Artificial Sequence: Synthetic oligonucleotide
ccuucaucaaaaacaucau

SEQ ID NO: 80138 - RNA, 19 nt, Artificial Sequence
  Description of Artificial Sequence: Synthetic oligonucleotide
ucauccaggacuguaugug

SEQ ID NO: 80139 - RNA, 19 nt, Artificial Sequence
  Description of Artificial Sequence: Synthetic oligonucleotide
ggagcggcuucucggccgc

SEQ ID NO: 80140 - RNA, 19 nt, Artificial Sequence
  Description of Artificial Sequence: Synthetic oligonucleotide
ccgccaagcucgucucaga

SEQ ID NO: 80141 - RNA, 19 nt, Artificial Sequence
  Description of Artificial Sequence: Synthetic oligonucleotide
agaagcuggccuccuacca

SEQ ID NO: 80142 - RNA, 19 nt, Artificial Sequence
  Description of Artificial Sequence: Synthetic oligonucleotide
aggcugcgcgcaaagacag

SEQ ID NO: 80143 - RNA, 19 nt, Artificial Sequence
  Description of Artificial Sequence: Synthetic oligonucleotide
gcggcagcccgaaccccgc

SEQ ID NO: 80144 - RNA, 19 nt, Artificial Sequence
  Description of Artificial Sequence: Synthetic oligonucleotide
cccgcggccacagcgucug

SEQ ID NO: 80145 - RNA, 19 nt, Artificial Sequence
  Description of Artificial Sequence: Synthetic oligonucleotide
gcuccaccuccagcuugua

SEQ ID NO: 80146 - RNA, 19 nt, Artificial Sequence
  Description of Artificial Sequence: Synthetic oligonucleotide
accugcaggaucugagcgc

SEQ ID NO: 80147 - RNA, 19 nt, Artificial Sequence
  Description of Artificial Sequence: Synthetic oligonucleotide
ccgccgccucagagugcau

SEQ ID NO: 80148 - RNA, 19 nt, Artificial Sequence
  Description of Artificial Sequence: Synthetic oligonucleotide
ucgaccccucgguggucuu

SEQ ID NO: 80149 - RNA, 19 nt, Artificial Sequence
  Description of Artificial Sequence: Synthetic oligonucleotide
uccccuacccucucaacga

SEQ ID NO: 80150 - RNA, 19 nt, Artificial Sequence
  Description of Artificial Sequence: Synthetic oligonucleotide
acagcagcucgcccaaguc

SEQ ID NO: 80151 - RNA, 19 nt, Artificial Sequence
  Description of Artificial Sequence: Synthetic oligonucleotide
ccugcgccucgcaagacuc

SEQ ID NO: 80152 - RNA, 19 nt, Artificial Sequence
  Description of Artificial Sequence: Synthetic oligonucleotide
ccagcgccuucucuccguc

SEQ ID NO: 80153 - RNA, 19 nt, Artificial Sequence
  Description of Artificial Sequence: Synthetic oligonucleotide
ccucggauucucugcucuc

SEQ ID NO: 80154 - RNA, 19 nt, Artificial Sequence
  Description of Artificial Sequence: Synthetic oligonucleotide
ccucgacggaguccucccc

SEQ ID NO: 80155 - RNA, 19 nt, Artificial Sequence
  Description of Artificial Sequence: Synthetic oligonucleotide
cgcagggcagccccgagcc

SEQ ID NO: 80156 - RNA, 19 nt, Artificial Sequence
  Description of Artificial Sequence: Synthetic oligonucleotide
cccuggugcuccaugagga

SEQ ID NO: 80157 - RNA, 19 nt, Artificial Sequence
  Description of Artificial Sequence: Synthetic oligonucleotide
agacaccgcccaccaccag

SEQ ID NO: 80158 - RNA, 19 nt, Artificial Sequence
  Description of Artificial Sequence: Synthetic oligonucleotide
gcagcgacucugaggagga

SEQ ID NO: 80159 - RNA, 19 nt, Artificial Sequence
  Description of Artificial Sequence: Synthetic oligonucleotide
aacaagaagaugaggaaga

SEQ ID NO: 80160 - RNA, 19 nt, Artificial Sequence
  Description of Artificial Sequence: Synthetic oligonucleotide
aaaucgauguuguuucugu

SEQ ID NO: 80161 - RNA, 19 nt, Artificial Sequence
  Description of Artificial Sequence: Synthetic oligonucleotide
uggaaaagaggcaggcucc

SEQ ID NO: 80162 - RNA, 19 nt, Artificial Sequence
  Description of Artificial Sequence: Synthetic oligonucleotide
cuggcaaaaggucagaguc

SEQ ID NO: 80163 - RNA, 19 nt, Artificial Sequence
  Description of Artificial Sequence: Synthetic oligonucleotide
cuggaucaccuucugcugg

SEQ ID NO: 80164 - RNA, 19 nt, Artificial Sequence
  Description of Artificial Sequence: Synthetic oligonucleotide
gaggccacagcaaaccucc

SEQ ID NO: 80165 - RNA, 19 nt, Artificial Sequence
  Description of Artificial Sequence: Synthetic oligonucleotide
cucacagcccacugguccu

SEQ ID NO: 80166 - RNA, 19 nt, Artificial Sequence
  Description of Artificial Sequence: Synthetic oligonucleotide
ucaagaggugccacgucuc

SEQ ID NO: 80167 - RNA, 19 nt, Artificial Sequence
  Description of Artificial Sequence: Synthetic oligonucleotide
ccacacaucagcacaacua

SEQ ID NO: 80168 - RNA, 19 nt, Artificial Sequence
  Description of Artificial Sequence: Synthetic oligonucleotide
acgcagcgccucccuccac

SEQ ID NO: 80169 - RNA, 19 nt, Artificial Sequence
  Description of Artificial Sequence: Synthetic oligonucleotide
cucggaaggacuauccugc

SEQ ID NO: 80170 - RNA, 19 nt, Artificial Sequence
  Description of Artificial Sequence: Synthetic oligonucleotide
cugccaagagggucaaguu

SEQ ID NO: 80171 - RNA, 19 nt, Artificial Sequence
  Description of Artificial Sequence: Synthetic oligonucleotide
uggacagugucagaguccu

SEQ ID NO: 80172 - RNA, 19 nt, Artificial Sequence
  Description of Artificial Sequence: Synthetic oligonucleotide
ugagacagaucagcaacaa

SEQ ID NO: 80173 - RNA, 19 nt, Artificial Sequence
  Description of Artificial Sequence: Synthetic oligonucleotide
accgaaaaugcaccagccc

SEQ ID NO: 80174 - RNA, 19 nt, Artificial Sequence
  Description of Artificial Sequence: Synthetic oligonucleotide
ccagguccucggacaccga

SEQ ID NO: 80175 - RNA, 19 nt, Artificial Sequence
  Description of Artificial Sequence: Synthetic oligonucleotide
aggagaaugucaagaggcg

SEQ ID NO: 80176 - RNA, 19 nt, Artificial Sequence
  Description of Artificial Sequence: Synthetic oligonucleotide
gaacacacaacgucuugga

SEQ ID NO: 80177 - RNA, 19 nt, Artificial Sequence
  Description of Artificial Sequence: Synthetic oligonucleotide
agcgccagaggaggaacga

SEQ ID NO: 80178 - RNA, 19 nt, Artificial Sequence
  Description of Artificial Sequence: Synthetic oligonucleotide
agcuaaaacggagcuuuuu

SEQ ID NO: 80179 - RNA, 19 nt, Artificial Sequence
  Description of Artificial Sequence: Synthetic oligonucleotide
uugcccugcgugaccagau

SEQ ID NO: 80180 - RNA, 19 nt, Artificial Sequence
  Description of Artificial Sequence: Synthetic oligonucleotide
ucccggaguuggaaaacaa

SEQ ID NO: 80181 - RNA, 19 nt, Artificial Sequence
  Description of Artificial Sequence: Synthetic oligonucleotide
augaaaaggcccccaaggu

SEQ ID NO: 80182 - RNA, 19 nt, Artificial Sequence
  Description of Artificial Sequence: Synthetic oligonucleotide
uaguuauccuuaaaaaagc

SEQ ID NO: 80183 - RNA, 19 nt, Artificial Sequence
  Description of Artificial Sequence: Synthetic oligonucleotide
ccacagcauacauccuguc

SEQ ID NO: 80184 - RNA, 19 nt, Artificial Sequence
  Description of Artificial Sequence: Synthetic oligonucleotide
ccguccaagcagaggagca

SEQ ID NO: 80185 - RNA, 19 nt, Artificial Sequence
  Description of Artificial Sequence: Synthetic oligonucleotide
aaaagcucauuucugaaga

SEQ ID NO: 80186 - RNA, 19 nt, Artificial Sequence
  Description of Artificial Sequence: Synthetic oligonucleotide
aggacuuguugcggaaacg

SEQ ID NO: 80187 - RNA, 19 nt, Artificial Sequence
  Description of Artificial Sequence: Synthetic oligonucleotide
gacgagaacaguugaaaca

SEQ ID NO: 80188 - RNA, 19 nt, Artificial Sequence
  Description of Artificial Sequence: Synthetic oligonucleotide
acaaacuugaacagcuacg

SEQ ID NO: 80189 - RNA, 19 nt, Artificial Sequence
  Description of Artificial Sequence: Synthetic oligonucleotide
ggaacucuugugcguaagg

SEQ ID NO: 80190 - RNA, 19 nt, Artificial Sequence
  Description of Artificial Sequence: Synthetic oligonucleotide
gaaaaguaaggaaaacgau

SEQ ID NO: 80191 - RNA, 19 nt, Artificial Sequence
  Description of Artificial Sequence: Synthetic oligonucleotide
uuccuucuaacagaaaugu

SEQ ID NO: 80192 - RNA, 19 nt, Artificial Sequence
  Description of Artificial Sequence: Synthetic oligonucleotide
uccugagcaaucaccuaug

SEQ ID NO: 80193 - RNA, 19 nt, Artificial Sequence
  Description of Artificial Sequence: Synthetic oligonucleotide
gaacuuguuucaaaugcau

SEQ ID NO: 80194 - RNA, 19 nt, Artificial Sequence
  Description of Artificial Sequence: Synthetic oligonucleotide
ugaucaaaugcaaccucac

SEQ ID NO: 80195 - RNA, 19 nt, Artificial Sequence
  Description of Artificial Sequence: Synthetic oligonucleotide
caaccuuggcugagucuug

SEQ ID NO: 80196 - RNA, 19 nt, Artificial Sequence
  Description of Artificial Sequence: Synthetic oligonucleotide
gagacugaaagauuuagcc

SEQ ID NO: 80197 - RNA, 19 nt, Artificial Sequence
  Description of Artificial Sequence: Synthetic oligonucleotide
cauaauguaaacugccuca

SEQ ID NO: 80198 - RNA, 19 nt, Artificial Sequence
  Description of Artificial Sequence: Synthetic oligonucleotide
aaauuggacuuugggcaua

SEQ ID NO: 80199 - RNA, 19 nt, Artificial Sequence
  Description of Artificial Sequence: Synthetic oligonucleotide
aaaagaacuuuuuuaugcu

SEQ ID NO: 80200 - RNA, 19 nt, Artificial Sequence
  Description of Artificial Sequence: Synthetic oligonucleotide
cuuuaacagauuuguauuu

SEQ ID NO: 80201 - RNA, 19 nt, Artificial Sequence
  Description of Artificial Sequence: Synthetic oligonucleotide
uaagaauuguuuuuaaaaa

SEQ ID NO: 80202 - RNA, 19 nt, Artificial Sequence
  Description of Artificial Sequence: Synthetic oligonucleotide
aauuuuaagauuuacacaa

SEQ ID NO: 80203 - RNA, 19 nt, Artificial Sequence
  Description of Artificial Sequence: Synthetic oligonucleotide
auguuucucuguaaauauu

SEQ ID NO: 80204 - RNA, 19 nt, Artificial Sequence
  Description of Artificial Sequence: Synthetic oligonucleotide
ugccauuaaauguaaauaa

SEQ ID NO: 80205 - RNA, 19 nt, Artificial Sequence
  Description of Artificial Sequence: Synthetic oligonucleotide
acuuuaauaaaacguuuau

SEQ ID NO: 80206 - RNA, 19 nt, Artificial Sequence
  Description of Artificial Sequence: Synthetic oligonucleotide
uagcaguuacacagaauuu

SEQ ID NO: 80207 - RNA, 19 nt, Artificial Sequence
  Description of Artificial Sequence: Synthetic oligonucleotide
ucaauccuaguauauagua

SEQ ID NO: 80208 - RNA, 19 nt, Artificial Sequence
  Description of Artificial Sequence: Synthetic oligonucleotide
accuaguauuauagguacu

SEQ ID NO: 80209 - RNA, 19 nt, Artificial Sequence
  Description of Artificial Sequence: Synthetic oligonucleotide
uauaaacccuaauuuuuuu

SEQ ID NO: 80210 - RNA, 19 nt, Artificial Sequence
  Description of Artificial Sequence: Synthetic oligonucleotide
uuauuuaaguacauuuugc

SEQ ID NO: 80211 - RNA, 19 nt, Artificial Sequence
  Description of Artificial Sequence: Synthetic oligonucleotide
cuuuuuaaaguugauuuuu

SEQ ID NO: 80212 - RNA, 19 nt, Artificial Sequence
  Description of Artificial Sequence: Synthetic oligonucleotide
uuucuauuguuuuuagaaa

SEQ ID NO: 80213 - RNA, 19 nt, Artificial Sequence
  Description of Artificial Sequence: Synthetic oligonucleotide
aaaauaaaauaacuggcaa

SEQ ID NO: 80214 - RNA, 19 nt, Artificial Sequence
  Description of Artificial Sequence: Synthetic oligonucleotide
aauauaucauugagccaaa

SEQ ID NO: 80215 - RNA, 25 nt, Artificial Sequence
  Description of Artificial Sequence: Synthetic oligonucleotide
acccccgagcugugcugcucgcggc

SEQ ID NO: 80216 - RNA, 25 nt, Artificial Sequence
  Description of Artificial Sequence: Synthetic oligonucleotide
ccgccaccgccgggccccggccguc

SEQ ID NO: 80217 - RNA, 25 nt, Artificial Sequence
  Description of Artificial Sequence: Synthetic oligonucleotide
cccuggcuccccuccugccucgaga

SEQ ID NO: 80218 - RNA, 25 nt, Artificial Sequence
  Description of Artificial Sequence: Synthetic oligonucleotide
aagggcagggcuucucagaggcuug

SEQ ID NO: 80219 - RNA, 25 nt, Artificial Sequence
  Description of Artificial Sequence: Synthetic oligonucleotide
ggcgggaaaaagaacggagggaggg

SEQ ID NO: 80220 - RNA, 25 nt, Artificial Sequence
  Description of Artificial Sequence: Synthetic oligonucleotide
gaucgcgcugaguauaaaagccggu

SEQ ID NO: 80221 - RNA, 25 nt, Artificial Sequence
  Description of Artificial Sequence: Synthetic oligonucleotide
uuuucggggcuuuaucuaacucgcu

SEQ ID NO: 80222 - RNA, 25 nt, Artificial Sequence
  Description of Artificial Sequence: Synthetic oligonucleotide
uguaguaauuccagcgagaggcaga

SEQ ID NO: 80223 - RNA, 25 nt, Artificial Sequence
  Description of Artificial Sequence: Synthetic oligonucleotide
agggagcgagcgggcggccggcuag

SEQ ID NO: 80224 - RNA, 25 nt, Artificial Sequence
  Description of Artificial Sequence: Synthetic oligonucleotide
ggguggaagagccgggcgagcagag

SEQ ID NO: 80225 - RNA, 25 nt, Artificial Sequence
  Description of Artificial Sequence: Synthetic oligonucleotide
gcugcgcugcgggcguccugggaag

SEQ ID NO: 80226 - RNA, 25 nt, Artificial Sequence
  Description of Artificial Sequence: Synthetic oligonucleotide
gggagauccggagcgaauagggggc

SEQ ID NO: 80227 - RNA, 25 nt, Artificial Sequence
  Description of Artificial Sequence: Synthetic oligonucleotide
cuucgccucuggcccagcccucccg

SEQ ID NO: 80228 - RNA, 25 nt, Artificial Sequence
  Description of Artificial Sequence: Synthetic oligonucleotide
gcugaucccccagccagcgguccgc

SEQ ID NO: 80229 - RNA, 25 nt, Artificial Sequence
  Description of Artificial Sequence: Synthetic oligonucleotide
caacccuugccgcauccacgaaacu

SEQ ID NO: 80230 - RNA, 25 nt, Artificial Sequence
  Description of Artificial Sequence: Synthetic oligonucleotide
uuugcccauagcagcgggcgggcac

SEQ ID NO: 80231 - RNA, 25 nt, Artificial Sequence
  Description of Artificial Sequence: Synthetic oligonucleotide
cuuugcacuggaacuuacaacaccc

SEQ ID NO: 80232 - RNA, 25 nt, Artificial Sequence
  Description of Artificial Sequence: Synthetic oligonucleotide
cgagcaaggacgcgacucucccgac

SEQ ID NO: 80233 - RNA, 25 nt, Artificial Sequence
  Description of Artificial Sequence: Synthetic oligonucleotide
cgcggggaggcuauucugcccauuu

SEQ ID NO: 80234 - RNA, 25 nt, Artificial Sequence
  Description of Artificial Sequence: Synthetic oligonucleotide
uggggacacuuccccgccgcugcca

SEQ ID NO: 80235 - RNA, 25 nt, Artificial Sequence
  Description of Artificial Sequence: Synthetic oligonucleotide
aggacccgcuucucugaaaggcucu

SEQ ID NO: 80236 - RNA, 25 nt, Artificial Sequence
  Description of Artificial Sequence: Synthetic oligonucleotide
uccuugcagcugcuuagacgcugga

SEQ ID NO: 80237 - RNA, 25 nt, Artificial Sequence
  Description of Artificial Sequence: Synthetic oligonucleotide
auuuuuuucggguaguggaaaacca

SEQ ID NO: 80238 - RNA, 25 nt, Artificial Sequence
  Description of Artificial Sequence: Synthetic oligonucleotide
agcagccucccgcgacgaugccccu

SEQ ID NO: 80239 - RNA, 25 nt, Artificial Sequence
  Description of Artificial Sequence: Synthetic oligonucleotide
ucaacguuagcuucaccaacaggaa

SEQ ID NO: 80240 - RNA, 25 nt, Artificial Sequence
  Description of Artificial Sequence: Synthetic oligonucleotide
acuaugaccucgacuacgacucggu

SEQ ID NO: 80241 - RNA, 25 nt, Artificial Sequence
  Description of Artificial Sequence: Synthetic oligonucleotide
ugcagccguauuucuacugcgacga

SEQ ID NO: 80242 - RNA, 25 nt, Artificial Sequence
  Description of Artificial Sequence: Synthetic oligonucleotide
aggaggagaacuucuaccagcagca

SEQ ID NO: 80243 - RNA, 25 nt, Artificial Sequence
  Description of Artificial Sequence: Synthetic oligonucleotide
agcagcagagcgagcugcagccccc

SEQ ID NO: 80244 - RNA, 25 nt, Artificial Sequence
  Description of Artificial Sequence: Synthetic oligonucleotide
cggcgcccagcgaggauaucuggaa

SEQ ID NO: 80245 - RNA, 25 nt, Artificial Sequence
  Description of Artificial Sequence: Synthetic oligonucleotide
agaaauucgagcugcugcccacccc

SEQ ID NO: 80246 - RNA, 25 nt, Artificial Sequence
  Description of Artificial Sequence: Synthetic oligonucleotide
cgccccuguccccuagccgccgcuc

SEQ ID NO: 80247 - RNA, 25 nt, Artificial Sequence
  Description of Artificial Sequence: Synthetic oligonucleotide
ccgggcucugcucgcccuccuacgu

SEQ ID NO: 80248 - RNA, 25 nt, Artificial Sequence
  Description of Artificial Sequence: Synthetic oligonucleotide
uugcggucacacccuucucccuucg

SEQ ID NO: 80249 - RNA, 25 nt, Artificial Sequence
  Description of Artificial Sequence: Synthetic oligonucleotide
ggggagacaacgacggcgguggcgg

SEQ ID NO: 80250 - RNA, 25 nt, Artificial Sequence
  Description of Artificial Sequence: Synthetic oligonucleotide
ggagcuucuccacggccgaccagcu

SEQ ID NO: 80251 - RNA, 25 nt, Artificial Sequence
  Description of Artificial Sequence: Synthetic oligonucleotide
uggagauggugaccgagcugcuggg

SEQ ID NO: 80252 - RNA, 25 nt, Artificial Sequence
  Description of Artificial Sequence: Synthetic oligonucleotide
gaggagacauggugaaccagaguuu

SEQ ID NO: 80253 - RNA, 25 nt, Artificial Sequence
  Description of Artificial Sequence: Synthetic oligonucleotide
ucaucugcgacccggacgacgagac

SEQ ID NO: 80254 - RNA, 25 nt, Artificial Sequence
  Description of Artificial Sequence: Synthetic oligonucleotide
ccuucaucaaaaacaucaucaucca

SEQ ID NO: 80255 - RNA, 25 nt, Artificial Sequence
  Description of Artificial Sequence: Synthetic oligonucleotide
aggacuguauguggagcggcuucuc

SEQ ID NO: 80256 - RNA, 25 nt, Artificial Sequence
  Description of Artificial Sequence: Synthetic oligonucleotide
cggccgccgccaagcucgucucaga

SEQ ID NO: 80257 - RNA, 25 nt, Artificial Sequence
  Description of Artificial Sequence: Synthetic oligonucleotide
agaagcuggccuccuaccaggcugc

SEQ ID NO: 80258 - RNA, 25 nt, Artificial Sequence
  Description of Artificial Sequence: Synthetic oligonucleotide
cgcgcaaagacagcggcagcccgaa

SEQ ID NO: 80259 - RNA, 25 nt, Artificial Sequence
  Description of Artificial Sequence: Synthetic oligonucleotide
accccgcccgcggccacagcgucug

SEQ ID NO: 80260 - RNA, 25 nt, Artificial Sequence
  Description of Artificial Sequence: Synthetic oligonucleotide
gcuccaccuccagcuuguaccugca

SEQ ID NO: 80261 - RNA, 25 nt, Artificial Sequence
  Description of Artificial Sequence: Synthetic oligonucleotide
aggaucugagcgccgccgccucaga

SEQ ID NO: 80262 - RNA, 25 nt, Artificial Sequence
  Description of Artificial Sequence: Synthetic oligonucleotide
agugcaucgaccccucgguggucuu

SEQ ID NO: 80263 - RNA, 25 nt, Artificial Sequence
  Description of Artificial Sequence: Synthetic oligonucleotide
uccccuacccucucaacgacagcag

SEQ ID NO: 80264 - RNA, 25 nt, Artificial Sequence
  Description of Artificial Sequence: Synthetic oligonucleotide
gcucgcccaaguccugcgccucgca

SEQ ID NO: 80265 - RNA, 25 nt, Artificial Sequence
  Description of Artificial Sequence: Synthetic oligonucleotide
aagacuccagcgccuucucuccguc

SEQ ID NO: 80266 - RNA, 25 nt, Artificial Sequence
  Description of Artificial Sequence: Synthetic oligonucleotide
ccucggauucucugcucuccucgac

SEQ ID NO: 80267 - RNA, 25 nt, Artificial Sequence
  Description of Artificial Sequence: Synthetic oligonucleotide
cggaguccuccccgcagggcagccc

SEQ ID NO: 80268 - RNA, 25 nt, Artificial Sequence
  Description of Artificial Sequence: Synthetic oligonucleotide
ccgagccccuggugcuccaugagga

SEQ ID NO: 80269 - RNA, 25 nt, Artificial Sequence
  Description of Artificial Sequence: Synthetic oligonucleotide
agacaccgcccaccaccagcagcga

SEQ ID NO: 80270 - RNA, 25 nt, Artificial Sequence
  Description of Artificial Sequence: Synthetic oligonucleotide
acucugaggaggaacaagaagauga

SEQ ID NO: 80271 - RNA, 25 nt, Artificial Sequence
  Description of Artificial Sequence: Synthetic oligonucleotide
aggaagaaaucgauguuguuucugu

SEQ ID NO: 80272 - RNA, 25 nt, Artificial Sequence
  Description of Artificial Sequence: Synthetic oligonucleotide
uggaaaagaggcaggcuccuggcaa

SEQ ID NO: 80273 - RNA, 25 nt, Artificial Sequence
  Description of Artificial Sequence: Synthetic oligonucleotide
aaaggucagagucuggaucaccuuc

SEQ ID NO: 80274 - RNA, 25 nt, Artificial Sequence
  Description of Artificial Sequence: Synthetic oligonucleotide
cugcuggaggccacagcaaaccucc

SEQ ID NO: 80275 - RNA, 25 nt, Artificial Sequence
  Description of Artificial Sequence: Synthetic oligonucleotide
cucacagcccacugguccucaagag

SEQ ID NO: 80276 - RNA, 25 nt, Artificial Sequence
  Description of Artificial Sequence: Synthetic oligonucleotide
ggugccacgucuccacacaucagca

SEQ ID NO: 80277 - RNA, 25 nt, Artificial Sequence
  Description of Artificial Sequence: Synthetic oligonucleotide
acaacuacgcagcgccucccuccac

SEQ ID NO: 80278 - RNA, 25 nt, Artificial Sequence
  Description of Artificial Sequence: Synthetic oligonucleotide
cucggaaggacuauccugcugccaa

SEQ ID NO: 80279 - RNA, 25 nt, Artificial Sequence
  Description of Artificial Sequence: Synthetic oligonucleotide
agagggucaaguuggacagugucag

SEQ ID NO: 80280 - RNA, 25 nt, Artificial Sequence
  Description of Artificial Sequence: Synthetic oligonucleotide
gaguccugagacagaucagcaacaa

SEQ ID NO: 80281 - RNA, 25 nt, Artificial Sequence
  Description of Artificial Sequence: Synthetic oligonucleotide
accgaaaaugcaccagccccagguc

SEQ ID NO: 80282 - RNA, 25 nt, Artificial Sequence
  Description of Artificial Sequence: Synthetic oligonucleotide
ccucggacaccgaggagaaugucaa

SEQ ID NO: 80283 - RNA, 25 nt, Artificial Sequence
  Description of Artificial Sequence: Synthetic oligonucleotide
agaggcgaacacacaacgucuugga

SEQ ID NO: 80284 - RNA, 25 nt, Artificial Sequence
  Description of Artificial Sequence: Synthetic oligonucleotide
agcgccagaggaggaacgagcuaaa

SEQ ID NO: 80285 - RNA, 25 nt, Artificial Sequence
  Description of Artificial Sequence: Synthetic oligonucleotide
aacggagcuuuuuugcccugcguga

SEQ ID NO: 80286 - RNA, 25 nt, Artificial Sequence
  Description of Artificial Sequence: Synthetic oligonucleotide
accagaucccggaguuggaaaacaa

SEQ ID NO: 80287 - RNA, 25 nt, Artificial Sequence
  Description of Artificial Sequence: Synthetic oligonucleotide
augaaaaggcccccaagguaguuau

SEQ ID NO: 80288 - RNA, 25 nt, Artificial Sequence
  Description of Artificial Sequence: Synthetic oligonucleotide
uccuuaaaaaagccacagcauacau

SEQ ID NO: 80289 - RNA, 25 nt, Artificial Sequence
  Description of Artificial Sequence: Synthetic oligonucleotide
uccuguccguccaagcagaggagca

SEQ ID NO: 80290 - RNA, 25 nt, Artificial Sequence
  Description of Artificial Sequence: Synthetic oligonucleotide
aaaagcucauuucugaagaggacuu

SEQ ID NO: 80291 - RNA, 25 nt, Artificial Sequence
  Description of Artificial Sequence: Synthetic oligonucleotide
uguugcggaaacgacgagaacaguu

SEQ ID NO: 80292 - RNA, 25 nt, Artificial Sequence
  Description of Artificial Sequence: Synthetic oligonucleotide
ugaaacacaaacuugaacagcuacg

SEQ ID NO: 80293 - RNA, 25 nt, Artificial Sequence
  Description of Artificial Sequence: Synthetic oligonucleotide
ggaacucuugugcguaaggaaaagu

SEQ ID NO: 80294 - RNA, 25 nt, Artificial Sequence
  Description of Artificial Sequence: Synthetic oligonucleotide
uaaggaaaacgauuccuucuaacag

SEQ ID NO: 80295 - RNA, 25 nt, Artificial Sequence
  Description of Artificial Sequence: Synthetic oligonucleotide
gaaauguccugagcaaucaccuaug

SEQ ID NO: 80296 - RNA, 25 nt, Artificial Sequence
  Description of Artificial Sequence: Synthetic oligonucleotide
gaacuuguuucaaaugcaugaucaa

SEQ ID NO: 80297 - RNA, 25 nt, Artificial Sequence
  Description of Artificial Sequence: Synthetic oligonucleotide
aaugcaaccucacaaccuuggcuga

SEQ ID NO: 80298 - RNA, 25 nt, Artificial Sequence
  Description of Artificial Sequence: Synthetic oligonucleotide
agucuugagacugaaagauuuagcc

SEQ ID NO: 80299 - RNA, 25 nt, Artificial Sequence
  Description of Artificial Sequence: Synthetic oligonucleotide
cauaauguaaacugccucaaauugg

SEQ ID NO: 80300 - RNA, 25 nt, Artificial Sequence
  Description of Artificial Sequence: Synthetic oligonucleotide
gacuuugggcauaaaagaacuuuuu

SEQ ID NO: 80301 - RNA, 25 nt, Artificial Sequence
  Description of Artificial Sequence: Synthetic oligonucleotide
cuuuaacagauuuguauuuaagaau

SEQ ID NO: 80302 - RNA, 25 nt, Artificial Sequence
  Description of Artificial Sequence: Synthetic oligonucleotide
uuguuuuuaaaaaauuuuaagauuu

SEQ ID NO: 80303 - RNA, 25 nt, Artificial Sequence
  Description of Artificial Sequence: Synthetic oligonucleotide
uacacaauguuucucuguaaauauu

SEQ ID NO: 80304 - RNA, 25 nt, Artificial Sequence
  Description of Artificial Sequence: Synthetic oligonucleotide
ugccauuaaauguaaauaacuuuaa

SEQ ID NO: 80305 - RNA, 25 nt, Artificial Sequence
  Description of Artificial Sequence: Synthetic oligonucleotide
auaaaacguuuauagcaguuacaca

SEQ ID NO: 80306 - RNA, 25 nt, Artificial Sequence
  Description of Artificial Sequence: Synthetic oligonucleotide
agaauuucaauccuaguauauagua

SEQ ID NO: 80307 - RNA, 25 nt, Artificial Sequence
  Description of Artificial Sequence: Synthetic oligonucleotide
accuaguauuauagguacuauaaac

SEQ ID NO: 80308 - RNA, 25 nt, Artificial Sequence
  Description of Artificial Sequence: Synthetic oligonucleotide
cccuaauuuuuuuuauuuaaguaca

SEQ ID NO: 80309 - RNA, 25 nt, Artificial Sequence
  Description of Artificial Sequence: Synthetic oligonucleotide
auuuugcuuuuuaaaguugauuuuu

SEQ ID NO: 80310 - RNA, 25 nt, Artificial Sequence
  Description of Artificial Sequence: Synthetic oligonucleotide
uuucuauuguuuuuagaaaaaauaa

SEQ ID NO: 80311 - RNA, 25 nt, Artificial Sequence
  Description of Artificial Sequence: Synthetic oligonucleotide
aaauaacuggcaaauauaucauuga

SEQ ID NO: 80312 - DNA, 21 bp, Artificial Sequence
  Description of Artificial Sequence: Synthetic oligonucleotide
  Description of Combined DNA/RNA Molecule: Synthetic oligonucleotide
cuacacaaaucagcgauuutt

SEQ ID NO: 80313 - DNA, 21 bp, Artificial Sequence
  Description of Artificial Sequence: Synthetic oligonucleotide
  Description of Combined DNA/RNA Molecule: Synthetic oligonucleotide
aaaucgcugauuuguguagtt

SEQ ID NO: 80314 - DNA, 25 bp, Artificial Sequence
  Description of Artificial Sequence: Synthetic oligonucleotide
  Description of Combined DNA/RNA Molecule: Synthetic oligonucleotide
cuacacaaaucagcgauuuccaugt

SEQ ID NO: 80315 - RNA, 27 nt, Artificial Sequence
  Description of Artificial Sequence: Synthetic oligonucleotide
acauggaaaucgcugauuuguguaguc

SEQ ID NO: 80316 - RNA, 13 nt, Artificial Sequence
  Description of Artificial Sequence: Synthetic oligonucleotide
cuacacaaaucag

SEQ ID NO: 80317 - DNA, 11 bp, Artificial Sequence
  Description of Artificial Sequence: Synthetic oligonucleotide
  Description of Combined DNA/RNA Molecule: Synthetic oligonucleotide
gauuuccaugt

SEQ ID NO: 80318 - DNA, 21 bp, Artificial Sequence
  Description of Artificial Sequence: Synthetic oligonucleotide
  Description of Combined DNA/RNA Molecule: Synthetic oligonucleotide
ggaucuuauuucuucggagtt

SEQ ID NO: 80319 - DNA, 21 bp, Artificial Sequence
  Description of Artificial Sequence: Synthetic oligonucleotide
  Description of Combined DNA/RNA Molecule: Synthetic oligonucleotide
cuccgaagaaauaagaucctt

SEQ ID NO: 80320 - RNA, 11 nt, Artificial Sequence
  Description of Artificial Sequence: Synthetic oligonucleotide
ggaucuuauuu

SEQ ID NO: 80321 - DNA, 10 bp, Artificial Sequence
  Description of Artificial Sequence: Synthetic oligonucleotide
  Description of Combined DNA/RNA Molecule: Synthetic oligonucleotide
cuucggagtt

SEQ ID NO: 80322 - RNA, 27 nt, Artificial Sequence
  Description of Artificial Sequence: Synthetic oligonucleotide
cauugucuccgaagaaauaagauccuu

SEQ ID NO: 80323 - RNA, 8 nt, Artificial Sequence
  Description of Artificial Sequence: Synthetic oligonucleotide
  modified_base (2): LNA-G
ggaucuua

SEQ ID NO: 80324 - DNA, 17 bp, Artificial Sequence
  Description of Artificial Sequence: Synthetic oligonucleotide
  Description of Combined DNA/RNA Molecule: Synthetic oligonucleotide
uuucuucggagacaatg

SEQ ID NO: 80325 - DNA, 16 bp, Artificial Sequence
  Description of Artificial Sequence: Synthetic oligonucleotide
  Description of Combined DNA/RNA Molecule: Synthetic oligonucleotide
uucuucggagacaatg

SEQ ID NO: 80326 - DNA, 15 bp, Artificial Sequence
  Description of Artificial Sequence: Synthetic oligonucleotide
  Description of Combined DNA/RNA Molecule: Synthetic oligonucleotide
ucuucggagacaatg

SEQ ID NO: 80327 - DNA, 14 bp, Artificial Sequence
  Description of Artificial Sequence: Synthetic oligonucleotide
  Description of Combined DNA/RNA Molecule: Synthetic oligonucleotide
cuucggagacaatg

SEQ ID NO: 80328 - DNA, 13 bp, Artificial Sequence
  Description of Artificial Sequence: Synthetic oligonucleotide
  Description of Combined DNA/RNA Molecule: Synthetic oligonucleotide
uucggagacaatg

SEQ ID NO: 80329 - DNA, 12 bp, Artificial Sequence
  Description of Artificial Sequence: Synthetic oligonucleotide
  Description of Combined DNA/RNA Molecule: Synthetic oligonucleotide
ucggagacaatg

SEQ ID NO: 80330 - DNA, 11 bp, Artificial Sequence
  Description of Artificial Sequence: Synthetic oligonucleotide
  Description of Combined DNA/RNA Molecule: Synthetic oligonucleotide
cggagacaatg

SEQ ID NO: 80331 - RNA, 9 nt, Artificial Sequence
  Description of Artificial Sequence: Synthetic oligonucleotide
  modified_base (2): LNA-G
ggaucuuau

SEQ ID NO: 80332 - RNA, 10 nt, Artificial Sequence
  Description of Artificial Sequence: Synthetic oligonucleotide
  modified_base (2): LNA-G
ggaucuuauu

SEQ ID NO: 80333 - RNA, 11 nt, Artificial Sequence
  Description of Artificial Sequence: Synthetic oligonucleotide
  modified_base (2): LNA-G
ggaucuuauuu

SEQ ID NO: 80334 - RNA, 12 nt, Artificial Sequence
  Description of Artificial Sequence: Synthetic oligonucleotide
  modified_base (2): LNA-G
ggaucuuauuuc

SEQ ID NO: 80335 - RNA, 8 nt, Artificial Sequence
  Description of Artificial Sequence: Synthetic oligonucleotide
  modified_base (3): LNA-A
cuacacaa

SEQ ID NO: 80336 - DNA, 13 bp, Artificial Sequence
  Description of Artificial Sequence: Synthetic oligonucleotide
  Description of Combined DNA/RNA Molecule: Synthetic oligonucleotide
  modified_base (8): LNA-A
aucagcgauuutt

SEQ ID NO: 80337 - DNA, 12 bp, Artificial Sequence
  Description of Artificial Sequence: Synthetic oligonucleotide
  Description of Combined DNA/RNA Molecule: Synthetic oligonucleotide
  modified_base (7): LNA-A
ucagcgauuutt

SEQ ID NO: 80338 - DNA, 11 bp, Artificial Sequence
  Description of Artificial Sequence: Synthetic oligonucleotide
  Description of Combined DNA/RNA Molecule: Synthetic oligonucleotide
  modified_base (6): LNA-A
cagcgauuutt

SEQ ID NO: 80339 - DNA, 10 bp, Artificial Sequence
  Description of Artificial Sequence: Synthetic oligonucleotide
  Description of Combined DNA/RNA Molecule: Synthetic oligonucleotide
  modified_base (5): LNA-A
agcgauuutt

SEQ ID NO: 80340 - DNA, 9 bp, Artificial Sequence
  Description of Artificial Sequence: Synthetic oligonucleotide
  Description of Combined DNA/RNA Molecule: Synthetic oligonucleotide
  modified_base (4): LNA-A
gcgauuutt

SEQ ID NO: 80341 - DNA, 8 bp, Artificial Sequence
  Description of Artificial Sequence: Synthetic oligonucleotide
  Description of Combined DNA/RNA Molecule: Synthetic oligonucleotide
  modified_base (3): LNA-A
cgauuutt

SEQ ID NO: 80342 - DNA, 7 bp, Artificial Sequence
  Description of Artificial Sequence: Synthetic oligonucleotide
  Description of Combined DNA/RNA Molecule: Synthetic oligonucleotide
  modified_base (2): LNA-A
gauuutt

SEQ ID NO: 80343 - RNA, 9 nt, Artificial Sequence
  Description of Artificial Sequence: Synthetic oligonucleotide
  modified_base (3): LNA-A
cuacacaaa

SEQ ID NO: 80344 - RNA, 10 nt, Artificial Sequence
  Description of Artificial Sequence: Synthetic oligonucleotide
  modified_base (3): LNA-A
cuacacaaau

SEQ ID NO: 80345 - RNA, 11 nt, Artificial Sequence
  Description of Artificial Sequence: Synthetic oligonucleotide
  modified_base (3): LNA-A
cuacacaaauc

SEQ ID NO: 80346 - RNA, 12 nt, Artificial Sequence
  Description of Artificial Sequence: Synthetic oligonucleotide
  modified_base (3): LNA-A
cuacacaaauca

SEQ ID NO: 80347 - RNA, 13 nt, Artificial Sequence
  Description of Artificial Sequence: Synthetic oligonucleotide
  modified_base (3): LNA-A
cuacacaaaucag

SEQ ID NO: 80348 - RNA, 14 nt, Artificial Sequence
  Description of Artificial Sequence: Synthetic oligonucleotide
  modified_base (3): LNA-A
cuacacaaaucagc

SEQ ID NO: 80349 - RNA, 13 nt, Artificial Sequence
  Description of Artificial Sequence: Synthetic oligonucleotide
  modified_base (2): LNA-G
ggaucuuauuucu

SEQ ID NO: 80350 - RNA, 14 nt, Artificial Sequence
  Description of Artificial Sequence: Synthetic oligonucleotide
  modified_base (2): LNA-G
ggaucuuauuucuu

SEQ ID NO: 80351 - RNA, 8 nt, Artificial Sequence
  Description of Artificial Sequence: Synthetic oligonucleotide
  modified_base (2): LNA-G
  modified_base (8): LNA-A
ggaucuua

SEQ ID NO: 80352 - RNA, 9 nt, Artificial Sequence
  Description of Artificial Sequence: Synthetic oligonucleotide
  modified_base (2): LNA-G
  modified_base (9): LNA-U
ggaucuuau

SEQ ID NO: 80353 - RNA, 10 nt, Artificial Sequence
  Description of Artificial Sequence: Synthetic oligonucleotide
  modified_base (2): LNA-G
  modified_base (10): LNA-U
ggaucuuauu

SEQ ID NO: 80354 - RNA, 11 nt, Artificial Sequence
  Description of Artificial Sequence: Synthetic oligonucleotide
  modified_base (2): LNA-G
  modified_base (11): LNA-U
ggaucuuauuu

SEQ ID NO: 80355 - RNA, 12 nt, Artificial Sequence
  Description of Artificial Sequence: Synthetic oligonucleotide
  modified_base (2): LNA-G
  modified_base (12): LNA-C
ggaucuuauuuc

SEQ ID NO: 80356 - RNA, 13 nt, Artificial Sequence
  Description of Artificial Sequence: Synthetic oligonucleotide
  modified_base (2): LNA-G
  modified_base (13): LNA-U
ggaucuuauuucu

SEQ ID NO: 80357 - RNA, 14 nt, Artificial Sequence
  Description of Artificial Sequence: Synthetic oligonucleotide
  modified_base (2): LNA-G
  modified_base (14): LNA-U
ggaucuuauuucuu

SEQ ID NO: 80358 - DNA, 13 bp, Artificial Sequence
  Description of Artificial Sequence: Synthetic oligonucleotide
  Description of Combined DNA/RNA Molecule: Synthetic oligonucleotide
  modified_base (8): LNA-G
uuucuucggagtt

SEQ ID NO: 80359 - DNA, 12 bp, Artificial Sequence
  Description of Artificial Sequence: Synthetic oligonucleotide
  Description of Combined DNA/RNA Molecule: Synthetic oligonucleotide
  modified_base (7): LNA-G
uucuucggagtt

SEQ ID NO: 80360 - DNA, 11 bp, Artificial Sequence
  Description of Artificial Sequence: Synthetic oligonucleotide
  Description of Combined DNA/RNA Molecule: Synthetic oligonucleotide
  modified_base (6): LNA-G
ucuucggagtt

SEQ ID NO: 80361 - DNA, 10 bp, Artificial Sequence
  Description of Artificial Sequence: Synthetic oligonucleotide
  Description of Combined DNA/RNA Molecule: Synthetic oligonucleotide
  modified_base (5): LNA-G
cuucggagtt

SEQ ID NO: 80362 - DNA, 9 bp, Artificial Sequence
  Description of Artificial Sequence: Synthetic oligonucleotide
  Description of Combined DNA/RNA Molecule: Synthetic oligonucleotide
  modified_base (4): LNA-G
uucggagtt

SEQ ID NO: 80363 - DNA, 8 bp, Artificial Sequence
  Description of Artificial Sequence: Synthetic oligonucleotide
  Description of Combined DNA/RNA Molecule: Synthetic oligonucleotide
  modified_base (3): LNA-G
ucggagtt

SEQ ID NO: 80364 - DNA, 7 bp, Artificial Sequence
  Description of Artificial Sequence: Synthetic oligonucleotide
  Description of Combined DNA/RNA Molecule: Synthetic oligonucleotide
  modified_base (2): LNA-G
cggagtt

SEQ ID NO: 80365 - DNA, 13 bp, Artificial Sequence
  Description of Artificial Sequence: Synthetic oligonucleotide
  Description of Combined DNA/RNA Molecule: Synthetic oligonucleotide
  modified_base (1): LNA-U
  modified_base (8): LNA-G
uuucuucggagtt

SEQ ID NO: 80366 - DNA, 12 bp, Artificial Sequence
  Description of Artificial Sequence: Synthetic oligonucleotide
  Description of Combined DNA/RNA Molecule: Synthetic oligonucleotide
  modified_base (1): LNA-U
  modified_base (7): LNA-G
uucuucggagtt

SEQ ID NO: 80367 - DNA, 11 bp, Artificial Sequence
  Description of Artificial Sequence: Synthetic oligonucleotide
  Description of Combined DNA/RNA Molecule: Synthetic oligonucleotide
  modified_base (1): LNA-U
  modified_base (6): LNA-G
ucuucggagtt

SEQ ID NO: 80368 - DNA, 10 bp, Artificial Sequence
  Description of Artificial Sequence: Synthetic oligonucleotide
  Description of Combined DNA/RNA Molecule: Synthetic oligonucleotide
  modified_base (1): LNA-C
  modified_base (5): LNA-G
cuucggagtt

SEQ ID NO: 80369 - DNA, 9 bp, Artificial Sequence
  Description of Artificial Sequence: Synthetic oligonucleotide
  Description of Combined DNA/RNA Molecule: Synthetic oligonucleotide
  modified_base (1): LNA-U
  modified_base (4): LNA-G
uucggagtt

SEQ ID NO: 80370 - DNA, 8 bp, Artificial Sequence
  Description of Artificial Sequence: Synthetic oligonucleotide
  Description of Combined DNA/RNA Molecule: Synthetic oligonucleotide
  modified_base (1): LNA-U
  modified_base (3): LNA-G
ucggagtt

SEQ ID NO: 80371 - DNA, 7 bp, Artificial Sequence
  Description of Artificial Sequence: Synthetic oligonucleotide
  Description of Combined DNA/RNA Molecule: Synthetic oligonucleotide
  modified_base (1): LNA-C
  modified_base (2): LNA-G
cggagtt

SEQ ID NO: 80372 - DNA, 21 bp, Artificial Sequence
  Description of Artificial Sequence: Synthetic oligonucleotide
  Description of Combined DNA/RNA Molecule: Synthetic oligonucleotide
  modified_base (2): LNA-G
  modified_base (16): LNA-G
ggaucuuauuucuucggagtt

SEQ ID NO: 80373 - DNA, 25 bp, Artificial Sequence
  Description of Artificial Sequence: Synthetic oligonucleotide
  Description of Combined DNA/RNA Molecule: Synthetic oligonucleotide
ggaucuuauuucuucggagacaatg

SEQ ID NO: 80374 - RNA, 25 nt, Artificial Sequence
  Description of Artificial Sequence: Synthetic oligonucleotide
uuaagcagaguucaaaagcccuuca

SEQ ID NO: 80375 - RNA, 25 nt, Artificial Sequence
  Description of Artificial Sequence: Synthetic oligonucleotide
uaagcagaguucaaaagcccuucag

SEQ ID NO: 80376 - RNA, 25 nt, Artificial Sequence
  Description of Artificial Sequence: Synthetic oligonucleotide
agcagaguucaaaagcccuucagcg

SEQ ID NO: 80377 - RNA, 25 nt, Artificial Sequence
  Description of Artificial Sequence: Synthetic oligonucleotide
cucagggucugagugaagccgcucg

SEQ ID NO: 80378 - RNA, 25 nt, Artificial Sequence
  Description of Artificial Sequence: Synthetic oligonucleotide
caagcaacuacaucacgccagucaa

SEQ ID NO: 80379 - RNA, 25 nt, Artificial Sequence
  Description of Artificial Sequence: Synthetic oligonucleotide
aucaauggcagcuucuuggugcgug

SEQ ID NO: 80380 - RNA, 25 nt, Artificial Sequence
  Description of Artificial Sequence: Synthetic oligonucleotide
uuccagcccacauuggauucaucag

SEQ ID NO: 80381 - RNA, 25 nt, Artificial Sequence
  Description of Artificial Sequence: Synthetic oligonucleotide
cagcugagaauguggaauaccuaag

SEQ ID NO: 80382 - RNA, 25 nt, Artificial Sequence
  Description of Artificial Sequence: Synthetic oligonucleotide
aacguaucuccuaauuugaggcuca

SEQ ID NO: 80383 - RNA, 25 nt, Artificial Sequence
  Description of Artificial Sequence: Synthetic oligonucleotide
ccuaaaauaauuucucuacaauugg

SEQ ID NO: 80384 - RNA, 25 nt, Artificial Sequence
  Description of Artificial Sequence: Synthetic oligonucleotide
uggaagauucagcuaguuaggagcc

SEQ ID NO: 80385 - RNA, 25 nt, Artificial Sequence
  Description of Artificial Sequence: Synthetic oligonucleotide
uuaaacucuccuagucaauauccac

SEQ ID NO: 80386 - RNA, 25 nt, Artificial Sequence
  Description of Artificial Sequence: Synthetic oligonucleotide
cagccuacaguuauguucagucaca

SEQ ID NO: 80387 - RNA, 25 nt, Artificial Sequence
  Description of Artificial Sequence: Synthetic oligonucleotide
guuauguucagucacacacacauac

SEQ ID NO: 80388 - RNA, 25 nt, Artificial Sequence
  Description of Artificial Sequence: Synthetic oligonucleotide
cacauacaaaauguuccuuuugcuu

SEQ ID NO: 80389 - RNA, 25 nt, Artificial Sequence
  Description of Artificial Sequence: Synthetic oligonucleotide
uccuuuugcuuuuaaaguaauuuuu

SEQ ID NO: 80390 - RNA, 25 nt, Artificial Sequence
  Description of Artificial Sequence: Synthetic oligonucleotide
ugaccugugaagcaacagucaaugg

SEQ ID NO: 80391 - RNA, 25 nt, Artificial Sequence
  Description of Artificial Sequence: Synthetic oligonucleotide
cuaucucacacaucgacaaaccaau

SEQ ID NO: 80392 - RNA, 25 nt, Artificial Sequence
  Description of Artificial Sequence: Synthetic oligonucleotide
uguccucaauuguacugcuaccacu

SEQ ID NO: 80393 - RNA, 25 nt, Artificial Sequence
  Description of Artificial Sequence: Synthetic oligonucleotide
aaaccguagcuggcaagcggucuua

SEQ ID NO: 80394 - RNA, 25 nt, Artificial Sequence
  Description of Artificial Sequence: Synthetic oligonucleotide
uagcuggcaagcggucuuaccggcu

SEQ ID NO: 80395 - RNA, 25 nt, Artificial Sequence
  Description of Artificial Sequence: Synthetic oligonucleotide
uuguaugguuaaaagauggguuacc

SEQ ID NO: 80396 - RNA, 25 nt, Artificial Sequence
  Description of Artificial Sequence: Synthetic oligonucleotide
ugguuaaaagauggguuaccugcga

SEQ ID NO: 80397 - RNA, 25 nt, Artificial Sequence
  Description of Artificial Sequence: Synthetic oligonucleotide
cagggaauuauacaaucuugcugag

SEQ ID NO: 80398 - RNA, 25 nt, Artificial Sequence
  Description of Artificial Sequence: Synthetic oligonucleotide
acaaucuugcugagcauaaaacagu

SEQ ID NO: 80399 - RNA, 25 nt, Artificial Sequence
  Description of Artificial Sequence: Synthetic oligonucleotide
ccaauaaugaagaguccuuuauccu

SEQ ID NO: 80400 - RNA, 25 nt, Artificial Sequence
  Description of Artificial Sequence: Synthetic oligonucleotide
acuuuggauguuccaacgcaaguug

SEQ ID NO: 80401 - RNA, 25 nt, Artificial Sequence
  Description of Artificial Sequence: Synthetic oligonucleotide
aaugcuuccacuaaacugaaaccau

SEQ ID NO: 80402 - RNA, 25 nt, Artificial Sequence
  Description of Artificial Sequence: Synthetic oligonucleotide
gagaaaguuugacuuuguuaaauau

SEQ ID NO: 80403 - RNA, 25 nt, Artificial Sequence
  Description of Artificial Sequence: Synthetic oligonucleotide
aaagaacuacuguauauuaaaaguu

SEQ ID NO: 80404 - RNA, 25 nt, Artificial Sequence
  Description of Artificial Sequence: Synthetic oligonucleotide
uuagaaauacggguuuugacuuaac

SEQ ID NO: 80405 - RNA, 25 nt, Artificial Sequence
  Description of Artificial Sequence: Synthetic oligonucleotide
aacauggguacagcaaacucagcac

SEQ ID NO: 80406 - RNA, 25 nt, Artificial Sequence
  Description of Artificial Sequence: Synthetic oligonucleotide
aaagacacagaagaugcugaccuca

SEQ ID NO: 80407 - RNA, 25 nt, Artificial Sequence
  Description of Artificial Sequence: Synthetic oligonucleotide
uaguagggagguuuauucagaucgc

SEQ ID NO: 80408 - RNA, 25 nt, Artificial Sequence
  Description of Artificial Sequence: Synthetic oligonucleotide
gccuucugcagcaggguucugggau

SEQ ID NO: 80409 - RNA, 25 nt, Artificial Sequence
  Description of Artificial Sequence: Synthetic oligonucleotide
ggucugguacauauuggaaauuaug

SEQ ID NO: 80410 - RNA, 25 nt, Artificial Sequence
  Description of Artificial Sequence: Synthetic oligonucleotide
cuaguccuuccgauggaagcacuag

SEQ ID NO: 80411 - RNA, 25 nt, Artificial Sequence
  Description of Artificial Sequence: Synthetic oligonucleotide
ccagugaauauuguuuuuaugugga

SEQ ID NO: 80412 - RNA, 25 nt, Artificial Sequence
  Description of Artificial Sequence: Synthetic oligonucleotide
augaauucaaguuggaauugguaga

SEQ ID NO: 80413 - RNA, 25 nt, Artificial Sequence
  Description of Artificial Sequence: Synthetic oligonucleotide
caggacacagauuuagacuuggaga

SEQ ID NO: 80414 - RNA, 25 nt, Artificial Sequence
  Description of Artificial Sequence: Synthetic oligonucleotide
cucaaagcacaguuacaguauucca

SEQ ID NO: 80415 - RNA, 25 nt, Artificial Sequence
  Description of Artificial Sequence: Synthetic oligonucleotide
accacugccaccacugaugaauuaa

SEQ ID NO: 80416 - RNA, 25 nt, Artificial Sequence
  Description of Artificial Sequence: Synthetic oligonucleotide
gaaacuacuagugccacaucaucac

SEQ ID NO: 80417 - RNA, 25 nt, Artificial Sequence
  Description of Artificial Sequence: Synthetic oligonucleotide
aagucggacagccucaccaaacaga

SEQ ID NO: 80418 - RNA, 25 nt, Artificial Sequence
  Description of Artificial Sequence: Synthetic oligonucleotide
gaaagcgaaaaauggaacaugaugg

SEQ ID NO: 80419 - RNA, 25 nt, Artificial Sequence
  Description of Artificial Sequence: Synthetic oligonucleotide
cccucugauuuagcauguagacugc

SEQ ID NO: 80420 - RNA, 25 nt, Artificial Sequence
  Description of Artificial Sequence: Synthetic oligonucleotide
ugagcuauuuaaggaucuauuuaug

SEQ ID NO: 80421 - RNA, 25 nt, Artificial Sequence
  Description of Artificial Sequence: Synthetic oligonucleotide
aaaaggugaaaaagcacuauuauca

SEQ ID NO: 80422 - RNA, 25 nt, Artificial Sequence
  Description of Artificial Sequence: Synthetic oligonucleotide
gaaaaagcacuauuaucaguucugc

SEQ ID NO: 80423 - RNA, 25 nt, Artificial Sequence
  Description of Artificial Sequence: Synthetic oligonucleotide
ggcugaaaagaaagauuaaaccuac

SEQ ID NO: 80424 - RNA, 25 nt, Artificial Sequence
  Description of Artificial Sequence: Synthetic oligonucleotide
uaaacccuuauaauaaaauccuucu

SEQ ID NO: 80425 - RNA, 25 nt, Artificial Sequence
  Description of Artificial Sequence: Synthetic oligonucleotide
cauacuauuagccaaugcuguagac

SEQ ID NO: 80426 - RNA, 25 nt, Artificial Sequence
  Description of Artificial Sequence: Synthetic oligonucleotide
gacagaagcauuuugauaggaauag

SEQ ID NO: 80427 - RNA, 25 nt, Artificial Sequence
  Description of Artificial Sequence: Synthetic oligonucleotide
agagcaaauaagauaauggcccuga

SEQ ID NO: 80428 - RNA, 25 nt, Artificial Sequence
  Description of Artificial Sequence: Synthetic oligonucleotide
ccaacauuuuucucuuccucaagca

SEQ ID NO: 80429 - RNA, 25 nt, Artificial Sequence
  Description of Artificial Sequence: Synthetic oligonucleotide
uuaaguaugagaaaaguucagccca

SEQ ID NO: 80430 - RNA, 25 nt, Artificial Sequence
  Description of Artificial Sequence: Synthetic oligonucleotide
caggaauaaagauggcugcugaacc

SEQ ID NO: 80431 - RNA, 25 nt, Artificial Sequence
  Description of Artificial Sequence: Synthetic oligonucleotide
aauuugaaugaccaaguucucuuca

SEQ ID NO: 80432 - RNA, 25 nt, Artificial Sequence
  Description of Artificial Sequence: Synthetic oligonucleotide
auguauaaagauagccagccuagag

SEQ ID NO: 80433 - RNA, 25 nt, Artificial Sequence
  Description of Artificial Sequence: Synthetic oligonucleotide
ggcuguaacuaucucugugaagugu

SEQ ID NO: 80434 - RNA, 25 nt, Artificial Sequence
  Description of Artificial Sequence: Synthetic oligonucleotide
ucugugaagugugagaaaauuucaa

SEQ ID NO: 80435 - RNA, 25 nt, Artificial Sequence
  Description of Artificial Sequence: Synthetic oligonucleotide
ccuuuaaggaaaugaauccuccuga

SEQ ID NO: 80436 - RNA, 25 nt, Artificial Sequence
  Description of Artificial Sequence: Synthetic oligonucleotide
aaggauacaaaaagugacaucauau

SEQ ID NO: 80437 - RNA, 25 nt, Artificial Sequence
  Description of Artificial Sequence: Synthetic oligonucleotide
agaugcaauuugaaucuucaucaua

SEQ ID NO: 80438 - RNA, 25 nt, Artificial Sequence
  Description of Artificial Sequence: Synthetic oligonucleotide
guucaaaacgaagacuagcuauuaa

SEQ ID NO: 80439 - RNA, 25 nt, Artificial Sequence
  Description of Artificial Sequence: Synthetic oligonucleotide
gugaaaccucaucucuacuaaaaau

SEQ ID NO: 80440 - RNA, 25 nt, Artificial Sequence
  Description of Artificial Sequence: Synthetic oligonucleotide
acgaaagagaagcucuaucucgccu

SEQ ID NO: 80441 - RNA, 25 nt, Artificial Sequence
  Description of Artificial Sequence: Synthetic oligonucleotide
cuccacaagcgccuucgguccaguu

SEQ ID NO: 80442 - RNA, 25 nt, Artificial Sequence
  Description of Artificial Sequence: Synthetic oligonucleotide
gagaagauuccaaagauguagccgc

SEQ ID NO: 80443 - RNA, 25 nt, Artificial Sequence
  Description of Artificial Sequence: Synthetic oligonucleotide
aaucuggauucaaugaggagacuug

SEQ ID NO: 80444 - RNA, 25 nt, Artificial Sequence
  Description of Artificial Sequence: Synthetic oligonucleotide
agaacagauuugagaguagugagga

SEQ ID NO: 80445 - RNA, 25 nt, Artificial Sequence
  Description of Artificial Sequence: Synthetic oligonucleotide
ccagagcugugcagaugaguacaaa

SEQ ID NO: 80446 - RNA, 25 nt, Artificial Sequence
  Description of Artificial Sequence: Synthetic oligonucleotide
ccucagauuguuguuguuaaugggc

SEQ ID NO: 80447 - RNA, 25 nt, Artificial Sequence
  Description of Artificial Sequence: Synthetic oligonucleotide
cuauuuuaauuauuuuuaauuuauu

SEQ ID NO: 80448 - RNA, 25 nt, Artificial Sequence
  Description of Artificial Sequence: Synthetic oligonucleotide
uuuaauuuauuaauauuuaaauaug

SEQ ID NO: 80449 - RNA, 25 nt, Artificial Sequence
  Description of Artificial Sequence: Synthetic oligonucleotide
augcaguuugaauauccuuuguuuc

SEQ ID NO: 80450 - RNA, 25 nt, Artificial Sequence
  Description of Artificial Sequence: Synthetic oligonucleotide
caugcugcuggcgucuaaguguuug

SEQ ID NO: 80451 - RNA, 25 nt, Artificial Sequence
  Description of Artificial Sequence: Synthetic oligonucleotide
agaugugcauuucaccugugacaaa

SEQ ID NO: 80452 - RNA, 25 nt, Artificial Sequence
  Description of Artificial Sequence: Synthetic oligonucleotide
ucaaaaccugugccaggcugaauua

SEQ ID NO: 80453 - RNA, 25 nt, Artificial Sequence
  Description of Artificial Sequence: Synthetic oligonucleotide
gaauguggguagucauucuuacaau

SEQ ID NO: 80454 - RNA, 25 nt, Artificial Sequence
  Description of Artificial Sequence: Synthetic oligonucleotide
auguggguagucauucuuacaauug

SEQ ID NO: 80455 - RNA, 25 nt, Artificial Sequence
  Description of Artificial Sequence: Synthetic oligonucleotide
ugaaaaugagcaucagagaguguac

SEQ ID NO: 80456 - RNA, 25 nt, Artificial Sequence
  Description of Artificial Sequence: Synthetic oligonucleotide
uugcuuuucauguagaacucagcag

SEQ ID NO: 80457 - RNA, 25 nt, Artificial Sequence
  Description of Artificial Sequence: Synthetic oligonucleotide
uguauuucuauauuuauuuucagua

SEQ ID NO: 80458 - RNA, 25 nt, Artificial Sequence
  Description of Artificial Sequence: Synthetic oligonucleotide
uuugauuaauguuucuuaaauggaa

SEQ ID NO: 80459 - RNA, 25 nt, Artificial Sequence
  Description of Artificial Sequence: Synthetic oligonucleotide
caacguguauagugccuaaaauugu

SEQ ID NO: 80460 - RNA, 25 nt, Artificial Sequence
  Description of Artificial Sequence: Synthetic oligonucleotide
cauauccuuggcuacuaacaucugg

SEQ ID NO: 80461 - RNA, 25 nt, Artificial Sequence
  Description of Artificial Sequence: Synthetic oligonucleotide
uacuaacaucuggagacugugagcu

SEQ ID NO: 80462 - RNA, 25 nt, Artificial Sequence
  Description of Artificial Sequence: Synthetic oligonucleotide
cauaaguugugugcuuuuuauuaau

SEQ ID NO: 80463 - RNA, 25 nt, Artificial Sequence
  Description of Artificial Sequence: Synthetic oligonucleotide
gcaucauuuuggcucuucuuacauu

SEQ ID NO: 80464 - RNA, 25 nt, Artificial Sequence
  Description of Artificial Sequence: Synthetic oligonucleotide
gcucuucuuacauuuguaaaaaugu

SEQ ID NO: 80465 - RNA, 25 nt, Artificial Sequence
  Description of Artificial Sequence: Synthetic oligonucleotide
agauuaggucaucuuaauucauauu

SEQ ID NO: 80466 - RNA, 25 nt, Artificial Sequence
  Description of Artificial Sequence: Synthetic oligonucleotide
auggaauugaaagaacuaaucauga

SEQ ID NO: 80467 - RNA, 25 nt, Artificial Sequence
  Description of Artificial Sequence: Synthetic oligonucleotide
cacacucauuccuucugcucuuggg

SEQ ID NO: 80468 - RNA, 25 nt, Artificial Sequence
  Description of Artificial Sequence: Synthetic oligonucleotide
uguagagguaaccaguagcuuugag

SEQ ID NO: 80469 - RNA, 25 nt, Artificial Sequence
  Description of Artificial Sequence: Synthetic oligonucleotide
caaccacaugccacguaauauuuca

SEQ ID NO: 80470 - RNA, 25 nt, Artificial Sequence
  Description of Artificial Sequence: Synthetic oligonucleotide
ucggaaacaaguuauucucuucacu

SEQ ID NO: 80471 - RNA, 25 nt, Artificial Sequence
  Description of Artificial Sequence: Synthetic oligonucleotide
acucccaauaacuaaugcuaagaaa

SEQ ID NO: 80472 - RNA, 25 nt, Artificial Sequence
  Description of Artificial Sequence: Synthetic oligonucleotide
aaugcuaagaaaugcugaaaaucaa

SEQ ID NO: 80473 - RNA, 25 nt, Artificial Sequence
  Description of Artificial Sequence: Synthetic oligonucleotide
gucuuucucuaaauaugauuacuuu

SEQ ID NO: 80474 - RNA, 25 nt, Artificial Sequence
  Description of Artificial Sequence: Synthetic oligonucleotide
ugaauuucaggcauuuuguucuaca

SEQ ID NO: 80475 - RNA, 25 nt, Artificial Sequence
  Description of Artificial Sequence: Synthetic oligonucleotide
cgauucccucucacccgggacucuc

SEQ ID NO: 80476 - RNA, 25 nt, Artificial Sequence
  Description of Artificial Sequence: Synthetic oligonucleotide
aggaaagugaaccuuuaaaguaaag

SEQ ID NO: 80477 - RNA, 25 nt, Artificial Sequence
  Description of Artificial Sequence: Synthetic oligonucleotide
gaggcugcaugcucuggaagccugg

SEQ ID NO: 80478 - RNA, 25 nt, Artificial Sequence
  Description of Artificial Sequence: Synthetic oligonucleotide
ucucugaacagaaaacaaaagagag

SEQ ID NO: 80479 - RNA, 25 nt, Artificial Sequence
  Description of Artificial Sequence: Synthetic oligonucleotide
aacuuggcuguaaucaguuaugccg

SEQ ID NO: 80480 - RNA, 25 nt, Artificial Sequence
  Description of Artificial Sequence: Synthetic oligonucleotide
agaagccaaaauuaaaagaagucca

SEQ ID NO: 80481 - RNA, 25 nt, Artificial Sequence
  Description of Artificial Sequence: Synthetic oligonucleotide
auuaaaagaaguccaggugagguua

SEQ ID NO: 80482 - RNA, 25 nt, Artificial Sequence
  Description of Artificial Sequence: Synthetic oligonucleotide
gaauccggauuaucgggaagaggac

SEQ ID NO: 80483 - RNA, 25 nt, Artificial Sequence
  Description of Artificial Sequence: Synthetic oligonucleotide
aaugugacaucaaagcaaguauugu

SEQ ID NO: 80484 - RNA, 25 nt, Artificial Sequence
  Description of Artificial Sequence: Synthetic oligonucleotide
caucaaagcaaguauuguagcacuc

SEQ ID NO: 80485 - RNA, 25 nt, Artificial Sequence
  Description of Artificial Sequence: Synthetic oligonucleotide
agagagagaaaacaaaaccacaaau

SEQ ID NO: 80486 - RNA, 25 nt, Artificial Sequence
  Description of Artificial Sequence: Synthetic oligonucleotide
ucgcuguaguauuuaagcccauaca

SEQ ID NO: 80487 - RNA, 25 nt, Artificial Sequence
  Description of Artificial Sequence: Synthetic oligonucleotide
cgcuguaguauuuaagcccauacag

SEQ ID NO: 80488 - RNA, 25 nt, Artificial Sequence
  Description of Artificial Sequence: Synthetic oligonucleotide
auuuaagcccauacagaaaccuucc

SEQ ID NO: 80489 - RNA, 25 nt, Artificial Sequence
  Description of Artificial Sequence: Synthetic oligonucleotide
auuaaaauaaacaugguauaccuac

SEQ ID NO: 80490 - RNA, 25 nt, Artificial Sequence
  Description of Artificial Sequence: Synthetic oligonucleotide
cuguucugaucggccaguuuucgga

SEQ ID NO: 80491 - RNA, 25 nt, Artificial Sequence
  Description of Artificial Sequence: Synthetic oligonucleotide
aaauaauuugaacuuuggaacaggg

SEQ ID NO: 80492 - RNA, 25 nt, Artificial Sequence
  Description of Artificial Sequence: Synthetic oligonucleotide
ugcgaccuuaauuuaacuuuccagu

SEQ ID NO: 80493 - RNA, 25 nt, Artificial Sequence
  Description of Artificial Sequence: Synthetic oligonucleotide
cugagaaagcuaaaguuugguuuug

SEQ ID NO: 80494 - RNA, 25 nt, Artificial Sequence
  Description of Artificial Sequence: Synthetic oligonucleotide
aguaaagaugcuacuucccacugua

SEQ ID NO: 80495 - RNA, 25 nt, Artificial Sequence
  Description of Artificial Sequence: Synthetic oligonucleotide
cugcuuaauugcugauaccauauga

SEQ ID NO: 80496 - RNA, 25 nt, Artificial Sequence
  Description of Artificial Sequence: Synthetic oligonucleotide
uaccauaugaaugaaacaugggcug

SEQ ID NO: 80497 - RNA, 25 nt, Artificial Sequence
  Description of Artificial Sequence: Synthetic oligonucleotide
aacuuucuuauccaacuuuuucaua

SEQ ID NO: 80498 - RNA, 25 nt, Artificial Sequence
  Description of Artificial Sequence: Synthetic oligonucleotide
ccuugcaugacaucaugaggccgga

SEQ ID NO: 80499 - RNA, 25 nt, Artificial Sequence
  Description of Artificial Sequence: Synthetic oligonucleotide
ugaauuuguauaugacugcauuugu

SEQ ID NO: 80500 - RNA, 25 nt, Artificial Sequence
  Description of Artificial Sequence: Synthetic oligonucleotide
gaauccuaguagaauguuuacuacc

SEQ ID NO: 80501 - RNA, 25 nt, Artificial Sequence
  Description of Artificial Sequence: Synthetic oligonucleotide
gaaagggaagaauuuuuugaugaaa

SEQ ID NO: 80502 - RNA, 25 nt, Artificial Sequence
  Description of Artificial Sequence: Synthetic oligonucleotide
uaucggcaugccagugugugaauuu

SEQ ID NO: 80503 - RNA, 25 nt, Artificial Sequence
  Description of Artificial Sequence: Synthetic oligonucleotide
caccucauaguagagcaauguaugu

SEQ ID NO: 80504 - RNA, 25 nt, Artificial Sequence
  Description of Artificial Sequence: Synthetic oligonucleotide
ccagaauugccaaagcacauauaua

SEQ ID NO: 80505 - RNA, 25 nt, Artificial Sequence
  Description of Artificial Sequence: Synthetic oligonucleotide
uggugaucuggguaauaguuucucc

SEQ ID NO: 80506 - RNA, 25 nt, Artificial Sequence
  Description of Artificial Sequence: Synthetic oligonucleotide
gaucuggguaauaguuucuccaaau

SEQ ID NO: 80507 - RNA, 25 nt, Artificial Sequence
  Description of Artificial Sequence: Synthetic oligonucleotide
ggaugugaugaauacuuccuagaaa

SEQ ID NO: 80508 - RNA, 25 nt, Artificial Sequence
  Description of Artificial Sequence: Synthetic oligonucleotide
cauuuccacagcuacaccauauaug

SEQ ID NO: 80509 - RNA, 25 nt, Artificial Sequence
  Description of Artificial Sequence: Synthetic oligonucleotide
acagcuacaccauauaugaauggag

SEQ ID NO: 80510 - RNA, 25 nt, Artificial Sequence
  Description of Artificial Sequence: Synthetic oligonucleotide
ugcaguucuuacacgagaagaagau

SEQ ID NO: 80511 - RNA, 25 nt, Artificial Sequence
  Description of Artificial Sequence: Synthetic oligonucleotide
acgagaagaagaucauuuacaggga

SEQ ID NO: 80512 - RNA, 25 nt, Artificial Sequence
  Description of Artificial Sequence: Synthetic oligonucleotide
cgagaagaagaucauuuacagggac

SEQ ID NO: 80513 - RNA, 25 nt, Artificial Sequence
  Description of Artificial Sequence: Synthetic oligonucleotide
aagaagaucauuuacagggaccuga

SEQ ID NO: 80514 - RNA, 25 nt, Artificial Sequence
  Description of Artificial Sequence: Synthetic oligonucleotide
agaggaagagguguuugacugcauc

SEQ ID NO: 80515 - RNA, 25 nt, Artificial Sequence
  Description of Artificial Sequence: Synthetic oligonucleotide
gaggaagagguguuugacugcaucg

SEQ ID NO: 80516 - RNA, 25 nt, Artificial Sequence
  Description of Artificial Sequence: Synthetic oligonucleotide
cuacuuugagggcgaguucacaggg

SEQ ID NO: 80517 - RNA, 25 nt, Artificial Sequence
  Description of Artificial Sequence: Synthetic oligonucleotide
agggcaucuccuggcaccucugucc

SEQ ID NO: 80518 - RNA, 25 nt, Artificial Sequence
  Description of Artificial Sequence: Synthetic oligonucleotide
ggagugauaugguuugucuuuuuaa

SEQ ID NO: 80519 - RNA, 25 nt, Artificial Sequence
  Description of Artificial Sequence: Synthetic oligonucleotide
gagugauaugguuugucuuuuuaag

SEQ ID NO: 80520 - RNA, 25 nt, Artificial Sequence
  Description of Artificial Sequence: Synthetic oligonucleotide
ugcaguaaagauccuaaagguuguc

SEQ ID NO: 80521 - RNA, 25 nt, Artificial Sequence
  Description of Artificial Sequence: Synthetic oligonucleotide
aguaaagauccuaaagguugucgac

SEQ ID NO: 80522 - RNA, 25 nt, Artificial Sequence
  Description of Artificial Sequence: Synthetic oligonucleotide
ugacaaaggacaaccuggcaauugu

SEQ ID NO: 80523 - RNA, 25 nt, Artificial Sequence
  Description of Artificial Sequence: Synthetic oligonucleotide
gcaauugugacccaguggugcgagg

SEQ ID NO: 80524 - RNA, 25 nt, Artificial Sequence
  Description of Artificial Sequence: Synthetic oligonucleotide
aacaucauccauagagacaugaaau

SEQ ID NO: 80525 - RNA, 25 nt, Artificial Sequence
  Description of Artificial Sequence: Synthetic oligonucleotide
ugaaauccaacaauauauuucucca

SEQ ID NO: 80526 - RNA, 25 nt, Artificial Sequence
  Description of Artificial Sequence: Synthetic oligonucleotide
aacaauauauuucuccaugaaggcu

SEQ ID NO: 80527 - RNA, 25 nt, Artificial Sequence
  Description of Artificial Sequence: Synthetic oligonucleotide
aacaguaaagucacgcuggaguggu

SEQ ID NO: 80528 - RNA, 25 nt, Artificial Sequence
  Description of Artificial Sequence: Synthetic oligonucleotide
ugugaagaaaguaaaggaagagagg

SEQ ID NO: 80529 - RNA, 25 nt, Artificial Sequence
  Description of Artificial Sequence: Synthetic oligonucleotide
cuuccgagccauccuugcaucgggc

SEQ ID NO: 80530 - RNA, 25 nt, Artificial Sequence
  Description of Artificial Sequence: Synthetic oligonucleotide
aauggagguugaauauccuacugug

SEQ ID NO: 80531 - RNA, 25 nt, Artificial Sequence
  Description of Artificial Sequence: Synthetic oligonucleotide
ggagguugaauauccuacuguguaa

SEQ ID NO: 80532 - RNA, 25 nt, Artificial Sequence
  Description of Artificial Sequence: Synthetic oligonucleotide
auuuugaguuuucccuuguagugua

SEQ ID NO: 80533 - RNA, 25 nt, Artificial Sequence
  Description of Artificial Sequence: Synthetic oligonucleotide
uauccuguuuguucuuuguugauug

SEQ ID NO: 80534 - RNA, 25 nt, Artificial Sequence
  Description of Artificial Sequence: Synthetic oligonucleotide
ccuguuuguucuuuguugauugaaa

SEQ ID NO: 80535 - RNA, 25 nt, Artificial Sequence
  Description of Artificial Sequence: Synthetic oligonucleotide
cucuacagccuucuuuuucuuccau

SEQ ID NO: 80536 - RNA, 25 nt, Artificial Sequence
  Description of Artificial Sequence: Synthetic oligonucleotide
ucuuccauagcuaaucuuccuucua

SEQ ID NO: 80537 - RNA, 25 nt, Artificial Sequence
  Description of Artificial Sequence: Synthetic oligonucleotide
auaaucuuccuguugaaugcuucau

SEQ ID NO: 80538 - RNA, 25 nt, Artificial Sequence
  Description of Artificial Sequence: Synthetic oligonucleotide
uaaucuuccuguugaaugcuucaug

SEQ ID NO: 80539 - RNA, 25 nt, Artificial Sequence
  Description of Artificial Sequence: Synthetic oligonucleotide
cuucaugacuugaauucuacuuuga

SEQ ID NO: 80540 - RNA, 25 nt, Artificial Sequence
  Description of Artificial Sequence: Synthetic oligonucleotide
aagagggagagaagcaacuacagac

SEQ ID NO: 80541 - RNA, 25 nt, Artificial Sequence
  Description of Artificial Sequence: Synthetic oligonucleotide
cgucuccuaccagaccaaggucaac

SEQ ID NO: 80542 - RNA, 25 nt, Artificial Sequence
  Description of Artificial Sequence: Synthetic oligonucleotide
gaucaaucggcccgacuaucucgac

SEQ ID NO: 80543 - RNA, 25 nt, Artificial Sequence
  Description of Artificial Sequence: Synthetic oligonucleotide
ggacgaacauccaaccuucccaaac

SEQ ID NO: 80544 - RNA, 25 nt, Artificial Sequence
  Description of Artificial Sequence: Synthetic oligonucleotide
agggucggaacccaagcuuagaacu

SEQ ID NO: 80545 - RNA, 25 nt, Artificial Sequence
  Description of Artificial Sequence: Synthetic oligonucleotide
ucggaacccaagcuuagaacuuuaa

SEQ ID NO: 80546 - RNA, 25 nt, Artificial Sequence
  Description of Artificial Sequence: Synthetic oligonucleotide
acccaagcuuagaacuuuaagcaac

SEQ ID NO: 80547 - RNA, 25 nt, Artificial Sequence
  Description of Artificial Sequence: Synthetic oligonucleotide
gaacuuuaagcaacaagaccaccac

SEQ ID NO: 80548 - RNA, 25 nt, Artificial Sequence
  Description of Artificial Sequence: Synthetic oligonucleotide
acuauucaguggcgagaaauaaagu

SEQ ID NO: 80549 - RNA, 25 nt, Artificial Sequence
  Description of Artificial Sequence: Synthetic oligonucleotide
cuauucaguggcgagaaauaaaguu

SEQ ID NO: 80550 - RNA, 25 nt, Artificial Sequence
  Description of Artificial Sequence: Synthetic oligonucleotide
aaacacagauaacaggaaaugaucc

SEQ ID NO: 80551 - RNA, 25 nt, Artificial Sequence
  Description of Artificial Sequence: Synthetic oligonucleotide
cuuaagaaaagagaagaaaugaaac

SEQ ID NO: 80552 - RNA, 25 nt, Artificial Sequence
  Description of Artificial Sequence: Synthetic oligonucleotide
cugaaggaguguguuuccauccucc

SEQ ID NO: 80553 - RNA, 25 nt, Artificial Sequence
  Description of Artificial Sequence: Synthetic oligonucleotide
ucaccgcgggacugaaaaucuuuga

SEQ ID NO: 80554 - RNA, 25 nt, Artificial Sequence
  Description of Artificial Sequence: Synthetic oligonucleotide
agcagaaauaagcgugccguucagg

SEQ ID NO: 80555 - RNA, 25 nt, Artificial Sequence
  Description of Artificial Sequence: Synthetic oligonucleotide
aagcgugccguucaggguccagaag

SEQ ID NO: 80556 - RNA, 25 nt, Artificial Sequence
  Description of Artificial Sequence: Synthetic oligonucleotide
agaaacagucacucaagacugcuug

SEQ ID NO: 80557 - RNA, 25 nt, Artificial Sequence
  Description of Artificial Sequence: Synthetic oligonucleotide
agaggaagaagguccaugucuuugg

SEQ ID NO: 80558 - RNA, 25 nt, Artificial Sequence
  Description of Artificial Sequence: Synthetic oligonucleotide
uguauucaaaauaugccugaaacac

SEQ ID NO: 80559 - RNA, 25 nt, Artificial Sequence
  Description of Artificial Sequence: Synthetic oligonucleotide
auuuuccucccuuucucuguaccuc

SEQ ID NO: 80560 - RNA, 25 nt, Artificial Sequence
  Description of Artificial Sequence: Synthetic oligonucleotide
caaagaaagauagagcaagacaaga

SEQ ID NO: 80561 - RNA, 25 nt, Artificial Sequence
  Description of Artificial Sequence: Synthetic oligonucleotide
aagaaagauagagcaagacaagaaa

SEQ ID NO: 80562 - RNA, 25 nt, Artificial Sequence
  Description of Artificial Sequence: Synthetic oligonucleotide
gaaagcauuuguuuguacaagaucc

SEQ ID NO: 80563 - RNA, 25 nt, Artificial Sequence
  Description of Artificial Sequence: Synthetic oligonucleotide
ugaguuaaacgaacguacuugcaga

SEQ ID NO: 80564 - RNA, 25 nt, Artificial Sequence
  Description of Artificial Sequence: Synthetic oligonucleotide
acugauacagaacgaucgauacaga

SEQ ID NO: 80565 - RNA, 25 nt, Artificial Sequence
  Description of Artificial Sequence: Synthetic oligonucleotide
auauuauauauauauaaaaauaaau

SEQ ID NO: 80566 - RNA, 25 nt, Artificial Sequence
  Description of Artificial Sequence: Synthetic oligonucleotide
auuauauauauauaaaaauaaauau

SEQ ID NO: 80567 - RNA, 25 nt, Artificial Sequence
  Description of Artificial Sequence: Synthetic oligonucleotide
ucacuggauguauuugacugcugug

SEQ ID NO: 80568 - RNA, 25 nt, Artificial Sequence
  Description of Artificial Sequence: Synthetic oligonucleotide
cagggaagaggaggagaugagagac

SEQ ID NO: 80569 - RNA, 25 nt, Artificial Sequence
  Description of Artificial Sequence: Synthetic oligonucleotide
augaucuuuuuuuugucccacuugg

SEQ ID NO: 80570 - RNA, 27 nt, Artificial Sequence
  Description of Artificial Sequence: Synthetic oligonucleotide
ggccgugaacuccucaucaaaauaccu

SEQ ID NO: 80571 - RNA, 27 nt, Artificial Sequence
  Description of Artificial Sequence: Synthetic oligonucleotide
uggugugauggugaucaucugggccgu

SEQ ID NO: 80572 - RNA, 27 nt, Artificial Sequence
  Description of Artificial Sequence: Synthetic oligonucleotide
aaacccgcaggauaguuuucuucccua

SEQ ID NO: 80573 - RNA, 27 nt, Artificial Sequence
  Description of Artificial Sequence: Synthetic oligonucleotide
caaacuggaugaaauaaauuaaaaccc

SEQ ID NO: 80574 - RNA, 27 nt, Artificial Sequence
  Description of Artificial Sequence: Synthetic oligonucleotide
agaaguccuuaacauuucccuacguga

SEQ ID NO: 80575 - RNA, 27 nt, Artificial Sequence
  Description of Artificial Sequence: Synthetic oligonucleotide
cucugucccacuggguaaacccuggcc

SEQ ID NO: 80576 - RNA, 27 nt, Artificial Sequence
  Description of Artificial Sequence: Synthetic oligonucleotide
cacaauaacaaauuuaaaccuugcucc

SEQ ID NO: 80577 - RNA, 27 nt, Artificial Sequence
  Description of Artificial Sequence: Synthetic oligonucleotide
aaaugcauuugaacaacauaauacaca

SEQ ID NO: 80578 - RNA, 27 nt, Artificial Sequence
  Description of Artificial Sequence: Synthetic oligonucleotide
ggcuuuccugucacaaagauuaaaaac

SEQ ID NO: 80579 - RNA, 27 nt, Artificial Sequence
  Description of Artificial Sequence: Synthetic oligonucleotide
agggcuuuccugucacaaagauuaaaa

SEQ ID NO: 80580 - RNA, 27 nt, Artificial Sequence
  Description of Artificial Sequence: Synthetic oligonucleotide
ggccaugcugggagacauaagcagcag

SEQ ID NO: 80581 - RNA, 27 nt, Artificial Sequence
  Description of Artificial Sequence: Synthetic oligonucleotide
ucagggagaagcuucugaaacacuucu

SEQ ID NO: 80582 - RNA, 27 nt, Artificial Sequence
  Description of Artificial Sequence: Synthetic oligonucleotide
aagggcuucuuccuuauugauggucag

SEQ ID NO: 80583 - RNA, 27 nt, Artificial Sequence
  Description of Artificial Sequence: Synthetic oligonucleotide
ugaagggcuucuuccuuauugaugguc

SEQ ID NO: 80584 - RNA, 27 nt, Artificial Sequence
  Description of Artificial Sequence: Synthetic oligonucleotide
cgcugaagggcuucuuccuuauugaug

SEQ ID NO: 80585 - RNA, 27 nt, Artificial Sequence
  Description of Artificial Sequence: Synthetic oligonucleotide
gccgcugaagggcuucuuccuuauuga

SEQ ID NO: 80586 - RNA, 27 nt, Artificial Sequence
  Description of Artificial Sequence: Synthetic oligonucleotide
acuggccgcugaagggcuucuuccuua

SEQ ID NO: 80587 - RNA, 27 nt, Artificial Sequence
  Description of Artificial Sequence: Synthetic oligonucleotide
cggagcuuuucaccuuuaguuaugcuu

SEQ ID NO: 80588 - RNA, 27 nt, Artificial Sequence
  Description of Artificial Sequence: Synthetic oligonucleotide
ccggagcuuuucaccuuuaguuaugcu

SEQ ID NO: 80589 - RNA, 27 nt, Artificial Sequence
  Description of Artificial Sequence: Synthetic oligonucleotide
cagacuguugacuggcgugauguaguu

SEQ ID NO: 80590 - RNA, 27 nt, Artificial Sequence
  Description of Artificial Sequence: Synthetic oligonucleotide
cuuuugaacucugcuuaaauccagugg

SEQ ID NO: 80591 - RNA, 27 nt, Artificial Sequence
  Description of Artificial Sequence: Synthetic oligonucleotide
gcuuuugaacucugcuuaaauccagug

SEQ ID NO: 80592 - RNA, 27 nt, Artificial Sequence
  Description of Artificial Sequence: Synthetic oligonucleotide
agggcuuuugaacucugcuuaaaucca

SEQ ID NO: 80593 - RNA, 27 nt, Artificial Sequence
  Description of Artificial Sequence: Synthetic oligonucleotide
aagggcuuuugaacucugcuuaaaucc

SEQ ID NO: 80594 - RNA, 27 nt, Artificial Sequence
  Description of Artificial Sequence: Synthetic oligonucleotide
ugaagggcuuuugaacucugcuuaaau

SEQ ID NO: 80595 - RNA, 27 nt, Artificial Sequence
  Description of Artificial Sequence: Synthetic oligonucleotide
cugaagggcuuuugaacucugcuuaaa

SEQ ID NO: 80596 - RNA, 27 nt, Artificial Sequence
  Description of Artificial Sequence: Synthetic oligonucleotide
cgcugaagggcuuuugaacucugcuua

SEQ ID NO: 80597 - RNA, 27 nt, Artificial Sequence
  Description of Artificial Sequence: Synthetic oligonucleotide
cgagcggcuucacucagacccugaggc

SEQ ID NO: 80598 - RNA, 27 nt, Artificial Sequence
  Description of Artificial Sequence: Synthetic oligonucleotide
uugacuggcgugauguaguugcuuggg

SEQ ID NO: 80599 - RNA, 27 nt, Artificial Sequence
  Description of Artificial Sequence: Synthetic oligonucleotide
cacgcaccaagaagcugccauugaucc

SEQ ID NO: 80600 - RNA, 27 nt, Artificial Sequence
  Description of Artificial Sequence: Synthetic oligonucleotide
cugaugaauccaaugugggcuggaauc

SEQ ID NO: 80601 - RNA, 27 nt, Artificial Sequence
  Description of Artificial Sequence: Synthetic oligonucleotide
cuuagguauuccacauucucagcugug

SEQ ID NO: 80602 - RNA, 27 nt, Artificial Sequence
  Description of Artificial Sequence: Synthetic oligonucleotide
ugagccucaaauuaggagauacguuuu

SEQ ID NO: 80603 - RNA, 27 nt, Artificial Sequence
  Description of Artificial Sequence: Synthetic oligonucleotide
ccaauuguagagaaauuauuuuaggaa

SEQ ID NO: 80604 - RNA, 27 nt, Artificial Sequence
  Description of Artificial Sequence: Synthetic oligonucleotide
ggcuccuaacuagcugaaucuuccaau

SEQ ID NO: 80605 - RNA, 27 nt, Artificial Sequence
  Description of Artificial Sequence: Synthetic oligonucleotide
guggauauugacuaggagaguuuaaaa

SEQ ID NO: 80606 - RNA, 27 nt, Artificial Sequence
  Description of Artificial Sequence: Synthetic oligonucleotide
ugugacugaacauaacuguaggcugaa

SEQ ID NO: 80607 - RNA, 27 nt, Artificial Sequence
  Description of Artificial Sequence: Synthetic oligonucleotide
guaugugugugugacugaacauaacug

SEQ ID NO: 80608 - RNA, 27 nt, Artificial Sequence
  Description of Artificial Sequence: Synthetic oligonucleotide
aagcaaaaggaacauuuuguaugugug

SEQ ID NO: 80609 - RNA, 27 nt, Artificial Sequence
  Description of Artificial Sequence: Synthetic oligonucleotide
aaaaauuacuuuaaaagcaaaaggaac

SEQ ID NO: 80610 - RNA, 27 nt, Artificial Sequence
  Description of Artificial Sequence: Synthetic oligonucleotide
ccauugacuguugcuucacaggucaga

SEQ ID NO: 80611 - RNA, 27 nt, Artificial Sequence
  Description of Artificial Sequence: Synthetic oligonucleotide
auugguuugucgaugugugagauaguu

SEQ ID NO: 80612 - RNA, 27 nt, Artificial Sequence
  Description of Artificial Sequence: Synthetic oligonucleotide
agugguagcaguacaauugaggacaag

SEQ ID NO: 80613 - RNA, 27 nt, Artificial Sequence
  Description of Artificial Sequence: Synthetic oligonucleotide
uaagaccgcuugccagcuacgguuuca

SEQ ID NO: 80614 - RNA, 27 nt, Artificial Sequence
  Description of Artificial Sequence: Synthetic oligonucleotide
agccgguaagaccgcuugccagcuacg

SEQ ID NO: 80615 - RNA, 27 nt, Artificial Sequence
  Description of Artificial Sequence: Synthetic oligonucleotide
gguaacccaucuuuuaaccauacaacu

SEQ ID NO: 80616 - RNA, 27 nt, Artificial Sequence
  Description of Artificial Sequence: Synthetic oligonucleotide
ucgcagguaacccaucuuuuaaccaua

SEQ ID NO: 80617 - RNA, 27 nt, Artificial Sequence
  Description of Artificial Sequence: Synthetic oligonucleotide
cucagcaagauuguauaauucccugca

SEQ ID NO: 80618 - RNA, 27 nt, Artificial Sequence
  Description of Artificial Sequence: Synthetic oligonucleotide
acuguuuuaugcucagcaagauuguau

SEQ ID NO: 80619 - RNA, 27 nt, Artificial Sequence
  Description of Artificial Sequence: Synthetic oligonucleotide
aggauaaaggacucuucauuauuggaa

SEQ ID NO: 80620 - RNA, 27 nt, Artificial Sequence
  Description of Artificial Sequence: Synthetic oligonucleotide
caacuugcguuggaacauccaaagugu

SEQ ID NO: 80621 - RNA, 27 nt, Artificial Sequence
  Description of Artificial Sequence: Synthetic oligonucleotide
augguuucaguuuaguggaagcauuua

SEQ ID NO: 80622 - RNA, 27 nt, Artificial Sequence
  Description of Artificial Sequence: Synthetic oligonucleotide
auauuuaacaaagucaaacuuucucac

SEQ ID NO: 80623 - RNA, 27 nt, Artificial Sequence
  Description of Artificial Sequence: Synthetic oligonucleotide
aacuuuuaauauacaguaguucuuuuc

SEQ ID NO: 80624 - RNA, 27 nt, Artificial Sequence
  Description of Artificial Sequence: Synthetic oligonucleotide
guuaagucaaaacccguauuucuaaag

SEQ ID NO: 80625 - RNA, 27 nt, Artificial Sequence
  Description of Artificial Sequence: Synthetic oligonucleotide
gugcugaguuugcuguacccauguuga

SEQ ID NO: 80626 - RNA, 27 nt, Artificial Sequence
  Description of Artificial Sequence: Synthetic oligonucleotide
ugaggucagcaucuucugugucuuuac

SEQ ID NO: 80627 - RNA, 27 nt, Artificial Sequence
  Description of Artificial Sequence: Synthetic oligonucleotide
gcgaucugaauaaaccucccuacuagc

SEQ ID NO: 80628 - RNA, 27 nt, Artificial Sequence
  Description of Artificial Sequence: Synthetic oligonucleotide
aucccagaacccugcugcagaaggcca

SEQ ID NO: 80629 - RNA, 27 nt, Artificial Sequence
  Description of Artificial Sequence: Synthetic oligonucleotide
cauaauuuccaauauguaccagaccuu

SEQ ID NO: 80630 - RNA, 27 nt, Artificial Sequence
  Description of Artificial Sequence: Synthetic oligonucleotide
cuagugcuuccaucggaaggacuaggu

SEQ ID NO: 80631 - RNA, 27 nt, Artificial Sequence
  Description of Artificial Sequence: Synthetic oligonucleotide
uccacauaaaaacaauauucacuggga

SEQ ID NO: 80632 - RNA, 27 nt, Artificial Sequence
  Description of Artificial Sequence: Synthetic oligonucleotide
ucuaccaauuccaacuugaauucauug

SEQ ID NO: 80633 - RNA, 27 nt, Artificial Sequence
  Description of Artificial Sequence: Synthetic oligonucleotide
ucuccaagucuaaaucuguguccugag

SEQ ID NO: 80634 - RNA, 27 nt, Artificial Sequence
  Description of Artificial Sequence: Synthetic oligonucleotide
uggaauacuguaacugugcuuugagga

SEQ ID NO: 80635 - RNA, 27 nt, Artificial Sequence
  Description of Artificial Sequence: Synthetic oligonucleotide
uuaauucaucagugguggcagugguag

SEQ ID NO: 80636 - RNA, 27 nt, Artificial Sequence
  Description of Artificial Sequence: Synthetic oligonucleotide
gugaugauguggcacuaguaguuucuu

SEQ ID NO: 80637 - RNA, 27 nt, Artificial Sequence
  Description of Artificial Sequence: Synthetic oligonucleotide
ucuguuuggugaggcuguccgacuuug

SEQ ID NO: 80638 - RNA, 27 nt, Artificial Sequence
  Description of Artificial Sequence: Synthetic oligonucleotide
ccaucauguuccauuuuucgcuuucuc

SEQ ID NO: 80639 - RNA, 27 nt, Artificial Sequence
  Description of Artificial Sequence: Synthetic oligonucleotide
gcagucuacaugcuaaaucagagggua

SEQ ID NO: 80640 - RNA, 27 nt, Artificial Sequence
  Description of Artificial Sequence: Synthetic oligonucleotide
cauaaauagauccuuaaauagcucaaa

SEQ ID NO: 80641 - RNA, 27 nt, Artificial Sequence
  Description of Artificial Sequence: Synthetic oligonucleotide
ugauaauagugcuuuuucaccuuuuuc

SEQ ID NO: 80642 - RNA, 27 nt, Artificial Sequence
  Description of Artificial Sequence: Synthetic oligonucleotide
gcagaacugauaauagugcuuuuucac

SEQ ID NO: 80643 - RNA, 27 nt, Artificial Sequence
  Description of Artificial Sequence: Synthetic oligonucleotide
guagguuuaaucuuucuuuucagccau

SEQ ID NO: 80644 - RNA, 27 nt, Artificial Sequence
  Description of Artificial Sequence: Synthetic oligonucleotide
agaaggauuuuauuauaaggguuuaau

SEQ ID NO: 80645 - RNA, 27 nt, Artificial Sequence
  Description of Artificial Sequence: Synthetic oligonucleotide
gucuacagcauuggcuaauaguaugaa

SEQ ID NO: 80646 - RNA, 27 nt, Artificial Sequence
  Description of Artificial Sequence: Synthetic oligonucleotide
cuauuccuaucaaaaugcuucugucua

SEQ ID NO: 80647 - RNA, 27 nt, Artificial Sequence
  Description of Artificial Sequence: Synthetic oligonucleotide
ucagggccauuaucuuauuugcucuau

SEQ ID NO: 80648 - RNA, 27 nt, Artificial Sequence
  Description of Artificial Sequence: Synthetic oligonucleotide
ugcuugaggaagagaaaaauguugguc

SEQ ID NO: 80649 - RNA, 27 nt, Artificial Sequence
  Description of Artificial Sequence: Synthetic oligonucleotide
ugggcugaacuuuucucauacuuaaag

SEQ ID NO: 80650 - RNA, 27 nt, Artificial Sequence
  Description of Artificial Sequence: Synthetic oligonucleotide
gguucagcagccaucuuuauuccugcg

SEQ ID NO: 80651 - RNA, 27 nt, Artificial Sequence
  Description of Artificial Sequence: Synthetic oligonucleotide
ugaagagaacuuggucauucaaauuuc

SEQ ID NO: 80652 - RNA, 27 nt, Artificial Sequence
  Description of Artificial Sequence: Synthetic oligonucleotide
cucuaggcuggcuaucuuuauacauac

SEQ ID NO: 80653 - RNA, 27 nt, Artificial Sequence
  Description of Artificial Sequence: Synthetic oligonucleotide
acacuucacagagauaguuacagccau

SEQ ID NO: 80654 - RNA, 27 nt, Artificial Sequence
  Description of Artificial Sequence: Synthetic oligonucleotide
uugaaauuuucucacacuucacagaga

SEQ ID NO: 80655 - RNA, 27 nt, Artificial Sequence
  Description of Artificial Sequence: Synthetic oligonucleotide
ucaggaggauucauuuccuuaaaggaa

SEQ ID NO: 80656 - RNA, 27 nt, Artificial Sequence
  Description of Artificial Sequence: Synthetic oligonucleotide
auaugaugucacuuuuuguauccuuga

SEQ ID NO: 80657 - RNA, 27 nt, Artificial Sequence
  Description of Artificial Sequence: Synthetic oligonucleotide
uaugaugaagauucaaauugcaucuua

SEQ ID NO: 80658 - RNA, 27 nt, Artificial Sequence
  Description of Artificial Sequence: Synthetic oligonucleotide
uuaauagcuagucuucguuuugaacag

SEQ ID NO: 80659 - RNA, 27 nt, Artificial Sequence
  Description of Artificial Sequence: Synthetic oligonucleotide
auuuuuaguagagaugagguuucacca

SEQ ID NO: 80660 - RNA, 27 nt, Artificial Sequence
  Description of Artificial Sequence: Synthetic oligonucleotide
aggcgagauagagcuucucuuucguuc

SEQ ID NO: 80661 - RNA, 27 nt, Artificial Sequence
  Description of Artificial Sequence: Synthetic oligonucleotide
aacuggaccgaaggcgcuuguggagaa

SEQ ID NO: 80662 - RNA, 27 nt, Artificial Sequence
  Description of Artificial Sequence: Synthetic oligonucleotide
gcggcuacaucuuuggaaucuucuccu

SEQ ID NO: 80663 - RNA, 27 nt, Artificial Sequence
  Description of Artificial Sequence: Synthetic oligonucleotide
caagucuccucauugaauccagauugg

SEQ ID NO: 80664 - RNA, 27 nt, Artificial Sequence
  Description of Artificial Sequence: Synthetic oligonucleotide
uccucacuacucucaaaucuguucugg

SEQ ID NO: 80665 - RNA, 27 nt, Artificial Sequence
  Description of Artificial Sequence: Synthetic oligonucleotide
uuuguacucaucugcacagcucuggcu

SEQ ID NO: 80666 - RNA, 27 nt, Artificial Sequence
  Description of Artificial Sequence: Synthetic oligonucleotide
gcccauuaacaacaacaaucugaggug

SEQ ID NO: 80667 - RNA, 27 nt, Artificial Sequence
  Description of Artificial Sequence: Synthetic oligonucleotide
aauaaauuaaaaauaauuaaaauagug

SEQ ID NO: 80668 - RNA, 27 nt, Artificial Sequence
  Description of Artificial Sequence: Synthetic oligonucleotide
cauauuuaaauauuaauaaauuaaaaa

SEQ ID NO: 80669 - RNA, 27 nt, Artificial Sequence
  Description of Artificial Sequence: Synthetic oligonucleotide
gaaacaaaggauauucaaacugcauag

SEQ ID NO: 80670 - RNA, 27 nt, Artificial Sequence
  Description of Artificial Sequence: Synthetic oligonucleotide
caaacacuuagacgccagcagcauggg

SEQ ID NO: 80671 - RNA, 27 nt, Artificial Sequence
  Description of Artificial Sequence: Synthetic oligonucleotide
uuugucacaggugaaaugcacaucuga

SEQ ID NO: 80672 - RNA, 27 nt, Artificial Sequence
  Description of Artificial Sequence: Synthetic oligonucleotide
uaauucagccuggcacagguuuugauc

SEQ ID NO: 80673 - RNA, 27 nt, Artificial Sequence
  Description of Artificial Sequence: Synthetic oligonucleotide
auuguaagaaugacuacccacauucac

SEQ ID NO: 80674 - RNA, 27 nt, Artificial Sequence
  Description of Artificial Sequence: Synthetic oligonucleotide
caauuguaagaaugacuacccacauuc

SEQ ID NO: 80675 - RNA, 27 nt, Artificial Sequence
  Description of Artificial Sequence: Synthetic oligonucleotide
guacacucucugaugcucauuuucaua

SEQ ID NO: 80676 - RNA, 27 nt, Artificial Sequence
  Description of Artificial Sequence: Synthetic oligonucleotide
cugcugaguucuacaugaaaagcaaau

SEQ ID NO: 80677 - RNA, 27 nt, Artificial Sequence
  Description of Artificial Sequence: Synthetic oligonucleotide
uacugaaaauaaauauagaaauacaac

SEQ ID NO: 80678 - RNA, 27 nt, Artificial Sequence
  Description of Artificial Sequence: Synthetic oligonucleotide
uuccauuuaagaaacauuaaucaaaac

SEQ ID NO: 80679 - RNA, 27 nt, Artificial Sequence
  Description of Artificial Sequence: Synthetic oligonucleotide
acaauuuuaggcacuauacacguuguu

SEQ ID NO: 80680 - RNA, 27 nt, Artificial Sequence
  Description of Artificial Sequence: Synthetic oligonucleotide
ccagauguuaguagccaaggauauggu

SEQ ID NO: 80681 - RNA, 27 nt, Artificial Sequence
  Description of Artificial Sequence: Synthetic oligonucleotide
agcucacagucuccagauguuaguagc

SEQ ID NO: 80682 - RNA, 27 nt, Artificial Sequence
  Description of Artificial Sequence: Synthetic oligonucleotide
auuaauaaaaagcacacaacuuauggc

SEQ ID NO: 80683 - RNA, 27 nt, Artificial Sequence
  Description of Artificial Sequence: Synthetic oligonucleotide
aauguaagaagagccaaaaugaugcau

SEQ ID NO: 80684 - RNA, 27 nt, Artificial Sequence
  Description of Artificial Sequence: Synthetic oligonucleotide
acauuuuuacaaauguaagaagagcca

SEQ ID NO: 80685 - RNA, 27 nt, Artificial Sequence
  Description of Artificial Sequence: Synthetic oligonucleotide
aauaugaauuaagaugaccuaaucugu

SEQ ID NO: 80686 - RNA, 27 nt, Artificial Sequence
  Description of Artificial Sequence: Synthetic oligonucleotide
ucaugauuaguucuuucaauuccaucc

SEQ ID NO: 80687 - RNA, 27 nt, Artificial Sequence
  Description of Artificial Sequence: Synthetic oligonucleotide
cccaagagcagaaggaaugagugugca

SEQ ID NO: 80688 - RNA, 27 nt, Artificial Sequence
  Description of Artificial Sequence: Synthetic oligonucleotide
cucaaagcuacugguuaccucuacacc

SEQ ID NO: 80689 - RNA, 27 nt, Artificial Sequence
  Description of Artificial Sequence: Synthetic oligonucleotide
ugaaauauuacguggcaugugguuggg

SEQ ID NO: 80690 - RNA, 27 nt, Artificial Sequence
  Description of Artificial Sequence: Synthetic oligonucleotide
agugaagagaauaacuuguuuccgaag

SEQ ID NO: 80691 - RNA, 27 nt, Artificial Sequence
  Description of Artificial Sequence: Synthetic oligonucleotide
uuucuuagcauuaguuauugggaguga

SEQ ID NO: 80692 - RNA, 27 nt, Artificial Sequence
  Description of Artificial Sequence: Synthetic oligonucleotide
uugauuuucagcauuucuuagcauuag

SEQ ID NO: 80693 - RNA, 27 nt, Artificial Sequence
  Description of Artificial Sequence: Synthetic oligonucleotide
aaaguaaucauauuuagagaaagacag

SEQ ID NO: 80694 - RNA, 27 nt, Artificial Sequence
  Description of Artificial Sequence: Synthetic oligonucleotide
uguagaacaaaaugccugaaauucagc

SEQ ID NO: 80695 - RNA, 27 nt, Artificial Sequence
  Description of Artificial Sequence: Synthetic oligonucleotide
gagagucccgggugagagggaaucgcc

SEQ ID NO: 80696 - RNA, 27 nt, Artificial Sequence
  Description of Artificial Sequence: Synthetic oligonucleotide
cuuuacuuuaaagguucacuuuccuug

SEQ ID NO: 80697 - RNA, 27 nt, Artificial Sequence
  Description of Artificial Sequence: Synthetic oligonucleotide
ccaggcuuccagagcaugcagccuccu

SEQ ID NO: 80698 - RNA, 27 nt, Artificial Sequence
  Description of Artificial Sequence: Synthetic oligonucleotide
cucucuuuuguuuucuguucagagaaa

SEQ ID NO: 80699 - RNA, 27 nt, Artificial Sequence
  Description of Artificial Sequence: Synthetic oligonucleotide
cggcauaacugauuacagccaaguuca

SEQ ID NO: 80700 - RNA, 27 nt, Artificial Sequence
  Description of Artificial Sequence: Synthetic oligonucleotide
uggacuucuuuuaauuuuggcuucuuc

SEQ ID NO: 80701 - RNA, 27 nt, Artificial Sequence
  Description of Artificial Sequence: Synthetic oligonucleotide
uaaccucaccuggacuucuuuuaauuu

SEQ ID NO: 80702 - RNA, 27 nt, Artificial Sequence
  Description of Artificial Sequence: Synthetic oligonucleotide
guccucuucccgauaauccggauucag

SEQ ID NO: 80703 - RNA, 27 nt, Artificial Sequence
  Description of Artificial Sequence: Synthetic oligonucleotide
acaauacuugcuuugaugucacauuaa

SEQ ID NO: 80704 - RNA, 27 nt, Artificial Sequence
  Description of Artificial Sequence: Synthetic oligonucleotide
gagugcuacaauacuugcuuugauguc

SEQ ID NO: 80705 - RNA, 27 nt, Artificial Sequence
  Description of Artificial Sequence: Synthetic oligonucleotide
auuugugguuuuguuuucucucucucu

SEQ ID NO: 80706 - RNA, 27 nt, Artificial Sequence
  Description of Artificial Sequence: Synthetic oligonucleotide
uguaugggcuuaaauacuacagcgagg

SEQ ID NO: 80707 - RNA, 27 nt, Artificial Sequence
  Description of Artificial Sequence: Synthetic oligonucleotide
cuguaugggcuuaaauacuacagcgag

SEQ ID NO: 80708 - RNA, 27 nt, Artificial Sequence
  Description of Artificial Sequence: Synthetic oligonucleotide
ggaagguuucuguaugggcuuaaauac

SEQ ID NO: 80709 - RNA, 27 nt, Artificial Sequence
  Description of Artificial Sequence: Synthetic oligonucleotide
guagguauaccauguuuauuuuaauac

SEQ ID NO: 80710 - RNA, 27 nt, Artificial Sequence
  Description of Artificial Sequence: Synthetic oligonucleotide
uccgaaaacuggccgaucagaacagcc

SEQ ID NO: 80711 - RNA, 27 nt, Artificial Sequence
  Description of Artificial Sequence: Synthetic oligonucleotide
cccuguuccaaaguucaaauuauuugu

SEQ ID NO: 80712 - RNA, 27 nt, Artificial Sequence
  Description of Artificial Sequence: Synthetic oligonucleotide
acuggaaaguuaaauuaaggucgcaau

SEQ ID NO: 80713 - RNA, 27 nt, Artificial Sequence
  Description of Artificial Sequence: Synthetic oligonucleotide
caaaaccaaacuuuagcuuucucagcc

SEQ ID NO: 80714 - RNA, 27 nt, Artificial Sequence
  Description of Artificial Sequence: Synthetic oligonucleotide
uacagugggaaguagcaucuuuacuuu

SEQ ID NO: 80715 - RNA, 27 nt, Artificial Sequence
  Description of Artificial Sequence: Synthetic oligonucleotide
ucauaugguaucagcaauuaagcagua

SEQ ID NO: 80716 - RNA, 27 nt, Artificial Sequence
  Description of Artificial Sequence: Synthetic oligonucleotide
cagcccauguuucauucauaugguauc

SEQ ID NO: 80717 - RNA, 27 nt, Artificial Sequence
  Description of Artificial Sequence: Synthetic oligonucleotide
uaugaaaaaguuggauaagaaaguugg

SEQ ID NO: 80718 - RNA, 27 nt, Artificial Sequence
  Description of Artificial Sequence: Synthetic oligonucleotide
uccggccucaugaugucaugcaaggcu

SEQ ID NO: 80719 - RNA, 27 nt, Artificial Sequence
  Description of Artificial Sequence: Synthetic oligonucleotide
acaaaugcagucauauacaaauucagg

SEQ ID NO: 80720 - RNA, 27 nt, Artificial Sequence
  Description of Artificial Sequence: Synthetic oligonucleotide
gguaguaaacauucuacuaggauucuu

SEQ ID NO: 80721 - RNA, 27 nt, Artificial Sequence
  Description of Artificial Sequence: Synthetic oligonucleotide
uuucaucaaaaaauucuucccuuucug

SEQ ID NO: 80722 - RNA, 27 nt, Artificial Sequence
  Description of Artificial Sequence: Synthetic oligonucleotide
aaauucacacacuggcaugccgauagc

SEQ ID NO: 80723 - RNA, 27 nt, Artificial Sequence
  Description of Artificial Sequence: Synthetic oligonucleotide
acauacauugcucuacuaugaggugaa

SEQ ID NO: 80724 - RNA, 27 nt, Artificial Sequence
  Description of Artificial Sequence: Synthetic oligonucleotide
uauauaugugcuuuggcaauucuggug

SEQ ID NO: 80725 - RNA, 27 nt, Artificial Sequence
  Description of Artificial Sequence: Synthetic oligonucleotide
ggagaaacuauuacccagaucaccacu

SEQ ID NO: 80726 - RNA, 27 nt, Artificial Sequence
  Description of Artificial Sequence: Synthetic oligonucleotide
auuuggagaaacuauuacccagaucac

SEQ ID NO: 80727 - RNA, 27 nt, Artificial Sequence
  Description of Artificial Sequence: Synthetic oligonucleotide
uuucuaggaaguauucaucacauccac

SEQ ID NO: 80728 - RNA, 27 nt, Artificial Sequence
  Description of Artificial Sequence: Synthetic oligonucleotide
cauauaugguguagcuguggaaaugcg

SEQ ID NO: 80729 - RNA, 27 nt, Artificial Sequence
  Description of Artificial Sequence: Synthetic oligonucleotide
cuccauucauauaugguguagcugugg

SEQ ID NO: 80730 - RNA, 27 nt, Artificial Sequence
  Description of Artificial Sequence: Synthetic oligonucleotide
aucuucuucucguguaagaacugcagc

SEQ ID NO: 80731 - RNA, 27 nt, Artificial Sequence
  Description of Artificial Sequence: Synthetic oligonucleotide
ucccuguaaaugaucuucuucucgugu

SEQ ID NO: 80732 - RNA, 27 nt, Artificial Sequence
  Description of Artificial Sequence: Synthetic oligonucleotide
gucccuguaaaugaucuucuucucgug

SEQ ID NO: 80733 - RNA, 27 nt, Artificial Sequence
  Description of Artificial Sequence: Synthetic oligonucleotide
ucaggucccuguaaaugaucuucuucu

SEQ ID NO: 80734 - RNA, 27 nt, Artificial Sequence
  Description of Artificial Sequence: Synthetic oligonucleotide
gaugcagucaaacaccucuuccucugu

SEQ ID NO: 80735 - RNA, 27 nt, Artificial Sequence
  Description of Artificial Sequence: Synthetic oligonucleotide
cgaugcagucaaacaccucuuccucug

SEQ ID NO: 80736 - RNA, 27 nt, Artificial Sequence
  Description of Artificial Sequence: Synthetic oligonucleotide
cccugugaacucgcccucaaaguagcg

SEQ ID NO: 80737 - RNA, 27 nt, Artificial Sequence
  Description of Artificial Sequence: Synthetic oligonucleotide
ggacagaggugccaggagaugcccuca

SEQ ID NO: 80738 - RNA, 27 nt, Artificial Sequence
  Description of Artificial Sequence: Synthetic oligonucleotide
uuaaaaagacaaaccauaucacuccuu

SEQ ID NO: 80739 - RNA, 27 nt, Artificial Sequence
  Description of Artificial Sequence: Synthetic oligonucleotide
cuuaaaaagacaaaccauaucacuccu

SEQ ID NO: 80740 - RNA, 27 nt, Artificial Sequence
  Description of Artificial Sequence: Synthetic oligonucleotide
gacaaccuuuaggaucuuuacugcaac

SEQ ID NO: 80741 - RNA, 27 nt, Artificial Sequence
  Description of Artificial Sequence: Synthetic oligonucleotide
gucgacaaccuuuaggaucuuuacugc

SEQ ID NO: 80742 - RNA, 27 nt, Artificial Sequence
  Description of Artificial Sequence: Synthetic oligonucleotide
acaauugccagguuguccuuugucaug

SEQ ID NO: 80743 - RNA, 27 nt, Artificial Sequence
  Description of Artificial Sequence: Synthetic oligonucleotide
ccucgcaccacugggucacaauugcca

SEQ ID NO: 80744 - RNA, 27 nt, Artificial Sequence
  Description of Artificial Sequence: Synthetic oligonucleotide
auuucaugucucuauggaugauguucu

SEQ ID NO: 80745 - RNA, 27 nt, Artificial Sequence
  Description of Artificial Sequence: Synthetic oligonucleotide
uggagaaauauauuguuggauuucaug

SEQ ID NO: 80746 - RNA, 27 nt, Artificial Sequence
  Description of Artificial Sequence: Synthetic oligonucleotide
agccuucauggagaaauauauuguugg

SEQ ID NO: 80747 - RNA, 27 nt, Artificial Sequence
  Description of Artificial Sequence: Synthetic oligonucleotide
accacuccagcgugacuuuacuguugc

SEQ ID NO: 80748 - RNA, 27 nt, Artificial Sequence
  Description of Artificial Sequence: Synthetic oligonucleotide
ccucucuuccuuuacuuucuucacaca

SEQ ID NO: 80749 - RNA, 27 nt, Artificial Sequence
  Description of Artificial Sequence: Synthetic oligonucleotide
gcccgaugcaaggauggcucggaagcg

SEQ ID NO: 80750 - RNA, 27 nt, Artificial Sequence
  Description of Artificial Sequence: Synthetic oligonucleotide
cacaguaggauauucaaccuccauuuc

SEQ ID NO: 80751 - RNA, 27 nt, Artificial Sequence
  Description of Artificial Sequence: Synthetic oligonucleotide
uuacacaguaggauauucaaccuccau

SEQ ID NO: 80752 - RNA, 27 nt, Artificial Sequence
  Description of Artificial Sequence: Synthetic oligonucleotide
uacacuacaagggaaaacucaaaaucu

SEQ ID NO: 80753 - RNA, 27 nt, Artificial Sequence
  Description of Artificial Sequence: Synthetic oligonucleotide
caaucaacaaagaacaaacaggauaaa

SEQ ID NO: 80754 - RNA, 27 nt, Artificial Sequence
  Description of Artificial Sequence: Synthetic oligonucleotide
uuucaaucaacaaagaacaaacaggau

SEQ ID NO: 80755 - RNA, 27 nt, Artificial Sequence
  Description of Artificial Sequence: Synthetic oligonucleotide
auggaagaaaaagaaggcuguagagaa

SEQ ID NO: 80756 - RNA, 27 nt, Artificial Sequence
  Description of Artificial Sequence: Synthetic oligonucleotide
uagaaggaagauuagcuauggaagaaa

SEQ ID NO: 80757 - RNA, 27 nt, Artificial Sequence
  Description of Artificial Sequence: Synthetic oligonucleotide
augaagcauucaacaggaagauuauuu

SEQ ID NO: 80758 - RNA, 27 nt, Artificial Sequence
  Description of Artificial Sequence: Synthetic oligonucleotide
caugaagcauucaacaggaagauuauu

SEQ ID NO: 80759 - RNA, 27 nt, Artificial Sequence
  Description of Artificial Sequence: Synthetic oligonucleotide
ucaaaguagaauucaagucaugaagca

SEQ ID NO: 80760 - RNA, 27 nt, Artificial Sequence
  Description of Artificial Sequence: Synthetic oligonucleotide
gucuguaguugcuucucucccucuuag

SEQ ID NO: 80761 - RNA, 27 nt, Artificial Sequence
  Description of Artificial Sequence: Synthetic oligonucleotide
guugaccuuggucugguaggagacggc

SEQ ID NO: 80762 - RNA, 27 nt, Artificial Sequence
  Description of Artificial Sequence: Synthetic oligonucleotide
gucgagauagucgggccgauugaucuc

SEQ ID NO: 80763 - RNA, 27 nt, Artificial Sequence
  Description of Artificial Sequence: Synthetic oligonucleotide
guuugggaagguuggauguucguccuc

SEQ ID NO: 80764 - RNA, 27 nt, Artificial Sequence
  Description of Artificial Sequence: Synthetic oligonucleotide
aguucuaagcuuggguuccgacccuaa

SEQ ID NO: 80765 - RNA, 27 nt, Artificial Sequence
  Description of Artificial Sequence: Synthetic oligonucleotide
uuaaaguucuaagcuuggguuccgacc

SEQ ID NO: 80766 - RNA, 27 nt, Artificial Sequence
  Description of Artificial Sequence: Synthetic oligonucleotide
guugcuuaaaguucuaagcuuggguuc

SEQ ID NO: 80767 - RNA, 27 nt, Artificial Sequence
  Description of Artificial Sequence: Synthetic oligonucleotide
gugguggucuuguugcuuaaaguucua

SEQ ID NO: 80768 - RNA, 27 nt, Artificial Sequence
  Description of Artificial Sequence: Synthetic oligonucleotide
acuuuauuucucgccacugaauaguag

SEQ ID NO: 80769 - RNA, 27 nt, Artificial Sequence
  Description of Artificial Sequence: Synthetic oligonucleotide
aacuuuauuucucgccacugaauagua

SEQ ID NO: 80770 - RNA, 27 nt, Artificial Sequence
  Description of Artificial Sequence: Synthetic oligonucleotide
ggaucauuuccuguuaucuguguuugu

SEQ ID NO: 80771 - RNA, 27 nt, Artificial Sequence
  Description of Artificial Sequence: Synthetic oligonucleotide
guuucauuucuucucuuuucuuaaggc

SEQ ID NO: 80772 - RNA, 27 nt, Artificial Sequence
  Description of Artificial Sequence: Synthetic oligonucleotide
ggaggauggaaacacacuccuucaguu

SEQ ID NO: 80773 - RNA, 27 nt, Artificial Sequence
  Description of Artificial Sequence: Synthetic oligonucleotide
ucaaagauuuucagucccgcggugaca

SEQ ID NO: 80774 - RNA, 27 nt, Artificial Sequence
  Description of Artificial Sequence: Synthetic oligonucleotide
ccugaacggcacgcuuauuucugcugu

SEQ ID NO: 80775 - RNA, 27 nt, Artificial Sequence
  Description of Artificial Sequence: Synthetic oligonucleotide
cuucuggacccugaacggcacgcuuau

SEQ ID NO: 80776 - RNA, 27 nt, Artificial Sequence
  Description of Artificial Sequence: Synthetic oligonucleotide
caagcagucuugagugacuguuucuuc

SEQ ID NO: 80777 - RNA, 27 nt, Artificial Sequence
  Description of Artificial Sequence: Synthetic oligonucleotide
ccaaagacauggaccuucuuccucuga

SEQ ID NO: 80778 - RNA, 27 nt, Artificial Sequence
  Description of Artificial Sequence: Synthetic oligonucleotide
guguuucaggcauauuuugaauacauc

SEQ ID NO: 80779 - RNA, 27 nt, Artificial Sequence
  Description of Artificial Sequence: Synthetic oligonucleotide
gagguacagagaaagggaggaaaauag

SEQ ID NO: 80780 - RNA, 27 nt, Artificial Sequence
  Description of Artificial Sequence: Synthetic oligonucleotide
ucuugucuugcucuaucuuucuuuggu

SEQ ID NO: 80781 - RNA, 27 nt, Artificial Sequence
  Description of Artificial Sequence: Synthetic oligonucleotide
uuucuugucuugcucuaucuuucuuug

SEQ ID NO: 80782 - RNA, 27 nt, Artificial Sequence
  Description of Artificial Sequence: Synthetic oligonucleotide
ggaucuuguacaaacaaaugcuuucuc

SEQ ID NO: 80783 - RNA, 27 nt, Artificial Sequence
  Description of Artificial Sequence: Synthetic oligonucleotide
ucugcaaguacguucguuuaacucaag

SEQ ID NO: 80784 - RNA, 27 nt, Artificial Sequence
  Description of Artificial Sequence: Synthetic oligonucleotide
ucuguaucgaucguucuguaucagucu

SEQ ID NO: 80785 - RNA, 27 nt, Artificial Sequence
  Description of Artificial Sequence: Synthetic oligonucleotide
auuuauuuuuauauauauauaauauau

SEQ ID NO: 80786 - RNA, 27 nt, Artificial Sequence
  Description of Artificial Sequence: Synthetic oligonucleotide
auauuuauuuuuauauauauauaauau

SEQ ID NO: 80787 - RNA, 27 nt, Artificial Sequence
  Description of Artificial Sequence: Synthetic oligonucleotide
cacagcagucaaauacauccagugaag

SEQ ID NO: 80788 - RNA, 27 nt, Artificial Sequence
  Description of Artificial Sequence: Synthetic oligonucleotide
gucucucaucuccuccucuucccuguc

SEQ ID NO: 80789 - RNA, 27 nt, Artificial Sequence
  Description of Artificial Sequence: Synthetic oligonucleotide
ccaagugggacaaaaaaaagaucaugc

SEQ ID NO: 80790 - RNA, 14 nt, Artificial Sequence
  Description of Artificial Sequence: Synthetic oligonucleotide
guauuuugaugagg

SEQ ID NO: 80791 - RNA, 12 nt, Artificial Sequence
  Description of Artificial Sequence: Synthetic oligonucleotide
ggcccagaugau

SEQ ID NO: 80792 - RNA, 14 nt, Artificial Sequence
  Description of Artificial Sequence: Synthetic oligonucleotide
gggaagaaaacuau

SEQ ID NO: 80793 - RNA, 15 nt, Artificial Sequence
  Description of Artificial Sequence: Synthetic oligonucleotide
guuuuaauuuauuuc

SEQ ID NO: 80794 - RNA, 12 nt, Artificial Sequence
  Description of Artificial Sequence: Synthetic oligonucleotide
acguagggaaau

SEQ ID NO: 80795 - RNA, 12 nt, Artificial Sequence
  Description of Artificial Sequence: Synthetic oligonucleotide
ccaggguuuacc

SEQ ID NO: 80796 - RNA, 11 nt, Artificial Sequence
  Description of Artificial Sequence: Synthetic oligonucleotide
agcaagguuua

SEQ ID NO: 80797 - RNA, 12 nt, Artificial Sequence
  Description of Artificial Sequence: Synthetic oligonucleotide
uguauuauguug

SEQ ID NO: 80798 - RNA, 15 nt, Artificial Sequence
  Description of Artificial Sequence: Synthetic oligonucleotide
uuuuaaucuuuguga

SEQ ID NO: 80799 - RNA, 14 nt, Artificial Sequence
  Description of Artificial Sequence: Synthetic oligonucleotide
uuaaucuuugugac

SEQ ID NO: 80800 - RNA, 13 nt, Artificial Sequence
  Description of Artificial Sequence: Synthetic oligonucleotide
gcugcuuaugucu

SEQ ID NO: 80801 - RNA, 14 nt, Artificial Sequence
  Description of Artificial Sequence: Synthetic oligonucleotide
aaguguuucagaag

SEQ ID NO: 80802 - RNA, 13 nt, Artificial Sequence
  Description of Artificial Sequence: Synthetic oligonucleotide
gaccaucaauaag

SEQ ID NO: 80803 - RNA, 13 nt, Artificial Sequence
  Description of Artificial Sequence: Synthetic oligonucleotide
ccaucaauaagga

SEQ ID NO: 80804 - RNA, 14 nt, Artificial Sequence
  Description of Artificial Sequence: Synthetic oligonucleotide
ucaauaaggaagaa

SEQ ID NO: 80805 - RNA, 14 nt, Artificial Sequence
  Description of Artificial Sequence: Synthetic oligonucleotide
aauaaggaagaagc

SEQ ID NO: 80806 - RNA, 13 nt, Artificial Sequence
  Description of Artificial Sequence: Synthetic oligonucleotide
aggaagaagcccu

SEQ ID NO: 80807 - RNA, 13 nt, Artificial Sequence
  Description of Artificial Sequence: Synthetic oligonucleotide
gcauaacuaaagg

SEQ ID NO: 80808 - RNA, 14 nt, Artificial Sequence
  Description of Artificial Sequence: Synthetic oligonucleotide
cauaacuaaaggug

SEQ ID NO: 80809 - RNA, 12 nt, Artificial Sequence
  Description of Artificial Sequence: Synthetic oligonucleotide
cuacaucacgcc

SEQ ID NO: 80810 - RNA, 12 nt, Artificial Sequence
  Description of Artificial Sequence: Synthetic oligonucleotide
acuggauuuaag

SEQ ID NO: 80811 - RNA, 12 nt, Artificial Sequence
  Description of Artificial Sequence: Synthetic oligonucleotide
cuggauuuaagc

SEQ ID NO: 80812 - RNA, 13 nt, Artificial Sequence
  Description of Artificial Sequence: Synthetic oligonucleotide
gauuuaagcagag

SEQ ID NO: 80813 - RNA, 13 nt, Artificial Sequence
  Description of Artificial Sequence: Synthetic oligonucleotide
auuuaagcagagu

SEQ ID NO: 80814 - RNA, 13 nt, Artificial Sequence
  Description of Artificial Sequence: Synthetic oligonucleotide
uuaagcagaguuc

SEQ ID NO: 80815 - RNA, 13 nt, Artificial Sequence
  Description of Artificial Sequence: Synthetic oligonucleotide
uaagcagaguuca

SEQ ID NO: 80816 - RNA, 14 nt, Artificial Sequence
  Description of Artificial Sequence: Synthetic oligonucleotide
agcagaguucaaaa

SEQ ID NO: 80817 - RNA, 12 nt, Artificial Sequence
  Description of Artificial Sequence: Synthetic oligonucleotide
cucagggucuga

SEQ ID NO: 80818 - RNA, 13 nt, Artificial Sequence
  Description of Artificial Sequence: Synthetic oligonucleotide
caagcaacuacau

SEQ ID NO: 80819 - RNA, 12 nt, Artificial Sequence
  Description of Artificial Sequence: Synthetic oligonucleotide
aucaauggcagc

SEQ ID NO: 80820 - RNA, 11 nt, Artificial Sequence
  Description of Artificial Sequence: Synthetic oligonucleotide
uuccagcccac

SEQ ID NO: 80821 - RNA, 12 nt, Artificial Sequence
  Description of Artificial Sequence: Synthetic oligonucleotide
cagcugagaaug

SEQ ID NO: 80822 - RNA, 13 nt, Artificial Sequence
  Description of Artificial Sequence: Synthetic oligonucleotide
aacguaucuccua

SEQ ID NO: 80823 - RNA, 14 nt, Artificial Sequence
  Description of Artificial Sequence: Synthetic oligonucleotide
ccuaaaauaauuuc

SEQ ID NO: 80824 - RNA, 13 nt, Artificial Sequence
  Description of Artificial Sequence: Synthetic oligonucleotide
uggaagauucagc

SEQ ID NO: 80825 - RNA, 12 nt, Artificial Sequence
  Description of Artificial Sequence: Synthetic oligonucleotide
uuaaacucuccu

SEQ ID NO: 80826 - RNA, 12 nt, Artificial Sequence
  Description of Artificial Sequence: Synthetic oligonucleotide
cagccuacaguu

SEQ ID NO: 80827 - RNA, 13 nt, Artificial Sequence
  Description of Artificial Sequence: Synthetic oligonucleotide
guuauguucaguc

SEQ ID NO: 80828 - RNA, 13 nt, Artificial Sequence
  Description of Artificial Sequence: Synthetic oligonucleotide
cacauacaaaaug

SEQ ID NO: 80829 - RNA, 9 nt, Artificial Sequence
  Description of Artificial Sequence: Synthetic oligonucleotide
uccuuuugc

SEQ ID NO: 80830 - RNA, 12 nt, Artificial Sequence
  Description of Artificial Sequence: Synthetic oligonucleotide
ugaccugugaag

SEQ ID NO: 80831 - RNA, 12 nt, Artificial Sequence
  Description of Artificial Sequence: Synthetic oligonucleotide
cuaucucacaca

SEQ ID NO: 80832 - RNA, 13 nt, Artificial Sequence
  Description of Artificial Sequence: Synthetic oligonucleotide
uguccucaauugu

SEQ ID NO: 80833 - RNA, 12 nt, Artificial Sequence
  Description of Artificial Sequence: Synthetic oligonucleotide
aaaccguagcug

SEQ ID NO: 80834 - RNA, 12 nt, Artificial Sequence
  Description of Artificial Sequence: Synthetic oligonucleotide
uagcuggcaagc

SEQ ID NO: 80835 - RNA, 14 nt, Artificial Sequence
  Description of Artificial Sequence: Synthetic oligonucleotide
uuguaugguuaaaa

SEQ ID NO: 80836 - RNA, 14 nt, Artificial Sequence
  Description of Artificial Sequence: Synthetic oligonucleotide
ugguuaaaagaugg

SEQ ID NO: 80837 - RNA, 13 nt, Artificial Sequence
  Description of Artificial Sequence: Synthetic oligonucleotide
cagggaauuauac

SEQ ID NO: 80838 - RNA, 12 nt, Artificial Sequence
  Description of Artificial Sequence: Synthetic oligonucleotide
acaaucuugcug

SEQ ID NO: 80839 - RNA, 13 nt, Artificial Sequence
  Description of Artificial Sequence: Synthetic oligonucleotide
ccaauaaugaaga

SEQ ID NO: 80840 - RNA, 13 nt, Artificial Sequence
  Description of Artificial Sequence: Synthetic oligonucleotide
acuuuggauguuc

SEQ ID NO: 80841 - RNA, 12 nt, Artificial Sequence
  Description of Artificial Sequence: Synthetic oligonucleotide
aaugcuuccacu

SEQ ID NO: 80842 - RNA, 11 nt, Artificial Sequence
  Description of Artificial Sequence: Synthetic oligonucleotide
gagaaaguuug

SEQ ID NO: 80843 - RNA, 11 nt, Artificial Sequence
  Description of Artificial Sequence: Synthetic oligonucleotide
aaagaacuacu

SEQ ID NO: 80844 - RNA, 12 nt, Artificial Sequence
  Description of Artificial Sequence: Synthetic oligonucleotide
uuagaaauacgg

SEQ ID NO: 80845 - RNA, 12 nt, Artificial Sequence
  Description of Artificial Sequence: Synthetic oligonucleotide
aacauggguaca

SEQ ID NO: 80846 - RNA, 14 nt, Artificial Sequence
  Description of Artificial Sequence: Synthetic oligonucleotide
aaagacacagaaga

SEQ ID NO: 80847 - RNA, 11 nt, Artificial Sequence
  Description of Artificial Sequence: Synthetic oligonucleotide
uaguagggagg

SEQ ID NO: 80848 - RNA, 12 nt, Artificial Sequence
  Description of Artificial Sequence: Synthetic oligonucleotide
gccuucugcagc

SEQ ID NO: 80849 - RNA, 10 nt, Artificial Sequence
  Description of Artificial Sequence: Synthetic oligonucleotide
ggucugguac

SEQ ID NO: 80850 - RNA, 12 nt, Artificial Sequence
  Description of Artificial Sequence: Synthetic oligonucleotide
cuaguccuuccg

SEQ ID NO: 80851 - RNA, 12 nt, Artificial Sequence
  Description of Artificial Sequence: Synthetic oligonucleotide
ccagugaauauu

SEQ ID NO: 80852 - RNA, 13 nt, Artificial Sequence
  Description of Artificial Sequence: Synthetic oligonucleotide
augaauucaaguu

SEQ ID NO: 80853 - RNA, 12 nt, Artificial Sequence
  Description of Artificial Sequence: Synthetic oligonucleotide
caggacacagau

SEQ ID NO: 80854 - RNA, 12 nt, Artificial Sequence
  Description of Artificial Sequence: Synthetic oligonucleotide
cucaaagcacag

SEQ ID NO: 80855 - RNA, 10 nt, Artificial Sequence
  Description of Artificial Sequence: Synthetic oligonucleotide
accacugcca

SEQ ID NO: 80856 - RNA, 13 nt, Artificial Sequence
  Description of Artificial Sequence: Synthetic oligonucleotide
gaaacuacuagug

SEQ ID NO: 80857 - RNA, 12 nt, Artificial Sequence
  Description of Artificial Sequence: Synthetic oligonucleotide
aagucggacagc

SEQ ID NO: 80858 - RNA, 13 nt, Artificial Sequence
  Description of Artificial Sequence: Synthetic oligonucleotide
gaaagcgaaaaau

SEQ ID NO: 80859 - RNA, 13 nt, Artificial Sequence
  Description of Artificial Sequence: Synthetic oligonucleotide
cccucugauuuag

SEQ ID NO: 80860 - RNA, 12 nt, Artificial Sequence
  Description of Artificial Sequence: Synthetic oligonucleotide
ugagcuauuuaa

SEQ ID NO: 80861 - RNA, 13 nt, Artificial Sequence
  Description of Artificial Sequence: Synthetic oligonucleotide
aaaaggugaaaaa

SEQ ID NO: 80862 - RNA, 14 nt, Artificial Sequence
  Description of Artificial Sequence: Synthetic oligonucleotide
gaaaaagcacuauu

SEQ ID NO: 80863 - RNA, 12 nt, Artificial Sequence
  Description of Artificial Sequence: Synthetic oligonucleotide
ggcugaaaagaa

SEQ ID NO: 80864 - RNA, 12 nt, Artificial Sequence
  Description of Artificial Sequence: Synthetic oligonucleotide
uaaacccuuaua

SEQ ID NO: 80865 - RNA, 13 nt, Artificial Sequence
  Description of Artificial Sequence: Synthetic oligonucleotide
cauacuauuagcc

SEQ ID NO: 80866 - RNA, 12 nt, Artificial Sequence
  Description of Artificial Sequence: Synthetic oligonucleotide
gacagaagcauu

SEQ ID NO: 80867 - RNA, 14 nt, Artificial Sequence
  Description of Artificial Sequence: Synthetic oligonucleotide
agagcaaauaagau

SEQ ID NO: 80868 - RNA, 14 nt, Artificial Sequence
  Description of Artificial Sequence: Synthetic oligonucleotide
ccaacauuuuucuc

SEQ ID NO: 80869 - RNA, 15 nt, Artificial Sequence
  Description of Artificial Sequence: Synthetic oligonucleotide
uuaaguaugagaaaa

SEQ ID NO: 80870 - RNA, 14 nt, Artificial Sequence
  Description of Artificial Sequence: Synthetic oligonucleotide
caggaauaaagaug

SEQ ID NO: 80871 - RNA, 13 nt, Artificial Sequence
  Description of Artificial Sequence: Synthetic oligonucleotide
aauuugaaugacc

SEQ ID NO: 80872 - RNA, 14 nt, Artificial Sequence
  Description of Artificial Sequence: Synthetic oligonucleotide
auguauaaagauag

SEQ ID NO: 80873 - RNA, 12 nt, Artificial Sequence
  Description of Artificial Sequence: Synthetic oligonucleotide
ggcuguaacuau

SEQ ID NO: 80874 - RNA, 11 nt, Artificial Sequence
  Description of Artificial Sequence: Synthetic oligonucleotide
ucugugaagug

SEQ ID NO: 80875 - RNA, 14 nt, Artificial Sequence
  Description of Artificial Sequence: Synthetic oligonucleotide
ccuuuaaggaaaug

SEQ ID NO: 80876 - RNA, 13 nt, Artificial Sequence
  Description of Artificial Sequence: Synthetic oligonucleotide
aaggauacaaaaa

SEQ ID NO: 80877 - RNA, 12 nt, Artificial Sequence
  Description of Artificial Sequence: Synthetic oligonucleotide
agaugcaauuug

SEQ ID NO: 80878 - RNA, 12 nt, Artificial Sequence
  Description of Artificial Sequence: Synthetic oligonucleotide
guucaaaacgaa

SEQ ID NO: 80879 - RNA, 11 nt, Artificial Sequence
  Description of Artificial Sequence: Synthetic oligonucleotide
gugaaaccuca

SEQ ID NO: 80880 - RNA, 13 nt, Artificial Sequence
  Description of Artificial Sequence: Synthetic oligonucleotide
acgaaagagaagc

SEQ ID NO: 80881 - RNA, 12 nt, Artificial Sequence
  Description of Artificial Sequence: Synthetic oligonucleotide
cuccacaagcgc

SEQ ID NO: 80882 - RNA, 14 nt, Artificial Sequence
  Description of Artificial Sequence: Synthetic oligonucleotide
gagaagauuccaaa

SEQ ID NO: 80883 - RNA, 13 nt, Artificial Sequence
  Description of Artificial Sequence: Synthetic oligonucleotide
aaucuggauucaa

SEQ ID NO: 80884 - RNA, 13 nt, Artificial Sequence
  Description of Artificial Sequence: Synthetic oligonucleotide
agaacagauuuga

SEQ ID NO: 80885 - RNA, 11 nt, Artificial Sequence
  Description of Artificial Sequence: Synthetic oligonucleotide
ccagagcugug

SEQ ID NO: 80886 - RNA, 12 nt, Artificial Sequence
  Description of Artificial Sequence: Synthetic oligonucleotide
ccucagauuguu

SEQ ID NO: 80887 - RNA, 12 nt, Artificial Sequence
  Description of Artificial Sequence: Synthetic oligonucleotide
cuauuuuaauua

SEQ ID NO: 80888 - RNA, 13 nt, Artificial Sequence
  Description of Artificial Sequence: Synthetic oligonucleotide
uuuaauuuauuaa

SEQ ID NO: 80889 - RNA, 12 nt, Artificial Sequence
  Description of Artificial Sequence: Synthetic oligonucleotide
augcaguuugaa

SEQ ID NO: 80890 - RNA, 11 nt, Artificial Sequence
  Description of Artificial Sequence: Synthetic oligonucleotide
caugcugcugg

SEQ ID NO: 80891 - RNA, 13 nt, Artificial Sequence
  Description of Artificial Sequence: Synthetic oligonucleotide
agaugugcauuuc

SEQ ID NO: 80892 - RNA, 12 nt, Artificial Sequence
  Description of Artificial Sequence: Synthetic oligonucleotide
ucaaaaccugug

SEQ ID NO: 80893 - RNA, 11 nt, Artificial Sequence
  Description of Artificial Sequence: Synthetic oligonucleotide
gaaugugggua

SEQ ID NO: 80894 - RNA, 10 nt, Artificial Sequence
  Description of Artificial Sequence: Synthetic oligonucleotide
auguggguag

SEQ ID NO: 80895 - RNA, 13 nt, Artificial Sequence
  Description of Artificial Sequence: Synthetic oligonucleotide
ugaaaaugagcau

SEQ ID NO: 80896 - RNA, 13 nt, Artificial Sequence
  Description of Artificial Sequence: Synthetic oligonucleotide
uugcuuuucaugu

SEQ ID NO: 80897 - RNA, 12 nt, Artificial Sequence
  Description of Artificial Sequence: Synthetic oligonucleotide
uguauuucuaua

SEQ ID NO: 80898 - RNA, 13 nt, Artificial Sequence
  Description of Artificial Sequence: Synthetic oligonucleotide
uuugauuaauguu

SEQ ID NO: 80899 - RNA, 12 nt, Artificial Sequence
  Description of Artificial Sequence: Synthetic oligonucleotide
caacguguauag

SEQ ID NO: 80900 - RNA, 12 nt, Artificial Sequence
  Description of Artificial Sequence: Synthetic oligonucleotide
cauauccuuggc

SEQ ID NO: 80901 - RNA, 13 nt, Artificial Sequence
  Description of Artificial Sequence: Synthetic oligonucleotide
uacuaacaucugg

SEQ ID NO: 80902 - RNA, 11 nt, Artificial Sequence
  Description of Artificial Sequence: Synthetic oligonucleotide
cauaaguugug

SEQ ID NO: 80903 - RNA, 12 nt, Artificial Sequence
  Description of Artificial Sequence: Synthetic oligonucleotide
gcaucauuuugg

SEQ ID NO: 80904 - RNA, 10 nt, Artificial Sequence
  Description of Artificial Sequence: Synthetic oligonucleotide
gcucuucuua

SEQ ID NO: 80905 - RNA, 10 nt, Artificial Sequence
  Description of Artificial Sequence: Synthetic oligonucleotide
agauuagguc

SEQ ID NO: 80906 - RNA, 12 nt, Artificial Sequence
  Description of Artificial Sequence: Synthetic oligonucleotide
auggaauugaaa

SEQ ID NO: 80907 - RNA, 13 nt, Artificial Sequence
  Description of Artificial Sequence: Synthetic oligonucleotide
cacacucauuccu

SEQ ID NO: 80908 - RNA, 12 nt, Artificial Sequence
  Description of Artificial Sequence: Synthetic oligonucleotide
uguagagguaac

SEQ ID NO: 80909 - RNA, 11 nt, Artificial Sequence
  Description of Artificial Sequence: Synthetic oligonucleotide
caaccacaugc

SEQ ID NO: 80910 - RNA, 12 nt, Artificial Sequence
  Description of Artificial Sequence: Synthetic oligonucleotide
ucggaaacaagu

SEQ ID NO: 80911 - RNA, 11 nt, Artificial Sequence
  Description of Artificial Sequence: Synthetic oligonucleotide
acucccaauaa

SEQ ID NO: 80912 - RNA, 13 nt, Artificial Sequence
  Description of Artificial Sequence: Synthetic oligonucleotide
aaugcuaagaaau

SEQ ID NO: 80913 - RNA, 11 nt, Artificial Sequence
  Description of Artificial Sequence: Synthetic oligonucleotide
gucuuucucua

SEQ ID NO: 80914 - RNA, 11 nt, Artificial Sequence
  Description of Artificial Sequence: Synthetic oligonucleotide
ugaauuucagg

SEQ ID NO: 80915 - RNA, 13 nt, Artificial Sequence
  Description of Artificial Sequence: Synthetic oligonucleotide
cgauucccucuca

SEQ ID NO: 80916 - RNA, 11 nt, Artificial Sequence
  Description of Artificial Sequence: Synthetic oligonucleotide
aggaaagugaa

SEQ ID NO: 80917 - RNA, 12 nt, Artificial Sequence
  Description of Artificial Sequence: Synthetic oligonucleotide
gaggcugcaugc

SEQ ID NO: 80918 - RNA, 11 nt, Artificial Sequence
  Description of Artificial Sequence: Synthetic oligonucleotide
ucucugaacag

SEQ ID NO: 80919 - RNA, 12 nt, Artificial Sequence
  Description of Artificial Sequence: Synthetic oligonucleotide
aacuuggcugua

SEQ ID NO: 80920 - RNA, 12 nt, Artificial Sequence
  Description of Artificial Sequence: Synthetic oligonucleotide
agaagccaaaau

SEQ ID NO: 80921 - RNA, 14 nt, Artificial Sequence
  Description of Artificial Sequence: Synthetic oligonucleotide
auuaaaagaagucc

SEQ ID NO: 80922 - RNA, 14 nt, Artificial Sequence
  Description of Artificial Sequence: Synthetic oligonucleotide
gaauccggauuauc

SEQ ID NO: 80923 - RNA, 12 nt, Artificial Sequence
  Description of Artificial Sequence: Synthetic oligonucleotide
aaugugacauca

SEQ ID NO: 80924 - RNA, 13 nt, Artificial Sequence
  Description of Artificial Sequence: Synthetic oligonucleotide
caucaaagcaagu

SEQ ID NO: 80925 - RNA, 11 nt, Artificial Sequence
  Description of Artificial Sequence: Synthetic oligonucleotide
agagagagaaa

SEQ ID NO: 80926 - RNA, 13 nt, Artificial Sequence
  Description of Artificial Sequence: Synthetic oligonucleotide
ucgcuguaguauu

SEQ ID NO: 80927 - RNA, 14 nt, Artificial Sequence
  Description of Artificial Sequence: Synthetic oligonucleotide
cgcuguaguauuua

SEQ ID NO: 80928 - RNA, 13 nt, Artificial Sequence
  Description of Artificial Sequence: Synthetic oligonucleotide
auuuaagcccaua

SEQ ID NO: 80929 - RNA, 15 nt, Artificial Sequence
  Description of Artificial Sequence: Synthetic oligonucleotide
auuaaaauaaacaug

SEQ ID NO: 80930 - RNA, 12 nt, Artificial Sequence
  Description of Artificial Sequence: Synthetic oligonucleotide
cuguucugaucg

SEQ ID NO: 80931 - RNA, 16 nt, Artificial Sequence
  Description of Artificial Sequence: Synthetic oligonucleotide
aaauaauuugaacuuu

SEQ ID NO: 80932 - RNA, 12 nt, Artificial Sequence
  Description of Artificial Sequence: Synthetic oligonucleotide
ugcgaccuuaau

SEQ ID NO: 80933 - RNA, 11 nt, Artificial Sequence
  Description of Artificial Sequence: Synthetic oligonucleotide
cugagaaagcu

SEQ ID NO: 80934 - RNA, 13 nt, Artificial Sequence
  Description of Artificial Sequence: Synthetic oligonucleotide
aguaaagaugcua

SEQ ID NO: 80935 - RNA, 12 nt, Artificial Sequence
  Description of Artificial Sequence: Synthetic oligonucleotide
cugcuuaauugc

SEQ ID NO: 80936 - RNA, 14 nt, Artificial Sequence
  Description of Artificial Sequence: Synthetic oligonucleotide
uaccauaugaauga

SEQ ID NO: 80937 - RNA, 12 nt, Artificial Sequence
  Description of Artificial Sequence: Synthetic oligonucleotide
aacuuucuuauc

SEQ ID NO: 80938 - RNA, 13 nt, Artificial Sequence
  Description of Artificial Sequence: Synthetic oligonucleotide
ccuugcaugacau

SEQ ID NO: 80939 - RNA, 14 nt, Artificial Sequence
  Description of Artificial Sequence: Synthetic oligonucleotide
ugaauuuguauaug

SEQ ID NO: 80940 - RNA, 12 nt, Artificial Sequence
  Description of Artificial Sequence: Synthetic oligonucleotide
gaauccuaguag

SEQ ID NO: 80941 - RNA, 10 nt, Artificial Sequence
  Description of Artificial Sequence: Synthetic oligonucleotide
gaaagggaag

SEQ ID NO: 80942 - RNA, 11 nt, Artificial Sequence
  Description of Artificial Sequence: Synthetic oligonucleotide
uaucggcaugc

SEQ ID NO: 80943 - RNA, 12 nt, Artificial Sequence
  Description of Artificial Sequence: Synthetic oligonucleotide
caccucauagua

SEQ ID NO: 80944 - RNA, 11 nt, Artificial Sequence
  Description of Artificial Sequence: Synthetic oligonucleotide
ccagaauugcc

SEQ ID NO: 80945 - RNA, 11 nt, Artificial Sequence
  Description of Artificial Sequence: Synthetic oligonucleotide
uggugaucugg

SEQ ID NO: 80946 - RNA, 12 nt, Artificial Sequence
  Description of Artificial Sequence: Synthetic oligonucleotide
gaucuggguaau

SEQ ID NO: 80947 - RNA, 12 nt, Artificial Sequence
  Description of Artificial Sequence: Synthetic oligonucleotide
ggaugugaugaa

SEQ ID NO: 80948 - RNA, 12 nt, Artificial Sequence
  Description of Artificial Sequence: Synthetic oligonucleotide
cauuuccacagc

SEQ ID NO: 80949 - RNA, 11 nt, Artificial Sequence
  Description of Artificial Sequence: Synthetic oligonucleotide
acagcuacacc

SEQ ID NO: 80950 - RNA, 12 nt, Artificial Sequence
  Description of Artificial Sequence: Synthetic oligonucleotide
ugcaguucuuac

SEQ ID NO: 80951 - RNA, 12 nt, Artificial Sequence
  Description of Artificial Sequence: Synthetic oligonucleotide
acgagaagaaga

SEQ ID NO: 80952 - RNA, 12 nt, Artificial Sequence
  Description of Artificial Sequence: Synthetic oligonucleotide
cgagaagaagau

SEQ ID NO: 80953 - RNA, 15 nt, Artificial Sequence
  Description of Artificial Sequence: Synthetic oligonucleotide
aagaagaucauuuac

SEQ ID NO: 80954 - RNA, 11 nt, Artificial Sequence
  Description of Artificial Sequence: Synthetic oligonucleotide
agaggaagagg

SEQ ID NO: 80955 - RNA, 12 nt, Artificial Sequence
  Description of Artificial Sequence: Synthetic oligonucleotide
gaggaagaggug

SEQ ID NO: 80956 - RNA, 13 nt, Artificial Sequence
  Description of Artificial Sequence: Synthetic oligonucleotide
cuacuuugagggc

SEQ ID NO: 80957 - RNA, 12 nt, Artificial Sequence
  Description of Artificial Sequence: Synthetic oligonucleotide
agggcaucuccu

SEQ ID NO: 80958 - RNA, 10 nt, Artificial Sequence
  Description of Artificial Sequence: Synthetic oligonucleotide
ggagugauau

SEQ ID NO: 80959 - RNA, 11 nt, Artificial Sequence
  Description of Artificial Sequence: Synthetic oligonucleotide
gagugauaugg

SEQ ID NO: 80960 - RNA, 12 nt, Artificial Sequence
  Description of Artificial Sequence: Synthetic oligonucleotide
ugcaguaaagau

SEQ ID NO: 80961 - RNA, 13 nt, Artificial Sequence
  Description of Artificial Sequence: Synthetic oligonucleotide
aguaaagauccua

SEQ ID NO: 80962 - RNA, 12 nt, Artificial Sequence
  Description of Artificial Sequence: Synthetic oligonucleotide
ugacaaaggaca

SEQ ID NO: 80963 - RNA, 13 nt, Artificial Sequence
  Description of Artificial Sequence: Synthetic oligonucleotide
gcaauugugaccc

SEQ ID NO: 80964 - RNA, 12 nt, Artificial Sequence
  Description of Artificial Sequence: Synthetic oligonucleotide
aacaucauccau

SEQ ID NO: 80965 - RNA, 12 nt, Artificial Sequence
  Description of Artificial Sequence: Synthetic oligonucleotide
ugaaauccaaca

SEQ ID NO: 80966 - RNA, 15 nt, Artificial Sequence
  Description of Artificial Sequence: Synthetic oligonucleotide
aacaauauauuucuc

SEQ ID NO: 80967 - RNA, 14 nt, Artificial Sequence
  Description of Artificial Sequence: Synthetic oligonucleotide
aacaguaaagucac

SEQ ID NO: 80968 - RNA, 14 nt, Artificial Sequence
  Description of Artificial Sequence: Synthetic oligonucleotide
ugugaagaaaguaa

SEQ ID NO: 80969 - RNA, 13 nt, Artificial Sequence
  Description of Artificial Sequence: Synthetic oligonucleotide
cuuccgagccauc

SEQ ID NO: 80970 - RNA, 12 nt, Artificial Sequence
  Description of Artificial Sequence: Synthetic oligonucleotide
aauggagguuga

SEQ ID NO: 80971 - RNA, 12 nt, Artificial Sequence
  Description of Artificial Sequence: Synthetic oligonucleotide
ggagguugaaua

SEQ ID NO: 80972 - RNA, 13 nt, Artificial Sequence
  Description of Artificial Sequence: Synthetic oligonucleotide
auuuugaguuuuc

SEQ ID NO: 80973 - RNA, 12 nt, Artificial Sequence
  Description of Artificial Sequence: Synthetic oligonucleotide
uauccuguuugu

SEQ ID NO: 80974 - RNA, 11 nt, Artificial Sequence
  Description of Artificial Sequence: Synthetic oligonucleotide
ccuguuuguuc

SEQ ID NO: 80975 - RNA, 10 nt, Artificial Sequence
  Description of Artificial Sequence: Synthetic oligonucleotide
cucuacagcc

SEQ ID NO: 80976 - RNA, 12 nt, Artificial Sequence
  Description of Artificial Sequence: Synthetic oligonucleotide
ucuuccauagcu

SEQ ID NO: 80977 - RNA, 12 nt, Artificial Sequence
  Description of Artificial Sequence: Synthetic oligonucleotide
auaaucuuccug

SEQ ID NO: 80978 - RNA, 12 nt, Artificial Sequence
  Description of Artificial Sequence: Synthetic oligonucleotide
uaaucuuccugu

SEQ ID NO: 80979 - RNA, 12 nt, Artificial Sequence
  Description of Artificial Sequence: Synthetic oligonucleotide
cuucaugacuug

SEQ ID NO: 80980 - RNA, 12 nt, Artificial Sequence
  Description of Artificial Sequence: Synthetic oligonucleotide
aagagggagaga

SEQ ID NO: 80981 - RNA, 12 nt, Artificial Sequence
  Description of Artificial Sequence: Synthetic oligonucleotide
cgucuccuacca

SEQ ID NO: 80982 - RNA, 12 nt, Artificial Sequence
  Description of Artificial Sequence: Synthetic oligonucleotide
gaucaaucggcc

SEQ ID NO: 80983 - RNA, 12 nt, Artificial Sequence
  Description of Artificial Sequence: Synthetic oligonucleotide
ggacgaacaucc

SEQ ID NO: 80984 - RNA, 11 nt, Artificial Sequence
  Description of Artificial Sequence: Synthetic oligonucleotide
agggucggaac

SEQ ID NO: 80985 - RNA, 10 nt, Artificial Sequence
  Description of Artificial Sequence: Synthetic oligonucleotide
ucggaaccca

SEQ ID NO: 80986 - RNA, 11 nt, Artificial Sequence
  Description of Artificial Sequence: Synthetic oligonucleotide
acccaagcuua

SEQ ID NO: 80987 - RNA, 14 nt, Artificial Sequence
  Description of Artificial Sequence: Synthetic oligonucleotide
gaacuuuaagcaac

SEQ ID NO: 80988 - RNA, 11 nt, Artificial Sequence
  Description of Artificial Sequence: Synthetic oligonucleotide
acuauucagug

SEQ ID NO: 80989 - RNA, 11 nt, Artificial Sequence
  Description of Artificial Sequence: Synthetic oligonucleotide
cuauucagugg

SEQ ID NO: 80990 - RNA, 13 nt, Artificial Sequence
  Description of Artificial Sequence: Synthetic oligonucleotide
aaacacagauaac

SEQ ID NO: 80991 - RNA, 12 nt, Artificial Sequence
  Description of Artificial Sequence: Synthetic oligonucleotide
cuuaagaaaaga

SEQ ID NO: 80992 - RNA, 12 nt, Artificial Sequence
  Description of Artificial Sequence: Synthetic oligonucleotide
cugaaggagugu

SEQ ID NO: 80993 - RNA, 10 nt, Artificial Sequence
  Description of Artificial Sequence: Synthetic oligonucleotide
ucaccgcggg

SEQ ID NO: 80994 - RNA, 14 nt, Artificial Sequence
  Description of Artificial Sequence: Synthetic oligonucleotide
agcagaaauaagcg

SEQ ID NO: 80995 - RNA, 12 nt, Artificial Sequence
  Description of Artificial Sequence: Synthetic oligonucleotide
aagcgugccguu

SEQ ID NO: 80996 - RNA, 12 nt, Artificial Sequence
  Description of Artificial Sequence: Synthetic oligonucleotide
agaaacagucac

SEQ ID NO: 80997 - RNA, 12 nt, Artificial Sequence
  Description of Artificial Sequence: Synthetic oligonucleotide
agaggaagaagg

SEQ ID NO: 80998 - RNA, 14 nt, Artificial Sequence
  Description of Artificial Sequence: Synthetic oligonucleotide
uguauucaaaauau

SEQ ID NO: 80999 - RNA, 13 nt, Artificial Sequence
  Description of Artificial Sequence: Synthetic oligonucleotide
auuuuccucccuu

SEQ ID NO: 81000 - RNA, 13 nt, Artificial Sequence
  Description of Artificial Sequence: Synthetic oligonucleotide
caaagaaagauag

SEQ ID NO: 81001 - RNA, 12 nt, Artificial Sequence
  Description of Artificial Sequence: Synthetic oligonucleotide
aagaaagauaga

SEQ ID NO: 81002 - RNA, 13 nt, Artificial Sequence
  Description of Artificial Sequence: Synthetic oligonucleotide
gaaagcauuuguu

SEQ ID NO: 81003 - RNA, 13 nt, Artificial Sequence
  Description of Artificial Sequence: Synthetic oligonucleotide
ugaguuaaacgaa

SEQ ID NO: 81004 - RNA, 12 nt, Artificial Sequence
  Description of Artificial Sequence: Synthetic oligonucleotide
acugauacagaa

SEQ ID NO: 81005 - RNA, 12 nt, Artificial Sequence
  Description of Artificial Sequence: Synthetic oligonucleotide
auauuauauaua

SEQ ID NO: 81006 - RNA, 12 nt, Artificial Sequence
  Description of Artificial Sequence: Synthetic oligonucleotide
auuauauauaua

SEQ ID NO: 81007 - RNA, 12 nt, Artificial Sequence
  Description of Artificial Sequence: Synthetic oligonucleotide
ucacuggaugua

SEQ ID NO: 81008 - RNA, 12 nt, Artificial Sequence
  Description of Artificial Sequence: Synthetic oligonucleotide
cagggaagagga

SEQ ID NO: 81009 - RNA, 15 nt, Artificial Sequence
  Description of Artificial Sequence: Synthetic oligonucleotide
augaucuuuuuuuug

SEQ ID NO: 81010 - RNA, 11 nt, Artificial Sequence
  Description of Artificial Sequence: Synthetic oligonucleotide
aguucacggcc

SEQ ID NO: 81011 - RNA, 13 nt, Artificial Sequence
  Description of Artificial Sequence: Synthetic oligonucleotide
caccaucacacca

SEQ ID NO: 81012 - RNA, 11 nt, Artificial Sequence
  Description of Artificial Sequence: Synthetic oligonucleotide
ccugcggguuu

SEQ ID NO: 81013 - RNA, 10 nt, Artificial Sequence
  Description of Artificial Sequence: Synthetic oligonucleotide
auccaguuug

SEQ ID NO: 81014 - RNA, 13 nt, Artificial Sequence
  Description of Artificial Sequence: Synthetic oligonucleotide
guuaaggacuucu

SEQ ID NO: 81015 - RNA, 13 nt, Artificial Sequence
  Description of Artificial Sequence: Synthetic oligonucleotide
cagugggacagag

SEQ ID NO: 81016 - RNA, 14 nt, Artificial Sequence
  Description of Artificial Sequence: Synthetic oligonucleotide
aauuuguuauugug

SEQ ID NO: 81017 - RNA, 13 nt, Artificial Sequence
  Description of Artificial Sequence: Synthetic oligonucleotide
uucaaaugcauuu

SEQ ID NO: 81018 - RNA, 10 nt, Artificial Sequence
  Description of Artificial Sequence: Synthetic oligonucleotide
caggaaagcc

SEQ ID NO: 81019 - RNA, 11 nt, Artificial Sequence
  Description of Artificial Sequence: Synthetic oligonucleotide
aggaaagcccu

SEQ ID NO: 81020 - RNA, 12 nt, Artificial Sequence
  Description of Artificial Sequence: Synthetic oligonucleotide
cccagcauggcc

SEQ ID NO: 81021 - RNA, 11 nt, Artificial Sequence
  Description of Artificial Sequence: Synthetic oligonucleotide
cuucucccuga

SEQ ID NO: 81022 - RNA, 12 nt, Artificial Sequence
  Description of Artificial Sequence: Synthetic oligonucleotide
gaagaagcccuu

SEQ ID NO: 81023 - RNA, 12 nt, Artificial Sequence
  Description of Artificial Sequence: Synthetic oligonucleotide
agaagcccuuca

SEQ ID NO: 81024 - RNA, 11 nt, Artificial Sequence
  Description of Artificial Sequence: Synthetic oligonucleotide
gcccuucagcg

SEQ ID NO: 81025 - RNA, 11 nt, Artificial Sequence
  Description of Artificial Sequence: Synthetic oligonucleotide
ccuucagcggc

SEQ ID NO: 81026 - RNA, 12 nt, Artificial Sequence
  Description of Artificial Sequence: Synthetic oligonucleotide
ucagcggccagu

SEQ ID NO: 81027 - RNA, 12 nt, Artificial Sequence
  Description of Artificial Sequence: Synthetic oligonucleotide
ugaaaagcuccg

SEQ ID NO: 81028 - RNA, 11 nt, Artificial Sequence
  Description of Artificial Sequence: Synthetic oligonucleotide
aaaagcuccgg

SEQ ID NO: 81029 - RNA, 13 nt, Artificial Sequence
  Description of Artificial Sequence: Synthetic oligonucleotide
agucaacagucug

SEQ ID NO: 81030 - RNA, 13 nt, Artificial Sequence
  Description of Artificial Sequence: Synthetic oligonucleotide
cagaguucaaaag

SEQ ID NO: 81031 - RNA, 13 nt, Artificial Sequence
  Description of Artificial Sequence: Synthetic oligonucleotide
agaguucaaaagc

SEQ ID NO: 81032 - RNA, 12 nt, Artificial Sequence
  Description of Artificial Sequence: Synthetic oligonucleotide
uucaaaagcccu

SEQ ID NO: 81033 - RNA, 12 nt, Artificial Sequence
  Description of Artificial Sequence: Synthetic oligonucleotide
ucaaaagcccuu

SEQ ID NO: 81034 - RNA, 12 nt, Artificial Sequence
  Description of Artificial Sequence: Synthetic oligonucleotide
aaaagcccuuca

SEQ ID NO: 81035 - RNA, 12 nt, Artificial Sequence
  Description of Artificial Sequence: Synthetic oligonucleotide
aaagcccuucag

SEQ ID NO: 81036 - RNA, 13 nt, Artificial Sequence
  Description of Artificial Sequence: Synthetic oligonucleotide
gugaagccgcucg

SEQ ID NO: 81037 - RNA, 12 nt, Artificial Sequence
  Description of Artificial Sequence: Synthetic oligonucleotide
cacgccagucaa

SEQ ID NO: 81038 - RNA, 13 nt, Artificial Sequence
  Description of Artificial Sequence: Synthetic oligonucleotide
uucuuggugcgug

SEQ ID NO: 81039 - RNA, 14 nt, Artificial Sequence
  Description of Artificial Sequence: Synthetic oligonucleotide
auuggauucaucag

SEQ ID NO: 81040 - RNA, 13 nt, Artificial Sequence
  Description of Artificial Sequence: Synthetic oligonucleotide
uggaauaccuaag

SEQ ID NO: 81041 - RNA, 12 nt, Artificial Sequence
  Description of Artificial Sequence: Synthetic oligonucleotide
auuugaggcuca

SEQ ID NO: 81042 - RNA, 11 nt, Artificial Sequence
  Description of Artificial Sequence: Synthetic oligonucleotide
ucuacaauugg

SEQ ID NO: 81043 - RNA, 12 nt, Artificial Sequence
  Description of Artificial Sequence: Synthetic oligonucleotide
uaguuaggagcc

SEQ ID NO: 81044 - RNA, 13 nt, Artificial Sequence
  Description of Artificial Sequence: Synthetic oligonucleotide
agucaauauccac

SEQ ID NO: 81045 - RNA, 13 nt, Artificial Sequence
  Description of Artificial Sequence: Synthetic oligonucleotide
auguucagucaca

SEQ ID NO: 81046 - RNA, 12 nt, Artificial Sequence
  Description of Artificial Sequence: Synthetic oligonucleotide
acacacacauac

SEQ ID NO: 81047 - RNA, 12 nt, Artificial Sequence
  Description of Artificial Sequence: Synthetic oligonucleotide
uuccuuuugcuu

SEQ ID NO: 81048 - RNA, 16 nt, Artificial Sequence
  Description of Artificial Sequence: Synthetic oligonucleotide
uuuuaaaguaauuuuu

SEQ ID NO: 81049 - RNA, 13 nt, Artificial Sequence
  Description of Artificial Sequence: Synthetic oligonucleotide
caacagucaaugg

SEQ ID NO: 81050 - RNA, 13 nt, Artificial Sequence
  Description of Artificial Sequence: Synthetic oligonucleotide
ucgacaaaccaau

SEQ ID NO: 81051 - RNA, 12 nt, Artificial Sequence
  Description of Artificial Sequence: Synthetic oligonucleotide
acugcuaccacu

SEQ ID NO: 81052 - RNA, 13 nt, Artificial Sequence
  Description of Artificial Sequence: Synthetic oligonucleotide
gcaagcggucuua

SEQ ID NO: 81053 - RNA, 13 nt, Artificial Sequence
  Description of Artificial Sequence: Synthetic oligonucleotide
ggucuuaccggcu

SEQ ID NO: 81054 - RNA, 11 nt, Artificial Sequence
  Description of Artificial Sequence: Synthetic oligonucleotide
gauggguuacc

SEQ ID NO: 81055 - RNA, 11 nt, Artificial Sequence
  Description of Artificial Sequence: Synthetic oligonucleotide
guuaccugcga

SEQ ID NO: 81056 - RNA, 12 nt, Artificial Sequence
  Description of Artificial Sequence: Synthetic oligonucleotide
aaucuugcugag

SEQ ID NO: 81057 - RNA, 13 nt, Artificial Sequence
  Description of Artificial Sequence: Synthetic oligonucleotide
agcauaaaacagu

SEQ ID NO: 81058 - RNA, 12 nt, Artificial Sequence
  Description of Artificial Sequence: Synthetic oligonucleotide
guccuuuauccu

SEQ ID NO: 81059 - RNA, 12 nt, Artificial Sequence
  Description of Artificial Sequence: Synthetic oligonucleotide
caacgcaaguug

SEQ ID NO: 81060 - RNA, 13 nt, Artificial Sequence
  Description of Artificial Sequence: Synthetic oligonucleotide
aaacugaaaccau

SEQ ID NO: 81061 - RNA, 14 nt, Artificial Sequence
  Description of Artificial Sequence: Synthetic oligonucleotide
acuuuguuaaauau

SEQ ID NO: 81062 - RNA, 14 nt, Artificial Sequence
  Description of Artificial Sequence: Synthetic oligonucleotide
guauauuaaaaguu

SEQ ID NO: 81063 - RNA, 13 nt, Artificial Sequence
  Description of Artificial Sequence: Synthetic oligonucleotide
guuuugacuuaac

SEQ ID NO: 81064 - RNA, 13 nt, Artificial Sequence
  Description of Artificial Sequence: Synthetic oligonucleotide
gcaaacucagcac

SEQ ID NO: 81065 - RNA, 11 nt, Artificial Sequence
  Description of Artificial Sequence: Synthetic oligonucleotide
ugcugaccuca

SEQ ID NO: 81066 - RNA, 14 nt, Artificial Sequence
  Description of Artificial Sequence: Synthetic oligonucleotide
uuuauucagaucgc

SEQ ID NO: 81067 - RNA, 13 nt, Artificial Sequence
  Description of Artificial Sequence: Synthetic oligonucleotide
aggguucugggau

SEQ ID NO: 81068 - RNA, 15 nt, Artificial Sequence
  Description of Artificial Sequence: Synthetic oligonucleotide
auauuggaaauuaug

SEQ ID NO: 81069 - RNA, 13 nt, Artificial Sequence
  Description of Artificial Sequence: Synthetic oligonucleotide
auggaagcacuag

SEQ ID NO: 81070 - RNA, 13 nt, Artificial Sequence
  Description of Artificial Sequence: Synthetic oligonucleotide
guuuuuaugugga

SEQ ID NO: 81071 - RNA, 12 nt, Artificial Sequence
  Description of Artificial Sequence: Synthetic oligonucleotide
ggaauugguaga

SEQ ID NO: 81072 - RNA, 13 nt, Artificial Sequence
  Description of Artificial Sequence: Synthetic oligonucleotide
uuagacuuggaga

SEQ ID NO: 81073 - RNA, 13 nt, Artificial Sequence
  Description of Artificial Sequence: Synthetic oligonucleotide
uuacaguauucca

SEQ ID NO: 81074 - RNA, 15 nt, Artificial Sequence
  Description of Artificial Sequence: Synthetic oligonucleotide
ccacugaugaauuaa

SEQ ID NO: 81075 - RNA, 12 nt, Artificial Sequence
  Description of Artificial Sequence: Synthetic oligonucleotide
ccacaucaucac

SEQ ID NO: 81076 - RNA, 13 nt, Artificial Sequence
  Description of Artificial Sequence: Synthetic oligonucleotide
cucaccaaacaga

SEQ ID NO: 81077 - RNA, 12 nt, Artificial Sequence
  Description of Artificial Sequence: Synthetic oligonucleotide
ggaacaugaugg

SEQ ID NO: 81078 - RNA, 12 nt, Artificial Sequence
  Description of Artificial Sequence: Synthetic oligonucleotide
cauguagacugc

SEQ ID NO: 81079 - RNA, 13 nt, Artificial Sequence
  Description of Artificial Sequence: Synthetic oligonucleotide
ggaucuauuuaug

SEQ ID NO: 81080 - RNA, 12 nt, Artificial Sequence
  Description of Artificial Sequence: Synthetic oligonucleotide
gcacuauuauca

SEQ ID NO: 81081 - RNA, 11 nt, Artificial Sequence
  Description of Artificial Sequence: Synthetic oligonucleotide
aucaguucugc

SEQ ID NO: 81082 - RNA, 13 nt, Artificial Sequence
  Description of Artificial Sequence: Synthetic oligonucleotide
agauuaaaccuac

SEQ ID NO: 81083 - RNA, 13 nt, Artificial Sequence
  Description of Artificial Sequence: Synthetic oligonucleotide
auaaaauccuucu

SEQ ID NO: 81084 - RNA, 12 nt, Artificial Sequence
  Description of Artificial Sequence: Synthetic oligonucleotide
aaugcuguagac

SEQ ID NO: 81085 - RNA, 13 nt, Artificial Sequence
  Description of Artificial Sequence: Synthetic oligonucleotide
uugauaggaauag

SEQ ID NO: 81086 - RNA, 11 nt, Artificial Sequence
  Description of Artificial Sequence: Synthetic oligonucleotide
aauggcccuga

SEQ ID NO: 81087 - RNA, 11 nt, Artificial Sequence
  Description of Artificial Sequence: Synthetic oligonucleotide
uuccucaagca

SEQ ID NO: 81088 - RNA, 10 nt, Artificial Sequence
  Description of Artificial Sequence: Synthetic oligonucleotide
guucagccca

SEQ ID NO: 81089 - RNA, 11 nt, Artificial Sequence
  Description of Artificial Sequence: Synthetic oligonucleotide
gcugcugaacc

SEQ ID NO: 81090 - RNA, 12 nt, Artificial Sequence
  Description of Artificial Sequence: Synthetic oligonucleotide
aaguucucuuca

SEQ ID NO: 81091 - RNA, 11 nt, Artificial Sequence
  Description of Artificial Sequence: Synthetic oligonucleotide
ccagccuagag

SEQ ID NO: 81092 - RNA, 13 nt, Artificial Sequence
  Description of Artificial Sequence: Synthetic oligonucleotide
cucugugaagugu

SEQ ID NO: 81093 - RNA, 14 nt, Artificial Sequence
  Description of Artificial Sequence: Synthetic oligonucleotide
ugagaaaauuucaa

SEQ ID NO: 81094 - RNA, 11 nt, Artificial Sequence
  Description of Artificial Sequence: Synthetic oligonucleotide
aauccuccuga

SEQ ID NO: 81095 - RNA, 12 nt, Artificial Sequence
  Description of Artificial Sequence: Synthetic oligonucleotide
gugacaucauau

SEQ ID NO: 81096 - RNA, 13 nt, Artificial Sequence
  Description of Artificial Sequence: Synthetic oligonucleotide
aaucuucaucaua

SEQ ID NO: 81097 - RNA, 13 nt, Artificial Sequence
  Description of Artificial Sequence: Synthetic oligonucleotide
gacuagcuauuaa

SEQ ID NO: 81098 - RNA, 14 nt, Artificial Sequence
  Description of Artificial Sequence: Synthetic oligonucleotide
ucucuacuaaaaau

SEQ ID NO: 81099 - RNA, 12 nt, Artificial Sequence
  Description of Artificial Sequence: Synthetic oligonucleotide
ucuaucucgccu

SEQ ID NO: 81100 - RNA, 13 nt, Artificial Sequence
  Description of Artificial Sequence: Synthetic oligonucleotide
cuucgguccaguu

SEQ ID NO: 81101 - RNA, 11 nt, Artificial Sequence
  Description of Artificial Sequence: Synthetic oligonucleotide
gauguagccgc

SEQ ID NO: 81102 - RNA, 12 nt, Artificial Sequence
  Description of Artificial Sequence: Synthetic oligonucleotide
ugaggagacuug

SEQ ID NO: 81103 - RNA, 12 nt, Artificial Sequence
  Description of Artificial Sequence: Synthetic oligonucleotide
gaguagugagga

SEQ ID NO: 81104 - RNA, 14 nt, Artificial Sequence
  Description of Artificial Sequence: Synthetic oligonucleotide
cagaugaguacaaa

SEQ ID NO: 81105 - RNA, 13 nt, Artificial Sequence
  Description of Artificial Sequence: Synthetic oligonucleotide
guuguuaaugggc

SEQ ID NO: 81106 - RNA, 13 nt, Artificial Sequence
  Description of Artificial Sequence: Synthetic oligonucleotide
uuuuuaauuuauu

SEQ ID NO: 81107 - RNA, 12 nt, Artificial Sequence
  Description of Artificial Sequence: Synthetic oligonucleotide
uauuuaaauaug

SEQ ID NO: 81108 - RNA, 13 nt, Artificial Sequence
  Description of Artificial Sequence: Synthetic oligonucleotide
uauccuuuguuuc

SEQ ID NO: 81109 - RNA, 14 nt, Artificial Sequence
  Description of Artificial Sequence: Synthetic oligonucleotide
cgucuaaguguuug

SEQ ID NO: 81110 - RNA, 12 nt, Artificial Sequence
  Description of Artificial Sequence: Synthetic oligonucleotide
accugugacaaa

SEQ ID NO: 81111 - RNA, 13 nt, Artificial Sequence
  Description of Artificial Sequence: Synthetic oligonucleotide
ccaggcugaauua

SEQ ID NO: 81112 - RNA, 14 nt, Artificial Sequence
  Description of Artificial Sequence: Synthetic oligonucleotide
gucauucuuacaau

SEQ ID NO: 81113 - RNA, 15 nt, Artificial Sequence
  Description of Artificial Sequence: Synthetic oligonucleotide
ucauucuuacaauug

SEQ ID NO: 81114 - RNA, 12 nt, Artificial Sequence
  Description of Artificial Sequence: Synthetic oligonucleotide
cagagaguguac

SEQ ID NO: 81115 - RNA, 12 nt, Artificial Sequence
  Description of Artificial Sequence: Synthetic oligonucleotide
agaacucagcag

SEQ ID NO: 81116 - RNA, 13 nt, Artificial Sequence
  Description of Artificial Sequence: Synthetic oligonucleotide
uuuauuuucagua

SEQ ID NO: 81117 - RNA, 12 nt, Artificial Sequence
  Description of Artificial Sequence: Synthetic oligonucleotide
ucuuaaauggaa

SEQ ID NO: 81118 - RNA, 13 nt, Artificial Sequence
  Description of Artificial Sequence: Synthetic oligonucleotide
ugccuaaaauugu

SEQ ID NO: 81119 - RNA, 12 nt, Artificial Sequence
  Description of Artificial Sequence: Synthetic oligonucleotide
agacugugagcu

SEQ ID NO: 81120 - RNA, 14 nt, Artificial Sequence
  Description of Artificial Sequence: Synthetic oligonucleotide
ugcuuuuuauuaau

SEQ ID NO: 81121 - RNA, 13 nt, Artificial Sequence
  Description of Artificial Sequence: Synthetic oligonucleotide
cucuucuuacauu

SEQ ID NO: 81122 - RNA, 15 nt, Artificial Sequence
  Description of Artificial Sequence: Synthetic oligonucleotide
cauuuguaaaaaugu

SEQ ID NO: 81123 - RNA, 15 nt, Artificial Sequence
  Description of Artificial Sequence: Synthetic oligonucleotide
aucuuaauucauauu

SEQ ID NO: 81124 - RNA, 13 nt, Artificial Sequence
  Description of Artificial Sequence: Synthetic oligonucleotide
gaacuaaucauga

SEQ ID NO: 81125 - RNA, 12 nt, Artificial Sequence
  Description of Artificial Sequence: Synthetic oligonucleotide
ucugcucuuggg

SEQ ID NO: 81126 - RNA, 13 nt, Artificial Sequence
  Description of Artificial Sequence: Synthetic oligonucleotide
caguagcuuugag

SEQ ID NO: 81127 - RNA, 14 nt, Artificial Sequence
  Description of Artificial Sequence: Synthetic oligonucleotide
cacguaauauuuca

SEQ ID NO: 81128 - RNA, 13 nt, Artificial Sequence
  Description of Artificial Sequence: Synthetic oligonucleotide
uauucucuucacu

SEQ ID NO: 81129 - RNA, 14 nt, Artificial Sequence
  Description of Artificial Sequence: Synthetic oligonucleotide
cuaaugcuaagaaa

SEQ ID NO: 81130 - RNA, 12 nt, Artificial Sequence
  Description of Artificial Sequence: Synthetic oligonucleotide
gcugaaaaucaa

SEQ ID NO: 81131 - RNA, 14 nt, Artificial Sequence
  Description of Artificial Sequence: Synthetic oligonucleotide
aauaugauuacuuu

SEQ ID NO: 81132 - RNA, 14 nt, Artificial Sequence
  Description of Artificial Sequence: Synthetic oligonucleotide
cauuuuguucuaca

SEQ ID NO: 81133 - RNA, 12 nt, Artificial Sequence
  Description of Artificial Sequence: Synthetic oligonucleotide
cccgggacucuc

SEQ ID NO: 81134 - RNA, 14 nt, Artificial Sequence
  Description of Artificial Sequence: Synthetic oligonucleotide
ccuuuaaaguaaag

SEQ ID NO: 81135 - RNA, 13 nt, Artificial Sequence
  Description of Artificial Sequence: Synthetic oligonucleotide
ucuggaagccugg

SEQ ID NO: 81136 - RNA, 14 nt, Artificial Sequence
  Description of Artificial Sequence: Synthetic oligonucleotide
aaaacaaaagagag

SEQ ID NO: 81137 - RNA, 13 nt, Artificial Sequence
  Description of Artificial Sequence: Synthetic oligonucleotide
aucaguuaugccg

SEQ ID NO: 81138 - RNA, 13 nt, Artificial Sequence
  Description of Artificial Sequence: Synthetic oligonucleotide
uaaaagaagucca

SEQ ID NO: 81139 - RNA, 11 nt, Artificial Sequence
  Description of Artificial Sequence: Synthetic oligonucleotide
aggugagguua

SEQ ID NO: 81140 - RNA, 11 nt, Artificial Sequence
  Description of Artificial Sequence: Synthetic oligonucleotide
gggaagaggac

SEQ ID NO: 81141 - RNA, 13 nt, Artificial Sequence
  Description of Artificial Sequence: Synthetic oligonucleotide
aagcaaguauugu

SEQ ID NO: 81142 - RNA, 12 nt, Artificial Sequence
  Description of Artificial Sequence: Synthetic oligonucleotide
auuguagcacuc

SEQ ID NO: 81143 - RNA, 14 nt, Artificial Sequence
  Description of Artificial Sequence: Synthetic oligonucleotide
acaaaaccacaaau

SEQ ID NO: 81144 - RNA, 12 nt, Artificial Sequence
  Description of Artificial Sequence: Synthetic oligonucleotide
uaagcccauaca

SEQ ID NO: 81145 - RNA, 11 nt, Artificial Sequence
  Description of Artificial Sequence: Synthetic oligonucleotide
agcccauacag

SEQ ID NO: 81146 - RNA, 12 nt, Artificial Sequence
  Description of Artificial Sequence: Synthetic oligonucleotide
cagaaaccuucc

SEQ ID NO: 81147 - RNA, 10 nt, Artificial Sequence
  Description of Artificial Sequence: Synthetic oligonucleotide
guauaccuac

SEQ ID NO: 81148 - RNA, 13 nt, Artificial Sequence
  Description of Artificial Sequence: Synthetic oligonucleotide
gccaguuuucgga

SEQ ID NO: 81149 - RNA, 9 nt, Artificial Sequence
  Description of Artificial Sequence: Synthetic oligonucleotide
ggaacaggg

SEQ ID NO: 81150 - RNA, 13 nt, Artificial Sequence
  Description of Artificial Sequence: Synthetic oligonucleotide
uuaacuuuccagu

SEQ ID NO: 81151 - RNA, 14 nt, Artificial Sequence
  Description of Artificial Sequence: Synthetic oligonucleotide
aaaguuugguuuug

SEQ ID NO: 81152 - RNA, 12 nt, Artificial Sequence
  Description of Artificial Sequence: Synthetic oligonucleotide
cuucccacugua

SEQ ID NO: 81153 - RNA, 13 nt, Artificial Sequence
  Description of Artificial Sequence: Synthetic oligonucleotide
ugauaccauauga

SEQ ID NO: 81154 - RNA, 11 nt, Artificial Sequence
  Description of Artificial Sequence: Synthetic oligonucleotide
aacaugggcug

SEQ ID NO: 81155 - RNA, 13 nt, Artificial Sequence
  Description of Artificial Sequence: Synthetic oligonucleotide
caacuuuuucaua

SEQ ID NO: 81156 - RNA, 12 nt, Artificial Sequence
  Description of Artificial Sequence: Synthetic oligonucleotide
caugaggccgga

SEQ ID NO: 81157 - RNA, 11 nt, Artificial Sequence
  Description of Artificial Sequence: Synthetic oligonucleotide
acugcauuugu

SEQ ID NO: 81158 - RNA, 13 nt, Artificial Sequence
  Description of Artificial Sequence: Synthetic oligonucleotide
aauguuuacuacc

SEQ ID NO: 81159 - RNA, 15 nt, Artificial Sequence
  Description of Artificial Sequence: Synthetic oligonucleotide
aauuuuuugaugaaa

SEQ ID NO: 81160 - RNA, 14 nt, Artificial Sequence
  Description of Artificial Sequence: Synthetic oligonucleotide
cagugugugaauuu

SEQ ID NO: 81161 - RNA, 13 nt, Artificial Sequence
  Description of Artificial Sequence: Synthetic oligonucleotide
gagcaauguaugu

SEQ ID NO: 81162 - RNA, 14 nt, Artificial Sequence
  Description of Artificial Sequence: Synthetic oligonucleotide
aaagcacauauaua

SEQ ID NO: 81163 - RNA, 14 nt, Artificial Sequence
  Description of Artificial Sequence: Synthetic oligonucleotide
guaauaguuucucc

SEQ ID NO: 81164 - RNA, 13 nt, Artificial Sequence
  Description of Artificial Sequence: Synthetic oligonucleotide
aguuucuccaaau

SEQ ID NO: 81165 - RNA, 13 nt, Artificial Sequence
  Description of Artificial Sequence: Synthetic oligonucleotide
uacuuccuagaaa

SEQ ID NO: 81166 - RNA, 13 nt, Artificial Sequence
  Description of Artificial Sequence: Synthetic oligonucleotide
uacaccauauaug

SEQ ID NO: 81167 - RNA, 14 nt, Artificial Sequence
  Description of Artificial Sequence: Synthetic oligonucleotide
auauaugaauggag

SEQ ID NO: 81168 - RNA, 13 nt, Artificial Sequence
  Description of Artificial Sequence: Synthetic oligonucleotide
acgagaagaagau

SEQ ID NO: 81169 - RNA, 13 nt, Artificial Sequence
  Description of Artificial Sequence: Synthetic oligonucleotide
ucauuuacaggga

SEQ ID NO: 81170 - RNA, 13 nt, Artificial Sequence
  Description of Artificial Sequence: Synthetic oligonucleotide
cauuuacagggac

SEQ ID NO: 81171 - RNA, 10 nt, Artificial Sequence
  Description of Artificial Sequence: Synthetic oligonucleotide
agggaccuga

SEQ ID NO: 81172 - RNA, 14 nt, Artificial Sequence
  Description of Artificial Sequence: Synthetic oligonucleotide
uguuugacugcauc

SEQ ID NO: 81173 - RNA, 13 nt, Artificial Sequence
  Description of Artificial Sequence: Synthetic oligonucleotide
uuugacugcaucg

SEQ ID NO: 81174 - RNA, 12 nt, Artificial Sequence
  Description of Artificial Sequence: Synthetic oligonucleotide
gaguucacaggg

SEQ ID NO: 81175 - RNA, 13 nt, Artificial Sequence
  Description of Artificial Sequence: Synthetic oligonucleotide
ggcaccucugucc

SEQ ID NO: 81176 - RNA, 15 nt, Artificial Sequence
  Description of Artificial Sequence: Synthetic oligonucleotide
gguuugucuuuuuaa

SEQ ID NO: 81177 - RNA, 14 nt, Artificial Sequence
  Description of Artificial Sequence: Synthetic oligonucleotide
uuugucuuuuuaag

SEQ ID NO: 81178 - RNA, 13 nt, Artificial Sequence
  Description of Artificial Sequence: Synthetic oligonucleotide
ccuaaagguuguc

SEQ ID NO: 81179 - RNA, 12 nt, Artificial Sequence
  Description of Artificial Sequence: Synthetic oligonucleotide
aagguugucgac

SEQ ID NO: 81180 - RNA, 13 nt, Artificial Sequence
  Description of Artificial Sequence: Synthetic oligonucleotide
accuggcaauugu

SEQ ID NO: 81181 - RNA, 12 nt, Artificial Sequence
  Description of Artificial Sequence: Synthetic oligonucleotide
aguggugcgagg

SEQ ID NO: 81182 - RNA, 13 nt, Artificial Sequence
  Description of Artificial Sequence: Synthetic oligonucleotide
agagacaugaaau

SEQ ID NO: 81183 - RNA, 13 nt, Artificial Sequence
  Description of Artificial Sequence: Synthetic oligonucleotide
auauauuucucca

SEQ ID NO: 81184 - RNA, 10 nt, Artificial Sequence
  Description of Artificial Sequence: Synthetic oligonucleotide
caugaaggcu

SEQ ID NO: 81185 - RNA, 11 nt, Artificial Sequence
  Description of Artificial Sequence: Synthetic oligonucleotide
gcuggaguggu

SEQ ID NO: 81186 - RNA, 11 nt, Artificial Sequence
  Description of Artificial Sequence: Synthetic oligonucleotide
aggaagagagg

SEQ ID NO: 81187 - RNA, 12 nt, Artificial Sequence
  Description of Artificial Sequence: Synthetic oligonucleotide
cuugcaucgggc

SEQ ID NO: 81188 - RNA, 13 nt, Artificial Sequence
  Description of Artificial Sequence: Synthetic oligonucleotide
auauccuacugug

SEQ ID NO: 81189 - RNA, 13 nt, Artificial Sequence
  Description of Artificial Sequence: Synthetic oligonucleotide
uccuacuguguaa

SEQ ID NO: 81190 - RNA, 12 nt, Artificial Sequence
  Description of Artificial Sequence: Synthetic oligonucleotide
ccuuguagugua

SEQ ID NO: 81191 - RNA, 13 nt, Artificial Sequence
  Description of Artificial Sequence: Synthetic oligonucleotide
ucuuuguugauug

SEQ ID NO: 81192 - RNA, 14 nt, Artificial Sequence
  Description of Artificial Sequence: Synthetic oligonucleotide
uuuguugauugaaa

SEQ ID NO: 81193 - RNA, 15 nt, Artificial Sequence
  Description of Artificial Sequence: Synthetic oligonucleotide
uucuuuuucuuccau

SEQ ID NO: 81194 - RNA, 13 nt, Artificial Sequence
  Description of Artificial Sequence: Synthetic oligonucleotide
aaucuuccuucua

SEQ ID NO: 81195 - RNA, 13 nt, Artificial Sequence
  Description of Artificial Sequence: Synthetic oligonucleotide
uugaaugcuucau

SEQ ID NO: 81196 - RNA, 13 nt, Artificial Sequence
  Description of Artificial Sequence: Synthetic oligonucleotide
ugaaugcuucaug

SEQ ID NO: 81197 - RNA, 13 nt, Artificial Sequence
  Description of Artificial Sequence: Synthetic oligonucleotide
aauucuacuuuga

SEQ ID NO: 81198 - RNA, 13 nt, Artificial Sequence
  Description of Artificial Sequence: Synthetic oligonucleotide
agcaacuacagac

SEQ ID NO: 81199 - RNA, 13 nt, Artificial Sequence
  Description of Artificial Sequence: Synthetic oligonucleotide
gaccaaggucaac

SEQ ID NO: 81200 - RNA, 13 nt, Artificial Sequence
  Description of Artificial Sequence: Synthetic oligonucleotide
cgacuaucucgac

SEQ ID NO: 81201 - RNA, 13 nt, Artificial Sequence
  Description of Artificial Sequence: Synthetic oligonucleotide
aaccuucccaaac

SEQ ID NO: 81202 - RNA, 14 nt, Artificial Sequence
  Description of Artificial Sequence: Synthetic oligonucleotide
ccaagcuuagaacu

SEQ ID NO: 81203 - RNA, 15 nt, Artificial Sequence
  Description of Artificial Sequence: Synthetic oligonucleotide
agcuuagaacuuuaa

SEQ ID NO: 81204 - RNA, 11 nt, Artificial Sequence
  Description of Artificial Sequence: Synthetic oligonucleotide
aagaccaccac

SEQ ID NO: 81205 - RNA, 14 nt, Artificial Sequence
  Description of Artificial Sequence: Synthetic oligonucleotide
gcgagaaauaaagu

SEQ ID NO: 81206 - RNA, 14 nt, Artificial Sequence
  Description of Artificial Sequence: Synthetic oligonucleotide
cgagaaauaaaguu

SEQ ID NO: 81207 - RNA, 12 nt, Artificial Sequence
  Description of Artificial Sequence: Synthetic oligonucleotide
aggaaaugaucc

SEQ ID NO: 81208 - RNA, 13 nt, Artificial Sequence
  Description of Artificial Sequence: Synthetic oligonucleotide
gaagaaaugaaac

SEQ ID NO: 81209 - RNA, 13 nt, Artificial Sequence
  Description of Artificial Sequence: Synthetic oligonucleotide
guuuccauccucc

SEQ ID NO: 81210 - RNA, 15 nt, Artificial Sequence
  Description of Artificial Sequence: Synthetic oligonucleotide
acugaaaaucuuuga

SEQ ID NO: 81211 - RNA, 11 nt, Artificial Sequence
  Description of Artificial Sequence: Synthetic oligonucleotide
ugccguucagg

SEQ ID NO: 81212 - RNA, 13 nt, Artificial Sequence
  Description of Artificial Sequence: Synthetic oligonucleotide
caggguccagaag

SEQ ID NO: 81213 - RNA, 13 nt, Artificial Sequence
  Description of Artificial Sequence: Synthetic oligonucleotide
ucaagacugcuug

SEQ ID NO: 81214 - RNA, 13 nt, Artificial Sequence
  Description of Artificial Sequence: Synthetic oligonucleotide
uccaugucuuugg

SEQ ID NO: 81215 - RNA, 11 nt, Artificial Sequence
  Description of Artificial Sequence: Synthetic oligonucleotide
gccugaaacac

SEQ ID NO: 81216 - RNA, 12 nt, Artificial Sequence
  Description of Artificial Sequence: Synthetic oligonucleotide
ucucuguaccuc

SEQ ID NO: 81217 - RNA, 12 nt, Artificial Sequence
  Description of Artificial Sequence: Synthetic oligonucleotide
agcaagacaaga

SEQ ID NO: 81218 - RNA, 13 nt, Artificial Sequence
  Description of Artificial Sequence: Synthetic oligonucleotide
gcaagacaagaaa

SEQ ID NO: 81219 - RNA, 12 nt, Artificial Sequence
  Description of Artificial Sequence: Synthetic oligonucleotide
uguacaagaucc

SEQ ID NO: 81220 - RNA, 12 nt, Artificial Sequence
  Description of Artificial Sequence: Synthetic oligonucleotide
cguacuugcaga

SEQ ID NO: 81221 - RNA, 13 nt, Artificial Sequence
  Description of Artificial Sequence: Synthetic oligonucleotide
cgaucgauacaga

SEQ ID NO: 81222 - RNA, 13 nt, Artificial Sequence
  Description of Artificial Sequence: Synthetic oligonucleotide
uauaaaaauaaau

SEQ ID NO: 81223 - RNA, 13 nt, Artificial Sequence
  Description of Artificial Sequence: Synthetic oligonucleotide
uaaaaauaaauau

SEQ ID NO: 81224 - RNA, 13 nt, Artificial Sequence
  Description of Artificial Sequence: Synthetic oligonucleotide
uuugacugcugug

SEQ ID NO: 81225 - RNA, 13 nt, Artificial Sequence
  Description of Artificial Sequence: Synthetic oligonucleotide
ggagaugagagac

SEQ ID NO: 81226 - RNA, 10 nt, Artificial Sequence
  Description of Artificial Sequence: Synthetic oligonucleotide
ucccacuugg

SEQ ID NO: 81227 - RNA, 10 nt, Artificial Sequence
  Description of Artificial Sequence: Synthetic oligonucleotide
guucacggcc

SEQ ID NO: 81228 - RNA, 12 nt, Artificial Sequence
  Description of Artificial Sequence: Synthetic oligonucleotide
accaucacacca

SEQ ID NO: 81229 - RNA, 10 nt, Artificial Sequence
  Description of Artificial Sequence: Synthetic oligonucleotide
cugcggguuu

SEQ ID NO: 81230 - RNA, 9 nt, Artificial Sequence
  Description of Artificial Sequence: Synthetic oligonucleotide
uccaguuug

SEQ ID NO: 81231 - RNA, 12 nt, Artificial Sequence
  Description of Artificial Sequence: Synthetic oligonucleotide
uuaaggacuucu

SEQ ID NO: 81232 - RNA, 12 nt, Artificial Sequence
  Description of Artificial Sequence: Synthetic oligonucleotide
agugggacagag

SEQ ID NO: 81233 - RNA, 13 nt, Artificial Sequence
  Description of Artificial Sequence: Synthetic oligonucleotide
auuuguuauugug

SEQ ID NO: 81234 - RNA, 12 nt, Artificial Sequence
  Description of Artificial Sequence: Synthetic oligonucleotide
ucaaaugcauuu

SEQ ID NO: 81235 - RNA, 9 nt, Artificial Sequence
  Description of Artificial Sequence: Synthetic oligonucleotide
aggaaagcc

SEQ ID NO: 81236 - RNA, 10 nt, Artificial Sequence
  Description of Artificial Sequence: Synthetic oligonucleotide
ggaaagcccu

SEQ ID NO: 81237 - RNA, 11 nt, Artificial Sequence
  Description of Artificial Sequence: Synthetic oligonucleotide
ccagcauggcc

SEQ ID NO: 81238 - RNA, 10 nt, Artificial Sequence
  Description of Artificial Sequence: Synthetic oligonucleotide
uucucccuga

SEQ ID NO: 81239 - RNA, 11 nt, Artificial Sequence
  Description of Artificial Sequence: Synthetic oligonucleotide
aagaagcccuu

SEQ ID NO: 81240 - RNA, 11 nt, Artificial Sequence
  Description of Artificial Sequence: Synthetic oligonucleotide
gaagcccuuca

SEQ ID NO: 81241 - RNA, 10 nt, Artificial Sequence
  Description of Artificial Sequence: Synthetic oligonucleotide
cccuucagcg

SEQ ID NO: 81242 - RNA, 10 nt, Artificial Sequence
  Description of Artificial Sequence: Synthetic oligonucleotide
cuucagcggc

SEQ ID NO: 81243 - RNA, 11 nt, Artificial Sequence
  Description of Artificial Sequence: Synthetic oligonucleotide
cagcggccagu

SEQ ID NO: 81244 - RNA, 11 nt, Artificial Sequence
  Description of Artificial Sequence: Synthetic oligonucleotide
gaaaagcuccg

SEQ ID NO: 81245 - RNA, 10 nt, Artificial Sequence
  Description of Artificial Sequence: Synthetic oligonucleotide
aaagcuccgg

SEQ ID NO: 81246 - RNA, 12 nt, Artificial Sequence
  Description of Artificial Sequence: Synthetic oligonucleotide
gucaacagucug

SEQ ID NO: 81247 - RNA, 12 nt, Artificial Sequence
  Description of Artificial Sequence: Synthetic oligonucleotide
agaguucaaaag

SEQ ID NO: 81248 - RNA, 12 nt, Artificial Sequence
  Description of Artificial Sequence: Synthetic oligonucleotide
gaguucaaaagc

SEQ ID NO: 81249 - RNA, 11 nt, Artificial Sequence
  Description of Artificial Sequence: Synthetic oligonucleotide
ucaaaagcccu

SEQ ID NO: 81250 - RNA, 11 nt, Artificial Sequence
  Description of Artificial Sequence: Synthetic oligonucleotide
caaaagcccuu

SEQ ID NO: 81251 - RNA, 11 nt, Artificial Sequence
  Description of Artificial Sequence: Synthetic oligonucleotide
aaagcccuuca

SEQ ID NO: 81252 - RNA, 11 nt, Artificial Sequence
  Description of Artificial Sequence: Synthetic oligonucleotide
aagcccuucag

SEQ ID NO: 81253 - RNA, 12 nt, Artificial Sequence
  Description of Artificial Sequence: Synthetic oligonucleotide
ugaagccgcucg

SEQ ID NO: 81254 - RNA, 11 nt, Artificial Sequence
  Description of Artificial Sequence: Synthetic oligonucleotide
acgccagucaa

SEQ ID NO: 81255 - RNA, 12 nt, Artificial Sequence
  Description of Artificial Sequence: Synthetic oligonucleotide
ucuuggugcgug

SEQ ID NO: 81256 - RNA, 13 nt, Artificial Sequence
  Description of Artificial Sequence: Synthetic oligonucleotide
uuggauucaucag

SEQ ID NO: 81257 - RNA, 12 nt, Artificial Sequence
  Description of Artificial Sequence: Synthetic oligonucleotide
ggaauaccuaag

SEQ ID NO: 81258 - RNA, 11 nt, Artificial Sequence
  Description of Artificial Sequence: Synthetic oligonucleotide
uuugaggcuca

SEQ ID NO: 81259 - RNA, 10 nt, Artificial Sequence
  Description of Artificial Sequence: Synthetic oligonucleotide
cuacaauugg

SEQ ID NO: 81260 - RNA, 11 nt, Artificial Sequence
  Description of Artificial Sequence: Synthetic oligonucleotide
aguuaggagcc

SEQ ID NO: 81261 - RNA, 12 nt, Artificial Sequence
  Description of Artificial Sequence: Synthetic oligonucleotide
gucaauauccac

SEQ ID NO: 81262 - RNA, 12 nt, Artificial Sequence
  Description of Artificial Sequence: Synthetic oligonucleotide
uguucagucaca

SEQ ID NO: 81263 - RNA, 11 nt, Artificial Sequence
  Description of Artificial Sequence: Synthetic oligonucleotide
cacacacauac

SEQ ID NO: 81264 - RNA, 11 nt, Artificial Sequence
  Description of Artificial Sequence: Synthetic oligonucleotide
uccuuuugcuu

SEQ ID NO: 81265 - RNA, 15 nt, Artificial Sequence
  Description of Artificial Sequence: Synthetic oligonucleotide
uuuaaaguaauuuuu

SEQ ID NO: 81266 - RNA, 12 nt, Artificial Sequence
  Description of Artificial Sequence: Synthetic oligonucleotide
aacagucaaugg

SEQ ID NO: 81267 - RNA, 12 nt, Artificial Sequence
  Description of Artificial Sequence: Synthetic oligonucleotide
cgacaaaccaau

SEQ ID NO: 81268 - RNA, 11 nt, Artificial Sequence
  Description of Artificial Sequence: Synthetic oligonucleotide
cugcuaccacu

SEQ ID NO: 81269 - RNA, 12 nt, Artificial Sequence
  Description of Artificial Sequence: Synthetic oligonucleotide
caagcggucuua

SEQ ID NO: 81270 - RNA, 12 nt, Artificial Sequence
  Description of Artificial Sequence: Synthetic oligonucleotide
gucuuaccggcu

SEQ ID NO: 81271 - RNA, 10 nt, Artificial Sequence
  Description of Artificial Sequence: Synthetic oligonucleotide
auggguuacc

SEQ ID NO: 81272 - RNA, 10 nt, Artificial Sequence
  Description of Artificial Sequence: Synthetic oligonucleotide
uuaccugcga

SEQ ID NO: 81273 - RNA, 11 nt, Artificial Sequence
  Description of Artificial Sequence: Synthetic oligonucleotide
aucuugcugag

SEQ ID NO: 81274 - RNA, 12 nt, Artificial Sequence
  Description of Artificial Sequence: Synthetic oligonucleotide
gcauaaaacagu

SEQ ID NO: 81275 - RNA, 11 nt, Artificial Sequence
  Description of Artificial Sequence: Synthetic oligonucleotide
uccuuuauccu

SEQ ID NO: 81276 - RNA, 11 nt, Artificial Sequence
  Description of Artificial Sequence: Synthetic oligonucleotide
aacgcaaguug

SEQ ID NO: 81277 - RNA, 12 nt, Artificial Sequence
  Description of Artificial Sequence: Synthetic oligonucleotide
aacugaaaccau

SEQ ID NO: 81278 - RNA, 13 nt, Artificial Sequence
  Description of Artificial Sequence: Synthetic oligonucleotide
cuuuguuaaauau

SEQ ID NO: 81279 - RNA, 13 nt, Artificial Sequence
  Description of Artificial Sequence: Synthetic oligonucleotide
uauauuaaaaguu

SEQ ID NO: 81280 - RNA, 12 nt, Artificial Sequence
  Description of Artificial Sequence: Synthetic oligonucleotide
uuuugacuuaac

SEQ ID NO: 81281 - RNA, 12 nt, Artificial Sequence
  Description of Artificial Sequence: Synthetic oligonucleotide
caaacucagcac

SEQ ID NO: 81282 - RNA, 10 nt, Artificial Sequence
  Description of Artificial Sequence: Synthetic oligonucleotide
gcugaccuca

SEQ ID NO: 81283 - RNA, 13 nt, Artificial Sequence
  Description of Artificial Sequence: Synthetic oligonucleotide
uuauucagaucgc

SEQ ID NO: 81284 - RNA, 12 nt, Artificial Sequence
  Description of Artificial Sequence: Synthetic oligonucleotide
ggguucugggau

SEQ ID NO: 81285 - RNA, 14 nt, Artificial Sequence
  Description of Artificial Sequence: Synthetic oligonucleotide
uauuggaaauuaug

SEQ ID NO: 81286 - RNA, 12 nt, Artificial Sequence
  Description of Artificial Sequence: Synthetic oligonucleotide
uggaagcacuag

SEQ ID NO: 81287 - RNA, 12 nt, Artificial Sequence
  Description of Artificial Sequence: Synthetic oligonucleotide
uuuuuaugugga

SEQ ID NO: 81288 - RNA, 11 nt, Artificial Sequence
  Description of Artificial Sequence: Synthetic oligonucleotide
gaauugguaga

SEQ ID NO: 81289 - RNA, 12 nt, Artificial Sequence
  Description of Artificial Sequence: Synthetic oligonucleotide
uagacuuggaga

SEQ ID NO: 81290 - RNA, 12 nt, Artificial Sequence
  Description of Artificial Sequence: Synthetic oligonucleotide
uacaguauucca

SEQ ID NO: 81291 - RNA, 14 nt, Artificial Sequence
  Description of Artificial Sequence: Synthetic oligonucleotide
cacugaugaauuaa

SEQ ID NO: 81292 - RNA, 11 nt, Artificial Sequence
  Description of Artificial Sequence: Synthetic oligonucleotide
cacaucaucac

SEQ ID NO: 81293 - RNA, 12 nt, Artificial Sequence
  Description of Artificial Sequence: Synthetic oligonucleotide
ucaccaaacaga

SEQ ID NO: 81294 - RNA, 11 nt, Artificial Sequence
  Description of Artificial Sequence: Synthetic oligonucleotide
gaacaugaugg

SEQ ID NO: 81295 - RNA, 11 nt, Artificial Sequence
  Description of Artificial Sequence: Synthetic oligonucleotide
auguagacugc

SEQ ID NO: 81296 - RNA, 12 nt, Artificial Sequence
  Description of Artificial Sequence: Synthetic oligonucleotide
gaucuauuuaug

SEQ ID NO: 81297 - RNA, 11 nt, Artificial Sequence
  Description of Artificial Sequence: Synthetic oligonucleotide
cacuauuauca

SEQ ID NO: 81298 - RNA, 10 nt, Artificial Sequence
  Description of Artificial Sequence: Synthetic oligonucleotide
ucaguucugc

SEQ ID NO: 81299 - RNA, 12 nt, Artificial Sequence
  Description of Artificial Sequence: Synthetic oligonucleotide
gauuaaaccuac

SEQ ID NO: 81300 - RNA, 12 nt, Artificial Sequence
  Description of Artificial Sequence: Synthetic oligonucleotide
uaaaauccuucu

SEQ ID NO: 81301 - RNA, 11 nt, Artificial Sequence
  Description of Artificial Sequence: Synthetic oligonucleotide
augcuguagac

SEQ ID NO: 81302 - RNA, 12 nt, Artificial Sequence
  Description of Artificial Sequence: Synthetic oligonucleotide
ugauaggaauag

SEQ ID NO: 81303 - RNA, 10 nt, Artificial Sequence
  Description of Artificial Sequence: Synthetic oligonucleotide
auggcccuga

SEQ ID NO: 81304 - RNA, 10 nt, Artificial Sequence
  Description of Artificial Sequence: Synthetic oligonucleotide
uccucaagca

SEQ ID NO: 81305 - RNA, 9 nt, Artificial Sequence
  Description of Artificial Sequence: Synthetic oligonucleotide
uucagccca

SEQ ID NO: 81306 - RNA, 10 nt, Artificial Sequence
  Description of Artificial Sequence: Synthetic oligonucleotide
cugcugaacc

SEQ ID NO: 81307 - RNA, 11 nt, Artificial Sequence
  Description of Artificial Sequence: Synthetic oligonucleotide
aguucucuuca

SEQ ID NO: 81308 - RNA, 10 nt, Artificial Sequence
  Description of Artificial Sequence: Synthetic oligonucleotide
cagccuagag

SEQ ID NO: 81309 - RNA, 12 nt, Artificial Sequence
  Description of Artificial Sequence: Synthetic oligonucleotide
ucugugaagugu

SEQ ID NO: 81310 - RNA, 13 nt, Artificial Sequence
  Description of Artificial Sequence: Synthetic oligonucleotide
gagaaaauuucaa

SEQ ID NO: 81311 - RNA, 10 nt, Artificial Sequence
  Description of Artificial Sequence: Synthetic oligonucleotide
auccuccuga

SEQ ID NO: 81312 - RNA, 11 nt, Artificial Sequence
  Description of Artificial Sequence: Synthetic oligonucleotide
ugacaucauau

SEQ ID NO: 81313 - RNA, 12 nt, Artificial Sequence
  Description of Artificial Sequence: Synthetic oligonucleotide
aucuucaucaua

SEQ ID NO: 81314 - RNA, 12 nt, Artificial Sequence
  Description of Artificial Sequence: Synthetic oligonucleotide
acuagcuauuaa

SEQ ID NO: 81315 - RNA, 13 nt, Artificial Sequence
  Description of Artificial Sequence: Synthetic oligonucleotide
cucuacuaaaaau

SEQ ID NO: 81316 - RNA, 11 nt, Artificial Sequence
  Description of Artificial Sequence: Synthetic oligonucleotide
cuaucucgccu

SEQ ID NO: 81317 - RNA, 12 nt, Artificial Sequence
  Description of Artificial Sequence: Synthetic oligonucleotide
uucgguccaguu

SEQ ID NO: 81318 - RNA, 10 nt, Artificial Sequence
  Description of Artificial Sequence: Synthetic oligonucleotide
auguagccgc

SEQ ID NO: 81319 - RNA, 11 nt, Artificial Sequence
  Description of Artificial Sequence: Synthetic oligonucleotide
gaggagacuug

SEQ ID NO: 81320 - RNA, 11 nt, Artificial Sequence
  Description of Artificial Sequence: Synthetic oligonucleotide
aguagugagga

SEQ ID NO: 81321 - RNA, 13 nt, Artificial Sequence
  Description of Artificial Sequence: Synthetic oligonucleotide
agaugaguacaaa

SEQ ID NO: 81322 - RNA, 12 nt, Artificial Sequence
  Description of Artificial Sequence: Synthetic oligonucleotide
uuguuaaugggc

SEQ ID NO: 81323 - RNA, 12 nt, Artificial Sequence
  Description of Artificial Sequence: Synthetic oligonucleotide
uuuuaauuuauu

SEQ ID NO: 81324 - RNA, 11 nt, Artificial Sequence
  Description of Artificial Sequence: Synthetic oligonucleotide
auuuaaauaug

SEQ ID NO: 81325 - RNA, 12 nt, Artificial Sequence
  Description of Artificial Sequence: Synthetic oligonucleotide
auccuuuguuuc

SEQ ID NO: 81326 - RNA, 13 nt, Artificial Sequence
  Description of Artificial Sequence: Synthetic oligonucleotide
gucuaaguguuug

SEQ ID NO: 81327 - RNA, 11 nt, Artificial Sequence
  Description of Artificial Sequence: Synthetic oligonucleotide
ccugugacaaa

SEQ ID NO: 81328 - RNA, 12 nt, Artificial Sequence
  Description of Artificial Sequence: Synthetic oligonucleotide
caggcugaauua

SEQ ID NO: 81329 - RNA, 13 nt, Artificial Sequence
  Description of Artificial Sequence: Synthetic oligonucleotide
ucauucuuacaau

SEQ ID NO: 81330 - RNA, 14 nt, Artificial Sequence
  Description of Artificial Sequence: Synthetic oligonucleotide
cauucuuacaauug

SEQ ID NO: 81331 - RNA, 11 nt, Artificial Sequence
  Description of Artificial Sequence: Synthetic oligonucleotide
agagaguguac

SEQ ID NO: 81332 - RNA, 11 nt, Artificial Sequence
  Description of Artificial Sequence: Synthetic oligonucleotide
gaacucagcag

SEQ ID NO: 81333 - RNA, 12 nt, Artificial Sequence
  Description of Artificial Sequence: Synthetic oligonucleotide
uuauuuucagua

SEQ ID NO: 81334 - RNA, 11 nt, Artificial Sequence
  Description of Artificial Sequence: Synthetic oligonucleotide
cuuaaauggaa

SEQ ID NO: 81335 - RNA, 12 nt, Artificial Sequence
  Description of Artificial Sequence: Synthetic oligonucleotide
gccuaaaauugu

SEQ ID NO: 81336 - RNA, 12 nt, Artificial Sequence
  Description of Artificial Sequence: Synthetic oligonucleotide
acuaacaucugg

SEQ ID NO: 81337 - RNA, 11 nt, Artificial Sequence
  Description of Artificial Sequence: Synthetic oligonucleotide
gacugugagcu

SEQ ID NO: 81338 - RNA, 13 nt, Artificial Sequence
  Description of Artificial Sequence: Synthetic oligonucleotide
gcuuuuuauuaau

SEQ ID NO: 81339 - RNA, 12 nt, Artificial Sequence
  Description of Artificial Sequence: Synthetic oligonucleotide
ucuucuuacauu

SEQ ID NO: 81340 - RNA, 14 nt, Artificial Sequence
  Description of Artificial Sequence: Synthetic oligonucleotide
auuuguaaaaaugu

SEQ ID NO: 81341 - RNA, 14 nt, Artificial Sequence
  Description of Artificial Sequence: Synthetic oligonucleotide
ucuuaauucauauu

SEQ ID NO: 81342 - RNA, 12 nt, Artificial Sequence
  Description of Artificial Sequence: Synthetic oligonucleotide
aacuaaucauga

SEQ ID NO: 81343 - RNA, 11 nt, Artificial Sequence
  Description of Artificial Sequence: Synthetic oligonucleotide
cugcucuuggg

SEQ ID NO: 81344 - RNA, 12 nt, Artificial Sequence
  Description of Artificial Sequence: Synthetic oligonucleotide
aguagcuuugag

SEQ ID NO: 81345 - RNA, 13 nt, Artificial Sequence
  Description of Artificial Sequence: Synthetic oligonucleotide
acguaauauuuca

SEQ ID NO: 81346 - RNA, 12 nt, Artificial Sequence
  Description of Artificial Sequence: Synthetic oligonucleotide
auucucuucacu

SEQ ID NO: 81347 - RNA, 13 nt, Artificial Sequence
  Description of Artificial Sequence: Synthetic oligonucleotide
uaaugcuaagaaa

SEQ ID NO: 81348 - RNA, 11 nt, Artificial Sequence
  Description of Artificial Sequence: Synthetic oligonucleotide
cugaaaaucaa

SEQ ID NO: 81349 - RNA, 13 nt, Artificial Sequence
  Description of Artificial Sequence: Synthetic oligonucleotide
auaugauuacuuu

SEQ ID NO: 81350 - RNA, 13 nt, Artificial Sequence
  Description of Artificial Sequence: Synthetic oligonucleotide
auuuuguucuaca

SEQ ID NO: 81351 - RNA, 11 nt, Artificial Sequence
  Description of Artificial Sequence: Synthetic oligonucleotide
ccgggacucuc

SEQ ID NO: 81352 - RNA, 13 nt, Artificial Sequence
  Description of Artificial Sequence: Synthetic oligonucleotide
cuuuaaaguaaag

SEQ ID NO: 81353 - RNA, 12 nt, Artificial Sequence
  Description of Artificial Sequence: Synthetic oligonucleotide
cuggaagccugg

SEQ ID NO: 81354 - RNA, 13 nt, Artificial Sequence
  Description of Artificial Sequence: Synthetic oligonucleotide
aaacaaaagagag

SEQ ID NO: 81355 - RNA, 12 nt, Artificial Sequence
  Description of Artificial Sequence: Synthetic oligonucleotide
ucaguuaugccg

SEQ ID NO: 81356 - RNA, 12 nt, Artificial Sequence
  Description of Artificial Sequence: Synthetic oligonucleotide
aaaagaagucca

SEQ ID NO: 81357 - RNA, 10 nt, Artificial Sequence
  Description of Artificial Sequence: Synthetic oligonucleotide
ggugagguua

SEQ ID NO: 81358 - RNA, 10 nt, Artificial Sequence
  Description of Artificial Sequence: Synthetic oligonucleotide
ggaagaggac

SEQ ID NO: 81359 - RNA, 12 nt, Artificial Sequence
  Description of Artificial Sequence: Synthetic oligonucleotide
agcaaguauugu

SEQ ID NO: 81360 - RNA, 11 nt, Artificial Sequence
  Description of Artificial Sequence: Synthetic oligonucleotide
uuguagcacuc

SEQ ID NO: 81361 - RNA, 13 nt, Artificial Sequence
  Description of Artificial Sequence: Synthetic oligonucleotide
caaaaccacaaau

SEQ ID NO: 81362 - RNA, 11 nt, Artificial Sequence
  Description of Artificial Sequence: Synthetic oligonucleotide
aagcccauaca

SEQ ID NO: 81363 - RNA, 10 nt, Artificial Sequence
  Description of Artificial Sequence: Synthetic oligonucleotide
gcccauacag

SEQ ID NO: 81364 - RNA, 11 nt, Artificial Sequence
  Description of Artificial Sequence: Synthetic oligonucleotide
agaaaccuucc

SEQ ID NO: 81365 - RNA, 9 nt, Artificial Sequence
  Description of Artificial Sequence: Synthetic oligonucleotide
uauaccuac

SEQ ID NO: 81366 - RNA, 12 nt, Artificial Sequence
  Description of Artificial Sequence: Synthetic oligonucleotide
ccaguuuucgga

SEQ ID NO: 81367 - RNA, 8 nt, Artificial Sequence
  Description of Artificial Sequence: Synthetic oligonucleotide
gaacaggg

SEQ ID NO: 81368 - RNA, 12 nt, Artificial Sequence
  Description of Artificial Sequence: Synthetic oligonucleotide
uaacuuuccagu

SEQ ID NO: 81369 - RNA, 13 nt, Artificial Sequence
  Description of Artificial Sequence: Synthetic oligonucleotide
aaguuugguuuug

SEQ ID NO: 81370 - RNA, 11 nt, Artificial Sequence
  Description of Artificial Sequence: Synthetic oligonucleotide
uucccacugua

SEQ ID NO: 81371 - RNA, 12 nt, Artificial Sequence
  Description of Artificial Sequence: Synthetic oligonucleotide
gauaccauauga

SEQ ID NO: 81372 - RNA, 10 nt, Artificial Sequence
  Description of Artificial Sequence: Synthetic oligonucleotide
acaugggcug

SEQ ID NO: 81373 - RNA, 12 nt, Artificial Sequence
  Description of Artificial Sequence: Synthetic oligonucleotide
aacuuuuucaua

SEQ ID NO: 81374 - RNA, 11 nt, Artificial Sequence
  Description of Artificial Sequence: Synthetic oligonucleotide
augaggccgga

SEQ ID NO: 81375 - RNA, 10 nt, Artificial Sequence
  Description of Artificial Sequence: Synthetic oligonucleotide
cugcauuugu

SEQ ID NO: 81376 - RNA, 12 nt, Artificial Sequence
  Description of Artificial Sequence: Synthetic oligonucleotide
auguuuacuacc

SEQ ID NO: 81377 - RNA, 14 nt, Artificial Sequence
  Description of Artificial Sequence: Synthetic oligonucleotide
auuuuuugaugaaa

SEQ ID NO: 81378 - RNA, 13 nt, Artificial Sequence
  Description of Artificial Sequence: Synthetic oligonucleotide
agugugugaauuu

SEQ ID NO: 81379 - RNA, 12 nt, Artificial Sequence
  Description of Artificial Sequence: Synthetic oligonucleotide
agcaauguaugu

SEQ ID NO: 81380 - RNA, 13 nt, Artificial Sequence
  Description of Artificial Sequence: Synthetic oligonucleotide
aagcacauauaua

SEQ ID NO: 81381 - RNA, 13 nt, Artificial Sequence
  Description of Artificial Sequence: Synthetic oligonucleotide
uaauaguuucucc

SEQ ID NO: 81382 - RNA, 12 nt, Artificial Sequence
  Description of Artificial Sequence: Synthetic oligonucleotide
guuucuccaaau

SEQ ID NO: 81383 - RNA, 12 nt, Artificial Sequence
  Description of Artificial Sequence: Synthetic oligonucleotide
acuuccuagaaa

SEQ ID NO: 81384 - RNA, 12 nt, Artificial Sequence
  Description of Artificial Sequence: Synthetic oligonucleotide
acaccauauaug

SEQ ID NO: 81385 - RNA, 13 nt, Artificial Sequence
  Description of Artificial Sequence: Synthetic oligonucleotide
uauaugaauggag

SEQ ID NO: 81386 - RNA, 12 nt, Artificial Sequence
  Description of Artificial Sequence: Synthetic oligonucleotide
cauuuacaggga

SEQ ID NO: 81387 - RNA, 12 nt, Artificial Sequence
  Description of Artificial Sequence: Synthetic oligonucleotide
auuuacagggac

SEQ ID NO: 81388 - RNA, 9 nt, Artificial Sequence
  Description of Artificial Sequence: Synthetic oligonucleotide
gggaccuga

SEQ ID NO: 81389 - RNA, 13 nt, Artificial Sequence
  Description of Artificial Sequence: Synthetic oligonucleotide
guuugacugcauc

SEQ ID NO: 81390 - RNA, 12 nt, Artificial Sequence
  Description of Artificial Sequence: Synthetic oligonucleotide
uugacugcaucg

SEQ ID NO: 81391 - RNA, 11 nt, Artificial Sequence
  Description of Artificial Sequence: Synthetic oligonucleotide
aguucacaggg

SEQ ID NO: 81392 - RNA, 12 nt, Artificial Sequence
  Description of Artificial Sequence: Synthetic oligonucleotide
gcaccucugucc

SEQ ID NO: 81393 - RNA, 14 nt, Artificial Sequence
  Description of Artificial Sequence: Synthetic oligonucleotide
guuugucuuuuuaa

SEQ ID NO: 81394 - RNA, 13 nt, Artificial Sequence
  Description of Artificial Sequence: Synthetic oligonucleotide
uugucuuuuuaag

SEQ ID NO: 81395 - RNA, 12 nt, Artificial Sequence
  Description of Artificial Sequence: Synthetic oligonucleotide
cuaaagguuguc

SEQ ID NO: 81396 - RNA, 11 nt, Artificial Sequence
  Description of Artificial Sequence: Synthetic oligonucleotide
agguugucgac

SEQ ID NO: 81397 - RNA, 12 nt, Artificial Sequence
  Description of Artificial Sequence: Synthetic oligonucleotide
ccuggcaauugu

SEQ ID NO: 81398 - RNA, 11 nt, Artificial Sequence
  Description of Artificial Sequence: Synthetic oligonucleotide
guggugcgagg

SEQ ID NO: 81399 - RNA, 12 nt, Artificial Sequence
  Description of Artificial Sequence: Synthetic oligonucleotide
gagacaugaaau

SEQ ID NO: 81400 - RNA, 12 nt, Artificial Sequence
  Description of Artificial Sequence: Synthetic oligonucleotide
uauauuucucca

SEQ ID NO: 81401 - RNA, 9 nt, Artificial Sequence
  Description of Artificial Sequence: Synthetic oligonucleotide
augaaggcu

SEQ ID NO: 81402 - RNA, 10 nt, Artificial Sequence
  Description of Artificial Sequence: Synthetic oligonucleotide
cuggaguggu

SEQ ID NO: 81403 - RNA, 10 nt, Artificial Sequence
  Description of Artificial Sequence: Synthetic oligonucleotide
ggaagagagg

SEQ ID NO: 81404 - RNA, 11 nt, Artificial Sequence
  Description of Artificial Sequence: Synthetic oligonucleotide
uugcaucgggc

SEQ ID NO: 81405 - RNA, 12 nt, Artificial Sequence
  Description of Artificial Sequence: Synthetic oligonucleotide
uauccuacugug

SEQ ID NO: 81406 - RNA, 12 nt, Artificial Sequence
  Description of Artificial Sequence: Synthetic oligonucleotide
ccuacuguguaa

SEQ ID NO: 81407 - RNA, 11 nt, Artificial Sequence
  Description of Artificial Sequence: Synthetic oligonucleotide
cuuguagugua

SEQ ID NO: 81408 - RNA, 12 nt, Artificial Sequence
  Description of Artificial Sequence: Synthetic oligonucleotide
cuuuguugauug

SEQ ID NO: 81409 - RNA, 13 nt, Artificial Sequence
  Description of Artificial Sequence: Synthetic oligonucleotide
uuguugauugaaa

SEQ ID NO: 81410 - RNA, 14 nt, Artificial Sequence
  Description of Artificial Sequence: Synthetic oligonucleotide
ucuuuuucuuccau

SEQ ID NO: 81411 - RNA, 12 nt, Artificial Sequence
  Description of Artificial Sequence: Synthetic oligonucleotide
aucuuccuucua

SEQ ID NO: 81412 - RNA, 12 nt, Artificial Sequence
  Description of Artificial Sequence: Synthetic oligonucleotide
ugaaugcuucau

SEQ ID NO: 81413 - RNA, 12 nt, Artificial Sequence
  Description of Artificial Sequence: Synthetic oligonucleotide
gaaugcuucaug

SEQ ID NO: 81414 - RNA, 12 nt, Artificial Sequence
  Description of Artificial Sequence: Synthetic oligonucleotide
auucuacuuuga

SEQ ID NO: 81415 - RNA, 12 nt, Artificial Sequence
  Description of Artificial Sequence: Synthetic oligonucleotide
gcaacuacagac

SEQ ID NO: 81416 - RNA, 12 nt, Artificial Sequence
  Description of Artificial Sequence: Synthetic oligonucleotide
accaaggucaac

SEQ ID NO: 81417 - RNA, 12 nt, Artificial Sequence
  Description of Artificial Sequence: Synthetic oligonucleotide
gacuaucucgac

SEQ ID NO: 81418 - RNA, 12 nt, Artificial Sequence
  Description of Artificial Sequence: Synthetic oligonucleotide
accuucccaaac

SEQ ID NO: 81419 - RNA, 13 nt, Artificial Sequence
  Description of Artificial Sequence: Synthetic oligonucleotide
caagcuuagaacu

SEQ ID NO: 81420 - RNA, 14 nt, Artificial Sequence
  Description of Artificial Sequence: Synthetic oligonucleotide
gcuuagaacuuuaa

SEQ ID NO: 81421 - RNA, 13 nt, Artificial Sequence
  Description of Artificial Sequence: Synthetic oligonucleotide
aacuuuaagcaac

SEQ ID NO: 81422 - RNA, 10 nt, Artificial Sequence
  Description of Artificial Sequence: Synthetic oligonucleotide
agaccaccac

SEQ ID NO: 81423 - RNA, 13 nt, Artificial Sequence
  Description of Artificial Sequence: Synthetic oligonucleotide
cgagaaauaaagu

SEQ ID NO: 81424 - RNA, 13 nt, Artificial Sequence
  Description of Artificial Sequence: Synthetic oligonucleotide
gagaaauaaaguu

SEQ ID NO: 81425 - RNA, 11 nt, Artificial Sequence
  Description of Artificial Sequence: Synthetic oligonucleotide
ggaaaugaucc

SEQ ID NO: 81426 - RNA, 12 nt, Artificial Sequence
  Description of Artificial Sequence: Synthetic oligonucleotide
aagaaaugaaac

SEQ ID NO: 81427 - RNA, 12 nt, Artificial Sequence
  Description of Artificial Sequence: Synthetic oligonucleotide
uuuccauccucc

SEQ ID NO: 81428 - RNA, 14 nt, Artificial Sequence
  Description of Artificial Sequence: Synthetic oligonucleotide
cugaaaaucuuuga

SEQ ID NO: 81429 - RNA, 10 nt, Artificial Sequence
  Description of Artificial Sequence: Synthetic oligonucleotide
gccguucagg

SEQ ID NO: 81430 - RNA, 12 nt, Artificial Sequence
  Description of Artificial Sequence: Synthetic oligonucleotide
aggguccagaag

SEQ ID NO: 81431 - RNA, 12 nt, Artificial Sequence
  Description of Artificial Sequence: Synthetic oligonucleotide
caagacugcuug

SEQ ID NO: 81432 - RNA, 12 nt, Artificial Sequence
  Description of Artificial Sequence: Synthetic oligonucleotide
ccaugucuuugg

SEQ ID NO: 81433 - RNA, 10 nt, Artificial Sequence
  Description of Artificial Sequence: Synthetic oligonucleotide
ccugaaacac

SEQ ID NO: 81434 - RNA, 11 nt, Artificial Sequence
  Description of Artificial Sequence: Synthetic oligonucleotide
cucuguaccuc

SEQ ID NO: 81435 - RNA, 11 nt, Artificial Sequence
  Description of Artificial Sequence: Synthetic oligonucleotide
gcaagacaaga

SEQ ID NO: 81436 - RNA, 12 nt, Artificial Sequence
  Description of Artificial Sequence: Synthetic oligonucleotide
caagacaagaaa

SEQ ID NO: 81437 - RNA, 11 nt, Artificial Sequence
  Description of Artificial Sequence: Synthetic oligonucleotide
guacaagaucc

SEQ ID NO: 81438 - RNA, 11 nt, Artificial Sequence
  Description of Artificial Sequence: Synthetic oligonucleotide
guacuugcaga

SEQ ID NO: 81439 - RNA, 12 nt, Artificial Sequence
  Description of Artificial Sequence: Synthetic oligonucleotide
gaucgauacaga

SEQ ID NO: 81440 - RNA, 12 nt, Artificial Sequence
  Description of Artificial Sequence: Synthetic oligonucleotide
auaaaaauaaau

SEQ ID NO: 81441 - RNA, 12 nt, Artificial Sequence
  Description of Artificial Sequence: Synthetic oligonucleotide
aaaaauaaauau

SEQ ID NO: 81442 - RNA, 12 nt, Artificial Sequence
  Description of Artificial Sequence: Synthetic oligonucleotide
uugacugcugug

SEQ ID NO: 81443 - RNA, 12 nt, Artificial Sequence
  Description of Artificial Sequence: Synthetic oligonucleotide
gagaugagagac

SEQ ID NO: 81444 - RNA, 9 nt, Artificial Sequence
  Description of Artificial Sequence: Synthetic oligonucleotide
cccacuugg

SEQ ID NO: 81445 - RNA, 451 nt, Homo sapiens
ggguugcggagggugggccugggaggggugguggccauuuuuugucuaacccuaacugagaagggcguaggcgccgugcuuuugcuccccgcgcgcuguuuuucucgcugacuuucagcgggcggaaaagccucggccugccgccuuccaccguucauucuagagcaaacaaaaaaugucagcugcuggcccguucgccccucccggggaccugcggcgggucgccugcccagcccccgaaccccgccuggaggccgcggucggcccggggcuucuccggaggcacccacugccaccgcgaagaguugggcucugucagccgcgggucucucgggggcgagggcgagguucaggccuuucaggccgcaggaagaggaacggagcgaguccccgcgcgcggcgcgauucccugagcugugggacgugcacccaggacucggcucacacaugc

SEQ ID NO: 81446 - RNA, 19 nt, Artificial Sequence
  Description of Artificial Sequence: Synthetic oligonucleotide
ggguugcggagggugggcc

SEQ ID NO: 81447 - RNA, 19 nt, Artificial Sequence
  Description of Artificial Sequence: Synthetic oligonucleotide
cugggaggggugguggcca

SEQ ID NO: 81448 - RNA, 19 nt, Artificial Sequence
  Description of Artificial Sequence: Synthetic oligonucleotide
auuuuuugucuaacccuaa

SEQ ID NO: 81449 - RNA, 19 nt, Artificial Sequence
  Description of Artificial Sequence: Synthetic oligonucleotide
acugagaagggcguaggcg

SEQ ID NO: 81450 - RNA, 19 nt, Artificial Sequence
  Description of Artificial Sequence: Synthetic oligonucleotide
gccgugcuuuugcuccccg

SEQ ID NO: 81451 - RNA, 19 nt, Artificial Sequence
  Description of Artificial Sequence: Synthetic oligonucleotide
gcgcgcuguuuuucucgcu

SEQ ID NO: 81452 - RNA, 19 nt, Artificial Sequence
  Description of Artificial Sequence: Synthetic oligonucleotide
ugacuuucagcgggcggaa

SEQ ID NO: 81453 - RNA, 19 nt, Artificial Sequence
  Description of Artificial Sequence: Synthetic oligonucleotide
aaagccucggccugccgcc

SEQ ID NO: 81454 - RNA, 19 nt, Artificial Sequence
  Description of Artificial Sequence: Synthetic oligonucleotide
cuuccaccguucauucuag

SEQ ID NO: 81455 - RNA, 19 nt, Artificial Sequence
  Description of Artificial Sequence: Synthetic oligonucleotide
gagcaaacaaaaaauguca

SEQ ID NO: 81456 - RNA, 19 nt, Artificial Sequence
  Description of Artificial Sequence: Synthetic oligonucleotide
agcugcuggcccguucgcc

SEQ ID NO: 81457 - RNA, 19 nt, Artificial Sequence
  Description of Artificial Sequence: Synthetic oligonucleotide
cccucccggggaccugcgg

SEQ ID NO: 81458 - RNA, 19 nt, Artificial Sequence
  Description of Artificial Sequence: Synthetic oligonucleotide
gcgggucgccugcccagcc

SEQ ID NO: 81459 - RNA, 19 nt, Artificial Sequence
  Description of Artificial Sequence: Synthetic oligonucleotide
ccccgaaccccgccuggag

SEQ ID NO: 81460 - RNA, 19 nt, Artificial Sequence
  Description of Artificial Sequence: Synthetic oligonucleotide
ggccgcggucggcccgggg

SEQ ID NO: 81461 - RNA, 19 nt, Artificial Sequence
  Description of Artificial Sequence: Synthetic oligonucleotide
gcuucuccggaggcaccca

SEQ ID NO: 81462 - RNA, 19 nt, Artificial Sequence
  Description of Artificial Sequence: Synthetic oligonucleotide
acugccaccgcgaagaguu

SEQ ID NO: 81463 - RNA, 19 nt, Artificial Sequence
  Description of Artificial Sequence: Synthetic oligonucleotide
ugggcucugucagccgcgg

SEQ ID NO: 81464 - RNA, 19 nt, Artificial Sequence
  Description of Artificial Sequence: Synthetic oligonucleotide
ggucucucgggggcgaggg

SEQ ID NO: 81465 - RNA, 19 nt, Artificial Sequence
  Description of Artificial Sequence: Synthetic oligonucleotide
gcgagguucaggccuuuca

SEQ ID NO: 81466 - RNA, 19 nt, Artificial Sequence
  Description of Artificial Sequence: Synthetic oligonucleotide
aggccgcaggaagaggaac

SEQ ID NO: 81467 - RNA, 19 nt, Artificial Sequence
  Description of Artificial Sequence: Synthetic oligonucleotide
cggagcgaguccccgcgcg

SEQ ID NO: 81468 - RNA, 19 nt, Artificial Sequence
  Description of Artificial Sequence: Synthetic oligonucleotide
gcggcgcgauucccugagc

SEQ ID NO: 81469 - RNA, 19 nt, Artificial Sequence
  Description of Artificial Sequence: Synthetic oligonucleotide
cugugggacgugcacccag

SEQ ID NO: 81470 - RNA, 19 nt, Artificial Sequence
  Description of Artificial Sequence: Synthetic oligonucleotide
ggacucggcucacacaugc

SEQ ID NO: 81471 - RNA, 25 nt, Artificial Sequence
  Description of Artificial Sequence: Synthetic oligonucleotide
ggguugcggagggugggccugggag

SEQ ID NO: 81472 - RNA, 25 nt, Artificial Sequence
  Description of Artificial Sequence: Synthetic oligonucleotide
ggggugguggccauuuuuugucuaa

SEQ ID NO: 81473 - RNA, 25 nt, Artificial Sequence
  Description of Artificial Sequence: Synthetic oligonucleotide
acccuaacugagaagggcguaggcg

SEQ ID NO: 81474 - RNA, 25 nt, Artificial Sequence
  Description of Artificial Sequence: Synthetic oligonucleotide
gccgugcuuuugcuccccgcgcgcu

SEQ ID NO: 81475 - RNA, 25 nt, Artificial Sequence
  Description of Artificial Sequence: Synthetic oligonucleotide
uguuuuucucgcugacuuucagcgg

SEQ ID NO: 81476 - RNA, 25 nt, Artificial Sequence
  Description of Artificial Sequence: Synthetic oligonucleotide
ggcggaaaagccucggccugccgcc

SEQ ID NO: 81477 - RNA, 25 nt, Artificial Sequence
  Description of Artificial Sequence: Synthetic oligonucleotide
cuuccaccguucauucuagagcaaa

SEQ ID NO: 81478 - RNA, 25 nt, Artificial Sequence
  Description of Artificial Sequence: Synthetic oligonucleotide
acaaaaaaugucagcugcuggcccg

SEQ ID NO: 81479 - RNA, 25 nt, Artificial Sequence
  Description of Artificial Sequence: Synthetic oligonucleotide
guucgccccucccggggaccugcgg

SEQ ID NO: 81480 - RNA, 25 nt, Artificial Sequence
  Description of Artificial Sequence: Synthetic oligonucleotide
gcgggucgccugcccagcccccgaa

SEQ ID NO: 81481 - RNA, 25 nt, Artificial Sequence
  Description of Artificial Sequence: Synthetic oligonucleotide
accccgccuggaggccgcggucggc

SEQ ID NO: 81482 - RNA, 25 nt, Artificial Sequence
  Description of Artificial Sequence: Synthetic oligonucleotide
cccggggcuucuccggaggcaccca

SEQ ID NO: 81483 - RNA, 25 nt, Artificial Sequence
  Description of Artificial Sequence: Synthetic oligonucleotide
acugccaccgcgaagaguugggcuc

SEQ ID NO: 81484 - RNA, 25 nt, Artificial Sequence
  Description of Artificial Sequence: Synthetic oligonucleotide
cugucagccgcgggucucucggggg

SEQ ID NO: 81485 - RNA, 25 nt, Artificial Sequence
  Description of Artificial Sequence: Synthetic oligonucleotide
gcgagggcgagguucaggccuuuca

SEQ ID NO: 81486 - RNA, 25 nt, Artificial Sequence
  Description of Artificial Sequence: Synthetic oligonucleotide
aggccgcaggaagaggaacggagcg

SEQ ID NO: 81487 - RNA, 25 nt, Artificial Sequence
  Description of Artificial Sequence: Synthetic oligonucleotide
gaguccccgcgcgcggcgcgauucc

SEQ ID NO: 81488 - RNA, 25 nt, Artificial Sequence
  Description of Artificial Sequence: Synthetic oligonucleotide
ccugagcugugggacgugcacccag

SEQ ID NO: 81489 - RNA, 25 nt, Artificial Sequence
  Description of Artificial Sequence: Synthetic oligonucleotide
cacccaggacucggcucacacaugc

SEQ ID NO: 81490 - RNA, 4017 nt, Homo sapiens
caggcagcgcgcguccugcugcgcacgugggaagcccuggccccggccacccccgcgaugccgcgcgcuccccgcugccgagccgugcgcucccugcugcgcagccacuaccgcgaggugcugccgcuggccacguucgugcggcgccuggggccccagggcuggcggcuggugcagcgcggggacccggcggcuuuccgcgcgcugguggcccagugccuggugugcgugcccugggacgcacggccgccccccgccgcccccuccuuccgccagguguccugccugaaggagcugguggcccgagugcugcagaggcugugcgagcgcggcgcgaagaacgugcuggccuucggcuucgcgcugcuggacggggcccgcgggggcccccccgaggccuucaccaccagcgugcgcagcuaccugcccaacacggugaccgacgcacugcgggggagcggggcgugggggcugcugcugcgccgcgugggcgacgacgugcugguucaccugcuggcacgcugcgcgcucuuugugcugguggcucccagcugcgccuaccaggugugcgggccgccgcuguaccagcucggcgcugccacucaggcccggcccccgccacacgcuaguggaccccgaaggcgucugggaugcgaacgggccuggaaccauagcgucagggaggccggggucccccugggccugccagccccgggugcgaggaggcgcgggggcagugccagccgaagucugccguugcccaagaggcccaggcguggcgcugccccugagccggagcggacgcccguugggcagggguccugggcccacccgggcaggacgcguggaccgagugaccgugguuucuguguggugucaccugccagacccgccgaagaagccaccucuuuggagggugcgcucucuggcacgcgccacucccacccauccgugggccgccagcaccacgcgggccccccauccacaucgcggccaccacgucccugggacacgccuugucccccgguguacgccgagaccaagcacuuccucuacuccucaggcgacaaggagcagcugcggcccuccuuccuacucagcucucugaggcccagccugacuggcgcucggaggcucguggagaccaucuuucuggguuccaggcccuggaugccagggacuccccgcagguugccccgccugccccagcgcuacuggcaaaugcggccccuguuucuggagcugcuugggaaccacgcgcagugccccuacggggugcuccucaagacgcacugcccgcugcgagcugcggucaccccagcagccggugucugugcccgggagaagccccagggcucuguggcggcccccgaggaggaggacacagacccccgucgccuggugcagcugcuccgccagcacagcagccccuggcagguguacggcuucgugcgggccugccugcgccggcuggugcccccaggccucuggggcuccaggcacaacgaacgccgcuuccucaggaacaccaagaaguucaucucccuggggaagcaugccaagcucucgcugcaggagcugacguggaagaugagcgugcgggacugcgcuuggcugcgcaggagcccagggguuggcuguguuccggccgcagagcaccgucugcgugaggagauccuggccaaguuccugcacuggcugaugaguguguacgucgucgagcugcucaggucuuucuuuuaugucacggagaccacguuucaaaagaacaggcucuuuuucuaccggaagagugucuggagcaaguugcaaagcauuggaaucagacagcacuugaagagggugcagcugcgggagcugucggaagcagaggucaggcagcaucgggaagccaggcccgcccugcugacguccagacuccgcuucauccccaagccugacgggcugcggccgauugugaacauggacuacgucgugggagccagaacguuccgcagagaaaagagggccgagcgucucaccucgagggugaaggcacuguucagcgugcucaacuacgagcgggcgcggcgccccggccuccugggcgccucugugcugggccuggacgauauccacagggccuggcgcaccuucgugcugcgugugcgggcccaggacccgccgccugagcuguacuuugucaagguggaugugacgggcgcguacgacaccaucccccaggacaggcucacggaggucaucgccagcaucaucaaaccccagaacacguacugcgugcgucgguaugccgugguccagaaggccgcccaugggcacguccgcaaggccuucaagagccacgucucuaccuugacagaccuccagccguacaugcgacaguucguggcucaccugcaggagaccagcccgcugagggaugccgucgucaucgagcagagcuccucccugaaugaggccagcaguggccucuucgacgucuuccuacgcuucaugugccaccacgccgugcgcaucaggggcaaguccuacguccagugccaggggaucccgcagggcuccauccucuccacgcugcucugcagccugugcuacggcgacauggagaacaagcuguuugcggggauucggcgggacgggcugcuccugcguuugguggaugauuucuuguuggugacaccucaccucacccacgcgaaaaccuuccucaggacccugguccgaggugucccugaguauggcugcguggugaacuugcggaagacaguggugaacuucccuguagaagacgaggcccuggguggcacggcuuuuguucagaugccggcccacggccuauuccccuggugcggccugcugcuggauacccggacccuggaggugcagagcgacuacuccagcuaugcccggaccuccaucagagccagucucaccuucaaccgcggcuucaaggcugggaggaacaugcgucgcaaacucuuuggggucuugcggcugaagugucacagccuguuucuggauuugcaggugaacagccuccagacggugugcaccaacaucuacaagauccuccugcugcaggcguacagguuucacgcaugugugcugcagcucccauuucaucagcaaguuuggaagaaccccacauuuuuccugcgcgucaucucugacacggccucccucugcuacuccauccugaaagccaagaacgcagggaugucgcugggggccaagggcgccgccggcccucugcccuccgaggccgugcaguggcugugccaccaagcauuccugcucaagcugacucgacaccgugucaccuacgugccacuccuggggucacucaggacagcccagacgcagcugagucggaagcucccggggacgacgcugacugcccuggaggccgcagccaacccggcacugcccucagacuucaagaccauccuggacugauggccacccgcccacagccaggccgagagcagacaccagcagcccugucacgccgggcucuacgucccagggagggaggggcggcccacacccaggcccgcaccgcugggagucugaggccugagugaguguuuggccgaggccugcauguccggcugaaggcugaguguccggcugaggccugagcgaguguccagccaagggcugaguguccagcacaccugccgucuucacuuccccacaggcuggcgcucggcuccaccccagggccagcuuuuccucaccaggagcccggcuuccacuccccacauaggaauaguccauccccagauucgccauuguucaccccucgcccugcccuccuuugccuuccacccccaccauccagguggagacccugagaaggacccugggagcucugggaauuuggagugaccaaaggugugcccuguacacaggcgaggacccugcaccuggaugggggucccugugggucaaauuggggggaggugcugugggaguaaaauacugaauauaugaguuuuucaguuuugaaaaaaa

SEQ ID NO: 81491 - RNA, 3982 nt, Homo sapiens
caggcagcgcugcguccugcugcgcacgugggaagcccuggccccggccacccccgcgaugccgcgcgcuccccgcugccgagccgugcgcucccugcugcgcagccacuaccgcgaggugcugccgcuggccacguucgugcggcgccuggggccccagggcuggcggcuggugcagcgcggggacccggcggcuuuccgcgcgcugguggcccagugccuggugugcgugcccugggacgcacggccgccccccgccgcccccuccuuccgccagguguccugccugaaggagcugguggcccgagugcugcagaggcugugcgagcgcggcgcgaagaacgugcuggccuucggcuucgcgcugcuggacggggcccgcgggggcccccccgaggccuucaccaccagcgugcgcagcuaccugcccaacacggugaccgacgcacugcgggggagcggggcgugggggcugcugcugcgccgcgugggcgacgacgugcugguucaccugcuggcacgcugcgcgcucuuugugcugguggcucccagcugcgccuaccaggugugcgggccgccgcuguaccagcucggcgcugccacucaggcccggcccccgccacacgcuaguggaccccgaaggcgucugggaugcgaacgggccuggaaccauagcgucagggaggccggggucccccugggccugccagccccgggugcgaggaggcgcgggggcagugccagccgaagucugccguugcccaagaggcccaggcguggcgcugccccugagccggagcggacgcccguugggcagggguccugggcccacccgggcaggacgcguggaccgagugaccgugguuucuguguggugucaccugccagacccgccgaagaagccaccucuuuggagggugcgcucucuggcacgcgccacucccacccauccgugggccgccagcaccacgcgggccccccauccacaucgcggccaccacgucccugggacacgccuugucccccgguguacgccgagaccaagcacuuccucuacuccucaggcgacaaggagcagcugcggcccuccuuccuacucagcucucugaggcccagccugacuggcgcucggaggcucguggagaccaucuuucuggguuccaggcccuggaugccagggacuccccgcagguugccccgccugccccagcgcuacuggcaaaugcggccccuguuucuggagcugcuugggaaccacgcgcagugccccuacggggugcuccucaagacgcacugcccgcugcgagcugcggucaccccagcagccggugucugugcccgggagaagccccagggcucuguggcggcccccgaggaggaggacacagacccccgucgccuggugcagcugcuccgccagcacagcagccccuggcagguguacggcuucgugcgggccugccugcgccggcuggugcccccaggccucuggggcuccaggcacaacgaacgccgcuuccucaggaacaccaagaaguucaucucccuggggaagcaugccaagcucucgcugcaggagcugacguggaagaugagcgugcgggacugcgcuuggcugcgcaggagcccagggguuggcuguguuccggccgcagagcaccgucugcgugaggagauccuggccaaguuccugcacuggcugaugaguguguacgucgucgagcugcucaggucuuucuuuuaugucacggagaccacguuucaaaagaacaggcucuuuuucuaccggaagagugucuggagcaaguugcaaagcauuggaaucagacagcacuugaagagggugcagcugcgggagcugucggaagcagaggucaggcagcaucgggaagccaggcccgcccugcugacguccagacuccgcuucauccccaagccugacgggcugcggccgauugugaacauggacuacgucgugggagccagaacguuccgcagagaaaagagggccgagcgucucaccucgagggugaaggcacuguucagcgugcucaacuacgagcgggcgcggcgccccggccuccugggcgccucugugcugggccuggacgauauccacagggccuggcgcaccuucgugcugcgugugcgggcccaggacccgccgccugagcuguacuuugucaaggacaggcucacggaggucaucgccagcaucaucaaaccccagaacacguacugcgugcgucgguaugccgugguccagaaggccgcccaugggcacguccgcaaggccuucaagagccacgucucuaccuugacagaccuccagccguacaugcgacaguucguggcucaccugcaggagaccagcccgcugagggaugccgucgucaucgagcagagcuccucccugaaugaggccagcaguggccucuucgacgucuuccuacgcuucaugugccaccacgccgugcgcaucaggggcaaguccuacguccagugccaggggaucccgcagggcuccauccucuccacgcugcucugcagccugugcuacggcgacauggagaacaagcuguuugcggggauucggcgggacgggcugcuccugcguuugguggaugauuucuuguuggugacaccucaccucacccacgcgaaaaccuuccucaggacccugguccgaggugucccugaguauggcugcguggugaacuugcggaagacaguggugaacuucccuguagaagacgaggcccuggguggcacggcuuuuguucagaugccggcccacggccuauuccccuggugcggccugcugcuggauacccggacccuggaggugcagagcgacuacuccagcuaugcccggaccuccaucagagccagucucaccuucaaccgcggcuucaaggcugggaggaacaugcgucgcaaacucuuuggggucuugcggcugaagugucacagccuguuucuggauuugcaggugaacagccuccagacggugugcaccaacaucuacaagauccuccugcugcaggcguacagguuucacgcaugugugcugcagcucccauuucaucagcaaguuuggaagaaccccacauuuuuccugcgcgucaucucugacacggccucccucugcuacuccauccugaaagccaagaacgcagggaugucgcugggggccaagggcgccgccggcccucugcccuccgaggccgugcaguggcugugccaccaagcauuccugcucaagcugacucgacaccgugucaccuacgugccacuccuggggucacucaggacagcccagacgcagcugagucggaagcucccggggacgacgcugacugcccuggaggccgcagccaacccggcacugcccucagacuucaagaccauccuggacugauggccacccgcccacagccaggccgagagcagacaccagcagcccugucacgccgggcucuacgucccagggagggaggggcggcccacacccaggcccgcaccgcugggagucugaggccugagugaguguuuggccgaggccugcauguccggcugaaggcugaguguccggcugaggccugagcgaguguccagccaagggcugaguguccagcacaccugccgucuucacuuccccacaggcuggcgcucggcuccaccccagggccagcuuuuccucaccaggagcccggcuuccacuccccacauaggaauaguccauccccagauucgccauuguucaccccucgcccugcccuccuuugccuuccacccccaccauccagguggagacccugagaaggacccugggagcucugggaauuuggagugaccaaaggugugcccuguacacaggcgaggacccugcaccuggaugggggucccugugggucaaauuggggggaggugcugugggaguaaaauacugaauauaugaguuuuucaguuuugaaaaaaa

SEQ ID NO: 81492 - RNA, 19 nt, Artificial Sequence
  Description of Artificial Sequence: Synthetic oligonucleotide
caggcagcgcugcguccug

SEQ ID NO: 81493 - RNA, 19 nt, Artificial Sequence
  Description of Artificial Sequence: Synthetic oligonucleotide
gcugcgcacgugggaagcc

SEQ ID NO: 81494 - RNA, 19 nt, Artificial Sequence
  Description of Artificial Sequence: Synthetic oligonucleotide
ccuggccccggccaccccc

SEQ ID NO: 81495 - RNA, 19 nt, Artificial Sequence
  Description of Artificial Sequence: Synthetic oligonucleotide
cgcgaugccgcgcgcuccc

SEQ ID NO: 81496 - RNA, 19 nt, Artificial Sequence
  Description of Artificial Sequence: Synthetic oligonucleotide
ccgcugccgagccgugcgc

SEQ ID NO: 81497 - RNA, 19 nt, Artificial Sequence
  Description of Artificial Sequence: Synthetic oligonucleotide
cucccugcugcgcagccac

SEQ ID NO: 81498 - RNA, 19 nt, Artificial Sequence
  Description of Artificial Sequence: Synthetic oligonucleotide
cuaccgcgaggugcugccg

SEQ ID NO: 81499 - RNA, 19 nt, Artificial Sequence
  Description of Artificial Sequence: Synthetic oligonucleotide
gcuggccacguucgugcgg

SEQ ID NO: 81500 - RNA, 19 nt, Artificial Sequence
  Description of Artificial Sequence: Synthetic oligonucleotide
gcgccuggggccccagggc

SEQ ID NO: 81501 - RNA, 19 nt, Artificial Sequence
  Description of Artificial Sequence: Synthetic oligonucleotide
cuggcggcuggugcagcgc

SEQ ID NO: 81502 - RNA, 19 nt, Artificial Sequence
  Description of Artificial Sequence: Synthetic oligonucleotide
cggggacccggcggcuuuc

SEQ ID NO: 81503 - RNA, 19 nt, Artificial Sequence
  Description of Artificial Sequence: Synthetic oligonucleotide
ccgcgcgcugguggcccag

SEQ ID NO: 81504 - RNA, 19 nt, Artificial Sequence
  Description of Artificial Sequence: Synthetic oligonucleotide
gugccuggugugcgugccc

SEQ ID NO: 81505 - RNA, 19 nt, Artificial Sequence
  Description of Artificial Sequence: Synthetic oligonucleotide
cugggacgcacggccgccc

SEQ ID NO: 81506 - RNA, 19 nt, Artificial Sequence
  Description of Artificial Sequence: Synthetic oligonucleotide
ccccgccgcccccuccuuc

SEQ ID NO: 81507 - RNA, 19 nt, Artificial Sequence
  Description of Artificial Sequence: Synthetic oligonucleotide
ccgccagguguccugccug

SEQ ID NO: 81508 - RNA, 19 nt, Artificial Sequence
  Description of Artificial Sequence: Synthetic oligonucleotide
gaaggagcugguggcccga

SEQ ID NO: 81509 - RNA, 19 nt, Artificial Sequence
  Description of Artificial Sequence: Synthetic oligonucleotide
agugcugcagaggcugugc

SEQ ID NO: 81510 - RNA, 19 nt, Artificial Sequence
  Description of Artificial Sequence: Synthetic oligonucleotide
cgagcgcggcgcgaagaac

SEQ ID NO: 81511 - RNA, 19 nt, Artificial Sequence
  Description of Artificial Sequence: Synthetic oligonucleotide
cgugcuggccuucggcuuc

SEQ ID NO: 81512 - RNA, 19 nt, Artificial Sequence
  Description of Artificial Sequence: Synthetic oligonucleotide
cgcgcugcuggacggggcc

SEQ ID NO: 81513 - RNA, 19 nt, Artificial Sequence
  Description of Artificial Sequence: Synthetic oligonucleotide
ccgcgggggcccccccgag

SEQ ID NO: 81514 - RNA, 19 nt, Artificial Sequence
  Description of Artificial Sequence: Synthetic oligonucleotide
ggccuucaccaccagcgug

SEQ ID NO: 81515 - RNA, 19 nt, Artificial Sequence
  Description of Artificial Sequence: Synthetic oligonucleotide
gcgcagcuaccugcccaac

SEQ ID NO: 81516 - RNA, 19 nt, Artificial Sequence
  Description of Artificial Sequence: Synthetic oligonucleotide
cacggugaccgacgcacug

SEQ ID NO: 81517 - RNA, 19 nt, Artificial Sequence
  Description of Artificial Sequence: Synthetic oligonucleotide
gcgggggagcggggcgugg

SEQ ID NO: 81518 - RNA, 19 nt, Artificial Sequence
  Description of Artificial Sequence: Synthetic oligonucleotide
ggggcugcugcugcgccgc

SEQ ID NO: 81519 - RNA, 19 nt, Artificial Sequence
  Description of Artificial Sequence: Synthetic oligonucleotide
cgugggcgacgacgugcug

SEQ ID NO: 81520 - RNA, 19 nt, Artificial Sequence
  Description of Artificial Sequence: Synthetic oligonucleotide
gguucaccugcuggcacgc

SEQ ID NO: 81521 - RNA, 19 nt, Artificial Sequence
  Description of Artificial Sequence: Synthetic oligonucleotide
cugcgcgcucuuugugcug

SEQ ID NO: 81522 - RNA, 19 nt, Artificial Sequence
  Description of Artificial Sequence: Synthetic oligonucleotide
gguggcucccagcugcgcc

SEQ ID NO: 81523 - RNA, 19 nt, Artificial Sequence
  Description of Artificial Sequence: Synthetic oligonucleotide
cuaccaggugugcgggccg

SEQ ID NO: 81524 - RNA, 19 nt, Artificial Sequence
  Description of Artificial Sequence: Synthetic oligonucleotide
gccgcuguaccagcucggc

SEQ ID NO: 81525 - RNA, 19 nt, Artificial Sequence
  Description of Artificial Sequence: Synthetic oligonucleotide
cgcugccacucaggcccgg

SEQ ID NO: 81526 - RNA, 19 nt, Artificial Sequence
  Description of Artificial Sequence: Synthetic oligonucleotide
gcccccgccacacgcuagu

SEQ ID NO: 81527 - RNA, 19 nt, Artificial Sequence
  Description of Artificial Sequence: Synthetic oligonucleotide
uggaccccgaaggcgucug

SEQ ID NO: 81528 - RNA, 19 nt, Artificial Sequence
  Description of Artificial Sequence: Synthetic oligonucleotide
gggaugcgaacgggccugg

SEQ ID NO: 81529 - RNA, 19 nt, Artificial Sequence
  Description of Artificial Sequence: Synthetic oligonucleotide
gaaccauagcgucagggag

SEQ ID NO: 81530 - RNA, 19 nt, Artificial Sequence
  Description of Artificial Sequence: Synthetic oligonucleotide
ggccggggucccccugggc

SEQ ID NO: 81531 - RNA, 19 nt, Artificial Sequence
  Description of Artificial Sequence: Synthetic oligonucleotide
ccugccagccccgggugcg

SEQ ID NO: 81532 - RNA, 19 nt, Artificial Sequence
  Description of Artificial Sequence: Synthetic oligonucleotide
gaggaggcgcgggggcagu

SEQ ID NO: 81533 - RNA, 19 nt, Artificial Sequence
  Description of Artificial Sequence: Synthetic oligonucleotide
ugccagccgaagucugccg

SEQ ID NO: 81534 - RNA, 19 nt, Artificial Sequence
  Description of Artificial Sequence: Synthetic oligonucleotide
guugcccaagaggcccagg

SEQ ID NO: 81535 - RNA, 19 nt, Artificial Sequence
  Description of Artificial Sequence: Synthetic oligonucleotide
gcguggcgcugccccugag

SEQ ID NO: 81536 - RNA, 19 nt, Artificial Sequence
  Description of Artificial Sequence: Synthetic oligonucleotide
gccggagcggacgcccguu

SEQ ID NO: 81537 - RNA, 19 nt, Artificial Sequence
  Description of Artificial Sequence: Synthetic oligonucleotide
ugggcagggguccugggcc

SEQ ID NO: 81538 - RNA, 19 nt, Artificial Sequence
  Description of Artificial Sequence: Synthetic oligonucleotide
ccacccgggcaggacgcgu

SEQ ID NO: 81539 - RNA, 19 nt, Artificial Sequence
  Description of Artificial Sequence: Synthetic oligonucleotide
uggaccgagugaccguggu

SEQ ID NO: 81540 - RNA, 19 nt, Artificial Sequence
  Description of Artificial Sequence: Synthetic oligonucleotide
uuucuguguggugucaccu

SEQ ID NO: 81541 - RNA, 19 nt, Artificial Sequence
  Description of Artificial Sequence: Synthetic oligonucleotide
ugccagacccgccgaagaa

SEQ ID NO: 81542 - RNA, 19 nt, Artificial Sequence
  Description of Artificial Sequence: Synthetic oligonucleotide
agccaccucuuuggagggu

SEQ ID NO: 81543 - RNA, 19 nt, Artificial Sequence
  Description of Artificial Sequence: Synthetic oligonucleotide
ugcgcucucuggcacgcgc

SEQ ID NO: 81544 - RNA, 19 nt, Artificial Sequence
  Description of Artificial Sequence: Synthetic oligonucleotide
ccacucccacccauccgug

SEQ ID NO: 81545 - RNA, 19 nt, Artificial Sequence
  Description of Artificial Sequence: Synthetic oligonucleotide
gggccgccagcaccacgcg

SEQ ID NO: 81546 - RNA, 19 nt, Artificial Sequence
  Description of Artificial Sequence: Synthetic oligonucleotide
gggccccccauccacaucg

SEQ ID NO: 81547 - RNA, 19 nt, Artificial Sequence
  Description of Artificial Sequence: Synthetic oligonucleotide
gcggccaccacgucccugg

SEQ ID NO: 81548 - RNA, 19 nt, Artificial Sequence
  Description of Artificial Sequence: Synthetic oligonucleotide
ggacacgccuugucccccg

SEQ ID NO: 81549 - RNA, 19 nt, Artificial Sequence
  Description of Artificial Sequence: Synthetic oligonucleotide
gguguacgccgagaccaag

SEQ ID NO: 81550 - RNA, 19 nt, Artificial Sequence
  Description of Artificial Sequence: Synthetic oligonucleotide
gcacuuccucuacuccuca

SEQ ID NO: 81551 - RNA, 19 nt, Artificial Sequence
  Description of Artificial Sequence: Synthetic oligonucleotide
aggcgacaaggagcagcug

SEQ ID NO: 81552 - RNA, 19 nt, Artificial Sequence
  Description of Artificial Sequence: Synthetic oligonucleotide
gcggcccuccuuccuacuc

SEQ ID NO: 81553 - RNA, 19 nt, Artificial Sequence
  Description of Artificial Sequence: Synthetic oligonucleotide
cagcucucugaggcccagc

SEQ ID NO: 81554 - RNA, 19 nt, Artificial Sequence
  Description of Artificial Sequence: Synthetic oligonucleotide
ccugacuggcgcucggagg

SEQ ID NO: 81555 - RNA, 19 nt, Artificial Sequence
  Description of Artificial Sequence: Synthetic oligonucleotide
gcucguggagaccaucuuu

SEQ ID NO: 81556 - RNA, 19 nt, Artificial Sequence
  Description of Artificial Sequence: Synthetic oligonucleotide
ucuggguuccaggcccugg

SEQ ID NO: 81557 - RNA, 19 nt, Artificial Sequence
  Description of Artificial Sequence: Synthetic oligonucleotide
gaugccagggacuccccgc

SEQ ID NO: 81558 - RNA, 19 nt, Artificial Sequence
  Description of Artificial Sequence: Synthetic oligonucleotide
cagguugccccgccugccc

SEQ ID NO: 81559 - RNA, 19 nt, Artificial Sequence
  Description of Artificial Sequence: Synthetic oligonucleotide
ccagcgcuacuggcaaaug

SEQ ID NO: 81560 - RNA, 19 nt, Artificial Sequence
  Description of Artificial Sequence: Synthetic oligonucleotide
gcggccccuguuucuggag

SEQ ID NO: 81561 - RNA, 19 nt, Artificial Sequence
  Description of Artificial Sequence: Synthetic oligonucleotide
gcugcuugggaaccacgcg

SEQ ID NO: 81562 - RNA, 19 nt, Artificial Sequence
  Description of Artificial Sequence: Synthetic oligonucleotide
gcagugccccuacggggug

SEQ ID NO: 81563 - RNA, 19 nt, Artificial Sequence
  Description of Artificial Sequence: Synthetic oligonucleotide
gcuccucaagacgcacugc

SEQ ID NO: 81564 - RNA, 19 nt, Artificial Sequence
  Description of Artificial Sequence: Synthetic oligonucleotide
cccgcugcgagcugcgguc

SEQ ID NO: 81565 - RNA, 19 nt, Artificial Sequence
  Description of Artificial Sequence: Synthetic oligonucleotide
caccccagcagccgguguc

SEQ ID NO: 81566 - RNA, 19 nt, Artificial Sequence
  Description of Artificial Sequence: Synthetic oligonucleotide
cugugcccgggagaagccc

SEQ ID NO: 81567 - RNA, 19 nt, Artificial Sequence
  Description of Artificial Sequence: Synthetic oligonucleotide
ccagggcucuguggcggcc

SEQ ID NO: 81568 - RNA, 19 nt, Artificial Sequence
  Description of Artificial Sequence: Synthetic oligonucleotide
ccccgaggaggaggacaca

SEQ ID NO: 81569 - RNA, 19 nt, Artificial Sequence
  Description of Artificial Sequence: Synthetic oligonucleotide
agacccccgucgccuggug

SEQ ID NO: 81570 - RNA, 19 nt, Artificial Sequence
  Description of Artificial Sequence: Synthetic oligonucleotide
gcagcugcuccgccagcac

SEQ ID NO: 81571 - RNA, 19 nt, Artificial Sequence
  Description of Artificial Sequence: Synthetic oligonucleotide
cagcagccccuggcaggug

SEQ ID NO: 81572 - RNA, 19 nt, Artificial Sequence
  Description of Artificial Sequence: Synthetic oligonucleotide
guacggcuucgugcgggcc

SEQ ID NO: 81573 - RNA, 19 nt, Artificial Sequence
  Description of Artificial Sequence: Synthetic oligonucleotide
cugccugcgccggcuggug

SEQ ID NO: 81574 - RNA, 19 nt, Artificial Sequence
  Description of Artificial Sequence: Synthetic oligonucleotide
gcccccaggccucuggggc

SEQ ID NO: 81575 - RNA, 19 nt, Artificial Sequence
  Description of Artificial Sequence: Synthetic oligonucleotide
cuccaggcacaacgaacgc

SEQ ID NO: 81576 - RNA, 19 nt, Artificial Sequence
  Description of Artificial Sequence: Synthetic oligonucleotide
ccgcuuccucaggaacacc

SEQ ID NO: 81577 - RNA, 19 nt, Artificial Sequence
  Description of Artificial Sequence: Synthetic oligonucleotide
caagaaguucaucucccug

SEQ ID NO: 81578 - RNA, 19 nt, Artificial Sequence
  Description of Artificial Sequence: Synthetic oligonucleotide
ggggaagcaugccaagcuc

SEQ ID NO: 81579 - RNA, 19 nt, Artificial Sequence
  Description of Artificial Sequence: Synthetic oligonucleotide
cucgcugcaggagcugacg

SEQ ID NO: 81580 - RNA, 19 nt, Artificial Sequence
  Description of Artificial Sequence: Synthetic oligonucleotide
guggaagaugagcgugcgg

SEQ ID NO: 81581 - RNA, 19 nt, Artificial Sequence
  Description of Artificial Sequence: Synthetic oligonucleotide
ggacugcgcuuggcugcgc

SEQ ID NO: 81582 - RNA, 19 nt, Artificial Sequence
  Description of Artificial Sequence: Synthetic oligonucleotide
caggagcccagggguuggc

SEQ ID NO: 81583 - RNA, 19 nt, Artificial Sequence
  Description of Artificial Sequence: Synthetic oligonucleotide
cuguguuccggccgcagag

SEQ ID NO: 81584 - RNA, 19 nt, Artificial Sequence
  Description of Artificial Sequence: Synthetic oligonucleotide
gcaccgucugcgugaggag

SEQ ID NO: 81585 - RNA, 19 nt, Artificial Sequence
  Description of Artificial Sequence: Synthetic oligonucleotide
gauccuggccaaguuccug

SEQ ID NO: 81586 - RNA, 19 nt, Artificial Sequence
  Description of Artificial Sequence: Synthetic oligonucleotide
gcacuggcugaugagugug

SEQ ID NO: 81587 - RNA, 19 nt, Artificial Sequence
  Description of Artificial Sequence: Synthetic oligonucleotide
guacgucgucgagcugcuc

SEQ ID NO: 81588 - RNA, 19 nt, Artificial Sequence
  Description of Artificial Sequence: Synthetic oligonucleotide
caggucuuucuuuuauguc

SEQ ID NO: 81589 - RNA, 19 nt, Artificial Sequence
  Description of Artificial Sequence: Synthetic oligonucleotide
cacggagaccacguuucaa

SEQ ID NO: 81590 - RNA, 19 nt, Artificial Sequence
  Description of Artificial Sequence: Synthetic oligonucleotide
aaagaacaggcucuuuuuc

SEQ ID NO: 81591 - RNA, 19 nt, Artificial Sequence
  Description of Artificial Sequence: Synthetic oligonucleotide
cuaccggaagagugucugg

SEQ ID NO: 81592 - RNA, 19 nt, Artificial Sequence
  Description of Artificial Sequence: Synthetic oligonucleotide
gagcaaguugcaaagcauu

SEQ ID NO: 81593 - RNA, 19 nt, Artificial Sequence
  Description of Artificial Sequence: Synthetic oligonucleotide
uggaaucagacagcacuug

SEQ ID NO: 81594 - RNA, 19 nt, Artificial Sequence
  Description of Artificial Sequence: Synthetic oligonucleotide
gaagagggugcagcugcgg

SEQ ID NO: 81595 - RNA, 19 nt, Artificial Sequence
  Description of Artificial Sequence: Synthetic oligonucleotide
ggagcugucggaagcagag

SEQ ID NO: 81596 - RNA, 19 nt, Artificial Sequence
  Description of Artificial Sequence: Synthetic oligonucleotide
ggucaggcagcaucgggaa

SEQ ID NO: 81597 - RNA, 19 nt, Artificial Sequence
  Description of Artificial Sequence: Synthetic oligonucleotide
agccaggcccgcccugcug

SEQ ID NO: 81598 - RNA, 19 nt, Artificial Sequence
  Description of Artificial Sequence: Synthetic oligonucleotide
gacguccagacuccgcuuc

SEQ ID NO: 81599 - RNA, 19 nt, Artificial Sequence
  Description of Artificial Sequence: Synthetic oligonucleotide
cauccccaagccugacggg

SEQ ID NO: 81600 - RNA, 19 nt, Artificial Sequence
  Description of Artificial Sequence: Synthetic oligonucleotide
gcugcggccgauugugaac

SEQ ID NO: 81601 - RNA, 19 nt, Artificial Sequence
  Description of Artificial Sequence: Synthetic oligonucleotide
cauggacuacgucguggga

SEQ ID NO: 81602 - RNA, 19 nt, Artificial Sequence
  Description of Artificial Sequence: Synthetic oligonucleotide
agccagaacguuccgcaga

SEQ ID NO: 81603 - RNA, 19 nt, Artificial Sequence
  Description of Artificial Sequence: Synthetic oligonucleotide
agaaaagagggccgagcgu

SEQ ID NO: 81604 - RNA, 19 nt, Artificial Sequence
  Description of Artificial Sequence: Synthetic oligonucleotide
ucucaccucgagggugaag

SEQ ID NO: 81605 - RNA, 19 nt, Artificial Sequence
  Description of Artificial Sequence: Synthetic oligonucleotide
ggcacuguucagcgugcuc

SEQ ID NO: 81606 - RNA, 19 nt, Artificial Sequence
  Description of Artificial Sequence: Synthetic oligonucleotide
caacuacgagcgggcgcgg

SEQ ID NO: 81607 - RNA, 19 nt, Artificial Sequence
  Description of Artificial Sequence: Synthetic oligonucleotide
gcgccccggccuccugggc

SEQ ID NO: 81608 - RNA, 19 nt, Artificial Sequence
  Description of Artificial Sequence: Synthetic oligonucleotide
cgccucugugcugggccug

SEQ ID NO: 81609 - RNA, 19 nt, Artificial Sequence
  Description of Artificial Sequence: Synthetic oligonucleotide
ggacgauauccacagggcc

SEQ ID NO: 81610 - RNA, 19 nt, Artificial Sequence
  Description of Artificial Sequence: Synthetic oligonucleotide
cuggcgcaccuucgugcug

SEQ ID NO: 81611 - RNA, 19 nt, Artificial Sequence
  Description of Artificial Sequence: Synthetic oligonucleotide
gcgugugcgggcccaggac

SEQ ID NO: 81612 - RNA, 19 nt, Artificial Sequence
  Description of Artificial Sequence: Synthetic oligonucleotide
cccgccgccugagcuguac

SEQ ID NO: 81613 - RNA, 19 nt, Artificial Sequence
  Description of Artificial Sequence: Synthetic oligonucleotide
cuuugucaagguggaugug

SEQ ID NO: 81614 - RNA, 19 nt, Artificial Sequence
  Description of Artificial Sequence: Synthetic oligonucleotide
gacgggcgcguacgacacc

SEQ ID NO: 81615 - RNA, 19 nt, Artificial Sequence
  Description of Artificial Sequence: Synthetic oligonucleotide
caucccccaggacaggcuc

SEQ ID NO: 81616 - RNA, 19 nt, Artificial Sequence
  Description of Artificial Sequence: Synthetic oligonucleotide
cacggaggucaucgccagc

SEQ ID NO: 81617 - RNA, 19 nt, Artificial Sequence
  Description of Artificial Sequence: Synthetic oligonucleotide
caucaucaaaccccagaac

SEQ ID NO: 81618 - RNA, 19 nt, Artificial Sequence
  Description of Artificial Sequence: Synthetic oligonucleotide
cacguacugcgugcgucgg

SEQ ID NO: 81619 - RNA, 19 nt, Artificial Sequence
  Description of Artificial Sequence: Synthetic oligonucleotide
guaugccgugguccagaag

SEQ ID NO: 81620 - RNA, 19 nt, Artificial Sequence
  Description of Artificial Sequence: Synthetic oligonucleotide
ggccgcccaugggcacguc

SEQ ID NO: 81621 - RNA, 19 nt, Artificial Sequence
  Description of Artificial Sequence: Synthetic oligonucleotide
ccgcaaggccuucaagagc

SEQ ID NO: 81622 - RNA, 19 nt, Artificial Sequence
  Description of Artificial Sequence: Synthetic oligonucleotide
ccacgucucuaccuugaca

SEQ ID NO: 81623 - RNA, 19 nt, Artificial Sequence
  Description of Artificial Sequence: Synthetic oligonucleotide
agaccuccagccguacaug

SEQ ID NO: 81624 - RNA, 19 nt, Artificial Sequence
  Description of Artificial Sequence: Synthetic oligonucleotide
gcgacaguucguggcucac

SEQ ID NO: 81625 - RNA, 19 nt, Artificial Sequence
  Description of Artificial Sequence: Synthetic oligonucleotide
ccugcaggagaccagcccg

SEQ ID NO: 81626 - RNA, 19 nt, Artificial Sequence
  Description of Artificial Sequence: Synthetic oligonucleotide
gcugagggaugccgucguc

SEQ ID NO: 81627 - RNA, 19 nt, Artificial Sequence
  Description of Artificial Sequence: Synthetic oligonucleotide
caucgagcagagcuccucc

SEQ ID NO: 81628 - RNA, 19 nt, Artificial Sequence
  Description of Artificial Sequence: Synthetic oligonucleotide
ccugaaugaggccagcagu

SEQ ID NO: 81629 - RNA, 19 nt, Artificial Sequence
  Description of Artificial Sequence: Synthetic oligonucleotide
uggccucuucgacgucuuc

SEQ ID NO: 81630 - RNA, 19 nt, Artificial Sequence
  Description of Artificial Sequence: Synthetic oligonucleotide
ccuacgcuucaugugccac

SEQ ID NO: 81631 - RNA, 19 nt, Artificial Sequence
  Description of Artificial Sequence: Synthetic oligonucleotide
ccacgccgugcgcaucagg

SEQ ID NO: 81632 - RNA, 19 nt, Artificial Sequence
  Description of Artificial Sequence: Synthetic oligonucleotide
gggcaaguccuacguccag

SEQ ID NO: 81633 - RNA, 19 nt, Artificial Sequence
  Description of Artificial Sequence: Synthetic oligonucleotide
gugccaggggaucccgcag

SEQ ID NO: 81634 - RNA, 19 nt, Artificial Sequence
  Description of Artificial Sequence: Synthetic oligonucleotide
gggcuccauccucuccacg

SEQ ID NO: 81635 - RNA, 19 nt, Artificial Sequence
  Description of Artificial Sequence: Synthetic oligonucleotide
gcugcucugcagccugugc

SEQ ID NO: 81636 - RNA, 19 nt, Artificial Sequence
  Description of Artificial Sequence: Synthetic oligonucleotide
cuacggcgacauggagaac

SEQ ID NO: 81637 - RNA, 19 nt, Artificial Sequence
  Description of Artificial Sequence: Synthetic oligonucleotide
caagcuguuugcggggauu

SEQ ID NO: 81638 - RNA, 19 nt, Artificial Sequence
  Description of Artificial Sequence: Synthetic oligonucleotide
ucggcgggacgggcugcuc

SEQ ID NO: 81639 - RNA, 19 nt, Artificial Sequence
  Description of Artificial Sequence: Synthetic oligonucleotide
ccugcguuugguggaugau

SEQ ID NO: 81640 - RNA, 19 nt, Artificial Sequence
  Description of Artificial Sequence: Synthetic oligonucleotide
uuucuuguuggugacaccu

SEQ ID NO: 81641 - RNA, 19 nt, Artificial Sequence
  Description of Artificial Sequence: Synthetic oligonucleotide
ucaccucacccacgcgaaa

SEQ ID NO: 81642 - RNA, 19 nt, Artificial Sequence
  Description of Artificial Sequence: Synthetic oligonucleotide
aaccuuccucaggacccug

SEQ ID NO: 81643 - RNA, 19 nt, Artificial Sequence
  Description of Artificial Sequence: Synthetic oligonucleotide
gguccgaggugucccugag

SEQ ID NO: 81644 - RNA, 19 nt, Artificial Sequence
  Description of Artificial Sequence: Synthetic oligonucleotide
guauggcugcguggugaac

SEQ ID NO: 81645 - RNA, 19 nt, Artificial Sequence
  Description of Artificial Sequence: Synthetic oligonucleotide
cuugcggaagacaguggug

SEQ ID NO: 81646 - RNA, 19 nt, Artificial Sequence
  Description of Artificial Sequence: Synthetic oligonucleotide
gaacuucccuguagaagac

SEQ ID NO: 81647 - RNA, 19 nt, Artificial Sequence
  Description of Artificial Sequence: Synthetic oligonucleotide
cgaggcccuggguggcacg

SEQ ID NO: 81648 - RNA, 19 nt, Artificial Sequence
  Description of Artificial Sequence: Synthetic oligonucleotide
ggcuuuuguucagaugccg

SEQ ID NO: 81649 - RNA, 19 nt, Artificial Sequence
  Description of Artificial Sequence: Synthetic oligonucleotide
ggcccacggccuauucccc

SEQ ID NO: 81650 - RNA, 19 nt, Artificial Sequence
  Description of Artificial Sequence: Synthetic oligonucleotide
cuggugcggccugcugcug

SEQ ID NO: 81651 - RNA, 19 nt, Artificial Sequence
  Description of Artificial Sequence: Synthetic oligonucleotide
ggauacccggacccuggag

SEQ ID NO: 81652 - RNA, 19 nt, Artificial Sequence
  Description of Artificial Sequence: Synthetic oligonucleotide
ggugcagagcgacuacucc

SEQ ID NO: 81653 - RNA, 19 nt, Artificial Sequence
  Description of Artificial Sequence: Synthetic oligonucleotide
cagcuaugcccggaccucc

SEQ ID NO: 81654 - RNA, 19 nt, Artificial Sequence
  Description of Artificial Sequence: Synthetic oligonucleotide
caucagagccagucucacc

SEQ ID NO: 81655 - RNA, 19 nt, Artificial Sequence
  Description of Artificial Sequence: Synthetic oligonucleotide
cuucaaccgcggcuucaag

SEQ ID NO: 81656 - RNA, 19 nt, Artificial Sequence
  Description of Artificial Sequence: Synthetic oligonucleotide
ggcugggaggaacaugcgu

SEQ ID NO: 81657 - RNA, 19 nt, Artificial Sequence
  Description of Artificial Sequence: Synthetic oligonucleotide
ucgcaaacucuuugggguc

SEQ ID NO: 81658 - RNA, 19 nt, Artificial Sequence
  Description of Artificial Sequence: Synthetic oligonucleotide
cuugcggcugaagugucac

SEQ ID NO: 81659 - RNA, 19 nt, Artificial Sequence
  Description of Artificial Sequence: Synthetic oligonucleotide
cagccuguuucuggauuug

SEQ ID NO: 81660 - RNA, 19 nt, Artificial Sequence
  Description of Artificial Sequence: Synthetic oligonucleotide
gcaggugaacagccuccag

SEQ ID NO: 81661 - RNA, 19 nt, Artificial Sequence
  Description of Artificial Sequence: Synthetic oligonucleotide
gacggugugcaccaacauc

SEQ ID NO: 81662 - RNA, 19 nt, Artificial Sequence
  Description of Artificial Sequence: Synthetic oligonucleotide
cuacaagauccuccugcug

SEQ ID NO: 81663 - RNA, 19 nt, Artificial Sequence
  Description of Artificial Sequence: Synthetic oligonucleotide
gcaggcguacagguuucac

SEQ ID NO: 81664 - RNA, 19 nt, Artificial Sequence
  Description of Artificial Sequence: Synthetic oligonucleotide
cgcaugugugcugcagcuc

SEQ ID NO: 81665 - RNA, 19 nt, Artificial Sequence
  Description of Artificial Sequence: Synthetic oligonucleotide
cccauuucaucagcaaguu

SEQ ID NO: 81666 - RNA, 19 nt, Artificial Sequence
  Description of Artificial Sequence: Synthetic oligonucleotide
uuggaagaaccccacauuu

SEQ ID NO: 81667 - RNA, 19 nt, Artificial Sequence
  Description of Artificial Sequence: Synthetic oligonucleotide
uuuccugcgcgucaucucu

SEQ ID NO: 81668 - RNA, 19 nt, Artificial Sequence
  Description of Artificial Sequence: Synthetic oligonucleotide
ugacacggccucccucugc

SEQ ID NO: 81669 - RNA, 19 nt, Artificial Sequence
  Description of Artificial Sequence: Synthetic oligonucleotide
cuacuccauccugaaagcc

SEQ ID NO: 81670 - RNA, 19 nt, Artificial Sequence
  Description of Artificial Sequence: Synthetic oligonucleotide
caagaacgcagggaugucg

SEQ ID NO: 81671 - RNA, 19 nt, Artificial Sequence
  Description of Artificial Sequence: Synthetic oligonucleotide
gcugggggccaagggcgcc

SEQ ID NO: 81672 - RNA, 19 nt, Artificial Sequence
  Description of Artificial Sequence: Synthetic oligonucleotide
cgccggcccucugcccucc

SEQ ID NO: 81673 - RNA, 19 nt, Artificial Sequence
  Description of Artificial Sequence: Synthetic oligonucleotide
cgaggccgugcaguggcug

SEQ ID NO: 81674 - RNA, 19 nt, Artificial Sequence
  Description of Artificial Sequence: Synthetic oligonucleotide
gugccaccaagcauuccug

SEQ ID NO: 81675 - RNA, 19 nt, Artificial Sequence
  Description of Artificial Sequence: Synthetic oligonucleotide
gcucaagcugacucgacac

SEQ ID NO: 81676 - RNA, 19 nt, Artificial Sequence
  Description of Artificial Sequence: Synthetic oligonucleotide
ccgugucaccuacgugcca

SEQ ID NO: 81677 - RNA, 19 nt, Artificial Sequence
  Description of Artificial Sequence: Synthetic oligonucleotide
acuccuggggucacucagg

SEQ ID NO: 81678 - RNA, 19 nt, Artificial Sequence
  Description of Artificial Sequence: Synthetic oligonucleotide
gacagcccagacgcagcug

SEQ ID NO: 81679 - RNA, 19 nt, Artificial Sequence
  Description of Artificial Sequence: Synthetic oligonucleotide
gagucggaagcucccgggg

SEQ ID NO: 81680 - RNA, 19 nt, Artificial Sequence
  Description of Artificial Sequence: Synthetic oligonucleotide
gacgacgcugacugcccug

SEQ ID NO: 81681 - RNA, 19 nt, Artificial Sequence
  Description of Artificial Sequence: Synthetic oligonucleotide
ggaggccgcagccaacccg

SEQ ID NO: 81682 - RNA, 19 nt, Artificial Sequence
  Description of Artificial Sequence: Synthetic oligonucleotide
ggcacugcccucagacuuc

SEQ ID NO: 81683 - RNA, 19 nt, Artificial Sequence
  Description of Artificial Sequence: Synthetic oligonucleotide
caagaccauccuggacuga

SEQ ID NO: 81684 - RNA, 19 nt, Artificial Sequence
  Description of Artificial Sequence: Synthetic oligonucleotide
auggccacccgcccacagc

SEQ ID NO: 81685 - RNA, 19 nt, Artificial Sequence
  Description of Artificial Sequence: Synthetic oligonucleotide
ccaggccgagagcagacac

SEQ ID NO: 81686 - RNA, 19 nt, Artificial Sequence
  Description of Artificial Sequence: Synthetic oligonucleotide
ccagcagcccugucacgcc

SEQ ID NO: 81687 - RNA, 19 nt, Artificial Sequence
  Description of Artificial Sequence: Synthetic oligonucleotide
cgggcucuacgucccaggg

SEQ ID NO: 81688 - RNA, 19 nt, Artificial Sequence
  Description of Artificial Sequence: Synthetic oligonucleotide
gagggaggggcggcccaca

SEQ ID NO: 81689 - RNA, 19 nt, Artificial Sequence
  Description of Artificial Sequence: Synthetic oligonucleotide
acccaggcccgcaccgcug

SEQ ID NO: 81690 - RNA, 19 nt, Artificial Sequence
  Description of Artificial Sequence: Synthetic oligonucleotide
gggagucugaggccugagu

SEQ ID NO: 81691 - RNA, 19 nt, Artificial Sequence
  Description of Artificial Sequence: Synthetic oligonucleotide
ugaguguuuggccgaggcc

SEQ ID NO: 81692 - RNA, 19 nt, Artificial Sequence
  Description of Artificial Sequence: Synthetic oligonucleotide
cugcauguccggcugaagg

SEQ ID NO: 81693 - RNA, 19 nt, Artificial Sequence
  Description of Artificial Sequence: Synthetic oligonucleotide
gcugaguguccggcugagg

SEQ ID NO: 81694 - RNA, 19 nt, Artificial Sequence
  Description of Artificial Sequence: Synthetic oligonucleotide
gccugagcgaguguccagc

SEQ ID NO: 81695 - RNA, 19 nt, Artificial Sequence
  Description of Artificial Sequence: Synthetic oligonucleotide
ccaagggcugaguguccag

SEQ ID NO: 81696 - RNA, 19 nt, Artificial Sequence
  Description of Artificial Sequence: Synthetic oligonucleotide
gcacaccugccgucuucac

SEQ ID NO: 81697 - RNA, 19 nt, Artificial Sequence
  Description of Artificial Sequence: Synthetic oligonucleotide
cuuccccacaggcuggcgc

SEQ ID NO: 81698 - RNA, 19 nt, Artificial Sequence
  Description of Artificial Sequence: Synthetic oligonucleotide
cucggcuccaccccagggc

SEQ ID NO: 81699 - RNA, 19 nt, Artificial Sequence
  Description of Artificial Sequence: Synthetic oligonucleotide
ccagcuuuuccucaccagg

SEQ ID NO: 81700 - RNA, 19 nt, Artificial Sequence
  Description of Artificial Sequence: Synthetic oligonucleotide
gagcccggcuuccacuccc

SEQ ID NO: 81701 - RNA, 19 nt, Artificial Sequence
  Description of Artificial Sequence: Synthetic oligonucleotide
ccacauaggaauaguccau

SEQ ID NO: 81702 - RNA, 19 nt, Artificial Sequence
  Description of Artificial Sequence: Synthetic oligonucleotide
uccccagauucgccauugu

SEQ ID NO: 81703 - RNA, 19 nt, Artificial Sequence
  Description of Artificial Sequence: Synthetic oligonucleotide
uucaccccucgcccugccc

SEQ ID NO: 81704 - RNA, 19 nt, Artificial Sequence
  Description of Artificial Sequence: Synthetic oligonucleotide
cuccuuugccuuccacccc

SEQ ID NO: 81705 - RNA, 19 nt, Artificial Sequence
  Description of Artificial Sequence: Synthetic oligonucleotide
ccaccauccagguggagac

SEQ ID NO: 81706 - RNA, 19 nt, Artificial Sequence
  Description of Artificial Sequence: Synthetic oligonucleotide
cccugagaaggacccuggg

SEQ ID NO: 81707 - RNA, 19 nt, Artificial Sequence
  Description of Artificial Sequence: Synthetic oligonucleotide
gagcucugggaauuuggag

SEQ ID NO: 81708 - RNA, 19 nt, Artificial Sequence
  Description of Artificial Sequence: Synthetic oligonucleotide
gugaccaaaggugugcccu

SEQ ID NO: 81709 - RNA, 19 nt, Artificial Sequence
  Description of Artificial Sequence: Synthetic oligonucleotide
uguacacaggcgaggaccc

SEQ ID NO: 81710 - RNA, 19 nt, Artificial Sequence
  Description of Artificial Sequence: Synthetic oligonucleotide
cugcaccuggauggggguc

SEQ ID NO: 81711 - RNA, 19 nt, Artificial Sequence
  Description of Artificial Sequence: Synthetic oligonucleotide
cccugugggucaaauuggg

SEQ ID NO: 81712 - RNA, 19 nt, Artificial Sequence
  Description of Artificial Sequence: Synthetic oligonucleotide
ggggaggugcugugggagu

SEQ ID NO: 81713 - RNA, 19 nt, Artificial Sequence
  Description of Artificial Sequence: Synthetic oligonucleotide
uaaaauacugaauauauga

SEQ ID NO: 81714 - RNA, 19 nt, Artificial Sequence
  Description of Artificial Sequence: Synthetic oligonucleotide
aguuuuucaguuuugaaaa

SEQ ID NO: 81715 - RNA, 19 nt, Artificial Sequence
  Description of Artificial Sequence: Synthetic oligonucleotide
uuuucaguuuugaaaaaaa

SEQ ID NO: 81716 - RNA, 19 nt, Artificial Sequence
  Description of Artificial Sequence: Synthetic oligonucleotide
cuuugucaaggacaggcuc

SEQ ID NO: 81717 - RNA, 25 nt, Artificial Sequence
  Description of Artificial Sequence: Synthetic oligonucleotide
caggcagcgcugcguccugcugcgc

SEQ ID NO: 81718 - RNA, 25 nt, Artificial Sequence
  Description of Artificial Sequence: Synthetic oligonucleotide
cacgugggaagcccuggccccggcc

SEQ ID NO: 81719 - RNA, 25 nt, Artificial Sequence
  Description of Artificial Sequence: Synthetic oligonucleotide
cacccccgcgaugccgcgcgcuccc

SEQ ID NO: 81720 - RNA, 25 nt, Artificial Sequence
  Description of Artificial Sequence: Synthetic oligonucleotide
ccgcugccgagccgugcgcucccug

SEQ ID NO: 81721 - RNA, 25 nt, Artificial Sequence
  Description of Artificial Sequence: Synthetic oligonucleotide
gcugcgcagccacuaccgcgaggug

SEQ ID NO: 81722 - RNA, 25 nt, Artificial Sequence
  Description of Artificial Sequence: Synthetic oligonucleotide
gcugccgcuggccacguucgugcgg

SEQ ID NO: 81723 - RNA, 25 nt, Artificial Sequence
  Description of Artificial Sequence: Synthetic oligonucleotide
gcgccuggggccccagggcuggcgg

SEQ ID NO: 81724 - RNA, 25 nt, Artificial Sequence
  Description of Artificial Sequence: Synthetic oligonucleotide
gcuggugcagcgcggggacccggcg

SEQ ID NO: 81725 - RNA, 25 nt, Artificial Sequence
  Description of Artificial Sequence: Synthetic oligonucleotide
ggcuuuccgcgcgcugguggcccag

SEQ ID NO: 81726 - RNA, 25 nt, Artificial Sequence
  Description of Artificial Sequence: Synthetic oligonucleotide
gugccuggugugcgugcccugggac

SEQ ID NO: 81727 - RNA, 25 nt, Artificial Sequence
  Description of Artificial Sequence: Synthetic oligonucleotide
cgcacggccgccccccgccgccccc

SEQ ID NO: 81728 - RNA, 25 nt, Artificial Sequence
  Description of Artificial Sequence: Synthetic oligonucleotide
cuccuuccgccagguguccugccug

SEQ ID NO: 81729 - RNA, 25 nt, Artificial Sequence
  Description of Artificial Sequence: Synthetic oligonucleotide
gaaggagcugguggcccgagugcug

SEQ ID NO: 81730 - RNA, 25 nt, Artificial Sequence
  Description of Artificial Sequence: Synthetic oligonucleotide
gcagaggcugugcgagcgcggcgcg

SEQ ID NO: 81731 - RNA, 25 nt, Artificial Sequence
  Description of Artificial Sequence: Synthetic oligonucleotide
gaagaacgugcuggccuucggcuuc

SEQ ID NO: 81732 - RNA, 25 nt, Artificial Sequence
  Description of Artificial Sequence: Synthetic oligonucleotide
cgcgcugcuggacggggcccgcggg

SEQ ID NO: 81733 - RNA, 25 nt, Artificial Sequence
  Description of Artificial Sequence: Synthetic oligonucleotide
gggcccccccgaggccuucaccacc

SEQ ID NO: 81734 - RNA, 25 nt, Artificial Sequence
  Description of Artificial Sequence: Synthetic oligonucleotide
cagcgugcgcagcuaccugcccaac

SEQ ID NO: 81735 - RNA, 25 nt, Artificial Sequence
  Description of Artificial Sequence: Synthetic oligonucleotide
cacggugaccgacgcacugcggggg

SEQ ID NO: 81736 - RNA, 25 nt, Artificial Sequence
  Description of Artificial Sequence: Synthetic oligonucleotide
gagcggggcgugggggcugcugcug

SEQ ID NO: 81737 - RNA, 25 nt, Artificial Sequence
  Description of Artificial Sequence: Synthetic oligonucleotide
gcgccgcgugggcgacgacgugcug

SEQ ID NO: 81738 - RNA, 25 nt, Artificial Sequence
  Description of Artificial Sequence: Synthetic oligonucleotide
gguucaccugcuggcacgcugcgcg

SEQ ID NO: 81739 - RNA, 25 nt, Artificial Sequence
  Description of Artificial Sequence: Synthetic oligonucleotide
gcucuuugugcugguggcucccagc

SEQ ID NO: 81740 - RNA, 25 nt, Artificial Sequence
  Description of Artificial Sequence: Synthetic oligonucleotide
cugcgccuaccaggugugcgggccg

SEQ ID NO: 81741 - RNA, 25 nt, Artificial Sequence
  Description of Artificial Sequence: Synthetic oligonucleotide
gccgcuguaccagcucggcgcugcc

SEQ ID NO: 81742 - RNA, 25 nt, Artificial Sequence
  Description of Artificial Sequence: Synthetic oligonucleotide
cacucaggcccggcccccgccacac

SEQ ID NO: 81743 - RNA, 25 nt, Artificial Sequence
  Description of Artificial Sequence: Synthetic oligonucleotide
cgcuaguggaccccgaaggcgucug

SEQ ID NO: 81744 - RNA, 25 nt, Artificial Sequence
  Description of Artificial Sequence: Synthetic oligonucleotide
gggaugcgaacgggccuggaaccau

SEQ ID NO: 81745 - RNA, 25 nt, Artificial Sequence
  Description of Artificial Sequence: Synthetic oligonucleotide
uagcgucagggaggccggggucccc

SEQ ID NO: 81746 - RNA, 25 nt, Artificial Sequence
  Description of Artificial Sequence: Synthetic oligonucleotide
ccugggccugccagccccgggugcg

SEQ ID NO: 81747 - RNA, 25 nt, Artificial Sequence
  Description of Artificial Sequence: Synthetic oligonucleotide
gaggaggcgcgggggcagugccagc

SEQ ID NO: 81748 - RNA, 25 nt, Artificial Sequence
  Description of Artificial Sequence: Synthetic oligonucleotide
ccgaagucugccguugcccaagagg

SEQ ID NO: 81749 - RNA, 25 nt, Artificial Sequence
  Description of Artificial Sequence: Synthetic oligonucleotide
gcccaggcguggcgcugccccugag

SEQ ID NO: 81750 - RNA, 25 nt, Artificial Sequence
  Description of Artificial Sequence: Synthetic oligonucleotide
gccggagcggacgcccguugggcag

SEQ ID NO: 81751 - RNA, 25 nt, Artificial Sequence
  Description of Artificial Sequence: Synthetic oligonucleotide
gggguccugggcccacccgggcagg

SEQ ID NO: 81752 - RNA, 25 nt, Artificial Sequence
  Description of Artificial Sequence: Synthetic oligonucleotide
gacgcguggaccgagugaccguggu

SEQ ID NO: 81753 - RNA, 25 nt, Artificial Sequence
  Description of Artificial Sequence: Synthetic oligonucleotide
uuucuguguggugucaccugccaga

SEQ ID NO: 81754 - RNA, 25 nt, Artificial Sequence
  Description of Artificial Sequence: Synthetic oligonucleotide
acccgccgaagaagccaccucuuug

SEQ ID NO: 81755 - RNA, 25 nt, Artificial Sequence
  Description of Artificial Sequence: Synthetic oligonucleotide
ggagggugcgcucucuggcacgcgc

SEQ ID NO: 81756 - RNA, 25 nt, Artificial Sequence
  Description of Artificial Sequence: Synthetic oligonucleotide
ccacucccacccauccgugggccgc

SEQ ID NO: 81757 - RNA, 25 nt, Artificial Sequence
  Description of Artificial Sequence: Synthetic oligonucleotide
ccagcaccacgcgggccccccaucc

SEQ ID NO: 81758 - RNA, 25 nt, Artificial Sequence
  Description of Artificial Sequence: Synthetic oligonucleotide
cacaucgcggccaccacgucccugg

SEQ ID NO: 81759 - RNA, 25 nt, Artificial Sequence
  Description of Artificial Sequence: Synthetic oligonucleotide
ggacacgccuugucccccgguguac

SEQ ID NO: 81760 - RNA, 25 nt, Artificial Sequence
  Description of Artificial Sequence: Synthetic oligonucleotide
cgccgagaccaagcacuuccucuac

SEQ ID NO: 81761 - RNA, 25 nt, Artificial Sequence
  Description of Artificial Sequence: Synthetic oligonucleotide
cuccucaggcgacaaggagcagcug

SEQ ID NO: 81762 - RNA, 25 nt, Artificial Sequence
  Description of Artificial Sequence: Synthetic oligonucleotide
gcggcccuccuuccuacucagcucu

SEQ ID NO: 81763 - RNA, 25 nt, Artificial Sequence
  Description of Artificial Sequence: Synthetic oligonucleotide
ucugaggcccagccugacuggcgcu

SEQ ID NO: 81764 - RNA, 25 nt, Artificial Sequence
  Description of Artificial Sequence: Synthetic oligonucleotide
ucggaggcucguggagaccaucuuu

SEQ ID NO: 81765 - RNA, 25 nt, Artificial Sequence
  Description of Artificial Sequence: Synthetic oligonucleotide
ucuggguuccaggcccuggaugcca

SEQ ID NO: 81766 - RNA, 25 nt, Artificial Sequence
  Description of Artificial Sequence: Synthetic oligonucleotide
agggacuccccgcagguugccccgc

SEQ ID NO: 81767 - RNA, 25 nt, Artificial Sequence
  Description of Artificial Sequence: Synthetic oligonucleotide
ccugccccagcgcuacuggcaaaug

SEQ ID NO: 81768 - RNA, 25 nt, Artificial Sequence
  Description of Artificial Sequence: Synthetic oligonucleotide
gcggccccuguuucuggagcugcuu

SEQ ID NO: 81769 - RNA, 25 nt, Artificial Sequence
  Description of Artificial Sequence: Synthetic oligonucleotide
ugggaaccacgcgcagugccccuac

SEQ ID NO: 81770 - RNA, 25 nt, Artificial Sequence
  Description of Artificial Sequence: Synthetic oligonucleotide
cggggugcuccucaagacgcacugc

SEQ ID NO: 81771 - RNA, 25 nt, Artificial Sequence
  Description of Artificial Sequence: Synthetic oligonucleotide
cccgcugcgagcugcggucacccca

SEQ ID NO: 81772 - RNA, 25 nt, Artificial Sequence
  Description of Artificial Sequence: Synthetic oligonucleotide
agcagccggugucugugcccgggag

SEQ ID NO: 81773 - RNA, 25 nt, Artificial Sequence
  Description of Artificial Sequence: Synthetic oligonucleotide
gaagccccagggcucuguggcggcc

SEQ ID NO: 81774 - RNA, 25 nt, Artificial Sequence
  Description of Artificial Sequence: Synthetic oligonucleotide
ccccgaggaggaggacacagacccc

SEQ ID NO: 81775 - RNA, 25 nt, Artificial Sequence
  Description of Artificial Sequence: Synthetic oligonucleotide
ccgucgccuggugcagcugcuccgc

SEQ ID NO: 81776 - RNA, 25 nt, Artificial Sequence
  Description of Artificial Sequence: Synthetic oligonucleotide
ccagcacagcagccccuggcaggug

SEQ ID NO: 81777 - RNA, 25 nt, Artificial Sequence
  Description of Artificial Sequence: Synthetic oligonucleotide
guacggcuucgugcgggccugccug

SEQ ID NO: 81778 - RNA, 25 nt, Artificial Sequence
  Description of Artificial Sequence: Synthetic oligonucleotide
gcgccggcuggugcccccaggccuc

SEQ ID NO: 81779 - RNA, 25 nt, Artificial Sequence
  Description of Artificial Sequence: Synthetic oligonucleotide
cuggggcuccaggcacaacgaacgc

SEQ ID NO: 81780 - RNA, 25 nt, Artificial Sequence
  Description of Artificial Sequence: Synthetic oligonucleotide
ccgcuuccucaggaacaccaagaag

SEQ ID NO: 81781 - RNA, 25 nt, Artificial Sequence
  Description of Artificial Sequence: Synthetic oligonucleotide
guucaucucccuggggaagcaugcc

SEQ ID NO: 81782 - RNA, 25 nt, Artificial Sequence
  Description of Artificial Sequence: Synthetic oligonucleotide
caagcucucgcugcaggagcugacg

SEQ ID NO: 81783 - RNA, 25 nt, Artificial Sequence
  Description of Artificial Sequence: Synthetic oligonucleotide
guggaagaugagcgugcgggacugc

SEQ ID NO: 81784 - RNA, 25 nt, Artificial Sequence
  Description of Artificial Sequence: Synthetic oligonucleotide
cgcuuggcugcgcaggagcccaggg

SEQ ID NO: 81785 - RNA, 25 nt, Artificial Sequence
  Description of Artificial Sequence: Synthetic oligonucleotide
gguuggcuguguuccggccgcagag

SEQ ID NO: 81786 - RNA, 25 nt, Artificial Sequence
  Description of Artificial Sequence: Synthetic oligonucleotide
gcaccgucugcgugaggagauccug

SEQ ID NO: 81787 - RNA, 25 nt, Artificial Sequence
  Description of Artificial Sequence: Synthetic oligonucleotide
ggccaaguuccugcacuggcugaug

SEQ ID NO: 81788 - RNA, 25 nt, Artificial Sequence
  Description of Artificial Sequence: Synthetic oligonucleotide
gaguguguacgucgucgagcugcuc

SEQ ID NO: 81789 - RNA, 25 nt, Artificial Sequence
  Description of Artificial Sequence: Synthetic oligonucleotide
caggucuuucuuuuaugucacggag

SEQ ID NO: 81790 - RNA, 25 nt, Artificial Sequence
  Description of Artificial Sequence: Synthetic oligonucleotide
gaccacguuucaaaagaacaggcuc

SEQ ID NO: 81791 - RNA, 25 nt, Artificial Sequence
  Description of Artificial Sequence: Synthetic oligonucleotide
cuuuuucuaccggaagagugucugg

SEQ ID NO: 81792 - RNA, 25 nt, Artificial Sequence
  Description of Artificial Sequence: Synthetic oligonucleotide
gagcaaguugcaaagcauuggaauc

SEQ ID NO: 81793 - RNA, 25 nt, Artificial Sequence
  Description of Artificial Sequence: Synthetic oligonucleotide
cagacagcacuugaagagggugcag

SEQ ID NO: 81794 - RNA, 25 nt, Artificial Sequence
  Description of Artificial Sequence: Synthetic oligonucleotide
gcugcgggagcugucggaagcagag

SEQ ID NO: 81795 - RNA, 25 nt, Artificial Sequence
  Description of Artificial Sequence: Synthetic oligonucleotide
ggucaggcagcaucgggaagccagg

SEQ ID NO: 81796 - RNA, 25 nt, Artificial Sequence
  Description of Artificial Sequence: Synthetic oligonucleotide
gcccgcccugcugacguccagacuc

SEQ ID NO: 81797 - RNA, 25 nt, Artificial Sequence
  Description of Artificial Sequence: Synthetic oligonucleotide
ccgcuucauccccaagccugacggg

SEQ ID NO: 81798 - RNA, 25 nt, Artificial Sequence
  Description of Artificial Sequence: Synthetic oligonucleotide
gcugcggccgauugugaacauggac

SEQ ID NO: 81799 - RNA, 25 nt, Artificial Sequence
  Description of Artificial Sequence: Synthetic oligonucleotide
cuacgucgugggagccagaacguuc

SEQ ID NO: 81800 - RNA, 25 nt, Artificial Sequence
  Description of Artificial Sequence: Synthetic oligonucleotide
ccgcagagaaaagagggccgagcgu

SEQ ID NO: 81801 - RNA, 25 nt, Artificial Sequence
  Description of Artificial Sequence: Synthetic oligonucleotide
ucucaccucgagggugaaggcacug

SEQ ID NO: 81802 - RNA, 25 nt, Artificial Sequence
  Description of Artificial Sequence: Synthetic oligonucleotide
guucagcgugcucaacuacgagcgg

SEQ ID NO: 81803 - RNA, 25 nt, Artificial Sequence
  Description of Artificial Sequence: Synthetic oligonucleotide
ggcgcggcgccccggccuccugggc

SEQ ID NO: 81804 - RNA, 25 nt, Artificial Sequence
  Description of Artificial Sequence: Synthetic oligonucleotide
cgccucugugcugggccuggacgau

SEQ ID NO: 81805 - RNA, 25 nt, Artificial Sequence
  Description of Artificial Sequence: Synthetic oligonucleotide
uauccacagggccuggcgcaccuuc

SEQ ID NO: 81806 - RNA, 25 nt, Artificial Sequence
  Description of Artificial Sequence: Synthetic oligonucleotide
cgugcugcgugugcgggcccaggac

SEQ ID NO: 81807 - RNA, 25 nt, Artificial Sequence
  Description of Artificial Sequence: Synthetic oligonucleotide
cccgccgccugagcuguacuuuguc

SEQ ID NO: 81808 - RNA, 25 nt, Artificial Sequence
  Description of Artificial Sequence: Synthetic oligonucleotide
caagguggaugugacgggcgcguac

SEQ ID NO: 81809 - RNA, 25 nt, Artificial Sequence
  Description of Artificial Sequence: Synthetic oligonucleotide
cgacaccaucccccaggacaggcuc

SEQ ID NO: 81810 - RNA, 25 nt, Artificial Sequence
  Description of Artificial Sequence: Synthetic oligonucleotide
cacggaggucaucgccagcaucauc

SEQ ID NO: 81811 - RNA, 25 nt, Artificial Sequence
  Description of Artificial Sequence: Synthetic oligonucleotide
caaaccccagaacacguacugcgug

SEQ ID NO: 81812 - RNA, 25 nt, Artificial Sequence
  Description of Artificial Sequence: Synthetic oligonucleotide
gcgucgguaugccgugguccagaag

SEQ ID NO: 81813 - RNA, 25 nt, Artificial Sequence
  Description of Artificial Sequence: Synthetic oligonucleotide
ggccgcccaugggcacguccgcaag

SEQ ID NO: 81814 - RNA, 25 nt, Artificial Sequence
  Description of Artificial Sequence: Synthetic oligonucleotide
ggccuucaagagccacgucucuacc

SEQ ID NO: 81815 - RNA, 25 nt, Artificial Sequence
  Description of Artificial Sequence: Synthetic oligonucleotide
cuugacagaccuccagccguacaug

SEQ ID NO: 81816 - RNA, 25 nt, Artificial Sequence
  Description of Artificial Sequence: Synthetic oligonucleotide
gcgacaguucguggcucaccugcag

SEQ ID NO: 81817 - RNA, 25 nt, Artificial Sequence
  Description of Artificial Sequence: Synthetic oligonucleotide
ggagaccagcccgcugagggaugcc

SEQ ID NO: 81818 - RNA, 25 nt, Artificial Sequence
  Description of Artificial Sequence: Synthetic oligonucleotide
cgucgucaucgagcagagcuccucc

SEQ ID NO: 81819 - RNA, 25 nt, Artificial Sequence
  Description of Artificial Sequence: Synthetic oligonucleotide
ccugaaugaggccagcaguggccuc

SEQ ID NO: 81820 - RNA, 25 nt, Artificial Sequence
  Description of Artificial Sequence: Synthetic oligonucleotide
cuucgacgucuuccuacgcuucaug

SEQ ID NO: 81821 - RNA, 25 nt, Artificial Sequence
  Description of Artificial Sequence: Synthetic oligonucleotide
gugccaccacgccgugcgcaucagg

SEQ ID NO: 81822 - RNA, 25 nt, Artificial Sequence
  Description of Artificial Sequence: Synthetic oligonucleotide
gggcaaguccuacguccagugccag

SEQ ID NO: 81823 - RNA, 25 nt, Artificial Sequence
  Description of Artificial Sequence: Synthetic oligonucleotide
ggggaucccgcagggcuccauccuc

SEQ ID NO: 81824 - RNA, 25 nt, Artificial Sequence
  Description of Artificial Sequence: Synthetic oligonucleotide
cuccacgcugcucugcagccugugc

SEQ ID NO: 81825 - RNA, 25 nt, Artificial Sequence
  Description of Artificial Sequence: Synthetic oligonucleotide
cuacggcgacauggagaacaagcug

SEQ ID NO: 81826 - RNA, 25 nt, Artificial Sequence
  Description of Artificial Sequence: Synthetic oligonucleotide
guuugcggggauucggcgggacggg

SEQ ID NO: 81827 - RNA, 25 nt, Artificial Sequence
  Description of Artificial Sequence: Synthetic oligonucleotide
gcugcuccugcguuugguggaugau

SEQ ID NO: 81828 - RNA, 25 nt, Artificial Sequence
  Description of Artificial Sequence: Synthetic oligonucleotide
uuucuuguuggugacaccucaccuc

SEQ ID NO: 81829 - RNA, 25 nt, Artificial Sequence
  Description of Artificial Sequence: Synthetic oligonucleotide
cacccacgcgaaaaccuuccucagg

SEQ ID NO: 81830 - RNA, 25 nt, Artificial Sequence
  Description of Artificial Sequence: Synthetic oligonucleotide
gacccugguccgaggugucccugag

SEQ ID NO: 81831 - RNA, 25 nt, Artificial Sequence
  Description of Artificial Sequence: Synthetic oligonucleotide
guauggcugcguggugaacuugcgg

SEQ ID NO: 81832 - RNA, 25 nt, Artificial Sequence
  Description of Artificial Sequence: Synthetic oligonucleotide
gaagacaguggugaacuucccugua

SEQ ID NO: 81833 - RNA, 25 nt, Artificial Sequence
  Description of Artificial Sequence: Synthetic oligonucleotide
agaagacgaggcccuggguggcacg

SEQ ID NO: 81834 - RNA, 25 nt, Artificial Sequence
  Description of Artificial Sequence: Synthetic oligonucleotide
ggcuuuuguucagaugccggcccac

SEQ ID NO: 81835 - RNA, 25 nt, Artificial Sequence
  Description of Artificial Sequence: Synthetic oligonucleotide
cggccuauuccccuggugcggccug

SEQ ID NO: 81836 - RNA, 25 nt, Artificial Sequence
  Description of Artificial Sequence: Synthetic oligonucleotide
gcugcuggauacccggacccuggag

SEQ ID NO: 81837 - RNA, 25 nt, Artificial Sequence
  Description of Artificial Sequence: Synthetic oligonucleotide
ggugcagagcgacuacuccagcuau

SEQ ID NO: 81838 - RNA, 25 nt, Artificial Sequence
  Description of Artificial Sequence: Synthetic oligonucleotide
ugcccggaccuccaucagagccagu

SEQ ID NO: 81839 - RNA, 25 nt, Artificial Sequence
  Description of Artificial Sequence: Synthetic oligonucleotide
ucucaccuucaaccgcggcuucaag

SEQ ID NO: 81840 - RNA, 25 nt, Artificial Sequence
  Description of Artificial Sequence: Synthetic oligonucleotide
ggcugggaggaacaugcgucgcaaa

SEQ ID NO: 81841 - RNA, 25 nt, Artificial Sequence
  Description of Artificial Sequence: Synthetic oligonucleotide
acucuuuggggucuugcggcugaag

SEQ ID NO: 81842 - RNA, 25 nt, Artificial Sequence
  Description of Artificial Sequence: Synthetic oligonucleotide
gugucacagccuguuucuggauuug

SEQ ID NO: 81843 - RNA, 25 nt, Artificial Sequence
  Description of Artificial Sequence: Synthetic oligonucleotide
gcaggugaacagccuccagacggug

SEQ ID NO: 81844 - RNA, 25 nt, Artificial Sequence
  Description of Artificial Sequence: Synthetic oligonucleotide
gugcaccaacaucuacaagauccuc

SEQ ID NO: 81845 - RNA, 25 nt, Artificial Sequence
  Description of Artificial Sequence: Synthetic oligonucleotide
ccugcugcaggcguacagguuucac

SEQ ID NO: 81846 - RNA, 25 nt, Artificial Sequence
  Description of Artificial Sequence: Synthetic oligonucleotide
cgcaugugugcugcagcucccauuu

SEQ ID NO: 81847 - RNA, 25 nt, Artificial Sequence
  Description of Artificial Sequence: Synthetic oligonucleotide
ucaucagcaaguuuggaagaacccc

SEQ ID NO: 81848 - RNA, 25 nt, Artificial Sequence
  Description of Artificial Sequence: Synthetic oligonucleotide
cacauuuuuccugcgcgucaucucu

SEQ ID NO: 81849 - RNA, 25 nt, Artificial Sequence
  Description of Artificial Sequence: Synthetic oligonucleotide
ugacacggccucccucugcuacucc

SEQ ID NO: 81850 - RNA, 25 nt, Artificial Sequence
  Description of Artificial Sequence: Synthetic oligonucleotide
cauccugaaagccaagaacgcaggg

SEQ ID NO: 81851 - RNA, 25 nt, Artificial Sequence
  Description of Artificial Sequence: Synthetic oligonucleotide
gaugucgcugggggccaagggcgcc

SEQ ID NO: 81852 - RNA, 25 nt, Artificial Sequence
  Description of Artificial Sequence: Synthetic oligonucleotide
cgccggcccucugcccuccgaggcc

SEQ ID NO: 81853 - RNA, 25 nt, Artificial Sequence
  Description of Artificial Sequence: Synthetic oligonucleotide
cgugcaguggcugugccaccaagca

SEQ ID NO: 81854 - RNA, 25 nt, Artificial Sequence
  Description of Artificial Sequence: Synthetic oligonucleotide
auuccugcucaagcugacucgacac

SEQ ID NO: 81855 - RNA, 25 nt, Artificial Sequence
  Description of Artificial Sequence: Synthetic oligonucleotide
ccgugucaccuacgugccacuccug

SEQ ID NO: 81856 - RNA, 25 nt, Artificial Sequence
  Description of Artificial Sequence: Synthetic oligonucleotide
ggggucacucaggacagcccagacg

SEQ ID NO: 81857 - RNA, 25 nt, Artificial Sequence
  Description of Artificial Sequence: Synthetic oligonucleotide
gcagcugagucggaagcucccgggg

SEQ ID NO: 81858 - RNA, 25 nt, Artificial Sequence
  Description of Artificial Sequence: Synthetic oligonucleotide
gacgacgcugacugcccuggaggcc

SEQ ID NO: 81859 - RNA, 25 nt, Artificial Sequence
  Description of Artificial Sequence: Synthetic oligonucleotide
cgcagccaacccggcacugcccuca

SEQ ID NO: 81860 - RNA, 25 nt, Artificial Sequence
  Description of Artificial Sequence: Synthetic oligonucleotide
agacuucaagaccauccuggacuga

SEQ ID NO: 81861 - RNA, 25 nt, Artificial Sequence
  Description of Artificial Sequence: Synthetic oligonucleotide
auggccacccgcccacagccaggcc

SEQ ID NO: 81862 - RNA, 25 nt, Artificial Sequence
  Description of Artificial Sequence: Synthetic oligonucleotide
cgagagcagacaccagcagcccugu

SEQ ID NO: 81863 - RNA, 25 nt, Artificial Sequence
  Description of Artificial Sequence: Synthetic oligonucleotide
ucacgccgggcucuacgucccaggg

SEQ ID NO: 81864 - RNA, 25 nt, Artificial Sequence
  Description of Artificial Sequence: Synthetic oligonucleotide
gagggaggggcggcccacacccagg

SEQ ID NO: 81865 - RNA, 25 nt, Artificial Sequence
  Description of Artificial Sequence: Synthetic oligonucleotide
gcccgcaccgcugggagucugaggc

SEQ ID NO: 81866 - RNA, 25 nt, Artificial Sequence
  Description of Artificial Sequence: Synthetic oligonucleotide
ccugagugaguguuuggccgaggcc

SEQ ID NO: 81867 - RNA, 25 nt, Artificial Sequence
  Description of Artificial Sequence: Synthetic oligonucleotide
cugcauguccggcugaaggcugagu

SEQ ID NO: 81868 - RNA, 25 nt, Artificial Sequence
  Description of Artificial Sequence: Synthetic oligonucleotide
uguccggcugaggccugagcgagug

SEQ ID NO: 81869 - RNA, 25 nt, Artificial Sequence
  Description of Artificial Sequence: Synthetic oligonucleotide
guccagccaagggcugaguguccag

SEQ ID NO: 81870 - RNA, 25 nt, Artificial Sequence
  Description of Artificial Sequence: Synthetic oligonucleotide
gcacaccugccgucuucacuucccc

SEQ ID NO: 81871 - RNA, 25 nt, Artificial Sequence
  Description of Artificial Sequence: Synthetic oligonucleotide
cacaggcuggcgcucggcuccaccc

SEQ ID NO: 81872 - RNA, 25 nt, Artificial Sequence
  Description of Artificial Sequence: Synthetic oligonucleotide
ccagggccagcuuuuccucaccagg

SEQ ID NO: 81873 - RNA, 25 nt, Artificial Sequence
  Description of Artificial Sequence: Synthetic oligonucleotide
gagcccggcuuccacuccccacaua

SEQ ID NO: 81874 - RNA, 25 nt, Artificial Sequence
  Description of Artificial Sequence: Synthetic oligonucleotide
aggaauaguccauccccagauucgc

SEQ ID NO: 81875 - RNA, 25 nt, Artificial Sequence
  Description of Artificial Sequence: Synthetic oligonucleotide
ccauuguucaccccucgcccugccc

SEQ ID NO: 81876 - RNA, 25 nt, Artificial Sequence
  Description of Artificial Sequence: Synthetic oligonucleotide
cuccuuugccuuccacccccaccau

SEQ ID NO: 81877 - RNA, 25 nt, Artificial Sequence
  Description of Artificial Sequence: Synthetic oligonucleotide
uccagguggagacccugagaaggac

SEQ ID NO: 81878 - RNA, 25 nt, Artificial Sequence
  Description of Artificial Sequence: Synthetic oligonucleotide
cccugggagcucugggaauuuggag

SEQ ID NO: 81879 - RNA, 25 nt, Artificial Sequence
  Description of Artificial Sequence: Synthetic oligonucleotide
gugaccaaaggugugcccuguacac

SEQ ID NO: 81880 - RNA, 25 nt, Artificial Sequence
  Description of Artificial Sequence: Synthetic oligonucleotide
caggcgaggacccugcaccuggaug

SEQ ID NO: 81881 - RNA, 25 nt, Artificial Sequence
  Description of Artificial Sequence: Synthetic oligonucleotide
gggggucccugugggucaaauuggg

SEQ ID NO: 81882 - RNA, 25 nt, Artificial Sequence
  Description of Artificial Sequence: Synthetic oligonucleotide
ggggaggugcugugggaguaaaaua

SEQ ID NO: 81883 - RNA, 25 nt, Artificial Sequence
  Description of Artificial Sequence: Synthetic oligonucleotide
acugaauauaugaguuuuucaguuu

SEQ ID NO: 81884 - RNA, 25 nt, Artificial Sequence
  Description of Artificial Sequence: Synthetic oligonucleotide
augaguuuuucaguuuugaaaaaaa

SEQ ID NO: 81885 - RNA, 25 nt, Artificial Sequence
  Description of Artificial Sequence: Synthetic oligonucleotide
caaggacaggcucacggaggucauc

SEQ ID NO: 81886 - RNA, 25 nt, Artificial Sequence
  Description of Artificial Sequence: Synthetic oligonucleotide
cgccagcaucaucaaaccccagaac

SEQ ID NO: 81887 - RNA, 25 nt, Artificial Sequence
  Description of Artificial Sequence: Synthetic oligonucleotide
cacguacugcgugcgucgguaugcc

SEQ ID NO: 81888 - RNA, 25 nt, Artificial Sequence
  Description of Artificial Sequence: Synthetic oligonucleotide
cgugguccagaaggccgcccauggg

SEQ ID NO: 81889 - RNA, 25 nt, Artificial Sequence
  Description of Artificial Sequence: Synthetic oligonucleotide
gcacguccgcaaggccuucaagagc

SEQ ID NO: 81890 - RNA, 25 nt, Artificial Sequence
  Description of Artificial Sequence: Synthetic oligonucleotide
ccacgucucuaccuugacagaccuc

SEQ ID NO: 81891 - RNA, 25 nt, Artificial Sequence
  Description of Artificial Sequence: Synthetic oligonucleotide
ccagccguacaugcgacaguucgug

SEQ ID NO: 81892 - RNA, 25 nt, Artificial Sequence
  Description of Artificial Sequence: Synthetic oligonucleotide
ggcucaccugcaggagaccagcccg

SEQ ID NO: 81893 - RNA, 25 nt, Artificial Sequence
  Description of Artificial Sequence: Synthetic oligonucleotide
gcugagggaugccgucgucaucgag

SEQ ID NO: 81894 - RNA, 25 nt, Artificial Sequence
  Description of Artificial Sequence: Synthetic oligonucleotide
gcagagcuccucccugaaugaggcc

SEQ ID NO: 81895 - RNA, 25 nt, Artificial Sequence
  Description of Artificial Sequence: Synthetic oligonucleotide
cagcaguggccucuucgacgucuuc

SEQ ID NO: 81896 - RNA, 25 nt, Artificial Sequence
  Description of Artificial Sequence: Synthetic oligonucleotide
ccuacgcuucaugugccaccacgcc

SEQ ID NO: 81897 - RNA, 25 nt, Artificial Sequence
  Description of Artificial Sequence: Synthetic oligonucleotide
cgugcgcaucaggggcaaguccuac

SEQ ID NO: 81898 - RNA, 25 nt, Artificial Sequence
  Description of Artificial Sequence: Synthetic oligonucleotide
cguccagugccaggggaucccgcag

SEQ ID NO: 81899 - RNA, 25 nt, Artificial Sequence
  Description of Artificial Sequence: Synthetic oligonucleotide
gggcuccauccucuccacgcugcuc

SEQ ID NO: 81900 - RNA, 25 nt, Artificial Sequence
  Description of Artificial Sequence: Synthetic oligonucleotide
cugcagccugugcuacggcgacaug

SEQ ID NO: 81901 - RNA, 25 nt, Artificial Sequence
  Description of Artificial Sequence: Synthetic oligonucleotide
ggagaacaagcuguuugcggggauu

SEQ ID NO: 81902 - RNA, 25 nt, Artificial Sequence
  Description of Artificial Sequence: Synthetic oligonucleotide
ucggcgggacgggcugcuccugcgu

SEQ ID NO: 81903 - RNA, 25 nt, Artificial Sequence
  Description of Artificial Sequence: Synthetic oligonucleotide
uuugguggaugauuucuuguuggug

SEQ ID NO: 81904 - RNA, 25 nt, Artificial Sequence
  Description of Artificial Sequence: Synthetic oligonucleotide
gacaccucaccucacccacgcgaaa

SEQ ID NO: 81905 - RNA, 25 nt, Artificial Sequence
  Description of Artificial Sequence: Synthetic oligonucleotide
aaccuuccucaggacccugguccga

SEQ ID NO: 81906 - RNA, 25 nt, Artificial Sequence
  Description of Artificial Sequence: Synthetic oligonucleotide
aggugucccugaguauggcugcgug

SEQ ID NO: 81907 - RNA, 25 nt, Artificial Sequence
  Description of Artificial Sequence: Synthetic oligonucleotide
ggugaacuugcggaagacaguggug

SEQ ID NO: 81908 - RNA, 25 nt, Artificial Sequence
  Description of Artificial Sequence: Synthetic oligonucleotide
gaacuucccuguagaagacgaggcc

SEQ ID NO: 81909 - RNA, 25 nt, Artificial Sequence
  Description of Artificial Sequence: Synthetic oligonucleotide
ccuggguggcacggcuuuuguucag

SEQ ID NO: 81910 - RNA, 25 nt, Artificial Sequence
  Description of Artificial Sequence: Synthetic oligonucleotide
gaugccggcccacggccuauucccc

SEQ ID NO: 81911 - RNA, 25 nt, Artificial Sequence
  Description of Artificial Sequence: Synthetic oligonucleotide
cuggugcggccugcugcuggauacc

SEQ ID NO: 81912 - RNA, 25 nt, Artificial Sequence
  Description of Artificial Sequence: Synthetic oligonucleotide
ccggacccuggaggugcagagcgac

SEQ ID NO: 81913 - RNA, 25 nt, Artificial Sequence
  Description of Artificial Sequence: Synthetic oligonucleotide
cuacuccagcuaugcccggaccucc

SEQ ID NO: 81914 - RNA, 25 nt, Artificial Sequence
  Description of Artificial Sequence: Synthetic oligonucleotide
caucagagccagucucaccuucaac

SEQ ID NO: 81915 - RNA, 25 nt, Artificial Sequence
  Description of Artificial Sequence: Synthetic oligonucleotide
ccgcggcuucaaggcugggaggaac

SEQ ID NO: 81916 - RNA, 25 nt, Artificial Sequence
  Description of Artificial Sequence: Synthetic oligonucleotide
caugcgucgcaaacucuuugggguc

SEQ ID NO: 81917 - RNA, 25 nt, Artificial Sequence
  Description of Artificial Sequence: Synthetic oligonucleotide
cuugcggcugaagugucacagccug

SEQ ID NO: 81918 - RNA, 25 nt, Artificial Sequence
  Description of Artificial Sequence: Synthetic oligonucleotide
guuucuggauuugcaggugaacagc

SEQ ID NO: 81919 - RNA, 25 nt, Artificial Sequence
  Description of Artificial Sequence: Synthetic oligonucleotide
ccuccagacggugugcaccaacauc

SEQ ID NO: 81920 - RNA, 25 nt, Artificial Sequence
  Description of Artificial Sequence: Synthetic oligonucleotide
cuacaagauccuccugcugcaggcg

SEQ ID NO: 81921 - RNA, 25 nt, Artificial Sequence
  Description of Artificial Sequence: Synthetic oligonucleotide
guacagguuucacgcaugugugcug

SEQ ID NO: 81922 - RNA, 25 nt, Artificial Sequence
  Description of Artificial Sequence: Synthetic oligonucleotide
gcagcucccauuucaucagcaaguu

SEQ ID NO: 81923 - RNA, 25 nt, Artificial Sequence
  Description of Artificial Sequence: Synthetic oligonucleotide
uuggaagaaccccacauuuuuccug

SEQ ID NO: 81924 - RNA, 25 nt, Artificial Sequence
  Description of Artificial Sequence: Synthetic oligonucleotide
gcgcgucaucucugacacggccucc

SEQ ID NO: 81925 - RNA, 25 nt, Artificial Sequence
  Description of Artificial Sequence: Synthetic oligonucleotide
ccucugcuacuccauccugaaagcc

SEQ ID NO: 81926 - RNA, 25 nt, Artificial Sequence
  Description of Artificial Sequence: Synthetic oligonucleotide
caagaacgcagggaugucgcugggg

SEQ ID NO: 81927 - RNA, 25 nt, Artificial Sequence
  Description of Artificial Sequence: Synthetic oligonucleotide
ggccaagggcgccgccggcccucug

SEQ ID NO: 81928 - RNA, 25 nt, Artificial Sequence
  Description of Artificial Sequence: Synthetic oligonucleotide
gcccuccgaggccgugcaguggcug

SEQ ID NO: 81929 - RNA, 25 nt, Artificial Sequence
  Description of Artificial Sequence: Synthetic oligonucleotide
gugccaccaagcauuccugcucaag

SEQ ID NO: 81930 - RNA, 25 nt, Artificial Sequence
  Description of Artificial Sequence: Synthetic oligonucleotide
gcugacucgacaccgugucaccuac

SEQ ID NO: 81931 - RNA, 25 nt, Artificial Sequence
  Description of Artificial Sequence: Synthetic oligonucleotide
cgugccacuccuggggucacucagg

SEQ ID NO: 81932 - RNA, 25 nt, Artificial Sequence
  Description of Artificial Sequence: Synthetic oligonucleotide
gacagcccagacgcagcugagucgg

SEQ ID NO: 81933 - RNA, 25 nt, Artificial Sequence
  Description of Artificial Sequence: Synthetic oligonucleotide
gaagcucccggggacgacgcugacu

SEQ ID NO: 81934 - RNA, 25 nt, Artificial Sequence
  Description of Artificial Sequence: Synthetic oligonucleotide
ugcccuggaggccgcagccaacccg

SEQ ID NO: 81935 - RNA, 25 nt, Artificial Sequence
  Description of Artificial Sequence: Synthetic oligonucleotide
ggcacugcccucagacuucaagacc

SEQ ID NO: 81936 - RNA, 25 nt, Artificial Sequence
  Description of Artificial Sequence: Synthetic oligonucleotide
cauccuggacugauggccacccgcc

SEQ ID NO: 81937 - RNA, 25 nt, Artificial Sequence
  Description of Artificial Sequence: Synthetic oligonucleotide
ccacagccaggccgagagcagacac

SEQ ID NO: 81938 - RNA, 25 nt, Artificial Sequence
  Description of Artificial Sequence: Synthetic oligonucleotide
ccagcagcccugucacgccgggcuc

SEQ ID NO: 81939 - RNA, 25 nt, Artificial Sequence
  Description of Artificial Sequence: Synthetic oligonucleotide
cuacgucccagggagggaggggcgg

SEQ ID NO: 81940 - RNA, 25 nt, Artificial Sequence
  Description of Artificial Sequence: Synthetic oligonucleotide
gcccacacccaggcccgcaccgcug

SEQ ID NO: 81941 - RNA, 25 nt, Artificial Sequence
  Description of Artificial Sequence: Synthetic oligonucleotide
gggagucugaggccugagugagugu

SEQ ID NO: 81942 - RNA, 25 nt, Artificial Sequence
  Description of Artificial Sequence: Synthetic oligonucleotide
uuuggccgaggccugcauguccggc

SEQ ID NO: 81943 - RNA, 25 nt, Artificial Sequence
  Description of Artificial Sequence: Synthetic oligonucleotide
cugaaggcugaguguccggcugagg

SEQ ID NO: 81944 - RNA, 25 nt, Artificial Sequence
  Description of Artificial Sequence: Synthetic oligonucleotide
gccugagcgaguguccagccaaggg

SEQ ID NO: 81945 - RNA, 25 nt, Artificial Sequence
  Description of Artificial Sequence: Synthetic oligonucleotide
gcugaguguccagcacaccugccgu

SEQ ID NO: 81946 - RNA, 25 nt, Artificial Sequence
  Description of Artificial Sequence: Synthetic oligonucleotide
ucuucacuuccccacaggcuggcgc

SEQ ID NO: 81947 - RNA, 25 nt, Artificial Sequence
  Description of Artificial Sequence: Synthetic oligonucleotide
cucggcuccaccccagggccagcuu

SEQ ID NO: 81948 - RNA, 25 nt, Artificial Sequence
  Description of Artificial Sequence: Synthetic oligonucleotide
uuuccucaccaggagcccggcuucc

SEQ ID NO: 81949 - RNA, 25 nt, Artificial Sequence
  Description of Artificial Sequence: Synthetic oligonucleotide
cacuccccacauaggaauaguccau

SEQ ID NO: 81950 - RNA, 25 nt, Artificial Sequence
  Description of Artificial Sequence: Synthetic oligonucleotide
uccccagauucgccauuguucaccc

SEQ ID NO: 81951 - RNA, 25 nt, Artificial Sequence
  Description of Artificial Sequence: Synthetic oligonucleotide
ccucgcccugcccuccuuugccuuc

SEQ ID NO: 81952 - RNA, 25 nt, Artificial Sequence
  Description of Artificial Sequence: Synthetic oligonucleotide
ccacccccaccauccagguggagac

SEQ ID NO: 81953 - RNA, 25 nt, Artificial Sequence
  Description of Artificial Sequence: Synthetic oligonucleotide
cccugagaaggacccugggagcucu

SEQ ID NO: 81954 - RNA, 25 nt, Artificial Sequence
  Description of Artificial Sequence: Synthetic oligonucleotide
ugggaauuuggagugaccaaaggug

SEQ ID NO: 81955 - RNA, 25 nt, Artificial Sequence
  Description of Artificial Sequence: Synthetic oligonucleotide
gugcccuguacacaggcgaggaccc

SEQ ID NO: 81956 - RNA, 25 nt, Artificial Sequence
  Description of Artificial Sequence: Synthetic oligonucleotide
cugcaccuggaugggggucccugug

SEQ ID NO: 81957 - RNA, 25 nt, Artificial Sequence
  Description of Artificial Sequence: Synthetic oligonucleotide
gggucaaauuggggggaggugcugu

SEQ ID NO: 81958 - RNA, 25 nt, Artificial Sequence
  Description of Artificial Sequence: Synthetic oligonucleotide
ugggaguaaaauacugaauauauga

SEQ ID NO: 81959 - DNA, 21 bp, Artificial Sequence
  Description of Artificial Sequence: Synthetic oligonucleotide
  Description of Combined DNA/RNA Molecule: Synthetic oligonucleotide
cuacacaaaucagcgauuutt

SEQ ID NO: 81960 - DNA, 21 bp, Artificial Sequence
  Description of Artificial Sequence: Synthetic oligonucleotide
  Description of Combined DNA/RNA Molecule: Synthetic oligonucleotide
aaaucgcugauuuguguagtt

SEQ ID NO: 81961 - DNA, 25 bp, Artificial Sequence
  Description of Artificial Sequence: Synthetic oligonucleotide
  Description of Combined DNA/RNA Molecule: Synthetic oligonucleotide
cuacacaaaucagcgauuuccaugt

SEQ ID NO: 81962 - RNA, 27 nt, Artificial Sequence
  Description of Artificial Sequence: Synthetic oligonucleotide
acauggaaaucgcugauuuguguaguc

SEQ ID NO: 81963 - RNA, 13 nt, Artificial Sequence
  Description of Artificial Sequence: Synthetic oligonucleotide
cuacacaaaucag

SEQ ID NO: 81964 - DNA, 11 bp, Artificial Sequence
  Description of Artificial Sequence: Synthetic oligonucleotide
  Description of Combined DNA/RNA Molecule: Synthetic oligonucleotide
gauuuccaugt

SEQ ID NO: 81965 - DNA, 21 bp, Artificial Sequence
  Description of Artificial Sequence: Synthetic oligonucleotide
  Description of Combined DNA/RNA Molecule: Synthetic oligonucleotide
ggaucuuauuucuucggagtt

SEQ ID NO: 81966 - DNA, 21 bp, Artificial Sequence
  Description of Artificial Sequence: Synthetic oligonucleotide
  Description of Combined DNA/RNA Molecule: Synthetic oligonucleotide
cuccgaagaaauaagaucctt

SEQ ID NO: 81967 - RNA, 11 nt, Artificial Sequence
  Description of Artificial Sequence: Synthetic oligonucleotide
ggaucuuauuu

SEQ ID NO: 81968 - DNA, 10 bp, Artificial Sequence
  Description of Artificial Sequence: Synthetic oligonucleotide
  Description of Combined DNA/RNA Molecule: Synthetic oligonucleotide
cuucggagtt

SEQ ID NO: 81969 - RNA, 27 nt, Artificial Sequence
  Description of Artificial Sequence: Synthetic oligonucleotide
cauugucuccgaagaaauaagauccuu

SEQ ID NO: 81970 - RNA, 8 nt, Artificial Sequence
  Description of Artificial Sequence: Synthetic oligonucleotide
  modified_base (2): LNA-G
ggaucuua

SEQ ID NO: 81971 - DNA, 17 bp, Artificial Sequence
  Description of Artificial Sequence: Synthetic oligonucleotide
  Description of Combined DNA/RNA Molecule: Synthetic oligonucleotide
uuucuucggagacaatg

SEQ ID NO: 81972 - DNA, 16 bp, Artificial Sequence
  Description of Artificial Sequence: Synthetic oligonucleotide
  Description of Combined DNA/RNA Molecule: Synthetic oligonucleotide
uucuucggagacaatg

SEQ ID NO: 81973 - DNA, 15 bp, Artificial Sequence
  Description of Artificial Sequence: Synthetic oligonucleotide
  Description of Combined DNA/RNA Molecule: Synthetic oligonucleotide
ucuucggagacaatg

SEQ ID NO: 81974 - DNA, 14 bp, Artificial Sequence
  Description of Artificial Sequence: Synthetic oligonucleotide
  Description of Combined DNA/RNA Molecule: Synthetic oligonucleotide
cuucggagacaatg

SEQ ID NO: 81975 - DNA, 13 bp, Artificial Sequence
  Description of Artificial Sequence: Synthetic oligonucleotide
  Description of Combined DNA/RNA Molecule: Synthetic oligonucleotide
uucggagacaatg

SEQ ID NO: 81976 - DNA, 12 bp, Artificial Sequence
  Description of Artificial Sequence: Synthetic oligonucleotide
  Description of Combined DNA/RNA Molecule: Synthetic oligonucleotide
ucggagacaatg

SEQ ID NO: 81977 - DNA, 11 bp, Artificial Sequence
  Description of Artificial Sequence: Synthetic oligonucleotide
  Description of Combined DNA/RNA Molecule: Synthetic oligonucleotide
cggagacaatg

SEQ ID NO: 81978 - RNA, 9 nt, Artificial Sequence
  Description of Artificial Sequence: Synthetic oligonucleotide
  modified_base (2): LNA-G
ggaucuuau

SEQ ID NO: 81979 - RNA, 10 nt, Artificial Sequence
  Description of Artificial Sequence: Synthetic oligonucleotide
  modified_base (2): LNA-G
ggaucuuauu

SEQ ID NO: 81980 - RNA, 11 nt, Artificial Sequence
  Description of Artificial Sequence: Synthetic oligonucleotide
  modified_base (2): LNA-G
ggaucuuauuu

SEQ ID NO: 81981 - RNA, 12 nt, Artificial Sequence
  Description of Artificial Sequence: Synthetic oligonucleotide
  modified_base (2): LNA-G
ggaucuuauuuc

SEQ ID NO: 81982 - RNA, 8 nt, Artificial Sequence
  Description of Artificial Sequence: Synthetic oligonucleotide
  modified_base (3): LNA-A
cuacacaa

SEQ ID NO: 81983 - DNA, 13 bp, Artificial Sequence
  Description of Artificial Sequence: Synthetic oligonucleotide
  Description of Combined DNA/RNA Molecule: Synthetic oligonucleotide
  modified_base (8): LNA-A
aucagcgauuutt

SEQ ID NO: 81984 - DNA, 12 bp, Artificial Sequence
  Description of Artificial Sequence: Synthetic oligonucleotide
  Description of Combined DNA/RNA Molecule: Synthetic oligonucleotide
  modified_base (7): LNA-A
ucagcgauuutt

SEQ ID NO: 81985 - DNA, 11 bp, Artificial Sequence
  Description of Artificial Sequence: Synthetic oligonucleotide
  Description of Combined DNA/RNA Molecule: Synthetic oligonucleotide
  modified_base (6): LNA-A
cagcgauuutt

SEQ ID NO: 81986 - DNA, 10 bp, Artificial Sequence
  Description of Artificial Sequence: Synthetic oligonucleotide
  Description of Combined DNA/RNA Molecule: Synthetic oligonucleotide
  modified_base (5): LNA-A
agcgauuutt

SEQ ID NO: 81987 - DNA, 9 bp, Artificial Sequence
  Description of Artificial Sequence: Synthetic oligonucleotide
  Description of Combined DNA/RNA Molecule: Synthetic oligonucleotide
  modified_base (4): LNA-A
gcgauuutt

SEQ ID NO: 81988 - DNA, 8 bp, Artificial Sequence
  Description of Artificial Sequence: Synthetic oligonucleotide
  Description of Combined DNA/RNA Molecule: Synthetic oligonucleotide
  modified_base (3): LNA-A
cgauuutt

SEQ ID NO: 81989 - DNA, 7 bp, Artificial Sequence
  Description of Artificial Sequence: Synthetic oligonucleotide
  Description of Combined DNA/RNA Molecule: Synthetic oligonucleotide
  modified_base (2): LNA-A
gauuutt

SEQ ID NO: 81990 - RNA, 9 nt, Artificial Sequence
  Description of Artificial Sequence: Synthetic oligonucleotide
  modified_base (3): LNA-A
cuacacaaa

SEQ ID NO: 81991 - RNA, 10 nt, Artificial Sequence
  Description of Artificial Sequence: Synthetic oligonucleotide
  modified_base (3): LNA-A
cuacacaaau

SEQ ID NO: 81992 - RNA, 11 nt, Artificial Sequence
  Description of Artificial Sequence: Synthetic oligonucleotide
  modified_base (3): LNA-A
cuacacaaauc

SEQ ID NO: 81993 - RNA, 12 nt, Artificial Sequence
  Description of Artificial Sequence: Synthetic oligonucleotide
  modified_base (3): LNA-A
cuacacaaauca

SEQ ID NO: 81994 - RNA, 13 nt, Artificial Sequence
  Description of Artificial Sequence: Synthetic oligonucleotide
  modified_base (3): LNA-A
cuacacaaaucag

SEQ ID NO: 81995 - RNA, 14 nt, Artificial Sequence
  Description of Artificial Sequence: Synthetic oligonucleotide
  modified_base (3): LNA-A
cuacacaaaucagc

SEQ ID NO: 81996 - RNA, 13 nt, Artificial Sequence
  Description of Artificial Sequence: Synthetic oligonucleotide
  modified_base (2): LNA-G
ggaucuuauuucu

SEQ ID NO: 81997 - RNA, 14 nt, Artificial Sequence
  Description of Artificial Sequence: Synthetic oligonucleotide
  modified_base (2): LNA-G
ggaucuuauuucuu

SEQ ID NO: 81998 - RNA, 8 nt, Artificial Sequence
  Description of Artificial Sequence: Synthetic oligonucleotide
  modified_base (2): LNA-G
  modified_base (8): LNA-A
ggaucuua

SEQ ID NO: 81999 - RNA, 9 nt, Artificial Sequence
  Description of Artificial Sequence: Synthetic oligonucleotide
  modified_base (2): LNA-G
  modified_base (9): LNA-U
ggaucuuau

SEQ ID NO: 82000 - RNA, 10 nt, Artificial Sequence
  Description of Artificial Sequence: Synthetic oligonucleotide
  modified_base (2): LNA-G
  modified_base (10): LNA-U
ggaucuuauu

SEQ ID NO: 82001 - RNA, 11 nt, Artificial Sequence
  Description of Artificial Sequence: Synthetic oligonucleotide
  modified_base (2): LNA-G
  modified_base (11): LNA-U
ggaucuuauuu

SEQ ID NO: 82002 - RNA, 12 nt, Artificial Sequence
  Description of Artificial Sequence: Synthetic oligonucleotide
  modified_base (2): LNA-G
  modified_base (12): LNA-C
ggaucuuauuuc

SEQ ID NO: 82003 - RNA, 13 nt, Artificial Sequence
  Description of Artificial Sequence: Synthetic oligonucleotide
  modified_base (2): LNA-G
  modified_base (13): LNA-U
ggaucuuauuucu

SEQ ID NO: 82004 - RNA, 14 nt, Artificial Sequence
  Description of Artificial Sequence: Synthetic oligonucleotide
  modified_base (2): LNA-G
  modified_base (14): LNA-U
ggaucuuauuucuu

SEQ ID NO: 82005 - DNA, 13 bp, Artificial Sequence
  Description of Artificial Sequence: Synthetic oligonucleotide
  Description of Combined DNA/RNA Molecule: Synthetic oligonucleotide
  modified_base (8): LNA-G
uuucuucggagtt

SEQ ID NO: 82006 - DNA, 12 bp, Artificial Sequence
  Description of Artificial Sequence: Synthetic oligonucleotide
  Description of Combined DNA/RNA Molecule: Synthetic oligonucleotide
  modified_base (7): LNA-G
uucuucggagtt

SEQ ID NO: 82007 - DNA, 11 bp, Artificial Sequence
  Description of Artificial Sequence: Synthetic oligonucleotide
  Description of Combined DNA/RNA Molecule: Synthetic oligonucleotide
  modified_base (6): LNA-G
ucuucggagtt

SEQ ID NO: 82008 - DNA, 10 bp, Artificial Sequence
  Description of Artificial Sequence: Synthetic oligonucleotide
  Description of Combined DNA/RNA Molecule: Synthetic oligonucleotide
  modified_base (5): LNA-G
cuucggagtt

SEQ ID NO: 82009 - DNA, 9 bp, Artificial Sequence
  Description of Artificial Sequence: Synthetic oligonucleotide
  Description of Combined DNA/RNA Molecule: Synthetic oligonucleotide
  modified_base (4): LNA-G
uucggagtt

SEQ ID NO: 82010 - DNA, 8 bp, Artificial Sequence
  Description of Artificial Sequence: Synthetic oligonucleotide
  Description of Combined DNA/RNA Molecule: Synthetic oligonucleotide
  modified_base (3): LNA-G
ucggagtt

SEQ ID NO: 82011 - DNA, 7 bp, Artificial Sequence
  Description of Artificial Sequence: Synthetic oligonucleotide
  Description of Combined DNA/RNA Molecule: Synthetic oligonucleotide
  modified_base (2): LNA-G
cggagtt

SEQ ID NO: 82012 - DNA, 13 bp, Artificial Sequence
  Description of Artificial Sequence: Synthetic oligonucleotide
  Description of Combined DNA/RNA Molecule: Synthetic oligonucleotide
  modified_base (1): LNA-U
  modified_base (8): LNA-G
uuucuucggagtt

SEQ ID NO: 82013 - DNA, 12 bp, Artificial Sequence
  Description of Artificial Sequence: Synthetic oligonucleotide
  Description of Combined DNA/RNA Molecule: Synthetic oligonucleotide
  modified_base (1): LNA-U
  modified_base (7): LNA-G
uucuucggagtt

SEQ ID NO: 82014 - DNA, 11 bp, Artificial Sequence
  Description of Artificial Sequence: Synthetic oligonucleotide
  Description of Combined DNA/RNA Molecule: Synthetic oligonucleotide
  modified_base (1): LNA-U
  modified_base (6): LNA-G
ucuucggagtt

SEQ ID NO: 82015 - DNA, 10 bp, Artificial Sequence
  Description of Artificial Sequence: Synthetic oligonucleotide
  Description of Combined DNA/RNA Molecule: Synthetic oligonucleotide
  modified_base (1): LNA-C
  modified_base (5): LNA-G
cuucggagtt

SEQ ID NO: 82016 - DNA, 9 bp, Artificial Sequence
  Description of Artificial Sequence: Synthetic oligonucleotide
  Description of Combined DNA/RNA Molecule: Synthetic oligonucleotide
  modified_base (1): LNA-U
  modified_base (4): LNA-G
uucggagtt

SEQ ID NO: 82017 - DNA, 8 bp, Artificial Sequence
  Description of Artificial Sequence: Synthetic oligonucleotide
  Description of Combined DNA/RNA Molecule: Synthetic oligonucleotide
  modified_base (1): LNA-U
  modified_base (3): LNA-G
ucggagtt

SEQ ID NO: 82018 - DNA, 7 bp, Artificial Sequence
  Description of Artificial Sequence: Synthetic oligonucleotide
  Description of Combined DNA/RNA Molecule: Synthetic oligonucleotide
  modified_base (1): LNA-C
  modified_base (2): LNA-G
cggagtt

SEQ ID NO: 82019 - DNA, 21 bp, Artificial Sequence
  Description of Artificial Sequence: Synthetic oligonucleotide
  Description of Combined DNA/RNA Molecule: Synthetic oligonucleotide
  modified_base (2): LNA-G
  modified_base (16): LNA-G
ggaucuuauuucuucggagtt

SEQ ID NO: 82020 - DNA, 25 bp, Artificial Sequence
  Description of Artificial Sequence: Synthetic oligonucleotide
  Description of Combined DNA/RNA Molecule: Synthetic oligonucleotide
ggaucuuauuucuucggagacaatg

SEQ ID NO: 82021 - RNA, 25 nt, Artificial Sequence
  Description of Artificial Sequence: Synthetic oligonucleotide
uuaagcagaguucaaaagcccuuca

SEQ ID NO: 82022 - RNA, 25 nt, Artificial Sequence
  Description of Artificial Sequence: Synthetic oligonucleotide
uaagcagaguucaaaagcccuucag

SEQ ID NO: 82023 - RNA, 25 nt, Artificial Sequence
  Description of Artificial Sequence: Synthetic oligonucleotide
agcagaguucaaaagcccuucagcg

SEQ ID NO: 82024 - RNA, 25 nt, Artificial Sequence
  Description of Artificial Sequence: Synthetic oligonucleotide
cucagggucugagugaagccgcucg

SEQ ID NO: 82025 - RNA, 25 nt, Artificial Sequence
  Description of Artificial Sequence: Synthetic oligonucleotide
caagcaacuacaucacgccagucaa

SEQ ID NO: 82026 - RNA, 25 nt, Artificial Sequence
  Description of Artificial Sequence: Synthetic oligonucleotide
aucaauggcagcuucuuggugcgug

SEQ ID NO: 82027 - RNA, 25 nt, Artificial Sequence
  Description of Artificial Sequence: Synthetic oligonucleotide
uuccagcccacauuggauucaucag

SEQ ID NO: 82028 - RNA, 25 nt, Artificial Sequence
  Description of Artificial Sequence: Synthetic oligonucleotide
cagcugagaauguggaauaccuaag

SEQ ID NO: 82029 - RNA, 25 nt, Artificial Sequence
  Description of Artificial Sequence: Synthetic oligonucleotide
aacguaucuccuaauuugaggcuca

SEQ ID NO: 82030 - RNA, 25 nt, Artificial Sequence
  Description of Artificial Sequence: Synthetic oligonucleotide
ccuaaaauaauuucucuacaauugg

SEQ ID NO: 82031 - RNA, 25 nt, Artificial Sequence
  Description of Artificial Sequence: Synthetic oligonucleotide
uggaagauucagcuaguuaggagcc

SEQ ID NO: 82032 - RNA, 25 nt, Artificial Sequence
  Description of Artificial Sequence: Synthetic oligonucleotide
uuaaacucuccuagucaauauccac

SEQ ID NO: 82033 - RNA, 25 nt, Artificial Sequence
  Description of Artificial Sequence: Synthetic oligonucleotide
cagccuacaguuauguucagucaca

SEQ ID NO: 82034 - RNA, 25 nt, Artificial Sequence
  Description of Artificial Sequence: Synthetic oligonucleotide
guuauguucagucacacacacauac

SEQ ID NO: 82035 - RNA, 25 nt, Artificial Sequence
  Description of Artificial Sequence: Synthetic oligonucleotide
cacauacaaaauguuccuuuugcuu

SEQ ID NO: 82036 - RNA, 25 nt, Artificial Sequence
  Description of Artificial Sequence: Synthetic oligonucleotide
uccuuuugcuuuuaaaguaauuuuu

SEQ ID NO: 82037 - RNA, 25 nt, Artificial Sequence
  Description of Artificial Sequence: Synthetic oligonucleotide
ugaccugugaagcaacagucaaugg

SEQ ID NO: 82038 - RNA, 25 nt, Artificial Sequence
  Description of Artificial Sequence: Synthetic oligonucleotide
cuaucucacacaucgacaaaccaau

SEQ ID NO: 82039 - RNA, 25 nt, Artificial Sequence
  Description of Artificial Sequence: Synthetic oligonucleotide
uguccucaauuguacugcuaccacu

SEQ ID NO: 82040 - RNA, 25 nt, Artificial Sequence
  Description of Artificial Sequence: Synthetic oligonucleotide
aaaccguagcuggcaagcggucuua

SEQ ID NO: 82041 - RNA, 25 nt, Artificial Sequence
  Description of Artificial Sequence: Synthetic oligonucleotide
uagcuggcaagcggucuuaccggcu

SEQ ID NO: 82042 - RNA, 25 nt, Artificial Sequence
  Description of Artificial Sequence: Synthetic oligonucleotide
uuguaugguuaaaagauggguuacc

SEQ ID NO: 82043 - RNA, 25 nt, Artificial Sequence
  Description of Artificial Sequence: Synthetic oligonucleotide
ugguuaaaagauggguuaccugcga

SEQ ID NO: 82044 - RNA, 25 nt, Artificial Sequence
  Description of Artificial Sequence: Synthetic oligonucleotide
cagggaauuauacaaucuugcugag

SEQ ID NO: 82045 - RNA, 25 nt, Artificial Sequence
  Description of Artificial Sequence: Synthetic oligonucleotide
acaaucuugcugagcauaaaacagu

SEQ ID NO: 82046 - RNA, 25 nt, Artificial Sequence
  Description of Artificial Sequence: Synthetic oligonucleotide
ccaauaaugaagaguccuuuauccu

SEQ ID NO: 82047 - RNA, 25 nt, Artificial Sequence
  Description of Artificial Sequence: Synthetic oligonucleotide
acuuuggauguuccaacgcaaguug

SEQ ID NO: 82048 - RNA, 25 nt, Artificial Sequence
  Description of Artificial Sequence: Synthetic oligonucleotide
aaugcuuccacuaaacugaaaccau

SEQ ID NO: 82049 - RNA, 25 nt, Artificial Sequence
  Description of Artificial Sequence: Synthetic oligonucleotide
gagaaaguuugacuuuguuaaauau

SEQ ID NO: 82050 - RNA, 25 nt, Artificial Sequence
  Description of Artificial Sequence: Synthetic oligonucleotide
aaagaacuacuguauauuaaaaguu

SEQ ID NO: 82051 - RNA, 25 nt, Artificial Sequence
  Description of Artificial Sequence: Synthetic oligonucleotide
uuagaaauacggguuuugacuuaac

SEQ ID NO: 82052 - RNA, 25 nt, Artificial Sequence
  Description of Artificial Sequence: Synthetic oligonucleotide
aacauggguacagcaaacucagcac

SEQ ID NO: 82053 - RNA, 25 nt, Artificial Sequence
  Description of Artificial Sequence: Synthetic oligonucleotide
aaagacacagaagaugcugaccuca

SEQ ID NO: 82054 - RNA, 25 nt, Artificial Sequence
  Description of Artificial Sequence: Synthetic oligonucleotide
uaguagggagguuuauucagaucgc

SEQ ID NO: 82055 - RNA, 25 nt, Artificial Sequence
  Description of Artificial Sequence: Synthetic oligonucleotide
gccuucugcagcaggguucugggau

SEQ ID NO: 82056 - RNA, 25 nt, Artificial Sequence
  Description of Artificial Sequence: Synthetic oligonucleotide
ggucugguacauauuggaaauuaug

SEQ ID NO: 82057 - RNA, 25 nt, Artificial Sequence
  Description of Artificial Sequence: Synthetic oligonucleotide
cuaguccuuccgauggaagcacuag

SEQ ID NO: 82058 - RNA, 25 nt, Artificial Sequence
  Description of Artificial Sequence: Synthetic oligonucleotide
ccagugaauauuguuuuuaugugga

SEQ ID NO: 82059 - RNA, 25 nt, Artificial Sequence
  Description of Artificial Sequence: Synthetic oligonucleotide
augaauucaaguuggaauugguaga

SEQ ID NO: 82060 - RNA, 25 nt, Artificial Sequence
  Description of Artificial Sequence: Synthetic oligonucleotide
caggacacagauuuagacuuggaga

SEQ ID NO: 82061 - RNA, 25 nt, Artificial Sequence
  Description of Artificial Sequence: Synthetic oligonucleotide
cucaaagcacaguuacaguauucca

SEQ ID NO: 82062 - RNA, 25 nt, Artificial Sequence
  Description of Artificial Sequence: Synthetic oligonucleotide
accacugccaccacugaugaauuaa

SEQ ID NO: 82063 - RNA, 25 nt, Artificial Sequence
  Description of Artificial Sequence: Synthetic oligonucleotide
gaaacuacuagugccacaucaucac

SEQ ID NO: 82064 - RNA, 25 nt, Artificial Sequence
  Description of Artificial Sequence: Synthetic oligonucleotide
aagucggacagccucaccaaacaga

SEQ ID NO: 82065 - RNA, 25 nt, Artificial Sequence
  Description of Artificial Sequence: Synthetic oligonucleotide
gaaagcgaaaaauggaacaugaugg

SEQ ID NO: 82066 - RNA, 25 nt, Artificial Sequence
  Description of Artificial Sequence: Synthetic oligonucleotide
cccucugauuuagcauguagacugc

SEQ ID NO: 82067 - RNA, 25 nt, Artificial Sequence
  Description of Artificial Sequence: Synthetic oligonucleotide
ugagcuauuuaaggaucuauuuaug

SEQ ID NO: 82068 - RNA, 25 nt, Artificial Sequence
  Description of Artificial Sequence: Synthetic oligonucleotide
aaaaggugaaaaagcacuauuauca

SEQ ID NO: 82069 - RNA, 25 nt, Artificial Sequence
  Description of Artificial Sequence: Synthetic oligonucleotide
gaaaaagcacuauuaucaguucugc

SEQ ID NO: 82070 - RNA, 25 nt, Artificial Sequence
  Description of Artificial Sequence: Synthetic oligonucleotide
ggcugaaaagaaagauuaaaccuac

SEQ ID NO: 82071 - RNA, 25 nt, Artificial Sequence
  Description of Artificial Sequence: Synthetic oligonucleotide
uaaacccuuauaauaaaauccuucu

SEQ ID NO: 82072 - RNA, 25 nt, Artificial Sequence
  Description of Artificial Sequence: Synthetic oligonucleotide
cauacuauuagccaaugcuguagac

SEQ ID NO: 82073 - RNA, 25 nt, Artificial Sequence
  Description of Artificial Sequence: Synthetic oligonucleotide
gacagaagcauuuugauaggaauag

SEQ ID NO: 82074 - RNA, 25 nt, Artificial Sequence
  Description of Artificial Sequence: Synthetic oligonucleotide
agagcaaauaagauaauggcccuga

SEQ ID NO: 82075 - RNA, 25 nt, Artificial Sequence
  Description of Artificial Sequence: Synthetic oligonucleotide
ccaacauuuuucucuuccucaagca

SEQ ID NO: 82076 - RNA, 25 nt, Artificial Sequence
  Description of Artificial Sequence: Synthetic oligonucleotide
uuaaguaugagaaaaguucagccca

SEQ ID NO: 82077 - RNA, 25 nt, Artificial Sequence
  Description of Artificial Sequence: Synthetic oligonucleotide
caggaauaaagauggcugcugaacc

SEQ ID NO: 82078 - RNA, 25 nt, Artificial Sequence
  Description of Artificial Sequence: Synthetic oligonucleotide
aauuugaaugaccaaguucucuuca

SEQ ID NO: 82079 - RNA, 25 nt, Artificial Sequence
  Description of Artificial Sequence: Synthetic oligonucleotide
auguauaaagauagccagccuagag

SEQ ID NO: 82080 - RNA, 25 nt, Artificial Sequence
  Description of Artificial Sequence: Synthetic oligonucleotide
ggcuguaacuaucucugugaagugu

SEQ ID NO: 82081 - RNA, 25 nt, Artificial Sequence
  Description of Artificial Sequence: Synthetic oligonucleotide
ucugugaagugugagaaaauuucaa

SEQ ID NO: 82082 - RNA, 25 nt, Artificial Sequence
  Description of Artificial Sequence: Synthetic oligonucleotide
ccuuuaaggaaaugaauccuccuga

SEQ ID NO: 82083 - RNA, 25 nt, Artificial Sequence
  Description of Artificial Sequence: Synthetic oligonucleotide
aaggauacaaaaagugacaucauau

SEQ ID NO: 82084 - RNA, 25 nt, Artificial Sequence
  Description of Artificial Sequence: Synthetic oligonucleotide
agaugcaauuugaaucuucaucaua

SEQ ID NO: 82085 - RNA, 25 nt, Artificial Sequence
  Description of Artificial Sequence: Synthetic oligonucleotide
guucaaaacgaagacuagcuauuaa

SEQ ID NO: 82086 - RNA, 25 nt, Artificial Sequence
  Description of Artificial Sequence: Synthetic oligonucleotide
gugaaaccucaucucuacuaaaaau

SEQ ID NO: 82087 - RNA, 25 nt, Artificial Sequence
  Description of Artificial Sequence: Synthetic oligonucleotide
acgaaagagaagcucuaucucgccu

SEQ ID NO: 82088 - RNA, 25 nt, Artificial Sequence
  Description of Artificial Sequence: Synthetic oligonucleotide
cuccacaagcgccuucgguccaguu

SEQ ID NO: 82089 - RNA, 25 nt, Artificial Sequence
  Description of Artificial Sequence: Synthetic oligonucleotide
gagaagauuccaaagauguagccgc

SEQ ID NO: 82090 - RNA, 25 nt, Artificial Sequence
  Description of Artificial Sequence: Synthetic oligonucleotide
aaucuggauucaaugaggagacuug

SEQ ID NO: 82091 - RNA, 25 nt, Artificial Sequence
  Description of Artificial Sequence: Synthetic oligonucleotide
agaacagauuugagaguagugagga

SEQ ID NO: 82092 - RNA, 25 nt, Artificial Sequence
  Description of Artificial Sequence: Synthetic oligonucleotide
ccagagcugugcagaugaguacaaa

SEQ ID NO: 82093 - RNA, 25 nt, Artificial Sequence
  Description of Artificial Sequence: Synthetic oligonucleotide
ccucagauuguuguuguuaaugggc

SEQ ID NO: 82094 - RNA, 25 nt, Artificial Sequence
  Description of Artificial Sequence: Synthetic oligonucleotide
cuauuuuaauuauuuuuaauuuauu

SEQ ID NO: 82095 - RNA, 25 nt, Artificial Sequence
  Description of Artificial Sequence: Synthetic oligonucleotide
uuuaauuuauuaauauuuaaauaug

SEQ ID NO: 82096 - RNA, 25 nt, Artificial Sequence
  Description of Artificial Sequence: Synthetic oligonucleotide
augcaguuugaauauccuuuguuuc

SEQ ID NO: 82097 - RNA, 25 nt, Artificial Sequence
  Description of Artificial Sequence: Synthetic oligonucleotide
caugcugcuggcgucuaaguguuug

SEQ ID NO: 82098 - RNA, 25 nt, Artificial Sequence
  Description of Artificial Sequence: Synthetic oligonucleotide
agaugugcauuucaccugugacaaa

SEQ ID NO: 82099 - RNA, 25 nt, Artificial Sequence
  Description of Artificial Sequence: Synthetic oligonucleotide
ucaaaaccugugccaggcugaauua

SEQ ID NO: 82100 - RNA, 25 nt, Artificial Sequence
  Description of Artificial Sequence: Synthetic oligonucleotide
gaauguggguagucauucuuacaau

SEQ ID NO: 82101 - RNA, 25 nt, Artificial Sequence
  Description of Artificial Sequence: Synthetic oligonucleotide
auguggguagucauucuuacaauug

SEQ ID NO: 82102 - RNA, 25 nt, Artificial Sequence
  Description of Artificial Sequence: Synthetic oligonucleotide
ugaaaaugagcaucagagaguguac

SEQ ID NO: 82103 - RNA, 25 nt, Artificial Sequence
  Description of Artificial Sequence: Synthetic oligonucleotide
uugcuuuucauguagaacucagcag

SEQ ID NO: 82104 - RNA, 25 nt, Artificial Sequence
  Description of Artificial Sequence: Synthetic oligonucleotide
uguauuucuauauuuauuuucagua

SEQ ID NO: 82105 - RNA, 25 nt, Artificial Sequence
  Description of Artificial Sequence: Synthetic oligonucleotide
uuugauuaauguuucuuaaauggaa

SEQ ID NO: 82106 - RNA, 25 nt, Artificial Sequence
  Description of Artificial Sequence: Synthetic oligonucleotide
caacguguauagugccuaaaauugu

SEQ ID NO: 82107 - RNA, 25 nt, Artificial Sequence
  Description of Artificial Sequence: Synthetic oligonucleotide
cauauccuuggcuacuaacaucugg

SEQ ID NO: 82108 - RNA, 25 nt, Artificial Sequence
  Description of Artificial Sequence: Synthetic oligonucleotide
uacuaacaucuggagacugugagcu

SEQ ID NO: 82109 - RNA, 25 nt, Artificial Sequence
  Description of Artificial Sequence: Synthetic oligonucleotide
cauaaguugugugcuuuuuauuaau

SEQ ID NO: 82110 - RNA, 25 nt, Artificial Sequence
  Description of Artificial Sequence: Synthetic oligonucleotide
gcaucauuuuggcucuucuuacauu

SEQ ID NO: 82111 - RNA, 25 nt, Artificial Sequence
  Description of Artificial Sequence: Synthetic oligonucleotide
gcucuucuuacauuuguaaaaaugu

SEQ ID NO: 82112 - RNA, 25 nt, Artificial Sequence
  Description of Artificial Sequence: Synthetic oligonucleotide
agauuaggucaucuuaauucauauu

SEQ ID NO: 82113 - RNA, 25 nt, Artificial Sequence
  Description of Artificial Sequence: Synthetic oligonucleotide
auggaauugaaagaacuaaucauga

SEQ ID NO: 82114 - RNA, 25 nt, Artificial Sequence
  Description of Artificial Sequence: Synthetic oligonucleotide
cacacucauuccuucugcucuuggg

SEQ ID NO: 82115 - RNA, 25 nt, Artificial Sequence
  Description of Artificial Sequence: Synthetic oligonucleotide
uguagagguaaccaguagcuuugag

SEQ ID NO: 82116 - RNA, 25 nt, Artificial Sequence
  Description of Artificial Sequence: Synthetic oligonucleotide
caaccacaugccacguaauauuuca

SEQ ID NO: 82117 - RNA, 25 nt, Artificial Sequence
  Description of Artificial Sequence: Synthetic oligonucleotide
ucggaaacaaguuauucucuucacu

SEQ ID NO: 82118 - RNA, 25 nt, Artificial Sequence
  Description of Artificial Sequence: Synthetic oligonucleotide
acucccaauaacuaaugcuaagaaa

SEQ ID NO: 82119 - RNA, 25 nt, Artificial Sequence
  Description of Artificial Sequence: Synthetic oligonucleotide
aaugcuaagaaaugcugaaaaucaa

SEQ ID NO: 82120 - RNA, 25 nt, Artificial Sequence
  Description of Artificial Sequence: Synthetic oligonucleotide
gucuuucucuaaauaugauuacuuu

SEQ ID NO: 82121 - RNA, 25 nt, Artificial Sequence
  Description of Artificial Sequence: Synthetic oligonucleotide
ugaauuucaggcauuuuguucuaca

SEQ ID NO: 82122 - RNA, 25 nt, Artificial Sequence
  Description of Artificial Sequence: Synthetic oligonucleotide
cgauucccucucacccgggacucuc

SEQ ID NO: 82123 - RNA, 25 nt, Artificial Sequence
  Description of Artificial Sequence: Synthetic oligonucleotide
aggaaagugaaccuuuaaaguaaag

SEQ ID NO: 82124 - RNA, 25 nt, Artificial Sequence
  Description of Artificial Sequence: Synthetic oligonucleotide
gaggcugcaugcucuggaagccugg

SEQ ID NO: 82125 - RNA, 25 nt, Artificial Sequence
  Description of Artificial Sequence: Synthetic oligonucleotide
ucucugaacagaaaacaaaagagag

SEQ ID NO: 82126 - RNA, 25 nt, Artificial Sequence
  Description of Artificial Sequence: Synthetic oligonucleotide
aacuuggcuguaaucaguuaugccg

SEQ ID NO: 82127 - RNA, 25 nt, Artificial Sequence
  Description of Artificial Sequence: Synthetic oligonucleotide
agaagccaaaauuaaaagaagucca

SEQ ID NO: 82128 - RNA, 25 nt, Artificial Sequence
  Description of Artificial Sequence: Synthetic oligonucleotide
auuaaaagaaguccaggugagguua

SEQ ID NO: 82129 - RNA, 25 nt, Artificial Sequence
  Description of Artificial Sequence: Synthetic oligonucleotide
gaauccggauuaucgggaagaggac

SEQ ID NO: 82130 - RNA, 25 nt, Artificial Sequence
  Description of Artificial Sequence: Synthetic oligonucleotide
aaugugacaucaaagcaaguauugu

SEQ ID NO: 82131 - RNA, 25 nt, Artificial Sequence
  Description of Artificial Sequence: Synthetic oligonucleotide
caucaaagcaaguauuguagcacuc

SEQ ID NO: 82132 - RNA, 25 nt, Artificial Sequence
  Description of Artificial Sequence: Synthetic oligonucleotide
agagagagaaaacaaaaccacaaau

SEQ ID NO: 82133 - RNA, 25 nt, Artificial Sequence
  Description of Artificial Sequence: Synthetic oligonucleotide
ucgcuguaguauuuaagcccauaca

SEQ ID NO: 82134 - RNA, 25 nt, Artificial Sequence
  Description of Artificial Sequence: Synthetic oligonucleotide
cgcuguaguauuuaagcccauacag

SEQ ID NO: 82135 - RNA, 25 nt, Artificial Sequence
  Description of Artificial Sequence: Synthetic oligonucleotide
auuuaagcccauacagaaaccuucc

SEQ ID NO: 82136 - RNA, 25 nt, Artificial Sequence
  Description of Artificial Sequence: Synthetic oligonucleotide
auuaaaauaaacaugguauaccuac

SEQ ID NO: 82137 - RNA, 25 nt, Artificial Sequence
  Description of Artificial Sequence: Synthetic oligonucleotide
cuguucugaucggccaguuuucgga

SEQ ID NO: 82138 - RNA, 25 nt, Artificial Sequence
  Description of Artificial Sequence: Synthetic oligonucleotide
aaauaauuugaacuuuggaacaggg

SEQ ID NO: 82139 - RNA, 25 nt, Artificial Sequence
  Description of Artificial Sequence: Synthetic oligonucleotide
ugcgaccuuaauuuaacuuuccagu

SEQ ID NO: 82140 - RNA, 25 nt, Artificial Sequence
  Description of Artificial Sequence: Synthetic oligonucleotide
cugagaaagcuaaaguuugguuuug

SEQ ID NO: 82141 - RNA, 25 nt, Artificial Sequence
  Description of Artificial Sequence: Synthetic oligonucleotide
aguaaagaugcuacuucccacugua

SEQ ID NO: 82142 - RNA, 25 nt, Artificial Sequence
  Description of Artificial Sequence: Synthetic oligonucleotide
cugcuuaauugcugauaccauauga

SEQ ID NO: 82143 - RNA, 25 nt, Artificial Sequence
  Description of Artificial Sequence: Synthetic oligonucleotide
uaccauaugaaugaaacaugggcug

SEQ ID NO: 82144 - RNA, 25 nt, Artificial Sequence
  Description of Artificial Sequence: Synthetic oligonucleotide
aacuuucuuauccaacuuuuucaua

SEQ ID NO: 82145 - RNA, 25 nt, Artificial Sequence
  Description of Artificial Sequence: Synthetic oligonucleotide
ccuugcaugacaucaugaggccgga

SEQ ID NO: 82146 - RNA, 25 nt, Artificial Sequence
  Description of Artificial Sequence: Synthetic oligonucleotide
ugaauuuguauaugacugcauuugu

SEQ ID NO: 82147 - RNA, 25 nt, Artificial Sequence
  Description of Artificial Sequence: Synthetic oligonucleotide
gaauccuaguagaauguuuacuacc

SEQ ID NO: 82148 - RNA, 25 nt, Artificial Sequence
  Description of Artificial Sequence: Synthetic oligonucleotide
gaaagggaagaauuuuuugaugaaa

SEQ ID NO: 82149 - RNA, 25 nt, Artificial Sequence
  Description of Artificial Sequence: Synthetic oligonucleotide
uaucggcaugccagugugugaauuu

SEQ ID NO: 82150 - RNA, 25 nt, Artificial Sequence
  Description of Artificial Sequence: Synthetic oligonucleotide
caccucauaguagagcaauguaugu

SEQ ID NO: 82151 - RNA, 25 nt, Artificial Sequence
  Description of Artificial Sequence: Synthetic oligonucleotide
ccagaauugccaaagcacauauaua

SEQ ID NO: 82152 - RNA, 25 nt, Artificial Sequence
  Description of Artificial Sequence: Synthetic oligonucleotide
uggugaucuggguaauaguuucucc

SEQ ID NO: 82153 - RNA, 25 nt, Artificial Sequence
  Description of Artificial Sequence: Synthetic oligonucleotide
gaucuggguaauaguuucuccaaau

SEQ ID NO: 82154 - RNA, 25 nt, Artificial Sequence
  Description of Artificial Sequence: Synthetic oligonucleotide
ggaugugaugaauacuuccuagaaa

SEQ ID NO: 82155 - RNA, 25 nt, Artificial Sequence
  Description of Artificial Sequence: Synthetic oligonucleotide
cauuuccacagcuacaccauauaug

SEQ ID NO: 82156 - RNA, 25 nt, Artificial Sequence
  Description of Artificial Sequence: Synthetic oligonucleotide
acagcuacaccauauaugaauggag

SEQ ID NO: 82157 - RNA, 25 nt, Artificial Sequence
  Description of Artificial Sequence: Synthetic oligonucleotide
ugcaguucuuacacgagaagaagau

SEQ ID NO: 82158 - RNA, 25 nt, Artificial Sequence
  Description of Artificial Sequence: Synthetic oligonucleotide
acgagaagaagaucauuuacaggga

SEQ ID NO: 82159 - RNA, 25 nt, Artificial Sequence
  Description of Artificial Sequence: Synthetic oligonucleotide
cgagaagaagaucauuuacagggac

SEQ ID NO: 82160 - RNA, 25 nt, Artificial Sequence
  Description of Artificial Sequence: Synthetic oligonucleotide
aagaagaucauuuacagggaccuga

SEQ ID NO: 82161 - RNA, 25 nt, Artificial Sequence
  Description of Artificial Sequence: Synthetic oligonucleotide
agaggaagagguguuugacugcauc

SEQ ID NO: 82162 - RNA, 25 nt, Artificial Sequence
  Description of Artificial Sequence: Synthetic oligonucleotide
gaggaagagguguuugacugcaucg

SEQ ID NO: 82163 - RNA, 25 nt, Artificial Sequence
  Description of Artificial Sequence: Synthetic oligonucleotide
cuacuuugagggcgaguucacaggg

SEQ ID NO: 82164 - RNA, 25 nt, Artificial Sequence
  Description of Artificial Sequence: Synthetic oligonucleotide
agggcaucuccuggcaccucugucc

SEQ ID NO: 82165 - RNA, 25 nt, Artificial Sequence
  Description of Artificial Sequence: Synthetic oligonucleotide
ggagugauaugguuugucuuuuuaa

SEQ ID NO: 82166 - RNA, 25 nt, Artificial Sequence
  Description of Artificial Sequence: Synthetic oligonucleotide
gagugauaugguuugucuuuuuaag

SEQ ID NO: 82167 - RNA, 25 nt, Artificial Sequence
  Description of Artificial Sequence: Synthetic oligonucleotide
ugcaguaaagauccuaaagguuguc

SEQ ID NO: 82168 - RNA, 25 nt, Artificial Sequence
  Description of Artificial Sequence: Synthetic oligonucleotide
aguaaagauccuaaagguugucgac

SEQ ID NO: 82169 - RNA, 25 nt, Artificial Sequence
  Description of Artificial Sequence: Synthetic oligonucleotide
ugacaaaggacaaccuggcaauugu

SEQ ID NO: 82170 - RNA, 25 nt, Artificial Sequence
  Description of Artificial Sequence: Synthetic oligonucleotide
gcaauugugacccaguggugcgagg

SEQ ID NO: 82171 - RNA, 25 nt, Artificial Sequence
  Description of Artificial Sequence: Synthetic oligonucleotide
aacaucauccauagagacaugaaau

SEQ ID NO: 82172 - RNA, 25 nt, Artificial Sequence
  Description of Artificial Sequence: Synthetic oligonucleotide
ugaaauccaacaauauauuucucca

SEQ ID NO: 82173 - RNA, 25 nt, Artificial Sequence
  Description of Artificial Sequence: Synthetic oligonucleotide
aacaauauauuucuccaugaaggcu

SEQ ID NO: 82174 - RNA, 25 nt, Artificial Sequence
  Description of Artificial Sequence: Synthetic oligonucleotide
aacaguaaagucacgcuggaguggu

SEQ ID NO: 82175 - RNA, 25 nt, Artificial Sequence
  Description of Artificial Sequence: Synthetic oligonucleotide
ugugaagaaaguaaaggaagagagg

SEQ ID NO: 82176 - RNA, 25 nt, Artificial Sequence
  Description of Artificial Sequence: Synthetic oligonucleotide
cuuccgagccauccuugcaucgggc

SEQ ID NO: 82177 - RNA, 25 nt, Artificial Sequence
  Description of Artificial Sequence: Synthetic oligonucleotide
aauggagguugaauauccuacugug

SEQ ID NO: 82178 - RNA, 25 nt, Artificial Sequence
  Description of Artificial Sequence: Synthetic oligonucleotide
ggagguugaauauccuacuguguaa

SEQ ID NO: 82179 - RNA, 25 nt, Artificial Sequence
  Description of Artificial Sequence: Synthetic oligonucleotide
auuuugaguuuucccuuguagugua

SEQ ID NO: 82180 - RNA, 25 nt, Artificial Sequence
  Description of Artificial Sequence: Synthetic oligonucleotide
uauccuguuuguucuuuguugauug

SEQ ID NO: 82181 - RNA, 25 nt, Artificial Sequence
  Description of Artificial Sequence: Synthetic oligonucleotide
ccuguuuguucuuuguugauugaaa

SEQ ID NO: 82182 - RNA, 25 nt, Artificial Sequence
  Description of Artificial Sequence: Synthetic oligonucleotide
cucuacagccuucuuuuucuuccau

SEQ ID NO: 82183 - RNA, 25 nt, Artificial Sequence
  Description of Artificial Sequence: Synthetic oligonucleotide
ucuuccauagcuaaucuuccuucua

SEQ ID NO: 82184 - RNA, 25 nt, Artificial Sequence
  Description of Artificial Sequence: Synthetic oligonucleotide
auaaucuuccuguugaaugcuucau

SEQ ID NO: 82185 - RNA, 25 nt, Artificial Sequence
  Description of Artificial Sequence: Synthetic oligonucleotide
uaaucuuccuguugaaugcuucaug

SEQ ID NO: 82186 - RNA, 25 nt, Artificial Sequence
  Description of Artificial Sequence: Synthetic oligonucleotide
cuucaugacuugaauucuacuuuga

SEQ ID NO: 82187 - RNA, 25 nt, Artificial Sequence
  Description of Artificial Sequence: Synthetic oligonucleotide
aagagggagagaagcaacuacagac

SEQ ID NO: 82188 - RNA, 25 nt, Artificial Sequence
  Description of Artificial Sequence: Synthetic oligonucleotide
cgucuccuaccagaccaaggucaac

SEQ ID NO: 82189 - RNA, 25 nt, Artificial Sequence
  Description of Artificial Sequence: Synthetic oligonucleotide
gaucaaucggcccgacuaucucgac

SEQ ID NO: 82190 - RNA, 25 nt, Artificial Sequence
  Description of Artificial Sequence: Synthetic oligonucleotide
ggacgaacauccaaccuucccaaac

SEQ ID NO: 82191 - RNA, 25 nt, Artificial Sequence
  Description of Artificial Sequence: Synthetic oligonucleotide
agggucggaacccaagcuuagaacu

SEQ ID NO: 82192 - RNA, 25 nt, Artificial Sequence
  Description of Artificial Sequence: Synthetic oligonucleotide
ucggaacccaagcuuagaacuuuaa

SEQ ID NO: 82193 - RNA, 25 nt, Artificial Sequence
  Description of Artificial Sequence: Synthetic oligonucleotide
acccaagcuuagaacuuuaagcaac

SEQ ID NO: 82194 - RNA, 25 nt, Artificial Sequence
  Description of Artificial Sequence: Synthetic oligonucleotide
gaacuuuaagcaacaagaccaccac

SEQ ID NO: 82195 - RNA, 25 nt, Artificial Sequence
  Description of Artificial Sequence: Synthetic oligonucleotide
acuauucaguggcgagaaauaaagu

SEQ ID NO: 82196 - RNA, 25 nt, Artificial Sequence
  Description of Artificial Sequence: Synthetic oligonucleotide
cuauucaguggcgagaaauaaaguu

SEQ ID NO: 82197 - RNA, 25 nt, Artificial Sequence
  Description of Artificial Sequence: Synthetic oligonucleotide
aaacacagauaacaggaaaugaucc

SEQ ID NO: 82198 - RNA, 25 nt, Artificial Sequence
  Description of Artificial Sequence: Synthetic oligonucleotide
cuuaagaaaagagaagaaaugaaac

SEQ ID NO: 82199 - RNA, 25 nt, Artificial Sequence
  Description of Artificial Sequence: Synthetic oligonucleotide
cugaaggaguguguuuccauccucc

SEQ ID NO: 82200 - RNA, 25 nt, Artificial Sequence
  Description of Artificial Sequence: Synthetic oligonucleotide
ucaccgcgggacugaaaaucuuuga

SEQ ID NO: 82201 - RNA, 25 nt, Artificial Sequence
  Description of Artificial Sequence: Synthetic oligonucleotide
agcagaaauaagcgugccguucagg

SEQ ID NO: 82202 - RNA, 25 nt, Artificial Sequence
  Description of Artificial Sequence: Synthetic oligonucleotide
aagcgugccguucaggguccagaag

SEQ ID NO: 82203 - RNA, 25 nt, Artificial Sequence
  Description of Artificial Sequence: Synthetic oligonucleotide
agaaacagucacucaagacugcuug

SEQ ID NO: 82204 - RNA, 25 nt, Artificial Sequence
  Description of Artificial Sequence: Synthetic oligonucleotide
agaggaagaagguccaugucuuugg

SEQ ID NO: 82205 - RNA, 25 nt, Artificial Sequence
  Description of Artificial Sequence: Synthetic oligonucleotide
uguauucaaaauaugccugaaacac

SEQ ID NO: 82206 - RNA, 25 nt, Artificial Sequence
  Description of Artificial Sequence: Synthetic oligonucleotide
auuuuccucccuuucucuguaccuc

SEQ ID NO: 82207 - RNA, 25 nt, Artificial Sequence
  Description of Artificial Sequence: Synthetic oligonucleotide
caaagaaagauagagcaagacaaga

SEQ ID NO: 82208 - RNA, 25 nt, Artificial Sequence
  Description of Artificial Sequence: Synthetic oligonucleotide
aagaaagauagagcaagacaagaaa

SEQ ID NO: 82209 - RNA, 25 nt, Artificial Sequence
  Description of Artificial Sequence: Synthetic oligonucleotide
gaaagcauuuguuuguacaagaucc

SEQ ID NO: 82210 - RNA, 25 nt, Artificial Sequence
  Description of Artificial Sequence: Synthetic oligonucleotide
ugaguuaaacgaacguacuugcaga

SEQ ID NO: 82211 - RNA, 25 nt, Artificial Sequence
  Description of Artificial Sequence: Synthetic oligonucleotide
acugauacagaacgaucgauacaga

SEQ ID NO: 82212 - RNA, 25 nt, Artificial Sequence
  Description of Artificial Sequence: Synthetic oligonucleotide
auauuauauauauauaaaaauaaau

SEQ ID NO: 82213 - RNA, 25 nt, Artificial Sequence
  Description of Artificial Sequence: Synthetic oligonucleotide
auuauauauauauaaaaauaaauau

SEQ ID NO: 82214 - RNA, 25 nt, Artificial Sequence
  Description of Artificial Sequence: Synthetic oligonucleotide
ucacuggauguauuugacugcugug

SEQ ID NO: 82215 - RNA, 25 nt, Artificial Sequence
  Description of Artificial Sequence: Synthetic oligonucleotide
cagggaagaggaggagaugagagac

SEQ ID NO: 82216 - RNA, 25 nt, Artificial Sequence
  Description of Artificial Sequence: Synthetic oligonucleotide
augaucuuuuuuuugucccacuugg

SEQ ID NO: 82217 - RNA, 27 nt, Artificial Sequence
  Description of Artificial Sequence: Synthetic oligonucleotide
ggccgugaacuccucaucaaaauaccu

SEQ ID NO: 82218 - RNA, 27 nt, Artificial Sequence
  Description of Artificial Sequence: Synthetic oligonucleotide
uggugugauggugaucaucugggccgu

SEQ ID NO: 82219 - RNA, 27 nt, Artificial Sequence
  Description of Artificial Sequence: Synthetic oligonucleotide
aaacccgcaggauaguuuucuucccua

SEQ ID NO: 82220 - RNA, 27 nt, Artificial Sequence
  Description of Artificial Sequence: Synthetic oligonucleotide
caaacuggaugaaauaaauuaaaaccc

SEQ ID NO: 82221 - RNA, 27 nt, Artificial Sequence
  Description of Artificial Sequence: Synthetic oligonucleotide
agaaguccuuaacauuucccuacguga

SEQ ID NO: 82222 - RNA, 27 nt, Artificial Sequence
  Description of Artificial Sequence: Synthetic oligonucleotide
cucugucccacuggguaaacccuggcc

SEQ ID NO: 82223 - RNA, 27 nt, Artificial Sequence
  Description of Artificial Sequence: Synthetic oligonucleotide
cacaauaacaaauuuaaaccuugcucc

SEQ ID NO: 82224 - RNA, 27 nt, Artificial Sequence
  Description of Artificial Sequence: Synthetic oligonucleotide
aaaugcauuugaacaacauaauacaca

SEQ ID NO: 82225 - RNA, 27 nt, Artificial Sequence
  Description of Artificial Sequence: Synthetic oligonucleotide
ggcuuuccugucacaaagauuaaaaac

SEQ ID NO: 82226 - RNA, 27 nt, Artificial Sequence
  Description of Artificial Sequence: Synthetic oligonucleotide
agggcuuuccugucacaaagauuaaaa

SEQ ID NO: 82227 - RNA, 27 nt, Artificial Sequence
  Description of Artificial Sequence: Synthetic oligonucleotide
ggccaugcugggagacauaagcagcag

SEQ ID NO: 82228 - RNA, 27 nt, Artificial Sequence
  Description of Artificial Sequence: Synthetic oligonucleotide
ucagggagaagcuucugaaacacuucu

SEQ ID NO: 82229 - RNA, 27 nt, Artificial Sequence
  Description of Artificial Sequence: Synthetic oligonucleotide
aagggcuucuuccuuauugauggucag

SEQ ID NO: 82230 - RNA, 27 nt, Artificial Sequence
  Description of Artificial Sequence: Synthetic oligonucleotide
ugaagggcuucuuccuuauugaugguc

SEQ ID NO: 82231 - RNA, 27 nt, Artificial Sequence
  Description of Artificial Sequence: Synthetic oligonucleotide
cgcugaagggcuucuuccuuauugaug

SEQ ID NO: 82232 - RNA, 27 nt, Artificial Sequence
  Description of Artificial Sequence: Synthetic oligonucleotide
gccgcugaagggcuucuuccuuauuga

SEQ ID NO: 82233 - RNA, 27 nt, Artificial Sequence
  Description of Artificial Sequence: Synthetic oligonucleotide
acuggccgcugaagggcuucuuccuua

SEQ ID NO: 82234 - RNA, 27 nt, Artificial Sequence
  Description of Artificial Sequence: Synthetic oligonucleotide
cggagcuuuucaccuuuaguuaugcuu

SEQ ID NO: 82235 - RNA, 27 nt, Artificial Sequence
  Description of Artificial Sequence: Synthetic oligonucleotide
ccggagcuuuucaccuuuaguuaugcu

SEQ ID NO: 82236 - RNA, 27 nt, Artificial Sequence
  Description of Artificial Sequence: Synthetic oligonucleotide
cagacuguugacuggcgugauguaguu

SEQ ID NO: 82237 - RNA, 27 nt, Artificial Sequence
  Description of Artificial Sequence: Synthetic oligonucleotide
cuuuugaacucugcuuaaauccagugg

SEQ ID NO: 82238 - RNA, 27 nt, Artificial Sequence
  Description of Artificial Sequence: Synthetic oligonucleotide
gcuuuugaacucugcuuaaauccagug

SEQ ID NO: 82239 - RNA, 27 nt, Artificial Sequence
  Description of Artificial Sequence: Synthetic oligonucleotide
agggcuuuugaacucugcuuaaaucca

SEQ ID NO: 82240 - RNA, 27 nt, Artificial Sequence
  Description of Artificial Sequence: Synthetic oligonucleotide
aagggcuuuugaacucugcuuaaaucc

SEQ ID NO: 82241 - RNA, 27 nt, Artificial Sequence
  Description of Artificial Sequence: Synthetic oligonucleotide
ugaagggcuuuugaacucugcuuaaau

SEQ ID NO: 82242 - RNA, 27 nt, Artificial Sequence
  Description of Artificial Sequence: Synthetic oligonucleotide
cugaagggcuuuugaacucugcuuaaa

SEQ ID NO: 82243 - RNA, 27 nt, Artificial Sequence
  Description of Artificial Sequence: Synthetic oligonucleotide
cgcugaagggcuuuugaacucugcuua

SEQ ID NO: 82244 - RNA, 27 nt, Artificial Sequence
  Description of Artificial Sequence: Synthetic oligonucleotide
cgagcggcuucacucagacccugaggc

SEQ ID NO: 82245 - RNA, 27 nt, Artificial Sequence
  Description of Artificial Sequence: Synthetic oligonucleotide
uugacuggcgugauguaguugcuuggg

SEQ ID NO: 82246 - RNA, 27 nt, Artificial Sequence
  Description of Artificial Sequence: Synthetic oligonucleotide
cacgcaccaagaagcugccauugaucc

SEQ ID NO: 82247 - RNA, 27 nt, Artificial Sequence
  Description of Artificial Sequence: Synthetic oligonucleotide
cugaugaauccaaugugggcuggaauc

SEQ ID NO: 82248 - RNA, 27 nt, Artificial Sequence
  Description of Artificial Sequence: Synthetic oligonucleotide
cuuagguauuccacauucucagcugug

SEQ ID NO: 82249 - RNA, 27 nt, Artificial Sequence
  Description of Artificial Sequence: Synthetic oligonucleotide
ugagccucaaauuaggagauacguuuu

SEQ ID NO: 82250 - RNA, 27 nt, Artificial Sequence
  Description of Artificial Sequence: Synthetic oligonucleotide
ccaauuguagagaaauuauuuuaggaa

SEQ ID NO: 82251 - RNA, 27 nt, Artificial Sequence
  Description of Artificial Sequence: Synthetic oligonucleotide
ggcuccuaacuagcugaaucuuccaau

SEQ ID NO: 82252 - RNA, 27 nt, Artificial Sequence
  Description of Artificial Sequence: Synthetic oligonucleotide
guggauauugacuaggagaguuuaaaa

SEQ ID NO: 82253 - RNA, 27 nt, Artificial Sequence
  Description of Artificial Sequence: Synthetic oligonucleotide
ugugacugaacauaacuguaggcugaa

SEQ ID NO: 82254 - RNA, 27 nt, Artificial Sequence
  Description of Artificial Sequence: Synthetic oligonucleotide
guaugugugugugacugaacauaacug

SEQ ID NO: 82255 - RNA, 27 nt, Artificial Sequence
  Description of Artificial Sequence: Synthetic oligonucleotide
aagcaaaaggaacauuuuguaugugug

SEQ ID NO: 82256 - RNA, 27 nt, Artificial Sequence
  Description of Artificial Sequence: Synthetic oligonucleotide
aaaaauuacuuuaaaagcaaaaggaac

SEQ ID NO: 82257 - RNA, 27 nt, Artificial Sequence
  Description of Artificial Sequence: Synthetic oligonucleotide
ccauugacuguugcuucacaggucaga

SEQ ID NO: 82258 - RNA, 27 nt, Artificial Sequence
  Description of Artificial Sequence: Synthetic oligonucleotide
auugguuugucgaugugugagauaguu

SEQ ID NO: 82259 - RNA, 27 nt, Artificial Sequence
  Description of Artificial Sequence: Synthetic oligonucleotide
agugguagcaguacaauugaggacaag

SEQ ID NO: 82260 - RNA, 27 nt, Artificial Sequence
  Description of Artificial Sequence: Synthetic oligonucleotide
uaagaccgcuugccagcuacgguuuca

SEQ ID NO: 82261 - RNA, 27 nt, Artificial Sequence
  Description of Artificial Sequence: Synthetic oligonucleotide
agccgguaagaccgcuugccagcuacg

SEQ ID NO: 82262 - RNA, 27 nt, Artificial Sequence
  Description of Artificial Sequence: Synthetic oligonucleotide
gguaacccaucuuuuaaccauacaacu

SEQ ID NO: 82263 - RNA, 27 nt, Artificial Sequence
  Description of Artificial Sequence: Synthetic oligonucleotide
ucgcagguaacccaucuuuuaaccaua

SEQ ID NO: 82264 - RNA, 27 nt, Artificial Sequence
  Description of Artificial Sequence: Synthetic oligonucleotide
cucagcaagauuguauaauucccugca

SEQ ID NO: 82265 - RNA, 27 nt, Artificial Sequence
  Description of Artificial Sequence: Synthetic oligonucleotide
acuguuuuaugcucagcaagauuguau

SEQ ID NO: 82266 - RNA, 27 nt, Artificial Sequence
  Description of Artificial Sequence: Synthetic oligonucleotide
aggauaaaggacucuucauuauuggaa

SEQ ID NO: 82267 - RNA, 27 nt, Artificial Sequence
  Description of Artificial Sequence: Synthetic oligonucleotide
caacuugcguuggaacauccaaagugu

SEQ ID NO: 82268 - RNA, 27 nt, Artificial Sequence
  Description of Artificial Sequence: Synthetic oligonucleotide
augguuucaguuuaguggaagcauuua

SEQ ID NO: 82269 - RNA, 27 nt, Artificial Sequence
  Description of Artificial Sequence: Synthetic oligonucleotide
auauuuaacaaagucaaacuuucucac

SEQ ID NO: 82270 - RNA, 27 nt, Artificial Sequence
  Description of Artificial Sequence: Synthetic oligonucleotide
aacuuuuaauauacaguaguucuuuuc

SEQ ID NO: 82271 - RNA, 27 nt, Artificial Sequence
  Description of Artificial Sequence: Synthetic oligonucleotide
guuaagucaaaacccguauuucuaaag

SEQ ID NO: 82272 - RNA, 27 nt, Artificial Sequence
  Description of Artificial Sequence: Synthetic oligonucleotide
gugcugaguuugcuguacccauguuga

SEQ ID NO: 82273 - RNA, 27 nt, Artificial Sequence
  Description of Artificial Sequence: Synthetic oligonucleotide
ugaggucagcaucuucugugucuuuac

SEQ ID NO: 82274 - RNA, 27 nt, Artificial Sequence
  Description of Artificial Sequence: Synthetic oligonucleotide
gcgaucugaauaaaccucccuacuagc

SEQ ID NO: 82275 - RNA, 27 nt, Artificial Sequence
  Description of Artificial Sequence: Synthetic oligonucleotide
aucccagaacccugcugcagaaggcca

SEQ ID NO: 82276 - RNA, 27 nt, Artificial Sequence
  Description of Artificial Sequence: Synthetic oligonucleotide
cauaauuuccaauauguaccagaccuu

SEQ ID NO: 82277 - RNA, 27 nt, Artificial Sequence
  Description of Artificial Sequence: Synthetic oligonucleotide
cuagugcuuccaucggaaggacuaggu

SEQ ID NO: 82278 - RNA, 27 nt, Artificial Sequence
  Description of Artificial Sequence: Synthetic oligonucleotide
uccacauaaaaacaauauucacuggga

SEQ ID NO: 82279 - RNA, 27 nt, Artificial Sequence
  Description of Artificial Sequence: Synthetic oligonucleotide
ucuaccaauuccaacuugaauucauug

SEQ ID NO: 82280 - RNA, 27 nt, Artificial Sequence
  Description of Artificial Sequence: Synthetic oligonucleotide
ucuccaagucuaaaucuguguccugag

SEQ ID NO: 82281 - RNA, 27 nt, Artificial Sequence
  Description of Artificial Sequence: Synthetic oligonucleotide
uggaauacuguaacugugcuuugagga

SEQ ID NO: 82282 - RNA, 27 nt, Artificial Sequence
  Description of Artificial Sequence: Synthetic oligonucleotide
uuaauucaucagugguggcagugguag

SEQ ID NO: 82283 - RNA, 27 nt, Artificial Sequence
  Description of Artificial Sequence: Synthetic oligonucleotide
gugaugauguggcacuaguaguuucuu

SEQ ID NO: 82284 - RNA, 27 nt, Artificial Sequence
  Description of Artificial Sequence: Synthetic oligonucleotide
ucuguuuggugaggcuguccgacuuug

SEQ ID NO: 82285 - RNA, 27 nt, Artificial Sequence
  Description of Artificial Sequence: Synthetic oligonucleotide
ccaucauguuccauuuuucgcuuucuc

SEQ ID NO: 82286 - RNA, 27 nt, Artificial Sequence
  Description of Artificial Sequence: Synthetic oligonucleotide
gcagucuacaugcuaaaucagagggua

SEQ ID NO: 82287 - RNA, 27 nt, Artificial Sequence
  Description of Artificial Sequence: Synthetic oligonucleotide
cauaaauagauccuuaaauagcucaaa

SEQ ID NO: 82288 - RNA, 27 nt, Artificial Sequence
  Description of Artificial Sequence: Synthetic oligonucleotide
ugauaauagugcuuuuucaccuuuuuc

SEQ ID NO: 82289 - RNA, 27 nt, Artificial Sequence
  Description of Artificial Sequence: Synthetic oligonucleotide
gcagaacugauaauagugcuuuuucac

SEQ ID NO: 82290 - RNA, 27 nt, Artificial Sequence
  Description of Artificial Sequence: Synthetic oligonucleotide
guagguuuaaucuuucuuuucagccau

SEQ ID NO: 82291 - RNA, 27 nt, Artificial Sequence
  Description of Artificial Sequence: Synthetic oligonucleotide
agaaggauuuuauuauaaggguuuaau

SEQ ID NO: 82292 - RNA, 27 nt, Artificial Sequence
  Description of Artificial Sequence: Synthetic oligonucleotide
gucuacagcauuggcuaauaguaugaa

SEQ ID NO: 82293 - RNA, 27 nt, Artificial Sequence
  Description of Artificial Sequence: Synthetic oligonucleotide
cuauuccuaucaaaaugcuucugucua

SEQ ID NO: 82294 - RNA, 27 nt, Artificial Sequence
  Description of Artificial Sequence: Synthetic oligonucleotide
ucagggccauuaucuuauuugcucuau

SEQ ID NO: 82295 - RNA, 27 nt, Artificial Sequence
  Description of Artificial Sequence: Synthetic oligonucleotide
ugcuugaggaagagaaaaauguugguc

SEQ ID NO: 82296 - RNA, 27 nt, Artificial Sequence
  Description of Artificial Sequence: Synthetic oligonucleotide
ugggcugaacuuuucucauacuuaaag

SEQ ID NO: 82297 - RNA, 27 nt, Artificial Sequence
  Description of Artificial Sequence: Synthetic oligonucleotide
gguucagcagccaucuuuauuccugcg

SEQ ID NO: 82298 - RNA, 27 nt, Artificial Sequence
  Description of Artificial Sequence: Synthetic oligonucleotide
ugaagagaacuuggucauucaaauuuc

SEQ ID NO: 82299 - RNA, 27 nt, Artificial Sequence
  Description of Artificial Sequence: Synthetic oligonucleotide
cucuaggcuggcuaucuuuauacauac

SEQ ID NO: 82300 - RNA, 27 nt, Artificial Sequence
  Description of Artificial Sequence: Synthetic oligonucleotide
acacuucacagagauaguuacagccau

SEQ ID NO: 82301 - RNA, 27 nt, Artificial Sequence
  Description of Artificial Sequence: Synthetic oligonucleotide
uugaaauuuucucacacuucacagaga

SEQ ID NO: 82302 - RNA, 27 nt, Artificial Sequence
  Description of Artificial Sequence: Synthetic oligonucleotide
ucaggaggauucauuuccuuaaaggaa

SEQ ID NO: 82303 - RNA, 27 nt, Artificial Sequence
  Description of Artificial Sequence: Synthetic oligonucleotide
auaugaugucacuuuuuguauccuuga

SEQ ID NO: 82304 - RNA, 27 nt, Artificial Sequence
  Description of Artificial Sequence: Synthetic oligonucleotide
uaugaugaagauucaaauugcaucuua

SEQ ID NO: 82305 - RNA, 27 nt, Artificial Sequence
  Description of Artificial Sequence: Synthetic oligonucleotide
uuaauagcuagucuucguuuugaacag

SEQ ID NO: 82306 - RNA, 27 nt, Artificial Sequence
  Description of Artificial Sequence: Synthetic oligonucleotide
auuuuuaguagagaugagguuucacca

SEQ ID NO: 82307 - RNA, 27 nt, Artificial Sequence
  Description of Artificial Sequence: Synthetic oligonucleotide
aggcgagauagagcuucucuuucguuc

SEQ ID NO: 82308 - RNA, 27 nt, Artificial Sequence
  Description of Artificial Sequence: Synthetic oligonucleotide
aacuggaccgaaggcgcuuguggagaa

SEQ ID NO: 82309 - RNA, 27 nt, Artificial Sequence
  Description of Artificial Sequence: Synthetic oligonucleotide
gcggcuacaucuuuggaaucuucuccu

SEQ ID NO: 82310 - RNA, 27 nt, Artificial Sequence
  Description of Artificial Sequence: Synthetic oligonucleotide
caagucuccucauugaauccagauugg

SEQ ID NO: 82311 - RNA, 27 nt, Artificial Sequence
  Description of Artificial Sequence: Synthetic oligonucleotide
uccucacuacucucaaaucuguucugg

SEQ ID NO: 82312 - RNA, 27 nt, Artificial Sequence
  Description of Artificial Sequence: Synthetic oligonucleotide
uuuguacucaucugcacagcucuggcu

SEQ ID NO: 82313 - RNA, 27 nt, Artificial Sequence
  Description of Artificial Sequence: Synthetic oligonucleotide
gcccauuaacaacaacaaucugaggug

SEQ ID NO: 82314 - RNA, 27 nt, Artificial Sequence
  Description of Artificial Sequence: Synthetic oligonucleotide
aauaaauuaaaaauaauuaaaauagug

SEQ ID NO: 82315 - RNA, 27 nt, Artificial Sequence
  Description of Artificial Sequence: Synthetic oligonucleotide
cauauuuaaauauuaauaaauuaaaaa

SEQ ID NO: 82316 - RNA, 27 nt, Artificial Sequence
  Description of Artificial Sequence: Synthetic oligonucleotide
gaaacaaaggauauucaaacugcauag

SEQ ID NO: 82317 - RNA, 27 nt, Artificial Sequence
  Description of Artificial Sequence: Synthetic oligonucleotide
caaacacuuagacgccagcagcauggg

SEQ ID NO: 82318 - RNA, 27 nt, Artificial Sequence
  Description of Artificial Sequence: Synthetic oligonucleotide
uuugucacaggugaaaugcacaucuga

SEQ ID NO: 82319 - RNA, 27 nt, Artificial Sequence
  Description of Artificial Sequence: Synthetic oligonucleotide
uaauucagccuggcacagguuuugauc

SEQ ID NO: 82320 - RNA, 27 nt, Artificial Sequence
  Description of Artificial Sequence: Synthetic oligonucleotide
auuguaagaaugacuacccacauucac

SEQ ID NO: 82321 - RNA, 27 nt, Artificial Sequence
  Description of Artificial Sequence: Synthetic oligonucleotide
caauuguaagaaugacuacccacauuc

SEQ ID NO: 82322 - RNA, 27 nt, Artificial Sequence
  Description of Artificial Sequence: Synthetic oligonucleotide
guacacucucugaugcucauuuucaua

SEQ ID NO: 82323 - RNA, 27 nt, Artificial Sequence
  Description of Artificial Sequence: Synthetic oligonucleotide
cugcugaguucuacaugaaaagcaaau

SEQ ID NO: 82324 - RNA, 27 nt, Artificial Sequence
  Description of Artificial Sequence: Synthetic oligonucleotide
uacugaaaauaaauauagaaauacaac

SEQ ID NO: 82325 - RNA, 27 nt, Artificial Sequence
  Description of Artificial Sequence: Synthetic oligonucleotide
uuccauuuaagaaacauuaaucaaaac

SEQ ID NO: 82326 - RNA, 27 nt, Artificial Sequence
  Description of Artificial Sequence: Synthetic oligonucleotide
acaauuuuaggcacuauacacguuguu

SEQ ID NO: 82327 - RNA, 27 nt, Artificial Sequence
  Description of Artificial Sequence: Synthetic oligonucleotide
ccagauguuaguagccaaggauauggu

SEQ ID NO: 82328 - RNA, 27 nt, Artificial Sequence
  Description of Artificial Sequence: Synthetic oligonucleotide
agcucacagucuccagauguuaguagc

SEQ ID NO: 82329 - RNA, 27 nt, Artificial Sequence
  Description of Artificial Sequence: Synthetic oligonucleotide
auuaauaaaaagcacacaacuuauggc

SEQ ID NO: 82330 - RNA, 27 nt, Artificial Sequence
  Description of Artificial Sequence: Synthetic oligonucleotide
aauguaagaagagccaaaaugaugcau

SEQ ID NO: 82331 - RNA, 27 nt, Artificial Sequence
  Description of Artificial Sequence: Synthetic oligonucleotide
acauuuuuacaaauguaagaagagcca

SEQ ID NO: 82332 - RNA, 27 nt, Artificial Sequence
  Description of Artificial Sequence: Synthetic oligonucleotide
aauaugaauuaagaugaccuaaucugu

SEQ ID NO: 82333 - RNA, 27 nt, Artificial Sequence
  Description of Artificial Sequence: Synthetic oligonucleotide
ucaugauuaguucuuucaauuccaucc

SEQ ID NO: 82334 - RNA, 27 nt, Artificial Sequence
  Description of Artificial Sequence: Synthetic oligonucleotide
cccaagagcagaaggaaugagugugca

SEQ ID NO: 82335 - RNA, 27 nt, Artificial Sequence
  Description of Artificial Sequence: Synthetic oligonucleotide
cucaaagcuacugguuaccucuacacc

SEQ ID NO: 82336 - RNA, 27 nt, Artificial Sequence
  Description of Artificial Sequence: Synthetic oligonucleotide
ugaaauauuacguggcaugugguuggg

SEQ ID NO: 82337 - RNA, 27 nt, Artificial Sequence
  Description of Artificial Sequence: Synthetic oligonucleotide
agugaagagaauaacuuguuuccgaag

SEQ ID NO: 82338 - RNA, 27 nt, Artificial Sequence
  Description of Artificial Sequence: Synthetic oligonucleotide
uuucuuagcauuaguuauugggaguga

SEQ ID NO: 82339 - RNA, 27 nt, Artificial Sequence
  Description of Artificial Sequence: Synthetic oligonucleotide
uugauuuucagcauuucuuagcauuag

SEQ ID NO: 82340 - RNA, 27 nt, Artificial Sequence
  Description of Artificial Sequence: Synthetic oligonucleotide
aaaguaaucauauuuagagaaagacag

SEQ ID NO: 82341 - RNA, 27 nt, Artificial Sequence
  Description of Artificial Sequence: Synthetic oligonucleotide
uguagaacaaaaugccugaaauucagc

SEQ ID NO: 82342 - RNA, 27 nt, Artificial Sequence
  Description of Artificial Sequence: Synthetic oligonucleotide
gagagucccgggugagagggaaucgcc

SEQ ID NO: 82343 - RNA, 27 nt, Artificial Sequence
  Description of Artificial Sequence: Synthetic oligonucleotide
cuuuacuuuaaagguucacuuuccuug

SEQ ID NO: 82344 - RNA, 27 nt, Artificial Sequence
  Description of Artificial Sequence: Synthetic oligonucleotide
ccaggcuuccagagcaugcagccuccu

SEQ ID NO: 82345 - RNA, 27 nt, Artificial Sequence
  Description of Artificial Sequence: Synthetic oligonucleotide
cucucuuuuguuuucuguucagagaaa

SEQ ID NO: 82346 - RNA, 27 nt, Artificial Sequence
  Description of Artificial Sequence: Synthetic oligonucleotide
cggcauaacugauuacagccaaguuca

SEQ ID NO: 82347 - RNA, 27 nt, Artificial Sequence
  Description of Artificial Sequence: Synthetic oligonucleotide
uggacuucuuuuaauuuuggcuucuuc

SEQ ID NO: 82348 - RNA, 27 nt, Artificial Sequence
  Description of Artificial Sequence: Synthetic oligonucleotide
uaaccucaccuggacuucuuuuaauuu

SEQ ID NO: 82349 - RNA, 27 nt, Artificial Sequence
  Description of Artificial Sequence: Synthetic oligonucleotide
guccucuucccgauaauccggauucag

SEQ ID NO: 82350 - RNA, 27 nt, Artificial Sequence
  Description of Artificial Sequence: Synthetic oligonucleotide
acaauacuugcuuugaugucacauuaa

SEQ ID NO: 82351 - RNA, 27 nt, Artificial Sequence
  Description of Artificial Sequence: Synthetic oligonucleotide
gagugcuacaauacuugcuuugauguc

SEQ ID NO: 82352 - RNA, 27 nt, Artificial Sequence
  Description of Artificial Sequence: Synthetic oligonucleotide
auuugugguuuuguuuucucucucucu

SEQ ID NO: 82353 - RNA, 27 nt, Artificial Sequence
  Description of Artificial Sequence: Synthetic oligonucleotide
uguaugggcuuaaauacuacagcgagg

SEQ ID NO: 82354 - RNA, 27 nt, Artificial Sequence
  Description of Artificial Sequence: Synthetic oligonucleotide
cuguaugggcuuaaauacuacagcgag

SEQ ID NO: 82355 - RNA, 27 nt, Artificial Sequence
  Description of Artificial Sequence: Synthetic oligonucleotide
ggaagguuucuguaugggcuuaaauac

SEQ ID NO: 82356 - RNA, 27 nt, Artificial Sequence
  Description of Artificial Sequence: Synthetic oligonucleotide
guagguauaccauguuuauuuuaauac

SEQ ID NO: 82357 - RNA, 27 nt, Artificial Sequence
  Description of Artificial Sequence: Synthetic oligonucleotide
uccgaaaacuggccgaucagaacagcc

SEQ ID NO: 82358 - RNA, 27 nt, Artificial Sequence
  Description of Artificial Sequence: Synthetic oligonucleotide
cccuguuccaaaguucaaauuauuugu

SEQ ID NO: 82359 - RNA, 27 nt, Artificial Sequence
  Description of Artificial Sequence: Synthetic oligonucleotide
acuggaaaguuaaauuaaggucgcaau

SEQ ID NO: 82360 - RNA, 27 nt, Artificial Sequence
  Description of Artificial Sequence: Synthetic oligonucleotide
caaaaccaaacuuuagcuuucucagcc

SEQ ID NO: 82361 - RNA, 27 nt, Artificial Sequence
  Description of Artificial Sequence: Synthetic oligonucleotide
uacagugggaaguagcaucuuuacuuu

SEQ ID NO: 82362 - RNA, 27 nt, Artificial Sequence
  Description of Artificial Sequence: Synthetic oligonucleotide
ucauaugguaucagcaauuaagcagua

SEQ ID NO: 82363 - RNA, 27 nt, Artificial Sequence
  Description of Artificial Sequence: Synthetic oligonucleotide
cagcccauguuucauucauaugguauc

SEQ ID NO: 82364 - RNA, 27 nt, Artificial Sequence
  Description of Artificial Sequence: Synthetic oligonucleotide
uaugaaaaaguuggauaagaaaguugg

SEQ ID NO: 82365 - RNA, 27 nt, Artificial Sequence
  Description of Artificial Sequence: Synthetic oligonucleotide
uccggccucaugaugucaugcaaggcu

SEQ ID NO: 82366 - RNA, 27 nt, Artificial Sequence
  Description of Artificial Sequence: Synthetic oligonucleotide
acaaaugcagucauauacaaauucagg

SEQ ID NO: 82367 - RNA, 27 nt, Artificial Sequence
  Description of Artificial Sequence: Synthetic oligonucleotide
gguaguaaacauucuacuaggauucuu

SEQ ID NO: 82368 - RNA, 27 nt, Artificial Sequence
  Description of Artificial Sequence: Synthetic oligonucleotide
uuucaucaaaaaauucuucccuuucug

SEQ ID NO: 82369 - RNA, 27 nt, Artificial Sequence
  Description of Artificial Sequence: Synthetic oligonucleotide
aaauucacacacuggcaugccgauagc

SEQ ID NO: 82370 - RNA, 27 nt, Artificial Sequence
  Description of Artificial Sequence: Synthetic oligonucleotide
acauacauugcucuacuaugaggugaa

SEQ ID NO: 82371 - RNA, 27 nt, Artificial Sequence
  Description of Artificial Sequence: Synthetic oligonucleotide
uauauaugugcuuuggcaauucuggug

SEQ ID NO: 82372 - RNA, 27 nt, Artificial Sequence
  Description of Artificial Sequence: Synthetic oligonucleotide
ggagaaacuauuacccagaucaccacu

SEQ ID NO: 82373 - RNA, 27 nt, Artificial Sequence
  Description of Artificial Sequence: Synthetic oligonucleotide
auuuggagaaacuauuacccagaucac

SEQ ID NO: 82374 - RNA, 27 nt, Artificial Sequence
  Description of Artificial Sequence: Synthetic oligonucleotide
uuucuaggaaguauucaucacauccac

SEQ ID NO: 82375 - RNA, 27 nt, Artificial Sequence
  Description of Artificial Sequence: Synthetic oligonucleotide
cauauaugguguagcuguggaaaugcg

SEQ ID NO: 82376 - RNA, 27 nt, Artificial Sequence
  Description of Artificial Sequence: Synthetic oligonucleotide
cuccauucauauaugguguagcugugg

SEQ ID NO: 82377 - RNA, 27 nt, Artificial Sequence
  Description of Artificial Sequence: Synthetic oligonucleotide
aucuucuucucguguaagaacugcagc

SEQ ID NO: 82378 - RNA, 27 nt, Artificial Sequence
  Description of Artificial Sequence: Synthetic oligonucleotide
ucccuguaaaugaucuucuucucgugu

SEQ ID NO: 82379 - RNA, 27 nt, Artificial Sequence
  Description of Artificial Sequence: Synthetic oligonucleotide
gucccuguaaaugaucuucuucucgug

SEQ ID NO: 82380 - RNA, 27 nt, Artificial Sequence
  Description of Artificial Sequence: Synthetic oligonucleotide
ucaggucccuguaaaugaucuucuucu

SEQ ID NO: 82381 - RNA, 27 nt, Artificial Sequence
  Description of Artificial Sequence: Synthetic oligonucleotide
gaugcagucaaacaccucuuccucugu

SEQ ID NO: 82382 - RNA, 27 nt, Artificial Sequence
  Description of Artificial Sequence: Synthetic oligonucleotide
cgaugcagucaaacaccucuuccucug

SEQ ID NO: 82383 - RNA, 27 nt, Artificial Sequence
  Description of Artificial Sequence: Synthetic oligonucleotide
cccugugaacucgcccucaaaguagcg

SEQ ID NO: 82384 - RNA, 27 nt, Artificial Sequence
  Description of Artificial Sequence: Synthetic oligonucleotide
ggacagaggugccaggagaugcccuca

SEQ ID NO: 82385 - RNA, 27 nt, Artificial Sequence
  Description of Artificial Sequence: Synthetic oligonucleotide
uuaaaaagacaaaccauaucacuccuu

SEQ ID NO: 82386 - RNA, 27 nt, Artificial Sequence
  Description of Artificial Sequence: Synthetic oligonucleotide
cuuaaaaagacaaaccauaucacuccu

SEQ ID NO: 82387 - RNA, 27 nt, Artificial Sequence
  Description of Artificial Sequence: Synthetic oligonucleotide
gacaaccuuuaggaucuuuacugcaac

SEQ ID NO: 82388 - RNA, 27 nt, Artificial Sequence
  Description of Artificial Sequence: Synthetic oligonucleotide
gucgacaaccuuuaggaucuuuacugc

SEQ ID NO: 82389 - RNA, 27 nt, Artificial Sequence
  Description of Artificial Sequence: Synthetic oligonucleotide
acaauugccagguuguccuuugucaug

SEQ ID NO: 82390 - RNA, 27 nt, Artificial Sequence
  Description of Artificial Sequence: Synthetic oligonucleotide
ccucgcaccacugggucacaauugcca

SEQ ID NO: 82391 - RNA, 27 nt, Artificial Sequence
  Description of Artificial Sequence: Synthetic oligonucleotide
auuucaugucucuauggaugauguucu

SEQ ID NO: 82392 - RNA, 27 nt, Artificial Sequence
  Description of Artificial Sequence: Synthetic oligonucleotide
uggagaaauauauuguuggauuucaug

SEQ ID NO: 82393 - RNA, 27 nt, Artificial Sequence
  Description of Artificial Sequence: Synthetic oligonucleotide
agccuucauggagaaauauauuguugg

SEQ ID NO: 82394 - RNA, 27 nt, Artificial Sequence
  Description of Artificial Sequence: Synthetic oligonucleotide
accacuccagcgugacuuuacuguugc

SEQ ID NO: 82395 - RNA, 27 nt, Artificial Sequence
  Description of Artificial Sequence: Synthetic oligonucleotide
ccucucuuccuuuacuuucuucacaca

SEQ ID NO: 82396 - RNA, 27 nt, Artificial Sequence
  Description of Artificial Sequence: Synthetic oligonucleotide
gcccgaugcaaggauggcucggaagcg

SEQ ID NO: 82397 - RNA, 27 nt, Artificial Sequence
  Description of Artificial Sequence: Synthetic oligonucleotide
cacaguaggauauucaaccuccauuuc

SEQ ID NO: 82398 - RNA, 27 nt, Artificial Sequence
  Description of Artificial Sequence: Synthetic oligonucleotide
uuacacaguaggauauucaaccuccau

SEQ ID NO: 82399 - RNA, 27 nt, Artificial Sequence
  Description of Artificial Sequence: Synthetic oligonucleotide
uacacuacaagggaaaacucaaaaucu

SEQ ID NO: 82400 - RNA, 27 nt, Artificial Sequence
  Description of Artificial Sequence: Synthetic oligonucleotide
caaucaacaaagaacaaacaggauaaa

SEQ ID NO: 82401 - RNA, 27 nt, Artificial Sequence
  Description of Artificial Sequence: Synthetic oligonucleotide
uuucaaucaacaaagaacaaacaggau

SEQ ID NO: 82402 - RNA, 27 nt, Artificial Sequence
  Description of Artificial Sequence: Synthetic oligonucleotide
auggaagaaaaagaaggcuguagagaa

SEQ ID NO: 82403 - RNA, 27 nt, Artificial Sequence
  Description of Artificial Sequence: Synthetic oligonucleotide
uagaaggaagauuagcuauggaagaaa

SEQ ID NO: 82404 - RNA, 27 nt, Artificial Sequence
  Description of Artificial Sequence: Synthetic oligonucleotide
augaagcauucaacaggaagauuauuu

SEQ ID NO: 82405 - RNA, 27 nt, Artificial Sequence
  Description of Artificial Sequence: Synthetic oligonucleotide
caugaagcauucaacaggaagauuauu

SEQ ID NO: 82406 - RNA, 27 nt, Artificial Sequence
  Description of Artificial Sequence: Synthetic oligonucleotide
ucaaaguagaauucaagucaugaagca

SEQ ID NO: 82407 - RNA, 27 nt, Artificial Sequence
  Description of Artificial Sequence: Synthetic oligonucleotide
gucuguaguugcuucucucccucuuag

SEQ ID NO: 82408 - RNA, 27 nt, Artificial Sequence
  Description of Artificial Sequence: Synthetic oligonucleotide
guugaccuuggucugguaggagacggc

SEQ ID NO: 82409 - RNA, 27 nt, Artificial Sequence
  Description of Artificial Sequence: Synthetic oligonucleotide
gucgagauagucgggccgauugaucuc

SEQ ID NO: 82410 - RNA, 27 nt, Artificial Sequence
  Description of Artificial Sequence: Synthetic oligonucleotide
guuugggaagguuggauguucguccuc

SEQ ID NO: 82411 - RNA, 27 nt, Artificial Sequence
  Description of Artificial Sequence: Synthetic oligonucleotide
aguucuaagcuuggguuccgacccuaa

SEQ ID NO: 82412 - RNA, 27 nt, Artificial Sequence
  Description of Artificial Sequence: Synthetic oligonucleotide
uuaaaguucuaagcuuggguuccgacc

SEQ ID NO: 82413 - RNA, 27 nt, Artificial Sequence
  Description of Artificial Sequence: Synthetic oligonucleotide
guugcuuaaaguucuaagcuuggguuc

SEQ ID NO: 82414 - RNA, 27 nt, Artificial Sequence
  Description of Artificial Sequence: Synthetic oligonucleotide
gugguggucuuguugcuuaaaguucua

SEQ ID NO: 82415 - RNA, 27 nt, Artificial Sequence
  Description of Artificial Sequence: Synthetic oligonucleotide
acuuuauuucucgccacugaauaguag

SEQ ID NO: 82416 - RNA, 27 nt, Artificial Sequence
  Description of Artificial Sequence: Synthetic oligonucleotide
aacuuuauuucucgccacugaauagua

SEQ ID NO: 82417 - RNA, 27 nt, Artificial Sequence
  Description of Artificial Sequence: Synthetic oligonucleotide
ggaucauuuccuguuaucuguguuugu

SEQ ID NO: 82418 - RNA, 27 nt, Artificial Sequence
  Description of Artificial Sequence: Synthetic oligonucleotide
guuucauuucuucucuuuucuuaaggc

SEQ ID NO: 82419 - RNA, 27 nt, Artificial Sequence
  Description of Artificial Sequence: Synthetic oligonucleotide
ggaggauggaaacacacuccuucaguu

SEQ ID NO: 82420 - RNA, 27 nt, Artificial Sequence
  Description of Artificial Sequence: Synthetic oligonucleotide
ucaaagauuuucagucccgcggugaca

SEQ ID NO: 82421 - RNA, 27 nt, Artificial Sequence
  Description of Artificial Sequence: Synthetic oligonucleotide
ccugaacggcacgcuuauuucugcugu

SEQ ID NO: 82422 - RNA, 27 nt, Artificial Sequence
  Description of Artificial Sequence: Synthetic oligonucleotide
cuucuggacccugaacggcacgcuuau

SEQ ID NO: 82423 - RNA, 27 nt, Artificial Sequence
  Description of Artificial Sequence: Synthetic oligonucleotide
caagcagucuugagugacuguuucuuc

SEQ ID NO: 82424 - RNA, 27 nt, Artificial Sequence
  Description of Artificial Sequence: Synthetic oligonucleotide
ccaaagacauggaccuucuuccucuga

SEQ ID NO: 82425 - RNA, 27 nt, Artificial Sequence
  Description of Artificial Sequence: Synthetic oligonucleotide
guguuucaggcauauuuugaauacauc

SEQ ID NO: 82426 - RNA, 27 nt, Artificial Sequence
  Description of Artificial Sequence: Synthetic oligonucleotide
gagguacagagaaagggaggaaaauag

SEQ ID NO: 82427 - RNA, 27 nt, Artificial Sequence
  Description of Artificial Sequence: Synthetic oligonucleotide
ucuugucuugcucuaucuuucuuuggu

SEQ ID NO: 82428 - RNA, 27 nt, Artificial Sequence
  Description of Artificial Sequence: Synthetic oligonucleotide
uuucuugucuugcucuaucuuucuuug

SEQ ID NO: 82429 - RNA, 27 nt, Artificial Sequence
  Description of Artificial Sequence: Synthetic oligonucleotide
ggaucuuguacaaacaaaugcuuucuc

SEQ ID NO: 82430 - RNA, 27 nt, Artificial Sequence
  Description of Artificial Sequence: Synthetic oligonucleotide
ucugcaaguacguucguuuaacucaag

SEQ ID NO: 82431 - RNA, 27 nt, Artificial Sequence
  Description of Artificial Sequence: Synthetic oligonucleotide
ucuguaucgaucguucuguaucagucu

SEQ ID NO: 82432 - RNA, 27 nt, Artificial Sequence
  Description of Artificial Sequence: Synthetic oligonucleotide
auuuauuuuuauauauauauaauauau

SEQ ID NO: 82433 - RNA, 27 nt, Artificial Sequence
  Description of Artificial Sequence: Synthetic oligonucleotide
auauuuauuuuuauauauauauaauau

SEQ ID NO: 82434 - RNA, 27 nt, Artificial Sequence
  Description of Artificial Sequence: Synthetic oligonucleotide
cacagcagucaaauacauccagugaag

SEQ ID NO: 82435 - RNA, 27 nt, Artificial Sequence
  Description of Artificial Sequence: Synthetic oligonucleotide
gucucucaucuccuccucuucccuguc

SEQ ID NO: 82436 - RNA, 27 nt, Artificial Sequence
  Description of Artificial Sequence: Synthetic oligonucleotide
ccaagugggacaaaaaaaagaucaugc

SEQ ID NO: 82437 - RNA, 14 nt, Artificial Sequence
  Description of Artificial Sequence: Synthetic oligonucleotide
guauuuugaugagg

SEQ ID NO: 82438 - RNA, 12 nt, Artificial Sequence
  Description of Artificial Sequence: Synthetic oligonucleotide
ggcccagaugau

SEQ ID NO: 82439 - RNA, 14 nt, Artificial Sequence
  Description of Artificial Sequence: Synthetic oligonucleotide
gggaagaaaacuau

SEQ ID NO: 82440 - RNA, 15 nt, Artificial Sequence
  Description of Artificial Sequence: Synthetic oligonucleotide
guuuuaauuuauuuc

SEQ ID NO: 82441 - RNA, 12 nt, Artificial Sequence
  Description of Artificial Sequence: Synthetic oligonucleotide
acguagggaaau

SEQ ID NO: 82442 - RNA, 12 nt, Artificial Sequence
  Description of Artificial Sequence: Synthetic oligonucleotide
ccaggguuuacc

SEQ ID NO: 82443 - RNA, 11 nt, Artificial Sequence
  Description of Artificial Sequence: Synthetic oligonucleotide
agcaagguuua

SEQ ID NO: 82444 - RNA, 12 nt, Artificial Sequence
  Description of Artificial Sequence: Synthetic oligonucleotide
uguauuauguug

SEQ ID NO: 82445 - RNA, 15 nt, Artificial Sequence
  Description of Artificial Sequence: Synthetic oligonucleotide
uuuuaaucuuuguga

SEQ ID NO: 82446 - RNA, 14 nt, Artificial Sequence
  Description of Artificial Sequence: Synthetic oligonucleotide
uuaaucuuugugac

SEQ ID NO: 82447 - RNA, 13 nt, Artificial Sequence
  Description of Artificial Sequence: Synthetic oligonucleotide
gcugcuuaugucu

SEQ ID NO: 82448 - RNA, 14 nt, Artificial Sequence
  Description of Artificial Sequence: Synthetic oligonucleotide
aaguguuucagaag

SEQ ID NO: 82449 - RNA, 13 nt, Artificial Sequence
  Description of Artificial Sequence: Synthetic oligonucleotide
gaccaucaauaag

SEQ ID NO: 82450 - RNA, 13 nt, Artificial Sequence
  Description of Artificial Sequence: Synthetic oligonucleotide
ccaucaauaagga

SEQ ID NO: 82451 - RNA, 14 nt, Artificial Sequence
  Description of Artificial Sequence: Synthetic oligonucleotide
ucaauaaggaagaa

SEQ ID NO: 82452 - RNA, 14 nt, Artificial Sequence
  Description of Artificial Sequence: Synthetic oligonucleotide
aauaaggaagaagc

SEQ ID NO: 82453 - RNA, 13 nt, Artificial Sequence
  Description of Artificial Sequence: Synthetic oligonucleotide
aggaagaagcccu

SEQ ID NO: 82454 - RNA, 13 nt, Artificial Sequence
  Description of Artificial Sequence: Synthetic oligonucleotide
gcauaacuaaagg

SEQ ID NO: 82455 - RNA, 14 nt, Artificial Sequence
  Description of Artificial Sequence: Synthetic oligonucleotide
cauaacuaaaggug

SEQ ID NO: 82456 - RNA, 12 nt, Artificial Sequence
  Description of Artificial Sequence: Synthetic oligonucleotide
cuacaucacgcc

SEQ ID NO: 82457 - RNA, 12 nt, Artificial Sequence
  Description of Artificial Sequence: Synthetic oligonucleotide
acuggauuuaag

SEQ ID NO: 82458 - RNA, 12 nt, Artificial Sequence
  Description of Artificial Sequence: Synthetic oligonucleotide
cuggauuuaagc

SEQ ID NO: 82459 - RNA, 13 nt, Artificial Sequence
  Description of Artificial Sequence: Synthetic oligonucleotide
gauuuaagcagag

SEQ ID NO: 82460 - RNA, 13 nt, Artificial Sequence
  Description of Artificial Sequence: Synthetic oligonucleotide
auuuaagcagagu

SEQ ID NO: 82461 - RNA, 13 nt, Artificial Sequence
  Description of Artificial Sequence: Synthetic oligonucleotide
uuaagcagaguuc

SEQ ID NO: 82462 - RNA, 13 nt, Artificial Sequence
  Description of Artificial Sequence: Synthetic oligonucleotide
uaagcagaguuca

SEQ ID NO: 82463 - RNA, 14 nt, Artificial Sequence
  Description of Artificial Sequence: Synthetic oligonucleotide
agcagaguucaaaa

SEQ ID NO: 82464 - RNA, 12 nt, Artificial Sequence
  Description of Artificial Sequence: Synthetic oligonucleotide
cucagggucuga

SEQ ID NO: 82465 - RNA, 13 nt, Artificial Sequence
  Description of Artificial Sequence: Synthetic oligonucleotide
caagcaacuacau

SEQ ID NO: 82466 - RNA, 12 nt, Artificial Sequence
  Description of Artificial Sequence: Synthetic oligonucleotide
aucaauggcagc

SEQ ID NO: 82467 - RNA, 11 nt, Artificial Sequence
  Description of Artificial Sequence: Synthetic oligonucleotide
uuccagcccac

SEQ ID NO: 82468 - RNA, 12 nt, Artificial Sequence
  Description of Artificial Sequence: Synthetic oligonucleotide
cagcugagaaug

SEQ ID NO: 82469 - RNA, 13 nt, Artificial Sequence
  Description of Artificial Sequence: Synthetic oligonucleotide
aacguaucuccua

SEQ ID NO: 82470 - RNA, 14 nt, Artificial Sequence
  Description of Artificial Sequence: Synthetic oligonucleotide
ccuaaaauaauuuc

SEQ ID NO: 82471 - RNA, 13 nt, Artificial Sequence
  Description of Artificial Sequence: Synthetic oligonucleotide
uggaagauucagc

SEQ ID NO: 82472 - RNA, 12 nt, Artificial Sequence
  Description of Artificial Sequence: Synthetic oligonucleotide
uuaaacucuccu

SEQ ID NO: 82473 - RNA, 12 nt, Artificial Sequence
  Description of Artificial Sequence: Synthetic oligonucleotide
cagccuacaguu

SEQ ID NO: 82474 - RNA, 13 nt, Artificial Sequence
  Description of Artificial Sequence: Synthetic oligonucleotide
guuauguucaguc

SEQ ID NO: 82475 - RNA, 13 nt, Artificial Sequence
  Description of Artificial Sequence: Synthetic oligonucleotide
cacauacaaaaug

SEQ ID NO: 82476 - RNA, 9 nt, Artificial Sequence
  Description of Artificial Sequence: Synthetic oligonucleotide
uccuuuugc

SEQ ID NO: 82477 - RNA, 12 nt, Artificial Sequence
  Description of Artificial Sequence: Synthetic oligonucleotide
ugaccugugaag

SEQ ID NO: 82478 - RNA, 12 nt, Artificial Sequence
  Description of Artificial Sequence: Synthetic oligonucleotide
cuaucucacaca

SEQ ID NO: 82479 - RNA, 13 nt, Artificial Sequence
  Description of Artificial Sequence: Synthetic oligonucleotide
uguccucaauugu

SEQ ID NO: 82480 - RNA, 12 nt, Artificial Sequence
  Description of Artificial Sequence: Synthetic oligonucleotide
aaaccguagcug

SEQ ID NO: 82481 - RNA, 12 nt, Artificial Sequence
  Description of Artificial Sequence: Synthetic oligonucleotide
uagcuggcaagc

SEQ ID NO: 82482 - RNA, 14 nt, Artificial Sequence
  Description of Artificial Sequence: Synthetic oligonucleotide
uuguaugguuaaaa

SEQ ID NO: 82483 - RNA, 14 nt, Artificial Sequence
  Description of Artificial Sequence: Synthetic oligonucleotide
ugguuaaaagaugg

SEQ ID NO: 82484 - RNA, 13 nt, Artificial Sequence
  Description of Artificial Sequence: Synthetic oligonucleotide
cagggaauuauac

SEQ ID NO: 82485 - RNA, 12 nt, Artificial Sequence
  Description of Artificial Sequence: Synthetic oligonucleotide
acaaucuugcug

SEQ ID NO: 82486 - RNA, 13 nt, Artificial Sequence
  Description of Artificial Sequence: Synthetic oligonucleotide
ccaauaaugaaga

SEQ ID NO: 82487 - RNA, 13 nt, Artificial Sequence
  Description of Artificial Sequence: Synthetic oligonucleotide
acuuuggauguuc

SEQ ID NO: 82488 - RNA, 12 nt, Artificial Sequence
  Description of Artificial Sequence: Synthetic oligonucleotide
aaugcuuccacu

SEQ ID NO: 82489 - RNA, 11 nt, Artificial Sequence
  Description of Artificial Sequence: Synthetic oligonucleotide
gagaaaguuug

SEQ ID NO: 82490 - RNA, 11 nt, Artificial Sequence
  Description of Artificial Sequence: Synthetic oligonucleotide
aaagaacuacu

SEQ ID NO: 82491 - RNA, 12 nt, Artificial Sequence
  Description of Artificial Sequence: Synthetic oligonucleotide
uuagaaauacgg

SEQ ID NO: 82492 - RNA, 12 nt, Artificial Sequence
  Description of Artificial Sequence: Synthetic oligonucleotide
aacauggguaca

SEQ ID NO: 82493 - RNA, 14 nt, Artificial Sequence
  Description of Artificial Sequence: Synthetic oligonucleotide
aaagacacagaaga

SEQ ID NO: 82494 - RNA, 11 nt, Artificial Sequence
  Description of Artificial Sequence: Synthetic oligonucleotide
uaguagggagg

SEQ ID NO: 82495 - RNA, 12 nt, Artificial Sequence
  Description of Artificial Sequence: Synthetic oligonucleotide
gccuucugcagc

SEQ ID NO: 82496 - RNA, 10 nt, Artificial Sequence
  Description of Artificial Sequence: Synthetic oligonucleotide
ggucugguac

SEQ ID NO: 82497 - RNA, 12 nt, Artificial Sequence
  Description of Artificial Sequence: Synthetic oligonucleotide
cuaguccuuccg

SEQ ID NO: 82498 - RNA, 12 nt, Artificial Sequence
  Description of Artificial Sequence: Synthetic oligonucleotide
ccagugaauauu

SEQ ID NO: 82499 - RNA, 13 nt, Artificial Sequence
  Description of Artificial Sequence: Synthetic oligonucleotide
augaauucaaguu

SEQ ID NO: 82500 - RNA, 12 nt, Artificial Sequence
  Description of Artificial Sequence: Synthetic oligonucleotide
caggacacagau

SEQ ID NO: 82501 - RNA, 12 nt, Artificial Sequence
  Description of Artificial Sequence: Synthetic oligonucleotide
cucaaagcacag

SEQ ID NO: 82502 - RNA, 10 nt, Artificial Sequence
  Description of Artificial Sequence: Synthetic oligonucleotide
accacugcca

SEQ ID NO: 82503 - RNA, 13 nt, Artificial Sequence
  Description of Artificial Sequence: Synthetic oligonucleotide
gaaacuacuagug

SEQ ID NO: 82504 - RNA, 12 nt, Artificial Sequence
  Description of Artificial Sequence: Synthetic oligonucleotide
aagucggacagc

SEQ ID NO: 82505 - RNA, 13 nt, Artificial Sequence
  Description of Artificial Sequence: Synthetic oligonucleotide
gaaagcgaaaaau

SEQ ID NO: 82506 - RNA, 13 nt, Artificial Sequence
  Description of Artificial Sequence: Synthetic oligonucleotide
cccucugauuuag

SEQ ID NO: 82507 - RNA, 12 nt, Artificial Sequence
  Description of Artificial Sequence: Synthetic oligonucleotide
ugagcuauuuaa

SEQ ID NO: 82508 - RNA, 13 nt, Artificial Sequence
  Description of Artificial Sequence: Synthetic oligonucleotide
aaaaggugaaaaa

SEQ ID NO: 82509 - RNA, 14 nt, Artificial Sequence
  Description of Artificial Sequence: Synthetic oligonucleotide
gaaaaagcacuauu

SEQ ID NO: 82510 - RNA, 12 nt, Artificial Sequence
  Description of Artificial Sequence: Synthetic oligonucleotide
ggcugaaaagaa

SEQ ID NO: 82511 - RNA, 12 nt, Artificial Sequence
  Description of Artificial Sequence: Synthetic oligonucleotide
uaaacccuuaua

SEQ ID NO: 82512 - RNA, 13 nt, Artificial Sequence
  Description of Artificial Sequence: Synthetic oligonucleotide
cauacuauuagcc

SEQ ID NO: 82513 - RNA, 12 nt, Artificial Sequence
  Description of Artificial Sequence: Synthetic oligonucleotide
gacagaagcauu

SEQ ID NO: 82514 - RNA, 14 nt, Artificial Sequence
  Description of Artificial Sequence: Synthetic oligonucleotide
agagcaaauaagau

SEQ ID NO: 82515 - RNA, 14 nt, Artificial Sequence
  Description of Artificial Sequence: Synthetic oligonucleotide
ccaacauuuuucuc

SEQ ID NO: 82516 - RNA, 15 nt, Artificial Sequence
  Description of Artificial Sequence: Synthetic oligonucleotide
uuaaguaugagaaaa

SEQ ID NO: 82517 - RNA, 14 nt, Artificial Sequence
  Description of Artificial Sequence: Synthetic oligonucleotide
caggaauaaagaug

SEQ ID NO: 82518 - RNA, 13 nt, Artificial Sequence
  Description of Artificial Sequence: Synthetic oligonucleotide
aauuugaaugacc

SEQ ID NO: 82519 - RNA, 14 nt, Artificial Sequence
  Description of Artificial Sequence: Synthetic oligonucleotide
auguauaaagauag

SEQ ID NO: 82520 - RNA, 12 nt, Artificial Sequence
  Description of Artificial Sequence: Synthetic oligonucleotide
ggcuguaacuau

SEQ ID NO: 82521 - RNA, 11 nt, Artificial Sequence
  Description of Artificial Sequence: Synthetic oligonucleotide
ucugugaagug

SEQ ID NO: 82522 - RNA, 14 nt, Artificial Sequence
  Description of Artificial Sequence: Synthetic oligonucleotide
ccuuuaaggaaaug

SEQ ID NO: 82523 - RNA, 13 nt, Artificial Sequence
  Description of Artificial Sequence: Synthetic oligonucleotide
aaggauacaaaaa

SEQ ID NO: 82524 - RNA, 12 nt, Artificial Sequence
  Description of Artificial Sequence: Synthetic oligonucleotide
agaugcaauuug

SEQ ID NO: 82525 - RNA, 12 nt, Artificial Sequence
  Description of Artificial Sequence: Synthetic oligonucleotide
guucaaaacgaa

SEQ ID NO: 82526 - RNA, 11 nt, Artificial Sequence
  Description of Artificial Sequence: Synthetic oligonucleotide
gugaaaccuca

SEQ ID NO: 82527 - RNA, 13 nt, Artificial Sequence
  Description of Artificial Sequence: Synthetic oligonucleotide
acgaaagagaagc

SEQ ID NO: 82528 - RNA, 12 nt, Artificial Sequence
  Description of Artificial Sequence: Synthetic oligonucleotide
cuccacaagcgc

SEQ ID NO: 82529 - RNA, 14 nt, Artificial Sequence
  Description of Artificial Sequence: Synthetic oligonucleotide
gagaagauuccaaa

SEQ ID NO: 82530 - RNA, 13 nt, Artificial Sequence
  Description of Artificial Sequence: Synthetic oligonucleotide
aaucuggauucaa

SEQ ID NO: 82531 - RNA, 13 nt, Artificial Sequence
  Description of Artificial Sequence: Synthetic oligonucleotide
agaacagauuuga

SEQ ID NO: 82532 - RNA, 11 nt, Artificial Sequence
  Description of Artificial Sequence: Synthetic oligonucleotide
ccagagcugug

SEQ ID NO: 82533 - RNA, 12 nt, Artificial Sequence
  Description of Artificial Sequence: Synthetic oligonucleotide
ccucagauuguu

SEQ ID NO: 82534 - RNA, 12 nt, Artificial Sequence
  Description of Artificial Sequence: Synthetic oligonucleotide
cuauuuuaauua

SEQ ID NO: 82535 - RNA, 13 nt, Artificial Sequence
  Description of Artificial Sequence: Synthetic oligonucleotide
uuuaauuuauuaa

SEQ ID NO: 82536 - RNA, 12 nt, Artificial Sequence
  Description of Artificial Sequence: Synthetic oligonucleotide
augcaguuugaa

SEQ ID NO: 82537 - RNA, 11 nt, Artificial Sequence
  Description of Artificial Sequence: Synthetic oligonucleotide
caugcugcugg

SEQ ID NO: 82538 - RNA, 13 nt, Artificial Sequence
  Description of Artificial Sequence: Synthetic oligonucleotide
agaugugcauuuc

SEQ ID NO: 82539 - RNA, 12 nt, Artificial Sequence
  Description of Artificial Sequence: Synthetic oligonucleotide
ucaaaaccugug

SEQ ID NO: 82540 - RNA, 11 nt, Artificial Sequence
  Description of Artificial Sequence: Synthetic oligonucleotide
gaaugugggua

SEQ ID NO: 82541 - RNA, 10 nt, Artificial Sequence
  Description of Artificial Sequence: Synthetic oligonucleotide
auguggguag

SEQ ID NO: 82542 - RNA, 13 nt, Artificial Sequence
  Description of Artificial Sequence: Synthetic oligonucleotide
ugaaaaugagcau

SEQ ID NO: 82543 - RNA, 13 nt, Artificial Sequence
  Description of Artificial Sequence: Synthetic oligonucleotide
uugcuuuucaugu

SEQ ID NO: 82544 - RNA, 12 nt, Artificial Sequence
  Description of Artificial Sequence: Synthetic oligonucleotide
uguauuucuaua

SEQ ID NO: 82545 - RNA, 13 nt, Artificial Sequence
  Description of Artificial Sequence: Synthetic oligonucleotide
uuugauuaauguu

SEQ ID NO: 82546 - RNA, 12 nt, Artificial Sequence
  Description of Artificial Sequence: Synthetic oligonucleotide
caacguguauag

SEQ ID NO: 82547 - RNA, 12 nt, Artificial Sequence
  Description of Artificial Sequence: Synthetic oligonucleotide
cauauccuuggc

SEQ ID NO: 82548 - RNA, 13 nt, Artificial Sequence
  Description of Artificial Sequence: Synthetic oligonucleotide
uacuaacaucugg

SEQ ID NO: 82549 - RNA, 11 nt, Artificial Sequence
  Description of Artificial Sequence: Synthetic oligonucleotide
cauaaguugug

SEQ ID NO: 82550 - RNA, 12 nt, Artificial Sequence
  Description of Artificial Sequence: Synthetic oligonucleotide
gcaucauuuugg

SEQ ID NO: 82551 - RNA, 10 nt, Artificial Sequence
  Description of Artificial Sequence: Synthetic oligonucleotide
gcucuucuua

SEQ ID NO: 82552 - RNA, 10 nt, Artificial Sequence
  Description of Artificial Sequence: Synthetic oligonucleotide
agauuagguc

SEQ ID NO: 82553 - RNA, 12 nt, Artificial Sequence
  Description of Artificial Sequence: Synthetic oligonucleotide
auggaauugaaa

SEQ ID NO: 82554 - RNA, 13 nt, Artificial Sequence
  Description of Artificial Sequence: Synthetic oligonucleotide
cacacucauuccu

SEQ ID NO: 82555 - RNA, 12 nt, Artificial Sequence
  Description of Artificial Sequence: Synthetic oligonucleotide
uguagagguaac

SEQ ID NO: 82556 - RNA, 11 nt, Artificial Sequence
  Description of Artificial Sequence: Synthetic oligonucleotide
caaccacaugc

SEQ ID NO: 82557 - RNA, 12 nt, Artificial Sequence
  Description of Artificial Sequence: Synthetic oligonucleotide
ucggaaacaagu

SEQ ID NO: 82558 - RNA, 11 nt, Artificial Sequence
  Description of Artificial Sequence: Synthetic oligonucleotide
acucccaauaa

SEQ ID NO: 82559 - RNA, 13 nt, Artificial Sequence
  Description of Artificial Sequence: Synthetic oligonucleotide
aaugcuaagaaau

SEQ ID NO: 82560 - RNA, 11 nt, Artificial Sequence
  Description of Artificial Sequence: Synthetic oligonucleotide
gucuuucucua

SEQ ID NO: 82561 - RNA, 11 nt, Artificial Sequence
  Description of Artificial Sequence: Synthetic oligonucleotide
ugaauuucagg

SEQ ID NO: 82562 - RNA, 13 nt, Artificial Sequence
  Description of Artificial Sequence: Synthetic oligonucleotide
cgauucccucuca

SEQ ID NO: 82563 - RNA, 11 nt, Artificial Sequence
  Description of Artificial Sequence: Synthetic oligonucleotide
aggaaagugaa

SEQ ID NO: 82564 - RNA, 12 nt, Artificial Sequence
  Description of Artificial Sequence: Synthetic oligonucleotide
gaggcugcaugc

SEQ ID NO: 82565 - RNA, 11 nt, Artificial Sequence
  Description of Artificial Sequence: Synthetic oligonucleotide
ucucugaacag

SEQ ID NO: 82566 - RNA, 12 nt, Artificial Sequence
  Description of Artificial Sequence: Synthetic oligonucleotide
aacuuggcugua

SEQ ID NO: 82567 - RNA, 12 nt, Artificial Sequence
  Description of Artificial Sequence: Synthetic oligonucleotide
agaagccaaaau

SEQ ID NO: 82568 - RNA, 14 nt, Artificial Sequence
  Description of Artificial Sequence: Synthetic oligonucleotide
auuaaaagaagucc

SEQ ID NO: 82569 - RNA, 14 nt, Artificial Sequence
  Description of Artificial Sequence: Synthetic oligonucleotide
gaauccggauuauc

SEQ ID NO: 82570 - RNA, 12 nt, Artificial Sequence
  Description of Artificial Sequence: Synthetic oligonucleotide
aaugugacauca

SEQ ID NO: 82571 - RNA, 13 nt, Artificial Sequence
  Description of Artificial Sequence: Synthetic oligonucleotide
caucaaagcaagu

SEQ ID NO: 82572 - RNA, 11 nt, Artificial Sequence
  Description of Artificial Sequence: Synthetic oligonucleotide
agagagagaaa

SEQ ID NO: 82573 - RNA, 13 nt, Artificial Sequence
  Description of Artificial Sequence: Synthetic oligonucleotide
ucgcuguaguauu

SEQ ID NO: 82574 - RNA, 14 nt, Artificial Sequence
  Description of Artificial Sequence: Synthetic oligonucleotide
cgcuguaguauuua

SEQ ID NO: 82575 - RNA, 13 nt, Artificial Sequence
  Description of Artificial Sequence: Synthetic oligonucleotide
auuuaagcccaua

SEQ ID NO: 82576 - RNA, 15 nt, Artificial Sequence
  Description of Artificial Sequence: Synthetic oligonucleotide
auuaaaauaaacaug

SEQ ID NO: 82577 - RNA, 12 nt, Artificial Sequence
  Description of Artificial Sequence: Synthetic oligonucleotide
cuguucugaucg

SEQ ID NO: 82578 - RNA, 16 nt, Artificial Sequence
  Description of Artificial Sequence: Synthetic oligonucleotide
aaauaauuugaacuuu

SEQ ID NO: 82579 - RNA, 12 nt, Artificial Sequence
  Description of Artificial Sequence: Synthetic oligonucleotide
ugcgaccuuaau

SEQ ID NO: 82580 - RNA, 11 nt, Artificial Sequence
  Description of Artificial Sequence: Synthetic oligonucleotide
cugagaaagcu

SEQ ID NO: 82581 - RNA, 13 nt, Artificial Sequence
  Description of Artificial Sequence: Synthetic oligonucleotide
aguaaagaugcua

SEQ ID NO: 82582 - RNA, 12 nt, Artificial Sequence
  Description of Artificial Sequence: Synthetic oligonucleotide
cugcuuaauugc

SEQ ID NO: 82583 - RNA, 14 nt, Artificial Sequence
  Description of Artificial Sequence: Synthetic oligonucleotide
uaccauaugaauga

SEQ ID NO: 82584 - RNA, 12 nt, Artificial Sequence
  Description of Artificial Sequence: Synthetic oligonucleotide
aacuuucuuauc

SEQ ID NO: 82585 - RNA, 13 nt, Artificial Sequence
  Description of Artificial Sequence: Synthetic oligonucleotide
ccuugcaugacau

SEQ ID NO: 82586 - RNA, 14 nt, Artificial Sequence
  Description of Artificial Sequence: Synthetic oligonucleotide
ugaauuuguauaug

SEQ ID NO: 82587 - RNA, 12 nt, Artificial Sequence
  Description of Artificial Sequence: Synthetic oligonucleotide
gaauccuaguag

SEQ ID NO: 82588 - RNA, 10 nt, Artificial Sequence
  Description of Artificial Sequence: Synthetic oligonucleotide
gaaagggaag

SEQ ID NO: 82589 - RNA, 11 nt, Artificial Sequence
  Description of Artificial Sequence: Synthetic oligonucleotide
uaucggcaugc

SEQ ID NO: 82590 - RNA, 12 nt, Artificial Sequence
  Description of Artificial Sequence: Synthetic oligonucleotide
caccucauagua

SEQ ID NO: 82591 - RNA, 11 nt, Artificial Sequence
  Description of Artificial Sequence: Synthetic oligonucleotide
ccagaauugcc

SEQ ID NO: 82592 - RNA, 11 nt, Artificial Sequence
  Description of Artificial Sequence: Synthetic oligonucleotide
uggugaucugg

SEQ ID NO: 82593 - RNA, 12 nt, Artificial Sequence
  Description of Artificial Sequence: Synthetic oligonucleotide
gaucuggguaau

SEQ ID NO: 82594 - RNA, 12 nt, Artificial Sequence
  Description of Artificial Sequence: Synthetic oligonucleotide
ggaugugaugaa

SEQ ID NO: 82595 - RNA, 12 nt, Artificial Sequence
  Description of Artificial Sequence: Synthetic oligonucleotide
cauuuccacagc

SEQ ID NO: 82596 - RNA, 11 nt, Artificial Sequence
  Description of Artificial Sequence: Synthetic oligonucleotide
acagcuacacc

SEQ ID NO: 82597 - RNA, 12 nt, Artificial Sequence
  Description of Artificial Sequence: Synthetic oligonucleotide
ugcaguucuuac

SEQ ID NO: 82598 - RNA, 12 nt, Artificial Sequence
  Description of Artificial Sequence: Synthetic oligonucleotide
acgagaagaaga

SEQ ID NO: 82599 - RNA, 12 nt, Artificial Sequence
  Description of Artificial Sequence: Synthetic oligonucleotide
cgagaagaagau

SEQ ID NO: 82600 - RNA, 15 nt, Artificial Sequence
  Description of Artificial Sequence: Synthetic oligonucleotide
aagaagaucauuuac

SEQ ID NO: 82601 - RNA, 11 nt, Artificial Sequence
  Description of Artificial Sequence: Synthetic oligonucleotide
agaggaagagg

SEQ ID NO: 82602 - RNA, 12 nt, Artificial Sequence
  Description of Artificial Sequence: Synthetic oligonucleotide
gaggaagaggug

SEQ ID NO: 82603 - RNA, 13 nt, Artificial Sequence
  Description of Artificial Sequence: Synthetic oligonucleotide
cuacuuugagggc

SEQ ID NO: 82604 - RNA, 12 nt, Artificial Sequence
  Description of Artificial Sequence: Synthetic oligonucleotide
agggcaucuccu

SEQ ID NO: 82605 - RNA, 10 nt, Artificial Sequence
  Description of Artificial Sequence: Synthetic oligonucleotide
ggagugauau

SEQ ID NO: 82606 - RNA, 11 nt, Artificial Sequence
  Description of Artificial Sequence: Synthetic oligonucleotide
gagugauaugg

SEQ ID NO: 82607 - RNA, 12 nt, Artificial Sequence
  Description of Artificial Sequence: Synthetic oligonucleotide
ugcaguaaagau

SEQ ID NO: 82608 - RNA, 13 nt, Artificial Sequence
  Description of Artificial Sequence: Synthetic oligonucleotide
aguaaagauccua

SEQ ID NO: 82609 - RNA, 12 nt, Artificial Sequence
  Description of Artificial Sequence: Synthetic oligonucleotide
ugacaaaggaca

SEQ ID NO: 82610 - RNA, 13 nt, Artificial Sequence
  Description of Artificial Sequence: Synthetic oligonucleotide
gcaauugugaccc

SEQ ID NO: 82611 - RNA, 12 nt, Artificial Sequence
  Description of Artificial Sequence: Synthetic oligonucleotide
aacaucauccau

SEQ ID NO: 82612 - RNA, 12 nt, Artificial Sequence
  Description of Artificial Sequence: Synthetic oligonucleotide
ugaaauccaaca

SEQ ID NO: 82613 - RNA, 15 nt, Artificial Sequence
  Description of Artificial Sequence: Synthetic oligonucleotide
aacaauauauuucuc

SEQ ID NO: 82614 - RNA, 14 nt, Artificial Sequence
  Description of Artificial Sequence: Synthetic oligonucleotide
aacaguaaagucac

SEQ ID NO: 82615 - RNA, 14 nt, Artificial Sequence
  Description of Artificial Sequence: Synthetic oligonucleotide
ugugaagaaaguaa

SEQ ID NO: 82616 - RNA, 13 nt, Artificial Sequence
  Description of Artificial Sequence: Synthetic oligonucleotide
cuuccgagccauc

SEQ ID NO: 82617 - RNA, 12 nt, Artificial Sequence
  Description of Artificial Sequence: Synthetic oligonucleotide
aauggagguuga

SEQ ID NO: 82618 - RNA, 12 nt, Artificial Sequence
  Description of Artificial Sequence: Synthetic oligonucleotide
ggagguugaaua

SEQ ID NO: 82619 - RNA, 13 nt, Artificial Sequence
  Description of Artificial Sequence: Synthetic oligonucleotide
auuuugaguuuuc

SEQ ID NO: 82620 - RNA, 12 nt, Artificial Sequence
  Description of Artificial Sequence: Synthetic oligonucleotide
uauccuguuugu

SEQ ID NO: 82621 - RNA, 11 nt, Artificial Sequence
  Description of Artificial Sequence: Synthetic oligonucleotide
ccuguuuguuc

SEQ ID NO: 82622 - RNA, 10 nt, Artificial Sequence
  Description of Artificial Sequence: Synthetic oligonucleotide
cucuacagcc

SEQ ID NO: 82623 - RNA, 12 nt, Artificial Sequence
  Description of Artificial Sequence: Synthetic oligonucleotide
ucuuccauagcu

SEQ ID NO: 82624 - RNA, 12 nt, Artificial Sequence
  Description of Artificial Sequence: Synthetic oligonucleotide
auaaucuuccug

SEQ ID NO: 82625 - RNA, 12 nt, Artificial Sequence
  Description of Artificial Sequence: Synthetic oligonucleotide
uaaucuuccugu

SEQ ID NO: 82626 - RNA, 12 nt, Artificial Sequence
  Description of Artificial Sequence: Synthetic oligonucleotide
cuucaugacuug

SEQ ID NO: 82627 - RNA, 12 nt, Artificial Sequence
  Description of Artificial Sequence: Synthetic oligonucleotide
aagagggagaga

SEQ ID NO: 82628 - RNA, 12 nt, Artificial Sequence
  Description of Artificial Sequence: Synthetic oligonucleotide
cgucuccuacca

SEQ ID NO: 82629 - RNA, 12 nt, Artificial Sequence
  Description of Artificial Sequence: Synthetic oligonucleotide
gaucaaucggcc

SEQ ID NO: 82630 - RNA, 12 nt, Artificial Sequence
  Description of Artificial Sequence: Synthetic oligonucleotide
ggacgaacaucc

SEQ ID NO: 82631 - RNA, 11 nt, Artificial Sequence
  Description of Artificial Sequence: Synthetic oligonucleotide
agggucggaac

SEQ ID NO: 82632 - RNA, 10 nt, Artificial Sequence
  Description of Artificial Sequence: Synthetic oligonucleotide
ucggaaccca

SEQ ID NO: 82633 - RNA, 11 nt, Artificial Sequence
  Description of Artificial Sequence: Synthetic oligonucleotide
acccaagcuua

SEQ ID NO: 82634 - RNA, 14 nt, Artificial Sequence
  Description of Artificial Sequence: Synthetic oligonucleotide
gaacuuuaagcaac

SEQ ID NO: 82635 - RNA, 11 nt, Artificial Sequence
  Description of Artificial Sequence: Synthetic oligonucleotide
acuauucagug

SEQ ID NO: 82636 - RNA, 11 nt, Artificial Sequence
  Description of Artificial Sequence: Synthetic oligonucleotide
cuauucagugg

SEQ ID NO: 82637 - RNA, 13 nt, Artificial Sequence
  Description of Artificial Sequence: Synthetic oligonucleotide
aaacacagauaac

SEQ ID NO: 82638 - RNA, 12 nt, Artificial Sequence
  Description of Artificial Sequence: Synthetic oligonucleotide
cuuaagaaaaga

SEQ ID NO: 82639 - RNA, 12 nt, Artificial Sequence
  Description of Artificial Sequence: Synthetic oligonucleotide
cugaaggagugu

SEQ ID NO: 82640 - RNA, 10 nt, Artificial Sequence
  Description of Artificial Sequence: Synthetic oligonucleotide
ucaccgcggg

SEQ ID NO: 82641 - RNA, 14 nt, Artificial Sequence
  Description of Artificial Sequence: Synthetic oligonucleotide
agcagaaauaagcg

SEQ ID NO: 82642 - RNA, 12 nt, Artificial Sequence
  Description of Artificial Sequence: Synthetic oligonucleotide
aagcgugccguu

SEQ ID NO: 82643 - RNA, 12 nt, Artificial Sequence
  Description of Artificial Sequence: Synthetic oligonucleotide
agaaacagucac

SEQ ID NO: 82644 - RNA, 12 nt, Artificial Sequence
  Description of Artificial Sequence: Synthetic oligonucleotide
agaggaagaagg

SEQ ID NO: 82645 - RNA, 14 nt, Artificial Sequence
  Description of Artificial Sequence: Synthetic oligonucleotide
uguauucaaaauau

SEQ ID NO: 82646 - RNA, 13 nt, Artificial Sequence
  Description of Artificial Sequence: Synthetic oligonucleotide
auuuuccucccuu

SEQ ID NO: 82647 - RNA, 13 nt, Artificial Sequence
  Description of Artificial Sequence: Synthetic oligonucleotide
caaagaaagauag

SEQ ID NO: 82648 - RNA, 12 nt, Artificial Sequence
  Description of Artificial Sequence: Synthetic oligonucleotide
aagaaagauaga

SEQ ID NO: 82649 - RNA, 13 nt, Artificial Sequence
  Description of Artificial Sequence: Synthetic oligonucleotide
gaaagcauuuguu

SEQ ID NO: 82650 - RNA, 13 nt, Artificial Sequence
  Description of Artificial Sequence: Synthetic oligonucleotide
ugaguuaaacgaa

SEQ ID NO: 82651 - RNA, 12 nt, Artificial Sequence
  Description of Artificial Sequence: Synthetic oligonucleotide
acugauacagaa

SEQ ID NO: 82652 - RNA, 12 nt, Artificial Sequence
  Description of Artificial Sequence: Synthetic oligonucleotide
auauuauauaua

SEQ ID NO: 82653 - RNA, 12 nt, Artificial Sequence
  Description of Artificial Sequence: Synthetic oligonucleotide
auuauauauaua

SEQ ID NO: 82654 - RNA, 12 nt, Artificial Sequence
  Description of Artificial Sequence: Synthetic oligonucleotide
ucacuggaugua

SEQ ID NO: 82655 - RNA, 12 nt, Artificial Sequence
  Description of Artificial Sequence: Synthetic oligonucleotide
cagggaagagga

SEQ ID NO: 82656 - RNA, 15 nt, Artificial Sequence
  Description of Artificial Sequence: Synthetic oligonucleotide
augaucuuuuuuuug

SEQ ID NO: 82657 - RNA, 11 nt, Artificial Sequence
  Description of Artificial Sequence: Synthetic oligonucleotide
aguucacggcc

SEQ ID NO: 82658 - RNA, 13 nt, Artificial Sequence
  Description of Artificial Sequence: Synthetic oligonucleotide
caccaucacacca

SEQ ID NO: 82659 - RNA, 11 nt, Artificial Sequence
  Description of Artificial Sequence: Synthetic oligonucleotide
ccugcggguuu

SEQ ID NO: 82660 - RNA, 10 nt, Artificial Sequence
  Description of Artificial Sequence: Synthetic oligonucleotide
auccaguuug

SEQ ID NO: 82661 - RNA, 13 nt, Artificial Sequence
  Description of Artificial Sequence: Synthetic oligonucleotide
guuaaggacuucu

SEQ ID NO: 82662 - RNA, 13 nt, Artificial Sequence
  Description of Artificial Sequence: Synthetic oligonucleotide
cagugggacagag

SEQ ID NO: 82663 - RNA, 14 nt, Artificial Sequence
  Description of Artificial Sequence: Synthetic oligonucleotide
aauuuguuauugug

SEQ ID NO: 82664 - RNA, 13 nt, Artificial Sequence
  Description of Artificial Sequence: Synthetic oligonucleotide
uucaaaugcauuu

SEQ ID NO: 82665 - RNA, 10 nt, Artificial Sequence
  Description of Artificial Sequence: Synthetic oligonucleotide
caggaaagcc

SEQ ID NO: 82666 - RNA, 11 nt, Artificial Sequence
  Description of Artificial Sequence: Synthetic oligonucleotide
aggaaagcccu

SEQ ID NO: 82667 - RNA, 12 nt, Artificial Sequence
  Description of Artificial Sequence: Synthetic oligonucleotide
cccagcauggcc

SEQ ID NO: 82668 - RNA, 11 nt, Artificial Sequence
  Description of Artificial Sequence: Synthetic oligonucleotide
cuucucccuga

SEQ ID NO: 82669 - RNA, 12 nt, Artificial Sequence
  Description of Artificial Sequence: Synthetic oligonucleotide
gaagaagcccuu

SEQ ID NO: 82670 - RNA, 12 nt, Artificial Sequence
  Description of Artificial Sequence: Synthetic oligonucleotide
agaagcccuuca

SEQ ID NO: 82671 - RNA, 11 nt, Artificial Sequence
  Description of Artificial Sequence: Synthetic oligonucleotide
gcccuucagcg

SEQ ID NO: 82672 - RNA, 11 nt, Artificial Sequence
  Description of Artificial Sequence: Synthetic oligonucleotide
ccuucagcggc

SEQ ID NO: 82673 - RNA, 12 nt, Artificial Sequence
  Description of Artificial Sequence: Synthetic oligonucleotide
ucagcggccagu

SEQ ID NO: 82674 - RNA, 12 nt, Artificial Sequence
  Description of Artificial Sequence: Synthetic oligonucleotide
ugaaaagcuccg

SEQ ID NO: 82675 - RNA, 11 nt, Artificial Sequence
  Description of Artificial Sequence: Synthetic oligonucleotide
aaaagcuccgg

SEQ ID NO: 82676 - RNA, 13 nt, Artificial Sequence
  Description of Artificial Sequence: Synthetic oligonucleotide
agucaacagucug

SEQ ID NO: 82677 - RNA, 13 nt, Artificial Sequence
  Description of Artificial Sequence: Synthetic oligonucleotide
cagaguucaaaag

SEQ ID NO: 82678 - RNA, 13 nt, Artificial Sequence
  Description of Artificial Sequence: Synthetic oligonucleotide
agaguucaaaagc

SEQ ID NO: 82679 - RNA, 12 nt, Artificial Sequence
  Description of Artificial Sequence: Synthetic oligonucleotide
uucaaaagcccu

SEQ ID NO: 82680 - RNA, 12 nt, Artificial Sequence
  Description of Artificial Sequence: Synthetic oligonucleotide
ucaaaagcccuu

SEQ ID NO: 82681 - RNA, 12 nt, Artificial Sequence
  Description of Artificial Sequence: Synthetic oligonucleotide
aaaagcccuuca

SEQ ID NO: 82682 - RNA, 12 nt, Artificial Sequence
  Description of Artificial Sequence: Synthetic oligonucleotide
aaagcccuucag

SEQ ID NO: 82683 - RNA, 13 nt, Artificial Sequence
  Description of Artificial Sequence: Synthetic oligonucleotide
gugaagccgcucg

SEQ ID NO: 82684 - RNA, 12 nt, Artificial Sequence
  Description of Artificial Sequence: Synthetic oligonucleotide
cacgccagucaa

SEQ ID NO: 82685 - RNA, 13 nt, Artificial Sequence
  Description of Artificial Sequence: Synthetic oligonucleotide
uucuuggugcgug

SEQ ID NO: 82686 - RNA, 14 nt, Artificial Sequence
  Description of Artificial Sequence: Synthetic oligonucleotide
auuggauucaucag

SEQ ID NO: 82687 - RNA, 13 nt, Artificial Sequence
  Description of Artificial Sequence: Synthetic oligonucleotide
uggaauaccuaag

SEQ ID NO: 82688 - RNA, 12 nt, Artificial Sequence
  Description of Artificial Sequence: Synthetic oligonucleotide
auuugaggcuca

SEQ ID NO: 82689 - RNA, 11 nt, Artificial Sequence
  Description of Artificial Sequence: Synthetic oligonucleotide
ucuacaauugg

SEQ ID NO: 82690 - RNA, 12 nt, Artificial Sequence
  Description of Artificial Sequence: Synthetic oligonucleotide
uaguuaggagcc

SEQ ID NO: 82691 - RNA, 13 nt, Artificial Sequence
  Description of Artificial Sequence: Synthetic oligonucleotide
agucaauauccac

SEQ ID NO: 82692 - RNA, 13 nt, Artificial Sequence
  Description of Artificial Sequence: Synthetic oligonucleotide
auguucagucaca

SEQ ID NO: 82693 - RNA, 12 nt, Artificial Sequence
  Description of Artificial Sequence: Synthetic oligonucleotide
acacacacauac

SEQ ID NO: 82694 - RNA, 12 nt, Artificial Sequence
  Description of Artificial Sequence: Synthetic oligonucleotide
uuccuuuugcuu

SEQ ID NO: 82695 - RNA, 16 nt, Artificial Sequence
  Description of Artificial Sequence: Synthetic oligonucleotide
uuuuaaaguaauuuuu

SEQ ID NO: 82696 - RNA, 13 nt, Artificial Sequence
  Description of Artificial Sequence: Synthetic oligonucleotide
caacagucaaugg

SEQ ID NO: 82697 - RNA, 13 nt, Artificial Sequence
  Description of Artificial Sequence: Synthetic oligonucleotide
ucgacaaaccaau

SEQ ID NO: 82698 - RNA, 12 nt, Artificial Sequence
  Description of Artificial Sequence: Synthetic oligonucleotide
acugcuaccacu

SEQ ID NO: 82699 - RNA, 13 nt, Artificial Sequence
  Description of Artificial Sequence: Synthetic oligonucleotide
gcaagcggucuua

SEQ ID NO: 82700 - RNA, 13 nt, Artificial Sequence
  Description of Artificial Sequence: Synthetic oligonucleotide
ggucuuaccggcu

SEQ ID NO: 82701 - RNA, 11 nt, Artificial Sequence
  Description of Artificial Sequence: Synthetic oligonucleotide
gauggguuacc

SEQ ID NO: 82702 - RNA, 11 nt, Artificial Sequence
  Description of Artificial Sequence: Synthetic oligonucleotide
guuaccugcga

SEQ ID NO: 82703 - RNA, 12 nt, Artificial Sequence
  Description of Artificial Sequence: Synthetic oligonucleotide
aaucuugcugag

SEQ ID NO: 82704 - RNA, 13 nt, Artificial Sequence
  Description of Artificial Sequence: Synthetic oligonucleotide
agcauaaaacagu

SEQ ID NO: 82705 - RNA, 12 nt, Artificial Sequence
  Description of Artificial Sequence: Synthetic oligonucleotide
guccuuuauccu

SEQ ID NO: 82706 - RNA, 12 nt, Artificial Sequence
  Description of Artificial Sequence: Synthetic oligonucleotide
caacgcaaguug

SEQ ID NO: 82707 - RNA, 13 nt, Artificial Sequence
  Description of Artificial Sequence: Synthetic oligonucleotide
aaacugaaaccau

SEQ ID NO: 82708 - RNA, 14 nt, Artificial Sequence
  Description of Artificial Sequence: Synthetic oligonucleotide
acuuuguuaaauau

SEQ ID NO: 82709 - RNA, 14 nt, Artificial Sequence
  Description of Artificial Sequence: Synthetic oligonucleotide
guauauuaaaaguu

SEQ ID NO: 82710 - RNA, 13 nt, Artificial Sequence
  Description of Artificial Sequence: Synthetic oligonucleotide
guuuugacuuaac

SEQ ID NO: 82711 - RNA, 13 nt, Artificial Sequence
  Description of Artificial Sequence: Synthetic oligonucleotide
gcaaacucagcac

SEQ ID NO: 82712 - RNA, 11 nt, Artificial Sequence
  Description of Artificial Sequence: Synthetic oligonucleotide
ugcugaccuca

SEQ ID NO: 82713 - RNA, 14 nt, Artificial Sequence
  Description of Artificial Sequence: Synthetic oligonucleotide
uuuauucagaucgc

SEQ ID NO: 82714 - RNA, 13 nt, Artificial Sequence
  Description of Artificial Sequence: Synthetic oligonucleotide
aggguucugggau

SEQ ID NO: 82715 - RNA, 15 nt, Artificial Sequence
  Description of Artificial Sequence: Synthetic oligonucleotide
auauuggaaauuaug

SEQ ID NO: 82716 - RNA, 13 nt, Artificial Sequence
  Description of Artificial Sequence: Synthetic oligonucleotide
auggaagcacuag

SEQ ID NO: 82717 - RNA, 13 nt, Artificial Sequence
  Description of Artificial Sequence: Synthetic oligonucleotide
guuuuuaugugga

SEQ ID NO: 82718 - RNA, 12 nt, Artificial Sequence
  Description of Artificial Sequence: Synthetic oligonucleotide
ggaauugguaga

SEQ ID NO: 82719 - RNA, 13 nt, Artificial Sequence
  Description of Artificial Sequence: Synthetic oligonucleotide
uuagacuuggaga

SEQ ID NO: 82720 - RNA, 13 nt, Artificial Sequence
  Description of Artificial Sequence: Synthetic oligonucleotide
uuacaguauucca

SEQ ID NO: 82721 - RNA, 15 nt, Artificial Sequence
  Description of Artificial Sequence: Synthetic oligonucleotide
ccacugaugaauuaa

SEQ ID NO: 82722 - RNA, 12 nt, Artificial Sequence
  Description of Artificial Sequence: Synthetic oligonucleotide
ccacaucaucac

SEQ ID NO: 82723 - RNA, 13 nt, Artificial Sequence
  Description of Artificial Sequence: Synthetic oligonucleotide
cucaccaaacaga

SEQ ID NO: 82724 - RNA, 12 nt, Artificial Sequence
  Description of Artificial Sequence: Synthetic oligonucleotide
ggaacaugaugg

SEQ ID NO: 82725 - RNA, 12 nt, Artificial Sequence
  Description of Artificial Sequence: Synthetic oligonucleotide
cauguagacugc

SEQ ID NO: 82726 - RNA, 13 nt, Artificial Sequence
  Description of Artificial Sequence: Synthetic oligonucleotide
ggaucuauuuaug

SEQ ID NO: 82727 - RNA, 12 nt, Artificial Sequence
  Description of Artificial Sequence: Synthetic oligonucleotide
gcacuauuauca

SEQ ID NO: 82728 - RNA, 11 nt, Artificial Sequence
  Description of Artificial Sequence: Synthetic oligonucleotide
aucaguucugc

SEQ ID NO: 82729 - RNA, 13 nt, Artificial Sequence
  Description of Artificial Sequence: Synthetic oligonucleotide
agauuaaaccuac

SEQ ID NO: 82730 - RNA, 13 nt, Artificial Sequence
  Description of Artificial Sequence: Synthetic oligonucleotide
auaaaauccuucu

SEQ ID NO: 82731 - RNA, 12 nt, Artificial Sequence
  Description of Artificial Sequence: Synthetic oligonucleotide
aaugcuguagac

SEQ ID NO: 82732 - RNA, 13 nt, Artificial Sequence
  Description of Artificial Sequence: Synthetic oligonucleotide
uugauaggaauag

SEQ ID NO: 82733 - RNA, 11 nt, Artificial Sequence
  Description of Artificial Sequence: Synthetic oligonucleotide
aauggcccuga

SEQ ID NO: 82734 - RNA, 11 nt, Artificial Sequence
  Description of Artificial Sequence: Synthetic oligonucleotide
uuccucaagca

SEQ ID NO: 82735 - RNA, 10 nt, Artificial Sequence
  Description of Artificial Sequence: Synthetic oligonucleotide
guucagccca

SEQ ID NO: 82736 - RNA, 11 nt, Artificial Sequence
  Description of Artificial Sequence: Synthetic oligonucleotide
gcugcugaacc

SEQ ID NO: 82737 - RNA, 12 nt, Artificial Sequence
  Description of Artificial Sequence: Synthetic oligonucleotide
aaguucucuuca

SEQ ID NO: 82738 - RNA, 11 nt, Artificial Sequence
  Description of Artificial Sequence: Synthetic oligonucleotide
ccagccuagag

SEQ ID NO: 82739 - RNA, 13 nt, Artificial Sequence
  Description of Artificial Sequence: Synthetic oligonucleotide
cucugugaagugu

SEQ ID NO: 82740 - RNA, 14 nt, Artificial Sequence
  Description of Artificial Sequence: Synthetic oligonucleotide
ugagaaaauuucaa

SEQ ID NO: 82741 - RNA, 11 nt, Artificial Sequence
  Description of Artificial Sequence: Synthetic oligonucleotide
aauccuccuga

SEQ ID NO: 82742 - RNA, 12 nt, Artificial Sequence
  Description of Artificial Sequence: Synthetic oligonucleotide
gugacaucauau

SEQ ID NO: 82743 - RNA, 13 nt, Artificial Sequence
  Description of Artificial Sequence: Synthetic oligonucleotide
aaucuucaucaua

SEQ ID NO: 82744 - RNA, 13 nt, Artificial Sequence
  Description of Artificial Sequence: Synthetic oligonucleotide
gacuagcuauuaa

SEQ ID NO: 82745 - RNA, 14 nt, Artificial Sequence
  Description of Artificial Sequence: Synthetic oligonucleotide
ucucuacuaaaaau

SEQ ID NO: 82746 - RNA, 12 nt, Artificial Sequence
  Description of Artificial Sequence: Synthetic oligonucleotide
ucuaucucgccu

SEQ ID NO: 82747 - RNA, 13 nt, Artificial Sequence
  Description of Artificial Sequence: Synthetic oligonucleotide
cuucgguccaguu

SEQ ID NO: 82748 - RNA, 11 nt, Artificial Sequence
  Description of Artificial Sequence: Synthetic oligonucleotide
gauguagccgc

SEQ ID NO: 82749 - RNA, 12 nt, Artificial Sequence
  Description of Artificial Sequence: Synthetic oligonucleotide
ugaggagacuug

SEQ ID NO: 82750 - RNA, 12 nt, Artificial Sequence
  Description of Artificial Sequence: Synthetic oligonucleotide
gaguagugagga

SEQ ID NO: 82751 - RNA, 14 nt, Artificial Sequence
  Description of Artificial Sequence: Synthetic oligonucleotide
cagaugaguacaaa

SEQ ID NO: 82752 - RNA, 13 nt, Artificial Sequence
  Description of Artificial Sequence: Synthetic oligonucleotide
guuguuaaugggc

SEQ ID NO: 82753 - RNA, 13 nt, Artificial Sequence
  Description of Artificial Sequence: Synthetic oligonucleotide
uuuuuaauuuauu

SEQ ID NO: 82754 - RNA, 12 nt, Artificial Sequence
  Description of Artificial Sequence: Synthetic oligonucleotide
uauuuaaauaug

SEQ ID NO: 82755 - RNA, 13 nt, Artificial Sequence
  Description of Artificial Sequence: Synthetic oligonucleotide
uauccuuuguuuc

SEQ ID NO: 82756 - RNA, 14 nt, Artificial Sequence
  Description of Artificial Sequence: Synthetic oligonucleotide
cgucuaaguguuug

SEQ ID NO: 82757 - RNA, 12 nt, Artificial Sequence
  Description of Artificial Sequence: Synthetic oligonucleotide
accugugacaaa

SEQ ID NO: 82758 - RNA, 13 nt, Artificial Sequence
  Description of Artificial Sequence: Synthetic oligonucleotide
ccaggcugaauua

SEQ ID NO: 82759 - RNA, 14 nt, Artificial Sequence
  Description of Artificial Sequence: Synthetic oligonucleotide
gucauucuuacaau

SEQ ID NO: 82760 - RNA, 15 nt, Artificial Sequence
  Description of Artificial Sequence: Synthetic oligonucleotide
ucauucuuacaauug

SEQ ID NO: 82761 - RNA, 12 nt, Artificial Sequence
  Description of Artificial Sequence: Synthetic oligonucleotide
cagagaguguac

SEQ ID NO: 82762 - RNA, 12 nt, Artificial Sequence
  Description of Artificial Sequence: Synthetic oligonucleotide
agaacucagcag

SEQ ID NO: 82763 - RNA, 13 nt, Artificial Sequence
  Description of Artificial Sequence: Synthetic oligonucleotide
uuuauuuucagua

SEQ ID NO: 82764 - RNA, 12 nt, Artificial Sequence
  Description of Artificial Sequence: Synthetic oligonucleotide
ucuuaaauggaa

SEQ ID NO: 82765 - RNA, 13 nt, Artificial Sequence
  Description of Artificial Sequence: Synthetic oligonucleotide
ugccuaaaauugu

SEQ ID NO: 82766 - RNA, 12 nt, Artificial Sequence
  Description of Artificial Sequence: Synthetic oligonucleotide
agacugugagcu

SEQ ID NO: 82767 - RNA, 14 nt, Artificial Sequence
  Description of Artificial Sequence: Synthetic oligonucleotide
ugcuuuuuauuaau

SEQ ID NO: 82768 - RNA, 13 nt, Artificial Sequence
  Description of Artificial Sequence: Synthetic oligonucleotide
cucuucuuacauu

SEQ ID NO: 82769 - RNA, 15 nt, Artificial Sequence
  Description of Artificial Sequence: Synthetic oligonucleotide
cauuuguaaaaaugu

SEQ ID NO: 82770 - RNA, 15 nt, Artificial Sequence
  Description of Artificial Sequence: Synthetic oligonucleotide
aucuuaauucauauu

SEQ ID NO: 82771 - RNA, 13 nt, Artificial Sequence
  Description of Artificial Sequence: Synthetic oligonucleotide
gaacuaaucauga

SEQ ID NO: 82772 - RNA, 12 nt, Artificial Sequence
  Description of Artificial Sequence: Synthetic oligonucleotide
ucugcucuuggg

SEQ ID NO: 82773 - RNA, 13 nt, Artificial Sequence
  Description of Artificial Sequence: Synthetic oligonucleotide
caguagcuuugag

SEQ ID NO: 82774 - RNA, 14 nt, Artificial Sequence
  Description of Artificial Sequence: Synthetic oligonucleotide
cacguaauauuuca

SEQ ID NO: 82775 - RNA, 13 nt, Artificial Sequence
  Description of Artificial Sequence: Synthetic oligonucleotide
uauucucuucacu

SEQ ID NO: 82776 - RNA, 14 nt, Artificial Sequence
  Description of Artificial Sequence: Synthetic oligonucleotide
cuaaugcuaagaaa

SEQ ID NO: 82777 - RNA, 12 nt, Artificial Sequence
  Description of Artificial Sequence: Synthetic oligonucleotide
gcugaaaaucaa

SEQ ID NO: 82778 - RNA, 14 nt, Artificial Sequence
  Description of Artificial Sequence: Synthetic oligonucleotide
aauaugauuacuuu

SEQ ID NO: 82779 - RNA, 14 nt, Artificial Sequence
  Description of Artificial Sequence: Synthetic oligonucleotide
cauuuuguucuaca

SEQ ID NO: 82780 - RNA, 12 nt, Artificial Sequence
  Description of Artificial Sequence: Synthetic oligonucleotide
cccgggacucuc

SEQ ID NO: 82781 - RNA, 14 nt, Artificial Sequence
  Description of Artificial Sequence: Synthetic oligonucleotide
ccuuuaaaguaaag

SEQ ID NO: 82782 - RNA, 13 nt, Artificial Sequence
  Description of Artificial Sequence: Synthetic oligonucleotide
ucuggaagccugg

SEQ ID NO: 82783 - RNA, 14 nt, Artificial Sequence
  Description of Artificial Sequence: Synthetic oligonucleotide
aaaacaaaagagag

SEQ ID NO: 82784 - RNA, 13 nt, Artificial Sequence
  Description of Artificial Sequence: Synthetic oligonucleotide
aucaguuaugccg

SEQ ID NO: 82785 - RNA, 13 nt, Artificial Sequence
  Description of Artificial Sequence: Synthetic oligonucleotide
uaaaagaagucca

SEQ ID NO: 82786 - RNA, 11 nt, Artificial Sequence
  Description of Artificial Sequence: Synthetic oligonucleotide
aggugagguua

SEQ ID NO: 82787 - RNA, 11 nt, Artificial Sequence
  Description of Artificial Sequence: Synthetic oligonucleotide
gggaagaggac

SEQ ID NO: 82788 - RNA, 13 nt, Artificial Sequence
  Description of Artificial Sequence: Synthetic oligonucleotide
aagcaaguauugu

SEQ ID NO: 82789 - RNA, 12 nt, Artificial Sequence
  Description of Artificial Sequence: Synthetic oligonucleotide
auuguagcacuc

SEQ ID NO: 82790 - RNA, 14 nt, Artificial Sequence
  Description of Artificial Sequence: Synthetic oligonucleotide
acaaaaccacaaau

SEQ ID NO: 82791 - RNA, 12 nt, Artificial Sequence
  Description of Artificial Sequence: Synthetic oligonucleotide
uaagcccauaca

SEQ ID NO: 82792 - RNA, 11 nt, Artificial Sequence
  Description of Artificial Sequence: Synthetic oligonucleotide
agcccauacag

SEQ ID NO: 82793 - RNA, 12 nt, Artificial Sequence
  Description of Artificial Sequence: Synthetic oligonucleotide
cagaaaccuucc

SEQ ID NO: 82794 - RNA, 10 nt, Artificial Sequence
  Description of Artificial Sequence: Synthetic oligonucleotide
guauaccuac

SEQ ID NO: 82795 - RNA, 13 nt, Artificial Sequence
  Description of Artificial Sequence: Synthetic oligonucleotide
gccaguuuucgga

SEQ ID NO: 82796 - RNA, 9 nt, Artificial Sequence
  Description of Artificial Sequence: Synthetic oligonucleotide
ggaacaggg

SEQ ID NO: 82797 - RNA, 13 nt, Artificial Sequence
  Description of Artificial Sequence: Synthetic oligonucleotide
uuaacuuuccagu

SEQ ID NO: 82798 - RNA, 14 nt, Artificial Sequence
  Description of Artificial Sequence: Synthetic oligonucleotide
aaaguuugguuuug

SEQ ID NO: 82799 - RNA, 12 nt, Artificial Sequence
  Description of Artificial Sequence: Synthetic oligonucleotide
cuucccacugua

SEQ ID NO: 82800 - RNA, 13 nt, Artificial Sequence
  Description of Artificial Sequence: Synthetic oligonucleotide
ugauaccauauga

SEQ ID NO: 82801 - RNA, 11 nt, Artificial Sequence
  Description of Artificial Sequence: Synthetic oligonucleotide
aacaugggcug

SEQ ID NO: 82802 - RNA, 13 nt, Artificial Sequence
  Description of Artificial Sequence: Synthetic oligonucleotide
caacuuuuucaua

SEQ ID NO: 82803 - RNA, 12 nt, Artificial Sequence
  Description of Artificial Sequence: Synthetic oligonucleotide
caugaggccgga

SEQ ID NO: 82804 - RNA, 11 nt, Artificial Sequence
  Description of Artificial Sequence: Synthetic oligonucleotide
acugcauuugu

SEQ ID NO: 82805 - RNA, 13 nt, Artificial Sequence
  Description of Artificial Sequence: Synthetic oligonucleotide
aauguuuacuacc

SEQ ID NO: 82806 - RNA, 15 nt, Artificial Sequence
  Description of Artificial Sequence: Synthetic oligonucleotide
aauuuuuugaugaaa

SEQ ID NO: 82807 - RNA, 14 nt, Artificial Sequence
  Description of Artificial Sequence: Synthetic oligonucleotide
cagugugugaauuu

SEQ ID NO: 82808 - RNA, 13 nt, Artificial Sequence
  Description of Artificial Sequence: Synthetic oligonucleotide
gagcaauguaugu

SEQ ID NO: 82809 - RNA, 14 nt, Artificial Sequence
  Description of Artificial Sequence: Synthetic oligonucleotide
aaagcacauauaua

SEQ ID NO: 82810 - RNA, 14 nt, Artificial Sequence
  Description of Artificial Sequence: Synthetic oligonucleotide
guaauaguuucucc

SEQ ID NO: 82811 - RNA, 13 nt, Artificial Sequence
  Description of Artificial Sequence: Synthetic oligonucleotide
aguuucuccaaau

SEQ ID NO: 82812 - RNA, 13 nt, Artificial Sequence
  Description of Artificial Sequence: Synthetic oligonucleotide
uacuuccuagaaa

SEQ ID NO: 82813 - RNA, 13 nt, Artificial Sequence
  Description of Artificial Sequence: Synthetic oligonucleotide
uacaccauauaug

SEQ ID NO: 82814 - RNA, 14 nt, Artificial Sequence
  Description of Artificial Sequence: Synthetic oligonucleotide
auauaugaauggag

SEQ ID NO: 82815 - RNA, 13 nt, Artificial Sequence
  Description of Artificial Sequence: Synthetic oligonucleotide
acgagaagaagau

SEQ ID NO: 82816 - RNA, 13 nt, Artificial Sequence
  Description of Artificial Sequence: Synthetic oligonucleotide
ucauuuacaggga

SEQ ID NO: 82817 - RNA, 13 nt, Artificial Sequence
  Description of Artificial Sequence: Synthetic oligonucleotide
cauuuacagggac

SEQ ID NO: 82818 - RNA, 10 nt, Artificial Sequence
  Description of Artificial Sequence: Synthetic oligonucleotide
agggaccuga

SEQ ID NO: 82819 - RNA, 14 nt, Artificial Sequence
  Description of Artificial Sequence: Synthetic oligonucleotide
uguuugacugcauc

SEQ ID NO: 82820 - RNA, 13 nt, Artificial Sequence
  Description of Artificial Sequence: Synthetic oligonucleotide
uuugacugcaucg

SEQ ID NO: 82821 - RNA, 12 nt, Artificial Sequence
  Description of Artificial Sequence: Synthetic oligonucleotide
gaguucacaggg

SEQ ID NO: 82822 - RNA, 13 nt, Artificial Sequence
  Description of Artificial Sequence: Synthetic oligonucleotide
ggcaccucugucc

SEQ ID NO: 82823 - RNA, 15 nt, Artificial Sequence
  Description of Artificial Sequence: Synthetic oligonucleotide
gguuugucuuuuuaa

SEQ ID NO: 82824 - RNA, 14 nt, Artificial Sequence
  Description of Artificial Sequence: Synthetic oligonucleotide
uuugucuuuuuaag

SEQ ID NO: 82825 - RNA, 13 nt, Artificial Sequence
  Description of Artificial Sequence: Synthetic oligonucleotide
ccuaaagguuguc

SEQ ID NO: 82826 - RNA, 12 nt, Artificial Sequence
  Description of Artificial Sequence: Synthetic oligonucleotide
aagguugucgac

SEQ ID NO: 82827 - RNA, 13 nt, Artificial Sequence
  Description of Artificial Sequence: Synthetic oligonucleotide
accuggcaauugu

SEQ ID NO: 82828 - RNA, 12 nt, Artificial Sequence
  Description of Artificial Sequence: Synthetic oligonucleotide
aguggugcgagg

SEQ ID NO: 82829 - RNA, 13 nt, Artificial Sequence
  Description of Artificial Sequence: Synthetic oligonucleotide
agagacaugaaau

SEQ ID NO: 82830 - RNA, 13 nt, Artificial Sequence
  Description of Artificial Sequence: Synthetic oligonucleotide
auauauuucucca

SEQ ID NO: 82831 - RNA, 10 nt, Artificial Sequence
  Description of Artificial Sequence: Synthetic oligonucleotide
caugaaggcu

SEQ ID NO: 82832 - RNA, 11 nt, Artificial Sequence
  Description of Artificial Sequence: Synthetic oligonucleotide
gcuggaguggu

SEQ ID NO: 82833 - RNA, 11 nt, Artificial Sequence
  Description of Artificial Sequence: Synthetic oligonucleotide
aggaagagagg

SEQ ID NO: 82834 - RNA, 12 nt, Artificial Sequence
  Description of Artificial Sequence: Synthetic oligonucleotide
cuugcaucgggc

SEQ ID NO: 82835 - RNA, 13 nt, Artificial Sequence
  Description of Artificial Sequence: Synthetic oligonucleotide
auauccuacugug

SEQ ID NO: 82836 - RNA, 13 nt, Artificial Sequence
  Description of Artificial Sequence: Synthetic oligonucleotide
uccuacuguguaa

SEQ ID NO: 82837 - RNA, 12 nt, Artificial Sequence
  Description of Artificial Sequence: Synthetic oligonucleotide
ccuuguagugua

SEQ ID NO: 82838 - RNA, 13 nt, Artificial Sequence
  Description of Artificial Sequence: Synthetic oligonucleotide
ucuuuguugauug

SEQ ID NO: 82839 - RNA, 14 nt, Artificial Sequence
  Description of Artificial Sequence: Synthetic oligonucleotide
uuuguugauugaaa

SEQ ID NO: 82840 - RNA, 15 nt, Artificial Sequence
  Description of Artificial Sequence: Synthetic oligonucleotide
uucuuuuucuuccau

SEQ ID NO: 82841 - RNA, 13 nt, Artificial Sequence
  Description of Artificial Sequence: Synthetic oligonucleotide
aaucuuccuucua

SEQ ID NO: 82842 - RNA, 13 nt, Artificial Sequence
  Description of Artificial Sequence: Synthetic oligonucleotide
uugaaugcuucau

SEQ ID NO: 82843 - RNA, 13 nt, Artificial Sequence
  Description of Artificial Sequence: Synthetic oligonucleotide
ugaaugcuucaug

SEQ ID NO: 82844 - RNA, 13 nt, Artificial Sequence
  Description of Artificial Sequence: Synthetic oligonucleotide
aauucuacuuuga

SEQ ID NO: 82845 - RNA, 13 nt, Artificial Sequence
  Description of Artificial Sequence: Synthetic oligonucleotide
agcaacuacagac

SEQ ID NO: 82846 - RNA, 13 nt, Artificial Sequence
  Description of Artificial Sequence: Synthetic oligonucleotide
gaccaaggucaac

SEQ ID NO: 82847 - RNA, 13 nt, Artificial Sequence
  Description of Artificial Sequence: Synthetic oligonucleotide
cgacuaucucgac

SEQ ID NO: 82848 - RNA, 13 nt, Artificial Sequence
  Description of Artificial Sequence: Synthetic oligonucleotide
aaccuucccaaac

SEQ ID NO: 82849 - RNA, 14 nt, Artificial Sequence
  Description of Artificial Sequence: Synthetic oligonucleotide
ccaagcuuagaacu

SEQ ID NO: 82850 - RNA, 15 nt, Artificial Sequence
  Description of Artificial Sequence: Synthetic oligonucleotide
agcuuagaacuuuaa

SEQ ID NO: 82851 - RNA, 11 nt, Artificial Sequence
  Description of Artificial Sequence: Synthetic oligonucleotide
aagaccaccac

SEQ ID NO: 82852 - RNA, 14 nt, Artificial Sequence
  Description of Artificial Sequence: Synthetic oligonucleotide
gcgagaaauaaagu

SEQ ID NO: 82853 - RNA, 14 nt, Artificial Sequence
  Description of Artificial Sequence: Synthetic oligonucleotide
cgagaaauaaaguu

SEQ ID NO: 82854 - RNA, 12 nt, Artificial Sequence
  Description of Artificial Sequence: Synthetic oligonucleotide
aggaaaugaucc

SEQ ID NO: 82855 - RNA, 13 nt, Artificial Sequence
  Description of Artificial Sequence: Synthetic oligonucleotide
gaagaaaugaaac

SEQ ID NO: 82856 - RNA, 13 nt, Artificial Sequence
  Description of Artificial Sequence: Synthetic oligonucleotide
guuuccauccucc

SEQ ID NO: 82857 - RNA, 15 nt, Artificial Sequence
  Description of Artificial Sequence: Synthetic oligonucleotide
acugaaaaucuuuga

SEQ ID NO: 82858 - RNA, 11 nt, Artificial Sequence
  Description of Artificial Sequence: Synthetic oligonucleotide
ugccguucagg

SEQ ID NO: 82859 - RNA, 13 nt, Artificial Sequence
  Description of Artificial Sequence: Synthetic oligonucleotide
caggguccagaag

SEQ ID NO: 82860 - RNA, 13 nt, Artificial Sequence
  Description of Artificial Sequence: Synthetic oligonucleotide
ucaagacugcuug

SEQ ID NO: 82861 - RNA, 13 nt, Artificial Sequence
  Description of Artificial Sequence: Synthetic oligonucleotide
uccaugucuuugg

SEQ ID NO: 82862 - RNA, 11 nt, Artificial Sequence
  Description of Artificial Sequence: Synthetic oligonucleotide
gccugaaacac

SEQ ID NO: 82863 - RNA, 12 nt, Artificial Sequence
  Description of Artificial Sequence: Synthetic oligonucleotide
ucucuguaccuc

SEQ ID NO: 82864 - RNA, 12 nt, Artificial Sequence
  Description of Artificial Sequence: Synthetic oligonucleotide
agcaagacaaga

SEQ ID NO: 82865 - RNA, 13 nt, Artificial Sequence
  Description of Artificial Sequence: Synthetic oligonucleotide
gcaagacaagaaa

SEQ ID NO: 82866 - RNA, 12 nt, Artificial Sequence
  Description of Artificial Sequence: Synthetic oligonucleotide
uguacaagaucc

SEQ ID NO: 82867 - RNA, 12 nt, Artificial Sequence
  Description of Artificial Sequence: Synthetic oligonucleotide
cguacuugcaga

SEQ ID NO: 82868 - RNA, 13 nt, Artificial Sequence
  Description of Artificial Sequence: Synthetic oligonucleotide
cgaucgauacaga

SEQ ID NO: 82869 - RNA, 13 nt, Artificial Sequence
  Description of Artificial Sequence: Synthetic oligonucleotide
uauaaaaauaaau

SEQ ID NO: 82870 - RNA, 13 nt, Artificial Sequence
  Description of Artificial Sequence: Synthetic oligonucleotide
uaaaaauaaauau

SEQ ID NO: 82871 - RNA, 13 nt, Artificial Sequence
  Description of Artificial Sequence: Synthetic oligonucleotide
uuugacugcugug

SEQ ID NO: 82872 - RNA, 13 nt, Artificial Sequence
  Description of Artificial Sequence: Synthetic oligonucleotide
ggagaugagagac

SEQ ID NO: 82873 - RNA, 10 nt, Artificial Sequence
  Description of Artificial Sequence: Synthetic oligonucleotide
ucccacuugg

SEQ ID NO: 82874 - RNA, 10 nt, Artificial Sequence
  Description of Artificial Sequence: Synthetic oligonucleotide
guucacggcc

SEQ ID NO: 82875 - RNA, 12 nt, Artificial Sequence
  Description of Artificial Sequence: Synthetic oligonucleotide
accaucacacca

SEQ ID NO: 82876 - RNA, 10 nt, Artificial Sequence
  Description of Artificial Sequence: Synthetic oligonucleotide
cugcggguuu

SEQ ID NO: 82877 - RNA, 9 nt, Artificial Sequence
  Description of Artificial Sequence: Synthetic oligonucleotide
uccaguuug

SEQ ID NO: 82878 - RNA, 12 nt, Artificial Sequence
  Description of Artificial Sequence: Synthetic oligonucleotide
uuaaggacuucu

SEQ ID NO: 82879 - RNA, 12 nt, Artificial Sequence
  Description of Artificial Sequence: Synthetic oligonucleotide
agugggacagag

SEQ ID NO: 82880 - RNA, 13 nt, Artificial Sequence
  Description of Artificial Sequence: Synthetic oligonucleotide
auuuguuauugug

SEQ ID NO: 82881 - RNA, 12 nt, Artificial Sequence
  Description of Artificial Sequence: Synthetic oligonucleotide
ucaaaugcauuu

SEQ ID NO: 82882 - RNA, 9 nt, Artificial Sequence
  Description of Artificial Sequence: Synthetic oligonucleotide
aggaaagcc

SEQ ID NO: 82883 - RNA, 10 nt, Artificial Sequence
  Description of Artificial Sequence: Synthetic oligonucleotide
ggaaagcccu

SEQ ID NO: 82884 - RNA, 11 nt, Artificial Sequence
  Description of Artificial Sequence: Synthetic oligonucleotide
ccagcauggcc

SEQ ID NO: 82885 - RNA, 10 nt, Artificial Sequence
  Description of Artificial Sequence: Synthetic oligonucleotide
uucucccuga

SEQ ID NO: 82886 - RNA, 11 nt, Artificial Sequence
  Description of Artificial Sequence: Synthetic oligonucleotide
aagaagcccuu

SEQ ID NO: 82887 - RNA, 11 nt, Artificial Sequence
  Description of Artificial Sequence: Synthetic oligonucleotide
gaagcccuuca

SEQ ID NO: 82888 - RNA, 10 nt, Artificial Sequence
  Description of Artificial Sequence: Synthetic oligonucleotide
cccuucagcg

SEQ ID NO: 82889 - RNA, 10 nt, Artificial Sequence
  Description of Artificial Sequence: Synthetic oligonucleotide
cuucagcggc

SEQ ID NO: 82890 - RNA, 11 nt, Artificial Sequence
  Description of Artificial Sequence: Synthetic oligonucleotide
cagcggccagu

SEQ ID NO: 82891 - RNA, 11 nt, Artificial Sequence
  Description of Artificial Sequence: Synthetic oligonucleotide
gaaaagcuccg

SEQ ID NO: 82892 - RNA, 10 nt, Artificial Sequence
  Description of Artificial Sequence: Synthetic oligonucleotide
aaagcuccgg

SEQ ID NO: 82893 - RNA, 12 nt, Artificial Sequence
  Description of Artificial Sequence: Synthetic oligonucleotide
gucaacagucug

SEQ ID NO: 82894 - RNA, 12 nt, Artificial Sequence
  Description of Artificial Sequence: Synthetic oligonucleotide
agaguucaaaag

SEQ ID NO: 82895 - RNA, 12 nt, Artificial Sequence
  Description of Artificial Sequence: Synthetic oligonucleotide
gaguucaaaagc

SEQ ID NO: 82896 - RNA, 11 nt, Artificial Sequence
  Description of Artificial Sequence: Synthetic oligonucleotide
ucaaaagcccu

SEQ ID NO: 82897 - RNA, 11 nt, Artificial Sequence
  Description of Artificial Sequence: Synthetic oligonucleotide
caaaagcccuu

SEQ ID NO: 82898 - RNA, 11 nt, Artificial Sequence
  Description of Artificial Sequence: Synthetic oligonucleotide
aaagcccuuca

SEQ ID NO: 82899 - RNA, 11 nt, Artificial Sequence
  Description of Artificial Sequence: Synthetic oligonucleotide
aagcccuucag

SEQ ID NO: 82900 - RNA, 12 nt, Artificial Sequence
  Description of Artificial Sequence: Synthetic oligonucleotide
ugaagccgcucg

SEQ ID NO: 82901 - RNA, 11 nt, Artificial Sequence
  Description of Artificial Sequence: Synthetic oligonucleotide
acgccagucaa

SEQ ID NO: 82902 - RNA, 12 nt, Artificial Sequence
  Description of Artificial Sequence: Synthetic oligonucleotide
ucuuggugcgug

SEQ ID NO: 82903 - RNA, 13 nt, Artificial Sequence
  Description of Artificial Sequence: Synthetic oligonucleotide
uuggauucaucag

SEQ ID NO: 82904 - RNA, 12 nt, Artificial Sequence
  Description of Artificial Sequence: Synthetic oligonucleotide
ggaauaccuaag

SEQ ID NO: 82905 - RNA, 11 nt, Artificial Sequence
  Description of Artificial Sequence: Synthetic oligonucleotide
uuugaggcuca

SEQ ID NO: 82906 - RNA, 10 nt, Artificial Sequence
  Description of Artificial Sequence: Synthetic oligonucleotide
cuacaauugg

SEQ ID NO: 82907 - RNA, 11 nt, Artificial Sequence
  Description of Artificial Sequence: Synthetic oligonucleotide
aguuaggagcc

SEQ ID NO: 82908 - RNA, 12 nt, Artificial Sequence
  Description of Artificial Sequence: Synthetic oligonucleotide
gucaauauccac

SEQ ID NO: 82909 - RNA, 12 nt, Artificial Sequence
  Description of Artificial Sequence: Synthetic oligonucleotide
uguucagucaca

SEQ ID NO: 82910 - RNA, 11 nt, Artificial Sequence
  Description of Artificial Sequence: Synthetic oligonucleotide
cacacacauac

SEQ ID NO: 82911 - RNA, 11 nt, Artificial Sequence
  Description of Artificial Sequence: Synthetic oligonucleotide
uccuuuugcuu

SEQ ID NO: 82912 - RNA, 15 nt, Artificial Sequence
  Description of Artificial Sequence: Synthetic oligonucleotide
uuuaaaguaauuuuu

SEQ ID NO: 82913 - RNA, 12 nt, Artificial Sequence
  Description of Artificial Sequence: Synthetic oligonucleotide
aacagucaaugg

SEQ ID NO: 82914 - RNA, 12 nt, Artificial Sequence
  Description of Artificial Sequence: Synthetic oligonucleotide
cgacaaaccaau

SEQ ID NO: 82915 - RNA, 11 nt, Artificial Sequence
  Description of Artificial Sequence: Synthetic oligonucleotide
cugcuaccacu

SEQ ID NO: 82916 - RNA, 12 nt, Artificial Sequence
  Description of Artificial Sequence: Synthetic oligonucleotide
caagcggucuua

SEQ ID NO: 82917 - RNA, 12 nt, Artificial Sequence
  Description of Artificial Sequence: Synthetic oligonucleotide
gucuuaccggcu

SEQ ID NO: 82918 - RNA, 10 nt, Artificial Sequence
  Description of Artificial Sequence: Synthetic oligonucleotide
auggguuacc

SEQ ID NO: 82919 - RNA, 10 nt, Artificial Sequence
  Description of Artificial Sequence: Synthetic oligonucleotide
uuaccugcga

SEQ ID NO: 82920 - RNA, 11 nt, Artificial Sequence
  Description of Artificial Sequence: Synthetic oligonucleotide
aucuugcugag

SEQ ID NO: 82921 - RNA, 12 nt, Artificial Sequence
  Description of Artificial Sequence: Synthetic oligonucleotide
gcauaaaacagu

SEQ ID NO: 82922 - RNA, 11 nt, Artificial Sequence
  Description of Artificial Sequence: Synthetic oligonucleotide
uccuuuauccu

SEQ ID NO: 82923 - RNA, 11 nt, Artificial Sequence
  Description of Artificial Sequence: Synthetic oligonucleotide
aacgcaaguug

SEQ ID NO: 82924 - RNA, 12 nt, Artificial Sequence
  Description of Artificial Sequence: Synthetic oligonucleotide
aacugaaaccau

SEQ ID NO: 82925 - RNA, 13 nt, Artificial Sequence
  Description of Artificial Sequence: Synthetic oligonucleotide
cuuuguuaaauau

SEQ ID NO: 82926 - RNA, 13 nt, Artificial Sequence
  Description of Artificial Sequence: Synthetic oligonucleotide
uauauuaaaaguu

SEQ ID NO: 82927 - RNA, 12 nt, Artificial Sequence
  Description of Artificial Sequence: Synthetic oligonucleotide
uuuugacuuaac

SEQ ID NO: 82928 - RNA, 12 nt, Artificial Sequence
  Description of Artificial Sequence: Synthetic oligonucleotide
caaacucagcac

SEQ ID NO: 82929 - RNA, 10 nt, Artificial Sequence
  Description of Artificial Sequence: Synthetic oligonucleotide
gcugaccuca

SEQ ID NO: 82930 - RNA, 13 nt, Artificial Sequence
  Description of Artificial Sequence: Synthetic oligonucleotide
uuauucagaucgc

SEQ ID NO: 82931 - RNA, 12 nt, Artificial Sequence
  Description of Artificial Sequence: Synthetic oligonucleotide
ggguucugggau

SEQ ID NO: 82932 - RNA, 14 nt, Artificial Sequence
  Description of Artificial Sequence: Synthetic oligonucleotide
uauuggaaauuaug

SEQ ID NO: 82933 - RNA, 12 nt, Artificial Sequence
  Description of Artificial Sequence: Synthetic oligonucleotide
uggaagcacuag

SEQ ID NO: 82934 - RNA, 12 nt, Artificial Sequence
  Description of Artificial Sequence: Synthetic oligonucleotide
uuuuuaugugga

SEQ ID NO: 82935 - RNA, 11 nt, Artificial Sequence
  Description of Artificial Sequence: Synthetic oligonucleotide
gaauugguaga

SEQ ID NO: 82936 - RNA, 12 nt, Artificial Sequence
  Description of Artificial Sequence: Synthetic oligonucleotide
uagacuuggaga

SEQ ID NO: 82937 - RNA, 12 nt, Artificial Sequence
  Description of Artificial Sequence: Synthetic oligonucleotide
uacaguauucca

SEQ ID NO: 82938 - RNA, 14 nt, Artificial Sequence
  Description of Artificial Sequence: Synthetic oligonucleotide
cacugaugaauuaa

SEQ ID NO: 82939 - RNA, 11 nt, Artificial Sequence
  Description of Artificial Sequence: Synthetic oligonucleotide
cacaucaucac

SEQ ID NO: 82940 - RNA, 12 nt, Artificial Sequence
  Description of Artificial Sequence: Synthetic oligonucleotide
ucaccaaacaga

SEQ ID NO: 82941 - RNA, 11 nt, Artificial Sequence
  Description of Artificial Sequence: Synthetic oligonucleotide
gaacaugaugg

SEQ ID NO: 82942 - RNA, 11 nt, Artificial Sequence
  Description of Artificial Sequence: Synthetic oligonucleotide
auguagacugc

SEQ ID NO: 82943 - RNA, 12 nt, Artificial Sequence
  Description of Artificial Sequence: Synthetic oligonucleotide
gaucuauuuaug

SEQ ID NO: 82944 - RNA, 11 nt, Artificial Sequence
  Description of Artificial Sequence: Synthetic oligonucleotide
cacuauuauca

SEQ ID NO: 82945 - RNA, 10 nt, Artificial Sequence
  Description of Artificial Sequence: Synthetic oligonucleotide
ucaguucugc

SEQ ID NO: 82946 - RNA, 12 nt, Artificial Sequence
  Description of Artificial Sequence: Synthetic oligonucleotide
gauuaaaccuac

SEQ ID NO: 82947 - RNA, 12 nt, Artificial Sequence
  Description of Artificial Sequence: Synthetic oligonucleotide
uaaaauccuucu

SEQ ID NO: 82948 - RNA, 11 nt, Artificial Sequence
  Description of Artificial Sequence: Synthetic oligonucleotide
augcuguagac

SEQ ID NO: 82949 - RNA, 12 nt, Artificial Sequence
  Description of Artificial Sequence: Synthetic oligonucleotide
ugauaggaauag

SEQ ID NO: 82950 - RNA, 10 nt, Artificial Sequence
  Description of Artificial Sequence: Synthetic oligonucleotide
auggcccuga

SEQ ID NO: 82951 - RNA, 10 nt, Artificial Sequence
  Description of Artificial Sequence: Synthetic oligonucleotide
uccucaagca

SEQ ID NO: 82952 - RNA, 9 nt, Artificial Sequence
  Description of Artificial Sequence: Synthetic oligonucleotide
uucagccca

SEQ ID NO: 82953 - RNA, 10 nt, Artificial Sequence
  Description of Artificial Sequence: Synthetic oligonucleotide
cugcugaacc

SEQ ID NO: 82954 - RNA, 11 nt, Artificial Sequence
  Description of Artificial Sequence: Synthetic oligonucleotide
aguucucuuca

SEQ ID NO: 82955 - RNA, 10 nt, Artificial Sequence
  Description of Artificial Sequence: Synthetic oligonucleotide
cagccuagag

SEQ ID NO: 82956 - RNA, 12 nt, Artificial Sequence
  Description of Artificial Sequence: Synthetic oligonucleotide
ucugugaagugu

SEQ ID NO: 82957 - RNA, 13 nt, Artificial Sequence
  Description of Artificial Sequence: Synthetic oligonucleotide
gagaaaauuucaa

SEQ ID NO: 82958 - RNA, 10 nt, Artificial Sequence
  Description of Artificial Sequence: Synthetic oligonucleotide
auccuccuga

SEQ ID NO: 82959 - RNA, 11 nt, Artificial Sequence
  Description of Artificial Sequence: Synthetic oligonucleotide
ugacaucauau

SEQ ID NO: 82960 - RNA, 12 nt, Artificial Sequence
  Description of Artificial Sequence: Synthetic oligonucleotide
aucuucaucaua

SEQ ID NO: 82961 - RNA, 12 nt, Artificial Sequence
  Description of Artificial Sequence: Synthetic oligonucleotide
acuagcuauuaa

SEQ ID NO: 82962 - RNA, 13 nt, Artificial Sequence
  Description of Artificial Sequence: Synthetic oligonucleotide
cucuacuaaaaau

SEQ ID NO: 82963 - RNA, 11 nt, Artificial Sequence
  Description of Artificial Sequence: Synthetic oligonucleotide
cuaucucgccu

SEQ ID NO: 82964 - RNA, 12 nt, Artificial Sequence
  Description of Artificial Sequence: Synthetic oligonucleotide
uucgguccaguu

SEQ ID NO: 82965 - RNA, 10 nt, Artificial Sequence
  Description of Artificial Sequence: Synthetic oligonucleotide
auguagccgc

SEQ ID NO: 82966 - RNA, 11 nt, Artificial Sequence
  Description of Artificial Sequence: Synthetic oligonucleotide
gaggagacuug

SEQ ID NO: 82967 - RNA, 11 nt, Artificial Sequence
  Description of Artificial Sequence: Synthetic oligonucleotide
aguagugagga

SEQ ID NO: 82968 - RNA, 13 nt, Artificial Sequence
  Description of Artificial Sequence: Synthetic oligonucleotide
agaugaguacaaa

SEQ ID NO: 82969 - RNA, 12 nt, Artificial Sequence
  Description of Artificial Sequence: Synthetic oligonucleotide
uuguuaaugggc

SEQ ID NO: 82970 - RNA, 12 nt, Artificial Sequence
  Description of Artificial Sequence: Synthetic oligonucleotide
uuuuaauuuauu

SEQ ID NO: 82971 - RNA, 11 nt, Artificial Sequence
  Description of Artificial Sequence: Synthetic oligonucleotide
auuuaaauaug

SEQ ID NO: 82972 - RNA, 12 nt, Artificial Sequence
  Description of Artificial Sequence: Synthetic oligonucleotide
auccuuuguuuc

SEQ ID NO: 82973 - RNA, 13 nt, Artificial Sequence
  Description of Artificial Sequence: Synthetic oligonucleotide
gucuaaguguuug

SEQ ID NO: 82974 - RNA, 11 nt, Artificial Sequence
  Description of Artificial Sequence: Synthetic oligonucleotide
ccugugacaaa

SEQ ID NO: 82975 - RNA, 12 nt, Artificial Sequence
  Description of Artificial Sequence: Synthetic oligonucleotide
caggcugaauua

SEQ ID NO: 82976 - RNA, 13 nt, Artificial Sequence
  Description of Artificial Sequence: Synthetic oligonucleotide
ucauucuuacaau

SEQ ID NO: 82977 - RNA, 14 nt, Artificial Sequence
  Description of Artificial Sequence: Synthetic oligonucleotide
cauucuuacaauug

SEQ ID NO: 82978 - RNA, 11 nt, Artificial Sequence
  Description of Artificial Sequence: Synthetic oligonucleotide
agagaguguac

SEQ ID NO: 82979 - RNA, 11 nt, Artificial Sequence
  Description of Artificial Sequence: Synthetic oligonucleotide
gaacucagcag

SEQ ID NO: 82980 - RNA, 12 nt, Artificial Sequence
  Description of Artificial Sequence: Synthetic oligonucleotide
uuauuuucagua

SEQ ID NO: 82981 - RNA, 11 nt, Artificial Sequence
  Description of Artificial Sequence: Synthetic oligonucleotide
cuuaaauggaa

SEQ ID NO: 82982 - RNA, 12 nt, Artificial Sequence
  Description of Artificial Sequence: Synthetic oligonucleotide
gccuaaaauugu

SEQ ID NO: 82983 - RNA, 12 nt, Artificial Sequence
  Description of Artificial Sequence: Synthetic oligonucleotide
acuaacaucugg

SEQ ID NO: 82984 - RNA, 11 nt, Artificial Sequence
  Description of Artificial Sequence: Synthetic oligonucleotide
gacugugagcu

SEQ ID NO: 82985 - RNA, 13 nt, Artificial Sequence
  Description of Artificial Sequence: Synthetic oligonucleotide
gcuuuuuauuaau

SEQ ID NO: 82986 - RNA, 12 nt, Artificial Sequence
  Description of Artificial Sequence: Synthetic oligonucleotide
ucuucuuacauu

SEQ ID NO: 82987 - RNA, 14 nt, Artificial Sequence
  Description of Artificial Sequence: Synthetic oligonucleotide
auuuguaaaaaugu

SEQ ID NO: 82988 - RNA, 14 nt, Artificial Sequence
  Description of Artificial Sequence: Synthetic oligonucleotide
ucuuaauucauauu

SEQ ID NO: 82989 - RNA, 12 nt, Artificial Sequence
  Description of Artificial Sequence: Synthetic oligonucleotide
aacuaaucauga

SEQ ID NO: 82990 - RNA, 11 nt, Artificial Sequence
  Description of Artificial Sequence: Synthetic oligonucleotide
cugcucuuggg

SEQ ID NO: 82991 - RNA, 12 nt, Artificial Sequence
  Description of Artificial Sequence: Synthetic oligonucleotide
aguagcuuugag

SEQ ID NO: 82992 - RNA, 13 nt, Artificial Sequence
  Description of Artificial Sequence: Synthetic oligonucleotide
acguaauauuuca

SEQ ID NO: 82993 - RNA, 12 nt, Artificial Sequence
  Description of Artificial Sequence: Synthetic oligonucleotide
auucucuucacu

SEQ ID NO: 82994 - RNA, 13 nt, Artificial Sequence
  Description of Artificial Sequence: Synthetic oligonucleotide
uaaugcuaagaaa

SEQ ID NO: 82995 - RNA, 11 nt, Artificial Sequence
  Description of Artificial Sequence: Synthetic oligonucleotide
cugaaaaucaa

SEQ ID NO: 82996 - RNA, 13 nt, Artificial Sequence
  Description of Artificial Sequence: Synthetic oligonucleotide
auaugauuacuuu

SEQ ID NO: 82997 - RNA, 13 nt, Artificial Sequence
  Description of Artificial Sequence: Synthetic oligonucleotide
auuuuguucuaca

SEQ ID NO: 82998 - RNA, 11 nt, Artificial Sequence
  Description of Artificial Sequence: Synthetic oligonucleotide
ccgggacucuc

SEQ ID NO: 82999 - RNA, 13 nt, Artificial Sequence
  Description of Artificial Sequence: Synthetic oligonucleotide
cuuuaaaguaaag

SEQ ID NO: 83000 - RNA, 12 nt, Artificial Sequence
  Description of Artificial Sequence: Synthetic oligonucleotide
cuggaagccugg

SEQ ID NO: 83001 - RNA, 13 nt, Artificial Sequence
  Description of Artificial Sequence: Synthetic oligonucleotide
aaacaaaagagag

SEQ ID NO: 83002 - RNA, 12 nt, Artificial Sequence
  Description of Artificial Sequence: Synthetic oligonucleotide
ucaguuaugccg

SEQ ID NO: 83003 - RNA, 12 nt, Artificial Sequence
  Description of Artificial Sequence: Synthetic oligonucleotide
aaaagaagucca

SEQ ID NO: 83004 - RNA, 10 nt, Artificial Sequence
  Description of Artificial Sequence: Synthetic oligonucleotide
ggugagguua

SEQ ID NO: 83005 - RNA, 10 nt, Artificial Sequence
  Description of Artificial Sequence: Synthetic oligonucleotide
ggaagaggac

SEQ ID NO: 83006 - RNA, 12 nt, Artificial Sequence
  Description of Artificial Sequence: Synthetic oligonucleotide
agcaaguauugu

SEQ ID NO: 83007 - RNA, 11 nt, Artificial Sequence
  Description of Artificial Sequence: Synthetic oligonucleotide
uuguagcacuc

SEQ ID NO: 83008 - RNA, 13 nt, Artificial Sequence
  Description of Artificial Sequence: Synthetic oligonucleotide
caaaaccacaaau

SEQ ID NO: 83009 - RNA, 11 nt, Artificial Sequence
  Description of Artificial Sequence: Synthetic oligonucleotide
aagcccauaca

SEQ ID NO: 83010 - RNA, 10 nt, Artificial Sequence
  Description of Artificial Sequence: Synthetic oligonucleotide
gcccauacag

SEQ ID NO: 83011 - RNA, 11 nt, Artificial Sequence
  Description of Artificial Sequence: Synthetic oligonucleotide
agaaaccuucc

SEQ ID NO: 83012 - RNA, 9 nt, Artificial Sequence
  Description of Artificial Sequence: Synthetic oligonucleotide
uauaccuac

SEQ ID NO: 83013 - RNA, 12 nt, Artificial Sequence
  Description of Artificial Sequence: Synthetic oligonucleotide
ccaguuuucgga

SEQ ID NO: 83014 - RNA, 8 nt, Artificial Sequence
  Description of Artificial Sequence: Synthetic oligonucleotide
gaacaggg

SEQ ID NO: 83015 - RNA, 12 nt, Artificial Sequence
  Description of Artificial Sequence: Synthetic oligonucleotide
uaacuuuccagu

SEQ ID NO: 83016 - RNA, 13 nt, Artificial Sequence
  Description of Artificial Sequence: Synthetic oligonucleotide
aaguuugguuuug

SEQ ID NO: 83017 - RNA, 11 nt, Artificial Sequence
  Description of Artificial Sequence: Synthetic oligonucleotide
uucccacugua

SEQ ID NO: 83018 - RNA, 12 nt, Artificial Sequence
  Description of Artificial Sequence: Synthetic oligonucleotide
gauaccauauga

SEQ ID NO: 83019 - RNA, 10 nt, Artificial Sequence
  Description of Artificial Sequence: Synthetic oligonucleotide
acaugggcug

SEQ ID NO: 83020 - RNA, 12 nt, Artificial Sequence
  Description of Artificial Sequence: Synthetic oligonucleotide
aacuuuuucaua

SEQ ID NO: 83021 - RNA, 11 nt, Artificial Sequence
  Description of Artificial Sequence: Synthetic oligonucleotide
augaggccgga

SEQ ID NO: 83022 - RNA, 10 nt, Artificial Sequence
  Description of Artificial Sequence: Synthetic oligonucleotide
cugcauuugu

SEQ ID NO: 83023 - RNA, 12 nt, Artificial Sequence
  Description of Artificial Sequence: Synthetic oligonucleotide
auguuuacuacc

SEQ ID NO: 83024 - RNA, 14 nt, Artificial Sequence
  Description of Artificial Sequence: Synthetic oligonucleotide
auuuuuugaugaaa

SEQ ID NO: 83025 - RNA, 13 nt, Artificial Sequence
  Description of Artificial Sequence: Synthetic oligonucleotide
agugugugaauuu

SEQ ID NO: 83026 - RNA, 12 nt, Artificial Sequence
  Description of Artificial Sequence: Synthetic oligonucleotide
agcaauguaugu

SEQ ID NO: 83027 - RNA, 13 nt, Artificial Sequence
  Description of Artificial Sequence: Synthetic oligonucleotide
aagcacauauaua

SEQ ID NO: 83028 - RNA, 13 nt, Artificial Sequence
  Description of Artificial Sequence: Synthetic oligonucleotide
uaauaguuucucc

SEQ ID NO: 83029 - RNA, 12 nt, Artificial Sequence
  Description of Artificial Sequence: Synthetic oligonucleotide
guuucuccaaau

SEQ ID NO: 83030 - RNA, 12 nt, Artificial Sequence
  Description of Artificial Sequence: Synthetic oligonucleotide
acuuccuagaaa

SEQ ID NO: 83031 - RNA, 12 nt, Artificial Sequence
  Description of Artificial Sequence: Synthetic oligonucleotide
acaccauauaug

SEQ ID NO: 83032 - RNA, 13 nt, Artificial Sequence
  Description of Artificial Sequence: Synthetic oligonucleotide
uauaugaauggag

SEQ ID NO: 83033 - RNA, 12 nt, Artificial Sequence
  Description of Artificial Sequence: Synthetic oligonucleotide
cauuuacaggga

SEQ ID NO: 83034 - RNA, 12 nt, Artificial Sequence
  Description of Artificial Sequence: Synthetic oligonucleotide
auuuacagggac

SEQ ID NO: 83035 - RNA, 9 nt, Artificial Sequence
  Description of Artificial Sequence: Synthetic oligonucleotide
gggaccuga

SEQ ID NO: 83036 - RNA, 13 nt, Artificial Sequence
  Description of Artificial Sequence: Synthetic oligonucleotide
guuugacugcauc

SEQ ID NO: 83037 - RNA, 12 nt, Artificial Sequence
  Description of Artificial Sequence: Synthetic oligonucleotide
uugacugcaucg

SEQ ID NO: 83038 - RNA, 11 nt, Artificial Sequence
  Description of Artificial Sequence: Synthetic oligonucleotide
aguucacaggg

SEQ ID NO: 83039 - RNA, 12 nt, Artificial Sequence
  Description of Artificial Sequence: Synthetic oligonucleotide
gcaccucugucc

SEQ ID NO: 83040 - RNA, 14 nt, Artificial Sequence
  Description of Artificial Sequence: Synthetic oligonucleotide
guuugucuuuuuaa

SEQ ID NO: 83041 - RNA, 13 nt, Artificial Sequence
  Description of Artificial Sequence: Synthetic oligonucleotide
uugucuuuuuaag

SEQ ID NO: 83042 - RNA, 12 nt, Artificial Sequence
  Description of Artificial Sequence: Synthetic oligonucleotide
cuaaagguuguc

SEQ ID NO: 83043 - RNA, 11 nt, Artificial Sequence
  Description of Artificial Sequence: Synthetic oligonucleotide
agguugucgac

SEQ ID NO: 83044 - RNA, 12 nt, Artificial Sequence
  Description of Artificial Sequence: Synthetic oligonucleotide
ccuggcaauugu

SEQ ID NO: 83045 - RNA, 11 nt, Artificial Sequence
  Description of Artificial Sequence: Synthetic oligonucleotide
guggugcgagg

SEQ ID NO: 83046 - RNA, 12 nt, Artificial Sequence
  Description of Artificial Sequence: Synthetic oligonucleotide
gagacaugaaau

SEQ ID NO: 83047 - RNA, 12 nt, Artificial Sequence
  Description of Artificial Sequence: Synthetic oligonucleotide
uauauuucucca

SEQ ID NO: 83048 - RNA, 9 nt, Artificial Sequence
  Description of Artificial Sequence: Synthetic oligonucleotide
augaaggcu

SEQ ID NO: 83049 - RNA, 10 nt, Artificial Sequence
  Description of Artificial Sequence: Synthetic oligonucleotide
cuggaguggu

SEQ ID NO: 83050 - RNA, 10 nt, Artificial Sequence
  Description of Artificial Sequence: Synthetic oligonucleotide
ggaagagagg

SEQ ID NO: 83051 - RNA, 11 nt, Artificial Sequence
  Description of Artificial Sequence: Synthetic oligonucleotide
uugcaucgggc

SEQ ID NO: 83052 - RNA, 12 nt, Artificial Sequence
  Description of Artificial Sequence: Synthetic oligonucleotide
uauccuacugug

SEQ ID NO: 83053 - RNA, 12 nt, Artificial Sequence
  Description of Artificial Sequence: Synthetic oligonucleotide
ccuacuguguaa

SEQ ID NO: 83054 - RNA, 11 nt, Artificial Sequence
  Description of Artificial Sequence: Synthetic oligonucleotide
cuuguagugua

SEQ ID NO: 83055 - RNA, 12 nt, Artificial Sequence
  Description of Artificial Sequence: Synthetic oligonucleotide
cuuuguugauug

SEQ ID NO: 83056 - RNA, 13 nt, Artificial Sequence
  Description of Artificial Sequence: Synthetic oligonucleotide
uuguugauugaaa

SEQ ID NO: 83057 - RNA, 14 nt, Artificial Sequence
  Description of Artificial Sequence: Synthetic oligonucleotide
ucuuuuucuuccau

SEQ ID NO: 83058 - RNA, 12 nt, Artificial Sequence
  Description of Artificial Sequence: Synthetic oligonucleotide
aucuuccuucua

SEQ ID NO: 83059 - RNA, 12 nt, Artificial Sequence
  Description of Artificial Sequence: Synthetic oligonucleotide
ugaaugcuucau

SEQ ID NO: 83060 - RNA, 12 nt, Artificial Sequence
  Description of Artificial Sequence: Synthetic oligonucleotide
gaaugcuucaug

SEQ ID NO: 83061 - RNA, 12 nt, Artificial Sequence
  Description of Artificial Sequence: Synthetic oligonucleotide
auucuacuuuga

SEQ ID NO: 83062 - RNA, 12 nt, Artificial Sequence
  Description of Artificial Sequence: Synthetic oligonucleotide
gcaacuacagac

SEQ ID NO: 83063 - RNA, 12 nt, Artificial Sequence
  Description of Artificial Sequence: Synthetic oligonucleotide
accaaggucaac

SEQ ID NO: 83064 - RNA, 12 nt, Artificial Sequence
  Description of Artificial Sequence: Synthetic oligonucleotide
gacuaucucgac

SEQ ID NO: 83065 - RNA, 12 nt, Artificial Sequence
  Description of Artificial Sequence: Synthetic oligonucleotide
accuucccaaac

SEQ ID NO: 83066 - RNA, 13 nt, Artificial Sequence
  Description of Artificial Sequence: Synthetic oligonucleotide
caagcuuagaacu

SEQ ID NO: 83067 - RNA, 14 nt, Artificial Sequence
  Description of Artificial Sequence: Synthetic oligonucleotide
gcuuagaacuuuaa

SEQ ID NO: 83068 - RNA, 13 nt, Artificial Sequence
  Description of Artificial Sequence: Synthetic oligonucleotide
aacuuuaagcaac

SEQ ID NO: 83069 - RNA, 10 nt, Artificial Sequence
  Description of Artificial Sequence: Synthetic oligonucleotide
agaccaccac

SEQ ID NO: 83070 - RNA, 13 nt, Artificial Sequence
  Description of Artificial Sequence: Synthetic oligonucleotide
cgagaaauaaagu

SEQ ID NO: 83071 - RNA, 13 nt, Artificial Sequence
  Description of Artificial Sequence: Synthetic oligonucleotide
gagaaauaaaguu

SEQ ID NO: 83072 - RNA, 11 nt, Artificial Sequence
  Description of Artificial Sequence: Synthetic oligonucleotide
ggaaaugaucc

SEQ ID NO: 83073 - RNA, 12 nt, Artificial Sequence
  Description of Artificial Sequence: Synthetic oligonucleotide
aagaaaugaaac

SEQ ID NO: 83074 - RNA, 12 nt, Artificial Sequence
  Description of Artificial Sequence: Synthetic oligonucleotide
uuuccauccucc

SEQ ID NO: 83075 - RNA, 14 nt, Artificial Sequence
  Description of Artificial Sequence: Synthetic oligonucleotide
cugaaaaucuuuga

SEQ ID NO: 83076 - RNA, 10 nt, Artificial Sequence
  Description of Artificial Sequence: Synthetic oligonucleotide
gccguucagg

SEQ ID NO: 83077 - RNA, 12 nt, Artificial Sequence
  Description of Artificial Sequence: Synthetic oligonucleotide
aggguccagaag

SEQ ID NO: 83078 - RNA, 12 nt, Artificial Sequence
  Description of Artificial Sequence: Synthetic oligonucleotide
caagacugcuug

SEQ ID NO: 83079 - RNA, 12 nt, Artificial Sequence
  Description of Artificial Sequence: Synthetic oligonucleotide
ccaugucuuugg

SEQ ID NO: 83080 - RNA, 10 nt, Artificial Sequence
  Description of Artificial Sequence: Synthetic oligonucleotide
ccugaaacac

SEQ ID NO: 83081 - RNA, 11 nt, Artificial Sequence
  Description of Artificial Sequence: Synthetic oligonucleotide
cucuguaccuc

SEQ ID NO: 83082 - RNA, 11 nt, Artificial Sequence
  Description of Artificial Sequence: Synthetic oligonucleotide
gcaagacaaga

SEQ ID NO: 83083 - RNA, 12 nt, Artificial Sequence
  Description of Artificial Sequence: Synthetic oligonucleotide
caagacaagaaa

SEQ ID NO: 83084 - RNA, 11 nt, Artificial Sequence
  Description of Artificial Sequence: Synthetic oligonucleotide
guacaagaucc

SEQ ID NO: 83085 - RNA, 11 nt, Artificial Sequence
  Description of Artificial Sequence: Synthetic oligonucleotide
guacuugcaga

SEQ ID NO: 83086 - RNA, 12 nt, Artificial Sequence
  Description of Artificial Sequence: Synthetic oligonucleotide
gaucgauacaga

SEQ ID NO: 83087 - RNA, 12 nt, Artificial Sequence
  Description of Artificial Sequence: Synthetic oligonucleotide
auaaaaauaaau

SEQ ID NO: 83088 - RNA, 12 nt, Artificial Sequence
  Description of Artificial Sequence: Synthetic oligonucleotide
aaaaauaaauau

SEQ ID NO: 83089 - RNA, 12 nt, Artificial Sequence
  Description of Artificial Sequence: Synthetic oligonucleotide
uugacugcugug

SEQ ID NO: 83090 - RNA, 12 nt, Artificial Sequence
  Description of Artificial Sequence: Synthetic oligonucleotide
gagaugagagac

SEQ ID NO: 83091 - RNA, 9 nt, Artificial Sequence
  Description of Artificial Sequence: Synthetic oligonucleotide
cccacuugg

SEQ ID NO: 83092 - RNA, 8787 nt, Homo sapiens
ggccgcagcuccccggcggaggcaagaggugguugggggggaccauggcugacguuuucccgggcaacgacuccacggcgucucaggacguggccaaccgcuucgcccgcaaaggggcgcugaggcagaagaacgugcacgaggugaaggaccacaaauucaucgcgcgcuucuucaagcagcccaccuucugcagccacugcaccgacuucaucuggggguuugggaaacaaggcuuccagugccaaguuugcuguuuugugguccacaagaggugccaugaauuuguuacuuuuucuuguccgggugcggauaagggacccgacacugaugaccccaggagcaagcacaaguucaaaauccacacuuacggaagccccaccuucugcgaucacugugggucacugcucuauggacuuauccaucaagggaugaaaugugacaccugcgauaugaacguucacaagcaaugcgucaucaauguccccagccucugcggaauggaucacacugagaagagggggcggauuuaccuaaaggcugagguugcugaugaaaagcuccaugucacaguacgagaugcaaaaaaucuaaucccuauggauccaaacgggcuuucagauccuuaugugaagcugaaacuuauuccugaucccaagaaugaaagcaagcaaaaaaccaaaaccauccgcuccacacuaaauccgcaguggaaugaguccuuuacauucaaauugaaaccuucagacaaagaccgacgacugucuguagaaaucugggacugggaucgaacaacaaggaaugacuucaugggaucccuuuccuuuggaguuucggagcugaugaagaugccggccaguggaugguacaaguugcuuaaccaagaagaaggugaguacuacaacguacccauuccggaaggggacgaggaaggaaacauggaacucaggcagaaauucgagaaagccaaacuuggcccugcuggcaacaaagucaucagucccucugaagacaggaaacaaccuuccaacaaccuugaccgagugaaacucacggacuucaauuuccucaugguguugggaaaggggaguuuuggaaaggugaugcuugccgacaggaagggcacagaagaacuguaugcaaucaaaauccugaagaaggauguggugauucaggaugaugacguggagugcaccaugguagaaaagcgagucuuggcccugcuugacaaacccccguucuugacgcagcugcacuccugcuuccagacaguggaucggcuguacuucgucauggaauaugucaacgguggggaccucauguaccacauucagcaaguaggaaaauuuaaggaaccacaagcaguauucuaugcggcagagauuuccaucggauuguucuuucuucauaaaagaggaaucauuuauagggaucugaaguuagauaacgucauguuggauucagaaggacauaucaaaauugcugacuuugggaugugcaaggaacacaugauggauggagucacgaccaggaccuucugugggacuccagauuauaucgccccagagauaaucgcuuaucagccguauggaaaaucuguggacuggugggccuauggcguccuguuguaugaaaugcuugccgggcagccuccauuugauggugaagaugaagacgagcuauuucagucuaucauggagcacaacguuuccuauccaaaauccuuguccaaggaggcuguuucuaucugcaaaggacugaugaccaaacacccagccaagcggcugggcugugggccugagggggagagggacgugagagagcaugccuucuuccggaggaucgacugggaaaaacuggagaacagggagauccagccaccauucaagcccaaaguguguggcaaaggagcagagaacuuugacaaguucuucacacgaggacagcccgucuuaacaccaccugaucagcugguuauugcuaacauagaccagucugauuuugaaggguucucguaugucaacccccaguuugugcaccccaucuuacagagugcaguaugaaacucaccagcgagaacaaacaccuccccagcccccagcccuccccgcagugggaagugaauccuuaacccuaaaauuuuaaggccacggccuugugucugauuccauauggaggccugaaaauuguaggguuauuaguccaaaugugaucaacuguucagggucucucucuuacaaccaagaacauuaucuuaguggaagaugguacgucaugcucaguguccaguuuaauucuguagaaguuacgucuggcucuagguuaacccuuccuagaaagcaagcagacuguugccccauuuuggguacaauuugauauacuuuccauacccuccaucuguggauuuuucagcauuggaaucccccaaccagagauguuaaagugagccugucccaggaaacaucuccacccaagacgucuuuggaauccaagaacaggaagccaagagagugagcagggagggauugggggugggggaggccucaaaauaccgacugcguccauucucugccuccauggaaacagccccuagaaucugaaaggccgggauaaaccuaaucacuguucccaaacauugacaaauccuaacccaaccaugguccagcaguuaccaguuuaaacaaaaaaaccucagaugaguguugggugaaucugucaucugguacccuccuugguugauaacugucuugauacuuuucauucuuuguaagaggccaaaucgucuaaggacguugcugaacaagcgugugaaaucauuucagaucaaggauaagccaguguguacauauguucauuuuaaucucugggagauuauuuuuccauccagggugccaucaguaaucaugccacuacucaccaguguuguucgccaacacccacccccacacacaccaacauuuugcugccuaccuuguuauccuucucaagaagcugaaguguacgcccucuccccuuuugugcuuauuuauuuaauaggcugcagugucgcuuaugaaaguacgauguacaguaacuuaauggaagugcugacucuagcaucagccucuaccgauugauuuuccucccuucucuagcccuggauguccacuuagggauaaaaagaauaugguuuugguucccauuucuaguucacguugaaugacaggccuggagcuguagaaucaggaaacccggaugccuaacagcucaaagauguuuuguuaauagaaggauuuuaauacguuuugcaaaugcaucaugcaaugaauuuugcauguuuauaauaaaccuuaauaacaagugaaucuauauuauugauauaaucguaucaaguauaaagagaguauuauaauaauuuuauaagacacaauugugcucuauuugugcagguucuuguuucuaauccucuuuucuaauuaaguuuuagcugaaucccuugcuucugugcuuucccucccugcacaugggcacuguaucagauagauuacuuuuuaaauguagauaaaauuucaaaaaugaauggcuaguuuacgugauagauuaggcucuuacuacauauguguguguauauauauguauuugauucuaccugcaaacaaauuuuuauuggugaggacuauuuuugagcugacacucccucuuaguuucuucaugucaccuuucguccugguuccuccgccacucuuccucuuggggacaacaggaagugucugauuccagucugccuaguacguugguacacacguggcauugccgcagcaccugggcugaccuuugugugugcguguguguguguuuccuucuucccuucagccugugacuguugcugacuccaggggugggagggauggggagacuccccucuugcuguguguacuggacacgcaggaagcaugcugucuugcugccucugcaacgaccugucguuugcuccagcaugcacaaacuucgugagaccaacacagccgugcccugcaggcaccagcacgugcuuuucagaggcugcggacuuucuuccagccauuguggcauuggccuuuccagucuugggaggagcgcgcugcuuuggugagacacccccaugcaagguccucagaguagccggguucuaccacaaacagaaacagaaugaaaguagcugucaguccuuguagagagccgcucuguuuccucccagaagcaucucccagcuaagcucgcauuauuuuucuccucuggcuguuugccugaaguucacagaacacacaaccaugaaaggcuuuuugaggugagaggcccaggugguccuggcaacccugaguagaaggagagacgggguagggaacgggcccggccagaaaagaaccauuucuucugccaucuuuuaugcaccauagacaucgagacuccaggggguccuggcuccccugucccugcagcccugcaggucagugcaugaucuggguucguguccugaccaggugcuccuccuuugauccgaggggaaagggacugguuuauagaaagagccuaggagacaaaagggccagucccccugcccagaauggagcagcagcaggacagacccccacgaggccccccagagaggaggaagaucccacggaggaacacaugagguuagggacccuuguucagcaccccaaacagccugccuguuuaaagcaggcagcaggcuuaggccuucccugcaaccccaacacccacaaguuuguuucucuaggaaacacauucacugucucagcuggcuguuacucucucagaccauauggcaaaguuuuccaagaaaaugccccgacaggggugcccagcacacugccugagggacaacagacaucagaacaaacccccagagagaaacagucaaaaucagggcccggugcaguguugucauguggaaccugcuuuauccauugcugaguguugaauguggguaaugguuagggcuuuccagaucucagcagccaaagacaguuauuguuggaagacugucauguagauaaccaugagcaauggcucgccucagaaucaguucauaaaauucuaugguacuggccccuucguggguauugugugaaaugagaugguggcgaggggugcgcuguggaacugccgcagccacgcaggaggucccugggggaugcuuugggaaguccuugccccugagcacugccugauugccagggccuguggaggucuaggccgccuggcagaaucuagcaccguccgaauccccgcaggacccauggagcuaugaccacaccaggccauucaaauggcucugcauuaucuucccuuggaagguggccacuccucgguggcagggccuuucccugaggcugcaggccgugggcuggcagcccgucucuuggcauuucaauugaaggucaccaggugcuggguuugaaaggaagucacuggagugcugccaggggccgcccuccaagguuaaugagaggcccacauccaggcaagaacuaauucaaaaggcagaucagaaaccacaggagucaaaauuauugcuccggcagugcuucccuuccuuucauccacuggccucgugugguccaugcagggccacugucugcccuuucugaugccacguauuaggcuuucuuacucagaauuuugauagaaaaccauggggccaagagcucuggaagccuggccggaaagaccaagguucaugcagcccaacaaaugauuguugagcaccucucggagccaaaguccuuaggcgaguguggugacuuccuggaaggaggaugcagacuuccagagagcccccccaacggacgugcugagaagggagagggaggcgggggcuguagucaggaaggagccagagaagaacaggguuugggugcauccagaaauaugccugcaguaggagggagaggaaggggugccaccgucaacggcuucccaucggaggugguuggugcagauggaaguuucugucugcuggcccucaagagaguguuuugccagggacacagucuguuccuccucagaaaacaccccccaaaugcuaacaacauccccaccagcugcuagaagccccuuuccccuccccaccuugaaguagcucauaguucucugggcagagccagaccauccaguguaccccagaggccaguagguuccugcccauuuuccucucuggcuuccugccaagaauuauggcagcugaggaugaauggagaaguaaaaacaacuaacaccgcacaacuaacaacuaacaccgcaguucccaccuggguuccacuuagcaggagacauuucggaggguuuuuuuuguuuuuguuccuguuuuuuuuuuuuuugcuggaauuuguuuucucaguacugaaaagagaaaaagugacaaucuuguauuuuuaaaagccucggaaaggugauaccaucugacagucauuuucucacguuggucuucuaaagucaccuauuucuugugugugcacaucacaccauuuccuguuucuuuauaacccgacaaggguaggagugccuguuuccccugcugggcacaccagacaaucguaaucacaaaacagacacugagccaggggcccaaagggugugaucaugagaguuaccgggacagcaguaggcaugacagucaccaggaaggacaagggugcucuguuguuaguggccacacaccaauuugacaaggaguguugcgaaauuuuuauuuauuuauuuauuuauuuugagauggaguuucacucuuguugcccaggcuggagugcggugguacaaucucggcucacugcaaccuccaccucccagguucaagcgauucuccugccucagccucccaaguaccugggacuacaggugcgugccaccacacccagcuaaauuuuguguuuuuaguagagaugggguuucaccauguuggccaggauggucuugaaccccugaccucaugaucugccugccucggccucccaaagugcugggauuacaggcaugagccaccacgcccagccaaaauauuuuuuuaaagucauuuuccuuaagcugcuugggcuacaugugaaauacacuggacggucaacauuccugucuccucccauuugggcugaugcagcagauccagggaauguuaccuguuucugcugcuagaagauccaggaaauugggaagguuaccugacgcacacauggaugaaggccaucaucuagaaauggggucaaccacaauuguguuaauuccguagugucagggauucuucgggaaggucaacaguaugaaggauucugaccccugugccucccauuuaugugaucaggugacaguuaauaaccguggaggucacacucagccauccaacagccuuacagugacccuacacaaaagcccccaaauuccaaagacuuuuucuuaaccuaaaggaagaaauuauuuguuaauuccaguagagcaacugaauauacugggcuauuuguacuuuuuuauagagaacuuuaauaauaauucuuuaaaaaugaguuuuuagaacaaagcaacugacgauuuccuaagauuccaaugcccuggagcuuguaggaggacuuagccugggucagcuggagcacccccgaccugaucucccacugccagauuuucccaugcuccuaggguauggaguccacgugggaaugacugcaaguucagguggaacuuggccgacugaugcucugcgaguuuuuaauagacacuggggacaacugcuuaagguuuagaaacuuccaaaccacaggaaagacauuuuuagugucccccauccagaggcagcccuggaauaggauucccagggguuucugggaccccuuuccuugcuccgugaggcucuguggccaucuuuuggcaggaggaggaugcuuccuuggcucugugcccagacccgccugguccccaggucucucaccuugggugaagauucagagaugcccuguaaggauuuugcccacugggcaacucagaaauacuucgaucucccaagauauaagaggcagcagcaaacgugccuauugacgucuguuucauaguuaccacuuacgcgaguagacagaacucggcuuuucagaaaauaggugucaaguccacuuuauaagaaccuuuuuuucuaaaauaagauaaaagguggcuuugcauuuucugauuaaacgacugugucuuugucaccucugcuuaacuuuaggaguauccauuccugugauuguagacuuuuguugauauucuuccuggaagaauaucauucuuuucuugaaggguugguuuacuagaauauucaaaaucaaucaugaaggcaguuacuauuuugagucuaaagguuuucuaaaaauuaaccucacaucccuucuguuagggucuuucagaauaucuuuuauaaacagaagcauuugaagucauugcuuuugcuacaugauuugugugugugaaggacauaccacguuuaaaucauuaauugaaaaacaucauauaagccccaacuuuguuuggaggaagagacggagguugagguuuuuccuucuguauaagcaccuacugacaaaauguagaggccauucaaccgucaaacaccauuugguuauaucgcagaggagacggauguguaaauuacugcauugcuuuuuuuuucaguuuguauaaccucuaaucuccguuugcaugauacgcuuuguuagaaacauuaauuguaguuuggaagcaaguguguaugaauaaagauaaugaucauuccaaaaaaaaaaaaaaaaa

SEQ ID NO: 83093 - RNA, 19 nt, Artificial Sequence
  Description of Artificial Sequence: Synthetic oligonucleotide
ggccgcagcuccccggcgg

SEQ ID NO: 83094 - RNA, 19 nt, Artificial Sequence
  Description of Artificial Sequence: Synthetic oligonucleotide
gaggcaagaggugguuggg

SEQ ID NO: 83095 - RNA, 19 nt, Artificial Sequence
  Description of Artificial Sequence: Synthetic oligonucleotide
gggggaccauggcugacgu

SEQ ID NO: 83096 - RNA, 19 nt, Artificial Sequence
  Description of Artificial Sequence: Synthetic oligonucleotide
uuuucccgggcaacgacuc

SEQ ID NO: 83097 - RNA, 19 nt, Artificial Sequence
  Description of Artificial Sequence: Synthetic oligonucleotide
ccacggcgucucaggacgu

SEQ ID NO: 83098 - RNA, 19 nt, Artificial Sequence
  Description of Artificial Sequence: Synthetic oligonucleotide
uggccaaccgcuucgcccg

SEQ ID NO: 83099 - RNA, 19 nt, Artificial Sequence
  Description of Artificial Sequence: Synthetic oligonucleotide
gcaaaggggcgcugaggca

SEQ ID NO: 83100 - RNA, 19 nt, Artificial Sequence
  Description of Artificial Sequence: Synthetic oligonucleotide
agaagaacgugcacgaggu

SEQ ID NO: 83101 - RNA, 19 nt, Artificial Sequence
  Description of Artificial Sequence: Synthetic oligonucleotide
ugaaggaccacaaauucau

SEQ ID NO: 83102 - RNA, 19 nt, Artificial Sequence
  Description of Artificial Sequence: Synthetic oligonucleotide
ucgcgcgcuucuucaagca

SEQ ID NO: 83103 - RNA, 19 nt, Artificial Sequence
  Description of Artificial Sequence: Synthetic oligonucleotide
agcccaccuucugcagcca

SEQ ID NO: 83104 - RNA, 19 nt, Artificial Sequence
  Description of Artificial Sequence: Synthetic oligonucleotide
acugcaccgacuucaucug

SEQ ID NO: 83105 - RNA, 19 nt, Artificial Sequence
  Description of Artificial Sequence: Synthetic oligonucleotide
ggggguuugggaaacaagg

SEQ ID NO: 83106 - RNA, 19 nt, Artificial Sequence
  Description of Artificial Sequence: Synthetic oligonucleotide
gcuuccagugccaaguuug

SEQ ID NO: 83107 - RNA, 19 nt, Artificial Sequence
  Description of Artificial Sequence: Synthetic oligonucleotide
gcuguuuugugguccacaa

SEQ ID NO: 83108 - RNA, 19 nt, Artificial Sequence
  Description of Artificial Sequence: Synthetic oligonucleotide
agaggugccaugaauuugu

SEQ ID NO: 83109 - RNA, 19 nt, Artificial Sequence
  Description of Artificial Sequence: Synthetic oligonucleotide
uuacuuuuucuuguccggg

SEQ ID NO: 83110 - RNA, 19 nt, Artificial Sequence
  Description of Artificial Sequence: Synthetic oligonucleotide
gugcggauaagggacccga

SEQ ID NO: 83111 - RNA, 19 nt, Artificial Sequence
  Description of Artificial Sequence: Synthetic oligonucleotide
acacugaugaccccaggag

SEQ ID NO: 83112 - RNA, 19 nt, Artificial Sequence
  Description of Artificial Sequence: Synthetic oligonucleotide
gcaagcacaaguucaaaau

SEQ ID NO: 83113 - RNA, 19 nt, Artificial Sequence
  Description of Artificial Sequence: Synthetic oligonucleotide
uccacacuuacggaagccc

SEQ ID NO: 83114 - RNA, 19 nt, Artificial Sequence
  Description of Artificial Sequence: Synthetic oligonucleotide
ccaccuucugcgaucacug

SEQ ID NO: 83115 - RNA, 19 nt, Artificial Sequence
  Description of Artificial Sequence: Synthetic oligonucleotide
gugggucacugcucuaugg

SEQ ID NO: 83116 - RNA, 19 nt, Artificial Sequence
  Description of Artificial Sequence: Synthetic oligonucleotide
gacuuauccaucaagggau

SEQ ID NO: 83117 - RNA, 19 nt, Artificial Sequence
  Description of Artificial Sequence: Synthetic oligonucleotide
ugaaaugugacaccugcga

SEQ ID NO: 83118 - RNA, 19 nt, Artificial Sequence
  Description of Artificial Sequence: Synthetic oligonucleotide
auaugaacguucacaagca

SEQ ID NO: 83119 - RNA, 19 nt, Artificial Sequence
  Description of Artificial Sequence: Synthetic oligonucleotide
aaugcgucaucaauguccc

SEQ ID NO: 83120 - RNA, 19 nt, Artificial Sequence
  Description of Artificial Sequence: Synthetic oligonucleotide
ccagccucugcggaaugga

SEQ ID NO: 83121 - RNA, 19 nt, Artificial Sequence
  Description of Artificial Sequence: Synthetic oligonucleotide
aucacacugagaagagggg

SEQ ID NO: 83122 - RNA, 19 nt, Artificial Sequence
  Description of Artificial Sequence: Synthetic oligonucleotide
ggcggauuuaccuaaaggc

SEQ ID NO: 83123 - RNA, 19 nt, Artificial Sequence
  Description of Artificial Sequence: Synthetic oligonucleotide
cugagguugcugaugaaaa

SEQ ID NO: 83124 - RNA, 19 nt, Artificial Sequence
  Description of Artificial Sequence: Synthetic oligonucleotide
agcuccaugucacaguacg

SEQ ID NO: 83125 - RNA, 19 nt, Artificial Sequence
  Description of Artificial Sequence: Synthetic oligonucleotide
gagaugcaaaaaaucuaau

SEQ ID NO: 83126 - RNA, 19 nt, Artificial Sequence
  Description of Artificial Sequence: Synthetic oligonucleotide
ucccuauggauccaaacgg

SEQ ID NO: 83127 - RNA, 19 nt, Artificial Sequence
  Description of Artificial Sequence: Synthetic oligonucleotide
ggcuuucagauccuuaugu

SEQ ID NO: 83128 - RNA, 19 nt, Artificial Sequence
  Description of Artificial Sequence: Synthetic oligonucleotide
ugaagcugaaacuuauucc

SEQ ID NO: 83129 - RNA, 19 nt, Artificial Sequence
  Description of Artificial Sequence: Synthetic oligonucleotide
cugaucccaagaaugaaag

SEQ ID NO: 83130 - RNA, 19 nt, Artificial Sequence
  Description of Artificial Sequence: Synthetic oligonucleotide
gcaagcaaaaaaccaaaac

SEQ ID NO: 83131 - RNA, 19 nt, Artificial Sequence
  Description of Artificial Sequence: Synthetic oligonucleotide
ccauccgcuccacacuaaa

SEQ ID NO: 83132 - RNA, 19 nt, Artificial Sequence
  Description of Artificial Sequence: Synthetic oligonucleotide
auccgcaguggaaugaguc

SEQ ID NO: 83133 - RNA, 19 nt, Artificial Sequence
  Description of Artificial Sequence: Synthetic oligonucleotide
ccuuuacauucaaauugaa

SEQ ID NO: 83134 - RNA, 19 nt, Artificial Sequence
  Description of Artificial Sequence: Synthetic oligonucleotide
aaccuucagacaaagaccg

SEQ ID NO: 83135 - RNA, 19 nt, Artificial Sequence
  Description of Artificial Sequence: Synthetic oligonucleotide
gacgacugucuguagaaau

SEQ ID NO: 83136 - RNA, 19 nt, Artificial Sequence
  Description of Artificial Sequence: Synthetic oligonucleotide
ucugggacugggaucgaac

SEQ ID NO: 83137 - RNA, 19 nt, Artificial Sequence
  Description of Artificial Sequence: Synthetic oligonucleotide
caacaaggaaugacuucau

SEQ ID NO: 83138 - RNA, 19 nt, Artificial Sequence
  Description of Artificial Sequence: Synthetic oligonucleotide
ugggaucccuuuccuuugg

SEQ ID NO: 83139 - RNA, 19 nt, Artificial Sequence
  Description of Artificial Sequence: Synthetic oligonucleotide
gaguuucggagcugaugaa

SEQ ID NO: 83140 - RNA, 19 nt, Artificial Sequence
  Description of Artificial Sequence: Synthetic oligonucleotide
agaugccggccaguggaug

SEQ ID NO: 83141 - RNA, 19 nt, Artificial Sequence
  Description of Artificial Sequence: Synthetic oligonucleotide
gguacaaguugcuuaacca

SEQ ID NO: 83142 - RNA, 19 nt, Artificial Sequence
  Description of Artificial Sequence: Synthetic oligonucleotide
aagaagaaggugaguacua

SEQ ID NO: 83143 - RNA, 19 nt, Artificial Sequence
  Description of Artificial Sequence: Synthetic oligonucleotide
acaacguacccauuccgga

SEQ ID NO: 83144 - RNA, 19 nt, Artificial Sequence
  Description of Artificial Sequence: Synthetic oligonucleotide
aaggggacgaggaaggaaa

SEQ ID NO: 83145 - RNA, 19 nt, Artificial Sequence
  Description of Artificial Sequence: Synthetic oligonucleotide
acauggaacucaggcagaa

SEQ ID NO: 83146 - RNA, 19 nt, Artificial Sequence
  Description of Artificial Sequence: Synthetic oligonucleotide
aauucgagaaagccaaacu

SEQ ID NO: 83147 - RNA, 19 nt, Artificial Sequence
  Description of Artificial Sequence: Synthetic oligonucleotide
uuggcccugcuggcaacaa

SEQ ID NO: 83148 - RNA, 19 nt, Artificial Sequence
  Description of Artificial Sequence: Synthetic oligonucleotide
aagucaucagucccucuga

SEQ ID NO: 83149 - RNA, 19 nt, Artificial Sequence
  Description of Artificial Sequence: Synthetic oligonucleotide
aagacaggaaacaaccuuc

SEQ ID NO: 83150 - RNA, 19 nt, Artificial Sequence
  Description of Artificial Sequence: Synthetic oligonucleotide
ccaacaaccuugaccgagu

SEQ ID NO: 83151 - RNA, 19 nt, Artificial Sequence
  Description of Artificial Sequence: Synthetic oligonucleotide
ugaaacucacggacuucaa

SEQ ID NO: 83152 - RNA, 19 nt, Artificial Sequence
  Description of Artificial Sequence: Synthetic oligonucleotide
auuuccucaugguguuggg

SEQ ID NO: 83153 - RNA, 19 nt, Artificial Sequence
  Description of Artificial Sequence: Synthetic oligonucleotide
gaaaggggaguuuuggaaa

SEQ ID NO: 83154 - RNA, 19 nt, Artificial Sequence
  Description of Artificial Sequence: Synthetic oligonucleotide
aggugaugcuugccgacag

SEQ ID NO: 83155 - RNA, 19 nt, Artificial Sequence
  Description of Artificial Sequence: Synthetic oligonucleotide
ggaagggcacagaagaacu

SEQ ID NO: 83156 - RNA, 19 nt, Artificial Sequence
  Description of Artificial Sequence: Synthetic oligonucleotide
uguaugcaaucaaaauccu

SEQ ID NO: 83157 - RNA, 19 nt, Artificial Sequence
  Description of Artificial Sequence: Synthetic oligonucleotide
ugaagaaggauguggugau

SEQ ID NO: 83158 - RNA, 19 nt, Artificial Sequence
  Description of Artificial Sequence: Synthetic oligonucleotide
uucaggaugaugacgugga

SEQ ID NO: 83159 - RNA, 19 nt, Artificial Sequence
  Description of Artificial Sequence: Synthetic oligonucleotide
agugcaccaugguagaaaa

SEQ ID NO: 83160 - RNA, 19 nt, Artificial Sequence
  Description of Artificial Sequence: Synthetic oligonucleotide
agcgagucuuggcccugcu

SEQ ID NO: 83161 - RNA, 19 nt, Artificial Sequence
  Description of Artificial Sequence: Synthetic oligonucleotide
uugacaaacccccguucuu

SEQ ID NO: 83162 - RNA, 19 nt, Artificial Sequence
  Description of Artificial Sequence: Synthetic oligonucleotide
ugacgcagcugcacuccug

SEQ ID NO: 83163 - RNA, 19 nt, Artificial Sequence
  Description of Artificial Sequence: Synthetic oligonucleotide
gcuuccagacaguggaucg

SEQ ID NO: 83164 - RNA, 19 nt, Artificial Sequence
  Description of Artificial Sequence: Synthetic oligonucleotide
ggcuguacuucgucaugga

SEQ ID NO: 83165 - RNA, 19 nt, Artificial Sequence
  Description of Artificial Sequence: Synthetic oligonucleotide
aauaugucaacggugggga

SEQ ID NO: 83166 - RNA, 19 nt, Artificial Sequence
  Description of Artificial Sequence: Synthetic oligonucleotide
accucauguaccacauuca

SEQ ID NO: 83167 - RNA, 19 nt, Artificial Sequence
  Description of Artificial Sequence: Synthetic oligonucleotide
agcaaguaggaaaauuuaa

SEQ ID NO: 83168 - RNA, 19 nt, Artificial Sequence
  Description of Artificial Sequence: Synthetic oligonucleotide
aggaaccacaagcaguauu

SEQ ID NO: 83169 - RNA, 19 nt, Artificial Sequence
  Description of Artificial Sequence: Synthetic oligonucleotide
ucuaugcggcagagauuuc

SEQ ID NO: 83170 - RNA, 19 nt, Artificial Sequence
  Description of Artificial Sequence: Synthetic oligonucleotide
ccaucggauuguucuuucu

SEQ ID NO: 83171 - RNA, 19 nt, Artificial Sequence
  Description of Artificial Sequence: Synthetic oligonucleotide
uucauaaaagaggaaucau

SEQ ID NO: 83172 - RNA, 19 nt, Artificial Sequence
  Description of Artificial Sequence: Synthetic oligonucleotide
uuuauagggaucugaaguu

SEQ ID NO: 83173 - RNA, 19 nt, Artificial Sequence
  Description of Artificial Sequence: Synthetic oligonucleotide
uagauaacgucauguugga

SEQ ID NO: 83174 - RNA, 19 nt, Artificial Sequence
  Description of Artificial Sequence: Synthetic oligonucleotide
auucagaaggacauaucaa

SEQ ID NO: 83175 - RNA, 19 nt, Artificial Sequence
  Description of Artificial Sequence: Synthetic oligonucleotide
aaauugcugacuuugggau

SEQ ID NO: 83176 - RNA, 19 nt, Artificial Sequence
  Description of Artificial Sequence: Synthetic oligonucleotide
ugugcaaggaacacaugau

SEQ ID NO: 83177 - RNA, 19 nt, Artificial Sequence
  Description of Artificial Sequence: Synthetic oligonucleotide
uggauggagucacgaccag

SEQ ID NO: 83178 - RNA, 19 nt, Artificial Sequence
  Description of Artificial Sequence: Synthetic oligonucleotide
ggaccuucugugggacucc

SEQ ID NO: 83179 - RNA, 19 nt, Artificial Sequence
  Description of Artificial Sequence: Synthetic oligonucleotide
cagauuauaucgccccaga

SEQ ID NO: 83180 - RNA, 19 nt, Artificial Sequence
  Description of Artificial Sequence: Synthetic oligonucleotide
agauaaucgcuuaucagcc

SEQ ID NO: 83181 - RNA, 19 nt, Artificial Sequence
  Description of Artificial Sequence: Synthetic oligonucleotide
cguauggaaaaucugugga

SEQ ID NO: 83182 - RNA, 19 nt, Artificial Sequence
  Description of Artificial Sequence: Synthetic oligonucleotide
acuggugggccuauggcgu

SEQ ID NO: 83183 - RNA, 19 nt, Artificial Sequence
  Description of Artificial Sequence: Synthetic oligonucleotide
uccuguuguaugaaaugcu

SEQ ID NO: 83184 - RNA, 19 nt, Artificial Sequence
  Description of Artificial Sequence: Synthetic oligonucleotide
uugccgggcagccuccauu

SEQ ID NO: 83185 - RNA, 19 nt, Artificial Sequence
  Description of Artificial Sequence: Synthetic oligonucleotide
uugauggugaagaugaaga

SEQ ID NO: 83186 - RNA, 19 nt, Artificial Sequence
  Description of Artificial Sequence: Synthetic oligonucleotide
acgagcuauuucagucuau

SEQ ID NO: 83187 - RNA, 19 nt, Artificial Sequence
  Description of Artificial Sequence: Synthetic oligonucleotide
ucauggagcacaacguuuc

SEQ ID NO: 83188 - RNA, 19 nt, Artificial Sequence
  Description of Artificial Sequence: Synthetic oligonucleotide
ccuauccaaaauccuuguc

SEQ ID NO: 83189 - RNA, 19 nt, Artificial Sequence
  Description of Artificial Sequence: Synthetic oligonucleotide
ccaaggaggcuguuucuau

SEQ ID NO: 83190 - RNA, 19 nt, Artificial Sequence
  Description of Artificial Sequence: Synthetic oligonucleotide
ucugcaaaggacugaugac

SEQ ID NO: 83191 - RNA, 19 nt, Artificial Sequence
  Description of Artificial Sequence: Synthetic oligonucleotide
ccaaacacccagccaagcg

SEQ ID NO: 83192 - RNA, 19 nt, Artificial Sequence
  Description of Artificial Sequence: Synthetic oligonucleotide
ggcugggcugugggccuga

SEQ ID NO: 83193 - RNA, 19 nt, Artificial Sequence
  Description of Artificial Sequence: Synthetic oligonucleotide
agggggagagggacgugag

SEQ ID NO: 83194 - RNA, 19 nt, Artificial Sequence
  Description of Artificial Sequence: Synthetic oligonucleotide
gagagcaugccuucuuccg

SEQ ID NO: 83195 - RNA, 19 nt, Artificial Sequence
  Description of Artificial Sequence: Synthetic oligonucleotide
ggaggaucgacugggaaaa

SEQ ID NO: 83196 - RNA, 19 nt, Artificial Sequence
  Description of Artificial Sequence: Synthetic oligonucleotide
aacuggagaacagggagau

SEQ ID NO: 83197 - RNA, 19 nt, Artificial Sequence
  Description of Artificial Sequence: Synthetic oligonucleotide
uccagccaccauucaagcc

SEQ ID NO: 83198 - RNA, 19 nt, Artificial Sequence
  Description of Artificial Sequence: Synthetic oligonucleotide
ccaaaguguguggcaaagg

SEQ ID NO: 83199 - RNA, 19 nt, Artificial Sequence
  Description of Artificial Sequence: Synthetic oligonucleotide
gagcagagaacuuugacaa

SEQ ID NO: 83200 - RNA, 19 nt, Artificial Sequence
  Description of Artificial Sequence: Synthetic oligonucleotide
aguucuucacacgaggaca

SEQ ID NO: 83201 - RNA, 19 nt, Artificial Sequence
  Description of Artificial Sequence: Synthetic oligonucleotide
agcccgucuuaacaccacc

SEQ ID NO: 83202 - RNA, 19 nt, Artificial Sequence
  Description of Artificial Sequence: Synthetic oligonucleotide
cugaucagcugguuauugc

SEQ ID NO: 83203 - RNA, 19 nt, Artificial Sequence
  Description of Artificial Sequence: Synthetic oligonucleotide
cuaacauagaccagucuga

SEQ ID NO: 83204 - RNA, 19 nt, Artificial Sequence
  Description of Artificial Sequence: Synthetic oligonucleotide
auuuugaaggguucucgua

SEQ ID NO: 83205 - RNA, 19 nt, Artificial Sequence
  Description of Artificial Sequence: Synthetic oligonucleotide
augucaacccccaguuugu

SEQ ID NO: 83206 - RNA, 19 nt, Artificial Sequence
  Description of Artificial Sequence: Synthetic oligonucleotide
ugcaccccaucuuacagag

SEQ ID NO: 83207 - RNA, 19 nt, Artificial Sequence
  Description of Artificial Sequence: Synthetic oligonucleotide
gugcaguaugaaacucacc

SEQ ID NO: 83208 - RNA, 19 nt, Artificial Sequence
  Description of Artificial Sequence: Synthetic oligonucleotide
cagcgagaacaaacaccuc

SEQ ID NO: 83209 - RNA, 19 nt, Artificial Sequence
  Description of Artificial Sequence: Synthetic oligonucleotide
ccccagcccccagcccucc

SEQ ID NO: 83210 - RNA, 19 nt, Artificial Sequence
  Description of Artificial Sequence: Synthetic oligonucleotide
cccgcagugggaagugaau

SEQ ID NO: 83211 - RNA, 19 nt, Artificial Sequence
  Description of Artificial Sequence: Synthetic oligonucleotide
uccuuaacccuaaaauuuu

SEQ ID NO: 83212 - RNA, 19 nt, Artificial Sequence
  Description of Artificial Sequence: Synthetic oligonucleotide
uaaggccacggccuugugu

SEQ ID NO: 83213 - RNA, 19 nt, Artificial Sequence
  Description of Artificial Sequence: Synthetic oligonucleotide
ucugauuccauauggaggc

SEQ ID NO: 83214 - RNA, 19 nt, Artificial Sequence
  Description of Artificial Sequence: Synthetic oligonucleotide
ccugaaaauuguaggguua

SEQ ID NO: 83215 - RNA, 19 nt, Artificial Sequence
  Description of Artificial Sequence: Synthetic oligonucleotide
auuaguccaaaugugauca

SEQ ID NO: 83216 - RNA, 19 nt, Artificial Sequence
  Description of Artificial Sequence: Synthetic oligonucleotide
aacuguucagggucucucu

SEQ ID NO: 83217 - RNA, 19 nt, Artificial Sequence
  Description of Artificial Sequence: Synthetic oligonucleotide
ucuuacaaccaagaacauu

SEQ ID NO: 83218 - RNA, 19 nt, Artificial Sequence
  Description of Artificial Sequence: Synthetic oligonucleotide
uaucuuaguggaagauggu

SEQ ID NO: 83219 - RNA, 19 nt, Artificial Sequence
  Description of Artificial Sequence: Synthetic oligonucleotide
uacgucaugcucagugucc

SEQ ID NO: 83220 - RNA, 19 nt, Artificial Sequence
  Description of Artificial Sequence: Synthetic oligonucleotide
caguuuaauucuguagaag

SEQ ID NO: 83221 - RNA, 19 nt, Artificial Sequence
  Description of Artificial Sequence: Synthetic oligonucleotide
guuacgucuggcucuaggu

SEQ ID NO: 83222 - RNA, 19 nt, Artificial Sequence
  Description of Artificial Sequence: Synthetic oligonucleotide
uuaacccuuccuagaaagc

SEQ ID NO: 83223 - RNA, 19 nt, Artificial Sequence
  Description of Artificial Sequence: Synthetic oligonucleotide
caagcagacuguugcccca

SEQ ID NO: 83224 - RNA, 19 nt, Artificial Sequence
  Description of Artificial Sequence: Synthetic oligonucleotide
auuuuggguacaauuugau

SEQ ID NO: 83225 - RNA, 19 nt, Artificial Sequence
  Description of Artificial Sequence: Synthetic oligonucleotide
uauacuuuccauacccucc

SEQ ID NO: 83226 - RNA, 19 nt, Artificial Sequence
  Description of Artificial Sequence: Synthetic oligonucleotide
caucuguggauuuuucagc

SEQ ID NO: 83227 - RNA, 19 nt, Artificial Sequence
  Description of Artificial Sequence: Synthetic oligonucleotide
cauuggaaucccccaacca

SEQ ID NO: 83228 - RNA, 19 nt, Artificial Sequence
  Description of Artificial Sequence: Synthetic oligonucleotide
agagauguuaaagugagcc

SEQ ID NO: 83229 - RNA, 19 nt, Artificial Sequence
  Description of Artificial Sequence: Synthetic oligonucleotide
cugucccaggaaacaucuc

SEQ ID NO: 83230 - RNA, 19 nt, Artificial Sequence
  Description of Artificial Sequence: Synthetic oligonucleotide
ccacccaagacgucuuugg

SEQ ID NO: 83231 - RNA, 19 nt, Artificial Sequence
  Description of Artificial Sequence: Synthetic oligonucleotide
gaauccaagaacaggaagc

SEQ ID NO: 83232 - RNA, 19 nt, Artificial Sequence
  Description of Artificial Sequence: Synthetic oligonucleotide
ccaagagagugagcaggga

SEQ ID NO: 83233 - RNA, 19 nt, Artificial Sequence
  Description of Artificial Sequence: Synthetic oligonucleotide
agggauuggggguggggga

SEQ ID NO: 83234 - RNA, 19 nt, Artificial Sequence
  Description of Artificial Sequence: Synthetic oligonucleotide
aggccucaaaauaccgacu

SEQ ID NO: 83235 - RNA, 19 nt, Artificial Sequence
  Description of Artificial Sequence: Synthetic oligonucleotide
ugcguccauucucugccuc

SEQ ID NO: 83236 - RNA, 19 nt, Artificial Sequence
  Description of Artificial Sequence: Synthetic oligonucleotide
ccauggaaacagccccuag

SEQ ID NO: 83237 - RNA, 19 nt, Artificial Sequence
  Description of Artificial Sequence: Synthetic oligonucleotide
gaaucugaaaggccgggau

SEQ ID NO: 83238 - RNA, 19 nt, Artificial Sequence
  Description of Artificial Sequence: Synthetic oligonucleotide
uaaaccuaaucacuguucc

SEQ ID NO: 83239 - RNA, 19 nt, Artificial Sequence
  Description of Artificial Sequence: Synthetic oligonucleotide
ccaaacauugacaaauccu

SEQ ID NO: 83240 - RNA, 19 nt, Artificial Sequence
  Description of Artificial Sequence: Synthetic oligonucleotide
uaacccaaccaugguccag

SEQ ID NO: 83241 - RNA, 19 nt, Artificial Sequence
  Description of Artificial Sequence: Synthetic oligonucleotide
gcaguuaccaguuuaaaca

SEQ ID NO: 83242 - RNA, 19 nt, Artificial Sequence
  Description of Artificial Sequence: Synthetic oligonucleotide
aaaaaaaccucagaugagu

SEQ ID NO: 83243 - RNA, 19 nt, Artificial Sequence
  Description of Artificial Sequence: Synthetic oligonucleotide
uguugggugaaucugucau

SEQ ID NO: 83244 - RNA, 19 nt, Artificial Sequence
  Description of Artificial Sequence: Synthetic oligonucleotide
ucugguacccuccuugguu

SEQ ID NO: 83245 - RNA, 19 nt, Artificial Sequence
  Description of Artificial Sequence: Synthetic oligonucleotide
ugauaacugucuugauacu

SEQ ID NO: 83246 - RNA, 19 nt, Artificial Sequence
  Description of Artificial Sequence: Synthetic oligonucleotide
uuuucauucuuuguaagag

SEQ ID NO: 83247 - RNA, 19 nt, Artificial Sequence
  Description of Artificial Sequence: Synthetic oligonucleotide
ggccaaaucgucuaaggac

SEQ ID NO: 83248 - RNA, 19 nt, Artificial Sequence
  Description of Artificial Sequence: Synthetic oligonucleotide
cguugcugaacaagcgugu

SEQ ID NO: 83249 - RNA, 19 nt, Artificial Sequence
  Description of Artificial Sequence: Synthetic oligonucleotide
ugaaaucauuucagaucaa

SEQ ID NO: 83250 - RNA, 19 nt, Artificial Sequence
  Description of Artificial Sequence: Synthetic oligonucleotide
aggauaagccaguguguac

SEQ ID NO: 83251 - RNA, 19 nt, Artificial Sequence
  Description of Artificial Sequence: Synthetic oligonucleotide
cauauguucauuuuaaucu

SEQ ID NO: 83252 - RNA, 19 nt, Artificial Sequence
  Description of Artificial Sequence: Synthetic oligonucleotide
ucugggagauuauuuuucc

SEQ ID NO: 83253 - RNA, 19 nt, Artificial Sequence
  Description of Artificial Sequence: Synthetic oligonucleotide
cauccagggugccaucagu

SEQ ID NO: 83254 - RNA, 19 nt, Artificial Sequence
  Description of Artificial Sequence: Synthetic oligonucleotide
uaaucaugccacuacucac

SEQ ID NO: 83255 - RNA, 19 nt, Artificial Sequence
  Description of Artificial Sequence: Synthetic oligonucleotide
ccaguguuguucgccaaca

SEQ ID NO: 83256 - RNA, 19 nt, Artificial Sequence
  Description of Artificial Sequence: Synthetic oligonucleotide
acccacccccacacacacc

SEQ ID NO: 83257 - RNA, 19 nt, Artificial Sequence
  Description of Artificial Sequence: Synthetic oligonucleotide
caacauuuugcugccuacc

SEQ ID NO: 83258 - RNA, 19 nt, Artificial Sequence
  Description of Artificial Sequence: Synthetic oligonucleotide
cuuguuauccuucucaaga

SEQ ID NO: 83259 - RNA, 19 nt, Artificial Sequence
  Description of Artificial Sequence: Synthetic oligonucleotide
aagcugaaguguacgcccu

SEQ ID NO: 83260 - RNA, 19 nt, Artificial Sequence
  Description of Artificial Sequence: Synthetic oligonucleotide
ucuccccuuuugugcuuau

SEQ ID NO: 83261 - RNA, 19 nt, Artificial Sequence
  Description of Artificial Sequence: Synthetic oligonucleotide
uuuauuuaauaggcugcag

SEQ ID NO: 83262 - RNA, 19 nt, Artificial Sequence
  Description of Artificial Sequence: Synthetic oligonucleotide
gugucgcuuaugaaaguac

SEQ ID NO: 83263 - RNA, 19 nt, Artificial Sequence
  Description of Artificial Sequence: Synthetic oligonucleotide
cgauguacaguaacuuaau

SEQ ID NO: 83264 - RNA, 19 nt, Artificial Sequence
  Description of Artificial Sequence: Synthetic oligonucleotide
uggaagugcugacucuagc

SEQ ID NO: 83265 - RNA, 19 nt, Artificial Sequence
  Description of Artificial Sequence: Synthetic oligonucleotide
caucagccucuaccgauug

SEQ ID NO: 83266 - RNA, 19 nt, Artificial Sequence
  Description of Artificial Sequence: Synthetic oligonucleotide
gauuuuccucccuucucua

SEQ ID NO: 83267 - RNA, 19 nt, Artificial Sequence
  Description of Artificial Sequence: Synthetic oligonucleotide
agcccuggauguccacuua

SEQ ID NO: 83268 - RNA, 19 nt, Artificial Sequence
  Description of Artificial Sequence: Synthetic oligonucleotide
agggauaaaaagaauaugg

SEQ ID NO: 83269 - RNA, 19 nt, Artificial Sequence
  Description of Artificial Sequence: Synthetic oligonucleotide
guuuugguucccauuucua

SEQ ID NO: 83270 - RNA, 19 nt, Artificial Sequence
  Description of Artificial Sequence: Synthetic oligonucleotide
aguucacguugaaugacag

SEQ ID NO: 83271 - RNA, 19 nt, Artificial Sequence
  Description of Artificial Sequence: Synthetic oligonucleotide
ggccuggagcuguagaauc

SEQ ID NO: 83272 - RNA, 19 nt, Artificial Sequence
  Description of Artificial Sequence: Synthetic oligonucleotide
caggaaacccggaugccua

SEQ ID NO: 83273 - RNA, 19 nt, Artificial Sequence
  Description of Artificial Sequence: Synthetic oligonucleotide
aacagcucaaagauguuuu

SEQ ID NO: 83274 - RNA, 19 nt, Artificial Sequence
  Description of Artificial Sequence: Synthetic oligonucleotide
uguuaauagaaggauuuua

SEQ ID NO: 83275 - RNA, 19 nt, Artificial Sequence
  Description of Artificial Sequence: Synthetic oligonucleotide
aauacguuuugcaaaugca

SEQ ID NO: 83276 - RNA, 19 nt, Artificial Sequence
  Description of Artificial Sequence: Synthetic oligonucleotide
aucaugcaaugaauuuugc

SEQ ID NO: 83277 - RNA, 19 nt, Artificial Sequence
  Description of Artificial Sequence: Synthetic oligonucleotide
cauguuuauaauaaaccuu

SEQ ID NO: 83278 - RNA, 19 nt, Artificial Sequence
  Description of Artificial Sequence: Synthetic oligonucleotide
uaauaacaagugaaucuau

SEQ ID NO: 83279 - RNA, 19 nt, Artificial Sequence
  Description of Artificial Sequence: Synthetic oligonucleotide
uauuauugauauaaucgua

SEQ ID NO: 83280 - RNA, 19 nt, Artificial Sequence
  Description of Artificial Sequence: Synthetic oligonucleotide
aucaaguauaaagagagua

SEQ ID NO: 83281 - RNA, 19 nt, Artificial Sequence
  Description of Artificial Sequence: Synthetic oligonucleotide
auuauaauaauuuuauaag

SEQ ID NO: 83282 - RNA, 19 nt, Artificial Sequence
  Description of Artificial Sequence: Synthetic oligonucleotide
gacacaauugugcucuauu

SEQ ID NO: 83283 - RNA, 19 nt, Artificial Sequence
  Description of Artificial Sequence: Synthetic oligonucleotide
uugugcagguucuuguuuc

SEQ ID NO: 83284 - RNA, 19 nt, Artificial Sequence
  Description of Artificial Sequence: Synthetic oligonucleotide
cuaauccucuuuucuaauu

SEQ ID NO: 83285 - RNA, 19 nt, Artificial Sequence
  Description of Artificial Sequence: Synthetic oligonucleotide
uaaguuuuagcugaauccc

SEQ ID NO: 83286 - RNA, 19 nt, Artificial Sequence
  Description of Artificial Sequence: Synthetic oligonucleotide
cuugcuucugugcuuuccc

SEQ ID NO: 83287 - RNA, 19 nt, Artificial Sequence
  Description of Artificial Sequence: Synthetic oligonucleotide
cucccugcacaugggcacu

SEQ ID NO: 83288 - RNA, 19 nt, Artificial Sequence
  Description of Artificial Sequence: Synthetic oligonucleotide
uguaucagauagauuacuu

SEQ ID NO: 83289 - RNA, 19 nt, Artificial Sequence
  Description of Artificial Sequence: Synthetic oligonucleotide
uuuuaaauguagauaaaau

SEQ ID NO: 83290 - RNA, 19 nt, Artificial Sequence
  Description of Artificial Sequence: Synthetic oligonucleotide
uuucaaaaaugaauggcua

SEQ ID NO: 83291 - RNA, 19 nt, Artificial Sequence
  Description of Artificial Sequence: Synthetic oligonucleotide
aguuuacgugauagauuag

SEQ ID NO: 83292 - RNA, 19 nt, Artificial Sequence
  Description of Artificial Sequence: Synthetic oligonucleotide
ggcucuuacuacauaugug

SEQ ID NO: 83293 - RNA, 19 nt, Artificial Sequence
  Description of Artificial Sequence: Synthetic oligonucleotide
guguguauauauauguauu

SEQ ID NO: 83294 - RNA, 19 nt, Artificial Sequence
  Description of Artificial Sequence: Synthetic oligonucleotide
uugauucuaccugcaaaca

SEQ ID NO: 83295 - RNA, 19 nt, Artificial Sequence
  Description of Artificial Sequence: Synthetic oligonucleotide
aaauuuuuauuggugagga

SEQ ID NO: 83296 - RNA, 19 nt, Artificial Sequence
  Description of Artificial Sequence: Synthetic oligonucleotide
acuauuuuugagcugacac

SEQ ID NO: 83297 - RNA, 19 nt, Artificial Sequence
  Description of Artificial Sequence: Synthetic oligonucleotide
cucccucuuaguuucuuca

SEQ ID NO: 83298 - RNA, 19 nt, Artificial Sequence
  Description of Artificial Sequence: Synthetic oligonucleotide
augucaccuuucguccugg

SEQ ID NO: 83299 - RNA, 19 nt, Artificial Sequence
  Description of Artificial Sequence: Synthetic oligonucleotide
guuccuccgccacucuucc

SEQ ID NO: 83300 - RNA, 19 nt, Artificial Sequence
  Description of Artificial Sequence: Synthetic oligonucleotide
cucuuggggacaacaggaa

SEQ ID NO: 83301 - RNA, 19 nt, Artificial Sequence
  Description of Artificial Sequence: Synthetic oligonucleotide
agugucugauuccagucug

SEQ ID NO: 83302 - RNA, 19 nt, Artificial Sequence
  Description of Artificial Sequence: Synthetic oligonucleotide
gccuaguacguugguacac

SEQ ID NO: 83303 - RNA, 19 nt, Artificial Sequence
  Description of Artificial Sequence: Synthetic oligonucleotide
cacguggcauugccgcagc

SEQ ID NO: 83304 - RNA, 19 nt, Artificial Sequence
  Description of Artificial Sequence: Synthetic oligonucleotide
caccugggcugaccuuugu

SEQ ID NO: 83305 - RNA, 19 nt, Artificial Sequence
  Description of Artificial Sequence: Synthetic oligonucleotide
ugugugcgugugugugugu

SEQ ID NO: 83306 - RNA, 19 nt, Artificial Sequence
  Description of Artificial Sequence: Synthetic oligonucleotide
uuuccuucuucccuucagc

SEQ ID NO: 83307 - RNA, 19 nt, Artificial Sequence
  Description of Artificial Sequence: Synthetic oligonucleotide
ccugugacuguugcugacu

SEQ ID NO: 83308 - RNA, 19 nt, Artificial Sequence
  Description of Artificial Sequence: Synthetic oligonucleotide
uccaggggugggagggaug

SEQ ID NO: 83309 - RNA, 19 nt, Artificial Sequence
  Description of Artificial Sequence: Synthetic oligonucleotide
ggggagacuccccucuugc

SEQ ID NO: 83310 - RNA, 19 nt, Artificial Sequence
  Description of Artificial Sequence: Synthetic oligonucleotide
cuguguguacuggacacgc

SEQ ID NO: 83311 - RNA, 19 nt, Artificial Sequence
  Description of Artificial Sequence: Synthetic oligonucleotide
caggaagcaugcugucuug

SEQ ID NO: 83312 - RNA, 19 nt, Artificial Sequence
  Description of Artificial Sequence: Synthetic oligonucleotide
gcugccucugcaacgaccu

SEQ ID NO: 83313 - RNA, 19 nt, Artificial Sequence
  Description of Artificial Sequence: Synthetic oligonucleotide
ugucguuugcuccagcaug

SEQ ID NO: 83314 - RNA, 19 nt, Artificial Sequence
  Description of Artificial Sequence: Synthetic oligonucleotide
gcacaaacuucgugagacc

SEQ ID NO: 83315 - RNA, 19 nt, Artificial Sequence
  Description of Artificial Sequence: Synthetic oligonucleotide
caacacagccgugcccugc

SEQ ID NO: 83316 - RNA, 19 nt, Artificial Sequence
  Description of Artificial Sequence: Synthetic oligonucleotide
caggcaccagcacgugcuu

SEQ ID NO: 83317 - RNA, 19 nt, Artificial Sequence
  Description of Artificial Sequence: Synthetic oligonucleotide
uuucagaggcugcggacuu

SEQ ID NO: 83318 - RNA, 19 nt, Artificial Sequence
  Description of Artificial Sequence: Synthetic oligonucleotide
uucuuccagccauuguggc

SEQ ID NO: 83319 - RNA, 19 nt, Artificial Sequence
  Description of Artificial Sequence: Synthetic oligonucleotide
cauuggccuuuccagucuu

SEQ ID NO: 83320 - RNA, 19 nt, Artificial Sequence
  Description of Artificial Sequence: Synthetic oligonucleotide
ugggaggagcgcgcugcuu

SEQ ID NO: 83321 - RNA, 19 nt, Artificial Sequence
  Description of Artificial Sequence: Synthetic oligonucleotide
uuggugagacacccccaug

SEQ ID NO: 83322 - RNA, 19 nt, Artificial Sequence
  Description of Artificial Sequence: Synthetic oligonucleotide
gcaagguccucagaguagc

SEQ ID NO: 83323 - RNA, 19 nt, Artificial Sequence
  Description of Artificial Sequence: Synthetic oligonucleotide
ccggguucuaccacaaaca

SEQ ID NO: 83324 - RNA, 19 nt, Artificial Sequence
  Description of Artificial Sequence: Synthetic oligonucleotide
agaaacagaaugaaaguag

SEQ ID NO: 83325 - RNA, 19 nt, Artificial Sequence
  Description of Artificial Sequence: Synthetic oligonucleotide
gcugucaguccuuguagag

SEQ ID NO: 83326 - RNA, 19 nt, Artificial Sequence
  Description of Artificial Sequence: Synthetic oligonucleotide
gagccgcucuguuuccucc

SEQ ID NO: 83327 - RNA, 19 nt, Artificial Sequence
  Description of Artificial Sequence: Synthetic oligonucleotide
ccagaagcaucucccagcu

SEQ ID NO: 83328 - RNA, 19 nt, Artificial Sequence
  Description of Artificial Sequence: Synthetic oligonucleotide
uaagcucgcauuauuuuuc

SEQ ID NO: 83329 - RNA, 19 nt, Artificial Sequence
  Description of Artificial Sequence: Synthetic oligonucleotide
cuccucuggcuguuugccu

SEQ ID NO: 83330 - RNA, 19 nt, Artificial Sequence
  Description of Artificial Sequence: Synthetic oligonucleotide
ugaaguucacagaacacac

SEQ ID NO: 83331 - RNA, 19 nt, Artificial Sequence
  Description of Artificial Sequence: Synthetic oligonucleotide
caaccaugaaaggcuuuuu

SEQ ID NO: 83332 - RNA, 19 nt, Artificial Sequence
  Description of Artificial Sequence: Synthetic oligonucleotide
ugaggugagaggcccaggu

SEQ ID NO: 83333 - RNA, 19 nt, Artificial Sequence
  Description of Artificial Sequence: Synthetic oligonucleotide
ugguccuggcaacccugag

SEQ ID NO: 83334 - RNA, 19 nt, Artificial Sequence
  Description of Artificial Sequence: Synthetic oligonucleotide
guagaaggagagacggggu

SEQ ID NO: 83335 - RNA, 19 nt, Artificial Sequence
  Description of Artificial Sequence: Synthetic oligonucleotide
uagggaacgggcccggcca

SEQ ID NO: 83336 - RNA, 19 nt, Artificial Sequence
  Description of Artificial Sequence: Synthetic oligonucleotide
agaaaagaaccauuucuuc

SEQ ID NO: 83337 - RNA, 19 nt, Artificial Sequence
  Description of Artificial Sequence: Synthetic oligonucleotide
cugccaucuuuuaugcacc

SEQ ID NO: 83338 - RNA, 19 nt, Artificial Sequence
  Description of Artificial Sequence: Synthetic oligonucleotide
cauagacaucgagacucca

SEQ ID NO: 83339 - RNA, 19 nt, Artificial Sequence
  Description of Artificial Sequence: Synthetic oligonucleotide
aggggguccuggcuccccu

SEQ ID NO: 83340 - RNA, 19 nt, Artificial Sequence
  Description of Artificial Sequence: Synthetic oligonucleotide
ugucccugcagcccugcag

SEQ ID NO: 83341 - RNA, 19 nt, Artificial Sequence
  Description of Artificial Sequence: Synthetic oligonucleotide
ggucagugcaugaucuggg

SEQ ID NO: 83342 - RNA, 19 nt, Artificial Sequence
  Description of Artificial Sequence: Synthetic oligonucleotide
guucguguccugaccaggu

SEQ ID NO: 83343 - RNA, 19 nt, Artificial Sequence
  Description of Artificial Sequence: Synthetic oligonucleotide
ugcuccuccuuugauccga

SEQ ID NO: 83344 - RNA, 19 nt, Artificial Sequence
  Description of Artificial Sequence: Synthetic oligonucleotide
aggggaaagggacugguuu

SEQ ID NO: 83345 - RNA, 19 nt, Artificial Sequence
  Description of Artificial Sequence: Synthetic oligonucleotide
uauagaaagagccuaggag

SEQ ID NO: 83346 - RNA, 19 nt, Artificial Sequence
  Description of Artificial Sequence: Synthetic oligonucleotide
gacaaaagggccagucccc

SEQ ID NO: 83347 - RNA, 19 nt, Artificial Sequence
  Description of Artificial Sequence: Synthetic oligonucleotide
ccugcccagaauggagcag

SEQ ID NO: 83348 - RNA, 19 nt, Artificial Sequence
  Description of Artificial Sequence: Synthetic oligonucleotide
gcagcaggacagaccccca

SEQ ID NO: 83349 - RNA, 19 nt, Artificial Sequence
  Description of Artificial Sequence: Synthetic oligonucleotide
acgaggccccccagagagg

SEQ ID NO: 83350 - RNA, 19 nt, Artificial Sequence
  Description of Artificial Sequence: Synthetic oligonucleotide
gaggaagaucccacggagg

SEQ ID NO: 83351 - RNA, 19 nt, Artificial Sequence
  Description of Artificial Sequence: Synthetic oligonucleotide
gaacacaugagguuaggga

SEQ ID NO: 83352 - RNA, 19 nt, Artificial Sequence
  Description of Artificial Sequence: Synthetic oligonucleotide
acccuuguucagcacccca

SEQ ID NO: 83353 - RNA, 19 nt, Artificial Sequence
  Description of Artificial Sequence: Synthetic oligonucleotide
aaacagccugccuguuuaa

SEQ ID NO: 83354 - RNA, 19 nt, Artificial Sequence
  Description of Artificial Sequence: Synthetic oligonucleotide
aagcaggcagcaggcuuag

SEQ ID NO: 83355 - RNA, 19 nt, Artificial Sequence
  Description of Artificial Sequence: Synthetic oligonucleotide
ggccuucccugcaacccca

SEQ ID NO: 83356 - RNA, 19 nt, Artificial Sequence
  Description of Artificial Sequence: Synthetic oligonucleotide
aacacccacaaguuuguuu

SEQ ID NO: 83357 - RNA, 19 nt, Artificial Sequence
  Description of Artificial Sequence: Synthetic oligonucleotide
ucucuaggaaacacauuca

SEQ ID NO: 83358 - RNA, 19 nt, Artificial Sequence
  Description of Artificial Sequence: Synthetic oligonucleotide
acugucucagcuggcuguu

SEQ ID NO: 83359 - RNA, 19 nt, Artificial Sequence
  Description of Artificial Sequence: Synthetic oligonucleotide
uacucucucagaccauaug

SEQ ID NO: 83360 - RNA, 19 nt, Artificial Sequence
  Description of Artificial Sequence: Synthetic oligonucleotide
ggcaaaguuuuccaagaaa

SEQ ID NO: 83361 - RNA, 19 nt, Artificial Sequence
  Description of Artificial Sequence: Synthetic oligonucleotide
aaugccccgacaggggugc

SEQ ID NO: 83362 - RNA, 19 nt, Artificial Sequence
  Description of Artificial Sequence: Synthetic oligonucleotide
cccagcacacugccugagg

SEQ ID NO: 83363 - RNA, 19 nt, Artificial Sequence
  Description of Artificial Sequence: Synthetic oligonucleotide
ggacaacagacaucagaac

SEQ ID NO: 83364 - RNA, 19 nt, Artificial Sequence
  Description of Artificial Sequence: Synthetic oligonucleotide
caaacccccagagagaaac

SEQ ID NO: 83365 - RNA, 19 nt, Artificial Sequence
  Description of Artificial Sequence: Synthetic oligonucleotide
cagucaaaaucagggcccg

SEQ ID NO: 83366 - RNA, 19 nt, Artificial Sequence
  Description of Artificial Sequence: Synthetic oligonucleotide
ggugcaguguugucaugug

SEQ ID NO: 83367 - RNA, 19 nt, Artificial Sequence
  Description of Artificial Sequence: Synthetic oligonucleotide
ggaaccugcuuuauccauu

SEQ ID NO: 83368 - RNA, 19 nt, Artificial Sequence
  Description of Artificial Sequence: Synthetic oligonucleotide
ugcugaguguugaaugugg

SEQ ID NO: 83369 - RNA, 19 nt, Artificial Sequence
  Description of Artificial Sequence: Synthetic oligonucleotide
gguaaugguuagggcuuuc

SEQ ID NO: 83370 - RNA, 19 nt, Artificial Sequence
  Description of Artificial Sequence: Synthetic oligonucleotide
ccagaucucagcagccaaa

SEQ ID NO: 83371 - RNA, 19 nt, Artificial Sequence
  Description of Artificial Sequence: Synthetic oligonucleotide
agacaguuauuguuggaag

SEQ ID NO: 83372 - RNA, 19 nt, Artificial Sequence
  Description of Artificial Sequence: Synthetic oligonucleotide
gacugucauguagauaacc

SEQ ID NO: 83373 - RNA, 19 nt, Artificial Sequence
  Description of Artificial Sequence: Synthetic oligonucleotide
caugagcaauggcucgccu

SEQ ID NO: 83374 - RNA, 19 nt, Artificial Sequence
  Description of Artificial Sequence: Synthetic oligonucleotide
ucagaaucaguucauaaaa

SEQ ID NO: 83375 - RNA, 19 nt, Artificial Sequence
  Description of Artificial Sequence: Synthetic oligonucleotide
auucuaugguacuggcccc

SEQ ID NO: 83376 - RNA, 19 nt, Artificial Sequence
  Description of Artificial Sequence: Synthetic oligonucleotide
cuucguggguauuguguga

SEQ ID NO: 83377 - RNA, 19 nt, Artificial Sequence
  Description of Artificial Sequence: Synthetic oligonucleotide
aaaugagaugguggcgagg

SEQ ID NO: 83378 - RNA, 19 nt, Artificial Sequence
  Description of Artificial Sequence: Synthetic oligonucleotide
gggugcgcuguggaacugc

SEQ ID NO: 83379 - RNA, 19 nt, Artificial Sequence
  Description of Artificial Sequence: Synthetic oligonucleotide
ccgcagccacgcaggaggu

SEQ ID NO: 83380 - RNA, 19 nt, Artificial Sequence
  Description of Artificial Sequence: Synthetic oligonucleotide
ucccugggggaugcuuugg

SEQ ID NO: 83381 - RNA, 19 nt, Artificial Sequence
  Description of Artificial Sequence: Synthetic oligonucleotide
ggaaguccuugccccugag

SEQ ID NO: 83382 - RNA, 19 nt, Artificial Sequence
  Description of Artificial Sequence: Synthetic oligonucleotide
gcacugccugauugccagg

SEQ ID NO: 83383 - RNA, 19 nt, Artificial Sequence
  Description of Artificial Sequence: Synthetic oligonucleotide
ggccuguggaggucuaggc

SEQ ID NO: 83384 - RNA, 19 nt, Artificial Sequence
  Description of Artificial Sequence: Synthetic oligonucleotide
ccgccuggcagaaucuagc

SEQ ID NO: 83385 - RNA, 19 nt, Artificial Sequence
  Description of Artificial Sequence: Synthetic oligonucleotide
caccguccgaauccccgca

SEQ ID NO: 83386 - RNA, 19 nt, Artificial Sequence
  Description of Artificial Sequence: Synthetic oligonucleotide
aggacccauggagcuauga

SEQ ID NO: 83387 - RNA, 19 nt, Artificial Sequence
  Description of Artificial Sequence: Synthetic oligonucleotide
accacaccaggccauucaa

SEQ ID NO: 83388 - RNA, 19 nt, Artificial Sequence
  Description of Artificial Sequence: Synthetic oligonucleotide
aauggcucugcauuaucuu

SEQ ID NO: 83389 - RNA, 19 nt, Artificial Sequence
  Description of Artificial Sequence: Synthetic oligonucleotide
ucccuuggaagguggccac

SEQ ID NO: 83390 - RNA, 19 nt, Artificial Sequence
  Description of Artificial Sequence: Synthetic oligonucleotide
cuccucgguggcagggccu

SEQ ID NO: 83391 - RNA, 19 nt, Artificial Sequence
  Description of Artificial Sequence: Synthetic oligonucleotide
uuucccugaggcugcaggc

SEQ ID NO: 83392 - RNA, 19 nt, Artificial Sequence
  Description of Artificial Sequence: Synthetic oligonucleotide
ccgugggcuggcagcccgu

SEQ ID NO: 83393 - RNA, 19 nt, Artificial Sequence
  Description of Artificial Sequence: Synthetic oligonucleotide
ucucuuggcauuucaauug

SEQ ID NO: 83394 - RNA, 19 nt, Artificial Sequence
  Description of Artificial Sequence: Synthetic oligonucleotide
gaaggucaccaggugcugg

SEQ ID NO: 83395 - RNA, 19 nt, Artificial Sequence
  Description of Artificial Sequence: Synthetic oligonucleotide
gguuugaaaggaagucacu

SEQ ID NO: 83396 - RNA, 19 nt, Artificial Sequence
  Description of Artificial Sequence: Synthetic oligonucleotide
uggagugcugccaggggcc

SEQ ID NO: 83397 - RNA, 19 nt, Artificial Sequence
  Description of Artificial Sequence: Synthetic oligonucleotide
cgcccuccaagguuaauga

SEQ ID NO: 83398 - RNA, 19 nt, Artificial Sequence
  Description of Artificial Sequence: Synthetic oligonucleotide
agaggcccacauccaggca

SEQ ID NO: 83399 - RNA, 19 nt, Artificial Sequence
  Description of Artificial Sequence: Synthetic oligonucleotide
aagaacuaauucaaaaggc

SEQ ID NO: 83400 - RNA, 19 nt, Artificial Sequence
  Description of Artificial Sequence: Synthetic oligonucleotide
cagaucagaaaccacagga

SEQ ID NO: 83401 - RNA, 19 nt, Artificial Sequence
  Description of Artificial Sequence: Synthetic oligonucleotide
agucaaaauuauugcuccg

SEQ ID NO: 83402 - RNA, 19 nt, Artificial Sequence
  Description of Artificial Sequence: Synthetic oligonucleotide
ggcagugcuucccuuccuu

SEQ ID NO: 83403 - RNA, 19 nt, Artificial Sequence
  Description of Artificial Sequence: Synthetic oligonucleotide
uucauccacuggccucgug

SEQ ID NO: 83404 - RNA, 19 nt, Artificial Sequence
  Description of Artificial Sequence: Synthetic oligonucleotide
gugguccaugcagggccac

SEQ ID NO: 83405 - RNA, 19 nt, Artificial Sequence
  Description of Artificial Sequence: Synthetic oligonucleotide
cugucugcccuuucugaug

SEQ ID NO: 83406 - RNA, 19 nt, Artificial Sequence
  Description of Artificial Sequence: Synthetic oligonucleotide
gccacguauuaggcuuucu

SEQ ID NO: 83407 - RNA, 19 nt, Artificial Sequence
  Description of Artificial Sequence: Synthetic oligonucleotide
uuacucagaauuuugauag

SEQ ID NO: 83408 - RNA, 19 nt, Artificial Sequence
  Description of Artificial Sequence: Synthetic oligonucleotide
gaaaaccauggggccaaga

SEQ ID NO: 83409 - RNA, 19 nt, Artificial Sequence
  Description of Artificial Sequence: Synthetic oligonucleotide
agcucuggaagccuggccg

SEQ ID NO: 83410 - RNA, 19 nt, Artificial Sequence
  Description of Artificial Sequence: Synthetic oligonucleotide
ggaaagaccaagguucaug

SEQ ID NO: 83411 - RNA, 19 nt, Artificial Sequence
  Description of Artificial Sequence: Synthetic oligonucleotide
gcagcccaacaaaugauug

SEQ ID NO: 83412 - RNA, 19 nt, Artificial Sequence
  Description of Artificial Sequence: Synthetic oligonucleotide
guugagcaccucucggagc

SEQ ID NO: 83413 - RNA, 19 nt, Artificial Sequence
  Description of Artificial Sequence: Synthetic oligonucleotide
ccaaaguccuuaggcgagu

SEQ ID NO: 83414 - RNA, 19 nt, Artificial Sequence
  Description of Artificial Sequence: Synthetic oligonucleotide
uguggugacuuccuggaag

SEQ ID NO: 83415 - RNA, 19 nt, Artificial Sequence
  Description of Artificial Sequence: Synthetic oligonucleotide
ggaggaugcagacuuccag

SEQ ID NO: 83416 - RNA, 19 nt, Artificial Sequence
  Description of Artificial Sequence: Synthetic oligonucleotide
gagagcccccccaacggac

SEQ ID NO: 83417 - RNA, 19 nt, Artificial Sequence
  Description of Artificial Sequence: Synthetic oligonucleotide
cgugcugagaagggagagg

SEQ ID NO: 83418 - RNA, 19 nt, Artificial Sequence
  Description of Artificial Sequence: Synthetic oligonucleotide
ggaggcgggggcuguaguc

SEQ ID NO: 83419 - RNA, 19 nt, Artificial Sequence
  Description of Artificial Sequence: Synthetic oligonucleotide
caggaaggagccagagaag

SEQ ID NO: 83420 - RNA, 19 nt, Artificial Sequence
  Description of Artificial Sequence: Synthetic oligonucleotide
gaacaggguuugggugcau

SEQ ID NO: 83421 - RNA, 19 nt, Artificial Sequence
  Description of Artificial Sequence: Synthetic oligonucleotide
uccagaaauaugccugcag

SEQ ID NO: 83422 - RNA, 19 nt, Artificial Sequence
  Description of Artificial Sequence: Synthetic oligonucleotide
guaggagggagaggaaggg

SEQ ID NO: 83423 - RNA, 19 nt, Artificial Sequence
  Description of Artificial Sequence: Synthetic oligonucleotide
ggugccaccgucaacggcu

SEQ ID NO: 83424 - RNA, 19 nt, Artificial Sequence
  Description of Artificial Sequence: Synthetic oligonucleotide
uucccaucggaggugguug

SEQ ID NO: 83425 - RNA, 19 nt, Artificial Sequence
  Description of Artificial Sequence: Synthetic oligonucleotide
ggugcagauggaaguuucu

SEQ ID NO: 83426 - RNA, 19 nt, Artificial Sequence
  Description of Artificial Sequence: Synthetic oligonucleotide
ugucugcuggcccucaaga

SEQ ID NO: 83427 - RNA, 19 nt, Artificial Sequence
  Description of Artificial Sequence: Synthetic oligonucleotide
agaguguuuugccagggac

SEQ ID NO: 83428 - RNA, 19 nt, Artificial Sequence
  Description of Artificial Sequence: Synthetic oligonucleotide
cacagucuguuccuccuca

SEQ ID NO: 83429 - RNA, 19 nt, Artificial Sequence
  Description of Artificial Sequence: Synthetic oligonucleotide
agaaaacaccccccaaaug

SEQ ID NO: 83430 - RNA, 19 nt, Artificial Sequence
  Description of Artificial Sequence: Synthetic oligonucleotide
gcuaacaacauccccacca

SEQ ID NO: 83431 - RNA, 19 nt, Artificial Sequence
  Description of Artificial Sequence: Synthetic oligonucleotide
agcugcuagaagccccuuu

SEQ ID NO: 83432 - RNA, 19 nt, Artificial Sequence
  Description of Artificial Sequence: Synthetic oligonucleotide
uccccuccccaccuugaag

SEQ ID NO: 83433 - RNA, 19 nt, Artificial Sequence
  Description of Artificial Sequence: Synthetic oligonucleotide
guagcucauaguucucugg

SEQ ID NO: 83434 - RNA, 19 nt, Artificial Sequence
  Description of Artificial Sequence: Synthetic oligonucleotide
ggcagagccagaccaucca

SEQ ID NO: 83435 - RNA, 19 nt, Artificial Sequence
  Description of Artificial Sequence: Synthetic oligonucleotide
aguguaccccagaggccag

SEQ ID NO: 83436 - RNA, 19 nt, Artificial Sequence
  Description of Artificial Sequence: Synthetic oligonucleotide
guagguuccugcccauuuu

SEQ ID NO: 83437 - RNA, 19 nt, Artificial Sequence
  Description of Artificial Sequence: Synthetic oligonucleotide
uccucucuggcuuccugcc

SEQ ID NO: 83438 - RNA, 19 nt, Artificial Sequence
  Description of Artificial Sequence: Synthetic oligonucleotide
caagaauuauggcagcuga

SEQ ID NO: 83439 - RNA, 19 nt, Artificial Sequence
  Description of Artificial Sequence: Synthetic oligonucleotide
aggaugaauggagaaguaa

SEQ ID NO: 83440 - RNA, 19 nt, Artificial Sequence
  Description of Artificial Sequence: Synthetic oligonucleotide
aaaacaacuaacaccgcac

SEQ ID NO: 83441 - RNA, 19 nt, Artificial Sequence
  Description of Artificial Sequence: Synthetic oligonucleotide
caacuaacaacuaacaccg

SEQ ID NO: 83442 - RNA, 19 nt, Artificial Sequence
  Description of Artificial Sequence: Synthetic oligonucleotide
gcaguucccaccuggguuc

SEQ ID NO: 83443 - RNA, 19 nt, Artificial Sequence
  Description of Artificial Sequence: Synthetic oligonucleotide
ccacuuagcaggagacauu

SEQ ID NO: 83444 - RNA, 19 nt, Artificial Sequence
  Description of Artificial Sequence: Synthetic oligonucleotide
uucggaggguuuuuuuugu

SEQ ID NO: 83445 - RNA, 19 nt, Artificial Sequence
  Description of Artificial Sequence: Synthetic oligonucleotide
uuuuuguuccuguuuuuuu

SEQ ID NO: 83446 - RNA, 19 nt, Artificial Sequence
  Description of Artificial Sequence: Synthetic oligonucleotide
uuuuuuuugcuggaauuug

SEQ ID NO: 83447 - RNA, 19 nt, Artificial Sequence
  Description of Artificial Sequence: Synthetic oligonucleotide
guuuucucaguacugaaaa

SEQ ID NO: 83448 - RNA, 19 nt, Artificial Sequence
  Description of Artificial Sequence: Synthetic oligonucleotide
agagaaaaagugacaaucu

SEQ ID NO: 83449 - RNA, 19 nt, Artificial Sequence
  Description of Artificial Sequence: Synthetic oligonucleotide
uuguauuuuuaaaagccuc

SEQ ID NO: 83450 - RNA, 19 nt, Artificial Sequence
  Description of Artificial Sequence: Synthetic oligonucleotide
cggaaaggugauaccaucu

SEQ ID NO: 83451 - RNA, 19 nt, Artificial Sequence
  Description of Artificial Sequence: Synthetic oligonucleotide
ugacagucauuuucucacg

SEQ ID NO: 83452 - RNA, 19 nt, Artificial Sequence
  Description of Artificial Sequence: Synthetic oligonucleotide
guuggucuucuaaagucac

SEQ ID NO: 83453 - RNA, 19 nt, Artificial Sequence
  Description of Artificial Sequence: Synthetic oligonucleotide
ccuauuucuugugugugca

SEQ ID NO: 83454 - RNA, 19 nt, Artificial Sequence
  Description of Artificial Sequence: Synthetic oligonucleotide
acaucacaccauuuccugu

SEQ ID NO: 83455 - RNA, 19 nt, Artificial Sequence
  Description of Artificial Sequence: Synthetic oligonucleotide
uuucuuuauaacccgacaa

SEQ ID NO: 83456 - RNA, 19 nt, Artificial Sequence
  Description of Artificial Sequence: Synthetic oligonucleotide
aggguaggagugccuguuu

SEQ ID NO: 83457 - RNA, 19 nt, Artificial Sequence
  Description of Artificial Sequence: Synthetic oligonucleotide
uccccugcugggcacacca

SEQ ID NO: 83458 - RNA, 19 nt, Artificial Sequence
  Description of Artificial Sequence: Synthetic oligonucleotide
agacaaucguaaucacaaa

SEQ ID NO: 83459 - RNA, 19 nt, Artificial Sequence
  Description of Artificial Sequence: Synthetic oligonucleotide
aacagacacugagccaggg

SEQ ID NO: 83460 - RNA, 19 nt, Artificial Sequence
  Description of Artificial Sequence: Synthetic oligonucleotide
ggcccaaagggugugauca

SEQ ID NO: 83461 - RNA, 19 nt, Artificial Sequence
  Description of Artificial Sequence: Synthetic oligonucleotide
augagaguuaccgggacag

SEQ ID NO: 83462 - RNA, 19 nt, Artificial Sequence
  Description of Artificial Sequence: Synthetic oligonucleotide
gcaguaggcaugacaguca

SEQ ID NO: 83463 - RNA, 19 nt, Artificial Sequence
  Description of Artificial Sequence: Synthetic oligonucleotide
accaggaaggacaagggug

SEQ ID NO: 83464 - RNA, 19 nt, Artificial Sequence
  Description of Artificial Sequence: Synthetic oligonucleotide
gcucuguuguuaguggcca

SEQ ID NO: 83465 - RNA, 19 nt, Artificial Sequence
  Description of Artificial Sequence: Synthetic oligonucleotide
acacaccaauuugacaagg

SEQ ID NO: 83466 - RNA, 19 nt, Artificial Sequence
  Description of Artificial Sequence: Synthetic oligonucleotide
gaguguugcgaaauuuuua

SEQ ID NO: 83467 - RNA, 19 nt, Artificial Sequence
  Description of Artificial Sequence: Synthetic oligonucleotide
auuuauuuauuuauuuauu

SEQ ID NO: 83468 - RNA, 19 nt, Artificial Sequence
  Description of Artificial Sequence: Synthetic oligonucleotide
uuugagauggaguuucacu

SEQ ID NO: 83469 - RNA, 19 nt, Artificial Sequence
  Description of Artificial Sequence: Synthetic oligonucleotide
ucuuguugcccaggcugga

SEQ ID NO: 83470 - RNA, 19 nt, Artificial Sequence
  Description of Artificial Sequence: Synthetic oligonucleotide
agugcggugguacaaucuc

SEQ ID NO: 83471 - RNA, 19 nt, Artificial Sequence
  Description of Artificial Sequence: Synthetic oligonucleotide
cggcucacugcaaccucca

SEQ ID NO: 83472 - RNA, 19 nt, Artificial Sequence
  Description of Artificial Sequence: Synthetic oligonucleotide
accucccagguucaagcga

SEQ ID NO: 83473 - RNA, 19 nt, Artificial Sequence
  Description of Artificial Sequence: Synthetic oligonucleotide
auucuccugccucagccuc

SEQ ID NO: 83474 - RNA, 19 nt, Artificial Sequence
  Description of Artificial Sequence: Synthetic oligonucleotide
cccaaguaccugggacuac

SEQ ID NO: 83475 - RNA, 19 nt, Artificial Sequence
  Description of Artificial Sequence: Synthetic oligonucleotide
caggugcgugccaccacac

SEQ ID NO: 83476 - RNA, 19 nt, Artificial Sequence
  Description of Artificial Sequence: Synthetic oligonucleotide
cccagcuaaauuuuguguu

SEQ ID NO: 83477 - RNA, 19 nt, Artificial Sequence
  Description of Artificial Sequence: Synthetic oligonucleotide
uuuuaguagagaugggguu

SEQ ID NO: 83478 - RNA, 19 nt, Artificial Sequence
  Description of Artificial Sequence: Synthetic oligonucleotide
uucaccauguuggccagga

SEQ ID NO: 83479 - RNA, 19 nt, Artificial Sequence
  Description of Artificial Sequence: Synthetic oligonucleotide
auggucuugaaccccugac

SEQ ID NO: 83480 - RNA, 19 nt, Artificial Sequence
  Description of Artificial Sequence: Synthetic oligonucleotide
ccucaugaucugccugccu

SEQ ID NO: 83481 - RNA, 19 nt, Artificial Sequence
  Description of Artificial Sequence: Synthetic oligonucleotide
ucggccucccaaagugcug

SEQ ID NO: 83482 - RNA, 19 nt, Artificial Sequence
  Description of Artificial Sequence: Synthetic oligonucleotide
gggauuacaggcaugagcc

SEQ ID NO: 83483 - RNA, 19 nt, Artificial Sequence
  Description of Artificial Sequence: Synthetic oligonucleotide
caccacgcccagccaaaau

SEQ ID NO: 83484 - RNA, 19 nt, Artificial Sequence
  Description of Artificial Sequence: Synthetic oligonucleotide
uauuuuuuuaaagucauuu

SEQ ID NO: 83485 - RNA, 19 nt, Artificial Sequence
  Description of Artificial Sequence: Synthetic oligonucleotide
uuccuuaagcugcuugggc

SEQ ID NO: 83486 - RNA, 19 nt, Artificial Sequence
  Description of Artificial Sequence: Synthetic oligonucleotide
cuacaugugaaauacacug

SEQ ID NO: 83487 - RNA, 19 nt, Artificial Sequence
  Description of Artificial Sequence: Synthetic oligonucleotide
ggacggucaacauuccugu

SEQ ID NO: 83488 - RNA, 19 nt, Artificial Sequence
  Description of Artificial Sequence: Synthetic oligonucleotide
ucuccucccauuugggcug

SEQ ID NO: 83489 - RNA, 19 nt, Artificial Sequence
  Description of Artificial Sequence: Synthetic oligonucleotide
gaugcagcagauccaggga

SEQ ID NO: 83490 - RNA, 19 nt, Artificial Sequence
  Description of Artificial Sequence: Synthetic oligonucleotide
aauguuaccuguuucugcu

SEQ ID NO: 83491 - RNA, 19 nt, Artificial Sequence
  Description of Artificial Sequence: Synthetic oligonucleotide
ugcuagaagauccaggaaa

SEQ ID NO: 83492 - RNA, 19 nt, Artificial Sequence
  Description of Artificial Sequence: Synthetic oligonucleotide
auugggaagguuaccugac

SEQ ID NO: 83493 - RNA, 19 nt, Artificial Sequence
  Description of Artificial Sequence: Synthetic oligonucleotide
cgcacacauggaugaaggc

SEQ ID NO: 83494 - RNA, 19 nt, Artificial Sequence
  Description of Artificial Sequence: Synthetic oligonucleotide
ccaucaucuagaaaugggg

SEQ ID NO: 83495 - RNA, 19 nt, Artificial Sequence
  Description of Artificial Sequence: Synthetic oligonucleotide
gucaaccacaauuguguua

SEQ ID NO: 83496 - RNA, 19 nt, Artificial Sequence
  Description of Artificial Sequence: Synthetic oligonucleotide
aauuccguagugucaggga

SEQ ID NO: 83497 - RNA, 19 nt, Artificial Sequence
  Description of Artificial Sequence: Synthetic oligonucleotide
auucuucgggaaggucaac

SEQ ID NO: 83498 - RNA, 19 nt, Artificial Sequence
  Description of Artificial Sequence: Synthetic oligonucleotide
caguaugaaggauucugac

SEQ ID NO: 83499 - RNA, 19 nt, Artificial Sequence
  Description of Artificial Sequence: Synthetic oligonucleotide
ccccugugccucccauuua

SEQ ID NO: 83500 - RNA, 19 nt, Artificial Sequence
  Description of Artificial Sequence: Synthetic oligonucleotide
augugaucaggugacaguu

SEQ ID NO: 83501 - RNA, 19 nt, Artificial Sequence
  Description of Artificial Sequence: Synthetic oligonucleotide
uaauaaccguggaggucac

SEQ ID NO: 83502 - RNA, 19 nt, Artificial Sequence
  Description of Artificial Sequence: Synthetic oligonucleotide
cacucagccauccaacagc

SEQ ID NO: 83503 - RNA, 19 nt, Artificial Sequence
  Description of Artificial Sequence: Synthetic oligonucleotide
ccuuacagugacccuacac

SEQ ID NO: 83504 - RNA, 19 nt, Artificial Sequence
  Description of Artificial Sequence: Synthetic oligonucleotide
caaaagcccccaaauucca

SEQ ID NO: 83505 - RNA, 19 nt, Artificial Sequence
  Description of Artificial Sequence: Synthetic oligonucleotide
aaagacuuuuucuuaaccu

SEQ ID NO: 83506 - RNA, 19 nt, Artificial Sequence
  Description of Artificial Sequence: Synthetic oligonucleotide
uaaaggaagaaauuauuug

SEQ ID NO: 83507 - RNA, 19 nt, Artificial Sequence
  Description of Artificial Sequence: Synthetic oligonucleotide
guuaauuccaguagagcaa

SEQ ID NO: 83508 - RNA, 19 nt, Artificial Sequence
  Description of Artificial Sequence: Synthetic oligonucleotide
acugaauauacugggcuau

SEQ ID NO: 83509 - RNA, 19 nt, Artificial Sequence
  Description of Artificial Sequence: Synthetic oligonucleotide
uuuguacuuuuuuauagag

SEQ ID NO: 83510 - RNA, 19 nt, Artificial Sequence
  Description of Artificial Sequence: Synthetic oligonucleotide
gaacuuuaauaauaauucu

SEQ ID NO: 83511 - RNA, 19 nt, Artificial Sequence
  Description of Artificial Sequence: Synthetic oligonucleotide
uuuaaaaaugaguuuuuag

SEQ ID NO: 83512 - RNA, 19 nt, Artificial Sequence
  Description of Artificial Sequence: Synthetic oligonucleotide
gaacaaagcaacugacgau

SEQ ID NO: 83513 - RNA, 19 nt, Artificial Sequence
  Description of Artificial Sequence: Synthetic oligonucleotide
uuuccuaagauuccaaugc

SEQ ID NO: 83514 - RNA, 19 nt, Artificial Sequence
  Description of Artificial Sequence: Synthetic oligonucleotide
cccuggagcuuguaggagg

SEQ ID NO: 83515 - RNA, 19 nt, Artificial Sequence
  Description of Artificial Sequence: Synthetic oligonucleotide
gacuuagccugggucagcu

SEQ ID NO: 83516 - RNA, 19 nt, Artificial Sequence
  Description of Artificial Sequence: Synthetic oligonucleotide
uggagcacccccgaccuga

SEQ ID NO: 83517 - RNA, 19 nt, Artificial Sequence
  Description of Artificial Sequence: Synthetic oligonucleotide
aucucccacugccagauuu

SEQ ID NO: 83518 - RNA, 19 nt, Artificial Sequence
  Description of Artificial Sequence: Synthetic oligonucleotide
uucccaugcuccuagggua

SEQ ID NO: 83519 - RNA, 19 nt, Artificial Sequence
  Description of Artificial Sequence: Synthetic oligonucleotide
auggaguccacgugggaau

SEQ ID NO: 83520 - RNA, 19 nt, Artificial Sequence
  Description of Artificial Sequence: Synthetic oligonucleotide
ugacugcaaguucaggugg

SEQ ID NO: 83521 - RNA, 19 nt, Artificial Sequence
  Description of Artificial Sequence: Synthetic oligonucleotide
gaacuuggccgacugaugc

SEQ ID NO: 83522 - RNA, 19 nt, Artificial Sequence
  Description of Artificial Sequence: Synthetic oligonucleotide
cucugcgaguuuuuaauag

SEQ ID NO: 83523 - RNA, 19 nt, Artificial Sequence
  Description of Artificial Sequence: Synthetic oligonucleotide
gacacuggggacaacugcu

SEQ ID NO: 83524 - RNA, 19 nt, Artificial Sequence
  Description of Artificial Sequence: Synthetic oligonucleotide
uuaagguuuagaaacuucc

SEQ ID NO: 83525 - RNA, 19 nt, Artificial Sequence
  Description of Artificial Sequence: Synthetic oligonucleotide
caaaccacaggaaagacau

SEQ ID NO: 83526 - RNA, 19 nt, Artificial Sequence
  Description of Artificial Sequence: Synthetic oligonucleotide
uuuuuagugucccccaucc

SEQ ID NO: 83527 - RNA, 19 nt, Artificial Sequence
  Description of Artificial Sequence: Synthetic oligonucleotide
cagaggcagcccuggaaua

SEQ ID NO: 83528 - RNA, 19 nt, Artificial Sequence
  Description of Artificial Sequence: Synthetic oligonucleotide
aggauucccagggguuucu

SEQ ID NO: 83529 - RNA, 19 nt, Artificial Sequence
  Description of Artificial Sequence: Synthetic oligonucleotide
ugggaccccuuuccuugcu

SEQ ID NO: 83530 - RNA, 19 nt, Artificial Sequence
  Description of Artificial Sequence: Synthetic oligonucleotide
uccgugaggcucuguggcc

SEQ ID NO: 83531 - RNA, 19 nt, Artificial Sequence
  Description of Artificial Sequence: Synthetic oligonucleotide
caucuuuuggcaggaggag

SEQ ID NO: 83532 - RNA, 19 nt, Artificial Sequence
  Description of Artificial Sequence: Synthetic oligonucleotide
ggaugcuuccuuggcucug

SEQ ID NO: 83533 - RNA, 19 nt, Artificial Sequence
  Description of Artificial Sequence: Synthetic oligonucleotide
gugcccagacccgccuggu

SEQ ID NO: 83534 - RNA, 19 nt, Artificial Sequence
  Description of Artificial Sequence: Synthetic oligonucleotide
uccccaggucucucaccuu

SEQ ID NO: 83535 - RNA, 19 nt, Artificial Sequence
  Description of Artificial Sequence: Synthetic oligonucleotide
ugggugaagauucagagau

SEQ ID NO: 83536 - RNA, 19 nt, Artificial Sequence
  Description of Artificial Sequence: Synthetic oligonucleotide
ugcccuguaaggauuuugc

SEQ ID NO: 83537 - RNA, 19 nt, Artificial Sequence
  Description of Artificial Sequence: Synthetic oligonucleotide
cccacugggcaacucagaa

SEQ ID NO: 83538 - RNA, 19 nt, Artificial Sequence
  Description of Artificial Sequence: Synthetic oligonucleotide
aauacuucgaucucccaag

SEQ ID NO: 83539 - RNA, 19 nt, Artificial Sequence
  Description of Artificial Sequence: Synthetic oligonucleotide
gauauaagaggcagcagca

SEQ ID NO: 83540 - RNA, 19 nt, Artificial Sequence
  Description of Artificial Sequence: Synthetic oligonucleotide
aaacgugccuauugacguc

SEQ ID NO: 83541 - RNA, 19 nt, Artificial Sequence
  Description of Artificial Sequence: Synthetic oligonucleotide
cuguuucauaguuaccacu

SEQ ID NO: 83542 - RNA, 19 nt, Artificial Sequence
  Description of Artificial Sequence: Synthetic oligonucleotide
uuacgcgaguagacagaac

SEQ ID NO: 83543 - RNA, 19 nt, Artificial Sequence
  Description of Artificial Sequence: Synthetic oligonucleotide
cucggcuuuucagaaaaua

SEQ ID NO: 83544 - RNA, 19 nt, Artificial Sequence
  Description of Artificial Sequence: Synthetic oligonucleotide
aggugucaaguccacuuua

SEQ ID NO: 83545 - RNA, 19 nt, Artificial Sequence
  Description of Artificial Sequence: Synthetic oligonucleotide
auaagaaccuuuuuuucua

SEQ ID NO: 83546 - RNA, 19 nt, Artificial Sequence
  Description of Artificial Sequence: Synthetic oligonucleotide
aaaauaagauaaaaggugg

SEQ ID NO: 83547 - RNA, 19 nt, Artificial Sequence
  Description of Artificial Sequence: Synthetic oligonucleotide
gcuuugcauuuucugauua

SEQ ID NO: 83548 - RNA, 19 nt, Artificial Sequence
  Description of Artificial Sequence: Synthetic oligonucleotide
aaacgacugugucuuuguc

SEQ ID NO: 83549 - RNA, 19 nt, Artificial Sequence
  Description of Artificial Sequence: Synthetic oligonucleotide
caccucugcuuaacuuuag

SEQ ID NO: 83550 - RNA, 19 nt, Artificial Sequence
  Description of Artificial Sequence: Synthetic oligonucleotide
ggaguauccauuccuguga

SEQ ID NO: 83551 - RNA, 19 nt, Artificial Sequence
  Description of Artificial Sequence: Synthetic oligonucleotide
auuguagacuuuuguugau

SEQ ID NO: 83552 - RNA, 19 nt, Artificial Sequence
  Description of Artificial Sequence: Synthetic oligonucleotide
uauucuuccuggaagaaua

SEQ ID NO: 83553 - RNA, 19 nt, Artificial Sequence
  Description of Artificial Sequence: Synthetic oligonucleotide
aucauucuuuucuugaagg

SEQ ID NO: 83554 - RNA, 19 nt, Artificial Sequence
  Description of Artificial Sequence: Synthetic oligonucleotide
gguugguuuacuagaauau

SEQ ID NO: 83555 - RNA, 19 nt, Artificial Sequence
  Description of Artificial Sequence: Synthetic oligonucleotide
uucaaaaucaaucaugaag

SEQ ID NO: 83556 - RNA, 19 nt, Artificial Sequence
  Description of Artificial Sequence: Synthetic oligonucleotide
ggcaguuacuauuuugagu

SEQ ID NO: 83557 - RNA, 19 nt, Artificial Sequence
  Description of Artificial Sequence: Synthetic oligonucleotide
ucuaaagguuuucuaaaaa

SEQ ID NO: 83558 - RNA, 19 nt, Artificial Sequence
  Description of Artificial Sequence: Synthetic oligonucleotide
auuaaccucacaucccuuc

SEQ ID NO: 83559 - RNA, 19 nt, Artificial Sequence
  Description of Artificial Sequence: Synthetic oligonucleotide
cuguuagggucuuucagaa

SEQ ID NO: 83560 - RNA, 19 nt, Artificial Sequence
  Description of Artificial Sequence: Synthetic oligonucleotide
auaucuuuuauaaacagaa

SEQ ID NO: 83561 - RNA, 19 nt, Artificial Sequence
  Description of Artificial Sequence: Synthetic oligonucleotide
agcauuugaagucauugcu

SEQ ID NO: 83562 - RNA, 19 nt, Artificial Sequence
  Description of Artificial Sequence: Synthetic oligonucleotide
uuuugcuacaugauuugug

SEQ ID NO: 83563 - RNA, 19 nt, Artificial Sequence
  Description of Artificial Sequence: Synthetic oligonucleotide
gugugugaaggacauacca

SEQ ID NO: 83564 - RNA, 19 nt, Artificial Sequence
  Description of Artificial Sequence: Synthetic oligonucleotide
acguuuaaaucauuaauug

SEQ ID NO: 83565 - RNA, 19 nt, Artificial Sequence
  Description of Artificial Sequence: Synthetic oligonucleotide
gaaaaacaucauauaagcc

SEQ ID NO: 83566 - RNA, 19 nt, Artificial Sequence
  Description of Artificial Sequence: Synthetic oligonucleotide
cccaacuuuguuuggagga

SEQ ID NO: 83567 - RNA, 19 nt, Artificial Sequence
  Description of Artificial Sequence: Synthetic oligonucleotide
aagagacggagguugaggu

SEQ ID NO: 83568 - RNA, 19 nt, Artificial Sequence
  Description of Artificial Sequence: Synthetic oligonucleotide
uuuuuccuucuguauaagc

SEQ ID NO: 83569 - RNA, 19 nt, Artificial Sequence
  Description of Artificial Sequence: Synthetic oligonucleotide
caccuacugacaaaaugua

SEQ ID NO: 83570 - RNA, 19 nt, Artificial Sequence
  Description of Artificial Sequence: Synthetic oligonucleotide
agaggccauucaaccguca

SEQ ID NO: 83571 - RNA, 19 nt, Artificial Sequence
  Description of Artificial Sequence: Synthetic oligonucleotide
aaacaccauuugguuauau

SEQ ID NO: 83572 - RNA, 19 nt, Artificial Sequence
  Description of Artificial Sequence: Synthetic oligonucleotide
ucgcagaggagacggaugu

SEQ ID NO: 83573 - RNA, 19 nt, Artificial Sequence
  Description of Artificial Sequence: Synthetic oligonucleotide
uguaaauuacugcauugcu

SEQ ID NO: 83574 - RNA, 19 nt, Artificial Sequence
  Description of Artificial Sequence: Synthetic oligonucleotide
uuuuuuuuucaguuuguau

SEQ ID NO: 83575 - RNA, 19 nt, Artificial Sequence
  Description of Artificial Sequence: Synthetic oligonucleotide
uaaccucuaaucuccguuu

SEQ ID NO: 83576 - RNA, 19 nt, Artificial Sequence
  Description of Artificial Sequence: Synthetic oligonucleotide
ugcaugauacgcuuuguua

SEQ ID NO: 83577 - RNA, 19 nt, Artificial Sequence
  Description of Artificial Sequence: Synthetic oligonucleotide
agaaacauuaauuguaguu

SEQ ID NO: 83578 - RNA, 19 nt, Artificial Sequence
  Description of Artificial Sequence: Synthetic oligonucleotide
uuggaagcaaguguguaug

SEQ ID NO: 83579 - RNA, 19 nt, Artificial Sequence
  Description of Artificial Sequence: Synthetic oligonucleotide
gaauaaagauaaugaucau

SEQ ID NO: 83580 - RNA, 25 nt, Artificial Sequence
  Description of Artificial Sequence: Synthetic oligonucleotide
ggccgcagcuccccggcggaggcaa

SEQ ID NO: 83581 - RNA, 25 nt, Artificial Sequence
  Description of Artificial Sequence: Synthetic oligonucleotide
agaggugguugggggggaccauggc

SEQ ID NO: 83582 - RNA, 25 nt, Artificial Sequence
  Description of Artificial Sequence: Synthetic oligonucleotide
cugacguuuucccgggcaacgacuc

SEQ ID NO: 83583 - RNA, 25 nt, Artificial Sequence
  Description of Artificial Sequence: Synthetic oligonucleotide
ccacggcgucucaggacguggccaa

SEQ ID NO: 83584 - RNA, 25 nt, Artificial Sequence
  Description of Artificial Sequence: Synthetic oligonucleotide
accgcuucgcccgcaaaggggcgcu

SEQ ID NO: 83585 - RNA, 25 nt, Artificial Sequence
  Description of Artificial Sequence: Synthetic oligonucleotide
ugaggcagaagaacgugcacgaggu

SEQ ID NO: 83586 - RNA, 25 nt, Artificial Sequence
  Description of Artificial Sequence: Synthetic oligonucleotide
ugaaggaccacaaauucaucgcgcg

SEQ ID NO: 83587 - RNA, 25 nt, Artificial Sequence
  Description of Artificial Sequence: Synthetic oligonucleotide
gcuucuucaagcagcccaccuucug

SEQ ID NO: 83588 - RNA, 25 nt, Artificial Sequence
  Description of Artificial Sequence: Synthetic oligonucleotide
gcagccacugcaccgacuucaucug

SEQ ID NO: 83589 - RNA, 25 nt, Artificial Sequence
  Description of Artificial Sequence: Synthetic oligonucleotide
ggggguuugggaaacaaggcuucca

SEQ ID NO: 83590 - RNA, 25 nt, Artificial Sequence
  Description of Artificial Sequence: Synthetic oligonucleotide
agugccaaguuugcuguuuuguggu

SEQ ID NO: 83591 - RNA, 25 nt, Artificial Sequence
  Description of Artificial Sequence: Synthetic oligonucleotide
uccacaagaggugccaugaauuugu

SEQ ID NO: 83592 - RNA, 25 nt, Artificial Sequence
  Description of Artificial Sequence: Synthetic oligonucleotide
uuacuuuuucuuguccgggugcgga

SEQ ID NO: 83593 - RNA, 25 nt, Artificial Sequence
  Description of Artificial Sequence: Synthetic oligonucleotide
auaagggacccgacacugaugaccc

SEQ ID NO: 83594 - RNA, 25 nt, Artificial Sequence
  Description of Artificial Sequence: Synthetic oligonucleotide
ccaggagcaagcacaaguucaaaau

SEQ ID NO: 83595 - RNA, 25 nt, Artificial Sequence
  Description of Artificial Sequence: Synthetic oligonucleotide
uccacacuuacggaagccccaccuu

SEQ ID NO: 83596 - RNA, 25 nt, Artificial Sequence
  Description of Artificial Sequence: Synthetic oligonucleotide
ucugcgaucacugugggucacugcu

SEQ ID NO: 83597 - RNA, 25 nt, Artificial Sequence
  Description of Artificial Sequence: Synthetic oligonucleotide
ucuauggacuuauccaucaagggau

SEQ ID NO: 83598 - RNA, 25 nt, Artificial Sequence
  Description of Artificial Sequence: Synthetic oligonucleotide
ugaaaugugacaccugcgauaugaa

SEQ ID NO: 83599 - RNA, 25 nt, Artificial Sequence
  Description of Artificial Sequence: Synthetic oligonucleotide
acguucacaagcaaugcgucaucaa

SEQ ID NO: 83600 - RNA, 25 nt, Artificial Sequence
  Description of Artificial Sequence: Synthetic oligonucleotide
auguccccagccucugcggaaugga

SEQ ID NO: 83601 - RNA, 25 nt, Artificial Sequence
  Description of Artificial Sequence: Synthetic oligonucleotide
aucacacugagaagagggggcggau

SEQ ID NO: 83602 - RNA, 25 nt, Artificial Sequence
  Description of Artificial Sequence: Synthetic oligonucleotide
uuuaccuaaaggcugagguugcuga

SEQ ID NO: 83603 - RNA, 25 nt, Artificial Sequence
  Description of Artificial Sequence: Synthetic oligonucleotide
augaaaagcuccaugucacaguacg

SEQ ID NO: 83604 - RNA, 25 nt, Artificial Sequence
  Description of Artificial Sequence: Synthetic oligonucleotide
gagaugcaaaaaaucuaaucccuau

SEQ ID NO: 83605 - RNA, 25 nt, Artificial Sequence
  Description of Artificial Sequence: Synthetic oligonucleotide
uggauccaaacgggcuuucagaucc

SEQ ID NO: 83606 - RNA, 25 nt, Artificial Sequence
  Description of Artificial Sequence: Synthetic oligonucleotide
cuuaugugaagcugaaacuuauucc

SEQ ID NO: 83607 - RNA, 25 nt, Artificial Sequence
  Description of Artificial Sequence: Synthetic oligonucleotide
cugaucccaagaaugaaagcaagca

SEQ ID NO: 83608 - RNA, 25 nt, Artificial Sequence
  Description of Artificial Sequence: Synthetic oligonucleotide
aaaaaaccaaaaccauccgcuccac

SEQ ID NO: 83609 - RNA, 25 nt, Artificial Sequence
  Description of Artificial Sequence: Synthetic oligonucleotide
cacuaaauccgcaguggaaugaguc

SEQ ID NO: 83610 - RNA, 25 nt, Artificial Sequence
  Description of Artificial Sequence: Synthetic oligonucleotide
ccuuuacauucaaauugaaaccuuc

SEQ ID NO: 83611 - RNA, 25 nt, Artificial Sequence
  Description of Artificial Sequence: Synthetic oligonucleotide
cagacaaagaccgacgacugucugu

SEQ ID NO: 83612 - RNA, 25 nt, Artificial Sequence
  Description of Artificial Sequence: Synthetic oligonucleotide
uagaaaucugggacugggaucgaac

SEQ ID NO: 83613 - RNA, 25 nt, Artificial Sequence
  Description of Artificial Sequence: Synthetic oligonucleotide
caacaaggaaugacuucaugggauc

SEQ ID NO: 83614 - RNA, 25 nt, Artificial Sequence
  Description of Artificial Sequence: Synthetic oligonucleotide
cccuuuccuuuggaguuucggagcu

SEQ ID NO: 83615 - RNA, 25 nt, Artificial Sequence
  Description of Artificial Sequence: Synthetic oligonucleotide
ugaugaagaugccggccaguggaug

SEQ ID NO: 83616 - RNA, 25 nt, Artificial Sequence
  Description of Artificial Sequence: Synthetic oligonucleotide
gguacaaguugcuuaaccaagaaga

SEQ ID NO: 83617 - RNA, 25 nt, Artificial Sequence
  Description of Artificial Sequence: Synthetic oligonucleotide
aaggugaguacuacaacguacccau

SEQ ID NO: 83618 - RNA, 25 nt, Artificial Sequence
  Description of Artificial Sequence: Synthetic oligonucleotide
uuccggaaggggacgaggaaggaaa

SEQ ID NO: 83619 - RNA, 25 nt, Artificial Sequence
  Description of Artificial Sequence: Synthetic oligonucleotide
acauggaacucaggcagaaauucga

SEQ ID NO: 83620 - RNA, 25 nt, Artificial Sequence
  Description of Artificial Sequence: Synthetic oligonucleotide
agaaagccaaacuuggcccugcugg

SEQ ID NO: 83621 - RNA, 25 nt, Artificial Sequence
  Description of Artificial Sequence: Synthetic oligonucleotide
gcaacaaagucaucagucccucuga

SEQ ID NO: 83622 - RNA, 25 nt, Artificial Sequence
  Description of Artificial Sequence: Synthetic oligonucleotide
aagacaggaaacaaccuuccaacaa

SEQ ID NO: 83623 - RNA, 25 nt, Artificial Sequence
  Description of Artificial Sequence: Synthetic oligonucleotide
accuugaccgagugaaacucacgga

SEQ ID NO: 83624 - RNA, 25 nt, Artificial Sequence
  Description of Artificial Sequence: Synthetic oligonucleotide
acuucaauuuccucaugguguuggg

SEQ ID NO: 83625 - RNA, 25 nt, Artificial Sequence
  Description of Artificial Sequence: Synthetic oligonucleotide
gaaaggggaguuuuggaaaggugau

SEQ ID NO: 83626 - RNA, 25 nt, Artificial Sequence
  Description of Artificial Sequence: Synthetic oligonucleotide
ugcuugccgacaggaagggcacaga

SEQ ID NO: 83627 - RNA, 25 nt, Artificial Sequence
  Description of Artificial Sequence: Synthetic oligonucleotide
aagaacuguaugcaaucaaaauccu

SEQ ID NO: 83628 - RNA, 25 nt, Artificial Sequence
  Description of Artificial Sequence: Synthetic oligonucleotide
ugaagaaggauguggugauucagga

SEQ ID NO: 83629 - RNA, 25 nt, Artificial Sequence
  Description of Artificial Sequence: Synthetic oligonucleotide
augaugacguggagugcaccauggu

SEQ ID NO: 83630 - RNA, 25 nt, Artificial Sequence
  Description of Artificial Sequence: Synthetic oligonucleotide
uagaaaagcgagucuuggcccugcu

SEQ ID NO: 83631 - RNA, 25 nt, Artificial Sequence
  Description of Artificial Sequence: Synthetic oligonucleotide
uugacaaacccccguucuugacgca

SEQ ID NO: 83632 - RNA, 25 nt, Artificial Sequence
  Description of Artificial Sequence: Synthetic oligonucleotide
agcugcacuccugcuuccagacagu

SEQ ID NO: 83633 - RNA, 25 nt, Artificial Sequence
  Description of Artificial Sequence: Synthetic oligonucleotide
uggaucggcuguacuucgucaugga

SEQ ID NO: 83634 - RNA, 25 nt, Artificial Sequence
  Description of Artificial Sequence: Synthetic oligonucleotide
aauaugucaacgguggggaccucau

SEQ ID NO: 83635 - RNA, 25 nt, Artificial Sequence
  Description of Artificial Sequence: Synthetic oligonucleotide
uguaccacauucagcaaguaggaaa

SEQ ID NO: 83636 - RNA, 25 nt, Artificial Sequence
  Description of Artificial Sequence: Synthetic oligonucleotide
aauuuaaggaaccacaagcaguauu

SEQ ID NO: 83637 - RNA, 25 nt, Artificial Sequence
  Description of Artificial Sequence: Synthetic oligonucleotide
ucuaugcggcagagauuuccaucgg

SEQ ID NO: 83638 - RNA, 25 nt, Artificial Sequence
  Description of Artificial Sequence: Synthetic oligonucleotide
gauuguucuuucuucauaaaagagg

SEQ ID NO: 83639 - RNA, 25 nt, Artificial Sequence
  Description of Artificial Sequence: Synthetic oligonucleotide
gaaucauuuauagggaucugaaguu

SEQ ID NO: 83640 - RNA, 25 nt, Artificial Sequence
  Description of Artificial Sequence: Synthetic oligonucleotide
uagauaacgucauguuggauucaga

SEQ ID NO: 83641 - RNA, 25 nt, Artificial Sequence
  Description of Artificial Sequence: Synthetic oligonucleotide
aaggacauaucaaaauugcugacuu

SEQ ID NO: 83642 - RNA, 25 nt, Artificial Sequence
  Description of Artificial Sequence: Synthetic oligonucleotide
uugggaugugcaaggaacacaugau

SEQ ID NO: 83643 - RNA, 25 nt, Artificial Sequence
  Description of Artificial Sequence: Synthetic oligonucleotide
uggauggagucacgaccaggaccuu

SEQ ID NO: 83644 - RNA, 25 nt, Artificial Sequence
  Description of Artificial Sequence: Synthetic oligonucleotide
ucugugggacuccagauuauaucgc

SEQ ID NO: 83645 - RNA, 25 nt, Artificial Sequence
  Description of Artificial Sequence: Synthetic oligonucleotide
ccccagagauaaucgcuuaucagcc

SEQ ID NO: 83646 - RNA, 25 nt, Artificial Sequence
  Description of Artificial Sequence: Synthetic oligonucleotide
cguauggaaaaucuguggacuggug

SEQ ID NO: 83647 - RNA, 25 nt, Artificial Sequence
  Description of Artificial Sequence: Synthetic oligonucleotide
gggccuauggcguccuguuguauga

SEQ ID NO: 83648 - RNA, 25 nt, Artificial Sequence
  Description of Artificial Sequence: Synthetic oligonucleotide
aaaugcuugccgggcagccuccauu

SEQ ID NO: 83649 - RNA, 25 nt, Artificial Sequence
  Description of Artificial Sequence: Synthetic oligonucleotide
uugauggugaagaugaagacgagcu

SEQ ID NO: 83650 - RNA, 25 nt, Artificial Sequence
  Description of Artificial Sequence: Synthetic oligonucleotide
uauuucagucuaucauggagcacaa

SEQ ID NO: 83651 - RNA, 25 nt, Artificial Sequence
  Description of Artificial Sequence: Synthetic oligonucleotide
acguuuccuauccaaaauccuuguc

SEQ ID NO: 83652 - RNA, 25 nt, Artificial Sequence
  Description of Artificial Sequence: Synthetic oligonucleotide
ccaaggaggcuguuucuaucugcaa

SEQ ID NO: 83653 - RNA, 25 nt, Artificial Sequence
  Description of Artificial Sequence: Synthetic oligonucleotide
aaggacugaugaccaaacacccagc

SEQ ID NO: 83654 - RNA, 25 nt, Artificial Sequence
  Description of Artificial Sequence: Synthetic oligonucleotide
ccaagcggcugggcugugggccuga

SEQ ID NO: 83655 - RNA, 25 nt, Artificial Sequence
  Description of Artificial Sequence: Synthetic oligonucleotide
agggggagagggacgugagagagca

SEQ ID NO: 83656 - RNA, 25 nt, Artificial Sequence
  Description of Artificial Sequence: Synthetic oligonucleotide
augccuucuuccggaggaucgacug

SEQ ID NO: 83657 - RNA, 25 nt, Artificial Sequence
  Description of Artificial Sequence: Synthetic oligonucleotide
gggaaaaacuggagaacagggagau

SEQ ID NO: 83658 - RNA, 25 nt, Artificial Sequence
  Description of Artificial Sequence: Synthetic oligonucleotide
uccagccaccauucaagcccaaagu

SEQ ID NO: 83659 - RNA, 25 nt, Artificial Sequence
  Description of Artificial Sequence: Synthetic oligonucleotide
uguguggcaaaggagcagagaacuu

SEQ ID NO: 83660 - RNA, 25 nt, Artificial Sequence
  Description of Artificial Sequence: Synthetic oligonucleotide
uugacaaguucuucacacgaggaca

SEQ ID NO: 83661 - RNA, 25 nt, Artificial Sequence
  Description of Artificial Sequence: Synthetic oligonucleotide
agcccgucuuaacaccaccugauca

SEQ ID NO: 83662 - RNA, 25 nt, Artificial Sequence
  Description of Artificial Sequence: Synthetic oligonucleotide
agcugguuauugcuaacauagacca

SEQ ID NO: 83663 - RNA, 25 nt, Artificial Sequence
  Description of Artificial Sequence: Synthetic oligonucleotide
agucugauuuugaaggguucucgua

SEQ ID NO: 83664 - RNA, 25 nt, Artificial Sequence
  Description of Artificial Sequence: Synthetic oligonucleotide
augucaacccccaguuugugcaccc

SEQ ID NO: 83665 - RNA, 25 nt, Artificial Sequence
  Description of Artificial Sequence: Synthetic oligonucleotide
ccaucuuacagagugcaguaugaaa

SEQ ID NO: 83666 - RNA, 25 nt, Artificial Sequence
  Description of Artificial Sequence: Synthetic oligonucleotide
acucaccagcgagaacaaacaccuc

SEQ ID NO: 83667 - RNA, 25 nt, Artificial Sequence
  Description of Artificial Sequence: Synthetic oligonucleotide
ccccagcccccagcccuccccgcag

SEQ ID NO: 83668 - RNA, 25 nt, Artificial Sequence
  Description of Artificial Sequence: Synthetic oligonucleotide
gugggaagugaauccuuaacccuaa

SEQ ID NO: 83669 - RNA, 25 nt, Artificial Sequence
  Description of Artificial Sequence: Synthetic oligonucleotide
aaauuuuaaggccacggccuugugu

SEQ ID NO: 83670 - RNA, 25 nt, Artificial Sequence
  Description of Artificial Sequence: Synthetic oligonucleotide
ucugauuccauauggaggccugaaa

SEQ ID NO: 83671 - RNA, 25 nt, Artificial Sequence
  Description of Artificial Sequence: Synthetic oligonucleotide
aauuguaggguuauuaguccaaaug

SEQ ID NO: 83672 - RNA, 25 nt, Artificial Sequence
  Description of Artificial Sequence: Synthetic oligonucleotide
gugaucaacuguucagggucucucu

SEQ ID NO: 83673 - RNA, 25 nt, Artificial Sequence
  Description of Artificial Sequence: Synthetic oligonucleotide
ucuuacaaccaagaacauuaucuua

SEQ ID NO: 83674 - RNA, 25 nt, Artificial Sequence
  Description of Artificial Sequence: Synthetic oligonucleotide
aguggaagaugguacgucaugcuca

SEQ ID NO: 83675 - RNA, 25 nt, Artificial Sequence
  Description of Artificial Sequence: Synthetic oligonucleotide
aguguccaguuuaauucuguagaag

SEQ ID NO: 83676 - RNA, 25 nt, Artificial Sequence
  Description of Artificial Sequence: Synthetic oligonucleotide
guuacgucuggcucuagguuaaccc

SEQ ID NO: 83677 - RNA, 25 nt, Artificial Sequence
  Description of Artificial Sequence: Synthetic oligonucleotide
cuuccuagaaagcaagcagacuguu

SEQ ID NO: 83678 - RNA, 25 nt, Artificial Sequence
  Description of Artificial Sequence: Synthetic oligonucleotide
ugccccauuuuggguacaauuugau

SEQ ID NO: 83679 - RNA, 25 nt, Artificial Sequence
  Description of Artificial Sequence: Synthetic oligonucleotide
uauacuuuccauacccuccaucugu

SEQ ID NO: 83680 - RNA, 25 nt, Artificial Sequence
  Description of Artificial Sequence: Synthetic oligonucleotide
uggauuuuucagcauuggaaucccc

SEQ ID NO: 83681 - RNA, 25 nt, Artificial Sequence
  Description of Artificial Sequence: Synthetic oligonucleotide
ccaaccagagauguuaaagugagcc

SEQ ID NO: 83682 - RNA, 25 nt, Artificial Sequence
  Description of Artificial Sequence: Synthetic oligonucleotide
cugucccaggaaacaucuccaccca

SEQ ID NO: 83683 - RNA, 25 nt, Artificial Sequence
  Description of Artificial Sequence: Synthetic oligonucleotide
aagacgucuuuggaauccaagaaca

SEQ ID NO: 83684 - RNA, 25 nt, Artificial Sequence
  Description of Artificial Sequence: Synthetic oligonucleotide
aggaagccaagagagugagcaggga

SEQ ID NO: 83685 - RNA, 25 nt, Artificial Sequence
  Description of Artificial Sequence: Synthetic oligonucleotide
agggauugggggugggggaggccuc

SEQ ID NO: 83686 - RNA, 25 nt, Artificial Sequence
  Description of Artificial Sequence: Synthetic oligonucleotide
caaaauaccgacugcguccauucuc

SEQ ID NO: 83687 - RNA, 25 nt, Artificial Sequence
  Description of Artificial Sequence: Synthetic oligonucleotide
cugccuccauggaaacagccccuag

SEQ ID NO: 83688 - RNA, 25 nt, Artificial Sequence
  Description of Artificial Sequence: Synthetic oligonucleotide
gaaucugaaaggccgggauaaaccu

SEQ ID NO: 83689 - RNA, 25 nt, Artificial Sequence
  Description of Artificial Sequence: Synthetic oligonucleotide
uaaucacuguucccaaacauugaca

SEQ ID NO: 83690 - RNA, 25 nt, Artificial Sequence
  Description of Artificial Sequence: Synthetic oligonucleotide
aaauccuaacccaaccaugguccag

SEQ ID NO: 83691 - RNA, 25 nt, Artificial Sequence
  Description of Artificial Sequence: Synthetic oligonucleotide
gcaguuaccaguuuaaacaaaaaaa

SEQ ID NO: 83692 - RNA, 25 nt, Artificial Sequence
  Description of Artificial Sequence: Synthetic oligonucleotide
accucagaugaguguugggugaauc

SEQ ID NO: 83693 - RNA, 25 nt, Artificial Sequence
  Description of Artificial Sequence: Synthetic oligonucleotide
cugucaucugguacccuccuugguu

SEQ ID NO: 83694 - RNA, 25 nt, Artificial Sequence
  Description of Artificial Sequence: Synthetic oligonucleotide
ugauaacugucuugauacuuuucau

SEQ ID NO: 83695 - RNA, 25 nt, Artificial Sequence
  Description of Artificial Sequence: Synthetic oligonucleotide
uucuuuguaagaggccaaaucgucu

SEQ ID NO: 83696 - RNA, 25 nt, Artificial Sequence
  Description of Artificial Sequence: Synthetic oligonucleotide
uaaggacguugcugaacaagcgugu

SEQ ID NO: 83697 - RNA, 25 nt, Artificial Sequence
  Description of Artificial Sequence: Synthetic oligonucleotide
ugaaaucauuucagaucaaggauaa

SEQ ID NO: 83698 - RNA, 25 nt, Artificial Sequence
  Description of Artificial Sequence: Synthetic oligonucleotide
agccaguguguacauauguucauuu

SEQ ID NO: 83699 - RNA, 25 nt, Artificial Sequence
  Description of Artificial Sequence: Synthetic oligonucleotide
uuaaucucugggagauuauuuuucc

SEQ ID NO: 83700 - RNA, 25 nt, Artificial Sequence
  Description of Artificial Sequence: Synthetic oligonucleotide
cauccagggugccaucaguaaucau

SEQ ID NO: 83701 - RNA, 25 nt, Artificial Sequence
  Description of Artificial Sequence: Synthetic oligonucleotide
ugccacuacucaccaguguuguucg

SEQ ID NO: 83702 - RNA, 25 nt, Artificial Sequence
  Description of Artificial Sequence: Synthetic oligonucleotide
gccaacacccacccccacacacacc

SEQ ID NO: 83703 - RNA, 25 nt, Artificial Sequence
  Description of Artificial Sequence: Synthetic oligonucleotide
caacauuuugcugccuaccuuguua

SEQ ID NO: 83704 - RNA, 25 nt, Artificial Sequence
  Description of Artificial Sequence: Synthetic oligonucleotide
auccuucucaagaagcugaagugua

SEQ ID NO: 83705 - RNA, 25 nt, Artificial Sequence
  Description of Artificial Sequence: Synthetic oligonucleotide
acgcccucuccccuuuugugcuuau

SEQ ID NO: 83706 - RNA, 25 nt, Artificial Sequence
  Description of Artificial Sequence: Synthetic oligonucleotide
uuuauuuaauaggcugcagugucgc

SEQ ID NO: 83707 - RNA, 25 nt, Artificial Sequence
  Description of Artificial Sequence: Synthetic oligonucleotide
cuuaugaaaguacgauguacaguaa

SEQ ID NO: 83708 - RNA, 25 nt, Artificial Sequence
  Description of Artificial Sequence: Synthetic oligonucleotide
acuuaauggaagugcugacucuagc

SEQ ID NO: 83709 - RNA, 25 nt, Artificial Sequence
  Description of Artificial Sequence: Synthetic oligonucleotide
caucagccucuaccgauugauuuuc

SEQ ID NO: 83710 - RNA, 25 nt, Artificial Sequence
  Description of Artificial Sequence: Synthetic oligonucleotide
ccucccuucucuagcccuggauguc

SEQ ID NO: 83711 - RNA, 25 nt, Artificial Sequence
  Description of Artificial Sequence: Synthetic oligonucleotide
ccacuuagggauaaaaagaauaugg

SEQ ID NO: 83712 - RNA, 25 nt, Artificial Sequence
  Description of Artificial Sequence: Synthetic oligonucleotide
guuuugguucccauuucuaguucac

SEQ ID NO: 83713 - RNA, 25 nt, Artificial Sequence
  Description of Artificial Sequence: Synthetic oligonucleotide
cguugaaugacaggccuggagcugu

SEQ ID NO: 83714 - RNA, 25 nt, Artificial Sequence
  Description of Artificial Sequence: Synthetic oligonucleotide
uagaaucaggaaacccggaugccua

SEQ ID NO: 83715 - RNA, 25 nt, Artificial Sequence
  Description of Artificial Sequence: Synthetic oligonucleotide
aacagcucaaagauguuuuguuaau

SEQ ID NO: 83716 - RNA, 25 nt, Artificial Sequence
  Description of Artificial Sequence: Synthetic oligonucleotide
uagaaggauuuuaauacguuuugca

SEQ ID NO: 83717 - RNA, 25 nt, Artificial Sequence
  Description of Artificial Sequence: Synthetic oligonucleotide
aaaugcaucaugcaaugaauuuugc

SEQ ID NO: 83718 - RNA, 25 nt, Artificial Sequence
  Description of Artificial Sequence: Synthetic oligonucleotide
cauguuuauaauaaaccuuaauaac

SEQ ID NO: 83719 - RNA, 25 nt, Artificial Sequence
  Description of Artificial Sequence: Synthetic oligonucleotide
caagugaaucuauauuauugauaua

SEQ ID NO: 83720 - RNA, 25 nt, Artificial Sequence
  Description of Artificial Sequence: Synthetic oligonucleotide
aaucguaucaaguauaaagagagua

SEQ ID NO: 83721 - RNA, 25 nt, Artificial Sequence
  Description of Artificial Sequence: Synthetic oligonucleotide
auuauaauaauuuuauaagacacaa

SEQ ID NO: 83722 - RNA, 25 nt, Artificial Sequence
  Description of Artificial Sequence: Synthetic oligonucleotide
auugugcucuauuugugcagguucu

SEQ ID NO: 83723 - RNA, 25 nt, Artificial Sequence
  Description of Artificial Sequence: Synthetic oligonucleotide
uuguuucuaauccucuuuucuaauu

SEQ ID NO: 83724 - RNA, 25 nt, Artificial Sequence
  Description of Artificial Sequence: Synthetic oligonucleotide
uaaguuuuagcugaaucccuugcuu

SEQ ID NO: 83725 - RNA, 25 nt, Artificial Sequence
  Description of Artificial Sequence: Synthetic oligonucleotide
ucugugcuuucccucccugcacaug

SEQ ID NO: 83726 - RNA, 25 nt, Artificial Sequence
  Description of Artificial Sequence: Synthetic oligonucleotide
gggcacuguaucagauagauuacuu

SEQ ID NO: 83727 - RNA, 25 nt, Artificial Sequence
  Description of Artificial Sequence: Synthetic oligonucleotide
uuuuaaauguagauaaaauuucaaa

SEQ ID NO: 83728 - RNA, 25 nt, Artificial Sequence
  Description of Artificial Sequence: Synthetic oligonucleotide
aaaugaauggcuaguuuacgugaua

SEQ ID NO: 83729 - RNA, 25 nt, Artificial Sequence
  Description of Artificial Sequence: Synthetic oligonucleotide
agauuaggcucuuacuacauaugug

SEQ ID NO: 83730 - RNA, 25 nt, Artificial Sequence
  Description of Artificial Sequence: Synthetic oligonucleotide
guguguauauauauguauuugauuc

SEQ ID NO: 83731 - RNA, 25 nt, Artificial Sequence
  Description of Artificial Sequence: Synthetic oligonucleotide
cuaccugcaaacaaauuuuuauugg

SEQ ID NO: 83732 - RNA, 25 nt, Artificial Sequence
  Description of Artificial Sequence: Synthetic oligonucleotide
gugaggacuauuuuugagcugacac

SEQ ID NO: 83733 - RNA, 25 nt, Artificial Sequence
  Description of Artificial Sequence: Synthetic oligonucleotide
cucccucuuaguuucuucaugucac

SEQ ID NO: 83734 - RNA, 25 nt, Artificial Sequence
  Description of Artificial Sequence: Synthetic oligonucleotide
ccuuucguccugguuccuccgccac

SEQ ID NO: 83735 - RNA, 25 nt, Artificial Sequence
  Description of Artificial Sequence: Synthetic oligonucleotide
cucuuccucuuggggacaacaggaa

SEQ ID NO: 83736 - RNA, 25 nt, Artificial Sequence
  Description of Artificial Sequence: Synthetic oligonucleotide
agugucugauuccagucugccuagu

SEQ ID NO: 83737 - RNA, 25 nt, Artificial Sequence
  Description of Artificial Sequence: Synthetic oligonucleotide
uacguugguacacacguggcauugc

SEQ ID NO: 83738 - RNA, 25 nt, Artificial Sequence
  Description of Artificial Sequence: Synthetic oligonucleotide
ccgcagcaccugggcugaccuuugu

SEQ ID NO: 83739 - RNA, 25 nt, Artificial Sequence
  Description of Artificial Sequence: Synthetic oligonucleotide
ugugugcguguguguguguuuccuu

SEQ ID NO: 83740 - RNA, 25 nt, Artificial Sequence
  Description of Artificial Sequence: Synthetic oligonucleotide
ucuucccuucagccugugacuguug

SEQ ID NO: 83741 - RNA, 25 nt, Artificial Sequence
  Description of Artificial Sequence: Synthetic oligonucleotide
gcugacuccaggggugggagggaug

SEQ ID NO: 83742 - RNA, 25 nt, Artificial Sequence
  Description of Artificial Sequence: Synthetic oligonucleotide
ggggagacuccccucuugcugugug

SEQ ID NO: 83743 - RNA, 25 nt, Artificial Sequence
  Description of Artificial Sequence: Synthetic oligonucleotide
guacuggacacgcaggaagcaugcu

SEQ ID NO: 83744 - RNA, 25 nt, Artificial Sequence
  Description of Artificial Sequence: Synthetic oligonucleotide
ugucuugcugccucugcaacgaccu

SEQ ID NO: 83745 - RNA, 25 nt, Artificial Sequence
  Description of Artificial Sequence: Synthetic oligonucleotide
ugucguuugcuccagcaugcacaaa

SEQ ID NO: 83746 - RNA, 25 nt, Artificial Sequence
  Description of Artificial Sequence: Synthetic oligonucleotide
acuucgugagaccaacacagccgug

SEQ ID NO: 83747 - RNA, 25 nt, Artificial Sequence
  Description of Artificial Sequence: Synthetic oligonucleotide
gcccugcaggcaccagcacgugcuu

SEQ ID NO: 83748 - RNA, 25 nt, Artificial Sequence
  Description of Artificial Sequence: Synthetic oligonucleotide
uuucagaggcugcggacuuucuucc

SEQ ID NO: 83749 - RNA, 25 nt, Artificial Sequence
  Description of Artificial Sequence: Synthetic oligonucleotide
cagccauuguggcauuggccuuucc

SEQ ID NO: 83750 - RNA, 25 nt, Artificial Sequence
  Description of Artificial Sequence: Synthetic oligonucleotide
cagucuugggaggagcgcgcugcuu

SEQ ID NO: 83751 - RNA, 25 nt, Artificial Sequence
  Description of Artificial Sequence: Synthetic oligonucleotide
uuggugagacacccccaugcaaggu

SEQ ID NO: 83752 - RNA, 25 nt, Artificial Sequence
  Description of Artificial Sequence: Synthetic oligonucleotide
uccucagaguagccggguucuacca

SEQ ID NO: 83753 - RNA, 25 nt, Artificial Sequence
  Description of Artificial Sequence: Synthetic oligonucleotide
acaaacagaaacagaaugaaaguag

SEQ ID NO: 83754 - RNA, 25 nt, Artificial Sequence
  Description of Artificial Sequence: Synthetic oligonucleotide
gcugucaguccuuguagagagccgc

SEQ ID NO: 83755 - RNA, 25 nt, Artificial Sequence
  Description of Artificial Sequence: Synthetic oligonucleotide
cucuguuuccucccagaagcaucuc

SEQ ID NO: 83756 - RNA, 25 nt, Artificial Sequence
  Description of Artificial Sequence: Synthetic oligonucleotide
cccagcuaagcucgcauuauuuuuc

SEQ ID NO: 83757 - RNA, 25 nt, Artificial Sequence
  Description of Artificial Sequence: Synthetic oligonucleotide
cuccucuggcuguuugccugaaguu

SEQ ID NO: 83758 - RNA, 25 nt, Artificial Sequence
  Description of Artificial Sequence: Synthetic oligonucleotide
ucacagaacacacaaccaugaaagg

SEQ ID NO: 83759 - RNA, 25 nt, Artificial Sequence
  Description of Artificial Sequence: Synthetic oligonucleotide
gcuuuuugaggugagaggcccaggu

SEQ ID NO: 83760 - RNA, 25 nt, Artificial Sequence
  Description of Artificial Sequence: Synthetic oligonucleotide
ugguccuggcaacccugaguagaag

SEQ ID NO: 83761 - RNA, 25 nt, Artificial Sequence
  Description of Artificial Sequence: Synthetic oligonucleotide
ggagagacgggguagggaacgggcc

SEQ ID NO: 83762 - RNA, 25 nt, Artificial Sequence
  Description of Artificial Sequence: Synthetic oligonucleotide
ccggccagaaaagaaccauuucuuc

SEQ ID NO: 83763 - RNA, 25 nt, Artificial Sequence
  Description of Artificial Sequence: Synthetic oligonucleotide
cugccaucuuuuaugcaccauagac

SEQ ID NO: 83764 - RNA, 25 nt, Artificial Sequence
  Description of Artificial Sequence: Synthetic oligonucleotide
caucgagacuccaggggguccuggc

SEQ ID NO: 83765 - RNA, 25 nt, Artificial Sequence
  Description of Artificial Sequence: Synthetic oligonucleotide
cuccccugucccugcagcccugcag

SEQ ID NO: 83766 - RNA, 25 nt, Artificial Sequence
  Description of Artificial Sequence: Synthetic oligonucleotide
ggucagugcaugaucuggguucgug

SEQ ID NO: 83767 - RNA, 25 nt, Artificial Sequence
  Description of Artificial Sequence: Synthetic oligonucleotide
guccugaccaggugcuccuccuuug

SEQ ID NO: 83768 - RNA, 25 nt, Artificial Sequence
  Description of Artificial Sequence: Synthetic oligonucleotide
gauccgaggggaaagggacugguuu

SEQ ID NO: 83769 - RNA, 25 nt, Artificial Sequence
  Description of Artificial Sequence: Synthetic oligonucleotide
uauagaaagagccuaggagacaaaa

SEQ ID NO: 83770 - RNA, 25 nt, Artificial Sequence
  Description of Artificial Sequence: Synthetic oligonucleotide
agggccagucccccugcccagaaug

SEQ ID NO: 83771 - RNA, 25 nt, Artificial Sequence
  Description of Artificial Sequence: Synthetic oligonucleotide
ggagcagcagcaggacagaccccca

SEQ ID NO: 83772 - RNA, 25 nt, Artificial Sequence
  Description of Artificial Sequence: Synthetic oligonucleotide
acgaggccccccagagaggaggaag

SEQ ID NO: 83773 - RNA, 25 nt, Artificial Sequence
  Description of Artificial Sequence: Synthetic oligonucleotide
gaucccacggaggaacacaugaggu

SEQ ID NO: 83774 - RNA, 25 nt, Artificial Sequence
  Description of Artificial Sequence: Synthetic oligonucleotide
uuagggacccuuguucagcacccca

SEQ ID NO: 83775 - RNA, 25 nt, Artificial Sequence
  Description of Artificial Sequence: Synthetic oligonucleotide
aaacagccugccuguuuaaagcagg

SEQ ID NO: 83776 - RNA, 25 nt, Artificial Sequence
  Description of Artificial Sequence: Synthetic oligonucleotide
gcagcaggcuuaggccuucccugca

SEQ ID NO: 83777 - RNA, 25 nt, Artificial Sequence
  Description of Artificial Sequence: Synthetic oligonucleotide
aaccccaacacccacaaguuuguuu

SEQ ID NO: 83778 - RNA, 25 nt, Artificial Sequence
  Description of Artificial Sequence: Synthetic oligonucleotide
ucucuaggaaacacauucacugucu

SEQ ID NO: 83779 - RNA, 25 nt, Artificial Sequence
  Description of Artificial Sequence: Synthetic oligonucleotide
ucagcuggcuguuacucucucagac

SEQ ID NO: 83780 - RNA, 25 nt, Artificial Sequence
  Description of Artificial Sequence: Synthetic oligonucleotide
ccauauggcaaaguuuuccaagaaa

SEQ ID NO: 83781 - RNA, 25 nt, Artificial Sequence
  Description of Artificial Sequence: Synthetic oligonucleotide
aaugccccgacaggggugcccagca

SEQ ID NO: 83782 - RNA, 25 nt, Artificial Sequence
  Description of Artificial Sequence: Synthetic oligonucleotide
acacugccugagggacaacagacau

SEQ ID NO: 83783 - RNA, 25 nt, Artificial Sequence
  Description of Artificial Sequence: Synthetic oligonucleotide
ucagaacaaacccccagagagaaac

SEQ ID NO: 83784 - RNA, 25 nt, Artificial Sequence
  Description of Artificial Sequence: Synthetic oligonucleotide
cagucaaaaucagggcccggugcag

SEQ ID NO: 83785 - RNA, 25 nt, Artificial Sequence
  Description of Artificial Sequence: Synthetic oligonucleotide
guguugucauguggaaccugcuuua

SEQ ID NO: 83786 - RNA, 25 nt, Artificial Sequence
  Description of Artificial Sequence: Synthetic oligonucleotide
auccauugcugaguguugaaugugg

SEQ ID NO: 83787 - RNA, 25 nt, Artificial Sequence
  Description of Artificial Sequence: Synthetic oligonucleotide
gguaaugguuagggcuuuccagauc

SEQ ID NO: 83788 - RNA, 25 nt, Artificial Sequence
  Description of Artificial Sequence: Synthetic oligonucleotide
cucagcagccaaagacaguuauugu

SEQ ID NO: 83789 - RNA, 25 nt, Artificial Sequence
  Description of Artificial Sequence: Synthetic oligonucleotide
uuggaagacugucauguagauaacc

SEQ ID NO: 83790 - RNA, 25 nt, Artificial Sequence
  Description of Artificial Sequence: Synthetic oligonucleotide
caugagcaauggcucgccucagaau

SEQ ID NO: 83791 - RNA, 25 nt, Artificial Sequence
  Description of Artificial Sequence: Synthetic oligonucleotide
ucaguucauaaaauucuaugguacu

SEQ ID NO: 83792 - RNA, 25 nt, Artificial Sequence
  Description of Artificial Sequence: Synthetic oligonucleotide
uggccccuucguggguauuguguga

SEQ ID NO: 83793 - RNA, 25 nt, Artificial Sequence
  Description of Artificial Sequence: Synthetic oligonucleotide
aaaugagaugguggcgaggggugcg

SEQ ID NO: 83794 - RNA, 25 nt, Artificial Sequence
  Description of Artificial Sequence: Synthetic oligonucleotide
gcuguggaacugccgcagccacgca

SEQ ID NO: 83795 - RNA, 25 nt, Artificial Sequence
  Description of Artificial Sequence: Synthetic oligonucleotide
aggaggucccugggggaugcuuugg

SEQ ID NO: 83796 - RNA, 25 nt, Artificial Sequence
  Description of Artificial Sequence: Synthetic oligonucleotide
ggaaguccuugccccugagcacugc

SEQ ID NO: 83797 - RNA, 25 nt, Artificial Sequence
  Description of Artificial Sequence: Synthetic oligonucleotide
ccugauugccagggccuguggaggu

SEQ ID NO: 83798 - RNA, 25 nt, Artificial Sequence
  Description of Artificial Sequence: Synthetic oligonucleotide
ucuaggccgccuggcagaaucuagc

SEQ ID NO: 83799 - RNA, 25 nt, Artificial Sequence
  Description of Artificial Sequence: Synthetic oligonucleotide
caccguccgaauccccgcaggaccc

SEQ ID NO: 83800 - RNA, 25 nt, Artificial Sequence
  Description of Artificial Sequence: Synthetic oligonucleotide
cauggagcuaugaccacaccaggcc

SEQ ID NO: 83801 - RNA, 25 nt, Artificial Sequence
  Description of Artificial Sequence: Synthetic oligonucleotide
cauucaaauggcucugcauuaucuu

SEQ ID NO: 83802 - RNA, 25 nt, Artificial Sequence
  Description of Artificial Sequence: Synthetic oligonucleotide
ucccuuggaagguggccacuccucg

SEQ ID NO: 83803 - RNA, 25 nt, Artificial Sequence
  Description of Artificial Sequence: Synthetic oligonucleotide
gguggcagggccuuucccugaggcu

SEQ ID NO: 83804 - RNA, 25 nt, Artificial Sequence
  Description of Artificial Sequence: Synthetic oligonucleotide
ugcaggccgugggcuggcagcccgu

SEQ ID NO: 83805 - RNA, 25 nt, Artificial Sequence
  Description of Artificial Sequence: Synthetic oligonucleotide
ucucuuggcauuucaauugaagguc

SEQ ID NO: 83806 - RNA, 25 nt, Artificial Sequence
  Description of Artificial Sequence: Synthetic oligonucleotide
caccaggugcuggguuugaaaggaa

SEQ ID NO: 83807 - RNA, 25 nt, Artificial Sequence
  Description of Artificial Sequence: Synthetic oligonucleotide
agucacuggagugcugccaggggcc

SEQ ID NO: 83808 - RNA, 25 nt, Artificial Sequence
  Description of Artificial Sequence: Synthetic oligonucleotide
cgcccuccaagguuaaugagaggcc

SEQ ID NO: 83809 - RNA, 25 nt, Artificial Sequence
  Description of Artificial Sequence: Synthetic oligonucleotide
ccacauccaggcaagaacuaauuca

SEQ ID NO: 83810 - RNA, 25 nt, Artificial Sequence
  Description of Artificial Sequence: Synthetic oligonucleotide
aaaaggcagaucagaaaccacagga

SEQ ID NO: 83811 - RNA, 25 nt, Artificial Sequence
  Description of Artificial Sequence: Synthetic oligonucleotide
agucaaaauuauugcuccggcagug

SEQ ID NO: 83812 - RNA, 25 nt, Artificial Sequence
  Description of Artificial Sequence: Synthetic oligonucleotide
gcuucccuuccuuucauccacuggc

SEQ ID NO: 83813 - RNA, 25 nt, Artificial Sequence
  Description of Artificial Sequence: Synthetic oligonucleotide
ccucgugugguccaugcagggccac

SEQ ID NO: 83814 - RNA, 25 nt, Artificial Sequence
  Description of Artificial Sequence: Synthetic oligonucleotide
cugucugcccuuucugaugccacgu

SEQ ID NO: 83815 - RNA, 25 nt, Artificial Sequence
  Description of Artificial Sequence: Synthetic oligonucleotide
uauuaggcuuucuuacucagaauuu

SEQ ID NO: 83816 - RNA, 25 nt, Artificial Sequence
  Description of Artificial Sequence: Synthetic oligonucleotide
uugauagaaaaccauggggccaaga

SEQ ID NO: 83817 - RNA, 25 nt, Artificial Sequence
  Description of Artificial Sequence: Synthetic oligonucleotide
agcucuggaagccuggccggaaaga

SEQ ID NO: 83818 - RNA, 25 nt, Artificial Sequence
  Description of Artificial Sequence: Synthetic oligonucleotide
accaagguucaugcagcccaacaaa

SEQ ID NO: 83819 - RNA, 25 nt, Artificial Sequence
  Description of Artificial Sequence: Synthetic oligonucleotide
augauuguugagcaccucucggagc

SEQ ID NO: 83820 - RNA, 25 nt, Artificial Sequence
  Description of Artificial Sequence: Synthetic oligonucleotide
ccaaaguccuuaggcgaguguggug

SEQ ID NO: 83821 - RNA, 25 nt, Artificial Sequence
  Description of Artificial Sequence: Synthetic oligonucleotide
gacuuccuggaaggaggaugcagac

SEQ ID NO: 83822 - RNA, 25 nt, Artificial Sequence
  Description of Artificial Sequence: Synthetic oligonucleotide
cuuccagagagcccccccaacggac

SEQ ID NO: 83823 - RNA, 25 nt, Artificial Sequence
  Description of Artificial Sequence: Synthetic oligonucleotide
cgugcugagaagggagagggaggcg

SEQ ID NO: 83824 - RNA, 25 nt, Artificial Sequence
  Description of Artificial Sequence: Synthetic oligonucleotide
gggggcuguagucaggaaggagcca

SEQ ID NO: 83825 - RNA, 25 nt, Artificial Sequence
  Description of Artificial Sequence: Synthetic oligonucleotide
agagaagaacaggguuugggugcau

SEQ ID NO: 83826 - RNA, 25 nt, Artificial Sequence
  Description of Artificial Sequence: Synthetic oligonucleotide
uccagaaauaugccugcaguaggag

SEQ ID NO: 83827 - RNA, 25 nt, Artificial Sequence
  Description of Artificial Sequence: Synthetic oligonucleotide
gggagaggaaggggugccaccguca

SEQ ID NO: 83828 - RNA, 25 nt, Artificial Sequence
  Description of Artificial Sequence: Synthetic oligonucleotide
aacggcuucccaucggaggugguug

SEQ ID NO: 83829 - RNA, 25 nt, Artificial Sequence
  Description of Artificial Sequence: Synthetic oligonucleotide
ggugcagauggaaguuucugucugc

SEQ ID NO: 83830 - RNA, 25 nt, Artificial Sequence
  Description of Artificial Sequence: Synthetic oligonucleotide
cuggcccucaagagaguguuuugcc

SEQ ID NO: 83831 - RNA, 25 nt, Artificial Sequence
  Description of Artificial Sequence: Synthetic oligonucleotide
cagggacacagucuguuccuccuca

SEQ ID NO: 83832 - RNA, 25 nt, Artificial Sequence
  Description of Artificial Sequence: Synthetic oligonucleotide
agaaaacaccccccaaaugcuaaca

SEQ ID NO: 83833 - RNA, 25 nt, Artificial Sequence
  Description of Artificial Sequence: Synthetic oligonucleotide
aacauccccaccagcugcuagaagc

SEQ ID NO: 83834 - RNA, 25 nt, Artificial Sequence
  Description of Artificial Sequence: Synthetic oligonucleotide
ccccuuuccccuccccaccuugaag

SEQ ID NO: 83835 - RNA, 25 nt, Artificial Sequence
  Description of Artificial Sequence: Synthetic oligonucleotide
guagcucauaguucucugggcagag

SEQ ID NO: 83836 - RNA, 25 nt, Artificial Sequence
  Description of Artificial Sequence: Synthetic oligonucleotide
gccagaccauccaguguaccccaga

SEQ ID NO: 83837 - RNA, 25 nt, Artificial Sequence
  Description of Artificial Sequence: Synthetic oligonucleotide
aggccaguagguuccugcccauuuu

SEQ ID NO: 83838 - RNA, 25 nt, Artificial Sequence
  Description of Artificial Sequence: Synthetic oligonucleotide
uccucucuggcuuccugccaagaau

SEQ ID NO: 83839 - RNA, 25 nt, Artificial Sequence
  Description of Artificial Sequence: Synthetic oligonucleotide
uuauggcagcugaggaugaauggag

SEQ ID NO: 83840 - RNA, 25 nt, Artificial Sequence
  Description of Artificial Sequence: Synthetic oligonucleotide
gaaguaaaaacaacuaacaccgcac

SEQ ID NO: 83841 - RNA, 25 nt, Artificial Sequence
  Description of Artificial Sequence: Synthetic oligonucleotide
caacuaacaacuaacaccgcaguuc

SEQ ID NO: 83842 - RNA, 25 nt, Artificial Sequence
  Description of Artificial Sequence: Synthetic oligonucleotide
cccaccuggguuccacuuagcagga

SEQ ID NO: 83843 - RNA, 25 nt, Artificial Sequence
  Description of Artificial Sequence: Synthetic oligonucleotide
agacauuucggaggguuuuuuuugu

SEQ ID NO: 83844 - RNA, 25 nt, Artificial Sequence
  Description of Artificial Sequence: Synthetic oligonucleotide
uugcuggaauuuguuuucucaguac

SEQ ID NO: 83845 - RNA, 25 nt, Artificial Sequence
  Description of Artificial Sequence: Synthetic oligonucleotide
cugaaaagagaaaaagugacaaucu

SEQ ID NO: 83846 - RNA, 25 nt, Artificial Sequence
  Description of Artificial Sequence: Synthetic oligonucleotide
uuguauuuuuaaaagccucggaaag

SEQ ID NO: 83847 - RNA, 25 nt, Artificial Sequence
  Description of Artificial Sequence: Synthetic oligonucleotide
ggugauaccaucugacagucauuuu

SEQ ID NO: 83848 - RNA, 25 nt, Artificial Sequence
  Description of Artificial Sequence: Synthetic oligonucleotide
ucucacguuggucuucuaaagucac

SEQ ID NO: 83849 - RNA, 25 nt, Artificial Sequence
  Description of Artificial Sequence: Synthetic oligonucleotide
ccuauuucuugugugugcacaucac

SEQ ID NO: 83850 - RNA, 25 nt, Artificial Sequence
  Description of Artificial Sequence: Synthetic oligonucleotide
caccauuuccuguuucuuuauaacc

SEQ ID NO: 83851 - RNA, 25 nt, Artificial Sequence
  Description of Artificial Sequence: Synthetic oligonucleotide
ccgacaaggguaggagugccuguuu

SEQ ID NO: 83852 - RNA, 25 nt, Artificial Sequence
  Description of Artificial Sequence: Synthetic oligonucleotide
uccccugcugggcacaccagacaau

SEQ ID NO: 83853 - RNA, 25 nt, Artificial Sequence
  Description of Artificial Sequence: Synthetic oligonucleotide
ucguaaucacaaaacagacacugag

SEQ ID NO: 83854 - RNA, 25 nt, Artificial Sequence
  Description of Artificial Sequence: Synthetic oligonucleotide
gccaggggcccaaagggugugauca

SEQ ID NO: 83855 - RNA, 25 nt, Artificial Sequence
  Description of Artificial Sequence: Synthetic oligonucleotide
augagaguuaccgggacagcaguag

SEQ ID NO: 83856 - RNA, 25 nt, Artificial Sequence
  Description of Artificial Sequence: Synthetic oligonucleotide
ggcaugacagucaccaggaaggaca

SEQ ID NO: 83857 - RNA, 25 nt, Artificial Sequence
  Description of Artificial Sequence: Synthetic oligonucleotide
aagggugcucuguuguuaguggcca

SEQ ID NO: 83858 - RNA, 25 nt, Artificial Sequence
  Description of Artificial Sequence: Synthetic oligonucleotide
acacaccaauuugacaaggaguguu

SEQ ID NO: 83859 - RNA, 25 nt, Artificial Sequence
  Description of Artificial Sequence: Synthetic oligonucleotide
ugcgaaauuuuuauuuauuuauuua

SEQ ID NO: 83860 - RNA, 25 nt, Artificial Sequence
  Description of Artificial Sequence: Synthetic oligonucleotide
auuuauuuugagauggaguuucacu

SEQ ID NO: 83861 - RNA, 25 nt, Artificial Sequence
  Description of Artificial Sequence: Synthetic oligonucleotide
ucuuguugcccaggcuggagugcgg

SEQ ID NO: 83862 - RNA, 25 nt, Artificial Sequence
  Description of Artificial Sequence: Synthetic oligonucleotide
gugguacaaucucggcucacugcaa

SEQ ID NO: 83863 - RNA, 25 nt, Artificial Sequence
  Description of Artificial Sequence: Synthetic oligonucleotide
accuccaccucccagguucaagcga

SEQ ID NO: 83864 - RNA, 25 nt, Artificial Sequence
  Description of Artificial Sequence: Synthetic oligonucleotide
auucuccugccucagccucccaagu

SEQ ID NO: 83865 - RNA, 25 nt, Artificial Sequence
  Description of Artificial Sequence: Synthetic oligonucleotide
uaccugggacuacaggugcgugcca

SEQ ID NO: 83866 - RNA, 25 nt, Artificial Sequence
  Description of Artificial Sequence: Synthetic oligonucleotide
accacacccagcuaaauuuuguguu

SEQ ID NO: 83867 - RNA, 25 nt, Artificial Sequence
  Description of Artificial Sequence: Synthetic oligonucleotide
uuuuaguagagaugggguuucacca

SEQ ID NO: 83868 - RNA, 25 nt, Artificial Sequence
  Description of Artificial Sequence: Synthetic oligonucleotide
auguuggccaggauggucuugaacc

SEQ ID NO: 83869 - RNA, 25 nt, Artificial Sequence
  Description of Artificial Sequence: Synthetic oligonucleotide
cccugaccucaugaucugccugccu

SEQ ID NO: 83870 - RNA, 25 nt, Artificial Sequence
  Description of Artificial Sequence: Synthetic oligonucleotide
ucggccucccaaagugcugggauua

SEQ ID NO: 83871 - RNA, 25 nt, Artificial Sequence
  Description of Artificial Sequence: Synthetic oligonucleotide
acaggcaugagccaccacgcccagc

SEQ ID NO: 83872 - RNA, 25 nt, Artificial Sequence
  Description of Artificial Sequence: Synthetic oligonucleotide
ccaaaauauuuuuuuaaagucauuu

SEQ ID NO: 83873 - RNA, 25 nt, Artificial Sequence
  Description of Artificial Sequence: Synthetic oligonucleotide
uuccuuaagcugcuugggcuacaug

SEQ ID NO: 83874 - RNA, 25 nt, Artificial Sequence
  Description of Artificial Sequence: Synthetic oligonucleotide
gugaaauacacuggacggucaacau

SEQ ID NO: 83875 - RNA, 25 nt, Artificial Sequence
  Description of Artificial Sequence: Synthetic oligonucleotide
uuccugucuccucccauuugggcug

SEQ ID NO: 83876 - RNA, 25 nt, Artificial Sequence
  Description of Artificial Sequence: Synthetic oligonucleotide
gaugcagcagauccagggaauguua

SEQ ID NO: 83877 - RNA, 25 nt, Artificial Sequence
  Description of Artificial Sequence: Synthetic oligonucleotide
accuguuucugcugcuagaagaucc

SEQ ID NO: 83878 - RNA, 25 nt, Artificial Sequence
  Description of Artificial Sequence: Synthetic oligonucleotide
caggaaauugggaagguuaccugac

SEQ ID NO: 83879 - RNA, 25 nt, Artificial Sequence
  Description of Artificial Sequence: Synthetic oligonucleotide
cgcacacauggaugaaggccaucau

SEQ ID NO: 83880 - RNA, 25 nt, Artificial Sequence
  Description of Artificial Sequence: Synthetic oligonucleotide
ucuagaaauggggucaaccacaauu

SEQ ID NO: 83881 - RNA, 25 nt, Artificial Sequence
  Description of Artificial Sequence: Synthetic oligonucleotide
uguguuaauuccguagugucaggga

SEQ ID NO: 83882 - RNA, 25 nt, Artificial Sequence
  Description of Artificial Sequence: Synthetic oligonucleotide
auucuucgggaaggucaacaguaug

SEQ ID NO: 83883 - RNA, 25 nt, Artificial Sequence
  Description of Artificial Sequence: Synthetic oligonucleotide
gaaggauucugaccccugugccucc

SEQ ID NO: 83884 - RNA, 25 nt, Artificial Sequence
  Description of Artificial Sequence: Synthetic oligonucleotide
ccauuuaugugaucaggugacaguu

SEQ ID NO: 83885 - RNA, 25 nt, Artificial Sequence
  Description of Artificial Sequence: Synthetic oligonucleotide
uaauaaccguggaggucacacucag

SEQ ID NO: 83886 - RNA, 25 nt, Artificial Sequence
  Description of Artificial Sequence: Synthetic oligonucleotide
gccauccaacagccuuacagugacc

SEQ ID NO: 83887 - RNA, 25 nt, Artificial Sequence
  Description of Artificial Sequence: Synthetic oligonucleotide
ccuacacaaaagcccccaaauucca

SEQ ID NO: 83888 - RNA, 25 nt, Artificial Sequence
  Description of Artificial Sequence: Synthetic oligonucleotide
aaagacuuuuucuuaaccuaaagga

SEQ ID NO: 83889 - RNA, 25 nt, Artificial Sequence
  Description of Artificial Sequence: Synthetic oligonucleotide
aagaaauuauuuguuaauuccagua

SEQ ID NO: 83890 - RNA, 25 nt, Artificial Sequence
  Description of Artificial Sequence: Synthetic oligonucleotide
agagcaacugaauauacugggcuau

SEQ ID NO: 83891 - RNA, 25 nt, Artificial Sequence
  Description of Artificial Sequence: Synthetic oligonucleotide
uuuguacuuuuuuauagagaacuuu

SEQ ID NO: 83892 - RNA, 25 nt, Artificial Sequence
  Description of Artificial Sequence: Synthetic oligonucleotide
uaauaauaauucuuuaaaaaugagu

SEQ ID NO: 83893 - RNA, 25 nt, Artificial Sequence
  Description of Artificial Sequence: Synthetic oligonucleotide
uuuuuagaacaaagcaacugacgau

SEQ ID NO: 83894 - RNA, 25 nt, Artificial Sequence
  Description of Artificial Sequence: Synthetic oligonucleotide
uuuccuaagauuccaaugcccugga

SEQ ID NO: 83895 - RNA, 25 nt, Artificial Sequence
  Description of Artificial Sequence: Synthetic oligonucleotide
agcuuguaggaggacuuagccuggg

SEQ ID NO: 83896 - RNA, 25 nt, Artificial Sequence
  Description of Artificial Sequence: Synthetic oligonucleotide
gucagcuggagcacccccgaccuga

SEQ ID NO: 83897 - RNA, 25 nt, Artificial Sequence
  Description of Artificial Sequence: Synthetic oligonucleotide
aucucccacugccagauuuucccau

SEQ ID NO: 83898 - RNA, 25 nt, Artificial Sequence
  Description of Artificial Sequence: Synthetic oligonucleotide
ugcuccuaggguauggaguccacgu

SEQ ID NO: 83899 - RNA, 25 nt, Artificial Sequence
  Description of Artificial Sequence: Synthetic oligonucleotide
ugggaaugacugcaaguucaggugg

SEQ ID NO: 83900 - RNA, 25 nt, Artificial Sequence
  Description of Artificial Sequence: Synthetic oligonucleotide
gaacuuggccgacugaugcucugcg

SEQ ID NO: 83901 - RNA, 25 nt, Artificial Sequence
  Description of Artificial Sequence: Synthetic oligonucleotide
gaguuuuuaauagacacuggggaca

SEQ ID NO: 83902 - RNA, 25 nt, Artificial Sequence
  Description of Artificial Sequence: Synthetic oligonucleotide
aacugcuuaagguuuagaaacuucc

SEQ ID NO: 83903 - RNA, 25 nt, Artificial Sequence
  Description of Artificial Sequence: Synthetic oligonucleotide
caaaccacaggaaagacauuuuuag

SEQ ID NO: 83904 - RNA, 25 nt, Artificial Sequence
  Description of Artificial Sequence: Synthetic oligonucleotide
gugucccccauccagaggcagcccu

SEQ ID NO: 83905 - RNA, 25 nt, Artificial Sequence
  Description of Artificial Sequence: Synthetic oligonucleotide
uggaauaggauucccagggguuucu

SEQ ID NO: 83906 - RNA, 25 nt, Artificial Sequence
  Description of Artificial Sequence: Synthetic oligonucleotide
ugggaccccuuuccuugcuccguga

SEQ ID NO: 83907 - RNA, 25 nt, Artificial Sequence
  Description of Artificial Sequence: Synthetic oligonucleotide
aggcucuguggccaucuuuuggcag

SEQ ID NO: 83908 - RNA, 25 nt, Artificial Sequence
  Description of Artificial Sequence: Synthetic oligonucleotide
ggaggaggaugcuuccuuggcucug

SEQ ID NO: 83909 - RNA, 25 nt, Artificial Sequence
  Description of Artificial Sequence: Synthetic oligonucleotide
gugcccagacccgccugguccccag

SEQ ID NO: 83910 - RNA, 25 nt, Artificial Sequence
  Description of Artificial Sequence: Synthetic oligonucleotide
ggucucucaccuugggugaagauuc

SEQ ID NO: 83911 - RNA, 25 nt, Artificial Sequence
  Description of Artificial Sequence: Synthetic oligonucleotide
cagagaugcccuguaaggauuuugc

SEQ ID NO: 83912 - RNA, 25 nt, Artificial Sequence
  Description of Artificial Sequence: Synthetic oligonucleotide
cccacugggcaacucagaaauacuu

SEQ ID NO: 83913 - RNA, 25 nt, Artificial Sequence
  Description of Artificial Sequence: Synthetic oligonucleotide
ucgaucucccaagauauaagaggca

SEQ ID NO: 83914 - RNA, 25 nt, Artificial Sequence
  Description of Artificial Sequence: Synthetic oligonucleotide
agcagcaaacgugccuauugacguc

SEQ ID NO: 83915 - RNA, 25 nt, Artificial Sequence
  Description of Artificial Sequence: Synthetic oligonucleotide
cuguuucauaguuaccacuuacgcg

SEQ ID NO: 83916 - RNA, 25 nt, Artificial Sequence
  Description of Artificial Sequence: Synthetic oligonucleotide
gaguagacagaacucggcuuuucag

SEQ ID NO: 83917 - RNA, 25 nt, Artificial Sequence
  Description of Artificial Sequence: Synthetic oligonucleotide
gaaaauaggugucaaguccacuuua

SEQ ID NO: 83918 - RNA, 25 nt, Artificial Sequence
  Description of Artificial Sequence: Synthetic oligonucleotide
auaagaaccuuuuuuucuaaaauaa

SEQ ID NO: 83919 - RNA, 25 nt, Artificial Sequence
  Description of Artificial Sequence: Synthetic oligonucleotide
agauaaaagguggcuuugcauuuuc

SEQ ID NO: 83920 - RNA, 25 nt, Artificial Sequence
  Description of Artificial Sequence: Synthetic oligonucleotide
cugauuaaacgacugugucuuuguc

SEQ ID NO: 83921 - RNA, 25 nt, Artificial Sequence
  Description of Artificial Sequence: Synthetic oligonucleotide
caccucugcuuaacuuuaggaguau

SEQ ID NO: 83922 - RNA, 25 nt, Artificial Sequence
  Description of Artificial Sequence: Synthetic oligonucleotide
uccauuccugugauuguagacuuuu

SEQ ID NO: 83923 - RNA, 25 nt, Artificial Sequence
  Description of Artificial Sequence: Synthetic oligonucleotide
uguugauauucuuccuggaagaaua

SEQ ID NO: 83924 - RNA, 25 nt, Artificial Sequence
  Description of Artificial Sequence: Synthetic oligonucleotide
aucauucuuuucuugaaggguuggu

SEQ ID NO: 83925 - RNA, 25 nt, Artificial Sequence
  Description of Artificial Sequence: Synthetic oligonucleotide
uuuacuagaauauucaaaaucaauc

SEQ ID NO: 83926 - RNA, 25 nt, Artificial Sequence
  Description of Artificial Sequence: Synthetic oligonucleotide
caugaaggcaguuacuauuuugagu

SEQ ID NO: 83927 - RNA, 25 nt, Artificial Sequence
  Description of Artificial Sequence: Synthetic oligonucleotide
ucuaaagguuuucuaaaaauuaacc

SEQ ID NO: 83928 - RNA, 25 nt, Artificial Sequence
  Description of Artificial Sequence: Synthetic oligonucleotide
cucacaucccuucuguuagggucuu

SEQ ID NO: 83929 - RNA, 25 nt, Artificial Sequence
  Description of Artificial Sequence: Synthetic oligonucleotide
uucagaauaucuuuuauaaacagaa

SEQ ID NO: 83930 - RNA, 25 nt, Artificial Sequence
  Description of Artificial Sequence: Synthetic oligonucleotide
agcauuugaagucauugcuuuugcu

SEQ ID NO: 83931 - RNA, 25 nt, Artificial Sequence
  Description of Artificial Sequence: Synthetic oligonucleotide
uacaugauuugugugugugaaggac

SEQ ID NO: 83932 - RNA, 25 nt, Artificial Sequence
  Description of Artificial Sequence: Synthetic oligonucleotide
cauaccacguuuaaaucauuaauug

SEQ ID NO: 83933 - RNA, 25 nt, Artificial Sequence
  Description of Artificial Sequence: Synthetic oligonucleotide
gaaaaacaucauauaagccccaacu

SEQ ID NO: 83934 - RNA, 25 nt, Artificial Sequence
  Description of Artificial Sequence: Synthetic oligonucleotide
uuuguuuggaggaagagacggaggu

SEQ ID NO: 83935 - RNA, 25 nt, Artificial Sequence
  Description of Artificial Sequence: Synthetic oligonucleotide
uugagguuuuuccuucuguauaagc

SEQ ID NO: 83936 - RNA, 25 nt, Artificial Sequence
  Description of Artificial Sequence: Synthetic oligonucleotide
caccuacugacaaaauguagaggcc

SEQ ID NO: 83937 - RNA, 25 nt, Artificial Sequence
  Description of Artificial Sequence: Synthetic oligonucleotide
cauucaaccgucaaacaccauuugg

SEQ ID NO: 83938 - RNA, 25 nt, Artificial Sequence
  Description of Artificial Sequence: Synthetic oligonucleotide
guuauaucgcagaggagacggaugu

SEQ ID NO: 83939 - RNA, 25 nt, Artificial Sequence
  Description of Artificial Sequence: Synthetic oligonucleotide
uguaaauuacugcauugcuuuuuuu

SEQ ID NO: 83940 - RNA, 25 nt, Artificial Sequence
  Description of Artificial Sequence: Synthetic oligonucleotide
uuucaguuuguauaaccucuaaucu

SEQ ID NO: 83941 - RNA, 25 nt, Artificial Sequence
  Description of Artificial Sequence: Synthetic oligonucleotide
uccguuugcaugauacgcuuuguua

SEQ ID NO: 83942 - RNA, 25 nt, Artificial Sequence
  Description of Artificial Sequence: Synthetic oligonucleotide
agaaacauuaauuguaguuuggaag

SEQ ID NO: 83943 - RNA, 25 nt, Artificial Sequence
  Description of Artificial Sequence: Synthetic oligonucleotide
gcaaguguguaugaauaaagauaau

SEQ ID NO: 83944 - DNA, 21 bp, Artificial Sequence
  Description of Artificial Sequence: Synthetic oligonucleotide
  Description of Combined DNA/RNA Molecule: Synthetic oligonucleotide
cuacacaaaucagcgauuutt

SEQ ID NO: 83945 - DNA, 21 bp, Artificial Sequence
  Description of Artificial Sequence: Synthetic oligonucleotide
  Description of Combined DNA/RNA Molecule: Synthetic oligonucleotide
aaaucgcugauuuguguagtt

SEQ ID NO: 83946 - DNA, 25 bp, Artificial Sequence
  Description of Artificial Sequence: Synthetic oligonucleotide
  Description of Combined DNA/RNA Molecule: Synthetic oligonucleotide
cuacacaaaucagcgauuuccaugt

SEQ ID NO: 83947 - RNA, 27 nt, Artificial Sequence
  Description of Artificial Sequence: Synthetic oligonucleotide
acauggaaaucgcugauuuguguaguc

SEQ ID NO: 83948 - RNA, 13 nt, Artificial Sequence
  Description of Artificial Sequence: Synthetic oligonucleotide
cuacacaaaucag

SEQ ID NO: 83949 - DNA, 11 bp, Artificial Sequence
  Description of Artificial Sequence: Synthetic oligonucleotide
  Description of Combined DNA/RNA Molecule: Synthetic oligonucleotide
gauuuccaugt

SEQ ID NO: 83950 - DNA, 21 bp, Artificial Sequence
  Description of Artificial Sequence: Synthetic oligonucleotide
  Description of Combined DNA/RNA Molecule: Synthetic oligonucleotide
ggaucuuauuucuucggagtt

SEQ ID NO: 83951 - DNA, 21 bp, Artificial Sequence
  Description of Artificial Sequence: Synthetic oligonucleotide
  Description of Combined DNA/RNA Molecule: Synthetic oligonucleotide
cuccgaagaaauaagaucctt

SEQ ID NO: 83952 - RNA, 11 nt, Artificial Sequence
  Description of Artificial Sequence: Synthetic oligonucleotide
ggaucuuauuu

SEQ ID NO: 83953 - DNA, 10 bp, Artificial Sequence
  Description of Artificial Sequence: Synthetic oligonucleotide
  Description of Combined DNA/RNA Molecule: Synthetic oligonucleotide
cuucggagtt

SEQ ID NO: 83954 - RNA, 27 nt, Artificial Sequence
  Description of Artificial Sequence: Synthetic oligonucleotide
cauugucuccgaagaaauaagauccuu

SEQ ID NO: 83955 - RNA, 8 nt, Artificial Sequence
  Description of Artificial Sequence: Synthetic oligonucleotide
  modified_base (2): LNA-G
ggaucuua

SEQ ID NO: 83956 - DNA, 17 bp, Artificial Sequence
  Description of Artificial Sequence: Synthetic oligonucleotide
  Description of Combined DNA/RNA Molecule: Synthetic oligonucleotide
uuucuucggagacaatg

SEQ ID NO: 83957 - DNA, 16 bp, Artificial Sequence
  Description of Artificial Sequence: Synthetic oligonucleotide
  Description of Combined DNA/RNA Molecule: Synthetic oligonucleotide
uucuucggagacaatg

SEQ ID NO: 83958 - DNA, 15 bp, Artificial Sequence
  Description of Artificial Sequence: Synthetic oligonucleotide
  Description of Combined DNA/RNA Molecule: Synthetic oligonucleotide
ucuucggagacaatg

SEQ ID NO: 83959 - DNA, 14 bp, Artificial Sequence
  Description of Artificial Sequence: Synthetic oligonucleotide
  Description of Combined DNA/RNA Molecule: Synthetic oligonucleotide
cuucggagacaatg

SEQ ID NO: 83960 - DNA, 13 bp, Artificial Sequence
  Description of Artificial Sequence: Synthetic oligonucleotide
  Description of Combined DNA/RNA Molecule: Synthetic oligonucleotide
uucggagacaatg

SEQ ID NO: 83961 - DNA, 12 bp, Artificial Sequence
  Description of Artificial Sequence: Synthetic oligonucleotide
  Description of Combined DNA/RNA Molecule: Synthetic oligonucleotide
ucggagacaatg

SEQ ID NO: 83962 - DNA, 11 bp, Artificial Sequence
  Description of Artificial Sequence: Synthetic oligonucleotide
  Description of Combined DNA/RNA Molecule: Synthetic oligonucleotide
cggagacaatg

SEQ ID NO: 83963 - RNA, 9 nt, Artificial Sequence
  Description of Artificial Sequence: Synthetic oligonucleotide
  modified_base (2): LNA-G
ggaucuuau

SEQ ID NO: 83964 - RNA, 10 nt, Artificial Sequence
  Description of Artificial Sequence: Synthetic oligonucleotide
  modified_base (2): LNA-G
ggaucuuauu

SEQ ID NO: 83965 - RNA, 11 nt, Artificial Sequence
  Description of Artificial Sequence: Synthetic oligonucleotide
  modified_base (2): LNA-G
ggaucuuauuu

SEQ ID NO: 83966 - RNA, 12 nt, Artificial Sequence
  Description of Artificial Sequence: Synthetic oligonucleotide
  modified_base (2): LNA-G
ggaucuuauuuc

SEQ ID NO: 83967 - RNA, 8 nt, Artificial Sequence
  Description of Artificial Sequence: Synthetic oligonucleotide
  modified_base (3): LNA-A
cuacacaa

SEQ ID NO: 83968 - DNA, 13 bp, Artificial Sequence
  Description of Artificial Sequence: Synthetic oligonucleotide
  Description of Combined DNA/RNA Molecule: Synthetic oligonucleotide
  modified_base (8): LNA-A
aucagcgauuutt

SEQ ID NO: 83969 - DNA, 12 bp, Artificial Sequence
  Description of Artificial Sequence: Synthetic oligonucleotide
  Description of Combined DNA/RNA Molecule: Synthetic oligonucleotide
  modified_base (7): LNA-A
ucagcgauuutt

SEQ ID NO: 83970 - DNA, 11 bp, Artificial Sequence
  Description of Artificial Sequence: Synthetic oligonucleotide
  Description of Combined DNA/RNA Molecule: Synthetic oligonucleotide
  modified_base (6): LNA-A
cagcgauuutt

SEQ ID NO: 83971 - DNA, 10 bp, Artificial Sequence
  Description of Artificial Sequence: Synthetic oligonucleotide
  Description of Combined DNA/RNA Molecule: Synthetic oligonucleotide
  modified_base (5): LNA-A
agcgauuutt

SEQ ID NO: 83972 - DNA, 9 bp, Artificial Sequence
  Description of Artificial Sequence: Synthetic oligonucleotide
  Description of Combined DNA/RNA Molecule: Synthetic oligonucleotide
  modified_base (4): LNA-A
gcgauuutt

SEQ ID NO: 83973 - DNA, 8 bp, Artificial Sequence
  Description of Artificial Sequence: Synthetic oligonucleotide
  Description of Combined DNA/RNA Molecule: Synthetic oligonucleotide
  modified_base (3): LNA-A
cgauuutt

SEQ ID NO: 83974 - DNA, 7 bp, Artificial Sequence
  Description of Artificial Sequence: Synthetic oligonucleotide
  Description of Combined DNA/RNA Molecule: Synthetic oligonucleotide
  modified_base (2): LNA-A
gauuutt

SEQ ID NO: 83975 - RNA, 9 nt, Artificial Sequence
  Description of Artificial Sequence: Synthetic oligonucleotide
  modified_base (3): LNA-A
cuacacaaa

SEQ ID NO: 83976 - RNA, 10 nt, Artificial Sequence
  Description of Artificial Sequence: Synthetic oligonucleotide
  modified_base (3): LNA-A
cuacacaaau

SEQ ID NO: 83977 - RNA, 11 nt, Artificial Sequence
  Description of Artificial Sequence: Synthetic oligonucleotide
  modified_base (3): LNA-A
cuacacaaauc

SEQ ID NO: 83978 - RNA, 12 nt, Artificial Sequence
  Description of Artificial Sequence: Synthetic oligonucleotide
  modified_base (3): LNA-A
cuacacaaauca

SEQ ID NO: 83979 - RNA, 13 nt, Artificial Sequence
  Description of Artificial Sequence: Synthetic oligonucleotide
  modified_base (3): LNA-A
cuacacaaaucag

SEQ ID NO: 83980 - RNA, 14 nt, Artificial Sequence
  Description of Artificial Sequence: Synthetic oligonucleotide
  modified_base (3): LNA-A
cuacacaaaucagc

SEQ ID NO: 83981 - RNA, 13 nt, Artificial Sequence
  Description of Artificial Sequence: Synthetic oligonucleotide
  modified_base (2): LNA-G
ggaucuuauuucu

SEQ ID NO: 83982 - RNA, 14 nt, Artificial Sequence
  Description of Artificial Sequence: Synthetic oligonucleotide
  modified_base (2): LNA-G
ggaucuuauuucuu

SEQ ID NO: 83983 - RNA, 8 nt, Artificial Sequence
  Description of Artificial Sequence: Synthetic oligonucleotide
  modified_base (2): LNA-G
  modified_base (8): LNA-A
ggaucuua

SEQ ID NO: 83984 - RNA, 9 nt, Artificial Sequence
  Description of Artificial Sequence: Synthetic oligonucleotide
  modified_base (2): LNA-G
  modified_base (9): LNA-U
ggaucuuau

SEQ ID NO: 83985 - RNA, 10 nt, Artificial Sequence
  Description of Artificial Sequence: Synthetic oligonucleotide
  modified_base (2): LNA-G
  modified_base (10): LNA-U
ggaucuuauu

SEQ ID NO: 83986 - RNA, 11 nt, Artificial Sequence
  Description of Artificial Sequence: Synthetic oligonucleotide
  modified_base (2): LNA-G
  modified_base (11): LNA-U
ggaucuuauuu

SEQ ID NO: 83987 - RNA, 12 nt, Artificial Sequence
  Description of Artificial Sequence: Synthetic oligonucleotide
  modified_base (2): LNA-G
  modified_base (12): LNA-C
ggaucuuauuuc

SEQ ID NO: 83988 - RNA, 13 nt, Artificial Sequence
  Description of Artificial Sequence: Synthetic oligonucleotide
  modified_base (2): LNA-G
  modified_base (13): LNA-U
ggaucuuauuucu

SEQ ID NO: 83989 - RNA, 14 nt, Artificial Sequence
  Description of Artificial Sequence: Synthetic oligonucleotide
  modified_base (2): LNA-G
  modified_base (14): LNA-U
ggaucuuauuucuu

SEQ ID NO: 83990 - DNA, 13 bp, Artificial Sequence
  Description of Artificial Sequence: Synthetic oligonucleotide
  Description of Combined DNA/RNA Molecule: Synthetic oligonucleotide
  modified_base (8): LNA-G
uuucuucggagtt

SEQ ID NO: 83991 - DNA, 12 bp, Artificial Sequence
  Description of Artificial Sequence: Synthetic oligonucleotide
  Description of Combined DNA/RNA Molecule: Synthetic oligonucleotide
  modified_base (7): LNA-G
uucuucggagtt

SEQ ID NO: 83992 - DNA, 11 bp, Artificial Sequence
  Description of Artificial Sequence: Synthetic oligonucleotide
  Description of Combined DNA/RNA Molecule: Synthetic oligonucleotide
  modified_base (6): LNA-G
ucuucggagtt

SEQ ID NO: 83993 - DNA, 10 bp, Artificial Sequence
  Description of Artificial Sequence: Synthetic oligonucleotide
  Description of Combined DNA/RNA Molecule: Synthetic oligonucleotide
  modified_base (5): LNA-G
cuucggagtt

SEQ ID NO: 83994 - DNA, 9 bp, Artificial Sequence
  Description of Artificial Sequence: Synthetic oligonucleotide
  Description of Combined DNA/RNA Molecule: Synthetic oligonucleotide
  modified_base (4): LNA-G
uucggagtt

SEQ ID NO: 83995 - DNA, 8 bp, Artificial Sequence
  Description of Artificial Sequence: Synthetic oligonucleotide
  Description of Combined DNA/RNA Molecule: Synthetic oligonucleotide
  modified_base (3): LNA-G
ucggagtt

SEQ ID NO: 83996 - DNA, 7 bp, Artificial Sequence
  Description of Artificial Sequence: Synthetic oligonucleotide
  Description of Combined DNA/RNA Molecule: Synthetic oligonucleotide
  modified_base (2): LNA-G
cggagtt

SEQ ID NO: 83997 - DNA, 13 bp, Artificial Sequence
  Description of Artificial Sequence: Synthetic oligonucleotide
  Description of Combined DNA/RNA Molecule: Synthetic oligonucleotide
  modified_base (1): LNA-U
  modified_base (8): LNA-G
uuucuucggagtt

SEQ ID NO: 83998 - DNA, 12 bp, Artificial Sequence
  Description of Artificial Sequence: Synthetic oligonucleotide
  Description of Combined DNA/RNA Molecule: Synthetic oligonucleotide
  modified_base (1): LNA-U
  modified_base (7): LNA-G
uucuucggagtt

SEQ ID NO: 83999 - DNA, 11 bp, Artificial Sequence
  Description of Artificial Sequence: Synthetic oligonucleotide
  Description of Combined DNA/RNA Molecule: Synthetic oligonucleotide
  modified_base (1): LNA-U
  modified_base (6): LNA-G
ucuucggagtt

SEQ ID NO: 84000 - DNA, 10 bp, Artificial Sequence
  Description of Artificial Sequence: Synthetic oligonucleotide
  Description of Combined DNA/RNA Molecule: Synthetic oligonucleotide
  modified_base (1): LNA-C
  modified_base (5): LNA-G
cuucggagtt

SEQ ID NO: 84001 - DNA, 9 bp, Artificial Sequence
  Description of Artificial Sequence: Synthetic oligonucleotide
  Description of Combined DNA/RNA Molecule: Synthetic oligonucleotide
  modified_base (1): LNA-U
  modified_base (4): LNA-G
uucggagtt

SEQ ID NO: 84002 - DNA, 8 bp, Artificial Sequence
  Description of Artificial Sequence: Synthetic oligonucleotide
  Description of Combined DNA/RNA Molecule: Synthetic oligonucleotide
  modified_base (1): LNA-U
  modified_base (3): LNA-G
ucggagtt

SEQ ID NO: 84003 - DNA, 7 bp, Artificial Sequence
  Description of Artificial Sequence: Synthetic oligonucleotide
  Description of Combined DNA/RNA Molecule: Synthetic oligonucleotide
  modified_base (1): LNA-C
  modified_base (2): LNA-G
cggagtt

SEQ ID NO: 84004 - DNA, 21 bp, Artificial Sequence
  Description of Artificial Sequence: Synthetic oligonucleotide
  Description of Combined DNA/RNA Molecule: Synthetic oligonucleotide
  modified_base (2): LNA-G
  modified_base (16): LNA-G
ggaucuuauuucuucggagtt

SEQ ID NO: 84005 - DNA, 25 bp, Artificial Sequence
  Description of Artificial Sequence: Synthetic oligonucleotide
  Description of Combined DNA/RNA Molecule: Synthetic oligonucleotide
ggaucuuauuucuucggagacaatg

SEQ ID NO: 84006 - RNA, 25 nt, Artificial Sequence
  Description of Artificial Sequence: Synthetic oligonucleotide
uaagcagaguucaaaagcccuucag

SEQ ID NO: 84007 - RNA, 25 nt, Artificial Sequence
  Description of Artificial Sequence: Synthetic oligonucleotide
agcagaguucaaaagcccuucagcg

SEQ ID NO: 84008 - RNA, 25 nt, Artificial Sequence
  Description of Artificial Sequence: Synthetic oligonucleotide
cucagggucugagugaagccgcucg

SEQ ID NO: 84009 - RNA, 25 nt, Artificial Sequence
  Description of Artificial Sequence: Synthetic oligonucleotide
caagcaacuacaucacgccagucaa

SEQ ID NO: 84010 - RNA, 25 nt, Artificial Sequence
  Description of Artificial Sequence: Synthetic oligonucleotide
aucaauggcagcuucuuggugcgug

SEQ ID NO: 84011 - RNA, 25 nt, Artificial Sequence
  Description of Artificial Sequence: Synthetic oligonucleotide
uuccagcccacauuggauucaucag

SEQ ID NO: 84012 - RNA, 25 nt, Artificial Sequence
  Description of Artificial Sequence: Synthetic oligonucleotide
cagcugagaauguggaauaccuaag

SEQ ID NO: 84013 - RNA, 25 nt, Artificial Sequence
  Description of Artificial Sequence: Synthetic oligonucleotide
aacguaucuccuaauuugaggcuca

SEQ ID NO: 84014 - RNA, 25 nt, Artificial Sequence
  Description of Artificial Sequence: Synthetic oligonucleotide
ccuaaaauaauuucucuacaauugg

SEQ ID NO: 84015 - RNA, 25 nt, Artificial Sequence
  Description of Artificial Sequence: Synthetic oligonucleotide
uggaagauucagcuaguuaggagcc

SEQ ID NO: 84016 - RNA, 25 nt, Artificial Sequence
  Description of Artificial Sequence: Synthetic oligonucleotide
uuaaacucuccuagucaauauccac

SEQ ID NO: 84017 - RNA, 25 nt, Artificial Sequence
  Description of Artificial Sequence: Synthetic oligonucleotide
cagccuacaguuauguucagucaca

SEQ ID NO: 84018 - RNA, 25 nt, Artificial Sequence
  Description of Artificial Sequence: Synthetic oligonucleotide
guuauguucagucacacacacauac

SEQ ID NO: 84019 - RNA, 25 nt, Artificial Sequence
  Description of Artificial Sequence: Synthetic oligonucleotide
cacauacaaaauguuccuuuugcuu

SEQ ID NO: 84020 - RNA, 25 nt, Artificial Sequence
  Description of Artificial Sequence: Synthetic oligonucleotide
uccuuuugcuuuuaaaguaauuuuu

SEQ ID NO: 84021 - RNA, 25 nt, Artificial Sequence
  Description of Artificial Sequence: Synthetic oligonucleotide
ugaccugugaagcaacagucaaugg

SEQ ID NO: 84022 - RNA, 25 nt, Artificial Sequence
  Description of Artificial Sequence: Synthetic oligonucleotide
cuaucucacacaucgacaaaccaau

SEQ ID NO: 84023 - RNA, 25 nt, Artificial Sequence
  Description of Artificial Sequence: Synthetic oligonucleotide
uguccucaauuguacugcuaccacu

SEQ ID NO: 84024 - RNA, 25 nt, Artificial Sequence
  Description of Artificial Sequence: Synthetic oligonucleotide
aaaccguagcuggcaagcggucuua

SEQ ID NO: 84025 - RNA, 25 nt, Artificial Sequence
  Description of Artificial Sequence: Synthetic oligonucleotide
uagcuggcaagcggucuuaccggcu

SEQ ID NO: 84026 - RNA, 25 nt, Artificial Sequence
  Description of Artificial Sequence: Synthetic oligonucleotide
uuguaugguuaaaagauggguuacc

SEQ ID NO: 84027 - RNA, 25 nt, Artificial Sequence
  Description of Artificial Sequence: Synthetic oligonucleotide
ugguuaaaagauggguuaccugcga

SEQ ID NO: 84028 - RNA, 25 nt, Artificial Sequence
  Description of Artificial Sequence: Synthetic oligonucleotide
cagggaauuauacaaucuugcugag

SEQ ID NO: 84029 - RNA, 25 nt, Artificial Sequence
  Description of Artificial Sequence: Synthetic oligonucleotide
acaaucuugcugagcauaaaacagu

SEQ ID NO: 84030 - RNA, 25 nt, Artificial Sequence
  Description of Artificial Sequence: Synthetic oligonucleotide
ccaauaaugaagaguccuuuauccu

SEQ ID NO: 84031 - RNA, 25 nt, Artificial Sequence
  Description of Artificial Sequence: Synthetic oligonucleotide
acuuuggauguuccaacgcaaguug

SEQ ID NO: 84032 - RNA, 25 nt, Artificial Sequence
  Description of Artificial Sequence: Synthetic oligonucleotide
aaugcuuccacuaaacugaaaccau

SEQ ID NO: 84033 - RNA, 25 nt, Artificial Sequence
  Description of Artificial Sequence: Synthetic oligonucleotide
gagaaaguuugacuuuguuaaauau

SEQ ID NO: 84034 - RNA, 25 nt, Artificial Sequence
  Description of Artificial Sequence: Synthetic oligonucleotide
aaagaacuacuguauauuaaaaguu

SEQ ID NO: 84035 - RNA, 25 nt, Artificial Sequence
  Description of Artificial Sequence: Synthetic oligonucleotide
uuagaaauacggguuuugacuuaac

SEQ ID NO: 84036 - RNA, 25 nt, Artificial Sequence
  Description of Artificial Sequence: Synthetic oligonucleotide
aacauggguacagcaaacucagcac

SEQ ID NO: 84037 - RNA, 25 nt, Artificial Sequence
  Description of Artificial Sequence: Synthetic oligonucleotide
aaagacacagaagaugcugaccuca

SEQ ID NO: 84038 - RNA, 25 nt, Artificial Sequence
  Description of Artificial Sequence: Synthetic oligonucleotide
uaguagggagguuuauucagaucgc

SEQ ID NO: 84039 - RNA, 25 nt, Artificial Sequence
  Description of Artificial Sequence: Synthetic oligonucleotide
gccuucugcagcaggguucugggau

SEQ ID NO: 84040 - RNA, 25 nt, Artificial Sequence
  Description of Artificial Sequence: Synthetic oligonucleotide
ggucugguacauauuggaaauuaug

SEQ ID NO: 84041 - RNA, 25 nt, Artificial Sequence
  Description of Artificial Sequence: Synthetic oligonucleotide
cuaguccuuccgauggaagcacuag

SEQ ID NO: 84042 - RNA, 25 nt, Artificial Sequence
  Description of Artificial Sequence: Synthetic oligonucleotide
ccagugaauauuguuuuuaugugga

SEQ ID NO: 84043 - RNA, 25 nt, Artificial Sequence
  Description of Artificial Sequence: Synthetic oligonucleotide
augaauucaaguuggaauugguaga

SEQ ID NO: 84044 - RNA, 25 nt, Artificial Sequence
  Description of Artificial Sequence: Synthetic oligonucleotide
caggacacagauuuagacuuggaga

SEQ ID NO: 84045 - RNA, 25 nt, Artificial Sequence
  Description of Artificial Sequence: Synthetic oligonucleotide
cucaaagcacaguuacaguauucca

SEQ ID NO: 84046 - RNA, 25 nt, Artificial Sequence
  Description of Artificial Sequence: Synthetic oligonucleotide
accacugccaccacugaugaauuaa

SEQ ID NO: 84047 - RNA, 25 nt, Artificial Sequence
  Description of Artificial Sequence: Synthetic oligonucleotide
gaaacuacuagugccacaucaucac

SEQ ID NO: 84048 - RNA, 25 nt, Artificial Sequence
  Description of Artificial Sequence: Synthetic oligonucleotide
aagucggacagccucaccaaacaga

SEQ ID NO: 84049 - RNA, 25 nt, Artificial Sequence
  Description of Artificial Sequence: Synthetic oligonucleotide
gaaagcgaaaaauggaacaugaugg

SEQ ID NO: 84050 - RNA, 25 nt, Artificial Sequence
  Description of Artificial Sequence: Synthetic oligonucleotide
cccucugauuuagcauguagacugc

SEQ ID NO: 84051 - RNA, 25 nt, Artificial Sequence
  Description of Artificial Sequence: Synthetic oligonucleotide
ugagcuauuuaaggaucuauuuaug

SEQ ID NO: 84052 - RNA, 25 nt, Artificial Sequence
  Description of Artificial Sequence: Synthetic oligonucleotide
aaaaggugaaaaagcacuauuauca

SEQ ID NO: 84053 - RNA, 25 nt, Artificial Sequence
  Description of Artificial Sequence: Synthetic oligonucleotide
gaaaaagcacuauuaucaguucugc

SEQ ID NO: 84054 - RNA, 25 nt, Artificial Sequence
  Description of Artificial Sequence: Synthetic oligonucleotide
ggcugaaaagaaagauuaaaccuac

SEQ ID NO: 84055 - RNA, 25 nt, Artificial Sequence
  Description of Artificial Sequence: Synthetic oligonucleotide
uaaacccuuauaauaaaauccuucu

SEQ ID NO: 84056 - RNA, 25 nt, Artificial Sequence
  Description of Artificial Sequence: Synthetic oligonucleotide
cauacuauuagccaaugcuguagac

SEQ ID NO: 84057 - RNA, 25 nt, Artificial Sequence
  Description of Artificial Sequence: Synthetic oligonucleotide
gacagaagcauuuugauaggaauag

SEQ ID NO: 84058 - RNA, 25 nt, Artificial Sequence
  Description of Artificial Sequence: Synthetic oligonucleotide
agagcaaauaagauaauggcccuga

SEQ ID NO: 84059 - RNA, 25 nt, Artificial Sequence
  Description of Artificial Sequence: Synthetic oligonucleotide
ccaacauuuuucucuuccucaagca

SEQ ID NO: 84060 - RNA, 25 nt, Artificial Sequence
  Description of Artificial Sequence: Synthetic oligonucleotide
uuaaguaugagaaaaguucagccca

SEQ ID NO: 84061 - RNA, 25 nt, Artificial Sequence
  Description of Artificial Sequence: Synthetic oligonucleotide
caggaauaaagauggcugcugaacc

SEQ ID NO: 84062 - RNA, 25 nt, Artificial Sequence
  Description of Artificial Sequence: Synthetic oligonucleotide
aauuugaaugaccaaguucucuuca

SEQ ID NO: 84063 - RNA, 25 nt, Artificial Sequence
  Description of Artificial Sequence: Synthetic oligonucleotide
auguauaaagauagccagccuagag

SEQ ID NO: 84064 - RNA, 25 nt, Artificial Sequence
  Description of Artificial Sequence: Synthetic oligonucleotide
ggcuguaacuaucucugugaagugu

SEQ ID NO: 84065 - RNA, 25 nt, Artificial Sequence
  Description of Artificial Sequence: Synthetic oligonucleotide
ucugugaagugugagaaaauuucaa

SEQ ID NO: 84066 - RNA, 25 nt, Artificial Sequence
  Description of Artificial Sequence: Synthetic oligonucleotide
ccuuuaaggaaaugaauccuccuga

SEQ ID NO: 84067 - RNA, 25 nt, Artificial Sequence
  Description of Artificial Sequence: Synthetic oligonucleotide
aaggauacaaaaagugacaucauau

SEQ ID NO: 84068 - RNA, 25 nt, Artificial Sequence
  Description of Artificial Sequence: Synthetic oligonucleotide
agaugcaauuugaaucuucaucaua

SEQ ID NO: 84069 - RNA, 25 nt, Artificial Sequence
  Description of Artificial Sequence: Synthetic oligonucleotide
guucaaaacgaagacuagcuauuaa

SEQ ID NO: 84070 - RNA, 25 nt, Artificial Sequence
  Description of Artificial Sequence: Synthetic oligonucleotide
gugaaaccucaucucuacuaaaaau

SEQ ID NO: 84071 - RNA, 25 nt, Artificial Sequence
  Description of Artificial Sequence: Synthetic oligonucleotide
acgaaagagaagcucuaucucgccu

SEQ ID NO: 84072 - RNA, 25 nt, Artificial Sequence
  Description of Artificial Sequence: Synthetic oligonucleotide
cuccacaagcgccuucgguccaguu

SEQ ID NO: 84073 - RNA, 25 nt, Artificial Sequence
  Description of Artificial Sequence: Synthetic oligonucleotide
gagaagauuccaaagauguagccgc

SEQ ID NO: 84074 - RNA, 25 nt, Artificial Sequence
  Description of Artificial Sequence: Synthetic oligonucleotide
aaucuggauucaaugaggagacuug

SEQ ID NO: 84075 - RNA, 25 nt, Artificial Sequence
  Description of Artificial Sequence: Synthetic oligonucleotide
agaacagauuugagaguagugagga

SEQ ID NO: 84076 - RNA, 25 nt, Artificial Sequence
  Description of Artificial Sequence: Synthetic oligonucleotide
ccagagcugugcagaugaguacaaa

SEQ ID NO: 84077 - RNA, 25 nt, Artificial Sequence
  Description of Artificial Sequence: Synthetic oligonucleotide
ccucagauuguuguuguuaaugggc

SEQ ID NO: 84078 - RNA, 25 nt, Artificial Sequence
  Description of Artificial Sequence: Synthetic oligonucleotide
cuauuuuaauuauuuuuaauuuauu

SEQ ID NO: 84079 - RNA, 25 nt, Artificial Sequence
  Description of Artificial Sequence: Synthetic oligonucleotide
uuuaauuuauuaauauuuaaauaug

SEQ ID NO: 84080 - RNA, 25 nt, Artificial Sequence
  Description of Artificial Sequence: Synthetic oligonucleotide
augcaguuugaauauccuuuguuuc

SEQ ID NO: 84081 - RNA, 25 nt, Artificial Sequence
  Description of Artificial Sequence: Synthetic oligonucleotide
caugcugcuggcgucuaaguguuug

SEQ ID NO: 84082 - RNA, 25 nt, Artificial Sequence
  Description of Artificial Sequence: Synthetic oligonucleotide
agaugugcauuucaccugugacaaa

SEQ ID NO: 84083 - RNA, 25 nt, Artificial Sequence
  Description of Artificial Sequence: Synthetic oligonucleotide
ucaaaaccugugccaggcugaauua

SEQ ID NO: 84084 - RNA, 25 nt, Artificial Sequence
  Description of Artificial Sequence: Synthetic oligonucleotide
gaauguggguagucauucuuacaau

SEQ ID NO: 84085 - RNA, 25 nt, Artificial Sequence
  Description of Artificial Sequence: Synthetic oligonucleotide
auguggguagucauucuuacaauug

SEQ ID NO: 84086 - RNA, 25 nt, Artificial Sequence
  Description of Artificial Sequence: Synthetic oligonucleotide
ugaaaaugagcaucagagaguguac

SEQ ID NO: 84087 - RNA, 25 nt, Artificial Sequence
  Description of Artificial Sequence: Synthetic oligonucleotide
uugcuuuucauguagaacucagcag

SEQ ID NO: 84088 - RNA, 25 nt, Artificial Sequence
  Description of Artificial Sequence: Synthetic oligonucleotide
uguauuucuauauuuauuuucagua

SEQ ID NO: 84089 - RNA, 25 nt, Artificial Sequence
  Description of Artificial Sequence: Synthetic oligonucleotide
uuugauuaauguuucuuaaauggaa

SEQ ID NO: 84090 - RNA, 25 nt, Artificial Sequence
  Description of Artificial Sequence: Synthetic oligonucleotide
caacguguauagugccuaaaauugu

SEQ ID NO: 84091 - RNA, 25 nt, Artificial Sequence
  Description of Artificial Sequence: Synthetic oligonucleotide
cauauccuuggcuacuaacaucugg

SEQ ID NO: 84092 - RNA, 25 nt, Artificial Sequence
  Description of Artificial Sequence: Synthetic oligonucleotide
uacuaacaucuggagacugugagcu

SEQ ID NO: 84093 - RNA, 25 nt, Artificial Sequence
  Description of Artificial Sequence: Synthetic oligonucleotide
cauaaguugugugcuuuuuauuaau

SEQ ID NO: 84094 - RNA, 25 nt, Artificial Sequence
  Description of Artificial Sequence: Synthetic oligonucleotide
gcaucauuuuggcucuucuuacauu

SEQ ID NO: 84095 - RNA, 25 nt, Artificial Sequence
  Description of Artificial Sequence: Synthetic oligonucleotide
gcucuucuuacauuuguaaaaaugu

SEQ ID NO: 84096 - RNA, 25 nt, Artificial Sequence
  Description of Artificial Sequence: Synthetic oligonucleotide
agauuaggucaucuuaauucauauu

SEQ ID NO: 84097 - RNA, 25 nt, Artificial Sequence
  Description of Artificial Sequence: Synthetic oligonucleotide
auggaauugaaagaacuaaucauga

SEQ ID NO: 84098 - RNA, 25 nt, Artificial Sequence
  Description of Artificial Sequence: Synthetic oligonucleotide
cacacucauuccuucugcucuuggg

SEQ ID NO: 84099 - RNA, 25 nt, Artificial Sequence
  Description of Artificial Sequence: Synthetic oligonucleotide
uguagagguaaccaguagcuuugag

SEQ ID NO: 84100 - RNA, 25 nt, Artificial Sequence
  Description of Artificial Sequence: Synthetic oligonucleotide
caaccacaugccacguaauauuuca

SEQ ID NO: 84101 - RNA, 25 nt, Artificial Sequence
  Description of Artificial Sequence: Synthetic oligonucleotide
ucggaaacaaguuauucucuucacu

SEQ ID NO: 84102 - RNA, 25 nt, Artificial Sequence
  Description of Artificial Sequence: Synthetic oligonucleotide
acucccaauaacuaaugcuaagaaa

SEQ ID NO: 84103 - RNA, 25 nt, Artificial Sequence
  Description of Artificial Sequence: Synthetic oligonucleotide
aaugcuaagaaaugcugaaaaucaa

SEQ ID NO: 84104 - RNA, 25 nt, Artificial Sequence
  Description of Artificial Sequence: Synthetic oligonucleotide
gucuuucucuaaauaugauuacuuu

SEQ ID NO: 84105 - RNA, 25 nt, Artificial Sequence
  Description of Artificial Sequence: Synthetic oligonucleotide
ugaauuucaggcauuuuguucuaca

SEQ ID NO: 84106 - RNA, 25 nt, Artificial Sequence
  Description of Artificial Sequence: Synthetic oligonucleotide
cgauucccucucacccgggacucuc

SEQ ID NO: 84107 - RNA, 25 nt, Artificial Sequence
  Description of Artificial Sequence: Synthetic oligonucleotide
aggaaagugaaccuuuaaaguaaag

SEQ ID NO: 84108 - RNA, 25 nt, Artificial Sequence
  Description of Artificial Sequence: Synthetic oligonucleotide
gaggcugcaugcucuggaagccugg

SEQ ID NO: 84109 - RNA, 25 nt, Artificial Sequence
  Description of Artificial Sequence: Synthetic oligonucleotide
ucucugaacagaaaacaaaagagag

SEQ ID NO: 84110 - RNA, 25 nt, Artificial Sequence
  Description of Artificial Sequence: Synthetic oligonucleotide
aacuuggcuguaaucaguuaugccg

SEQ ID NO: 84111 - RNA, 25 nt, Artificial Sequence
  Description of Artificial Sequence: Synthetic oligonucleotide
agaagccaaaauuaaaagaagucca

SEQ ID NO: 84112 - RNA, 25 nt, Artificial Sequence
  Description of Artificial Sequence: Synthetic oligonucleotide
auuaaaagaaguccaggugagguua

SEQ ID NO: 84113 - RNA, 25 nt, Artificial Sequence
  Description of Artificial Sequence: Synthetic oligonucleotide
gaauccggauuaucgggaagaggac

SEQ ID NO: 84114 - RNA, 25 nt, Artificial Sequence
  Description of Artificial Sequence: Synthetic oligonucleotide
aaugugacaucaaagcaaguauugu

SEQ ID NO: 84115 - RNA, 25 nt, Artificial Sequence
  Description of Artificial Sequence: Synthetic oligonucleotide
caucaaagcaaguauuguagcacuc

SEQ ID NO: 84116 - RNA, 25 nt, Artificial Sequence
  Description of Artificial Sequence: Synthetic oligonucleotide
agagagagaaaacaaaaccacaaau

SEQ ID NO: 84117 - RNA, 25 nt, Artificial Sequence
  Description of Artificial Sequence: Synthetic oligonucleotide
ucgcuguaguauuuaagcccauaca

SEQ ID NO: 84118 - RNA, 25 nt, Artificial Sequence
  Description of Artificial Sequence: Synthetic oligonucleotide
cgcuguaguauuuaagcccauacag

SEQ ID NO: 84119 - RNA, 25 nt, Artificial Sequence
  Description of Artificial Sequence: Synthetic oligonucleotide
auuuaagcccauacagaaaccuucc

SEQ ID NO: 84120 - RNA, 25 nt, Artificial Sequence
  Description of Artificial Sequence: Synthetic oligonucleotide
auuaaaauaaacaugguauaccuac

SEQ ID NO: 84121 - RNA, 25 nt, Artificial Sequence
  Description of Artificial Sequence: Synthetic oligonucleotide
cuguucugaucggccaguuuucgga

SEQ ID NO: 84122 - RNA, 25 nt, Artificial Sequence
  Description of Artificial Sequence: Synthetic oligonucleotide
aaauaauuugaacuuuggaacaggg

SEQ ID NO: 84123 - RNA, 25 nt, Artificial Sequence
  Description of Artificial Sequence: Synthetic oligonucleotide
ugcgaccuuaauuuaacuuuccagu

SEQ ID NO: 84124 - RNA, 25 nt, Artificial Sequence
  Description of Artificial Sequence: Synthetic oligonucleotide
cugagaaagcuaaaguuugguuuug

SEQ ID NO: 84125 - RNA, 25 nt, Artificial Sequence
  Description of Artificial Sequence: Synthetic oligonucleotide
aguaaagaugcuacuucccacugua

SEQ ID NO: 84126 - RNA, 25 nt, Artificial Sequence
  Description of Artificial Sequence: Synthetic oligonucleotide
cugcuuaauugcugauaccauauga

SEQ ID NO: 84127 - RNA, 25 nt, Artificial Sequence
  Description of Artificial Sequence: Synthetic oligonucleotide
uaccauaugaaugaaacaugggcug

SEQ ID NO: 84128 - RNA, 25 nt, Artificial Sequence
  Description of Artificial Sequence: Synthetic oligonucleotide
aacuuucuuauccaacuuuuucaua

SEQ ID NO: 84129 - RNA, 25 nt, Artificial Sequence
  Description of Artificial Sequence: Synthetic oligonucleotide
ccuugcaugacaucaugaggccgga

SEQ ID NO: 84130 - RNA, 25 nt, Artificial Sequence
  Description of Artificial Sequence: Synthetic oligonucleotide
ugaauuuguauaugacugcauuugu

SEQ ID NO: 84131 - RNA, 25 nt, Artificial Sequence
  Description of Artificial Sequence: Synthetic oligonucleotide
gaauccuaguagaauguuuacuacc

SEQ ID NO: 84132 - RNA, 25 nt, Artificial Sequence
  Description of Artificial Sequence: Synthetic oligonucleotide
gaaagggaagaauuuuuugaugaaa

SEQ ID NO: 84133 - RNA, 25 nt, Artificial Sequence
  Description of Artificial Sequence: Synthetic oligonucleotide
uaucggcaugccagugugugaauuu

SEQ ID NO: 84134 - RNA, 25 nt, Artificial Sequence
  Description of Artificial Sequence: Synthetic oligonucleotide
caccucauaguagagcaauguaugu

SEQ ID NO: 84135 - RNA, 25 nt, Artificial Sequence
  Description of Artificial Sequence: Synthetic oligonucleotide
ccagaauugccaaagcacauauaua

SEQ ID NO: 84136 - RNA, 25 nt, Artificial Sequence
  Description of Artificial Sequence: Synthetic oligonucleotide
uggugaucuggguaauaguuucucc

SEQ ID NO: 84137 - RNA, 25 nt, Artificial Sequence
  Description of Artificial Sequence: Synthetic oligonucleotide
gaucuggguaauaguuucuccaaau

SEQ ID NO: 84138 - RNA, 25 nt, Artificial Sequence
  Description of Artificial Sequence: Synthetic oligonucleotide
ggaugugaugaauacuuccuagaaa

SEQ ID NO: 84139 - RNA, 25 nt, Artificial Sequence
  Description of Artificial Sequence: Synthetic oligonucleotide
cauuuccacagcuacaccauauaug

SEQ ID NO: 84140 - RNA, 25 nt, Artificial Sequence
  Description of Artificial Sequence: Synthetic oligonucleotide
acagcuacaccauauaugaauggag

SEQ ID NO: 84141 - RNA, 25 nt, Artificial Sequence
  Description of Artificial Sequence: Synthetic oligonucleotide
ugcaguucuuacacgagaagaagau

SEQ ID NO: 84142 - RNA, 25 nt, Artificial Sequence
  Description of Artificial Sequence: Synthetic oligonucleotide
acgagaagaagaucauuuacaggga

SEQ ID NO: 84143 - RNA, 25 nt, Artificial Sequence
  Description of Artificial Sequence: Synthetic oligonucleotide
cgagaagaagaucauuuacagggac

SEQ ID NO: 84144 - RNA, 25 nt, Artificial Sequence
  Description of Artificial Sequence: Synthetic oligonucleotide
aagaagaucauuuacagggaccuga

SEQ ID NO: 84145 - RNA, 25 nt, Artificial Sequence
  Description of Artificial Sequence: Synthetic oligonucleotide
agaggaagagguguuugacugcauc

SEQ ID NO: 84146 - RNA, 25 nt, Artificial Sequence
  Description of Artificial Sequence: Synthetic oligonucleotide
gaggaagagguguuugacugcaucg

SEQ ID NO: 84147 - RNA, 25 nt, Artificial Sequence
  Description of Artificial Sequence: Synthetic oligonucleotide
cuacuuugagggcgaguucacaggg

SEQ ID NO: 84148 - RNA, 25 nt, Artificial Sequence
  Description of Artificial Sequence: Synthetic oligonucleotide
agggcaucuccuggcaccucugucc

SEQ ID NO: 84149 - RNA, 25 nt, Artificial Sequence
  Description of Artificial Sequence: Synthetic oligonucleotide
ggagugauaugguuugucuuuuuaa

SEQ ID NO: 84150 - RNA, 25 nt, Artificial Sequence
  Description of Artificial Sequence: Synthetic oligonucleotide
gagugauaugguuugucuuuuuaag

SEQ ID NO: 84151 - RNA, 25 nt, Artificial Sequence
  Description of Artificial Sequence: Synthetic oligonucleotide
ugcaguaaagauccuaaagguuguc

SEQ ID NO: 84152 - RNA, 25 nt, Artificial Sequence
  Description of Artificial Sequence: Synthetic oligonucleotide
aguaaagauccuaaagguugucgac

SEQ ID NO: 84153 - RNA, 25 nt, Artificial Sequence
  Description of Artificial Sequence: Synthetic oligonucleotide
ugacaaaggacaaccuggcaauugu

SEQ ID NO: 84154 - RNA, 25 nt, Artificial Sequence
  Description of Artificial Sequence: Synthetic oligonucleotide
gcaauugugacccaguggugcgagg

SEQ ID NO: 84155 - RNA, 25 nt, Artificial Sequence
  Description of Artificial Sequence: Synthetic oligonucleotide
aacaucauccauagagacaugaaau

SEQ ID NO: 84156 - RNA, 25 nt, Artificial Sequence
  Description of Artificial Sequence: Synthetic oligonucleotide
ugaaauccaacaauauauuucucca

SEQ ID NO: 84157 - RNA, 25 nt, Artificial Sequence
  Description of Artificial Sequence: Synthetic oligonucleotide
aacaauauauuucuccaugaaggcu

SEQ ID NO: 84158 - RNA, 25 nt, Artificial Sequence
  Description of Artificial Sequence: Synthetic oligonucleotide
aacaguaaagucacgcuggaguggu

SEQ ID NO: 84159 - RNA, 25 nt, Artificial Sequence
  Description of Artificial Sequence: Synthetic oligonucleotide
ugugaagaaaguaaaggaagagagg

SEQ ID NO: 84160 - RNA, 25 nt, Artificial Sequence
  Description of Artificial Sequence: Synthetic oligonucleotide
cuuccgagccauccuugcaucgggc

SEQ ID NO: 84161 - RNA, 25 nt, Artificial Sequence
  Description of Artificial Sequence: Synthetic oligonucleotide
aauggagguugaauauccuacugug

SEQ ID NO: 84162 - RNA, 25 nt, Artificial Sequence
  Description of Artificial Sequence: Synthetic oligonucleotide
ggagguugaauauccuacuguguaa

SEQ ID NO: 84163 - RNA, 25 nt, Artificial Sequence
  Description of Artificial Sequence: Synthetic oligonucleotide
auuuugaguuuucccuuguagugua

SEQ ID NO: 84164 - RNA, 25 nt, Artificial Sequence
  Description of Artificial Sequence: Synthetic oligonucleotide
uauccuguuuguucuuuguugauug

SEQ ID NO: 84165 - RNA, 25 nt, Artificial Sequence
  Description of Artificial Sequence: Synthetic oligonucleotide
ccuguuuguucuuuguugauugaaa

SEQ ID NO: 84166 - RNA, 25 nt, Artificial Sequence
  Description of Artificial Sequence: Synthetic oligonucleotide
cucuacagccuucuuuuucuuccau

SEQ ID NO: 84167 - RNA, 25 nt, Artificial Sequence
  Description of Artificial Sequence: Synthetic oligonucleotide
ucuuccauagcuaaucuuccuucua

SEQ ID NO: 84168 - RNA, 25 nt, Artificial Sequence
  Description of Artificial Sequence: Synthetic oligonucleotide
auaaucuuccuguugaaugcuucau

SEQ ID NO: 84169 - RNA, 25 nt, Artificial Sequence
  Description of Artificial Sequence: Synthetic oligonucleotide
uaaucuuccuguugaaugcuucaug

SEQ ID NO: 84170 - RNA, 25 nt, Artificial Sequence
  Description of Artificial Sequence: Synthetic oligonucleotide
cuucaugacuugaauucuacuuuga

SEQ ID NO: 84171 - RNA, 25 nt, Artificial Sequence
  Description of Artificial Sequence: Synthetic oligonucleotide
aagagggagagaagcaacuacagac

SEQ ID NO: 84172 - RNA, 25 nt, Artificial Sequence
  Description of Artificial Sequence: Synthetic oligonucleotide
cgucuccuaccagaccaaggucaac

SEQ ID NO: 84173 - RNA, 25 nt, Artificial Sequence
  Description of Artificial Sequence: Synthetic oligonucleotide
gaucaaucggcccgacuaucucgac

SEQ ID NO: 84174 - RNA, 25 nt, Artificial Sequence
  Description of Artificial Sequence: Synthetic oligonucleotide
ggacgaacauccaaccuucccaaac

SEQ ID NO: 84175 - RNA, 25 nt, Artificial Sequence
  Description of Artificial Sequence: Synthetic oligonucleotide
agggucggaacccaagcuuagaacu

SEQ ID NO: 84176 - RNA, 25 nt, Artificial Sequence
  Description of Artificial Sequence: Synthetic oligonucleotide
ucggaacccaagcuuagaacuuuaa

SEQ ID NO: 84177 - RNA, 25 nt, Artificial Sequence
  Description of Artificial Sequence: Synthetic oligonucleotide
acccaagcuuagaacuuuaagcaac

SEQ ID NO: 84178 - RNA, 25 nt, Artificial Sequence
  Description of Artificial Sequence: Synthetic oligonucleotide
gaacuuuaagcaacaagaccaccac

SEQ ID NO: 84179 - RNA, 25 nt, Artificial Sequence
  Description of Artificial Sequence: Synthetic oligonucleotide
acuauucaguggcgagaaauaaagu

SEQ ID NO: 84180 - RNA, 25 nt, Artificial Sequence
  Description of Artificial Sequence: Synthetic oligonucleotide
cuauucaguggcgagaaauaaaguu

SEQ ID NO: 84181 - RNA, 25 nt, Artificial Sequence
  Description of Artificial Sequence: Synthetic oligonucleotide
aaacacagauaacaggaaaugaucc

SEQ ID NO: 84182 - RNA, 25 nt, Artificial Sequence
  Description of Artificial Sequence: Synthetic oligonucleotide
cuuaagaaaagagaagaaaugaaac

SEQ ID NO: 84183 - RNA, 25 nt, Artificial Sequence
  Description of Artificial Sequence: Synthetic oligonucleotide
cugaaggaguguguuuccauccucc

SEQ ID NO: 84184 - RNA, 25 nt, Artificial Sequence
  Description of Artificial Sequence: Synthetic oligonucleotide
ucaccgcgggacugaaaaucuuuga

SEQ ID NO: 84185 - RNA, 25 nt, Artificial Sequence
  Description of Artificial Sequence: Synthetic oligonucleotide
agcagaaauaagcgugccguucagg

SEQ ID NO: 84186 - RNA, 25 nt, Artificial Sequence
  Description of Artificial Sequence: Synthetic oligonucleotide
aagcgugccguucaggguccagaag

SEQ ID NO: 84187 - RNA, 25 nt, Artificial Sequence
  Description of Artificial Sequence: Synthetic oligonucleotide
agaaacagucacucaagacugcuug

SEQ ID NO: 84188 - RNA, 25 nt, Artificial Sequence
  Description of Artificial Sequence: Synthetic oligonucleotide
agaggaagaagguccaugucuuugg

SEQ ID NO: 84189 - RNA, 25 nt, Artificial Sequence
  Description of Artificial Sequence: Synthetic oligonucleotide
uguauucaaaauaugccugaaacac

SEQ ID NO: 84190 - RNA, 25 nt, Artificial Sequence
  Description of Artificial Sequence: Synthetic oligonucleotide
auuuuccucccuuucucuguaccuc

SEQ ID NO: 84191 - RNA, 25 nt, Artificial Sequence
  Description of Artificial Sequence: Synthetic oligonucleotide
caaagaaagauagagcaagacaaga

SEQ ID NO: 84192 - RNA, 25 nt, Artificial Sequence
  Description of Artificial Sequence: Synthetic oligonucleotide
aagaaagauagagcaagacaagaaa

SEQ ID NO: 84193 - RNA, 25 nt, Artificial Sequence
  Description of Artificial Sequence: Synthetic oligonucleotide
gaaagcauuuguuuguacaagaucc

SEQ ID NO: 84194 - RNA, 25 nt, Artificial Sequence
  Description of Artificial Sequence: Synthetic oligonucleotide
ugaguuaaacgaacguacuugcaga

SEQ ID NO: 84195 - RNA, 25 nt, Artificial Sequence
  Description of Artificial Sequence: Synthetic oligonucleotide
acugauacagaacgaucgauacaga

SEQ ID NO: 84196 - RNA, 25 nt, Artificial Sequence
  Description of Artificial Sequence: Synthetic oligonucleotide
auauuauauauauauaaaaauaaau

SEQ ID NO: 84197 - RNA, 25 nt, Artificial Sequence
  Description of Artificial Sequence: Synthetic oligonucleotide
auuauauauauauaaaaauaaauau

SEQ ID NO: 84198 - RNA, 25 nt, Artificial Sequence
  Description of Artificial Sequence: Synthetic oligonucleotide
ucacuggauguauuugacugcugug

SEQ ID NO: 84199 - RNA, 25 nt, Artificial Sequence
  Description of Artificial Sequence: Synthetic oligonucleotide
cagggaagaggaggagaugagagac

SEQ ID NO: 84200 - RNA, 25 nt, Artificial Sequence
  Description of Artificial Sequence: Synthetic oligonucleotide
augaucuuuuuuuugucccacuugg

SEQ ID NO: 84201 - RNA, 27 nt, Artificial Sequence
  Description of Artificial Sequence: Synthetic oligonucleotide
ggccgugaacuccucaucaaaauaccu

SEQ ID NO: 84202 - RNA, 27 nt, Artificial Sequence
  Description of Artificial Sequence: Synthetic oligonucleotide
uggugugauggugaucaucugggccgu

SEQ ID NO: 84203 - RNA, 27 nt, Artificial Sequence
  Description of Artificial Sequence: Synthetic oligonucleotide
aaacccgcaggauaguuuucuucccua

SEQ ID NO: 84204 - RNA, 27 nt, Artificial Sequence
  Description of Artificial Sequence: Synthetic oligonucleotide
caaacuggaugaaauaaauuaaaaccc

SEQ ID NO: 84205 - RNA, 27 nt, Artificial Sequence
  Description of Artificial Sequence: Synthetic oligonucleotide
agaaguccuuaacauuucccuacguga

SEQ ID NO: 84206 - RNA, 27 nt, Artificial Sequence
  Description of Artificial Sequence: Synthetic oligonucleotide
cucugucccacuggguaaacccuggcc

SEQ ID NO: 84207 - RNA, 27 nt, Artificial Sequence
  Description of Artificial Sequence: Synthetic oligonucleotide
cacaauaacaaauuuaaaccuugcucc

SEQ ID NO: 84208 - RNA, 27 nt, Artificial Sequence
  Description of Artificial Sequence: Synthetic oligonucleotide
aaaugcauuugaacaacauaauacaca

SEQ ID NO: 84209 - RNA, 27 nt, Artificial Sequence
  Description of Artificial Sequence: Synthetic oligonucleotide
ggcuuuccugucacaaagauuaaaaac

SEQ ID NO: 84210 - RNA, 27 nt, Artificial Sequence
  Description of Artificial Sequence: Synthetic oligonucleotide
agggcuuuccugucacaaagauuaaaa

SEQ ID NO: 84211 - RNA, 27 nt, Artificial Sequence
  Description of Artificial Sequence: Synthetic oligonucleotide
ggccaugcugggagacauaagcagcag

SEQ ID NO: 84212 - RNA, 27 nt, Artificial Sequence
  Description of Artificial Sequence: Synthetic oligonucleotide
ucagggagaagcuucugaaacacuucu

SEQ ID NO: 84213 - RNA, 27 nt, Artificial Sequence
  Description of Artificial Sequence: Synthetic oligonucleotide
aagggcuucuuccuuauugauggucag

SEQ ID NO: 84214 - RNA, 27 nt, Artificial Sequence
  Description of Artificial Sequence: Synthetic oligonucleotide
ugaagggcuucuuccuuauugaugguc

SEQ ID NO: 84215 - RNA, 27 nt, Artificial Sequence
  Description of Artificial Sequence: Synthetic oligonucleotide
cgcugaagggcuucuuccuuauugaug

SEQ ID NO: 84216 - RNA, 27 nt, Artificial Sequence
  Description of Artificial Sequence: Synthetic oligonucleotide
gccgcugaagggcuucuuccuuauuga

SEQ ID NO: 84217 - RNA, 27 nt, Artificial Sequence
  Description of Artificial Sequence: Synthetic oligonucleotide
acuggccgcugaagggcuucuuccuua

SEQ ID NO: 84218 - RNA, 27 nt, Artificial Sequence
  Description of Artificial Sequence: Synthetic oligonucleotide
cggagcuuuucaccuuuaguuaugcuu

SEQ ID NO: 84219 - RNA, 27 nt, Artificial Sequence
  Description of Artificial Sequence: Synthetic oligonucleotide
ccggagcuuuucaccuuuaguuaugcu

SEQ ID NO: 84220 - RNA, 27 nt, Artificial Sequence
  Description of Artificial Sequence: Synthetic oligonucleotide
cagacuguugacuggcgugauguaguu

SEQ ID NO: 84221 - RNA, 27 nt, Artificial Sequence
  Description of Artificial Sequence: Synthetic oligonucleotide
cuuuugaacucugcuuaaauccagugg

SEQ ID NO: 84222 - RNA, 27 nt, Artificial Sequence
  Description of Artificial Sequence: Synthetic oligonucleotide
gcuuuugaacucugcuuaaauccagug

SEQ ID NO: 84223 - RNA, 27 nt, Artificial Sequence
  Description of Artificial Sequence: Synthetic oligonucleotide
agggcuuuugaacucugcuuaaaucca

SEQ ID NO: 84224 - RNA, 27 nt, Artificial Sequence
  Description of Artificial Sequence: Synthetic oligonucleotide
aagggcuuuugaacucugcuuaaaucc

SEQ ID NO: 84225 - RNA, 27 nt, Artificial Sequence
  Description of Artificial Sequence: Synthetic oligonucleotide
ugaagggcuuuugaacucugcuuaaau

SEQ ID NO: 84226 - RNA, 27 nt, Artificial Sequence
  Description of Artificial Sequence: Synthetic oligonucleotide
cugaagggcuuuugaacucugcuuaaa

SEQ ID NO: 84227 - RNA, 27 nt, Artificial Sequence
  Description of Artificial Sequence: Synthetic oligonucleotide
cgcugaagggcuuuugaacucugcuua

SEQ ID NO: 84228 - RNA, 27 nt, Artificial Sequence
  Description of Artificial Sequence: Synthetic oligonucleotide
cgagcggcuucacucagacccugaggc

SEQ ID NO: 84229 - RNA, 27 nt, Artificial Sequence
  Description of Artificial Sequence: Synthetic oligonucleotide
uugacuggcgugauguaguugcuuggg

SEQ ID NO: 84230 - RNA, 27 nt, Artificial Sequence
  Description of Artificial Sequence: Synthetic oligonucleotide
cacgcaccaagaagcugccauugaucc

SEQ ID NO: 84231 - RNA, 27 nt, Artificial Sequence
  Description of Artificial Sequence: Synthetic oligonucleotide
cugaugaauccaaugugggcuggaauc

SEQ ID NO: 84232 - RNA, 27 nt, Artificial Sequence
  Description of Artificial Sequence: Synthetic oligonucleotide
cuuagguauuccacauucucagcugug

SEQ ID NO: 84233 - RNA, 27 nt, Artificial Sequence
  Description of Artificial Sequence: Synthetic oligonucleotide
ugagccucaaauuaggagauacguuuu

SEQ ID NO: 84234 - RNA, 27 nt, Artificial Sequence
  Description of Artificial Sequence: Synthetic oligonucleotide
ccaauuguagagaaauuauuuuaggaa

SEQ ID NO: 84235 - RNA, 27 nt, Artificial Sequence
  Description of Artificial Sequence: Synthetic oligonucleotide
ggcuccuaacuagcugaaucuuccaau

SEQ ID NO: 84236 - RNA, 27 nt, Artificial Sequence
  Description of Artificial Sequence: Synthetic oligonucleotide
guggauauugacuaggagaguuuaaaa

SEQ ID NO: 84237 - RNA, 27 nt, Artificial Sequence
  Description of Artificial Sequence: Synthetic oligonucleotide
ugugacugaacauaacuguaggcugaa

SEQ ID NO: 84238 - RNA, 27 nt, Artificial Sequence
  Description of Artificial Sequence: Synthetic oligonucleotide
guaugugugugugacugaacauaacug

SEQ ID NO: 84239 - RNA, 27 nt, Artificial Sequence
  Description of Artificial Sequence: Synthetic oligonucleotide
aagcaaaaggaacauuuuguaugugug

SEQ ID NO: 84240 - RNA, 27 nt, Artificial Sequence
  Description of Artificial Sequence: Synthetic oligonucleotide
aaaaauuacuuuaaaagcaaaaggaac

SEQ ID NO: 84241 - RNA, 27 nt, Artificial Sequence
  Description of Artificial Sequence: Synthetic oligonucleotide
ccauugacuguugcuucacaggucaga

SEQ ID NO: 84242 - RNA, 27 nt, Artificial Sequence
  Description of Artificial Sequence: Synthetic oligonucleotide
auugguuugucgaugugugagauaguu

SEQ ID NO: 84243 - RNA, 27 nt, Artificial Sequence
  Description of Artificial Sequence: Synthetic oligonucleotide
agugguagcaguacaauugaggacaag

SEQ ID NO: 84244 - RNA, 27 nt, Artificial Sequence
  Description of Artificial Sequence: Synthetic oligonucleotide
uaagaccgcuugccagcuacgguuuca

SEQ ID NO: 84245 - RNA, 27 nt, Artificial Sequence
  Description of Artificial Sequence: Synthetic oligonucleotide
agccgguaagaccgcuugccagcuacg

SEQ ID NO: 84246 - RNA, 27 nt, Artificial Sequence
  Description of Artificial Sequence: Synthetic oligonucleotide
gguaacccaucuuuuaaccauacaacu

SEQ ID NO: 84247 - RNA, 27 nt, Artificial Sequence
  Description of Artificial Sequence: Synthetic oligonucleotide
ucgcagguaacccaucuuuuaaccaua

SEQ ID NO: 84248 - RNA, 27 nt, Artificial Sequence
  Description of Artificial Sequence: Synthetic oligonucleotide
cucagcaagauuguauaauucccugca

SEQ ID NO: 84249 - RNA, 27 nt, Artificial Sequence
  Description of Artificial Sequence: Synthetic oligonucleotide
acuguuuuaugcucagcaagauuguau

SEQ ID NO: 84250 - RNA, 27 nt, Artificial Sequence
  Description of Artificial Sequence: Synthetic oligonucleotide
aggauaaaggacucuucauuauuggaa

SEQ ID NO: 84251 - RNA, 27 nt, Artificial Sequence
  Description of Artificial Sequence: Synthetic oligonucleotide
caacuugcguuggaacauccaaagugu

SEQ ID NO: 84252 - RNA, 27 nt, Artificial Sequence
  Description of Artificial Sequence: Synthetic oligonucleotide
augguuucaguuuaguggaagcauuua

SEQ ID NO: 84253 - RNA, 27 nt, Artificial Sequence
  Description of Artificial Sequence: Synthetic oligonucleotide
auauuuaacaaagucaaacuuucucac

SEQ ID NO: 84254 - RNA, 27 nt, Artificial Sequence
  Description of Artificial Sequence: Synthetic oligonucleotide
aacuuuuaauauacaguaguucuuuuc

SEQ ID NO: 84255 - RNA, 27 nt, Artificial Sequence
  Description of Artificial Sequence: Synthetic oligonucleotide
guuaagucaaaacccguauuucuaaag

SEQ ID NO: 84256 - RNA, 27 nt, Artificial Sequence
  Description of Artificial Sequence: Synthetic oligonucleotide
gugcugaguuugcuguacccauguuga

SEQ ID NO: 84257 - RNA, 27 nt, Artificial Sequence
  Description of Artificial Sequence: Synthetic oligonucleotide
ugaggucagcaucuucugugucuuuac

SEQ ID NO: 84258 - RNA, 27 nt, Artificial Sequence
  Description of Artificial Sequence: Synthetic oligonucleotide
gcgaucugaauaaaccucccuacuagc

SEQ ID NO: 84259 - RNA, 27 nt, Artificial Sequence
  Description of Artificial Sequence: Synthetic oligonucleotide
aucccagaacccugcugcagaaggcca

SEQ ID NO: 84260 - RNA, 27 nt, Artificial Sequence
  Description of Artificial Sequence: Synthetic oligonucleotide
cauaauuuccaauauguaccagaccuu

SEQ ID NO: 84261 - RNA, 27 nt, Artificial Sequence
  Description of Artificial Sequence: Synthetic oligonucleotide
cuagugcuuccaucggaaggacuaggu

SEQ ID NO: 84262 - RNA, 27 nt, Artificial Sequence
  Description of Artificial Sequence: Synthetic oligonucleotide
uccacauaaaaacaauauucacuggga

SEQ ID NO: 84263 - RNA, 27 nt, Artificial Sequence
  Description of Artificial Sequence: Synthetic oligonucleotide
ucuaccaauuccaacuugaauucauug

SEQ ID NO: 84264 - RNA, 27 nt, Artificial Sequence
  Description of Artificial Sequence: Synthetic oligonucleotide
ucuccaagucuaaaucuguguccugag

SEQ ID NO: 84265 - RNA, 27 nt, Artificial Sequence
  Description of Artificial Sequence: Synthetic oligonucleotide
uggaauacuguaacugugcuuugagga

SEQ ID NO: 84266 - RNA, 27 nt, Artificial Sequence
  Description of Artificial Sequence: Synthetic oligonucleotide
uuaauucaucagugguggcagugguag

SEQ ID NO: 84267 - RNA, 27 nt, Artificial Sequence
  Description of Artificial Sequence: Synthetic oligonucleotide
gugaugauguggcacuaguaguuucuu

SEQ ID NO: 84268 - RNA, 27 nt, Artificial Sequence
  Description of Artificial Sequence: Synthetic oligonucleotide
ucuguuuggugaggcuguccgacuuug

SEQ ID NO: 84269 - RNA, 27 nt, Artificial Sequence
  Description of Artificial Sequence: Synthetic oligonucleotide
ccaucauguuccauuuuucgcuuucuc

SEQ ID NO: 84270 - RNA, 27 nt, Artificial Sequence
  Description of Artificial Sequence: Synthetic oligonucleotide
gcagucuacaugcuaaaucagagggua

SEQ ID NO: 84271 - RNA, 27 nt, Artificial Sequence
  Description of Artificial Sequence: Synthetic oligonucleotide
cauaaauagauccuuaaauagcucaaa

SEQ ID NO: 84272 - RNA, 27 nt, Artificial Sequence
  Description of Artificial Sequence: Synthetic oligonucleotide
ugauaauagugcuuuuucaccuuuuuc

SEQ ID NO: 84273 - RNA, 27 nt, Artificial Sequence
  Description of Artificial Sequence: Synthetic oligonucleotide
gcagaacugauaauagugcuuuuucac

SEQ ID NO: 84274 - RNA, 27 nt, Artificial Sequence
  Description of Artificial Sequence: Synthetic oligonucleotide
guagguuuaaucuuucuuuucagccau

SEQ ID NO: 84275 - RNA, 27 nt, Artificial Sequence
  Description of Artificial Sequence: Synthetic oligonucleotide
agaaggauuuuauuauaaggguuuaau

SEQ ID NO: 84276 - RNA, 27 nt, Artificial Sequence
  Description of Artificial Sequence: Synthetic oligonucleotide
gucuacagcauuggcuaauaguaugaa

SEQ ID NO: 84277 - RNA, 27 nt, Artificial Sequence
  Description of Artificial Sequence: Synthetic oligonucleotide
cuauuccuaucaaaaugcuucugucua

SEQ ID NO: 84278 - RNA, 27 nt, Artificial Sequence
  Description of Artificial Sequence: Synthetic oligonucleotide
ucagggccauuaucuuauuugcucuau

SEQ ID NO: 84279 - RNA, 27 nt, Artificial Sequence
  Description of Artificial Sequence: Synthetic oligonucleotide
ugcuugaggaagagaaaaauguugguc

SEQ ID NO: 84280 - RNA, 27 nt, Artificial Sequence
  Description of Artificial Sequence: Synthetic oligonucleotide
ugggcugaacuuuucucauacuuaaag

SEQ ID NO: 84281 - RNA, 27 nt, Artificial Sequence
  Description of Artificial Sequence: Synthetic oligonucleotide
gguucagcagccaucuuuauuccugcg

SEQ ID NO: 84282 - RNA, 27 nt, Artificial Sequence
  Description of Artificial Sequence: Synthetic oligonucleotide
ugaagagaacuuggucauucaaauuuc

SEQ ID NO: 84283 - RNA, 27 nt, Artificial Sequence
  Description of Artificial Sequence: Synthetic oligonucleotide
cucuaggcuggcuaucuuuauacauac

SEQ ID NO: 84284 - RNA, 27 nt, Artificial Sequence
  Description of Artificial Sequence: Synthetic oligonucleotide
acacuucacagagauaguuacagccau

SEQ ID NO: 84285 - RNA, 27 nt, Artificial Sequence
  Description of Artificial Sequence: Synthetic oligonucleotide
uugaaauuuucucacacuucacagaga

SEQ ID NO: 84286 - RNA, 27 nt, Artificial Sequence
  Description of Artificial Sequence: Synthetic oligonucleotide
ucaggaggauucauuuccuuaaaggaa

SEQ ID NO: 84287 - RNA, 27 nt, Artificial Sequence
  Description of Artificial Sequence: Synthetic oligonucleotide
auaugaugucacuuuuuguauccuuga

SEQ ID NO: 84288 - RNA, 27 nt, Artificial Sequence
  Description of Artificial Sequence: Synthetic oligonucleotide
uaugaugaagauucaaauugcaucuua

SEQ ID NO: 84289 - RNA, 27 nt, Artificial Sequence
  Description of Artificial Sequence: Synthetic oligonucleotide
uuaauagcuagucuucguuuugaacag

SEQ ID NO: 84290 - RNA, 27 nt, Artificial Sequence
  Description of Artificial Sequence: Synthetic oligonucleotide
auuuuuaguagagaugagguuucacca

SEQ ID NO: 84291 - RNA, 27 nt, Artificial Sequence
  Description of Artificial Sequence: Synthetic oligonucleotide
aggcgagauagagcuucucuuucguuc

SEQ ID NO: 84292 - RNA, 27 nt, Artificial Sequence
  Description of Artificial Sequence: Synthetic oligonucleotide
aacuggaccgaaggcgcuuguggagaa

SEQ ID NO: 84293 - RNA, 27 nt, Artificial Sequence
  Description of Artificial Sequence: Synthetic oligonucleotide
gcggcuacaucuuuggaaucuucuccu

SEQ ID NO: 84294 - RNA, 27 nt, Artificial Sequence
  Description of Artificial Sequence: Synthetic oligonucleotide
caagucuccucauugaauccagauugg

SEQ ID NO: 84295 - RNA, 27 nt, Artificial Sequence
  Description of Artificial Sequence: Synthetic oligonucleotide
uccucacuacucucaaaucuguucugg

SEQ ID NO: 84296 - RNA, 27 nt, Artificial Sequence
  Description of Artificial Sequence: Synthetic oligonucleotide
uuuguacucaucugcacagcucuggcu

SEQ ID NO: 84297 - RNA, 27 nt, Artificial Sequence
  Description of Artificial Sequence: Synthetic oligonucleotide
gcccauuaacaacaacaaucugaggug

SEQ ID NO: 84298 - RNA, 27 nt, Artificial Sequence
  Description of Artificial Sequence: Synthetic oligonucleotide
aauaaauuaaaaauaauuaaaauagug

SEQ ID NO: 84299 - RNA, 27 nt, Artificial Sequence
  Description of Artificial Sequence: Synthetic oligonucleotide
cauauuuaaauauuaauaaauuaaaaa

SEQ ID NO: 84300 - RNA, 27 nt, Artificial Sequence
  Description of Artificial Sequence: Synthetic oligonucleotide
gaaacaaaggauauucaaacugcauag

SEQ ID NO: 84301 - RNA, 27 nt, Artificial Sequence
  Description of Artificial Sequence: Synthetic oligonucleotide
caaacacuuagacgccagcagcauggg

SEQ ID NO: 84302 - RNA, 27 nt, Artificial Sequence
  Description of Artificial Sequence: Synthetic oligonucleotide
uuugucacaggugaaaugcacaucuga

SEQ ID NO: 84303 - RNA, 27 nt, Artificial Sequence
  Description of Artificial Sequence: Synthetic oligonucleotide
uaauucagccuggcacagguuuugauc

SEQ ID NO: 84304 - RNA, 27 nt, Artificial Sequence
  Description of Artificial Sequence: Synthetic oligonucleotide
auuguaagaaugacuacccacauucac

SEQ ID NO: 84305 - RNA, 27 nt, Artificial Sequence
  Description of Artificial Sequence: Synthetic oligonucleotide
caauuguaagaaugacuacccacauuc

SEQ ID NO: 84306 - RNA, 27 nt, Artificial Sequence
  Description of Artificial Sequence: Synthetic oligonucleotide
guacacucucugaugcucauuuucaua

SEQ ID NO: 84307 - RNA, 27 nt, Artificial Sequence
  Description of Artificial Sequence: Synthetic oligonucleotide
cugcugaguucuacaugaaaagcaaau

SEQ ID NO: 84308 - RNA, 27 nt, Artificial Sequence
  Description of Artificial Sequence: Synthetic oligonucleotide
uacugaaaauaaauauagaaauacaac

SEQ ID NO: 84309 - RNA, 27 nt, Artificial Sequence
  Description of Artificial Sequence: Synthetic oligonucleotide
uuccauuuaagaaacauuaaucaaaac

SEQ ID NO: 84310 - RNA, 27 nt, Artificial Sequence
  Description of Artificial Sequence: Synthetic oligonucleotide
acaauuuuaggcacuauacacguuguu

SEQ ID NO: 84311 - RNA, 27 nt, Artificial Sequence
  Description of Artificial Sequence: Synthetic oligonucleotide
ccagauguuaguagccaaggauauggu

SEQ ID NO: 84312 - RNA, 27 nt, Artificial Sequence
  Description of Artificial Sequence: Synthetic oligonucleotide
agcucacagucuccagauguuaguagc

SEQ ID NO: 84313 - RNA, 27 nt, Artificial Sequence
  Description of Artificial Sequence: Synthetic oligonucleotide
auuaauaaaaagcacacaacuuauggc

SEQ ID NO: 84314 - RNA, 27 nt, Artificial Sequence
  Description of Artificial Sequence: Synthetic oligonucleotide
aauguaagaagagccaaaaugaugcau

SEQ ID NO: 84315 - RNA, 27 nt, Artificial Sequence
  Description of Artificial Sequence: Synthetic oligonucleotide
acauuuuuacaaauguaagaagagcca

SEQ ID NO: 84316 - RNA, 27 nt, Artificial Sequence
  Description of Artificial Sequence: Synthetic oligonucleotide
aauaugaauuaagaugaccuaaucugu

SEQ ID NO: 84317 - RNA, 27 nt, Artificial Sequence
  Description of Artificial Sequence: Synthetic oligonucleotide
ucaugauuaguucuuucaauuccaucc

SEQ ID NO: 84318 - RNA, 27 nt, Artificial Sequence
  Description of Artificial Sequence: Synthetic oligonucleotide
cccaagagcagaaggaaugagugugca

SEQ ID NO: 84319 - RNA, 27 nt, Artificial Sequence
  Description of Artificial Sequence: Synthetic oligonucleotide
cucaaagcuacugguuaccucuacacc

SEQ ID NO: 84320 - RNA, 27 nt, Artificial Sequence
  Description of Artificial Sequence: Synthetic oligonucleotide
ugaaauauuacguggcaugugguuggg

SEQ ID NO: 84321 - RNA, 27 nt, Artificial Sequence
  Description of Artificial Sequence: Synthetic oligonucleotide
agugaagagaauaacuuguuuccgaag

SEQ ID NO: 84322 - RNA, 27 nt, Artificial Sequence
  Description of Artificial Sequence: Synthetic oligonucleotide
uuucuuagcauuaguuauugggaguga

SEQ ID NO: 84323 - RNA, 27 nt, Artificial Sequence
  Description of Artificial Sequence: Synthetic oligonucleotide
uugauuuucagcauuucuuagcauuag

SEQ ID NO: 84324 - RNA, 27 nt, Artificial Sequence
  Description of Artificial Sequence: Synthetic oligonucleotide
aaaguaaucauauuuagagaaagacag

SEQ ID NO: 84325 - RNA, 27 nt, Artificial Sequence
  Description of Artificial Sequence: Synthetic oligonucleotide
uguagaacaaaaugccugaaauucagc

SEQ ID NO: 84326 - RNA, 27 nt, Artificial Sequence
  Description of Artificial Sequence: Synthetic oligonucleotide
gagagucccgggugagagggaaucgcc

SEQ ID NO: 84327 - RNA, 27 nt, Artificial Sequence
  Description of Artificial Sequence: Synthetic oligonucleotide
cuuuacuuuaaagguucacuuuccuug

SEQ ID NO: 84328 - RNA, 27 nt, Artificial Sequence
  Description of Artificial Sequence: Synthetic oligonucleotide
ccaggcuuccagagcaugcagccuccu

SEQ ID NO: 84329 - RNA, 27 nt, Artificial Sequence
  Description of Artificial Sequence: Synthetic oligonucleotide
cucucuuuuguuuucuguucagagaaa

SEQ ID NO: 84330 - RNA, 27 nt, Artificial Sequence
  Description of Artificial Sequence: Synthetic oligonucleotide
cggcauaacugauuacagccaaguuca

SEQ ID NO: 84331 - RNA, 27 nt, Artificial Sequence
  Description of Artificial Sequence: Synthetic oligonucleotide
uggacuucuuuuaauuuuggcuucuuc

SEQ ID NO: 84332 - RNA, 27 nt, Artificial Sequence
  Description of Artificial Sequence: Synthetic oligonucleotide
uaaccucaccuggacuucuuuuaauuu

SEQ ID NO: 84333 - RNA, 27 nt, Artificial Sequence
  Description of Artificial Sequence: Synthetic oligonucleotide
guccucuucccgauaauccggauucag

SEQ ID NO: 84334 - RNA, 27 nt, Artificial Sequence
  Description of Artificial Sequence: Synthetic oligonucleotide
acaauacuugcuuugaugucacauuaa

SEQ ID NO: 84335 - RNA, 27 nt, Artificial Sequence
  Description of Artificial Sequence: Synthetic oligonucleotide
gagugcuacaauacuugcuuugauguc

SEQ ID NO: 84336 - RNA, 27 nt, Artificial Sequence
  Description of Artificial Sequence: Synthetic oligonucleotide
auuugugguuuuguuuucucucucucu

SEQ ID NO: 84337 - RNA, 27 nt, Artificial Sequence
  Description of Artificial Sequence: Synthetic oligonucleotide
uguaugggcuuaaauacuacagcgagg

SEQ ID NO: 84338 - RNA, 27 nt, Artificial Sequence
  Description of Artificial Sequence: Synthetic oligonucleotide
cuguaugggcuuaaauacuacagcgag

SEQ ID NO: 84339 - RNA, 27 nt, Artificial Sequence
  Description of Artificial Sequence: Synthetic oligonucleotide
ggaagguuucuguaugggcuuaaauac

SEQ ID NO: 84340 - RNA, 27 nt, Artificial Sequence
  Description of Artificial Sequence: Synthetic oligonucleotide
guagguauaccauguuuauuuuaauac

SEQ ID NO: 84341 - RNA, 27 nt, Artificial Sequence
  Description of Artificial Sequence: Synthetic oligonucleotide
uccgaaaacuggccgaucagaacagcc

SEQ ID NO: 84342 - RNA, 27 nt, Artificial Sequence
  Description of Artificial Sequence: Synthetic oligonucleotide
cccuguuccaaaguucaaauuauuugu

SEQ ID NO: 84343 - RNA, 27 nt, Artificial Sequence
  Description of Artificial Sequence: Synthetic oligonucleotide
acuggaaaguuaaauuaaggucgcaau

SEQ ID NO: 84344 - RNA, 27 nt, Artificial Sequence
  Description of Artificial Sequence: Synthetic oligonucleotide
caaaaccaaacuuuagcuuucucagcc

SEQ ID NO: 84345 - RNA, 27 nt, Artificial Sequence
  Description of Artificial Sequence: Synthetic oligonucleotide
uacagugggaaguagcaucuuuacuuu

SEQ ID NO: 84346 - RNA, 27 nt, Artificial Sequence
  Description of Artificial Sequence: Synthetic oligonucleotide
ucauaugguaucagcaauuaagcagua

SEQ ID NO: 84347 - RNA, 27 nt, Artificial Sequence
  Description of Artificial Sequence: Synthetic oligonucleotide
cagcccauguuucauucauaugguauc

SEQ ID NO: 84348 - RNA, 27 nt, Artificial Sequence
  Description of Artificial Sequence: Synthetic oligonucleotide
uaugaaaaaguuggauaagaaaguugg

SEQ ID NO: 84349 - RNA, 27 nt, Artificial Sequence
  Description of Artificial Sequence: Synthetic oligonucleotide
uccggccucaugaugucaugcaaggcu

SEQ ID NO: 84350 - RNA, 27 nt, Artificial Sequence
  Description of Artificial Sequence: Synthetic oligonucleotide
acaaaugcagucauauacaaauucagg

SEQ ID NO: 84351 - RNA, 27 nt, Artificial Sequence
  Description of Artificial Sequence: Synthetic oligonucleotide
gguaguaaacauucuacuaggauucuu

SEQ ID NO: 84352 - RNA, 27 nt, Artificial Sequence
  Description of Artificial Sequence: Synthetic oligonucleotide
uuucaucaaaaaauucuucccuuucug

SEQ ID NO: 84353 - RNA, 27 nt, Artificial Sequence
  Description of Artificial Sequence: Synthetic oligonucleotide
aaauucacacacuggcaugccgauagc

SEQ ID NO: 84354 - RNA, 27 nt, Artificial Sequence
  Description of Artificial Sequence: Synthetic oligonucleotide
acauacauugcucuacuaugaggugaa

SEQ ID NO: 84355 - RNA, 27 nt, Artificial Sequence
  Description of Artificial Sequence: Synthetic oligonucleotide
uauauaugugcuuuggcaauucuggug

SEQ ID NO: 84356 - RNA, 27 nt, Artificial Sequence
  Description of Artificial Sequence: Synthetic oligonucleotide
ggagaaacuauuacccagaucaccacu

SEQ ID NO: 84357 - RNA, 27 nt, Artificial Sequence
  Description of Artificial Sequence: Synthetic oligonucleotide
auuuggagaaacuauuacccagaucac

SEQ ID NO: 84358 - RNA, 27 nt, Artificial Sequence
  Description of Artificial Sequence: Synthetic oligonucleotide
uuucuaggaaguauucaucacauccac

SEQ ID NO: 84359 - RNA, 27 nt, Artificial Sequence
  Description of Artificial Sequence: Synthetic oligonucleotide
cauauaugguguagcuguggaaaugcg

SEQ ID NO: 84360 - RNA, 27 nt, Artificial Sequence
  Description of Artificial Sequence: Synthetic oligonucleotide
cuccauucauauaugguguagcugugg

SEQ ID NO: 84361 - RNA, 27 nt, Artificial Sequence
  Description of Artificial Sequence: Synthetic oligonucleotide
aucuucuucucguguaagaacugcagc

SEQ ID NO: 84362 - RNA, 27 nt, Artificial Sequence
  Description of Artificial Sequence: Synthetic oligonucleotide
ucccuguaaaugaucuucuucucgugu

SEQ ID NO: 84363 - RNA, 27 nt, Artificial Sequence
  Description of Artificial Sequence: Synthetic oligonucleotide
gucccuguaaaugaucuucuucucgug

SEQ ID NO: 84364 - RNA, 27 nt, Artificial Sequence
  Description of Artificial Sequence: Synthetic oligonucleotide
ucaggucccuguaaaugaucuucuucu

SEQ ID NO: 84365 - RNA, 27 nt, Artificial Sequence
  Description of Artificial Sequence: Synthetic oligonucleotide
gaugcagucaaacaccucuuccucugu

SEQ ID NO: 84366 - RNA, 27 nt, Artificial Sequence
  Description of Artificial Sequence: Synthetic oligonucleotide
cgaugcagucaaacaccucuuccucug

SEQ ID NO: 84367 - RNA, 27 nt, Artificial Sequence
  Description of Artificial Sequence: Synthetic oligonucleotide
cccugugaacucgcccucaaaguagcg

SEQ ID NO: 84368 - RNA, 27 nt, Artificial Sequence
  Description of Artificial Sequence: Synthetic oligonucleotide
ggacagaggugccaggagaugcccuca

SEQ ID NO: 84369 - RNA, 27 nt, Artificial Sequence
  Description of Artificial Sequence: Synthetic oligonucleotide
uuaaaaagacaaaccauaucacuccuu

SEQ ID NO: 84370 - RNA, 27 nt, Artificial Sequence
  Description of Artificial Sequence: Synthetic oligonucleotide
cuuaaaaagacaaaccauaucacuccu

SEQ ID NO: 84371 - RNA, 27 nt, Artificial Sequence
  Description of Artificial Sequence: Synthetic oligonucleotide
gacaaccuuuaggaucuuuacugcaac

SEQ ID NO: 84372 - RNA, 27 nt, Artificial Sequence
  Description of Artificial Sequence: Synthetic oligonucleotide
gucgacaaccuuuaggaucuuuacugc

SEQ ID NO: 84373 - RNA, 27 nt, Artificial Sequence
  Description of Artificial Sequence: Synthetic oligonucleotide
acaauugccagguuguccuuugucaug

SEQ ID NO: 84374 - RNA, 27 nt, Artificial Sequence
  Description of Artificial Sequence: Synthetic oligonucleotide
ccucgcaccacugggucacaauugcca

SEQ ID NO: 84375 - RNA, 27 nt, Artificial Sequence
  Description of Artificial Sequence: Synthetic oligonucleotide
auuucaugucucuauggaugauguucu

SEQ ID NO: 84376 - RNA, 27 nt, Artificial Sequence
  Description of Artificial Sequence: Synthetic oligonucleotide
uggagaaauauauuguuggauuucaug

SEQ ID NO: 84377 - RNA, 27 nt, Artificial Sequence
  Description of Artificial Sequence: Synthetic oligonucleotide
agccuucauggagaaauauauuguugg

SEQ ID NO: 84378 - RNA, 27 nt, Artificial Sequence
  Description of Artificial Sequence: Synthetic oligonucleotide
accacuccagcgugacuuuacuguugc

SEQ ID NO: 84379 - RNA, 27 nt, Artificial Sequence
  Description of Artificial Sequence: Synthetic oligonucleotide
ccucucuuccuuuacuuucuucacaca

SEQ ID NO: 84380 - RNA, 27 nt, Artificial Sequence
  Description of Artificial Sequence: Synthetic oligonucleotide
gcccgaugcaaggauggcucggaagcg

SEQ ID NO: 84381 - RNA, 27 nt, Artificial Sequence
  Description of Artificial Sequence: Synthetic oligonucleotide
cacaguaggauauucaaccuccauuuc

SEQ ID NO: 84382 - RNA, 27 nt, Artificial Sequence
  Description of Artificial Sequence: Synthetic oligonucleotide
uuacacaguaggauauucaaccuccau

SEQ ID NO: 84383 - RNA, 27 nt, Artificial Sequence
  Description of Artificial Sequence: Synthetic oligonucleotide
uacacuacaagggaaaacucaaaaucu

SEQ ID NO: 84384 - RNA, 27 nt, Artificial Sequence
  Description of Artificial Sequence: Synthetic oligonucleotide
caaucaacaaagaacaaacaggauaaa

SEQ ID NO: 84385 - RNA, 27 nt, Artificial Sequence
  Description of Artificial Sequence: Synthetic oligonucleotide
uuucaaucaacaaagaacaaacaggau

SEQ ID NO: 84386 - RNA, 27 nt, Artificial Sequence
  Description of Artificial Sequence: Synthetic oligonucleotide
auggaagaaaaagaaggcuguagagaa

SEQ ID NO: 84387 - RNA, 27 nt, Artificial Sequence
  Description of Artificial Sequence: Synthetic oligonucleotide
uagaaggaagauuagcuauggaagaaa

SEQ ID NO: 84388 - RNA, 27 nt, Artificial Sequence
  Description of Artificial Sequence: Synthetic oligonucleotide
augaagcauucaacaggaagauuauuu

SEQ ID NO: 84389 - RNA, 27 nt, Artificial Sequence
  Description of Artificial Sequence: Synthetic oligonucleotide
caugaagcauucaacaggaagauuauu

SEQ ID NO: 84390 - RNA, 27 nt, Artificial Sequence
  Description of Artificial Sequence: Synthetic oligonucleotide
ucaaaguagaauucaagucaugaagca

SEQ ID NO: 84391 - RNA, 27 nt, Artificial Sequence
  Description of Artificial Sequence: Synthetic oligonucleotide
gucuguaguugcuucucucccucuuag

SEQ ID NO: 84392 - RNA, 27 nt, Artificial Sequence
  Description of Artificial Sequence: Synthetic oligonucleotide
guugaccuuggucugguaggagacggc

SEQ ID NO: 84393 - RNA, 27 nt, Artificial Sequence
  Description of Artificial Sequence: Synthetic oligonucleotide
gucgagauagucgggccgauugaucuc

SEQ ID NO: 84394 - RNA, 27 nt, Artificial Sequence
  Description of Artificial Sequence: Synthetic oligonucleotide
guuugggaagguuggauguucguccuc

SEQ ID NO: 84395 - RNA, 27 nt, Artificial Sequence
  Description of Artificial Sequence: Synthetic oligonucleotide
aguucuaagcuuggguuccgacccuaa

SEQ ID NO: 84396 - RNA, 27 nt, Artificial Sequence
  Description of Artificial Sequence: Synthetic oligonucleotide
uuaaaguucuaagcuuggguuccgacc

SEQ ID NO: 84397 - RNA, 27 nt, Artificial Sequence
  Description of Artificial Sequence: Synthetic oligonucleotide
guugcuuaaaguucuaagcuuggguuc

SEQ ID NO: 84398 - RNA, 27 nt, Artificial Sequence
  Description of Artificial Sequence: Synthetic oligonucleotide
gugguggucuuguugcuuaaaguucua

SEQ ID NO: 84399 - RNA, 27 nt, Artificial Sequence
  Description of Artificial Sequence: Synthetic oligonucleotide
acuuuauuucucgccacugaauaguag

SEQ ID NO: 84400 - RNA, 27 nt, Artificial Sequence
  Description of Artificial Sequence: Synthetic oligonucleotide
aacuuuauuucucgccacugaauagua

SEQ ID NO: 84401 - RNA, 27 nt, Artificial Sequence
  Description of Artificial Sequence: Synthetic oligonucleotide
ggaucauuuccuguuaucuguguuugu

SEQ ID NO: 84402 - RNA, 27 nt, Artificial Sequence
  Description of Artificial Sequence: Synthetic oligonucleotide
guuucauuucuucucuuuucuuaaggc

SEQ ID NO: 84403 - RNA, 27 nt, Artificial Sequence
  Description of Artificial Sequence: Synthetic oligonucleotide
ggaggauggaaacacacuccuucaguu

SEQ ID NO: 84404 - RNA, 27 nt, Artificial Sequence
  Description of Artificial Sequence: Synthetic oligonucleotide
ucaaagauuuucagucccgcggugaca

SEQ ID NO: 84405 - RNA, 27 nt, Artificial Sequence
  Description of Artificial Sequence: Synthetic oligonucleotide
ccugaacggcacgcuuauuucugcugu

SEQ ID NO: 84406 - RNA, 27 nt, Artificial Sequence
  Description of Artificial Sequence: Synthetic oligonucleotide
cuucuggacccugaacggcacgcuuau

SEQ ID NO: 84407 - RNA, 27 nt, Artificial Sequence
  Description of Artificial Sequence: Synthetic oligonucleotide
caagcagucuugagugacuguuucuuc

SEQ ID NO: 84408 - RNA, 27 nt, Artificial Sequence
  Description of Artificial Sequence: Synthetic oligonucleotide
ccaaagacauggaccuucuuccucuga

SEQ ID NO: 84409 - RNA, 27 nt, Artificial Sequence
  Description of Artificial Sequence: Synthetic oligonucleotide
guguuucaggcauauuuugaauacauc

SEQ ID NO: 84410 - RNA, 27 nt, Artificial Sequence
  Description of Artificial Sequence: Synthetic oligonucleotide
gagguacagagaaagggaggaaaauag

SEQ ID NO: 84411 - RNA, 27 nt, Artificial Sequence
  Description of Artificial Sequence: Synthetic oligonucleotide
ucuugucuugcucuaucuuucuuuggu

SEQ ID NO: 84412 - RNA, 27 nt, Artificial Sequence
  Description of Artificial Sequence: Synthetic oligonucleotide
uuucuugucuugcucuaucuuucuuug

SEQ ID NO: 84413 - RNA, 27 nt, Artificial Sequence
  Description of Artificial Sequence: Synthetic oligonucleotide
ggaucuuguacaaacaaaugcuuucuc

SEQ ID NO: 84414 - RNA, 27 nt, Artificial Sequence
  Description of Artificial Sequence: Synthetic oligonucleotide
ucugcaaguacguucguuuaacucaag

SEQ ID NO: 84415 - RNA, 27 nt, Artificial Sequence
  Description of Artificial Sequence: Synthetic oligonucleotide
ucuguaucgaucguucuguaucagucu

SEQ ID NO: 84416 - RNA, 27 nt, Artificial Sequence
  Description of Artificial Sequence: Synthetic oligonucleotide
auuuauuuuuauauauauauaauauau

SEQ ID NO: 84417 - RNA, 27 nt, Artificial Sequence
  Description of Artificial Sequence: Synthetic oligonucleotide
auauuuauuuuuauauauauauaauau

SEQ ID NO: 84418 - RNA, 27 nt, Artificial Sequence
  Description of Artificial Sequence: Synthetic oligonucleotide
cacagcagucaaauacauccagugaag

SEQ ID NO: 84419 - RNA, 27 nt, Artificial Sequence
  Description of Artificial Sequence: Synthetic oligonucleotide
gucucucaucuccuccucuucccuguc

SEQ ID NO: 84420 - RNA, 27 nt, Artificial Sequence
  Description of Artificial Sequence: Synthetic oligonucleotide
ccaagugggacaaaaaaaagaucaugc

SEQ ID NO: 84421 - RNA, 14 nt, Artificial Sequence
  Description of Artificial Sequence: Synthetic oligonucleotide
guauuuugaugagg

SEQ ID NO: 84422 - RNA, 12 nt, Artificial Sequence
  Description of Artificial Sequence: Synthetic oligonucleotide
ggcccagaugau

SEQ ID NO: 84423 - RNA, 14 nt, Artificial Sequence
  Description of Artificial Sequence: Synthetic oligonucleotide
gggaagaaaacuau

SEQ ID NO: 84424 - RNA, 15 nt, Artificial Sequence
  Description of Artificial Sequence: Synthetic oligonucleotide
guuuuaauuuauuuc

SEQ ID NO: 84425 - RNA, 12 nt, Artificial Sequence
  Description of Artificial Sequence: Synthetic oligonucleotide
acguagggaaau

SEQ ID NO: 84426 - RNA, 12 nt, Artificial Sequence
  Description of Artificial Sequence: Synthetic oligonucleotide
ccaggguuuacc

SEQ ID NO: 84427 - RNA, 11 nt, Artificial Sequence
  Description of Artificial Sequence: Synthetic oligonucleotide
agcaagguuua

SEQ ID NO: 84428 - RNA, 12 nt, Artificial Sequence
  Description of Artificial Sequence: Synthetic oligonucleotide
uguauuauguug

SEQ ID NO: 84429 - RNA, 15 nt, Artificial Sequence
  Description of Artificial Sequence: Synthetic oligonucleotide
uuuuaaucuuuguga

SEQ ID NO: 84430 - RNA, 14 nt, Artificial Sequence
  Description of Artificial Sequence: Synthetic oligonucleotide
uuaaucuuugugac

SEQ ID NO: 84431 - RNA, 13 nt, Artificial Sequence
  Description of Artificial Sequence: Synthetic oligonucleotide
gcugcuuaugucu

SEQ ID NO: 84432 - RNA, 14 nt, Artificial Sequence
  Description of Artificial Sequence: Synthetic oligonucleotide
aaguguuucagaag

SEQ ID NO: 84433 - RNA, 13 nt, Artificial Sequence
  Description of Artificial Sequence: Synthetic oligonucleotide
gaccaucaauaag

SEQ ID NO: 84434 - RNA, 13 nt, Artificial Sequence
  Description of Artificial Sequence: Synthetic oligonucleotide
ccaucaauaagga

SEQ ID NO: 84435 - RNA, 14 nt, Artificial Sequence
  Description of Artificial Sequence: Synthetic oligonucleotide
ucaauaaggaagaa

SEQ ID NO: 84436 - RNA, 14 nt, Artificial Sequence
  Description of Artificial Sequence: Synthetic oligonucleotide
aauaaggaagaagc

SEQ ID NO: 84437 - RNA, 13 nt, Artificial Sequence
  Description of Artificial Sequence: Synthetic oligonucleotide
aggaagaagcccu

SEQ ID NO: 84438 - RNA, 13 nt, Artificial Sequence
  Description of Artificial Sequence: Synthetic oligonucleotide
gcauaacuaaagg

SEQ ID NO: 84439 - RNA, 14 nt, Artificial Sequence
  Description of Artificial Sequence: Synthetic oligonucleotide
cauaacuaaaggug

SEQ ID NO: 84440 - RNA, 12 nt, Artificial Sequence
  Description of Artificial Sequence: Synthetic oligonucleotide
cuacaucacgcc

SEQ ID NO: 84441 - RNA, 12 nt, Artificial Sequence
  Description of Artificial Sequence: Synthetic oligonucleotide
acuggauuuaag

SEQ ID NO: 84442 - RNA, 12 nt, Artificial Sequence
  Description of Artificial Sequence: Synthetic oligonucleotide
cuggauuuaagc

SEQ ID NO: 84443 - RNA, 13 nt, Artificial Sequence
  Description of Artificial Sequence: Synthetic oligonucleotide
gauuuaagcagag

SEQ ID NO: 84444 - RNA, 13 nt, Artificial Sequence
  Description of Artificial Sequence: Synthetic oligonucleotide
auuuaagcagagu

SEQ ID NO: 84445 - RNA, 13 nt, Artificial Sequence
  Description of Artificial Sequence: Synthetic oligonucleotide
uuaagcagaguuc

SEQ ID NO: 84446 - RNA, 13 nt, Artificial Sequence
  Description of Artificial Sequence: Synthetic oligonucleotide
uaagcagaguuca

SEQ ID NO: 84447 - RNA, 14 nt, Artificial Sequence
  Description of Artificial Sequence: Synthetic oligonucleotide
agcagaguucaaaa

SEQ ID NO: 84448 - RNA, 12 nt, Artificial Sequence
  Description of Artificial Sequence: Synthetic oligonucleotide
cucagggucuga

SEQ ID NO: 84449 - RNA, 13 nt, Artificial Sequence
  Description of Artificial Sequence: Synthetic oligonucleotide
caagcaacuacau

SEQ ID NO: 84450 - RNA, 12 nt, Artificial Sequence
  Description of Artificial Sequence: Synthetic oligonucleotide
aucaauggcagc

SEQ ID NO: 84451 - RNA, 11 nt, Artificial Sequence
  Description of Artificial Sequence: Synthetic oligonucleotide
uuccagcccac

SEQ ID NO: 84452 - RNA, 12 nt, Artificial Sequence
  Description of Artificial Sequence: Synthetic oligonucleotide
cagcugagaaug

SEQ ID NO: 84453 - RNA, 13 nt, Artificial Sequence
  Description of Artificial Sequence: Synthetic oligonucleotide
aacguaucuccua

SEQ ID NO: 84454 - RNA, 14 nt, Artificial Sequence
  Description of Artificial Sequence: Synthetic oligonucleotide
ccuaaaauaauuuc

SEQ ID NO: 84455 - RNA, 13 nt, Artificial Sequence
  Description of Artificial Sequence: Synthetic oligonucleotide
uggaagauucagc

SEQ ID NO: 84456 - RNA, 12 nt, Artificial Sequence
  Description of Artificial Sequence: Synthetic oligonucleotide
uuaaacucuccu

SEQ ID NO: 84457 - RNA, 12 nt, Artificial Sequence
  Description of Artificial Sequence: Synthetic oligonucleotide
cagccuacaguu

SEQ ID NO: 84458 - RNA, 13 nt, Artificial Sequence
  Description of Artificial Sequence: Synthetic oligonucleotide
guuauguucaguc

SEQ ID NO: 84459 - RNA, 13 nt, Artificial Sequence
  Description of Artificial Sequence: Synthetic oligonucleotide
cacauacaaaaug

SEQ ID NO: 84460 - RNA, 9 nt, Artificial Sequence
  Description of Artificial Sequence: Synthetic oligonucleotide
uccuuuugc

SEQ ID NO: 84461 - RNA, 12 nt, Artificial Sequence
  Description of Artificial Sequence: Synthetic oligonucleotide
ugaccugugaag

SEQ ID NO: 84462 - RNA, 12 nt, Artificial Sequence
  Description of Artificial Sequence: Synthetic oligonucleotide
cuaucucacaca

SEQ ID NO: 84463 - RNA, 13 nt, Artificial Sequence
  Description of Artificial Sequence: Synthetic oligonucleotide
uguccucaauugu

SEQ ID NO: 84464 - RNA, 12 nt, Artificial Sequence
  Description of Artificial Sequence: Synthetic oligonucleotide
aaaccguagcug

SEQ ID NO: 84465 - RNA, 12 nt, Artificial Sequence
  Description of Artificial Sequence: Synthetic oligonucleotide
uagcuggcaagc

SEQ ID NO: 84466 - RNA, 14 nt, Artificial Sequence
  Description of Artificial Sequence: Synthetic oligonucleotide
uuguaugguuaaaa

SEQ ID NO: 84467 - RNA, 14 nt, Artificial Sequence
  Description of Artificial Sequence: Synthetic oligonucleotide
ugguuaaaagaugg

SEQ ID NO: 84468 - RNA, 13 nt, Artificial Sequence
  Description of Artificial Sequence: Synthetic oligonucleotide
cagggaauuauac

SEQ ID NO: 84469 - RNA, 12 nt, Artificial Sequence
  Description of Artificial Sequence: Synthetic oligonucleotide
acaaucuugcug

SEQ ID NO: 84470 - RNA, 13 nt, Artificial Sequence
  Description of Artificial Sequence: Synthetic oligonucleotide
ccaauaaugaaga

SEQ ID NO: 84471 - RNA, 13 nt, Artificial Sequence
  Description of Artificial Sequence: Synthetic oligonucleotide
acuuuggauguuc

SEQ ID NO: 84472 - RNA, 12 nt, Artificial Sequence
  Description of Artificial Sequence: Synthetic oligonucleotide
aaugcuuccacu

SEQ ID NO: 84473 - RNA, 11 nt, Artificial Sequence
  Description of Artificial Sequence: Synthetic oligonucleotide
gagaaaguuug

SEQ ID NO: 84474 - RNA, 11 nt, Artificial Sequence
  Description of Artificial Sequence: Synthetic oligonucleotide
aaagaacuacu

SEQ ID NO: 84475 - RNA, 12 nt, Artificial Sequence
  Description of Artificial Sequence: Synthetic oligonucleotide
uuagaaauacgg

SEQ ID NO: 84476 - RNA, 12 nt, Artificial Sequence
  Description of Artificial Sequence: Synthetic oligonucleotide
aacauggguaca

SEQ ID NO: 84477 - RNA, 14 nt, Artificial Sequence
  Description of Artificial Sequence: Synthetic oligonucleotide
aaagacacagaaga

SEQ ID NO: 84478 - RNA, 11 nt, Artificial Sequence
  Description of Artificial Sequence: Synthetic oligonucleotide
uaguagggagg

SEQ ID NO: 84479 - RNA, 12 nt, Artificial Sequence
  Description of Artificial Sequence: Synthetic oligonucleotide
gccuucugcagc

SEQ ID NO: 84480 - RNA, 10 nt, Artificial Sequence
  Description of Artificial Sequence: Synthetic oligonucleotide
ggucugguac

SEQ ID NO: 84481 - RNA, 12 nt, Artificial Sequence
  Description of Artificial Sequence: Synthetic oligonucleotide
cuaguccuuccg

SEQ ID NO: 84482 - RNA, 12 nt, Artificial Sequence
  Description of Artificial Sequence: Synthetic oligonucleotide
ccagugaauauu

SEQ ID NO: 84483 - RNA, 13 nt, Artificial Sequence
  Description of Artificial Sequence: Synthetic oligonucleotide
augaauucaaguu

SEQ ID NO: 84484 - RNA, 12 nt, Artificial Sequence
  Description of Artificial Sequence: Synthetic oligonucleotide
caggacacagau

SEQ ID NO: 84485 - RNA, 12 nt, Artificial Sequence
  Description of Artificial Sequence: Synthetic oligonucleotide
cucaaagcacag

SEQ ID NO: 84486 - RNA, 10 nt, Artificial Sequence
  Description of Artificial Sequence: Synthetic oligonucleotide
accacugcca

SEQ ID NO: 84487 - RNA, 13 nt, Artificial Sequence
  Description of Artificial Sequence: Synthetic oligonucleotide
gaaacuacuagug

SEQ ID NO: 84488 - RNA, 12 nt, Artificial Sequence
  Description of Artificial Sequence: Synthetic oligonucleotide
aagucggacagc

SEQ ID NO: 84489 - RNA, 13 nt, Artificial Sequence
  Description of Artificial Sequence: Synthetic oligonucleotide
gaaagcgaaaaau

SEQ ID NO: 84490 - RNA, 13 nt, Artificial Sequence
  Description of Artificial Sequence: Synthetic oligonucleotide
cccucugauuuag

SEQ ID NO: 84491 - RNA, 12 nt, Artificial Sequence
  Description of Artificial Sequence: Synthetic oligonucleotide
ugagcuauuuaa

SEQ ID NO: 84492 - RNA, 13 nt, Artificial Sequence
  Description of Artificial Sequence: Synthetic oligonucleotide
aaaaggugaaaaa

SEQ ID NO: 84493 - RNA, 14 nt, Artificial Sequence
  Description of Artificial Sequence: Synthetic oligonucleotide
gaaaaagcacuauu

SEQ ID NO: 84494 - RNA, 12 nt, Artificial Sequence
  Description of Artificial Sequence: Synthetic oligonucleotide
ggcugaaaagaa

SEQ ID NO: 84495 - RNA, 12 nt, Artificial Sequence
  Description of Artificial Sequence: Synthetic oligonucleotide
uaaacccuuaua

SEQ ID NO: 84496 - RNA, 13 nt, Artificial Sequence
  Description of Artificial Sequence: Synthetic oligonucleotide
cauacuauuagcc

SEQ ID NO: 84497 - RNA, 12 nt, Artificial Sequence
  Description of Artificial Sequence: Synthetic oligonucleotide
gacagaagcauu

SEQ ID NO: 84498 - RNA, 14 nt, Artificial Sequence
  Description of Artificial Sequence: Synthetic oligonucleotide
agagcaaauaagau

SEQ ID NO: 84499 - RNA, 14 nt, Artificial Sequence
  Description of Artificial Sequence: Synthetic oligonucleotide
ccaacauuuuucuc

SEQ ID NO: 84500 - RNA, 15 nt, Artificial Sequence
  Description of Artificial Sequence: Synthetic oligonucleotide
uuaaguaugagaaaa

SEQ ID NO: 84501 - RNA, 14 nt, Artificial Sequence
  Description of Artificial Sequence: Synthetic oligonucleotide
caggaauaaagaug

SEQ ID NO: 84502 - RNA, 13 nt, Artificial Sequence
  Description of Artificial Sequence: Synthetic oligonucleotide
aauuugaaugacc

SEQ ID NO: 84503 - RNA, 14 nt, Artificial Sequence
  Description of Artificial Sequence: Synthetic oligonucleotide
auguauaaagauag

SEQ ID NO: 84504 - RNA, 12 nt, Artificial Sequence
  Description of Artificial Sequence: Synthetic oligonucleotide
ggcuguaacuau

SEQ ID NO: 84505 - RNA, 11 nt, Artificial Sequence
  Description of Artificial Sequence: Synthetic oligonucleotide
ucugugaagug

SEQ ID NO: 84506 - RNA, 14 nt, Artificial Sequence
  Description of Artificial Sequence: Synthetic oligonucleotide
ccuuuaaggaaaug

SEQ ID NO: 84507 - RNA, 13 nt, Artificial Sequence
  Description of Artificial Sequence: Synthetic oligonucleotide
aaggauacaaaaa

SEQ ID NO: 84508 - RNA, 12 nt, Artificial Sequence
  Description of Artificial Sequence: Synthetic oligonucleotide
agaugcaauuug

SEQ ID NO: 84509 - RNA, 12 nt, Artificial Sequence
  Description of Artificial Sequence: Synthetic oligonucleotide
guucaaaacgaa

SEQ ID NO: 84510 - RNA, 11 nt, Artificial Sequence
  Description of Artificial Sequence: Synthetic oligonucleotide
gugaaaccuca

SEQ ID NO: 84511 - RNA, 13 nt, Artificial Sequence
  Description of Artificial Sequence: Synthetic oligonucleotide
acgaaagagaagc

SEQ ID NO: 84512 - RNA, 12 nt, Artificial Sequence
  Description of Artificial Sequence: Synthetic oligonucleotide
cuccacaagcgc

SEQ ID NO: 84513 - RNA, 14 nt, Artificial Sequence
  Description of Artificial Sequence: Synthetic oligonucleotide
gagaagauuccaaa

SEQ ID NO: 84514 - RNA, 13 nt, Artificial Sequence
  Description of Artificial Sequence: Synthetic oligonucleotide
aaucuggauucaa

SEQ ID NO: 84515 - RNA, 13 nt, Artificial Sequence
  Description of Artificial Sequence: Synthetic oligonucleotide
agaacagauuuga

SEQ ID NO: 84516 - RNA, 11 nt, Artificial Sequence
  Description of Artificial Sequence: Synthetic oligonucleotide
ccagagcugug

SEQ ID NO: 84517 - RNA, 12 nt, Artificial Sequence
  Description of Artificial Sequence: Synthetic oligonucleotide
ccucagauuguu

SEQ ID NO: 84518 - RNA, 12 nt, Artificial Sequence
  Description of Artificial Sequence: Synthetic oligonucleotide
cuauuuuaauua

SEQ ID NO: 84519 - RNA, 13 nt, Artificial Sequence
  Description of Artificial Sequence: Synthetic oligonucleotide
uuuaauuuauuaa

SEQ ID NO: 84520 - RNA, 12 nt, Artificial Sequence
  Description of Artificial Sequence: Synthetic oligonucleotide
augcaguuugaa

SEQ ID NO: 84521 - RNA, 11 nt, Artificial Sequence
  Description of Artificial Sequence: Synthetic oligonucleotide
caugcugcugg

SEQ ID NO: 84522 - RNA, 13 nt, Artificial Sequence
  Description of Artificial Sequence: Synthetic oligonucleotide
agaugugcauuuc

SEQ ID NO: 84523 - RNA, 12 nt, Artificial Sequence
  Description of Artificial Sequence: Synthetic oligonucleotide
ucaaaaccugug

SEQ ID NO: 84524 - RNA, 11 nt, Artificial Sequence
  Description of Artificial Sequence: Synthetic oligonucleotide
gaaugugggua

SEQ ID NO: 84525 - RNA, 10 nt, Artificial Sequence
  Description of Artificial Sequence: Synthetic oligonucleotide
auguggguag

SEQ ID NO: 84526 - RNA, 13 nt, Artificial Sequence
  Description of Artificial Sequence: Synthetic oligonucleotide
ugaaaaugagcau

SEQ ID NO: 84527 - RNA, 13 nt, Artificial Sequence
  Description of Artificial Sequence: Synthetic oligonucleotide
uugcuuuucaugu

SEQ ID NO: 84528 - RNA, 12 nt, Artificial Sequence
  Description of Artificial Sequence: Synthetic oligonucleotide
uguauuucuaua

SEQ ID NO: 84529 - RNA, 13 nt, Artificial Sequence
  Description of Artificial Sequence: Synthetic oligonucleotide
uuugauuaauguu

SEQ ID NO: 84530 - RNA, 12 nt, Artificial Sequence
  Description of Artificial Sequence: Synthetic oligonucleotide
caacguguauag

SEQ ID NO: 84531 - RNA, 12 nt, Artificial Sequence
  Description of Artificial Sequence: Synthetic oligonucleotide
cauauccuuggc

SEQ ID NO: 84532 - RNA, 13 nt, Artificial Sequence
  Description of Artificial Sequence: Synthetic oligonucleotide
uacuaacaucugg

SEQ ID NO: 84533 - RNA, 11 nt, Artificial Sequence
  Description of Artificial Sequence: Synthetic oligonucleotide
cauaaguugug

SEQ ID NO: 84534 - RNA, 12 nt, Artificial Sequence
  Description of Artificial Sequence: Synthetic oligonucleotide
gcaucauuuugg

SEQ ID NO: 84535 - RNA, 10 nt, Artificial Sequence
  Description of Artificial Sequence: Synthetic oligonucleotide
gcucuucuua

SEQ ID NO: 84536 - RNA, 10 nt, Artificial Sequence
  Description of Artificial Sequence: Synthetic oligonucleotide
agauuagguc

SEQ ID NO: 84537 - RNA, 12 nt, Artificial Sequence
  Description of Artificial Sequence: Synthetic oligonucleotide
auggaauugaaa

SEQ ID NO: 84538 - RNA, 13 nt, Artificial Sequence
  Description of Artificial Sequence: Synthetic oligonucleotide
cacacucauuccu

SEQ ID NO: 84539 - RNA, 12 nt, Artificial Sequence
  Description of Artificial Sequence: Synthetic oligonucleotide
uguagagguaac

SEQ ID NO: 84540 - RNA, 11 nt, Artificial Sequence
  Description of Artificial Sequence: Synthetic oligonucleotide
caaccacaugc

SEQ ID NO: 84541 - RNA, 12 nt, Artificial Sequence
  Description of Artificial Sequence: Synthetic oligonucleotide
ucggaaacaagu

SEQ ID NO: 84542 - RNA, 11 nt, Artificial Sequence
  Description of Artificial Sequence: Synthetic oligonucleotide
acucccaauaa

SEQ ID NO: 84543 - RNA, 13 nt, Artificial Sequence
  Description of Artificial Sequence: Synthetic oligonucleotide
aaugcuaagaaau

SEQ ID NO: 84544 - RNA, 11 nt, Artificial Sequence
  Description of Artificial Sequence: Synthetic oligonucleotide
gucuuucucua

SEQ ID NO: 84545 - RNA, 11 nt, Artificial Sequence
  Description of Artificial Sequence: Synthetic oligonucleotide
ugaauuucagg

SEQ ID NO: 84546 - RNA, 13 nt, Artificial Sequence
  Description of Artificial Sequence: Synthetic oligonucleotide
cgauucccucuca

SEQ ID NO: 84547 - RNA, 11 nt, Artificial Sequence
  Description of Artificial Sequence: Synthetic oligonucleotide
aggaaagugaa

SEQ ID NO: 84548 - RNA, 12 nt, Artificial Sequence
  Description of Artificial Sequence: Synthetic oligonucleotide
gaggcugcaugc

SEQ ID NO: 84549 - RNA, 11 nt, Artificial Sequence
  Description of Artificial Sequence: Synthetic oligonucleotide
ucucugaacag

SEQ ID NO: 84550 - RNA, 12 nt, Artificial Sequence
  Description of Artificial Sequence: Synthetic oligonucleotide
aacuuggcugua

SEQ ID NO: 84551 - RNA, 12 nt, Artificial Sequence
  Description of Artificial Sequence: Synthetic oligonucleotide
agaagccaaaau

SEQ ID NO: 84552 - RNA, 14 nt, Artificial Sequence
  Description of Artificial Sequence: Synthetic oligonucleotide
auuaaaagaagucc

SEQ ID NO: 84553 - RNA, 14 nt, Artificial Sequence
  Description of Artificial Sequence: Synthetic oligonucleotide
gaauccggauuauc

SEQ ID NO: 84554 - RNA, 12 nt, Artificial Sequence
  Description of Artificial Sequence: Synthetic oligonucleotide
aaugugacauca

SEQ ID NO: 84555 - RNA, 13 nt, Artificial Sequence
  Description of Artificial Sequence: Synthetic oligonucleotide
caucaaagcaagu

SEQ ID NO: 84556 - RNA, 11 nt, Artificial Sequence
  Description of Artificial Sequence: Synthetic oligonucleotide
agagagagaaa

SEQ ID NO: 84557 - RNA, 13 nt, Artificial Sequence
  Description of Artificial Sequence: Synthetic oligonucleotide
ucgcuguaguauu

SEQ ID NO: 84558 - RNA, 14 nt, Artificial Sequence
  Description of Artificial Sequence: Synthetic oligonucleotide
cgcuguaguauuua

SEQ ID NO: 84559 - RNA, 13 nt, Artificial Sequence
  Description of Artificial Sequence: Synthetic oligonucleotide
auuuaagcccaua

SEQ ID NO: 84560 - RNA, 15 nt, Artificial Sequence
  Description of Artificial Sequence: Synthetic oligonucleotide
auuaaaauaaacaug

SEQ ID NO: 84561 - RNA, 12 nt, Artificial Sequence
  Description of Artificial Sequence: Synthetic oligonucleotide
cuguucugaucg

SEQ ID NO: 84562 - RNA, 16 nt, Artificial Sequence
  Description of Artificial Sequence: Synthetic oligonucleotide
aaauaauuugaacuuu

SEQ ID NO: 84563 - RNA, 12 nt, Artificial Sequence
  Description of Artificial Sequence: Synthetic oligonucleotide
ugcgaccuuaau

SEQ ID NO: 84564 - RNA, 11 nt, Artificial Sequence
  Description of Artificial Sequence: Synthetic oligonucleotide
cugagaaagcu

SEQ ID NO: 84565 - RNA, 13 nt, Artificial Sequence
  Description of Artificial Sequence: Synthetic oligonucleotide
aguaaagaugcua

SEQ ID NO: 84566 - RNA, 12 nt, Artificial Sequence
  Description of Artificial Sequence: Synthetic oligonucleotide
cugcuuaauugc

SEQ ID NO: 84567 - RNA, 14 nt, Artificial Sequence
  Description of Artificial Sequence: Synthetic oligonucleotide
uaccauaugaauga

SEQ ID NO: 84568 - RNA, 12 nt, Artificial Sequence
  Description of Artificial Sequence: Synthetic oligonucleotide
aacuuucuuauc

SEQ ID NO: 84569 - RNA, 13 nt, Artificial Sequence
  Description of Artificial Sequence: Synthetic oligonucleotide
ccuugcaugacau

SEQ ID NO: 84570 - RNA, 14 nt, Artificial Sequence
  Description of Artificial Sequence: Synthetic oligonucleotide
ugaauuuguauaug

SEQ ID NO: 84571 - RNA, 12 nt, Artificial Sequence
  Description of Artificial Sequence: Synthetic oligonucleotide
gaauccuaguag

SEQ ID NO: 84572 - RNA, 10 nt, Artificial Sequence
  Description of Artificial Sequence: Synthetic oligonucleotide
gaaagggaag

SEQ ID NO: 84573 - RNA, 11 nt, Artificial Sequence
  Description of Artificial Sequence: Synthetic oligonucleotide
uaucggcaugc

SEQ ID NO: 84574 - RNA, 12 nt, Artificial Sequence
  Description of Artificial Sequence: Synthetic oligonucleotide
caccucauagua

SEQ ID NO: 84575 - RNA, 11 nt, Artificial Sequence
  Description of Artificial Sequence: Synthetic oligonucleotide
ccagaauugcc

SEQ ID NO: 84576 - RNA, 11 nt, Artificial Sequence
  Description of Artificial Sequence: Synthetic oligonucleotide
uggugaucugg

SEQ ID NO: 84577 - RNA, 12 nt, Artificial Sequence
  Description of Artificial Sequence: Synthetic oligonucleotide
gaucuggguaau

SEQ ID NO: 84578 - RNA, 12 nt, Artificial Sequence
  Description of Artificial Sequence: Synthetic oligonucleotide
ggaugugaugaa

SEQ ID NO: 84579 - RNA, 12 nt, Artificial Sequence
  Description of Artificial Sequence: Synthetic oligonucleotide
cauuuccacagc

SEQ ID NO: 84580 - RNA, 11 nt, Artificial Sequence
  Description of Artificial Sequence: Synthetic oligonucleotide
acagcuacacc

SEQ ID NO: 84581 - RNA, 12 nt, Artificial Sequence
  Description of Artificial Sequence: Synthetic oligonucleotide
ugcaguucuuac

SEQ ID NO: 84582 - RNA, 12 nt, Artificial Sequence
  Description of Artificial Sequence: Synthetic oligonucleotide
acgagaagaaga

SEQ ID NO: 84583 - RNA, 12 nt, Artificial Sequence
  Description of Artificial Sequence: Synthetic oligonucleotide
cgagaagaagau

SEQ ID NO: 84584 - RNA, 15 nt, Artificial Sequence
  Description of Artificial Sequence: Synthetic oligonucleotide
aagaagaucauuuac

SEQ ID NO: 84585 - RNA, 11 nt, Artificial Sequence
  Description of Artificial Sequence: Synthetic oligonucleotide
agaggaagagg

SEQ ID NO: 84586 - RNA, 12 nt, Artificial Sequence
  Description of Artificial Sequence: Synthetic oligonucleotide
gaggaagaggug

SEQ ID NO: 84587 - RNA, 13 nt, Artificial Sequence
  Description of Artificial Sequence: Synthetic oligonucleotide
cuacuuugagggc

SEQ ID NO: 84588 - RNA, 12 nt, Artificial Sequence
  Description of Artificial Sequence: Synthetic oligonucleotide
agggcaucuccu

SEQ ID NO: 84589 - RNA, 10 nt, Artificial Sequence
  Description of Artificial Sequence: Synthetic oligonucleotide
ggagugauau

SEQ ID NO: 84590 - RNA, 11 nt, Artificial Sequence
  Description of Artificial Sequence: Synthetic oligonucleotide
gagugauaugg

SEQ ID NO: 84591 - RNA, 12 nt, Artificial Sequence
  Description of Artificial Sequence: Synthetic oligonucleotide
ugcaguaaagau

SEQ ID NO: 84592 - RNA, 13 nt, Artificial Sequence
  Description of Artificial Sequence: Synthetic oligonucleotide
aguaaagauccua

SEQ ID NO: 84593 - RNA, 12 nt, Artificial Sequence
  Description of Artificial Sequence: Synthetic oligonucleotide
ugacaaaggaca

SEQ ID NO: 84594 - RNA, 13 nt, Artificial Sequence
  Description of Artificial Sequence: Synthetic oligonucleotide
gcaauugugaccc

SEQ ID NO: 84595 - RNA, 12 nt, Artificial Sequence
  Description of Artificial Sequence: Synthetic oligonucleotide
aacaucauccau

SEQ ID NO: 84596 - RNA, 12 nt, Artificial Sequence
  Description of Artificial Sequence: Synthetic oligonucleotide
ugaaauccaaca

SEQ ID NO: 84597 - RNA, 15 nt, Artificial Sequence
  Description of Artificial Sequence: Synthetic oligonucleotide
aacaauauauuucuc

SEQ ID NO: 84598 - RNA, 14 nt, Artificial Sequence
  Description of Artificial Sequence: Synthetic oligonucleotide
aacaguaaagucac

SEQ ID NO: 84599 - RNA, 14 nt, Artificial Sequence
  Description of Artificial Sequence: Synthetic oligonucleotide
ugugaagaaaguaa

SEQ ID NO: 84600 - RNA, 13 nt, Artificial Sequence
  Description of Artificial Sequence: Synthetic oligonucleotide
cuuccgagccauc

SEQ ID NO: 84601 - RNA, 12 nt, Artificial Sequence
  Description of Artificial Sequence: Synthetic oligonucleotide
aauggagguuga

SEQ ID NO: 84602 - RNA, 12 nt, Artificial Sequence
  Description of Artificial Sequence: Synthetic oligonucleotide
ggagguugaaua

SEQ ID NO: 84603 - RNA, 13 nt, Artificial Sequence
  Description of Artificial Sequence: Synthetic oligonucleotide
auuuugaguuuuc

SEQ ID NO: 84604 - RNA, 12 nt, Artificial Sequence
  Description of Artificial Sequence: Synthetic oligonucleotide
uauccuguuugu

SEQ ID NO: 84605 - RNA, 11 nt, Artificial Sequence
  Description of Artificial Sequence: Synthetic oligonucleotide
ccuguuuguuc

SEQ ID NO: 84606 - RNA, 10 nt, Artificial Sequence
  Description of Artificial Sequence: Synthetic oligonucleotide
cucuacagcc

SEQ ID NO: 84607 - RNA, 12 nt, Artificial Sequence
  Description of Artificial Sequence: Synthetic oligonucleotide
ucuuccauagcu

SEQ ID NO: 84608 - RNA, 12 nt, Artificial Sequence
  Description of Artificial Sequence: Synthetic oligonucleotide
auaaucuuccug

SEQ ID NO: 84609 - RNA, 12 nt, Artificial Sequence
  Description of Artificial Sequence: Synthetic oligonucleotide
uaaucuuccugu

SEQ ID NO: 84610 - RNA, 12 nt, Artificial Sequence
  Description of Artificial Sequence: Synthetic oligonucleotide
cuucaugacuug

SEQ ID NO: 84611 - RNA, 12 nt, Artificial Sequence
  Description of Artificial Sequence: Synthetic oligonucleotide
aagagggagaga

SEQ ID NO: 84612 - RNA, 12 nt, Artificial Sequence
  Description of Artificial Sequence: Synthetic oligonucleotide
cgucuccuacca

SEQ ID NO: 84613 - RNA, 12 nt, Artificial Sequence
  Description of Artificial Sequence: Synthetic oligonucleotide
gaucaaucggcc

SEQ ID NO: 84614 - RNA, 12 nt, Artificial Sequence
  Description of Artificial Sequence: Synthetic oligonucleotide
ggacgaacaucc

SEQ ID NO: 84615 - RNA, 11 nt, Artificial Sequence
  Description of Artificial Sequence: Synthetic oligonucleotide
agggucggaac

SEQ ID NO: 84616 - RNA, 10 nt, Artificial Sequence
  Description of Artificial Sequence: Synthetic oligonucleotide
ucggaaccca

SEQ ID NO: 84617 - RNA, 11 nt, Artificial Sequence
  Description of Artificial Sequence: Synthetic oligonucleotide
acccaagcuua

SEQ ID NO: 84618 - RNA, 14 nt, Artificial Sequence
  Description of Artificial Sequence: Synthetic oligonucleotide
gaacuuuaagcaac

SEQ ID NO: 84619 - RNA, 11 nt, Artificial Sequence
  Description of Artificial Sequence: Synthetic oligonucleotide
acuauucagug

SEQ ID NO: 84620 - RNA, 11 nt, Artificial Sequence
  Description of Artificial Sequence: Synthetic oligonucleotide
cuauucagugg

SEQ ID NO: 84621 - RNA, 13 nt, Artificial Sequence
  Description of Artificial Sequence: Synthetic oligonucleotide
aaacacagauaac

SEQ ID NO: 84622 - RNA, 12 nt, Artificial Sequence
  Description of Artificial Sequence: Synthetic oligonucleotide
cuuaagaaaaga

SEQ ID NO: 84623 - RNA, 12 nt, Artificial Sequence
  Description of Artificial Sequence: Synthetic oligonucleotide
cugaaggagugu

SEQ ID NO: 84624 - RNA, 10 nt, Artificial Sequence
  Description of Artificial Sequence: Synthetic oligonucleotide
ucaccgcggg

SEQ ID NO: 84625 - RNA, 14 nt, Artificial Sequence
  Description of Artificial Sequence: Synthetic oligonucleotide
agcagaaauaagcg

SEQ ID NO: 84626 - RNA, 12 nt, Artificial Sequence
  Description of Artificial Sequence: Synthetic oligonucleotide
aagcgugccguu

SEQ ID NO: 84627 - RNA, 12 nt, Artificial Sequence
  Description of Artificial Sequence: Synthetic oligonucleotide
agaaacagucac

SEQ ID NO: 84628 - RNA, 12 nt, Artificial Sequence
  Description of Artificial Sequence: Synthetic oligonucleotide
agaggaagaagg

SEQ ID NO: 84629 - RNA, 14 nt, Artificial Sequence
  Description of Artificial Sequence: Synthetic oligonucleotide
uguauucaaaauau

SEQ ID NO: 84630 - RNA, 13 nt, Artificial Sequence
  Description of Artificial Sequence: Synthetic oligonucleotide
auuuuccucccuu

SEQ ID NO: 84631 - RNA, 13 nt, Artificial Sequence
  Description of Artificial Sequence: Synthetic oligonucleotide
caaagaaagauag

SEQ ID NO: 84632 - RNA, 12 nt, Artificial Sequence
  Description of Artificial Sequence: Synthetic oligonucleotide
aagaaagauaga

SEQ ID NO: 84633 - RNA, 13 nt, Artificial Sequence
  Description of Artificial Sequence: Synthetic oligonucleotide
gaaagcauuuguu

SEQ ID NO: 84634 - RNA, 13 nt, Artificial Sequence
  Description of Artificial Sequence: Synthetic oligonucleotide
ugaguuaaacgaa

SEQ ID NO: 84635 - RNA, 12 nt, Artificial Sequence
  Description of Artificial Sequence: Synthetic oligonucleotide
acugauacagaa

SEQ ID NO: 84636 - RNA, 12 nt, Artificial Sequence
  Description of Artificial Sequence: Synthetic oligonucleotide
auauuauauaua

SEQ ID NO: 84637 - RNA, 12 nt, Artificial Sequence
  Description of Artificial Sequence: Synthetic oligonucleotide
auuauauauaua

SEQ ID NO: 84638 - RNA, 12 nt, Artificial Sequence
  Description of Artificial Sequence: Synthetic oligonucleotide
ucacuggaugua

SEQ ID NO: 84639 - RNA, 12 nt, Artificial Sequence
  Description of Artificial Sequence: Synthetic oligonucleotide
cagggaagagga

SEQ ID NO: 84640 - RNA, 15 nt, Artificial Sequence
  Description of Artificial Sequence: Synthetic oligonucleotide
augaucuuuuuuuug

SEQ ID NO: 84641 - RNA, 11 nt, Artificial Sequence
  Description of Artificial Sequence: Synthetic oligonucleotide
aguucacggcc

SEQ ID NO: 84642 - RNA, 13 nt, Artificial Sequence
  Description of Artificial Sequence: Synthetic oligonucleotide
caccaucacacca

SEQ ID NO: 84643 - RNA, 11 nt, Artificial Sequence
  Description of Artificial Sequence: Synthetic oligonucleotide
ccugcggguuu

SEQ ID NO: 84644 - RNA, 10 nt, Artificial Sequence
  Description of Artificial Sequence: Synthetic oligonucleotide
auccaguuug

SEQ ID NO: 84645 - RNA, 13 nt, Artificial Sequence
  Description of Artificial Sequence: Synthetic oligonucleotide
guuaaggacuucu

SEQ ID NO: 84646 - RNA, 13 nt, Artificial Sequence
  Description of Artificial Sequence: Synthetic oligonucleotide
cagugggacagag

SEQ ID NO: 84647 - RNA, 14 nt, Artificial Sequence
  Description of Artificial Sequence: Synthetic oligonucleotide
aauuuguuauugug

SEQ ID NO: 84648 - RNA, 13 nt, Artificial Sequence
  Description of Artificial Sequence: Synthetic oligonucleotide
uucaaaugcauuu

SEQ ID NO: 84649 - RNA, 10 nt, Artificial Sequence
  Description of Artificial Sequence: Synthetic oligonucleotide
caggaaagcc

SEQ ID NO: 84650 - RNA, 11 nt, Artificial Sequence
  Description of Artificial Sequence: Synthetic oligonucleotide
aggaaagcccu

SEQ ID NO: 84651 - RNA, 12 nt, Artificial Sequence
  Description of Artificial Sequence: Synthetic oligonucleotide
cccagcauggcc

SEQ ID NO: 84652 - RNA, 11 nt, Artificial Sequence
  Description of Artificial Sequence: Synthetic oligonucleotide
cuucucccuga

SEQ ID NO: 84653 - RNA, 12 nt, Artificial Sequence
  Description of Artificial Sequence: Synthetic oligonucleotide
gaagaagcccuu

SEQ ID NO: 84654 - RNA, 12 nt, Artificial Sequence
  Description of Artificial Sequence: Synthetic oligonucleotide
agaagcccuuca

SEQ ID NO: 84655 - RNA, 11 nt, Artificial Sequence
  Description of Artificial Sequence: Synthetic oligonucleotide
gcccuucagcg

SEQ ID NO: 84656 - RNA, 11 nt, Artificial Sequence
  Description of Artificial Sequence: Synthetic oligonucleotide
ccuucagcggc

SEQ ID NO: 84657 - RNA, 12 nt, Artificial Sequence
  Description of Artificial Sequence: Synthetic oligonucleotide
ucagcggccagu

SEQ ID NO: 84658 - RNA, 12 nt, Artificial Sequence
  Description of Artificial Sequence: Synthetic oligonucleotide
ugaaaagcuccg

SEQ ID NO: 84659 - RNA, 11 nt, Artificial Sequence
  Description of Artificial Sequence: Synthetic oligonucleotide
aaaagcuccgg

SEQ ID NO: 84660 - RNA, 13 nt, Artificial Sequence
  Description of Artificial Sequence: Synthetic oligonucleotide
agucaacagucug

SEQ ID NO: 84661 - RNA, 13 nt, Artificial Sequence
  Description of Artificial Sequence: Synthetic oligonucleotide
cagaguucaaaag

SEQ ID NO: 84662 - RNA, 13 nt, Artificial Sequence
  Description of Artificial Sequence: Synthetic oligonucleotide
agaguucaaaagc

SEQ ID NO: 84663 - RNA, 12 nt, Artificial Sequence
  Description of Artificial Sequence: Synthetic oligonucleotide
uucaaaagcccu

SEQ ID NO: 84664 - RNA, 12 nt, Artificial Sequence
  Description of Artificial Sequence: Synthetic oligonucleotide
ucaaaagcccuu

SEQ ID NO: 84665 - RNA, 12 nt, Artificial Sequence
  Description of Artificial Sequence: Synthetic oligonucleotide
aaaagcccuuca

SEQ ID NO: 84666 - RNA, 12 nt, Artificial Sequence
  Description of Artificial Sequence: Synthetic oligonucleotide
aaagcccuucag

SEQ ID NO: 84667 - RNA, 13 nt, Artificial Sequence
  Description of Artificial Sequence: Synthetic oligonucleotide
gugaagccgcucg

SEQ ID NO: 84668 - RNA, 12 nt, Artificial Sequence
  Description of Artificial Sequence: Synthetic oligonucleotide
cacgccagucaa

SEQ ID NO: 84669 - RNA, 13 nt, Artificial Sequence
  Description of Artificial Sequence: Synthetic oligonucleotide
uucuuggugcgug

SEQ ID NO: 84670 - RNA, 14 nt, Artificial Sequence
  Description of Artificial Sequence: Synthetic oligonucleotide
auuggauucaucag

SEQ ID NO: 84671 - RNA, 13 nt, Artificial Sequence
  Description of Artificial Sequence: Synthetic oligonucleotide
uggaauaccuaag

SEQ ID NO: 84672 - RNA, 12 nt, Artificial Sequence
  Description of Artificial Sequence: Synthetic oligonucleotide
auuugaggcuca

SEQ ID NO: 84673 - RNA, 11 nt, Artificial Sequence
  Description of Artificial Sequence: Synthetic oligonucleotide
ucuacaauugg

SEQ ID NO: 84674 - RNA, 12 nt, Artificial Sequence
  Description of Artificial Sequence: Synthetic oligonucleotide
uaguuaggagcc

SEQ ID NO: 84675 - RNA, 13 nt, Artificial Sequence
  Description of Artificial Sequence: Synthetic oligonucleotide
agucaauauccac

SEQ ID NO: 84676 - RNA, 13 nt, Artificial Sequence
  Description of Artificial Sequence: Synthetic oligonucleotide
auguucagucaca

SEQ ID NO: 84677 - RNA, 12 nt, Artificial Sequence
  Description of Artificial Sequence: Synthetic oligonucleotide
acacacacauac

SEQ ID NO: 84678 - RNA, 12 nt, Artificial Sequence
  Description of Artificial Sequence: Synthetic oligonucleotide
uuccuuuugcuu

SEQ ID NO: 84679 - RNA, 16 nt, Artificial Sequence
  Description of Artificial Sequence: Synthetic oligonucleotide
uuuuaaaguaauuuuu

SEQ ID NO: 84680 - RNA, 13 nt, Artificial Sequence
  Description of Artificial Sequence: Synthetic oligonucleotide
caacagucaaugg

SEQ ID NO: 84681 - RNA, 13 nt, Artificial Sequence
  Description of Artificial Sequence: Synthetic oligonucleotide
ucgacaaaccaau

SEQ ID NO: 84682 - RNA, 12 nt, Artificial Sequence
  Description of Artificial Sequence: Synthetic oligonucleotide
acugcuaccacu

SEQ ID NO: 84683 - RNA, 13 nt, Artificial Sequence
  Description of Artificial Sequence: Synthetic oligonucleotide
gcaagcggucuua

SEQ ID NO: 84684 - RNA, 13 nt, Artificial Sequence
  Description of Artificial Sequence: Synthetic oligonucleotide
ggucuuaccggcu

SEQ ID NO: 84685 - RNA, 11 nt, Artificial Sequence
  Description of Artificial Sequence: Synthetic oligonucleotide
gauggguuacc

SEQ ID NO: 84686 - RNA, 11 nt, Artificial Sequence
  Description of Artificial Sequence: Synthetic oligonucleotide
guuaccugcga

SEQ ID NO: 84687 - RNA, 12 nt, Artificial Sequence
  Description of Artificial Sequence: Synthetic oligonucleotide
aaucuugcugag

SEQ ID NO: 84688 - RNA, 13 nt, Artificial Sequence
  Description of Artificial Sequence: Synthetic oligonucleotide
agcauaaaacagu

SEQ ID NO: 84689 - RNA, 12 nt, Artificial Sequence
  Description of Artificial Sequence: Synthetic oligonucleotide
guccuuuauccu

SEQ ID NO: 84690 - RNA, 12 nt, Artificial Sequence
  Description of Artificial Sequence: Synthetic oligonucleotide
caacgcaaguug

SEQ ID NO: 84691 - RNA, 13 nt, Artificial Sequence
  Description of Artificial Sequence: Synthetic oligonucleotide
aaacugaaaccau

SEQ ID NO: 84692 - RNA, 14 nt, Artificial Sequence
  Description of Artificial Sequence: Synthetic oligonucleotide
acuuuguuaaauau

SEQ ID NO: 84693 - RNA, 14 nt, Artificial Sequence
  Description of Artificial Sequence: Synthetic oligonucleotide
guauauuaaaaguu

SEQ ID NO: 84694 - RNA, 13 nt, Artificial Sequence
  Description of Artificial Sequence: Synthetic oligonucleotide
guuuugacuuaac

SEQ ID NO: 84695 - RNA, 13 nt, Artificial Sequence
  Description of Artificial Sequence: Synthetic oligonucleotide
gcaaacucagcac

SEQ ID NO: 84696 - RNA, 11 nt, Artificial Sequence
  Description of Artificial Sequence: Synthetic oligonucleotide
ugcugaccuca

SEQ ID NO: 84697 - RNA, 14 nt, Artificial Sequence
  Description of Artificial Sequence: Synthetic oligonucleotide
uuuauucagaucgc

SEQ ID NO: 84698 - RNA, 13 nt, Artificial Sequence
  Description of Artificial Sequence: Synthetic oligonucleotide
aggguucugggau

SEQ ID NO: 84699 - RNA, 15 nt, Artificial Sequence
  Description of Artificial Sequence: Synthetic oligonucleotide
auauuggaaauuaug

SEQ ID NO: 84700 - RNA, 13 nt, Artificial Sequence
  Description of Artificial Sequence: Synthetic oligonucleotide
auggaagcacuag

SEQ ID NO: 84701 - RNA, 13 nt, Artificial Sequence
  Description of Artificial Sequence: Synthetic oligonucleotide
guuuuuaugugga

SEQ ID NO: 84702 - RNA, 12 nt, Artificial Sequence
  Description of Artificial Sequence: Synthetic oligonucleotide
ggaauugguaga

SEQ ID NO: 84703 - RNA, 13 nt, Artificial Sequence
  Description of Artificial Sequence: Synthetic oligonucleotide
uuagacuuggaga

SEQ ID NO: 84704 - RNA, 13 nt, Artificial Sequence
  Description of Artificial Sequence: Synthetic oligonucleotide
uuacaguauucca

SEQ ID NO: 84705 - RNA, 15 nt, Artificial Sequence
  Description of Artificial Sequence: Synthetic oligonucleotide
ccacugaugaauuaa

SEQ ID NO: 84706 - RNA, 12 nt, Artificial Sequence
  Description of Artificial Sequence: Synthetic oligonucleotide
ccacaucaucac

SEQ ID NO: 84707 - RNA, 13 nt, Artificial Sequence
  Description of Artificial Sequence: Synthetic oligonucleotide
cucaccaaacaga

SEQ ID NO: 84708 - RNA, 12 nt, Artificial Sequence
  Description of Artificial Sequence: Synthetic oligonucleotide
ggaacaugaugg

SEQ ID NO: 84709 - RNA, 12 nt, Artificial Sequence
  Description of Artificial Sequence: Synthetic oligonucleotide
cauguagacugc

SEQ ID NO: 84710 - RNA, 13 nt, Artificial Sequence
  Description of Artificial Sequence: Synthetic oligonucleotide
ggaucuauuuaug

SEQ ID NO: 84711 - RNA, 12 nt, Artificial Sequence
  Description of Artificial Sequence: Synthetic oligonucleotide
gcacuauuauca

SEQ ID NO: 84712 - RNA, 11 nt, Artificial Sequence
  Description of Artificial Sequence: Synthetic oligonucleotide
aucaguucugc

SEQ ID NO: 84713 - RNA, 13 nt, Artificial Sequence
  Description of Artificial Sequence: Synthetic oligonucleotide
agauuaaaccuac

SEQ ID NO: 84714 - RNA, 13 nt, Artificial Sequence
  Description of Artificial Sequence: Synthetic oligonucleotide
auaaaauccuucu

SEQ ID NO: 84715 - RNA, 12 nt, Artificial Sequence
  Description of Artificial Sequence: Synthetic oligonucleotide
aaugcuguagac

SEQ ID NO: 84716 - RNA, 13 nt, Artificial Sequence
  Description of Artificial Sequence: Synthetic oligonucleotide
uugauaggaauag

SEQ ID NO: 84717 - RNA, 11 nt, Artificial Sequence
  Description of Artificial Sequence: Synthetic oligonucleotide
aauggcccuga

SEQ ID NO: 84718 - RNA, 11 nt, Artificial Sequence
  Description of Artificial Sequence: Synthetic oligonucleotide
uuccucaagca

SEQ ID NO: 84719 - RNA, 10 nt, Artificial Sequence
  Description of Artificial Sequence: Synthetic oligonucleotide
guucagccca

SEQ ID NO: 84720 - RNA, 11 nt, Artificial Sequence
  Description of Artificial Sequence: Synthetic oligonucleotide
gcugcugaacc

SEQ ID NO: 84721 - RNA, 12 nt, Artificial Sequence
  Description of Artificial Sequence: Synthetic oligonucleotide
aaguucucuuca

SEQ ID NO: 84722 - RNA, 11 nt, Artificial Sequence
  Description of Artificial Sequence: Synthetic oligonucleotide
ccagccuagag

SEQ ID NO: 84723 - RNA, 13 nt, Artificial Sequence
  Description of Artificial Sequence: Synthetic oligonucleotide
cucugugaagugu

SEQ ID NO: 84724 - RNA, 14 nt, Artificial Sequence
  Description of Artificial Sequence: Synthetic oligonucleotide
ugagaaaauuucaa

SEQ ID NO: 84725 - RNA, 11 nt, Artificial Sequence
  Description of Artificial Sequence: Synthetic oligonucleotide
aauccuccuga

SEQ ID NO: 84726 - RNA, 12 nt, Artificial Sequence
  Description of Artificial Sequence: Synthetic oligonucleotide
gugacaucauau

SEQ ID NO: 84727 - RNA, 13 nt, Artificial Sequence
  Description of Artificial Sequence: Synthetic oligonucleotide
aaucuucaucaua

SEQ ID NO: 84728 - RNA, 13 nt, Artificial Sequence
  Description of Artificial Sequence: Synthetic oligonucleotide
gacuagcuauuaa

SEQ ID NO: 84729 - RNA, 14 nt, Artificial Sequence
  Description of Artificial Sequence: Synthetic oligonucleotide
ucucuacuaaaaau

SEQ ID NO: 84730 - RNA, 12 nt, Artificial Sequence
  Description of Artificial Sequence: Synthetic oligonucleotide
ucuaucucgccu

SEQ ID NO: 84731 - RNA, 13 nt, Artificial Sequence
  Description of Artificial Sequence: Synthetic oligonucleotide
cuucgguccaguu

SEQ ID NO: 84732 - RNA, 11 nt, Artificial Sequence
  Description of Artificial Sequence: Synthetic oligonucleotide
gauguagccgc

SEQ ID NO: 84733 - RNA, 12 nt, Artificial Sequence
  Description of Artificial Sequence: Synthetic oligonucleotide
ugaggagacuug

SEQ ID NO: 84734 - RNA, 12 nt, Artificial Sequence
  Description of Artificial Sequence: Synthetic oligonucleotide
gaguagugagga

SEQ ID NO: 84735 - RNA, 14 nt, Artificial Sequence
  Description of Artificial Sequence: Synthetic oligonucleotide
cagaugaguacaaa

SEQ ID NO: 84736 - RNA, 13 nt, Artificial Sequence
  Description of Artificial Sequence: Synthetic oligonucleotide
guuguuaaugggc

SEQ ID NO: 84737 - RNA, 13 nt, Artificial Sequence
  Description of Artificial Sequence: Synthetic oligonucleotide
uuuuuaauuuauu

SEQ ID NO: 84738 - RNA, 12 nt, Artificial Sequence
  Description of Artificial Sequence: Synthetic oligonucleotide
uauuuaaauaug

SEQ ID NO: 84739 - RNA, 13 nt, Artificial Sequence
  Description of Artificial Sequence: Synthetic oligonucleotide
uauccuuuguuuc

SEQ ID NO: 84740 - RNA, 14 nt, Artificial Sequence
  Description of Artificial Sequence: Synthetic oligonucleotide
cgucuaaguguuug

SEQ ID NO: 84741 - RNA, 12 nt, Artificial Sequence
  Description of Artificial Sequence: Synthetic oligonucleotide
accugugacaaa

SEQ ID NO: 84742 - RNA, 13 nt, Artificial Sequence
  Description of Artificial Sequence: Synthetic oligonucleotide
ccaggcugaauua

SEQ ID NO: 84743 - RNA, 14 nt, Artificial Sequence
  Description of Artificial Sequence: Synthetic oligonucleotide
gucauucuuacaau

SEQ ID NO: 84744 - RNA, 15 nt, Artificial Sequence
  Description of Artificial Sequence: Synthetic oligonucleotide
ucauucuuacaauug

SEQ ID NO: 84745 - RNA, 12 nt, Artificial Sequence
  Description of Artificial Sequence: Synthetic oligonucleotide
cagagaguguac

SEQ ID NO: 84746 - RNA, 12 nt, Artificial Sequence
  Description of Artificial Sequence: Synthetic oligonucleotide
agaacucagcag

SEQ ID NO: 84747 - RNA, 13 nt, Artificial Sequence
  Description of Artificial Sequence: Synthetic oligonucleotide
uuuauuuucagua

SEQ ID NO: 84748 - RNA, 12 nt, Artificial Sequence
  Description of Artificial Sequence: Synthetic oligonucleotide
ucuuaaauggaa

SEQ ID NO: 84749 - RNA, 13 nt, Artificial Sequence
  Description of Artificial Sequence: Synthetic oligonucleotide
ugccuaaaauugu

SEQ ID NO: 84750 - RNA, 12 nt, Artificial Sequence
  Description of Artificial Sequence: Synthetic oligonucleotide
agacugugagcu

SEQ ID NO: 84751 - RNA, 14 nt, Artificial Sequence
  Description of Artificial Sequence: Synthetic oligonucleotide
ugcuuuuuauuaau

SEQ ID NO: 84752 - RNA, 13 nt, Artificial Sequence
  Description of Artificial Sequence: Synthetic oligonucleotide
cucuucuuacauu

SEQ ID NO: 84753 - RNA, 15 nt, Artificial Sequence
  Description of Artificial Sequence: Synthetic oligonucleotide
cauuuguaaaaaugu

SEQ ID NO: 84754 - RNA, 15 nt, Artificial Sequence
  Description of Artificial Sequence: Synthetic oligonucleotide
aucuuaauucauauu

SEQ ID NO: 84755 - RNA, 13 nt, Artificial Sequence
  Description of Artificial Sequence: Synthetic oligonucleotide
gaacuaaucauga

SEQ ID NO: 84756 - RNA, 12 nt, Artificial Sequence
  Description of Artificial Sequence: Synthetic oligonucleotide
ucugcucuuggg

SEQ ID NO: 84757 - RNA, 13 nt, Artificial Sequence
  Description of Artificial Sequence: Synthetic oligonucleotide
caguagcuuugag

SEQ ID NO: 84758 - RNA, 14 nt, Artificial Sequence
  Description of Artificial Sequence: Synthetic oligonucleotide
cacguaauauuuca

SEQ ID NO: 84759 - RNA, 13 nt, Artificial Sequence
  Description of Artificial Sequence: Synthetic oligonucleotide
uauucucuucacu

SEQ ID NO: 84760 - RNA, 14 nt, Artificial Sequence
  Description of Artificial Sequence: Synthetic oligonucleotide
cuaaugcuaagaaa

SEQ ID NO: 84761 - RNA, 12 nt, Artificial Sequence
  Description of Artificial Sequence: Synthetic oligonucleotide
gcugaaaaucaa

SEQ ID NO: 84762 - RNA, 14 nt, Artificial Sequence
  Description of Artificial Sequence: Synthetic oligonucleotide
aauaugauuacuuu

SEQ ID NO: 84763 - RNA, 14 nt, Artificial Sequence
  Description of Artificial Sequence: Synthetic oligonucleotide
cauuuuguucuaca

SEQ ID NO: 84764 - RNA, 12 nt, Artificial Sequence
  Description of Artificial Sequence: Synthetic oligonucleotide
cccgggacucuc

SEQ ID NO: 84765 - RNA, 14 nt, Artificial Sequence
  Description of Artificial Sequence: Synthetic oligonucleotide
ccuuuaaaguaaag

SEQ ID NO: 84766 - RNA, 13 nt, Artificial Sequence
  Description of Artificial Sequence: Synthetic oligonucleotide
ucuggaagccugg

SEQ ID NO: 84767 - RNA, 14 nt, Artificial Sequence
  Description of Artificial Sequence: Synthetic oligonucleotide
aaaacaaaagagag

SEQ ID NO: 84768 - RNA, 13 nt, Artificial Sequence
  Description of Artificial Sequence: Synthetic oligonucleotide
aucaguuaugccg

SEQ ID NO: 84769 - RNA, 13 nt, Artificial Sequence
  Description of Artificial Sequence: Synthetic oligonucleotide
uaaaagaagucca

SEQ ID NO: 84770 - RNA, 11 nt, Artificial Sequence
  Description of Artificial Sequence: Synthetic oligonucleotide
aggugagguua

SEQ ID NO: 84771 - RNA, 11 nt, Artificial Sequence
  Description of Artificial Sequence: Synthetic oligonucleotide
gggaagaggac

SEQ ID NO: 84772 - RNA, 13 nt, Artificial Sequence
  Description of Artificial Sequence: Synthetic oligonucleotide
aagcaaguauugu

SEQ ID NO: 84773 - RNA, 12 nt, Artificial Sequence
  Description of Artificial Sequence: Synthetic oligonucleotide
auuguagcacuc

SEQ ID NO: 84774 - RNA, 14 nt, Artificial Sequence
  Description of Artificial Sequence: Synthetic oligonucleotide
acaaaaccacaaau

SEQ ID NO: 84775 - RNA, 12 nt, Artificial Sequence
  Description of Artificial Sequence: Synthetic oligonucleotide
uaagcccauaca

SEQ ID NO: 84776 - RNA, 11 nt, Artificial Sequence
  Description of Artificial Sequence: Synthetic oligonucleotide
agcccauacag

SEQ ID NO: 84777 - RNA, 12 nt, Artificial Sequence
  Description of Artificial Sequence: Synthetic oligonucleotide
cagaaaccuucc

SEQ ID NO: 84778 - RNA, 10 nt, Artificial Sequence
  Description of Artificial Sequence: Synthetic oligonucleotide
guauaccuac

SEQ ID NO: 84779 - RNA, 13 nt, Artificial Sequence
  Description of Artificial Sequence: Synthetic oligonucleotide
gccaguuuucgga

SEQ ID NO: 84780 - RNA, 9 nt, Artificial Sequence
  Description of Artificial Sequence: Synthetic oligonucleotide
ggaacaggg

SEQ ID NO: 84781 - RNA, 13 nt, Artificial Sequence
  Description of Artificial Sequence: Synthetic oligonucleotide
uuaacuuuccagu

SEQ ID NO: 84782 - RNA, 14 nt, Artificial Sequence
  Description of Artificial Sequence: Synthetic oligonucleotide
aaaguuugguuuug

SEQ ID NO: 84783 - RNA, 12 nt, Artificial Sequence
  Description of Artificial Sequence: Synthetic oligonucleotide
cuucccacugua

SEQ ID NO: 84784 - RNA, 13 nt, Artificial Sequence
  Description of Artificial Sequence: Synthetic oligonucleotide
ugauaccauauga

SEQ ID NO: 84785 - RNA, 11 nt, Artificial Sequence
  Description of Artificial Sequence: Synthetic oligonucleotide
aacaugggcug

SEQ ID NO: 84786 - RNA, 13 nt, Artificial Sequence
  Description of Artificial Sequence: Synthetic oligonucleotide
caacuuuuucaua

SEQ ID NO: 84787 - RNA, 12 nt, Artificial Sequence
  Description of Artificial Sequence: Synthetic oligonucleotide
caugaggccgga

SEQ ID NO: 84788 - RNA, 11 nt, Artificial Sequence
  Description of Artificial Sequence: Synthetic oligonucleotide
acugcauuugu

SEQ ID NO: 84789 - RNA, 13 nt, Artificial Sequence
  Description of Artificial Sequence: Synthetic oligonucleotide
aauguuuacuacc

SEQ ID NO: 84790 - RNA, 15 nt, Artificial Sequence
  Description of Artificial Sequence: Synthetic oligonucleotide
aauuuuuugaugaaa

SEQ ID NO: 84791 - RNA, 14 nt, Artificial Sequence
  Description of Artificial Sequence: Synthetic oligonucleotide
cagugugugaauuu

SEQ ID NO: 84792 - RNA, 13 nt, Artificial Sequence
  Description of Artificial Sequence: Synthetic oligonucleotide
gagcaauguaugu

SEQ ID NO: 84793 - RNA, 14 nt, Artificial Sequence
  Description of Artificial Sequence: Synthetic oligonucleotide
aaagcacauauaua

SEQ ID NO: 84794 - RNA, 14 nt, Artificial Sequence
  Description of Artificial Sequence: Synthetic oligonucleotide
guaauaguuucucc

SEQ ID NO: 84795 - RNA, 13 nt, Artificial Sequence
  Description of Artificial Sequence: Synthetic oligonucleotide
aguuucuccaaau

SEQ ID NO: 84796 - RNA, 13 nt, Artificial Sequence
  Description of Artificial Sequence: Synthetic oligonucleotide
uacuuccuagaaa

SEQ ID NO: 84797 - RNA, 13 nt, Artificial Sequence
  Description of Artificial Sequence: Synthetic oligonucleotide
uacaccauauaug

SEQ ID NO: 84798 - RNA, 14 nt, Artificial Sequence
  Description of Artificial Sequence: Synthetic oligonucleotide
auauaugaauggag

SEQ ID NO: 84799 - RNA, 13 nt, Artificial Sequence
  Description of Artificial Sequence: Synthetic oligonucleotide
acgagaagaagau

SEQ ID NO: 84800 - RNA, 13 nt, Artificial Sequence
  Description of Artificial Sequence: Synthetic oligonucleotide
ucauuuacaggga

SEQ ID NO: 84801 - RNA, 13 nt, Artificial Sequence
  Description of Artificial Sequence: Synthetic oligonucleotide
cauuuacagggac

SEQ ID NO: 84802 - RNA, 10 nt, Artificial Sequence
  Description of Artificial Sequence: Synthetic oligonucleotide
agggaccuga

SEQ ID NO: 84803 - RNA, 14 nt, Artificial Sequence
  Description of Artificial Sequence: Synthetic oligonucleotide
uguuugacugcauc

SEQ ID NO: 84804 - RNA, 13 nt, Artificial Sequence
  Description of Artificial Sequence: Synthetic oligonucleotide
uuugacugcaucg

SEQ ID NO: 84805 - RNA, 12 nt, Artificial Sequence
  Description of Artificial Sequence: Synthetic oligonucleotide
gaguucacaggg

SEQ ID NO: 84806 - RNA, 13 nt, Artificial Sequence
  Description of Artificial Sequence: Synthetic oligonucleotide
ggcaccucugucc

SEQ ID NO: 84807 - RNA, 15 nt, Artificial Sequence
  Description of Artificial Sequence: Synthetic oligonucleotide
gguuugucuuuuuaa

SEQ ID NO: 84808 - RNA, 14 nt, Artificial Sequence
  Description of Artificial Sequence: Synthetic oligonucleotide
uuugucuuuuuaag

SEQ ID NO: 84809 - RNA, 13 nt, Artificial Sequence
  Description of Artificial Sequence: Synthetic oligonucleotide
ccuaaagguuguc

SEQ ID NO: 84810 - RNA, 12 nt, Artificial Sequence
  Description of Artificial Sequence: Synthetic oligonucleotide
aagguugucgac

SEQ ID NO: 84811 - RNA, 13 nt, Artificial Sequence
  Description of Artificial Sequence: Synthetic oligonucleotide
accuggcaauugu

SEQ ID NO: 84812 - RNA, 12 nt, Artificial Sequence
  Description of Artificial Sequence: Synthetic oligonucleotide
aguggugcgagg

SEQ ID NO: 84813 - RNA, 13 nt, Artificial Sequence
  Description of Artificial Sequence: Synthetic oligonucleotide
agagacaugaaau

SEQ ID NO: 84814 - RNA, 13 nt, Artificial Sequence
  Description of Artificial Sequence: Synthetic oligonucleotide
auauauuucucca

SEQ ID NO: 84815 - RNA, 10 nt, Artificial Sequence
  Description of Artificial Sequence: Synthetic oligonucleotide
caugaaggcu

SEQ ID NO: 84816 - RNA, 11 nt, Artificial Sequence
  Description of Artificial Sequence: Synthetic oligonucleotide
gcuggaguggu

SEQ ID NO: 84817 - RNA, 11 nt, Artificial Sequence
  Description of Artificial Sequence: Synthetic oligonucleotide
aggaagagagg

SEQ ID NO: 84818 - RNA, 12 nt, Artificial Sequence
  Description of Artificial Sequence: Synthetic oligonucleotide
cuugcaucgggc

SEQ ID NO: 84819 - RNA, 13 nt, Artificial Sequence
  Description of Artificial Sequence: Synthetic oligonucleotide
auauccuacugug

SEQ ID NO: 84820 - RNA, 13 nt, Artificial Sequence
  Description of Artificial Sequence: Synthetic oligonucleotide
uccuacuguguaa

SEQ ID NO: 84821 - RNA, 12 nt, Artificial Sequence
  Description of Artificial Sequence: Synthetic oligonucleotide
ccuuguagugua

SEQ ID NO: 84822 - RNA, 13 nt, Artificial Sequence
  Description of Artificial Sequence: Synthetic oligonucleotide
ucuuuguugauug

SEQ ID NO: 84823 - RNA, 14 nt, Artificial Sequence
  Description of Artificial Sequence: Synthetic oligonucleotide
uuuguugauugaaa

SEQ ID NO: 84824 - RNA, 15 nt, Artificial Sequence
  Description of Artificial Sequence: Synthetic oligonucleotide
uucuuuuucuuccau

SEQ ID NO: 84825 - RNA, 13 nt, Artificial Sequence
  Description of Artificial Sequence: Synthetic oligonucleotide
aaucuuccuucua

SEQ ID NO: 84826 - RNA, 13 nt, Artificial Sequence
  Description of Artificial Sequence: Synthetic oligonucleotide
uugaaugcuucau

SEQ ID NO: 84827 - RNA, 13 nt, Artificial Sequence
  Description of Artificial Sequence: Synthetic oligonucleotide
ugaaugcuucaug

SEQ ID NO: 84828 - RNA, 13 nt, Artificial Sequence
  Description of Artificial Sequence: Synthetic oligonucleotide
aauucuacuuuga

SEQ ID NO: 84829 - RNA, 13 nt, Artificial Sequence
  Description of Artificial Sequence: Synthetic oligonucleotide
agcaacuacagac

SEQ ID NO: 84830 - RNA, 13 nt, Artificial Sequence
  Description of Artificial Sequence: Synthetic oligonucleotide
gaccaaggucaac

SEQ ID NO: 84831 - RNA, 13 nt, Artificial Sequence
  Description of Artificial Sequence: Synthetic oligonucleotide
cgacuaucucgac

SEQ ID NO: 84832 - RNA, 13 nt, Artificial Sequence
  Description of Artificial Sequence: Synthetic oligonucleotide
aaccuucccaaac

SEQ ID NO: 84833 - RNA, 14 nt, Artificial Sequence
  Description of Artificial Sequence: Synthetic oligonucleotide
ccaagcuuagaacu

SEQ ID NO: 84834 - RNA, 15 nt, Artificial Sequence
  Description of Artificial Sequence: Synthetic oligonucleotide
agcuuagaacuuuaa

SEQ ID NO: 84835 - RNA, 11 nt, Artificial Sequence
  Description of Artificial Sequence: Synthetic oligonucleotide
aagaccaccac

SEQ ID NO: 84836 - RNA, 14 nt, Artificial Sequence
  Description of Artificial Sequence: Synthetic oligonucleotide
gcgagaaauaaagu

SEQ ID NO: 84837 - RNA, 14 nt, Artificial Sequence
  Description of Artificial Sequence: Synthetic oligonucleotide
cgagaaauaaaguu

SEQ ID NO: 84838 - RNA, 12 nt, Artificial Sequence
  Description of Artificial Sequence: Synthetic oligonucleotide
aggaaaugaucc

SEQ ID NO: 84839 - RNA, 13 nt, Artificial Sequence
  Description of Artificial Sequence: Synthetic oligonucleotide
gaagaaaugaaac

SEQ ID NO: 84840 - RNA, 13 nt, Artificial Sequence
  Description of Artificial Sequence: Synthetic oligonucleotide
guuuccauccucc

SEQ ID NO: 84841 - RNA, 15 nt, Artificial Sequence
  Description of Artificial Sequence: Synthetic oligonucleotide
acugaaaaucuuuga

SEQ ID NO: 84842 - RNA, 11 nt, Artificial Sequence
  Description of Artificial Sequence: Synthetic oligonucleotide
ugccguucagg

SEQ ID NO: 84843 - RNA, 13 nt, Artificial Sequence
  Description of Artificial Sequence: Synthetic oligonucleotide
caggguccagaag

SEQ ID NO: 84844 - RNA, 13 nt, Artificial Sequence
  Description of Artificial Sequence: Synthetic oligonucleotide
ucaagacugcuug

SEQ ID NO: 84845 - RNA, 13 nt, Artificial Sequence
  Description of Artificial Sequence: Synthetic oligonucleotide
uccaugucuuugg

SEQ ID NO: 84846 - RNA, 11 nt, Artificial Sequence
  Description of Artificial Sequence: Synthetic oligonucleotide
gccugaaacac

SEQ ID NO: 84847 - RNA, 12 nt, Artificial Sequence
  Description of Artificial Sequence: Synthetic oligonucleotide
ucucuguaccuc

SEQ ID NO: 84848 - RNA, 12 nt, Artificial Sequence
  Description of Artificial Sequence: Synthetic oligonucleotide
agcaagacaaga

SEQ ID NO: 84849 - RNA, 13 nt, Artificial Sequence
  Description of Artificial Sequence: Synthetic oligonucleotide
gcaagacaagaaa

SEQ ID NO: 84850 - RNA, 12 nt, Artificial Sequence
  Description of Artificial Sequence: Synthetic oligonucleotide
uguacaagaucc

SEQ ID NO: 84851 - RNA, 12 nt, Artificial Sequence
  Description of Artificial Sequence: Synthetic oligonucleotide
cguacuugcaga

SEQ ID NO: 84852 - RNA, 13 nt, Artificial Sequence
  Description of Artificial Sequence: Synthetic oligonucleotide
cgaucgauacaga

SEQ ID NO: 84853 - RNA, 13 nt, Artificial Sequence
  Description of Artificial Sequence: Synthetic oligonucleotide
uauaaaaauaaau

SEQ ID NO: 84854 - RNA, 13 nt, Artificial Sequence
  Description of Artificial Sequence: Synthetic oligonucleotide
uaaaaauaaauau

SEQ ID NO: 84855 - RNA, 13 nt, Artificial Sequence
  Description of Artificial Sequence: Synthetic oligonucleotide
uuugacugcugug

SEQ ID NO: 84856 - RNA, 13 nt, Artificial Sequence
  Description of Artificial Sequence: Synthetic oligonucleotide
ggagaugagagac

SEQ ID NO: 84857 - RNA, 10 nt, Artificial Sequence
  Description of Artificial Sequence: Synthetic oligonucleotide
ucccacuugg

SEQ ID NO: 84858 - RNA, 10 nt, Artificial Sequence
  Description of Artificial Sequence: Synthetic oligonucleotide
guucacggcc

SEQ ID NO: 84859 - RNA, 12 nt, Artificial Sequence
  Description of Artificial Sequence: Synthetic oligonucleotide
accaucacacca

SEQ ID NO: 84860 - RNA, 10 nt, Artificial Sequence
  Description of Artificial Sequence: Synthetic oligonucleotide
cugcggguuu

SEQ ID NO: 84861 - RNA, 9 nt, Artificial Sequence
  Description of Artificial Sequence: Synthetic oligonucleotide
uccaguuug

SEQ ID NO: 84862 - RNA, 12 nt, Artificial Sequence
  Description of Artificial Sequence: Synthetic oligonucleotide
uuaaggacuucu

SEQ ID NO: 84863 - RNA, 12 nt, Artificial Sequence
  Description of Artificial Sequence: Synthetic oligonucleotide
agugggacagag

SEQ ID NO: 84864 - RNA, 13 nt, Artificial Sequence
  Description of Artificial Sequence: Synthetic oligonucleotide
auuuguuauugug

SEQ ID NO: 84865 - RNA, 12 nt, Artificial Sequence
  Description of Artificial Sequence: Synthetic oligonucleotide
ucaaaugcauuu

SEQ ID NO: 84866 - RNA, 9 nt, Artificial Sequence
  Description of Artificial Sequence: Synthetic oligonucleotide
aggaaagcc

SEQ ID NO: 84867 - RNA, 10 nt, Artificial Sequence
  Description of Artificial Sequence: Synthetic oligonucleotide
ggaaagcccu

SEQ ID NO: 84868 - RNA, 11 nt, Artificial Sequence
  Description of Artificial Sequence: Synthetic oligonucleotide
ccagcauggcc

SEQ ID NO: 84869 - RNA, 10 nt, Artificial Sequence
  Description of Artificial Sequence: Synthetic oligonucleotide
uucucccuga

SEQ ID NO: 84870 - RNA, 11 nt, Artificial Sequence
  Description of Artificial Sequence: Synthetic oligonucleotide
aagaagcccuu

SEQ ID NO: 84871 - RNA, 11 nt, Artificial Sequence
  Description of Artificial Sequence: Synthetic oligonucleotide
gaagcccuuca

SEQ ID NO: 84872 - RNA, 10 nt, Artificial Sequence
  Description of Artificial Sequence: Synthetic oligonucleotide
cccuucagcg

SEQ ID NO: 84873 - RNA, 10 nt, Artificial Sequence
  Description of Artificial Sequence: Synthetic oligonucleotide
cuucagcggc

SEQ ID NO: 84874 - RNA, 11 nt, Artificial Sequence
  Description of Artificial Sequence: Synthetic oligonucleotide
cagcggccagu

SEQ ID NO: 84875 - RNA, 11 nt, Artificial Sequence
  Description of Artificial Sequence: Synthetic oligonucleotide
gaaaagcuccg

SEQ ID NO: 84876 - RNA, 10 nt, Artificial Sequence
  Description of Artificial Sequence: Synthetic oligonucleotide
aaagcuccgg

SEQ ID NO: 84877 - RNA, 12 nt, Artificial Sequence
  Description of Artificial Sequence: Synthetic oligonucleotide
gucaacagucug

SEQ ID NO: 84878 - RNA, 12 nt, Artificial Sequence
  Description of Artificial Sequence: Synthetic oligonucleotide
agaguucaaaag

SEQ ID NO: 84879 - RNA, 12 nt, Artificial Sequence
  Description of Artificial Sequence: Synthetic oligonucleotide
gaguucaaaagc

SEQ ID NO: 84880 - RNA, 11 nt, Artificial Sequence
  Description of Artificial Sequence: Synthetic oligonucleotide
ucaaaagcccu

SEQ ID NO: 84881 - RNA, 11 nt, Artificial Sequence
  Description of Artificial Sequence: Synthetic oligonucleotide
caaaagcccuu

SEQ ID NO: 84882 - RNA, 11 nt, Artificial Sequence
  Description of Artificial Sequence: Synthetic oligonucleotide
aaagcccuuca

SEQ ID NO: 84883 - RNA, 11 nt, Artificial Sequence
  Description of Artificial Sequence: Synthetic oligonucleotide
aagcccuucag

SEQ ID NO: 84884 - RNA, 12 nt, Artificial Sequence
  Description of Artificial Sequence: Synthetic oligonucleotide
ugaagccgcucg

SEQ ID NO: 84885 - RNA, 11 nt, Artificial Sequence
  Description of Artificial Sequence: Synthetic oligonucleotide
acgccagucaa

SEQ ID NO: 84886 - RNA, 12 nt, Artificial Sequence
  Description of Artificial Sequence: Synthetic oligonucleotide
ucuuggugcgug

SEQ ID NO: 84887 - RNA, 13 nt, Artificial Sequence
  Description of Artificial Sequence: Synthetic oligonucleotide
uuggauucaucag

SEQ ID NO: 84888 - RNA, 12 nt, Artificial Sequence
  Description of Artificial Sequence: Synthetic oligonucleotide
ggaauaccuaag

SEQ ID NO: 84889 - RNA, 11 nt, Artificial Sequence
  Description of Artificial Sequence: Synthetic oligonucleotide
uuugaggcuca

SEQ ID NO: 84890 - RNA, 10 nt, Artificial Sequence
  Description of Artificial Sequence: Synthetic oligonucleotide
cuacaauugg

SEQ ID NO: 84891 - RNA, 11 nt, Artificial Sequence
  Description of Artificial Sequence: Synthetic oligonucleotide
aguuaggagcc

SEQ ID NO: 84892 - RNA, 12 nt, Artificial Sequence
  Description of Artificial Sequence: Synthetic oligonucleotide
gucaauauccac

SEQ ID NO: 84893 - RNA, 12 nt, Artificial Sequence
  Description of Artificial Sequence: Synthetic oligonucleotide
uguucagucaca

SEQ ID NO: 84894 - RNA, 11 nt, Artificial Sequence
  Description of Artificial Sequence: Synthetic oligonucleotide
cacacacauac

SEQ ID NO: 84895 - RNA, 11 nt, Artificial Sequence
  Description of Artificial Sequence: Synthetic oligonucleotide
uccuuuugcuu

SEQ ID NO: 84896 - RNA, 15 nt, Artificial Sequence
  Description of Artificial Sequence: Synthetic oligonucleotide
uuuaaaguaauuuuu

SEQ ID NO: 84897 - RNA, 12 nt, Artificial Sequence
  Description of Artificial Sequence: Synthetic oligonucleotide
aacagucaaugg

SEQ ID NO: 84898 - RNA, 12 nt, Artificial Sequence
  Description of Artificial Sequence: Synthetic oligonucleotide
cgacaaaccaau

SEQ ID NO: 84899 - RNA, 11 nt, Artificial Sequence
  Description of Artificial Sequence: Synthetic oligonucleotide
cugcuaccacu

SEQ ID NO: 84900 - RNA, 12 nt, Artificial Sequence
  Description of Artificial Sequence: Synthetic oligonucleotide
caagcggucuua

SEQ ID NO: 84901 - RNA, 12 nt, Artificial Sequence
  Description of Artificial Sequence: Synthetic oligonucleotide
gucuuaccggcu

SEQ ID NO: 84902 - RNA, 10 nt, Artificial Sequence
  Description of Artificial Sequence: Synthetic oligonucleotide
auggguuacc

SEQ ID NO: 84903 - RNA, 10 nt, Artificial Sequence
  Description of Artificial Sequence: Synthetic oligonucleotide
uuaccugcga

SEQ ID NO: 84904 - RNA, 11 nt, Artificial Sequence
  Description of Artificial Sequence: Synthetic oligonucleotide
aucuugcugag

SEQ ID NO: 84905 - RNA, 12 nt, Artificial Sequence
  Description of Artificial Sequence: Synthetic oligonucleotide
gcauaaaacagu

SEQ ID NO: 84906 - RNA, 11 nt, Artificial Sequence
  Description of Artificial Sequence: Synthetic oligonucleotide
uccuuuauccu

SEQ ID NO: 84907 - RNA, 11 nt, Artificial Sequence
  Description of Artificial Sequence: Synthetic oligonucleotide
aacgcaaguug

SEQ ID NO: 84908 - RNA, 12 nt, Artificial Sequence
  Description of Artificial Sequence: Synthetic oligonucleotide
aacugaaaccau

SEQ ID NO: 84909 - RNA, 13 nt, Artificial Sequence
  Description of Artificial Sequence: Synthetic oligonucleotide
cuuuguuaaauau

SEQ ID NO: 84910 - RNA, 13 nt, Artificial Sequence
  Description of Artificial Sequence: Synthetic oligonucleotide
uauauuaaaaguu

SEQ ID NO: 84911 - RNA, 12 nt, Artificial Sequence
  Description of Artificial Sequence: Synthetic oligonucleotide
uuuugacuuaac

SEQ ID NO: 84912 - RNA, 12 nt, Artificial Sequence
  Description of Artificial Sequence: Synthetic oligonucleotide
caaacucagcac

SEQ ID NO: 84913 - RNA, 10 nt, Artificial Sequence
  Description of Artificial Sequence: Synthetic oligonucleotide
gcugaccuca

SEQ ID NO: 84914 - RNA, 13 nt, Artificial Sequence
  Description of Artificial Sequence: Synthetic oligonucleotide
uuauucagaucgc

SEQ ID NO: 84915 - RNA, 12 nt, Artificial Sequence
  Description of Artificial Sequence: Synthetic oligonucleotide
ggguucugggau

SEQ ID NO: 84916 - RNA, 14 nt, Artificial Sequence
  Description of Artificial Sequence: Synthetic oligonucleotide
uauuggaaauuaug

SEQ ID NO: 84917 - RNA, 12 nt, Artificial Sequence
  Description of Artificial Sequence: Synthetic oligonucleotide
uggaagcacuag

SEQ ID NO: 84918 - RNA, 12 nt, Artificial Sequence
  Description of Artificial Sequence: Synthetic oligonucleotide
uuuuuaugugga

SEQ ID NO: 84919 - RNA, 11 nt, Artificial Sequence
  Description of Artificial Sequence: Synthetic oligonucleotide
gaauugguaga

SEQ ID NO: 84920 - RNA, 12 nt, Artificial Sequence
  Description of Artificial Sequence: Synthetic oligonucleotide
uagacuuggaga

SEQ ID NO: 84921 - RNA, 12 nt, Artificial Sequence
  Description of Artificial Sequence: Synthetic oligonucleotide
uacaguauucca

SEQ ID NO: 84922 - RNA, 14 nt, Artificial Sequence
  Description of Artificial Sequence: Synthetic oligonucleotide
cacugaugaauuaa

SEQ ID NO: 84923 - RNA, 11 nt, Artificial Sequence
  Description of Artificial Sequence: Synthetic oligonucleotide
cacaucaucac

SEQ ID NO: 84924 - RNA, 12 nt, Artificial Sequence
  Description of Artificial Sequence: Synthetic oligonucleotide
ucaccaaacaga

SEQ ID NO: 84925 - RNA, 11 nt, Artificial Sequence
  Description of Artificial Sequence: Synthetic oligonucleotide
gaacaugaugg

SEQ ID NO: 84926 - RNA, 11 nt, Artificial Sequence
  Description of Artificial Sequence: Synthetic oligonucleotide
auguagacugc

SEQ ID NO: 84927 - RNA, 12 nt, Artificial Sequence
  Description of Artificial Sequence: Synthetic oligonucleotide
gaucuauuuaug

SEQ ID NO: 84928 - RNA, 11 nt, Artificial Sequence
  Description of Artificial Sequence: Synthetic oligonucleotide
cacuauuauca

SEQ ID NO: 84929 - RNA, 10 nt, Artificial Sequence
  Description of Artificial Sequence: Synthetic oligonucleotide
ucaguucugc

SEQ ID NO: 84930 - RNA, 12 nt, Artificial Sequence
  Description of Artificial Sequence: Synthetic oligonucleotide
gauuaaaccuac

SEQ ID NO: 84931 - RNA, 12 nt, Artificial Sequence
  Description of Artificial Sequence: Synthetic oligonucleotide
uaaaauccuucu

SEQ ID NO: 84932 - RNA, 11 nt, Artificial Sequence
  Description of Artificial Sequence: Synthetic oligonucleotide
augcuguagac

SEQ ID NO: 84933 - RNA, 12 nt, Artificial Sequence
  Description of Artificial Sequence: Synthetic oligonucleotide
ugauaggaauag

SEQ ID NO: 84934 - RNA, 10 nt, Artificial Sequence
  Description of Artificial Sequence: Synthetic oligonucleotide
auggcccuga

SEQ ID NO: 84935 - RNA, 10 nt, Artificial Sequence
  Description of Artificial Sequence: Synthetic oligonucleotide
uccucaagca

SEQ ID NO: 84936 - RNA, 9 nt, Artificial Sequence
  Description of Artificial Sequence: Synthetic oligonucleotide
uucagccca

SEQ ID NO: 84937 - RNA, 10 nt, Artificial Sequence
  Description of Artificial Sequence: Synthetic oligonucleotide
cugcugaacc

SEQ ID NO: 84938 - RNA, 11 nt, Artificial Sequence
  Description of Artificial Sequence: Synthetic oligonucleotide
aguucucuuca

SEQ ID NO: 84939 - RNA, 10 nt, Artificial Sequence
  Description of Artificial Sequence: Synthetic oligonucleotide
cagccuagag

SEQ ID NO: 84940 - RNA, 12 nt, Artificial Sequence
  Description of Artificial Sequence: Synthetic oligonucleotide
ucugugaagugu

SEQ ID NO: 84941 - RNA, 13 nt, Artificial Sequence
  Description of Artificial Sequence: Synthetic oligonucleotide
gagaaaauuucaa

SEQ ID NO: 84942 - RNA, 10 nt, Artificial Sequence
  Description of Artificial Sequence: Synthetic oligonucleotide
auccuccuga

SEQ ID NO: 84943 - RNA, 11 nt, Artificial Sequence
  Description of Artificial Sequence: Synthetic oligonucleotide
ugacaucauau

SEQ ID NO: 84944 - RNA, 12 nt, Artificial Sequence
  Description of Artificial Sequence: Synthetic oligonucleotide
aucuucaucaua

SEQ ID NO: 84945 - RNA, 12 nt, Artificial Sequence
  Description of Artificial Sequence: Synthetic oligonucleotide
acuagcuauuaa

SEQ ID NO: 84946 - RNA, 13 nt, Artificial Sequence
  Description of Artificial Sequence: Synthetic oligonucleotide
cucuacuaaaaau

SEQ ID NO: 84947 - RNA, 11 nt, Artificial Sequence
  Description of Artificial Sequence: Synthetic oligonucleotide
cuaucucgccu

SEQ ID NO: 84948 - RNA, 12 nt, Artificial Sequence
  Description of Artificial Sequence: Synthetic oligonucleotide
uucgguccaguu

SEQ ID NO: 84949 - RNA, 10 nt, Artificial Sequence
  Description of Artificial Sequence: Synthetic oligonucleotide
auguagccgc

SEQ ID NO: 84950 - RNA, 11 nt, Artificial Sequence
  Description of Artificial Sequence: Synthetic oligonucleotide
gaggagacuug

SEQ ID NO: 84951 - RNA, 11 nt, Artificial Sequence
  Description of Artificial Sequence: Synthetic oligonucleotide
aguagugagga

SEQ ID NO: 84952 - RNA, 13 nt, Artificial Sequence
  Description of Artificial Sequence: Synthetic oligonucleotide
agaugaguacaaa

SEQ ID NO: 84953 - RNA, 12 nt, Artificial Sequence
  Description of Artificial Sequence: Synthetic oligonucleotide
uuguuaaugggc

SEQ ID NO: 84954 - RNA, 12 nt, Artificial Sequence
  Description of Artificial Sequence: Synthetic oligonucleotide
uuuuaauuuauu

SEQ ID NO: 84955 - RNA, 11 nt, Artificial Sequence
  Description of Artificial Sequence: Synthetic oligonucleotide
auuuaaauaug

SEQ ID NO: 84956 - RNA, 12 nt, Artificial Sequence
  Description of Artificial Sequence: Synthetic oligonucleotide
auccuuuguuuc

SEQ ID NO: 84957 - RNA, 13 nt, Artificial Sequence
  Description of Artificial Sequence: Synthetic oligonucleotide
gucuaaguguuug

SEQ ID NO: 84958 - RNA, 11 nt, Artificial Sequence
  Description of Artificial Sequence: Synthetic oligonucleotide
ccugugacaaa

SEQ ID NO: 84959 - RNA, 12 nt, Artificial Sequence
  Description of Artificial Sequence: Synthetic oligonucleotide
caggcugaauua

SEQ ID NO: 84960 - RNA, 13 nt, Artificial Sequence
  Description of Artificial Sequence: Synthetic oligonucleotide
ucauucuuacaau

SEQ ID NO: 84961 - RNA, 14 nt, Artificial Sequence
  Description of Artificial Sequence: Synthetic oligonucleotide
cauucuuacaauug

SEQ ID NO: 84962 - RNA, 11 nt, Artificial Sequence
  Description of Artificial Sequence: Synthetic oligonucleotide
agagaguguac

SEQ ID NO: 84963 - RNA, 11 nt, Artificial Sequence
  Description of Artificial Sequence: Synthetic oligonucleotide
gaacucagcag

SEQ ID NO: 84964 - RNA, 12 nt, Artificial Sequence
  Description of Artificial Sequence: Synthetic oligonucleotide
uuauuuucagua

SEQ ID NO: 84965 - RNA, 11 nt, Artificial Sequence
  Description of Artificial Sequence: Synthetic oligonucleotide
cuuaaauggaa

SEQ ID NO: 84966 - RNA, 12 nt, Artificial Sequence
  Description of Artificial Sequence: Synthetic oligonucleotide
gccuaaaauugu

SEQ ID NO: 84967 - RNA, 12 nt, Artificial Sequence
  Description of Artificial Sequence: Synthetic oligonucleotide
acuaacaucugg

SEQ ID NO: 84968 - RNA, 11 nt, Artificial Sequence
  Description of Artificial Sequence: Synthetic oligonucleotide
gacugugagcu

SEQ ID NO: 84969 - RNA, 13 nt, Artificial Sequence
  Description of Artificial Sequence: Synthetic oligonucleotide
gcuuuuuauuaau

SEQ ID NO: 84970 - RNA, 12 nt, Artificial Sequence
  Description of Artificial Sequence: Synthetic oligonucleotide
ucuucuuacauu

SEQ ID NO: 84971 - RNA, 14 nt, Artificial Sequence
  Description of Artificial Sequence: Synthetic oligonucleotide
auuuguaaaaaugu

SEQ ID NO: 84972 - RNA, 14 nt, Artificial Sequence
  Description of Artificial Sequence: Synthetic oligonucleotide
ucuuaauucauauu

SEQ ID NO: 84973 - RNA, 12 nt, Artificial Sequence
  Description of Artificial Sequence: Synthetic oligonucleotide
aacuaaucauga

SEQ ID NO: 84974 - RNA, 11 nt, Artificial Sequence
  Description of Artificial Sequence: Synthetic oligonucleotide
cugcucuuggg

SEQ ID NO: 84975 - RNA, 12 nt, Artificial Sequence
  Description of Artificial Sequence: Synthetic oligonucleotide
aguagcuuugag

SEQ ID NO: 84976 - RNA, 13 nt, Artificial Sequence
  Description of Artificial Sequence: Synthetic oligonucleotide
acguaauauuuca

SEQ ID NO: 84977 - RNA, 12 nt, Artificial Sequence
  Description of Artificial Sequence: Synthetic oligonucleotide
auucucuucacu

SEQ ID NO: 84978 - RNA, 13 nt, Artificial Sequence
  Description of Artificial Sequence: Synthetic oligonucleotide
uaaugcuaagaaa

SEQ ID NO: 84979 - RNA, 11 nt, Artificial Sequence
  Description of Artificial Sequence: Synthetic oligonucleotide
cugaaaaucaa

SEQ ID NO: 84980 - RNA, 13 nt, Artificial Sequence
  Description of Artificial Sequence: Synthetic oligonucleotide
auaugauuacuuu

SEQ ID NO: 84981 - RNA, 13 nt, Artificial Sequence
  Description of Artificial Sequence: Synthetic oligonucleotide
auuuuguucuaca

SEQ ID NO: 84982 - RNA, 11 nt, Artificial Sequence
  Description of Artificial Sequence: Synthetic oligonucleotide
ccgggacucuc

SEQ ID NO: 84983 - RNA, 13 nt, Artificial Sequence
  Description of Artificial Sequence: Synthetic oligonucleotide
cuuuaaaguaaag

SEQ ID NO: 84984 - RNA, 12 nt, Artificial Sequence
  Description of Artificial Sequence: Synthetic oligonucleotide
cuggaagccugg

SEQ ID NO: 84985 - RNA, 13 nt, Artificial Sequence
  Description of Artificial Sequence: Synthetic oligonucleotide
aaacaaaagagag

SEQ ID NO: 84986 - RNA, 12 nt, Artificial Sequence
  Description of Artificial Sequence: Synthetic oligonucleotide
ucaguuaugccg

SEQ ID NO: 84987 - RNA, 12 nt, Artificial Sequence
  Description of Artificial Sequence: Synthetic oligonucleotide
aaaagaagucca

SEQ ID NO: 84988 - RNA, 10 nt, Artificial Sequence
  Description of Artificial Sequence: Synthetic oligonucleotide
ggugagguua

SEQ ID NO: 84989 - RNA, 10 nt, Artificial Sequence
  Description of Artificial Sequence: Synthetic oligonucleotide
ggaagaggac

SEQ ID NO: 84990 - RNA, 12 nt, Artificial Sequence
  Description of Artificial Sequence: Synthetic oligonucleotide
agcaaguauugu

SEQ ID NO: 84991 - RNA, 11 nt, Artificial Sequence
  Description of Artificial Sequence: Synthetic oligonucleotide
uuguagcacuc

SEQ ID NO: 84992 - RNA, 13 nt, Artificial Sequence
  Description of Artificial Sequence: Synthetic oligonucleotide
caaaaccacaaau

SEQ ID NO: 84993 - RNA, 11 nt, Artificial Sequence
  Description of Artificial Sequence: Synthetic oligonucleotide
aagcccauaca

SEQ ID NO: 84994 - RNA, 10 nt, Artificial Sequence
  Description of Artificial Sequence: Synthetic oligonucleotide
gcccauacag

SEQ ID NO: 84995 - RNA, 11 nt, Artificial Sequence
  Description of Artificial Sequence: Synthetic oligonucleotide
agaaaccuucc

SEQ ID NO: 84996 - RNA, 9 nt, Artificial Sequence
  Description of Artificial Sequence: Synthetic oligonucleotide
uauaccuac

SEQ ID NO: 84997 - RNA, 12 nt, Artificial Sequence
  Description of Artificial Sequence: Synthetic oligonucleotide
ccaguuuucgga

SEQ ID NO: 84998 - RNA, 8 nt, Artificial Sequence
  Description of Artificial Sequence: Synthetic oligonucleotide
gaacaggg

SEQ ID NO: 84999 - RNA, 12 nt, Artificial Sequence
  Description of Artificial Sequence: Synthetic oligonucleotide
uaacuuuccagu

SEQ ID NO: 85000 - RNA, 13 nt, Artificial Sequence
  Description of Artificial Sequence: Synthetic oligonucleotide
aaguuugguuuug

SEQ ID NO: 85001 - RNA, 11 nt, Artificial Sequence
  Description of Artificial Sequence: Synthetic oligonucleotide
uucccacugua

SEQ ID NO: 85002 - RNA, 12 nt, Artificial Sequence
  Description of Artificial Sequence: Synthetic oligonucleotide
gauaccauauga

SEQ ID NO: 85003 - RNA, 10 nt, Artificial Sequence
  Description of Artificial Sequence: Synthetic oligonucleotide
acaugggcug

SEQ ID NO: 85004 - RNA, 12 nt, Artificial Sequence
  Description of Artificial Sequence: Synthetic oligonucleotide
aacuuuuucaua

SEQ ID NO: 85005 - RNA, 11 nt, Artificial Sequence
  Description of Artificial Sequence: Synthetic oligonucleotide
augaggccgga

SEQ ID NO: 85006 - RNA, 10 nt, Artificial Sequence
  Description of Artificial Sequence: Synthetic oligonucleotide
cugcauuugu

SEQ ID NO: 85007 - RNA, 12 nt, Artificial Sequence
  Description of Artificial Sequence: Synthetic oligonucleotide
auguuuacuacc

SEQ ID NO: 85008 - RNA, 14 nt, Artificial Sequence
  Description of Artificial Sequence: Synthetic oligonucleotide
auuuuuugaugaaa

SEQ ID NO: 85009 - RNA, 13 nt, Artificial Sequence
  Description of Artificial Sequence: Synthetic oligonucleotide
agugugugaauuu

SEQ ID NO: 85010 - RNA, 12 nt, Artificial Sequence
  Description of Artificial Sequence: Synthetic oligonucleotide
agcaauguaugu

SEQ ID NO: 85011 - RNA, 13 nt, Artificial Sequence
  Description of Artificial Sequence: Synthetic oligonucleotide
aagcacauauaua

SEQ ID NO: 85012 - RNA, 13 nt, Artificial Sequence
  Description of Artificial Sequence: Synthetic oligonucleotide
uaauaguuucucc

SEQ ID NO: 85013 - RNA, 12 nt, Artificial Sequence
  Description of Artificial Sequence: Synthetic oligonucleotide
guuucuccaaau

SEQ ID NO: 85014 - RNA, 12 nt, Artificial Sequence
  Description of Artificial Sequence: Synthetic oligonucleotide
acuuccuagaaa

SEQ ID NO: 85015 - RNA, 12 nt, Artificial Sequence
  Description of Artificial Sequence: Synthetic oligonucleotide
acaccauauaug

SEQ ID NO: 85016 - RNA, 13 nt, Artificial Sequence
  Description of Artificial Sequence: Synthetic oligonucleotide
uauaugaauggag

SEQ ID NO: 85017 - RNA, 12 nt, Artificial Sequence
  Description of Artificial Sequence: Synthetic oligonucleotide
cauuuacaggga

SEQ ID NO: 85018 - RNA, 12 nt, Artificial Sequence
  Description of Artificial Sequence: Synthetic oligonucleotide
auuuacagggac

SEQ ID NO: 85019 - RNA, 9 nt, Artificial Sequence
  Description of Artificial Sequence: Synthetic oligonucleotide
gggaccuga

SEQ ID NO: 85020 - RNA, 13 nt, Artificial Sequence
  Description of Artificial Sequence: Synthetic oligonucleotide
guuugacugcauc

SEQ ID NO: 85021 - RNA, 12 nt, Artificial Sequence
  Description of Artificial Sequence: Synthetic oligonucleotide
uugacugcaucg

SEQ ID NO: 85022 - RNA, 11 nt, Artificial Sequence
  Description of Artificial Sequence: Synthetic oligonucleotide
aguucacaggg

SEQ ID NO: 85023 - RNA, 12 nt, Artificial Sequence
  Description of Artificial Sequence: Synthetic oligonucleotide
gcaccucugucc

SEQ ID NO: 85024 - RNA, 14 nt, Artificial Sequence
  Description of Artificial Sequence: Synthetic oligonucleotide
guuugucuuuuuaa

SEQ ID NO: 85025 - RNA, 13 nt, Artificial Sequence
  Description of Artificial Sequence: Synthetic oligonucleotide
uugucuuuuuaag

SEQ ID NO: 85026 - RNA, 12 nt, Artificial Sequence
  Description of Artificial Sequence: Synthetic oligonucleotide
cuaaagguuguc

SEQ ID NO: 85027 - RNA, 11 nt, Artificial Sequence
  Description of Artificial Sequence: Synthetic oligonucleotide
agguugucgac

SEQ ID NO: 85028 - RNA, 12 nt, Artificial Sequence
  Description of Artificial Sequence: Synthetic oligonucleotide
ccuggcaauugu

SEQ ID NO: 85029 - RNA, 11 nt, Artificial Sequence
  Description of Artificial Sequence: Synthetic oligonucleotide
guggugcgagg

SEQ ID NO: 85030 - RNA, 12 nt, Artificial Sequence
  Description of Artificial Sequence: Synthetic oligonucleotide
gagacaugaaau

SEQ ID NO: 85031 - RNA, 12 nt, Artificial Sequence
  Description of Artificial Sequence: Synthetic oligonucleotide
uauauuucucca

SEQ ID NO: 85032 - RNA, 9 nt, Artificial Sequence
  Description of Artificial Sequence: Synthetic oligonucleotide
augaaggcu

SEQ ID NO: 85033 - RNA, 10 nt, Artificial Sequence
  Description of Artificial Sequence: Synthetic oligonucleotide
cuggaguggu

SEQ ID NO: 85034 - RNA, 10 nt, Artificial Sequence
  Description of Artificial Sequence: Synthetic oligonucleotide
ggaagagagg

SEQ ID NO: 85035 - RNA, 11 nt, Artificial Sequence
  Description of Artificial Sequence: Synthetic oligonucleotide
uugcaucgggc

SEQ ID NO: 85036 - RNA, 12 nt, Artificial Sequence
  Description of Artificial Sequence: Synthetic oligonucleotide
uauccuacugug

SEQ ID NO: 85037 - RNA, 12 nt, Artificial Sequence
  Description of Artificial Sequence: Synthetic oligonucleotide
ccuacuguguaa

SEQ ID NO: 85038 - RNA, 11 nt, Artificial Sequence
  Description of Artificial Sequence: Synthetic oligonucleotide
cuuguagugua

SEQ ID NO: 85039 - RNA, 12 nt, Artificial Sequence
  Description of Artificial Sequence: Synthetic oligonucleotide
cuuuguugauug

SEQ ID NO: 85040 - RNA, 13 nt, Artificial Sequence
  Description of Artificial Sequence: Synthetic oligonucleotide
uuguugauugaaa

SEQ ID NO: 85041 - RNA, 14 nt, Artificial Sequence
  Description of Artificial Sequence: Synthetic oligonucleotide
ucuuuuucuuccau

SEQ ID NO: 85042 - RNA, 12 nt, Artificial Sequence
  Description of Artificial Sequence: Synthetic oligonucleotide
aucuuccuucua

SEQ ID NO: 85043 - RNA, 12 nt, Artificial Sequence
  Description of Artificial Sequence: Synthetic oligonucleotide
ugaaugcuucau

SEQ ID NO: 85044 - RNA, 12 nt, Artificial Sequence
  Description of Artificial Sequence: Synthetic oligonucleotide
gaaugcuucaug

SEQ ID NO: 85045 - RNA, 12 nt, Artificial Sequence
  Description of Artificial Sequence: Synthetic oligonucleotide
auucuacuuuga

SEQ ID NO: 85046 - RNA, 12 nt, Artificial Sequence
  Description of Artificial Sequence: Synthetic oligonucleotide
gcaacuacagac

SEQ ID NO: 85047 - RNA, 12 nt, Artificial Sequence
  Description of Artificial Sequence: Synthetic oligonucleotide
accaaggucaac

SEQ ID NO: 85048 - RNA, 12 nt, Artificial Sequence
  Description of Artificial Sequence: Synthetic oligonucleotide
gacuaucucgac

SEQ ID NO: 85049 - RNA, 12 nt, Artificial Sequence
  Description of Artificial Sequence: Synthetic oligonucleotide
accuucccaaac

SEQ ID NO: 85050 - RNA, 13 nt, Artificial Sequence
  Description of Artificial Sequence: Synthetic oligonucleotide
caagcuuagaacu

SEQ ID NO: 85051 - RNA, 14 nt, Artificial Sequence
  Description of Artificial Sequence: Synthetic oligonucleotide
gcuuagaacuuuaa

SEQ ID NO: 85052 - RNA, 13 nt, Artificial Sequence
  Description of Artificial Sequence: Synthetic oligonucleotide
aacuuuaagcaac

SEQ ID NO: 85053 - RNA, 10 nt, Artificial Sequence
  Description of Artificial Sequence: Synthetic oligonucleotide
agaccaccac

SEQ ID NO: 85054 - RNA, 13 nt, Artificial Sequence
  Description of Artificial Sequence: Synthetic oligonucleotide
cgagaaauaaagu

SEQ ID NO: 85055 - RNA, 13 nt, Artificial Sequence
  Description of Artificial Sequence: Synthetic oligonucleotide
gagaaauaaaguu

SEQ ID NO: 85056 - RNA, 11 nt, Artificial Sequence
  Description of Artificial Sequence: Synthetic oligonucleotide
ggaaaugaucc

SEQ ID NO: 85057 - RNA, 12 nt, Artificial Sequence
  Description of Artificial Sequence: Synthetic oligonucleotide
aagaaaugaaac

SEQ ID NO: 85058 - RNA, 12 nt, Artificial Sequence
  Description of Artificial Sequence: Synthetic oligonucleotide
uuuccauccucc

SEQ ID NO: 85059 - RNA, 14 nt, Artificial Sequence
  Description of Artificial Sequence: Synthetic oligonucleotide
cugaaaaucuuuga

SEQ ID NO: 85060 - RNA, 10 nt, Artificial Sequence
  Description of Artificial Sequence: Synthetic oligonucleotide
gccguucagg

SEQ ID NO: 85061 - RNA, 12 nt, Artificial Sequence
  Description of Artificial Sequence: Synthetic oligonucleotide
aggguccagaag

SEQ ID NO: 85062 - RNA, 12 nt, Artificial Sequence
  Description of Artificial Sequence: Synthetic oligonucleotide
caagacugcuug

SEQ ID NO: 85063 - RNA, 12 nt, Artificial Sequence
  Description of Artificial Sequence: Synthetic oligonucleotide
ccaugucuuugg

SEQ ID NO: 85064 - RNA, 10 nt, Artificial Sequence
  Description of Artificial Sequence: Synthetic oligonucleotide
ccugaaacac

SEQ ID NO: 85065 - RNA, 11 nt, Artificial Sequence
  Description of Artificial Sequence: Synthetic oligonucleotide
cucuguaccuc

SEQ ID NO: 85066 - RNA, 11 nt, Artificial Sequence
  Description of Artificial Sequence: Synthetic oligonucleotide
gcaagacaaga

SEQ ID NO: 85067 - RNA, 12 nt, Artificial Sequence
  Description of Artificial Sequence: Synthetic oligonucleotide
caagacaagaaa

SEQ ID NO: 85068 - RNA, 11 nt, Artificial Sequence
  Description of Artificial Sequence: Synthetic oligonucleotide
guacaagaucc

SEQ ID NO: 85069 - RNA, 11 nt, Artificial Sequence
  Description of Artificial Sequence: Synthetic oligonucleotide
guacuugcaga

SEQ ID NO: 85070 - RNA, 12 nt, Artificial Sequence
  Description of Artificial Sequence: Synthetic oligonucleotide
gaucgauacaga

SEQ ID NO: 85071 - RNA, 12 nt, Artificial Sequence
  Description of Artificial Sequence: Synthetic oligonucleotide
auaaaaauaaau

SEQ ID NO: 85072 - RNA, 12 nt, Artificial Sequence
  Description of Artificial Sequence: Synthetic oligonucleotide
aaaaauaaauau

SEQ ID NO: 85073 - RNA, 12 nt, Artificial Sequence
  Description of Artificial Sequence: Synthetic oligonucleotide
uugacugcugug

SEQ ID NO: 85074 - RNA, 12 nt, Artificial Sequence
  Description of Artificial Sequence: Synthetic oligonucleotide
gagaugagagac

SEQ ID NO: 85075 - RNA, 9 nt, Artificial Sequence
  Description of Artificial Sequence: Synthetic oligonucleotide
cccacuugg

SEQ ID NO: 85076 - RNA, 1061 nt, Homo sapiens
ugcccugcgcccgcaacccgagccgcacccgccgcggacggagcccaugcgcggggcgaaccgcgcgcccccgcccccgccccgccccggccucggccccggcccuggccccgggggcagucgcgccugugaacgguggggcaggagacccuguaggaggaccccgggccgcaggccccugaggagcgaugacggaauauaagcuggugguggugggcgccggcggugugggcaagagugcgcugaccauccagcugauccagaaccauuuuguggacgaauacgaccccacuauagaggauuccuaccggaagcagguggucauugauggggagacgugccuguuggacauccuggauaccgccggccaggaggaguacagcgccaugcgggaccaguacaugcgcaccggggagggcuuccuguguguguuugccaucaacaacaccaagucuuuugaggacauccaccaguacagggagcagaucaaacgggugaaggacucggaugacgugcccauggugcugguggggaacaagugugaccuggcugcacgcacuguggaaucucggcaggcucaggaccucgcccgaagcuacggcauccccuacaucgagaccucggccaagacccggcagggaguggaggaugccuucuacacguuggugcgugagauccggcagcacaagcugcggaagcugaacccuccugaugagaguggccccggcugcaugagcugcaagugugugcucuccugacgcagcacaagcucaggacauggaggugccggaugcaggaaggaggugcagacggaaggaggaggaaggaaggacggaagcaaggaaggaaggaagggcugcuggagcccagucaccccgggaccgugggccgaggugacugcagacccucccagggaggcugugcacagacugucuugaacaucccaaaugccaccggaaccccagcccuuagcuccccucccaggccucugugggcccuugucgggcacagaugggaucacaguaaauuauuggauggucuugaaaaaaaaaaaaaaaaaa

SEQ ID NO: 85077 - RNA, 1143 nt, Homo sapiens
ugcccugcgcccgcaacccgagccgcacccgccgcggacggagcccaugcgcggggcgaaccgcgcgcccccgcccccgccccgccccggccucggccccggcccuggccccgggggcagucgcgccugugaacgguggggcaggagacccuguaggaggaccccgggccgcaggccccugaggagcgaugacggaauauaagcuggugguggugggcgccggcggugugggcaagagugcgcugaccauccagcugauccagaaccauuuuguggacgaauacgaccccacuauagaggauuccuaccggaagcagguggucauugauggggagacgugccuguuggacauccuggauaccgccggccaggaggaguacagcgccaugcgggaccaguacaugcgcaccggggagggcuuccuguguguguuugccaucaacaacaccaagucuuuugaggacauccaccaguacagggagcagaucaaacgggugaaggacucggaugacgugcccauggugcugguggggaacaagugugaccuggcugcacgcacuguggaaucucggcaggcucaggaccucgcccgaagcuacggcauccccuacaucgagaccucggccaagacccggcagggcagccgcucuggcucuagcuccagcuccgggacccucugggaccccccgggacccaugugacccagcggccccucgcgcuggaguggaggaugccuucuacacguuggugcgugagauccggcagcacaagcugcggaagcugaacccuccugaugagaguggccccggcugcaugagcugcaagugugugcucuccugacgcagcacaagcucaggacauggaggugccggaugcaggaaggaggugcagacggaaggaggaggaaggaaggacggaagcaaggaaggaaggaagggcugcuggagcccagucaccccgggaccgugggccgaggugacugcagacccucccagggaggcugugcacagacugucuugaacaucccaaaugccaccggaaccccagcccuuagcuccccucccaggccucugugggcccuugucgggcacagaugggaucacaguaaauuauuggauggucuugaaaaaaaaaaaaaaaaaa

SEQ ID NO: 85078 - RNA, 19 nt, Artificial Sequence
  Description of Artificial Sequence: Synthetic oligonucleotide
ugcccugcgcccgcaaccc

SEQ ID NO: 85079 - RNA, 19 nt, Artificial Sequence
  Description of Artificial Sequence: Synthetic oligonucleotide
cgagccgcacccgccgcgg

SEQ ID NO: 85080 - RNA, 19 nt, Artificial Sequence
  Description of Artificial Sequence: Synthetic oligonucleotide
gacggagcccaugcgcggg

SEQ ID NO: 85081 - RNA, 19 nt, Artificial Sequence
  Description of Artificial Sequence: Synthetic oligonucleotide
ggcgaaccgcgcgcccccg

SEQ ID NO: 85082 - RNA, 19 nt, Artificial Sequence
  Description of Artificial Sequence: Synthetic oligonucleotide
gcccccgccccgccccggc

SEQ ID NO: 85083 - RNA, 19 nt, Artificial Sequence
  Description of Artificial Sequence: Synthetic oligonucleotide
ccucggccccggcccuggc

SEQ ID NO: 85084 - RNA, 19 nt, Artificial Sequence
  Description of Artificial Sequence: Synthetic oligonucleotide
ccccgggggcagucgcgcc

SEQ ID NO: 85085 - RNA, 19 nt, Artificial Sequence
  Description of Artificial Sequence: Synthetic oligonucleotide
cugugaacgguggggcagg

SEQ ID NO: 85086 - RNA, 19 nt, Artificial Sequence
  Description of Artificial Sequence: Synthetic oligonucleotide
gagacccuguaggaggacc

SEQ ID NO: 85087 - RNA, 19 nt, Artificial Sequence
  Description of Artificial Sequence: Synthetic oligonucleotide
cccgggccgcaggccccug

SEQ ID NO: 85088 - RNA, 19 nt, Artificial Sequence
  Description of Artificial Sequence: Synthetic oligonucleotide
gaggagcgaugacggaaua

SEQ ID NO: 85089 - RNA, 19 nt, Artificial Sequence
  Description of Artificial Sequence: Synthetic oligonucleotide
auaagcugguggugguggg

SEQ ID NO: 85090 - RNA, 19 nt, Artificial Sequence
  Description of Artificial Sequence: Synthetic oligonucleotide
gcgccggcggugugggcaa

SEQ ID NO: 85091 - RNA, 19 nt, Artificial Sequence
  Description of Artificial Sequence: Synthetic oligonucleotide
agagugcgcugaccaucca

SEQ ID NO: 85092 - RNA, 19 nt, Artificial Sequence
  Description of Artificial Sequence: Synthetic oligonucleotide
agcugauccagaaccauuu

SEQ ID NO: 85093 - RNA, 19 nt, Artificial Sequence
  Description of Artificial Sequence: Synthetic oligonucleotide
uuguggacgaauacgaccc

SEQ ID NO: 85094 - RNA, 19 nt, Artificial Sequence
  Description of Artificial Sequence: Synthetic oligonucleotide
ccacuauagaggauuccua

SEQ ID NO: 85095 - RNA, 19 nt, Artificial Sequence
  Description of Artificial Sequence: Synthetic oligonucleotide
accggaagcagguggucau

SEQ ID NO: 85096 - RNA, 19 nt, Artificial Sequence
  Description of Artificial Sequence: Synthetic oligonucleotide
uugauggggagacgugccu

SEQ ID NO: 85097 - RNA, 19 nt, Artificial Sequence
  Description of Artificial Sequence: Synthetic oligonucleotide
uguuggacauccuggauac

SEQ ID NO: 85098 - RNA, 19 nt, Artificial Sequence
  Description of Artificial Sequence: Synthetic oligonucleotide
ccgccggccaggaggagua

SEQ ID NO: 85099 - RNA, 19 nt, Artificial Sequence
  Description of Artificial Sequence: Synthetic oligonucleotide
acagcgccaugcgggacca

SEQ ID NO: 85100 - RNA, 19 nt, Artificial Sequence
  Description of Artificial Sequence: Synthetic oligonucleotide
aguacaugcgcaccgggga

SEQ ID NO: 85101 - RNA, 19 nt, Artificial Sequence
  Description of Artificial Sequence: Synthetic oligonucleotide
agggcuuccuguguguguu

SEQ ID NO: 85102 - RNA, 19 nt, Artificial Sequence
  Description of Artificial Sequence: Synthetic oligonucleotide
uugccaucaacaacaccaa

SEQ ID NO: 85103 - RNA, 19 nt, Artificial Sequence
  Description of Artificial Sequence: Synthetic oligonucleotide
agucuuuugaggacaucca

SEQ ID NO: 85104 - RNA, 19 nt, Artificial Sequence
  Description of Artificial Sequence: Synthetic oligonucleotide
accaguacagggagcagau

SEQ ID NO: 85105 - RNA, 19 nt, Artificial Sequence
  Description of Artificial Sequence: Synthetic oligonucleotide
ucaaacgggugaaggacuc

SEQ ID NO: 85106 - RNA, 19 nt, Artificial Sequence
  Description of Artificial Sequence: Synthetic oligonucleotide
cggaugacgugcccauggu

SEQ ID NO: 85107 - RNA, 19 nt, Artificial Sequence
  Description of Artificial Sequence: Synthetic oligonucleotide
ugcugguggggaacaagug

SEQ ID NO: 85108 - RNA, 19 nt, Artificial Sequence
  Description of Artificial Sequence: Synthetic oligonucleotide
gugaccuggcugcacgcac

SEQ ID NO: 85109 - RNA, 19 nt, Artificial Sequence
  Description of Artificial Sequence: Synthetic oligonucleotide
cuguggaaucucggcaggc

SEQ ID NO: 85110 - RNA, 19 nt, Artificial Sequence
  Description of Artificial Sequence: Synthetic oligonucleotide
cucaggaccucgcccgaag

SEQ ID NO: 85111 - RNA, 19 nt, Artificial Sequence
  Description of Artificial Sequence: Synthetic oligonucleotide
gcuacggcauccccuacau

SEQ ID NO: 85112 - RNA, 19 nt, Artificial Sequence
  Description of Artificial Sequence: Synthetic oligonucleotide
ucgagaccucggccaagac

SEQ ID NO: 85113 - RNA, 19 nt, Artificial Sequence
  Description of Artificial Sequence: Synthetic oligonucleotide
cccggcagggcagccgcuc

SEQ ID NO: 85114 - RNA, 19 nt, Artificial Sequence
  Description of Artificial Sequence: Synthetic oligonucleotide
cuggcucuagcuccagcuc

SEQ ID NO: 85115 - RNA, 19 nt, Artificial Sequence
  Description of Artificial Sequence: Synthetic oligonucleotide
ccgggacccucugggaccc

SEQ ID NO: 85116 - RNA, 19 nt, Artificial Sequence
  Description of Artificial Sequence: Synthetic oligonucleotide
ccccgggacccaugugacc

SEQ ID NO: 85117 - RNA, 19 nt, Artificial Sequence
  Description of Artificial Sequence: Synthetic oligonucleotide
ccagcggccccucgcgcug

SEQ ID NO: 85118 - RNA, 19 nt, Artificial Sequence
  Description of Artificial Sequence: Synthetic oligonucleotide
ggaguggaggaugccuucu

SEQ ID NO: 85119 - RNA, 19 nt, Artificial Sequence
  Description of Artificial Sequence: Synthetic oligonucleotide
uacacguuggugcgugaga

SEQ ID NO: 85120 - RNA, 19 nt, Artificial Sequence
  Description of Artificial Sequence: Synthetic oligonucleotide
auccggcagcacaagcugc

SEQ ID NO: 85121 - RNA, 19 nt, Artificial Sequence
  Description of Artificial Sequence: Synthetic oligonucleotide
cggaagcugaacccuccug

SEQ ID NO: 85122 - RNA, 19 nt, Artificial Sequence
  Description of Artificial Sequence: Synthetic oligonucleotide
gaugagaguggccccggcu

SEQ ID NO: 85123 - RNA, 19 nt, Artificial Sequence
  Description of Artificial Sequence: Synthetic oligonucleotide
ugcaugagcugcaagugug

SEQ ID NO: 85124 - RNA, 19 nt, Artificial Sequence
  Description of Artificial Sequence: Synthetic oligonucleotide
gugcucuccugacgcagca

SEQ ID NO: 85125 - RNA, 19 nt, Artificial Sequence
  Description of Artificial Sequence: Synthetic oligonucleotide
acaagcucaggacauggag

SEQ ID NO: 85126 - RNA, 19 nt, Artificial Sequence
  Description of Artificial Sequence: Synthetic oligonucleotide
ggugccggaugcaggaagg

SEQ ID NO: 85127 - RNA, 19 nt, Artificial Sequence
  Description of Artificial Sequence: Synthetic oligonucleotide
gaggugcagacggaaggag

SEQ ID NO: 85128 - RNA, 19 nt, Artificial Sequence
  Description of Artificial Sequence: Synthetic oligonucleotide
ggaggaaggaaggacggaa

SEQ ID NO: 85129 - RNA, 19 nt, Artificial Sequence
  Description of Artificial Sequence: Synthetic oligonucleotide
agcaaggaaggaaggaagg

SEQ ID NO: 85130 - RNA, 19 nt, Artificial Sequence
  Description of Artificial Sequence: Synthetic oligonucleotide
ggcugcuggagcccaguca

SEQ ID NO: 85131 - RNA, 19 nt, Artificial Sequence
  Description of Artificial Sequence: Synthetic oligonucleotide
accccgggaccgugggccg

SEQ ID NO: 85132 - RNA, 19 nt, Artificial Sequence
  Description of Artificial Sequence: Synthetic oligonucleotide
gaggugacugcagacccuc

SEQ ID NO: 85133 - RNA, 19 nt, Artificial Sequence
  Description of Artificial Sequence: Synthetic oligonucleotide
cccagggaggcugugcaca

SEQ ID NO: 85134 - RNA, 19 nt, Artificial Sequence
  Description of Artificial Sequence: Synthetic oligonucleotide
agacugucuugaacauccc

SEQ ID NO: 85135 - RNA, 19 nt, Artificial Sequence
  Description of Artificial Sequence: Synthetic oligonucleotide
caaaugccaccggaacccc

SEQ ID NO: 85136 - RNA, 19 nt, Artificial Sequence
  Description of Artificial Sequence: Synthetic oligonucleotide
cagcccuuagcuccccucc

SEQ ID NO: 85137 - RNA, 19 nt, Artificial Sequence
  Description of Artificial Sequence: Synthetic oligonucleotide
ccaggccucugugggcccu

SEQ ID NO: 85138 - RNA, 19 nt, Artificial Sequence
  Description of Artificial Sequence: Synthetic oligonucleotide
uugucgggcacagauggga

SEQ ID NO: 85139 - RNA, 19 nt, Artificial Sequence
  Description of Artificial Sequence: Synthetic oligonucleotide
aucacaguaaauuauugga

SEQ ID NO: 85140 - RNA, 19 nt, Artificial Sequence
  Description of Artificial Sequence: Synthetic oligonucleotide
cccggcagggaguggagga

SEQ ID NO: 85141 - RNA, 19 nt, Artificial Sequence
  Description of Artificial Sequence: Synthetic oligonucleotide
augccuucuacacguuggu

SEQ ID NO: 85142 - RNA, 19 nt, Artificial Sequence
  Description of Artificial Sequence: Synthetic oligonucleotide
ugcgugagauccggcagca

SEQ ID NO: 85143 - RNA, 19 nt, Artificial Sequence
  Description of Artificial Sequence: Synthetic oligonucleotide
acaagcugcggaagcugaa

SEQ ID NO: 85144 - RNA, 19 nt, Artificial Sequence
  Description of Artificial Sequence: Synthetic oligonucleotide
acccuccugaugagagugg

SEQ ID NO: 85145 - RNA, 19 nt, Artificial Sequence
  Description of Artificial Sequence: Synthetic oligonucleotide
gccccggcugcaugagcug

SEQ ID NO: 85146 - RNA, 19 nt, Artificial Sequence
  Description of Artificial Sequence: Synthetic oligonucleotide
gcaagugugugcucuccug

SEQ ID NO: 85147 - RNA, 19 nt, Artificial Sequence
  Description of Artificial Sequence: Synthetic oligonucleotide
gacgcagcacaagcucagg

SEQ ID NO: 85148 - RNA, 19 nt, Artificial Sequence
  Description of Artificial Sequence: Synthetic oligonucleotide
gacauggaggugccggaug

SEQ ID NO: 85149 - RNA, 19 nt, Artificial Sequence
  Description of Artificial Sequence: Synthetic oligonucleotide
gcaggaaggaggugcagac

SEQ ID NO: 85150 - RNA, 19 nt, Artificial Sequence
  Description of Artificial Sequence: Synthetic oligonucleotide
cggaaggaggaggaaggaa

SEQ ID NO: 85151 - RNA, 19 nt, Artificial Sequence
  Description of Artificial Sequence: Synthetic oligonucleotide
aggacggaagcaaggaagg

SEQ ID NO: 85152 - RNA, 19 nt, Artificial Sequence
  Description of Artificial Sequence: Synthetic oligonucleotide
gaaggaagggcugcuggag

SEQ ID NO: 85153 - RNA, 19 nt, Artificial Sequence
  Description of Artificial Sequence: Synthetic oligonucleotide
gcccagucaccccgggacc

SEQ ID NO: 85154 - RNA, 19 nt, Artificial Sequence
  Description of Artificial Sequence: Synthetic oligonucleotide
cgugggccgaggugacugc

SEQ ID NO: 85155 - RNA, 19 nt, Artificial Sequence
  Description of Artificial Sequence: Synthetic oligonucleotide
cagacccucccagggaggc

SEQ ID NO: 85156 - RNA, 19 nt, Artificial Sequence
  Description of Artificial Sequence: Synthetic oligonucleotide
cugugcacagacugucuug

SEQ ID NO: 85157 - RNA, 19 nt, Artificial Sequence
  Description of Artificial Sequence: Synthetic oligonucleotide
gaacaucccaaaugccacc

SEQ ID NO: 85158 - RNA, 19 nt, Artificial Sequence
  Description of Artificial Sequence: Synthetic oligonucleotide
cggaaccccagcccuuagc

SEQ ID NO: 85159 - RNA, 19 nt, Artificial Sequence
  Description of Artificial Sequence: Synthetic oligonucleotide
cuccccucccaggccucug

SEQ ID NO: 85160 - RNA, 19 nt, Artificial Sequence
  Description of Artificial Sequence: Synthetic oligonucleotide
gugggcccuugucgggcac

SEQ ID NO: 85161 - RNA, 19 nt, Artificial Sequence
  Description of Artificial Sequence: Synthetic oligonucleotide
cagaugggaucacaguaaa

SEQ ID NO: 85162 - RNA, 19 nt, Artificial Sequence
  Description of Artificial Sequence: Synthetic oligonucleotide
auuauuggauggucuugaa

SEQ ID NO: 85163 - RNA, 25 nt, Artificial Sequence
  Description of Artificial Sequence: Synthetic oligonucleotide
ugcccugcgcccgcaacccgagccg

SEQ ID NO: 85164 - RNA, 25 nt, Artificial Sequence
  Description of Artificial Sequence: Synthetic oligonucleotide
gcacccgccgcggacggagcccaug

SEQ ID NO: 85165 - RNA, 25 nt, Artificial Sequence
  Description of Artificial Sequence: Synthetic oligonucleotide
gcgcggggcgaaccgcgcgcccccg

SEQ ID NO: 85166 - RNA, 25 nt, Artificial Sequence
  Description of Artificial Sequence: Synthetic oligonucleotide
gcccccgccccgccccggccucggc

SEQ ID NO: 85167 - RNA, 25 nt, Artificial Sequence
  Description of Artificial Sequence: Synthetic oligonucleotide
ccccggcccuggccccgggggcagu

SEQ ID NO: 85168 - RNA, 25 nt, Artificial Sequence
  Description of Artificial Sequence: Synthetic oligonucleotide
ucgcgccugugaacgguggggcagg

SEQ ID NO: 85169 - RNA, 25 nt, Artificial Sequence
  Description of Artificial Sequence: Synthetic oligonucleotide
gagacccuguaggaggaccccgggc

SEQ ID NO: 85170 - RNA, 25 nt, Artificial Sequence
  Description of Artificial Sequence: Synthetic oligonucleotide
ccgcaggccccugaggagcgaugac

SEQ ID NO: 85171 - RNA, 25 nt, Artificial Sequence
  Description of Artificial Sequence: Synthetic oligonucleotide
cggaauauaagcugguggugguggg

SEQ ID NO: 85172 - RNA, 25 nt, Artificial Sequence
  Description of Artificial Sequence: Synthetic oligonucleotide
gcgccggcggugugggcaagagugc

SEQ ID NO: 85173 - RNA, 25 nt, Artificial Sequence
  Description of Artificial Sequence: Synthetic oligonucleotide
cgcugaccauccagcugauccagaa

SEQ ID NO: 85174 - RNA, 25 nt, Artificial Sequence
  Description of Artificial Sequence: Synthetic oligonucleotide
accauuuuguggacgaauacgaccc

SEQ ID NO: 85175 - RNA, 25 nt, Artificial Sequence
  Description of Artificial Sequence: Synthetic oligonucleotide
ccacuauagaggauuccuaccggaa

SEQ ID NO: 85176 - RNA, 25 nt, Artificial Sequence
  Description of Artificial Sequence: Synthetic oligonucleotide
agcagguggucauugauggggagac

SEQ ID NO: 85177 - RNA, 25 nt, Artificial Sequence
  Description of Artificial Sequence: Synthetic oligonucleotide
cgugccuguuggacauccuggauac

SEQ ID NO: 85178 - RNA, 25 nt, Artificial Sequence
  Description of Artificial Sequence: Synthetic oligonucleotide
ccgccggccaggaggaguacagcgc

SEQ ID NO: 85179 - RNA, 25 nt, Artificial Sequence
  Description of Artificial Sequence: Synthetic oligonucleotide
ccaugcgggaccaguacaugcgcac

SEQ ID NO: 85180 - RNA, 25 nt, Artificial Sequence
  Description of Artificial Sequence: Synthetic oligonucleotide
ccggggagggcuuccuguguguguu

SEQ ID NO: 85181 - RNA, 25 nt, Artificial Sequence
  Description of Artificial Sequence: Synthetic oligonucleotide
uugccaucaacaacaccaagucuuu

SEQ ID NO: 85182 - RNA, 25 nt, Artificial Sequence
  Description of Artificial Sequence: Synthetic oligonucleotide
uugaggacauccaccaguacaggga

SEQ ID NO: 85183 - RNA, 25 nt, Artificial Sequence
  Description of Artificial Sequence: Synthetic oligonucleotide
agcagaucaaacgggugaaggacuc

SEQ ID NO: 85184 - RNA, 25 nt, Artificial Sequence
  Description of Artificial Sequence: Synthetic oligonucleotide
cggaugacgugcccauggugcuggu

SEQ ID NO: 85185 - RNA, 25 nt, Artificial Sequence
  Description of Artificial Sequence: Synthetic oligonucleotide
uggggaacaagugugaccuggcugc

SEQ ID NO: 85186 - RNA, 25 nt, Artificial Sequence
  Description of Artificial Sequence: Synthetic oligonucleotide
cacgcacuguggaaucucggcaggc

SEQ ID NO: 85187 - RNA, 25 nt, Artificial Sequence
  Description of Artificial Sequence: Synthetic oligonucleotide
cucaggaccucgcccgaagcuacgg

SEQ ID NO: 85188 - RNA, 25 nt, Artificial Sequence
  Description of Artificial Sequence: Synthetic oligonucleotide
gcauccccuacaucgagaccucggc

SEQ ID NO: 85189 - RNA, 25 nt, Artificial Sequence
  Description of Artificial Sequence: Synthetic oligonucleotide
ccaagacccggcagggcagccgcuc

SEQ ID NO: 85190 - RNA, 25 nt, Artificial Sequence
  Description of Artificial Sequence: Synthetic oligonucleotide
cuggcucuagcuccagcuccgggac

SEQ ID NO: 85191 - RNA, 25 nt, Artificial Sequence
  Description of Artificial Sequence: Synthetic oligonucleotide
cccucugggaccccccgggacccau

SEQ ID NO: 85192 - RNA, 25 nt, Artificial Sequence
  Description of Artificial Sequence: Synthetic oligonucleotide
ugugacccagcggccccucgcgcug

SEQ ID NO: 85193 - RNA, 25 nt, Artificial Sequence
  Description of Artificial Sequence: Synthetic oligonucleotide
ggaguggaggaugccuucuacacgu

SEQ ID NO: 85194 - RNA, 25 nt, Artificial Sequence
  Description of Artificial Sequence: Synthetic oligonucleotide
uuggugcgugagauccggcagcaca

SEQ ID NO: 85195 - RNA, 25 nt, Artificial Sequence
  Description of Artificial Sequence: Synthetic oligonucleotide
aagcugcggaagcugaacccuccug

SEQ ID NO: 85196 - RNA, 25 nt, Artificial Sequence
  Description of Artificial Sequence: Synthetic oligonucleotide
gaugagaguggccccggcugcauga

SEQ ID NO: 85197 - RNA, 25 nt, Artificial Sequence
  Description of Artificial Sequence: Synthetic oligonucleotide
agcugcaagugugugcucuccugac

SEQ ID NO: 85198 - RNA, 25 nt, Artificial Sequence
  Description of Artificial Sequence: Synthetic oligonucleotide
cgcagcacaagcucaggacauggag

SEQ ID NO: 85199 - RNA, 25 nt, Artificial Sequence
  Description of Artificial Sequence: Synthetic oligonucleotide
ggugccggaugcaggaaggaggugc

SEQ ID NO: 85200 - RNA, 25 nt, Artificial Sequence
  Description of Artificial Sequence: Synthetic oligonucleotide
cagacggaaggaggaggaaggaagg

SEQ ID NO: 85201 - RNA, 25 nt, Artificial Sequence
  Description of Artificial Sequence: Synthetic oligonucleotide
gacggaagcaaggaaggaaggaagg

SEQ ID NO: 85202 - RNA, 25 nt, Artificial Sequence
  Description of Artificial Sequence: Synthetic oligonucleotide
ggcugcuggagcccagucaccccgg

SEQ ID NO: 85203 - RNA, 25 nt, Artificial Sequence
  Description of Artificial Sequence: Synthetic oligonucleotide
ggaccgugggccgaggugacugcag

SEQ ID NO: 85204 - RNA, 25 nt, Artificial Sequence
  Description of Artificial Sequence: Synthetic oligonucleotide
gacccucccagggaggcugugcaca

SEQ ID NO: 85205 - RNA, 25 nt, Artificial Sequence
  Description of Artificial Sequence: Synthetic oligonucleotide
agacugucuugaacaucccaaaugc

SEQ ID NO: 85206 - RNA, 25 nt, Artificial Sequence
  Description of Artificial Sequence: Synthetic oligonucleotide
ccaccggaaccccagcccuuagcuc

SEQ ID NO: 85207 - RNA, 25 nt, Artificial Sequence
  Description of Artificial Sequence: Synthetic oligonucleotide
ccccucccaggccucugugggcccu

SEQ ID NO: 85208 - RNA, 25 nt, Artificial Sequence
  Description of Artificial Sequence: Synthetic oligonucleotide
uugucgggcacagaugggaucacag

SEQ ID NO: 85209 - RNA, 25 nt, Artificial Sequence
  Description of Artificial Sequence: Synthetic oligonucleotide
guaaauuauuggauggucuugaaaa

SEQ ID NO: 85210 - RNA, 25 nt, Artificial Sequence
  Description of Artificial Sequence: Synthetic oligonucleotide
ccaagacccggcagggaguggagga

SEQ ID NO: 85211 - RNA, 25 nt, Artificial Sequence
  Description of Artificial Sequence: Synthetic oligonucleotide
augccuucuacacguuggugcguga

SEQ ID NO: 85212 - RNA, 25 nt, Artificial Sequence
  Description of Artificial Sequence: Synthetic oligonucleotide
agauccggcagcacaagcugcggaa

SEQ ID NO: 85213 - RNA, 25 nt, Artificial Sequence
  Description of Artificial Sequence: Synthetic oligonucleotide
agcugaacccuccugaugagagugg

SEQ ID NO: 85214 - RNA, 25 nt, Artificial Sequence
  Description of Artificial Sequence: Synthetic oligonucleotide
gccccggcugcaugagcugcaagug

SEQ ID NO: 85215 - RNA, 25 nt, Artificial Sequence
  Description of Artificial Sequence: Synthetic oligonucleotide
gugugcucuccugacgcagcacaag

SEQ ID NO: 85216 - RNA, 25 nt, Artificial Sequence
  Description of Artificial Sequence: Synthetic oligonucleotide
gcucaggacauggaggugccggaug

SEQ ID NO: 85217 - RNA, 25 nt, Artificial Sequence
  Description of Artificial Sequence: Synthetic oligonucleotide
gcaggaaggaggugcagacggaagg

SEQ ID NO: 85218 - RNA, 25 nt, Artificial Sequence
  Description of Artificial Sequence: Synthetic oligonucleotide
gaggaggaaggaaggacggaagcaa

SEQ ID NO: 85219 - RNA, 25 nt, Artificial Sequence
  Description of Artificial Sequence: Synthetic oligonucleotide
aggaaggaaggaagggcugcuggag

SEQ ID NO: 85220 - RNA, 25 nt, Artificial Sequence
  Description of Artificial Sequence: Synthetic oligonucleotide
gcccagucaccccgggaccgugggc

SEQ ID NO: 85221 - RNA, 25 nt, Artificial Sequence
  Description of Artificial Sequence: Synthetic oligonucleotide
ccgaggugacugcagacccucccag

SEQ ID NO: 85222 - RNA, 25 nt, Artificial Sequence
  Description of Artificial Sequence: Synthetic oligonucleotide
gggaggcugugcacagacugucuug

SEQ ID NO: 85223 - RNA, 25 nt, Artificial Sequence
  Description of Artificial Sequence: Synthetic oligonucleotide
gaacaucccaaaugccaccggaacc

SEQ ID NO: 85224 - RNA, 25 nt, Artificial Sequence
  Description of Artificial Sequence: Synthetic oligonucleotide
cccagcccuuagcuccccucccagg

SEQ ID NO: 85225 - RNA, 25 nt, Artificial Sequence
  Description of Artificial Sequence: Synthetic oligonucleotide
gccucugugggcccuugucgggcac

SEQ ID NO: 85226 - RNA, 25 nt, Artificial Sequence
  Description of Artificial Sequence: Synthetic oligonucleotide
cagaugggaucacaguaaauuauug

SEQ ID NO: 85227 - RNA, 5436 nt, Homo sapiens
ggccgcggcggcggaggcagcagcggcggcggcaguggcggcggcgaagguggcggcggcucggccaguacucccggcccccgccauuucggacugggagcgagcgcggcgcaggcacugaaggcggcggcggggccagaggcucagcggcucccaggugcgggagagaggccugcugaaaaugacugaauauaaacuugugguaguuggagcugguggcguaggcaagagugccuugacgauacagcuaauucagaaucauuuuguggacgaauaugauccaacaauagaggauuccuacaggaagcaaguaguaauugauggagaaaccugucucuuggauauucucgacacagcaggucaagaggaguacagugcaaugagggaccaguacaugaggacuggggagggcuuucuuuguguauuugccauaaauaauacuaaaucauuugaagauauucaccauuauagagaacaaauuaaaagaguuaaggacucugaagauguaccuaugguccuaguaggaaauaaaugugauuugccuucuagaacaguagacacaaaacaggcucaggacuuagcaagaaguuauggaauuccuuuuauugaaacaucagcaaagacaagacagagaguggaggaugcuuuuuauacauuggugagggagauccgacaauacagauugaaaaaaaucagcaaagaagaaaagacuccuggcugugugaaaauuaaaaaaugcauuauaauguaaucuggguguugaugaugccuucuauacauuaguucgagaaauucgaaaacauaaagaaaagaugagcaaagaugguaaaaagaagaaaaagaagucaaagacaaaguguguaauuauguaaauacaauuuguacuuuuuucuuaaggcauacuaguacaagugguaauuuuuguacauuacacuaaauuauuagcauuuguuuuagcauuaccuaauuuuuuuccugcuccaugcagacuguuagcuuuuaccuuaaaugcuuauuuuaaaaugacaguggaaguuuuuuuuuccucuaagugccaguauucccagaguuuugguuuuugaacuagcaaugccugugaaaaagaaacugaauaccuaagauuucugucuugggguuuuuggugcaugcaguugauuacuucuuauuuuucuuaccaauugugaauguuggugugaaacaaauuaaugaagcuuuugaaucaucccuauucuguguuuuaucuagucacauaaauggauuaauuacuaauuucaguugagaccuucuaauugguuuuuacugaaacauugagggaacacaaauuuaugggcuuccugaugaugauucuucuaggcaucauguccuauaguuugucaucccugaugaauguaaaguuacacuguucacaaagguuuugucuccuuuccacugcuauuagucauggucacucuccccaaaauauuauauuuuuucuauaaaaagaaaaaaauggaaaaaaauuacaaggcaauggaaacuauuauaaggccauuuccuuuucacauuagauaaauuacuauaaagacuccuaauagcuuuuccuguuaaggcagacccaguaugaaauggggauuauuauagcaaccauuuuggggcuauauuuacaugcuacuaaauuuuuauaauaauugaaaagauuuuaacaaguauaaaaaauucucauaggaauuaaauguagucucccugugucagacugcucuuucauaguauaacuuuaaaucuuuucuucaacuugagucuuugaagauaguuuuaauucugcuugugacauuaaaagauuauuugggccaguuauagcuuauuagguguugaagagaccaagguugcaaggccaggcccugugugaaccuuugagcuuucauagagaguuucacagcauggacuguguccccacggucauccaguguugucaugcauugguuagucaaaauggggagggacuagggcaguuuggauagcucaacaagauacaaucucacucuguggugguccugcugacaaaucaagagcauugcuuuuguuucuuaagaaaacaaacucuuuuuuaaaaauuacuuuuaaauauuaacucaaaaguugagauuuuggggugguggugugccaagacauuaauuuuuuuuuuaaacaaugaagugaaaaaguuuuacaaucucuagguuuggcuaguucucuuaacacugguuaaauuaacauugcauaaacacuuuucaagucugauccauauuuaauaaugcuuuaaaauaaaaauaaaaacaauccuuuugauaaauuuaaaauguuacuuauuuuaaaauaaaugaagugagauggcauggugaggugaaaguaucacuggacuaggaagaaggugacuuagguucuagauaggugucuuuuaggacucugauuuugaggacaucacuuacuauccauuucuucauguuaaaagaagucaucucaaacucuuaguuuuuuuuuuuuacaacuauguaauuuauauuccauuuacauaaggauacacuuauuugucaagcucagcacaaucuguaaauuuuuaaccuauguuacaccaucuucagugccagucuugggcaaaauugugcaagaggugaaguuuauauuugaauauccauucucguuuuaggacucuucuuccauauuagugucaucuugccucccuaccuuccacaugccccaugacuugaugcaguuuuaauacuuguaauuccccuaaccauaagauuuacugcugcuguggauaucuccaugaaguuuucccacugagucacaucagaaaugcccuacaucuuauuuccucagggcucaagagaaucugacagauaccauaaagggauuugaccuaaucacuaauuuucaggugguggcugaugcuuugaacaucucuuugcugcccaauccauuagcgacaguaggauuuuucaaaccugguaugaauagacagaacccuauccaguggaaggagaauuuaauaaagauagugcugaaagaauuccuuagguaaucuauaacuaggacuacuccugguaacaguaauacauuccauuguuuuaguaaccagaaaucuucaugcaaugaaaaauacuuuaauucaugaagcuuacuuuuuuuuuuuggugucagagucucgcucuugucacccaggcuggaaugcaguggcgccaucucagcucacugcaaccuccaucucccagguucaagcgauucucgugccucggccuccugaguagcugggauuacaggcgugugccacuacacucaacuaauuuuuguauuuuuaggagagacgggguuucacccuguuggccaggcuggucucgaacuccugaccucaagugauucacccaccuuggccucauaaaccuguuuugcagaacucauuuauucagcaaauauuuauugagugccuaccagaugccagucaccgcacaaggcacuggguauaugguauccccaaacaagagacauaaucccgguccuuagguagugcuaguguggucuguaauaucuuacuaaggccuuugguauacgacccagagauaacacgaugcguauuuuaguuuugcaaagaagggguuuggucucugugccagcucuauaauuguuuugcuacgauuccacugaaacucuucgaucaagcuacuuuauguaaaucacuucauuguuuuaaaggaauaaacuugauuauauuguuuuuuuauuuggcauaacugugauucuuuuaggacaauuacuguacacauuaagguguaugucagauauucauauugacccaaauguguaauauuccaguuuucucugcauaaguaauuaaaauauacuuaaaaauuaauaguuuuaucuggguacaaauaaacaggugccugaacuaguucacagacaaggaaacuucuauguaaaaaucacuaugauuucugaauugcuaugugaaacuacagaucuuuggaacacuguuuagguaggguguuaagacuuacacaguaccucguuucuacacagagaaagaaauggccauacuucaggaacugcagugcuuaugaggggauauuuaggccucuugaauuuuugauguagaugggcauuuuuuuaagguagugguuaauuaccuuuaugugaacuuugaaugguuuaacaaaagauuuguuuuuguagagauuuuaaagggggagaauucuagaaauaaauguuaccuaauuauuacagccuuaaagacaaaaauccuuguugaaguuuuuuuaaaaaaagcuaaauuacauagacuuaggcauuaacauguuuguggaagaauauagcagacguauauuguaucauuugagugaauguucccaaguaggcauucuaggcucuauuuaacugagucacacugcauaggaauuuagaaccuaacuuuuauagguuaucaaaacuguugucaccauugcacaauuuuguccuaauauauacauagaaacuuuguggggcauguuaaguuacaguuugcacaaguucaucucauuuguauuccauugauuuuuuuuuucuucuaaacauuuuuucuucaaacaguauauaacuuuuuuuaggggauuuuuuuuuagacagcaaaaacuaucugaagauuuccauuugucaaaaaguaaugauuucuugauaauuguguaguaauguuuuuuagaacccagcaguuaccuuaaagcugaauuuauauuuaguaacuucuguguuaauacuggauagcaugaauucugcauugagaaacugaauagcugucauaaaaugaaacuuucuuucuaaagaaagauacucacaugaguucuugaagaauagucauaacuagauuaagaucuguguuuuaguuuaauaguuugaagugccuguuugggauaaugauagguaauuuagaugaauuuaggggaaaaaaaaguuaucugcagauauguugagggcccaucucuccccccacacccccacagagcuaacuggguuacaguguuuuauccgaaaguuuccaauuccacugucuuguguuuucauguugaaaauacuuuugcauuuuuccuuugagugccaauuucuuacuaguacuauuucuuaauguaacauguuuaccuggaauguauuuuaacuauuuuuguauaguguaaacugaaacaugcacauuuuguacauugugcuuucuuuugugggacauaugcagugugauccaguuguuuuccaucauuugguugcgcugaccuaggaauguuggucauaucaaacauuaaaaaugaccacucuuuuaauugaaauuaacuuuuaaauguuuauaggaguaugugcugugaagugaucuaaaauuuguaauauuuuugucaugaacuguacuacuccuaauuauuguaauguaauaaaaauaguuacagugacaaaaaaaaaaaaaaa

SEQ ID NO: 85228 - RNA, 5312 nt, Homo sapiens
ggccgcggcggcggaggcagcagcggcggcggcaguggcggcggcgaagguggcggcggcucggccaguacucccggcccccgccauuucggacugggagcgagcgcggcgcaggcacugaaggcggcggcggggccagaggcucagcggcucccaggugcgggagagaggccugcugaaaaugacugaauauaaacuugugguaguuggagcugguggcguaggcaagagugccuugacgauacagcuaauucagaaucauuuuguggacgaauaugauccaacaauagaggauuccuacaggaagcaaguaguaauugauggagaaaccugucucuuggauauucucgacacagcaggucaagaggaguacagugcaaugagggaccaguacaugaggacuggggagggcuuucuuuguguauuugccauaaauaauacuaaaucauuugaagauauucaccauuauagagaacaaauuaaaagaguuaaggacucugaagauguaccuaugguccuaguaggaaauaaaugugauuugccuucuagaacaguagacacaaaacaggcucaggacuuagcaagaaguuauggaauuccuuuuauugaaacaucagcaaagacaagacaggguguugaugaugccuucuauacauuaguucgagaaauucgaaaacauaaagaaaagaugagcaaagaugguaaaaagaagaaaaagaagucaaagacaaaguguguaauuauguaaauacaauuuguacuuuuuucuuaaggcauacuaguacaagugguaauuuuuguacauuacacuaaauuauuagcauuuguuuuagcauuaccuaauuuuuuuccugcuccaugcagacuguuagcuuuuaccuuaaaugcuuauuuuaaaaugacaguggaaguuuuuuuuuccucuaagugccaguauucccagaguuuugguuuuugaacuagcaaugccugugaaaaagaaacugaauaccuaagauuucugucuugggguuuuuggugcaugcaguugauuacuucuuauuuuucuuaccaauugugaauguuggugugaaacaaauuaaugaagcuuuugaaucaucccuauucuguguuuuaucuagucacauaaauggauuaauuacuaauuucaguugagaccuucuaauugguuuuuacugaaacauugagggaacacaaauuuaugggcuuccugaugaugauucuucuaggcaucauguccuauaguuugucaucccugaugaauguaaaguuacacuguucacaaagguuuugucuccuuuccacugcuauuagucauggucacucuccccaaaauauuauauuuuuucuauaaaaagaaaaaaauggaaaaaaauuacaaggcaauggaaacuauuauaaggccauuuccuuuucacauuagauaaauuacuauaaagacuccuaauagcuuuuccuguuaaggcagacccaguaugaaauggggauuauuauagcaaccauuuuggggcuauauuuacaugcuacuaaauuuuuauaauaauugaaaagauuuuaacaaguauaaaaaauucucauaggaauuaaauguagucucccugugucagacugcucuuucauaguauaacuuuaaaucuuuucuucaacuugagucuuugaagauaguuuuaauucugcuugugacauuaaaagauuauuugggccaguuauagcuuauuagguguugaagagaccaagguugcaaggccaggcccugugugaaccuuugagcuuucauagagaguuucacagcauggacuguguccccacggucauccaguguugucaugcauugguuagucaaaauggggagggacuagggcaguuuggauagcucaacaagauacaaucucacucuguggugguccugcugacaaaucaagagcauugcuuuuguuucuuaagaaaacaaacucuuuuuuaaaaauuacuuuuaaauauuaacucaaaaguugagauuuuggggugguggugugccaagacauuaauuuuuuuuuuaaacaaugaagugaaaaaguuuuacaaucucuagguuuggcuaguucucuuaacacugguuaaauuaacauugcauaaacacuuuucaagucugauccauauuuaauaaugcuuuaaaauaaaaauaaaaacaauccuuuugauaaauuuaaaauguuacuuauuuuaaaauaaaugaagugagauggcauggugaggugaaaguaucacuggacuaggaagaaggugacuuagguucuagauaggugucuuuuaggacucugauuuugaggacaucacuuacuauccauuucuucauguuaaaagaagucaucucaaacucuuaguuuuuuuuuuuuacaacuauguaauuuauauuccauuuacauaaggauacacuuauuugucaagcucagcacaaucuguaaauuuuuaaccuauguuacaccaucuucagugccagucuugggcaaaauugugcaagaggugaaguuuauauuugaauauccauucucguuuuaggacucuucuuccauauuagugucaucuugccucccuaccuuccacaugccccaugacuugaugcaguuuuaauacuuguaauuccccuaaccauaagauuuacugcugcuguggauaucuccaugaaguuuucccacugagucacaucagaaaugcccuacaucuuauuuccucagggcucaagagaaucugacagauaccauaaagggauuugaccuaaucacuaauuuucaggugguggcugaugcuuugaacaucucuuugcugcccaauccauuagcgacaguaggauuuuucaaaccugguaugaauagacagaacccuauccaguggaaggagaauuuaauaaagauagugcugaaagaauuccuuagguaaucuauaacuaggacuacuccugguaacaguaauacauuccauuguuuuaguaaccagaaaucuucaugcaaugaaaaauacuuuaauucaugaagcuuacuuuuuuuuuuuggugucagagucucgcucuugucacccaggcuggaaugcaguggcgccaucucagcucacugcaaccuccaucucccagguucaagcgauucucgugccucggccuccugaguagcugggauuacaggcgugugccacuacacucaacuaauuuuuguauuuuuaggagagacgggguuucacccuguuggccaggcuggucucgaacuccugaccucaagugauucacccaccuuggccucauaaaccuguuuugcagaacucauuuauucagcaaauauuuauugagugccuaccagaugccagucaccgcacaaggcacuggguauaugguauccccaaacaagagacauaaucccgguccuuagguagugcuaguguggucuguaauaucuuacuaaggccuuugguauacgacccagagauaacacgaugcguauuuuaguuuugcaaagaagggguuuggucucugugccagcucuauaauuguuuugcuacgauuccacugaaacucuucgaucaagcuacuuuauguaaaucacuucauuguuuuaaaggaauaaacuugauuauauuguuuuuuuauuuggcauaacugugauucuuuuaggacaauuacuguacacauuaagguguaugucagauauucauauugacccaaauguguaauauuccaguuuucucugcauaaguaauuaaaauauacuuaaaaauuaauaguuuuaucuggguacaaauaaacaggugccugaacuaguucacagacaaggaaacuucuauguaaaaaucacuaugauuucugaauugcuaugugaaacuacagaucuuuggaacacuguuuagguaggguguuaagacuuacacaguaccucguuucuacacagagaaagaaauggccauacuucaggaacugcagugcuuaugaggggauauuuaggccucuugaauuuuugauguagaugggcauuuuuuuaagguagugguuaauuaccuuuaugugaacuuugaaugguuuaacaaaagauuuguuuuuguagagauuuuaaagggggagaauucuagaaauaaauguuaccuaauuauuacagccuuaaagacaaaaauccuuguugaaguuuuuuuaaaaaaagcuaaauuacauagacuuaggcauuaacauguuuguggaagaauauagcagacguauauuguaucauuugagugaauguucccaaguaggcauucuaggcucuauuuaacugagucacacugcauaggaauuuagaaccuaacuuuuauagguuaucaaaacuguugucaccauugcacaauuuuguccuaauauauacauagaaacuuuguggggcauguuaaguuacaguuugcacaaguucaucucauuuguauuccauugauuuuuuuuuucuucuaaacauuuuuucuucaaacaguauauaacuuuuuuuaggggauuuuuuuuuagacagcaaaaacuaucugaagauuuccauuugucaaaaaguaaugauuucuugauaauuguguaguaauguuuuuuagaacccagcaguuaccuuaaagcugaauuuauauuuaguaacuucuguguuaauacuggauagcaugaauucugcauugagaaacugaauagcugucauaaaaugaaacuuucuuucuaaagaaagauacucacaugaguucuugaagaauagucauaacuagauuaagaucuguguuuuaguuuaauaguuugaagugccuguuugggauaaugauagguaauuuagaugaauuuaggggaaaaaaaaguuaucugcagauauguugagggcccaucucuccccccacacccccacagagcuaacuggguuacaguguuuuauccgaaaguuuccaauuccacugucuuguguuuucauguugaaaauacuuuugcauuuuuccuuugagugccaauuucuuacuaguacuauuucuuaauguaacauguuuaccuggaauguauuuuaacuauuuuuguauaguguaaacugaaacaugcacauuuuguacauugugcuuucuuuugugggacauaugcagugugauccaguuguuuuccaucauuugguugcgcugaccuaggaauguuggucauaucaaacauuaaaaaugaccacucuuuuaauugaaauuaacuuuuaaauguuuauaggaguaugugcugugaagugaucuaaaauuuguaauauuuuugucaugaacuguacuacuccuaauuauuguaauguaauaaaaauaguuacagugacaaaaaaaaaaaaaaa

SEQ ID NO: 85229 - RNA, 19 nt, Artificial Sequence
  Description of Artificial Sequence: Synthetic oligonucleotide
ggccgcggcggcggaggca

SEQ ID NO: 85230 - RNA, 19 nt, Artificial Sequence
  Description of Artificial Sequence: Synthetic oligonucleotide
agcagcggcggcggcagug

SEQ ID NO: 85231 - RNA, 19 nt, Artificial Sequence
  Description of Artificial Sequence: Synthetic oligonucleotide
ggcggcggcgaagguggcg

SEQ ID NO: 85232 - RNA, 19 nt, Artificial Sequence
  Description of Artificial Sequence: Synthetic oligonucleotide
ggcggcucggccaguacuc

SEQ ID NO: 85233 - RNA, 19 nt, Artificial Sequence
  Description of Artificial Sequence: Synthetic oligonucleotide
cccggcccccgccauuucg

SEQ ID NO: 85234 - RNA, 19 nt, Artificial Sequence
  Description of Artificial Sequence: Synthetic oligonucleotide
ggacugggagcgagcgcgg

SEQ ID NO: 85235 - RNA, 19 nt, Artificial Sequence
  Description of Artificial Sequence: Synthetic oligonucleotide
gcgcaggcacugaaggcgg

SEQ ID NO: 85236 - RNA, 19 nt, Artificial Sequence
  Description of Artificial Sequence: Synthetic oligonucleotide
gcggcggggccagaggcuc

SEQ ID NO: 85237 - RNA, 19 nt, Artificial Sequence
  Description of Artificial Sequence: Synthetic oligonucleotide
cagcggcucccaggugcgg

SEQ ID NO: 85238 - RNA, 19 nt, Artificial Sequence
  Description of Artificial Sequence: Synthetic oligonucleotide
ggagagaggccugcugaaa

SEQ ID NO: 85239 - RNA, 19 nt, Artificial Sequence
  Description of Artificial Sequence: Synthetic oligonucleotide
aaugacugaauauaaacuu

SEQ ID NO: 85240 - RNA, 19 nt, Artificial Sequence
  Description of Artificial Sequence: Synthetic oligonucleotide
ugugguaguuggagcuggu

SEQ ID NO: 85241 - RNA, 19 nt, Artificial Sequence
  Description of Artificial Sequence: Synthetic oligonucleotide
uggcguaggcaagagugcc

SEQ ID NO: 85242 - RNA, 19 nt, Artificial Sequence
  Description of Artificial Sequence: Synthetic oligonucleotide
cuugacgauacagcuaauu

SEQ ID NO: 85243 - RNA, 19 nt, Artificial Sequence
  Description of Artificial Sequence: Synthetic oligonucleotide
ucagaaucauuuuguggac

SEQ ID NO: 85244 - RNA, 19 nt, Artificial Sequence
  Description of Artificial Sequence: Synthetic oligonucleotide
cgaauaugauccaacaaua

SEQ ID NO: 85245 - RNA, 19 nt, Artificial Sequence
  Description of Artificial Sequence: Synthetic oligonucleotide
agaggauuccuacaggaag

SEQ ID NO: 85246 - RNA, 19 nt, Artificial Sequence
  Description of Artificial Sequence: Synthetic oligonucleotide
gcaaguaguaauugaugga

SEQ ID NO: 85247 - RNA, 19 nt, Artificial Sequence
  Description of Artificial Sequence: Synthetic oligonucleotide
agaaaccugucucuuggau

SEQ ID NO: 85248 - RNA, 19 nt, Artificial Sequence
  Description of Artificial Sequence: Synthetic oligonucleotide
uauucucgacacagcaggu

SEQ ID NO: 85249 - RNA, 19 nt, Artificial Sequence
  Description of Artificial Sequence: Synthetic oligonucleotide
ucaagaggaguacagugca

SEQ ID NO: 85250 - RNA, 19 nt, Artificial Sequence
  Description of Artificial Sequence: Synthetic oligonucleotide
aaugagggaccaguacaug

SEQ ID NO: 85251 - RNA, 19 nt, Artificial Sequence
  Description of Artificial Sequence: Synthetic oligonucleotide
gaggacuggggagggcuuu

SEQ ID NO: 85252 - RNA, 19 nt, Artificial Sequence
  Description of Artificial Sequence: Synthetic oligonucleotide
ucuuuguguauuugccaua

SEQ ID NO: 85253 - RNA, 19 nt, Artificial Sequence
  Description of Artificial Sequence: Synthetic oligonucleotide
aaauaauacuaaaucauuu

SEQ ID NO: 85254 - RNA, 19 nt, Artificial Sequence
  Description of Artificial Sequence: Synthetic oligonucleotide
ugaagauauucaccauuau

SEQ ID NO: 85255 - RNA, 19 nt, Artificial Sequence
  Description of Artificial Sequence: Synthetic oligonucleotide
uagagaacaaauuaaaaga

SEQ ID NO: 85256 - RNA, 19 nt, Artificial Sequence
  Description of Artificial Sequence: Synthetic oligonucleotide
aguuaaggacucugaagau

SEQ ID NO: 85257 - RNA, 19 nt, Artificial Sequence
  Description of Artificial Sequence: Synthetic oligonucleotide
uguaccuaugguccuagua

SEQ ID NO: 85258 - RNA, 19 nt, Artificial Sequence
  Description of Artificial Sequence: Synthetic oligonucleotide
aggaaauaaaugugauuug

SEQ ID NO: 85259 - RNA, 19 nt, Artificial Sequence
  Description of Artificial Sequence: Synthetic oligonucleotide
gccuucuagaacaguagac

SEQ ID NO: 85260 - RNA, 19 nt, Artificial Sequence
  Description of Artificial Sequence: Synthetic oligonucleotide
cacaaaacaggcucaggac

SEQ ID NO: 85261 - RNA, 19 nt, Artificial Sequence
  Description of Artificial Sequence: Synthetic oligonucleotide
cuuagcaagaaguuaugga

SEQ ID NO: 85262 - RNA, 19 nt, Artificial Sequence
  Description of Artificial Sequence: Synthetic oligonucleotide
aauuccuuuuauugaaaca

SEQ ID NO: 85263 - RNA, 19 nt, Artificial Sequence
  Description of Artificial Sequence: Synthetic oligonucleotide
aucagcaaagacaagacag

SEQ ID NO: 85264 - RNA, 19 nt, Artificial Sequence
  Description of Artificial Sequence: Synthetic oligonucleotide
gagaguggaggaugcuuuu

SEQ ID NO: 85265 - RNA, 19 nt, Artificial Sequence
  Description of Artificial Sequence: Synthetic oligonucleotide
uuauacauuggugagggag

SEQ ID NO: 85266 - RNA, 19 nt, Artificial Sequence
  Description of Artificial Sequence: Synthetic oligonucleotide
gauccgacaauacagauug

SEQ ID NO: 85267 - RNA, 19 nt, Artificial Sequence
  Description of Artificial Sequence: Synthetic oligonucleotide
gaaaaaaaucagcaaagaa

SEQ ID NO: 85268 - RNA, 19 nt, Artificial Sequence
  Description of Artificial Sequence: Synthetic oligonucleotide
agaaaagacuccuggcugu

SEQ ID NO: 85269 - RNA, 19 nt, Artificial Sequence
  Description of Artificial Sequence: Synthetic oligonucleotide
ugugaaaauuaaaaaaugc

SEQ ID NO: 85270 - RNA, 19 nt, Artificial Sequence
  Description of Artificial Sequence: Synthetic oligonucleotide
cauuauaauguaaucuggg

SEQ ID NO: 85271 - RNA, 19 nt, Artificial Sequence
  Description of Artificial Sequence: Synthetic oligonucleotide
guguugaugaugccuucua

SEQ ID NO: 85272 - RNA, 19 nt, Artificial Sequence
  Description of Artificial Sequence: Synthetic oligonucleotide
auacauuaguucgagaaau

SEQ ID NO: 85273 - RNA, 19 nt, Artificial Sequence
  Description of Artificial Sequence: Synthetic oligonucleotide
uucgaaaacauaaagaaaa

SEQ ID NO: 85274 - RNA, 19 nt, Artificial Sequence
  Description of Artificial Sequence: Synthetic oligonucleotide
agaugagcaaagaugguaa

SEQ ID NO: 85275 - RNA, 19 nt, Artificial Sequence
  Description of Artificial Sequence: Synthetic oligonucleotide
aaaagaagaaaaagaaguc

SEQ ID NO: 85276 - RNA, 19 nt, Artificial Sequence
  Description of Artificial Sequence: Synthetic oligonucleotide
caaagacaaaguguguaau

SEQ ID NO: 85277 - RNA, 19 nt, Artificial Sequence
  Description of Artificial Sequence: Synthetic oligonucleotide
uuauguaaauacaauuugu

SEQ ID NO: 85278 - RNA, 19 nt, Artificial Sequence
  Description of Artificial Sequence: Synthetic oligonucleotide
uacuuuuuucuuaaggcau

SEQ ID NO: 85279 - RNA, 19 nt, Artificial Sequence
  Description of Artificial Sequence: Synthetic oligonucleotide
uacuaguacaagugguaau

SEQ ID NO: 85280 - RNA, 19 nt, Artificial Sequence
  Description of Artificial Sequence: Synthetic oligonucleotide
uuuuuguacauuacacuaa

SEQ ID NO: 85281 - RNA, 19 nt, Artificial Sequence
  Description of Artificial Sequence: Synthetic oligonucleotide
aauuauuagcauuuguuuu

SEQ ID NO: 85282 - RNA, 19 nt, Artificial Sequence
  Description of Artificial Sequence: Synthetic oligonucleotide
uagcauuaccuaauuuuuu

SEQ ID NO: 85283 - RNA, 19 nt, Artificial Sequence
  Description of Artificial Sequence: Synthetic oligonucleotide
uuccugcuccaugcagacu

SEQ ID NO: 85284 - RNA, 19 nt, Artificial Sequence
  Description of Artificial Sequence: Synthetic oligonucleotide
uguuagcuuuuaccuuaaa

SEQ ID NO: 85285 - RNA, 19 nt, Artificial Sequence
  Description of Artificial Sequence: Synthetic oligonucleotide
augcuuauuuuaaaaugac

SEQ ID NO: 85286 - RNA, 19 nt, Artificial Sequence
  Description of Artificial Sequence: Synthetic oligonucleotide
caguggaaguuuuuuuuuc

SEQ ID NO: 85287 - RNA, 19 nt, Artificial Sequence
  Description of Artificial Sequence: Synthetic oligonucleotide
ccucuaagugccaguauuc

SEQ ID NO: 85288 - RNA, 19 nt, Artificial Sequence
  Description of Artificial Sequence: Synthetic oligonucleotide
cccagaguuuugguuuuug

SEQ ID NO: 85289 - RNA, 19 nt, Artificial Sequence
  Description of Artificial Sequence: Synthetic oligonucleotide
gaacuagcaaugccuguga

SEQ ID NO: 85290 - RNA, 19 nt, Artificial Sequence
  Description of Artificial Sequence: Synthetic oligonucleotide
aaaaagaaacugaauaccu

SEQ ID NO: 85291 - RNA, 19 nt, Artificial Sequence
  Description of Artificial Sequence: Synthetic oligonucleotide
uaagauuucugucuugggg

SEQ ID NO: 85292 - RNA, 19 nt, Artificial Sequence
  Description of Artificial Sequence: Synthetic oligonucleotide
guuuuuggugcaugcaguu

SEQ ID NO: 85293 - RNA, 19 nt, Artificial Sequence
  Description of Artificial Sequence: Synthetic oligonucleotide
ugauuacuucuuauuuuuc

SEQ ID NO: 85294 - RNA, 19 nt, Artificial Sequence
  Description of Artificial Sequence: Synthetic oligonucleotide
cuuaccaauugugaauguu

SEQ ID NO: 85295 - RNA, 19 nt, Artificial Sequence
  Description of Artificial Sequence: Synthetic oligonucleotide
uggugugaaacaaauuaau

SEQ ID NO: 85296 - RNA, 19 nt, Artificial Sequence
  Description of Artificial Sequence: Synthetic oligonucleotide
ugaagcuuuugaaucaucc

SEQ ID NO: 85297 - RNA, 19 nt, Artificial Sequence
  Description of Artificial Sequence: Synthetic oligonucleotide
ccuauucuguguuuuaucu

SEQ ID NO: 85298 - RNA, 19 nt, Artificial Sequence
  Description of Artificial Sequence: Synthetic oligonucleotide
uagucacauaaauggauua

SEQ ID NO: 85299 - RNA, 19 nt, Artificial Sequence
  Description of Artificial Sequence: Synthetic oligonucleotide
aauuacuaauuucaguuga

SEQ ID NO: 85300 - RNA, 19 nt, Artificial Sequence
  Description of Artificial Sequence: Synthetic oligonucleotide
agaccuucuaauugguuuu

SEQ ID NO: 85301 - RNA, 19 nt, Artificial Sequence
  Description of Artificial Sequence: Synthetic oligonucleotide
uuacugaaacauugaggga

SEQ ID NO: 85302 - RNA, 19 nt, Artificial Sequence
  Description of Artificial Sequence: Synthetic oligonucleotide
aacacaaauuuaugggcuu

SEQ ID NO: 85303 - RNA, 19 nt, Artificial Sequence
  Description of Artificial Sequence: Synthetic oligonucleotide
uccugaugaugauucuucu

SEQ ID NO: 85304 - RNA, 19 nt, Artificial Sequence
  Description of Artificial Sequence: Synthetic oligonucleotide
uaggcaucauguccuauag

SEQ ID NO: 85305 - RNA, 19 nt, Artificial Sequence
  Description of Artificial Sequence: Synthetic oligonucleotide
guuugucaucccugaugaa

SEQ ID NO: 85306 - RNA, 19 nt, Artificial Sequence
  Description of Artificial Sequence: Synthetic oligonucleotide
auguaaaguuacacuguuc

SEQ ID NO: 85307 - RNA, 19 nt, Artificial Sequence
  Description of Artificial Sequence: Synthetic oligonucleotide
cacaaagguuuugucuccu

SEQ ID NO: 85308 - RNA, 19 nt, Artificial Sequence
  Description of Artificial Sequence: Synthetic oligonucleotide
uuuccacugcuauuaguca

SEQ ID NO: 85309 - RNA, 19 nt, Artificial Sequence
  Description of Artificial Sequence: Synthetic oligonucleotide
auggucacucuccccaaaa

SEQ ID NO: 85310 - RNA, 19 nt, Artificial Sequence
  Description of Artificial Sequence: Synthetic oligonucleotide
auauuauauuuuuucuaua

SEQ ID NO: 85311 - RNA, 19 nt, Artificial Sequence
  Description of Artificial Sequence: Synthetic oligonucleotide
aaaaagaaaaaaauggaaa

SEQ ID NO: 85312 - RNA, 19 nt, Artificial Sequence
  Description of Artificial Sequence: Synthetic oligonucleotide
aaaaauuacaaggcaaugg

SEQ ID NO: 85313 - RNA, 19 nt, Artificial Sequence
  Description of Artificial Sequence: Synthetic oligonucleotide
gaaacuauuauaaggccau

SEQ ID NO: 85314 - RNA, 19 nt, Artificial Sequence
  Description of Artificial Sequence: Synthetic oligonucleotide
uuuccuuuucacauuagau

SEQ ID NO: 85315 - RNA, 19 nt, Artificial Sequence
  Description of Artificial Sequence: Synthetic oligonucleotide
uaaauuacuauaaagacuc

SEQ ID NO: 85316 - RNA, 19 nt, Artificial Sequence
  Description of Artificial Sequence: Synthetic oligonucleotide
ccuaauagcuuuuccuguu

SEQ ID NO: 85317 - RNA, 19 nt, Artificial Sequence
  Description of Artificial Sequence: Synthetic oligonucleotide
uaaggcagacccaguauga

SEQ ID NO: 85318 - RNA, 19 nt, Artificial Sequence
  Description of Artificial Sequence: Synthetic oligonucleotide
aaauggggauuauuauagc

SEQ ID NO: 85319 - RNA, 19 nt, Artificial Sequence
  Description of Artificial Sequence: Synthetic oligonucleotide
caaccauuuuggggcuaua

SEQ ID NO: 85320 - RNA, 19 nt, Artificial Sequence
  Description of Artificial Sequence: Synthetic oligonucleotide
auuuacaugcuacuaaauu

SEQ ID NO: 85321 - RNA, 19 nt, Artificial Sequence
  Description of Artificial Sequence: Synthetic oligonucleotide
uuuuauaauaauugaaaag

SEQ ID NO: 85322 - RNA, 19 nt, Artificial Sequence
  Description of Artificial Sequence: Synthetic oligonucleotide
gauuuuaacaaguauaaaa

SEQ ID NO: 85323 - RNA, 19 nt, Artificial Sequence
  Description of Artificial Sequence: Synthetic oligonucleotide
aaauucucauaggaauuaa

SEQ ID NO: 85324 - RNA, 19 nt, Artificial Sequence
  Description of Artificial Sequence: Synthetic oligonucleotide
aauguagucucccuguguc

SEQ ID NO: 85325 - RNA, 19 nt, Artificial Sequence
  Description of Artificial Sequence: Synthetic oligonucleotide
cagacugcucuuucauagu

SEQ ID NO: 85326 - RNA, 19 nt, Artificial Sequence
  Description of Artificial Sequence: Synthetic oligonucleotide
uauaacuuuaaaucuuuuc

SEQ ID NO: 85327 - RNA, 19 nt, Artificial Sequence
  Description of Artificial Sequence: Synthetic oligonucleotide
cuucaacuugagucuuuga

SEQ ID NO: 85328 - RNA, 19 nt, Artificial Sequence
  Description of Artificial Sequence: Synthetic oligonucleotide
aagauaguuuuaauucugc

SEQ ID NO: 85329 - RNA, 19 nt, Artificial Sequence
  Description of Artificial Sequence: Synthetic oligonucleotide
cuugugacauuaaaagauu

SEQ ID NO: 85330 - RNA, 19 nt, Artificial Sequence
  Description of Artificial Sequence: Synthetic oligonucleotide
uauuugggccaguuauagc

SEQ ID NO: 85331 - RNA, 19 nt, Artificial Sequence
  Description of Artificial Sequence: Synthetic oligonucleotide
cuuauuagguguugaagag

SEQ ID NO: 85332 - RNA, 19 nt, Artificial Sequence
  Description of Artificial Sequence: Synthetic oligonucleotide
gaccaagguugcaaggcca

SEQ ID NO: 85333 - RNA, 19 nt, Artificial Sequence
  Description of Artificial Sequence: Synthetic oligonucleotide
aggcccugugugaaccuuu

SEQ ID NO: 85334 - RNA, 19 nt, Artificial Sequence
  Description of Artificial Sequence: Synthetic oligonucleotide
ugagcuuucauagagaguu

SEQ ID NO: 85335 - RNA, 19 nt, Artificial Sequence
  Description of Artificial Sequence: Synthetic oligonucleotide
uucacagcauggacugugu

SEQ ID NO: 85336 - RNA, 19 nt, Artificial Sequence
  Description of Artificial Sequence: Synthetic oligonucleotide
uccccacggucauccagug

SEQ ID NO: 85337 - RNA, 19 nt, Artificial Sequence
  Description of Artificial Sequence: Synthetic oligonucleotide
guugucaugcauugguuag

SEQ ID NO: 85338 - RNA, 19 nt, Artificial Sequence
  Description of Artificial Sequence: Synthetic oligonucleotide
gucaaaauggggagggacu

SEQ ID NO: 85339 - RNA, 19 nt, Artificial Sequence
  Description of Artificial Sequence: Synthetic oligonucleotide
uagggcaguuuggauagcu

SEQ ID NO: 85340 - RNA, 19 nt, Artificial Sequence
  Description of Artificial Sequence: Synthetic oligonucleotide
ucaacaagauacaaucuca

SEQ ID NO: 85341 - RNA, 19 nt, Artificial Sequence
  Description of Artificial Sequence: Synthetic oligonucleotide
acucuguggugguccugcu

SEQ ID NO: 85342 - RNA, 19 nt, Artificial Sequence
  Description of Artificial Sequence: Synthetic oligonucleotide
ugacaaaucaagagcauug

SEQ ID NO: 85343 - RNA, 19 nt, Artificial Sequence
  Description of Artificial Sequence: Synthetic oligonucleotide
gcuuuuguuucuuaagaaa

SEQ ID NO: 85344 - RNA, 19 nt, Artificial Sequence
  Description of Artificial Sequence: Synthetic oligonucleotide
aacaaacucuuuuuuaaaa

SEQ ID NO: 85345 - RNA, 19 nt, Artificial Sequence
  Description of Artificial Sequence: Synthetic oligonucleotide
aauuacuuuuaaauauuaa

SEQ ID NO: 85346 - RNA, 19 nt, Artificial Sequence
  Description of Artificial Sequence: Synthetic oligonucleotide
acucaaaaguugagauuuu

SEQ ID NO: 85347 - RNA, 19 nt, Artificial Sequence
  Description of Artificial Sequence: Synthetic oligonucleotide
uggggugguggugugccaa

SEQ ID NO: 85348 - RNA, 19 nt, Artificial Sequence
  Description of Artificial Sequence: Synthetic oligonucleotide
uaaacaaugaagugaaaaa

SEQ ID NO: 85349 - RNA, 19 nt, Artificial Sequence
  Description of Artificial Sequence: Synthetic oligonucleotide
aguuuuacaaucucuaggu

SEQ ID NO: 85350 - RNA, 19 nt, Artificial Sequence
  Description of Artificial Sequence: Synthetic oligonucleotide
uuuggcuaguucucuuaac

SEQ ID NO: 85351 - RNA, 19 nt, Artificial Sequence
  Description of Artificial Sequence: Synthetic oligonucleotide
cacugguuaaauuaacauu

SEQ ID NO: 85352 - RNA, 19 nt, Artificial Sequence
  Description of Artificial Sequence: Synthetic oligonucleotide
ugcauaaacacuuuucaag

SEQ ID NO: 85353 - RNA, 19 nt, Artificial Sequence
  Description of Artificial Sequence: Synthetic oligonucleotide
gucugauccauauuuaaua

SEQ ID NO: 85354 - RNA, 19 nt, Artificial Sequence
  Description of Artificial Sequence: Synthetic oligonucleotide
aaugcuuuaaaauaaaaau

SEQ ID NO: 85355 - RNA, 19 nt, Artificial Sequence
  Description of Artificial Sequence: Synthetic oligonucleotide
uaaaaacaauccuuuugau

SEQ ID NO: 85356 - RNA, 19 nt, Artificial Sequence
  Description of Artificial Sequence: Synthetic oligonucleotide
uaaauuuaaaauguuacuu

SEQ ID NO: 85357 - RNA, 19 nt, Artificial Sequence
  Description of Artificial Sequence: Synthetic oligonucleotide
uauuuuaaaauaaaugaag

SEQ ID NO: 85358 - RNA, 19 nt, Artificial Sequence
  Description of Artificial Sequence: Synthetic oligonucleotide
gugagauggcauggugagg

SEQ ID NO: 85359 - RNA, 19 nt, Artificial Sequence
  Description of Artificial Sequence: Synthetic oligonucleotide
gugaaaguaucacuggacu

SEQ ID NO: 85360 - RNA, 19 nt, Artificial Sequence
  Description of Artificial Sequence: Synthetic oligonucleotide
uaggaagaaggugacuuag

SEQ ID NO: 85361 - RNA, 19 nt, Artificial Sequence
  Description of Artificial Sequence: Synthetic oligonucleotide
gguucuagauaggugucuu

SEQ ID NO: 85362 - RNA, 19 nt, Artificial Sequence
  Description of Artificial Sequence: Synthetic oligonucleotide
uuuaggacucugauuuuga

SEQ ID NO: 85363 - RNA, 19 nt, Artificial Sequence
  Description of Artificial Sequence: Synthetic oligonucleotide
aggacaucacuuacuaucc

SEQ ID NO: 85364 - RNA, 19 nt, Artificial Sequence
  Description of Artificial Sequence: Synthetic oligonucleotide
cauuucuucauguuaaaag

SEQ ID NO: 85365 - RNA, 19 nt, Artificial Sequence
  Description of Artificial Sequence: Synthetic oligonucleotide
gaagucaucucaaacucuu

SEQ ID NO: 85366 - RNA, 19 nt, Artificial Sequence
  Description of Artificial Sequence: Synthetic oligonucleotide
acuauguaauuuauauucc

SEQ ID NO: 85367 - RNA, 19 nt, Artificial Sequence
  Description of Artificial Sequence: Synthetic oligonucleotide
cauuuacauaaggauacac

SEQ ID NO: 85368 - RNA, 19 nt, Artificial Sequence
  Description of Artificial Sequence: Synthetic oligonucleotide
cuuauuugucaagcucagc

SEQ ID NO: 85369 - RNA, 19 nt, Artificial Sequence
  Description of Artificial Sequence: Synthetic oligonucleotide
cacaaucuguaaauuuuua

SEQ ID NO: 85370 - RNA, 19 nt, Artificial Sequence
  Description of Artificial Sequence: Synthetic oligonucleotide
aaccuauguuacaccaucu

SEQ ID NO: 85371 - RNA, 19 nt, Artificial Sequence
  Description of Artificial Sequence: Synthetic oligonucleotide
uucagugccagucuugggc

SEQ ID NO: 85372 - RNA, 19 nt, Artificial Sequence
  Description of Artificial Sequence: Synthetic oligonucleotide
caaaauugugcaagaggug

SEQ ID NO: 85373 - RNA, 19 nt, Artificial Sequence
  Description of Artificial Sequence: Synthetic oligonucleotide
gaaguuuauauuugaauau

SEQ ID NO: 85374 - RNA, 19 nt, Artificial Sequence
  Description of Artificial Sequence: Synthetic oligonucleotide
uccauucucguuuuaggac

SEQ ID NO: 85375 - RNA, 19 nt, Artificial Sequence
  Description of Artificial Sequence: Synthetic oligonucleotide
cucuucuuccauauuagug

SEQ ID NO: 85376 - RNA, 19 nt, Artificial Sequence
  Description of Artificial Sequence: Synthetic oligonucleotide
gucaucuugccucccuacc

SEQ ID NO: 85377 - RNA, 19 nt, Artificial Sequence
  Description of Artificial Sequence: Synthetic oligonucleotide
cuuccacaugccccaugac

SEQ ID NO: 85378 - RNA, 19 nt, Artificial Sequence
  Description of Artificial Sequence: Synthetic oligonucleotide
cuugaugcaguuuuaauac

SEQ ID NO: 85379 - RNA, 19 nt, Artificial Sequence
  Description of Artificial Sequence: Synthetic oligonucleotide
cuuguaauuccccuaacca

SEQ ID NO: 85380 - RNA, 19 nt, Artificial Sequence
  Description of Artificial Sequence: Synthetic oligonucleotide
auaagauuuacugcugcug

SEQ ID NO: 85381 - RNA, 19 nt, Artificial Sequence
  Description of Artificial Sequence: Synthetic oligonucleotide
guggauaucuccaugaagu

SEQ ID NO: 85382 - RNA, 19 nt, Artificial Sequence
  Description of Artificial Sequence: Synthetic oligonucleotide
uuuucccacugagucacau

SEQ ID NO: 85383 - RNA, 19 nt, Artificial Sequence
  Description of Artificial Sequence: Synthetic oligonucleotide
ucagaaaugcccuacaucu

SEQ ID NO: 85384 - RNA, 19 nt, Artificial Sequence
  Description of Artificial Sequence: Synthetic oligonucleotide
uuauuuccucagggcucaa

SEQ ID NO: 85385 - RNA, 19 nt, Artificial Sequence
  Description of Artificial Sequence: Synthetic oligonucleotide
agagaaucugacagauacc

SEQ ID NO: 85386 - RNA, 19 nt, Artificial Sequence
  Description of Artificial Sequence: Synthetic oligonucleotide
cauaaagggauuugaccua

SEQ ID NO: 85387 - RNA, 19 nt, Artificial Sequence
  Description of Artificial Sequence: Synthetic oligonucleotide
aaucacuaauuuucaggug

SEQ ID NO: 85388 - RNA, 19 nt, Artificial Sequence
  Description of Artificial Sequence: Synthetic oligonucleotide
gguggcugaugcuuugaac

SEQ ID NO: 85389 - RNA, 19 nt, Artificial Sequence
  Description of Artificial Sequence: Synthetic oligonucleotide
caucucuuugcugcccaau

SEQ ID NO: 85390 - RNA, 19 nt, Artificial Sequence
  Description of Artificial Sequence: Synthetic oligonucleotide
uccauuagcgacaguagga

SEQ ID NO: 85391 - RNA, 19 nt, Artificial Sequence
  Description of Artificial Sequence: Synthetic oligonucleotide
auuuuucaaaccugguaug

SEQ ID NO: 85392 - RNA, 19 nt, Artificial Sequence
  Description of Artificial Sequence: Synthetic oligonucleotide
gaauagacagaacccuauc

SEQ ID NO: 85393 - RNA, 19 nt, Artificial Sequence
  Description of Artificial Sequence: Synthetic oligonucleotide
ccaguggaaggagaauuua

SEQ ID NO: 85394 - RNA, 19 nt, Artificial Sequence
  Description of Artificial Sequence: Synthetic oligonucleotide
aauaaagauagugcugaaa

SEQ ID NO: 85395 - RNA, 19 nt, Artificial Sequence
  Description of Artificial Sequence: Synthetic oligonucleotide
agaauuccuuagguaaucu

SEQ ID NO: 85396 - RNA, 19 nt, Artificial Sequence
  Description of Artificial Sequence: Synthetic oligonucleotide
uauaacuaggacuacuccu

SEQ ID NO: 85397 - RNA, 19 nt, Artificial Sequence
  Description of Artificial Sequence: Synthetic oligonucleotide
ugguaacaguaauacauuc

SEQ ID NO: 85398 - RNA, 19 nt, Artificial Sequence
  Description of Artificial Sequence: Synthetic oligonucleotide
ccauuguuuuaguaaccag

SEQ ID NO: 85399 - RNA, 19 nt, Artificial Sequence
  Description of Artificial Sequence: Synthetic oligonucleotide
gaaaucuucaugcaaugaa

SEQ ID NO: 85400 - RNA, 19 nt, Artificial Sequence
  Description of Artificial Sequence: Synthetic oligonucleotide
aaaauacuuuaauucauga

SEQ ID NO: 85401 - RNA, 19 nt, Artificial Sequence
  Description of Artificial Sequence: Synthetic oligonucleotide
uggugucagagucucgcuc

SEQ ID NO: 85402 - RNA, 19 nt, Artificial Sequence
  Description of Artificial Sequence: Synthetic oligonucleotide
cuugucacccaggcuggaa

SEQ ID NO: 85403 - RNA, 19 nt, Artificial Sequence
  Description of Artificial Sequence: Synthetic oligonucleotide
augcaguggcgccaucuca

SEQ ID NO: 85404 - RNA, 19 nt, Artificial Sequence
  Description of Artificial Sequence: Synthetic oligonucleotide
agcucacugcaaccuccau

SEQ ID NO: 85405 - RNA, 19 nt, Artificial Sequence
  Description of Artificial Sequence: Synthetic oligonucleotide
ucucccagguucaagcgau

SEQ ID NO: 85406 - RNA, 19 nt, Artificial Sequence
  Description of Artificial Sequence: Synthetic oligonucleotide
uucucgugccucggccucc

SEQ ID NO: 85407 - RNA, 19 nt, Artificial Sequence
  Description of Artificial Sequence: Synthetic oligonucleotide
cugaguagcugggauuaca

SEQ ID NO: 85408 - RNA, 19 nt, Artificial Sequence
  Description of Artificial Sequence: Synthetic oligonucleotide
aggcgugugccacuacacu

SEQ ID NO: 85409 - RNA, 19 nt, Artificial Sequence
  Description of Artificial Sequence: Synthetic oligonucleotide
ucaacuaauuuuuguauuu

SEQ ID NO: 85410 - RNA, 19 nt, Artificial Sequence
  Description of Artificial Sequence: Synthetic oligonucleotide
uuuaggagagacgggguuu

SEQ ID NO: 85411 - RNA, 19 nt, Artificial Sequence
  Description of Artificial Sequence: Synthetic oligonucleotide
ucacccuguuggccaggcu

SEQ ID NO: 85412 - RNA, 19 nt, Artificial Sequence
  Description of Artificial Sequence: Synthetic oligonucleotide
uggucucgaacuccugacc

SEQ ID NO: 85413 - RNA, 19 nt, Artificial Sequence
  Description of Artificial Sequence: Synthetic oligonucleotide
cucaagugauucacccacc

SEQ ID NO: 85414 - RNA, 19 nt, Artificial Sequence
  Description of Artificial Sequence: Synthetic oligonucleotide
cuuggccucauaaaccugu

SEQ ID NO: 85415 - RNA, 19 nt, Artificial Sequence
  Description of Artificial Sequence: Synthetic oligonucleotide
uuuugcagaacucauuuau

SEQ ID NO: 85416 - RNA, 19 nt, Artificial Sequence
  Description of Artificial Sequence: Synthetic oligonucleotide
uucagcaaauauuuauuga

SEQ ID NO: 85417 - RNA, 19 nt, Artificial Sequence
  Description of Artificial Sequence: Synthetic oligonucleotide
agugccuaccagaugccag

SEQ ID NO: 85418 - RNA, 19 nt, Artificial Sequence
  Description of Artificial Sequence: Synthetic oligonucleotide
gucaccgcacaaggcacug

SEQ ID NO: 85419 - RNA, 19 nt, Artificial Sequence
  Description of Artificial Sequence: Synthetic oligonucleotide
ggguauaugguauccccaa

SEQ ID NO: 85420 - RNA, 19 nt, Artificial Sequence
  Description of Artificial Sequence: Synthetic oligonucleotide
aacaagagacauaaucccg

SEQ ID NO: 85421 - RNA, 19 nt, Artificial Sequence
  Description of Artificial Sequence: Synthetic oligonucleotide
gguccuuagguagugcuag

SEQ ID NO: 85422 - RNA, 19 nt, Artificial Sequence
  Description of Artificial Sequence: Synthetic oligonucleotide
guguggucuguaauaucuu

SEQ ID NO: 85423 - RNA, 19 nt, Artificial Sequence
  Description of Artificial Sequence: Synthetic oligonucleotide
uacuaaggccuuugguaua

SEQ ID NO: 85424 - RNA, 19 nt, Artificial Sequence
  Description of Artificial Sequence: Synthetic oligonucleotide
acgacccagagauaacacg

SEQ ID NO: 85425 - RNA, 19 nt, Artificial Sequence
  Description of Artificial Sequence: Synthetic oligonucleotide
gaugcguauuuuaguuuug

SEQ ID NO: 85426 - RNA, 19 nt, Artificial Sequence
  Description of Artificial Sequence: Synthetic oligonucleotide
gcaaagaagggguuugguc

SEQ ID NO: 85427 - RNA, 19 nt, Artificial Sequence
  Description of Artificial Sequence: Synthetic oligonucleotide
cucugugccagcucuauaa

SEQ ID NO: 85428 - RNA, 19 nt, Artificial Sequence
  Description of Artificial Sequence: Synthetic oligonucleotide
auuguuuugcuacgauucc

SEQ ID NO: 85429 - RNA, 19 nt, Artificial Sequence
  Description of Artificial Sequence: Synthetic oligonucleotide
cacugaaacucuucgauca

SEQ ID NO: 85430 - RNA, 19 nt, Artificial Sequence
  Description of Artificial Sequence: Synthetic oligonucleotide
aagcuacuuuauguaaauc

SEQ ID NO: 85431 - RNA, 19 nt, Artificial Sequence
  Description of Artificial Sequence: Synthetic oligonucleotide
cacuucauuguuuuaaagg

SEQ ID NO: 85432 - RNA, 19 nt, Artificial Sequence
  Description of Artificial Sequence: Synthetic oligonucleotide
gaauaaacuugauuauauu

SEQ ID NO: 85433 - RNA, 19 nt, Artificial Sequence
  Description of Artificial Sequence: Synthetic oligonucleotide
uguuuuuuuauuuggcaua

SEQ ID NO: 85434 - RNA, 19 nt, Artificial Sequence
  Description of Artificial Sequence: Synthetic oligonucleotide
aacugugauucuuuuagga

SEQ ID NO: 85435 - RNA, 19 nt, Artificial Sequence
  Description of Artificial Sequence: Synthetic oligonucleotide
acaauuacuguacacauua

SEQ ID NO: 85436 - RNA, 19 nt, Artificial Sequence
  Description of Artificial Sequence: Synthetic oligonucleotide
aagguguaugucagauauu

SEQ ID NO: 85437 - RNA, 19 nt, Artificial Sequence
  Description of Artificial Sequence: Synthetic oligonucleotide
ucauauugacccaaaugug

SEQ ID NO: 85438 - RNA, 19 nt, Artificial Sequence
  Description of Artificial Sequence: Synthetic oligonucleotide
guaauauuccaguuuucuc

SEQ ID NO: 85439 - RNA, 19 nt, Artificial Sequence
  Description of Artificial Sequence: Synthetic oligonucleotide
cugcauaaguaauuaaaau

SEQ ID NO: 85440 - RNA, 19 nt, Artificial Sequence
  Description of Artificial Sequence: Synthetic oligonucleotide
uauacuuaaaaauuaauag

SEQ ID NO: 85441 - RNA, 19 nt, Artificial Sequence
  Description of Artificial Sequence: Synthetic oligonucleotide
guuuuaucuggguacaaau

SEQ ID NO: 85442 - RNA, 19 nt, Artificial Sequence
  Description of Artificial Sequence: Synthetic oligonucleotide
uaaacaggugccugaacua

SEQ ID NO: 85443 - RNA, 19 nt, Artificial Sequence
  Description of Artificial Sequence: Synthetic oligonucleotide
aguucacagacaaggaaac

SEQ ID NO: 85444 - RNA, 19 nt, Artificial Sequence
  Description of Artificial Sequence: Synthetic oligonucleotide
cuucuauguaaaaaucacu

SEQ ID NO: 85445 - RNA, 19 nt, Artificial Sequence
  Description of Artificial Sequence: Synthetic oligonucleotide
uaugauuucugaauugcua

SEQ ID NO: 85446 - RNA, 19 nt, Artificial Sequence
  Description of Artificial Sequence: Synthetic oligonucleotide
augugaaacuacagaucuu

SEQ ID NO: 85447 - RNA, 19 nt, Artificial Sequence
  Description of Artificial Sequence: Synthetic oligonucleotide
uuggaacacuguuuaggua

SEQ ID NO: 85448 - RNA, 19 nt, Artificial Sequence
  Description of Artificial Sequence: Synthetic oligonucleotide
aggguguuaagacuuacac

SEQ ID NO: 85449 - RNA, 19 nt, Artificial Sequence
  Description of Artificial Sequence: Synthetic oligonucleotide
caguaccucguuucuacac

SEQ ID NO: 85450 - RNA, 19 nt, Artificial Sequence
  Description of Artificial Sequence: Synthetic oligonucleotide
cagagaaagaaauggccau

SEQ ID NO: 85451 - RNA, 19 nt, Artificial Sequence
  Description of Artificial Sequence: Synthetic oligonucleotide
uacuucaggaacugcagug

SEQ ID NO: 85452 - RNA, 19 nt, Artificial Sequence
  Description of Artificial Sequence: Synthetic oligonucleotide
gcuuaugaggggauauuua

SEQ ID NO: 85453 - RNA, 19 nt, Artificial Sequence
  Description of Artificial Sequence: Synthetic oligonucleotide
aggccucuugaauuuuuga

SEQ ID NO: 85454 - RNA, 19 nt, Artificial Sequence
  Description of Artificial Sequence: Synthetic oligonucleotide
auguagaugggcauuuuuu

SEQ ID NO: 85455 - RNA, 19 nt, Artificial Sequence
  Description of Artificial Sequence: Synthetic oligonucleotide
uuaagguagugguuaauua

SEQ ID NO: 85456 - RNA, 19 nt, Artificial Sequence
  Description of Artificial Sequence: Synthetic oligonucleotide
accuuuaugugaacuuuga

SEQ ID NO: 85457 - RNA, 19 nt, Artificial Sequence
  Description of Artificial Sequence: Synthetic oligonucleotide
aaugguuuaacaaaagauu

SEQ ID NO: 85458 - RNA, 19 nt, Artificial Sequence
  Description of Artificial Sequence: Synthetic oligonucleotide
uuguuuuuguagagauuuu

SEQ ID NO: 85459 - RNA, 19 nt, Artificial Sequence
  Description of Artificial Sequence: Synthetic oligonucleotide
uaaagggggagaauucuag

SEQ ID NO: 85460 - RNA, 19 nt, Artificial Sequence
  Description of Artificial Sequence: Synthetic oligonucleotide
gaaauaaauguuaccuaau

SEQ ID NO: 85461 - RNA, 19 nt, Artificial Sequence
  Description of Artificial Sequence: Synthetic oligonucleotide
uuauuacagccuuaaagac

SEQ ID NO: 85462 - RNA, 19 nt, Artificial Sequence
  Description of Artificial Sequence: Synthetic oligonucleotide
caaaaauccuuguugaagu

SEQ ID NO: 85463 - RNA, 19 nt, Artificial Sequence
  Description of Artificial Sequence: Synthetic oligonucleotide
uuuuuuuaaaaaaagcuaa

SEQ ID NO: 85464 - RNA, 19 nt, Artificial Sequence
  Description of Artificial Sequence: Synthetic oligonucleotide
aauuacauagacuuaggca

SEQ ID NO: 85465 - RNA, 19 nt, Artificial Sequence
  Description of Artificial Sequence: Synthetic oligonucleotide
auuaacauguuuguggaag

SEQ ID NO: 85466 - RNA, 19 nt, Artificial Sequence
  Description of Artificial Sequence: Synthetic oligonucleotide
gaauauagcagacguauau

SEQ ID NO: 85467 - RNA, 19 nt, Artificial Sequence
  Description of Artificial Sequence: Synthetic oligonucleotide
uuguaucauuugagugaau

SEQ ID NO: 85468 - RNA, 19 nt, Artificial Sequence
  Description of Artificial Sequence: Synthetic oligonucleotide
uguucccaaguaggcauuc

SEQ ID NO: 85469 - RNA, 19 nt, Artificial Sequence
  Description of Artificial Sequence: Synthetic oligonucleotide
cuaggcucuauuuaacuga

SEQ ID NO: 85470 - RNA, 19 nt, Artificial Sequence
  Description of Artificial Sequence: Synthetic oligonucleotide
agucacacugcauaggaau

SEQ ID NO: 85471 - RNA, 19 nt, Artificial Sequence
  Description of Artificial Sequence: Synthetic oligonucleotide
uuuagaaccuaacuuuuau

SEQ ID NO: 85472 - RNA, 19 nt, Artificial Sequence
  Description of Artificial Sequence: Synthetic oligonucleotide
uagguuaucaaaacuguug

SEQ ID NO: 85473 - RNA, 19 nt, Artificial Sequence
  Description of Artificial Sequence: Synthetic oligonucleotide
gucaccauugcacaauuuu

SEQ ID NO: 85474 - RNA, 19 nt, Artificial Sequence
  Description of Artificial Sequence: Synthetic oligonucleotide
uguccuaauauauacauag

SEQ ID NO: 85475 - RNA, 19 nt, Artificial Sequence
  Description of Artificial Sequence: Synthetic oligonucleotide
gaaacuuuguggggcaugu

SEQ ID NO: 85476 - RNA, 19 nt, Artificial Sequence
  Description of Artificial Sequence: Synthetic oligonucleotide
uuaaguuacaguuugcaca

SEQ ID NO: 85477 - RNA, 19 nt, Artificial Sequence
  Description of Artificial Sequence: Synthetic oligonucleotide
aaguucaucucauuuguau

SEQ ID NO: 85478 - RNA, 19 nt, Artificial Sequence
  Description of Artificial Sequence: Synthetic oligonucleotide
ucuucuaaacauuuuuucu

SEQ ID NO: 85479 - RNA, 19 nt, Artificial Sequence
  Description of Artificial Sequence: Synthetic oligonucleotide
uucaaacaguauauaacuu

SEQ ID NO: 85480 - RNA, 19 nt, Artificial Sequence
  Description of Artificial Sequence: Synthetic oligonucleotide
uuuuuuaggggauuuuuuu

SEQ ID NO: 85481 - RNA, 19 nt, Artificial Sequence
  Description of Artificial Sequence: Synthetic oligonucleotide
uuuagacagcaaaaacuau

SEQ ID NO: 85482 - RNA, 19 nt, Artificial Sequence
  Description of Artificial Sequence: Synthetic oligonucleotide
ucugaagauuuccauuugu

SEQ ID NO: 85483 - RNA, 19 nt, Artificial Sequence
  Description of Artificial Sequence: Synthetic oligonucleotide
ucaaaaaguaaugauuucu

SEQ ID NO: 85484 - RNA, 19 nt, Artificial Sequence
  Description of Artificial Sequence: Synthetic oligonucleotide
uugauaauuguguaguaau

SEQ ID NO: 85485 - RNA, 19 nt, Artificial Sequence
  Description of Artificial Sequence: Synthetic oligonucleotide
uguuuuuuagaacccagca

SEQ ID NO: 85486 - RNA, 19 nt, Artificial Sequence
  Description of Artificial Sequence: Synthetic oligonucleotide
aguuaccuuaaagcugaau

SEQ ID NO: 85487 - RNA, 19 nt, Artificial Sequence
  Description of Artificial Sequence: Synthetic oligonucleotide
uuuauauuuaguaacuucu

SEQ ID NO: 85488 - RNA, 19 nt, Artificial Sequence
  Description of Artificial Sequence: Synthetic oligonucleotide
uguguuaauacuggauagc

SEQ ID NO: 85489 - RNA, 19 nt, Artificial Sequence
  Description of Artificial Sequence: Synthetic oligonucleotide
caugaauucugcauugaga

SEQ ID NO: 85490 - RNA, 19 nt, Artificial Sequence
  Description of Artificial Sequence: Synthetic oligonucleotide
aaacugaauagcugucaua

SEQ ID NO: 85491 - RNA, 19 nt, Artificial Sequence
  Description of Artificial Sequence: Synthetic oligonucleotide
aaaaugaaacuuucuuucu

SEQ ID NO: 85492 - RNA, 19 nt, Artificial Sequence
  Description of Artificial Sequence: Synthetic oligonucleotide
uaaagaaagauacucacau

SEQ ID NO: 85493 - RNA, 19 nt, Artificial Sequence
  Description of Artificial Sequence: Synthetic oligonucleotide
ugaguucuugaagaauagu

SEQ ID NO: 85494 - RNA, 19 nt, Artificial Sequence
  Description of Artificial Sequence: Synthetic oligonucleotide
ucauaacuagauuaagauc

SEQ ID NO: 85495 - RNA, 19 nt, Artificial Sequence
  Description of Artificial Sequence: Synthetic oligonucleotide
cuguguuuuaguuuaauag

SEQ ID NO: 85496 - RNA, 19 nt, Artificial Sequence
  Description of Artificial Sequence: Synthetic oligonucleotide
guuugaagugccuguuugg

SEQ ID NO: 85497 - RNA, 19 nt, Artificial Sequence
  Description of Artificial Sequence: Synthetic oligonucleotide
ggauaaugauagguaauuu

SEQ ID NO: 85498 - RNA, 19 nt, Artificial Sequence
  Description of Artificial Sequence: Synthetic oligonucleotide
uagaugaauuuaggggaaa

SEQ ID NO: 85499 - RNA, 19 nt, Artificial Sequence
  Description of Artificial Sequence: Synthetic oligonucleotide
aaaaaaguuaucugcagau

SEQ ID NO: 85500 - RNA, 19 nt, Artificial Sequence
  Description of Artificial Sequence: Synthetic oligonucleotide
uauguugagggcccaucuc

SEQ ID NO: 85501 - RNA, 19 nt, Artificial Sequence
  Description of Artificial Sequence: Synthetic oligonucleotide
cuccccccacacccccaca

SEQ ID NO: 85502 - RNA, 19 nt, Artificial Sequence
  Description of Artificial Sequence: Synthetic oligonucleotide
agagcuaacuggguuacag

SEQ ID NO: 85503 - RNA, 19 nt, Artificial Sequence
  Description of Artificial Sequence: Synthetic oligonucleotide
guguuuuauccgaaaguuu

SEQ ID NO: 85504 - RNA, 19 nt, Artificial Sequence
  Description of Artificial Sequence: Synthetic oligonucleotide
uccaauuccacugucuugu

SEQ ID NO: 85505 - RNA, 19 nt, Artificial Sequence
  Description of Artificial Sequence: Synthetic oligonucleotide
uguuuucauguugaaaaua

SEQ ID NO: 85506 - RNA, 19 nt, Artificial Sequence
  Description of Artificial Sequence: Synthetic oligonucleotide
acuuuugcauuuuuccuuu

SEQ ID NO: 85507 - RNA, 19 nt, Artificial Sequence
  Description of Artificial Sequence: Synthetic oligonucleotide
ugagugccaauuucuuacu

SEQ ID NO: 85508 - RNA, 19 nt, Artificial Sequence
  Description of Artificial Sequence: Synthetic oligonucleotide
uaguacuauuucuuaaugu

SEQ ID NO: 85509 - RNA, 19 nt, Artificial Sequence
  Description of Artificial Sequence: Synthetic oligonucleotide
uaacauguuuaccuggaau

SEQ ID NO: 85510 - RNA, 19 nt, Artificial Sequence
  Description of Artificial Sequence: Synthetic oligonucleotide
uguauuuuaacuauuuuug

SEQ ID NO: 85511 - RNA, 19 nt, Artificial Sequence
  Description of Artificial Sequence: Synthetic oligonucleotide
guauaguguaaacugaaac

SEQ ID NO: 85512 - RNA, 19 nt, Artificial Sequence
  Description of Artificial Sequence: Synthetic oligonucleotide
caugcacauuuuguacauu

SEQ ID NO: 85513 - RNA, 19 nt, Artificial Sequence
  Description of Artificial Sequence: Synthetic oligonucleotide
ugugcuuucuuuuguggga

SEQ ID NO: 85514 - RNA, 19 nt, Artificial Sequence
  Description of Artificial Sequence: Synthetic oligonucleotide
acauaugcagugugaucca

SEQ ID NO: 85515 - RNA, 19 nt, Artificial Sequence
  Description of Artificial Sequence: Synthetic oligonucleotide
aguuguuuuccaucauuug

SEQ ID NO: 85516 - RNA, 19 nt, Artificial Sequence
  Description of Artificial Sequence: Synthetic oligonucleotide
gguugcgcugaccuaggaa

SEQ ID NO: 85517 - RNA, 19 nt, Artificial Sequence
  Description of Artificial Sequence: Synthetic oligonucleotide
auguuggucauaucaaaca

SEQ ID NO: 85518 - RNA, 19 nt, Artificial Sequence
  Description of Artificial Sequence: Synthetic oligonucleotide
auuaaaaaugaccacucuu

SEQ ID NO: 85519 - RNA, 19 nt, Artificial Sequence
  Description of Artificial Sequence: Synthetic oligonucleotide
uuuaauugaaauuaacuuu

SEQ ID NO: 85520 - RNA, 19 nt, Artificial Sequence
  Description of Artificial Sequence: Synthetic oligonucleotide
uuaaauguuuauaggagua

SEQ ID NO: 85521 - RNA, 19 nt, Artificial Sequence
  Description of Artificial Sequence: Synthetic oligonucleotide
augugcugugaagugaucu

SEQ ID NO: 85522 - RNA, 19 nt, Artificial Sequence
  Description of Artificial Sequence: Synthetic oligonucleotide
uaaaauuuguaauauuuuu

SEQ ID NO: 85523 - RNA, 19 nt, Artificial Sequence
  Description of Artificial Sequence: Synthetic oligonucleotide
ugucaugaacuguacuacu

SEQ ID NO: 85524 - RNA, 19 nt, Artificial Sequence
  Description of Artificial Sequence: Synthetic oligonucleotide
uccuaauuauuguaaugua

SEQ ID NO: 85525 - RNA, 19 nt, Artificial Sequence
  Description of Artificial Sequence: Synthetic oligonucleotide
aauaaaaauaguuacagug

SEQ ID NO: 85526 - RNA, 19 nt, Artificial Sequence
  Description of Artificial Sequence: Synthetic oligonucleotide
ggguguugaugaugccuuc

SEQ ID NO: 85527 - RNA, 19 nt, Artificial Sequence
  Description of Artificial Sequence: Synthetic oligonucleotide
cuauacauuaguucgagaa

SEQ ID NO: 85528 - RNA, 19 nt, Artificial Sequence
  Description of Artificial Sequence: Synthetic oligonucleotide
aauucgaaaacauaaagaa

SEQ ID NO: 85529 - RNA, 19 nt, Artificial Sequence
  Description of Artificial Sequence: Synthetic oligonucleotide
aaagaugagcaaagauggu

SEQ ID NO: 85530 - RNA, 19 nt, Artificial Sequence
  Description of Artificial Sequence: Synthetic oligonucleotide
uaaaaagaagaaaaagaag

SEQ ID NO: 85531 - RNA, 19 nt, Artificial Sequence
  Description of Artificial Sequence: Synthetic oligonucleotide
gucaaagacaaagugugua

SEQ ID NO: 85532 - RNA, 19 nt, Artificial Sequence
  Description of Artificial Sequence: Synthetic oligonucleotide
aauuauguaaauacaauuu

SEQ ID NO: 85533 - RNA, 19 nt, Artificial Sequence
  Description of Artificial Sequence: Synthetic oligonucleotide
uguacuuuuuucuuaaggc

SEQ ID NO: 85534 - RNA, 19 nt, Artificial Sequence
  Description of Artificial Sequence: Synthetic oligonucleotide
cauacuaguacaaguggua

SEQ ID NO: 85535 - RNA, 19 nt, Artificial Sequence
  Description of Artificial Sequence: Synthetic oligonucleotide
aauuuuuguacauuacacu

SEQ ID NO: 85536 - RNA, 19 nt, Artificial Sequence
  Description of Artificial Sequence: Synthetic oligonucleotide
uaaauuauuagcauuuguu

SEQ ID NO: 85537 - RNA, 19 nt, Artificial Sequence
  Description of Artificial Sequence: Synthetic oligonucleotide
uuuagcauuaccuaauuuu

SEQ ID NO: 85538 - RNA, 19 nt, Artificial Sequence
  Description of Artificial Sequence: Synthetic oligonucleotide
uuuuccugcuccaugcaga

SEQ ID NO: 85539 - RNA, 19 nt, Artificial Sequence
  Description of Artificial Sequence: Synthetic oligonucleotide
acuguuagcuuuuaccuua

SEQ ID NO: 85540 - RNA, 19 nt, Artificial Sequence
  Description of Artificial Sequence: Synthetic oligonucleotide
aaaugcuuauuuuaaaaug

SEQ ID NO: 85541 - RNA, 19 nt, Artificial Sequence
  Description of Artificial Sequence: Synthetic oligonucleotide
gacaguggaaguuuuuuuu

SEQ ID NO: 85542 - RNA, 19 nt, Artificial Sequence
  Description of Artificial Sequence: Synthetic oligonucleotide
uuccucuaagugccaguau

SEQ ID NO: 85543 - RNA, 19 nt, Artificial Sequence
  Description of Artificial Sequence: Synthetic oligonucleotide
uucccagaguuuugguuuu

SEQ ID NO: 85544 - RNA, 19 nt, Artificial Sequence
  Description of Artificial Sequence: Synthetic oligonucleotide
uugaacuagcaaugccugu

SEQ ID NO: 85545 - RNA, 19 nt, Artificial Sequence
  Description of Artificial Sequence: Synthetic oligonucleotide
ugaaaaagaaacugaauac

SEQ ID NO: 85546 - RNA, 19 nt, Artificial Sequence
  Description of Artificial Sequence: Synthetic oligonucleotide
ccuaagauuucugucuugg

SEQ ID NO: 85547 - RNA, 19 nt, Artificial Sequence
  Description of Artificial Sequence: Synthetic oligonucleotide
ggguuuuuggugcaugcag

SEQ ID NO: 85548 - RNA, 19 nt, Artificial Sequence
  Description of Artificial Sequence: Synthetic oligonucleotide
guugauuacuucuuauuuu

SEQ ID NO: 85549 - RNA, 19 nt, Artificial Sequence
  Description of Artificial Sequence: Synthetic oligonucleotide
uucuuaccaauugugaaug

SEQ ID NO: 85550 - RNA, 19 nt, Artificial Sequence
  Description of Artificial Sequence: Synthetic oligonucleotide
guuggugugaaacaaauua

SEQ ID NO: 85551 - RNA, 19 nt, Artificial Sequence
  Description of Artificial Sequence: Synthetic oligonucleotide
aaugaagcuuuugaaucau

SEQ ID NO: 85552 - RNA, 19 nt, Artificial Sequence
  Description of Artificial Sequence: Synthetic oligonucleotide
ucccuauucuguguuuuau

SEQ ID NO: 85553 - RNA, 19 nt, Artificial Sequence
  Description of Artificial Sequence: Synthetic oligonucleotide
ucuagucacauaaauggau

SEQ ID NO: 85554 - RNA, 19 nt, Artificial Sequence
  Description of Artificial Sequence: Synthetic oligonucleotide
uuaauuacuaauuucaguu

SEQ ID NO: 85555 - RNA, 19 nt, Artificial Sequence
  Description of Artificial Sequence: Synthetic oligonucleotide
ugagaccuucuaauugguu

SEQ ID NO: 85556 - RNA, 19 nt, Artificial Sequence
  Description of Artificial Sequence: Synthetic oligonucleotide
uuuuacugaaacauugagg

SEQ ID NO: 85557 - RNA, 19 nt, Artificial Sequence
  Description of Artificial Sequence: Synthetic oligonucleotide
ggaacacaaauuuaugggc

SEQ ID NO: 85558 - RNA, 19 nt, Artificial Sequence
  Description of Artificial Sequence: Synthetic oligonucleotide
cuuccugaugaugauucuu

SEQ ID NO: 85559 - RNA, 19 nt, Artificial Sequence
  Description of Artificial Sequence: Synthetic oligonucleotide
ucuaggcaucauguccuau

SEQ ID NO: 85560 - RNA, 19 nt, Artificial Sequence
  Description of Artificial Sequence: Synthetic oligonucleotide
uaguuugucaucccugaug

SEQ ID NO: 85561 - RNA, 19 nt, Artificial Sequence
  Description of Artificial Sequence: Synthetic oligonucleotide
gaauguaaaguuacacugu

SEQ ID NO: 85562 - RNA, 19 nt, Artificial Sequence
  Description of Artificial Sequence: Synthetic oligonucleotide
uucacaaagguuuugucuc

SEQ ID NO: 85563 - RNA, 19 nt, Artificial Sequence
  Description of Artificial Sequence: Synthetic oligonucleotide
ccuuuccacugcuauuagu

SEQ ID NO: 85564 - RNA, 19 nt, Artificial Sequence
  Description of Artificial Sequence: Synthetic oligonucleotide
ucauggucacucuccccaa

SEQ ID NO: 85565 - RNA, 19 nt, Artificial Sequence
  Description of Artificial Sequence: Synthetic oligonucleotide
aaauauuauauuuuuucua

SEQ ID NO: 85566 - RNA, 19 nt, Artificial Sequence
  Description of Artificial Sequence: Synthetic oligonucleotide
auaaaaagaaaaaaaugga

SEQ ID NO: 85567 - RNA, 19 nt, Artificial Sequence
  Description of Artificial Sequence: Synthetic oligonucleotide
aaaaaaauuacaaggcaau

SEQ ID NO: 85568 - RNA, 19 nt, Artificial Sequence
  Description of Artificial Sequence: Synthetic oligonucleotide
uggaaacuauuauaaggcc

SEQ ID NO: 85569 - RNA, 19 nt, Artificial Sequence
  Description of Artificial Sequence: Synthetic oligonucleotide
cauuuccuuuucacauuag

SEQ ID NO: 85570 - RNA, 19 nt, Artificial Sequence
  Description of Artificial Sequence: Synthetic oligonucleotide
gauaaauuacuauaaagac

SEQ ID NO: 85571 - RNA, 19 nt, Artificial Sequence
  Description of Artificial Sequence: Synthetic oligonucleotide
cuccuaauagcuuuuccug

SEQ ID NO: 85572 - RNA, 19 nt, Artificial Sequence
  Description of Artificial Sequence: Synthetic oligonucleotide
guuaaggcagacccaguau

SEQ ID NO: 85573 - RNA, 19 nt, Artificial Sequence
  Description of Artificial Sequence: Synthetic oligonucleotide
ugaaauggggauuauuaua

SEQ ID NO: 85574 - RNA, 19 nt, Artificial Sequence
  Description of Artificial Sequence: Synthetic oligonucleotide
agcaaccauuuuggggcua

SEQ ID NO: 85575 - RNA, 19 nt, Artificial Sequence
  Description of Artificial Sequence: Synthetic oligonucleotide
auauuuacaugcuacuaaa

SEQ ID NO: 85576 - RNA, 19 nt, Artificial Sequence
  Description of Artificial Sequence: Synthetic oligonucleotide
auuuuuauaauaauugaaa

SEQ ID NO: 85577 - RNA, 19 nt, Artificial Sequence
  Description of Artificial Sequence: Synthetic oligonucleotide
aagauuuuaacaaguauaa

SEQ ID NO: 85578 - RNA, 19 nt, Artificial Sequence
  Description of Artificial Sequence: Synthetic oligonucleotide
aaaaauucucauaggaauu

SEQ ID NO: 85579 - RNA, 19 nt, Artificial Sequence
  Description of Artificial Sequence: Synthetic oligonucleotide
uaaauguagucucccugug

SEQ ID NO: 85580 - RNA, 19 nt, Artificial Sequence
  Description of Artificial Sequence: Synthetic oligonucleotide
gucagacugcucuuucaua

SEQ ID NO: 85581 - RNA, 19 nt, Artificial Sequence
  Description of Artificial Sequence: Synthetic oligonucleotide
aguauaacuuuaaaucuuu

SEQ ID NO: 85582 - RNA, 19 nt, Artificial Sequence
  Description of Artificial Sequence: Synthetic oligonucleotide
uucuucaacuugagucuuu

SEQ ID NO: 85583 - RNA, 19 nt, Artificial Sequence
  Description of Artificial Sequence: Synthetic oligonucleotide
ugaagauaguuuuaauucu

SEQ ID NO: 85584 - RNA, 19 nt, Artificial Sequence
  Description of Artificial Sequence: Synthetic oligonucleotide
ugcuugugacauuaaaaga

SEQ ID NO: 85585 - RNA, 19 nt, Artificial Sequence
  Description of Artificial Sequence: Synthetic oligonucleotide
auuauuugggccaguuaua

SEQ ID NO: 85586 - RNA, 19 nt, Artificial Sequence
  Description of Artificial Sequence: Synthetic oligonucleotide
agcuuauuagguguugaag

SEQ ID NO: 85587 - RNA, 19 nt, Artificial Sequence
  Description of Artificial Sequence: Synthetic oligonucleotide
gagaccaagguugcaaggc

SEQ ID NO: 85588 - RNA, 19 nt, Artificial Sequence
  Description of Artificial Sequence: Synthetic oligonucleotide
ccaggcccugugugaaccu

SEQ ID NO: 85589 - RNA, 19 nt, Artificial Sequence
  Description of Artificial Sequence: Synthetic oligonucleotide
uuugagcuuucauagagag

SEQ ID NO: 85590 - RNA, 19 nt, Artificial Sequence
  Description of Artificial Sequence: Synthetic oligonucleotide
guuucacagcauggacugu

SEQ ID NO: 85591 - RNA, 19 nt, Artificial Sequence
  Description of Artificial Sequence: Synthetic oligonucleotide
uguccccacggucauccag

SEQ ID NO: 85592 - RNA, 19 nt, Artificial Sequence
  Description of Artificial Sequence: Synthetic oligonucleotide
guguugucaugcauugguu

SEQ ID NO: 85593 - RNA, 19 nt, Artificial Sequence
  Description of Artificial Sequence: Synthetic oligonucleotide
uagucaaaauggggaggga

SEQ ID NO: 85594 - RNA, 19 nt, Artificial Sequence
  Description of Artificial Sequence: Synthetic oligonucleotide
acuagggcaguuuggauag

SEQ ID NO: 85595 - RNA, 19 nt, Artificial Sequence
  Description of Artificial Sequence: Synthetic oligonucleotide
gcucaacaagauacaaucu

SEQ ID NO: 85596 - RNA, 19 nt, Artificial Sequence
  Description of Artificial Sequence: Synthetic oligonucleotide
ucacucuguggugguccug

SEQ ID NO: 85597 - RNA, 19 nt, Artificial Sequence
  Description of Artificial Sequence: Synthetic oligonucleotide
gcugacaaaucaagagcau

SEQ ID NO: 85598 - RNA, 19 nt, Artificial Sequence
  Description of Artificial Sequence: Synthetic oligonucleotide
uugcuuuuguuucuuaaga

SEQ ID NO: 85599 - RNA, 19 nt, Artificial Sequence
  Description of Artificial Sequence: Synthetic oligonucleotide
aaaacaaacucuuuuuuaa

SEQ ID NO: 85600 - RNA, 19 nt, Artificial Sequence
  Description of Artificial Sequence: Synthetic oligonucleotide
aaaauuacuuuuaaauauu

SEQ ID NO: 85601 - RNA, 19 nt, Artificial Sequence
  Description of Artificial Sequence: Synthetic oligonucleotide
uaacucaaaaguugagauu

SEQ ID NO: 85602 - RNA, 19 nt, Artificial Sequence
  Description of Artificial Sequence: Synthetic oligonucleotide
uuuggggugguggugugcc

SEQ ID NO: 85603 - RNA, 19 nt, Artificial Sequence
  Description of Artificial Sequence: Synthetic oligonucleotide
caagacauuaauuuuuuuu

SEQ ID NO: 85604 - RNA, 19 nt, Artificial Sequence
  Description of Artificial Sequence: Synthetic oligonucleotide
uuuaaacaaugaagugaaa

SEQ ID NO: 85605 - RNA, 19 nt, Artificial Sequence
  Description of Artificial Sequence: Synthetic oligonucleotide
aaaguuuuacaaucucuag

SEQ ID NO: 85606 - RNA, 19 nt, Artificial Sequence
  Description of Artificial Sequence: Synthetic oligonucleotide
gguuuggcuaguucucuua

SEQ ID NO: 85607 - RNA, 19 nt, Artificial Sequence
  Description of Artificial Sequence: Synthetic oligonucleotide
aacacugguuaaauuaaca

SEQ ID NO: 85608 - RNA, 19 nt, Artificial Sequence
  Description of Artificial Sequence: Synthetic oligonucleotide
auugcauaaacacuuuuca

SEQ ID NO: 85609 - RNA, 19 nt, Artificial Sequence
  Description of Artificial Sequence: Synthetic oligonucleotide
aagucugauccauauuuaa

SEQ ID NO: 85610 - RNA, 19 nt, Artificial Sequence
  Description of Artificial Sequence: Synthetic oligonucleotide
auaaugcuuuaaaauaaaa

SEQ ID NO: 85611 - RNA, 19 nt, Artificial Sequence
  Description of Artificial Sequence: Synthetic oligonucleotide
aauaaaaacaauccuuuug

SEQ ID NO: 85612 - RNA, 19 nt, Artificial Sequence
  Description of Artificial Sequence: Synthetic oligonucleotide
gauaaauuuaaaauguuac

SEQ ID NO: 85613 - RNA, 19 nt, Artificial Sequence
  Description of Artificial Sequence: Synthetic oligonucleotide
cuuauuuuaaaauaaauga

SEQ ID NO: 85614 - RNA, 19 nt, Artificial Sequence
  Description of Artificial Sequence: Synthetic oligonucleotide
aagugagauggcaugguga

SEQ ID NO: 85615 - RNA, 19 nt, Artificial Sequence
  Description of Artificial Sequence: Synthetic oligonucleotide
aggugaaaguaucacugga

SEQ ID NO: 85616 - RNA, 19 nt, Artificial Sequence
  Description of Artificial Sequence: Synthetic oligonucleotide
acuaggaagaaggugacuu

SEQ ID NO: 85617 - RNA, 19 nt, Artificial Sequence
  Description of Artificial Sequence: Synthetic oligonucleotide
uagguucuagauagguguc

SEQ ID NO: 85618 - RNA, 19 nt, Artificial Sequence
  Description of Artificial Sequence: Synthetic oligonucleotide
cuuuuaggacucugauuuu

SEQ ID NO: 85619 - RNA, 19 nt, Artificial Sequence
  Description of Artificial Sequence: Synthetic oligonucleotide
ugaggacaucacuuacuau

SEQ ID NO: 85620 - RNA, 19 nt, Artificial Sequence
  Description of Artificial Sequence: Synthetic oligonucleotide
uccauuucuucauguuaaa

SEQ ID NO: 85621 - RNA, 19 nt, Artificial Sequence
  Description of Artificial Sequence: Synthetic oligonucleotide
aagaagucaucucaaacuc

SEQ ID NO: 85622 - RNA, 19 nt, Artificial Sequence
  Description of Artificial Sequence: Synthetic oligonucleotide
caacuauguaauuuauauu

SEQ ID NO: 85623 - RNA, 19 nt, Artificial Sequence
  Description of Artificial Sequence: Synthetic oligonucleotide
uccauuuacauaaggauac

SEQ ID NO: 85624 - RNA, 19 nt, Artificial Sequence
  Description of Artificial Sequence: Synthetic oligonucleotide
cacuuauuugucaagcuca

SEQ ID NO: 85625 - RNA, 19 nt, Artificial Sequence
  Description of Artificial Sequence: Synthetic oligonucleotide
agcacaaucuguaaauuuu

SEQ ID NO: 85626 - RNA, 19 nt, Artificial Sequence
  Description of Artificial Sequence: Synthetic oligonucleotide
uuaaccuauguuacaccau

SEQ ID NO: 85627 - RNA, 19 nt, Artificial Sequence
  Description of Artificial Sequence: Synthetic oligonucleotide
ucuucagugccagucuugg

SEQ ID NO: 85628 - RNA, 19 nt, Artificial Sequence
  Description of Artificial Sequence: Synthetic oligonucleotide
ggcaaaauugugcaagagg

SEQ ID NO: 85629 - RNA, 19 nt, Artificial Sequence
  Description of Artificial Sequence: Synthetic oligonucleotide
gugaaguuuauauuugaau

SEQ ID NO: 85630 - RNA, 19 nt, Artificial Sequence
  Description of Artificial Sequence: Synthetic oligonucleotide
uauccauucucguuuuagg

SEQ ID NO: 85631 - RNA, 19 nt, Artificial Sequence
  Description of Artificial Sequence: Synthetic oligonucleotide
gacucuucuuccauauuag

SEQ ID NO: 85632 - RNA, 19 nt, Artificial Sequence
  Description of Artificial Sequence: Synthetic oligonucleotide
gugucaucuugccucccua

SEQ ID NO: 85633 - RNA, 19 nt, Artificial Sequence
  Description of Artificial Sequence: Synthetic oligonucleotide
accuuccacaugccccaug

SEQ ID NO: 85634 - RNA, 19 nt, Artificial Sequence
  Description of Artificial Sequence: Synthetic oligonucleotide
gacuugaugcaguuuuaau

SEQ ID NO: 85635 - RNA, 19 nt, Artificial Sequence
  Description of Artificial Sequence: Synthetic oligonucleotide
uacuuguaauuccccuaac

SEQ ID NO: 85636 - RNA, 19 nt, Artificial Sequence
  Description of Artificial Sequence: Synthetic oligonucleotide
ccauaagauuuacugcugc

SEQ ID NO: 85637 - RNA, 19 nt, Artificial Sequence
  Description of Artificial Sequence: Synthetic oligonucleotide
cuguggauaucuccaugaa

SEQ ID NO: 85638 - RNA, 19 nt, Artificial Sequence
  Description of Artificial Sequence: Synthetic oligonucleotide
aguuuucccacugagucac

SEQ ID NO: 85639 - RNA, 19 nt, Artificial Sequence
  Description of Artificial Sequence: Synthetic oligonucleotide
caucagaaaugcccuacau

SEQ ID NO: 85640 - RNA, 19 nt, Artificial Sequence
  Description of Artificial Sequence: Synthetic oligonucleotide
ucuuauuuccucagggcuc

SEQ ID NO: 85641 - RNA, 19 nt, Artificial Sequence
  Description of Artificial Sequence: Synthetic oligonucleotide
caagagaaucugacagaua

SEQ ID NO: 85642 - RNA, 19 nt, Artificial Sequence
  Description of Artificial Sequence: Synthetic oligonucleotide
accauaaagggauuugacc

SEQ ID NO: 85643 - RNA, 19 nt, Artificial Sequence
  Description of Artificial Sequence: Synthetic oligonucleotide
cuaaucacuaauuuucagg

SEQ ID NO: 85644 - RNA, 19 nt, Artificial Sequence
  Description of Artificial Sequence: Synthetic oligonucleotide
gugguggcugaugcuuuga

SEQ ID NO: 85645 - RNA, 19 nt, Artificial Sequence
  Description of Artificial Sequence: Synthetic oligonucleotide
aacaucucuuugcugccca

SEQ ID NO: 85646 - RNA, 19 nt, Artificial Sequence
  Description of Artificial Sequence: Synthetic oligonucleotide
aauccauuagcgacaguag

SEQ ID NO: 85647 - RNA, 19 nt, Artificial Sequence
  Description of Artificial Sequence: Synthetic oligonucleotide
ggauuuuucaaaccuggua

SEQ ID NO: 85648 - RNA, 19 nt, Artificial Sequence
  Description of Artificial Sequence: Synthetic oligonucleotide
augaauagacagaacccua

SEQ ID NO: 85649 - RNA, 19 nt, Artificial Sequence
  Description of Artificial Sequence: Synthetic oligonucleotide
auccaguggaaggagaauu

SEQ ID NO: 85650 - RNA, 19 nt, Artificial Sequence
  Description of Artificial Sequence: Synthetic oligonucleotide
uuaauaaagauagugcuga

SEQ ID NO: 85651 - RNA, 19 nt, Artificial Sequence
  Description of Artificial Sequence: Synthetic oligonucleotide
aaagaauuccuuagguaau

SEQ ID NO: 85652 - RNA, 19 nt, Artificial Sequence
  Description of Artificial Sequence: Synthetic oligonucleotide
ucuauaacuaggacuacuc

SEQ ID NO: 85653 - RNA, 19 nt, Artificial Sequence
  Description of Artificial Sequence: Synthetic oligonucleotide
ccugguaacaguaauacau

SEQ ID NO: 85654 - RNA, 19 nt, Artificial Sequence
  Description of Artificial Sequence: Synthetic oligonucleotide
uuccauuguuuuaguaacc

SEQ ID NO: 85655 - RNA, 19 nt, Artificial Sequence
  Description of Artificial Sequence: Synthetic oligonucleotide
cagaaaucuucaugcaaug

SEQ ID NO: 85656 - RNA, 19 nt, Artificial Sequence
  Description of Artificial Sequence: Synthetic oligonucleotide
gaaaaauacuuuaauucau

SEQ ID NO: 85657 - RNA, 19 nt, Artificial Sequence
  Description of Artificial Sequence: Synthetic oligonucleotide
ugaagcuuacuuuuuuuuu

SEQ ID NO: 85658 - RNA, 19 nt, Artificial Sequence
  Description of Artificial Sequence: Synthetic oligonucleotide
uuuggugucagagucucgc

SEQ ID NO: 85659 - RNA, 19 nt, Artificial Sequence
  Description of Artificial Sequence: Synthetic oligonucleotide
cucuugucacccaggcugg

SEQ ID NO: 85660 - RNA, 19 nt, Artificial Sequence
  Description of Artificial Sequence: Synthetic oligonucleotide
gaaugcaguggcgccaucu

SEQ ID NO: 85661 - RNA, 19 nt, Artificial Sequence
  Description of Artificial Sequence: Synthetic oligonucleotide
ucagcucacugcaaccucc

SEQ ID NO: 85662 - RNA, 19 nt, Artificial Sequence
  Description of Artificial Sequence: Synthetic oligonucleotide
caucucccagguucaagcg

SEQ ID NO: 85663 - RNA, 19 nt, Artificial Sequence
  Description of Artificial Sequence: Synthetic oligonucleotide
gauucucgugccucggccu

SEQ ID NO: 85664 - RNA, 19 nt, Artificial Sequence
  Description of Artificial Sequence: Synthetic oligonucleotide
uccugaguagcugggauua

SEQ ID NO: 85665 - RNA, 19 nt, Artificial Sequence
  Description of Artificial Sequence: Synthetic oligonucleotide
acaggcgugugccacuaca

SEQ ID NO: 85666 - RNA, 19 nt, Artificial Sequence
  Description of Artificial Sequence: Synthetic oligonucleotide
acucaacuaauuuuuguau

SEQ ID NO: 85667 - RNA, 19 nt, Artificial Sequence
  Description of Artificial Sequence: Synthetic oligonucleotide
uuuuuaggagagacggggu

SEQ ID NO: 85668 - RNA, 19 nt, Artificial Sequence
  Description of Artificial Sequence: Synthetic oligonucleotide
uuucacccuguuggccagg

SEQ ID NO: 85669 - RNA, 19 nt, Artificial Sequence
  Description of Artificial Sequence: Synthetic oligonucleotide
gcuggucucgaacuccuga

SEQ ID NO: 85670 - RNA, 19 nt, Artificial Sequence
  Description of Artificial Sequence: Synthetic oligonucleotide
accucaagugauucaccca

SEQ ID NO: 85671 - RNA, 19 nt, Artificial Sequence
  Description of Artificial Sequence: Synthetic oligonucleotide
accuuggccucauaaaccu

SEQ ID NO: 85672 - RNA, 19 nt, Artificial Sequence
  Description of Artificial Sequence: Synthetic oligonucleotide
uguuuugcagaacucauuu

SEQ ID NO: 85673 - RNA, 19 nt, Artificial Sequence
  Description of Artificial Sequence: Synthetic oligonucleotide
uauucagcaaauauuuauu

SEQ ID NO: 85674 - RNA, 19 nt, Artificial Sequence
  Description of Artificial Sequence: Synthetic oligonucleotide
ugagugccuaccagaugcc

SEQ ID NO: 85675 - RNA, 19 nt, Artificial Sequence
  Description of Artificial Sequence: Synthetic oligonucleotide
cagucaccgcacaaggcac

SEQ ID NO: 85676 - RNA, 19 nt, Artificial Sequence
  Description of Artificial Sequence: Synthetic oligonucleotide
cuggguauaugguaucccc

SEQ ID NO: 85677 - RNA, 19 nt, Artificial Sequence
  Description of Artificial Sequence: Synthetic oligonucleotide
caaacaagagacauaaucc

SEQ ID NO: 85678 - RNA, 19 nt, Artificial Sequence
  Description of Artificial Sequence: Synthetic oligonucleotide
ccgguccuuagguagugcu

SEQ ID NO: 85679 - RNA, 19 nt, Artificial Sequence
  Description of Artificial Sequence: Synthetic oligonucleotide
uaguguggucuguaauauc

SEQ ID NO: 85680 - RNA, 19 nt, Artificial Sequence
  Description of Artificial Sequence: Synthetic oligonucleotide
cuuacuaaggccuuuggua

SEQ ID NO: 85681 - RNA, 19 nt, Artificial Sequence
  Description of Artificial Sequence: Synthetic oligonucleotide
auacgacccagagauaaca

SEQ ID NO: 85682 - RNA, 19 nt, Artificial Sequence
  Description of Artificial Sequence: Synthetic oligonucleotide
acgaugcguauuuuaguuu

SEQ ID NO: 85683 - RNA, 19 nt, Artificial Sequence
  Description of Artificial Sequence: Synthetic oligonucleotide
uugcaaagaagggguuugg

SEQ ID NO: 85684 - RNA, 19 nt, Artificial Sequence
  Description of Artificial Sequence: Synthetic oligonucleotide
gucucugugccagcucuau

SEQ ID NO: 85685 - RNA, 19 nt, Artificial Sequence
  Description of Artificial Sequence: Synthetic oligonucleotide
uaauuguuuugcuacgauu

SEQ ID NO: 85686 - RNA, 19 nt, Artificial Sequence
  Description of Artificial Sequence: Synthetic oligonucleotide
uccacugaaacucuucgau

SEQ ID NO: 85687 - RNA, 19 nt, Artificial Sequence
  Description of Artificial Sequence: Synthetic oligonucleotide
ucaagcuacuuuauguaaa

SEQ ID NO: 85688 - RNA, 19 nt, Artificial Sequence
  Description of Artificial Sequence: Synthetic oligonucleotide
aucacuucauuguuuuaaa

SEQ ID NO: 85689 - RNA, 19 nt, Artificial Sequence
  Description of Artificial Sequence: Synthetic oligonucleotide
aggaauaaacuugauuaua

SEQ ID NO: 85690 - RNA, 19 nt, Artificial Sequence
  Description of Artificial Sequence: Synthetic oligonucleotide
auuguuuuuuuauuuggca

SEQ ID NO: 85691 - RNA, 19 nt, Artificial Sequence
  Description of Artificial Sequence: Synthetic oligonucleotide
auaacugugauucuuuuag

SEQ ID NO: 85692 - RNA, 19 nt, Artificial Sequence
  Description of Artificial Sequence: Synthetic oligonucleotide
ggacaauuacuguacacau

SEQ ID NO: 85693 - RNA, 19 nt, Artificial Sequence
  Description of Artificial Sequence: Synthetic oligonucleotide
uuaagguguaugucagaua

SEQ ID NO: 85694 - RNA, 19 nt, Artificial Sequence
  Description of Artificial Sequence: Synthetic oligonucleotide
auucauauugacccaaaug

SEQ ID NO: 85695 - RNA, 19 nt, Artificial Sequence
  Description of Artificial Sequence: Synthetic oligonucleotide
guguaauauuccaguuuuc

SEQ ID NO: 85696 - RNA, 19 nt, Artificial Sequence
  Description of Artificial Sequence: Synthetic oligonucleotide
cucugcauaaguaauuaaa

SEQ ID NO: 85697 - RNA, 19 nt, Artificial Sequence
  Description of Artificial Sequence: Synthetic oligonucleotide
aauauacuuaaaaauuaau

SEQ ID NO: 85698 - RNA, 19 nt, Artificial Sequence
  Description of Artificial Sequence: Synthetic oligonucleotide
uaguuuuaucuggguacaa

SEQ ID NO: 85699 - RNA, 19 nt, Artificial Sequence
  Description of Artificial Sequence: Synthetic oligonucleotide
aauaaacaggugccugaac

SEQ ID NO: 85700 - RNA, 19 nt, Artificial Sequence
  Description of Artificial Sequence: Synthetic oligonucleotide
cuaguucacagacaaggaa

SEQ ID NO: 85701 - RNA, 19 nt, Artificial Sequence
  Description of Artificial Sequence: Synthetic oligonucleotide
aacuucuauguaaaaauca

SEQ ID NO: 85702 - RNA, 19 nt, Artificial Sequence
  Description of Artificial Sequence: Synthetic oligonucleotide
acuaugauuucugaauugc

SEQ ID NO: 85703 - RNA, 19 nt, Artificial Sequence
  Description of Artificial Sequence: Synthetic oligonucleotide
cuaugugaaacuacagauc

SEQ ID NO: 85704 - RNA, 19 nt, Artificial Sequence
  Description of Artificial Sequence: Synthetic oligonucleotide
cuuuggaacacuguuuagg

SEQ ID NO: 85705 - RNA, 19 nt, Artificial Sequence
  Description of Artificial Sequence: Synthetic oligonucleotide
guaggguguuaagacuuac

SEQ ID NO: 85706 - RNA, 19 nt, Artificial Sequence
  Description of Artificial Sequence: Synthetic oligonucleotide
cacaguaccucguuucuac

SEQ ID NO: 85707 - RNA, 19 nt, Artificial Sequence
  Description of Artificial Sequence: Synthetic oligonucleotide
cacagagaaagaaauggcc

SEQ ID NO: 85708 - RNA, 19 nt, Artificial Sequence
  Description of Artificial Sequence: Synthetic oligonucleotide
cauacuucaggaacugcag

SEQ ID NO: 85709 - RNA, 19 nt, Artificial Sequence
  Description of Artificial Sequence: Synthetic oligonucleotide
gugcuuaugaggggauauu

SEQ ID NO: 85710 - RNA, 19 nt, Artificial Sequence
  Description of Artificial Sequence: Synthetic oligonucleotide
uuaggccucuugaauuuuu

SEQ ID NO: 85711 - RNA, 19 nt, Artificial Sequence
  Description of Artificial Sequence: Synthetic oligonucleotide
ugauguagaugggcauuuu

SEQ ID NO: 85712 - RNA, 19 nt, Artificial Sequence
  Description of Artificial Sequence: Synthetic oligonucleotide
uuuuaagguagugguuaau

SEQ ID NO: 85713 - RNA, 19 nt, Artificial Sequence
  Description of Artificial Sequence: Synthetic oligonucleotide
uuaccuuuaugugaacuuu

SEQ ID NO: 85714 - RNA, 19 nt, Artificial Sequence
  Description of Artificial Sequence: Synthetic oligonucleotide
ugaaugguuuaacaaaaga

SEQ ID NO: 85715 - RNA, 19 nt, Artificial Sequence
  Description of Artificial Sequence: Synthetic oligonucleotide
auuuguuuuuguagagauu

SEQ ID NO: 85716 - RNA, 19 nt, Artificial Sequence
  Description of Artificial Sequence: Synthetic oligonucleotide
uuuaaagggggagaauucu

SEQ ID NO: 85717 - RNA, 19 nt, Artificial Sequence
  Description of Artificial Sequence: Synthetic oligonucleotide
uagaaauaaauguuaccua

SEQ ID NO: 85718 - RNA, 19 nt, Artificial Sequence
  Description of Artificial Sequence: Synthetic oligonucleotide
aauuauuacagccuuaaag

SEQ ID NO: 85719 - RNA, 19 nt, Artificial Sequence
  Description of Artificial Sequence: Synthetic oligonucleotide
gacaaaaauccuuguugaa

SEQ ID NO: 85720 - RNA, 19 nt, Artificial Sequence
  Description of Artificial Sequence: Synthetic oligonucleotide
aguuuuuuuaaaaaaagcu

SEQ ID NO: 85721 - RNA, 19 nt, Artificial Sequence
  Description of Artificial Sequence: Synthetic oligonucleotide
uaaauuacauagacuuagg

SEQ ID NO: 85722 - RNA, 19 nt, Artificial Sequence
  Description of Artificial Sequence: Synthetic oligonucleotide
gcauuaacauguuugugga

SEQ ID NO: 85723 - RNA, 19 nt, Artificial Sequence
  Description of Artificial Sequence: Synthetic oligonucleotide
aagaauauagcagacguau

SEQ ID NO: 85724 - RNA, 19 nt, Artificial Sequence
  Description of Artificial Sequence: Synthetic oligonucleotide
uauuguaucauuugaguga

SEQ ID NO: 85725 - RNA, 19 nt, Artificial Sequence
  Description of Artificial Sequence: Synthetic oligonucleotide
aauguucccaaguaggcau

SEQ ID NO: 85726 - RNA, 19 nt, Artificial Sequence
  Description of Artificial Sequence: Synthetic oligonucleotide
uucuaggcucuauuuaacu

SEQ ID NO: 85727 - RNA, 19 nt, Artificial Sequence
  Description of Artificial Sequence: Synthetic oligonucleotide
ugagucacacugcauagga

SEQ ID NO: 85728 - RNA, 19 nt, Artificial Sequence
  Description of Artificial Sequence: Synthetic oligonucleotide
aauuuagaaccuaacuuuu

SEQ ID NO: 85729 - RNA, 19 nt, Artificial Sequence
  Description of Artificial Sequence: Synthetic oligonucleotide
uauagguuaucaaaacugu

SEQ ID NO: 85730 - RNA, 19 nt, Artificial Sequence
  Description of Artificial Sequence: Synthetic oligonucleotide
uugucaccauugcacaauu

SEQ ID NO: 85731 - RNA, 19 nt, Artificial Sequence
  Description of Artificial Sequence: Synthetic oligonucleotide
uuuguccuaauauauacau

SEQ ID NO: 85732 - RNA, 19 nt, Artificial Sequence
  Description of Artificial Sequence: Synthetic oligonucleotide
uagaaacuuuguggggcau

SEQ ID NO: 85733 - RNA, 19 nt, Artificial Sequence
  Description of Artificial Sequence: Synthetic oligonucleotide
uguuaaguuacaguuugca

SEQ ID NO: 85734 - RNA, 19 nt, Artificial Sequence
  Description of Artificial Sequence: Synthetic oligonucleotide
acaaguucaucucauuugu

SEQ ID NO: 85735 - RNA, 19 nt, Artificial Sequence
  Description of Artificial Sequence: Synthetic oligonucleotide
uauuccauugauuuuuuuu

SEQ ID NO: 85736 - RNA, 19 nt, Artificial Sequence
  Description of Artificial Sequence: Synthetic oligonucleotide
uuucuucuaaacauuuuuu

SEQ ID NO: 85737 - RNA, 19 nt, Artificial Sequence
  Description of Artificial Sequence: Synthetic oligonucleotide
ucuucaaacaguauauaac

SEQ ID NO: 85738 - RNA, 19 nt, Artificial Sequence
  Description of Artificial Sequence: Synthetic oligonucleotide
cuuuuuuuaggggauuuuu

SEQ ID NO: 85739 - RNA, 19 nt, Artificial Sequence
  Description of Artificial Sequence: Synthetic oligonucleotide
uuuuuagacagcaaaaacu

SEQ ID NO: 85740 - RNA, 19 nt, Artificial Sequence
  Description of Artificial Sequence: Synthetic oligonucleotide
uaucugaagauuuccauuu

SEQ ID NO: 85741 - RNA, 19 nt, Artificial Sequence
  Description of Artificial Sequence: Synthetic oligonucleotide
ugucaaaaaguaaugauuu

SEQ ID NO: 85742 - RNA, 19 nt, Artificial Sequence
  Description of Artificial Sequence: Synthetic oligonucleotide
ucuugauaauuguguagua

SEQ ID NO: 85743 - RNA, 19 nt, Artificial Sequence
  Description of Artificial Sequence: Synthetic oligonucleotide
aauguuuuuuagaacccag

SEQ ID NO: 85744 - RNA, 19 nt, Artificial Sequence
  Description of Artificial Sequence: Synthetic oligonucleotide
gcaguuaccuuaaagcuga

SEQ ID NO: 85745 - RNA, 19 nt, Artificial Sequence
  Description of Artificial Sequence: Synthetic oligonucleotide
aauuuauauuuaguaacuu

SEQ ID NO: 85746 - RNA, 19 nt, Artificial Sequence
  Description of Artificial Sequence: Synthetic oligonucleotide
ucuguguuaauacuggaua

SEQ ID NO: 85747 - RNA, 19 nt, Artificial Sequence
  Description of Artificial Sequence: Synthetic oligonucleotide
agcaugaauucugcauuga

SEQ ID NO: 85748 - RNA, 19 nt, Artificial Sequence
  Description of Artificial Sequence: Synthetic oligonucleotide
agaaacugaauagcuguca

SEQ ID NO: 85749 - RNA, 19 nt, Artificial Sequence
  Description of Artificial Sequence: Synthetic oligonucleotide
auaaaaugaaacuuucuuu

SEQ ID NO: 85750 - RNA, 19 nt, Artificial Sequence
  Description of Artificial Sequence: Synthetic oligonucleotide
ucuaaagaaagauacucac

SEQ ID NO: 85751 - RNA, 19 nt, Artificial Sequence
  Description of Artificial Sequence: Synthetic oligonucleotide
caugaguucuugaagaaua

SEQ ID NO: 85752 - RNA, 19 nt, Artificial Sequence
  Description of Artificial Sequence: Synthetic oligonucleotide
agucauaacuagauuaaga

SEQ ID NO: 85753 - RNA, 19 nt, Artificial Sequence
  Description of Artificial Sequence: Synthetic oligonucleotide
aucuguguuuuaguuuaau

SEQ ID NO: 85754 - RNA, 19 nt, Artificial Sequence
  Description of Artificial Sequence: Synthetic oligonucleotide
uaguuugaagugccuguuu

SEQ ID NO: 85755 - RNA, 19 nt, Artificial Sequence
  Description of Artificial Sequence: Synthetic oligonucleotide
ugggauaaugauagguaau

SEQ ID NO: 85756 - RNA, 19 nt, Artificial Sequence
  Description of Artificial Sequence: Synthetic oligonucleotide
uuuagaugaauuuagggga

SEQ ID NO: 85757 - RNA, 19 nt, Artificial Sequence
  Description of Artificial Sequence: Synthetic oligonucleotide
aaaaaaaaguuaucugcag

SEQ ID NO: 85758 - RNA, 19 nt, Artificial Sequence
  Description of Artificial Sequence: Synthetic oligonucleotide
gauauguugagggcccauc

SEQ ID NO: 85759 - RNA, 19 nt, Artificial Sequence
  Description of Artificial Sequence: Synthetic oligonucleotide
cucuccccccacaccccca

SEQ ID NO: 85760 - RNA, 19 nt, Artificial Sequence
  Description of Artificial Sequence: Synthetic oligonucleotide
acagagcuaacuggguuac

SEQ ID NO: 85761 - RNA, 19 nt, Artificial Sequence
  Description of Artificial Sequence: Synthetic oligonucleotide
caguguuuuauccgaaagu

SEQ ID NO: 85762 - RNA, 19 nt, Artificial Sequence
  Description of Artificial Sequence: Synthetic oligonucleotide
uuuccaauuccacugucuu

SEQ ID NO: 85763 - RNA, 19 nt, Artificial Sequence
  Description of Artificial Sequence: Synthetic oligonucleotide
uguguuuucauguugaaaa

SEQ ID NO: 85764 - RNA, 19 nt, Artificial Sequence
  Description of Artificial Sequence: Synthetic oligonucleotide
auacuuuugcauuuuuccu

SEQ ID NO: 85765 - RNA, 19 nt, Artificial Sequence
  Description of Artificial Sequence: Synthetic oligonucleotide
uuugagugccaauuucuua

SEQ ID NO: 85766 - RNA, 19 nt, Artificial Sequence
  Description of Artificial Sequence: Synthetic oligonucleotide
acuaguacuauuucuuaau

SEQ ID NO: 85767 - RNA, 19 nt, Artificial Sequence
  Description of Artificial Sequence: Synthetic oligonucleotide
uguaacauguuuaccugga

SEQ ID NO: 85768 - RNA, 19 nt, Artificial Sequence
  Description of Artificial Sequence: Synthetic oligonucleotide
aauguauuuuaacuauuuu

SEQ ID NO: 85769 - RNA, 19 nt, Artificial Sequence
  Description of Artificial Sequence: Synthetic oligonucleotide
uuguauaguguaaacugaa

SEQ ID NO: 85770 - RNA, 19 nt, Artificial Sequence
  Description of Artificial Sequence: Synthetic oligonucleotide
aacaugcacauuuuguaca

SEQ ID NO: 85771 - RNA, 19 nt, Artificial Sequence
  Description of Artificial Sequence: Synthetic oligonucleotide
auugugcuuucuuuugugg

SEQ ID NO: 85772 - RNA, 19 nt, Artificial Sequence
  Description of Artificial Sequence: Synthetic oligonucleotide
ggacauaugcagugugauc

SEQ ID NO: 85773 - RNA, 19 nt, Artificial Sequence
  Description of Artificial Sequence: Synthetic oligonucleotide
ccaguuguuuuccaucauu

SEQ ID NO: 85774 - RNA, 19 nt, Artificial Sequence
  Description of Artificial Sequence: Synthetic oligonucleotide
uugguugcgcugaccuagg

SEQ ID NO: 85775 - RNA, 19 nt, Artificial Sequence
  Description of Artificial Sequence: Synthetic oligonucleotide
gaauguuggucauaucaaa

SEQ ID NO: 85776 - RNA, 19 nt, Artificial Sequence
  Description of Artificial Sequence: Synthetic oligonucleotide
acauuaaaaaugaccacuc

SEQ ID NO: 85777 - RNA, 19 nt, Artificial Sequence
  Description of Artificial Sequence: Synthetic oligonucleotide
cuuuuaauugaaauuaacu

SEQ ID NO: 85778 - RNA, 19 nt, Artificial Sequence
  Description of Artificial Sequence: Synthetic oligonucleotide
uuuuaaauguuuauaggag

SEQ ID NO: 85779 - RNA, 19 nt, Artificial Sequence
  Description of Artificial Sequence: Synthetic oligonucleotide
guaugugcugugaagugau

SEQ ID NO: 85780 - RNA, 19 nt, Artificial Sequence
  Description of Artificial Sequence: Synthetic oligonucleotide
ucuaaaauuuguaauauuu

SEQ ID NO: 85781 - RNA, 19 nt, Artificial Sequence
  Description of Artificial Sequence: Synthetic oligonucleotide
uuugucaugaacuguacua

SEQ ID NO: 85782 - RNA, 19 nt, Artificial Sequence
  Description of Artificial Sequence: Synthetic oligonucleotide
acuccuaauuauuguaaug

SEQ ID NO: 85783 - RNA, 19 nt, Artificial Sequence
  Description of Artificial Sequence: Synthetic oligonucleotide
guaauaaaaauaguuacag

SEQ ID NO: 85784 - RNA, 25 nt, Artificial Sequence
  Description of Artificial Sequence: Synthetic oligonucleotide
ggccgcggcggcggaggcagcagcg

SEQ ID NO: 85785 - RNA, 25 nt, Artificial Sequence
  Description of Artificial Sequence: Synthetic oligonucleotide
ggcggcggcaguggcggcggcgaag

SEQ ID NO: 85786 - RNA, 25 nt, Artificial Sequence
  Description of Artificial Sequence: Synthetic oligonucleotide
gguggcggcggcucggccaguacuc

SEQ ID NO: 85787 - RNA, 25 nt, Artificial Sequence
  Description of Artificial Sequence: Synthetic oligonucleotide
cccggcccccgccauuucggacugg

SEQ ID NO: 85788 - RNA, 25 nt, Artificial Sequence
  Description of Artificial Sequence: Synthetic oligonucleotide
ggagcgagcgcggcgcaggcacuga

SEQ ID NO: 85789 - RNA, 25 nt, Artificial Sequence
  Description of Artificial Sequence: Synthetic oligonucleotide
aaggcggcggcggggccagaggcuc

SEQ ID NO: 85790 - RNA, 25 nt, Artificial Sequence
  Description of Artificial Sequence: Synthetic oligonucleotide
cagcggcucccaggugcgggagaga

SEQ ID NO: 85791 - RNA, 25 nt, Artificial Sequence
  Description of Artificial Sequence: Synthetic oligonucleotide
aggccugcugaaaaugacugaauau

SEQ ID NO: 85792 - RNA, 25 nt, Artificial Sequence
  Description of Artificial Sequence: Synthetic oligonucleotide
uaaacuugugguaguuggagcuggu

SEQ ID NO: 85793 - RNA, 25 nt, Artificial Sequence
  Description of Artificial Sequence: Synthetic oligonucleotide
uggcguaggcaagagugccuugacg

SEQ ID NO: 85794 - RNA, 25 nt, Artificial Sequence
  Description of Artificial Sequence: Synthetic oligonucleotide
gauacagcuaauucagaaucauuuu

SEQ ID NO: 85795 - RNA, 25 nt, Artificial Sequence
  Description of Artificial Sequence: Synthetic oligonucleotide
uguggacgaauaugauccaacaaua

SEQ ID NO: 85796 - RNA, 25 nt, Artificial Sequence
  Description of Artificial Sequence: Synthetic oligonucleotide
agaggauuccuacaggaagcaagua

SEQ ID NO: 85797 - RNA, 25 nt, Artificial Sequence
  Description of Artificial Sequence: Synthetic oligonucleotide
aguaauugauggagaaaccugucuc

SEQ ID NO: 85798 - RNA, 25 nt, Artificial Sequence
  Description of Artificial Sequence: Synthetic oligonucleotide
cuuggauauucucgacacagcaggu

SEQ ID NO: 85799 - RNA, 25 nt, Artificial Sequence
  Description of Artificial Sequence: Synthetic oligonucleotide
ucaagaggaguacagugcaaugagg

SEQ ID NO: 85800 - RNA, 25 nt, Artificial Sequence
  Description of Artificial Sequence: Synthetic oligonucleotide
ggaccaguacaugaggacuggggag

SEQ ID NO: 85801 - RNA, 25 nt, Artificial Sequence
  Description of Artificial Sequence: Synthetic oligonucleotide
gggcuuucuuuguguauuugccaua

SEQ ID NO: 85802 - RNA, 25 nt, Artificial Sequence
  Description of Artificial Sequence: Synthetic oligonucleotide
aaauaauacuaaaucauuugaagau

SEQ ID NO: 85803 - RNA, 25 nt, Artificial Sequence
  Description of Artificial Sequence: Synthetic oligonucleotide
uauucaccauuauagagaacaaauu

SEQ ID NO: 85804 - RNA, 25 nt, Artificial Sequence
  Description of Artificial Sequence: Synthetic oligonucleotide
uaaaagaguuaaggacucugaagau

SEQ ID NO: 85805 - RNA, 25 nt, Artificial Sequence
  Description of Artificial Sequence: Synthetic oligonucleotide
uguaccuaugguccuaguaggaaau

SEQ ID NO: 85806 - RNA, 25 nt, Artificial Sequence
  Description of Artificial Sequence: Synthetic oligonucleotide
uaaaugugauuugccuucuagaaca

SEQ ID NO: 85807 - RNA, 25 nt, Artificial Sequence
  Description of Artificial Sequence: Synthetic oligonucleotide
aguagacacaaaacaggcucaggac

SEQ ID NO: 85808 - RNA, 25 nt, Artificial Sequence
  Description of Artificial Sequence: Synthetic oligonucleotide
cuuagcaagaaguuauggaauuccu

SEQ ID NO: 85809 - RNA, 25 nt, Artificial Sequence
  Description of Artificial Sequence: Synthetic oligonucleotide
uuuuauugaaacaucagcaaagaca

SEQ ID NO: 85810 - RNA, 25 nt, Artificial Sequence
  Description of Artificial Sequence: Synthetic oligonucleotide
aagacagagaguggaggaugcuuuu

SEQ ID NO: 85811 - RNA, 25 nt, Artificial Sequence
  Description of Artificial Sequence: Synthetic oligonucleotide
uuauacauuggugagggagauccga

SEQ ID NO: 85812 - RNA, 25 nt, Artificial Sequence
  Description of Artificial Sequence: Synthetic oligonucleotide
acaauacagauugaaaaaaaucagc

SEQ ID NO: 85813 - RNA, 25 nt, Artificial Sequence
  Description of Artificial Sequence: Synthetic oligonucleotide
caaagaagaaaagacuccuggcugu

SEQ ID NO: 85814 - RNA, 25 nt, Artificial Sequence
  Description of Artificial Sequence: Synthetic oligonucleotide
ugugaaaauuaaaaaaugcauuaua

SEQ ID NO: 85815 - RNA, 25 nt, Artificial Sequence
  Description of Artificial Sequence: Synthetic oligonucleotide
aauguaaucuggguguugaugaugc

SEQ ID NO: 85816 - RNA, 25 nt, Artificial Sequence
  Description of Artificial Sequence: Synthetic oligonucleotide
ccuucuauacauuaguucgagaaau

SEQ ID NO: 85817 - RNA, 25 nt, Artificial Sequence
  Description of Artificial Sequence: Synthetic oligonucleotide
uucgaaaacauaaagaaaagaugag

SEQ ID NO: 85818 - RNA, 25 nt, Artificial Sequence
  Description of Artificial Sequence: Synthetic oligonucleotide
gcaaagaugguaaaaagaagaaaaa

SEQ ID NO: 85819 - RNA, 25 nt, Artificial Sequence
  Description of Artificial Sequence: Synthetic oligonucleotide
agaagucaaagacaaaguguguaau

SEQ ID NO: 85820 - RNA, 25 nt, Artificial Sequence
  Description of Artificial Sequence: Synthetic oligonucleotide
uuauguaaauacaauuuguacuuuu

SEQ ID NO: 85821 - RNA, 25 nt, Artificial Sequence
  Description of Artificial Sequence: Synthetic oligonucleotide
uuucuuaaggcauacuaguacaagu

SEQ ID NO: 85822 - RNA, 25 nt, Artificial Sequence
  Description of Artificial Sequence: Synthetic oligonucleotide
ugguaauuuuuguacauuacacuaa

SEQ ID NO: 85823 - RNA, 25 nt, Artificial Sequence
  Description of Artificial Sequence: Synthetic oligonucleotide
aauuauuagcauuuguuuuagcauu

SEQ ID NO: 85824 - RNA, 25 nt, Artificial Sequence
  Description of Artificial Sequence: Synthetic oligonucleotide
uaccuaauuuuuuuccugcuccaug

SEQ ID NO: 85825 - RNA, 25 nt, Artificial Sequence
  Description of Artificial Sequence: Synthetic oligonucleotide
gcagacuguuagcuuuuaccuuaaa

SEQ ID NO: 85826 - RNA, 25 nt, Artificial Sequence
  Description of Artificial Sequence: Synthetic oligonucleotide
augcuuauuuuaaaaugacagugga

SEQ ID NO: 85827 - RNA, 25 nt, Artificial Sequence
  Description of Artificial Sequence: Synthetic oligonucleotide
aaguuuuuuuuuccucuaagugcca

SEQ ID NO: 85828 - RNA, 25 nt, Artificial Sequence
  Description of Artificial Sequence: Synthetic oligonucleotide
aguauucccagaguuuugguuuuug

SEQ ID NO: 85829 - RNA, 25 nt, Artificial Sequence
  Description of Artificial Sequence: Synthetic oligonucleotide
gaacuagcaaugccugugaaaaaga

SEQ ID NO: 85830 - RNA, 25 nt, Artificial Sequence
  Description of Artificial Sequence: Synthetic oligonucleotide
aaacugaauaccuaagauuucuguc

SEQ ID NO: 85831 - RNA, 25 nt, Artificial Sequence
  Description of Artificial Sequence: Synthetic oligonucleotide
cuugggguuuuuggugcaugcaguu

SEQ ID NO: 85832 - RNA, 25 nt, Artificial Sequence
  Description of Artificial Sequence: Synthetic oligonucleotide
ugauuacuucuuauuuuucuuacca

SEQ ID NO: 85833 - RNA, 25 nt, Artificial Sequence
  Description of Artificial Sequence: Synthetic oligonucleotide
aauugugaauguuggugugaaacaa

SEQ ID NO: 85834 - RNA, 25 nt, Artificial Sequence
  Description of Artificial Sequence: Synthetic oligonucleotide
aauuaaugaagcuuuugaaucaucc

SEQ ID NO: 85835 - RNA, 25 nt, Artificial Sequence
  Description of Artificial Sequence: Synthetic oligonucleotide
ccuauucuguguuuuaucuagucac

SEQ ID NO: 85836 - RNA, 25 nt, Artificial Sequence
  Description of Artificial Sequence: Synthetic oligonucleotide
cauaaauggauuaauuacuaauuuc

SEQ ID NO: 85837 - RNA, 25 nt, Artificial Sequence
  Description of Artificial Sequence: Synthetic oligonucleotide
caguugagaccuucuaauugguuuu

SEQ ID NO: 85838 - RNA, 25 nt, Artificial Sequence
  Description of Artificial Sequence: Synthetic oligonucleotide
uuacugaaacauugagggaacacaa

SEQ ID NO: 85839 - RNA, 25 nt, Artificial Sequence
  Description of Artificial Sequence: Synthetic oligonucleotide
aauuuaugggcuuccugaugaugau

SEQ ID NO: 85840 - RNA, 25 nt, Artificial Sequence
  Description of Artificial Sequence: Synthetic oligonucleotide
uucuucuaggcaucauguccuauag

SEQ ID NO: 85841 - RNA, 25 nt, Artificial Sequence
  Description of Artificial Sequence: Synthetic oligonucleotide
guuugucaucccugaugaauguaaa

SEQ ID NO: 85842 - RNA, 25 nt, Artificial Sequence
  Description of Artificial Sequence: Synthetic oligonucleotide
aguuacacuguucacaaagguuuug

SEQ ID NO: 85843 - RNA, 25 nt, Artificial Sequence
  Description of Artificial Sequence: Synthetic oligonucleotide
gucuccuuuccacugcuauuaguca

SEQ ID NO: 85844 - RNA, 25 nt, Artificial Sequence
  Description of Artificial Sequence: Synthetic oligonucleotide
auggucacucuccccaaaauauuau

SEQ ID NO: 85845 - RNA, 25 nt, Artificial Sequence
  Description of Artificial Sequence: Synthetic oligonucleotide
uauuuuuucuauaaaaagaaaaaaa

SEQ ID NO: 85846 - RNA, 25 nt, Artificial Sequence
  Description of Artificial Sequence: Synthetic oligonucleotide
auggaaaaaaauuacaaggcaaugg

SEQ ID NO: 85847 - RNA, 25 nt, Artificial Sequence
  Description of Artificial Sequence: Synthetic oligonucleotide
gaaacuauuauaaggccauuuccuu

SEQ ID NO: 85848 - RNA, 25 nt, Artificial Sequence
  Description of Artificial Sequence: Synthetic oligonucleotide
uuucacauuagauaaauuacuauaa

SEQ ID NO: 85849 - RNA, 25 nt, Artificial Sequence
  Description of Artificial Sequence: Synthetic oligonucleotide
aagacuccuaauagcuuuuccuguu

SEQ ID NO: 85850 - RNA, 25 nt, Artificial Sequence
  Description of Artificial Sequence: Synthetic oligonucleotide
uaaggcagacccaguaugaaauggg

SEQ ID NO: 85851 - RNA, 25 nt, Artificial Sequence
  Description of Artificial Sequence: Synthetic oligonucleotide
ggauuauuauagcaaccauuuuggg

SEQ ID NO: 85852 - RNA, 25 nt, Artificial Sequence
  Description of Artificial Sequence: Synthetic oligonucleotide
ggcuauauuuacaugcuacuaaauu

SEQ ID NO: 85853 - RNA, 25 nt, Artificial Sequence
  Description of Artificial Sequence: Synthetic oligonucleotide
uuuuauaauaauugaaaagauuuua

SEQ ID NO: 85854 - RNA, 25 nt, Artificial Sequence
  Description of Artificial Sequence: Synthetic oligonucleotide
aacaaguauaaaaaauucucauagg

SEQ ID NO: 85855 - RNA, 25 nt, Artificial Sequence
  Description of Artificial Sequence: Synthetic oligonucleotide
gaauuaaauguagucucccuguguc

SEQ ID NO: 85856 - RNA, 25 nt, Artificial Sequence
  Description of Artificial Sequence: Synthetic oligonucleotide
cagacugcucuuucauaguauaacu

SEQ ID NO: 85857 - RNA, 25 nt, Artificial Sequence
  Description of Artificial Sequence: Synthetic oligonucleotide
uuuaaaucuuuucuucaacuugagu

SEQ ID NO: 85858 - RNA, 25 nt, Artificial Sequence
  Description of Artificial Sequence: Synthetic oligonucleotide
ucuuugaagauaguuuuaauucugc

SEQ ID NO: 85859 - RNA, 25 nt, Artificial Sequence
  Description of Artificial Sequence: Synthetic oligonucleotide
cuugugacauuaaaagauuauuugg

SEQ ID NO: 85860 - RNA, 25 nt, Artificial Sequence
  Description of Artificial Sequence: Synthetic oligonucleotide
ggccaguuauagcuuauuagguguu

SEQ ID NO: 85861 - RNA, 25 nt, Artificial Sequence
  Description of Artificial Sequence: Synthetic oligonucleotide
ugaagagaccaagguugcaaggcca

SEQ ID NO: 85862 - RNA, 25 nt, Artificial Sequence
  Description of Artificial Sequence: Synthetic oligonucleotide
aggcccugugugaaccuuugagcuu

SEQ ID NO: 85863 - RNA, 25 nt, Artificial Sequence
  Description of Artificial Sequence: Synthetic oligonucleotide
uucauagagaguuucacagcaugga

SEQ ID NO: 85864 - RNA, 25 nt, Artificial Sequence
  Description of Artificial Sequence: Synthetic oligonucleotide
acuguguccccacggucauccagug

SEQ ID NO: 85865 - RNA, 25 nt, Artificial Sequence
  Description of Artificial Sequence: Synthetic oligonucleotide
guugucaugcauugguuagucaaaa

SEQ ID NO: 85866 - RNA, 25 nt, Artificial Sequence
  Description of Artificial Sequence: Synthetic oligonucleotide
auggggagggacuagggcaguuugg

SEQ ID NO: 85867 - RNA, 25 nt, Artificial Sequence
  Description of Artificial Sequence: Synthetic oligonucleotide
gauagcucaacaagauacaaucuca

SEQ ID NO: 85868 - RNA, 25 nt, Artificial Sequence
  Description of Artificial Sequence: Synthetic oligonucleotide
acucuguggugguccugcugacaaa

SEQ ID NO: 85869 - RNA, 25 nt, Artificial Sequence
  Description of Artificial Sequence: Synthetic oligonucleotide
aucaagagcauugcuuuuguuucuu

SEQ ID NO: 85870 - RNA, 25 nt, Artificial Sequence
  Description of Artificial Sequence: Synthetic oligonucleotide
uaagaaaacaaacucuuuuuuaaaa

SEQ ID NO: 85871 - RNA, 25 nt, Artificial Sequence
  Description of Artificial Sequence: Synthetic oligonucleotide
aauuacuuuuaaauauuaacucaaa

SEQ ID NO: 85872 - RNA, 25 nt, Artificial Sequence
  Description of Artificial Sequence: Synthetic oligonucleotide
aaguugagauuuuggggugguggug

SEQ ID NO: 85873 - RNA, 25 nt, Artificial Sequence
  Description of Artificial Sequence: Synthetic oligonucleotide
uaaacaaugaagugaaaaaguuuua

SEQ ID NO: 85874 - RNA, 25 nt, Artificial Sequence
  Description of Artificial Sequence: Synthetic oligonucleotide
acaaucucuagguuuggcuaguucu

SEQ ID NO: 85875 - RNA, 25 nt, Artificial Sequence
  Description of Artificial Sequence: Synthetic oligonucleotide
ucuuaacacugguuaaauuaacauu

SEQ ID NO: 85876 - RNA, 25 nt, Artificial Sequence
  Description of Artificial Sequence: Synthetic oligonucleotide
ugcauaaacacuuuucaagucugau

SEQ ID NO: 85877 - RNA, 25 nt, Artificial Sequence
  Description of Artificial Sequence: Synthetic oligonucleotide
uccauauuuaauaaugcuuuaaaau

SEQ ID NO: 85878 - RNA, 25 nt, Artificial Sequence
  Description of Artificial Sequence: Synthetic oligonucleotide
uaaaaauaaaaacaauccuuuugau

SEQ ID NO: 85879 - RNA, 25 nt, Artificial Sequence
  Description of Artificial Sequence: Synthetic oligonucleotide
uaaauuuaaaauguuacuuauuuua

SEQ ID NO: 85880 - RNA, 25 nt, Artificial Sequence
  Description of Artificial Sequence: Synthetic oligonucleotide
aaaauaaaugaagugagauggcaug

SEQ ID NO: 85881 - RNA, 25 nt, Artificial Sequence
  Description of Artificial Sequence: Synthetic oligonucleotide
ggugaggugaaaguaucacuggacu

SEQ ID NO: 85882 - RNA, 25 nt, Artificial Sequence
  Description of Artificial Sequence: Synthetic oligonucleotide
uaggaagaaggugacuuagguucua

SEQ ID NO: 85883 - RNA, 25 nt, Artificial Sequence
  Description of Artificial Sequence: Synthetic oligonucleotide
agauaggugucuuuuaggacucuga

SEQ ID NO: 85884 - RNA, 25 nt, Artificial Sequence
  Description of Artificial Sequence: Synthetic oligonucleotide
auuuugaggacaucacuuacuaucc

SEQ ID NO: 85885 - RNA, 25 nt, Artificial Sequence
  Description of Artificial Sequence: Synthetic oligonucleotide
cauuucuucauguuaaaagaaguca

SEQ ID NO: 85886 - RNA, 25 nt, Artificial Sequence
  Description of Artificial Sequence: Synthetic oligonucleotide
uuuacaacuauguaauuuauauucc

SEQ ID NO: 85887 - RNA, 25 nt, Artificial Sequence
  Description of Artificial Sequence: Synthetic oligonucleotide
cauuuacauaaggauacacuuauuu

SEQ ID NO: 85888 - RNA, 25 nt, Artificial Sequence
  Description of Artificial Sequence: Synthetic oligonucleotide
ugucaagcucagcacaaucuguaaa

SEQ ID NO: 85889 - RNA, 25 nt, Artificial Sequence
  Description of Artificial Sequence: Synthetic oligonucleotide
auuuuuaaccuauguuacaccaucu

SEQ ID NO: 85890 - RNA, 25 nt, Artificial Sequence
  Description of Artificial Sequence: Synthetic oligonucleotide
uucagugccagucuugggcaaaauu

SEQ ID NO: 85891 - RNA, 25 nt, Artificial Sequence
  Description of Artificial Sequence: Synthetic oligonucleotide
ugugcaagaggugaaguuuauauuu

SEQ ID NO: 85892 - RNA, 25 nt, Artificial Sequence
  Description of Artificial Sequence: Synthetic oligonucleotide
ugaauauccauucucguuuuaggac

SEQ ID NO: 85893 - RNA, 25 nt, Artificial Sequence
  Description of Artificial Sequence: Synthetic oligonucleotide
cucuucuuccauauuagugucaucu

SEQ ID NO: 85894 - RNA, 25 nt, Artificial Sequence
  Description of Artificial Sequence: Synthetic oligonucleotide
uugccucccuaccuuccacaugccc

SEQ ID NO: 85895 - RNA, 25 nt, Artificial Sequence
  Description of Artificial Sequence: Synthetic oligonucleotide
ccaugacuugaugcaguuuuaauac

SEQ ID NO: 85896 - RNA, 25 nt, Artificial Sequence
  Description of Artificial Sequence: Synthetic oligonucleotide
cuuguaauuccccuaaccauaagau

SEQ ID NO: 85897 - RNA, 25 nt, Artificial Sequence
  Description of Artificial Sequence: Synthetic oligonucleotide
uuuacugcugcuguggauaucucca

SEQ ID NO: 85898 - RNA, 25 nt, Artificial Sequence
  Description of Artificial Sequence: Synthetic oligonucleotide
augaaguuuucccacugagucacau

SEQ ID NO: 85899 - RNA, 25 nt, Artificial Sequence
  Description of Artificial Sequence: Synthetic oligonucleotide
ucagaaaugcccuacaucuuauuuc

SEQ ID NO: 85900 - RNA, 25 nt, Artificial Sequence
  Description of Artificial Sequence: Synthetic oligonucleotide
ccucagggcucaagagaaucugaca

SEQ ID NO: 85901 - RNA, 25 nt, Artificial Sequence
  Description of Artificial Sequence: Synthetic oligonucleotide
agauaccauaaagggauuugaccua

SEQ ID NO: 85902 - RNA, 25 nt, Artificial Sequence
  Description of Artificial Sequence: Synthetic oligonucleotide
aaucacuaauuuucaggugguggcu

SEQ ID NO: 85903 - RNA, 25 nt, Artificial Sequence
  Description of Artificial Sequence: Synthetic oligonucleotide
ugaugcuuugaacaucucuuugcug

SEQ ID NO: 85904 - RNA, 25 nt, Artificial Sequence
  Description of Artificial Sequence: Synthetic oligonucleotide
gcccaauccauuagcgacaguagga

SEQ ID NO: 85905 - RNA, 25 nt, Artificial Sequence
  Description of Artificial Sequence: Synthetic oligonucleotide
auuuuucaaaccugguaugaauaga

SEQ ID NO: 85906 - RNA, 25 nt, Artificial Sequence
  Description of Artificial Sequence: Synthetic oligonucleotide
acagaacccuauccaguggaaggag

SEQ ID NO: 85907 - RNA, 25 nt, Artificial Sequence
  Description of Artificial Sequence: Synthetic oligonucleotide
gaauuuaauaaagauagugcugaaa

SEQ ID NO: 85908 - RNA, 25 nt, Artificial Sequence
  Description of Artificial Sequence: Synthetic oligonucleotide
agaauuccuuagguaaucuauaacu

SEQ ID NO: 85909 - RNA, 25 nt, Artificial Sequence
  Description of Artificial Sequence: Synthetic oligonucleotide
uaggacuacuccugguaacaguaau

SEQ ID NO: 85910 - RNA, 25 nt, Artificial Sequence
  Description of Artificial Sequence: Synthetic oligonucleotide
uacauuccauuguuuuaguaaccag

SEQ ID NO: 85911 - RNA, 25 nt, Artificial Sequence
  Description of Artificial Sequence: Synthetic oligonucleotide
gaaaucuucaugcaaugaaaaauac

SEQ ID NO: 85912 - RNA, 25 nt, Artificial Sequence
  Description of Artificial Sequence: Synthetic oligonucleotide
cuuuaauucaugaagcuuacuuuuu

SEQ ID NO: 85913 - RNA, 25 nt, Artificial Sequence
  Description of Artificial Sequence: Synthetic oligonucleotide
uuuuuuuggugucagagucucgcuc

SEQ ID NO: 85914 - RNA, 25 nt, Artificial Sequence
  Description of Artificial Sequence: Synthetic oligonucleotide
cuugucacccaggcuggaaugcagu

SEQ ID NO: 85915 - RNA, 25 nt, Artificial Sequence
  Description of Artificial Sequence: Synthetic oligonucleotide
uggcgccaucucagcucacugcaac

SEQ ID NO: 85916 - RNA, 25 nt, Artificial Sequence
  Description of Artificial Sequence: Synthetic oligonucleotide
ccuccaucucccagguucaagcgau

SEQ ID NO: 85917 - RNA, 25 nt, Artificial Sequence
  Description of Artificial Sequence: Synthetic oligonucleotide
uucucgugccucggccuccugagua

SEQ ID NO: 85918 - RNA, 25 nt, Artificial Sequence
  Description of Artificial Sequence: Synthetic oligonucleotide
agcugggauuacaggcgugugccac

SEQ ID NO: 85919 - RNA, 25 nt, Artificial Sequence
  Description of Artificial Sequence: Synthetic oligonucleotide
cuacacucaacuaauuuuuguauuu

SEQ ID NO: 85920 - RNA, 25 nt, Artificial Sequence
  Description of Artificial Sequence: Synthetic oligonucleotide
uuuaggagagacgggguuucacccu

SEQ ID NO: 85921 - RNA, 25 nt, Artificial Sequence
  Description of Artificial Sequence: Synthetic oligonucleotide
uguuggccaggcuggucucgaacuc

SEQ ID NO: 85922 - RNA, 25 nt, Artificial Sequence
  Description of Artificial Sequence: Synthetic oligonucleotide
ccugaccucaagugauucacccacc

SEQ ID NO: 85923 - RNA, 25 nt, Artificial Sequence
  Description of Artificial Sequence: Synthetic oligonucleotide
cuuggccucauaaaccuguuuugca

SEQ ID NO: 85924 - RNA, 25 nt, Artificial Sequence
  Description of Artificial Sequence: Synthetic oligonucleotide
agaacucauuuauucagcaaauauu

SEQ ID NO: 85925 - RNA, 25 nt, Artificial Sequence
  Description of Artificial Sequence: Synthetic oligonucleotide
uuauugagugccuaccagaugccag

SEQ ID NO: 85926 - RNA, 25 nt, Artificial Sequence
  Description of Artificial Sequence: Synthetic oligonucleotide
gucaccgcacaaggcacuggguaua

SEQ ID NO: 85927 - RNA, 25 nt, Artificial Sequence
  Description of Artificial Sequence: Synthetic oligonucleotide
augguauccccaaacaagagacaua

SEQ ID NO: 85928 - RNA, 25 nt, Artificial Sequence
  Description of Artificial Sequence: Synthetic oligonucleotide
aaucccgguccuuagguagugcuag

SEQ ID NO: 85929 - RNA, 25 nt, Artificial Sequence
  Description of Artificial Sequence: Synthetic oligonucleotide
guguggucuguaauaucuuacuaag

SEQ ID NO: 85930 - RNA, 25 nt, Artificial Sequence
  Description of Artificial Sequence: Synthetic oligonucleotide
ggccuuugguauacgacccagagau

SEQ ID NO: 85931 - RNA, 25 nt, Artificial Sequence
  Description of Artificial Sequence: Synthetic oligonucleotide
uaacacgaugcguauuuuaguuuug

SEQ ID NO: 85932 - RNA, 25 nt, Artificial Sequence
  Description of Artificial Sequence: Synthetic oligonucleotide
gcaaagaagggguuuggucucugug

SEQ ID NO: 85933 - RNA, 25 nt, Artificial Sequence
  Description of Artificial Sequence: Synthetic oligonucleotide
gccagcucuauaauuguuuugcuac

SEQ ID NO: 85934 - RNA, 25 nt, Artificial Sequence
  Description of Artificial Sequence: Synthetic oligonucleotide
cgauuccacugaaacucuucgauca

SEQ ID NO: 85935 - RNA, 25 nt, Artificial Sequence
  Description of Artificial Sequence: Synthetic oligonucleotide
aagcuacuuuauguaaaucacuuca

SEQ ID NO: 85936 - RNA, 25 nt, Artificial Sequence
  Description of Artificial Sequence: Synthetic oligonucleotide
auuguuuuaaaggaauaaacuugau

SEQ ID NO: 85937 - RNA, 25 nt, Artificial Sequence
  Description of Artificial Sequence: Synthetic oligonucleotide
uuauauuguuuuuuuauuuggcaua

SEQ ID NO: 85938 - RNA, 25 nt, Artificial Sequence
  Description of Artificial Sequence: Synthetic oligonucleotide
aacugugauucuuuuaggacaauua

SEQ ID NO: 85939 - RNA, 25 nt, Artificial Sequence
  Description of Artificial Sequence: Synthetic oligonucleotide
acuguacacauuaagguguauguca

SEQ ID NO: 85940 - RNA, 25 nt, Artificial Sequence
  Description of Artificial Sequence: Synthetic oligonucleotide
agauauucauauugacccaaaugug

SEQ ID NO: 85941 - RNA, 25 nt, Artificial Sequence
  Description of Artificial Sequence: Synthetic oligonucleotide
guaauauuccaguuuucucugcaua

SEQ ID NO: 85942 - RNA, 25 nt, Artificial Sequence
  Description of Artificial Sequence: Synthetic oligonucleotide
aaguaauuaaaauauacuuaaaaau

SEQ ID NO: 85943 - RNA, 25 nt, Artificial Sequence
  Description of Artificial Sequence: Synthetic oligonucleotide
uuaauaguuuuaucuggguacaaau

SEQ ID NO: 85944 - RNA, 25 nt, Artificial Sequence
  Description of Artificial Sequence: Synthetic oligonucleotide
uaaacaggugccugaacuaguucac

SEQ ID NO: 85945 - RNA, 25 nt, Artificial Sequence
  Description of Artificial Sequence: Synthetic oligonucleotide
cagacaaggaaacuucuauguaaaa

SEQ ID NO: 85946 - RNA, 25 nt, Artificial Sequence
  Description of Artificial Sequence: Synthetic oligonucleotide
aaucacuaugauuucugaauugcua

SEQ ID NO: 85947 - RNA, 25 nt, Artificial Sequence
  Description of Artificial Sequence: Synthetic oligonucleotide
augugaaacuacagaucuuuggaac

SEQ ID NO: 85948 - RNA, 25 nt, Artificial Sequence
  Description of Artificial Sequence: Synthetic oligonucleotide
cacuguuuagguaggguguuaagac

SEQ ID NO: 85949 - RNA, 25 nt, Artificial Sequence
  Description of Artificial Sequence: Synthetic oligonucleotide
cuuacacaguaccucguuucuacac

SEQ ID NO: 85950 - RNA, 25 nt, Artificial Sequence
  Description of Artificial Sequence: Synthetic oligonucleotide
cagagaaagaaauggccauacuuca

SEQ ID NO: 85951 - RNA, 25 nt, Artificial Sequence
  Description of Artificial Sequence: Synthetic oligonucleotide
aggaacugcagugcuuaugagggga

SEQ ID NO: 85952 - RNA, 25 nt, Artificial Sequence
  Description of Artificial Sequence: Synthetic oligonucleotide
auauuuaggccucuugaauuuuuga

SEQ ID NO: 85953 - RNA, 25 nt, Artificial Sequence
  Description of Artificial Sequence: Synthetic oligonucleotide
auguagaugggcauuuuuuuaaggu

SEQ ID NO: 85954 - RNA, 25 nt, Artificial Sequence
  Description of Artificial Sequence: Synthetic oligonucleotide
uagugguuaauuaccuuuaugugaa

SEQ ID NO: 85955 - RNA, 25 nt, Artificial Sequence
  Description of Artificial Sequence: Synthetic oligonucleotide
acuuugaaugguuuaacaaaagauu

SEQ ID NO: 85956 - RNA, 25 nt, Artificial Sequence
  Description of Artificial Sequence: Synthetic oligonucleotide
uuguuuuuguagagauuuuaaaggg

SEQ ID NO: 85957 - RNA, 25 nt, Artificial Sequence
  Description of Artificial Sequence: Synthetic oligonucleotide
gggagaauucuagaaauaaauguua

SEQ ID NO: 85958 - RNA, 25 nt, Artificial Sequence
  Description of Artificial Sequence: Synthetic oligonucleotide
accuaauuauuacagccuuaaagac

SEQ ID NO: 85959 - RNA, 25 nt, Artificial Sequence
  Description of Artificial Sequence: Synthetic oligonucleotide
caaaaauccuuguugaaguuuuuuu

SEQ ID NO: 85960 - RNA, 25 nt, Artificial Sequence
  Description of Artificial Sequence: Synthetic oligonucleotide
uaaaaaaagcuaaauuacauagacu

SEQ ID NO: 85961 - RNA, 25 nt, Artificial Sequence
  Description of Artificial Sequence: Synthetic oligonucleotide
uuaggcauuaacauguuuguggaag

SEQ ID NO: 85962 - RNA, 25 nt, Artificial Sequence
  Description of Artificial Sequence: Synthetic oligonucleotide
gaauauagcagacguauauuguauc

SEQ ID NO: 85963 - RNA, 25 nt, Artificial Sequence
  Description of Artificial Sequence: Synthetic oligonucleotide
cauuugagugaauguucccaaguag

SEQ ID NO: 85964 - RNA, 25 nt, Artificial Sequence
  Description of Artificial Sequence: Synthetic oligonucleotide
ggcauucuaggcucuauuuaacuga

SEQ ID NO: 85965 - RNA, 25 nt, Artificial Sequence
  Description of Artificial Sequence: Synthetic oligonucleotide
agucacacugcauaggaauuuagaa

SEQ ID NO: 85966 - RNA, 25 nt, Artificial Sequence
  Description of Artificial Sequence: Synthetic oligonucleotide
accuaacuuuuauagguuaucaaaa

SEQ ID NO: 85967 - RNA, 25 nt, Artificial Sequence
  Description of Artificial Sequence: Synthetic oligonucleotide
acuguugucaccauugcacaauuuu

SEQ ID NO: 85968 - RNA, 25 nt, Artificial Sequence
  Description of Artificial Sequence: Synthetic oligonucleotide
uguccuaauauauacauagaaacuu

SEQ ID NO: 85969 - RNA, 25 nt, Artificial Sequence
  Description of Artificial Sequence: Synthetic oligonucleotide
uuguggggcauguuaaguuacaguu

SEQ ID NO: 85970 - RNA, 25 nt, Artificial Sequence
  Description of Artificial Sequence: Synthetic oligonucleotide
uugcacaaguucaucucauuuguau

SEQ ID NO: 85971 - RNA, 25 nt, Artificial Sequence
  Description of Artificial Sequence: Synthetic oligonucleotide
aaacauuuuuucuucaaacaguaua

SEQ ID NO: 85972 - RNA, 25 nt, Artificial Sequence
  Description of Artificial Sequence: Synthetic oligonucleotide
auaacuuuuuuuaggggauuuuuuu

SEQ ID NO: 85973 - RNA, 25 nt, Artificial Sequence
  Description of Artificial Sequence: Synthetic oligonucleotide
uuuagacagcaaaaacuaucugaag

SEQ ID NO: 85974 - RNA, 25 nt, Artificial Sequence
  Description of Artificial Sequence: Synthetic oligonucleotide
gauuuccauuugucaaaaaguaaug

SEQ ID NO: 85975 - RNA, 25 nt, Artificial Sequence
  Description of Artificial Sequence: Synthetic oligonucleotide
gauuucuugauaauuguguaguaau

SEQ ID NO: 85976 - RNA, 25 nt, Artificial Sequence
  Description of Artificial Sequence: Synthetic oligonucleotide
uguuuuuuagaacccagcaguuacc

SEQ ID NO: 85977 - RNA, 25 nt, Artificial Sequence
  Description of Artificial Sequence: Synthetic oligonucleotide
cuuaaagcugaauuuauauuuagua

SEQ ID NO: 85978 - RNA, 25 nt, Artificial Sequence
  Description of Artificial Sequence: Synthetic oligonucleotide
aacuucuguguuaauacuggauagc

SEQ ID NO: 85979 - RNA, 25 nt, Artificial Sequence
  Description of Artificial Sequence: Synthetic oligonucleotide
caugaauucugcauugagaaacuga

SEQ ID NO: 85980 - RNA, 25 nt, Artificial Sequence
  Description of Artificial Sequence: Synthetic oligonucleotide
aauagcugucauaaaaugaaacuuu

SEQ ID NO: 85981 - RNA, 25 nt, Artificial Sequence
  Description of Artificial Sequence: Synthetic oligonucleotide
ucuuucuaaagaaagauacucacau

SEQ ID NO: 85982 - RNA, 25 nt, Artificial Sequence
  Description of Artificial Sequence: Synthetic oligonucleotide
ugaguucuugaagaauagucauaac

SEQ ID NO: 85983 - RNA, 25 nt, Artificial Sequence
  Description of Artificial Sequence: Synthetic oligonucleotide
cuagauuaagaucuguguuuuaguu

SEQ ID NO: 85984 - RNA, 25 nt, Artificial Sequence
  Description of Artificial Sequence: Synthetic oligonucleotide
uuaauaguuugaagugccuguuugg

SEQ ID NO: 85985 - RNA, 25 nt, Artificial Sequence
  Description of Artificial Sequence: Synthetic oligonucleotide
ggauaaugauagguaauuuagauga

SEQ ID NO: 85986 - RNA, 25 nt, Artificial Sequence
  Description of Artificial Sequence: Synthetic oligonucleotide
aauuuaggggaaaaaaaaguuaucu

SEQ ID NO: 85987 - RNA, 25 nt, Artificial Sequence
  Description of Artificial Sequence: Synthetic oligonucleotide
ugcagauauguugagggcccaucuc

SEQ ID NO: 85988 - RNA, 25 nt, Artificial Sequence
  Description of Artificial Sequence: Synthetic oligonucleotide
cuccccccacacccccacagagcua

SEQ ID NO: 85989 - RNA, 25 nt, Artificial Sequence
  Description of Artificial Sequence: Synthetic oligonucleotide
aacuggguuacaguguuuuauccga

SEQ ID NO: 85990 - RNA, 25 nt, Artificial Sequence
  Description of Artificial Sequence: Synthetic oligonucleotide
aaaguuuccaauuccacugucuugu

SEQ ID NO: 85991 - RNA, 25 nt, Artificial Sequence
  Description of Artificial Sequence: Synthetic oligonucleotide
uguuuucauguugaaaauacuuuug

SEQ ID NO: 85992 - RNA, 25 nt, Artificial Sequence
  Description of Artificial Sequence: Synthetic oligonucleotide
gcauuuuuccuuugagugccaauuu

SEQ ID NO: 85993 - RNA, 25 nt, Artificial Sequence
  Description of Artificial Sequence: Synthetic oligonucleotide
ucuuacuaguacuauuucuuaaugu

SEQ ID NO: 85994 - RNA, 25 nt, Artificial Sequence
  Description of Artificial Sequence: Synthetic oligonucleotide
uaacauguuuaccuggaauguauuu

SEQ ID NO: 85995 - RNA, 25 nt, Artificial Sequence
  Description of Artificial Sequence: Synthetic oligonucleotide
uuaacuauuuuuguauaguguaaac

SEQ ID NO: 85996 - RNA, 25 nt, Artificial Sequence
  Description of Artificial Sequence: Synthetic oligonucleotide
cugaaacaugcacauuuuguacauu

SEQ ID NO: 85997 - RNA, 25 nt, Artificial Sequence
  Description of Artificial Sequence: Synthetic oligonucleotide
ugugcuuucuuuugugggacauaug

SEQ ID NO: 85998 - RNA, 25 nt, Artificial Sequence
  Description of Artificial Sequence: Synthetic oligonucleotide
gcagugugauccaguuguuuuccau

SEQ ID NO: 85999 - RNA, 25 nt, Artificial Sequence
  Description of Artificial Sequence: Synthetic oligonucleotide
ucauuugguugcgcugaccuaggaa

SEQ ID NO: 86000 - RNA, 25 nt, Artificial Sequence
  Description of Artificial Sequence: Synthetic oligonucleotide
auguuggucauaucaaacauuaaaa

SEQ ID NO: 86001 - RNA, 25 nt, Artificial Sequence
  Description of Artificial Sequence: Synthetic oligonucleotide
aaugaccacucuuuuaauugaaauu

SEQ ID NO: 86002 - RNA, 25 nt, Artificial Sequence
  Description of Artificial Sequence: Synthetic oligonucleotide
uaacuuuuaaauguuuauaggagua

SEQ ID NO: 86003 - RNA, 25 nt, Artificial Sequence
  Description of Artificial Sequence: Synthetic oligonucleotide
augugcugugaagugaucuaaaauu

SEQ ID NO: 86004 - RNA, 25 nt, Artificial Sequence
  Description of Artificial Sequence: Synthetic oligonucleotide
uuguaauauuuuugucaugaacugu

SEQ ID NO: 86005 - RNA, 25 nt, Artificial Sequence
  Description of Artificial Sequence: Synthetic oligonucleotide
uacuacuccuaauuauuguaaugua

SEQ ID NO: 86006 - RNA, 25 nt, Artificial Sequence
  Description of Artificial Sequence: Synthetic oligonucleotide
aauaaaaauaguuacagugacaaaa

SEQ ID NO: 86007 - RNA, 25 nt, Artificial Sequence
  Description of Artificial Sequence: Synthetic oligonucleotide
aagacaggguguugaugaugccuuc

SEQ ID NO: 86008 - RNA, 25 nt, Artificial Sequence
  Description of Artificial Sequence: Synthetic oligonucleotide
cuauacauuaguucgagaaauucga

SEQ ID NO: 86009 - RNA, 25 nt, Artificial Sequence
  Description of Artificial Sequence: Synthetic oligonucleotide
aaaacauaaagaaaagaugagcaaa

SEQ ID NO: 86010 - RNA, 25 nt, Artificial Sequence
  Description of Artificial Sequence: Synthetic oligonucleotide
agaugguaaaaagaagaaaaagaag

SEQ ID NO: 86011 - RNA, 25 nt, Artificial Sequence
  Description of Artificial Sequence: Synthetic oligonucleotide
gucaaagacaaaguguguaauuaug

SEQ ID NO: 86012 - RNA, 25 nt, Artificial Sequence
  Description of Artificial Sequence: Synthetic oligonucleotide
guaaauacaauuuguacuuuuuucu

SEQ ID NO: 86013 - RNA, 25 nt, Artificial Sequence
  Description of Artificial Sequence: Synthetic oligonucleotide
uuaaggcauacuaguacaaguggua

SEQ ID NO: 86014 - RNA, 25 nt, Artificial Sequence
  Description of Artificial Sequence: Synthetic oligonucleotide
aauuuuuguacauuacacuaaauua

SEQ ID NO: 86015 - RNA, 25 nt, Artificial Sequence
  Description of Artificial Sequence: Synthetic oligonucleotide
auuagcauuuguuuuagcauuaccu

SEQ ID NO: 86016 - RNA, 25 nt, Artificial Sequence
  Description of Artificial Sequence: Synthetic oligonucleotide
uaauuuuuuuccugcuccaugcaga

SEQ ID NO: 86017 - RNA, 25 nt, Artificial Sequence
  Description of Artificial Sequence: Synthetic oligonucleotide
acuguuagcuuuuaccuuaaaugcu

SEQ ID NO: 86018 - RNA, 25 nt, Artificial Sequence
  Description of Artificial Sequence: Synthetic oligonucleotide
uuauuuuaaaaugacaguggaaguu

SEQ ID NO: 86019 - RNA, 25 nt, Artificial Sequence
  Description of Artificial Sequence: Synthetic oligonucleotide
uuuuuuuuccucuaagugccaguau

SEQ ID NO: 86020 - RNA, 25 nt, Artificial Sequence
  Description of Artificial Sequence: Synthetic oligonucleotide
uucccagaguuuugguuuuugaacu

SEQ ID NO: 86021 - RNA, 25 nt, Artificial Sequence
  Description of Artificial Sequence: Synthetic oligonucleotide
uagcaaugccugugaaaaagaaacu

SEQ ID NO: 86022 - RNA, 25 nt, Artificial Sequence
  Description of Artificial Sequence: Synthetic oligonucleotide
ugaauaccuaagauuucugucuugg

SEQ ID NO: 86023 - RNA, 25 nt, Artificial Sequence
  Description of Artificial Sequence: Synthetic oligonucleotide
ggguuuuuggugcaugcaguugauu

SEQ ID NO: 86024 - RNA, 25 nt, Artificial Sequence
  Description of Artificial Sequence: Synthetic oligonucleotide
uacuucuuauuuuucuuaccaauug

SEQ ID NO: 86025 - RNA, 25 nt, Artificial Sequence
  Description of Artificial Sequence: Synthetic oligonucleotide
gugaauguuggugugaaacaaauua

SEQ ID NO: 86026 - RNA, 25 nt, Artificial Sequence
  Description of Artificial Sequence: Synthetic oligonucleotide
aaugaagcuuuugaaucaucccuau

SEQ ID NO: 86027 - RNA, 25 nt, Artificial Sequence
  Description of Artificial Sequence: Synthetic oligonucleotide
uucuguguuuuaucuagucacauaa

SEQ ID NO: 86028 - RNA, 25 nt, Artificial Sequence
  Description of Artificial Sequence: Synthetic oligonucleotide
aauggauuaauuacuaauuucaguu

SEQ ID NO: 86029 - RNA, 25 nt, Artificial Sequence
  Description of Artificial Sequence: Synthetic oligonucleotide
ugagaccuucuaauugguuuuuacu

SEQ ID NO: 86030 - RNA, 25 nt, Artificial Sequence
  Description of Artificial Sequence: Synthetic oligonucleotide
ugaaacauugagggaacacaaauuu

SEQ ID NO: 86031 - RNA, 25 nt, Artificial Sequence
  Description of Artificial Sequence: Synthetic oligonucleotide
uaugggcuuccugaugaugauucuu

SEQ ID NO: 86032 - RNA, 25 nt, Artificial Sequence
  Description of Artificial Sequence: Synthetic oligonucleotide
ucuaggcaucauguccuauaguuug

SEQ ID NO: 86033 - RNA, 25 nt, Artificial Sequence
  Description of Artificial Sequence: Synthetic oligonucleotide
gucaucccugaugaauguaaaguua

SEQ ID NO: 86034 - RNA, 25 nt, Artificial Sequence
  Description of Artificial Sequence: Synthetic oligonucleotide
acacuguucacaaagguuuugucuc

SEQ ID NO: 86035 - RNA, 25 nt, Artificial Sequence
  Description of Artificial Sequence: Synthetic oligonucleotide
ccuuuccacugcuauuagucauggu

SEQ ID NO: 86036 - RNA, 25 nt, Artificial Sequence
  Description of Artificial Sequence: Synthetic oligonucleotide
ucacucuccccaaaauauuauauuu

SEQ ID NO: 86037 - RNA, 25 nt, Artificial Sequence
  Description of Artificial Sequence: Synthetic oligonucleotide
uuuucuauaaaaagaaaaaaaugga

SEQ ID NO: 86038 - RNA, 25 nt, Artificial Sequence
  Description of Artificial Sequence: Synthetic oligonucleotide
aaaaaaauuacaaggcaauggaaac

SEQ ID NO: 86039 - RNA, 25 nt, Artificial Sequence
  Description of Artificial Sequence: Synthetic oligonucleotide
cuauuauaaggccauuuccuuuuca

SEQ ID NO: 86040 - RNA, 25 nt, Artificial Sequence
  Description of Artificial Sequence: Synthetic oligonucleotide
acauuagauaaauuacuauaaagac

SEQ ID NO: 86041 - RNA, 25 nt, Artificial Sequence
  Description of Artificial Sequence: Synthetic oligonucleotide
cuccuaauagcuuuuccuguuaagg

SEQ ID NO: 86042 - RNA, 25 nt, Artificial Sequence
  Description of Artificial Sequence: Synthetic oligonucleotide
gcagacccaguaugaaauggggauu

SEQ ID NO: 86043 - RNA, 25 nt, Artificial Sequence
  Description of Artificial Sequence: Synthetic oligonucleotide
uauuauagcaaccauuuuggggcua

SEQ ID NO: 86044 - RNA, 25 nt, Artificial Sequence
  Description of Artificial Sequence: Synthetic oligonucleotide
auauuuacaugcuacuaaauuuuua

SEQ ID NO: 86045 - RNA, 25 nt, Artificial Sequence
  Description of Artificial Sequence: Synthetic oligonucleotide
auaauaauugaaaagauuuuaacaa

SEQ ID NO: 86046 - RNA, 25 nt, Artificial Sequence
  Description of Artificial Sequence: Synthetic oligonucleotide
aguauaaaaaauucucauaggaauu

SEQ ID NO: 86047 - RNA, 25 nt, Artificial Sequence
  Description of Artificial Sequence: Synthetic oligonucleotide
uaaauguagucucccugugucagac

SEQ ID NO: 86048 - RNA, 25 nt, Artificial Sequence
  Description of Artificial Sequence: Synthetic oligonucleotide
cugcucuuucauaguauaacuuuaa

SEQ ID NO: 86049 - RNA, 25 nt, Artificial Sequence
  Description of Artificial Sequence: Synthetic oligonucleotide
aaucuuuucuucaacuugagucuuu

SEQ ID NO: 86050 - RNA, 25 nt, Artificial Sequence
  Description of Artificial Sequence: Synthetic oligonucleotide
ugaagauaguuuuaauucugcuugu

SEQ ID NO: 86051 - RNA, 25 nt, Artificial Sequence
  Description of Artificial Sequence: Synthetic oligonucleotide
ugacauuaaaagauuauuugggcca

SEQ ID NO: 86052 - RNA, 25 nt, Artificial Sequence
  Description of Artificial Sequence: Synthetic oligonucleotide
aguuauagcuuauuagguguugaag

SEQ ID NO: 86053 - RNA, 25 nt, Artificial Sequence
  Description of Artificial Sequence: Synthetic oligonucleotide
gagaccaagguugcaaggccaggcc

SEQ ID NO: 86054 - RNA, 25 nt, Artificial Sequence
  Description of Artificial Sequence: Synthetic oligonucleotide
ccugugugaaccuuugagcuuucau

SEQ ID NO: 86055 - RNA, 25 nt, Artificial Sequence
  Description of Artificial Sequence: Synthetic oligonucleotide
uagagaguuucacagcauggacugu

SEQ ID NO: 86056 - RNA, 25 nt, Artificial Sequence
  Description of Artificial Sequence: Synthetic oligonucleotide
uguccccacggucauccaguguugu

SEQ ID NO: 86057 - RNA, 25 nt, Artificial Sequence
  Description of Artificial Sequence: Synthetic oligonucleotide
ucaugcauugguuagucaaaauggg

SEQ ID NO: 86058 - RNA, 25 nt, Artificial Sequence
  Description of Artificial Sequence: Synthetic oligonucleotide
ggagggacuagggcaguuuggauag

SEQ ID NO: 86059 - RNA, 25 nt, Artificial Sequence
  Description of Artificial Sequence: Synthetic oligonucleotide
gcucaacaagauacaaucucacucu

SEQ ID NO: 86060 - RNA, 25 nt, Artificial Sequence
  Description of Artificial Sequence: Synthetic oligonucleotide
uguggugguccugcugacaaaucaa

SEQ ID NO: 86061 - RNA, 25 nt, Artificial Sequence
  Description of Artificial Sequence: Synthetic oligonucleotide
agagcauugcuuuuguuucuuaaga

SEQ ID NO: 86062 - RNA, 25 nt, Artificial Sequence
  Description of Artificial Sequence: Synthetic oligonucleotide
aaaacaaacucuuuuuuaaaaauua

SEQ ID NO: 86063 - RNA, 25 nt, Artificial Sequence
  Description of Artificial Sequence: Synthetic oligonucleotide
acuuuuaaauauuaacucaaaaguu

SEQ ID NO: 86064 - RNA, 25 nt, Artificial Sequence
  Description of Artificial Sequence: Synthetic oligonucleotide
ugagauuuuggggugguggugugcc

SEQ ID NO: 86065 - RNA, 25 nt, Artificial Sequence
  Description of Artificial Sequence: Synthetic oligonucleotide
caaugaagugaaaaaguuuuacaau

SEQ ID NO: 86066 - RNA, 25 nt, Artificial Sequence
  Description of Artificial Sequence: Synthetic oligonucleotide
ucucuagguuuggcuaguucucuua

SEQ ID NO: 86067 - RNA, 25 nt, Artificial Sequence
  Description of Artificial Sequence: Synthetic oligonucleotide
aacacugguuaaauuaacauugcau

SEQ ID NO: 86068 - RNA, 25 nt, Artificial Sequence
  Description of Artificial Sequence: Synthetic oligonucleotide
uaaacacuuuucaagucugauccau

SEQ ID NO: 86069 - RNA, 25 nt, Artificial Sequence
  Description of Artificial Sequence: Synthetic oligonucleotide
uauuuaauaaugcuuuaaaauaaaa

SEQ ID NO: 86070 - RNA, 25 nt, Artificial Sequence
  Description of Artificial Sequence: Synthetic oligonucleotide
aauaaaaacaauccuuuugauaaau

SEQ ID NO: 86071 - RNA, 25 nt, Artificial Sequence
  Description of Artificial Sequence: Synthetic oligonucleotide
uuuaaaauguuacuuauuuuaaaau

SEQ ID NO: 86072 - RNA, 25 nt, Artificial Sequence
  Description of Artificial Sequence: Synthetic oligonucleotide
uaaaugaagugagauggcaugguga

SEQ ID NO: 86073 - RNA, 25 nt, Artificial Sequence
  Description of Artificial Sequence: Synthetic oligonucleotide
aggugaaaguaucacuggacuagga

SEQ ID NO: 86074 - RNA, 25 nt, Artificial Sequence
  Description of Artificial Sequence: Synthetic oligonucleotide
aagaaggugacuuagguucuagaua

SEQ ID NO: 86075 - RNA, 25 nt, Artificial Sequence
  Description of Artificial Sequence: Synthetic oligonucleotide
aggugucuuuuaggacucugauuuu

SEQ ID NO: 86076 - RNA, 25 nt, Artificial Sequence
  Description of Artificial Sequence: Synthetic oligonucleotide
ugaggacaucacuuacuauccauuu

SEQ ID NO: 86077 - RNA, 25 nt, Artificial Sequence
  Description of Artificial Sequence: Synthetic oligonucleotide
ucuucauguuaaaagaagucaucuc

SEQ ID NO: 86078 - RNA, 25 nt, Artificial Sequence
  Description of Artificial Sequence: Synthetic oligonucleotide
caacuauguaauuuauauuccauuu

SEQ ID NO: 86079 - RNA, 25 nt, Artificial Sequence
  Description of Artificial Sequence: Synthetic oligonucleotide
uacauaaggauacacuuauuuguca

SEQ ID NO: 86080 - RNA, 25 nt, Artificial Sequence
  Description of Artificial Sequence: Synthetic oligonucleotide
aagcucagcacaaucuguaaauuuu

SEQ ID NO: 86081 - RNA, 25 nt, Artificial Sequence
  Description of Artificial Sequence: Synthetic oligonucleotide
uuaaccuauguuacaccaucuucag

SEQ ID NO: 86082 - RNA, 25 nt, Artificial Sequence
  Description of Artificial Sequence: Synthetic oligonucleotide
gugccagucuugggcaaaauugugc

SEQ ID NO: 86083 - RNA, 25 nt, Artificial Sequence
  Description of Artificial Sequence: Synthetic oligonucleotide
caagaggugaaguuuauauuugaau

SEQ ID NO: 86084 - RNA, 25 nt, Artificial Sequence
  Description of Artificial Sequence: Synthetic oligonucleotide
uauccauucucguuuuaggacucuu

SEQ ID NO: 86085 - RNA, 25 nt, Artificial Sequence
  Description of Artificial Sequence: Synthetic oligonucleotide
ucuuccauauuagugucaucuugcc

SEQ ID NO: 86086 - RNA, 25 nt, Artificial Sequence
  Description of Artificial Sequence: Synthetic oligonucleotide
cucccuaccuuccacaugccccaug

SEQ ID NO: 86087 - RNA, 25 nt, Artificial Sequence
  Description of Artificial Sequence: Synthetic oligonucleotide
gacuugaugcaguuuuaauacuugu

SEQ ID NO: 86088 - RNA, 25 nt, Artificial Sequence
  Description of Artificial Sequence: Synthetic oligonucleotide
uaauuccccuaaccauaagauuuac

SEQ ID NO: 86089 - RNA, 25 nt, Artificial Sequence
  Description of Artificial Sequence: Synthetic oligonucleotide
cugcugcuguggauaucuccaugaa

SEQ ID NO: 86090 - RNA, 25 nt, Artificial Sequence
  Description of Artificial Sequence: Synthetic oligonucleotide
aguuuucccacugagucacaucaga

SEQ ID NO: 86091 - RNA, 25 nt, Artificial Sequence
  Description of Artificial Sequence: Synthetic oligonucleotide
aaaugcccuacaucuuauuuccuca

SEQ ID NO: 86092 - RNA, 25 nt, Artificial Sequence
  Description of Artificial Sequence: Synthetic oligonucleotide
agggcucaagagaaucugacagaua

SEQ ID NO: 86093 - RNA, 25 nt, Artificial Sequence
  Description of Artificial Sequence: Synthetic oligonucleotide
accauaaagggauuugaccuaauca

SEQ ID NO: 86094 - RNA, 25 nt, Artificial Sequence
  Description of Artificial Sequence: Synthetic oligonucleotide
acuaauuuucaggugguggcugaug

SEQ ID NO: 86095 - RNA, 25 nt, Artificial Sequence
  Description of Artificial Sequence: Synthetic oligonucleotide
gcuuugaacaucucuuugcugccca

SEQ ID NO: 86096 - RNA, 25 nt, Artificial Sequence
  Description of Artificial Sequence: Synthetic oligonucleotide
aauccauuagcgacaguaggauuuu

SEQ ID NO: 86097 - RNA, 25 nt, Artificial Sequence
  Description of Artificial Sequence: Synthetic oligonucleotide
uucaaaccugguaugaauagacaga

SEQ ID NO: 86098 - RNA, 25 nt, Artificial Sequence
  Description of Artificial Sequence: Synthetic oligonucleotide
aacccuauccaguggaaggagaauu

SEQ ID NO: 86099 - RNA, 25 nt, Artificial Sequence
  Description of Artificial Sequence: Synthetic oligonucleotide
uuaauaaagauagugcugaaagaau

SEQ ID NO: 86100 - RNA, 25 nt, Artificial Sequence
  Description of Artificial Sequence: Synthetic oligonucleotide
uuccuuagguaaucuauaacuagga

SEQ ID NO: 86101 - RNA, 25 nt, Artificial Sequence
  Description of Artificial Sequence: Synthetic oligonucleotide
acuacuccugguaacaguaauacau

SEQ ID NO: 86102 - RNA, 25 nt, Artificial Sequence
  Description of Artificial Sequence: Synthetic oligonucleotide
uuccauuguuuuaguaaccagaaau

SEQ ID NO: 86103 - RNA, 25 nt, Artificial Sequence
  Description of Artificial Sequence: Synthetic oligonucleotide
ucuucaugcaaugaaaaauacuuua

SEQ ID NO: 86104 - RNA, 25 nt, Artificial Sequence
  Description of Artificial Sequence: Synthetic oligonucleotide
aauucaugaagcuuacuuuuuuuuu

SEQ ID NO: 86105 - RNA, 25 nt, Artificial Sequence
  Description of Artificial Sequence: Synthetic oligonucleotide
uuuggugucagagucucgcucuugu

SEQ ID NO: 86106 - RNA, 25 nt, Artificial Sequence
  Description of Artificial Sequence: Synthetic oligonucleotide
ucacccaggcuggaaugcaguggcg

SEQ ID NO: 86107 - RNA, 25 nt, Artificial Sequence
  Description of Artificial Sequence: Synthetic oligonucleotide
gccaucucagcucacugcaaccucc

SEQ ID NO: 86108 - RNA, 25 nt, Artificial Sequence
  Description of Artificial Sequence: Synthetic oligonucleotide
caucucccagguucaagcgauucuc

SEQ ID NO: 86109 - RNA, 25 nt, Artificial Sequence
  Description of Artificial Sequence: Synthetic oligonucleotide
cgugccucggccuccugaguagcug

SEQ ID NO: 86110 - RNA, 25 nt, Artificial Sequence
  Description of Artificial Sequence: Synthetic oligonucleotide
gggauuacaggcgugugccacuaca

SEQ ID NO: 86111 - RNA, 25 nt, Artificial Sequence
  Description of Artificial Sequence: Synthetic oligonucleotide
acucaacuaauuuuuguauuuuuag

SEQ ID NO: 86112 - RNA, 25 nt, Artificial Sequence
  Description of Artificial Sequence: Synthetic oligonucleotide
ggagagacgggguuucacccuguug

SEQ ID NO: 86113 - RNA, 25 nt, Artificial Sequence
  Description of Artificial Sequence: Synthetic oligonucleotide
ggccaggcuggucucgaacuccuga

SEQ ID NO: 86114 - RNA, 25 nt, Artificial Sequence
  Description of Artificial Sequence: Synthetic oligonucleotide
accucaagugauucacccaccuugg

SEQ ID NO: 86115 - RNA, 25 nt, Artificial Sequence
  Description of Artificial Sequence: Synthetic oligonucleotide
gccucauaaaccuguuuugcagaac

SEQ ID NO: 86116 - RNA, 25 nt, Artificial Sequence
  Description of Artificial Sequence: Synthetic oligonucleotide
cucauuuauucagcaaauauuuauu

SEQ ID NO: 86117 - RNA, 25 nt, Artificial Sequence
  Description of Artificial Sequence: Synthetic oligonucleotide
ugagugccuaccagaugccagucac

SEQ ID NO: 86118 - RNA, 25 nt, Artificial Sequence
  Description of Artificial Sequence: Synthetic oligonucleotide
ccgcacaaggcacuggguauauggu

SEQ ID NO: 86119 - RNA, 25 nt, Artificial Sequence
  Description of Artificial Sequence: Synthetic oligonucleotide
uauccccaaacaagagacauaaucc

SEQ ID NO: 86120 - RNA, 25 nt, Artificial Sequence
  Description of Artificial Sequence: Synthetic oligonucleotide
ccgguccuuagguagugcuagugug

SEQ ID NO: 86121 - RNA, 25 nt, Artificial Sequence
  Description of Artificial Sequence: Synthetic oligonucleotide
ggucuguaauaucuuacuaaggccu

SEQ ID NO: 86122 - RNA, 25 nt, Artificial Sequence
  Description of Artificial Sequence: Synthetic oligonucleotide
uuugguauacgacccagagauaaca

SEQ ID NO: 86123 - RNA, 25 nt, Artificial Sequence
  Description of Artificial Sequence: Synthetic oligonucleotide
acgaugcguauuuuaguuuugcaaa

SEQ ID NO: 86124 - RNA, 25 nt, Artificial Sequence
  Description of Artificial Sequence: Synthetic oligonucleotide
agaagggguuuggucucugugccag

SEQ ID NO: 86125 - RNA, 25 nt, Artificial Sequence
  Description of Artificial Sequence: Synthetic oligonucleotide
gcucuauaauuguuuugcuacgauu

SEQ ID NO: 86126 - RNA, 25 nt, Artificial Sequence
  Description of Artificial Sequence: Synthetic oligonucleotide
uccacugaaacucuucgaucaagcu

SEQ ID NO: 86127 - RNA, 25 nt, Artificial Sequence
  Description of Artificial Sequence: Synthetic oligonucleotide
uacuuuauguaaaucacuucauugu

SEQ ID NO: 86128 - RNA, 25 nt, Artificial Sequence
  Description of Artificial Sequence: Synthetic oligonucleotide
uuuuaaaggaauaaacuugauuaua

SEQ ID NO: 86129 - RNA, 25 nt, Artificial Sequence
  Description of Artificial Sequence: Synthetic oligonucleotide
auuguuuuuuuauuuggcauaacug

SEQ ID NO: 86130 - RNA, 25 nt, Artificial Sequence
  Description of Artificial Sequence: Synthetic oligonucleotide
gugauucuuuuaggacaauuacugu

SEQ ID NO: 86131 - RNA, 25 nt, Artificial Sequence
  Description of Artificial Sequence: Synthetic oligonucleotide
uacacauuaagguguaugucagaua

SEQ ID NO: 86132 - RNA, 25 nt, Artificial Sequence
  Description of Artificial Sequence: Synthetic oligonucleotide
auucauauugacccaaauguguaau

SEQ ID NO: 86133 - RNA, 25 nt, Artificial Sequence
  Description of Artificial Sequence: Synthetic oligonucleotide
uauuccaguuuucucugcauaagua

SEQ ID NO: 86134 - RNA, 25 nt, Artificial Sequence
  Description of Artificial Sequence: Synthetic oligonucleotide
aauuaaaauauacuuaaaaauuaau

SEQ ID NO: 86135 - RNA, 25 nt, Artificial Sequence
  Description of Artificial Sequence: Synthetic oligonucleotide
uaguuuuaucuggguacaaauaaac

SEQ ID NO: 86136 - RNA, 25 nt, Artificial Sequence
  Description of Artificial Sequence: Synthetic oligonucleotide
caggugccugaacuaguucacagac

SEQ ID NO: 86137 - RNA, 25 nt, Artificial Sequence
  Description of Artificial Sequence: Synthetic oligonucleotide
caaggaaacuucuauguaaaaauca

SEQ ID NO: 86138 - RNA, 25 nt, Artificial Sequence
  Description of Artificial Sequence: Synthetic oligonucleotide
acuaugauuucugaauugcuaugug

SEQ ID NO: 86139 - RNA, 25 nt, Artificial Sequence
  Description of Artificial Sequence: Synthetic oligonucleotide
gaaacuacagaucuuuggaacacug

SEQ ID NO: 86140 - RNA, 25 nt, Artificial Sequence
  Description of Artificial Sequence: Synthetic oligonucleotide
guuuagguaggguguuaagacuuac

SEQ ID NO: 86141 - RNA, 25 nt, Artificial Sequence
  Description of Artificial Sequence: Synthetic oligonucleotide
cacaguaccucguuucuacacagag

SEQ ID NO: 86142 - RNA, 25 nt, Artificial Sequence
  Description of Artificial Sequence: Synthetic oligonucleotide
gaaagaaauggccauacuucaggaa

SEQ ID NO: 86143 - RNA, 25 nt, Artificial Sequence
  Description of Artificial Sequence: Synthetic oligonucleotide
acugcagugcuuaugaggggauauu

SEQ ID NO: 86144 - RNA, 25 nt, Artificial Sequence
  Description of Artificial Sequence: Synthetic oligonucleotide
uuaggccucuugaauuuuugaugua

SEQ ID NO: 86145 - RNA, 25 nt, Artificial Sequence
  Description of Artificial Sequence: Synthetic oligonucleotide
agaugggcauuuuuuuaagguagug

SEQ ID NO: 86146 - RNA, 25 nt, Artificial Sequence
  Description of Artificial Sequence: Synthetic oligonucleotide
gguuaauuaccuuuaugugaacuuu

SEQ ID NO: 86147 - RNA, 25 nt, Artificial Sequence
  Description of Artificial Sequence: Synthetic oligonucleotide
ugaaugguuuaacaaaagauuuguu

SEQ ID NO: 86148 - RNA, 25 nt, Artificial Sequence
  Description of Artificial Sequence: Synthetic oligonucleotide
uuuuguagagauuuuaaagggggag

SEQ ID NO: 86149 - RNA, 25 nt, Artificial Sequence
  Description of Artificial Sequence: Synthetic oligonucleotide
gaauucuagaaauaaauguuaccua

SEQ ID NO: 86150 - RNA, 25 nt, Artificial Sequence
  Description of Artificial Sequence: Synthetic oligonucleotide
aauuauuacagccuuaaagacaaaa

SEQ ID NO: 86151 - RNA, 25 nt, Artificial Sequence
  Description of Artificial Sequence: Synthetic oligonucleotide
aauccuuguugaaguuuuuuuaaaa

SEQ ID NO: 86152 - RNA, 25 nt, Artificial Sequence
  Description of Artificial Sequence: Synthetic oligonucleotide
aaaagcuaaauuacauagacuuagg

SEQ ID NO: 86153 - RNA, 25 nt, Artificial Sequence
  Description of Artificial Sequence: Synthetic oligonucleotide
gcauuaacauguuuguggaagaaua

SEQ ID NO: 86154 - RNA, 25 nt, Artificial Sequence
  Description of Artificial Sequence: Synthetic oligonucleotide
auagcagacguauauuguaucauuu

SEQ ID NO: 86155 - RNA, 25 nt, Artificial Sequence
  Description of Artificial Sequence: Synthetic oligonucleotide
ugagugaauguucccaaguaggcau

SEQ ID NO: 86156 - RNA, 25 nt, Artificial Sequence
  Description of Artificial Sequence: Synthetic oligonucleotide
uucuaggcucuauuuaacugaguca

SEQ ID NO: 86157 - RNA, 25 nt, Artificial Sequence
  Description of Artificial Sequence: Synthetic oligonucleotide
acacugcauaggaauuuagaaccua

SEQ ID NO: 86158 - RNA, 25 nt, Artificial Sequence
  Description of Artificial Sequence: Synthetic oligonucleotide
aacuuuuauagguuaucaaaacugu

SEQ ID NO: 86159 - RNA, 25 nt, Artificial Sequence
  Description of Artificial Sequence: Synthetic oligonucleotide
uugucaccauugcacaauuuugucc

SEQ ID NO: 86160 - RNA, 25 nt, Artificial Sequence
  Description of Artificial Sequence: Synthetic oligonucleotide
cuaauauauacauagaaacuuugug

SEQ ID NO: 86161 - RNA, 25 nt, Artificial Sequence
  Description of Artificial Sequence: Synthetic oligonucleotide
ggggcauguuaaguuacaguuugca

SEQ ID NO: 86162 - RNA, 25 nt, Artificial Sequence
  Description of Artificial Sequence: Synthetic oligonucleotide
acaaguucaucucauuuguauucca

SEQ ID NO: 86163 - RNA, 25 nt, Artificial Sequence
  Description of Artificial Sequence: Synthetic oligonucleotide
auuuuuucuucaaacaguauauaac

SEQ ID NO: 86164 - RNA, 25 nt, Artificial Sequence
  Description of Artificial Sequence: Synthetic oligonucleotide
cuuuuuuuaggggauuuuuuuuuag

SEQ ID NO: 86165 - RNA, 25 nt, Artificial Sequence
  Description of Artificial Sequence: Synthetic oligonucleotide
gacagcaaaaacuaucugaagauuu

SEQ ID NO: 86166 - RNA, 25 nt, Artificial Sequence
  Description of Artificial Sequence: Synthetic oligonucleotide
uccauuugucaaaaaguaaugauuu

SEQ ID NO: 86167 - RNA, 25 nt, Artificial Sequence
  Description of Artificial Sequence: Synthetic oligonucleotide
ucuugauaauuguguaguaauguuu

SEQ ID NO: 86168 - RNA, 25 nt, Artificial Sequence
  Description of Artificial Sequence: Synthetic oligonucleotide
uuuuagaacccagcaguuaccuuaa

SEQ ID NO: 86169 - RNA, 25 nt, Artificial Sequence
  Description of Artificial Sequence: Synthetic oligonucleotide
aagcugaauuuauauuuaguaacuu

SEQ ID NO: 86170 - RNA, 25 nt, Artificial Sequence
  Description of Artificial Sequence: Synthetic oligonucleotide
ucuguguuaauacuggauagcauga

SEQ ID NO: 86171 - RNA, 25 nt, Artificial Sequence
  Description of Artificial Sequence: Synthetic oligonucleotide
aauucugcauugagaaacugaauag

SEQ ID NO: 86172 - RNA, 25 nt, Artificial Sequence
  Description of Artificial Sequence: Synthetic oligonucleotide
gcugucauaaaaugaaacuuucuuu

SEQ ID NO: 86173 - RNA, 25 nt, Artificial Sequence
  Description of Artificial Sequence: Synthetic oligonucleotide
ucuaaagaaagauacucacaugagu

SEQ ID NO: 86174 - RNA, 25 nt, Artificial Sequence
  Description of Artificial Sequence: Synthetic oligonucleotide
uucuugaagaauagucauaacuaga

SEQ ID NO: 86175 - RNA, 25 nt, Artificial Sequence
  Description of Artificial Sequence: Synthetic oligonucleotide
auuaagaucuguguuuuaguuuaau

SEQ ID NO: 86176 - RNA, 25 nt, Artificial Sequence
  Description of Artificial Sequence: Synthetic oligonucleotide
uaguuugaagugccuguuugggaua

SEQ ID NO: 86177 - RNA, 25 nt, Artificial Sequence
  Description of Artificial Sequence: Synthetic oligonucleotide
aaugauagguaauuuagaugaauuu

SEQ ID NO: 86178 - RNA, 25 nt, Artificial Sequence
  Description of Artificial Sequence: Synthetic oligonucleotide
uaggggaaaaaaaaguuaucugcag

SEQ ID NO: 86179 - RNA, 25 nt, Artificial Sequence
  Description of Artificial Sequence: Synthetic oligonucleotide
gauauguugagggcccaucucuccc

SEQ ID NO: 86180 - RNA, 25 nt, Artificial Sequence
  Description of Artificial Sequence: Synthetic oligonucleotide
ccccacacccccacagagcuaacug

SEQ ID NO: 86181 - RNA, 25 nt, Artificial Sequence
  Description of Artificial Sequence: Synthetic oligonucleotide
ggguuacaguguuuuauccgaaagu

SEQ ID NO: 86182 - RNA, 25 nt, Artificial Sequence
  Description of Artificial Sequence: Synthetic oligonucleotide
uuuccaauuccacugucuuguguuu

SEQ ID NO: 86183 - RNA, 25 nt, Artificial Sequence
  Description of Artificial Sequence: Synthetic oligonucleotide
uucauguugaaaauacuuuugcauu

SEQ ID NO: 86184 - RNA, 25 nt, Artificial Sequence
  Description of Artificial Sequence: Synthetic oligonucleotide
uuuuccuuugagugccaauuucuua

SEQ ID NO: 86185 - RNA, 25 nt, Artificial Sequence
  Description of Artificial Sequence: Synthetic oligonucleotide
acuaguacuauuucuuaauguaaca

SEQ ID NO: 86186 - RNA, 25 nt, Artificial Sequence
  Description of Artificial Sequence: Synthetic oligonucleotide
auguuuaccuggaauguauuuuaac

SEQ ID NO: 86187 - RNA, 25 nt, Artificial Sequence
  Description of Artificial Sequence: Synthetic oligonucleotide
cuauuuuuguauaguguaaacugaa

SEQ ID NO: 86188 - RNA, 25 nt, Artificial Sequence
  Description of Artificial Sequence: Synthetic oligonucleotide
aacaugcacauuuuguacauugugc

SEQ ID NO: 86189 - RNA, 25 nt, Artificial Sequence
  Description of Artificial Sequence: Synthetic oligonucleotide
cuuucuuuugugggacauaugcagu

SEQ ID NO: 86190 - RNA, 25 nt, Artificial Sequence
  Description of Artificial Sequence: Synthetic oligonucleotide
ugugauccaguuguuuuccaucauu

SEQ ID NO: 86191 - RNA, 25 nt, Artificial Sequence
  Description of Artificial Sequence: Synthetic oligonucleotide
uugguugcgcugaccuaggaauguu

SEQ ID NO: 86192 - RNA, 25 nt, Artificial Sequence
  Description of Artificial Sequence: Synthetic oligonucleotide
uggucauaucaaacauuaaaaauga

SEQ ID NO: 86193 - RNA, 25 nt, Artificial Sequence
  Description of Artificial Sequence: Synthetic oligonucleotide
accacucuuuuaauugaaauuaacu

SEQ ID NO: 86194 - RNA, 25 nt, Artificial Sequence
  Description of Artificial Sequence: Synthetic oligonucleotide
uuuuaaauguuuauaggaguaugug

SEQ ID NO: 86195 - RNA, 25 nt, Artificial Sequence
  Description of Artificial Sequence: Synthetic oligonucleotide
gcugugaagugaucuaaaauuugua

SEQ ID NO: 86196 - RNA, 25 nt, Artificial Sequence
  Description of Artificial Sequence: Synthetic oligonucleotide
aauauuuuugucaugaacuguacua

SEQ ID NO: 86197 - RNA, 25 nt, Artificial Sequence
  Description of Artificial Sequence: Synthetic oligonucleotide
acuccuaauuauuguaauguaauaa

SEQ ID NO: 86198 - RNA, 25 nt, Artificial Sequence
  Description of Artificial Sequence: Synthetic oligonucleotide
aaaauaguuacagugacaaaaaaaa

SEQ ID NO: 86199 - RNA, 1963 nt, Homo sapiens
gaaacgucccgugugggaggggcgggucugggugcggcugccgcaugacucgugguucggaggcccacguggccggggcggggacucaggcgccuggcagccgacugauuacguagcgggcggggccggaagugccgcuccuuggugggggcuguucauggcgguuccggggucuccaacauuuuucccggucugugguccuaaaucuguccaaagcagaggcaguggagcuugagguucuugcuggugugaaaugacugaguacaaacugguggugguuggagcaggugguguugggaaaagcgcacugacaauccagcuaauccagaaccacuuuguagaugaauaugaucccaccauagaggauucuuacagaaaacaagugguuauagauggugaaaccuguuuguuggacauacuggauacagcuggacaagaagaguacagugccaugagagaccaauacaugaggacaggcgaaggcuuccucuguguauuugccaucaauaauagcaagucauuugcggauauuaaccucuacagggagcagauuaagcgaguaaaagacucggaugauguaccuauggugcuagugggaaacaagugugauuugccaacaaggacaguugauacaaaacaagcccacgaacuggccaagaguuacgggauuccauucauugaaaccucagccaagaccagacaggguguugaagaugcuuuuuacacacugguaagagaaauacgccaguaccgaaugaaaaaacucaacagcagugaugaugggacucaggguuguaugggauugccauguguggugauguaacaagauacuuuuaaaguuuugucagaaaagagccacuuucaagcugcacugacacccugguccugacuuccuggaggagaaguauuccuguugcugucuucagucucacagagaagcuccugcuacuuccccagcucucaguaguuuaguacaauaaucucuauuugagaaguucucagaauaacuaccuccucacuuggcugucugaccagagaaugcaccucuuguuacucccuguuauuuuucugcccuggguucuuccacagcacaaacacaccucaacacaccucugccaccccagguuuuucaucugaaaagcaguucaugucugaaacagagaaccaaaccgcaaacgugaaauucuauugaaaacagugucuugagcucuaaaguagcaacugcuggugauuuuuuuuuucuuuuuacuguugaacuuagaacuaugccuaauuuuuggagaaaugucauaaauuacuguuuugccaagaauauaguuauuauugcuguuugguuuguuuauaauguuaucggcucuauucucuaaacuggcaucugcucuagauucauaaauacaaaaaugaauacugaauuuugagucuauccuagucuucacaacuuugacguaauuaaauccaacuuuucacagugaagugccuuuuuccuagaagugguuuguagacuccuuuauaauauuucaguggaauagaugucucaaaaauccuuaugcaugaaaugaaugucugagauacgucugugacuuaucuaccauugaaggaaagcuauaucuauuugagagcagaugccauuuuguacauguaugaaauugguuuuccagaggccuguuuuggggcuuucccaggagaaagaugaaacugaaagcauaugaauaauuucacuuaauaauuuuuaccuaaucuccacuuuuuucauagguuacuaccuauacaauguauguaauuuguuuccccuagcuuacugauaaaccuaauauucaaugaacuuccauuuguauucaaauuugugucauaccagaaagcucuacauuugcagauguucaaauauuguaaaacuuuggugcauuguuauuuaauagcugugaucagugauuuucaaaccucaaauauaguauauuaacaaauu

SEQ ID NO: 86200 - RNA, 19 nt, Artificial Sequence
  Description of Artificial Sequence: Synthetic oligonucleotide
gaaacgucccgugugggag

SEQ ID NO: 86201 - RNA, 19 nt, Artificial Sequence
  Description of Artificial Sequence: Synthetic oligonucleotide
ggggcgggucugggugcgg

SEQ ID NO: 86202 - RNA, 19 nt, Artificial Sequence
  Description of Artificial Sequence: Synthetic oligonucleotide
gcugccgcaugacucgugg

SEQ ID NO: 86203 - RNA, 19 nt, Artificial Sequence
  Description of Artificial Sequence: Synthetic oligonucleotide
guucggaggcccacguggc

SEQ ID NO: 86204 - RNA, 19 nt, Artificial Sequence
  Description of Artificial Sequence: Synthetic oligonucleotide
ccggggcggggacucaggc

SEQ ID NO: 86205 - RNA, 19 nt, Artificial Sequence
  Description of Artificial Sequence: Synthetic oligonucleotide
cgccuggcagccgacugau

SEQ ID NO: 86206 - RNA, 19 nt, Artificial Sequence
  Description of Artificial Sequence: Synthetic oligonucleotide
uuacguagcgggcggggcc

SEQ ID NO: 86207 - RNA, 19 nt, Artificial Sequence
  Description of Artificial Sequence: Synthetic oligonucleotide
cggaagugccgcuccuugg

SEQ ID NO: 86208 - RNA, 19 nt, Artificial Sequence
  Description of Artificial Sequence: Synthetic oligonucleotide
gugggggcuguucauggcg

SEQ ID NO: 86209 - RNA, 19 nt, Artificial Sequence
  Description of Artificial Sequence: Synthetic oligonucleotide
gguuccggggucuccaaca

SEQ ID NO: 86210 - RNA, 19 nt, Artificial Sequence
  Description of Artificial Sequence: Synthetic oligonucleotide
auuuuucccggucuguggu

SEQ ID NO: 86211 - RNA, 19 nt, Artificial Sequence
  Description of Artificial Sequence: Synthetic oligonucleotide
uccuaaaucuguccaaagc

SEQ ID NO: 86212 - RNA, 19 nt, Artificial Sequence
  Description of Artificial Sequence: Synthetic oligonucleotide
cagaggcaguggagcuuga

SEQ ID NO: 86213 - RNA, 19 nt, Artificial Sequence
  Description of Artificial Sequence: Synthetic oligonucleotide
agguucuugcuggugugaa

SEQ ID NO: 86214 - RNA, 19 nt, Artificial Sequence
  Description of Artificial Sequence: Synthetic oligonucleotide
aaugacugaguacaaacug

SEQ ID NO: 86215 - RNA, 19 nt, Artificial Sequence
  Description of Artificial Sequence: Synthetic oligonucleotide
gguggugguuggagcaggu

SEQ ID NO: 86216 - RNA, 19 nt, Artificial Sequence
  Description of Artificial Sequence: Synthetic oligonucleotide
ugguguugggaaaagcgca

SEQ ID NO: 86217 - RNA, 19 nt, Artificial Sequence
  Description of Artificial Sequence: Synthetic oligonucleotide
acugacaauccagcuaauc

SEQ ID NO: 86218 - RNA, 19 nt, Artificial Sequence
  Description of Artificial Sequence: Synthetic oligonucleotide
ccagaaccacuuuguagau

SEQ ID NO: 86219 - RNA, 19 nt, Artificial Sequence
  Description of Artificial Sequence: Synthetic oligonucleotide
ugaauaugaucccaccaua

SEQ ID NO: 86220 - RNA, 19 nt, Artificial Sequence
  Description of Artificial Sequence: Synthetic oligonucleotide
agaggauucuuacagaaaa

SEQ ID NO: 86221 - RNA, 19 nt, Artificial Sequence
  Description of Artificial Sequence: Synthetic oligonucleotide
acaagugguuauagauggu

SEQ ID NO: 86222 - RNA, 19 nt, Artificial Sequence
  Description of Artificial Sequence: Synthetic oligonucleotide
ugaaaccuguuuguuggac

SEQ ID NO: 86223 - RNA, 19 nt, Artificial Sequence
  Description of Artificial Sequence: Synthetic oligonucleotide
cauacuggauacagcugga

SEQ ID NO: 86224 - RNA, 19 nt, Artificial Sequence
  Description of Artificial Sequence: Synthetic oligonucleotide
acaagaagaguacagugcc

SEQ ID NO: 86225 - RNA, 19 nt, Artificial Sequence
  Description of Artificial Sequence: Synthetic oligonucleotide
caugagagaccaauacaug

SEQ ID NO: 86226 - RNA, 19 nt, Artificial Sequence
  Description of Artificial Sequence: Synthetic oligonucleotide
gaggacaggcgaaggcuuc

SEQ ID NO: 86227 - RNA, 19 nt, Artificial Sequence
  Description of Artificial Sequence: Synthetic oligonucleotide
ccucuguguauuugccauc

SEQ ID NO: 86228 - RNA, 19 nt, Artificial Sequence
  Description of Artificial Sequence: Synthetic oligonucleotide
caauaauagcaagucauuu

SEQ ID NO: 86229 - RNA, 19 nt, Artificial Sequence
  Description of Artificial Sequence: Synthetic oligonucleotide
ugcggauauuaaccucuac

SEQ ID NO: 86230 - RNA, 19 nt, Artificial Sequence
  Description of Artificial Sequence: Synthetic oligonucleotide
cagggagcagauuaagcga

SEQ ID NO: 86231 - RNA, 19 nt, Artificial Sequence
  Description of Artificial Sequence: Synthetic oligonucleotide
aguaaaagacucggaugau

SEQ ID NO: 86232 - RNA, 19 nt, Artificial Sequence
  Description of Artificial Sequence: Synthetic oligonucleotide
uguaccuauggugcuagug

SEQ ID NO: 86233 - RNA, 19 nt, Artificial Sequence
  Description of Artificial Sequence: Synthetic oligonucleotide
gggaaacaagugugauuug

SEQ ID NO: 86234 - RNA, 19 nt, Artificial Sequence
  Description of Artificial Sequence: Synthetic oligonucleotide
gccaacaaggacaguugau

SEQ ID NO: 86235 - RNA, 19 nt, Artificial Sequence
  Description of Artificial Sequence: Synthetic oligonucleotide
uacaaaacaagcccacgaa

SEQ ID NO: 86236 - RNA, 19 nt, Artificial Sequence
  Description of Artificial Sequence: Synthetic oligonucleotide
acuggccaagaguuacggg

SEQ ID NO: 86237 - RNA, 19 nt, Artificial Sequence
  Description of Artificial Sequence: Synthetic oligonucleotide
gauuccauucauugaaacc

SEQ ID NO: 86238 - RNA, 19 nt, Artificial Sequence
  Description of Artificial Sequence: Synthetic oligonucleotide
cucagccaagaccagacag

SEQ ID NO: 86239 - RNA, 19 nt, Artificial Sequence
  Description of Artificial Sequence: Synthetic oligonucleotide
ggguguugaagaugcuuuu

SEQ ID NO: 86240 - RNA, 19 nt, Artificial Sequence
  Description of Artificial Sequence: Synthetic oligonucleotide
uuacacacugguaagagaa

SEQ ID NO: 86241 - RNA, 19 nt, Artificial Sequence
  Description of Artificial Sequence: Synthetic oligonucleotide
aauacgccaguaccgaaug

SEQ ID NO: 86242 - RNA, 19 nt, Artificial Sequence
  Description of Artificial Sequence: Synthetic oligonucleotide
gaaaaaacucaacagcagu

SEQ ID NO: 86243 - RNA, 19 nt, Artificial Sequence
  Description of Artificial Sequence: Synthetic oligonucleotide
ugaugaugggacucagggu

SEQ ID NO: 86244 - RNA, 19 nt, Artificial Sequence
  Description of Artificial Sequence: Synthetic oligonucleotide
uuguaugggauugccaugu

SEQ ID NO: 86245 - RNA, 19 nt, Artificial Sequence
  Description of Artificial Sequence: Synthetic oligonucleotide
uguggugauguaacaagau

SEQ ID NO: 86246 - RNA, 19 nt, Artificial Sequence
  Description of Artificial Sequence: Synthetic oligonucleotide
uacuuuuaaaguuuuguca

SEQ ID NO: 86247 - RNA, 19 nt, Artificial Sequence
  Description of Artificial Sequence: Synthetic oligonucleotide
agaaaagagccacuuucaa

SEQ ID NO: 86248 - RNA, 19 nt, Artificial Sequence
  Description of Artificial Sequence: Synthetic oligonucleotide
agcugcacugacacccugg

SEQ ID NO: 86249 - RNA, 19 nt, Artificial Sequence
  Description of Artificial Sequence: Synthetic oligonucleotide
guccugacuuccuggagga

SEQ ID NO: 86250 - RNA, 19 nt, Artificial Sequence
  Description of Artificial Sequence: Synthetic oligonucleotide
agaaguauuccuguugcug

SEQ ID NO: 86251 - RNA, 19 nt, Artificial Sequence
  Description of Artificial Sequence: Synthetic oligonucleotide
gucuucagucucacagaga

SEQ ID NO: 86252 - RNA, 19 nt, Artificial Sequence
  Description of Artificial Sequence: Synthetic oligonucleotide
aagcuccugcuacuucccc

SEQ ID NO: 86253 - RNA, 19 nt, Artificial Sequence
  Description of Artificial Sequence: Synthetic oligonucleotide
cagcucucaguaguuuagu

SEQ ID NO: 86254 - RNA, 19 nt, Artificial Sequence
  Description of Artificial Sequence: Synthetic oligonucleotide
uacaauaaucucuauuuga

SEQ ID NO: 86255 - RNA, 19 nt, Artificial Sequence
  Description of Artificial Sequence: Synthetic oligonucleotide
agaaguucucagaauaacu

SEQ ID NO: 86256 - RNA, 19 nt, Artificial Sequence
  Description of Artificial Sequence: Synthetic oligonucleotide
uaccuccucacuuggcugu

SEQ ID NO: 86257 - RNA, 19 nt, Artificial Sequence
  Description of Artificial Sequence: Synthetic oligonucleotide
ucugaccagagaaugcacc

SEQ ID NO: 86258 - RNA, 19 nt, Artificial Sequence
  Description of Artificial Sequence: Synthetic oligonucleotide
cucuuguuacucccuguua

SEQ ID NO: 86259 - RNA, 19 nt, Artificial Sequence
  Description of Artificial Sequence: Synthetic oligonucleotide
auuuuucugcccuggguuc

SEQ ID NO: 86260 - RNA, 19 nt, Artificial Sequence
  Description of Artificial Sequence: Synthetic oligonucleotide
cuuccacagcacaaacaca

SEQ ID NO: 86261 - RNA, 19 nt, Artificial Sequence
  Description of Artificial Sequence: Synthetic oligonucleotide
accucaacacaccucugcc

SEQ ID NO: 86262 - RNA, 19 nt, Artificial Sequence
  Description of Artificial Sequence: Synthetic oligonucleotide
caccccagguuuuucaucu

SEQ ID NO: 86263 - RNA, 19 nt, Artificial Sequence
  Description of Artificial Sequence: Synthetic oligonucleotide
ugaaaagcaguucaugucu

SEQ ID NO: 86264 - RNA, 19 nt, Artificial Sequence
  Description of Artificial Sequence: Synthetic oligonucleotide
ugaaacagagaaccaaacc

SEQ ID NO: 86265 - RNA, 19 nt, Artificial Sequence
  Description of Artificial Sequence: Synthetic oligonucleotide
cgcaaacgugaaauucuau

SEQ ID NO: 86266 - RNA, 19 nt, Artificial Sequence
  Description of Artificial Sequence: Synthetic oligonucleotide
uugaaaacagugucuugag

SEQ ID NO: 86267 - RNA, 19 nt, Artificial Sequence
  Description of Artificial Sequence: Synthetic oligonucleotide
gcucuaaaguagcaacugc

SEQ ID NO: 86268 - RNA, 19 nt, Artificial Sequence
  Description of Artificial Sequence: Synthetic oligonucleotide
uuuuuacuguugaacuuag

SEQ ID NO: 86269 - RNA, 19 nt, Artificial Sequence
  Description of Artificial Sequence: Synthetic oligonucleotide
gaacuaugccuaauuuuug

SEQ ID NO: 86270 - RNA, 19 nt, Artificial Sequence
  Description of Artificial Sequence: Synthetic oligonucleotide
ggagaaaugucauaaauua

SEQ ID NO: 86271 - RNA, 19 nt, Artificial Sequence
  Description of Artificial Sequence: Synthetic oligonucleotide
acuguuuugccaagaauau

SEQ ID NO: 86272 - RNA, 19 nt, Artificial Sequence
  Description of Artificial Sequence: Synthetic oligonucleotide
uaguuauuauugcuguuug

SEQ ID NO: 86273 - RNA, 19 nt, Artificial Sequence
  Description of Artificial Sequence: Synthetic oligonucleotide
gguuuguuuauaauguuau

SEQ ID NO: 86274 - RNA, 19 nt, Artificial Sequence
  Description of Artificial Sequence: Synthetic oligonucleotide
ucggcucuauucucuaaac

SEQ ID NO: 86275 - RNA, 19 nt, Artificial Sequence
  Description of Artificial Sequence: Synthetic oligonucleotide
cuggcaucugcucuagauu

SEQ ID NO: 86276 - RNA, 19 nt, Artificial Sequence
  Description of Artificial Sequence: Synthetic oligonucleotide
ucauaaauacaaaaaugaa

SEQ ID NO: 86277 - RNA, 19 nt, Artificial Sequence
  Description of Artificial Sequence: Synthetic oligonucleotide
auacugaauuuugagucua

SEQ ID NO: 86278 - RNA, 19 nt, Artificial Sequence
  Description of Artificial Sequence: Synthetic oligonucleotide
auccuagucuucacaacuu

SEQ ID NO: 86279 - RNA, 19 nt, Artificial Sequence
  Description of Artificial Sequence: Synthetic oligonucleotide
uugacguaauuaaauccaa

SEQ ID NO: 86280 - RNA, 19 nt, Artificial Sequence
  Description of Artificial Sequence: Synthetic oligonucleotide
acuuuucacagugaagugc

SEQ ID NO: 86281 - RNA, 19 nt, Artificial Sequence
  Description of Artificial Sequence: Synthetic oligonucleotide
ccuuuuuccuagaaguggu

SEQ ID NO: 86282 - RNA, 19 nt, Artificial Sequence
  Description of Artificial Sequence: Synthetic oligonucleotide
uuuguagacuccuuuauaa

SEQ ID NO: 86283 - RNA, 19 nt, Artificial Sequence
  Description of Artificial Sequence: Synthetic oligonucleotide
auauuucaguggaauagau

SEQ ID NO: 86284 - RNA, 19 nt, Artificial Sequence
  Description of Artificial Sequence: Synthetic oligonucleotide
ugucucaaaaauccuuaug

SEQ ID NO: 86285 - RNA, 19 nt, Artificial Sequence
  Description of Artificial Sequence: Synthetic oligonucleotide
gcaugaaaugaaugucuga

SEQ ID NO: 86286 - RNA, 19 nt, Artificial Sequence
  Description of Artificial Sequence: Synthetic oligonucleotide
agauacgucugugacuuau

SEQ ID NO: 86287 - RNA, 19 nt, Artificial Sequence
  Description of Artificial Sequence: Synthetic oligonucleotide
ucuaccauugaaggaaagc

SEQ ID NO: 86288 - RNA, 19 nt, Artificial Sequence
  Description of Artificial Sequence: Synthetic oligonucleotide
cuauaucuauuugagagca

SEQ ID NO: 86289 - RNA, 19 nt, Artificial Sequence
  Description of Artificial Sequence: Synthetic oligonucleotide
agaugccauuuuguacaug

SEQ ID NO: 86290 - RNA, 19 nt, Artificial Sequence
  Description of Artificial Sequence: Synthetic oligonucleotide
guaugaaauugguuuucca

SEQ ID NO: 86291 - RNA, 19 nt, Artificial Sequence
  Description of Artificial Sequence: Synthetic oligonucleotide
agaggccuguuuuggggcu

SEQ ID NO: 86292 - RNA, 19 nt, Artificial Sequence
  Description of Artificial Sequence: Synthetic oligonucleotide
uuucccaggagaaagauga

SEQ ID NO: 86293 - RNA, 19 nt, Artificial Sequence
  Description of Artificial Sequence: Synthetic oligonucleotide
aaacugaaagcauaugaau

SEQ ID NO: 86294 - RNA, 19 nt, Artificial Sequence
  Description of Artificial Sequence: Synthetic oligonucleotide
uaauuucacuuaauaauuu

SEQ ID NO: 86295 - RNA, 19 nt, Artificial Sequence
  Description of Artificial Sequence: Synthetic oligonucleotide
uuuaccuaaucuccacuuu

SEQ ID NO: 86296 - RNA, 19 nt, Artificial Sequence
  Description of Artificial Sequence: Synthetic oligonucleotide
uuuucauagguuacuaccu

SEQ ID NO: 86297 - RNA, 19 nt, Artificial Sequence
  Description of Artificial Sequence: Synthetic oligonucleotide
uauacaauguauguaauuu

SEQ ID NO: 86298 - RNA, 19 nt, Artificial Sequence
  Description of Artificial Sequence: Synthetic oligonucleotide
uguuuccccuagcuuacug

SEQ ID NO: 86299 - RNA, 19 nt, Artificial Sequence
  Description of Artificial Sequence: Synthetic oligonucleotide
gauaaaccuaauauucaau

SEQ ID NO: 86300 - RNA, 19 nt, Artificial Sequence
  Description of Artificial Sequence: Synthetic oligonucleotide
ugaacuuccauuuguauuc

SEQ ID NO: 86301 - RNA, 19 nt, Artificial Sequence
  Description of Artificial Sequence: Synthetic oligonucleotide
caaauuugugucauaccag

SEQ ID NO: 86302 - RNA, 19 nt, Artificial Sequence
  Description of Artificial Sequence: Synthetic oligonucleotide
gaaagcucuacauuugcag

SEQ ID NO: 86303 - RNA, 19 nt, Artificial Sequence
  Description of Artificial Sequence: Synthetic oligonucleotide
gauguucaaauauuguaaa

SEQ ID NO: 86304 - RNA, 19 nt, Artificial Sequence
  Description of Artificial Sequence: Synthetic oligonucleotide
aacuuuggugcauuguuau

SEQ ID NO: 86305 - RNA, 19 nt, Artificial Sequence
  Description of Artificial Sequence: Synthetic oligonucleotide
uuuaauagcugugaucagu

SEQ ID NO: 86306 - RNA, 19 nt, Artificial Sequence
  Description of Artificial Sequence: Synthetic oligonucleotide
ugauuuucaaaccucaaau

SEQ ID NO: 86307 - RNA, 19 nt, Artificial Sequence
  Description of Artificial Sequence: Synthetic oligonucleotide
uauaguauauuaacaaauu

SEQ ID NO: 86308 - RNA, 25 nt, Artificial Sequence
  Description of Artificial Sequence: Synthetic oligonucleotide
gaaacgucccgugugggaggggcgg

SEQ ID NO: 86309 - RNA, 25 nt, Artificial Sequence
  Description of Artificial Sequence: Synthetic oligonucleotide
ggucugggugcggcugccgcaugac

SEQ ID NO: 86310 - RNA, 25 nt, Artificial Sequence
  Description of Artificial Sequence: Synthetic oligonucleotide
cucgugguucggaggcccacguggc

SEQ ID NO: 86311 - RNA, 25 nt, Artificial Sequence
  Description of Artificial Sequence: Synthetic oligonucleotide
ccggggcggggacucaggcgccugg

SEQ ID NO: 86312 - RNA, 25 nt, Artificial Sequence
  Description of Artificial Sequence: Synthetic oligonucleotide
gcagccgacugauuacguagcgggc

SEQ ID NO: 86313 - RNA, 25 nt, Artificial Sequence
  Description of Artificial Sequence: Synthetic oligonucleotide
cggggccggaagugccgcuccuugg

SEQ ID NO: 86314 - RNA, 25 nt, Artificial Sequence
  Description of Artificial Sequence: Synthetic oligonucleotide
gugggggcuguucauggcgguuccg

SEQ ID NO: 86315 - RNA, 25 nt, Artificial Sequence
  Description of Artificial Sequence: Synthetic oligonucleotide
ggggucuccaacauuuuucccgguc

SEQ ID NO: 86316 - RNA, 25 nt, Artificial Sequence
  Description of Artificial Sequence: Synthetic oligonucleotide
cugugguccuaaaucuguccaaagc

SEQ ID NO: 86317 - RNA, 25 nt, Artificial Sequence
  Description of Artificial Sequence: Synthetic oligonucleotide
cagaggcaguggagcuugagguucu

SEQ ID NO: 86318 - RNA, 25 nt, Artificial Sequence
  Description of Artificial Sequence: Synthetic oligonucleotide
uugcuggugugaaaugacugaguac

SEQ ID NO: 86319 - RNA, 25 nt, Artificial Sequence
  Description of Artificial Sequence: Synthetic oligonucleotide
caaacugguggugguuggagcaggu

SEQ ID NO: 86320 - RNA, 25 nt, Artificial Sequence
  Description of Artificial Sequence: Synthetic oligonucleotide
ugguguugggaaaagcgcacugaca

SEQ ID NO: 86321 - RNA, 25 nt, Artificial Sequence
  Description of Artificial Sequence: Synthetic oligonucleotide
aauccagcuaauccagaaccacuuu

SEQ ID NO: 86322 - RNA, 25 nt, Artificial Sequence
  Description of Artificial Sequence: Synthetic oligonucleotide
uguagaugaauaugaucccaccaua

SEQ ID NO: 86323 - RNA, 25 nt, Artificial Sequence
  Description of Artificial Sequence: Synthetic oligonucleotide
agaggauucuuacagaaaacaagug

SEQ ID NO: 86324 - RNA, 25 nt, Artificial Sequence
  Description of Artificial Sequence: Synthetic oligonucleotide
gguuauagauggugaaaccuguuug

SEQ ID NO: 86325 - RNA, 25 nt, Artificial Sequence
  Description of Artificial Sequence: Synthetic oligonucleotide
guuggacauacuggauacagcugga

SEQ ID NO: 86326 - RNA, 25 nt, Artificial Sequence
  Description of Artificial Sequence: Synthetic oligonucleotide
acaagaagaguacagugccaugaga

SEQ ID NO: 86327 - RNA, 25 nt, Artificial Sequence
  Description of Artificial Sequence: Synthetic oligonucleotide
agaccaauacaugaggacaggcgaa

SEQ ID NO: 86328 - RNA, 25 nt, Artificial Sequence
  Description of Artificial Sequence: Synthetic oligonucleotide
aggcuuccucuguguauuugccauc

SEQ ID NO: 86329 - RNA, 25 nt, Artificial Sequence
  Description of Artificial Sequence: Synthetic oligonucleotide
caauaauagcaagucauuugcggau

SEQ ID NO: 86330 - RNA, 25 nt, Artificial Sequence
  Description of Artificial Sequence: Synthetic oligonucleotide
uauuaaccucuacagggagcagauu

SEQ ID NO: 86331 - RNA, 25 nt, Artificial Sequence
  Description of Artificial Sequence: Synthetic oligonucleotide
uaagcgaguaaaagacucggaugau

SEQ ID NO: 86332 - RNA, 25 nt, Artificial Sequence
  Description of Artificial Sequence: Synthetic oligonucleotide
uguaccuauggugcuagugggaaac

SEQ ID NO: 86333 - RNA, 25 nt, Artificial Sequence
  Description of Artificial Sequence: Synthetic oligonucleotide
caagugugauuugccaacaaggaca

SEQ ID NO: 86334 - RNA, 25 nt, Artificial Sequence
  Description of Artificial Sequence: Synthetic oligonucleotide
aguugauacaaaacaagcccacgaa

SEQ ID NO: 86335 - RNA, 25 nt, Artificial Sequence
  Description of Artificial Sequence: Synthetic oligonucleotide
acuggccaagaguuacgggauucca

SEQ ID NO: 86336 - RNA, 25 nt, Artificial Sequence
  Description of Artificial Sequence: Synthetic oligonucleotide
auucauugaaaccucagccaagacc

SEQ ID NO: 86337 - RNA, 25 nt, Artificial Sequence
  Description of Artificial Sequence: Synthetic oligonucleotide
cagacaggguguugaagaugcuuuu

SEQ ID NO: 86338 - RNA, 25 nt, Artificial Sequence
  Description of Artificial Sequence: Synthetic oligonucleotide
uuacacacugguaagagaaauacgc

SEQ ID NO: 86339 - RNA, 25 nt, Artificial Sequence
  Description of Artificial Sequence: Synthetic oligonucleotide
ccaguaccgaaugaaaaaacucaac

SEQ ID NO: 86340 - RNA, 25 nt, Artificial Sequence
  Description of Artificial Sequence: Synthetic oligonucleotide
cagcagugaugaugggacucagggu

SEQ ID NO: 86341 - RNA, 25 nt, Artificial Sequence
  Description of Artificial Sequence: Synthetic oligonucleotide
uuguaugggauugccauguguggug

SEQ ID NO: 86342 - RNA, 25 nt, Artificial Sequence
  Description of Artificial Sequence: Synthetic oligonucleotide
gauguaacaagauacuuuuaaaguu

SEQ ID NO: 86343 - RNA, 25 nt, Artificial Sequence
  Description of Artificial Sequence: Synthetic oligonucleotide
uuugucagaaaagagccacuuucaa

SEQ ID NO: 86344 - RNA, 25 nt, Artificial Sequence
  Description of Artificial Sequence: Synthetic oligonucleotide
agcugcacugacacccugguccuga

SEQ ID NO: 86345 - RNA, 25 nt, Artificial Sequence
  Description of Artificial Sequence: Synthetic oligonucleotide
acuuccuggaggagaaguauuccug

SEQ ID NO: 86346 - RNA, 25 nt, Artificial Sequence
  Description of Artificial Sequence: Synthetic oligonucleotide
guugcugucuucagucucacagaga

SEQ ID NO: 86347 - RNA, 25 nt, Artificial Sequence
  Description of Artificial Sequence: Synthetic oligonucleotide
aagcuccugcuacuuccccagcucu

SEQ ID NO: 86348 - RNA, 25 nt, Artificial Sequence
  Description of Artificial Sequence: Synthetic oligonucleotide
ucaguaguuuaguacaauaaucucu

SEQ ID NO: 86349 - RNA, 25 nt, Artificial Sequence
  Description of Artificial Sequence: Synthetic oligonucleotide
uauuugagaaguucucagaauaacu

SEQ ID NO: 86350 - RNA, 25 nt, Artificial Sequence
  Description of Artificial Sequence: Synthetic oligonucleotide
uaccuccucacuuggcugucugacc

SEQ ID NO: 86351 - RNA, 25 nt, Artificial Sequence
  Description of Artificial Sequence: Synthetic oligonucleotide
cagagaaugcaccucuuguuacucc

SEQ ID NO: 86352 - RNA, 25 nt, Artificial Sequence
  Description of Artificial Sequence: Synthetic oligonucleotide
ccuguuauuuuucugcccuggguuc

SEQ ID NO: 86353 - RNA, 25 nt, Artificial Sequence
  Description of Artificial Sequence: Synthetic oligonucleotide
cuuccacagcacaaacacaccucaa

SEQ ID NO: 86354 - RNA, 25 nt, Artificial Sequence
  Description of Artificial Sequence: Synthetic oligonucleotide
acacaccucugccaccccagguuuu

SEQ ID NO: 86355 - RNA, 25 nt, Artificial Sequence
  Description of Artificial Sequence: Synthetic oligonucleotide
uucaucugaaaagcaguucaugucu

SEQ ID NO: 86356 - RNA, 25 nt, Artificial Sequence
  Description of Artificial Sequence: Synthetic oligonucleotide
ugaaacagagaaccaaaccgcaaac

SEQ ID NO: 86357 - RNA, 25 nt, Artificial Sequence
  Description of Artificial Sequence: Synthetic oligonucleotide
cgugaaauucuauugaaaacagugu

SEQ ID NO: 86358 - RNA, 25 nt, Artificial Sequence
  Description of Artificial Sequence: Synthetic oligonucleotide
ucuugagcucuaaaguagcaacugc

SEQ ID NO: 86359 - RNA, 25 nt, Artificial Sequence
  Description of Artificial Sequence: Synthetic oligonucleotide
cuguugaacuuagaacuaugccuaa

SEQ ID NO: 86360 - RNA, 25 nt, Artificial Sequence
  Description of Artificial Sequence: Synthetic oligonucleotide
auuuuuggagaaaugucauaaauua

SEQ ID NO: 86361 - RNA, 25 nt, Artificial Sequence
  Description of Artificial Sequence: Synthetic oligonucleotide
acuguuuugccaagaauauaguuau

SEQ ID NO: 86362 - RNA, 25 nt, Artificial Sequence
  Description of Artificial Sequence: Synthetic oligonucleotide
uuauugcuguuugguuuguuuauaa

SEQ ID NO: 86363 - RNA, 25 nt, Artificial Sequence
  Description of Artificial Sequence: Synthetic oligonucleotide
auguuaucggcucuauucucuaaac

SEQ ID NO: 86364 - RNA, 25 nt, Artificial Sequence
  Description of Artificial Sequence: Synthetic oligonucleotide
cuggcaucugcucuagauucauaaa

SEQ ID NO: 86365 - RNA, 25 nt, Artificial Sequence
  Description of Artificial Sequence: Synthetic oligonucleotide
auacaaaaaugaauacugaauuuug

SEQ ID NO: 86366 - RNA, 25 nt, Artificial Sequence
  Description of Artificial Sequence: Synthetic oligonucleotide
gagucuauccuagucuucacaacuu

SEQ ID NO: 86367 - RNA, 25 nt, Artificial Sequence
  Description of Artificial Sequence: Synthetic oligonucleotide
uugacguaauuaaauccaacuuuuc

SEQ ID NO: 86368 - RNA, 25 nt, Artificial Sequence
  Description of Artificial Sequence: Synthetic oligonucleotide
cacagugaagugccuuuuuccuaga

SEQ ID NO: 86369 - RNA, 25 nt, Artificial Sequence
  Description of Artificial Sequence: Synthetic oligonucleotide
aagugguuuguagacuccuuuauaa

SEQ ID NO: 86370 - RNA, 25 nt, Artificial Sequence
  Description of Artificial Sequence: Synthetic oligonucleotide
auauuucaguggaauagaugucuca

SEQ ID NO: 86371 - RNA, 25 nt, Artificial Sequence
  Description of Artificial Sequence: Synthetic oligonucleotide
aaaaauccuuaugcaugaaaugaau

SEQ ID NO: 86372 - RNA, 25 nt, Artificial Sequence
  Description of Artificial Sequence: Synthetic oligonucleotide
ugucugagauacgucugugacuuau

SEQ ID NO: 86373 - RNA, 25 nt, Artificial Sequence
  Description of Artificial Sequence: Synthetic oligonucleotide
ucuaccauugaaggaaagcuauauc

SEQ ID NO: 86374 - RNA, 25 nt, Artificial Sequence
  Description of Artificial Sequence: Synthetic oligonucleotide
cuauuugagagcagaugccauuuug

SEQ ID NO: 86375 - RNA, 25 nt, Artificial Sequence
  Description of Artificial Sequence: Synthetic oligonucleotide
guacauguaugaaauugguuuucca

SEQ ID NO: 86376 - RNA, 25 nt, Artificial Sequence
  Description of Artificial Sequence: Synthetic oligonucleotide
agaggccuguuuuggggcuuuccca

SEQ ID NO: 86377 - RNA, 25 nt, Artificial Sequence
  Description of Artificial Sequence: Synthetic oligonucleotide
aggagaaagaugaaacugaaagcau

SEQ ID NO: 86378 - RNA, 25 nt, Artificial Sequence
  Description of Artificial Sequence: Synthetic oligonucleotide
uaugaauaauuucacuuaauaauuu

SEQ ID NO: 86379 - RNA, 25 nt, Artificial Sequence
  Description of Artificial Sequence: Synthetic oligonucleotide
uuuaccuaaucuccacuuuuuucau

SEQ ID NO: 86380 - RNA, 25 nt, Artificial Sequence
  Description of Artificial Sequence: Synthetic oligonucleotide
uagguuacuaccuauacaauguaug

SEQ ID NO: 86381 - RNA, 25 nt, Artificial Sequence
  Description of Artificial Sequence: Synthetic oligonucleotide
guaauuuguuuccccuagcuuacug

SEQ ID NO: 86382 - RNA, 25 nt, Artificial Sequence
  Description of Artificial Sequence: Synthetic oligonucleotide
gauaaaccuaauauucaaugaacuu

SEQ ID NO: 86383 - RNA, 25 nt, Artificial Sequence
  Description of Artificial Sequence: Synthetic oligonucleotide
uccauuuguauucaaauuuguguca

SEQ ID NO: 86384 - RNA, 25 nt, Artificial Sequence
  Description of Artificial Sequence: Synthetic oligonucleotide
auaccagaaagcucuacauuugcag

SEQ ID NO: 86385 - RNA, 25 nt, Artificial Sequence
  Description of Artificial Sequence: Synthetic oligonucleotide
gauguucaaauauuguaaaacuuug

SEQ ID NO: 86386 - RNA, 25 nt, Artificial Sequence
  Description of Artificial Sequence: Synthetic oligonucleotide
ggugcauuguuauuuaauagcugug

SEQ ID NO: 86387 - RNA, 25 nt, Artificial Sequence
  Description of Artificial Sequence: Synthetic oligonucleotide
gaucagugauuuucaaaccucaaau

SEQ ID NO: 86388 - RNA, 25 nt, Artificial Sequence
  Description of Artificial Sequence: Synthetic oligonucleotide
cucaaauauaguauauuaacaaauu

SEQ ID NO: 86389 - DNA, 21 bp, Artificial Sequence
  Description of Artificial Sequence: Synthetic oligonucleotide
  Description of Combined DNA/RNA Molecule: Synthetic oligonucleotide
cuacacaaaucagcgauuutt

SEQ ID NO: 86390 - DNA, 21 bp, Artificial Sequence
  Description of Artificial Sequence: Synthetic oligonucleotide
  Description of Combined DNA/RNA Molecule: Synthetic oligonucleotide
aaaucgcugauuuguguagtt

SEQ ID NO: 86391 - DNA, 25 bp, Artificial Sequence
  Description of Artificial Sequence: Synthetic oligonucleotide
  Description of Combined DNA/RNA Molecule: Synthetic oligonucleotide
cuacacaaaucagcgauuuccaugt

SEQ ID NO: 86392 - RNA, 27 nt, Artificial Sequence
  Description of Artificial Sequence: Synthetic oligonucleotide
acauggaaaucgcugauuuguguaguc

SEQ ID NO: 86393 - RNA, 13 nt, Artificial Sequence
  Description of Artificial Sequence: Synthetic oligonucleotide
cuacacaaaucag

SEQ ID NO: 86394 - DNA, 11 bp, Artificial Sequence
  Description of Artificial Sequence: Synthetic oligonucleotide
  Description of Combined DNA/RNA Molecule: Synthetic oligonucleotide
gauuuccaugt

SEQ ID NO: 86395 - DNA, 21 bp, Artificial Sequence
  Description of Artificial Sequence: Synthetic oligonucleotide
  Description of Combined DNA/RNA Molecule: Synthetic oligonucleotide
ggaucuuauuucuucggagtt

SEQ ID NO: 86396 - DNA, 21 bp, Artificial Sequence
  Description of Artificial Sequence: Synthetic oligonucleotide
  Description of Combined DNA/RNA Molecule: Synthetic oligonucleotide
cuccgaagaaauaagaucctt

SEQ ID NO: 86397 - RNA, 11 nt, Artificial Sequence
  Description of Artificial Sequence: Synthetic oligonucleotide
ggaucuuauuu

SEQ ID NO: 86398 - DNA, 10 bp, Artificial Sequence
  Description of Artificial Sequence: Synthetic oligonucleotide
  Description of Combined DNA/RNA Molecule: Synthetic oligonucleotide
cuucggagtt

SEQ ID NO: 86399 - RNA, 27 nt, Artificial Sequence
  Description of Artificial Sequence: Synthetic oligonucleotide
cauugucuccgaagaaauaagauccuu

SEQ ID NO: 86400 - RNA, 8 nt, Artificial Sequence
  Description of Artificial Sequence: Synthetic oligonucleotide
  modified_base (2): LNA-G
ggaucuua

SEQ ID NO: 86401 - DNA, 17 bp, Artificial Sequence
  Description of Artificial Sequence: Synthetic oligonucleotide
  Description of Combined DNA/RNA Molecule: Synthetic oligonucleotide
uuucuucggagacaatg

SEQ ID NO: 86402 - DNA, 16 bp, Artificial Sequence
  Description of Artificial Sequence: Synthetic oligonucleotide
  Description of Combined DNA/RNA Molecule: Synthetic oligonucleotide
uucuucggagacaatg

SEQ ID NO: 86403 - DNA, 15 bp, Artificial Sequence
  Description of Artificial Sequence: Synthetic oligonucleotide
  Description of Combined DNA/RNA Molecule: Synthetic oligonucleotide
ucuucggagacaatg

SEQ ID NO: 86404 - DNA, 14 bp, Artificial Sequence
  Description of Artificial Sequence: Synthetic oligonucleotide
  Description of Combined DNA/RNA Molecule: Synthetic oligonucleotide
cuucggagacaatg

SEQ ID NO: 86405 - DNA, 13 bp, Artificial Sequence
  Description of Artificial Sequence: Synthetic oligonucleotide
  Description of Combined DNA/RNA Molecule: Synthetic oligonucleotide
uucggagacaatg

SEQ ID NO: 86406 - DNA, 12 bp, Artificial Sequence
  Description of Artificial Sequence: Synthetic oligonucleotide
  Description of Combined DNA/RNA Molecule: Synthetic oligonucleotide
ucggagacaatg

SEQ ID NO: 86407 - DNA, 11 bp, Artificial Sequence
  Description of Artificial Sequence: Synthetic oligonucleotide
  Description of Combined DNA/RNA Molecule: Synthetic oligonucleotide
cggagacaatg

SEQ ID NO: 86408 - RNA, 9 nt, Artificial Sequence
  Description of Artificial Sequence: Synthetic oligonucleotide
  modified_base (2): LNA-G
ggaucuuau

SEQ ID NO: 86409 - RNA, 10 nt, Artificial Sequence
  Description of Artificial Sequence: Synthetic oligonucleotide
  modified_base (2): LNA-G
ggaucuuauu

SEQ ID NO: 86410 - RNA, 11 nt, Artificial Sequence
  Description of Artificial Sequence: Synthetic oligonucleotide
  modified_base (2): LNA-G
ggaucuuauuu

SEQ ID NO: 86411 - RNA, 12 nt, Artificial Sequence
  Description of Artificial Sequence: Synthetic oligonucleotide
  modified_base (2): LNA-G
ggaucuuauuuc

SEQ ID NO: 86412 - RNA, 8 nt, Artificial Sequence
  Description of Artificial Sequence: Synthetic oligonucleotide
  modified_base (3): LNA-A
cuacacaa

SEQ ID NO: 86413 - DNA, 13 bp, Artificial Sequence
  Description of Artificial Sequence: Synthetic oligonucleotide
  Description of Combined DNA/RNA Molecule: Synthetic oligonucleotide
  modified_base (8): LNA-A
aucagcgauuutt

SEQ ID NO: 86414 - DNA, 12 bp, Artificial Sequence
  Description of Artificial Sequence: Synthetic oligonucleotide
  Description of Combined DNA/RNA Molecule: Synthetic oligonucleotide
  modified_base (7): LNA-A
ucagcgauuutt

SEQ ID NO: 86415 - DNA, 11 bp, Artificial Sequence
  Description of Artificial Sequence: Synthetic oligonucleotide
  Description of Combined DNA/RNA Molecule: Synthetic oligonucleotide
  modified_base (6): LNA-A
cagcgauuutt

SEQ ID NO: 86416 - DNA, 10 bp, Artificial Sequence
  Description of Artificial Sequence: Synthetic oligonucleotide
  Description of Combined DNA/RNA Molecule: Synthetic oligonucleotide
  modified_base (5): LNA-A
agcgauuutt

SEQ ID NO: 86417 - DNA, 9 bp, Artificial Sequence
  Description of Artificial Sequence: Synthetic oligonucleotide
  Description of Combined DNA/RNA Molecule: Synthetic oligonucleotide
  modified_base (4): LNA-A
gcgauuutt

SEQ ID NO: 86418 - DNA, 8 bp, Artificial Sequence
  Description of Artificial Sequence: Synthetic oligonucleotide
  Description of Combined DNA/RNA Molecule: Synthetic oligonucleotide
  modified_base (3): LNA-A
cgauuutt

SEQ ID NO: 86419 - DNA, 7 bp, Artificial Sequence
  Description of Artificial Sequence: Synthetic oligonucleotide
  Description of Combined DNA/RNA Molecule: Synthetic oligonucleotide
  modified_base (2): LNA-A
gauuutt

SEQ ID NO: 86420 - RNA, 9 nt, Artificial Sequence
  Description of Artificial Sequence: Synthetic oligonucleotide
  modified_base (3): LNA-A
cuacacaaa

SEQ ID NO: 86421 - RNA, 10 nt, Artificial Sequence
  Description of Artificial Sequence: Synthetic oligonucleotide
  modified_base (3): LNA-A
cuacacaaau

SEQ ID NO: 86422 - RNA, 11 nt, Artificial Sequence
  Description of Artificial Sequence: Synthetic oligonucleotide
  modified_base (3): LNA-A
cuacacaaauc

SEQ ID NO: 86423 - RNA, 12 nt, Artificial Sequence
  Description of Artificial Sequence: Synthetic oligonucleotide
  modified_base (3): LNA-A
cuacacaaauca

SEQ ID NO: 86424 - RNA, 13 nt, Artificial Sequence
  Description of Artificial Sequence: Synthetic oligonucleotide
  modified_base (3): LNA-A
cuacacaaaucag

SEQ ID NO: 86425 - RNA, 14 nt, Artificial Sequence
  Description of Artificial Sequence: Synthetic oligonucleotide
  modified_base (3): LNA-A
cuacacaaaucagc

SEQ ID NO: 86426 - RNA, 13 nt, Artificial Sequence
  Description of Artificial Sequence: Synthetic oligonucleotide
  modified_base (2): LNA-G
ggaucuuauuucu

SEQ ID NO: 86427 - RNA, 14 nt, Artificial Sequence
  Description of Artificial Sequence: Synthetic oligonucleotide
  modified_base (2): LNA-G
ggaucuuauuucuu

SEQ ID NO: 86428 - RNA, 8 nt, Artificial Sequence
  Description of Artificial Sequence: Synthetic oligonucleotide
  modified_base (2): LNA-G
  modified_base (8): LNA-A
ggaucuua

SEQ ID NO: 86429 - RNA, 9 nt, Artificial Sequence
  Description of Artificial Sequence: Synthetic oligonucleotide
  modified_base (2): LNA-G
  modified_base (9): LNA-U
ggaucuuau

SEQ ID NO: 86430 - RNA, 10 nt, Artificial Sequence
  Description of Artificial Sequence: Synthetic oligonucleotide
  modified_base (2): LNA-G
  modified_base (10): LNA-U
ggaucuuauu

SEQ ID NO: 86431 - RNA, 11 nt, Artificial Sequence
  Description of Artificial Sequence: Synthetic oligonucleotide
  modified_base (2): LNA-G
  modified_base (11): LNA-U
ggaucuuauuu

SEQ ID NO: 86432 - RNA, 12 nt, Artificial Sequence
  Description of Artificial Sequence: Synthetic oligonucleotide
  modified_base (2): LNA-G
  modified_base (12): LNA-C
ggaucuuauuuc

SEQ ID NO: 86433 - RNA, 13 nt, Artificial Sequence
  Description of Artificial Sequence: Synthetic oligonucleotide
  modified_base (2): LNA-G
  modified_base (13): LNA-U
ggaucuuauuucu

SEQ ID NO: 86434 - RNA, 14 nt, Artificial Sequence
  Description of Artificial Sequence: Synthetic oligonucleotide
  modified_base (2): LNA-G
  modified_base (14): LNA-U
ggaucuuauuucuu

SEQ ID NO: 86435 - DNA, 13 bp, Artificial Sequence
  Description of Artificial Sequence: Synthetic oligonucleotide
  Description of Combined DNA/RNA Molecule: Synthetic oligonucleotide
  modified_base (8): LNA-G
uuucuucggagtt

SEQ ID NO: 86436 - DNA, 12 bp, Artificial Sequence
  Description of Artificial Sequence: Synthetic oligonucleotide
  Description of Combined DNA/RNA Molecule: Synthetic oligonucleotide
  modified_base (7): LNA-G
uucuucggagtt

SEQ ID NO: 86437 - DNA, 11 bp, Artificial Sequence
  Description of Artificial Sequence: Synthetic oligonucleotide
  Description of Combined DNA/RNA Molecule: Synthetic oligonucleotide
  modified_base (6): LNA-G
ucuucggagtt

SEQ ID NO: 86438 - DNA, 10 bp, Artificial Sequence
  Description of Artificial Sequence: Synthetic oligonucleotide
  Description of Combined DNA/RNA Molecule: Synthetic oligonucleotide
  modified_base (5): LNA-G
cuucggagtt

SEQ ID NO: 86439 - DNA, 9 bp, Artificial Sequence
  Description of Artificial Sequence: Synthetic oligonucleotide
  Description of Combined DNA/RNA Molecule: Synthetic oligonucleotide
  modified_base (4): LNA-G
uucggagtt

SEQ ID NO: 86440 - DNA, 8 bp, Artificial Sequence
  Description of Artificial Sequence: Synthetic oligonucleotide
  Description of Combined DNA/RNA Molecule: Synthetic oligonucleotide
  modified_base (3): LNA-G
ucggagtt

SEQ ID NO: 86441 - DNA, 7 bp, Artificial Sequence
  Description of Artificial Sequence: Synthetic oligonucleotide
  Description of Combined DNA/RNA Molecule: Synthetic oligonucleotide
  modified_base (2): LNA-G
cggagtt

SEQ ID NO: 86442 - DNA, 13 bp, Artificial Sequence
  Description of Artificial Sequence: Synthetic oligonucleotide
  Description of Combined DNA/RNA Molecule: Synthetic oligonucleotide
  modified_base (1): LNA-U
  modified_base (8): LNA-G
uuucuucggagtt

SEQ ID NO: 86443 - DNA, 12 bp, Artificial Sequence
  Description of Artificial Sequence: Synthetic oligonucleotide
  Description of Combined DNA/RNA Molecule: Synthetic oligonucleotide
  modified_base (1): LNA-U
  modified_base (7): LNA-G
uucuucggagtt

SEQ ID NO: 86444 - DNA, 11 bp, Artificial Sequence
  Description of Artificial Sequence: Synthetic oligonucleotide
  Description of Combined DNA/RNA Molecule: Synthetic oligonucleotide
  modified_base (1): LNA-U
  modified_base (6): LNA-G
ucuucggagtt

SEQ ID NO: 86445 - DNA, 10 bp, Artificial Sequence
  Description of Artificial Sequence: Synthetic oligonucleotide
  Description of Combined DNA/RNA Molecule: Synthetic oligonucleotide
  modified_base (1): LNA-C
  modified_base (5): LNA-G
cuucggagtt

SEQ ID NO: 86446 - DNA, 9 bp, Artificial Sequence
  Description of Artificial Sequence: Synthetic oligonucleotide
  Description of Combined DNA/RNA Molecule: Synthetic oligonucleotide
  modified_base (1): LNA-U
  modified_base (4): LNA-G
uucggagtt

SEQ ID NO: 86447 - DNA, 8 bp, Artificial Sequence
  Description of Artificial Sequence: Synthetic oligonucleotide
  Description of Combined DNA/RNA Molecule: Synthetic oligonucleotide
  modified_base (1): LNA-U
  modified_base (3): LNA-G
ucggagtt

SEQ ID NO: 86448 - DNA, 7 bp, Artificial Sequence
  Description of Artificial Sequence: Synthetic oligonucleotide
  Description of Combined DNA/RNA Molecule: Synthetic oligonucleotide
  modified_base (1): LNA-C
  modified_base (2): LNA-G
cggagtt

SEQ ID NO: 86449 - DNA, 21 bp, Artificial Sequence
  Description of Artificial Sequence: Synthetic oligonucleotide
  Description of Combined DNA/RNA Molecule: Synthetic oligonucleotide
  modified_base (2): LNA-G
  modified_base (16): LNA-G
ggaucuuauuucuucggagtt

SEQ ID NO: 86450 - DNA, 25 bp, Artificial Sequence
  Description of Artificial Sequence: Synthetic oligonucleotide
  Description of Combined DNA/RNA Molecule: Synthetic oligonucleotide
ggaucuuauuucuucggagacaatg

SEQ ID NO: 86451 - RNA, 25 nt, Artificial Sequence
  Description of Artificial Sequence: Synthetic oligonucleotide
guauuuugaugaggaguucacggcc

SEQ ID NO: 86452 - RNA, 25 nt, Artificial Sequence
  Description of Artificial Sequence: Synthetic oligonucleotide
ggcccagaugaucaccaucacacca

SEQ ID NO: 86453 - RNA, 25 nt, Artificial Sequence
  Description of Artificial Sequence: Synthetic oligonucleotide
gggaagaaaacuauccugcggguuu

SEQ ID NO: 86454 - RNA, 25 nt, Artificial Sequence
  Description of Artificial Sequence: Synthetic oligonucleotide
guuuuaauuuauuucauccaguuug

SEQ ID NO: 86455 - RNA, 25 nt, Artificial Sequence
  Description of Artificial Sequence: Synthetic oligonucleotide
acguagggaaauguuaaggacuucu

SEQ ID NO: 86456 - RNA, 25 nt, Artificial Sequence
  Description of Artificial Sequence: Synthetic oligonucleotide
ccaggguuuacccagugggacagag

SEQ ID NO: 86457 - RNA, 25 nt, Artificial Sequence
  Description of Artificial Sequence: Synthetic oligonucleotide
agcaagguuuaaauuuguuauugug

SEQ ID NO: 86458 - RNA, 25 nt, Artificial Sequence
  Description of Artificial Sequence: Synthetic oligonucleotide
uguauuauguuguucaaaugcauuu

SEQ ID NO: 86459 - RNA, 25 nt, Artificial Sequence
  Description of Artificial Sequence: Synthetic oligonucleotide
uuuuaaucuuugugacaggaaagcc

SEQ ID NO: 86460 - RNA, 25 nt, Artificial Sequence
  Description of Artificial Sequence: Synthetic oligonucleotide
uuaaucuuugugacaggaaagcccu

SEQ ID NO: 86461 - RNA, 25 nt, Artificial Sequence
  Description of Artificial Sequence: Synthetic oligonucleotide
gcugcuuaugucucccagcauggcc

SEQ ID NO: 86462 - RNA, 25 nt, Artificial Sequence
  Description of Artificial Sequence: Synthetic oligonucleotide
aaguguuucagaagcuucucccuga

SEQ ID NO: 86463 - RNA, 25 nt, Artificial Sequence
  Description of Artificial Sequence: Synthetic oligonucleotide
gaccaucaauaaggaagaagcccuu

SEQ ID NO: 86464 - RNA, 25 nt, Artificial Sequence
  Description of Artificial Sequence: Synthetic oligonucleotide
ccaucaauaaggaagaagcccuuca

SEQ ID NO: 86465 - RNA, 25 nt, Artificial Sequence
  Description of Artificial Sequence: Synthetic oligonucleotide
ucaauaaggaagaagcccuucagcg

SEQ ID NO: 86466 - RNA, 25 nt, Artificial Sequence
  Description of Artificial Sequence: Synthetic oligonucleotide
aauaaggaagaagcccuucagcggc

SEQ ID NO: 86467 - RNA, 25 nt, Artificial Sequence
  Description of Artificial Sequence: Synthetic oligonucleotide
aggaagaagcccuucagcggccagu

SEQ ID NO: 86468 - RNA, 25 nt, Artificial Sequence
  Description of Artificial Sequence: Synthetic oligonucleotide
gcauaacuaaaggugaaaagcuccg

SEQ ID NO: 86469 - RNA, 25 nt, Artificial Sequence
  Description of Artificial Sequence: Synthetic oligonucleotide
cauaacuaaaggugaaaagcuccgg

SEQ ID NO: 86470 - RNA, 25 nt, Artificial Sequence
  Description of Artificial Sequence: Synthetic oligonucleotide
cuacaucacgccagucaacagucug

SEQ ID NO: 86471 - RNA, 25 nt, Artificial Sequence
  Description of Artificial Sequence: Synthetic oligonucleotide
acuggauuuaagcagaguucaaaag

SEQ ID NO: 86472 - RNA, 25 nt, Artificial Sequence
  Description of Artificial Sequence: Synthetic oligonucleotide
cuggauuuaagcagaguucaaaagc

SEQ ID NO: 86473 - RNA, 25 nt, Artificial Sequence
  Description of Artificial Sequence: Synthetic oligonucleotide
gauuuaagcagaguucaaaagcccu

SEQ ID NO: 86474 - RNA, 25 nt, Artificial Sequence
  Description of Artificial Sequence: Synthetic oligonucleotide
auuuaagcagaguucaaaagcccuu

SEQ ID NO: 86475 - RNA, 25 nt, Artificial Sequence
  Description of Artificial Sequence: Synthetic oligonucleotide
uuaagcagaguucaaaagcccuuca

SEQ ID NO: 86476 - RNA, 25 nt, Artificial Sequence
  Description of Artificial Sequence: Synthetic oligonucleotide
uaagcagaguucaaaagcccuucag

SEQ ID NO: 86477 - RNA, 25 nt, Artificial Sequence
  Description of Artificial Sequence: Synthetic oligonucleotide
agcagaguucaaaagcccuucagcg

SEQ ID NO: 86478 - RNA, 25 nt, Artificial Sequence
  Description of Artificial Sequence: Synthetic oligonucleotide
cucagggucugagugaagccgcucg

SEQ ID NO: 86479 - RNA, 25 nt, Artificial Sequence
  Description of Artificial Sequence: Synthetic oligonucleotide
caagcaacuacaucacgccagucaa

SEQ ID NO: 86480 - RNA, 25 nt, Artificial Sequence
  Description of Artificial Sequence: Synthetic oligonucleotide
aucaauggcagcuucuuggugcgug

SEQ ID NO: 86481 - RNA, 25 nt, Artificial Sequence
  Description of Artificial Sequence: Synthetic oligonucleotide
uuccagcccacauuggauucaucag

SEQ ID NO: 86482 - RNA, 25 nt, Artificial Sequence
  Description of Artificial Sequence: Synthetic oligonucleotide
cagcugagaauguggaauaccuaag

SEQ ID NO: 86483 - RNA, 25 nt, Artificial Sequence
  Description of Artificial Sequence: Synthetic oligonucleotide
aacguaucuccuaauuugaggcuca

SEQ ID NO: 86484 - RNA, 25 nt, Artificial Sequence
  Description of Artificial Sequence: Synthetic oligonucleotide
ccuaaaauaauuucucuacaauugg

SEQ ID NO: 86485 - RNA, 25 nt, Artificial Sequence
  Description of Artificial Sequence: Synthetic oligonucleotide
uggaagauucagcuaguuaggagcc

SEQ ID NO: 86486 - RNA, 25 nt, Artificial Sequence
  Description of Artificial Sequence: Synthetic oligonucleotide
uuaaacucuccuagucaauauccac

SEQ ID NO: 86487 - RNA, 25 nt, Artificial Sequence
  Description of Artificial Sequence: Synthetic oligonucleotide
cagccuacaguuauguucagucaca

SEQ ID NO: 86488 - RNA, 25 nt, Artificial Sequence
  Description of Artificial Sequence: Synthetic oligonucleotide
guuauguucagucacacacacauac

SEQ ID NO: 86489 - RNA, 25 nt, Artificial Sequence
  Description of Artificial Sequence: Synthetic oligonucleotide
cacauacaaaauguuccuuuugcuu

SEQ ID NO: 86490 - RNA, 25 nt, Artificial Sequence
  Description of Artificial Sequence: Synthetic oligonucleotide
uccuuuugcuuuuaaaguaauuuuu

SEQ ID NO: 86491 - RNA, 25 nt, Artificial Sequence
  Description of Artificial Sequence: Synthetic oligonucleotide
ugaccugugaagcaacagucaaugg

SEQ ID NO: 86492 - RNA, 25 nt, Artificial Sequence
  Description of Artificial Sequence: Synthetic oligonucleotide
cuaucucacacaucgacaaaccaau

SEQ ID NO: 86493 - RNA, 25 nt, Artificial Sequence
  Description of Artificial Sequence: Synthetic oligonucleotide
uguccucaauuguacugcuaccacu

SEQ ID NO: 86494 - RNA, 25 nt, Artificial Sequence
  Description of Artificial Sequence: Synthetic oligonucleotide
aaaccguagcuggcaagcggucuua

SEQ ID NO: 86495 - RNA, 25 nt, Artificial Sequence
  Description of Artificial Sequence: Synthetic oligonucleotide
uagcuggcaagcggucuuaccggcu

SEQ ID NO: 86496 - RNA, 25 nt, Artificial Sequence
  Description of Artificial Sequence: Synthetic oligonucleotide
uuguaugguuaaaagauggguuacc

SEQ ID NO: 86497 - RNA, 25 nt, Artificial Sequence
  Description of Artificial Sequence: Synthetic oligonucleotide
ugguuaaaagauggguuaccugcga

SEQ ID NO: 86498 - RNA, 25 nt, Artificial Sequence
  Description of Artificial Sequence: Synthetic oligonucleotide
cagggaauuauacaaucuugcugag

SEQ ID NO: 86499 - RNA, 25 nt, Artificial Sequence
  Description of Artificial Sequence: Synthetic oligonucleotide
acaaucuugcugagcauaaaacagu

SEQ ID NO: 86500 - RNA, 25 nt, Artificial Sequence
  Description of Artificial Sequence: Synthetic oligonucleotide
ccaauaaugaagaguccuuuauccu

SEQ ID NO: 86501 - RNA, 25 nt, Artificial Sequence
  Description of Artificial Sequence: Synthetic oligonucleotide
acuuuggauguuccaacgcaaguug

SEQ ID NO: 86502 - RNA, 25 nt, Artificial Sequence
  Description of Artificial Sequence: Synthetic oligonucleotide
aaugcuuccacuaaacugaaaccau

SEQ ID NO: 86503 - RNA, 25 nt, Artificial Sequence
  Description of Artificial Sequence: Synthetic oligonucleotide
gagaaaguuugacuuuguuaaauau

SEQ ID NO: 86504 - RNA, 25 nt, Artificial Sequence
  Description of Artificial Sequence: Synthetic oligonucleotide
aaagaacuacuguauauuaaaaguu

SEQ ID NO: 86505 - RNA, 25 nt, Artificial Sequence
  Description of Artificial Sequence: Synthetic oligonucleotide
uuagaaauacggguuuugacuuaac

SEQ ID NO: 86506 - RNA, 25 nt, Artificial Sequence
  Description of Artificial Sequence: Synthetic oligonucleotide
aacauggguacagcaaacucagcac

SEQ ID NO: 86507 - RNA, 25 nt, Artificial Sequence
  Description of Artificial Sequence: Synthetic oligonucleotide
aaagacacagaagaugcugaccuca

SEQ ID NO: 86508 - RNA, 25 nt, Artificial Sequence
  Description of Artificial Sequence: Synthetic oligonucleotide
uaguagggagguuuauucagaucgc

SEQ ID NO: 86509 - RNA, 25 nt, Artificial Sequence
  Description of Artificial Sequence: Synthetic oligonucleotide
gccuucugcagcaggguucugggau

SEQ ID NO: 86510 - RNA, 25 nt, Artificial Sequence
  Description of Artificial Sequence: Synthetic oligonucleotide
ggucugguacauauuggaaauuaug

SEQ ID NO: 86511 - RNA, 25 nt, Artificial Sequence
  Description of Artificial Sequence: Synthetic oligonucleotide
cuaguccuuccgauggaagcacuag

SEQ ID NO: 86512 - RNA, 25 nt, Artificial Sequence
  Description of Artificial Sequence: Synthetic oligonucleotide
ccagugaauauuguuuuuaugugga

SEQ ID NO: 86513 - RNA, 25 nt, Artificial Sequence
  Description of Artificial Sequence: Synthetic oligonucleotide
augaauucaaguuggaauugguaga

SEQ ID NO: 86514 - RNA, 25 nt, Artificial Sequence
  Description of Artificial Sequence: Synthetic oligonucleotide
caggacacagauuuagacuuggaga

SEQ ID NO: 86515 - RNA, 25 nt, Artificial Sequence
  Description of Artificial Sequence: Synthetic oligonucleotide
cucaaagcacaguuacaguauucca

SEQ ID NO: 86516 - RNA, 25 nt, Artificial Sequence
  Description of Artificial Sequence: Synthetic oligonucleotide
accacugccaccacugaugaauuaa

SEQ ID NO: 86517 - RNA, 25 nt, Artificial Sequence
  Description of Artificial Sequence: Synthetic oligonucleotide
gaaacuacuagugccacaucaucac

SEQ ID NO: 86518 - RNA, 25 nt, Artificial Sequence
  Description of Artificial Sequence: Synthetic oligonucleotide
aagucggacagccucaccaaacaga

SEQ ID NO: 86519 - RNA, 25 nt, Artificial Sequence
  Description of Artificial Sequence: Synthetic oligonucleotide
gaaagcgaaaaauggaacaugaugg

SEQ ID NO: 86520 - RNA, 25 nt, Artificial Sequence
  Description of Artificial Sequence: Synthetic oligonucleotide
cccucugauuuagcauguagacugc

SEQ ID NO: 86521 - RNA, 25 nt, Artificial Sequence
  Description of Artificial Sequence: Synthetic oligonucleotide
ugagcuauuuaaggaucuauuuaug

SEQ ID NO: 86522 - RNA, 25 nt, Artificial Sequence
  Description of Artificial Sequence: Synthetic oligonucleotide
aaaaggugaaaaagcacuauuauca

SEQ ID NO: 86523 - RNA, 25 nt, Artificial Sequence
  Description of Artificial Sequence: Synthetic oligonucleotide
gaaaaagcacuauuaucaguucugc

SEQ ID NO: 86524 - RNA, 25 nt, Artificial Sequence
  Description of Artificial Sequence: Synthetic oligonucleotide
ggcugaaaagaaagauuaaaccuac

SEQ ID NO: 86525 - RNA, 25 nt, Artificial Sequence
  Description of Artificial Sequence: Synthetic oligonucleotide
uaaacccuuauaauaaaauccuucu

SEQ ID NO: 86526 - RNA, 25 nt, Artificial Sequence
  Description of Artificial Sequence: Synthetic oligonucleotide
cauacuauuagccaaugcuguagac

SEQ ID NO: 86527 - RNA, 25 nt, Artificial Sequence
  Description of Artificial Sequence: Synthetic oligonucleotide
gacagaagcauuuugauaggaauag

SEQ ID NO: 86528 - RNA, 25 nt, Artificial Sequence
  Description of Artificial Sequence: Synthetic oligonucleotide
agagcaaauaagauaauggcccuga

SEQ ID NO: 86529 - RNA, 25 nt, Artificial Sequence
  Description of Artificial Sequence: Synthetic oligonucleotide
ccaacauuuuucucuuccucaagca

SEQ ID NO: 86530 - RNA, 25 nt, Artificial Sequence
  Description of Artificial Sequence: Synthetic oligonucleotide
uuaaguaugagaaaaguucagccca

SEQ ID NO: 86531 - RNA, 25 nt, Artificial Sequence
  Description of Artificial Sequence: Synthetic oligonucleotide
caggaauaaagauggcugcugaacc

SEQ ID NO: 86532 - RNA, 25 nt, Artificial Sequence
  Description of Artificial Sequence: Synthetic oligonucleotide
aauuugaaugaccaaguucucuuca

SEQ ID NO: 86533 - RNA, 25 nt, Artificial Sequence
  Description of Artificial Sequence: Synthetic oligonucleotide
auguauaaagauagccagccuagag

SEQ ID NO: 86534 - RNA, 25 nt, Artificial Sequence
  Description of Artificial Sequence: Synthetic oligonucleotide
ggcuguaacuaucucugugaagugu

SEQ ID NO: 86535 - RNA, 25 nt, Artificial Sequence
  Description of Artificial Sequence: Synthetic oligonucleotide
ucugugaagugugagaaaauuucaa

SEQ ID NO: 86536 - RNA, 25 nt, Artificial Sequence
  Description of Artificial Sequence: Synthetic oligonucleotide
ccuuuaaggaaaugaauccuccuga

SEQ ID NO: 86537 - RNA, 25 nt, Artificial Sequence
  Description of Artificial Sequence: Synthetic oligonucleotide
aaggauacaaaaagugacaucauau

SEQ ID NO: 86538 - RNA, 25 nt, Artificial Sequence
  Description of Artificial Sequence: Synthetic oligonucleotide
agaugcaauuugaaucuucaucaua

SEQ ID NO: 86539 - RNA, 25 nt, Artificial Sequence
  Description of Artificial Sequence: Synthetic oligonucleotide
guucaaaacgaagacuagcuauuaa

SEQ ID NO: 86540 - RNA, 25 nt, Artificial Sequence
  Description of Artificial Sequence: Synthetic oligonucleotide
gugaaaccucaucucuacuaaaaau

SEQ ID NO: 86541 - RNA, 25 nt, Artificial Sequence
  Description of Artificial Sequence: Synthetic oligonucleotide
acgaaagagaagcucuaucucgccu

SEQ ID NO: 86542 - RNA, 25 nt, Artificial Sequence
  Description of Artificial Sequence: Synthetic oligonucleotide
cuccacaagcgccuucgguccaguu

SEQ ID NO: 86543 - RNA, 25 nt, Artificial Sequence
  Description of Artificial Sequence: Synthetic oligonucleotide
gagaagauuccaaagauguagccgc

SEQ ID NO: 86544 - RNA, 25 nt, Artificial Sequence
  Description of Artificial Sequence: Synthetic oligonucleotide
aaucuggauucaaugaggagacuug

SEQ ID NO: 86545 - RNA, 25 nt, Artificial Sequence
  Description of Artificial Sequence: Synthetic oligonucleotide
agaacagauuugagaguagugagga

SEQ ID NO: 86546 - RNA, 25 nt, Artificial Sequence
  Description of Artificial Sequence: Synthetic oligonucleotide
ccagagcugugcagaugaguacaaa

SEQ ID NO: 86547 - RNA, 25 nt, Artificial Sequence
  Description of Artificial Sequence: Synthetic oligonucleotide
ccucagauuguuguuguuaaugggc

SEQ ID NO: 86548 - RNA, 25 nt, Artificial Sequence
  Description of Artificial Sequence: Synthetic oligonucleotide
cuauuuuaauuauuuuuaauuuauu

SEQ ID NO: 86549 - RNA, 25 nt, Artificial Sequence
  Description of Artificial Sequence: Synthetic oligonucleotide
uuuaauuuauuaauauuuaaauaug

SEQ ID NO: 86550 - RNA, 25 nt, Artificial Sequence
  Description of Artificial Sequence: Synthetic oligonucleotide
augcaguuugaauauccuuuguuuc

SEQ ID NO: 86551 - RNA, 25 nt, Artificial Sequence
  Description of Artificial Sequence: Synthetic oligonucleotide
caugcugcuggcgucuaaguguuug

SEQ ID NO: 86552 - RNA, 25 nt, Artificial Sequence
  Description of Artificial Sequence: Synthetic oligonucleotide
agaugugcauuucaccugugacaaa

SEQ ID NO: 86553 - RNA, 25 nt, Artificial Sequence
  Description of Artificial Sequence: Synthetic oligonucleotide
ucaaaaccugugccaggcugaauua

SEQ ID NO: 86554 - RNA, 25 nt, Artificial Sequence
  Description of Artificial Sequence: Synthetic oligonucleotide
gaauguggguagucauucuuacaau

SEQ ID NO: 86555 - RNA, 25 nt, Artificial Sequence
  Description of Artificial Sequence: Synthetic oligonucleotide
auguggguagucauucuuacaauug

SEQ ID NO: 86556 - RNA, 25 nt, Artificial Sequence
  Description of Artificial Sequence: Synthetic oligonucleotide
ugaaaaugagcaucagagaguguac

SEQ ID NO: 86557 - RNA, 25 nt, Artificial Sequence
  Description of Artificial Sequence: Synthetic oligonucleotide
uugcuuuucauguagaacucagcag

SEQ ID NO: 86558 - RNA, 25 nt, Artificial Sequence
  Description of Artificial Sequence: Synthetic oligonucleotide
uguauuucuauauuuauuuucagua

SEQ ID NO: 86559 - RNA, 25 nt, Artificial Sequence
  Description of Artificial Sequence: Synthetic oligonucleotide
uuugauuaauguuucuuaaauggaa

SEQ ID NO: 86560 - RNA, 25 nt, Artificial Sequence
  Description of Artificial Sequence: Synthetic oligonucleotide
caacguguauagugccuaaaauugu

SEQ ID NO: 86561 - RNA, 25 nt, Artificial Sequence
  Description of Artificial Sequence: Synthetic oligonucleotide
cauauccuuggcuacuaacaucugg

SEQ ID NO: 86562 - RNA, 25 nt, Artificial Sequence
  Description of Artificial Sequence: Synthetic oligonucleotide
uacuaacaucuggagacugugagcu

SEQ ID NO: 86563 - RNA, 25 nt, Artificial Sequence
  Description of Artificial Sequence: Synthetic oligonucleotide
cauaaguugugugcuuuuuauuaau

SEQ ID NO: 86564 - RNA, 25 nt, Artificial Sequence
  Description of Artificial Sequence: Synthetic oligonucleotide
gcaucauuuuggcucuucuuacauu

SEQ ID NO: 86565 - RNA, 25 nt, Artificial Sequence
  Description of Artificial Sequence: Synthetic oligonucleotide
gcucuucuuacauuuguaaaaaugu

SEQ ID NO: 86566 - RNA, 25 nt, Artificial Sequence
  Description of Artificial Sequence: Synthetic oligonucleotide
agauuaggucaucuuaauucauauu

SEQ ID NO: 86567 - RNA, 25 nt, Artificial Sequence
  Description of Artificial Sequence: Synthetic oligonucleotide
auggaauugaaagaacuaaucauga

SEQ ID NO: 86568 - RNA, 25 nt, Artificial Sequence
  Description of Artificial Sequence: Synthetic oligonucleotide
cacacucauuccuucugcucuuggg

SEQ ID NO: 86569 - RNA, 25 nt, Artificial Sequence
  Description of Artificial Sequence: Synthetic oligonucleotide
uguagagguaaccaguagcuuugag

SEQ ID NO: 86570 - RNA, 25 nt, Artificial Sequence
  Description of Artificial Sequence: Synthetic oligonucleotide
caaccacaugccacguaauauuuca

SEQ ID NO: 86571 - RNA, 25 nt, Artificial Sequence
  Description of Artificial Sequence: Synthetic oligonucleotide
ucggaaacaaguuauucucuucacu

SEQ ID NO: 86572 - RNA, 25 nt, Artificial Sequence
  Description of Artificial Sequence: Synthetic oligonucleotide
acucccaauaacuaaugcuaagaaa

SEQ ID NO: 86573 - RNA, 25 nt, Artificial Sequence
  Description of Artificial Sequence: Synthetic oligonucleotide
aaugcuaagaaaugcugaaaaucaa

SEQ ID NO: 86574 - RNA, 25 nt, Artificial Sequence
  Description of Artificial Sequence: Synthetic oligonucleotide
gucuuucucuaaauaugauuacuuu

SEQ ID NO: 86575 - RNA, 25 nt, Artificial Sequence
  Description of Artificial Sequence: Synthetic oligonucleotide
ugaauuucaggcauuuuguucuaca

SEQ ID NO: 86576 - RNA, 25 nt, Artificial Sequence
  Description of Artificial Sequence: Synthetic oligonucleotide
cgauucccucucacccgggacucuc

SEQ ID NO: 86577 - RNA, 25 nt, Artificial Sequence
  Description of Artificial Sequence: Synthetic oligonucleotide
aggaaagugaaccuuuaaaguaaag

SEQ ID NO: 86578 - RNA, 25 nt, Artificial Sequence
  Description of Artificial Sequence: Synthetic oligonucleotide
gaggcugcaugcucuggaagccugg

SEQ ID NO: 86579 - RNA, 25 nt, Artificial Sequence
  Description of Artificial Sequence: Synthetic oligonucleotide
ucucugaacagaaaacaaaagagag

SEQ ID NO: 86580 - RNA, 25 nt, Artificial Sequence
  Description of Artificial Sequence: Synthetic oligonucleotide
aacuuggcuguaaucaguuaugccg

SEQ ID NO: 86581 - RNA, 25 nt, Artificial Sequence
  Description of Artificial Sequence: Synthetic oligonucleotide
agaagccaaaauuaaaagaagucca

SEQ ID NO: 86582 - RNA, 25 nt, Artificial Sequence
  Description of Artificial Sequence: Synthetic oligonucleotide
auuaaaagaaguccaggugagguua

SEQ ID NO: 86583 - RNA, 25 nt, Artificial Sequence
  Description of Artificial Sequence: Synthetic oligonucleotide
gaauccggauuaucgggaagaggac

SEQ ID NO: 86584 - RNA, 25 nt, Artificial Sequence
  Description of Artificial Sequence: Synthetic oligonucleotide
aaugugacaucaaagcaaguauugu

SEQ ID NO: 86585 - RNA, 25 nt, Artificial Sequence
  Description of Artificial Sequence: Synthetic oligonucleotide
caucaaagcaaguauuguagcacuc

SEQ ID NO: 86586 - RNA, 25 nt, Artificial Sequence
  Description of Artificial Sequence: Synthetic oligonucleotide
agagagagaaaacaaaaccacaaau

SEQ ID NO: 86587 - RNA, 25 nt, Artificial Sequence
  Description of Artificial Sequence: Synthetic oligonucleotide
ucgcuguaguauuuaagcccauaca

SEQ ID NO: 86588 - RNA, 25 nt, Artificial Sequence
  Description of Artificial Sequence: Synthetic oligonucleotide
cgcuguaguauuuaagcccauacag

SEQ ID NO: 86589 - RNA, 25 nt, Artificial Sequence
  Description of Artificial Sequence: Synthetic oligonucleotide
auuuaagcccauacagaaaccuucc

SEQ ID NO: 86590 - RNA, 25 nt, Artificial Sequence
  Description of Artificial Sequence: Synthetic oligonucleotide
auuaaaauaaacaugguauaccuac

SEQ ID NO: 86591 - RNA, 25 nt, Artificial Sequence
  Description of Artificial Sequence: Synthetic oligonucleotide
cuguucugaucggccaguuuucgga

SEQ ID NO: 86592 - RNA, 25 nt, Artificial Sequence
  Description of Artificial Sequence: Synthetic oligonucleotide
aaauaauuugaacuuuggaacaggg

SEQ ID NO: 86593 - RNA, 25 nt, Artificial Sequence
  Description of Artificial Sequence: Synthetic oligonucleotide
ugcgaccuuaauuuaacuuuccagu

SEQ ID NO: 86594 - RNA, 25 nt, Artificial Sequence
  Description of Artificial Sequence: Synthetic oligonucleotide
cugagaaagcuaaaguuugguuuug

SEQ ID NO: 86595 - RNA, 25 nt, Artificial Sequence
  Description of Artificial Sequence: Synthetic oligonucleotide
aguaaagaugcuacuucccacugua

SEQ ID NO: 86596 - RNA, 25 nt, Artificial Sequence
  Description of Artificial Sequence: Synthetic oligonucleotide
cugcuuaauugcugauaccauauga

SEQ ID NO: 86597 - RNA, 25 nt, Artificial Sequence
  Description of Artificial Sequence: Synthetic oligonucleotide
uaccauaugaaugaaacaugggcug

SEQ ID NO: 86598 - RNA, 25 nt, Artificial Sequence
  Description of Artificial Sequence: Synthetic oligonucleotide
aacuuucuuauccaacuuuuucaua

SEQ ID NO: 86599 - RNA, 25 nt, Artificial Sequence
  Description of Artificial Sequence: Synthetic oligonucleotide
ccuugcaugacaucaugaggccgga

SEQ ID NO: 86600 - RNA, 25 nt, Artificial Sequence
  Description of Artificial Sequence: Synthetic oligonucleotide
ugaauuuguauaugacugcauuugu

SEQ ID NO: 86601 - RNA, 25 nt, Artificial Sequence
  Description of Artificial Sequence: Synthetic oligonucleotide
gaauccuaguagaauguuuacuacc

SEQ ID NO: 86602 - RNA, 25 nt, Artificial Sequence
  Description of Artificial Sequence: Synthetic oligonucleotide
gaaagggaagaauuuuuugaugaaa

SEQ ID NO: 86603 - RNA, 25 nt, Artificial Sequence
  Description of Artificial Sequence: Synthetic oligonucleotide
uaucggcaugccagugugugaauuu

SEQ ID NO: 86604 - RNA, 25 nt, Artificial Sequence
  Description of Artificial Sequence: Synthetic oligonucleotide
caccucauaguagagcaauguaugu

SEQ ID NO: 86605 - RNA, 25 nt, Artificial Sequence
  Description of Artificial Sequence: Synthetic oligonucleotide
ccagaauugccaaagcacauauaua

SEQ ID NO: 86606 - RNA, 25 nt, Artificial Sequence
  Description of Artificial Sequence: Synthetic oligonucleotide
uggugaucuggguaauaguuucucc

SEQ ID NO: 86607 - RNA, 25 nt, Artificial Sequence
  Description of Artificial Sequence: Synthetic oligonucleotide
gaucuggguaauaguuucuccaaau

SEQ ID NO: 86608 - RNA, 25 nt, Artificial Sequence
  Description of Artificial Sequence: Synthetic oligonucleotide
ggaugugaugaauacuuccuagaaa

SEQ ID NO: 86609 - RNA, 25 nt, Artificial Sequence
  Description of Artificial Sequence: Synthetic oligonucleotide
cauuuccacagcuacaccauauaug

SEQ ID NO: 86610 - RNA, 25 nt, Artificial Sequence
  Description of Artificial Sequence: Synthetic oligonucleotide
acagcuacaccauauaugaauggag

SEQ ID NO: 86611 - RNA, 25 nt, Artificial Sequence
  Description of Artificial Sequence: Synthetic oligonucleotide
ugcaguucuuacacgagaagaagau

SEQ ID NO: 86612 - RNA, 25 nt, Artificial Sequence
  Description of Artificial Sequence: Synthetic oligonucleotide
acgagaagaagaucauuuacaggga

SEQ ID NO: 86613 - RNA, 25 nt, Artificial Sequence
  Description of Artificial Sequence: Synthetic oligonucleotide
cgagaagaagaucauuuacagggac

SEQ ID NO: 86614 - RNA, 25 nt, Artificial Sequence
  Description of Artificial Sequence: Synthetic oligonucleotide
aagaagaucauuuacagggaccuga

SEQ ID NO: 86615 - RNA, 25 nt, Artificial Sequence
  Description of Artificial Sequence: Synthetic oligonucleotide
agaggaagagguguuugacugcauc

SEQ ID NO: 86616 - RNA, 25 nt, Artificial Sequence
  Description of Artificial Sequence: Synthetic oligonucleotide
gaggaagagguguuugacugcaucg

SEQ ID NO: 86617 - RNA, 25 nt, Artificial Sequence
  Description of Artificial Sequence: Synthetic oligonucleotide
cuacuuugagggcgaguucacaggg

SEQ ID NO: 86618 - RNA, 25 nt, Artificial Sequence
  Description of Artificial Sequence: Synthetic oligonucleotide
agggcaucuccuggcaccucugucc

SEQ ID NO: 86619 - RNA, 25 nt, Artificial Sequence
  Description of Artificial Sequence: Synthetic oligonucleotide
ggagugauaugguuugucuuuuuaa

SEQ ID NO: 86620 - RNA, 25 nt, Artificial Sequence
  Description of Artificial Sequence: Synthetic oligonucleotide
gagugauaugguuugucuuuuuaag

SEQ ID NO: 86621 - RNA, 25 nt, Artificial Sequence
  Description of Artificial Sequence: Synthetic oligonucleotide
ugcaguaaagauccuaaagguuguc

SEQ ID NO: 86622 - RNA, 25 nt, Artificial Sequence
  Description of Artificial Sequence: Synthetic oligonucleotide
aguaaagauccuaaagguugucgac

SEQ ID NO: 86623 - RNA, 25 nt, Artificial Sequence
  Description of Artificial Sequence: Synthetic oligonucleotide
ugacaaaggacaaccuggcaauugu

SEQ ID NO: 86624 - RNA, 25 nt, Artificial Sequence
  Description of Artificial Sequence: Synthetic oligonucleotide
gcaauugugacccaguggugcgagg

SEQ ID NO: 86625 - RNA, 25 nt, Artificial Sequence
  Description of Artificial Sequence: Synthetic oligonucleotide
aacaucauccauagagacaugaaau

SEQ ID NO: 86626 - RNA, 25 nt, Artificial Sequence
  Description of Artificial Sequence: Synthetic oligonucleotide
ugaaauccaacaauauauuucucca

SEQ ID NO: 86627 - RNA, 25 nt, Artificial Sequence
  Description of Artificial Sequence: Synthetic oligonucleotide
aacaauauauuucuccaugaaggcu

SEQ ID NO: 86628 - RNA, 25 nt, Artificial Sequence
  Description of Artificial Sequence: Synthetic oligonucleotide
aacaguaaagucacgcuggaguggu

SEQ ID NO: 86629 - RNA, 25 nt, Artificial Sequence
  Description of Artificial Sequence: Synthetic oligonucleotide
ugugaagaaaguaaaggaagagagg

SEQ ID NO: 86630 - RNA, 25 nt, Artificial Sequence
  Description of Artificial Sequence: Synthetic oligonucleotide
cuuccgagccauccuugcaucgggc

SEQ ID NO: 86631 - RNA, 25 nt, Artificial Sequence
  Description of Artificial Sequence: Synthetic oligonucleotide
aauggagguugaauauccuacugug

SEQ ID NO: 86632 - RNA, 25 nt, Artificial Sequence
  Description of Artificial Sequence: Synthetic oligonucleotide
ggagguugaauauccuacuguguaa

SEQ ID NO: 86633 - RNA, 25 nt, Artificial Sequence
  Description of Artificial Sequence: Synthetic oligonucleotide
auuuugaguuuucccuuguagugua

SEQ ID NO: 86634 - RNA, 25 nt, Artificial Sequence
  Description of Artificial Sequence: Synthetic oligonucleotide
uauccuguuuguucuuuguugauug

SEQ ID NO: 86635 - RNA, 25 nt, Artificial Sequence
  Description of Artificial Sequence: Synthetic oligonucleotide
ccuguuuguucuuuguugauugaaa

SEQ ID NO: 86636 - RNA, 25 nt, Artificial Sequence
  Description of Artificial Sequence: Synthetic oligonucleotide
cucuacagccuucuuuuucuuccau

SEQ ID NO: 86637 - RNA, 25 nt, Artificial Sequence
  Description of Artificial Sequence: Synthetic oligonucleotide
ucuuccauagcuaaucuuccuucua

SEQ ID NO: 86638 - RNA, 25 nt, Artificial Sequence
  Description of Artificial Sequence: Synthetic oligonucleotide
auaaucuuccuguugaaugcuucau

SEQ ID NO: 86639 - RNA, 25 nt, Artificial Sequence
  Description of Artificial Sequence: Synthetic oligonucleotide
uaaucuuccuguugaaugcuucaug

SEQ ID NO: 86640 - RNA, 25 nt, Artificial Sequence
  Description of Artificial Sequence: Synthetic oligonucleotide
cuucaugacuugaauucuacuuuga

SEQ ID NO: 86641 - RNA, 25 nt, Artificial Sequence
  Description of Artificial Sequence: Synthetic oligonucleotide
aagagggagagaagcaacuacagac

SEQ ID NO: 86642 - RNA, 25 nt, Artificial Sequence
  Description of Artificial Sequence: Synthetic oligonucleotide
cgucuccuaccagaccaaggucaac

SEQ ID NO: 86643 - RNA, 25 nt, Artificial Sequence
  Description of Artificial Sequence: Synthetic oligonucleotide
gaucaaucggcccgacuaucucgac

SEQ ID NO: 86644 - RNA, 25 nt, Artificial Sequence
  Description of Artificial Sequence: Synthetic oligonucleotide
ggacgaacauccaaccuucccaaac

SEQ ID NO: 86645 - RNA, 25 nt, Artificial Sequence
  Description of Artificial Sequence: Synthetic oligonucleotide
agggucggaacccaagcuuagaacu

SEQ ID NO: 86646 - RNA, 25 nt, Artificial Sequence
  Description of Artificial Sequence: Synthetic oligonucleotide
ucggaacccaagcuuagaacuuuaa

SEQ ID NO: 86647 - RNA, 25 nt, Artificial Sequence
  Description of Artificial Sequence: Synthetic oligonucleotide
acccaagcuuagaacuuuaagcaac

SEQ ID NO: 86648 - RNA, 25 nt, Artificial Sequence
  Description of Artificial Sequence: Synthetic oligonucleotide
gaacuuuaagcaacaagaccaccac

SEQ ID NO: 86649 - RNA, 25 nt, Artificial Sequence
  Description of Artificial Sequence: Synthetic oligonucleotide
acuauucaguggcgagaaauaaagu

SEQ ID NO: 86650 - RNA, 25 nt, Artificial Sequence
  Description of Artificial Sequence: Synthetic oligonucleotide
cuauucaguggcgagaaauaaaguu

SEQ ID NO: 86651 - RNA, 25 nt, Artificial Sequence
  Description of Artificial Sequence: Synthetic oligonucleotide
aaacacagauaacaggaaaugaucc

SEQ ID NO: 86652 - RNA, 25 nt, Artificial Sequence
  Description of Artificial Sequence: Synthetic oligonucleotide
cuuaagaaaagagaagaaaugaaac

SEQ ID NO: 86653 - RNA, 25 nt, Artificial Sequence
  Description of Artificial Sequence: Synthetic oligonucleotide
cugaaggaguguguuuccauccucc

SEQ ID NO: 86654 - RNA, 25 nt, Artificial Sequence
  Description of Artificial Sequence: Synthetic oligonucleotide
ucaccgcgggacugaaaaucuuuga

SEQ ID NO: 86655 - RNA, 25 nt, Artificial Sequence
  Description of Artificial Sequence: Synthetic oligonucleotide
agcagaaauaagcgugccguucagg

SEQ ID NO: 86656 - RNA, 25 nt, Artificial Sequence
  Description of Artificial Sequence: Synthetic oligonucleotide
aagcgugccguucaggguccagaag

SEQ ID NO: 86657 - RNA, 25 nt, Artificial Sequence
  Description of Artificial Sequence: Synthetic oligonucleotide
agaaacagucacucaagacugcuug

SEQ ID NO: 86658 - RNA, 25 nt, Artificial Sequence
  Description of Artificial Sequence: Synthetic oligonucleotide
agaggaagaagguccaugucuuugg

SEQ ID NO: 86659 - RNA, 25 nt, Artificial Sequence
  Description of Artificial Sequence: Synthetic oligonucleotide
uguauucaaaauaugccugaaacac

SEQ ID NO: 86660 - RNA, 25 nt, Artificial Sequence
  Description of Artificial Sequence: Synthetic oligonucleotide
auuuuccucccuuucucuguaccuc

SEQ ID NO: 86661 - RNA, 25 nt, Artificial Sequence
  Description of Artificial Sequence: Synthetic oligonucleotide
caaagaaagauagagcaagacaaga

SEQ ID NO: 86662 - RNA, 25 nt, Artificial Sequence
  Description of Artificial Sequence: Synthetic oligonucleotide
aagaaagauagagcaagacaagaaa

SEQ ID NO: 86663 - RNA, 25 nt, Artificial Sequence
  Description of Artificial Sequence: Synthetic oligonucleotide
gaaagcauuuguuuguacaagaucc

SEQ ID NO: 86664 - RNA, 25 nt, Artificial Sequence
  Description of Artificial Sequence: Synthetic oligonucleotide
ugaguuaaacgaacguacuugcaga

SEQ ID NO: 86665 - RNA, 25 nt, Artificial Sequence
  Description of Artificial Sequence: Synthetic oligonucleotide
acugauacagaacgaucgauacaga

SEQ ID NO: 86666 - RNA, 25 nt, Artificial Sequence
  Description of Artificial Sequence: Synthetic oligonucleotide
auauuauauauauauaaaaauaaau

SEQ ID NO: 86667 - RNA, 25 nt, Artificial Sequence
  Description of Artificial Sequence: Synthetic oligonucleotide
auuauauauauauaaaaauaaauau

SEQ ID NO: 86668 - RNA, 25 nt, Artificial Sequence
  Description of Artificial Sequence: Synthetic oligonucleotide
ucacuggauguauuugacugcugug

SEQ ID NO: 86669 - RNA, 25 nt, Artificial Sequence
  Description of Artificial Sequence: Synthetic oligonucleotide
cagggaagaggaggagaugagagac

SEQ ID NO: 86670 - RNA, 25 nt, Artificial Sequence
  Description of Artificial Sequence: Synthetic oligonucleotide
augaucuuuuuuuugucccacuugg

SEQ ID NO: 86671 - RNA, 27 nt, Artificial Sequence
  Description of Artificial Sequence: Synthetic oligonucleotide
ggccgugaacuccucaucaaaauaccu

SEQ ID NO: 86672 - RNA, 27 nt, Artificial Sequence
  Description of Artificial Sequence: Synthetic oligonucleotide
uggugugauggugaucaucugggccgu

SEQ ID NO: 86673 - RNA, 27 nt, Artificial Sequence
  Description of Artificial Sequence: Synthetic oligonucleotide
aaacccgcaggauaguuuucuucccua

SEQ ID NO: 86674 - RNA, 27 nt, Artificial Sequence
  Description of Artificial Sequence: Synthetic oligonucleotide
caaacuggaugaaauaaauuaaaaccc

SEQ ID NO: 86675 - RNA, 27 nt, Artificial Sequence
  Description of Artificial Sequence: Synthetic oligonucleotide
agaaguccuuaacauuucccuacguga

SEQ ID NO: 86676 - RNA, 27 nt, Artificial Sequence
  Description of Artificial Sequence: Synthetic oligonucleotide
cucugucccacuggguaaacccuggcc

SEQ ID NO: 86677 - RNA, 27 nt, Artificial Sequence
  Description of Artificial Sequence: Synthetic oligonucleotide
cacaauaacaaauuuaaaccuugcucc

SEQ ID NO: 86678 - RNA, 27 nt, Artificial Sequence
  Description of Artificial Sequence: Synthetic oligonucleotide
aaaugcauuugaacaacauaauacaca

SEQ ID NO: 86679 - RNA, 27 nt, Artificial Sequence
  Description of Artificial Sequence: Synthetic oligonucleotide
ggcuuuccugucacaaagauuaaaaac

SEQ ID NO: 86680 - RNA, 27 nt, Artificial Sequence
  Description of Artificial Sequence: Synthetic oligonucleotide
agggcuuuccugucacaaagauuaaaa

SEQ ID NO: 86681 - RNA, 27 nt, Artificial Sequence
  Description of Artificial Sequence: Synthetic oligonucleotide
ggccaugcugggagacauaagcagcag

SEQ ID NO: 86682 - RNA, 27 nt, Artificial Sequence
  Description of Artificial Sequence: Synthetic oligonucleotide
ucagggagaagcuucugaaacacuucu

SEQ ID NO: 86683 - RNA, 27 nt, Artificial Sequence
  Description of Artificial Sequence: Synthetic oligonucleotide
aagggcuucuuccuuauugauggucag

SEQ ID NO: 86684 - RNA, 27 nt, Artificial Sequence
  Description of Artificial Sequence: Synthetic oligonucleotide
ugaagggcuucuuccuuauugaugguc

SEQ ID NO: 86685 - RNA, 27 nt, Artificial Sequence
  Description of Artificial Sequence: Synthetic oligonucleotide
cgcugaagggcuucuuccuuauugaug

SEQ ID NO: 86686 - RNA, 27 nt, Artificial Sequence
  Description of Artificial Sequence: Synthetic oligonucleotide
gccgcugaagggcuucuuccuuauuga

SEQ ID NO: 86687 - RNA, 27 nt, Artificial Sequence
  Description of Artificial Sequence: Synthetic oligonucleotide
acuggccgcugaagggcuucuuccuua

SEQ ID NO: 86688 - RNA, 27 nt, Artificial Sequence
  Description of Artificial Sequence: Synthetic oligonucleotide
cggagcuuuucaccuuuaguuaugcuu

SEQ ID NO: 86689 - RNA, 27 nt, Artificial Sequence
  Description of Artificial Sequence: Synthetic oligonucleotide
ccggagcuuuucaccuuuaguuaugcu

SEQ ID NO: 86690 - RNA, 27 nt, Artificial Sequence
  Description of Artificial Sequence: Synthetic oligonucleotide
cagacuguugacuggcgugauguaguu

SEQ ID NO: 86691 - RNA, 27 nt, Artificial Sequence
  Description of Artificial Sequence: Synthetic oligonucleotide
cuuuugaacucugcuuaaauccagugg

SEQ ID NO: 86692 - RNA, 27 nt, Artificial Sequence
  Description of Artificial Sequence: Synthetic oligonucleotide
gcuuuugaacucugcuuaaauccagug

SEQ ID NO: 86693 - RNA, 27 nt, Artificial Sequence
  Description of Artificial Sequence: Synthetic oligonucleotide
agggcuuuugaacucugcuuaaaucca

SEQ ID NO: 86694 - RNA, 27 nt, Artificial Sequence
  Description of Artificial Sequence: Synthetic oligonucleotide
aagggcuuuugaacucugcuuaaaucc

SEQ ID NO: 86695 - RNA, 27 nt, Artificial Sequence
  Description of Artificial Sequence: Synthetic oligonucleotide
ugaagggcuuuugaacucugcuuaaau

SEQ ID NO: 86696 - RNA, 27 nt, Artificial Sequence
  Description of Artificial Sequence: Synthetic oligonucleotide
cugaagggcuuuugaacucugcuuaaa

SEQ ID NO: 86697 - RNA, 27 nt, Artificial Sequence
  Description of Artificial Sequence: Synthetic oligonucleotide
cgcugaagggcuuuugaacucugcuua

SEQ ID NO: 86698 - RNA, 27 nt, Artificial Sequence
  Description of Artificial Sequence: Synthetic oligonucleotide
cgagcggcuucacucagacccugaggc

SEQ ID NO: 86699 - RNA, 27 nt, Artificial Sequence
  Description of Artificial Sequence: Synthetic oligonucleotide
uugacuggcgugauguaguugcuuggg

SEQ ID NO: 86700 - RNA, 27 nt, Artificial Sequence
  Description of Artificial Sequence: Synthetic oligonucleotide
cacgcaccaagaagcugccauugaucc

SEQ ID NO: 86701 - RNA, 27 nt, Artificial Sequence
  Description of Artificial Sequence: Synthetic oligonucleotide
cugaugaauccaaugugggcuggaauc

SEQ ID NO: 86702 - RNA, 27 nt, Artificial Sequence
  Description of Artificial Sequence: Synthetic oligonucleotide
cuuagguauuccacauucucagcugug

SEQ ID NO: 86703 - RNA, 27 nt, Artificial Sequence
  Description of Artificial Sequence: Synthetic oligonucleotide
ugagccucaaauuaggagauacguuuu

SEQ ID NO: 86704 - RNA, 27 nt, Artificial Sequence
  Description of Artificial Sequence: Synthetic oligonucleotide
ccaauuguagagaaauuauuuuaggaa

SEQ ID NO: 86705 - RNA, 27 nt, Artificial Sequence
  Description of Artificial Sequence: Synthetic oligonucleotide
ggcuccuaacuagcugaaucuuccaau

SEQ ID NO: 86706 - RNA, 27 nt, Artificial Sequence
  Description of Artificial Sequence: Synthetic oligonucleotide
guggauauugacuaggagaguuuaaaa

SEQ ID NO: 86707 - RNA, 27 nt, Artificial Sequence
  Description of Artificial Sequence: Synthetic oligonucleotide
ugugacugaacauaacuguaggcugaa

SEQ ID NO: 86708 - RNA, 27 nt, Artificial Sequence
  Description of Artificial Sequence: Synthetic oligonucleotide
guaugugugugugacugaacauaacug

SEQ ID NO: 86709 - RNA, 27 nt, Artificial Sequence
  Description of Artificial Sequence: Synthetic oligonucleotide
aagcaaaaggaacauuuuguaugugug

SEQ ID NO: 86710 - RNA, 27 nt, Artificial Sequence
  Description of Artificial Sequence: Synthetic oligonucleotide
aaaaauuacuuuaaaagcaaaaggaac

SEQ ID NO: 86711 - RNA, 27 nt, Artificial Sequence
  Description of Artificial Sequence: Synthetic oligonucleotide
ccauugacuguugcuucacaggucaga

SEQ ID NO: 86712 - RNA, 27 nt, Artificial Sequence
  Description of Artificial Sequence: Synthetic oligonucleotide
auugguuugucgaugugugagauaguu

SEQ ID NO: 86713 - RNA, 27 nt, Artificial Sequence
  Description of Artificial Sequence: Synthetic oligonucleotide
agugguagcaguacaauugaggacaag

SEQ ID NO: 86714 - RNA, 27 nt, Artificial Sequence
  Description of Artificial Sequence: Synthetic oligonucleotide
uaagaccgcuugccagcuacgguuuca

SEQ ID NO: 86715 - RNA, 27 nt, Artificial Sequence
  Description of Artificial Sequence: Synthetic oligonucleotide
agccgguaagaccgcuugccagcuacg

SEQ ID NO: 86716 - RNA, 27 nt, Artificial Sequence
  Description of Artificial Sequence: Synthetic oligonucleotide
gguaacccaucuuuuaaccauacaacu

SEQ ID NO: 86717 - RNA, 27 nt, Artificial Sequence
  Description of Artificial Sequence: Synthetic oligonucleotide
ucgcagguaacccaucuuuuaaccaua

SEQ ID NO: 86718 - RNA, 27 nt, Artificial Sequence
  Description of Artificial Sequence: Synthetic oligonucleotide
cucagcaagauuguauaauucccugca

SEQ ID NO: 86719 - RNA, 27 nt, Artificial Sequence
  Description of Artificial Sequence: Synthetic oligonucleotide
acuguuuuaugcucagcaagauuguau

SEQ ID NO: 86720 - RNA, 27 nt, Artificial Sequence
  Description of Artificial Sequence: Synthetic oligonucleotide
aggauaaaggacucuucauuauuggaa

SEQ ID NO: 86721 - RNA, 27 nt, Artificial Sequence
  Description of Artificial Sequence: Synthetic oligonucleotide
caacuugcguuggaacauccaaagugu

SEQ ID NO: 86722 - RNA, 27 nt, Artificial Sequence
  Description of Artificial Sequence: Synthetic oligonucleotide
augguuucaguuuaguggaagcauuua

SEQ ID NO: 86723 - RNA, 27 nt, Artificial Sequence
  Description of Artificial Sequence: Synthetic oligonucleotide
auauuuaacaaagucaaacuuucucac

SEQ ID NO: 86724 - RNA, 27 nt, Artificial Sequence
  Description of Artificial Sequence: Synthetic oligonucleotide
aacuuuuaauauacaguaguucuuuuc

SEQ ID NO: 86725 - RNA, 27 nt, Artificial Sequence
  Description of Artificial Sequence: Synthetic oligonucleotide
guuaagucaaaacccguauuucuaaag

SEQ ID NO: 86726 - RNA, 27 nt, Artificial Sequence
  Description of Artificial Sequence: Synthetic oligonucleotide
gugcugaguuugcuguacccauguuga

SEQ ID NO: 86727 - RNA, 27 nt, Artificial Sequence
  Description of Artificial Sequence: Synthetic oligonucleotide
ugaggucagcaucuucugugucuuuac

SEQ ID NO: 86728 - RNA, 27 nt, Artificial Sequence
  Description of Artificial Sequence: Synthetic oligonucleotide
gcgaucugaauaaaccucccuacuagc

SEQ ID NO: 86729 - RNA, 27 nt, Artificial Sequence
  Description of Artificial Sequence: Synthetic oligonucleotide
aucccagaacccugcugcagaaggcca

SEQ ID NO: 86730 - RNA, 27 nt, Artificial Sequence
  Description of Artificial Sequence: Synthetic oligonucleotide
cauaauuuccaauauguaccagaccuu

SEQ ID NO: 86731 - RNA, 27 nt, Artificial Sequence
  Description of Artificial Sequence: Synthetic oligonucleotide
cuagugcuuccaucggaaggacuaggu

SEQ ID NO: 86732 - RNA, 27 nt, Artificial Sequence
  Description of Artificial Sequence: Synthetic oligonucleotide
uccacauaaaaacaauauucacuggga

SEQ ID NO: 86733 - RNA, 27 nt, Artificial Sequence
  Description of Artificial Sequence: Synthetic oligonucleotide
ucuaccaauuccaacuugaauucauug

SEQ ID NO: 86734 - RNA, 27 nt, Artificial Sequence
  Description of Artificial Sequence: Synthetic oligonucleotide
ucuccaagucuaaaucuguguccugag

SEQ ID NO: 86735 - RNA, 27 nt, Artificial Sequence
  Description of Artificial Sequence: Synthetic oligonucleotide
uggaauacuguaacugugcuuugagga

SEQ ID NO: 86736 - RNA, 27 nt, Artificial Sequence
  Description of Artificial Sequence: Synthetic oligonucleotide
uuaauucaucagugguggcagugguag

SEQ ID NO: 86737 - RNA, 27 nt, Artificial Sequence
  Description of Artificial Sequence: Synthetic oligonucleotide
gugaugauguggcacuaguaguuucuu

SEQ ID NO: 86738 - RNA, 27 nt, Artificial Sequence
  Description of Artificial Sequence: Synthetic oligonucleotide
ucuguuuggugaggcuguccgacuuug

SEQ ID NO: 86739 - RNA, 27 nt, Artificial Sequence
  Description of Artificial Sequence: Synthetic oligonucleotide
ccaucauguuccauuuuucgcuuucuc

SEQ ID NO: 86740 - RNA, 27 nt, Artificial Sequence
  Description of Artificial Sequence: Synthetic oligonucleotide
gcagucuacaugcuaaaucagagggua

SEQ ID NO: 86741 - RNA, 27 nt, Artificial Sequence
  Description of Artificial Sequence: Synthetic oligonucleotide
cauaaauagauccuuaaauagcucaaa

SEQ ID NO: 86742 - RNA, 27 nt, Artificial Sequence
  Description of Artificial Sequence: Synthetic oligonucleotide
ugauaauagugcuuuuucaccuuuuuc

SEQ ID NO: 86743 - RNA, 27 nt, Artificial Sequence
  Description of Artificial Sequence: Synthetic oligonucleotide
gcagaacugauaauagugcuuuuucac

SEQ ID NO: 86744 - RNA, 27 nt, Artificial Sequence
  Description of Artificial Sequence: Synthetic oligonucleotide
guagguuuaaucuuucuuuucagccau

SEQ ID NO: 86745 - RNA, 27 nt, Artificial Sequence
  Description of Artificial Sequence: Synthetic oligonucleotide
agaaggauuuuauuauaaggguuuaau

SEQ ID NO: 86746 - RNA, 27 nt, Artificial Sequence
  Description of Artificial Sequence: Synthetic oligonucleotide
gucuacagcauuggcuaauaguaugaa

SEQ ID NO: 86747 - RNA, 27 nt, Artificial Sequence
  Description of Artificial Sequence: Synthetic oligonucleotide
cuauuccuaucaaaaugcuucugucua

SEQ ID NO: 86748 - RNA, 27 nt, Artificial Sequence
  Description of Artificial Sequence: Synthetic oligonucleotide
ucagggccauuaucuuauuugcucuau

SEQ ID NO: 86749 - RNA, 27 nt, Artificial Sequence
  Description of Artificial Sequence: Synthetic oligonucleotide
ugcuugaggaagagaaaaauguugguc

SEQ ID NO: 86750 - RNA, 27 nt, Artificial Sequence
  Description of Artificial Sequence: Synthetic oligonucleotide
ugggcugaacuuuucucauacuuaaag

SEQ ID NO: 86751 - RNA, 27 nt, Artificial Sequence
  Description of Artificial Sequence: Synthetic oligonucleotide
gguucagcagccaucuuuauuccugcg

SEQ ID NO: 86752 - RNA, 27 nt, Artificial Sequence
  Description of Artificial Sequence: Synthetic oligonucleotide
ugaagagaacuuggucauucaaauuuc

SEQ ID NO: 86753 - RNA, 27 nt, Artificial Sequence
  Description of Artificial Sequence: Synthetic oligonucleotide
cucuaggcuggcuaucuuuauacauac

SEQ ID NO: 86754 - RNA, 27 nt, Artificial Sequence
  Description of Artificial Sequence: Synthetic oligonucleotide
acacuucacagagauaguuacagccau

SEQ ID NO: 86755 - RNA, 27 nt, Artificial Sequence
  Description of Artificial Sequence: Synthetic oligonucleotide
uugaaauuuucucacacuucacagaga

SEQ ID NO: 86756 - RNA, 27 nt, Artificial Sequence
  Description of Artificial Sequence: Synthetic oligonucleotide
ucaggaggauucauuuccuuaaaggaa

SEQ ID NO: 86757 - RNA, 27 nt, Artificial Sequence
  Description of Artificial Sequence: Synthetic oligonucleotide
auaugaugucacuuuuuguauccuuga

SEQ ID NO: 86758 - RNA, 27 nt, Artificial Sequence
  Description of Artificial Sequence: Synthetic oligonucleotide
uaugaugaagauucaaauugcaucuua

SEQ ID NO: 86759 - RNA, 27 nt, Artificial Sequence
  Description of Artificial Sequence: Synthetic oligonucleotide
uuaauagcuagucuucguuuugaacag

SEQ ID NO: 86760 - RNA, 27 nt, Artificial Sequence
  Description of Artificial Sequence: Synthetic oligonucleotide
auuuuuaguagagaugagguuucacca

SEQ ID NO: 86761 - RNA, 27 nt, Artificial Sequence
  Description of Artificial Sequence: Synthetic oligonucleotide
aggcgagauagagcuucucuuucguuc

SEQ ID NO: 86762 - RNA, 27 nt, Artificial Sequence
  Description of Artificial Sequence: Synthetic oligonucleotide
aacuggaccgaaggcgcuuguggagaa

SEQ ID NO: 86763 - RNA, 27 nt, Artificial Sequence
  Description of Artificial Sequence: Synthetic oligonucleotide
gcggcuacaucuuuggaaucuucuccu

SEQ ID NO: 86764 - RNA, 27 nt, Artificial Sequence
  Description of Artificial Sequence: Synthetic oligonucleotide
caagucuccucauugaauccagauugg

SEQ ID NO: 86765 - RNA, 27 nt, Artificial Sequence
  Description of Artificial Sequence: Synthetic oligonucleotide
uccucacuacucucaaaucuguucugg

SEQ ID NO: 86766 - RNA, 27 nt, Artificial Sequence
  Description of Artificial Sequence: Synthetic oligonucleotide
uuuguacucaucugcacagcucuggcu

SEQ ID NO: 86767 - RNA, 27 nt, Artificial Sequence
  Description of Artificial Sequence: Synthetic oligonucleotide
gcccauuaacaacaacaaucugaggug

SEQ ID NO: 86768 - RNA, 27 nt, Artificial Sequence
  Description of Artificial Sequence: Synthetic oligonucleotide
aauaaauuaaaaauaauuaaaauagug

SEQ ID NO: 86769 - RNA, 27 nt, Artificial Sequence
  Description of Artificial Sequence: Synthetic oligonucleotide
cauauuuaaauauuaauaaauuaaaaa

SEQ ID NO: 86770 - RNA, 27 nt, Artificial Sequence
  Description of Artificial Sequence: Synthetic oligonucleotide
gaaacaaaggauauucaaacugcauag

SEQ ID NO: 86771 - RNA, 27 nt, Artificial Sequence
  Description of Artificial Sequence: Synthetic oligonucleotide
caaacacuuagacgccagcagcauggg

SEQ ID NO: 86772 - RNA, 27 nt, Artificial Sequence
  Description of Artificial Sequence: Synthetic oligonucleotide
uuugucacaggugaaaugcacaucuga

SEQ ID NO: 86773 - RNA, 27 nt, Artificial Sequence
  Description of Artificial Sequence: Synthetic oligonucleotide
uaauucagccuggcacagguuuugauc

SEQ ID NO: 86774 - RNA, 27 nt, Artificial Sequence
  Description of Artificial Sequence: Synthetic oligonucleotide
auuguaagaaugacuacccacauucac

SEQ ID NO: 86775 - RNA, 27 nt, Artificial Sequence
  Description of Artificial Sequence: Synthetic oligonucleotide
caauuguaagaaugacuacccacauuc

SEQ ID NO: 86776 - RNA, 27 nt, Artificial Sequence
  Description of Artificial Sequence: Synthetic oligonucleotide
guacacucucugaugcucauuuucaua

SEQ ID NO: 86777 - RNA, 27 nt, Artificial Sequence
  Description of Artificial Sequence: Synthetic oligonucleotide
cugcugaguucuacaugaaaagcaaau

SEQ ID NO: 86778 - RNA, 27 nt, Artificial Sequence
  Description of Artificial Sequence: Synthetic oligonucleotide
uacugaaaauaaauauagaaauacaac

SEQ ID NO: 86779 - RNA, 27 nt, Artificial Sequence
  Description of Artificial Sequence: Synthetic oligonucleotide
uuccauuuaagaaacauuaaucaaaac

SEQ ID NO: 86780 - RNA, 27 nt, Artificial Sequence
  Description of Artificial Sequence: Synthetic oligonucleotide
acaauuuuaggcacuauacacguuguu

SEQ ID NO: 86781 - RNA, 27 nt, Artificial Sequence
  Description of Artificial Sequence: Synthetic oligonucleotide
ccagauguuaguagccaaggauauggu

SEQ ID NO: 86782 - RNA, 27 nt, Artificial Sequence
  Description of Artificial Sequence: Synthetic oligonucleotide
agcucacagucuccagauguuaguagc

SEQ ID NO: 86783 - RNA, 27 nt, Artificial Sequence
  Description of Artificial Sequence: Synthetic oligonucleotide
auuaauaaaaagcacacaacuuauggc

SEQ ID NO: 86784 - RNA, 27 nt, Artificial Sequence
  Description of Artificial Sequence: Synthetic oligonucleotide
aauguaagaagagccaaaaugaugcau

SEQ ID NO: 86785 - RNA, 27 nt, Artificial Sequence
  Description of Artificial Sequence: Synthetic oligonucleotide
acauuuuuacaaauguaagaagagcca

SEQ ID NO: 86786 - RNA, 27 nt, Artificial Sequence
  Description of Artificial Sequence: Synthetic oligonucleotide
aauaugaauuaagaugaccuaaucugu

SEQ ID NO: 86787 - RNA, 27 nt, Artificial Sequence
  Description of Artificial Sequence: Synthetic oligonucleotide
ucaugauuaguucuuucaauuccaucc

SEQ ID NO: 86788 - RNA, 27 nt, Artificial Sequence
  Description of Artificial Sequence: Synthetic oligonucleotide
cccaagagcagaaggaaugagugugca

SEQ ID NO: 86789 - RNA, 27 nt, Artificial Sequence
  Description of Artificial Sequence: Synthetic oligonucleotide
cucaaagcuacugguuaccucuacacc

SEQ ID NO: 86790 - RNA, 27 nt, Artificial Sequence
  Description of Artificial Sequence: Synthetic oligonucleotide
ugaaauauuacguggcaugugguuggg

SEQ ID NO: 86791 - RNA, 27 nt, Artificial Sequence
  Description of Artificial Sequence: Synthetic oligonucleotide
agugaagagaauaacuuguuuccgaag

SEQ ID NO: 86792 - RNA, 27 nt, Artificial Sequence
  Description of Artificial Sequence: Synthetic oligonucleotide
uuucuuagcauuaguuauugggaguga

SEQ ID NO: 86793 - RNA, 27 nt, Artificial Sequence
  Description of Artificial Sequence: Synthetic oligonucleotide
uugauuuucagcauuucuuagcauuag

SEQ ID NO: 86794 - RNA, 27 nt, Artificial Sequence
  Description of Artificial Sequence: Synthetic oligonucleotide
aaaguaaucauauuuagagaaagacag

SEQ ID NO: 86795 - RNA, 27 nt, Artificial Sequence
  Description of Artificial Sequence: Synthetic oligonucleotide
uguagaacaaaaugccugaaauucagc

SEQ ID NO: 86796 - RNA, 27 nt, Artificial Sequence
  Description of Artificial Sequence: Synthetic oligonucleotide
gagagucccgggugagagggaaucgcc

SEQ ID NO: 86797 - RNA, 27 nt, Artificial Sequence
  Description of Artificial Sequence: Synthetic oligonucleotide
cuuuacuuuaaagguucacuuuccuug

SEQ ID NO: 86798 - RNA, 27 nt, Artificial Sequence
  Description of Artificial Sequence: Synthetic oligonucleotide
ccaggcuuccagagcaugcagccuccu

SEQ ID NO: 86799 - RNA, 27 nt, Artificial Sequence
  Description of Artificial Sequence: Synthetic oligonucleotide
cucucuuuuguuuucuguucagagaaa

SEQ ID NO: 86800 - RNA, 27 nt, Artificial Sequence
  Description of Artificial Sequence: Synthetic oligonucleotide
cggcauaacugauuacagccaaguuca

SEQ ID NO: 86801 - RNA, 27 nt, Artificial Sequence
  Description of Artificial Sequence: Synthetic oligonucleotide
uggacuucuuuuaauuuuggcuucuuc

SEQ ID NO: 86802 - RNA, 27 nt, Artificial Sequence
  Description of Artificial Sequence: Synthetic oligonucleotide
uaaccucaccuggacuucuuuuaauuu

SEQ ID NO: 86803 - RNA, 27 nt, Artificial Sequence
  Description of Artificial Sequence: Synthetic oligonucleotide
guccucuucccgauaauccggauucag

SEQ ID NO: 86804 - RNA, 27 nt, Artificial Sequence
  Description of Artificial Sequence: Synthetic oligonucleotide
acaauacuugcuuugaugucacauuaa

SEQ ID NO: 86805 - RNA, 27 nt, Artificial Sequence
  Description of Artificial Sequence: Synthetic oligonucleotide
gagugcuacaauacuugcuuugauguc

SEQ ID NO: 86806 - RNA, 27 nt, Artificial Sequence
  Description of Artificial Sequence: Synthetic oligonucleotide
auuugugguuuuguuuucucucucucu

SEQ ID NO: 86807 - RNA, 27 nt, Artificial Sequence
  Description of Artificial Sequence: Synthetic oligonucleotide
uguaugggcuuaaauacuacagcgagg

SEQ ID NO: 86808 - RNA, 27 nt, Artificial Sequence
  Description of Artificial Sequence: Synthetic oligonucleotide
cuguaugggcuuaaauacuacagcgag

SEQ ID NO: 86809 - RNA, 27 nt, Artificial Sequence
  Description of Artificial Sequence: Synthetic oligonucleotide
ggaagguuucuguaugggcuuaaauac

SEQ ID NO: 86810 - RNA, 27 nt, Artificial Sequence
  Description of Artificial Sequence: Synthetic oligonucleotide
guagguauaccauguuuauuuuaauac

SEQ ID NO: 86811 - RNA, 27 nt, Artificial Sequence
  Description of Artificial Sequence: Synthetic oligonucleotide
uccgaaaacuggccgaucagaacagcc

SEQ ID NO: 86812 - RNA, 27 nt, Artificial Sequence
  Description of Artificial Sequence: Synthetic oligonucleotide
cccuguuccaaaguucaaauuauuugu

SEQ ID NO: 86813 - RNA, 27 nt, Artificial Sequence
  Description of Artificial Sequence: Synthetic oligonucleotide
acuggaaaguuaaauuaaggucgcaau

SEQ ID NO: 86814 - RNA, 27 nt, Artificial Sequence
  Description of Artificial Sequence: Synthetic oligonucleotide
caaaaccaaacuuuagcuuucucagcc

SEQ ID NO: 86815 - RNA, 27 nt, Artificial Sequence
  Description of Artificial Sequence: Synthetic oligonucleotide
uacagugggaaguagcaucuuuacuuu

SEQ ID NO: 86816 - RNA, 27 nt, Artificial Sequence
  Description of Artificial Sequence: Synthetic oligonucleotide
ucauaugguaucagcaauuaagcagua

SEQ ID NO: 86817 - RNA, 27 nt, Artificial Sequence
  Description of Artificial Sequence: Synthetic oligonucleotide
cagcccauguuucauucauaugguauc

SEQ ID NO: 86818 - RNA, 27 nt, Artificial Sequence
  Description of Artificial Sequence: Synthetic oligonucleotide
uaugaaaaaguuggauaagaaaguugg

SEQ ID NO: 86819 - RNA, 27 nt, Artificial Sequence
  Description of Artificial Sequence: Synthetic oligonucleotide
uccggccucaugaugucaugcaaggcu

SEQ ID NO: 86820 - RNA, 27 nt, Artificial Sequence
  Description of Artificial Sequence: Synthetic oligonucleotide
acaaaugcagucauauacaaauucagg

SEQ ID NO: 86821 - RNA, 27 nt, Artificial Sequence
  Description of Artificial Sequence: Synthetic oligonucleotide
gguaguaaacauucuacuaggauucuu

SEQ ID NO: 86822 - RNA, 27 nt, Artificial Sequence
  Description of Artificial Sequence: Synthetic oligonucleotide
uuucaucaaaaaauucuucccuuucug

SEQ ID NO: 86823 - RNA, 27 nt, Artificial Sequence
  Description of Artificial Sequence: Synthetic oligonucleotide
aaauucacacacuggcaugccgauagc

SEQ ID NO: 86824 - RNA, 27 nt, Artificial Sequence
  Description of Artificial Sequence: Synthetic oligonucleotide
acauacauugcucuacuaugaggugaa

SEQ ID NO: 86825 - RNA, 27 nt, Artificial Sequence
  Description of Artificial Sequence: Synthetic oligonucleotide
uauauaugugcuuuggcaauucuggug

SEQ ID NO: 86826 - RNA, 27 nt, Artificial Sequence
  Description of Artificial Sequence: Synthetic oligonucleotide
ggagaaacuauuacccagaucaccacu

SEQ ID NO: 86827 - RNA, 27 nt, Artificial Sequence
  Description of Artificial Sequence: Synthetic oligonucleotide
auuuggagaaacuauuacccagaucac

SEQ ID NO: 86828 - RNA, 27 nt, Artificial Sequence
  Description of Artificial Sequence: Synthetic oligonucleotide
uuucuaggaaguauucaucacauccac

SEQ ID NO: 86829 - RNA, 27 nt, Artificial Sequence
  Description of Artificial Sequence: Synthetic oligonucleotide
cauauaugguguagcuguggaaaugcg

SEQ ID NO: 86830 - RNA, 27 nt, Artificial Sequence
  Description of Artificial Sequence: Synthetic oligonucleotide
cuccauucauauaugguguagcugugg

SEQ ID NO: 86831 - RNA, 27 nt, Artificial Sequence
  Description of Artificial Sequence: Synthetic oligonucleotide
aucuucuucucguguaagaacugcagc

SEQ ID NO: 86832 - RNA, 27 nt, Artificial Sequence
  Description of Artificial Sequence: Synthetic oligonucleotide
ucccuguaaaugaucuucuucucgugu

SEQ ID NO: 86833 - RNA, 27 nt, Artificial Sequence
  Description of Artificial Sequence: Synthetic oligonucleotide
gucccuguaaaugaucuucuucucgug

SEQ ID NO: 86834 - RNA, 27 nt, Artificial Sequence
  Description of Artificial Sequence: Synthetic oligonucleotide
ucaggucccuguaaaugaucuucuucu

SEQ ID NO: 86835 - RNA, 27 nt, Artificial Sequence
  Description of Artificial Sequence: Synthetic oligonucleotide
gaugcagucaaacaccucuuccucugu

SEQ ID NO: 86836 - RNA, 27 nt, Artificial Sequence
  Description of Artificial Sequence: Synthetic oligonucleotide
cgaugcagucaaacaccucuuccucug

SEQ ID NO: 86837 - RNA, 27 nt, Artificial Sequence
  Description of Artificial Sequence: Synthetic oligonucleotide
cccugugaacucgcccucaaaguagcg

SEQ ID NO: 86838 - RNA, 27 nt, Artificial Sequence
  Description of Artificial Sequence: Synthetic oligonucleotide
ggacagaggugccaggagaugcccuca

SEQ ID NO: 86839 - RNA, 27 nt, Artificial Sequence
  Description of Artificial Sequence: Synthetic oligonucleotide
uuaaaaagacaaaccauaucacuccuu

SEQ ID NO: 86840 - RNA, 27 nt, Artificial Sequence
  Description of Artificial Sequence: Synthetic oligonucleotide
cuuaaaaagacaaaccauaucacuccu

SEQ ID NO: 86841 - RNA, 27 nt, Artificial Sequence
  Description of Artificial Sequence: Synthetic oligonucleotide
gacaaccuuuaggaucuuuacugcaac

SEQ ID NO: 86842 - RNA, 27 nt, Artificial Sequence
  Description of Artificial Sequence: Synthetic oligonucleotide
gucgacaaccuuuaggaucuuuacugc

SEQ ID NO: 86843 - RNA, 27 nt, Artificial Sequence
  Description of Artificial Sequence: Synthetic oligonucleotide
acaauugccagguuguccuuugucaug

SEQ ID NO: 86844 - RNA, 27 nt, Artificial Sequence
  Description of Artificial Sequence: Synthetic oligonucleotide
ccucgcaccacugggucacaauugcca

SEQ ID NO: 86845 - RNA, 27 nt, Artificial Sequence
  Description of Artificial Sequence: Synthetic oligonucleotide
auuucaugucucuauggaugauguucu

SEQ ID NO: 86846 - RNA, 27 nt, Artificial Sequence
  Description of Artificial Sequence: Synthetic oligonucleotide
uggagaaauauauuguuggauuucaug

SEQ ID NO: 86847 - RNA, 27 nt, Artificial Sequence
  Description of Artificial Sequence: Synthetic oligonucleotide
agccuucauggagaaauauauuguugg

SEQ ID NO: 86848 - RNA, 27 nt, Artificial Sequence
  Description of Artificial Sequence: Synthetic oligonucleotide
accacuccagcgugacuuuacuguugc

SEQ ID NO: 86849 - RNA, 27 nt, Artificial Sequence
  Description of Artificial Sequence: Synthetic oligonucleotide
ccucucuuccuuuacuuucuucacaca

SEQ ID NO: 86850 - RNA, 27 nt, Artificial Sequence
  Description of Artificial Sequence: Synthetic oligonucleotide
gcccgaugcaaggauggcucggaagcg

SEQ ID NO: 86851 - RNA, 27 nt, Artificial Sequence
  Description of Artificial Sequence: Synthetic oligonucleotide
cacaguaggauauucaaccuccauuuc

SEQ ID NO: 86852 - RNA, 27 nt, Artificial Sequence
  Description of Artificial Sequence: Synthetic oligonucleotide
uuacacaguaggauauucaaccuccau

SEQ ID NO: 86853 - RNA, 27 nt, Artificial Sequence
  Description of Artificial Sequence: Synthetic oligonucleotide
uacacuacaagggaaaacucaaaaucu

SEQ ID NO: 86854 - RNA, 27 nt, Artificial Sequence
  Description of Artificial Sequence: Synthetic oligonucleotide
caaucaacaaagaacaaacaggauaaa

SEQ ID NO: 86855 - RNA, 27 nt, Artificial Sequence
  Description of Artificial Sequence: Synthetic oligonucleotide
uuucaaucaacaaagaacaaacaggau

SEQ ID NO: 86856 - RNA, 27 nt, Artificial Sequence
  Description of Artificial Sequence: Synthetic oligonucleotide
auggaagaaaaagaaggcuguagagaa

SEQ ID NO: 86857 - RNA, 27 nt, Artificial Sequence
  Description of Artificial Sequence: Synthetic oligonucleotide
uagaaggaagauuagcuauggaagaaa

SEQ ID NO: 86858 - RNA, 27 nt, Artificial Sequence
  Description of Artificial Sequence: Synthetic oligonucleotide
augaagcauucaacaggaagauuauuu

SEQ ID NO: 86859 - RNA, 27 nt, Artificial Sequence
  Description of Artificial Sequence: Synthetic oligonucleotide
caugaagcauucaacaggaagauuauu

SEQ ID NO: 86860 - RNA, 27 nt, Artificial Sequence
  Description of Artificial Sequence: Synthetic oligonucleotide
ucaaaguagaauucaagucaugaagca

SEQ ID NO: 86861 - RNA, 27 nt, Artificial Sequence
  Description of Artificial Sequence: Synthetic oligonucleotide
gucuguaguugcuucucucccucuuag

SEQ ID NO: 86862 - RNA, 27 nt, Artificial Sequence
  Description of Artificial Sequence: Synthetic oligonucleotide
guugaccuuggucugguaggagacggc

SEQ ID NO: 86863 - RNA, 27 nt, Artificial Sequence
  Description of Artificial Sequence: Synthetic oligonucleotide
gucgagauagucgggccgauugaucuc

SEQ ID NO: 86864 - RNA, 27 nt, Artificial Sequence
  Description of Artificial Sequence: Synthetic oligonucleotide
guuugggaagguuggauguucguccuc

SEQ ID NO: 86865 - RNA, 27 nt, Artificial Sequence
  Description of Artificial Sequence: Synthetic oligonucleotide
aguucuaagcuuggguuccgacccuaa

SEQ ID NO: 86866 - RNA, 27 nt, Artificial Sequence
  Description of Artificial Sequence: Synthetic oligonucleotide
uuaaaguucuaagcuuggguuccgacc

SEQ ID NO: 86867 - RNA, 27 nt, Artificial Sequence
  Description of Artificial Sequence: Synthetic oligonucleotide
guugcuuaaaguucuaagcuuggguuc

SEQ ID NO: 86868 - RNA, 27 nt, Artificial Sequence
  Description of Artificial Sequence: Synthetic oligonucleotide
gugguggucuuguugcuuaaaguucua

SEQ ID NO: 86869 - RNA, 27 nt, Artificial Sequence
  Description of Artificial Sequence: Synthetic oligonucleotide
acuuuauuucucgccacugaauaguag

SEQ ID NO: 86870 - RNA, 27 nt, Artificial Sequence
  Description of Artificial Sequence: Synthetic oligonucleotide
aacuuuauuucucgccacugaauagua

SEQ ID NO: 86871 - RNA, 27 nt, Artificial Sequence
  Description of Artificial Sequence: Synthetic oligonucleotide
ggaucauuuccuguuaucuguguuugu

SEQ ID NO: 86872 - RNA, 27 nt, Artificial Sequence
  Description of Artificial Sequence: Synthetic oligonucleotide
guuucauuucuucucuuuucuuaaggc

SEQ ID NO: 86873 - RNA, 27 nt, Artificial Sequence
  Description of Artificial Sequence: Synthetic oligonucleotide
ggaggauggaaacacacuccuucaguu

SEQ ID NO: 86874 - RNA, 27 nt, Artificial Sequence
  Description of Artificial Sequence: Synthetic oligonucleotide
ucaaagauuuucagucccgcggugaca

SEQ ID NO: 86875 - RNA, 27 nt, Artificial Sequence
  Description of Artificial Sequence: Synthetic oligonucleotide
ccugaacggcacgcuuauuucugcugu

SEQ ID NO: 86876 - RNA, 27 nt, Artificial Sequence
  Description of Artificial Sequence: Synthetic oligonucleotide
cuucuggacccugaacggcacgcuuau

SEQ ID NO: 86877 - RNA, 27 nt, Artificial Sequence
  Description of Artificial Sequence: Synthetic oligonucleotide
caagcagucuugagugacuguuucuuc

SEQ ID NO: 86878 - RNA, 27 nt, Artificial Sequence
  Description of Artificial Sequence: Synthetic oligonucleotide
ccaaagacauggaccuucuuccucuga

SEQ ID NO: 86879 - RNA, 27 nt, Artificial Sequence
  Description of Artificial Sequence: Synthetic oligonucleotide
guguuucaggcauauuuugaauacauc

SEQ ID NO: 86880 - RNA, 27 nt, Artificial Sequence
  Description of Artificial Sequence: Synthetic oligonucleotide
gagguacagagaaagggaggaaaauag

SEQ ID NO: 86881 - RNA, 27 nt, Artificial Sequence
  Description of Artificial Sequence: Synthetic oligonucleotide
ucuugucuugcucuaucuuucuuuggu

SEQ ID NO: 86882 - RNA, 27 nt, Artificial Sequence
  Description of Artificial Sequence: Synthetic oligonucleotide
uuucuugucuugcucuaucuuucuuug

SEQ ID NO: 86883 - RNA, 27 nt, Artificial Sequence
  Description of Artificial Sequence: Synthetic oligonucleotide
ggaucuuguacaaacaaaugcuuucuc

SEQ ID NO: 86884 - RNA, 27 nt, Artificial Sequence
  Description of Artificial Sequence: Synthetic oligonucleotide
ucugcaaguacguucguuuaacucaag

SEQ ID NO: 86885 - RNA, 27 nt, Artificial Sequence
  Description of Artificial Sequence: Synthetic oligonucleotide
ucuguaucgaucguucuguaucagucu

SEQ ID NO: 86886 - RNA, 27 nt, Artificial Sequence
  Description of Artificial Sequence: Synthetic oligonucleotide
auuuauuuuuauauauauauaauauau

SEQ ID NO: 86887 - RNA, 27 nt, Artificial Sequence
  Description of Artificial Sequence: Synthetic oligonucleotide
auauuuauuuuuauauauauauaauau

SEQ ID NO: 86888 - RNA, 27 nt, Artificial Sequence
  Description of Artificial Sequence: Synthetic oligonucleotide
cacagcagucaaauacauccagugaag

SEQ ID NO: 86889 - RNA, 27 nt, Artificial Sequence
  Description of Artificial Sequence: Synthetic oligonucleotide
gucucucaucuccuccucuucccuguc

SEQ ID NO: 86890 - RNA, 27 nt, Artificial Sequence
  Description of Artificial Sequence: Synthetic oligonucleotide
ccaagugggacaaaaaaaagaucaugc

SEQ ID NO: 86891 - RNA, 14 nt, Artificial Sequence
  Description of Artificial Sequence: Synthetic oligonucleotide
guauuuugaugagg

SEQ ID NO: 86892 - RNA, 12 nt, Artificial Sequence
  Description of Artificial Sequence: Synthetic oligonucleotide
ggcccagaugau

SEQ ID NO: 86893 - RNA, 14 nt, Artificial Sequence
  Description of Artificial Sequence: Synthetic oligonucleotide
gggaagaaaacuau

SEQ ID NO: 86894 - RNA, 15 nt, Artificial Sequence
  Description of Artificial Sequence: Synthetic oligonucleotide
guuuuaauuuauuuc

SEQ ID NO: 86895 - RNA, 12 nt, Artificial Sequence
  Description of Artificial Sequence: Synthetic oligonucleotide
acguagggaaau

SEQ ID NO: 86896 - RNA, 12 nt, Artificial Sequence
  Description of Artificial Sequence: Synthetic oligonucleotide
ccaggguuuacc

SEQ ID NO: 86897 - RNA, 11 nt, Artificial Sequence
  Description of Artificial Sequence: Synthetic oligonucleotide
agcaagguuua

SEQ ID NO: 86898 - RNA, 12 nt, Artificial Sequence
  Description of Artificial Sequence: Synthetic oligonucleotide
uguauuauguug

SEQ ID NO: 86899 - RNA, 15 nt, Artificial Sequence
  Description of Artificial Sequence: Synthetic oligonucleotide
uuuuaaucuuuguga

SEQ ID NO: 86900 - RNA, 14 nt, Artificial Sequence
  Description of Artificial Sequence: Synthetic oligonucleotide
uuaaucuuugugac

SEQ ID NO: 86901 - RNA, 13 nt, Artificial Sequence
  Description of Artificial Sequence: Synthetic oligonucleotide
gcugcuuaugucu

SEQ ID NO: 86902 - RNA, 14 nt, Artificial Sequence
  Description of Artificial Sequence: Synthetic oligonucleotide
aaguguuucagaag

SEQ ID NO: 86903 - RNA, 13 nt, Artificial Sequence
  Description of Artificial Sequence: Synthetic oligonucleotide
gaccaucaauaag

SEQ ID NO: 86904 - RNA, 13 nt, Artificial Sequence
  Description of Artificial Sequence: Synthetic oligonucleotide
ccaucaauaagga

SEQ ID NO: 86905 - RNA, 14 nt, Artificial Sequence
  Description of Artificial Sequence: Synthetic oligonucleotide
ucaauaaggaagaa

SEQ ID NO: 86906 - RNA, 14 nt, Artificial Sequence
  Description of Artificial Sequence: Synthetic oligonucleotide
aauaaggaagaagc

SEQ ID NO: 86907 - RNA, 13 nt, Artificial Sequence
  Description of Artificial Sequence: Synthetic oligonucleotide
aggaagaagcccu

SEQ ID NO: 86908 - RNA, 13 nt, Artificial Sequence
  Description of Artificial Sequence: Synthetic oligonucleotide
gcauaacuaaagg

SEQ ID NO: 86909 - RNA, 14 nt, Artificial Sequence
  Description of Artificial Sequence: Synthetic oligonucleotide
cauaacuaaaggug

SEQ ID NO: 86910 - RNA, 12 nt, Artificial Sequence
  Description of Artificial Sequence: Synthetic oligonucleotide
cuacaucacgcc

SEQ ID NO: 86911 - RNA, 12 nt, Artificial Sequence
  Description of Artificial Sequence: Synthetic oligonucleotide
acuggauuuaag

SEQ ID NO: 86912 - RNA, 12 nt, Artificial Sequence
  Description of Artificial Sequence: Synthetic oligonucleotide
cuggauuuaagc

SEQ ID NO: 86913 - RNA, 13 nt, Artificial Sequence
  Description of Artificial Sequence: Synthetic oligonucleotide
gauuuaagcagag

SEQ ID NO: 86914 - RNA, 13 nt, Artificial Sequence
  Description of Artificial Sequence: Synthetic oligonucleotide
auuuaagcagagu

SEQ ID NO: 86915 - RNA, 13 nt, Artificial Sequence
  Description of Artificial Sequence: Synthetic oligonucleotide
uuaagcagaguuc

SEQ ID NO: 86916 - RNA, 13 nt, Artificial Sequence
  Description of Artificial Sequence: Synthetic oligonucleotide
uaagcagaguuca

SEQ ID NO: 86917 - RNA, 14 nt, Artificial Sequence
  Description of Artificial Sequence: Synthetic oligonucleotide
agcagaguucaaaa

SEQ ID NO: 86918 - RNA, 12 nt, Artificial Sequence
  Description of Artificial Sequence: Synthetic oligonucleotide
cucagggucuga

SEQ ID NO: 86919 - RNA, 13 nt, Artificial Sequence
  Description of Artificial Sequence: Synthetic oligonucleotide
caagcaacuacau

SEQ ID NO: 86920 - RNA, 12 nt, Artificial Sequence
  Description of Artificial Sequence: Synthetic oligonucleotide
aucaauggcagc

SEQ ID NO: 86921 - RNA, 11 nt, Artificial Sequence
  Description of Artificial Sequence: Synthetic oligonucleotide
uuccagcccac

SEQ ID NO: 86922 - RNA, 12 nt, Artificial Sequence
  Description of Artificial Sequence: Synthetic oligonucleotide
cagcugagaaug

SEQ ID NO: 86923 - RNA, 13 nt, Artificial Sequence
  Description of Artificial Sequence: Synthetic oligonucleotide
aacguaucuccua

SEQ ID NO: 86924 - RNA, 14 nt, Artificial Sequence
  Description of Artificial Sequence: Synthetic oligonucleotide
ccuaaaauaauuuc

SEQ ID NO: 86925 - RNA, 13 nt, Artificial Sequence
  Description of Artificial Sequence: Synthetic oligonucleotide
uggaagauucagc

SEQ ID NO: 86926 - RNA, 12 nt, Artificial Sequence
  Description of Artificial Sequence: Synthetic oligonucleotide
uuaaacucuccu

SEQ ID NO: 86927 - RNA, 12 nt, Artificial Sequence
  Description of Artificial Sequence: Synthetic oligonucleotide
cagccuacaguu

SEQ ID NO: 86928 - RNA, 13 nt, Artificial Sequence
  Description of Artificial Sequence: Synthetic oligonucleotide
guuauguucaguc

SEQ ID NO: 86929 - RNA, 13 nt, Artificial Sequence
  Description of Artificial Sequence: Synthetic oligonucleotide
cacauacaaaaug

SEQ ID NO: 86930 - RNA, 9 nt, Artificial Sequence
  Description of Artificial Sequence: Synthetic oligonucleotide
uccuuuugc

SEQ ID NO: 86931 - RNA, 12 nt, Artificial Sequence
  Description of Artificial Sequence: Synthetic oligonucleotide
ugaccugugaag

SEQ ID NO: 86932 - RNA, 12 nt, Artificial Sequence
  Description of Artificial Sequence: Synthetic oligonucleotide
cuaucucacaca

SEQ ID NO: 86933 - RNA, 13 nt, Artificial Sequence
  Description of Artificial Sequence: Synthetic oligonucleotide
uguccucaauugu

SEQ ID NO: 86934 - RNA, 12 nt, Artificial Sequence
  Description of Artificial Sequence: Synthetic oligonucleotide
aaaccguagcug

SEQ ID NO: 86935 - RNA, 12 nt, Artificial Sequence
  Description of Artificial Sequence: Synthetic oligonucleotide
uagcuggcaagc

SEQ ID NO: 86936 - RNA, 14 nt, Artificial Sequence
  Description of Artificial Sequence: Synthetic oligonucleotide
uuguaugguuaaaa

SEQ ID NO: 86937 - RNA, 14 nt, Artificial Sequence
  Description of Artificial Sequence: Synthetic oligonucleotide
ugguuaaaagaugg

SEQ ID NO: 86938 - RNA, 13 nt, Artificial Sequence
  Description of Artificial Sequence: Synthetic oligonucleotide
cagggaauuauac

SEQ ID NO: 86939 - RNA, 12 nt, Artificial Sequence
  Description of Artificial Sequence: Synthetic oligonucleotide
acaaucuugcug

SEQ ID NO: 86940 - RNA, 13 nt, Artificial Sequence
  Description of Artificial Sequence: Synthetic oligonucleotide
ccaauaaugaaga

SEQ ID NO: 86941 - RNA, 13 nt, Artificial Sequence
  Description of Artificial Sequence: Synthetic oligonucleotide
acuuuggauguuc

SEQ ID NO: 86942 - RNA, 12 nt, Artificial Sequence
  Description of Artificial Sequence: Synthetic oligonucleotide
aaugcuuccacu

SEQ ID NO: 86943 - RNA, 11 nt, Artificial Sequence
  Description of Artificial Sequence: Synthetic oligonucleotide
gagaaaguuug

SEQ ID NO: 86944 - RNA, 11 nt, Artificial Sequence
  Description of Artificial Sequence: Synthetic oligonucleotide
aaagaacuacu

SEQ ID NO: 86945 - RNA, 12 nt, Artificial Sequence
  Description of Artificial Sequence: Synthetic oligonucleotide
uuagaaauacgg

SEQ ID NO: 86946 - RNA, 12 nt, Artificial Sequence
  Description of Artificial Sequence: Synthetic oligonucleotide
aacauggguaca

SEQ ID NO: 86947 - RNA, 14 nt, Artificial Sequence
  Description of Artificial Sequence: Synthetic oligonucleotide
aaagacacagaaga

SEQ ID NO: 86948 - RNA, 11 nt, Artificial Sequence
  Description of Artificial Sequence: Synthetic oligonucleotide
uaguagggagg

SEQ ID NO: 86949 - RNA, 12 nt, Artificial Sequence
  Description of Artificial Sequence: Synthetic oligonucleotide
gccuucugcagc

SEQ ID NO: 86950 - RNA, 10 nt, Artificial Sequence
  Description of Artificial Sequence: Synthetic oligonucleotide
ggucugguac

SEQ ID NO: 86951 - RNA, 12 nt, Artificial Sequence
  Description of Artificial Sequence: Synthetic oligonucleotide
cuaguccuuccg

SEQ ID NO: 86952 - RNA, 12 nt, Artificial Sequence
  Description of Artificial Sequence: Synthetic oligonucleotide
ccagugaauauu

SEQ ID NO: 86953 - RNA, 13 nt, Artificial Sequence
  Description of Artificial Sequence: Synthetic oligonucleotide
augaauucaaguu

SEQ ID NO: 86954 - RNA, 12 nt, Artificial Sequence
  Description of Artificial Sequence: Synthetic oligonucleotide
caggacacagau

SEQ ID NO: 86955 - RNA, 12 nt, Artificial Sequence
  Description of Artificial Sequence: Synthetic oligonucleotide
cucaaagcacag

SEQ ID NO: 86956 - RNA, 10 nt, Artificial Sequence
  Description of Artificial Sequence: Synthetic oligonucleotide
accacugcca

SEQ ID NO: 86957 - RNA, 13 nt, Artificial Sequence
  Description of Artificial Sequence: Synthetic oligonucleotide
gaaacuacuagug

SEQ ID NO: 86958 - RNA, 12 nt, Artificial Sequence
  Description of Artificial Sequence: Synthetic oligonucleotide
aagucggacagc

SEQ ID NO: 86959 - RNA, 13 nt, Artificial Sequence
  Description of Artificial Sequence: Synthetic oligonucleotide
gaaagcgaaaaau

SEQ ID NO: 86960 - RNA, 13 nt, Artificial Sequence
  Description of Artificial Sequence: Synthetic oligonucleotide
cccucugauuuag

SEQ ID NO: 86961 - RNA, 12 nt, Artificial Sequence
  Description of Artificial Sequence: Synthetic oligonucleotide
ugagcuauuuaa

SEQ ID NO: 86962 - RNA, 13 nt, Artificial Sequence
  Description of Artificial Sequence: Synthetic oligonucleotide
aaaaggugaaaaa

SEQ ID NO: 86963 - RNA, 14 nt, Artificial Sequence
  Description of Artificial Sequence: Synthetic oligonucleotide
gaaaaagcacuauu

SEQ ID NO: 86964 - RNA, 12 nt, Artificial Sequence
  Description of Artificial Sequence: Synthetic oligonucleotide
ggcugaaaagaa

SEQ ID NO: 86965 - RNA, 12 nt, Artificial Sequence
  Description of Artificial Sequence: Synthetic oligonucleotide
uaaacccuuaua

SEQ ID NO: 86966 - RNA, 13 nt, Artificial Sequence
  Description of Artificial Sequence: Synthetic oligonucleotide
cauacuauuagcc

SEQ ID NO: 86967 - RNA, 12 nt, Artificial Sequence
  Description of Artificial Sequence: Synthetic oligonucleotide
gacagaagcauu

SEQ ID NO: 86968 - RNA, 14 nt, Artificial Sequence
  Description of Artificial Sequence: Synthetic oligonucleotide
agagcaaauaagau

SEQ ID NO: 86969 - RNA, 14 nt, Artificial Sequence
  Description of Artificial Sequence: Synthetic oligonucleotide
ccaacauuuuucuc

SEQ ID NO: 86970 - RNA, 15 nt, Artificial Sequence
  Description of Artificial Sequence: Synthetic oligonucleotide
uuaaguaugagaaaa

SEQ ID NO: 86971 - RNA, 14 nt, Artificial Sequence
  Description of Artificial Sequence: Synthetic oligonucleotide
caggaauaaagaug

SEQ ID NO: 86972 - RNA, 13 nt, Artificial Sequence
  Description of Artificial Sequence: Synthetic oligonucleotide
aauuugaaugacc

SEQ ID NO: 86973 - RNA, 14 nt, Artificial Sequence
  Description of Artificial Sequence: Synthetic oligonucleotide
auguauaaagauag

SEQ ID NO: 86974 - RNA, 12 nt, Artificial Sequence
  Description of Artificial Sequence: Synthetic oligonucleotide
ggcuguaacuau

SEQ ID NO: 86975 - RNA, 11 nt, Artificial Sequence
  Description of Artificial Sequence: Synthetic oligonucleotide
ucugugaagug

SEQ ID NO: 86976 - RNA, 14 nt, Artificial Sequence
  Description of Artificial Sequence: Synthetic oligonucleotide
ccuuuaaggaaaug

SEQ ID NO: 86977 - RNA, 13 nt, Artificial Sequence
  Description of Artificial Sequence: Synthetic oligonucleotide
aaggauacaaaaa

SEQ ID NO: 86978 - RNA, 12 nt, Artificial Sequence
  Description of Artificial Sequence: Synthetic oligonucleotide
agaugcaauuug

SEQ ID NO: 86979 - RNA, 12 nt, Artificial Sequence
  Description of Artificial Sequence: Synthetic oligonucleotide
guucaaaacgaa

SEQ ID NO: 86980 - RNA, 11 nt, Artificial Sequence
  Description of Artificial Sequence: Synthetic oligonucleotide
gugaaaccuca

SEQ ID NO: 86981 - RNA, 13 nt, Artificial Sequence
  Description of Artificial Sequence: Synthetic oligonucleotide
acgaaagagaagc

SEQ ID NO: 86982 - RNA, 12 nt, Artificial Sequence
  Description of Artificial Sequence: Synthetic oligonucleotide
cuccacaagcgc

SEQ ID NO: 86983 - RNA, 14 nt, Artificial Sequence
  Description of Artificial Sequence: Synthetic oligonucleotide
gagaagauuccaaa

SEQ ID NO: 86984 - RNA, 13 nt, Artificial Sequence
  Description of Artificial Sequence: Synthetic oligonucleotide
aaucuggauucaa

SEQ ID NO: 86985 - RNA, 13 nt, Artificial Sequence
  Description of Artificial Sequence: Synthetic oligonucleotide
agaacagauuuga

SEQ ID NO: 86986 - RNA, 11 nt, Artificial Sequence
  Description of Artificial Sequence: Synthetic oligonucleotide
ccagagcugug

SEQ ID NO: 86987 - RNA, 12 nt, Artificial Sequence
  Description of Artificial Sequence: Synthetic oligonucleotide
ccucagauuguu

SEQ ID NO: 86988 - RNA, 12 nt, Artificial Sequence
  Description of Artificial Sequence: Synthetic oligonucleotide
cuauuuuaauua

SEQ ID NO: 86989 - RNA, 13 nt, Artificial Sequence
  Description of Artificial Sequence: Synthetic oligonucleotide
uuuaauuuauuaa

SEQ ID NO: 86990 - RNA, 12 nt, Artificial Sequence
  Description of Artificial Sequence: Synthetic oligonucleotide
augcaguuugaa

SEQ ID NO: 86991 - RNA, 11 nt, Artificial Sequence
  Description of Artificial Sequence: Synthetic oligonucleotide
caugcugcugg

SEQ ID NO: 86992 - RNA, 13 nt, Artificial Sequence
  Description of Artificial Sequence: Synthetic oligonucleotide
agaugugcauuuc

SEQ ID NO: 86993 - RNA, 12 nt, Artificial Sequence
  Description of Artificial Sequence: Synthetic oligonucleotide
ucaaaaccugug

SEQ ID NO: 86994 - RNA, 11 nt, Artificial Sequence
  Description of Artificial Sequence: Synthetic oligonucleotide
gaaugugggua

SEQ ID NO: 86995 - RNA, 10 nt, Artificial Sequence
  Description of Artificial Sequence: Synthetic oligonucleotide
auguggguag

SEQ ID NO: 86996 - RNA, 13 nt, Artificial Sequence
  Description of Artificial Sequence: Synthetic oligonucleotide
ugaaaaugagcau

SEQ ID NO: 86997 - RNA, 13 nt, Artificial Sequence
  Description of Artificial Sequence: Synthetic oligonucleotide
uugcuuuucaugu

SEQ ID NO: 86998 - RNA, 12 nt, Artificial Sequence
  Description of Artificial Sequence: Synthetic oligonucleotide
uguauuucuaua

SEQ ID NO: 86999 - RNA, 13 nt, Artificial Sequence
  Description of Artificial Sequence: Synthetic oligonucleotide
uuugauuaauguu

SEQ ID NO: 87000 - RNA, 12 nt, Artificial Sequence
  Description of Artificial Sequence: Synthetic oligonucleotide
caacguguauag

SEQ ID NO: 87001 - RNA, 12 nt, Artificial Sequence
  Description of Artificial Sequence: Synthetic oligonucleotide
cauauccuuggc

SEQ ID NO: 87002 - RNA, 13 nt, Artificial Sequence
  Description of Artificial Sequence: Synthetic oligonucleotide
uacuaacaucugg

SEQ ID NO: 87003 - RNA, 11 nt, Artificial Sequence
  Description of Artificial Sequence: Synthetic oligonucleotide
cauaaguugug

SEQ ID NO: 87004 - RNA, 12 nt, Artificial Sequence
  Description of Artificial Sequence: Synthetic oligonucleotide
gcaucauuuugg

SEQ ID NO: 87005 - RNA, 10 nt, Artificial Sequence
  Description of Artificial Sequence: Synthetic oligonucleotide
gcucuucuua

SEQ ID NO: 87006 - RNA, 10 nt, Artificial Sequence
  Description of Artificial Sequence: Synthetic oligonucleotide
agauuagguc

SEQ ID NO: 87007 - RNA, 12 nt, Artificial Sequence
  Description of Artificial Sequence: Synthetic oligonucleotide
auggaauugaaa

SEQ ID NO: 87008 - RNA, 13 nt, Artificial Sequence
  Description of Artificial Sequence: Synthetic oligonucleotide
cacacucauuccu

SEQ ID NO: 87009 - RNA, 12 nt, Artificial Sequence
  Description of Artificial Sequence: Synthetic oligonucleotide
uguagagguaac

SEQ ID NO: 87010 - RNA, 11 nt, Artificial Sequence
  Description of Artificial Sequence: Synthetic oligonucleotide
caaccacaugc

SEQ ID NO: 87011 - RNA, 12 nt, Artificial Sequence
  Description of Artificial Sequence: Synthetic oligonucleotide
ucggaaacaagu

SEQ ID NO: 87012 - RNA, 11 nt, Artificial Sequence
  Description of Artificial Sequence: Synthetic oligonucleotide
acucccaauaa

SEQ ID NO: 87013 - RNA, 13 nt, Artificial Sequence
  Description of Artificial Sequence: Synthetic oligonucleotide
aaugcuaagaaau

SEQ ID NO: 87014 - RNA, 11 nt, Artificial Sequence
  Description of Artificial Sequence: Synthetic oligonucleotide
gucuuucucua

SEQ ID NO: 87015 - RNA, 11 nt, Artificial Sequence
  Description of Artificial Sequence: Synthetic oligonucleotide
ugaauuucagg

SEQ ID NO: 87016 - RNA, 13 nt, Artificial Sequence
  Description of Artificial Sequence: Synthetic oligonucleotide
cgauucccucuca

SEQ ID NO: 87017 - RNA, 11 nt, Artificial Sequence
  Description of Artificial Sequence: Synthetic oligonucleotide
aggaaagugaa

SEQ ID NO: 87018 - RNA, 12 nt, Artificial Sequence
  Description of Artificial Sequence: Synthetic oligonucleotide
gaggcugcaugc

SEQ ID NO: 87019 - RNA, 11 nt, Artificial Sequence
  Description of Artificial Sequence: Synthetic oligonucleotide
ucucugaacag

SEQ ID NO: 87020 - RNA, 12 nt, Artificial Sequence
  Description of Artificial Sequence: Synthetic oligonucleotide
aacuuggcugua

SEQ ID NO: 87021 - RNA, 12 nt, Artificial Sequence
  Description of Artificial Sequence: Synthetic oligonucleotide
agaagccaaaau

SEQ ID NO: 87022 - RNA, 14 nt, Artificial Sequence
  Description of Artificial Sequence: Synthetic oligonucleotide
auuaaaagaagucc

SEQ ID NO: 87023 - RNA, 14 nt, Artificial Sequence
  Description of Artificial Sequence: Synthetic oligonucleotide
gaauccggauuauc

SEQ ID NO: 87024 - RNA, 12 nt, Artificial Sequence
  Description of Artificial Sequence: Synthetic oligonucleotide
aaugugacauca

SEQ ID NO: 87025 - RNA, 13 nt, Artificial Sequence
  Description of Artificial Sequence: Synthetic oligonucleotide
caucaaagcaagu

SEQ ID NO: 87026 - RNA, 11 nt, Artificial Sequence
  Description of Artificial Sequence: Synthetic oligonucleotide
agagagagaaa

SEQ ID NO: 87027 - RNA, 13 nt, Artificial Sequence
  Description of Artificial Sequence: Synthetic oligonucleotide
ucgcuguaguauu

SEQ ID NO: 87028 - RNA, 14 nt, Artificial Sequence
  Description of Artificial Sequence: Synthetic oligonucleotide
cgcuguaguauuua

SEQ ID NO: 87029 - RNA, 13 nt, Artificial Sequence
  Description of Artificial Sequence: Synthetic oligonucleotide
auuuaagcccaua

SEQ ID NO: 87030 - RNA, 15 nt, Artificial Sequence
  Description of Artificial Sequence: Synthetic oligonucleotide
auuaaaauaaacaug

SEQ ID NO: 87031 - RNA, 12 nt, Artificial Sequence
  Description of Artificial Sequence: Synthetic oligonucleotide
cuguucugaucg

SEQ ID NO: 87032 - RNA, 16 nt, Artificial Sequence
  Description of Artificial Sequence: Synthetic oligonucleotide
aaauaauuugaacuuu

SEQ ID NO: 87033 - RNA, 12 nt, Artificial Sequence
  Description of Artificial Sequence: Synthetic oligonucleotide
ugcgaccuuaau

SEQ ID NO: 87034 - RNA, 11 nt, Artificial Sequence
  Description of Artificial Sequence: Synthetic oligonucleotide
cugagaaagcu

SEQ ID NO: 87035 - RNA, 13 nt, Artificial Sequence
  Description of Artificial Sequence: Synthetic oligonucleotide
aguaaagaugcua

SEQ ID NO: 87036 - RNA, 12 nt, Artificial Sequence
  Description of Artificial Sequence: Synthetic oligonucleotide
cugcuuaauugc

SEQ ID NO: 87037 - RNA, 14 nt, Artificial Sequence
  Description of Artificial Sequence: Synthetic oligonucleotide
uaccauaugaauga

SEQ ID NO: 87038 - RNA, 12 nt, Artificial Sequence
  Description of Artificial Sequence: Synthetic oligonucleotide
aacuuucuuauc

SEQ ID NO: 87039 - RNA, 13 nt, Artificial Sequence
  Description of Artificial Sequence: Synthetic oligonucleotide
ccuugcaugacau

SEQ ID NO: 87040 - RNA, 14 nt, Artificial Sequence
  Description of Artificial Sequence: Synthetic oligonucleotide
ugaauuuguauaug

SEQ ID NO: 87041 - RNA, 12 nt, Artificial Sequence
  Description of Artificial Sequence: Synthetic oligonucleotide
gaauccuaguag

SEQ ID NO: 87042 - RNA, 10 nt, Artificial Sequence
  Description of Artificial Sequence: Synthetic oligonucleotide
gaaagggaag

SEQ ID NO: 87043 - RNA, 11 nt, Artificial Sequence
  Description of Artificial Sequence: Synthetic oligonucleotide
uaucggcaugc

SEQ ID NO: 87044 - RNA, 12 nt, Artificial Sequence
  Description of Artificial Sequence: Synthetic oligonucleotide
caccucauagua

SEQ ID NO: 87045 - RNA, 11 nt, Artificial Sequence
  Description of Artificial Sequence: Synthetic oligonucleotide
ccagaauugcc

SEQ ID NO: 87046 - RNA, 11 nt, Artificial Sequence
  Description of Artificial Sequence: Synthetic oligonucleotide
uggugaucugg

SEQ ID NO: 87047 - RNA, 12 nt, Artificial Sequence
  Description of Artificial Sequence: Synthetic oligonucleotide
gaucuggguaau

SEQ ID NO: 87048 - RNA, 12 nt, Artificial Sequence
  Description of Artificial Sequence: Synthetic oligonucleotide
ggaugugaugaa

SEQ ID NO: 87049 - RNA, 12 nt, Artificial Sequence
  Description of Artificial Sequence: Synthetic oligonucleotide
cauuuccacagc

SEQ ID NO: 87050 - RNA, 11 nt, Artificial Sequence
  Description of Artificial Sequence: Synthetic oligonucleotide
acagcuacacc

SEQ ID NO: 87051 - RNA, 12 nt, Artificial Sequence
  Description of Artificial Sequence: Synthetic oligonucleotide
ugcaguucuuac

SEQ ID NO: 87052 - RNA, 12 nt, Artificial Sequence
  Description of Artificial Sequence: Synthetic oligonucleotide
acgagaagaaga

SEQ ID NO: 87053 - RNA, 12 nt, Artificial Sequence
  Description of Artificial Sequence: Synthetic oligonucleotide
cgagaagaagau

SEQ ID NO: 87054 - RNA, 15 nt, Artificial Sequence
  Description of Artificial Sequence: Synthetic oligonucleotide
aagaagaucauuuac

SEQ ID NO: 87055 - RNA, 11 nt, Artificial Sequence
  Description of Artificial Sequence: Synthetic oligonucleotide
agaggaagagg

SEQ ID NO: 87056 - RNA, 12 nt, Artificial Sequence
  Description of Artificial Sequence: Synthetic oligonucleotide
gaggaagaggug

SEQ ID NO: 87057 - RNA, 13 nt, Artificial Sequence
  Description of Artificial Sequence: Synthetic oligonucleotide
cuacuuugagggc

SEQ ID NO: 87058 - RNA, 12 nt, Artificial Sequence
  Description of Artificial Sequence: Synthetic oligonucleotide
agggcaucuccu

SEQ ID NO: 87059 - RNA, 10 nt, Artificial Sequence
  Description of Artificial Sequence: Synthetic oligonucleotide
ggagugauau

SEQ ID NO: 87060 - RNA, 11 nt, Artificial Sequence
  Description of Artificial Sequence: Synthetic oligonucleotide
gagugauaugg

SEQ ID NO: 87061 - RNA, 12 nt, Artificial Sequence
  Description of Artificial Sequence: Synthetic oligonucleotide
ugcaguaaagau

SEQ ID NO: 87062 - RNA, 13 nt, Artificial Sequence
  Description of Artificial Sequence: Synthetic oligonucleotide
aguaaagauccua

SEQ ID NO: 87063 - RNA, 12 nt, Artificial Sequence
  Description of Artificial Sequence: Synthetic oligonucleotide
ugacaaaggaca

SEQ ID NO: 87064 - RNA, 13 nt, Artificial Sequence
  Description of Artificial Sequence: Synthetic oligonucleotide
gcaauugugaccc

SEQ ID NO: 87065 - RNA, 12 nt, Artificial Sequence
  Description of Artificial Sequence: Synthetic oligonucleotide
aacaucauccau

SEQ ID NO: 87066 - RNA, 12 nt, Artificial Sequence
  Description of Artificial Sequence: Synthetic oligonucleotide
ugaaauccaaca

SEQ ID NO: 87067 - RNA, 15 nt, Artificial Sequence
  Description of Artificial Sequence: Synthetic oligonucleotide
aacaauauauuucuc

SEQ ID NO: 87068 - RNA, 14 nt, Artificial Sequence
  Description of Artificial Sequence: Synthetic oligonucleotide
aacaguaaagucac

SEQ ID NO: 87069 - RNA, 14 nt, Artificial Sequence
  Description of Artificial Sequence: Synthetic oligonucleotide
ugugaagaaaguaa

SEQ ID NO: 87070 - RNA, 13 nt, Artificial Sequence
  Description of Artificial Sequence: Synthetic oligonucleotide
cuuccgagccauc

SEQ ID NO: 87071 - RNA, 12 nt, Artificial Sequence
  Description of Artificial Sequence: Synthetic oligonucleotide
aauggagguuga

SEQ ID NO: 87072 - RNA, 12 nt, Artificial Sequence
  Description of Artificial Sequence: Synthetic oligonucleotide
ggagguugaaua

SEQ ID NO: 87073 - RNA, 13 nt, Artificial Sequence
  Description of Artificial Sequence: Synthetic oligonucleotide
auuuugaguuuuc

SEQ ID NO: 87074 - RNA, 12 nt, Artificial Sequence
  Description of Artificial Sequence: Synthetic oligonucleotide
uauccuguuugu

SEQ ID NO: 87075 - RNA, 11 nt, Artificial Sequence
  Description of Artificial Sequence: Synthetic oligonucleotide
ccuguuuguuc

SEQ ID NO: 87076 - RNA, 10 nt, Artificial Sequence
  Description of Artificial Sequence: Synthetic oligonucleotide
cucuacagcc

SEQ ID NO: 87077 - RNA, 12 nt, Artificial Sequence
  Description of Artificial Sequence: Synthetic oligonucleotide
ucuuccauagcu

SEQ ID NO: 87078 - RNA, 12 nt, Artificial Sequence
  Description of Artificial Sequence: Synthetic oligonucleotide
auaaucuuccug

SEQ ID NO: 87079 - RNA, 12 nt, Artificial Sequence
  Description of Artificial Sequence: Synthetic oligonucleotide
uaaucuuccugu

SEQ ID NO: 87080 - RNA, 12 nt, Artificial Sequence
  Description of Artificial Sequence: Synthetic oligonucleotide
cuucaugacuug

SEQ ID NO: 87081 - RNA, 12 nt, Artificial Sequence
  Description of Artificial Sequence: Synthetic oligonucleotide
aagagggagaga

SEQ ID NO: 87082 - RNA, 12 nt, Artificial Sequence
  Description of Artificial Sequence: Synthetic oligonucleotide
cgucuccuacca

SEQ ID NO: 87083 - RNA, 12 nt, Artificial Sequence
  Description of Artificial Sequence: Synthetic oligonucleotide
gaucaaucggcc

SEQ ID NO: 87084 - RNA, 12 nt, Artificial Sequence
  Description of Artificial Sequence: Synthetic oligonucleotide
ggacgaacaucc

SEQ ID NO: 87085 - RNA, 11 nt, Artificial Sequence
  Description of Artificial Sequence: Synthetic oligonucleotide
agggucggaac

SEQ ID NO: 87086 - RNA, 10 nt, Artificial Sequence
  Description of Artificial Sequence: Synthetic oligonucleotide
ucggaaccca

SEQ ID NO: 87087 - RNA, 11 nt, Artificial Sequence
  Description of Artificial Sequence: Synthetic oligonucleotide
acccaagcuua

SEQ ID NO: 87088 - RNA, 14 nt, Artificial Sequence
  Description of Artificial Sequence: Synthetic oligonucleotide
gaacuuuaagcaac

SEQ ID NO: 87089 - RNA, 11 nt, Artificial Sequence
  Description of Artificial Sequence: Synthetic oligonucleotide
acuauucagug

SEQ ID NO: 87090 - RNA, 11 nt, Artificial Sequence
  Description of Artificial Sequence: Synthetic oligonucleotide
cuauucagugg

SEQ ID NO: 87091 - RNA, 13 nt, Artificial Sequence
  Description of Artificial Sequence: Synthetic oligonucleotide
aaacacagauaac

SEQ ID NO: 87092 - RNA, 12 nt, Artificial Sequence
  Description of Artificial Sequence: Synthetic oligonucleotide
cuuaagaaaaga

SEQ ID NO: 87093 - RNA, 12 nt, Artificial Sequence
  Description of Artificial Sequence: Synthetic oligonucleotide
cugaaggagugu

SEQ ID NO: 87094 - RNA, 10 nt, Artificial Sequence
  Description of Artificial Sequence: Synthetic oligonucleotide
ucaccgcggg

SEQ ID NO: 87095 - RNA, 14 nt, Artificial Sequence
  Description of Artificial Sequence: Synthetic oligonucleotide
agcagaaauaagcg

SEQ ID NO: 87096 - RNA, 12 nt, Artificial Sequence
  Description of Artificial Sequence: Synthetic oligonucleotide
aagcgugccguu

SEQ ID NO: 87097 - RNA, 12 nt, Artificial Sequence
  Description of Artificial Sequence: Synthetic oligonucleotide
agaaacagucac

SEQ ID NO: 87098 - RNA, 12 nt, Artificial Sequence
  Description of Artificial Sequence: Synthetic oligonucleotide
agaggaagaagg

SEQ ID NO: 87099 - RNA, 14 nt, Artificial Sequence
  Description of Artificial Sequence: Synthetic oligonucleotide
uguauucaaaauau

SEQ ID NO: 87100 - RNA, 13 nt, Artificial Sequence
  Description of Artificial Sequence: Synthetic oligonucleotide
auuuuccucccuu

SEQ ID NO: 87101 - RNA, 13 nt, Artificial Sequence
  Description of Artificial Sequence: Synthetic oligonucleotide
caaagaaagauag

SEQ ID NO: 87102 - RNA, 12 nt, Artificial Sequence
  Description of Artificial Sequence: Synthetic oligonucleotide
aagaaagauaga

SEQ ID NO: 87103 - RNA, 13 nt, Artificial Sequence
  Description of Artificial Sequence: Synthetic oligonucleotide
gaaagcauuuguu

SEQ ID NO: 87104 - RNA, 13 nt, Artificial Sequence
  Description of Artificial Sequence: Synthetic oligonucleotide
ugaguuaaacgaa

SEQ ID NO: 87105 - RNA, 12 nt, Artificial Sequence
  Description of Artificial Sequence: Synthetic oligonucleotide
acugauacagaa

SEQ ID NO: 87106 - RNA, 12 nt, Artificial Sequence
  Description of Artificial Sequence: Synthetic oligonucleotide
auauuauauaua

SEQ ID NO: 87107 - RNA, 12 nt, Artificial Sequence
  Description of Artificial Sequence: Synthetic oligonucleotide
auuauauauaua

SEQ ID NO: 87108 - RNA, 12 nt, Artificial Sequence
  Description of Artificial Sequence: Synthetic oligonucleotide
ucacuggaugua

SEQ ID NO: 87109 - RNA, 12 nt, Artificial Sequence
  Description of Artificial Sequence: Synthetic oligonucleotide
cagggaagagga

SEQ ID NO: 87110 - RNA, 15 nt, Artificial Sequence
  Description of Artificial Sequence: Synthetic oligonucleotide
augaucuuuuuuuug

SEQ ID NO: 87111 - RNA, 11 nt, Artificial Sequence
  Description of Artificial Sequence: Synthetic oligonucleotide
aguucacggcc

SEQ ID NO: 87112 - RNA, 13 nt, Artificial Sequence
  Description of Artificial Sequence: Synthetic oligonucleotide
caccaucacacca

SEQ ID NO: 87113 - RNA, 11 nt, Artificial Sequence
  Description of Artificial Sequence: Synthetic oligonucleotide
ccugcggguuu

SEQ ID NO: 87114 - RNA, 10 nt, Artificial Sequence
  Description of Artificial Sequence: Synthetic oligonucleotide
auccaguuug

SEQ ID NO: 87115 - RNA, 13 nt, Artificial Sequence
  Description of Artificial Sequence: Synthetic oligonucleotide
guuaaggacuucu

SEQ ID NO: 87116 - RNA, 13 nt, Artificial Sequence
  Description of Artificial Sequence: Synthetic oligonucleotide
cagugggacagag

SEQ ID NO: 87117 - RNA, 14 nt, Artificial Sequence
  Description of Artificial Sequence: Synthetic oligonucleotide
aauuuguuauugug

SEQ ID NO: 87118 - RNA, 13 nt, Artificial Sequence
  Description of Artificial Sequence: Synthetic oligonucleotide
uucaaaugcauuu

SEQ ID NO: 87119 - RNA, 10 nt, Artificial Sequence
  Description of Artificial Sequence: Synthetic oligonucleotide
caggaaagcc

SEQ ID NO: 87120 - RNA, 11 nt, Artificial Sequence
  Description of Artificial Sequence: Synthetic oligonucleotide
aggaaagcccu

SEQ ID NO: 87121 - RNA, 12 nt, Artificial Sequence
  Description of Artificial Sequence: Synthetic oligonucleotide
cccagcauggcc

SEQ ID NO: 87122 - RNA, 11 nt, Artificial Sequence
  Description of Artificial Sequence: Synthetic oligonucleotide
cuucucccuga

SEQ ID NO: 87123 - RNA, 12 nt, Artificial Sequence
  Description of Artificial Sequence: Synthetic oligonucleotide
gaagaagcccuu

SEQ ID NO: 87124 - RNA, 12 nt, Artificial Sequence
  Description of Artificial Sequence: Synthetic oligonucleotide
agaagcccuuca

SEQ ID NO: 87125 - RNA, 11 nt, Artificial Sequence
  Description of Artificial Sequence: Synthetic oligonucleotide
gcccuucagcg

SEQ ID NO: 87126 - RNA, 11 nt, Artificial Sequence
  Description of Artificial Sequence: Synthetic oligonucleotide
ccuucagcggc

SEQ ID NO: 87127 - RNA, 12 nt, Artificial Sequence
  Description of Artificial Sequence: Synthetic oligonucleotide
ucagcggccagu

SEQ ID NO: 87128 - RNA, 12 nt, Artificial Sequence
  Description of Artificial Sequence: Synthetic oligonucleotide
ugaaaagcuccg

SEQ ID NO: 87129 - RNA, 11 nt, Artificial Sequence
  Description of Artificial Sequence: Synthetic oligonucleotide
aaaagcuccgg

SEQ ID NO: 87130 - RNA, 13 nt, Artificial Sequence
  Description of Artificial Sequence: Synthetic oligonucleotide
agucaacagucug

SEQ ID NO: 87131 - RNA, 13 nt, Artificial Sequence
  Description of Artificial Sequence: Synthetic oligonucleotide
cagaguucaaaag

SEQ ID NO: 87132 - RNA, 13 nt, Artificial Sequence
  Description of Artificial Sequence: Synthetic oligonucleotide
agaguucaaaagc

SEQ ID NO: 87133 - RNA, 12 nt, Artificial Sequence
  Description of Artificial Sequence: Synthetic oligonucleotide
uucaaaagcccu

SEQ ID NO: 87134 - RNA, 12 nt, Artificial Sequence
  Description of Artificial Sequence: Synthetic oligonucleotide
ucaaaagcccuu

SEQ ID NO: 87135 - RNA, 12 nt, Artificial Sequence
  Description of Artificial Sequence: Synthetic oligonucleotide
aaaagcccuuca

SEQ ID NO: 87136 - RNA, 12 nt, Artificial Sequence
  Description of Artificial Sequence: Synthetic oligonucleotide
aaagcccuucag

SEQ ID NO: 87137 - RNA, 13 nt, Artificial Sequence
  Description of Artificial Sequence: Synthetic oligonucleotide
gugaagccgcucg

SEQ ID NO: 87138 - RNA, 12 nt, Artificial Sequence
  Description of Artificial Sequence: Synthetic oligonucleotide
cacgccagucaa

SEQ ID NO: 87139 - RNA, 13 nt, Artificial Sequence
  Description of Artificial Sequence: Synthetic oligonucleotide
uucuuggugcgug

SEQ ID NO: 87140 - RNA, 14 nt, Artificial Sequence
  Description of Artificial Sequence: Synthetic oligonucleotide
auuggauucaucag

SEQ ID NO: 87141 - RNA, 13 nt, Artificial Sequence
  Description of Artificial Sequence: Synthetic oligonucleotide
uggaauaccuaag

SEQ ID NO: 87142 - RNA, 12 nt, Artificial Sequence
  Description of Artificial Sequence: Synthetic oligonucleotide
auuugaggcuca

SEQ ID NO: 87143 - RNA, 11 nt, Artificial Sequence
  Description of Artificial Sequence: Synthetic oligonucleotide
ucuacaauugg

SEQ ID NO: 87144 - RNA, 12 nt, Artificial Sequence
  Description of Artificial Sequence: Synthetic oligonucleotide
uaguuaggagcc

SEQ ID NO: 87145 - RNA, 13 nt, Artificial Sequence
  Description of Artificial Sequence: Synthetic oligonucleotide
agucaauauccac

SEQ ID NO: 87146 - RNA, 13 nt, Artificial Sequence
  Description of Artificial Sequence: Synthetic oligonucleotide
auguucagucaca

SEQ ID NO: 87147 - RNA, 12 nt, Artificial Sequence
  Description of Artificial Sequence: Synthetic oligonucleotide
acacacacauac

SEQ ID NO: 87148 - RNA, 12 nt, Artificial Sequence
  Description of Artificial Sequence: Synthetic oligonucleotide
uuccuuuugcuu

SEQ ID NO: 87149 - RNA, 16 nt, Artificial Sequence
  Description of Artificial Sequence: Synthetic oligonucleotide
uuuuaaaguaauuuuu

SEQ ID NO: 87150 - RNA, 13 nt, Artificial Sequence
  Description of Artificial Sequence: Synthetic oligonucleotide
caacagucaaugg

SEQ ID NO: 87151 - RNA, 13 nt, Artificial Sequence
  Description of Artificial Sequence: Synthetic oligonucleotide
ucgacaaaccaau

SEQ ID NO: 87152 - RNA, 12 nt, Artificial Sequence
  Description of Artificial Sequence: Synthetic oligonucleotide
acugcuaccacu

SEQ ID NO: 87153 - RNA, 13 nt, Artificial Sequence
  Description of Artificial Sequence: Synthetic oligonucleotide
gcaagcggucuua

SEQ ID NO: 87154 - RNA, 13 nt, Artificial Sequence
  Description of Artificial Sequence: Synthetic oligonucleotide
ggucuuaccggcu

SEQ ID NO: 87155 - RNA, 11 nt, Artificial Sequence
  Description of Artificial Sequence: Synthetic oligonucleotide
gauggguuacc

SEQ ID NO: 87156 - RNA, 11 nt, Artificial Sequence
  Description of Artificial Sequence: Synthetic oligonucleotide
guuaccugcga

SEQ ID NO: 87157 - RNA, 12 nt, Artificial Sequence
  Description of Artificial Sequence: Synthetic oligonucleotide
aaucuugcugag

SEQ ID NO: 87158 - RNA, 13 nt, Artificial Sequence
  Description of Artificial Sequence: Synthetic oligonucleotide
agcauaaaacagu

SEQ ID NO: 87159 - RNA, 12 nt, Artificial Sequence
  Description of Artificial Sequence: Synthetic oligonucleotide
guccuuuauccu

SEQ ID NO: 87160 - RNA, 12 nt, Artificial Sequence
  Description of Artificial Sequence: Synthetic oligonucleotide
caacgcaaguug

SEQ ID NO: 87161 - RNA, 13 nt, Artificial Sequence
  Description of Artificial Sequence: Synthetic oligonucleotide
aaacugaaaccau

SEQ ID NO: 87162 - RNA, 14 nt, Artificial Sequence
  Description of Artificial Sequence: Synthetic oligonucleotide
acuuuguuaaauau

SEQ ID NO: 87163 - RNA, 14 nt, Artificial Sequence
  Description of Artificial Sequence: Synthetic oligonucleotide
guauauuaaaaguu

SEQ ID NO: 87164 - RNA, 13 nt, Artificial Sequence
  Description of Artificial Sequence: Synthetic oligonucleotide
guuuugacuuaac

SEQ ID NO: 87165 - RNA, 13 nt, Artificial Sequence
  Description of Artificial Sequence: Synthetic oligonucleotide
gcaaacucagcac

SEQ ID NO: 87166 - RNA, 11 nt, Artificial Sequence
  Description of Artificial Sequence: Synthetic oligonucleotide
ugcugaccuca

SEQ ID NO: 87167 - RNA, 14 nt, Artificial Sequence
  Description of Artificial Sequence: Synthetic oligonucleotide
uuuauucagaucgc

SEQ ID NO: 87168 - RNA, 13 nt, Artificial Sequence
  Description of Artificial Sequence: Synthetic oligonucleotide
aggguucugggau

SEQ ID NO: 87169 - RNA, 15 nt, Artificial Sequence
  Description of Artificial Sequence: Synthetic oligonucleotide
auauuggaaauuaug

SEQ ID NO: 87170 - RNA, 13 nt, Artificial Sequence
  Description of Artificial Sequence: Synthetic oligonucleotide
auggaagcacuag

SEQ ID NO: 87171 - RNA, 13 nt, Artificial Sequence
  Description of Artificial Sequence: Synthetic oligonucleotide
guuuuuaugugga

SEQ ID NO: 87172 - RNA, 12 nt, Artificial Sequence
  Description of Artificial Sequence: Synthetic oligonucleotide
ggaauugguaga

SEQ ID NO: 87173 - RNA, 13 nt, Artificial Sequence
  Description of Artificial Sequence: Synthetic oligonucleotide
uuagacuuggaga

SEQ ID NO: 87174 - RNA, 13 nt, Artificial Sequence
  Description of Artificial Sequence: Synthetic oligonucleotide
uuacaguauucca

SEQ ID NO: 87175 - RNA, 15 nt, Artificial Sequence
  Description of Artificial Sequence: Synthetic oligonucleotide
ccacugaugaauuaa

SEQ ID NO: 87176 - RNA, 12 nt, Artificial Sequence
  Description of Artificial Sequence: Synthetic oligonucleotide
ccacaucaucac

SEQ ID NO: 87177 - RNA, 13 nt, Artificial Sequence
  Description of Artificial Sequence: Synthetic oligonucleotide
cucaccaaacaga

SEQ ID NO: 87178 - RNA, 12 nt, Artificial Sequence
  Description of Artificial Sequence: Synthetic oligonucleotide
ggaacaugaugg

SEQ ID NO: 87179 - RNA, 12 nt, Artificial Sequence
  Description of Artificial Sequence: Synthetic oligonucleotide
cauguagacugc

SEQ ID NO: 87180 - RNA, 13 nt, Artificial Sequence
  Description of Artificial Sequence: Synthetic oligonucleotide
ggaucuauuuaug

SEQ ID NO: 87181 - RNA, 12 nt, Artificial Sequence
  Description of Artificial Sequence: Synthetic oligonucleotide
gcacuauuauca

SEQ ID NO: 87182 - RNA, 11 nt, Artificial Sequence
  Description of Artificial Sequence: Synthetic oligonucleotide
aucaguucugc

SEQ ID NO: 87183 - RNA, 13 nt, Artificial Sequence
  Description of Artificial Sequence: Synthetic oligonucleotide
agauuaaaccuac

SEQ ID NO: 87184 - RNA, 13 nt, Artificial Sequence
  Description of Artificial Sequence: Synthetic oligonucleotide
auaaaauccuucu

SEQ ID NO: 87185 - RNA, 12 nt, Artificial Sequence
  Description of Artificial Sequence: Synthetic oligonucleotide
aaugcuguagac

SEQ ID NO: 87186 - RNA, 13 nt, Artificial Sequence
  Description of Artificial Sequence: Synthetic oligonucleotide
uugauaggaauag

SEQ ID NO: 87187 - RNA, 11 nt, Artificial Sequence
  Description of Artificial Sequence: Synthetic oligonucleotide
aauggcccuga

SEQ ID NO: 87188 - RNA, 11 nt, Artificial Sequence
  Description of Artificial Sequence: Synthetic oligonucleotide
uuccucaagca

SEQ ID NO: 87189 - RNA, 10 nt, Artificial Sequence
  Description of Artificial Sequence: Synthetic oligonucleotide
guucagccca

SEQ ID NO: 87190 - RNA, 11 nt, Artificial Sequence
  Description of Artificial Sequence: Synthetic oligonucleotide
gcugcugaacc

SEQ ID NO: 87191 - RNA, 12 nt, Artificial Sequence
  Description of Artificial Sequence: Synthetic oligonucleotide
aaguucucuuca

SEQ ID NO: 87192 - RNA, 11 nt, Artificial Sequence
  Description of Artificial Sequence: Synthetic oligonucleotide
ccagccuagag

SEQ ID NO: 87193 - RNA, 13 nt, Artificial Sequence
  Description of Artificial Sequence: Synthetic oligonucleotide
cucugugaagugu

SEQ ID NO: 87194 - RNA, 14 nt, Artificial Sequence
  Description of Artificial Sequence: Synthetic oligonucleotide
ugagaaaauuucaa

SEQ ID NO: 87195 - RNA, 11 nt, Artificial Sequence
  Description of Artificial Sequence: Synthetic oligonucleotide
aauccuccuga

SEQ ID NO: 87196 - RNA, 12 nt, Artificial Sequence
  Description of Artificial Sequence: Synthetic oligonucleotide
gugacaucauau

SEQ ID NO: 87197 - RNA, 13 nt, Artificial Sequence
  Description of Artificial Sequence: Synthetic oligonucleotide
aaucuucaucaua

SEQ ID NO: 87198 - RNA, 13 nt, Artificial Sequence
  Description of Artificial Sequence: Synthetic oligonucleotide
gacuagcuauuaa

SEQ ID NO: 87199 - RNA, 14 nt, Artificial Sequence
  Description of Artificial Sequence: Synthetic oligonucleotide
ucucuacuaaaaau

SEQ ID NO: 87200 - RNA, 12 nt, Artificial Sequence
  Description of Artificial Sequence: Synthetic oligonucleotide
ucuaucucgccu

SEQ ID NO: 87201 - RNA, 13 nt, Artificial Sequence
  Description of Artificial Sequence: Synthetic oligonucleotide
cuucgguccaguu

SEQ ID NO: 87202 - RNA, 11 nt, Artificial Sequence
  Description of Artificial Sequence: Synthetic oligonucleotide
gauguagccgc

SEQ ID NO: 87203 - RNA, 12 nt, Artificial Sequence
  Description of Artificial Sequence: Synthetic oligonucleotide
ugaggagacuug

SEQ ID NO: 87204 - RNA, 12 nt, Artificial Sequence
  Description of Artificial Sequence: Synthetic oligonucleotide
gaguagugagga

SEQ ID NO: 87205 - RNA, 14 nt, Artificial Sequence
  Description of Artificial Sequence: Synthetic oligonucleotide
cagaugaguacaaa

SEQ ID NO: 87206 - RNA, 13 nt, Artificial Sequence
  Description of Artificial Sequence: Synthetic oligonucleotide
guuguuaaugggc

SEQ ID NO: 87207 - RNA, 13 nt, Artificial Sequence
  Description of Artificial Sequence: Synthetic oligonucleotide
uuuuuaauuuauu

SEQ ID NO: 87208 - RNA, 12 nt, Artificial Sequence
  Description of Artificial Sequence: Synthetic oligonucleotide
uauuuaaauaug

SEQ ID NO: 87209 - RNA, 13 nt, Artificial Sequence
  Description of Artificial Sequence: Synthetic oligonucleotide
uauccuuuguuuc

SEQ ID NO: 87210 - RNA, 14 nt, Artificial Sequence
  Description of Artificial Sequence: Synthetic oligonucleotide
cgucuaaguguuug

SEQ ID NO: 87211 - RNA, 12 nt, Artificial Sequence
  Description of Artificial Sequence: Synthetic oligonucleotide
accugugacaaa

SEQ ID NO: 87212 - RNA, 13 nt, Artificial Sequence
  Description of Artificial Sequence: Synthetic oligonucleotide
ccaggcugaauua

SEQ ID NO: 87213 - RNA, 14 nt, Artificial Sequence
  Description of Artificial Sequence: Synthetic oligonucleotide
gucauucuuacaau

SEQ ID NO: 87214 - RNA, 15 nt, Artificial Sequence
  Description of Artificial Sequence: Synthetic oligonucleotide
ucauucuuacaauug

SEQ ID NO: 87215 - RNA, 12 nt, Artificial Sequence
  Description of Artificial Sequence: Synthetic oligonucleotide
cagagaguguac

SEQ ID NO: 87216 - RNA, 12 nt, Artificial Sequence
  Description of Artificial Sequence: Synthetic oligonucleotide
agaacucagcag

SEQ ID NO: 87217 - RNA, 13 nt, Artificial Sequence
  Description of Artificial Sequence: Synthetic oligonucleotide
uuuauuuucagua

SEQ ID NO: 87218 - RNA, 12 nt, Artificial Sequence
  Description of Artificial Sequence: Synthetic oligonucleotide
ucuuaaauggaa

SEQ ID NO: 87219 - RNA, 13 nt, Artificial Sequence
  Description of Artificial Sequence: Synthetic oligonucleotide
ugccuaaaauugu

SEQ ID NO: 87220 - RNA, 12 nt, Artificial Sequence
  Description of Artificial Sequence: Synthetic oligonucleotide
agacugugagcu

SEQ ID NO: 87221 - RNA, 14 nt, Artificial Sequence
  Description of Artificial Sequence: Synthetic oligonucleotide
ugcuuuuuauuaau

SEQ ID NO: 87222 - RNA, 13 nt, Artificial Sequence
  Description of Artificial Sequence: Synthetic oligonucleotide
cucuucuuacauu

SEQ ID NO: 87223 - RNA, 15 nt, Artificial Sequence
  Description of Artificial Sequence: Synthetic oligonucleotide
cauuuguaaaaaugu

SEQ ID NO: 87224 - RNA, 15 nt, Artificial Sequence
  Description of Artificial Sequence: Synthetic oligonucleotide
aucuuaauucauauu

SEQ ID NO: 87225 - RNA, 13 nt, Artificial Sequence
  Description of Artificial Sequence: Synthetic oligonucleotide
gaacuaaucauga

SEQ ID NO: 87226 - RNA, 12 nt, Artificial Sequence
  Description of Artificial Sequence: Synthetic oligonucleotide
ucugcucuuggg

SEQ ID NO: 87227 - RNA, 13 nt, Artificial Sequence
  Description of Artificial Sequence: Synthetic oligonucleotide
caguagcuuugag

SEQ ID NO: 87228 - RNA, 14 nt, Artificial Sequence
  Description of Artificial Sequence: Synthetic oligonucleotide
cacguaauauuuca

SEQ ID NO: 87229 - RNA, 13 nt, Artificial Sequence
  Description of Artificial Sequence: Synthetic oligonucleotide
uauucucuucacu

SEQ ID NO: 87230 - RNA, 14 nt, Artificial Sequence
  Description of Artificial Sequence: Synthetic oligonucleotide
cuaaugcuaagaaa

SEQ ID NO: 87231 - RNA, 12 nt, Artificial Sequence
  Description of Artificial Sequence: Synthetic oligonucleotide
gcugaaaaucaa

SEQ ID NO: 87232 - RNA, 14 nt, Artificial Sequence
  Description of Artificial Sequence: Synthetic oligonucleotide
aauaugauuacuuu

SEQ ID NO: 87233 - RNA, 14 nt, Artificial Sequence
  Description of Artificial Sequence: Synthetic oligonucleotide
cauuuuguucuaca

SEQ ID NO: 87234 - RNA, 12 nt, Artificial Sequence
  Description of Artificial Sequence: Synthetic oligonucleotide
cccgggacucuc

SEQ ID NO: 87235 - RNA, 14 nt, Artificial Sequence
  Description of Artificial Sequence: Synthetic oligonucleotide
ccuuuaaaguaaag

SEQ ID NO: 87236 - RNA, 13 nt, Artificial Sequence
  Description of Artificial Sequence: Synthetic oligonucleotide
ucuggaagccugg

SEQ ID NO: 87237 - RNA, 14 nt, Artificial Sequence
  Description of Artificial Sequence: Synthetic oligonucleotide
aaaacaaaagagag

SEQ ID NO: 87238 - RNA, 13 nt, Artificial Sequence
  Description of Artificial Sequence: Synthetic oligonucleotide
aucaguuaugccg

SEQ ID NO: 87239 - RNA, 13 nt, Artificial Sequence
  Description of Artificial Sequence: Synthetic oligonucleotide
uaaaagaagucca

SEQ ID NO: 87240 - RNA, 11 nt, Artificial Sequence
  Description of Artificial Sequence: Synthetic oligonucleotide
aggugagguua

SEQ ID NO: 87241 - RNA, 11 nt, Artificial Sequence
  Description of Artificial Sequence: Synthetic oligonucleotide
gggaagaggac

SEQ ID NO: 87242 - RNA, 13 nt, Artificial Sequence
  Description of Artificial Sequence: Synthetic oligonucleotide
aagcaaguauugu

SEQ ID NO: 87243 - RNA, 12 nt, Artificial Sequence
  Description of Artificial Sequence: Synthetic oligonucleotide
auuguagcacuc

SEQ ID NO: 87244 - RNA, 14 nt, Artificial Sequence
  Description of Artificial Sequence: Synthetic oligonucleotide
acaaaaccacaaau

SEQ ID NO: 87245 - RNA, 12 nt, Artificial Sequence
  Description of Artificial Sequence: Synthetic oligonucleotide
uaagcccauaca

SEQ ID NO: 87246 - RNA, 11 nt, Artificial Sequence
  Description of Artificial Sequence: Synthetic oligonucleotide
agcccauacag

SEQ ID NO: 87247 - RNA, 12 nt, Artificial Sequence
  Description of Artificial Sequence: Synthetic oligonucleotide
cagaaaccuucc

SEQ ID NO: 87248 - RNA, 10 nt, Artificial Sequence
  Description of Artificial Sequence: Synthetic oligonucleotide
guauaccuac

SEQ ID NO: 87249 - RNA, 13 nt, Artificial Sequence
  Description of Artificial Sequence: Synthetic oligonucleotide
gccaguuuucgga

SEQ ID NO: 87250 - RNA, 9 nt, Artificial Sequence
  Description of Artificial Sequence: Synthetic oligonucleotide
ggaacaggg

SEQ ID NO: 87251 - RNA, 13 nt, Artificial Sequence
  Description of Artificial Sequence: Synthetic oligonucleotide
uuaacuuuccagu

SEQ ID NO: 87252 - RNA, 14 nt, Artificial Sequence
  Description of Artificial Sequence: Synthetic oligonucleotide
aaaguuugguuuug

SEQ ID NO: 87253 - RNA, 12 nt, Artificial Sequence
  Description of Artificial Sequence: Synthetic oligonucleotide
cuucccacugua

SEQ ID NO: 87254 - RNA, 13 nt, Artificial Sequence
  Description of Artificial Sequence: Synthetic oligonucleotide
ugauaccauauga

SEQ ID NO: 87255 - RNA, 11 nt, Artificial Sequence
  Description of Artificial Sequence: Synthetic oligonucleotide
aacaugggcug

SEQ ID NO: 87256 - RNA, 13 nt, Artificial Sequence
  Description of Artificial Sequence: Synthetic oligonucleotide
caacuuuuucaua

SEQ ID NO: 87257 - RNA, 12 nt, Artificial Sequence
  Description of Artificial Sequence: Synthetic oligonucleotide
caugaggccgga

SEQ ID NO: 87258 - RNA, 11 nt, Artificial Sequence
  Description of Artificial Sequence: Synthetic oligonucleotide
acugcauuugu

SEQ ID NO: 87259 - RNA, 13 nt, Artificial Sequence
  Description of Artificial Sequence: Synthetic oligonucleotide
aauguuuacuacc

SEQ ID NO: 87260 - RNA, 15 nt, Artificial Sequence
  Description of Artificial Sequence: Synthetic oligonucleotide
aauuuuuugaugaaa

SEQ ID NO: 87261 - RNA, 14 nt, Artificial Sequence
  Description of Artificial Sequence: Synthetic oligonucleotide
cagugugugaauuu

SEQ ID NO: 87262 - RNA, 13 nt, Artificial Sequence
  Description of Artificial Sequence: Synthetic oligonucleotide
gagcaauguaugu

SEQ ID NO: 87263 - RNA, 14 nt, Artificial Sequence
  Description of Artificial Sequence: Synthetic oligonucleotide
aaagcacauauaua

SEQ ID NO: 87264 - RNA, 14 nt, Artificial Sequence
  Description of Artificial Sequence: Synthetic oligonucleotide
guaauaguuucucc

SEQ ID NO: 87265 - RNA, 13 nt, Artificial Sequence
  Description of Artificial Sequence: Synthetic oligonucleotide
aguuucuccaaau

SEQ ID NO: 87266 - RNA, 13 nt, Artificial Sequence
  Description of Artificial Sequence: Synthetic oligonucleotide
uacuuccuagaaa

SEQ ID NO: 87267 - RNA, 13 nt, Artificial Sequence
  Description of Artificial Sequence: Synthetic oligonucleotide
uacaccauauaug

SEQ ID NO: 87268 - RNA, 14 nt, Artificial Sequence
  Description of Artificial Sequence: Synthetic oligonucleotide
auauaugaauggag

SEQ ID NO: 87269 - RNA, 13 nt, Artificial Sequence
  Description of Artificial Sequence: Synthetic oligonucleotide
acgagaagaagau

SEQ ID NO: 87270 - RNA, 13 nt, Artificial Sequence
  Description of Artificial Sequence: Synthetic oligonucleotide
ucauuuacaggga

SEQ ID NO: 87271 - RNA, 13 nt, Artificial Sequence
  Description of Artificial Sequence: Synthetic oligonucleotide
cauuuacagggac

SEQ ID NO: 87272 - RNA, 10 nt, Artificial Sequence
  Description of Artificial Sequence: Synthetic oligonucleotide
agggaccuga

SEQ ID NO: 87273 - RNA, 14 nt, Artificial Sequence
  Description of Artificial Sequence: Synthetic oligonucleotide
uguuugacugcauc

SEQ ID NO: 87274 - RNA, 13 nt, Artificial Sequence
  Description of Artificial Sequence: Synthetic oligonucleotide
uuugacugcaucg

SEQ ID NO: 87275 - RNA, 12 nt, Artificial Sequence
  Description of Artificial Sequence: Synthetic oligonucleotide
gaguucacaggg

SEQ ID NO: 87276 - RNA, 13 nt, Artificial Sequence
  Description of Artificial Sequence: Synthetic oligonucleotide
ggcaccucugucc

SEQ ID NO: 87277 - RNA, 15 nt, Artificial Sequence
  Description of Artificial Sequence: Synthetic oligonucleotide
gguuugucuuuuuaa

SEQ ID NO: 87278 - RNA, 14 nt, Artificial Sequence
  Description of Artificial Sequence: Synthetic oligonucleotide
uuugucuuuuuaag

SEQ ID NO: 87279 - RNA, 13 nt, Artificial Sequence
  Description of Artificial Sequence: Synthetic oligonucleotide
ccuaaagguuguc

SEQ ID NO: 87280 - RNA, 12 nt, Artificial Sequence
  Description of Artificial Sequence: Synthetic oligonucleotide
aagguugucgac

SEQ ID NO: 87281 - RNA, 13 nt, Artificial Sequence
  Description of Artificial Sequence: Synthetic oligonucleotide
accuggcaauugu

SEQ ID NO: 87282 - RNA, 12 nt, Artificial Sequence
  Description of Artificial Sequence: Synthetic oligonucleotide
aguggugcgagg

SEQ ID NO: 87283 - RNA, 13 nt, Artificial Sequence
  Description of Artificial Sequence: Synthetic oligonucleotide
agagacaugaaau

SEQ ID NO: 87284 - RNA, 13 nt, Artificial Sequence
  Description of Artificial Sequence: Synthetic oligonucleotide
auauauuucucca

SEQ ID NO: 87285 - RNA, 10 nt, Artificial Sequence
  Description of Artificial Sequence: Synthetic oligonucleotide
caugaaggcu

SEQ ID NO: 87286 - RNA, 11 nt, Artificial Sequence
  Description of Artificial Sequence: Synthetic oligonucleotide
gcuggaguggu

SEQ ID NO: 87287 - RNA, 11 nt, Artificial Sequence
  Description of Artificial Sequence: Synthetic oligonucleotide
aggaagagagg

SEQ ID NO: 87288 - RNA, 12 nt, Artificial Sequence
  Description of Artificial Sequence: Synthetic oligonucleotide
cuugcaucgggc

SEQ ID NO: 87289 - RNA, 13 nt, Artificial Sequence
  Description of Artificial Sequence: Synthetic oligonucleotide
auauccuacugug

SEQ ID NO: 87290 - RNA, 13 nt, Artificial Sequence
  Description of Artificial Sequence: Synthetic oligonucleotide
uccuacuguguaa

SEQ ID NO: 87291 - RNA, 12 nt, Artificial Sequence
  Description of Artificial Sequence: Synthetic oligonucleotide
ccuuguagugua

SEQ ID NO: 87292 - RNA, 13 nt, Artificial Sequence
  Description of Artificial Sequence: Synthetic oligonucleotide
ucuuuguugauug

SEQ ID NO: 87293 - RNA, 14 nt, Artificial Sequence
  Description of Artificial Sequence: Synthetic oligonucleotide
uuuguugauugaaa

SEQ ID NO: 87294 - RNA, 15 nt, Artificial Sequence
  Description of Artificial Sequence: Synthetic oligonucleotide
uucuuuuucuuccau

SEQ ID NO: 87295 - RNA, 13 nt, Artificial Sequence
  Description of Artificial Sequence: Synthetic oligonucleotide
aaucuuccuucua

SEQ ID NO: 87296 - RNA, 13 nt, Artificial Sequence
  Description of Artificial Sequence: Synthetic oligonucleotide
uugaaugcuucau

SEQ ID NO: 87297 - RNA, 13 nt, Artificial Sequence
  Description of Artificial Sequence: Synthetic oligonucleotide
ugaaugcuucaug

SEQ ID NO: 87298 - RNA, 13 nt, Artificial Sequence
  Description of Artificial Sequence: Synthetic oligonucleotide
aauucuacuuuga

SEQ ID NO: 87299 - RNA, 13 nt, Artificial Sequence
  Description of Artificial Sequence: Synthetic oligonucleotide
agcaacuacagac

SEQ ID NO: 87300 - RNA, 13 nt, Artificial Sequence
  Description of Artificial Sequence: Synthetic oligonucleotide
gaccaaggucaac

SEQ ID NO: 87301 - RNA, 13 nt, Artificial Sequence
  Description of Artificial Sequence: Synthetic oligonucleotide
cgacuaucucgac

SEQ ID NO: 87302 - RNA, 13 nt, Artificial Sequence
  Description of Artificial Sequence: Synthetic oligonucleotide
aaccuucccaaac

SEQ ID NO: 87303 - RNA, 14 nt, Artificial Sequence
  Description of Artificial Sequence: Synthetic oligonucleotide
ccaagcuuagaacu

SEQ ID NO: 87304 - RNA, 15 nt, Artificial Sequence
  Description of Artificial Sequence: Synthetic oligonucleotide
agcuuagaacuuuaa

SEQ ID NO: 87305 - RNA, 11 nt, Artificial Sequence
  Description of Artificial Sequence: Synthetic oligonucleotide
aagaccaccac

SEQ ID NO: 87306 - RNA, 14 nt, Artificial Sequence
  Description of Artificial Sequence: Synthetic oligonucleotide
gcgagaaauaaagu

SEQ ID NO: 87307 - RNA, 14 nt, Artificial Sequence
  Description of Artificial Sequence: Synthetic oligonucleotide
cgagaaauaaaguu

SEQ ID NO: 87308 - RNA, 12 nt, Artificial Sequence
  Description of Artificial Sequence: Synthetic oligonucleotide
aggaaaugaucc

SEQ ID NO: 87309 - RNA, 13 nt, Artificial Sequence
  Description of Artificial Sequence: Synthetic oligonucleotide
gaagaaaugaaac

SEQ ID NO: 87310 - RNA, 13 nt, Artificial Sequence
  Description of Artificial Sequence: Synthetic oligonucleotide
guuuccauccucc

SEQ ID NO: 87311 - RNA, 15 nt, Artificial Sequence
  Description of Artificial Sequence: Synthetic oligonucleotide
acugaaaaucuuuga

SEQ ID NO: 87312 - RNA, 11 nt, Artificial Sequence
  Description of Artificial Sequence: Synthetic oligonucleotide
ugccguucagg

SEQ ID NO: 87313 - RNA, 13 nt, Artificial Sequence
  Description of Artificial Sequence: Synthetic oligonucleotide
caggguccagaag

SEQ ID NO: 87314 - RNA, 13 nt, Artificial Sequence
  Description of Artificial Sequence: Synthetic oligonucleotide
ucaagacugcuug

SEQ ID NO: 87315 - RNA, 13 nt, Artificial Sequence
  Description of Artificial Sequence: Synthetic oligonucleotide
uccaugucuuugg

SEQ ID NO: 87316 - RNA, 11 nt, Artificial Sequence
  Description of Artificial Sequence: Synthetic oligonucleotide
gccugaaacac

SEQ ID NO: 87317 - RNA, 12 nt, Artificial Sequence
  Description of Artificial Sequence: Synthetic oligonucleotide
ucucuguaccuc

SEQ ID NO: 87318 - RNA, 12 nt, Artificial Sequence
  Description of Artificial Sequence: Synthetic oligonucleotide
agcaagacaaga

SEQ ID NO: 87319 - RNA, 13 nt, Artificial Sequence
  Description of Artificial Sequence: Synthetic oligonucleotide
gcaagacaagaaa

SEQ ID NO: 87320 - RNA, 12 nt, Artificial Sequence
  Description of Artificial Sequence: Synthetic oligonucleotide
uguacaagaucc

SEQ ID NO: 87321 - RNA, 12 nt, Artificial Sequence
  Description of Artificial Sequence: Synthetic oligonucleotide
cguacuugcaga

SEQ ID NO: 87322 - RNA, 13 nt, Artificial Sequence
  Description of Artificial Sequence: Synthetic oligonucleotide
cgaucgauacaga

SEQ ID NO: 87323 - RNA, 13 nt, Artificial Sequence
  Description of Artificial Sequence: Synthetic oligonucleotide
uauaaaaauaaau

SEQ ID NO: 87324 - RNA, 13 nt, Artificial Sequence
  Description of Artificial Sequence: Synthetic oligonucleotide
uaaaaauaaauau

SEQ ID NO: 87325 - RNA, 13 nt, Artificial Sequence
  Description of Artificial Sequence: Synthetic oligonucleotide
uuugacugcugug

SEQ ID NO: 87326 - RNA, 13 nt, Artificial Sequence
  Description of Artificial Sequence: Synthetic oligonucleotide
ggagaugagagac

SEQ ID NO: 87327 - RNA, 10 nt, Artificial Sequence
  Description of Artificial Sequence: Synthetic oligonucleotide
ucccacuugg

SEQ ID NO: 87328 - RNA, 10 nt, Artificial Sequence
  Description of Artificial Sequence: Synthetic oligonucleotide
guucacggcc

SEQ ID NO: 87329 - RNA, 12 nt, Artificial Sequence
  Description of Artificial Sequence: Synthetic oligonucleotide
accaucacacca

SEQ ID NO: 87330 - RNA, 10 nt, Artificial Sequence
  Description of Artificial Sequence: Synthetic oligonucleotide
cugcggguuu

SEQ ID NO: 87331 - RNA, 9 nt, Artificial Sequence
  Description of Artificial Sequence: Synthetic oligonucleotide
uccaguuug

SEQ ID NO: 87332 - RNA, 12 nt, Artificial Sequence
  Description of Artificial Sequence: Synthetic oligonucleotide
uuaaggacuucu

SEQ ID NO: 87333 - RNA, 12 nt, Artificial Sequence
  Description of Artificial Sequence: Synthetic oligonucleotide
agugggacagag

SEQ ID NO: 87334 - RNA, 13 nt, Artificial Sequence
  Description of Artificial Sequence: Synthetic oligonucleotide
auuuguuauugug

SEQ ID NO: 87335 - RNA, 12 nt, Artificial Sequence
  Description of Artificial Sequence: Synthetic oligonucleotide
ucaaaugcauuu

SEQ ID NO: 87336 - RNA, 9 nt, Artificial Sequence
  Description of Artificial Sequence: Synthetic oligonucleotide
aggaaagcc

SEQ ID NO: 87337 - RNA, 10 nt, Artificial Sequence
  Description of Artificial Sequence: Synthetic oligonucleotide
ggaaagcccu

SEQ ID NO: 87338 - RNA, 11 nt, Artificial Sequence
  Description of Artificial Sequence: Synthetic oligonucleotide
ccagcauggcc

SEQ ID NO: 87339 - RNA, 10 nt, Artificial Sequence
  Description of Artificial Sequence: Synthetic oligonucleotide
uucucccuga

SEQ ID NO: 87340 - RNA, 11 nt, Artificial Sequence
  Description of Artificial Sequence: Synthetic oligonucleotide
aagaagcccuu

SEQ ID NO: 87341 - RNA, 11 nt, Artificial Sequence
  Description of Artificial Sequence: Synthetic oligonucleotide
gaagcccuuca

SEQ ID NO: 87342 - RNA, 10 nt, Artificial Sequence
  Description of Artificial Sequence: Synthetic oligonucleotide
cccuucagcg

SEQ ID NO: 87343 - RNA, 10 nt, Artificial Sequence
  Description of Artificial Sequence: Synthetic oligonucleotide
cuucagcggc

SEQ ID NO: 87344 - RNA, 11 nt, Artificial Sequence
  Description of Artificial Sequence: Synthetic oligonucleotide
cagcggccagu

SEQ ID NO: 87345 - RNA, 11 nt, Artificial Sequence
  Description of Artificial Sequence: Synthetic oligonucleotide
gaaaagcuccg

SEQ ID NO: 87346 - RNA, 10 nt, Artificial Sequence
  Description of Artificial Sequence: Synthetic oligonucleotide
aaagcuccgg

SEQ ID NO: 87347 - RNA, 12 nt, Artificial Sequence
  Description of Artificial Sequence: Synthetic oligonucleotide
gucaacagucug

SEQ ID NO: 87348 - RNA, 12 nt, Artificial Sequence
  Description of Artificial Sequence: Synthetic oligonucleotide
agaguucaaaag

SEQ ID NO: 87349 - RNA, 12 nt, Artificial Sequence
  Description of Artificial Sequence: Synthetic oligonucleotide
gaguucaaaagc

SEQ ID NO: 87350 - RNA, 11 nt, Artificial Sequence
  Description of Artificial Sequence: Synthetic oligonucleotide
ucaaaagcccu

SEQ ID NO: 87351 - RNA, 11 nt, Artificial Sequence
  Description of Artificial Sequence: Synthetic oligonucleotide
caaaagcccuu

SEQ ID NO: 87352 - RNA, 11 nt, Artificial Sequence
  Description of Artificial Sequence: Synthetic oligonucleotide
aaagcccuuca

SEQ ID NO: 87353 - RNA, 11 nt, Artificial Sequence
  Description of Artificial Sequence: Synthetic oligonucleotide
aagcccuucag

SEQ ID NO: 87354 - RNA, 12 nt, Artificial Sequence
  Description of Artificial Sequence: Synthetic oligonucleotide
ugaagccgcucg

SEQ ID NO: 87355 - RNA, 11 nt, Artificial Sequence
  Description of Artificial Sequence: Synthetic oligonucleotide
acgccagucaa

SEQ ID NO: 87356 - RNA, 12 nt, Artificial Sequence
  Description of Artificial Sequence: Synthetic oligonucleotide
ucuuggugcgug

SEQ ID NO: 87357 - RNA, 13 nt, Artificial Sequence
  Description of Artificial Sequence: Synthetic oligonucleotide
uuggauucaucag

SEQ ID NO: 87358 - RNA, 12 nt, Artificial Sequence
  Description of Artificial Sequence: Synthetic oligonucleotide
ggaauaccuaag

SEQ ID NO: 87359 - RNA, 11 nt, Artificial Sequence
  Description of Artificial Sequence: Synthetic oligonucleotide
uuugaggcuca

SEQ ID NO: 87360 - RNA, 10 nt, Artificial Sequence
  Description of Artificial Sequence: Synthetic oligonucleotide
cuacaauugg

SEQ ID NO: 87361 - RNA, 11 nt, Artificial Sequence
  Description of Artificial Sequence: Synthetic oligonucleotide
aguuaggagcc

SEQ ID NO: 87362 - RNA, 12 nt, Artificial Sequence
  Description of Artificial Sequence: Synthetic oligonucleotide
gucaauauccac

SEQ ID NO: 87363 - RNA, 12 nt, Artificial Sequence
  Description of Artificial Sequence: Synthetic oligonucleotide
uguucagucaca

SEQ ID NO: 87364 - RNA, 11 nt, Artificial Sequence
  Description of Artificial Sequence: Synthetic oligonucleotide
cacacacauac

SEQ ID NO: 87365 - RNA, 11 nt, Artificial Sequence
  Description of Artificial Sequence: Synthetic oligonucleotide
uccuuuugcuu

SEQ ID NO: 87366 - RNA, 15 nt, Artificial Sequence
  Description of Artificial Sequence: Synthetic oligonucleotide
uuuaaaguaauuuuu

SEQ ID NO: 87367 - RNA, 12 nt, Artificial Sequence
  Description of Artificial Sequence: Synthetic oligonucleotide
aacagucaaugg

SEQ ID NO: 87368 - RNA, 12 nt, Artificial Sequence
  Description of Artificial Sequence: Synthetic oligonucleotide
cgacaaaccaau

SEQ ID NO: 87369 - RNA, 11 nt, Artificial Sequence
  Description of Artificial Sequence: Synthetic oligonucleotide
cugcuaccacu

SEQ ID NO: 87370 - RNA, 12 nt, Artificial Sequence
  Description of Artificial Sequence: Synthetic oligonucleotide
caagcggucuua

SEQ ID NO: 87371 - RNA, 12 nt, Artificial Sequence
  Description of Artificial Sequence: Synthetic oligonucleotide
gucuuaccggcu

SEQ ID NO: 87372 - RNA, 10 nt, Artificial Sequence
  Description of Artificial Sequence: Synthetic oligonucleotide
auggguuacc

SEQ ID NO: 87373 - RNA, 10 nt, Artificial Sequence
  Description of Artificial Sequence: Synthetic oligonucleotide
uuaccugcga

SEQ ID NO: 87374 - RNA, 11 nt, Artificial Sequence
  Description of Artificial Sequence: Synthetic oligonucleotide
aucuugcugag

SEQ ID NO: 87375 - RNA, 12 nt, Artificial Sequence
  Description of Artificial Sequence: Synthetic oligonucleotide
gcauaaaacagu

SEQ ID NO: 87376 - RNA, 11 nt, Artificial Sequence
  Description of Artificial Sequence: Synthetic oligonucleotide
uccuuuauccu

SEQ ID NO: 87377 - RNA, 11 nt, Artificial Sequence
  Description of Artificial Sequence: Synthetic oligonucleotide
aacgcaaguug

SEQ ID NO: 87378 - RNA, 12 nt, Artificial Sequence
  Description of Artificial Sequence: Synthetic oligonucleotide
aacugaaaccau

SEQ ID NO: 87379 - RNA, 13 nt, Artificial Sequence
  Description of Artificial Sequence: Synthetic oligonucleotide
cuuuguuaaauau

SEQ ID NO: 87380 - RNA, 13 nt, Artificial Sequence
  Description of Artificial Sequence: Synthetic oligonucleotide
uauauuaaaaguu

SEQ ID NO: 87381 - RNA, 12 nt, Artificial Sequence
  Description of Artificial Sequence: Synthetic oligonucleotide
uuuugacuuaac

SEQ ID NO: 87382 - RNA, 12 nt, Artificial Sequence
  Description of Artificial Sequence: Synthetic oligonucleotide
caaacucagcac

SEQ ID NO: 87383 - RNA, 10 nt, Artificial Sequence
  Description of Artificial Sequence: Synthetic oligonucleotide
gcugaccuca

SEQ ID NO: 87384 - RNA, 13 nt, Artificial Sequence
  Description of Artificial Sequence: Synthetic oligonucleotide
uuauucagaucgc

SEQ ID NO: 87385 - RNA, 12 nt, Artificial Sequence
  Description of Artificial Sequence: Synthetic oligonucleotide
ggguucugggau

SEQ ID NO: 87386 - RNA, 14 nt, Artificial Sequence
  Description of Artificial Sequence: Synthetic oligonucleotide
uauuggaaauuaug

SEQ ID NO: 87387 - RNA, 12 nt, Artificial Sequence
  Description of Artificial Sequence: Synthetic oligonucleotide
uggaagcacuag

SEQ ID NO: 87388 - RNA, 12 nt, Artificial Sequence
  Description of Artificial Sequence: Synthetic oligonucleotide
uuuuuaugugga

SEQ ID NO: 87389 - RNA, 11 nt, Artificial Sequence
  Description of Artificial Sequence: Synthetic oligonucleotide
gaauugguaga

SEQ ID NO: 87390 - RNA, 12 nt, Artificial Sequence
  Description of Artificial Sequence: Synthetic oligonucleotide
uagacuuggaga

SEQ ID NO: 87391 - RNA, 12 nt, Artificial Sequence
  Description of Artificial Sequence: Synthetic oligonucleotide
uacaguauucca

SEQ ID NO: 87392 - RNA, 14 nt, Artificial Sequence
  Description of Artificial Sequence: Synthetic oligonucleotide
cacugaugaauuaa

SEQ ID NO: 87393 - RNA, 11 nt, Artificial Sequence
  Description of Artificial Sequence: Synthetic oligonucleotide
cacaucaucac

SEQ ID NO: 87394 - RNA, 12 nt, Artificial Sequence
  Description of Artificial Sequence: Synthetic oligonucleotide
ucaccaaacaga

SEQ ID NO: 87395 - RNA, 11 nt, Artificial Sequence
  Description of Artificial Sequence: Synthetic oligonucleotide
gaacaugaugg

SEQ ID NO: 87396 - RNA, 11 nt, Artificial Sequence
  Description of Artificial Sequence: Synthetic oligonucleotide
auguagacugc

SEQ ID NO: 87397 - RNA, 12 nt, Artificial Sequence
  Description of Artificial Sequence: Synthetic oligonucleotide
gaucuauuuaug

SEQ ID NO: 87398 - RNA, 11 nt, Artificial Sequence
  Description of Artificial Sequence: Synthetic oligonucleotide
cacuauuauca

SEQ ID NO: 87399 - RNA, 10 nt, Artificial Sequence
  Description of Artificial Sequence: Synthetic oligonucleotide
ucaguucugc

SEQ ID NO: 87400 - RNA, 12 nt, Artificial Sequence
  Description of Artificial Sequence: Synthetic oligonucleotide
gauuaaaccuac

SEQ ID NO: 87401 - RNA, 12 nt, Artificial Sequence
  Description of Artificial Sequence: Synthetic oligonucleotide
uaaaauccuucu

SEQ ID NO: 87402 - RNA, 11 nt, Artificial Sequence
  Description of Artificial Sequence: Synthetic oligonucleotide
augcuguagac

SEQ ID NO: 87403 - RNA, 12 nt, Artificial Sequence
  Description of Artificial Sequence: Synthetic oligonucleotide
ugauaggaauag

SEQ ID NO: 87404 - RNA, 10 nt, Artificial Sequence
  Description of Artificial Sequence: Synthetic oligonucleotide
auggcccuga

SEQ ID NO: 87405 - RNA, 10 nt, Artificial Sequence
  Description of Artificial Sequence: Synthetic oligonucleotide
uccucaagca

SEQ ID NO: 87406 - RNA, 9 nt, Artificial Sequence
  Description of Artificial Sequence: Synthetic oligonucleotide
uucagccca

SEQ ID NO: 87407 - RNA, 10 nt, Artificial Sequence
  Description of Artificial Sequence: Synthetic oligonucleotide
cugcugaacc

SEQ ID NO: 87408 - RNA, 11 nt, Artificial Sequence
  Description of Artificial Sequence: Synthetic oligonucleotide
aguucucuuca

SEQ ID NO: 87409 - RNA, 10 nt, Artificial Sequence
  Description of Artificial Sequence: Synthetic oligonucleotide
cagccuagag

SEQ ID NO: 87410 - RNA, 12 nt, Artificial Sequence
  Description of Artificial Sequence: Synthetic oligonucleotide
ucugugaagugu

SEQ ID NO: 87411 - RNA, 13 nt, Artificial Sequence
  Description of Artificial Sequence: Synthetic oligonucleotide
gagaaaauuucaa

SEQ ID NO: 87412 - RNA, 10 nt, Artificial Sequence
  Description of Artificial Sequence: Synthetic oligonucleotide
auccuccuga

SEQ ID NO: 87413 - RNA, 11 nt, Artificial Sequence
  Description of Artificial Sequence: Synthetic oligonucleotide
ugacaucauau

SEQ ID NO: 87414 - RNA, 12 nt, Artificial Sequence
  Description of Artificial Sequence: Synthetic oligonucleotide
aucuucaucaua

SEQ ID NO: 87415 - RNA, 12 nt, Artificial Sequence
  Description of Artificial Sequence: Synthetic oligonucleotide
acuagcuauuaa

SEQ ID NO: 87416 - RNA, 13 nt, Artificial Sequence
  Description of Artificial Sequence: Synthetic oligonucleotide
cucuacuaaaaau

SEQ ID NO: 87417 - RNA, 11 nt, Artificial Sequence
  Description of Artificial Sequence: Synthetic oligonucleotide
cuaucucgccu

SEQ ID NO: 87418 - RNA, 12 nt, Artificial Sequence
  Description of Artificial Sequence: Synthetic oligonucleotide
uucgguccaguu

SEQ ID NO: 87419 - RNA, 10 nt, Artificial Sequence
  Description of Artificial Sequence: Synthetic oligonucleotide
auguagccgc

SEQ ID NO: 87420 - RNA, 11 nt, Artificial Sequence
  Description of Artificial Sequence: Synthetic oligonucleotide
gaggagacuug

SEQ ID NO: 87421 - RNA, 11 nt, Artificial Sequence
  Description of Artificial Sequence: Synthetic oligonucleotide
aguagugagga

SEQ ID NO: 87422 - RNA, 13 nt, Artificial Sequence
  Description of Artificial Sequence: Synthetic oligonucleotide
agaugaguacaaa

SEQ ID NO: 87423 - RNA, 12 nt, Artificial Sequence
  Description of Artificial Sequence: Synthetic oligonucleotide
uuguuaaugggc

SEQ ID NO: 87424 - RNA, 12 nt, Artificial Sequence
  Description of Artificial Sequence: Synthetic oligonucleotide
uuuuaauuuauu

SEQ ID NO: 87425 - RNA, 11 nt, Artificial Sequence
  Description of Artificial Sequence: Synthetic oligonucleotide
auuuaaauaug

SEQ ID NO: 87426 - RNA, 12 nt, Artificial Sequence
  Description of Artificial Sequence: Synthetic oligonucleotide
auccuuuguuuc

SEQ ID NO: 87427 - RNA, 13 nt, Artificial Sequence
  Description of Artificial Sequence: Synthetic oligonucleotide
gucuaaguguuug

SEQ ID NO: 87428 - RNA, 11 nt, Artificial Sequence
  Description of Artificial Sequence: Synthetic oligonucleotide
ccugugacaaa

SEQ ID NO: 87429 - RNA, 12 nt, Artificial Sequence
  Description of Artificial Sequence: Synthetic oligonucleotide
caggcugaauua

SEQ ID NO: 87430 - RNA, 13 nt, Artificial Sequence
  Description of Artificial Sequence: Synthetic oligonucleotide
ucauucuuacaau

SEQ ID NO: 87431 - RNA, 14 nt, Artificial Sequence
  Description of Artificial Sequence: Synthetic oligonucleotide
cauucuuacaauug

SEQ ID NO: 87432 - RNA, 11 nt, Artificial Sequence
  Description of Artificial Sequence: Synthetic oligonucleotide
agagaguguac

SEQ ID NO: 87433 - RNA, 11 nt, Artificial Sequence
  Description of Artificial Sequence: Synthetic oligonucleotide
gaacucagcag

SEQ ID NO: 87434 - RNA, 12 nt, Artificial Sequence
  Description of Artificial Sequence: Synthetic oligonucleotide
uuauuuucagua

SEQ ID NO: 87435 - RNA, 11 nt, Artificial Sequence
  Description of Artificial Sequence: Synthetic oligonucleotide
cuuaaauggaa

SEQ ID NO: 87436 - RNA, 12 nt, Artificial Sequence
  Description of Artificial Sequence: Synthetic oligonucleotide
gccuaaaauugu

SEQ ID NO: 87437 - RNA, 12 nt, Artificial Sequence
  Description of Artificial Sequence: Synthetic oligonucleotide
acuaacaucugg

SEQ ID NO: 87438 - RNA, 11 nt, Artificial Sequence
  Description of Artificial Sequence: Synthetic oligonucleotide
gacugugagcu

SEQ ID NO: 87439 - RNA, 13 nt, Artificial Sequence
  Description of Artificial Sequence: Synthetic oligonucleotide
gcuuuuuauuaau

SEQ ID NO: 87440 - RNA, 12 nt, Artificial Sequence
  Description of Artificial Sequence: Synthetic oligonucleotide
ucuucuuacauu

SEQ ID NO: 87441 - RNA, 14 nt, Artificial Sequence
  Description of Artificial Sequence: Synthetic oligonucleotide
auuuguaaaaaugu

SEQ ID NO: 87442 - RNA, 14 nt, Artificial Sequence
  Description of Artificial Sequence: Synthetic oligonucleotide
ucuuaauucauauu

SEQ ID NO: 87443 - RNA, 12 nt, Artificial Sequence
  Description of Artificial Sequence: Synthetic oligonucleotide
aacuaaucauga

SEQ ID NO: 87444 - RNA, 11 nt, Artificial Sequence
  Description of Artificial Sequence: Synthetic oligonucleotide
cugcucuuggg

SEQ ID NO: 87445 - RNA, 12 nt, Artificial Sequence
  Description of Artificial Sequence: Synthetic oligonucleotide
aguagcuuugag

SEQ ID NO: 87446 - RNA, 13 nt, Artificial Sequence
  Description of Artificial Sequence: Synthetic oligonucleotide
acguaauauuuca

SEQ ID NO: 87447 - RNA, 12 nt, Artificial Sequence
  Description of Artificial Sequence: Synthetic oligonucleotide
auucucuucacu

SEQ ID NO: 87448 - RNA, 13 nt, Artificial Sequence
  Description of Artificial Sequence: Synthetic oligonucleotide
uaaugcuaagaaa

SEQ ID NO: 87449 - RNA, 11 nt, Artificial Sequence
  Description of Artificial Sequence: Synthetic oligonucleotide
cugaaaaucaa

SEQ ID NO: 87450 - RNA, 13 nt, Artificial Sequence
  Description of Artificial Sequence: Synthetic oligonucleotide
auaugauuacuuu

SEQ ID NO: 87451 - RNA, 13 nt, Artificial Sequence
  Description of Artificial Sequence: Synthetic oligonucleotide
auuuuguucuaca

SEQ ID NO: 87452 - RNA, 11 nt, Artificial Sequence
  Description of Artificial Sequence: Synthetic oligonucleotide
ccgggacucuc

SEQ ID NO: 87453 - RNA, 13 nt, Artificial Sequence
  Description of Artificial Sequence: Synthetic oligonucleotide
cuuuaaaguaaag

SEQ ID NO: 87454 - RNA, 12 nt, Artificial Sequence
  Description of Artificial Sequence: Synthetic oligonucleotide
cuggaagccugg

SEQ ID NO: 87455 - RNA, 13 nt, Artificial Sequence
  Description of Artificial Sequence: Synthetic oligonucleotide
aaacaaaagagag

SEQ ID NO: 87456 - RNA, 12 nt, Artificial Sequence
  Description of Artificial Sequence: Synthetic oligonucleotide
ucaguuaugccg

SEQ ID NO: 87457 - RNA, 12 nt, Artificial Sequence
  Description of Artificial Sequence: Synthetic oligonucleotide
aaaagaagucca

SEQ ID NO: 87458 - RNA, 10 nt, Artificial Sequence
  Description of Artificial Sequence: Synthetic oligonucleotide
ggugagguua

SEQ ID NO: 87459 - RNA, 10 nt, Artificial Sequence
  Description of Artificial Sequence: Synthetic oligonucleotide
ggaagaggac

SEQ ID NO: 87460 - RNA, 12 nt, Artificial Sequence
  Description of Artificial Sequence: Synthetic oligonucleotide
agcaaguauugu

SEQ ID NO: 87461 - RNA, 11 nt, Artificial Sequence
  Description of Artificial Sequence: Synthetic oligonucleotide
uuguagcacuc

SEQ ID NO: 87462 - RNA, 13 nt, Artificial Sequence
  Description of Artificial Sequence: Synthetic oligonucleotide
caaaaccacaaau

SEQ ID NO: 87463 - RNA, 11 nt, Artificial Sequence
  Description of Artificial Sequence: Synthetic oligonucleotide
aagcccauaca

SEQ ID NO: 87464 - RNA, 10 nt, Artificial Sequence
  Description of Artificial Sequence: Synthetic oligonucleotide
gcccauacag

SEQ ID NO: 87465 - RNA, 11 nt, Artificial Sequence
  Description of Artificial Sequence: Synthetic oligonucleotide
agaaaccuucc

SEQ ID NO: 87466 - RNA, 9 nt, Artificial Sequence
  Description of Artificial Sequence: Synthetic oligonucleotide
uauaccuac

SEQ ID NO: 87467 - RNA, 12 nt, Artificial Sequence
  Description of Artificial Sequence: Synthetic oligonucleotide
ccaguuuucgga

SEQ ID NO: 87468 - RNA, 8 nt, Artificial Sequence
  Description of Artificial Sequence: Synthetic oligonucleotide
gaacaggg

SEQ ID NO: 87469 - RNA, 12 nt, Artificial Sequence
  Description of Artificial Sequence: Synthetic oligonucleotide
uaacuuuccagu

SEQ ID NO: 87470 - RNA, 13 nt, Artificial Sequence
  Description of Artificial Sequence: Synthetic oligonucleotide
aaguuugguuuug

SEQ ID NO: 87471 - RNA, 11 nt, Artificial Sequence
  Description of Artificial Sequence: Synthetic oligonucleotide
uucccacugua

SEQ ID NO: 87472 - RNA, 12 nt, Artificial Sequence
  Description of Artificial Sequence: Synthetic oligonucleotide
gauaccauauga

SEQ ID NO: 87473 - RNA, 10 nt, Artificial Sequence
  Description of Artificial Sequence: Synthetic oligonucleotide
acaugggcug

SEQ ID NO: 87474 - RNA, 12 nt, Artificial Sequence
  Description of Artificial Sequence: Synthetic oligonucleotide
aacuuuuucaua

SEQ ID NO: 87475 - RNA, 11 nt, Artificial Sequence
  Description of Artificial Sequence: Synthetic oligonucleotide
augaggccgga

SEQ ID NO: 87476 - RNA, 10 nt, Artificial Sequence
  Description of Artificial Sequence: Synthetic oligonucleotide
cugcauuugu

SEQ ID NO: 87477 - RNA, 12 nt, Artificial Sequence
  Description of Artificial Sequence: Synthetic oligonucleotide
auguuuacuacc

SEQ ID NO: 87478 - RNA, 14 nt, Artificial Sequence
  Description of Artificial Sequence: Synthetic oligonucleotide
auuuuuugaugaaa

SEQ ID NO: 87479 - RNA, 13 nt, Artificial Sequence
  Description of Artificial Sequence: Synthetic oligonucleotide
agugugugaauuu

SEQ ID NO: 87480 - RNA, 12 nt, Artificial Sequence
  Description of Artificial Sequence: Synthetic oligonucleotide
agcaauguaugu

SEQ ID NO: 87481 - RNA, 13 nt, Artificial Sequence
  Description of Artificial Sequence: Synthetic oligonucleotide
aagcacauauaua

SEQ ID NO: 87482 - RNA, 13 nt, Artificial Sequence
  Description of Artificial Sequence: Synthetic oligonucleotide
uaauaguuucucc

SEQ ID NO: 87483 - RNA, 12 nt, Artificial Sequence
  Description of Artificial Sequence: Synthetic oligonucleotide
guuucuccaaau

SEQ ID NO: 87484 - RNA, 12 nt, Artificial Sequence
  Description of Artificial Sequence: Synthetic oligonucleotide
acuuccuagaaa

SEQ ID NO: 87485 - RNA, 12 nt, Artificial Sequence
  Description of Artificial Sequence: Synthetic oligonucleotide
acaccauauaug

SEQ ID NO: 87486 - RNA, 13 nt, Artificial Sequence
  Description of Artificial Sequence: Synthetic oligonucleotide
uauaugaauggag

SEQ ID NO: 87487 - RNA, 12 nt, Artificial Sequence
  Description of Artificial Sequence: Synthetic oligonucleotide
cauuuacaggga

SEQ ID NO: 87488 - RNA, 12 nt, Artificial Sequence
  Description of Artificial Sequence: Synthetic oligonucleotide
auuuacagggac

SEQ ID NO: 87489 - RNA, 9 nt, Artificial Sequence
  Description of Artificial Sequence: Synthetic oligonucleotide
gggaccuga

SEQ ID NO: 87490 - RNA, 13 nt, Artificial Sequence
  Description of Artificial Sequence: Synthetic oligonucleotide
guuugacugcauc

SEQ ID NO: 87491 - RNA, 12 nt, Artificial Sequence
  Description of Artificial Sequence: Synthetic oligonucleotide
uugacugcaucg

SEQ ID NO: 87492 - RNA, 11 nt, Artificial Sequence
  Description of Artificial Sequence: Synthetic oligonucleotide
aguucacaggg

SEQ ID NO: 87493 - RNA, 12 nt, Artificial Sequence
  Description of Artificial Sequence: Synthetic oligonucleotide
gcaccucugucc

SEQ ID NO: 87494 - RNA, 14 nt, Artificial Sequence
  Description of Artificial Sequence: Synthetic oligonucleotide
guuugucuuuuuaa

SEQ ID NO: 87495 - RNA, 13 nt, Artificial Sequence
  Description of Artificial Sequence: Synthetic oligonucleotide
uugucuuuuuaag

SEQ ID NO: 87496 - RNA, 12 nt, Artificial Sequence
  Description of Artificial Sequence: Synthetic oligonucleotide
cuaaagguuguc

SEQ ID NO: 87497 - RNA, 11 nt, Artificial Sequence
  Description of Artificial Sequence: Synthetic oligonucleotide
agguugucgac

SEQ ID NO: 87498 - RNA, 12 nt, Artificial Sequence
  Description of Artificial Sequence: Synthetic oligonucleotide
ccuggcaauugu

SEQ ID NO: 87499 - RNA, 11 nt, Artificial Sequence
  Description of Artificial Sequence: Synthetic oligonucleotide
guggugcgagg

SEQ ID NO: 87500 - RNA, 12 nt, Artificial Sequence
  Description of Artificial Sequence: Synthetic oligonucleotide
gagacaugaaau

SEQ ID NO: 87501 - RNA, 12 nt, Artificial Sequence
  Description of Artificial Sequence: Synthetic oligonucleotide
uauauuucucca

SEQ ID NO: 87502 - RNA, 9 nt, Artificial Sequence
  Description of Artificial Sequence: Synthetic oligonucleotide
augaaggcu

SEQ ID NO: 87503 - RNA, 10 nt, Artificial Sequence
  Description of Artificial Sequence: Synthetic oligonucleotide
cuggaguggu

SEQ ID NO: 87504 - RNA, 10 nt, Artificial Sequence
  Description of Artificial Sequence: Synthetic oligonucleotide
ggaagagagg

SEQ ID NO: 87505 - RNA, 11 nt, Artificial Sequence
  Description of Artificial Sequence: Synthetic oligonucleotide
uugcaucgggc

SEQ ID NO: 87506 - RNA, 12 nt, Artificial Sequence
  Description of Artificial Sequence: Synthetic oligonucleotide
uauccuacugug

SEQ ID NO: 87507 - RNA, 12 nt, Artificial Sequence
  Description of Artificial Sequence: Synthetic oligonucleotide
ccuacuguguaa

SEQ ID NO: 87508 - RNA, 11 nt, Artificial Sequence
  Description of Artificial Sequence: Synthetic oligonucleotide
cuuguagugua

SEQ ID NO: 87509 - RNA, 12 nt, Artificial Sequence
  Description of Artificial Sequence: Synthetic oligonucleotide
cuuuguugauug

SEQ ID NO: 87510 - RNA, 13 nt, Artificial Sequence
  Description of Artificial Sequence: Synthetic oligonucleotide
uuguugauugaaa

SEQ ID NO: 87511 - RNA, 14 nt, Artificial Sequence
  Description of Artificial Sequence: Synthetic oligonucleotide
ucuuuuucuuccau

SEQ ID NO: 87512 - RNA, 12 nt, Artificial Sequence
  Description of Artificial Sequence: Synthetic oligonucleotide
aucuuccuucua

SEQ ID NO: 87513 - RNA, 12 nt, Artificial Sequence
  Description of Artificial Sequence: Synthetic oligonucleotide
ugaaugcuucau

SEQ ID NO: 87514 - RNA, 12 nt, Artificial Sequence
  Description of Artificial Sequence: Synthetic oligonucleotide
gaaugcuucaug

SEQ ID NO: 87515 - RNA, 12 nt, Artificial Sequence
  Description of Artificial Sequence: Synthetic oligonucleotide
auucuacuuuga

SEQ ID NO: 87516 - RNA, 12 nt, Artificial Sequence
  Description of Artificial Sequence: Synthetic oligonucleotide
gcaacuacagac

SEQ ID NO: 87517 - RNA, 12 nt, Artificial Sequence
  Description of Artificial Sequence: Synthetic oligonucleotide
accaaggucaac

SEQ ID NO: 87518 - RNA, 12 nt, Artificial Sequence
  Description of Artificial Sequence: Synthetic oligonucleotide
gacuaucucgac

SEQ ID NO: 87519 - RNA, 12 nt, Artificial Sequence
  Description of Artificial Sequence: Synthetic oligonucleotide
accuucccaaac

SEQ ID NO: 87520 - RNA, 13 nt, Artificial Sequence
  Description of Artificial Sequence: Synthetic oligonucleotide
caagcuuagaacu

SEQ ID NO: 87521 - RNA, 14 nt, Artificial Sequence
  Description of Artificial Sequence: Synthetic oligonucleotide
gcuuagaacuuuaa

SEQ ID NO: 87522 - RNA, 13 nt, Artificial Sequence
  Description of Artificial Sequence: Synthetic oligonucleotide
aacuuuaagcaac

SEQ ID NO: 87523 - RNA, 10 nt, Artificial Sequence
  Description of Artificial Sequence: Synthetic oligonucleotide
agaccaccac

SEQ ID NO: 87524 - RNA, 13 nt, Artificial Sequence
  Description of Artificial Sequence: Synthetic oligonucleotide
cgagaaauaaagu

SEQ ID NO: 87525 - RNA, 13 nt, Artificial Sequence
  Description of Artificial Sequence: Synthetic oligonucleotide
gagaaauaaaguu

SEQ ID NO: 87526 - RNA, 11 nt, Artificial Sequence
  Description of Artificial Sequence: Synthetic oligonucleotide
ggaaaugaucc

SEQ ID NO: 87527 - RNA, 12 nt, Artificial Sequence
  Description of Artificial Sequence: Synthetic oligonucleotide
aagaaaugaaac

SEQ ID NO: 87528 - RNA, 12 nt, Artificial Sequence
  Description of Artificial Sequence: Synthetic oligonucleotide
uuuccauccucc

SEQ ID NO: 87529 - RNA, 14 nt, Artificial Sequence
  Description of Artificial Sequence: Synthetic oligonucleotide
cugaaaaucuuuga

SEQ ID NO: 87530 - RNA, 10 nt, Artificial Sequence
  Description of Artificial Sequence: Synthetic oligonucleotide
gccguucagg

SEQ ID NO: 87531 - RNA, 12 nt, Artificial Sequence
  Description of Artificial Sequence: Synthetic oligonucleotide
aggguccagaag

SEQ ID NO: 87532 - RNA, 12 nt, Artificial Sequence
  Description of Artificial Sequence: Synthetic oligonucleotide
caagacugcuug

SEQ ID NO: 87533 - RNA, 12 nt, Artificial Sequence
  Description of Artificial Sequence: Synthetic oligonucleotide
ccaugucuuugg

SEQ ID NO: 87534 - RNA, 10 nt, Artificial Sequence
  Description of Artificial Sequence: Synthetic oligonucleotide
ccugaaacac

SEQ ID NO: 87535 - RNA, 11 nt, Artificial Sequence
  Description of Artificial Sequence: Synthetic oligonucleotide
cucuguaccuc

SEQ ID NO: 87536 - RNA, 11 nt, Artificial Sequence
  Description of Artificial Sequence: Synthetic oligonucleotide
gcaagacaaga

SEQ ID NO: 87537 - RNA, 12 nt, Artificial Sequence
  Description of Artificial Sequence: Synthetic oligonucleotide
caagacaagaaa

SEQ ID NO: 87538 - RNA, 11 nt, Artificial Sequence
  Description of Artificial Sequence: Synthetic oligonucleotide
guacaagaucc

SEQ ID NO: 87539 - RNA, 11 nt, Artificial Sequence
  Description of Artificial Sequence: Synthetic oligonucleotide
guacuugcaga

SEQ ID NO: 87540 - RNA, 12 nt, Artificial Sequence
  Description of Artificial Sequence: Synthetic oligonucleotide
gaucgauacaga

SEQ ID NO: 87541 - RNA, 12 nt, Artificial Sequence
  Description of Artificial Sequence: Synthetic oligonucleotide
auaaaaauaaau

SEQ ID NO: 87542 - RNA, 12 nt, Artificial Sequence
  Description of Artificial Sequence: Synthetic oligonucleotide
aaaaauaaauau

SEQ ID NO: 87543 - RNA, 12 nt, Artificial Sequence
  Description of Artificial Sequence: Synthetic oligonucleotide
uugacugcugug

SEQ ID NO: 87544 - RNA, 12 nt, Artificial Sequence
  Description of Artificial Sequence: Synthetic oligonucleotide
gagaugagagac

SEQ ID NO: 87545 - RNA, 9 nt, Artificial Sequence
  Description of Artificial Sequence: Synthetic oligonucleotide
cccacuugg

SEQ ID NO: 87546 - RNA, 1937 nt, Homo sapiens
gcacuuucacucuccgucagccgcauugcccgcucggcguccggcccccgacccgcgcucguccgcccgcccgcccgcccgcccgcgccaugaacgccaaggucguggucgugcugguccucgugcugaccgcgcucugccucagcgacgggaagcccgucagccugagcuacagaugcccaugccgauucuucgaaagccauguugccagagccaacgucaagcaucucaaaauucucaacacuccaaacugugcccuucagauuguagcccggcugaagaacaacaacagacaagugugcauugacccgaagcuaaaguggauucaggaguaccuggagaaagcuuuaaacaaguaagcacaacagccaaaaaggacuuuccgcuagacccacucgaggaaaacuaaaaccuugugagagaugaaagggcaaagacgugggggagggggccuuaaccaugaggaccagguguguguguggggugggcacauugaucugggaucgggccugagguuugccagcauuuagacccugcauuuauagcauacgguaugauauugcagcuuauauucauccaugcccuguaccugugcacguuggaacuuuuauuacugggguuuuucuaagaaagaaauuguauuaucaacagcauuuucaagcaguuaguuccuucaugaucaucacaaucaucaucauucucauucucauuuuuuaaaucaacgaguacuucaagaucugaauuuggcuuguuuggagcaucuccucugcuccccuggggagucugggcacagucaggugguggcuuaacagggagcuggaaaaaguguccuuucuucagacacugaggcucccgcagcagcgccccucccaagaggaaggccucuguggcacucagauaccgacuggggcugggcgccgccacugccuucaccuccucuuucaaccucagugauuggcucugugggcuccauguagaagccacuauuacugggacugugcucagagaccccucucccagcuauuccuacucucuccccgacuccgagagcaugcuuaaucuugcuucugcuucucauuucuguagccugaucagcgccgcaccagccgggaagagggugauugcuggggcucgugcccugcaucccucuccucccagggccugccccacagcucgggcccucugugagauccgucuuuggccuccuccagaauggagcuggcccucuccuggggauguguaauggucccccugcuuacccgcaaaagacaagucuuuacagaaucaaaugcaauuuuaaaucugagagcucgcuuugagugacuggguuuugugauugccucugaagccuauguaugccauggaggcacuaacaaacucugagguuuccgaaaucagaagcgaaaaaaucagugaauaaaccaucaucuugccacuacccccuccugaagccacagcaggguuucagguuccaaucagaacuguuggcaaggugacauuuccaugcauaaaugcgauccacagaagguccuggugguauuuguaacuuuuugcaaggcauuuuuuuauauauauuuuugugcacauuuuuuuuuacguuucuuuagaaaacaaauguauuucaaaauauauuuauagucgaacaauucauauauuugaaguggagccauaugaaugucaguaguuuauacuucucuauuaucucaaacuacuggcaauuuguaaagaaauauauaugauauauaaaugugauugcagcuuuucaauguuagccacaguguauuuuuucacuuguacuaaaauuguaucaaaugugacauuauaugcacuagcaauaaaaugcuaauuguuucaugguauaaacguccuacuguaugugggaauuuauuuaccugaaauaaaauucauuaguuguuagugauggagcuuaaaaaaaa

SEQ ID NO: 87547 - RNA, 3542 nt, Homo sapiens
gcacuuucacucuccgucagccgcauugcccgcucggcguccggcccccgacccgcgcucguccgcccgcccgcccgcccgcccgcgccaugaacgccaaggucguggucgugcugguccucgugcugaccgcgcucugccucagcgacgggaagcccgucagccugagcuacagaugcccaugccgauucuucgaaagccauguugccagagccaacgucaagcaucucaaaauucucaacacuccaaacugugcccuucagauuguagcccggcugaagaacaacaacagacaagugugcauugacccgaagcuaaaguggauucaggaguaccuggagaaagcuuuaaacaagagguucaagaugugagagggucagacgccugaggaacccuuacaguaggagcccagcucugaaaccaguguuagggaagggccugccacagccuccccugccagggcagggccccaggcauugccaagggcuuuguuuugcacacuuugccauauuuucaccauuugauuauguagcaaaauacaugacauuuauuuuucauuuaguuugauuauucagugucacuggcgacacguagcagcuuagacuaaggccauuauuguacuugccuuauuagagugucuuuccacggagccacuccucugacucagggcuccuggguuuuguauucucugagcugugcagguggggagacugggcugagggagccuggccccauggucagcccuaggguggagagccaccaagagggacgccugggggugccaggaccagucaaccugggcaaagccuagugaaggcuucucucugugggaugggaugguggagggccacaugggaggcucacccccuucuccauccacaugggagccgggucugccucuucugggagggcagcagggcuacccugagcugaggcagcagugugaggccagggcagagugagacccagcccucaucccgagcaccuccacauccuccacguucugcucaucauucucugucucauccaucaucauguguguccacgacugucuccauggccccgcaaaaggacucucaggaccaaagcuuucauguaaacugugcaccaagcaggaaaugaaaaugucuuguguuaccugaaaacacugugcacaucugugucuuguuuggaauauuguccauuguccaauccuauguuuuuguucaaagccagcguccuccucugugaccaaugucuugaugcaugcacuguucccccugugcagccgcugagcgaggagaugcuccuugggcccuuugagugcaguccugaucagagccgugguccuuuggggugaacuaccuugguucccccacugaucacaaaaacaugguggguccaugggcagagcccaagggaauucggugugcaccaggguugaccccagaggauugcugccccaucagugcucccucacaugucaguaccuucaaacuagggccaagcccagcacugcuugaggaaaacaagcauucacaacuuguuuuugguuuuuaaaacccaguccacaaaauaaccaauccuggacaugaagauucuuucccaauucacaucuaaccucaucuucuucaccauuuggcaaugccaucaucuccugccuuccuccugggcccucucugcucugcgugucaccugugcuucgggcccuucccacaggacauuucucuaagagaacaaugugcuaugugaagaguaagucaaccugccugacauuuggaguguuccccuuccacugagggcagucgauagagcuguauuaagccacuuaaaauguucacuuuugacaaaggcaagcacuuguggguuuuuguuuuguuuuucauucagucuuacgaauacuuuugcccuuugauuaaagacuccaguuaaaaaaaauuuuaaugaagaaaguggaaaacaaggaagucaaagcaaggaaacuauguaacauguaggaaguaggaaguaaauuauagugauguaaucuugaauuguaacuguucuugaauuuaauaaucuguaggguaauuaguaacauguguuaaguauuuucauaaguauuucaaauuggagcuucauggcagaaggcaaacccaucaacaaaaauugucccuuaaacaaaaauuaaaauccucaauccagcuauguuauauugaaaaaauagagccugagggaucuuuacuaguuauaaagauacagaacucuuucaaaaccuuuugaaauuaaccucucacuauaccaguauaauugaguuuucaguggggcagucauuauccagguaauccaagauauuuuaaaaucugucacguagaacuuggauguaccugcccccaauccaugaaccaagaccauugaauucuugguugaggaaacaaacaugacccuaaaucuugacuacagucaggaaaggaaucauuucuauuucuccuccaugggagaaaauagauaagaguagaaacugcagggaaaauuauuugcauaacaauuccucuacuaacaaucagcuccuuccuggagacugcccagcuaaagcaauaugcauuuaaauacagucuuccauuugcaagggaaaagucucuuguaauccgaaucucuuuuugcuuucgaacugcuagucaagugcguccacgagcuguuuacuagggaucccucaucugucccuccgggaccuggugcugccucuaccugacacucccuugggcucccuguaaccucuucagaggcccucgcugccagcucuguaucaggacccagaggaaggggccagaggcucguugacuggcuguguguugggauugagucugugccacguguuugugcuguggugugucccccucuguccaggcacugagauaccagcgaggaggcuccagagggcacucugcuuguuauuagagauuaccuccugagaaaaaagguuccgcuuggagcagaggggcugaauagcagaagguugcaccucccccaaccuuagauguucuaagucuuuccauuggaucucauuggacccuuccauggugugaucgucugacugguguuaucaccgugggcucccugacugggaguugaucgccuuucccaggugcuacacccuuuuccagcuggaugagaauuugagugcucugaucccucuacagagcuucccugacucauucugaaggagccccauuccugggaaauauucccuagaaacuuccaaauccccuaagcagaccacugauaaaaccauguagaaaauuuguuauuuugcaaccucgcuggacucucagucucugagcagugaaugauucaguguuaaaugugaugaauacuguauuuuguauuguuucaauugcaucucccagauaaugugaaaaugguccaggagaaggccaauuccuauacgcagcgugcuuuaaaaaauaaauaagaaacaacucuuugagaaacaacaauuucuacuuugaagucauaccaaugaaaaaauguauaugcacuuauaauuuuccuaauaaaguucuguacucaaauguagccaccaa

SEQ ID NO: 87548 - RNA, 471 nt, Homo sapiens
gcacuuucacucuccgucagccgcauugcccgcucggcguccggcccccgacccgcgcucguccgcccgcccgcccgcccgcccgcgccaugaacgccaaggucguggucgugcugguccucgugcugaccgcgcucugccucagcgacgggaagcccgucagccugagcuacagaugcccaugccgauucuucgaaagccauguugccagagccaacgucaagcaucucaaaauucucaacacuccaaacugugcccuucagauuguagcccggcugaagaacaacaacagacaagugugcauugacccgaagcuaaaguggauucaggaguaccuggagaaagcuuuaaacaaggggcgcagagaagaaaaaguggggaaaaaagaaaagauaggaaaaaagaagcgacagaagaagagaaaggcugcccagaaaaggaaaaacuaguuaucugccaccucgagaugga

SEQ ID NO: 87549 - RNA, 19 nt, Artificial Sequence
  Description of Artificial Sequence: Synthetic oligonucleotide
gcacuuucacucuccguca

SEQ ID NO: 87550 - RNA, 19 nt, Artificial Sequence
  Description of Artificial Sequence: Synthetic oligonucleotide
agccgcauugcccgcucgg

SEQ ID NO: 87551 - RNA, 19 nt, Artificial Sequence
  Description of Artificial Sequence: Synthetic oligonucleotide
gcguccggcccccgacccg

SEQ ID NO: 87552 - RNA, 19 nt, Artificial Sequence
  Description of Artificial Sequence: Synthetic oligonucleotide
gcgcucguccgcccgcccg

SEQ ID NO: 87553 - RNA, 19 nt, Artificial Sequence
  Description of Artificial Sequence: Synthetic oligonucleotide
gcccgcccgcccgcgccau

SEQ ID NO: 87554 - RNA, 19 nt, Artificial Sequence
  Description of Artificial Sequence: Synthetic oligonucleotide
ugaacgccaaggucguggu

SEQ ID NO: 87555 - RNA, 19 nt, Artificial Sequence
  Description of Artificial Sequence: Synthetic oligonucleotide
ucgugcugguccucgugcu

SEQ ID NO: 87556 - RNA, 19 nt, Artificial Sequence
  Description of Artificial Sequence: Synthetic oligonucleotide
ugaccgcgcucugccucag

SEQ ID NO: 87557 - RNA, 19 nt, Artificial Sequence
  Description of Artificial Sequence: Synthetic oligonucleotide
gcgacgggaagcccgucag

SEQ ID NO: 87558 - RNA, 19 nt, Artificial Sequence
  Description of Artificial Sequence: Synthetic oligonucleotide
gccugagcuacagaugccc

SEQ ID NO: 87559 - RNA, 19 nt, Artificial Sequence
  Description of Artificial Sequence: Synthetic oligonucleotide
caugccgauucuucgaaag

SEQ ID NO: 87560 - RNA, 19 nt, Artificial Sequence
  Description of Artificial Sequence: Synthetic oligonucleotide
gccauguugccagagccaa

SEQ ID NO: 87561 - RNA, 19 nt, Artificial Sequence
  Description of Artificial Sequence: Synthetic oligonucleotide
acgucaagcaucucaaaau

SEQ ID NO: 87562 - RNA, 19 nt, Artificial Sequence
  Description of Artificial Sequence: Synthetic oligonucleotide
uucucaacacuccaaacug

SEQ ID NO: 87563 - RNA, 19 nt, Artificial Sequence
  Description of Artificial Sequence: Synthetic oligonucleotide
gugcccuucagauuguagc

SEQ ID NO: 87564 - RNA, 19 nt, Artificial Sequence
  Description of Artificial Sequence: Synthetic oligonucleotide
cccggcugaagaacaacaa

SEQ ID NO: 87565 - RNA, 19 nt, Artificial Sequence
  Description of Artificial Sequence: Synthetic oligonucleotide
acagacaagugugcauuga

SEQ ID NO: 87566 - RNA, 19 nt, Artificial Sequence
  Description of Artificial Sequence: Synthetic oligonucleotide
acccgaagcuaaaguggau

SEQ ID NO: 87567 - RNA, 19 nt, Artificial Sequence
  Description of Artificial Sequence: Synthetic oligonucleotide
uucaggaguaccuggagaa

SEQ ID NO: 87568 - RNA, 19 nt, Artificial Sequence
  Description of Artificial Sequence: Synthetic oligonucleotide
aagcuuuaaacaaggggcg

SEQ ID NO: 87569 - RNA, 19 nt, Artificial Sequence
  Description of Artificial Sequence: Synthetic oligonucleotide
gcagagaagaaaaaguggg

SEQ ID NO: 87570 - RNA, 19 nt, Artificial Sequence
  Description of Artificial Sequence: Synthetic oligonucleotide
ggaaaaaagaaaagauagg

SEQ ID NO: 87571 - RNA, 19 nt, Artificial Sequence
  Description of Artificial Sequence: Synthetic oligonucleotide
gaaaaaagaagcgacagaa

SEQ ID NO: 87572 - RNA, 19 nt, Artificial Sequence
  Description of Artificial Sequence: Synthetic oligonucleotide
agaagagaaaggcugccca

SEQ ID NO: 87573 - RNA, 19 nt, Artificial Sequence
  Description of Artificial Sequence: Synthetic oligonucleotide
agaaaaggaaaaacuaguu

SEQ ID NO: 87574 - RNA, 19 nt, Artificial Sequence
  Description of Artificial Sequence: Synthetic oligonucleotide
uaucugccaccucgagaug

SEQ ID NO: 87575 - RNA, 19 nt, Artificial Sequence
  Description of Artificial Sequence: Synthetic oligonucleotide
ucugccaccucgagaugga

SEQ ID NO: 87576 - RNA, 19 nt, Artificial Sequence
  Description of Artificial Sequence: Synthetic oligonucleotide
aagcuuuaaacaagagguu

SEQ ID NO: 87577 - RNA, 19 nt, Artificial Sequence
  Description of Artificial Sequence: Synthetic oligonucleotide
ucaagaugugagaggguca

SEQ ID NO: 87578 - RNA, 19 nt, Artificial Sequence
  Description of Artificial Sequence: Synthetic oligonucleotide
agacgccugaggaacccuu

SEQ ID NO: 87579 - RNA, 19 nt, Artificial Sequence
  Description of Artificial Sequence: Synthetic oligonucleotide
uacaguaggagcccagcuc

SEQ ID NO: 87580 - RNA, 19 nt, Artificial Sequence
  Description of Artificial Sequence: Synthetic oligonucleotide
cugaaaccaguguuaggga

SEQ ID NO: 87581 - RNA, 19 nt, Artificial Sequence
  Description of Artificial Sequence: Synthetic oligonucleotide
aagggccugccacagccuc

SEQ ID NO: 87582 - RNA, 19 nt, Artificial Sequence
  Description of Artificial Sequence: Synthetic oligonucleotide
ccccugccagggcagggcc

SEQ ID NO: 87583 - RNA, 19 nt, Artificial Sequence
  Description of Artificial Sequence: Synthetic oligonucleotide
cccaggcauugccaagggc

SEQ ID NO: 87584 - RNA, 19 nt, Artificial Sequence
  Description of Artificial Sequence: Synthetic oligonucleotide
cuuuguuuugcacacuuug

SEQ ID NO: 87585 - RNA, 19 nt, Artificial Sequence
  Description of Artificial Sequence: Synthetic oligonucleotide
gccauauuuucaccauuug

SEQ ID NO: 87586 - RNA, 19 nt, Artificial Sequence
  Description of Artificial Sequence: Synthetic oligonucleotide
gauuauguagcaaaauaca

SEQ ID NO: 87587 - RNA, 19 nt, Artificial Sequence
  Description of Artificial Sequence: Synthetic oligonucleotide
augacauuuauuuuucauu

SEQ ID NO: 87588 - RNA, 19 nt, Artificial Sequence
  Description of Artificial Sequence: Synthetic oligonucleotide
uuaguuugauuauucagug

SEQ ID NO: 87589 - RNA, 19 nt, Artificial Sequence
  Description of Artificial Sequence: Synthetic oligonucleotide
gucacuggcgacacguagc

SEQ ID NO: 87590 - RNA, 19 nt, Artificial Sequence
  Description of Artificial Sequence: Synthetic oligonucleotide
cagcuuagacuaaggccau

SEQ ID NO: 87591 - RNA, 19 nt, Artificial Sequence
  Description of Artificial Sequence: Synthetic oligonucleotide
uuauuguacuugccuuauu

SEQ ID NO: 87592 - RNA, 19 nt, Artificial Sequence
  Description of Artificial Sequence: Synthetic oligonucleotide
uagagugucuuuccacgga

SEQ ID NO: 87593 - RNA, 19 nt, Artificial Sequence
  Description of Artificial Sequence: Synthetic oligonucleotide
agccacuccucugacucag

SEQ ID NO: 87594 - RNA, 19 nt, Artificial Sequence
  Description of Artificial Sequence: Synthetic oligonucleotide
gggcuccuggguuuuguau

SEQ ID NO: 87595 - RNA, 19 nt, Artificial Sequence
  Description of Artificial Sequence: Synthetic oligonucleotide
uucucugagcugugcaggu

SEQ ID NO: 87596 - RNA, 19 nt, Artificial Sequence
  Description of Artificial Sequence: Synthetic oligonucleotide
uggggagacugggcugagg

SEQ ID NO: 87597 - RNA, 19 nt, Artificial Sequence
  Description of Artificial Sequence: Synthetic oligonucleotide
ggagccuggccccaugguc

SEQ ID NO: 87598 - RNA, 19 nt, Artificial Sequence
  Description of Artificial Sequence: Synthetic oligonucleotide
cagcccuaggguggagagc

SEQ ID NO: 87599 - RNA, 19 nt, Artificial Sequence
  Description of Artificial Sequence: Synthetic oligonucleotide
ccaccaagagggacgccug

SEQ ID NO: 87600 - RNA, 19 nt, Artificial Sequence
  Description of Artificial Sequence: Synthetic oligonucleotide
gggggugccaggaccaguc

SEQ ID NO: 87601 - RNA, 19 nt, Artificial Sequence
  Description of Artificial Sequence: Synthetic oligonucleotide
caaccugggcaaagccuag

SEQ ID NO: 87602 - RNA, 19 nt, Artificial Sequence
  Description of Artificial Sequence: Synthetic oligonucleotide
gugaaggcuucucucugug

SEQ ID NO: 87603 - RNA, 19 nt, Artificial Sequence
  Description of Artificial Sequence: Synthetic oligonucleotide
gggaugggaugguggaggg

SEQ ID NO: 87604 - RNA, 19 nt, Artificial Sequence
  Description of Artificial Sequence: Synthetic oligonucleotide
gccacaugggaggcucacc

SEQ ID NO: 87605 - RNA, 19 nt, Artificial Sequence
  Description of Artificial Sequence: Synthetic oligonucleotide
ccccuucuccauccacaug

SEQ ID NO: 87606 - RNA, 19 nt, Artificial Sequence
  Description of Artificial Sequence: Synthetic oligonucleotide
gggagccgggucugccucu

SEQ ID NO: 87607 - RNA, 19 nt, Artificial Sequence
  Description of Artificial Sequence: Synthetic oligonucleotide
uucugggagggcagcaggg

SEQ ID NO: 87608 - RNA, 19 nt, Artificial Sequence
  Description of Artificial Sequence: Synthetic oligonucleotide
gcuacccugagcugaggca

SEQ ID NO: 87609 - RNA, 19 nt, Artificial Sequence
  Description of Artificial Sequence: Synthetic oligonucleotide
agcagugugaggccagggc

SEQ ID NO: 87610 - RNA, 19 nt, Artificial Sequence
  Description of Artificial Sequence: Synthetic oligonucleotide
cagagugagacccagcccu

SEQ ID NO: 87611 - RNA, 19 nt, Artificial Sequence
  Description of Artificial Sequence: Synthetic oligonucleotide
ucaucccgagcaccuccac

SEQ ID NO: 87612 - RNA, 19 nt, Artificial Sequence
  Description of Artificial Sequence: Synthetic oligonucleotide
cauccuccacguucugcuc

SEQ ID NO: 87613 - RNA, 19 nt, Artificial Sequence
  Description of Artificial Sequence: Synthetic oligonucleotide
caucauucucugucucauc

SEQ ID NO: 87614 - RNA, 19 nt, Artificial Sequence
  Description of Artificial Sequence: Synthetic oligonucleotide
ccaucaucaugugugucca

SEQ ID NO: 87615 - RNA, 19 nt, Artificial Sequence
  Description of Artificial Sequence: Synthetic oligonucleotide
acgacugucuccauggccc

SEQ ID NO: 87616 - RNA, 19 nt, Artificial Sequence
  Description of Artificial Sequence: Synthetic oligonucleotide
ccgcaaaaggacucucagg

SEQ ID NO: 87617 - RNA, 19 nt, Artificial Sequence
  Description of Artificial Sequence: Synthetic oligonucleotide
gaccaaagcuuucauguaa

SEQ ID NO: 87618 - RNA, 19 nt, Artificial Sequence
  Description of Artificial Sequence: Synthetic oligonucleotide
aacugugcaccaagcagga

SEQ ID NO: 87619 - RNA, 19 nt, Artificial Sequence
  Description of Artificial Sequence: Synthetic oligonucleotide
aaaugaaaaugucuugugu

SEQ ID NO: 87620 - RNA, 19 nt, Artificial Sequence
  Description of Artificial Sequence: Synthetic oligonucleotide
uuaccugaaaacacugugc

SEQ ID NO: 87621 - RNA, 19 nt, Artificial Sequence
  Description of Artificial Sequence: Synthetic oligonucleotide
cacaucugugucuuguuug

SEQ ID NO: 87622 - RNA, 19 nt, Artificial Sequence
  Description of Artificial Sequence: Synthetic oligonucleotide
ggaauauuguccauugucc

SEQ ID NO: 87623 - RNA, 19 nt, Artificial Sequence
  Description of Artificial Sequence: Synthetic oligonucleotide
caauccuauguuuuuguuc

SEQ ID NO: 87624 - RNA, 19 nt, Artificial Sequence
  Description of Artificial Sequence: Synthetic oligonucleotide
caaagccagcguccuccuc

SEQ ID NO: 87625 - RNA, 19 nt, Artificial Sequence
  Description of Artificial Sequence: Synthetic oligonucleotide
cugugaccaaugucuugau

SEQ ID NO: 87626 - RNA, 19 nt, Artificial Sequence
  Description of Artificial Sequence: Synthetic oligonucleotide
ugcaugcacuguucccccu

SEQ ID NO: 87627 - RNA, 19 nt, Artificial Sequence
  Description of Artificial Sequence: Synthetic oligonucleotide
ugugcagccgcugagcgag

SEQ ID NO: 87628 - RNA, 19 nt, Artificial Sequence
  Description of Artificial Sequence: Synthetic oligonucleotide
ggagaugcuccuugggccc

SEQ ID NO: 87629 - RNA, 19 nt, Artificial Sequence
  Description of Artificial Sequence: Synthetic oligonucleotide
cuuugagugcaguccugau

SEQ ID NO: 87630 - RNA, 19 nt, Artificial Sequence
  Description of Artificial Sequence: Synthetic oligonucleotide
ucagagccgugguccuuug

SEQ ID NO: 87631 - RNA, 19 nt, Artificial Sequence
  Description of Artificial Sequence: Synthetic oligonucleotide
ggggugaacuaccuugguu

SEQ ID NO: 87632 - RNA, 19 nt, Artificial Sequence
  Description of Artificial Sequence: Synthetic oligonucleotide
ucccccacugaucacaaaa

SEQ ID NO: 87633 - RNA, 19 nt, Artificial Sequence
  Description of Artificial Sequence: Synthetic oligonucleotide
aacaugguggguccauggg

SEQ ID NO: 87634 - RNA, 19 nt, Artificial Sequence
  Description of Artificial Sequence: Synthetic oligonucleotide
gcagagcccaagggaauuc

SEQ ID NO: 87635 - RNA, 19 nt, Artificial Sequence
  Description of Artificial Sequence: Synthetic oligonucleotide
cggugugcaccaggguuga

SEQ ID NO: 87636 - RNA, 19 nt, Artificial Sequence
  Description of Artificial Sequence: Synthetic oligonucleotide
accccagaggauugcugcc

SEQ ID NO: 87637 - RNA, 19 nt, Artificial Sequence
  Description of Artificial Sequence: Synthetic oligonucleotide
cccaucagugcucccucac

SEQ ID NO: 87638 - RNA, 19 nt, Artificial Sequence
  Description of Artificial Sequence: Synthetic oligonucleotide
caugucaguaccuucaaac

SEQ ID NO: 87639 - RNA, 19 nt, Artificial Sequence
  Description of Artificial Sequence: Synthetic oligonucleotide
cuagggccaagcccagcac

SEQ ID NO: 87640 - RNA, 19 nt, Artificial Sequence
  Description of Artificial Sequence: Synthetic oligonucleotide
cugcuugaggaaaacaagc

SEQ ID NO: 87641 - RNA, 19 nt, Artificial Sequence
  Description of Artificial Sequence: Synthetic oligonucleotide
cauucacaacuuguuuuug

SEQ ID NO: 87642 - RNA, 19 nt, Artificial Sequence
  Description of Artificial Sequence: Synthetic oligonucleotide
gguuuuuaaaacccagucc

SEQ ID NO: 87643 - RNA, 19 nt, Artificial Sequence
  Description of Artificial Sequence: Synthetic oligonucleotide
cacaaaauaaccaauccug

SEQ ID NO: 87644 - RNA, 19 nt, Artificial Sequence
  Description of Artificial Sequence: Synthetic oligonucleotide
ggacaugaagauucuuucc

SEQ ID NO: 87645 - RNA, 19 nt, Artificial Sequence
  Description of Artificial Sequence: Synthetic oligonucleotide
ccaauucacaucuaaccuc

SEQ ID NO: 87646 - RNA, 19 nt, Artificial Sequence
  Description of Artificial Sequence: Synthetic oligonucleotide
caucuucuucaccauuugg

SEQ ID NO: 87647 - RNA, 19 nt, Artificial Sequence
  Description of Artificial Sequence: Synthetic oligonucleotide
gcaaugccaucaucuccug

SEQ ID NO: 87648 - RNA, 19 nt, Artificial Sequence
  Description of Artificial Sequence: Synthetic oligonucleotide
gccuuccuccugggcccuc

SEQ ID NO: 87649 - RNA, 19 nt, Artificial Sequence
  Description of Artificial Sequence: Synthetic oligonucleotide
cucugcucugcgugucacc

SEQ ID NO: 87650 - RNA, 19 nt, Artificial Sequence
  Description of Artificial Sequence: Synthetic oligonucleotide
cugugcuucgggcccuucc

SEQ ID NO: 87651 - RNA, 19 nt, Artificial Sequence
  Description of Artificial Sequence: Synthetic oligonucleotide
ccacaggacauuucucuaa

SEQ ID NO: 87652 - RNA, 19 nt, Artificial Sequence
  Description of Artificial Sequence: Synthetic oligonucleotide
agagaacaaugugcuaugu

SEQ ID NO: 87653 - RNA, 19 nt, Artificial Sequence
  Description of Artificial Sequence: Synthetic oligonucleotide
ugaagaguaagucaaccug

SEQ ID NO: 87654 - RNA, 19 nt, Artificial Sequence
  Description of Artificial Sequence: Synthetic oligonucleotide
gccugacauuuggaguguu

SEQ ID NO: 87655 - RNA, 19 nt, Artificial Sequence
  Description of Artificial Sequence: Synthetic oligonucleotide
uccccuuccacugagggca

SEQ ID NO: 87656 - RNA, 19 nt, Artificial Sequence
  Description of Artificial Sequence: Synthetic oligonucleotide
agucgauagagcuguauua

SEQ ID NO: 87657 - RNA, 19 nt, Artificial Sequence
  Description of Artificial Sequence: Synthetic oligonucleotide
aagccacuuaaaauguuca

SEQ ID NO: 87658 - RNA, 19 nt, Artificial Sequence
  Description of Artificial Sequence: Synthetic oligonucleotide
acuuuugacaaaggcaagc

SEQ ID NO: 87659 - RNA, 19 nt, Artificial Sequence
  Description of Artificial Sequence: Synthetic oligonucleotide
cacuuguggguuuuuguuu

SEQ ID NO: 87660 - RNA, 19 nt, Artificial Sequence
  Description of Artificial Sequence: Synthetic oligonucleotide
uuguuuuucauucagucuu

SEQ ID NO: 87661 - RNA, 19 nt, Artificial Sequence
  Description of Artificial Sequence: Synthetic oligonucleotide
uacgaauacuuuugcccuu

SEQ ID NO: 87662 - RNA, 19 nt, Artificial Sequence
  Description of Artificial Sequence: Synthetic oligonucleotide
uugauuaaagacuccaguu

SEQ ID NO: 87663 - RNA, 19 nt, Artificial Sequence
  Description of Artificial Sequence: Synthetic oligonucleotide
uaaaaaaaauuuuaaugaa

SEQ ID NO: 87664 - RNA, 19 nt, Artificial Sequence
  Description of Artificial Sequence: Synthetic oligonucleotide
agaaaguggaaaacaagga

SEQ ID NO: 87665 - RNA, 19 nt, Artificial Sequence
  Description of Artificial Sequence: Synthetic oligonucleotide
aagucaaagcaaggaaacu

SEQ ID NO: 87666 - RNA, 19 nt, Artificial Sequence
  Description of Artificial Sequence: Synthetic oligonucleotide
uauguaacauguaggaagu

SEQ ID NO: 87667 - RNA, 19 nt, Artificial Sequence
  Description of Artificial Sequence: Synthetic oligonucleotide
uaggaaguaaauuauagug

SEQ ID NO: 87668 - RNA, 19 nt, Artificial Sequence
  Description of Artificial Sequence: Synthetic oligonucleotide
gauguaaucuugaauugua

SEQ ID NO: 87669 - RNA, 19 nt, Artificial Sequence
  Description of Artificial Sequence: Synthetic oligonucleotide
aacuguucuugaauuuaau

SEQ ID NO: 87670 - RNA, 19 nt, Artificial Sequence
  Description of Artificial Sequence: Synthetic oligonucleotide
uaaucuguaggguaauuag

SEQ ID NO: 87671 - RNA, 19 nt, Artificial Sequence
  Description of Artificial Sequence: Synthetic oligonucleotide
guaacauguguuaaguauu

SEQ ID NO: 87672 - RNA, 19 nt, Artificial Sequence
  Description of Artificial Sequence: Synthetic oligonucleotide
uuucauaaguauuucaaau

SEQ ID NO: 87673 - RNA, 19 nt, Artificial Sequence
  Description of Artificial Sequence: Synthetic oligonucleotide
uuggagcuucauggcagaa

SEQ ID NO: 87674 - RNA, 19 nt, Artificial Sequence
  Description of Artificial Sequence: Synthetic oligonucleotide
aggcaaacccaucaacaaa

SEQ ID NO: 87675 - RNA, 19 nt, Artificial Sequence
  Description of Artificial Sequence: Synthetic oligonucleotide
aaauugucccuuaaacaaa

SEQ ID NO: 87676 - RNA, 19 nt, Artificial Sequence
  Description of Artificial Sequence: Synthetic oligonucleotide
aaauuaaaauccucaaucc

SEQ ID NO: 87677 - RNA, 19 nt, Artificial Sequence
  Description of Artificial Sequence: Synthetic oligonucleotide
cagcuauguuauauugaaa

SEQ ID NO: 87678 - RNA, 19 nt, Artificial Sequence
  Description of Artificial Sequence: Synthetic oligonucleotide
aaaauagagccugagggau

SEQ ID NO: 87679 - RNA, 19 nt, Artificial Sequence
  Description of Artificial Sequence: Synthetic oligonucleotide
ucuuuacuaguuauaaaga

SEQ ID NO: 87680 - RNA, 19 nt, Artificial Sequence
  Description of Artificial Sequence: Synthetic oligonucleotide
auacagaacucuuucaaaa

SEQ ID NO: 87681 - RNA, 19 nt, Artificial Sequence
  Description of Artificial Sequence: Synthetic oligonucleotide
accuuuugaaauuaaccuc

SEQ ID NO: 87682 - RNA, 19 nt, Artificial Sequence
  Description of Artificial Sequence: Synthetic oligonucleotide
cucacuauaccaguauaau

SEQ ID NO: 87683 - RNA, 19 nt, Artificial Sequence
  Description of Artificial Sequence: Synthetic oligonucleotide
uugaguuuucaguggggca

SEQ ID NO: 87684 - RNA, 19 nt, Artificial Sequence
  Description of Artificial Sequence: Synthetic oligonucleotide
agucauuauccagguaauc

SEQ ID NO: 87685 - RNA, 19 nt, Artificial Sequence
  Description of Artificial Sequence: Synthetic oligonucleotide
ccaagauauuuuaaaaucu

SEQ ID NO: 87686 - RNA, 19 nt, Artificial Sequence
  Description of Artificial Sequence: Synthetic oligonucleotide
ugucacguagaacuuggau

SEQ ID NO: 87687 - RNA, 19 nt, Artificial Sequence
  Description of Artificial Sequence: Synthetic oligonucleotide
uguaccugcccccaaucca

SEQ ID NO: 87688 - RNA, 19 nt, Artificial Sequence
  Description of Artificial Sequence: Synthetic oligonucleotide
augaaccaagaccauugaa

SEQ ID NO: 87689 - RNA, 19 nt, Artificial Sequence
  Description of Artificial Sequence: Synthetic oligonucleotide
auucuugguugaggaaaca

SEQ ID NO: 87690 - RNA, 19 nt, Artificial Sequence
  Description of Artificial Sequence: Synthetic oligonucleotide
aaacaugacccuaaaucuu

SEQ ID NO: 87691 - RNA, 19 nt, Artificial Sequence
  Description of Artificial Sequence: Synthetic oligonucleotide
ugacuacagucaggaaagg

SEQ ID NO: 87692 - RNA, 19 nt, Artificial Sequence
  Description of Artificial Sequence: Synthetic oligonucleotide
gaaucauuucuauuucucc

SEQ ID NO: 87693 - RNA, 19 nt, Artificial Sequence
  Description of Artificial Sequence: Synthetic oligonucleotide
cuccaugggagaaaauaga

SEQ ID NO: 87694 - RNA, 19 nt, Artificial Sequence
  Description of Artificial Sequence: Synthetic oligonucleotide
auaagaguagaaacugcag

SEQ ID NO: 87695 - RNA, 19 nt, Artificial Sequence
  Description of Artificial Sequence: Synthetic oligonucleotide
gggaaaauuauuugcauaa

SEQ ID NO: 87696 - RNA, 19 nt, Artificial Sequence
  Description of Artificial Sequence: Synthetic oligonucleotide
acaauuccucuacuaacaa

SEQ ID NO: 87697 - RNA, 19 nt, Artificial Sequence
  Description of Artificial Sequence: Synthetic oligonucleotide
aucagcuccuuccuggaga

SEQ ID NO: 87698 - RNA, 19 nt, Artificial Sequence
  Description of Artificial Sequence: Synthetic oligonucleotide
acugcccagcuaaagcaau

SEQ ID NO: 87699 - RNA, 19 nt, Artificial Sequence
  Description of Artificial Sequence: Synthetic oligonucleotide
uaugcauuuaaauacaguc

SEQ ID NO: 87700 - RNA, 19 nt, Artificial Sequence
  Description of Artificial Sequence: Synthetic oligonucleotide
cuuccauuugcaagggaaa

SEQ ID NO: 87701 - RNA, 19 nt, Artificial Sequence
  Description of Artificial Sequence: Synthetic oligonucleotide
aagucucuuguaauccgaa

SEQ ID NO: 87702 - RNA, 19 nt, Artificial Sequence
  Description of Artificial Sequence: Synthetic oligonucleotide
aucucuuuuugcuuucgaa

SEQ ID NO: 87703 - RNA, 19 nt, Artificial Sequence
  Description of Artificial Sequence: Synthetic oligonucleotide
acugcuagucaagugcguc

SEQ ID NO: 87704 - RNA, 19 nt, Artificial Sequence
  Description of Artificial Sequence: Synthetic oligonucleotide
ccacgagcuguuuacuagg

SEQ ID NO: 87705 - RNA, 19 nt, Artificial Sequence
  Description of Artificial Sequence: Synthetic oligonucleotide
ggaucccucaucugucccu

SEQ ID NO: 87706 - RNA, 19 nt, Artificial Sequence
  Description of Artificial Sequence: Synthetic oligonucleotide
uccgggaccuggugcugcc

SEQ ID NO: 87707 - RNA, 19 nt, Artificial Sequence
  Description of Artificial Sequence: Synthetic oligonucleotide
cucuaccugacacucccuu

SEQ ID NO: 87708 - RNA, 19 nt, Artificial Sequence
  Description of Artificial Sequence: Synthetic oligonucleotide
ugggcucccuguaaccucu

SEQ ID NO: 87709 - RNA, 19 nt, Artificial Sequence
  Description of Artificial Sequence: Synthetic oligonucleotide
uucagaggcccucgcugcc

SEQ ID NO: 87710 - RNA, 19 nt, Artificial Sequence
  Description of Artificial Sequence: Synthetic oligonucleotide
cagcucuguaucaggaccc

SEQ ID NO: 87711 - RNA, 19 nt, Artificial Sequence
  Description of Artificial Sequence: Synthetic oligonucleotide
cagaggaaggggccagagg

SEQ ID NO: 87712 - RNA, 19 nt, Artificial Sequence
  Description of Artificial Sequence: Synthetic oligonucleotide
gcucguugacuggcugugu

SEQ ID NO: 87713 - RNA, 19 nt, Artificial Sequence
  Description of Artificial Sequence: Synthetic oligonucleotide
uguugggauugagucugug

SEQ ID NO: 87714 - RNA, 19 nt, Artificial Sequence
  Description of Artificial Sequence: Synthetic oligonucleotide
gccacguguuugugcugug

SEQ ID NO: 87715 - RNA, 19 nt, Artificial Sequence
  Description of Artificial Sequence: Synthetic oligonucleotide
ggugugucccccucugucc

SEQ ID NO: 87716 - RNA, 19 nt, Artificial Sequence
  Description of Artificial Sequence: Synthetic oligonucleotide
caggcacugagauaccagc

SEQ ID NO: 87717 - RNA, 19 nt, Artificial Sequence
  Description of Artificial Sequence: Synthetic oligonucleotide
cgaggaggcuccagagggc

SEQ ID NO: 87718 - RNA, 19 nt, Artificial Sequence
  Description of Artificial Sequence: Synthetic oligonucleotide
cacucugcuuguuauuaga

SEQ ID NO: 87719 - RNA, 19 nt, Artificial Sequence
  Description of Artificial Sequence: Synthetic oligonucleotide
agauuaccuccugagaaaa

SEQ ID NO: 87720 - RNA, 19 nt, Artificial Sequence
  Description of Artificial Sequence: Synthetic oligonucleotide
aaagguuccgcuuggagca

SEQ ID NO: 87721 - RNA, 19 nt, Artificial Sequence
  Description of Artificial Sequence: Synthetic oligonucleotide
agaggggcugaauagcaga

SEQ ID NO: 87722 - RNA, 19 nt, Artificial Sequence
  Description of Artificial Sequence: Synthetic oligonucleotide
aagguugcaccucccccaa

SEQ ID NO: 87723 - RNA, 19 nt, Artificial Sequence
  Description of Artificial Sequence: Synthetic oligonucleotide
accuuagauguucuaaguc

SEQ ID NO: 87724 - RNA, 19 nt, Artificial Sequence
  Description of Artificial Sequence: Synthetic oligonucleotide
cuuuccauuggaucucauu

SEQ ID NO: 87725 - RNA, 19 nt, Artificial Sequence
  Description of Artificial Sequence: Synthetic oligonucleotide
uggacccuuccauggugug

SEQ ID NO: 87726 - RNA, 19 nt, Artificial Sequence
  Description of Artificial Sequence: Synthetic oligonucleotide
gaucgucugacugguguua

SEQ ID NO: 87727 - RNA, 19 nt, Artificial Sequence
  Description of Artificial Sequence: Synthetic oligonucleotide
aucaccgugggcucccuga

SEQ ID NO: 87728 - RNA, 19 nt, Artificial Sequence
  Description of Artificial Sequence: Synthetic oligonucleotide
acugggaguugaucgccuu

SEQ ID NO: 87729 - RNA, 19 nt, Artificial Sequence
  Description of Artificial Sequence: Synthetic oligonucleotide
uucccaggugcuacacccu

SEQ ID NO: 87730 - RNA, 19 nt, Artificial Sequence
  Description of Artificial Sequence: Synthetic oligonucleotide
uuuuccagcuggaugagaa

SEQ ID NO: 87731 - RNA, 19 nt, Artificial Sequence
  Description of Artificial Sequence: Synthetic oligonucleotide
auuugagugcucugauccc

SEQ ID NO: 87732 - RNA, 19 nt, Artificial Sequence
  Description of Artificial Sequence: Synthetic oligonucleotide
cucuacagagcuucccuga

SEQ ID NO: 87733 - RNA, 19 nt, Artificial Sequence
  Description of Artificial Sequence: Synthetic oligonucleotide
acucauucugaaggagccc

SEQ ID NO: 87734 - RNA, 19 nt, Artificial Sequence
  Description of Artificial Sequence: Synthetic oligonucleotide
ccauuccugggaaauauuc

SEQ ID NO: 87735 - RNA, 19 nt, Artificial Sequence
  Description of Artificial Sequence: Synthetic oligonucleotide
cccuagaaacuuccaaauc

SEQ ID NO: 87736 - RNA, 19 nt, Artificial Sequence
  Description of Artificial Sequence: Synthetic oligonucleotide
ccccuaagcagaccacuga

SEQ ID NO: 87737 - RNA, 19 nt, Artificial Sequence
  Description of Artificial Sequence: Synthetic oligonucleotide
auaaaaccauguagaaaau

SEQ ID NO: 87738 - RNA, 19 nt, Artificial Sequence
  Description of Artificial Sequence: Synthetic oligonucleotide
uuuguuauuuugcaaccuc

SEQ ID NO: 87739 - RNA, 19 nt, Artificial Sequence
  Description of Artificial Sequence: Synthetic oligonucleotide
cgcuggacucucagucucu

SEQ ID NO: 87740 - RNA, 19 nt, Artificial Sequence
  Description of Artificial Sequence: Synthetic oligonucleotide
ugagcagugaaugauucag

SEQ ID NO: 87741 - RNA, 19 nt, Artificial Sequence
  Description of Artificial Sequence: Synthetic oligonucleotide
guguuaaaugugaugaaua

SEQ ID NO: 87742 - RNA, 19 nt, Artificial Sequence
  Description of Artificial Sequence: Synthetic oligonucleotide
acuguauuuuguauuguuu

SEQ ID NO: 87743 - RNA, 19 nt, Artificial Sequence
  Description of Artificial Sequence: Synthetic oligonucleotide
ucaauugcaucucccagau

SEQ ID NO: 87744 - RNA, 19 nt, Artificial Sequence
  Description of Artificial Sequence: Synthetic oligonucleotide
uaaugugaaaaugguccag

SEQ ID NO: 87745 - RNA, 19 nt, Artificial Sequence
  Description of Artificial Sequence: Synthetic oligonucleotide
ggagaaggccaauuccuau

SEQ ID NO: 87746 - RNA, 19 nt, Artificial Sequence
  Description of Artificial Sequence: Synthetic oligonucleotide
uacgcagcgugcuuuaaaa

SEQ ID NO: 87747 - RNA, 19 nt, Artificial Sequence
  Description of Artificial Sequence: Synthetic oligonucleotide
aaauaaauaagaaacaacu

SEQ ID NO: 87748 - RNA, 19 nt, Artificial Sequence
  Description of Artificial Sequence: Synthetic oligonucleotide
ucuuugagaaacaacaauu

SEQ ID NO: 87749 - RNA, 19 nt, Artificial Sequence
  Description of Artificial Sequence: Synthetic oligonucleotide
uucuacuuugaagucauac

SEQ ID NO: 87750 - RNA, 19 nt, Artificial Sequence
  Description of Artificial Sequence: Synthetic oligonucleotide
ccaaugaaaaaauguauau

SEQ ID NO: 87751 - RNA, 19 nt, Artificial Sequence
  Description of Artificial Sequence: Synthetic oligonucleotide
ugcacuuauaauuuuccua

SEQ ID NO: 87752 - RNA, 19 nt, Artificial Sequence
  Description of Artificial Sequence: Synthetic oligonucleotide
aauaaaguucuguacucaa

SEQ ID NO: 87753 - RNA, 19 nt, Artificial Sequence
  Description of Artificial Sequence: Synthetic oligonucleotide
acucaaauguagccaccaa

SEQ ID NO: 87754 - RNA, 19 nt, Artificial Sequence
  Description of Artificial Sequence: Synthetic oligonucleotide
aagcuuuaaacaaguaagc

SEQ ID NO: 87755 - RNA, 19 nt, Artificial Sequence
  Description of Artificial Sequence: Synthetic oligonucleotide
cacaacagccaaaaaggac

SEQ ID NO: 87756 - RNA, 19 nt, Artificial Sequence
  Description of Artificial Sequence: Synthetic oligonucleotide
cuuuccgcuagacccacuc

SEQ ID NO: 87757 - RNA, 19 nt, Artificial Sequence
  Description of Artificial Sequence: Synthetic oligonucleotide
cgaggaaaacuaaaaccuu

SEQ ID NO: 87758 - RNA, 19 nt, Artificial Sequence
  Description of Artificial Sequence: Synthetic oligonucleotide
ugugagagaugaaagggca

SEQ ID NO: 87759 - RNA, 19 nt, Artificial Sequence
  Description of Artificial Sequence: Synthetic oligonucleotide
aaagacgugggggaggggg

SEQ ID NO: 87760 - RNA, 19 nt, Artificial Sequence
  Description of Artificial Sequence: Synthetic oligonucleotide
gccuuaaccaugaggacca

SEQ ID NO: 87761 - RNA, 19 nt, Artificial Sequence
  Description of Artificial Sequence: Synthetic oligonucleotide
agguguguguguggggugg

SEQ ID NO: 87762 - RNA, 19 nt, Artificial Sequence
  Description of Artificial Sequence: Synthetic oligonucleotide
ggcacauugaucugggauc

SEQ ID NO: 87763 - RNA, 19 nt, Artificial Sequence
  Description of Artificial Sequence: Synthetic oligonucleotide
cgggccugagguuugccag

SEQ ID NO: 87764 - RNA, 19 nt, Artificial Sequence
  Description of Artificial Sequence: Synthetic oligonucleotide
gcauuuagacccugcauuu

SEQ ID NO: 87765 - RNA, 19 nt, Artificial Sequence
  Description of Artificial Sequence: Synthetic oligonucleotide
uauagcauacgguaugaua

SEQ ID NO: 87766 - RNA, 19 nt, Artificial Sequence
  Description of Artificial Sequence: Synthetic oligonucleotide
auugcagcuuauauucauc

SEQ ID NO: 87767 - RNA, 19 nt, Artificial Sequence
  Description of Artificial Sequence: Synthetic oligonucleotide
ccaugcccuguaccugugc

SEQ ID NO: 87768 - RNA, 19 nt, Artificial Sequence
  Description of Artificial Sequence: Synthetic oligonucleotide
cacguuggaacuuuuauua

SEQ ID NO: 87769 - RNA, 19 nt, Artificial Sequence
  Description of Artificial Sequence: Synthetic oligonucleotide
acugggguuuuucuaagaa

SEQ ID NO: 87770 - RNA, 19 nt, Artificial Sequence
  Description of Artificial Sequence: Synthetic oligonucleotide
aagaaauuguauuaucaac

SEQ ID NO: 87771 - RNA, 19 nt, Artificial Sequence
  Description of Artificial Sequence: Synthetic oligonucleotide
cagcauuuucaagcaguua

SEQ ID NO: 87772 - RNA, 19 nt, Artificial Sequence
  Description of Artificial Sequence: Synthetic oligonucleotide
aguuccuucaugaucauca

SEQ ID NO: 87773 - RNA, 19 nt, Artificial Sequence
  Description of Artificial Sequence: Synthetic oligonucleotide
acaaucaucaucauucuca

SEQ ID NO: 87774 - RNA, 19 nt, Artificial Sequence
  Description of Artificial Sequence: Synthetic oligonucleotide
auucucauuuuuuaaauca

SEQ ID NO: 87775 - RNA, 19 nt, Artificial Sequence
  Description of Artificial Sequence: Synthetic oligonucleotide
aacgaguacuucaagaucu

SEQ ID NO: 87776 - RNA, 19 nt, Artificial Sequence
  Description of Artificial Sequence: Synthetic oligonucleotide
ugaauuuggcuuguuugga

SEQ ID NO: 87777 - RNA, 19 nt, Artificial Sequence
  Description of Artificial Sequence: Synthetic oligonucleotide
agcaucuccucugcucccc

SEQ ID NO: 87778 - RNA, 19 nt, Artificial Sequence
  Description of Artificial Sequence: Synthetic oligonucleotide
cuggggagucugggcacag

SEQ ID NO: 87779 - RNA, 19 nt, Artificial Sequence
  Description of Artificial Sequence: Synthetic oligonucleotide
gucaggugguggcuuaaca

SEQ ID NO: 87780 - RNA, 19 nt, Artificial Sequence
  Description of Artificial Sequence: Synthetic oligonucleotide
agggagcuggaaaaagugu

SEQ ID NO: 87781 - RNA, 19 nt, Artificial Sequence
  Description of Artificial Sequence: Synthetic oligonucleotide
uccuuucuucagacacuga

SEQ ID NO: 87782 - RNA, 19 nt, Artificial Sequence
  Description of Artificial Sequence: Synthetic oligonucleotide
aggcucccgcagcagcgcc

SEQ ID NO: 87783 - RNA, 19 nt, Artificial Sequence
  Description of Artificial Sequence: Synthetic oligonucleotide
cccucccaagaggaaggcc

SEQ ID NO: 87784 - RNA, 19 nt, Artificial Sequence
  Description of Artificial Sequence: Synthetic oligonucleotide
cucuguggcacucagauac

SEQ ID NO: 87785 - RNA, 19 nt, Artificial Sequence
  Description of Artificial Sequence: Synthetic oligonucleotide
ccgacuggggcugggcgcc

SEQ ID NO: 87786 - RNA, 19 nt, Artificial Sequence
  Description of Artificial Sequence: Synthetic oligonucleotide
cgccacugccuucaccucc

SEQ ID NO: 87787 - RNA, 19 nt, Artificial Sequence
  Description of Artificial Sequence: Synthetic oligonucleotide
cucuuucaaccucagugau

SEQ ID NO: 87788 - RNA, 19 nt, Artificial Sequence
  Description of Artificial Sequence: Synthetic oligonucleotide
uuggcucugugggcuccau

SEQ ID NO: 87789 - RNA, 19 nt, Artificial Sequence
  Description of Artificial Sequence: Synthetic oligonucleotide
uguagaagccacuauuacu

SEQ ID NO: 87790 - RNA, 19 nt, Artificial Sequence
  Description of Artificial Sequence: Synthetic oligonucleotide
ugggacugugcucagagac

SEQ ID NO: 87791 - RNA, 19 nt, Artificial Sequence
  Description of Artificial Sequence: Synthetic oligonucleotide
ccccucucccagcuauucc

SEQ ID NO: 87792 - RNA, 19 nt, Artificial Sequence
  Description of Artificial Sequence: Synthetic oligonucleotide
cuacucucuccccgacucc

SEQ ID NO: 87793 - RNA, 19 nt, Artificial Sequence
  Description of Artificial Sequence: Synthetic oligonucleotide
cgagagcaugcuuaaucuu

SEQ ID NO: 87794 - RNA, 19 nt, Artificial Sequence
  Description of Artificial Sequence: Synthetic oligonucleotide
ugcuucugcuucucauuuc

SEQ ID NO: 87795 - RNA, 19 nt, Artificial Sequence
  Description of Artificial Sequence: Synthetic oligonucleotide
cuguagccugaucagcgcc

SEQ ID NO: 87796 - RNA, 19 nt, Artificial Sequence
  Description of Artificial Sequence: Synthetic oligonucleotide
cgcaccagccgggaagagg

SEQ ID NO: 87797 - RNA, 19 nt, Artificial Sequence
  Description of Artificial Sequence: Synthetic oligonucleotide
ggugauugcuggggcucgu

SEQ ID NO: 87798 - RNA, 19 nt, Artificial Sequence
  Description of Artificial Sequence: Synthetic oligonucleotide
ugcccugcaucccucuccu

SEQ ID NO: 87799 - RNA, 19 nt, Artificial Sequence
  Description of Artificial Sequence: Synthetic oligonucleotide
ucccagggccugccccaca

SEQ ID NO: 87800 - RNA, 19 nt, Artificial Sequence
  Description of Artificial Sequence: Synthetic oligonucleotide
agcucgggcccucugugag

SEQ ID NO: 87801 - RNA, 19 nt, Artificial Sequence
  Description of Artificial Sequence: Synthetic oligonucleotide
gauccgucuuuggccuccu

SEQ ID NO: 87802 - RNA, 19 nt, Artificial Sequence
  Description of Artificial Sequence: Synthetic oligonucleotide
uccagaauggagcuggccc

SEQ ID NO: 87803 - RNA, 19 nt, Artificial Sequence
  Description of Artificial Sequence: Synthetic oligonucleotide
cucuccuggggauguguaa

SEQ ID NO: 87804 - RNA, 19 nt, Artificial Sequence
  Description of Artificial Sequence: Synthetic oligonucleotide
auggucccccugcuuaccc

SEQ ID NO: 87805 - RNA, 19 nt, Artificial Sequence
  Description of Artificial Sequence: Synthetic oligonucleotide
cgcaaaagacaagucuuua

SEQ ID NO: 87806 - RNA, 19 nt, Artificial Sequence
  Description of Artificial Sequence: Synthetic oligonucleotide
acagaaucaaaugcaauuu

SEQ ID NO: 87807 - RNA, 19 nt, Artificial Sequence
  Description of Artificial Sequence: Synthetic oligonucleotide
uuaaaucugagagcucgcu

SEQ ID NO: 87808 - RNA, 19 nt, Artificial Sequence
  Description of Artificial Sequence: Synthetic oligonucleotide
uuugagugacuggguuuug

SEQ ID NO: 87809 - RNA, 19 nt, Artificial Sequence
  Description of Artificial Sequence: Synthetic oligonucleotide
gugauugccucugaagccu

SEQ ID NO: 87810 - RNA, 19 nt, Artificial Sequence
  Description of Artificial Sequence: Synthetic oligonucleotide
uauguaugccauggaggca

SEQ ID NO: 87811 - RNA, 19 nt, Artificial Sequence
  Description of Artificial Sequence: Synthetic oligonucleotide
acuaacaaacucugagguu

SEQ ID NO: 87812 - RNA, 19 nt, Artificial Sequence
  Description of Artificial Sequence: Synthetic oligonucleotide
uuccgaaaucagaagcgaa

SEQ ID NO: 87813 - RNA, 19 nt, Artificial Sequence
  Description of Artificial Sequence: Synthetic oligonucleotide
aaaaaucagugaauaaacc

SEQ ID NO: 87814 - RNA, 19 nt, Artificial Sequence
  Description of Artificial Sequence: Synthetic oligonucleotide
caucaucuugccacuaccc

SEQ ID NO: 87815 - RNA, 19 nt, Artificial Sequence
  Description of Artificial Sequence: Synthetic oligonucleotide
cccuccugaagccacagca

SEQ ID NO: 87816 - RNA, 19 nt, Artificial Sequence
  Description of Artificial Sequence: Synthetic oligonucleotide
aggguuucagguuccaauc

SEQ ID NO: 87817 - RNA, 19 nt, Artificial Sequence
  Description of Artificial Sequence: Synthetic oligonucleotide
cagaacuguuggcaaggug

SEQ ID NO: 87818 - RNA, 19 nt, Artificial Sequence
  Description of Artificial Sequence: Synthetic oligonucleotide
gacauuuccaugcauaaau

SEQ ID NO: 87819 - RNA, 19 nt, Artificial Sequence
  Description of Artificial Sequence: Synthetic oligonucleotide
ugcgauccacagaaggucc

SEQ ID NO: 87820 - RNA, 19 nt, Artificial Sequence
  Description of Artificial Sequence: Synthetic oligonucleotide
cuggugguauuuguaacuu

SEQ ID NO: 87821 - RNA, 19 nt, Artificial Sequence
  Description of Artificial Sequence: Synthetic oligonucleotide
uuuugcaaggcauuuuuuu

SEQ ID NO: 87822 - RNA, 19 nt, Artificial Sequence
  Description of Artificial Sequence: Synthetic oligonucleotide
uauauauauuuuugugcac

SEQ ID NO: 87823 - RNA, 19 nt, Artificial Sequence
  Description of Artificial Sequence: Synthetic oligonucleotide
cauuuuuuuuuacguuucu

SEQ ID NO: 87824 - RNA, 19 nt, Artificial Sequence
  Description of Artificial Sequence: Synthetic oligonucleotide
uuuagaaaacaaauguauu

SEQ ID NO: 87825 - RNA, 19 nt, Artificial Sequence
  Description of Artificial Sequence: Synthetic oligonucleotide
uucaaaauauauuuauagu

SEQ ID NO: 87826 - RNA, 19 nt, Artificial Sequence
  Description of Artificial Sequence: Synthetic oligonucleotide
ucgaacaauucauauauuu

SEQ ID NO: 87827 - RNA, 19 nt, Artificial Sequence
  Description of Artificial Sequence: Synthetic oligonucleotide
ugaaguggagccauaugaa

SEQ ID NO: 87828 - RNA, 19 nt, Artificial Sequence
  Description of Artificial Sequence: Synthetic oligonucleotide
augucaguaguuuauacuu

SEQ ID NO: 87829 - RNA, 19 nt, Artificial Sequence
  Description of Artificial Sequence: Synthetic oligonucleotide
ucucuauuaucucaaacua

SEQ ID NO: 87830 - RNA, 19 nt, Artificial Sequence
  Description of Artificial Sequence: Synthetic oligonucleotide
acuggcaauuuguaaagaa

SEQ ID NO: 87831 - RNA, 19 nt, Artificial Sequence
  Description of Artificial Sequence: Synthetic oligonucleotide
aauauauaugauauauaaa

SEQ ID NO: 87832 - RNA, 19 nt, Artificial Sequence
  Description of Artificial Sequence: Synthetic oligonucleotide
augugauugcagcuuuuca

SEQ ID NO: 87833 - RNA, 19 nt, Artificial Sequence
  Description of Artificial Sequence: Synthetic oligonucleotide
aauguuagccacaguguau

SEQ ID NO: 87834 - RNA, 19 nt, Artificial Sequence
  Description of Artificial Sequence: Synthetic oligonucleotide
uuuuuucacuuguacuaaa

SEQ ID NO: 87835 - RNA, 19 nt, Artificial Sequence
  Description of Artificial Sequence: Synthetic oligonucleotide
aauuguaucaaaugugaca

SEQ ID NO: 87836 - RNA, 19 nt, Artificial Sequence
  Description of Artificial Sequence: Synthetic oligonucleotide
auuauaugcacuagcaaua

SEQ ID NO: 87837 - RNA, 19 nt, Artificial Sequence
  Description of Artificial Sequence: Synthetic oligonucleotide
aaaaugcuaauuguuucau

SEQ ID NO: 87838 - RNA, 19 nt, Artificial Sequence
  Description of Artificial Sequence: Synthetic oligonucleotide
ugguauaaacguccuacug

SEQ ID NO: 87839 - RNA, 19 nt, Artificial Sequence
  Description of Artificial Sequence: Synthetic oligonucleotide
guaugugggaauuuauuua

SEQ ID NO: 87840 - RNA, 19 nt, Artificial Sequence
  Description of Artificial Sequence: Synthetic oligonucleotide
accugaaauaaaauucauu

SEQ ID NO: 87841 - RNA, 19 nt, Artificial Sequence
  Description of Artificial Sequence: Synthetic oligonucleotide
uaguuguuagugauggagc

SEQ ID NO: 87842 - RNA, 19 nt, Artificial Sequence
  Description of Artificial Sequence: Synthetic oligonucleotide
ugauggagcuuaaaaaaaa

SEQ ID NO: 87843 - RNA, 25 nt, Artificial Sequence
  Description of Artificial Sequence: Synthetic oligonucleotide
gcacuuucacucuccgucagccgca

SEQ ID NO: 87844 - RNA, 25 nt, Artificial Sequence
  Description of Artificial Sequence: Synthetic oligonucleotide
auugcccgcucggcguccggccccc

SEQ ID NO: 87845 - RNA, 25 nt, Artificial Sequence
  Description of Artificial Sequence: Synthetic oligonucleotide
cgacccgcgcucguccgcccgcccg

SEQ ID NO: 87846 - RNA, 25 nt, Artificial Sequence
  Description of Artificial Sequence: Synthetic oligonucleotide
gcccgcccgcccgcgccaugaacgc

SEQ ID NO: 87847 - RNA, 25 nt, Artificial Sequence
  Description of Artificial Sequence: Synthetic oligonucleotide
ccaaggucguggucgugcugguccu

SEQ ID NO: 87848 - RNA, 25 nt, Artificial Sequence
  Description of Artificial Sequence: Synthetic oligonucleotide
ucgugcugaccgcgcucugccucag

SEQ ID NO: 87849 - RNA, 25 nt, Artificial Sequence
  Description of Artificial Sequence: Synthetic oligonucleotide
gcgacgggaagcccgucagccugag

SEQ ID NO: 87850 - RNA, 25 nt, Artificial Sequence
  Description of Artificial Sequence: Synthetic oligonucleotide
gcuacagaugcccaugccgauucuu

SEQ ID NO: 87851 - RNA, 25 nt, Artificial Sequence
  Description of Artificial Sequence: Synthetic oligonucleotide
ucgaaagccauguugccagagccaa

SEQ ID NO: 87852 - RNA, 25 nt, Artificial Sequence
  Description of Artificial Sequence: Synthetic oligonucleotide
acgucaagcaucucaaaauucucaa

SEQ ID NO: 87853 - RNA, 25 nt, Artificial Sequence
  Description of Artificial Sequence: Synthetic oligonucleotide
acacuccaaacugugcccuucagau

SEQ ID NO: 87854 - RNA, 25 nt, Artificial Sequence
  Description of Artificial Sequence: Synthetic oligonucleotide
uuguagcccggcugaagaacaacaa

SEQ ID NO: 87855 - RNA, 25 nt, Artificial Sequence
  Description of Artificial Sequence: Synthetic oligonucleotide
acagacaagugugcauugacccgaa

SEQ ID NO: 87856 - RNA, 25 nt, Artificial Sequence
  Description of Artificial Sequence: Synthetic oligonucleotide
agcuaaaguggauucaggaguaccu

SEQ ID NO: 87857 - RNA, 25 nt, Artificial Sequence
  Description of Artificial Sequence: Synthetic oligonucleotide
uggagaaagcuuuaaacaaggggcg

SEQ ID NO: 87858 - RNA, 25 nt, Artificial Sequence
  Description of Artificial Sequence: Synthetic oligonucleotide
gcagagaagaaaaaguggggaaaaa

SEQ ID NO: 87859 - RNA, 25 nt, Artificial Sequence
  Description of Artificial Sequence: Synthetic oligonucleotide
aagaaaagauaggaaaaaagaagcg

SEQ ID NO: 87860 - RNA, 25 nt, Artificial Sequence
  Description of Artificial Sequence: Synthetic oligonucleotide
gacagaagaagagaaaggcugccca

SEQ ID NO: 87861 - RNA, 25 nt, Artificial Sequence
  Description of Artificial Sequence: Synthetic oligonucleotide
agaaaaggaaaaacuaguuaucugc

SEQ ID NO: 87862 - RNA, 25 nt, Artificial Sequence
  Description of Artificial Sequence: Synthetic oligonucleotide
uaguuaucugccaccucgagaugga

SEQ ID NO: 87863 - RNA, 25 nt, Artificial Sequence
  Description of Artificial Sequence: Synthetic oligonucleotide
uggagaaagcuuuaaacaagagguu

SEQ ID NO: 87864 - RNA, 25 nt, Artificial Sequence
  Description of Artificial Sequence: Synthetic oligonucleotide
ucaagaugugagagggucagacgcc

SEQ ID NO: 87865 - RNA, 25 nt, Artificial Sequence
  Description of Artificial Sequence: Synthetic oligonucleotide
cugaggaacccuuacaguaggagcc

SEQ ID NO: 87866 - RNA, 25 nt, Artificial Sequence
  Description of Artificial Sequence: Synthetic oligonucleotide
ccagcucugaaaccaguguuaggga

SEQ ID NO: 87867 - RNA, 25 nt, Artificial Sequence
  Description of Artificial Sequence: Synthetic oligonucleotide
aagggccugccacagccuccccugc

SEQ ID NO: 87868 - RNA, 25 nt, Artificial Sequence
  Description of Artificial Sequence: Synthetic oligonucleotide
ccagggcagggccccaggcauugcc

SEQ ID NO: 87869 - RNA, 25 nt, Artificial Sequence
  Description of Artificial Sequence: Synthetic oligonucleotide
caagggcuuuguuuugcacacuuug

SEQ ID NO: 87870 - RNA, 25 nt, Artificial Sequence
  Description of Artificial Sequence: Synthetic oligonucleotide
gccauauuuucaccauuugauuaug

SEQ ID NO: 87871 - RNA, 25 nt, Artificial Sequence
  Description of Artificial Sequence: Synthetic oligonucleotide
guagcaaaauacaugacauuuauuu

SEQ ID NO: 87872 - RNA, 25 nt, Artificial Sequence
  Description of Artificial Sequence: Synthetic oligonucleotide
uuucauuuaguuugauuauucagug

SEQ ID NO: 87873 - RNA, 25 nt, Artificial Sequence
  Description of Artificial Sequence: Synthetic oligonucleotide
gucacuggcgacacguagcagcuua

SEQ ID NO: 87874 - RNA, 25 nt, Artificial Sequence
  Description of Artificial Sequence: Synthetic oligonucleotide
agacuaaggccauuauuguacuugc

SEQ ID NO: 87875 - RNA, 25 nt, Artificial Sequence
  Description of Artificial Sequence: Synthetic oligonucleotide
ccuuauuagagugucuuuccacgga

SEQ ID NO: 87876 - RNA, 25 nt, Artificial Sequence
  Description of Artificial Sequence: Synthetic oligonucleotide
agccacuccucugacucagggcucc

SEQ ID NO: 87877 - RNA, 25 nt, Artificial Sequence
  Description of Artificial Sequence: Synthetic oligonucleotide
cuggguuuuguauucucugagcugu

SEQ ID NO: 87878 - RNA, 25 nt, Artificial Sequence
  Description of Artificial Sequence: Synthetic oligonucleotide
ugcagguggggagacugggcugagg

SEQ ID NO: 87879 - RNA, 25 nt, Artificial Sequence
  Description of Artificial Sequence: Synthetic oligonucleotide
ggagccuggccccauggucagcccu

SEQ ID NO: 87880 - RNA, 25 nt, Artificial Sequence
  Description of Artificial Sequence: Synthetic oligonucleotide
uaggguggagagccaccaagaggga

SEQ ID NO: 87881 - RNA, 25 nt, Artificial Sequence
  Description of Artificial Sequence: Synthetic oligonucleotide
acgccugggggugccaggaccaguc

SEQ ID NO: 87882 - RNA, 25 nt, Artificial Sequence
  Description of Artificial Sequence: Synthetic oligonucleotide
caaccugggcaaagccuagugaagg

SEQ ID NO: 87883 - RNA, 25 nt, Artificial Sequence
  Description of Artificial Sequence: Synthetic oligonucleotide
gcuucucucugugggaugggauggu

SEQ ID NO: 87884 - RNA, 25 nt, Artificial Sequence
  Description of Artificial Sequence: Synthetic oligonucleotide
uggagggccacaugggaggcucacc

SEQ ID NO: 87885 - RNA, 25 nt, Artificial Sequence
  Description of Artificial Sequence: Synthetic oligonucleotide
ccccuucuccauccacaugggagcc

SEQ ID NO: 87886 - RNA, 25 nt, Artificial Sequence
  Description of Artificial Sequence: Synthetic oligonucleotide
cgggucugccucuucugggagggca

SEQ ID NO: 87887 - RNA, 25 nt, Artificial Sequence
  Description of Artificial Sequence: Synthetic oligonucleotide
agcagggcuacccugagcugaggca

SEQ ID NO: 87888 - RNA, 25 nt, Artificial Sequence
  Description of Artificial Sequence: Synthetic oligonucleotide
agcagugugaggccagggcagagug

SEQ ID NO: 87889 - RNA, 25 nt, Artificial Sequence
  Description of Artificial Sequence: Synthetic oligonucleotide
gagacccagcccucaucccgagcac

SEQ ID NO: 87890 - RNA, 25 nt, Artificial Sequence
  Description of Artificial Sequence: Synthetic oligonucleotide
ccuccacauccuccacguucugcuc

SEQ ID NO: 87891 - RNA, 25 nt, Artificial Sequence
  Description of Artificial Sequence: Synthetic oligonucleotide
caucauucucugucucauccaucau

SEQ ID NO: 87892 - RNA, 25 nt, Artificial Sequence
  Description of Artificial Sequence: Synthetic oligonucleotide
ucauguguguccacgacugucucca

SEQ ID NO: 87893 - RNA, 25 nt, Artificial Sequence
  Description of Artificial Sequence: Synthetic oligonucleotide
auggccccgcaaaaggacucucagg

SEQ ID NO: 87894 - RNA, 25 nt, Artificial Sequence
  Description of Artificial Sequence: Synthetic oligonucleotide
gaccaaagcuuucauguaaacugug

SEQ ID NO: 87895 - RNA, 25 nt, Artificial Sequence
  Description of Artificial Sequence: Synthetic oligonucleotide
gcaccaagcaggaaaugaaaauguc

SEQ ID NO: 87896 - RNA, 25 nt, Artificial Sequence
  Description of Artificial Sequence: Synthetic oligonucleotide
cuuguguuaccugaaaacacugugc

SEQ ID NO: 87897 - RNA, 25 nt, Artificial Sequence
  Description of Artificial Sequence: Synthetic oligonucleotide
cacaucugugucuuguuuggaauau

SEQ ID NO: 87898 - RNA, 25 nt, Artificial Sequence
  Description of Artificial Sequence: Synthetic oligonucleotide
uuguccauuguccaauccuauguuu

SEQ ID NO: 87899 - RNA, 25 nt, Artificial Sequence
  Description of Artificial Sequence: Synthetic oligonucleotide
uuuguucaaagccagcguccuccuc

SEQ ID NO: 87900 - RNA, 25 nt, Artificial Sequence
  Description of Artificial Sequence: Synthetic oligonucleotide
cugugaccaaugucuugaugcaugc

SEQ ID NO: 87901 - RNA, 25 nt, Artificial Sequence
  Description of Artificial Sequence: Synthetic oligonucleotide
cacuguucccccugugcagccgcug

SEQ ID NO: 87902 - RNA, 25 nt, Artificial Sequence
  Description of Artificial Sequence: Synthetic oligonucleotide
gagcgaggagaugcuccuugggccc

SEQ ID NO: 87903 - RNA, 25 nt, Artificial Sequence
  Description of Artificial Sequence: Synthetic oligonucleotide
cuuugagugcaguccugaucagagc

SEQ ID NO: 87904 - RNA, 25 nt, Artificial Sequence
  Description of Artificial Sequence: Synthetic oligonucleotide
ccgugguccuuuggggugaacuacc

SEQ ID NO: 87905 - RNA, 25 nt, Artificial Sequence
  Description of Artificial Sequence: Synthetic oligonucleotide
cuugguucccccacugaucacaaaa

SEQ ID NO: 87906 - RNA, 25 nt, Artificial Sequence
  Description of Artificial Sequence: Synthetic oligonucleotide
aacaugguggguccaugggcagagc

SEQ ID NO: 87907 - RNA, 25 nt, Artificial Sequence
  Description of Artificial Sequence: Synthetic oligonucleotide
cccaagggaauucggugugcaccag

SEQ ID NO: 87908 - RNA, 25 nt, Artificial Sequence
  Description of Artificial Sequence: Synthetic oligonucleotide
ggguugaccccagaggauugcugcc

SEQ ID NO: 87909 - RNA, 25 nt, Artificial Sequence
  Description of Artificial Sequence: Synthetic oligonucleotide
cccaucagugcucccucacauguca

SEQ ID NO: 87910 - RNA, 25 nt, Artificial Sequence
  Description of Artificial Sequence: Synthetic oligonucleotide
aguaccuucaaacuagggccaagcc

SEQ ID NO: 87911 - RNA, 25 nt, Artificial Sequence
  Description of Artificial Sequence: Synthetic oligonucleotide
ccagcacugcuugaggaaaacaagc

SEQ ID NO: 87912 - RNA, 25 nt, Artificial Sequence
  Description of Artificial Sequence: Synthetic oligonucleotide
cauucacaacuuguuuuugguuuuu

SEQ ID NO: 87913 - RNA, 25 nt, Artificial Sequence
  Description of Artificial Sequence: Synthetic oligonucleotide
uaaaacccaguccacaaaauaacca

SEQ ID NO: 87914 - RNA, 25 nt, Artificial Sequence
  Description of Artificial Sequence: Synthetic oligonucleotide
aauccuggacaugaagauucuuucc

SEQ ID NO: 87915 - RNA, 25 nt, Artificial Sequence
  Description of Artificial Sequence: Synthetic oligonucleotide
ccaauucacaucuaaccucaucuuc

SEQ ID NO: 87916 - RNA, 25 nt, Artificial Sequence
  Description of Artificial Sequence: Synthetic oligonucleotide
cuucaccauuuggcaaugccaucau

SEQ ID NO: 87917 - RNA, 25 nt, Artificial Sequence
  Description of Artificial Sequence: Synthetic oligonucleotide
ucuccugccuuccuccugggcccuc

SEQ ID NO: 87918 - RNA, 25 nt, Artificial Sequence
  Description of Artificial Sequence: Synthetic oligonucleotide
cucugcucugcgugucaccugugcu

SEQ ID NO: 87919 - RNA, 25 nt, Artificial Sequence
  Description of Artificial Sequence: Synthetic oligonucleotide
uucgggcccuucccacaggacauuu

SEQ ID NO: 87920 - RNA, 25 nt, Artificial Sequence
  Description of Artificial Sequence: Synthetic oligonucleotide
ucucuaagagaacaaugugcuaugu

SEQ ID NO: 87921 - RNA, 25 nt, Artificial Sequence
  Description of Artificial Sequence: Synthetic oligonucleotide
ugaagaguaagucaaccugccugac

SEQ ID NO: 87922 - RNA, 25 nt, Artificial Sequence
  Description of Artificial Sequence: Synthetic oligonucleotide
cauuuggaguguuccccuuccacug

SEQ ID NO: 87923 - RNA, 25 nt, Artificial Sequence
  Description of Artificial Sequence: Synthetic oligonucleotide
gagggcagucgauagagcuguauua

SEQ ID NO: 87924 - RNA, 25 nt, Artificial Sequence
  Description of Artificial Sequence: Synthetic oligonucleotide
aagccacuuaaaauguucacuuuug

SEQ ID NO: 87925 - RNA, 25 nt, Artificial Sequence
  Description of Artificial Sequence: Synthetic oligonucleotide
gacaaaggcaagcacuuguggguuu

SEQ ID NO: 87926 - RNA, 25 nt, Artificial Sequence
  Description of Artificial Sequence: Synthetic oligonucleotide
uuuguuuuguuuuucauucagucuu

SEQ ID NO: 87927 - RNA, 25 nt, Artificial Sequence
  Description of Artificial Sequence: Synthetic oligonucleotide
uacgaauacuuuugcccuuugauua

SEQ ID NO: 87928 - RNA, 25 nt, Artificial Sequence
  Description of Artificial Sequence: Synthetic oligonucleotide
aaagacuccaguuaaaaaaaauuuu

SEQ ID NO: 87929 - RNA, 25 nt, Artificial Sequence
  Description of Artificial Sequence: Synthetic oligonucleotide
uaaugaagaaaguggaaaacaagga

SEQ ID NO: 87930 - RNA, 25 nt, Artificial Sequence
  Description of Artificial Sequence: Synthetic oligonucleotide
aagucaaagcaaggaaacuauguaa

SEQ ID NO: 87931 - RNA, 25 nt, Artificial Sequence
  Description of Artificial Sequence: Synthetic oligonucleotide
acauguaggaaguaggaaguaaauu

SEQ ID NO: 87932 - RNA, 25 nt, Artificial Sequence
  Description of Artificial Sequence: Synthetic oligonucleotide
uauagugauguaaucuugaauugua

SEQ ID NO: 87933 - RNA, 25 nt, Artificial Sequence
  Description of Artificial Sequence: Synthetic oligonucleotide
aacuguucuugaauuuaauaaucug

SEQ ID NO: 87934 - RNA, 25 nt, Artificial Sequence
  Description of Artificial Sequence: Synthetic oligonucleotide
guaggguaauuaguaacauguguua

SEQ ID NO: 87935 - RNA, 25 nt, Artificial Sequence
  Description of Artificial Sequence: Synthetic oligonucleotide
aaguauuuucauaaguauuucaaau

SEQ ID NO: 87936 - RNA, 25 nt, Artificial Sequence
  Description of Artificial Sequence: Synthetic oligonucleotide
uuggagcuucauggcagaaggcaaa

SEQ ID NO: 87937 - RNA, 25 nt, Artificial Sequence
  Description of Artificial Sequence: Synthetic oligonucleotide
acccaucaacaaaaauugucccuua

SEQ ID NO: 87938 - RNA, 25 nt, Artificial Sequence
  Description of Artificial Sequence: Synthetic oligonucleotide
aaacaaaaauuaaaauccucaaucc

SEQ ID NO: 87939 - RNA, 25 nt, Artificial Sequence
  Description of Artificial Sequence: Synthetic oligonucleotide
cagcuauguuauauugaaaaaauag

SEQ ID NO: 87940 - RNA, 25 nt, Artificial Sequence
  Description of Artificial Sequence: Synthetic oligonucleotide
gagccugagggaucuuuacuaguua

SEQ ID NO: 87941 - RNA, 25 nt, Artificial Sequence
  Description of Artificial Sequence: Synthetic oligonucleotide
auaaagauacagaacucuuucaaaa

SEQ ID NO: 87942 - RNA, 25 nt, Artificial Sequence
  Description of Artificial Sequence: Synthetic oligonucleotide
accuuuugaaauuaaccucucacua

SEQ ID NO: 87943 - RNA, 25 nt, Artificial Sequence
  Description of Artificial Sequence: Synthetic oligonucleotide
auaccaguauaauugaguuuucagu

SEQ ID NO: 87944 - RNA, 25 nt, Artificial Sequence
  Description of Artificial Sequence: Synthetic oligonucleotide
uggggcagucauuauccagguaauc

SEQ ID NO: 87945 - RNA, 25 nt, Artificial Sequence
  Description of Artificial Sequence: Synthetic oligonucleotide
ccaagauauuuuaaaaucugucacg

SEQ ID NO: 87946 - RNA, 25 nt, Artificial Sequence
  Description of Artificial Sequence: Synthetic oligonucleotide
guagaacuuggauguaccugccccc

SEQ ID NO: 87947 - RNA, 25 nt, Artificial Sequence
  Description of Artificial Sequence: Synthetic oligonucleotide
caauccaugaaccaagaccauugaa

SEQ ID NO: 87948 - RNA, 25 nt, Artificial Sequence
  Description of Artificial Sequence: Synthetic oligonucleotide
auucuugguugaggaaacaaacaug

SEQ ID NO: 87949 - RNA, 25 nt, Artificial Sequence
  Description of Artificial Sequence: Synthetic oligonucleotide
gacccuaaaucuugacuacagucag

SEQ ID NO: 87950 - RNA, 25 nt, Artificial Sequence
  Description of Artificial Sequence: Synthetic oligonucleotide
ggaaaggaaucauuucuauuucucc

SEQ ID NO: 87951 - RNA, 25 nt, Artificial Sequence
  Description of Artificial Sequence: Synthetic oligonucleotide
cuccaugggagaaaauagauaagag

SEQ ID NO: 87952 - RNA, 25 nt, Artificial Sequence
  Description of Artificial Sequence: Synthetic oligonucleotide
guagaaacugcagggaaaauuauuu

SEQ ID NO: 87953 - RNA, 25 nt, Artificial Sequence
  Description of Artificial Sequence: Synthetic oligonucleotide
ugcauaacaauuccucuacuaacaa

SEQ ID NO: 87954 - RNA, 25 nt, Artificial Sequence
  Description of Artificial Sequence: Synthetic oligonucleotide
aucagcuccuuccuggagacugccc

SEQ ID NO: 87955 - RNA, 25 nt, Artificial Sequence
  Description of Artificial Sequence: Synthetic oligonucleotide
cagcuaaagcaauaugcauuuaaau

SEQ ID NO: 87956 - RNA, 25 nt, Artificial Sequence
  Description of Artificial Sequence: Synthetic oligonucleotide
uacagucuuccauuugcaagggaaa

SEQ ID NO: 87957 - RNA, 25 nt, Artificial Sequence
  Description of Artificial Sequence: Synthetic oligonucleotide
aagucucuuguaauccgaaucucuu

SEQ ID NO: 87958 - RNA, 25 nt, Artificial Sequence
  Description of Artificial Sequence: Synthetic oligonucleotide
uuuugcuuucgaacugcuagucaag

SEQ ID NO: 87959 - RNA, 25 nt, Artificial Sequence
  Description of Artificial Sequence: Synthetic oligonucleotide
gugcguccacgagcuguuuacuagg

SEQ ID NO: 87960 - RNA, 25 nt, Artificial Sequence
  Description of Artificial Sequence: Synthetic oligonucleotide
ggaucccucaucugucccuccggga

SEQ ID NO: 87961 - RNA, 25 nt, Artificial Sequence
  Description of Artificial Sequence: Synthetic oligonucleotide
accuggugcugccucuaccugacac

SEQ ID NO: 87962 - RNA, 25 nt, Artificial Sequence
  Description of Artificial Sequence: Synthetic oligonucleotide
cucccuugggcucccuguaaccucu

SEQ ID NO: 87963 - RNA, 25 nt, Artificial Sequence
  Description of Artificial Sequence: Synthetic oligonucleotide
uucagaggcccucgcugccagcucu

SEQ ID NO: 87964 - RNA, 25 nt, Artificial Sequence
  Description of Artificial Sequence: Synthetic oligonucleotide
uguaucaggacccagaggaaggggc

SEQ ID NO: 87965 - RNA, 25 nt, Artificial Sequence
  Description of Artificial Sequence: Synthetic oligonucleotide
ccagaggcucguugacuggcugugu

SEQ ID NO: 87966 - RNA, 25 nt, Artificial Sequence
  Description of Artificial Sequence: Synthetic oligonucleotide
uguugggauugagucugugccacgu

SEQ ID NO: 87967 - RNA, 25 nt, Artificial Sequence
  Description of Artificial Sequence: Synthetic oligonucleotide
uguuugugcuguggugugucccccu

SEQ ID NO: 87968 - RNA, 25 nt, Artificial Sequence
  Description of Artificial Sequence: Synthetic oligonucleotide
ucuguccaggcacugagauaccagc

SEQ ID NO: 87969 - RNA, 25 nt, Artificial Sequence
  Description of Artificial Sequence: Synthetic oligonucleotide
cgaggaggcuccagagggcacucug

SEQ ID NO: 87970 - RNA, 25 nt, Artificial Sequence
  Description of Artificial Sequence: Synthetic oligonucleotide
gcuuguuauuagagauuaccuccug

SEQ ID NO: 87971 - RNA, 25 nt, Artificial Sequence
  Description of Artificial Sequence: Synthetic oligonucleotide
gagaaaaaagguuccgcuuggagca

SEQ ID NO: 87972 - RNA, 25 nt, Artificial Sequence
  Description of Artificial Sequence: Synthetic oligonucleotide
agaggggcugaauagcagaagguug

SEQ ID NO: 87973 - RNA, 25 nt, Artificial Sequence
  Description of Artificial Sequence: Synthetic oligonucleotide
gcaccucccccaaccuuagauguuc

SEQ ID NO: 87974 - RNA, 25 nt, Artificial Sequence
  Description of Artificial Sequence: Synthetic oligonucleotide
cuaagucuuuccauuggaucucauu

SEQ ID NO: 87975 - RNA, 25 nt, Artificial Sequence
  Description of Artificial Sequence: Synthetic oligonucleotide
uggacccuuccauggugugaucguc

SEQ ID NO: 87976 - RNA, 25 nt, Artificial Sequence
  Description of Artificial Sequence: Synthetic oligonucleotide
cugacugguguuaucaccgugggcu

SEQ ID NO: 87977 - RNA, 25 nt, Artificial Sequence
  Description of Artificial Sequence: Synthetic oligonucleotide
ucccugacugggaguugaucgccuu

SEQ ID NO: 87978 - RNA, 25 nt, Artificial Sequence
  Description of Artificial Sequence: Synthetic oligonucleotide
uucccaggugcuacacccuuuucca

SEQ ID NO: 87979 - RNA, 25 nt, Artificial Sequence
  Description of Artificial Sequence: Synthetic oligonucleotide
agcuggaugagaauuugagugcucu

SEQ ID NO: 87980 - RNA, 25 nt, Artificial Sequence
  Description of Artificial Sequence: Synthetic oligonucleotide
ugaucccucuacagagcuucccuga

SEQ ID NO: 87981 - RNA, 25 nt, Artificial Sequence
  Description of Artificial Sequence: Synthetic oligonucleotide
acucauucugaaggagccccauucc

SEQ ID NO: 87982 - RNA, 25 nt, Artificial Sequence
  Description of Artificial Sequence: Synthetic oligonucleotide
cugggaaauauucccuagaaacuuc

SEQ ID NO: 87983 - RNA, 25 nt, Artificial Sequence
  Description of Artificial Sequence: Synthetic oligonucleotide
ccaaauccccuaagcagaccacuga

SEQ ID NO: 87984 - RNA, 25 nt, Artificial Sequence
  Description of Artificial Sequence: Synthetic oligonucleotide
auaaaaccauguagaaaauuuguua

SEQ ID NO: 87985 - RNA, 25 nt, Artificial Sequence
  Description of Artificial Sequence: Synthetic oligonucleotide
auuuugcaaccucgcuggacucuca

SEQ ID NO: 87986 - RNA, 25 nt, Artificial Sequence
  Description of Artificial Sequence: Synthetic oligonucleotide
agucucugagcagugaaugauucag

SEQ ID NO: 87987 - RNA, 25 nt, Artificial Sequence
  Description of Artificial Sequence: Synthetic oligonucleotide
guguuaaaugugaugaauacuguau

SEQ ID NO: 87988 - RNA, 25 nt, Artificial Sequence
  Description of Artificial Sequence: Synthetic oligonucleotide
uuuuguauuguuucaauugcaucuc

SEQ ID NO: 87989 - RNA, 25 nt, Artificial Sequence
  Description of Artificial Sequence: Synthetic oligonucleotide
cccagauaaugugaaaaugguccag

SEQ ID NO: 87990 - RNA, 25 nt, Artificial Sequence
  Description of Artificial Sequence: Synthetic oligonucleotide
ggagaaggccaauuccuauacgcag

SEQ ID NO: 87991 - RNA, 25 nt, Artificial Sequence
  Description of Artificial Sequence: Synthetic oligonucleotide
gcgugcuuuaaaaaauaaauaagaa

SEQ ID NO: 87992 - RNA, 25 nt, Artificial Sequence
  Description of Artificial Sequence: Synthetic oligonucleotide
aacaacucuuugagaaacaacaauu

SEQ ID NO: 87993 - RNA, 25 nt, Artificial Sequence
  Description of Artificial Sequence: Synthetic oligonucleotide
uucuacuuugaagucauaccaauga

SEQ ID NO: 87994 - RNA, 25 nt, Artificial Sequence
  Description of Artificial Sequence: Synthetic oligonucleotide
aaaaaauguauaugcacuuauaauu

SEQ ID NO: 87995 - RNA, 25 nt, Artificial Sequence
  Description of Artificial Sequence: Synthetic oligonucleotide
uuuccuaauaaaguucuguacucaa

SEQ ID NO: 87996 - RNA, 25 nt, Artificial Sequence
  Description of Artificial Sequence: Synthetic oligonucleotide
uucuguacucaaauguagccaccaa

SEQ ID NO: 87997 - RNA, 25 nt, Artificial Sequence
  Description of Artificial Sequence: Synthetic oligonucleotide
uggagaaagcuuuaaacaaguaagc

SEQ ID NO: 87998 - RNA, 25 nt, Artificial Sequence
  Description of Artificial Sequence: Synthetic oligonucleotide
cacaacagccaaaaaggacuuuccg

SEQ ID NO: 87999 - RNA, 25 nt, Artificial Sequence
  Description of Artificial Sequence: Synthetic oligonucleotide
gcuagacccacucgaggaaaacuaa

SEQ ID NO: 88000 - RNA, 25 nt, Artificial Sequence
  Description of Artificial Sequence: Synthetic oligonucleotide
aaaccuugugagagaugaaagggca

SEQ ID NO: 88001 - RNA, 25 nt, Artificial Sequence
  Description of Artificial Sequence: Synthetic oligonucleotide
aaagacgugggggagggggccuuaa

SEQ ID NO: 88002 - RNA, 25 nt, Artificial Sequence
  Description of Artificial Sequence: Synthetic oligonucleotide
accaugaggaccaggugugugugug

SEQ ID NO: 88003 - RNA, 25 nt, Artificial Sequence
  Description of Artificial Sequence: Synthetic oligonucleotide
ggggugggcacauugaucugggauc

SEQ ID NO: 88004 - RNA, 25 nt, Artificial Sequence
  Description of Artificial Sequence: Synthetic oligonucleotide
cgggccugagguuugccagcauuua

SEQ ID NO: 88005 - RNA, 25 nt, Artificial Sequence
  Description of Artificial Sequence: Synthetic oligonucleotide
agacccugcauuuauagcauacggu

SEQ ID NO: 88006 - RNA, 25 nt, Artificial Sequence
  Description of Artificial Sequence: Synthetic oligonucleotide
uaugauauugcagcuuauauucauc

SEQ ID NO: 88007 - RNA, 25 nt, Artificial Sequence
  Description of Artificial Sequence: Synthetic oligonucleotide
ccaugcccuguaccugugcacguug

SEQ ID NO: 88008 - RNA, 25 nt, Artificial Sequence
  Description of Artificial Sequence: Synthetic oligonucleotide
ggaacuuuuauuacugggguuuuuc

SEQ ID NO: 88009 - RNA, 25 nt, Artificial Sequence
  Description of Artificial Sequence: Synthetic oligonucleotide
cuaagaaagaaauuguauuaucaac

SEQ ID NO: 88010 - RNA, 25 nt, Artificial Sequence
  Description of Artificial Sequence: Synthetic oligonucleotide
cagcauuuucaagcaguuaguuccu

SEQ ID NO: 88011 - RNA, 25 nt, Artificial Sequence
  Description of Artificial Sequence: Synthetic oligonucleotide
uucaugaucaucacaaucaucauca

SEQ ID NO: 88012 - RNA, 25 nt, Artificial Sequence
  Description of Artificial Sequence: Synthetic oligonucleotide
auucucauucucauuuuuuaaauca

SEQ ID NO: 88013 - RNA, 25 nt, Artificial Sequence
  Description of Artificial Sequence: Synthetic oligonucleotide
aacgaguacuucaagaucugaauuu

SEQ ID NO: 88014 - RNA, 25 nt, Artificial Sequence
  Description of Artificial Sequence: Synthetic oligonucleotide
uggcuuguuuggagcaucuccucug

SEQ ID NO: 88015 - RNA, 25 nt, Artificial Sequence
  Description of Artificial Sequence: Synthetic oligonucleotide
gcuccccuggggagucugggcacag

SEQ ID NO: 88016 - RNA, 25 nt, Artificial Sequence
  Description of Artificial Sequence: Synthetic oligonucleotide
gucaggugguggcuuaacagggagc

SEQ ID NO: 88017 - RNA, 25 nt, Artificial Sequence
  Description of Artificial Sequence: Synthetic oligonucleotide
cuggaaaaaguguccuuucuucaga

SEQ ID NO: 88018 - RNA, 25 nt, Artificial Sequence
  Description of Artificial Sequence: Synthetic oligonucleotide
acacugaggcucccgcagcagcgcc

SEQ ID NO: 88019 - RNA, 25 nt, Artificial Sequence
  Description of Artificial Sequence: Synthetic oligonucleotide
cccucccaagaggaaggccucugug

SEQ ID NO: 88020 - RNA, 25 nt, Artificial Sequence
  Description of Artificial Sequence: Synthetic oligonucleotide
ggcacucagauaccgacuggggcug

SEQ ID NO: 88021 - RNA, 25 nt, Artificial Sequence
  Description of Artificial Sequence: Synthetic oligonucleotide
gggcgccgccacugccuucaccucc

SEQ ID NO: 88022 - RNA, 25 nt, Artificial Sequence
  Description of Artificial Sequence: Synthetic oligonucleotide
cucuuucaaccucagugauuggcuc

SEQ ID NO: 88023 - RNA, 25 nt, Artificial Sequence
  Description of Artificial Sequence: Synthetic oligonucleotide
cugugggcuccauguagaagccacu

SEQ ID NO: 88024 - RNA, 25 nt, Artificial Sequence
  Description of Artificial Sequence: Synthetic oligonucleotide
uauuacugggacugugcucagagac

SEQ ID NO: 88025 - RNA, 25 nt, Artificial Sequence
  Description of Artificial Sequence: Synthetic oligonucleotide
ccccucucccagcuauuccuacucu

SEQ ID NO: 88026 - RNA, 25 nt, Artificial Sequence
  Description of Artificial Sequence: Synthetic oligonucleotide
ucuccccgacuccgagagcaugcuu

SEQ ID NO: 88027 - RNA, 25 nt, Artificial Sequence
  Description of Artificial Sequence: Synthetic oligonucleotide
uaaucuugcuucugcuucucauuuc

SEQ ID NO: 88028 - RNA, 25 nt, Artificial Sequence
  Description of Artificial Sequence: Synthetic oligonucleotide
cuguagccugaucagcgccgcacca

SEQ ID NO: 88029 - RNA, 25 nt, Artificial Sequence
  Description of Artificial Sequence: Synthetic oligonucleotide
agccgggaagagggugauugcuggg

SEQ ID NO: 88030 - RNA, 25 nt, Artificial Sequence
  Description of Artificial Sequence: Synthetic oligonucleotide
ggcucgugcccugcaucccucuccu

SEQ ID NO: 88031 - RNA, 25 nt, Artificial Sequence
  Description of Artificial Sequence: Synthetic oligonucleotide
ucccagggccugccccacagcucgg

SEQ ID NO: 88032 - RNA, 25 nt, Artificial Sequence
  Description of Artificial Sequence: Synthetic oligonucleotide
ggcccucugugagauccgucuuugg

SEQ ID NO: 88033 - RNA, 25 nt, Artificial Sequence
  Description of Artificial Sequence: Synthetic oligonucleotide
gccuccuccagaauggagcuggccc

SEQ ID NO: 88034 - RNA, 25 nt, Artificial Sequence
  Description of Artificial Sequence: Synthetic oligonucleotide
cucuccuggggauguguaauggucc

SEQ ID NO: 88035 - RNA, 25 nt, Artificial Sequence
  Description of Artificial Sequence: Synthetic oligonucleotide
ccccugcuuacccgcaaaagacaag

SEQ ID NO: 88036 - RNA, 25 nt, Artificial Sequence
  Description of Artificial Sequence: Synthetic oligonucleotide
gucuuuacagaaucaaaugcaauuu

SEQ ID NO: 88037 - RNA, 25 nt, Artificial Sequence
  Description of Artificial Sequence: Synthetic oligonucleotide
uuaaaucugagagcucgcuuugagu

SEQ ID NO: 88038 - RNA, 25 nt, Artificial Sequence
  Description of Artificial Sequence: Synthetic oligonucleotide
ugacuggguuuugugauugccucug

SEQ ID NO: 88039 - RNA, 25 nt, Artificial Sequence
  Description of Artificial Sequence: Synthetic oligonucleotide
gaagccuauguaugccauggaggca

SEQ ID NO: 88040 - RNA, 25 nt, Artificial Sequence
  Description of Artificial Sequence: Synthetic oligonucleotide
acuaacaaacucugagguuuccgaa

SEQ ID NO: 88041 - RNA, 25 nt, Artificial Sequence
  Description of Artificial Sequence: Synthetic oligonucleotide
aaucagaagcgaaaaaaucagugaa

SEQ ID NO: 88042 - RNA, 25 nt, Artificial Sequence
  Description of Artificial Sequence: Synthetic oligonucleotide
auaaaccaucaucuugccacuaccc

SEQ ID NO: 88043 - RNA, 25 nt, Artificial Sequence
  Description of Artificial Sequence: Synthetic oligonucleotide
cccuccugaagccacagcaggguuu

SEQ ID NO: 88044 - RNA, 25 nt, Artificial Sequence
  Description of Artificial Sequence: Synthetic oligonucleotide
ucagguuccaaucagaacuguuggc

SEQ ID NO: 88045 - RNA, 25 nt, Artificial Sequence
  Description of Artificial Sequence: Synthetic oligonucleotide
caaggugacauuuccaugcauaaau

SEQ ID NO: 88046 - RNA, 25 nt, Artificial Sequence
  Description of Artificial Sequence: Synthetic oligonucleotide
ugcgauccacagaagguccuggugg

SEQ ID NO: 88047 - RNA, 25 nt, Artificial Sequence
  Description of Artificial Sequence: Synthetic oligonucleotide
guauuuguaacuuuuugcaaggcau

SEQ ID NO: 88048 - RNA, 25 nt, Artificial Sequence
  Description of Artificial Sequence: Synthetic oligonucleotide
uuuuuuuauauauauuuuugugcac

SEQ ID NO: 88049 - RNA, 25 nt, Artificial Sequence
  Description of Artificial Sequence: Synthetic oligonucleotide
cauuuuuuuuuacguuucuuuagaa

SEQ ID NO: 88050 - RNA, 25 nt, Artificial Sequence
  Description of Artificial Sequence: Synthetic oligonucleotide
aaacaaauguauuucaaaauauauu

SEQ ID NO: 88051 - RNA, 25 nt, Artificial Sequence
  Description of Artificial Sequence: Synthetic oligonucleotide
uuauagucgaacaauucauauauuu

SEQ ID NO: 88052 - RNA, 25 nt, Artificial Sequence
  Description of Artificial Sequence: Synthetic oligonucleotide
ugaaguggagccauaugaaugucag

SEQ ID NO: 88053 - RNA, 25 nt, Artificial Sequence
  Description of Artificial Sequence: Synthetic oligonucleotide
guaguuuauacuucucuauuaucuc

SEQ ID NO: 88054 - RNA, 25 nt, Artificial Sequence
  Description of Artificial Sequence: Synthetic oligonucleotide
caaacuacuggcaauuuguaaagaa

SEQ ID NO: 88055 - RNA, 25 nt, Artificial Sequence
  Description of Artificial Sequence: Synthetic oligonucleotide
aauauauaugauauauaaaugugau

SEQ ID NO: 88056 - RNA, 25 nt, Artificial Sequence
  Description of Artificial Sequence: Synthetic oligonucleotide
uugcagcuuuucaauguuagccaca

SEQ ID NO: 88057 - RNA, 25 nt, Artificial Sequence
  Description of Artificial Sequence: Synthetic oligonucleotide
aguguauuuuuucacuuguacuaaa

SEQ ID NO: 88058 - RNA, 25 nt, Artificial Sequence
  Description of Artificial Sequence: Synthetic oligonucleotide
aauuguaucaaaugugacauuauau

SEQ ID NO: 88059 - RNA, 25 nt, Artificial Sequence
  Description of Artificial Sequence: Synthetic oligonucleotide
ugcacuagcaauaaaaugcuaauug

SEQ ID NO: 88060 - RNA, 25 nt, Artificial Sequence
  Description of Artificial Sequence: Synthetic oligonucleotide
guuucaugguauaaacguccuacug

SEQ ID NO: 88061 - RNA, 25 nt, Artificial Sequence
  Description of Artificial Sequence: Synthetic oligonucleotide
guaugugggaauuuauuuaccugaa

SEQ ID NO: 88062 - RNA, 25 nt, Artificial Sequence
  Description of Artificial Sequence: Synthetic oligonucleotide
aauaaaauucauuaguuguuaguga

SEQ ID NO: 88063 - RNA, 25 nt, Artificial Sequence
  Description of Artificial Sequence: Synthetic oligonucleotide
uguuagugauggagcuuaaaaaaaa

SEQ ID NO: 88064 - RNA, 1912 nt, Homo sapiens
uuuuuuuucuucccucuagugggcggggcagaggaguuagccaagaugugacuuugaaacccucagcgucucagugcccuuuuguucuaaacaaagaauuuuguaauugguucuaccaaagaaggauauaaugaagucacuaugggaaaagauggggaggagaguuguaggauucuacauuaauucucuugugcccuuagcccacuacuucagaauuuccugaagaaagcaagccugaauugguuuuuuaaauugcuuuaaaaauuuuuuuuaacuggguuaaugcuugcugaauuggaagugaauguccauuccuuugccucuuuugcagauauacacuucagauaacuacaccgaggaaaugggcucaggggacuaugacuccaugaaggaacccuguuuccgugaagaaaaugcuaauuucaauaaaaucuuccugcccaccaucuacuccaucaucuucuuaacuggcauugugggcaauggauuggucauccuggucauggguuaccagaagaaacugagaagcaugacggacaaguacaggcugcaccugucaguggccgaccuccucuuugucaucacgcuucccuucugggcaguugaugccguggcaaacugguacuuugggaacuuccuaugcaaggcaguccaugucaucuacacagucaaccucuacagcaguguccucauccuggccuucaucagucuggaccgcuaccuggccaucguccacgccaccaacagucagaggccaaggaagcuguuggcugaaaagguggucuauguuggcgucuggaucccugcccuccugcugacuauucccgacuucaucuuugccaacgucagugaggcagaugacagauauaucugugaccgcuucuaccccaaugacuugugggugguuguguuccaguuucagcacaucaugguuggccuuauccugccugguauugucauccuguccugcuauugcauuaucaucuccaagcugucacacuccaagggccaccagaagcgcaaggcccucaagaccacagucauccucauccuggcuuucuucgccuguuggcugccuuacuacauugggaucagcaucgacuccuucauccuccuggaaaucaucaagcaagggugugaguuugagaacacugugcacaaguggauuuccaucaccgaggcccuagcuuucuuccacuguugucugaaccccauccucuaugcuuuccuuggagccaaauuuaaaaccucugcccagcacgcacucaccucugugagcagaggguccagccucaagauccucuccaaaggaaagcgagguggacauucaucuguuuccacugagucugagucuucaaguuuucacuccagcuaacacagauguaaaagacuuuuuuuuauacgauaaauaacuuuuuuuuaaguuacacauuuuucagauauaaaagacugaccaauauuguacaguuuuuauugcuuguuggauuuuugucuuguguuucuuuaguuuuugugaaguuuaauugacuuauuuauauaaauuuuuuuuguuucauauugaugugugucuaggcaggaccuguggccaaguucuuaguugcuguaugucucgugguaggacuguagaaaagggaacugaacauuccagagcguguagugaaucacguaaagcuagaaaugauccccagcuguuuaugcauagauaaucucuccauucccguggaacguuuuuccuguucuuaagacgugauuuugcuguagaagauggcacuuauaaccaaagcccaaagugguauagaaaugcugguuuuucaguuuucaggaguggguugauuucagcaccuacaguguacagucuuguauuaaguuguuaauaaaaguacauguuaaacuuaaaaaaaaaaaaaaaaaa

SEQ ID NO: 88065 - RNA, 1691 nt, Homo sapiens
aacuucaguuuguuggcugcggcagcagguagcaaagugacgccgagggccugagugcuccaguagccaccgcaucuggagaaccagcgguuaccauggaggggaucaguauauacacuucagauaacuacaccgaggaaaugggcucaggggacuaugacuccaugaaggaacccuguuuccgugaagaaaaugcuaauuucaauaaaaucuuccugcccaccaucuacuccaucaucuucuuaacuggcauugugggcaauggauuggucauccuggucauggguuaccagaagaaacugagaagcaugacggacaaguacaggcugcaccugucaguggccgaccuccucuuugucaucacgcuucccuucugggcaguugaugccguggcaaacugguacuuugggaacuuccuaugcaaggcaguccaugucaucuacacagucaaccucuacagcaguguccucauccuggccuucaucagucuggaccgcuaccuggccaucguccacgccaccaacagucagaggccaaggaagcuguuggcugaaaagguggucuauguuggcgucuggaucccugcccuccugcugacuauucccgacuucaucuuugccaacgucagugaggcagaugacagauauaucugugaccgcuucuaccccaaugacuugugggugguuguguuccaguuucagcacaucaugguuggccuuauccugccugguauugucauccuguccugcuauugcauuaucaucuccaagcugucacacuccaagggccaccagaagcgcaaggcccucaagaccacagucauccucauccuggcuuucuucgccuguuggcugccuuacuacauugggaucagcaucgacuccuucauccuccuggaaaucaucaagcaagggugugaguuugagaacacugugcacaaguggauuuccaucaccgaggcccuagcuuucuuccacuguugucugaaccccauccucuaugcuuuccuuggagccaaauuuaaaaccucugcccagcacgcacucaccucugugagcagaggguccagccucaagauccucuccaaaggaaagcgagguggacauucaucuguuuccacugagucugagucuucaaguuuucacuccagcuaacacagauguaaaagacuuuuuuuuauacgauaaauaacuuuuuuuuaaguuacacauuuuucagauauaaaagacugaccaauauuguacaguuuuuauugcuuguuggauuuuugucuuguguuucuuuaguuuuugugaaguuuaauugacuuauuuauauaaauuuuuuuuguuucauauugaugugugucuaggcaggaccuguggccaaguucuuaguugcuguaugucucgugguaggacuguagaaaagggaacugaacauuccagagcguguagugaaucacguaaagcuagaaaugauccccagcuguuuaugcauagauaaucucuccauucccguggaacguuuuuccuguucuuaagacgugauuuugcuguagaagauggcacuuauaaccaaagcccaaagugguauagaaaugcugguuuuucaguuuucaggaguggguugauuucagcaccuacaguguacagucuuguauuaaguuguuaauaaaaguacauguuaaacuuaaaaaaaaaaaaaaaaaa

SEQ ID NO: 88066 - RNA, 19 nt, Artificial Sequence
  Description of Artificial Sequence: Synthetic oligonucleotide
aacuucaguuuguuggcug

SEQ ID NO: 88067 - RNA, 19 nt, Artificial Sequence
  Description of Artificial Sequence: Synthetic oligonucleotide
gcggcagcagguagcaaag

SEQ ID NO: 88068 - RNA, 19 nt, Artificial Sequence
  Description of Artificial Sequence: Synthetic oligonucleotide
gugacgccgagggccugag

SEQ ID NO: 88069 - RNA, 19 nt, Artificial Sequence
  Description of Artificial Sequence: Synthetic oligonucleotide
gugcuccaguagccaccgc

SEQ ID NO: 88070 - RNA, 19 nt, Artificial Sequence
  Description of Artificial Sequence: Synthetic oligonucleotide
caucuggagaaccagcggu

SEQ ID NO: 88071 - RNA, 19 nt, Artificial Sequence
  Description of Artificial Sequence: Synthetic oligonucleotide
uuaccauggaggggaucag

SEQ ID NO: 88072 - RNA, 19 nt, Artificial Sequence
  Description of Artificial Sequence: Synthetic oligonucleotide
guauauacacuucagauaa

SEQ ID NO: 88073 - RNA, 19 nt, Artificial Sequence
  Description of Artificial Sequence: Synthetic oligonucleotide
acuacaccgaggaaauggg

SEQ ID NO: 88074 - RNA, 19 nt, Artificial Sequence
  Description of Artificial Sequence: Synthetic oligonucleotide
gcucaggggacuaugacuc

SEQ ID NO: 88075 - RNA, 19 nt, Artificial Sequence
  Description of Artificial Sequence: Synthetic oligonucleotide
ccaugaaggaacccuguuu

SEQ ID NO: 88076 - RNA, 19 nt, Artificial Sequence
  Description of Artificial Sequence: Synthetic oligonucleotide
uccgugaagaaaaugcuaa

SEQ ID NO: 88077 - RNA, 19 nt, Artificial Sequence
  Description of Artificial Sequence: Synthetic oligonucleotide
auuucaauaaaaucuuccu

SEQ ID NO: 88078 - RNA, 19 nt, Artificial Sequence
  Description of Artificial Sequence: Synthetic oligonucleotide
ugcccaccaucuacuccau

SEQ ID NO: 88079 - RNA, 19 nt, Artificial Sequence
  Description of Artificial Sequence: Synthetic oligonucleotide
ucaucuucuuaacuggcau

SEQ ID NO: 88080 - RNA, 19 nt, Artificial Sequence
  Description of Artificial Sequence: Synthetic oligonucleotide
uugugggcaauggauuggu

SEQ ID NO: 88081 - RNA, 19 nt, Artificial Sequence
  Description of Artificial Sequence: Synthetic oligonucleotide
ucauccuggucauggguua

SEQ ID NO: 88082 - RNA, 19 nt, Artificial Sequence
  Description of Artificial Sequence: Synthetic oligonucleotide
accagaagaaacugagaag

SEQ ID NO: 88083 - RNA, 19 nt, Artificial Sequence
  Description of Artificial Sequence: Synthetic oligonucleotide
gcaugacggacaaguacag

SEQ ID NO: 88084 - RNA, 19 nt, Artificial Sequence
  Description of Artificial Sequence: Synthetic oligonucleotide
ggcugcaccugucaguggc

SEQ ID NO: 88085 - RNA, 19 nt, Artificial Sequence
  Description of Artificial Sequence: Synthetic oligonucleotide
ccgaccuccucuuugucau

SEQ ID NO: 88086 - RNA, 19 nt, Artificial Sequence
  Description of Artificial Sequence: Synthetic oligonucleotide
ucacgcuucccuucugggc

SEQ ID NO: 88087 - RNA, 19 nt, Artificial Sequence
  Description of Artificial Sequence: Synthetic oligonucleotide
caguugaugccguggcaaa

SEQ ID NO: 88088 - RNA, 19 nt, Artificial Sequence
  Description of Artificial Sequence: Synthetic oligonucleotide
acugguacuuugggaacuu

SEQ ID NO: 88089 - RNA, 19 nt, Artificial Sequence
  Description of Artificial Sequence: Synthetic oligonucleotide
uccuaugcaaggcagucca

SEQ ID NO: 88090 - RNA, 19 nt, Artificial Sequence
  Description of Artificial Sequence: Synthetic oligonucleotide
augucaucuacacagucaa

SEQ ID NO: 88091 - RNA, 19 nt, Artificial Sequence
  Description of Artificial Sequence: Synthetic oligonucleotide
accucuacagcaguguccu

SEQ ID NO: 88092 - RNA, 19 nt, Artificial Sequence
  Description of Artificial Sequence: Synthetic oligonucleotide
ucauccuggccuucaucag

SEQ ID NO: 88093 - RNA, 19 nt, Artificial Sequence
  Description of Artificial Sequence: Synthetic oligonucleotide
gucuggaccgcuaccuggc

SEQ ID NO: 88094 - RNA, 19 nt, Artificial Sequence
  Description of Artificial Sequence: Synthetic oligonucleotide
ccaucguccacgccaccaa

SEQ ID NO: 88095 - RNA, 19 nt, Artificial Sequence
  Description of Artificial Sequence: Synthetic oligonucleotide
acagucagaggccaaggaa

SEQ ID NO: 88096 - RNA, 19 nt, Artificial Sequence
  Description of Artificial Sequence: Synthetic oligonucleotide
agcuguuggcugaaaaggu

SEQ ID NO: 88097 - RNA, 19 nt, Artificial Sequence
  Description of Artificial Sequence: Synthetic oligonucleotide
uggucuauguuggcgucug

SEQ ID NO: 88098 - RNA, 19 nt, Artificial Sequence
  Description of Artificial Sequence: Synthetic oligonucleotide
ggaucccugcccuccugcu

SEQ ID NO: 88099 - RNA, 19 nt, Artificial Sequence
  Description of Artificial Sequence: Synthetic oligonucleotide
ugacuauucccgacuucau

SEQ ID NO: 88100 - RNA, 19 nt, Artificial Sequence
  Description of Artificial Sequence: Synthetic oligonucleotide
ucuuugccaacgucaguga

SEQ ID NO: 88101 - RNA, 19 nt, Artificial Sequence
  Description of Artificial Sequence: Synthetic oligonucleotide
aggcagaugacagauauau

SEQ ID NO: 88102 - RNA, 19 nt, Artificial Sequence
  Description of Artificial Sequence: Synthetic oligonucleotide
ucugugaccgcuucuaccc

SEQ ID NO: 88103 - RNA, 19 nt, Artificial Sequence
  Description of Artificial Sequence: Synthetic oligonucleotide
ccaaugacuuguggguggu

SEQ ID NO: 88104 - RNA, 19 nt, Artificial Sequence
  Description of Artificial Sequence: Synthetic oligonucleotide
uuguguuccaguuucagca

SEQ ID NO: 88105 - RNA, 19 nt, Artificial Sequence
  Description of Artificial Sequence: Synthetic oligonucleotide
acaucaugguuggccuuau

SEQ ID NO: 88106 - RNA, 19 nt, Artificial Sequence
  Description of Artificial Sequence: Synthetic oligonucleotide
uccugccugguauugucau

SEQ ID NO: 88107 - RNA, 19 nt, Artificial Sequence
  Description of Artificial Sequence: Synthetic oligonucleotide
uccuguccugcuauugcau

SEQ ID NO: 88108 - RNA, 19 nt, Artificial Sequence
  Description of Artificial Sequence: Synthetic oligonucleotide
uuaucaucuccaagcuguc

SEQ ID NO: 88109 - RNA, 19 nt, Artificial Sequence
  Description of Artificial Sequence: Synthetic oligonucleotide
cacacuccaagggccacca

SEQ ID NO: 88110 - RNA, 19 nt, Artificial Sequence
  Description of Artificial Sequence: Synthetic oligonucleotide
agaagcgcaaggcccucaa

SEQ ID NO: 88111 - RNA, 19 nt, Artificial Sequence
  Description of Artificial Sequence: Synthetic oligonucleotide
agaccacagucauccucau

SEQ ID NO: 88112 - RNA, 19 nt, Artificial Sequence
  Description of Artificial Sequence: Synthetic oligonucleotide
uccuggcuuucuucgccug

SEQ ID NO: 88113 - RNA, 19 nt, Artificial Sequence
  Description of Artificial Sequence: Synthetic oligonucleotide
guuggcugccuuacuacau

SEQ ID NO: 88114 - RNA, 19 nt, Artificial Sequence
  Description of Artificial Sequence: Synthetic oligonucleotide
uugggaucagcaucgacuc

SEQ ID NO: 88115 - RNA, 19 nt, Artificial Sequence
  Description of Artificial Sequence: Synthetic oligonucleotide
ccuucauccuccuggaaau

SEQ ID NO: 88116 - RNA, 19 nt, Artificial Sequence
  Description of Artificial Sequence: Synthetic oligonucleotide
ucaucaagcaaggguguga

SEQ ID NO: 88117 - RNA, 19 nt, Artificial Sequence
  Description of Artificial Sequence: Synthetic oligonucleotide
aguuugagaacacugugca

SEQ ID NO: 88118 - RNA, 19 nt, Artificial Sequence
  Description of Artificial Sequence: Synthetic oligonucleotide
acaaguggauuuccaucac

SEQ ID NO: 88119 - RNA, 19 nt, Artificial Sequence
  Description of Artificial Sequence: Synthetic oligonucleotide
ccgaggcccuagcuuucuu

SEQ ID NO: 88120 - RNA, 19 nt, Artificial Sequence
  Description of Artificial Sequence: Synthetic oligonucleotide
uccacuguugucugaaccc

SEQ ID NO: 88121 - RNA, 19 nt, Artificial Sequence
  Description of Artificial Sequence: Synthetic oligonucleotide
ccauccucuaugcuuuccu

SEQ ID NO: 88122 - RNA, 19 nt, Artificial Sequence
  Description of Artificial Sequence: Synthetic oligonucleotide
uuggagccaaauuuaaaac

SEQ ID NO: 88123 - RNA, 19 nt, Artificial Sequence
  Description of Artificial Sequence: Synthetic oligonucleotide
ccucugcccagcacgcacu

SEQ ID NO: 88124 - RNA, 19 nt, Artificial Sequence
  Description of Artificial Sequence: Synthetic oligonucleotide
ucaccucugugagcagagg

SEQ ID NO: 88125 - RNA, 19 nt, Artificial Sequence
  Description of Artificial Sequence: Synthetic oligonucleotide
gguccagccucaagauccu

SEQ ID NO: 88126 - RNA, 19 nt, Artificial Sequence
  Description of Artificial Sequence: Synthetic oligonucleotide
ucuccaaaggaaagcgagg

SEQ ID NO: 88127 - RNA, 19 nt, Artificial Sequence
  Description of Artificial Sequence: Synthetic oligonucleotide
guggacauucaucuguuuc

SEQ ID NO: 88128 - RNA, 19 nt, Artificial Sequence
  Description of Artificial Sequence: Synthetic oligonucleotide
ccacugagucugagucuuc

SEQ ID NO: 88129 - RNA, 19 nt, Artificial Sequence
  Description of Artificial Sequence: Synthetic oligonucleotide
caaguuuucacuccagcua

SEQ ID NO: 88130 - RNA, 19 nt, Artificial Sequence
  Description of Artificial Sequence: Synthetic oligonucleotide
aacacagauguaaaagacu

SEQ ID NO: 88131 - RNA, 19 nt, Artificial Sequence
  Description of Artificial Sequence: Synthetic oligonucleotide
uuuuuuuuauacgauaaau

SEQ ID NO: 88132 - RNA, 19 nt, Artificial Sequence
  Description of Artificial Sequence: Synthetic oligonucleotide
uaacuuuuuuuuaaguuac

SEQ ID NO: 88133 - RNA, 19 nt, Artificial Sequence
  Description of Artificial Sequence: Synthetic oligonucleotide
cacauuuuucagauauaaa

SEQ ID NO: 88134 - RNA, 19 nt, Artificial Sequence
  Description of Artificial Sequence: Synthetic oligonucleotide
aagacugaccaauauugua

SEQ ID NO: 88135 - RNA, 19 nt, Artificial Sequence
  Description of Artificial Sequence: Synthetic oligonucleotide
acaguuuuuauugcuuguu

SEQ ID NO: 88136 - RNA, 19 nt, Artificial Sequence
  Description of Artificial Sequence: Synthetic oligonucleotide
uggauuuuugucuuguguu

SEQ ID NO: 88137 - RNA, 19 nt, Artificial Sequence
  Description of Artificial Sequence: Synthetic oligonucleotide
uucuuuaguuuuugugaag

SEQ ID NO: 88138 - RNA, 19 nt, Artificial Sequence
  Description of Artificial Sequence: Synthetic oligonucleotide
guuuaauugacuuauuuau

SEQ ID NO: 88139 - RNA, 19 nt, Artificial Sequence
  Description of Artificial Sequence: Synthetic oligonucleotide
uauaaauuuuuuuuguuuc

SEQ ID NO: 88140 - RNA, 19 nt, Artificial Sequence
  Description of Artificial Sequence: Synthetic oligonucleotide
cauauugaugugugucuag

SEQ ID NO: 88141 - RNA, 19 nt, Artificial Sequence
  Description of Artificial Sequence: Synthetic oligonucleotide
ggcaggaccuguggccaag

SEQ ID NO: 88142 - RNA, 19 nt, Artificial Sequence
  Description of Artificial Sequence: Synthetic oligonucleotide
guucuuaguugcuguaugu

SEQ ID NO: 88143 - RNA, 19 nt, Artificial Sequence
  Description of Artificial Sequence: Synthetic oligonucleotide
ucucgugguaggacuguag

SEQ ID NO: 88144 - RNA, 19 nt, Artificial Sequence
  Description of Artificial Sequence: Synthetic oligonucleotide
gaaaagggaacugaacauu

SEQ ID NO: 88145 - RNA, 19 nt, Artificial Sequence
  Description of Artificial Sequence: Synthetic oligonucleotide
uccagagcguguagugaau

SEQ ID NO: 88146 - RNA, 19 nt, Artificial Sequence
  Description of Artificial Sequence: Synthetic oligonucleotide
ucacguaaagcuagaaaug

SEQ ID NO: 88147 - RNA, 19 nt, Artificial Sequence
  Description of Artificial Sequence: Synthetic oligonucleotide
gauccccagcuguuuaugc

SEQ ID NO: 88148 - RNA, 19 nt, Artificial Sequence
  Description of Artificial Sequence: Synthetic oligonucleotide
cauagauaaucucuccauu

SEQ ID NO: 88149 - RNA, 19 nt, Artificial Sequence
  Description of Artificial Sequence: Synthetic oligonucleotide
ucccguggaacguuuuucc

SEQ ID NO: 88150 - RNA, 19 nt, Artificial Sequence
  Description of Artificial Sequence: Synthetic oligonucleotide
cuguucuuaagacgugauu

SEQ ID NO: 88151 - RNA, 19 nt, Artificial Sequence
  Description of Artificial Sequence: Synthetic oligonucleotide
uuugcuguagaagauggca

SEQ ID NO: 88152 - RNA, 19 nt, Artificial Sequence
  Description of Artificial Sequence: Synthetic oligonucleotide
acuuauaaccaaagcccaa

SEQ ID NO: 88153 - RNA, 19 nt, Artificial Sequence
  Description of Artificial Sequence: Synthetic oligonucleotide
aagugguauagaaaugcug

SEQ ID NO: 88154 - RNA, 19 nt, Artificial Sequence
  Description of Artificial Sequence: Synthetic oligonucleotide
gguuuuucaguuuucagga

SEQ ID NO: 88155 - RNA, 19 nt, Artificial Sequence
  Description of Artificial Sequence: Synthetic oligonucleotide
aguggguugauuucagcac

SEQ ID NO: 88156 - RNA, 19 nt, Artificial Sequence
  Description of Artificial Sequence: Synthetic oligonucleotide
ccuacaguguacagucuug

SEQ ID NO: 88157 - RNA, 19 nt, Artificial Sequence
  Description of Artificial Sequence: Synthetic oligonucleotide
guauuaaguuguuaauaaa

SEQ ID NO: 88158 - RNA, 19 nt, Artificial Sequence
  Description of Artificial Sequence: Synthetic oligonucleotide
aaguacauguuaaacuuaa

SEQ ID NO: 88159 - RNA, 19 nt, Artificial Sequence
  Description of Artificial Sequence: Synthetic oligonucleotide
uuuuuuuucuucccucuag

SEQ ID NO: 88160 - RNA, 19 nt, Artificial Sequence
  Description of Artificial Sequence: Synthetic oligonucleotide
gugggcggggcagaggagu

SEQ ID NO: 88161 - RNA, 19 nt, Artificial Sequence
  Description of Artificial Sequence: Synthetic oligonucleotide
uuagccaagaugugacuuu

SEQ ID NO: 88162 - RNA, 19 nt, Artificial Sequence
  Description of Artificial Sequence: Synthetic oligonucleotide
ugaaacccucagcgucuca

SEQ ID NO: 88163 - RNA, 19 nt, Artificial Sequence
  Description of Artificial Sequence: Synthetic oligonucleotide
agugcccuuuuguucuaaa

SEQ ID NO: 88164 - RNA, 19 nt, Artificial Sequence
  Description of Artificial Sequence: Synthetic oligonucleotide
acaaagaauuuuguaauug

SEQ ID NO: 88165 - RNA, 19 nt, Artificial Sequence
  Description of Artificial Sequence: Synthetic oligonucleotide
gguucuaccaaagaaggau

SEQ ID NO: 88166 - RNA, 19 nt, Artificial Sequence
  Description of Artificial Sequence: Synthetic oligonucleotide
uauaaugaagucacuaugg

SEQ ID NO: 88167 - RNA, 19 nt, Artificial Sequence
  Description of Artificial Sequence: Synthetic oligonucleotide
ggaaaagauggggaggaga

SEQ ID NO: 88168 - RNA, 19 nt, Artificial Sequence
  Description of Artificial Sequence: Synthetic oligonucleotide
aguuguaggauucuacauu

SEQ ID NO: 88169 - RNA, 19 nt, Artificial Sequence
  Description of Artificial Sequence: Synthetic oligonucleotide
uaauucucuugugcccuua

SEQ ID NO: 88170 - RNA, 19 nt, Artificial Sequence
  Description of Artificial Sequence: Synthetic oligonucleotide
agcccacuacuucagaauu

SEQ ID NO: 88171 - RNA, 19 nt, Artificial Sequence
  Description of Artificial Sequence: Synthetic oligonucleotide
uuccugaagaaagcaagcc

SEQ ID NO: 88172 - RNA, 19 nt, Artificial Sequence
  Description of Artificial Sequence: Synthetic oligonucleotide
cugaauugguuuuuuaaau

SEQ ID NO: 88173 - RNA, 19 nt, Artificial Sequence
  Description of Artificial Sequence: Synthetic oligonucleotide
uugcuuuaaaaauuuuuuu

SEQ ID NO: 88174 - RNA, 19 nt, Artificial Sequence
  Description of Artificial Sequence: Synthetic oligonucleotide
uuaacuggguuaaugcuug

SEQ ID NO: 88175 - RNA, 19 nt, Artificial Sequence
  Description of Artificial Sequence: Synthetic oligonucleotide
gcugaauuggaagugaaug

SEQ ID NO: 88176 - RNA, 19 nt, Artificial Sequence
  Description of Artificial Sequence: Synthetic oligonucleotide
guccauuccuuugccucuu

SEQ ID NO: 88177 - RNA, 19 nt, Artificial Sequence
  Description of Artificial Sequence: Synthetic oligonucleotide
uuugcagauauacacuuca

SEQ ID NO: 88178 - RNA, 19 nt, Artificial Sequence
  Description of Artificial Sequence: Synthetic oligonucleotide
agauaacuacaccgaggaa

SEQ ID NO: 88179 - RNA, 19 nt, Artificial Sequence
  Description of Artificial Sequence: Synthetic oligonucleotide
aaugggcucaggggacuau

SEQ ID NO: 88180 - RNA, 19 nt, Artificial Sequence
  Description of Artificial Sequence: Synthetic oligonucleotide
ugacuccaugaaggaaccc

SEQ ID NO: 88181 - RNA, 19 nt, Artificial Sequence
  Description of Artificial Sequence: Synthetic oligonucleotide
cuguuuccgugaagaaaau

SEQ ID NO: 88182 - RNA, 19 nt, Artificial Sequence
  Description of Artificial Sequence: Synthetic oligonucleotide
ugcuaauuucaauaaaauc

SEQ ID NO: 88183 - RNA, 19 nt, Artificial Sequence
  Description of Artificial Sequence: Synthetic oligonucleotide
cuuccugcccaccaucuac

SEQ ID NO: 88184 - RNA, 19 nt, Artificial Sequence
  Description of Artificial Sequence: Synthetic oligonucleotide
cuccaucaucuucuuaacu

SEQ ID NO: 88185 - RNA, 19 nt, Artificial Sequence
  Description of Artificial Sequence: Synthetic oligonucleotide
uggcauugugggcaaugga

SEQ ID NO: 88186 - RNA, 19 nt, Artificial Sequence
  Description of Artificial Sequence: Synthetic oligonucleotide
auuggucauccuggucaug

SEQ ID NO: 88187 - RNA, 19 nt, Artificial Sequence
  Description of Artificial Sequence: Synthetic oligonucleotide
ggguuaccagaagaaacug

SEQ ID NO: 88188 - RNA, 19 nt, Artificial Sequence
  Description of Artificial Sequence: Synthetic oligonucleotide
gagaagcaugacggacaag

SEQ ID NO: 88189 - RNA, 19 nt, Artificial Sequence
  Description of Artificial Sequence: Synthetic oligonucleotide
guacaggcugcaccuguca

SEQ ID NO: 88190 - RNA, 19 nt, Artificial Sequence
  Description of Artificial Sequence: Synthetic oligonucleotide
aguggccgaccuccucuuu

SEQ ID NO: 88191 - RNA, 19 nt, Artificial Sequence
  Description of Artificial Sequence: Synthetic oligonucleotide
ugucaucacgcuucccuuc

SEQ ID NO: 88192 - RNA, 19 nt, Artificial Sequence
  Description of Artificial Sequence: Synthetic oligonucleotide
cugggcaguugaugccgug

SEQ ID NO: 88193 - RNA, 19 nt, Artificial Sequence
  Description of Artificial Sequence: Synthetic oligonucleotide
ggcaaacugguacuuuggg

SEQ ID NO: 88194 - RNA, 19 nt, Artificial Sequence
  Description of Artificial Sequence: Synthetic oligonucleotide
gaacuuccuaugcaaggca

SEQ ID NO: 88195 - RNA, 19 nt, Artificial Sequence
  Description of Artificial Sequence: Synthetic oligonucleotide
aguccaugucaucuacaca

SEQ ID NO: 88196 - RNA, 19 nt, Artificial Sequence
  Description of Artificial Sequence: Synthetic oligonucleotide
agucaaccucuacagcagu

SEQ ID NO: 88197 - RNA, 19 nt, Artificial Sequence
  Description of Artificial Sequence: Synthetic oligonucleotide
uguccucauccuggccuuc

SEQ ID NO: 88198 - RNA, 19 nt, Artificial Sequence
  Description of Artificial Sequence: Synthetic oligonucleotide
caucagucuggaccgcuac

SEQ ID NO: 88199 - RNA, 19 nt, Artificial Sequence
  Description of Artificial Sequence: Synthetic oligonucleotide
ccuggccaucguccacgcc

SEQ ID NO: 88200 - RNA, 19 nt, Artificial Sequence
  Description of Artificial Sequence: Synthetic oligonucleotide
caccaacagucagaggcca

SEQ ID NO: 88201 - RNA, 19 nt, Artificial Sequence
  Description of Artificial Sequence: Synthetic oligonucleotide
aaggaagcuguuggcugaa

SEQ ID NO: 88202 - RNA, 19 nt, Artificial Sequence
  Description of Artificial Sequence: Synthetic oligonucleotide
aaagguggucuauguuggc

SEQ ID NO: 88203 - RNA, 19 nt, Artificial Sequence
  Description of Artificial Sequence: Synthetic oligonucleotide
cgucuggaucccugcccuc

SEQ ID NO: 88204 - RNA, 19 nt, Artificial Sequence
  Description of Artificial Sequence: Synthetic oligonucleotide
ccugcugacuauucccgac

SEQ ID NO: 88205 - RNA, 19 nt, Artificial Sequence
  Description of Artificial Sequence: Synthetic oligonucleotide
cuucaucuuugccaacguc

SEQ ID NO: 88206 - RNA, 19 nt, Artificial Sequence
  Description of Artificial Sequence: Synthetic oligonucleotide
cagugaggcagaugacaga

SEQ ID NO: 88207 - RNA, 19 nt, Artificial Sequence
  Description of Artificial Sequence: Synthetic oligonucleotide
auauaucugugaccgcuuc

SEQ ID NO: 88208 - RNA, 19 nt, Artificial Sequence
  Description of Artificial Sequence: Synthetic oligonucleotide
cuaccccaaugacuugugg

SEQ ID NO: 88209 - RNA, 19 nt, Artificial Sequence
  Description of Artificial Sequence: Synthetic oligonucleotide
ggugguuguguuccaguuu

SEQ ID NO: 88210 - RNA, 19 nt, Artificial Sequence
  Description of Artificial Sequence: Synthetic oligonucleotide
ucagcacaucaugguuggc

SEQ ID NO: 88211 - RNA, 19 nt, Artificial Sequence
  Description of Artificial Sequence: Synthetic oligonucleotide
ccuuauccugccugguauu

SEQ ID NO: 88212 - RNA, 19 nt, Artificial Sequence
  Description of Artificial Sequence: Synthetic oligonucleotide
ugucauccuguccugcuau

SEQ ID NO: 88213 - RNA, 19 nt, Artificial Sequence
  Description of Artificial Sequence: Synthetic oligonucleotide
uugcauuaucaucuccaag

SEQ ID NO: 88214 - RNA, 19 nt, Artificial Sequence
  Description of Artificial Sequence: Synthetic oligonucleotide
gcugucacacuccaagggc

SEQ ID NO: 88215 - RNA, 19 nt, Artificial Sequence
  Description of Artificial Sequence: Synthetic oligonucleotide
ccaccagaagcgcaaggcc

SEQ ID NO: 88216 - RNA, 19 nt, Artificial Sequence
  Description of Artificial Sequence: Synthetic oligonucleotide
ccucaagaccacagucauc

SEQ ID NO: 88217 - RNA, 19 nt, Artificial Sequence
  Description of Artificial Sequence: Synthetic oligonucleotide
ccucauccuggcuuucuuc

SEQ ID NO: 88218 - RNA, 19 nt, Artificial Sequence
  Description of Artificial Sequence: Synthetic oligonucleotide
cgccuguuggcugccuuac

SEQ ID NO: 88219 - RNA, 19 nt, Artificial Sequence
  Description of Artificial Sequence: Synthetic oligonucleotide
cuacauugggaucagcauc

SEQ ID NO: 88220 - RNA, 19 nt, Artificial Sequence
  Description of Artificial Sequence: Synthetic oligonucleotide
cgacuccuucauccuccug

SEQ ID NO: 88221 - RNA, 19 nt, Artificial Sequence
  Description of Artificial Sequence: Synthetic oligonucleotide
ggaaaucaucaagcaaggg

SEQ ID NO: 88222 - RNA, 19 nt, Artificial Sequence
  Description of Artificial Sequence: Synthetic oligonucleotide
gugugaguuugagaacacu

SEQ ID NO: 88223 - RNA, 19 nt, Artificial Sequence
  Description of Artificial Sequence: Synthetic oligonucleotide
ugugcacaaguggauuucc

SEQ ID NO: 88224 - RNA, 19 nt, Artificial Sequence
  Description of Artificial Sequence: Synthetic oligonucleotide
caucaccgaggcccuagcu

SEQ ID NO: 88225 - RNA, 19 nt, Artificial Sequence
  Description of Artificial Sequence: Synthetic oligonucleotide
uuucuuccacuguugucug

SEQ ID NO: 88226 - RNA, 19 nt, Artificial Sequence
  Description of Artificial Sequence: Synthetic oligonucleotide
gaaccccauccucuaugcu

SEQ ID NO: 88227 - RNA, 19 nt, Artificial Sequence
  Description of Artificial Sequence: Synthetic oligonucleotide
uuuccuuggagccaaauuu

SEQ ID NO: 88228 - RNA, 19 nt, Artificial Sequence
  Description of Artificial Sequence: Synthetic oligonucleotide
uaaaaccucugcccagcac

SEQ ID NO: 88229 - RNA, 19 nt, Artificial Sequence
  Description of Artificial Sequence: Synthetic oligonucleotide
cgcacucaccucugugagc

SEQ ID NO: 88230 - RNA, 19 nt, Artificial Sequence
  Description of Artificial Sequence: Synthetic oligonucleotide
cagaggguccagccucaag

SEQ ID NO: 88231 - RNA, 19 nt, Artificial Sequence
  Description of Artificial Sequence: Synthetic oligonucleotide
gauccucuccaaaggaaag

SEQ ID NO: 88232 - RNA, 19 nt, Artificial Sequence
  Description of Artificial Sequence: Synthetic oligonucleotide
gcgagguggacauucaucu

SEQ ID NO: 88233 - RNA, 19 nt, Artificial Sequence
  Description of Artificial Sequence: Synthetic oligonucleotide
uguuuccacugagucugag

SEQ ID NO: 88234 - RNA, 19 nt, Artificial Sequence
  Description of Artificial Sequence: Synthetic oligonucleotide
gucuucaaguuuucacucc

SEQ ID NO: 88235 - RNA, 19 nt, Artificial Sequence
  Description of Artificial Sequence: Synthetic oligonucleotide
cagcuaacacagauguaaa

SEQ ID NO: 88236 - RNA, 19 nt, Artificial Sequence
  Description of Artificial Sequence: Synthetic oligonucleotide
aagacuuuuuuuuauacga

SEQ ID NO: 88237 - RNA, 19 nt, Artificial Sequence
  Description of Artificial Sequence: Synthetic oligonucleotide
auaaauaacuuuuuuuuaa

SEQ ID NO: 88238 - RNA, 19 nt, Artificial Sequence
  Description of Artificial Sequence: Synthetic oligonucleotide
aguuacacauuuuucagau

SEQ ID NO: 88239 - RNA, 19 nt, Artificial Sequence
  Description of Artificial Sequence: Synthetic oligonucleotide
uauaaaagacugaccaaua

SEQ ID NO: 88240 - RNA, 19 nt, Artificial Sequence
  Description of Artificial Sequence: Synthetic oligonucleotide
auuguacaguuuuuauugc

SEQ ID NO: 88241 - RNA, 19 nt, Artificial Sequence
  Description of Artificial Sequence: Synthetic oligonucleotide
cuuguuggauuuuugucuu

SEQ ID NO: 88242 - RNA, 19 nt, Artificial Sequence
  Description of Artificial Sequence: Synthetic oligonucleotide
uguguuucuuuaguuuuug

SEQ ID NO: 88243 - RNA, 19 nt, Artificial Sequence
  Description of Artificial Sequence: Synthetic oligonucleotide
gugaaguuuaauugacuua

SEQ ID NO: 88244 - RNA, 19 nt, Artificial Sequence
  Description of Artificial Sequence: Synthetic oligonucleotide
auuuauauaaauuuuuuuu

SEQ ID NO: 88245 - RNA, 19 nt, Artificial Sequence
  Description of Artificial Sequence: Synthetic oligonucleotide
uguuucauauugaugugug

SEQ ID NO: 88246 - RNA, 19 nt, Artificial Sequence
  Description of Artificial Sequence: Synthetic oligonucleotide
gucuaggcaggaccugugg

SEQ ID NO: 88247 - RNA, 19 nt, Artificial Sequence
  Description of Artificial Sequence: Synthetic oligonucleotide
gccaaguucuuaguugcug

SEQ ID NO: 88248 - RNA, 19 nt, Artificial Sequence
  Description of Artificial Sequence: Synthetic oligonucleotide
guaugucucgugguaggac

SEQ ID NO: 88249 - RNA, 19 nt, Artificial Sequence
  Description of Artificial Sequence: Synthetic oligonucleotide
cuguagaaaagggaacuga

SEQ ID NO: 88250 - RNA, 19 nt, Artificial Sequence
  Description of Artificial Sequence: Synthetic oligonucleotide
aacauuccagagcguguag

SEQ ID NO: 88251 - RNA, 19 nt, Artificial Sequence
  Description of Artificial Sequence: Synthetic oligonucleotide
gugaaucacguaaagcuag

SEQ ID NO: 88252 - RNA, 19 nt, Artificial Sequence
  Description of Artificial Sequence: Synthetic oligonucleotide
gaaaugauccccagcuguu

SEQ ID NO: 88253 - RNA, 19 nt, Artificial Sequence
  Description of Artificial Sequence: Synthetic oligonucleotide
uuaugcauagauaaucucu

SEQ ID NO: 88254 - RNA, 19 nt, Artificial Sequence
  Description of Artificial Sequence: Synthetic oligonucleotide
uccauucccguggaacguu

SEQ ID NO: 88255 - RNA, 19 nt, Artificial Sequence
  Description of Artificial Sequence: Synthetic oligonucleotide
uuuuccuguucuuaagacg

SEQ ID NO: 88256 - RNA, 19 nt, Artificial Sequence
  Description of Artificial Sequence: Synthetic oligonucleotide
gugauuuugcuguagaaga

SEQ ID NO: 88257 - RNA, 19 nt, Artificial Sequence
  Description of Artificial Sequence: Synthetic oligonucleotide
auggcacuuauaaccaaag

SEQ ID NO: 88258 - RNA, 19 nt, Artificial Sequence
  Description of Artificial Sequence: Synthetic oligonucleotide
gcccaaagugguauagaaa

SEQ ID NO: 88259 - RNA, 19 nt, Artificial Sequence
  Description of Artificial Sequence: Synthetic oligonucleotide
augcugguuuuucaguuuu

SEQ ID NO: 88260 - RNA, 19 nt, Artificial Sequence
  Description of Artificial Sequence: Synthetic oligonucleotide
ucaggaguggguugauuuc

SEQ ID NO: 88261 - RNA, 19 nt, Artificial Sequence
  Description of Artificial Sequence: Synthetic oligonucleotide
cagcaccuacaguguacag

SEQ ID NO: 88262 - RNA, 19 nt, Artificial Sequence
  Description of Artificial Sequence: Synthetic oligonucleotide
gucuuguauuaaguuguua

SEQ ID NO: 88263 - RNA, 19 nt, Artificial Sequence
  Description of Artificial Sequence: Synthetic oligonucleotide
aauaaaaguacauguuaaa

SEQ ID NO: 88264 - RNA, 25 nt, Artificial Sequence
  Description of Artificial Sequence: Synthetic oligonucleotide
aacuucaguuuguuggcugcggcag

SEQ ID NO: 88265 - RNA, 25 nt, Artificial Sequence
  Description of Artificial Sequence: Synthetic oligonucleotide
gcagguagcaaagugacgccgaggg

SEQ ID NO: 88266 - RNA, 25 nt, Artificial Sequence
  Description of Artificial Sequence: Synthetic oligonucleotide
gccugagugcuccaguagccaccgc

SEQ ID NO: 88267 - RNA, 25 nt, Artificial Sequence
  Description of Artificial Sequence: Synthetic oligonucleotide
caucuggagaaccagcgguuaccau

SEQ ID NO: 88268 - RNA, 25 nt, Artificial Sequence
  Description of Artificial Sequence: Synthetic oligonucleotide
uggaggggaucaguauauacacuuc

SEQ ID NO: 88269 - RNA, 25 nt, Artificial Sequence
  Description of Artificial Sequence: Synthetic oligonucleotide
cagauaacuacaccgaggaaauggg

SEQ ID NO: 88270 - RNA, 25 nt, Artificial Sequence
  Description of Artificial Sequence: Synthetic oligonucleotide
gcucaggggacuaugacuccaugaa

SEQ ID NO: 88271 - RNA, 25 nt, Artificial Sequence
  Description of Artificial Sequence: Synthetic oligonucleotide
aggaacccuguuuccgugaagaaaa

SEQ ID NO: 88272 - RNA, 25 nt, Artificial Sequence
  Description of Artificial Sequence: Synthetic oligonucleotide
augcuaauuucaauaaaaucuuccu

SEQ ID NO: 88273 - RNA, 25 nt, Artificial Sequence
  Description of Artificial Sequence: Synthetic oligonucleotide
ugcccaccaucuacuccaucaucuu

SEQ ID NO: 88274 - RNA, 25 nt, Artificial Sequence
  Description of Artificial Sequence: Synthetic oligonucleotide
ucuuaacuggcauugugggcaaugg

SEQ ID NO: 88275 - RNA, 25 nt, Artificial Sequence
  Description of Artificial Sequence: Synthetic oligonucleotide
gauuggucauccuggucauggguua

SEQ ID NO: 88276 - RNA, 25 nt, Artificial Sequence
  Description of Artificial Sequence: Synthetic oligonucleotide
accagaagaaacugagaagcaugac

SEQ ID NO: 88277 - RNA, 25 nt, Artificial Sequence
  Description of Artificial Sequence: Synthetic oligonucleotide
cggacaaguacaggcugcaccuguc

SEQ ID NO: 88278 - RNA, 25 nt, Artificial Sequence
  Description of Artificial Sequence: Synthetic oligonucleotide
caguggccgaccuccucuuugucau

SEQ ID NO: 88279 - RNA, 25 nt, Artificial Sequence
  Description of Artificial Sequence: Synthetic oligonucleotide
ucacgcuucccuucugggcaguuga

SEQ ID NO: 88280 - RNA, 25 nt, Artificial Sequence
  Description of Artificial Sequence: Synthetic oligonucleotide
augccguggcaaacugguacuuugg

SEQ ID NO: 88281 - RNA, 25 nt, Artificial Sequence
  Description of Artificial Sequence: Synthetic oligonucleotide
ggaacuuccuaugcaaggcagucca

SEQ ID NO: 88282 - RNA, 25 nt, Artificial Sequence
  Description of Artificial Sequence: Synthetic oligonucleotide
augucaucuacacagucaaccucua

SEQ ID NO: 88283 - RNA, 25 nt, Artificial Sequence
  Description of Artificial Sequence: Synthetic oligonucleotide
acagcaguguccucauccuggccuu

SEQ ID NO: 88284 - RNA, 25 nt, Artificial Sequence
  Description of Artificial Sequence: Synthetic oligonucleotide
ucaucagucuggaccgcuaccuggc

SEQ ID NO: 88285 - RNA, 25 nt, Artificial Sequence
  Description of Artificial Sequence: Synthetic oligonucleotide
ccaucguccacgccaccaacaguca

SEQ ID NO: 88286 - RNA, 25 nt, Artificial Sequence
  Description of Artificial Sequence: Synthetic oligonucleotide
agaggccaaggaagcuguuggcuga

SEQ ID NO: 88287 - RNA, 25 nt, Artificial Sequence
  Description of Artificial Sequence: Synthetic oligonucleotide
aaaagguggucuauguuggcgucug

SEQ ID NO: 88288 - RNA, 25 nt, Artificial Sequence
  Description of Artificial Sequence: Synthetic oligonucleotide
ggaucccugcccuccugcugacuau

SEQ ID NO: 88289 - RNA, 25 nt, Artificial Sequence
  Description of Artificial Sequence: Synthetic oligonucleotide
uucccgacuucaucuuugccaacgu

SEQ ID NO: 88290 - RNA, 25 nt, Artificial Sequence
  Description of Artificial Sequence: Synthetic oligonucleotide
ucagugaggcagaugacagauauau

SEQ ID NO: 88291 - RNA, 25 nt, Artificial Sequence
  Description of Artificial Sequence: Synthetic oligonucleotide
ucugugaccgcuucuaccccaauga

SEQ ID NO: 88292 - RNA, 25 nt, Artificial Sequence
  Description of Artificial Sequence: Synthetic oligonucleotide
acuugugggugguuguguuccaguu

SEQ ID NO: 88293 - RNA, 25 nt, Artificial Sequence
  Description of Artificial Sequence: Synthetic oligonucleotide
uucagcacaucaugguuggccuuau

SEQ ID NO: 88294 - RNA, 25 nt, Artificial Sequence
  Description of Artificial Sequence: Synthetic oligonucleotide
uccugccugguauugucauccuguc

SEQ ID NO: 88295 - RNA, 25 nt, Artificial Sequence
  Description of Artificial Sequence: Synthetic oligonucleotide
ccugcuauugcauuaucaucuccaa

SEQ ID NO: 88296 - RNA, 25 nt, Artificial Sequence
  Description of Artificial Sequence: Synthetic oligonucleotide
agcugucacacuccaagggccacca

SEQ ID NO: 88297 - RNA, 25 nt, Artificial Sequence
  Description of Artificial Sequence: Synthetic oligonucleotide
agaagcgcaaggcccucaagaccac

SEQ ID NO: 88298 - RNA, 25 nt, Artificial Sequence
  Description of Artificial Sequence: Synthetic oligonucleotide
cagucauccucauccuggcuuucuu

SEQ ID NO: 88299 - RNA, 25 nt, Artificial Sequence
  Description of Artificial Sequence: Synthetic oligonucleotide
ucgccuguuggcugccuuacuacau

SEQ ID NO: 88300 - RNA, 25 nt, Artificial Sequence
  Description of Artificial Sequence: Synthetic oligonucleotide
uugggaucagcaucgacuccuucau

SEQ ID NO: 88301 - RNA, 25 nt, Artificial Sequence
  Description of Artificial Sequence: Synthetic oligonucleotide
uccuccuggaaaucaucaagcaagg

SEQ ID NO: 88302 - RNA, 25 nt, Artificial Sequence
  Description of Artificial Sequence: Synthetic oligonucleotide
ggugugaguuugagaacacugugca

SEQ ID NO: 88303 - RNA, 25 nt, Artificial Sequence
  Description of Artificial Sequence: Synthetic oligonucleotide
acaaguggauuuccaucaccgaggc

SEQ ID NO: 88304 - RNA, 25 nt, Artificial Sequence
  Description of Artificial Sequence: Synthetic oligonucleotide
cccuagcuuucuuccacuguugucu

SEQ ID NO: 88305 - RNA, 25 nt, Artificial Sequence
  Description of Artificial Sequence: Synthetic oligonucleotide
ugaaccccauccucuaugcuuuccu

SEQ ID NO: 88306 - RNA, 25 nt, Artificial Sequence
  Description of Artificial Sequence: Synthetic oligonucleotide
uuggagccaaauuuaaaaccucugc

SEQ ID NO: 88307 - RNA, 25 nt, Artificial Sequence
  Description of Artificial Sequence: Synthetic oligonucleotide
cccagcacgcacucaccucugugag

SEQ ID NO: 88308 - RNA, 25 nt, Artificial Sequence
  Description of Artificial Sequence: Synthetic oligonucleotide
gcagaggguccagccucaagauccu

SEQ ID NO: 88309 - RNA, 25 nt, Artificial Sequence
  Description of Artificial Sequence: Synthetic oligonucleotide
ucuccaaaggaaagcgagguggaca

SEQ ID NO: 88310 - RNA, 25 nt, Artificial Sequence
  Description of Artificial Sequence: Synthetic oligonucleotide
auucaucuguuuccacugagucuga

SEQ ID NO: 88311 - RNA, 25 nt, Artificial Sequence
  Description of Artificial Sequence: Synthetic oligonucleotide
agucuucaaguuuucacuccagcua

SEQ ID NO: 88312 - RNA, 25 nt, Artificial Sequence
  Description of Artificial Sequence: Synthetic oligonucleotide
aacacagauguaaaagacuuuuuuu

SEQ ID NO: 88313 - RNA, 25 nt, Artificial Sequence
  Description of Artificial Sequence: Synthetic oligonucleotide
uuauacgauaaauaacuuuuuuuua

SEQ ID NO: 88314 - RNA, 25 nt, Artificial Sequence
  Description of Artificial Sequence: Synthetic oligonucleotide
aaguuacacauuuuucagauauaaa

SEQ ID NO: 88315 - RNA, 25 nt, Artificial Sequence
  Description of Artificial Sequence: Synthetic oligonucleotide
aagacugaccaauauuguacaguuu

SEQ ID NO: 88316 - RNA, 25 nt, Artificial Sequence
  Description of Artificial Sequence: Synthetic oligonucleotide
uuuauugcuuguuggauuuuugucu

SEQ ID NO: 88317 - RNA, 25 nt, Artificial Sequence
  Description of Artificial Sequence: Synthetic oligonucleotide
uuguguuucuuuaguuuuugugaag

SEQ ID NO: 88318 - RNA, 25 nt, Artificial Sequence
  Description of Artificial Sequence: Synthetic oligonucleotide
guuuaauugacuuauuuauauaaau

SEQ ID NO: 88319 - RNA, 25 nt, Artificial Sequence
  Description of Artificial Sequence: Synthetic oligonucleotide
uuuuuuuuguuucauauugaugugu

SEQ ID NO: 88320 - RNA, 25 nt, Artificial Sequence
  Description of Artificial Sequence: Synthetic oligonucleotide
ugucuaggcaggaccuguggccaag

SEQ ID NO: 88321 - RNA, 25 nt, Artificial Sequence
  Description of Artificial Sequence: Synthetic oligonucleotide
guucuuaguugcuguaugucucgug

SEQ ID NO: 88322 - RNA, 25 nt, Artificial Sequence
  Description of Artificial Sequence: Synthetic oligonucleotide
gguaggacuguagaaaagggaacug

SEQ ID NO: 88323 - RNA, 25 nt, Artificial Sequence
  Description of Artificial Sequence: Synthetic oligonucleotide
gaacauuccagagcguguagugaau

SEQ ID NO: 88324 - RNA, 25 nt, Artificial Sequence
  Description of Artificial Sequence: Synthetic oligonucleotide
ucacguaaagcuagaaaugaucccc

SEQ ID NO: 88325 - RNA, 25 nt, Artificial Sequence
  Description of Artificial Sequence: Synthetic oligonucleotide
cagcuguuuaugcauagauaaucuc

SEQ ID NO: 88326 - RNA, 25 nt, Artificial Sequence
  Description of Artificial Sequence: Synthetic oligonucleotide
cuccauucccguggaacguuuuucc

SEQ ID NO: 88327 - RNA, 25 nt, Artificial Sequence
  Description of Artificial Sequence: Synthetic oligonucleotide
cuguucuuaagacgugauuuugcug

SEQ ID NO: 88328 - RNA, 25 nt, Artificial Sequence
  Description of Artificial Sequence: Synthetic oligonucleotide
guagaagauggcacuuauaaccaaa

SEQ ID NO: 88329 - RNA, 25 nt, Artificial Sequence
  Description of Artificial Sequence: Synthetic oligonucleotide
agcccaaagugguauagaaaugcug

SEQ ID NO: 88330 - RNA, 25 nt, Artificial Sequence
  Description of Artificial Sequence: Synthetic oligonucleotide
gguuuuucaguuuucaggagugggu

SEQ ID NO: 88331 - RNA, 25 nt, Artificial Sequence
  Description of Artificial Sequence: Synthetic oligonucleotide
uugauuucagcaccuacaguguaca

SEQ ID NO: 88332 - RNA, 25 nt, Artificial Sequence
  Description of Artificial Sequence: Synthetic oligonucleotide
agucuuguauuaaguuguuaauaaa

SEQ ID NO: 88333 - RNA, 25 nt, Artificial Sequence
  Description of Artificial Sequence: Synthetic oligonucleotide
aaguacauguuaaacuuaaaaaaaa

SEQ ID NO: 88334 - RNA, 25 nt, Artificial Sequence
  Description of Artificial Sequence: Synthetic oligonucleotide
uuuuuuuucuucccucuagugggcg

SEQ ID NO: 88335 - RNA, 25 nt, Artificial Sequence
  Description of Artificial Sequence: Synthetic oligonucleotide
ggggcagaggaguuagccaagaugu

SEQ ID NO: 88336 - RNA, 25 nt, Artificial Sequence
  Description of Artificial Sequence: Synthetic oligonucleotide
ugacuuugaaacccucagcgucuca

SEQ ID NO: 88337 - RNA, 25 nt, Artificial Sequence
  Description of Artificial Sequence: Synthetic oligonucleotide
agugcccuuuuguucuaaacaaaga

SEQ ID NO: 88338 - RNA, 25 nt, Artificial Sequence
  Description of Artificial Sequence: Synthetic oligonucleotide
aauuuuguaauugguucuaccaaag

SEQ ID NO: 88339 - RNA, 25 nt, Artificial Sequence
  Description of Artificial Sequence: Synthetic oligonucleotide
gaaggauauaaugaagucacuaugg

SEQ ID NO: 88340 - RNA, 25 nt, Artificial Sequence
  Description of Artificial Sequence: Synthetic oligonucleotide
ggaaaagauggggaggagaguugua

SEQ ID NO: 88341 - RNA, 25 nt, Artificial Sequence
  Description of Artificial Sequence: Synthetic oligonucleotide
aggauucuacauuaauucucuugug

SEQ ID NO: 88342 - RNA, 25 nt, Artificial Sequence
  Description of Artificial Sequence: Synthetic oligonucleotide
gcccuuagcccacuacuucagaauu

SEQ ID NO: 88343 - RNA, 25 nt, Artificial Sequence
  Description of Artificial Sequence: Synthetic oligonucleotide
uuccugaagaaagcaagccugaauu

SEQ ID NO: 88344 - RNA, 25 nt, Artificial Sequence
  Description of Artificial Sequence: Synthetic oligonucleotide
ugguuuuuuaaauugcuuuaaaaau

SEQ ID NO: 88345 - RNA, 25 nt, Artificial Sequence
  Description of Artificial Sequence: Synthetic oligonucleotide
uuuuuuuuaacuggguuaaugcuug

SEQ ID NO: 88346 - RNA, 25 nt, Artificial Sequence
  Description of Artificial Sequence: Synthetic oligonucleotide
gcugaauuggaagugaauguccauu

SEQ ID NO: 88347 - RNA, 25 nt, Artificial Sequence
  Description of Artificial Sequence: Synthetic oligonucleotide
uccuuugccucuuuugcagauauac

SEQ ID NO: 88348 - RNA, 25 nt, Artificial Sequence
  Description of Artificial Sequence: Synthetic oligonucleotide
cacuucagauaacuacaccgaggaa

SEQ ID NO: 88349 - RNA, 25 nt, Artificial Sequence
  Description of Artificial Sequence: Synthetic oligonucleotide
aaugggcucaggggacuaugacucc

SEQ ID NO: 88350 - RNA, 25 nt, Artificial Sequence
  Description of Artificial Sequence: Synthetic oligonucleotide
caugaaggaacccuguuuccgugaa

SEQ ID NO: 88351 - RNA, 25 nt, Artificial Sequence
  Description of Artificial Sequence: Synthetic oligonucleotide
agaaaaugcuaauuucaauaaaauc

SEQ ID NO: 88352 - RNA, 25 nt, Artificial Sequence
  Description of Artificial Sequence: Synthetic oligonucleotide
cuuccugcccaccaucuacuccauc

SEQ ID NO: 88353 - RNA, 25 nt, Artificial Sequence
  Description of Artificial Sequence: Synthetic oligonucleotide
caucuucuuaacuggcauugugggc

SEQ ID NO: 88354 - RNA, 25 nt, Artificial Sequence
  Description of Artificial Sequence: Synthetic oligonucleotide
caauggauuggucauccuggucaug

SEQ ID NO: 88355 - RNA, 25 nt, Artificial Sequence
  Description of Artificial Sequence: Synthetic oligonucleotide
ggguuaccagaagaaacugagaagc

SEQ ID NO: 88356 - RNA, 25 nt, Artificial Sequence
  Description of Artificial Sequence: Synthetic oligonucleotide
caugacggacaaguacaggcugcac

SEQ ID NO: 88357 - RNA, 25 nt, Artificial Sequence
  Description of Artificial Sequence: Synthetic oligonucleotide
ccugucaguggccgaccuccucuuu

SEQ ID NO: 88358 - RNA, 25 nt, Artificial Sequence
  Description of Artificial Sequence: Synthetic oligonucleotide
ugucaucacgcuucccuucugggca

SEQ ID NO: 88359 - RNA, 25 nt, Artificial Sequence
  Description of Artificial Sequence: Synthetic oligonucleotide
aguugaugccguggcaaacugguac

SEQ ID NO: 88360 - RNA, 25 nt, Artificial Sequence
  Description of Artificial Sequence: Synthetic oligonucleotide
cuuugggaacuuccuaugcaaggca

SEQ ID NO: 88361 - RNA, 25 nt, Artificial Sequence
  Description of Artificial Sequence: Synthetic oligonucleotide
aguccaugucaucuacacagucaac

SEQ ID NO: 88362 - RNA, 25 nt, Artificial Sequence
  Description of Artificial Sequence: Synthetic oligonucleotide
ccucuacagcaguguccucauccug

SEQ ID NO: 88363 - RNA, 25 nt, Artificial Sequence
  Description of Artificial Sequence: Synthetic oligonucleotide
ggccuucaucagucuggaccgcuac

SEQ ID NO: 88364 - RNA, 25 nt, Artificial Sequence
  Description of Artificial Sequence: Synthetic oligonucleotide
ccuggccaucguccacgccaccaac

SEQ ID NO: 88365 - RNA, 25 nt, Artificial Sequence
  Description of Artificial Sequence: Synthetic oligonucleotide
cagucagaggccaaggaagcuguug

SEQ ID NO: 88366 - RNA, 25 nt, Artificial Sequence
  Description of Artificial Sequence: Synthetic oligonucleotide
ggcugaaaagguggucuauguuggc

SEQ ID NO: 88367 - RNA, 25 nt, Artificial Sequence
  Description of Artificial Sequence: Synthetic oligonucleotide
cgucuggaucccugcccuccugcug

SEQ ID NO: 88368 - RNA, 25 nt, Artificial Sequence
  Description of Artificial Sequence: Synthetic oligonucleotide
gacuauucccgacuucaucuuugcc

SEQ ID NO: 88369 - RNA, 25 nt, Artificial Sequence
  Description of Artificial Sequence: Synthetic oligonucleotide
caacgucagugaggcagaugacaga

SEQ ID NO: 88370 - RNA, 25 nt, Artificial Sequence
  Description of Artificial Sequence: Synthetic oligonucleotide
auauaucugugaccgcuucuacccc

SEQ ID NO: 88371 - RNA, 25 nt, Artificial Sequence
  Description of Artificial Sequence: Synthetic oligonucleotide
caaugacuugugggugguuguguuc

SEQ ID NO: 88372 - RNA, 25 nt, Artificial Sequence
  Description of Artificial Sequence: Synthetic oligonucleotide
ccaguuucagcacaucaugguuggc

SEQ ID NO: 88373 - RNA, 25 nt, Artificial Sequence
  Description of Artificial Sequence: Synthetic oligonucleotide
ccuuauccugccugguauugucauc

SEQ ID NO: 88374 - RNA, 25 nt, Artificial Sequence
  Description of Artificial Sequence: Synthetic oligonucleotide
ccuguccugcuauugcauuaucauc

SEQ ID NO: 88375 - RNA, 25 nt, Artificial Sequence
  Description of Artificial Sequence: Synthetic oligonucleotide
cuccaagcugucacacuccaagggc

SEQ ID NO: 88376 - RNA, 25 nt, Artificial Sequence
  Description of Artificial Sequence: Synthetic oligonucleotide
ccaccagaagcgcaaggcccucaag

SEQ ID NO: 88377 - RNA, 25 nt, Artificial Sequence
  Description of Artificial Sequence: Synthetic oligonucleotide
gaccacagucauccucauccuggcu

SEQ ID NO: 88378 - RNA, 25 nt, Artificial Sequence
  Description of Artificial Sequence: Synthetic oligonucleotide
uuucuucgccuguuggcugccuuac

SEQ ID NO: 88379 - RNA, 25 nt, Artificial Sequence
  Description of Artificial Sequence: Synthetic oligonucleotide
cuacauugggaucagcaucgacucc

SEQ ID NO: 88380 - RNA, 25 nt, Artificial Sequence
  Description of Artificial Sequence: Synthetic oligonucleotide
cuucauccuccuggaaaucaucaag

SEQ ID NO: 88381 - RNA, 25 nt, Artificial Sequence
  Description of Artificial Sequence: Synthetic oligonucleotide
gcaagggugugaguuugagaacacu

SEQ ID NO: 88382 - RNA, 25 nt, Artificial Sequence
  Description of Artificial Sequence: Synthetic oligonucleotide
ugugcacaaguggauuuccaucacc

SEQ ID NO: 88383 - RNA, 25 nt, Artificial Sequence
  Description of Artificial Sequence: Synthetic oligonucleotide
cgaggcccuagcuuucuuccacugu

SEQ ID NO: 88384 - RNA, 25 nt, Artificial Sequence
  Description of Artificial Sequence: Synthetic oligonucleotide
uugucugaaccccauccucuaugcu

SEQ ID NO: 88385 - RNA, 25 nt, Artificial Sequence
  Description of Artificial Sequence: Synthetic oligonucleotide
uuuccuuggagccaaauuuaaaacc

SEQ ID NO: 88386 - RNA, 25 nt, Artificial Sequence
  Description of Artificial Sequence: Synthetic oligonucleotide
cucugcccagcacgcacucaccucu

SEQ ID NO: 88387 - RNA, 25 nt, Artificial Sequence
  Description of Artificial Sequence: Synthetic oligonucleotide
ugugagcagaggguccagccucaag

SEQ ID NO: 88388 - RNA, 25 nt, Artificial Sequence
  Description of Artificial Sequence: Synthetic oligonucleotide
gauccucuccaaaggaaagcgaggu

SEQ ID NO: 88389 - RNA, 25 nt, Artificial Sequence
  Description of Artificial Sequence: Synthetic oligonucleotide
uggacauucaucuguuuccacugag

SEQ ID NO: 88390 - RNA, 25 nt, Artificial Sequence
  Description of Artificial Sequence: Synthetic oligonucleotide
gucugagucuucaaguuuucacucc

SEQ ID NO: 88391 - RNA, 25 nt, Artificial Sequence
  Description of Artificial Sequence: Synthetic oligonucleotide
cagcuaacacagauguaaaagacuu

SEQ ID NO: 88392 - RNA, 25 nt, Artificial Sequence
  Description of Artificial Sequence: Synthetic oligonucleotide
uuuuuuuauacgauaaauaacuuuu

SEQ ID NO: 88393 - RNA, 25 nt, Artificial Sequence
  Description of Artificial Sequence: Synthetic oligonucleotide
uuuuuaaguuacacauuuuucagau

SEQ ID NO: 88394 - RNA, 25 nt, Artificial Sequence
  Description of Artificial Sequence: Synthetic oligonucleotide
uauaaaagacugaccaauauuguac

SEQ ID NO: 88395 - RNA, 25 nt, Artificial Sequence
  Description of Artificial Sequence: Synthetic oligonucleotide
caguuuuuauugcuuguuggauuuu

SEQ ID NO: 88396 - RNA, 25 nt, Artificial Sequence
  Description of Artificial Sequence: Synthetic oligonucleotide
uugucuuguguuucuuuaguuuuug

SEQ ID NO: 88397 - RNA, 25 nt, Artificial Sequence
  Description of Artificial Sequence: Synthetic oligonucleotide
gugaaguuuaauugacuuauuuaua

SEQ ID NO: 88398 - RNA, 25 nt, Artificial Sequence
  Description of Artificial Sequence: Synthetic oligonucleotide
auaaauuuuuuuuguuucauauuga

SEQ ID NO: 88399 - RNA, 25 nt, Artificial Sequence
  Description of Artificial Sequence: Synthetic oligonucleotide
augugugucuaggcaggaccugugg

SEQ ID NO: 88400 - RNA, 25 nt, Artificial Sequence
  Description of Artificial Sequence: Synthetic oligonucleotide
gccaaguucuuaguugcuguauguc

SEQ ID NO: 88401 - RNA, 25 nt, Artificial Sequence
  Description of Artificial Sequence: Synthetic oligonucleotide
cucgugguaggacuguagaaaaggg

SEQ ID NO: 88402 - RNA, 25 nt, Artificial Sequence
  Description of Artificial Sequence: Synthetic oligonucleotide
gaacugaacauuccagagcguguag

SEQ ID NO: 88403 - RNA, 25 nt, Artificial Sequence
  Description of Artificial Sequence: Synthetic oligonucleotide
gugaaucacguaaagcuagaaauga

SEQ ID NO: 88404 - RNA, 25 nt, Artificial Sequence
  Description of Artificial Sequence: Synthetic oligonucleotide
auccccagcuguuuaugcauagaua

SEQ ID NO: 88405 - RNA, 25 nt, Artificial Sequence
  Description of Artificial Sequence: Synthetic oligonucleotide
aaucucuccauucccguggaacguu

SEQ ID NO: 88406 - RNA, 25 nt, Artificial Sequence
  Description of Artificial Sequence: Synthetic oligonucleotide
uuuuccuguucuuaagacgugauuu

SEQ ID NO: 88407 - RNA, 25 nt, Artificial Sequence
  Description of Artificial Sequence: Synthetic oligonucleotide
uugcuguagaagauggcacuuauaa

SEQ ID NO: 88408 - RNA, 25 nt, Artificial Sequence
  Description of Artificial Sequence: Synthetic oligonucleotide
accaaagcccaaagugguauagaaa

SEQ ID NO: 88409 - RNA, 25 nt, Artificial Sequence
  Description of Artificial Sequence: Synthetic oligonucleotide
augcugguuuuucaguuuucaggag

SEQ ID NO: 88410 - RNA, 25 nt, Artificial Sequence
  Description of Artificial Sequence: Synthetic oligonucleotide
guggguugauuucagcaccuacagu

SEQ ID NO: 88411 - RNA, 25 nt, Artificial Sequence
  Description of Artificial Sequence: Synthetic oligonucleotide
uguacagucuuguauuaaguuguua

SEQ ID NO: 88412 - RNA, 25 nt, Artificial Sequence
  Description of Artificial Sequence: Synthetic oligonucleotide
aauaaaaguacauguuaaacuuaaa

SEQ ID NO: 88413 - RNA, 2114 nt, Homo sapiens
gagagauguggguuacaaagcugccaucuagaggcuagaggcuccuuucugcaguguauauaaugcaagucugcagccagcagagcucacaguuguugcaaagugcucagcacuaagggagccagcgcacagcacagccaggaaggcgagcgagcccagccagcccagccagcccagccagcccggaggucauuugauugcccgccucagaacgauggaucugcaucucuucgacuacucagagccagggaacuucucggacaucagcuggccaugcaacagcagcgacugcaucgugguggacacggugaugugucccaacaugcccaacaaaagcguccugcucuacacgcucuccuucauuuacauuuucaucuucgucaucggcaugauugccaacuccgugguggucugggugaauauccaggccaagaccacaggcuaugacacgcacugcuacaucuugaaccuggccauugccgaccuguggguuguccucaccaucccagucuggguggucagucucgugcagcacaaccaguggcccaugggcgagcucacgugcaaagucacacaccucaucuucuccaucaaccucuucggcagcauuuucuuccucacgugcaugagcguggaccgcuaccucuccaucaccuacuucaccaacacccccagcagcaggaagaagaugguacgccgugucgucugcauccugguguggcugcuggccuucugcgugucucugccugacaccuacuaccugaagaccgucacgucugcguccaacaaugagaccuacugccgguccuucuaccccgagcacagcaucaaggaguggcugaucggcauggagcuggucuccguugucuugggcuuugccguucccuucuccauuaucgcugucuucuacuuccugcuggccagagccaucucggcguccagugaccaggagaagcacagcagccggaagaucaucuucuccuacgugguggucuuccuugucugcuggcugcccuaccacguggcggugcugcuggacaucuucuccauccugcacuacaucccuuucaccugccggcuggagcacgcccucuucacggcccugcaugucacacagugccugucgcuggugcacugcugcgucaacccuguccucuacagcuucaucaaucgcaacuacagguacgagcugaugaaggccuucaucuucaaguacucggccaaaacagggcucaccaagcucaucgaugccuccagagucucagagacggaguacucugccuuggagcagagcaccaaaugaucugcccuggagaggcucugggacggguuuacuuguuuuugaacagggugaugggcccuaugguuuucuagagcaaagcaaaguagcuucgggucuugaugcuugaguagagugaagaggggagcacgugcccccugcauccauucucucuuucucuugaugacgcagcugucauuuggcugugcgugcugacaguuuugcaacaggcagagcugugucgcacagcagugcugugcgucagagccagcugaggacaggcuugccuggacuucuguaagauaggauuuucuguguuuccugaauuuuuuauauggugauuuguauuuaaauuuuaagacuuuauuuucucacuauugguguaccuuauaaauguauuugaaaguuaaauauauuuuaaauauuguuugggaggcauagugcugacauauauucagaguguuguaguuuuaagguuagcgugacuucaguuuugacuaaggaugacacuaauuguuagcuguuuugaaauuauauauauauaaauauauauaaauauauaaauauaugccagucuuggcugaaauguuuuauuuaccauaguuuuauaucugugugguguuuuguaccggcacgggauauggaacgaaaacugcuuuguaaugcaguuugugacauuaauaguauuguaaaguuacauuuuaaaauaaacaaaaaacuguucuggacugcaaaucugcacacacaacgaacaguugcauuucagagaguucucucaauuuguaaguuauuuuuuuuuaauaaagauuuuuguuuccuaaaaaaaaaaaaaaaa

SEQ ID NO: 88414 - RNA, 19 nt, Artificial Sequence
  Description of Artificial Sequence: Synthetic oligonucleotide
gagagauguggguuacaaa

SEQ ID NO: 88415 - RNA, 19 nt, Artificial Sequence
  Description of Artificial Sequence: Synthetic oligonucleotide
agcugccaucuagaggcua

SEQ ID NO: 88416 - RNA, 19 nt, Artificial Sequence
  Description of Artificial Sequence: Synthetic oligonucleotide
agaggcuccuuucugcagu

SEQ ID NO: 88417 - RNA, 19 nt, Artificial Sequence
  Description of Artificial Sequence: Synthetic oligonucleotide
uguauauaaugcaagucug

SEQ ID NO: 88418 - RNA, 19 nt, Artificial Sequence
  Description of Artificial Sequence: Synthetic oligonucleotide
gcagccagcagagcucaca

SEQ ID NO: 88419 - RNA, 19 nt, Artificial Sequence
  Description of Artificial Sequence: Synthetic oligonucleotide
aguuguugcaaagugcuca

SEQ ID NO: 88420 - RNA, 19 nt, Artificial Sequence
  Description of Artificial Sequence: Synthetic oligonucleotide
agcacuaagggagccagcg

SEQ ID NO: 88421 - RNA, 19 nt, Artificial Sequence
  Description of Artificial Sequence: Synthetic oligonucleotide
gcacagcacagccaggaag

SEQ ID NO: 88422 - RNA, 19 nt, Artificial Sequence
  Description of Artificial Sequence: Synthetic oligonucleotide
ggcgagcgagcccagccag

SEQ ID NO: 88423 - RNA, 19 nt, Artificial Sequence
  Description of Artificial Sequence: Synthetic oligonucleotide
gcccagccagcccagccag

SEQ ID NO: 88424 - RNA, 19 nt, Artificial Sequence
  Description of Artificial Sequence: Synthetic oligonucleotide
gcccggaggucauuugauu

SEQ ID NO: 88425 - RNA, 19 nt, Artificial Sequence
  Description of Artificial Sequence: Synthetic oligonucleotide
ugcccgccucagaacgaug

SEQ ID NO: 88426 - RNA, 19 nt, Artificial Sequence
  Description of Artificial Sequence: Synthetic oligonucleotide
ggaucugcaucucuucgac

SEQ ID NO: 88427 - RNA, 19 nt, Artificial Sequence
  Description of Artificial Sequence: Synthetic oligonucleotide
cuacucagagccagggaac

SEQ ID NO: 88428 - RNA, 19 nt, Artificial Sequence
  Description of Artificial Sequence: Synthetic oligonucleotide
cuucucggacaucagcugg

SEQ ID NO: 88429 - RNA, 19 nt, Artificial Sequence
  Description of Artificial Sequence: Synthetic oligonucleotide
gccaugcaacagcagcgac

SEQ ID NO: 88430 - RNA, 19 nt, Artificial Sequence
  Description of Artificial Sequence: Synthetic oligonucleotide
cugcaucgugguggacacg

SEQ ID NO: 88431 - RNA, 19 nt, Artificial Sequence
  Description of Artificial Sequence: Synthetic oligonucleotide
ggugaugugucccaacaug

SEQ ID NO: 88432 - RNA, 19 nt, Artificial Sequence
  Description of Artificial Sequence: Synthetic oligonucleotide
gcccaacaaaagcguccug

SEQ ID NO: 88433 - RNA, 19 nt, Artificial Sequence
  Description of Artificial Sequence: Synthetic oligonucleotide
gcucuacacgcucuccuuc

SEQ ID NO: 88434 - RNA, 19 nt, Artificial Sequence
  Description of Artificial Sequence: Synthetic oligonucleotide
cauuuacauuuucaucuuc

SEQ ID NO: 88435 - RNA, 19 nt, Artificial Sequence
  Description of Artificial Sequence: Synthetic oligonucleotide
cgucaucggcaugauugcc

SEQ ID NO: 88436 - RNA, 19 nt, Artificial Sequence
  Description of Artificial Sequence: Synthetic oligonucleotide
caacuccgugguggucugg

SEQ ID NO: 88437 - RNA, 19 nt, Artificial Sequence
  Description of Artificial Sequence: Synthetic oligonucleotide
ggugaauauccaggccaag

SEQ ID NO: 88438 - RNA, 19 nt, Artificial Sequence
  Description of Artificial Sequence: Synthetic oligonucleotide
gaccacaggcuaugacacg

SEQ ID NO: 88439 - RNA, 19 nt, Artificial Sequence
  Description of Artificial Sequence: Synthetic oligonucleotide
gcacugcuacaucuugaac

SEQ ID NO: 88440 - RNA, 19 nt, Artificial Sequence
  Description of Artificial Sequence: Synthetic oligonucleotide
ccuggccauugccgaccug

SEQ ID NO: 88441 - RNA, 19 nt, Artificial Sequence
  Description of Artificial Sequence: Synthetic oligonucleotide
guggguuguccucaccauc

SEQ ID NO: 88442 - RNA, 19 nt, Artificial Sequence
  Description of Artificial Sequence: Synthetic oligonucleotide
cccagucuggguggucagu

SEQ ID NO: 88443 - RNA, 19 nt, Artificial Sequence
  Description of Artificial Sequence: Synthetic oligonucleotide
ucucgugcagcacaaccag

SEQ ID NO: 88444 - RNA, 19 nt, Artificial Sequence
  Description of Artificial Sequence: Synthetic oligonucleotide
guggcccaugggcgagcuc

SEQ ID NO: 88445 - RNA, 19 nt, Artificial Sequence
  Description of Artificial Sequence: Synthetic oligonucleotide
cacgugcaaagucacacac

SEQ ID NO: 88446 - RNA, 19 nt, Artificial Sequence
  Description of Artificial Sequence: Synthetic oligonucleotide
ccucaucuucuccaucaac

SEQ ID NO: 88447 - RNA, 19 nt, Artificial Sequence
  Description of Artificial Sequence: Synthetic oligonucleotide
ccucuucggcagcauuuuc

SEQ ID NO: 88448 - RNA, 19 nt, Artificial Sequence
  Description of Artificial Sequence: Synthetic oligonucleotide
cuuccucacgugcaugagc

SEQ ID NO: 88449 - RNA, 19 nt, Artificial Sequence
  Description of Artificial Sequence: Synthetic oligonucleotide
cguggaccgcuaccucucc

SEQ ID NO: 88450 - RNA, 19 nt, Artificial Sequence
  Description of Artificial Sequence: Synthetic oligonucleotide
caucaccuacuucaccaac

SEQ ID NO: 88451 - RNA, 19 nt, Artificial Sequence
  Description of Artificial Sequence: Synthetic oligonucleotide
cacccccagcagcaggaag

SEQ ID NO: 88452 - RNA, 19 nt, Artificial Sequence
  Description of Artificial Sequence: Synthetic oligonucleotide
gaagaugguacgccguguc

SEQ ID NO: 88453 - RNA, 19 nt, Artificial Sequence
  Description of Artificial Sequence: Synthetic oligonucleotide
cgucugcauccuggugugg

SEQ ID NO: 88454 - RNA, 19 nt, Artificial Sequence
  Description of Artificial Sequence: Synthetic oligonucleotide
gcugcuggccuucugcgug

SEQ ID NO: 88455 - RNA, 19 nt, Artificial Sequence
  Description of Artificial Sequence: Synthetic oligonucleotide
gucucugccugacaccuac

SEQ ID NO: 88456 - RNA, 19 nt, Artificial Sequence
  Description of Artificial Sequence: Synthetic oligonucleotide
cuaccugaagaccgucacg

SEQ ID NO: 88457 - RNA, 19 nt, Artificial Sequence
  Description of Artificial Sequence: Synthetic oligonucleotide
gucugcguccaacaaugag

SEQ ID NO: 88458 - RNA, 19 nt, Artificial Sequence
  Description of Artificial Sequence: Synthetic oligonucleotide
gaccuacugccgguccuuc

SEQ ID NO: 88459 - RNA, 19 nt, Artificial Sequence
  Description of Artificial Sequence: Synthetic oligonucleotide
cuaccccgagcacagcauc

SEQ ID NO: 88460 - RNA, 19 nt, Artificial Sequence
  Description of Artificial Sequence: Synthetic oligonucleotide
caaggaguggcugaucggc

SEQ ID NO: 88461 - RNA, 19 nt, Artificial Sequence
  Description of Artificial Sequence: Synthetic oligonucleotide
cauggagcuggucuccguu

SEQ ID NO: 88462 - RNA, 19 nt, Artificial Sequence
  Description of Artificial Sequence: Synthetic oligonucleotide
ugucuugggcuuugccguu

SEQ ID NO: 88463 - RNA, 19 nt, Artificial Sequence
  Description of Artificial Sequence: Synthetic oligonucleotide
ucccuucuccauuaucgcu

SEQ ID NO: 88464 - RNA, 19 nt, Artificial Sequence
  Description of Artificial Sequence: Synthetic oligonucleotide
ugucuucuacuuccugcug

SEQ ID NO: 88465 - RNA, 19 nt, Artificial Sequence
  Description of Artificial Sequence: Synthetic oligonucleotide
ggccagagccaucucggcg

SEQ ID NO: 88466 - RNA, 19 nt, Artificial Sequence
  Description of Artificial Sequence: Synthetic oligonucleotide
guccagugaccaggagaag

SEQ ID NO: 88467 - RNA, 19 nt, Artificial Sequence
  Description of Artificial Sequence: Synthetic oligonucleotide
gcacagcagccggaagauc

SEQ ID NO: 88468 - RNA, 19 nt, Artificial Sequence
  Description of Artificial Sequence: Synthetic oligonucleotide
caucuucuccuacguggug

SEQ ID NO: 88469 - RNA, 19 nt, Artificial Sequence
  Description of Artificial Sequence: Synthetic oligonucleotide
ggucuuccuugucugcugg

SEQ ID NO: 88470 - RNA, 19 nt, Artificial Sequence
  Description of Artificial Sequence: Synthetic oligonucleotide
gcugcccuaccacguggcg

SEQ ID NO: 88471 - RNA, 19 nt, Artificial Sequence
  Description of Artificial Sequence: Synthetic oligonucleotide
ggugcugcuggacaucuuc

SEQ ID NO: 88472 - RNA, 19 nt, Artificial Sequence
  Description of Artificial Sequence: Synthetic oligonucleotide
cuccauccugcacuacauc

SEQ ID NO: 88473 - RNA, 19 nt, Artificial Sequence
  Description of Artificial Sequence: Synthetic oligonucleotide
cccuuucaccugccggcug

SEQ ID NO: 88474 - RNA, 19 nt, Artificial Sequence
  Description of Artificial Sequence: Synthetic oligonucleotide
ggagcacgcccucuucacg

SEQ ID NO: 88475 - RNA, 19 nt, Artificial Sequence
  Description of Artificial Sequence: Synthetic oligonucleotide
ggcccugcaugucacacag

SEQ ID NO: 88476 - RNA, 19 nt, Artificial Sequence
  Description of Artificial Sequence: Synthetic oligonucleotide
gugccugucgcuggugcac

SEQ ID NO: 88477 - RNA, 19 nt, Artificial Sequence
  Description of Artificial Sequence: Synthetic oligonucleotide
cugcugcgucaacccuguc

SEQ ID NO: 88478 - RNA, 19 nt, Artificial Sequence
  Description of Artificial Sequence: Synthetic oligonucleotide
ccucuacagcuucaucaau

SEQ ID NO: 88479 - RNA, 19 nt, Artificial Sequence
  Description of Artificial Sequence: Synthetic oligonucleotide
ucgcaacuacagguacgag

SEQ ID NO: 88480 - RNA, 19 nt, Artificial Sequence
  Description of Artificial Sequence: Synthetic oligonucleotide
gcugaugaaggccuucauc

SEQ ID NO: 88481 - RNA, 19 nt, Artificial Sequence
  Description of Artificial Sequence: Synthetic oligonucleotide
cuucaaguacucggccaaa

SEQ ID NO: 88482 - RNA, 19 nt, Artificial Sequence
  Description of Artificial Sequence: Synthetic oligonucleotide
aacagggcucaccaagcuc

SEQ ID NO: 88483 - RNA, 19 nt, Artificial Sequence
  Description of Artificial Sequence: Synthetic oligonucleotide
caucgaugccuccagaguc

SEQ ID NO: 88484 - RNA, 19 nt, Artificial Sequence
  Description of Artificial Sequence: Synthetic oligonucleotide
cucagagacggaguacucu

SEQ ID NO: 88485 - RNA, 19 nt, Artificial Sequence
  Description of Artificial Sequence: Synthetic oligonucleotide
ugccuuggagcagagcacc

SEQ ID NO: 88486 - RNA, 19 nt, Artificial Sequence
  Description of Artificial Sequence: Synthetic oligonucleotide
caaaugaucugcccuggag

SEQ ID NO: 88487 - RNA, 19 nt, Artificial Sequence
  Description of Artificial Sequence: Synthetic oligonucleotide
gaggcucugggacggguuu

SEQ ID NO: 88488 - RNA, 19 nt, Artificial Sequence
  Description of Artificial Sequence: Synthetic oligonucleotide
uacuuguuuuugaacaggg

SEQ ID NO: 88489 - RNA, 19 nt, Artificial Sequence
  Description of Artificial Sequence: Synthetic oligonucleotide
gugaugggcccuaugguuu

SEQ ID NO: 88490 - RNA, 19 nt, Artificial Sequence
  Description of Artificial Sequence: Synthetic oligonucleotide
uucuagagcaaagcaaagu

SEQ ID NO: 88491 - RNA, 19 nt, Artificial Sequence
  Description of Artificial Sequence: Synthetic oligonucleotide
uagcuucgggucuugaugc

SEQ ID NO: 88492 - RNA, 19 nt, Artificial Sequence
  Description of Artificial Sequence: Synthetic oligonucleotide
cuugaguagagugaagagg

SEQ ID NO: 88493 - RNA, 19 nt, Artificial Sequence
  Description of Artificial Sequence: Synthetic oligonucleotide
gggagcacgugcccccugc

SEQ ID NO: 88494 - RNA, 19 nt, Artificial Sequence
  Description of Artificial Sequence: Synthetic oligonucleotide
cauccauucucucuuucuc

SEQ ID NO: 88495 - RNA, 19 nt, Artificial Sequence
  Description of Artificial Sequence: Synthetic oligonucleotide
cuugaugacgcagcuguca

SEQ ID NO: 88496 - RNA, 19 nt, Artificial Sequence
  Description of Artificial Sequence: Synthetic oligonucleotide
auuuggcugugcgugcuga

SEQ ID NO: 88497 - RNA, 19 nt, Artificial Sequence
  Description of Artificial Sequence: Synthetic oligonucleotide
acaguuuugcaacaggcag

SEQ ID NO: 88498 - RNA, 19 nt, Artificial Sequence
  Description of Artificial Sequence: Synthetic oligonucleotide
gagcugugucgcacagcag

SEQ ID NO: 88499 - RNA, 19 nt, Artificial Sequence
  Description of Artificial Sequence: Synthetic oligonucleotide
gugcugugcgucagagcca

SEQ ID NO: 88500 - RNA, 19 nt, Artificial Sequence
  Description of Artificial Sequence: Synthetic oligonucleotide
agcugaggacaggcuugcc

SEQ ID NO: 88501 - RNA, 19 nt, Artificial Sequence
  Description of Artificial Sequence: Synthetic oligonucleotide
cuggacuucuguaagauag

SEQ ID NO: 88502 - RNA, 19 nt, Artificial Sequence
  Description of Artificial Sequence: Synthetic oligonucleotide
ggauuuucuguguuuccug

SEQ ID NO: 88503 - RNA, 19 nt, Artificial Sequence
  Description of Artificial Sequence: Synthetic oligonucleotide
gaauuuuuuauauggugau

SEQ ID NO: 88504 - RNA, 19 nt, Artificial Sequence
  Description of Artificial Sequence: Synthetic oligonucleotide
uuuguauuuaaauuuuaag

SEQ ID NO: 88505 - RNA, 19 nt, Artificial Sequence
  Description of Artificial Sequence: Synthetic oligonucleotide
gacuuuauuuucucacuau

SEQ ID NO: 88506 - RNA, 19 nt, Artificial Sequence
  Description of Artificial Sequence: Synthetic oligonucleotide
uugguguaccuuauaaaug

SEQ ID NO: 88507 - RNA, 19 nt, Artificial Sequence
  Description of Artificial Sequence: Synthetic oligonucleotide
guauuugaaaguuaaauau

SEQ ID NO: 88508 - RNA, 19 nt, Artificial Sequence
  Description of Artificial Sequence: Synthetic oligonucleotide
uauuuuaaauauuguuugg

SEQ ID NO: 88509 - RNA, 19 nt, Artificial Sequence
  Description of Artificial Sequence: Synthetic oligonucleotide
ggaggcauagugcugacau

SEQ ID NO: 88510 - RNA, 19 nt, Artificial Sequence
  Description of Artificial Sequence: Synthetic oligonucleotide
uauauucagaguguuguag

SEQ ID NO: 88511 - RNA, 19 nt, Artificial Sequence
  Description of Artificial Sequence: Synthetic oligonucleotide
guuuuaagguuagcgugac

SEQ ID NO: 88512 - RNA, 19 nt, Artificial Sequence
  Description of Artificial Sequence: Synthetic oligonucleotide
cuucaguuuugacuaagga

SEQ ID NO: 88513 - RNA, 19 nt, Artificial Sequence
  Description of Artificial Sequence: Synthetic oligonucleotide
augacacuaauuguuagcu

SEQ ID NO: 88514 - RNA, 19 nt, Artificial Sequence
  Description of Artificial Sequence: Synthetic oligonucleotide
uguuuugaaauuauauaua

SEQ ID NO: 88515 - RNA, 19 nt, Artificial Sequence
  Description of Artificial Sequence: Synthetic oligonucleotide
auauaaauauauauaaaua

SEQ ID NO: 88516 - RNA, 19 nt, Artificial Sequence
  Description of Artificial Sequence: Synthetic oligonucleotide
auauaaauauaugccaguc

SEQ ID NO: 88517 - RNA, 19 nt, Artificial Sequence
  Description of Artificial Sequence: Synthetic oligonucleotide
cuuggcugaaauguuuuau

SEQ ID NO: 88518 - RNA, 19 nt, Artificial Sequence
  Description of Artificial Sequence: Synthetic oligonucleotide
uuuaccauaguuuuauauc

SEQ ID NO: 88519 - RNA, 19 nt, Artificial Sequence
  Description of Artificial Sequence: Synthetic oligonucleotide
cugugugguguuuuguacc

SEQ ID NO: 88520 - RNA, 19 nt, Artificial Sequence
  Description of Artificial Sequence: Synthetic oligonucleotide
cggcacgggauauggaacg

SEQ ID NO: 88521 - RNA, 19 nt, Artificial Sequence
  Description of Artificial Sequence: Synthetic oligonucleotide
gaaaacugcuuuguaaugc

SEQ ID NO: 88522 - RNA, 19 nt, Artificial Sequence
  Description of Artificial Sequence: Synthetic oligonucleotide
caguuugugacauuaauag

SEQ ID NO: 88523 - RNA, 19 nt, Artificial Sequence
  Description of Artificial Sequence: Synthetic oligonucleotide
guauuguaaaguuacauuu

SEQ ID NO: 88524 - RNA, 19 nt, Artificial Sequence
  Description of Artificial Sequence: Synthetic oligonucleotide
uuaaaauaaacaaaaaacu

SEQ ID NO: 88525 - RNA, 19 nt, Artificial Sequence
  Description of Artificial Sequence: Synthetic oligonucleotide
uguucuggacugcaaaucu

SEQ ID NO: 88526 - RNA, 19 nt, Artificial Sequence
  Description of Artificial Sequence: Synthetic oligonucleotide
ugcacacacaacgaacagu

SEQ ID NO: 88527 - RNA, 19 nt, Artificial Sequence
  Description of Artificial Sequence: Synthetic oligonucleotide
uugcauuucagagaguucu

SEQ ID NO: 88528 - RNA, 19 nt, Artificial Sequence
  Description of Artificial Sequence: Synthetic oligonucleotide
ucucaauuuguaaguuauu

SEQ ID NO: 88529 - RNA, 19 nt, Artificial Sequence
  Description of Artificial Sequence: Synthetic oligonucleotide
uuuuuuuuaauaaagauuu

SEQ ID NO: 88530 - RNA, 19 nt, Artificial Sequence
  Description of Artificial Sequence: Synthetic oligonucleotide
uuuguuuccuaaaaaaaaa

SEQ ID NO: 88531 - RNA, 25 nt, Artificial Sequence
  Description of Artificial Sequence: Synthetic oligonucleotide
gagagauguggguuacaaagcugcc

SEQ ID NO: 88532 - RNA, 25 nt, Artificial Sequence
  Description of Artificial Sequence: Synthetic oligonucleotide
caucuagaggcuagaggcuccuuuc

SEQ ID NO: 88533 - RNA, 25 nt, Artificial Sequence
  Description of Artificial Sequence: Synthetic oligonucleotide
cugcaguguauauaaugcaagucug

SEQ ID NO: 88534 - RNA, 25 nt, Artificial Sequence
  Description of Artificial Sequence: Synthetic oligonucleotide
gcagccagcagagcucacaguuguu

SEQ ID NO: 88535 - RNA, 25 nt, Artificial Sequence
  Description of Artificial Sequence: Synthetic oligonucleotide
ugcaaagugcucagcacuaagggag

SEQ ID NO: 88536 - RNA, 25 nt, Artificial Sequence
  Description of Artificial Sequence: Synthetic oligonucleotide
gccagcgcacagcacagccaggaag

SEQ ID NO: 88537 - RNA, 25 nt, Artificial Sequence
  Description of Artificial Sequence: Synthetic oligonucleotide
ggcgagcgagcccagccagcccagc

SEQ ID NO: 88538 - RNA, 25 nt, Artificial Sequence
  Description of Artificial Sequence: Synthetic oligonucleotide
ccagcccagccagcccggaggucau

SEQ ID NO: 88539 - RNA, 25 nt, Artificial Sequence
  Description of Artificial Sequence: Synthetic oligonucleotide
uuugauugcccgccucagaacgaug

SEQ ID NO: 88540 - RNA, 25 nt, Artificial Sequence
  Description of Artificial Sequence: Synthetic oligonucleotide
ggaucugcaucucuucgacuacuca

SEQ ID NO: 88541 - RNA, 25 nt, Artificial Sequence
  Description of Artificial Sequence: Synthetic oligonucleotide
agagccagggaacuucucggacauc

SEQ ID NO: 88542 - RNA, 25 nt, Artificial Sequence
  Description of Artificial Sequence: Synthetic oligonucleotide
cagcuggccaugcaacagcagcgac

SEQ ID NO: 88543 - RNA, 25 nt, Artificial Sequence
  Description of Artificial Sequence: Synthetic oligonucleotide
cugcaucgugguggacacggugaug

SEQ ID NO: 88544 - RNA, 25 nt, Artificial Sequence
  Description of Artificial Sequence: Synthetic oligonucleotide
gugucccaacaugcccaacaaaagc

SEQ ID NO: 88545 - RNA, 25 nt, Artificial Sequence
  Description of Artificial Sequence: Synthetic oligonucleotide
cguccugcucuacacgcucuccuuc

SEQ ID NO: 88546 - RNA, 25 nt, Artificial Sequence
  Description of Artificial Sequence: Synthetic oligonucleotide
cauuuacauuuucaucuucgucauc

SEQ ID NO: 88547 - RNA, 25 nt, Artificial Sequence
  Description of Artificial Sequence: Synthetic oligonucleotide
cggcaugauugccaacuccguggug

SEQ ID NO: 88548 - RNA, 25 nt, Artificial Sequence
  Description of Artificial Sequence: Synthetic oligonucleotide
ggucugggugaauauccaggccaag

SEQ ID NO: 88549 - RNA, 25 nt, Artificial Sequence
  Description of Artificial Sequence: Synthetic oligonucleotide
gaccacaggcuaugacacgcacugc

SEQ ID NO: 88550 - RNA, 25 nt, Artificial Sequence
  Description of Artificial Sequence: Synthetic oligonucleotide
cuacaucuugaaccuggccauugcc

SEQ ID NO: 88551 - RNA, 25 nt, Artificial Sequence
  Description of Artificial Sequence: Synthetic oligonucleotide
cgaccuguggguuguccucaccauc

SEQ ID NO: 88552 - RNA, 25 nt, Artificial Sequence
  Description of Artificial Sequence: Synthetic oligonucleotide
cccagucuggguggucagucucgug

SEQ ID NO: 88553 - RNA, 25 nt, Artificial Sequence
  Description of Artificial Sequence: Synthetic oligonucleotide
gcagcacaaccaguggcccaugggc

SEQ ID NO: 88554 - RNA, 25 nt, Artificial Sequence
  Description of Artificial Sequence: Synthetic oligonucleotide
cgagcucacgugcaaagucacacac

SEQ ID NO: 88555 - RNA, 25 nt, Artificial Sequence
  Description of Artificial Sequence: Synthetic oligonucleotide
ccucaucuucuccaucaaccucuuc

SEQ ID NO: 88556 - RNA, 25 nt, Artificial Sequence
  Description of Artificial Sequence: Synthetic oligonucleotide
cggcagcauuuucuuccucacgugc

SEQ ID NO: 88557 - RNA, 25 nt, Artificial Sequence
  Description of Artificial Sequence: Synthetic oligonucleotide
caugagcguggaccgcuaccucucc

SEQ ID NO: 88558 - RNA, 25 nt, Artificial Sequence
  Description of Artificial Sequence: Synthetic oligonucleotide
caucaccuacuucaccaacaccccc

SEQ ID NO: 88559 - RNA, 25 nt, Artificial Sequence
  Description of Artificial Sequence: Synthetic oligonucleotide
cagcagcaggaagaagaugguacgc

SEQ ID NO: 88560 - RNA, 25 nt, Artificial Sequence
  Description of Artificial Sequence: Synthetic oligonucleotide
ccgugucgucugcauccuggugugg

SEQ ID NO: 88561 - RNA, 25 nt, Artificial Sequence
  Description of Artificial Sequence: Synthetic oligonucleotide
gcugcuggccuucugcgugucucug

SEQ ID NO: 88562 - RNA, 25 nt, Artificial Sequence
  Description of Artificial Sequence: Synthetic oligonucleotide
gccugacaccuacuaccugaagacc

SEQ ID NO: 88563 - RNA, 25 nt, Artificial Sequence
  Description of Artificial Sequence: Synthetic oligonucleotide
cgucacgucugcguccaacaaugag

SEQ ID NO: 88564 - RNA, 25 nt, Artificial Sequence
  Description of Artificial Sequence: Synthetic oligonucleotide
gaccuacugccgguccuucuacccc

SEQ ID NO: 88565 - RNA, 25 nt, Artificial Sequence
  Description of Artificial Sequence: Synthetic oligonucleotide
cgagcacagcaucaaggaguggcug

SEQ ID NO: 88566 - RNA, 25 nt, Artificial Sequence
  Description of Artificial Sequence: Synthetic oligonucleotide
gaucggcauggagcuggucuccguu

SEQ ID NO: 88567 - RNA, 25 nt, Artificial Sequence
  Description of Artificial Sequence: Synthetic oligonucleotide
ugucuugggcuuugccguucccuuc

SEQ ID NO: 88568 - RNA, 25 nt, Artificial Sequence
  Description of Artificial Sequence: Synthetic oligonucleotide
cuccauuaucgcugucuucuacuuc

SEQ ID NO: 88569 - RNA, 25 nt, Artificial Sequence
  Description of Artificial Sequence: Synthetic oligonucleotide
ccugcuggccagagccaucucggcg

SEQ ID NO: 88570 - RNA, 25 nt, Artificial Sequence
  Description of Artificial Sequence: Synthetic oligonucleotide
guccagugaccaggagaagcacagc

SEQ ID NO: 88571 - RNA, 25 nt, Artificial Sequence
  Description of Artificial Sequence: Synthetic oligonucleotide
cagccggaagaucaucuucuccuac

SEQ ID NO: 88572 - RNA, 25 nt, Artificial Sequence
  Description of Artificial Sequence: Synthetic oligonucleotide
cgugguggucuuccuugucugcugg

SEQ ID NO: 88573 - RNA, 25 nt, Artificial Sequence
  Description of Artificial Sequence: Synthetic oligonucleotide
gcugcccuaccacguggcggugcug

SEQ ID NO: 88574 - RNA, 25 nt, Artificial Sequence
  Description of Artificial Sequence: Synthetic oligonucleotide
gcuggacaucuucuccauccugcac

SEQ ID NO: 88575 - RNA, 25 nt, Artificial Sequence
  Description of Artificial Sequence: Synthetic oligonucleotide
cuacaucccuuucaccugccggcug

SEQ ID NO: 88576 - RNA, 25 nt, Artificial Sequence
  Description of Artificial Sequence: Synthetic oligonucleotide
ggagcacgcccucuucacggcccug

SEQ ID NO: 88577 - RNA, 25 nt, Artificial Sequence
  Description of Artificial Sequence: Synthetic oligonucleotide
gcaugucacacagugccugucgcug

SEQ ID NO: 88578 - RNA, 25 nt, Artificial Sequence
  Description of Artificial Sequence: Synthetic oligonucleotide
ggugcacugcugcgucaacccuguc

SEQ ID NO: 88579 - RNA, 25 nt, Artificial Sequence
  Description of Artificial Sequence: Synthetic oligonucleotide
ccucuacagcuucaucaaucgcaac

SEQ ID NO: 88580 - RNA, 25 nt, Artificial Sequence
  Description of Artificial Sequence: Synthetic oligonucleotide
cuacagguacgagcugaugaaggcc

SEQ ID NO: 88581 - RNA, 25 nt, Artificial Sequence
  Description of Artificial Sequence: Synthetic oligonucleotide
cuucaucuucaaguacucggccaaa

SEQ ID NO: 88582 - RNA, 25 nt, Artificial Sequence
  Description of Artificial Sequence: Synthetic oligonucleotide
aacagggcucaccaagcucaucgau

SEQ ID NO: 88583 - RNA, 25 nt, Artificial Sequence
  Description of Artificial Sequence: Synthetic oligonucleotide
ugccuccagagucucagagacggag

SEQ ID NO: 88584 - RNA, 25 nt, Artificial Sequence
  Description of Artificial Sequence: Synthetic oligonucleotide
guacucugccuuggagcagagcacc

SEQ ID NO: 88585 - RNA, 25 nt, Artificial Sequence
  Description of Artificial Sequence: Synthetic oligonucleotide
caaaugaucugcccuggagaggcuc

SEQ ID NO: 88586 - RNA, 25 nt, Artificial Sequence
  Description of Artificial Sequence: Synthetic oligonucleotide
cugggacggguuuacuuguuuuuga

SEQ ID NO: 88587 - RNA, 25 nt, Artificial Sequence
  Description of Artificial Sequence: Synthetic oligonucleotide
aacagggugaugggcccuaugguuu

SEQ ID NO: 88588 - RNA, 25 nt, Artificial Sequence
  Description of Artificial Sequence: Synthetic oligonucleotide
uucuagagcaaagcaaaguagcuuc

SEQ ID NO: 88589 - RNA, 25 nt, Artificial Sequence
  Description of Artificial Sequence: Synthetic oligonucleotide
cgggucuugaugcuugaguagagug

SEQ ID NO: 88590 - RNA, 25 nt, Artificial Sequence
  Description of Artificial Sequence: Synthetic oligonucleotide
gaagaggggagcacgugcccccugc

SEQ ID NO: 88591 - RNA, 25 nt, Artificial Sequence
  Description of Artificial Sequence: Synthetic oligonucleotide
cauccauucucucuuucucuugaug

SEQ ID NO: 88592 - RNA, 25 nt, Artificial Sequence
  Description of Artificial Sequence: Synthetic oligonucleotide
gacgcagcugucauuuggcugugcg

SEQ ID NO: 88593 - RNA, 25 nt, Artificial Sequence
  Description of Artificial Sequence: Synthetic oligonucleotide
gugcugacaguuuugcaacaggcag

SEQ ID NO: 88594 - RNA, 25 nt, Artificial Sequence
  Description of Artificial Sequence: Synthetic oligonucleotide
gagcugugucgcacagcagugcugu

SEQ ID NO: 88595 - RNA, 25 nt, Artificial Sequence
  Description of Artificial Sequence: Synthetic oligonucleotide
ugcgucagagccagcugaggacagg

SEQ ID NO: 88596 - RNA, 25 nt, Artificial Sequence
  Description of Artificial Sequence: Synthetic oligonucleotide
gcuugccuggacuucuguaagauag

SEQ ID NO: 88597 - RNA, 25 nt, Artificial Sequence
  Description of Artificial Sequence: Synthetic oligonucleotide
ggauuuucuguguuuccugaauuuu

SEQ ID NO: 88598 - RNA, 25 nt, Artificial Sequence
  Description of Artificial Sequence: Synthetic oligonucleotide
uuuauauggugauuuguauuuaaau

SEQ ID NO: 88599 - RNA, 25 nt, Artificial Sequence
  Description of Artificial Sequence: Synthetic oligonucleotide
uuuuaagacuuuauuuucucacuau

SEQ ID NO: 88600 - RNA, 25 nt, Artificial Sequence
  Description of Artificial Sequence: Synthetic oligonucleotide
uugguguaccuuauaaauguauuug

SEQ ID NO: 88601 - RNA, 25 nt, Artificial Sequence
  Description of Artificial Sequence: Synthetic oligonucleotide
gaaaguuaaauauauuuuaaauauu

SEQ ID NO: 88602 - RNA, 25 nt, Artificial Sequence
  Description of Artificial Sequence: Synthetic oligonucleotide
uguuugggaggcauagugcugacau

SEQ ID NO: 88603 - RNA, 25 nt, Artificial Sequence
  Description of Artificial Sequence: Synthetic oligonucleotide
uauauucagaguguuguaguuuuaa

SEQ ID NO: 88604 - RNA, 25 nt, Artificial Sequence
  Description of Artificial Sequence: Synthetic oligonucleotide
agguuagcgugacuucaguuuugac

SEQ ID NO: 88605 - RNA, 25 nt, Artificial Sequence
  Description of Artificial Sequence: Synthetic oligonucleotide
cuaaggaugacacuaauuguuagcu

SEQ ID NO: 88606 - RNA, 25 nt, Artificial Sequence
  Description of Artificial Sequence: Synthetic oligonucleotide
uguuuugaaauuauauauauauaaa

SEQ ID NO: 88607 - RNA, 25 nt, Artificial Sequence
  Description of Artificial Sequence: Synthetic oligonucleotide
auauauauaaauauauaaauauaug

SEQ ID NO: 88608 - RNA, 25 nt, Artificial Sequence
  Description of Artificial Sequence: Synthetic oligonucleotide
gccagucuuggcugaaauguuuuau

SEQ ID NO: 88609 - RNA, 25 nt, Artificial Sequence
  Description of Artificial Sequence: Synthetic oligonucleotide
uuuaccauaguuuuauaucugugug

SEQ ID NO: 88610 - RNA, 25 nt, Artificial Sequence
  Description of Artificial Sequence: Synthetic oligonucleotide
gguguuuuguaccggcacgggauau

SEQ ID NO: 88611 - RNA, 25 nt, Artificial Sequence
  Description of Artificial Sequence: Synthetic oligonucleotide
uggaacgaaaacugcuuuguaaugc

SEQ ID NO: 88612 - RNA, 25 nt, Artificial Sequence
  Description of Artificial Sequence: Synthetic oligonucleotide
caguuugugacauuaauaguauugu

SEQ ID NO: 88613 - RNA, 25 nt, Artificial Sequence
  Description of Artificial Sequence: Synthetic oligonucleotide
uaaaguuacauuuuaaaauaaacaa

SEQ ID NO: 88614 - RNA, 25 nt, Artificial Sequence
  Description of Artificial Sequence: Synthetic oligonucleotide
aaaaacuguucuggacugcaaaucu

SEQ ID NO: 88615 - RNA, 25 nt, Artificial Sequence
  Description of Artificial Sequence: Synthetic oligonucleotide
ugcacacacaacgaacaguugcauu

SEQ ID NO: 88616 - RNA, 25 nt, Artificial Sequence
  Description of Artificial Sequence: Synthetic oligonucleotide
uucagagaguucucucaauuuguaa

SEQ ID NO: 88617 - RNA, 25 nt, Artificial Sequence
  Description of Artificial Sequence: Synthetic oligonucleotide
aguuauuuuuuuuuaauaaagauuu

SEQ ID NO: 88618 - DNA, 21 bp, Artificial Sequence
  Description of Artificial Sequence: Synthetic oligonucleotide
  Description of Combined DNA/RNA Molecule: Synthetic oligonucleotide
cuacacaaaucagcgauuutt

SEQ ID NO: 88619 - DNA, 21 bp, Artificial Sequence
  Description of Artificial Sequence: Synthetic oligonucleotide
  Description of Combined DNA/RNA Molecule: Synthetic oligonucleotide
aaaucgcugauuuguguagtt

SEQ ID NO: 88620 - DNA, 25 bp, Artificial Sequence
  Description of Artificial Sequence: Synthetic oligonucleotide
  Description of Combined DNA/RNA Molecule: Synthetic oligonucleotide
cuacacaaaucagcgauuuccaugt

SEQ ID NO: 88621 - RNA, 27 nt, Artificial Sequence
  Description of Artificial Sequence: Synthetic oligonucleotide
acauggaaaucgcugauuuguguaguc

SEQ ID NO: 88622 - RNA, 13 nt, Artificial Sequence
  Description of Artificial Sequence: Synthetic oligonucleotide
cuacacaaaucag

SEQ ID NO: 88623 - DNA, 11 bp, Artificial Sequence
  Description of Artificial Sequence: Synthetic oligonucleotide
  Description of Combined DNA/RNA Molecule: Synthetic oligonucleotide
gauuuccaugt

SEQ ID NO: 88624 - DNA, 21 bp, Artificial Sequence
  Description of Artificial Sequence: Synthetic oligonucleotide
  Description of Combined DNA/RNA Molecule: Synthetic oligonucleotide
ggaucuuauuucuucggagtt

SEQ ID NO: 88625 - DNA, 21 bp, Artificial Sequence
  Description of Artificial Sequence: Synthetic oligonucleotide
  Description of Combined DNA/RNA Molecule: Synthetic oligonucleotide
cuccgaagaaauaagaucctt

SEQ ID NO: 88626 - RNA, 11 nt, Artificial Sequence
  Description of Artificial Sequence: Synthetic oligonucleotide
ggaucuuauuu

SEQ ID NO: 88627 - DNA, 10 bp, Artificial Sequence
  Description of Artificial Sequence: Synthetic oligonucleotide
  Description of Combined DNA/RNA Molecule: Synthetic oligonucleotide
cuucggagtt

SEQ ID NO: 88628 - RNA, 27 nt, Artificial Sequence
  Description of Artificial Sequence: Synthetic oligonucleotide
cauugucuccgaagaaauaagauccuu

SEQ ID NO: 88629 - RNA, 8 nt, Artificial Sequence
  Description of Artificial Sequence: Synthetic oligonucleotide
  modified_base (2): LNA-G
ggaucuua

SEQ ID NO: 88630 - DNA, 17 bp, Artificial Sequence
  Description of Artificial Sequence: Synthetic oligonucleotide
  Description of Combined DNA/RNA Molecule: Synthetic oligonucleotide
uuucuucggagacaatg

SEQ ID NO: 88631 - DNA, 16 bp, Artificial Sequence
  Description of Artificial Sequence: Synthetic oligonucleotide
  Description of Combined DNA/RNA Molecule: Synthetic oligonucleotide
uucuucggagacaatg

SEQ ID NO: 88632 - DNA, 15 bp, Artificial Sequence
  Description of Artificial Sequence: Synthetic oligonucleotide
  Description of Combined DNA/RNA Molecule: Synthetic oligonucleotide
ucuucggagacaatg

SEQ ID NO: 88633 - DNA, 14 bp, Artificial Sequence
  Description of Artificial Sequence: Synthetic oligonucleotide
  Description of Combined DNA/RNA Molecule: Synthetic oligonucleotide
cuucggagacaatg

SEQ ID NO: 88634 - DNA, 13 bp, Artificial Sequence
  Description of Artificial Sequence: Synthetic oligonucleotide
  Description of Combined DNA/RNA Molecule: Synthetic oligonucleotide
uucggagacaatg

SEQ ID NO: 88635 - DNA, 12 bp, Artificial Sequence
  Description of Artificial Sequence: Synthetic oligonucleotide
  Description of Combined DNA/RNA Molecule: Synthetic oligonucleotide
ucggagacaatg

SEQ ID NO: 88636 - DNA, 11 bp, Artificial Sequence
  Description of Artificial Sequence: Synthetic oligonucleotide
  Description of Combined DNA/RNA Molecule: Synthetic oligonucleotide
cggagacaatg

SEQ ID NO: 88637 - RNA, 9 nt, Artificial Sequence
  Description of Artificial Sequence: Synthetic oligonucleotide
  modified_base (2): LNA-G
ggaucuuau

SEQ ID NO: 88638 - RNA, 10 nt, Artificial Sequence
  Description of Artificial Sequence: Synthetic oligonucleotide
  modified_base (2): LNA-G
ggaucuuauu

SEQ ID NO: 88639 - RNA, 11 nt, Artificial Sequence
  Description of Artificial Sequence: Synthetic oligonucleotide
  modified_base (2): LNA-G
ggaucuuauuu

SEQ ID NO: 88640 - RNA, 12 nt, Artificial Sequence
  Description of Artificial Sequence: Synthetic oligonucleotide
  modified_base (2): LNA-G
ggaucuuauuuc

SEQ ID NO: 88641 - RNA, 8 nt, Artificial Sequence
  Description of Artificial Sequence: Synthetic oligonucleotide
  modified_base (3): LNA-A
cuacacaa

SEQ ID NO: 88642 - DNA, 13 bp, Artificial Sequence
  Description of Artificial Sequence: Synthetic oligonucleotide
  Description of Combined DNA/RNA Molecule: Synthetic oligonucleotide
  modified_base (8): LNA-A
aucagcgauuutt

SEQ ID NO: 88643 - DNA, 12 bp, Artificial Sequence
  Description of Artificial Sequence: Synthetic oligonucleotide
  Description of Combined DNA/RNA Molecule: Synthetic oligonucleotide
  modified_base (7): LNA-A
ucagcgauuutt

SEQ ID NO: 88644 - DNA, 11 bp, Artificial Sequence
  Description of Artificial Sequence: Synthetic oligonucleotide
  Description of Combined DNA/RNA Molecule: Synthetic oligonucleotide
  modified_base (6): LNA-A
cagcgauuutt

SEQ ID NO: 88645 - DNA, 10 bp, Artificial Sequence
  Description of Artificial Sequence: Synthetic oligonucleotide
  Description of Combined DNA/RNA Molecule: Synthetic oligonucleotide
  modified_base (5): LNA-A
agcgauuutt

SEQ ID NO: 88646 - DNA, 9 bp, Artificial Sequence
  Description of Artificial Sequence: Synthetic oligonucleotide
  Description of Combined DNA/RNA Molecule: Synthetic oligonucleotide
  modified_base (4): LNA-A
gcgauuutt

SEQ ID NO: 88647 - DNA, 8 bp, Artificial Sequence
  Description of Artificial Sequence: Synthetic oligonucleotide
  Description of Combined DNA/RNA Molecule: Synthetic oligonucleotide
  modified_base (3): LNA-A
cgauuutt

SEQ ID NO: 88648 - DNA, 7 bp, Artificial Sequence
  Description of Artificial Sequence: Synthetic oligonucleotide
  Description of Combined DNA/RNA Molecule: Synthetic oligonucleotide
  modified_base (2): LNA-A
gauuutt

SEQ ID NO: 88649 - RNA, 9 nt, Artificial Sequence
  Description of Artificial Sequence: Synthetic oligonucleotide
  modified_base (3): LNA-A
cuacacaaa

SEQ ID NO: 88650 - RNA, 10 nt, Artificial Sequence
  Description of Artificial Sequence: Synthetic oligonucleotide
  modified_base (3): LNA-A
cuacacaaau

SEQ ID NO: 88651 - RNA, 11 nt, Artificial Sequence
  Description of Artificial Sequence: Synthetic oligonucleotide
  modified_base (3): LNA-A
cuacacaaauc

SEQ ID NO: 88652 - RNA, 12 nt, Artificial Sequence
  Description of Artificial Sequence: Synthetic oligonucleotide
  modified_base (3): LNA-A
cuacacaaauca

SEQ ID NO: 88653 - RNA, 13 nt, Artificial Sequence
  Description of Artificial Sequence: Synthetic oligonucleotide
  modified_base (3): LNA-A
cuacacaaaucag

SEQ ID NO: 88654 - RNA, 14 nt, Artificial Sequence
  Description of Artificial Sequence: Synthetic oligonucleotide
  modified_base (3): LNA-A
cuacacaaaucagc

SEQ ID NO: 88655 - RNA, 13 nt, Artificial Sequence
  Description of Artificial Sequence: Synthetic oligonucleotide
  modified_base (2): LNA-G
ggaucuuauuucu

SEQ ID NO: 88656 - RNA, 14 nt, Artificial Sequence
  Description of Artificial Sequence: Synthetic oligonucleotide
  modified_base (2): LNA-G
ggaucuuauuucuu

SEQ ID NO: 88657 - RNA, 8 nt, Artificial Sequence
  Description of Artificial Sequence: Synthetic oligonucleotide
  modified_base (2): LNA-G
  modified_base (8): LNA-A
ggaucuua

SEQ ID NO: 88658 - RNA, 9 nt, Artificial Sequence
  Description of Artificial Sequence: Synthetic oligonucleotide
  modified_base (2): LNA-G
  modified_base (9): LNA-U
ggaucuuau

SEQ ID NO: 88659 - RNA, 10 nt, Artificial Sequence
  Description of Artificial Sequence: Synthetic oligonucleotide
  modified_base (2): LNA-G
  modified_base (10): LNA-U
ggaucuuauu

SEQ ID NO: 88660 - RNA, 11 nt, Artificial Sequence
  Description of Artificial Sequence: Synthetic oligonucleotide
  modified_base (2): LNA-G
  modified_base (11): LNA-U
ggaucuuauuu

SEQ ID NO: 88661 - RNA, 12 nt, Artificial Sequence
  Description of Artificial Sequence: Synthetic oligonucleotide
  modified_base (2): LNA-G
  modified_base (12): LNA-C
ggaucuuauuuc

SEQ ID NO: 88662 - RNA, 13 nt, Artificial Sequence
  Description of Artificial Sequence: Synthetic oligonucleotide
  modified_base (2): LNA-G
  modified_base (13): LNA-U
ggaucuuauuucu

SEQ ID NO: 88663 - RNA, 14 nt, Artificial Sequence
  Description of Artificial Sequence: Synthetic oligonucleotide
  modified_base (2): LNA-G
  modified_base (14): LNA-U
ggaucuuauuucuu

SEQ ID NO: 88664 - DNA, 13 bp, Artificial Sequence
  Description of Artificial Sequence: Synthetic oligonucleotide
  Description of Combined DNA/RNA Molecule: Synthetic oligonucleotide
  modified_base (8): LNA-G
uuucuucggagtt

SEQ ID NO: 88665 - DNA, 12 bp, Artificial Sequence
  Description of Artificial Sequence: Synthetic oligonucleotide
  Description of Combined DNA/RNA Molecule: Synthetic oligonucleotide
  modified_base (7): LNA-G
uucuucggagtt

SEQ ID NO: 88666 - DNA, 11 bp, Artificial Sequence
  Description of Artificial Sequence: Synthetic oligonucleotide
  Description of Combined DNA/RNA Molecule: Synthetic oligonucleotide
  modified_base (6): LNA-G
ucuucggagtt

SEQ ID NO: 88667 - DNA, 10 bp, Artificial Sequence
  Description of Artificial Sequence: Synthetic oligonucleotide
  Description of Combined DNA/RNA Molecule: Synthetic oligonucleotide
  modified_base (5): LNA-G
cuucggagtt

SEQ ID NO: 88668 - DNA, 9 bp, Artificial Sequence
  Description of Artificial Sequence: Synthetic oligonucleotide
  Description of Combined DNA/RNA Molecule: Synthetic oligonucleotide
  modified_base (4): LNA-G
uucggagtt

SEQ ID NO: 88669 - DNA, 8 bp, Artificial Sequence
  Description of Artificial Sequence: Synthetic oligonucleotide
  Description of Combined DNA/RNA Molecule: Synthetic oligonucleotide
  modified_base (3): LNA-G
ucggagtt

SEQ ID NO: 88670 - DNA, 7 bp, Artificial Sequence
  Description of Artificial Sequence: Synthetic oligonucleotide
  Description of Combined DNA/RNA Molecule: Synthetic oligonucleotide
  modified_base (2): LNA-G
cggagtt

SEQ ID NO: 88671 - DNA, 13 bp, Artificial Sequence
  Description of Artificial Sequence: Synthetic oligonucleotide
  Description of Combined DNA/RNA Molecule: Synthetic oligonucleotide
  modified_base (1): LNA-U
  modified_base (8): LNA-G
uuucuucggagtt

SEQ ID NO: 88672 - DNA, 12 bp, Artificial Sequence
  Description of Artificial Sequence: Synthetic oligonucleotide
  Description of Combined DNA/RNA Molecule: Synthetic oligonucleotide
  modified_base (1): LNA-U
  modified_base (7): LNA-G
uucuucggagtt

SEQ ID NO: 88673 - DNA, 11 bp, Artificial Sequence
  Description of Artificial Sequence: Synthetic oligonucleotide
  Description of Combined DNA/RNA Molecule: Synthetic oligonucleotide
  modified_base (1): LNA-U
  modified_base (6): LNA-G
ucuucggagtt

SEQ ID NO: 88674 - DNA, 10 bp, Artificial Sequence
  Description of Artificial Sequence: Synthetic oligonucleotide
  Description of Combined DNA/RNA Molecule: Synthetic oligonucleotide
  modified_base (1): LNA-C
  modified_base (5): LNA-G
cuucggagtt

SEQ ID NO: 88675 - DNA, 9 bp, Artificial Sequence
  Description of Artificial Sequence: Synthetic oligonucleotide
  Description of Combined DNA/RNA Molecule: Synthetic oligonucleotide
  modified_base (1): LNA-U
  modified_base (4): LNA-G
uucggagtt

SEQ ID NO: 88676 - DNA, 8 bp, Artificial Sequence
  Description of Artificial Sequence: Synthetic oligonucleotide
  Description of Combined DNA/RNA Molecule: Synthetic oligonucleotide
  modified_base (1): LNA-U
  modified_base (3): LNA-G
ucggagtt

SEQ ID NO: 88677 - DNA, 7 bp, Artificial Sequence
  Description of Artificial Sequence: Synthetic oligonucleotide
  Description of Combined DNA/RNA Molecule: Synthetic oligonucleotide
  modified_base (1): LNA-C
  modified_base (2): LNA-G
cggagtt

SEQ ID NO: 88678 - DNA, 21 bp, Artificial Sequence
  Description of Artificial Sequence: Synthetic oligonucleotide
  Description of Combined DNA/RNA Molecule: Synthetic oligonucleotide
  modified_base (2): LNA-G
  modified_base (16): LNA-G
ggaucuuauuucuucggagtt

SEQ ID NO: 88679 - DNA, 25 bp, Artificial Sequence
  Description of Artificial Sequence: Synthetic oligonucleotide
  Description of Combined DNA/RNA Molecule: Synthetic oligonucleotide
ggaucuuauuucuucggagacaatg

SEQ ID NO: 88680 - RNA, 25 nt, Artificial Sequence
  Description of Artificial Sequence: Synthetic oligonucleotide
guauuuugaugaggaguucacggcc

SEQ ID NO: 88681 - RNA, 25 nt, Artificial Sequence
  Description of Artificial Sequence: Synthetic oligonucleotide
ggcccagaugaucaccaucacacca

SEQ ID NO: 88682 - RNA, 25 nt, Artificial Sequence
  Description of Artificial Sequence: Synthetic oligonucleotide
gggaagaaaacuauccugcggguuu

SEQ ID NO: 88683 - RNA, 25 nt, Artificial Sequence
  Description of Artificial Sequence: Synthetic oligonucleotide
guuuuaauuuauuucauccaguuug

SEQ ID NO: 88684 - RNA, 25 nt, Artificial Sequence
  Description of Artificial Sequence: Synthetic oligonucleotide
acguagggaaauguuaaggacuucu

SEQ ID NO: 88685 - RNA, 25 nt, Artificial Sequence
  Description of Artificial Sequence: Synthetic oligonucleotide
ccaggguuuacccagugggacagag

SEQ ID NO: 88686 - RNA, 25 nt, Artificial Sequence
  Description of Artificial Sequence: Synthetic oligonucleotide
agcaagguuuaaauuuguuauugug

SEQ ID NO: 88687 - RNA, 25 nt, Artificial Sequence
  Description of Artificial Sequence: Synthetic oligonucleotide
uguauuauguuguucaaaugcauuu

SEQ ID NO: 88688 - RNA, 25 nt, Artificial Sequence
  Description of Artificial Sequence: Synthetic oligonucleotide
uuuuaaucuuugugacaggaaagcc

SEQ ID NO: 88689 - RNA, 25 nt, Artificial Sequence
  Description of Artificial Sequence: Synthetic oligonucleotide
uuaaucuuugugacaggaaagcccu

SEQ ID NO: 88690 - RNA, 25 nt, Artificial Sequence
  Description of Artificial Sequence: Synthetic oligonucleotide
gcugcuuaugucucccagcauggcc

SEQ ID NO: 88691 - RNA, 25 nt, Artificial Sequence
  Description of Artificial Sequence: Synthetic oligonucleotide
aaguguuucagaagcuucucccuga

SEQ ID NO: 88692 - RNA, 25 nt, Artificial Sequence
  Description of Artificial Sequence: Synthetic oligonucleotide
gaccaucaauaaggaagaagcccuu

SEQ ID NO: 88693 - RNA, 25 nt, Artificial Sequence
  Description of Artificial Sequence: Synthetic oligonucleotide
ccaucaauaaggaagaagcccuuca

SEQ ID NO: 88694 - RNA, 25 nt, Artificial Sequence
  Description of Artificial Sequence: Synthetic oligonucleotide
ucaauaaggaagaagcccuucagcg

SEQ ID NO: 88695 - RNA, 25 nt, Artificial Sequence
  Description of Artificial Sequence: Synthetic oligonucleotide
aauaaggaagaagcccuucagcggc

SEQ ID NO: 88696 - RNA, 25 nt, Artificial Sequence
  Description of Artificial Sequence: Synthetic oligonucleotide
aggaagaagcccuucagcggccagu

SEQ ID NO: 88697 - RNA, 25 nt, Artificial Sequence
  Description of Artificial Sequence: Synthetic oligonucleotide
gcauaacuaaaggugaaaagcuccg

SEQ ID NO: 88698 - RNA, 25 nt, Artificial Sequence
  Description of Artificial Sequence: Synthetic oligonucleotide
cauaacuaaaggugaaaagcuccgg

SEQ ID NO: 88699 - RNA, 25 nt, Artificial Sequence
  Description of Artificial Sequence: Synthetic oligonucleotide
cuacaucacgccagucaacagucug

SEQ ID NO: 88700 - RNA, 25 nt, Artificial Sequence
  Description of Artificial Sequence: Synthetic oligonucleotide
acuggauuuaagcagaguucaaaag

SEQ ID NO: 88701 - RNA, 25 nt, Artificial Sequence
  Description of Artificial Sequence: Synthetic oligonucleotide
cuggauuuaagcagaguucaaaagc

SEQ ID NO: 88702 - RNA, 25 nt, Artificial Sequence
  Description of Artificial Sequence: Synthetic oligonucleotide
gauuuaagcagaguucaaaagcccu

SEQ ID NO: 88703 - RNA, 25 nt, Artificial Sequence
  Description of Artificial Sequence: Synthetic oligonucleotide
auuuaagcagaguucaaaagcccuu

SEQ ID NO: 88704 - RNA, 25 nt, Artificial Sequence
  Description of Artificial Sequence: Synthetic oligonucleotide
uuaagcagaguucaaaagcccuuca

SEQ ID NO: 88705 - RNA, 25 nt, Artificial Sequence
  Description of Artificial Sequence: Synthetic oligonucleotide
uaagcagaguucaaaagcccuucag

SEQ ID NO: 88706 - RNA, 25 nt, Artificial Sequence
  Description of Artificial Sequence: Synthetic oligonucleotide
agcagaguucaaaagcccuucagcg

SEQ ID NO: 88707 - RNA, 25 nt, Artificial Sequence
  Description of Artificial Sequence: Synthetic oligonucleotide
cucagggucugagugaagccgcucg

SEQ ID NO: 88708 - RNA, 25 nt, Artificial Sequence
  Description of Artificial Sequence: Synthetic oligonucleotide
caagcaacuacaucacgccagucaa

SEQ ID NO: 88709 - RNA, 25 nt, Artificial Sequence
  Description of Artificial Sequence: Synthetic oligonucleotide
aucaauggcagcuucuuggugcgug

SEQ ID NO: 88710 - RNA, 25 nt, Artificial Sequence
  Description of Artificial Sequence: Synthetic oligonucleotide
uuccagcccacauuggauucaucag

SEQ ID NO: 88711 - RNA, 25 nt, Artificial Sequence
  Description of Artificial Sequence: Synthetic oligonucleotide
cagcugagaauguggaauaccuaag

SEQ ID NO: 88712 - RNA, 25 nt, Artificial Sequence
  Description of Artificial Sequence: Synthetic oligonucleotide
aacguaucuccuaauuugaggcuca

SEQ ID NO: 88713 - RNA, 25 nt, Artificial Sequence
  Description of Artificial Sequence: Synthetic oligonucleotide
ccuaaaauaauuucucuacaauugg

SEQ ID NO: 88714 - RNA, 25 nt, Artificial Sequence
  Description of Artificial Sequence: Synthetic oligonucleotide
uggaagauucagcuaguuaggagcc

SEQ ID NO: 88715 - RNA, 25 nt, Artificial Sequence
  Description of Artificial Sequence: Synthetic oligonucleotide
uuaaacucuccuagucaauauccac

SEQ ID NO: 88716 - RNA, 25 nt, Artificial Sequence
  Description of Artificial Sequence: Synthetic oligonucleotide
cagccuacaguuauguucagucaca

SEQ ID NO: 88717 - RNA, 25 nt, Artificial Sequence
  Description of Artificial Sequence: Synthetic oligonucleotide
guuauguucagucacacacacauac

SEQ ID NO: 88718 - RNA, 25 nt, Artificial Sequence
  Description of Artificial Sequence: Synthetic oligonucleotide
cacauacaaaauguuccuuuugcuu

SEQ ID NO: 88719 - RNA, 25 nt, Artificial Sequence
  Description of Artificial Sequence: Synthetic oligonucleotide
uccuuuugcuuuuaaaguaauuuuu

SEQ ID NO: 88720 - RNA, 25 nt, Artificial Sequence
  Description of Artificial Sequence: Synthetic oligonucleotide
ugaccugugaagcaacagucaaugg

SEQ ID NO: 88721 - RNA, 25 nt, Artificial Sequence
  Description of Artificial Sequence: Synthetic oligonucleotide
cuaucucacacaucgacaaaccaau

SEQ ID NO: 88722 - RNA, 25 nt, Artificial Sequence
  Description of Artificial Sequence: Synthetic oligonucleotide
uguccucaauuguacugcuaccacu

SEQ ID NO: 88723 - RNA, 25 nt, Artificial Sequence
  Description of Artificial Sequence: Synthetic oligonucleotide
aaaccguagcuggcaagcggucuua

SEQ ID NO: 88724 - RNA, 25 nt, Artificial Sequence
  Description of Artificial Sequence: Synthetic oligonucleotide
uagcuggcaagcggucuuaccggcu

SEQ ID NO: 88725 - RNA, 25 nt, Artificial Sequence
  Description of Artificial Sequence: Synthetic oligonucleotide
uuguaugguuaaaagauggguuacc

SEQ ID NO: 88726 - RNA, 25 nt, Artificial Sequence
  Description of Artificial Sequence: Synthetic oligonucleotide
ugguuaaaagauggguuaccugcga

SEQ ID NO: 88727 - RNA, 25 nt, Artificial Sequence
  Description of Artificial Sequence: Synthetic oligonucleotide
cagggaauuauacaaucuugcugag

SEQ ID NO: 88728 - RNA, 25 nt, Artificial Sequence
  Description of Artificial Sequence: Synthetic oligonucleotide
acaaucuugcugagcauaaaacagu

SEQ ID NO: 88729 - RNA, 25 nt, Artificial Sequence
  Description of Artificial Sequence: Synthetic oligonucleotide
ccaauaaugaagaguccuuuauccu

SEQ ID NO: 88730 - RNA, 25 nt, Artificial Sequence
  Description of Artificial Sequence: Synthetic oligonucleotide
acuuuggauguuccaacgcaaguug

SEQ ID NO: 88731 - RNA, 25 nt, Artificial Sequence
  Description of Artificial Sequence: Synthetic oligonucleotide
aaugcuuccacuaaacugaaaccau

SEQ ID NO: 88732 - RNA, 25 nt, Artificial Sequence
  Description of Artificial Sequence: Synthetic oligonucleotide
gagaaaguuugacuuuguuaaauau

SEQ ID NO: 88733 - RNA, 25 nt, Artificial Sequence
  Description of Artificial Sequence: Synthetic oligonucleotide
aaagaacuacuguauauuaaaaguu

SEQ ID NO: 88734 - RNA, 25 nt, Artificial Sequence
  Description of Artificial Sequence: Synthetic oligonucleotide
uuagaaauacggguuuugacuuaac

SEQ ID NO: 88735 - RNA, 25 nt, Artificial Sequence
  Description of Artificial Sequence: Synthetic oligonucleotide
aacauggguacagcaaacucagcac

SEQ ID NO: 88736 - RNA, 25 nt, Artificial Sequence
  Description of Artificial Sequence: Synthetic oligonucleotide
aaagacacagaagaugcugaccuca

SEQ ID NO: 88737 - RNA, 25 nt, Artificial Sequence
  Description of Artificial Sequence: Synthetic oligonucleotide
uaguagggagguuuauucagaucgc

SEQ ID NO: 88738 - RNA, 25 nt, Artificial Sequence
  Description of Artificial Sequence: Synthetic oligonucleotide
gccuucugcagcaggguucugggau

SEQ ID NO: 88739 - RNA, 25 nt, Artificial Sequence
  Description of Artificial Sequence: Synthetic oligonucleotide
ggucugguacauauuggaaauuaug

SEQ ID NO: 88740 - RNA, 25 nt, Artificial Sequence
  Description of Artificial Sequence: Synthetic oligonucleotide
cuaguccuuccgauggaagcacuag

SEQ ID NO: 88741 - RNA, 25 nt, Artificial Sequence
  Description of Artificial Sequence: Synthetic oligonucleotide
ccagugaauauuguuuuuaugugga

SEQ ID NO: 88742 - RNA, 25 nt, Artificial Sequence
  Description of Artificial Sequence: Synthetic oligonucleotide
augaauucaaguuggaauugguaga

SEQ ID NO: 88743 - RNA, 25 nt, Artificial Sequence
  Description of Artificial Sequence: Synthetic oligonucleotide
caggacacagauuuagacuuggaga

SEQ ID NO: 88744 - RNA, 25 nt, Artificial Sequence
  Description of Artificial Sequence: Synthetic oligonucleotide
cucaaagcacaguuacaguauucca

SEQ ID NO: 88745 - RNA, 25 nt, Artificial Sequence
  Description of Artificial Sequence: Synthetic oligonucleotide
accacugccaccacugaugaauuaa

SEQ ID NO: 88746 - RNA, 25 nt, Artificial Sequence
  Description of Artificial Sequence: Synthetic oligonucleotide
gaaacuacuagugccacaucaucac

SEQ ID NO: 88747 - RNA, 25 nt, Artificial Sequence
  Description of Artificial Sequence: Synthetic oligonucleotide
aagucggacagccucaccaaacaga

SEQ ID NO: 88748 - RNA, 25 nt, Artificial Sequence
  Description of Artificial Sequence: Synthetic oligonucleotide
gaaagcgaaaaauggaacaugaugg

SEQ ID NO: 88749 - RNA, 25 nt, Artificial Sequence
  Description of Artificial Sequence: Synthetic oligonucleotide
cccucugauuuagcauguagacugc

SEQ ID NO: 88750 - RNA, 25 nt, Artificial Sequence
  Description of Artificial Sequence: Synthetic oligonucleotide
ugagcuauuuaaggaucuauuuaug

SEQ ID NO: 88751 - RNA, 25 nt, Artificial Sequence
  Description of Artificial Sequence: Synthetic oligonucleotide
aaaaggugaaaaagcacuauuauca

SEQ ID NO: 88752 - RNA, 25 nt, Artificial Sequence
  Description of Artificial Sequence: Synthetic oligonucleotide
gaaaaagcacuauuaucaguucugc

SEQ ID NO: 88753 - RNA, 25 nt, Artificial Sequence
  Description of Artificial Sequence: Synthetic oligonucleotide
ggcugaaaagaaagauuaaaccuac

SEQ ID NO: 88754 - RNA, 25 nt, Artificial Sequence
  Description of Artificial Sequence: Synthetic oligonucleotide
uaaacccuuauaauaaaauccuucu

SEQ ID NO: 88755 - RNA, 25 nt, Artificial Sequence
  Description of Artificial Sequence: Synthetic oligonucleotide
cauacuauuagccaaugcuguagac

SEQ ID NO: 88756 - RNA, 25 nt, Artificial Sequence
  Description of Artificial Sequence: Synthetic oligonucleotide
gacagaagcauuuugauaggaauag

SEQ ID NO: 88757 - RNA, 25 nt, Artificial Sequence
  Description of Artificial Sequence: Synthetic oligonucleotide
agagcaaauaagauaauggcccuga

SEQ ID NO: 88758 - RNA, 25 nt, Artificial Sequence
  Description of Artificial Sequence: Synthetic oligonucleotide
ccaacauuuuucucuuccucaagca

SEQ ID NO: 88759 - RNA, 25 nt, Artificial Sequence
  Description of Artificial Sequence: Synthetic oligonucleotide
uuaaguaugagaaaaguucagccca

SEQ ID NO: 88760 - RNA, 25 nt, Artificial Sequence
  Description of Artificial Sequence: Synthetic oligonucleotide
caggaauaaagauggcugcugaacc

SEQ ID NO: 88761 - RNA, 25 nt, Artificial Sequence
  Description of Artificial Sequence: Synthetic oligonucleotide
aauuugaaugaccaaguucucuuca

SEQ ID NO: 88762 - RNA, 25 nt, Artificial Sequence
  Description of Artificial Sequence: Synthetic oligonucleotide
auguauaaagauagccagccuagag

SEQ ID NO: 88763 - RNA, 25 nt, Artificial Sequence
  Description of Artificial Sequence: Synthetic oligonucleotide
ggcuguaacuaucucugugaagugu

SEQ ID NO: 88764 - RNA, 25 nt, Artificial Sequence
  Description of Artificial Sequence: Synthetic oligonucleotide
ucugugaagugugagaaaauuucaa

SEQ ID NO: 88765 - RNA, 25 nt, Artificial Sequence
  Description of Artificial Sequence: Synthetic oligonucleotide
ccuuuaaggaaaugaauccuccuga

SEQ ID NO: 88766 - RNA, 25 nt, Artificial Sequence
  Description of Artificial Sequence: Synthetic oligonucleotide
aaggauacaaaaagugacaucauau

SEQ ID NO: 88767 - RNA, 25 nt, Artificial Sequence
  Description of Artificial Sequence: Synthetic oligonucleotide
agaugcaauuugaaucuucaucaua

SEQ ID NO: 88768 - RNA, 25 nt, Artificial Sequence
  Description of Artificial Sequence: Synthetic oligonucleotide
guucaaaacgaagacuagcuauuaa

SEQ ID NO: 88769 - RNA, 25 nt, Artificial Sequence
  Description of Artificial Sequence: Synthetic oligonucleotide
gugaaaccucaucucuacuaaaaau

SEQ ID NO: 88770 - RNA, 25 nt, Artificial Sequence
  Description of Artificial Sequence: Synthetic oligonucleotide
acgaaagagaagcucuaucucgccu

SEQ ID NO: 88771 - RNA, 25 nt, Artificial Sequence
  Description of Artificial Sequence: Synthetic oligonucleotide
cuccacaagcgccuucgguccaguu

SEQ ID NO: 88772 - RNA, 25 nt, Artificial Sequence
  Description of Artificial Sequence: Synthetic oligonucleotide
gagaagauuccaaagauguagccgc

SEQ ID NO: 88773 - RNA, 25 nt, Artificial Sequence
  Description of Artificial Sequence: Synthetic oligonucleotide
aaucuggauucaaugaggagacuug

SEQ ID NO: 88774 - RNA, 25 nt, Artificial Sequence
  Description of Artificial Sequence: Synthetic oligonucleotide
agaacagauuugagaguagugagga

SEQ ID NO: 88775 - RNA, 25 nt, Artificial Sequence
  Description of Artificial Sequence: Synthetic oligonucleotide
ccagagcugugcagaugaguacaaa

SEQ ID NO: 88776 - RNA, 25 nt, Artificial Sequence
  Description of Artificial Sequence: Synthetic oligonucleotide
ccucagauuguuguuguuaaugggc

SEQ ID NO: 88777 - RNA, 25 nt, Artificial Sequence
  Description of Artificial Sequence: Synthetic oligonucleotide
cuauuuuaauuauuuuuaauuuauu

SEQ ID NO: 88778 - RNA, 25 nt, Artificial Sequence
  Description of Artificial Sequence: Synthetic oligonucleotide
uuuaauuuauuaauauuuaaauaug

SEQ ID NO: 88779 - RNA, 25 nt, Artificial Sequence
  Description of Artificial Sequence: Synthetic oligonucleotide
augcaguuugaauauccuuuguuuc

SEQ ID NO: 88780 - RNA, 25 nt, Artificial Sequence
  Description of Artificial Sequence: Synthetic oligonucleotide
caugcugcuggcgucuaaguguuug

SEQ ID NO: 88781 - RNA, 25 nt, Artificial Sequence
  Description of Artificial Sequence: Synthetic oligonucleotide
agaugugcauuucaccugugacaaa

SEQ ID NO: 88782 - RNA, 25 nt, Artificial Sequence
  Description of Artificial Sequence: Synthetic oligonucleotide
ucaaaaccugugccaggcugaauua

SEQ ID NO: 88783 - RNA, 25 nt, Artificial Sequence
  Description of Artificial Sequence: Synthetic oligonucleotide
gaauguggguagucauucuuacaau

SEQ ID NO: 88784 - RNA, 25 nt, Artificial Sequence
  Description of Artificial Sequence: Synthetic oligonucleotide
auguggguagucauucuuacaauug

SEQ ID NO: 88785 - RNA, 25 nt, Artificial Sequence
  Description of Artificial Sequence: Synthetic oligonucleotide
ugaaaaugagcaucagagaguguac

SEQ ID NO: 88786 - RNA, 25 nt, Artificial Sequence
  Description of Artificial Sequence: Synthetic oligonucleotide
uugcuuuucauguagaacucagcag

SEQ ID NO: 88787 - RNA, 25 nt, Artificial Sequence
  Description of Artificial Sequence: Synthetic oligonucleotide
uguauuucuauauuuauuuucagua

SEQ ID NO: 88788 - RNA, 25 nt, Artificial Sequence
  Description of Artificial Sequence: Synthetic oligonucleotide
uuugauuaauguuucuuaaauggaa

SEQ ID NO: 88789 - RNA, 25 nt, Artificial Sequence
  Description of Artificial Sequence: Synthetic oligonucleotide
caacguguauagugccuaaaauugu

SEQ ID NO: 88790 - RNA, 25 nt, Artificial Sequence
  Description of Artificial Sequence: Synthetic oligonucleotide
cauauccuuggcuacuaacaucugg

SEQ ID NO: 88791 - RNA, 25 nt, Artificial Sequence
  Description of Artificial Sequence: Synthetic oligonucleotide
uacuaacaucuggagacugugagcu

SEQ ID NO: 88792 - RNA, 25 nt, Artificial Sequence
  Description of Artificial Sequence: Synthetic oligonucleotide
cauaaguugugugcuuuuuauuaau

SEQ ID NO: 88793 - RNA, 25 nt, Artificial Sequence
  Description of Artificial Sequence: Synthetic oligonucleotide
gcaucauuuuggcucuucuuacauu

SEQ ID NO: 88794 - RNA, 25 nt, Artificial Sequence
  Description of Artificial Sequence: Synthetic oligonucleotide
gcucuucuuacauuuguaaaaaugu

SEQ ID NO: 88795 - RNA, 25 nt, Artificial Sequence
  Description of Artificial Sequence: Synthetic oligonucleotide
agauuaggucaucuuaauucauauu

SEQ ID NO: 88796 - RNA, 25 nt, Artificial Sequence
  Description of Artificial Sequence: Synthetic oligonucleotide
auggaauugaaagaacuaaucauga

SEQ ID NO: 88797 - RNA, 25 nt, Artificial Sequence
  Description of Artificial Sequence: Synthetic oligonucleotide
cacacucauuccuucugcucuuggg

SEQ ID NO: 88798 - RNA, 25 nt, Artificial Sequence
  Description of Artificial Sequence: Synthetic oligonucleotide
uguagagguaaccaguagcuuugag

SEQ ID NO: 88799 - RNA, 25 nt, Artificial Sequence
  Description of Artificial Sequence: Synthetic oligonucleotide
caaccacaugccacguaauauuuca

SEQ ID NO: 88800 - RNA, 25 nt, Artificial Sequence
  Description of Artificial Sequence: Synthetic oligonucleotide
ucggaaacaaguuauucucuucacu

SEQ ID NO: 88801 - RNA, 25 nt, Artificial Sequence
  Description of Artificial Sequence: Synthetic oligonucleotide
acucccaauaacuaaugcuaagaaa

SEQ ID NO: 88802 - RNA, 25 nt, Artificial Sequence
  Description of Artificial Sequence: Synthetic oligonucleotide
aaugcuaagaaaugcugaaaaucaa

SEQ ID NO: 88803 - RNA, 25 nt, Artificial Sequence
  Description of Artificial Sequence: Synthetic oligonucleotide
gucuuucucuaaauaugauuacuuu

SEQ ID NO: 88804 - RNA, 25 nt, Artificial Sequence
  Description of Artificial Sequence: Synthetic oligonucleotide
ugaauuucaggcauuuuguucuaca

SEQ ID NO: 88805 - RNA, 25 nt, Artificial Sequence
  Description of Artificial Sequence: Synthetic oligonucleotide
cgauucccucucacccgggacucuc

SEQ ID NO: 88806 - RNA, 25 nt, Artificial Sequence
  Description of Artificial Sequence: Synthetic oligonucleotide
aggaaagugaaccuuuaaaguaaag

SEQ ID NO: 88807 - RNA, 25 nt, Artificial Sequence
  Description of Artificial Sequence: Synthetic oligonucleotide
gaggcugcaugcucuggaagccugg

SEQ ID NO: 88808 - RNA, 25 nt, Artificial Sequence
  Description of Artificial Sequence: Synthetic oligonucleotide
ucucugaacagaaaacaaaagagag

SEQ ID NO: 88809 - RNA, 25 nt, Artificial Sequence
  Description of Artificial Sequence: Synthetic oligonucleotide
aacuuggcuguaaucaguuaugccg

SEQ ID NO: 88810 - RNA, 25 nt, Artificial Sequence
  Description of Artificial Sequence: Synthetic oligonucleotide
agaagccaaaauuaaaagaagucca

SEQ ID NO: 88811 - RNA, 25 nt, Artificial Sequence
  Description of Artificial Sequence: Synthetic oligonucleotide
auuaaaagaaguccaggugagguua

SEQ ID NO: 88812 - RNA, 25 nt, Artificial Sequence
  Description of Artificial Sequence: Synthetic oligonucleotide
gaauccggauuaucgggaagaggac

SEQ ID NO: 88813 - RNA, 25 nt, Artificial Sequence
  Description of Artificial Sequence: Synthetic oligonucleotide
aaugugacaucaaagcaaguauugu

SEQ ID NO: 88814 - RNA, 25 nt, Artificial Sequence
  Description of Artificial Sequence: Synthetic oligonucleotide
caucaaagcaaguauuguagcacuc

SEQ ID NO: 88815 - RNA, 25 nt, Artificial Sequence
  Description of Artificial Sequence: Synthetic oligonucleotide
agagagagaaaacaaaaccacaaau

SEQ ID NO: 88816 - RNA, 25 nt, Artificial Sequence
  Description of Artificial Sequence: Synthetic oligonucleotide
ucgcuguaguauuuaagcccauaca

SEQ ID NO: 88817 - RNA, 25 nt, Artificial Sequence
  Description of Artificial Sequence: Synthetic oligonucleotide
cgcuguaguauuuaagcccauacag

SEQ ID NO: 88818 - RNA, 25 nt, Artificial Sequence
  Description of Artificial Sequence: Synthetic oligonucleotide
auuuaagcccauacagaaaccuucc

SEQ ID NO: 88819 - RNA, 25 nt, Artificial Sequence
  Description of Artificial Sequence: Synthetic oligonucleotide
auuaaaauaaacaugguauaccuac

SEQ ID NO: 88820 - RNA, 25 nt, Artificial Sequence
  Description of Artificial Sequence: Synthetic oligonucleotide
cuguucugaucggccaguuuucgga

SEQ ID NO: 88821 - RNA, 25 nt, Artificial Sequence
  Description of Artificial Sequence: Synthetic oligonucleotide
aaauaauuugaacuuuggaacaggg

SEQ ID NO: 88822 - RNA, 25 nt, Artificial Sequence
  Description of Artificial Sequence: Synthetic oligonucleotide
ugcgaccuuaauuuaacuuuccagu

SEQ ID NO: 88823 - RNA, 25 nt, Artificial Sequence
  Description of Artificial Sequence: Synthetic oligonucleotide
cugagaaagcuaaaguuugguuuug

SEQ ID NO: 88824 - RNA, 25 nt, Artificial Sequence
  Description of Artificial Sequence: Synthetic oligonucleotide
aguaaagaugcuacuucccacugua

SEQ ID NO: 88825 - RNA, 25 nt, Artificial Sequence
  Description of Artificial Sequence: Synthetic oligonucleotide
cugcuuaauugcugauaccauauga

SEQ ID NO: 88826 - RNA, 25 nt, Artificial Sequence
  Description of Artificial Sequence: Synthetic oligonucleotide
uaccauaugaaugaaacaugggcug

SEQ ID NO: 88827 - RNA, 25 nt, Artificial Sequence
  Description of Artificial Sequence: Synthetic oligonucleotide
aacuuucuuauccaacuuuuucaua

SEQ ID NO: 88828 - RNA, 25 nt, Artificial Sequence
  Description of Artificial Sequence: Synthetic oligonucleotide
ccuugcaugacaucaugaggccgga

SEQ ID NO: 88829 - RNA, 25 nt, Artificial Sequence
  Description of Artificial Sequence: Synthetic oligonucleotide
ugaauuuguauaugacugcauuugu

SEQ ID NO: 88830 - RNA, 25 nt, Artificial Sequence
  Description of Artificial Sequence: Synthetic oligonucleotide
gaauccuaguagaauguuuacuacc

SEQ ID NO: 88831 - RNA, 25 nt, Artificial Sequence
  Description of Artificial Sequence: Synthetic oligonucleotide
gaaagggaagaauuuuuugaugaaa

SEQ ID NO: 88832 - RNA, 25 nt, Artificial Sequence
  Description of Artificial Sequence: Synthetic oligonucleotide
uaucggcaugccagugugugaauuu

SEQ ID NO: 88833 - RNA, 25 nt, Artificial Sequence
  Description of Artificial Sequence: Synthetic oligonucleotide
caccucauaguagagcaauguaugu

SEQ ID NO: 88834 - RNA, 25 nt, Artificial Sequence
  Description of Artificial Sequence: Synthetic oligonucleotide
ccagaauugccaaagcacauauaua

SEQ ID NO: 88835 - RNA, 25 nt, Artificial Sequence
  Description of Artificial Sequence: Synthetic oligonucleotide
uggugaucuggguaauaguuucucc

SEQ ID NO: 88836 - RNA, 25 nt, Artificial Sequence
  Description of Artificial Sequence: Synthetic oligonucleotide
gaucuggguaauaguuucuccaaau

SEQ ID NO: 88837 - RNA, 25 nt, Artificial Sequence
  Description of Artificial Sequence: Synthetic oligonucleotide
ggaugugaugaauacuuccuagaaa

SEQ ID NO: 88838 - RNA, 25 nt, Artificial Sequence
  Description of Artificial Sequence: Synthetic oligonucleotide
cauuuccacagcuacaccauauaug

SEQ ID NO: 88839 - RNA, 25 nt, Artificial Sequence
  Description of Artificial Sequence: Synthetic oligonucleotide
acagcuacaccauauaugaauggag

SEQ ID NO: 88840 - RNA, 25 nt, Artificial Sequence
  Description of Artificial Sequence: Synthetic oligonucleotide
ugcaguucuuacacgagaagaagau

SEQ ID NO: 88841 - RNA, 25 nt, Artificial Sequence
  Description of Artificial Sequence: Synthetic oligonucleotide
acgagaagaagaucauuuacaggga

SEQ ID NO: 88842 - RNA, 25 nt, Artificial Sequence
  Description of Artificial Sequence: Synthetic oligonucleotide
cgagaagaagaucauuuacagggac

SEQ ID NO: 88843 - RNA, 25 nt, Artificial Sequence
  Description of Artificial Sequence: Synthetic oligonucleotide
aagaagaucauuuacagggaccuga

SEQ ID NO: 88844 - RNA, 25 nt, Artificial Sequence
  Description of Artificial Sequence: Synthetic oligonucleotide
agaggaagagguguuugacugcauc

SEQ ID NO: 88845 - RNA, 25 nt, Artificial Sequence
  Description of Artificial Sequence: Synthetic oligonucleotide
gaggaagagguguuugacugcaucg

SEQ ID NO: 88846 - RNA, 25 nt, Artificial Sequence
  Description of Artificial Sequence: Synthetic oligonucleotide
cuacuuugagggcgaguucacaggg

SEQ ID NO: 88847 - RNA, 25 nt, Artificial Sequence
  Description of Artificial Sequence: Synthetic oligonucleotide
agggcaucuccuggcaccucugucc

SEQ ID NO: 88848 - RNA, 25 nt, Artificial Sequence
  Description of Artificial Sequence: Synthetic oligonucleotide
ggagugauaugguuugucuuuuuaa

SEQ ID NO: 88849 - RNA, 25 nt, Artificial Sequence
  Description of Artificial Sequence: Synthetic oligonucleotide
gagugauaugguuugucuuuuuaag

SEQ ID NO: 88850 - RNA, 25 nt, Artificial Sequence
  Description of Artificial Sequence: Synthetic oligonucleotide
ugcaguaaagauccuaaagguuguc

SEQ ID NO: 88851 - RNA, 25 nt, Artificial Sequence
  Description of Artificial Sequence: Synthetic oligonucleotide
aguaaagauccuaaagguugucgac

SEQ ID NO: 88852 - RNA, 25 nt, Artificial Sequence
  Description of Artificial Sequence: Synthetic oligonucleotide
ugacaaaggacaaccuggcaauugu

SEQ ID NO: 88853 - RNA, 25 nt, Artificial Sequence
  Description of Artificial Sequence: Synthetic oligonucleotide
gcaauugugacccaguggugcgagg

SEQ ID NO: 88854 - RNA, 25 nt, Artificial Sequence
  Description of Artificial Sequence: Synthetic oligonucleotide
aacaucauccauagagacaugaaau

SEQ ID NO: 88855 - RNA, 25 nt, Artificial Sequence
  Description of Artificial Sequence: Synthetic oligonucleotide
ugaaauccaacaauauauuucucca

SEQ ID NO: 88856 - RNA, 25 nt, Artificial Sequence
  Description of Artificial Sequence: Synthetic oligonucleotide
aacaauauauuucuccaugaaggcu

SEQ ID NO: 88857 - RNA, 25 nt, Artificial Sequence
  Description of Artificial Sequence: Synthetic oligonucleotide
aacaguaaagucacgcuggaguggu

SEQ ID NO: 88858 - RNA, 25 nt, Artificial Sequence
  Description of Artificial Sequence: Synthetic oligonucleotide
ugugaagaaaguaaaggaagagagg

SEQ ID NO: 88859 - RNA, 25 nt, Artificial Sequence
  Description of Artificial Sequence: Synthetic oligonucleotide
cuuccgagccauccuugcaucgggc

SEQ ID NO: 88860 - RNA, 25 nt, Artificial Sequence
  Description of Artificial Sequence: Synthetic oligonucleotide
aauggagguugaauauccuacugug

SEQ ID NO: 88861 - RNA, 25 nt, Artificial Sequence
  Description of Artificial Sequence: Synthetic oligonucleotide
ggagguugaauauccuacuguguaa

SEQ ID NO: 88862 - RNA, 25 nt, Artificial Sequence
  Description of Artificial Sequence: Synthetic oligonucleotide
auuuugaguuuucccuuguagugua

SEQ ID NO: 88863 - RNA, 25 nt, Artificial Sequence
  Description of Artificial Sequence: Synthetic oligonucleotide
uauccuguuuguucuuuguugauug

SEQ ID NO: 88864 - RNA, 25 nt, Artificial Sequence
  Description of Artificial Sequence: Synthetic oligonucleotide
ccuguuuguucuuuguugauugaaa

SEQ ID NO: 88865 - RNA, 25 nt, Artificial Sequence
  Description of Artificial Sequence: Synthetic oligonucleotide
cucuacagccuucuuuuucuuccau

SEQ ID NO: 88866 - RNA, 25 nt, Artificial Sequence
  Description of Artificial Sequence: Synthetic oligonucleotide
ucuuccauagcuaaucuuccuucua

SEQ ID NO: 88867 - RNA, 25 nt, Artificial Sequence
  Description of Artificial Sequence: Synthetic oligonucleotide
auaaucuuccuguugaaugcuucau

SEQ ID NO: 88868 - RNA, 25 nt, Artificial Sequence
  Description of Artificial Sequence: Synthetic oligonucleotide
uaaucuuccuguugaaugcuucaug

SEQ ID NO: 88869 - RNA, 25 nt, Artificial Sequence
  Description of Artificial Sequence: Synthetic oligonucleotide
cuucaugacuugaauucuacuuuga

SEQ ID NO: 88870 - RNA, 25 nt, Artificial Sequence
  Description of Artificial Sequence: Synthetic oligonucleotide
aagagggagagaagcaacuacagac

SEQ ID NO: 88871 - RNA, 25 nt, Artificial Sequence
  Description of Artificial Sequence: Synthetic oligonucleotide
cgucuccuaccagaccaaggucaac

SEQ ID NO: 88872 - RNA, 25 nt, Artificial Sequence
  Description of Artificial Sequence: Synthetic oligonucleotide
gaucaaucggcccgacuaucucgac

SEQ ID NO: 88873 - RNA, 25 nt, Artificial Sequence
  Description of Artificial Sequence: Synthetic oligonucleotide
ggacgaacauccaaccuucccaaac

SEQ ID NO: 88874 - RNA, 25 nt, Artificial Sequence
  Description of Artificial Sequence: Synthetic oligonucleotide
agggucggaacccaagcuuagaacu

SEQ ID NO: 88875 - RNA, 25 nt, Artificial Sequence
  Description of Artificial Sequence: Synthetic oligonucleotide
ucggaacccaagcuuagaacuuuaa

SEQ ID NO: 88876 - RNA, 25 nt, Artificial Sequence
  Description of Artificial Sequence: Synthetic oligonucleotide
acccaagcuuagaacuuuaagcaac

SEQ ID NO: 88877 - RNA, 25 nt, Artificial Sequence
  Description of Artificial Sequence: Synthetic oligonucleotide
gaacuuuaagcaacaagaccaccac

SEQ ID NO: 88878 - RNA, 25 nt, Artificial Sequence
  Description of Artificial Sequence: Synthetic oligonucleotide
acuauucaguggcgagaaauaaagu

SEQ ID NO: 88879 - RNA, 25 nt, Artificial Sequence
  Description of Artificial Sequence: Synthetic oligonucleotide
cuauucaguggcgagaaauaaaguu

SEQ ID NO: 88880 - RNA, 25 nt, Artificial Sequence
  Description of Artificial Sequence: Synthetic oligonucleotide
aaacacagauaacaggaaaugaucc

SEQ ID NO: 88881 - RNA, 25 nt, Artificial Sequence
  Description of Artificial Sequence: Synthetic oligonucleotide
cuuaagaaaagagaagaaaugaaac

SEQ ID NO: 88882 - RNA, 25 nt, Artificial Sequence
  Description of Artificial Sequence: Synthetic oligonucleotide
cugaaggaguguguuuccauccucc

SEQ ID NO: 88883 - RNA, 25 nt, Artificial Sequence
  Description of Artificial Sequence: Synthetic oligonucleotide
ucaccgcgggacugaaaaucuuuga

SEQ ID NO: 88884 - RNA, 25 nt, Artificial Sequence
  Description of Artificial Sequence: Synthetic oligonucleotide
agcagaaauaagcgugccguucagg

SEQ ID NO: 88885 - RNA, 25 nt, Artificial Sequence
  Description of Artificial Sequence: Synthetic oligonucleotide
aagcgugccguucaggguccagaag

SEQ ID NO: 88886 - RNA, 25 nt, Artificial Sequence
  Description of Artificial Sequence: Synthetic oligonucleotide
agaaacagucacucaagacugcuug

SEQ ID NO: 88887 - RNA, 25 nt, Artificial Sequence
  Description of Artificial Sequence: Synthetic oligonucleotide
agaggaagaagguccaugucuuugg

SEQ ID NO: 88888 - RNA, 25 nt, Artificial Sequence
  Description of Artificial Sequence: Synthetic oligonucleotide
uguauucaaaauaugccugaaacac

SEQ ID NO: 88889 - RNA, 25 nt, Artificial Sequence
  Description of Artificial Sequence: Synthetic oligonucleotide
auuuuccucccuuucucuguaccuc

SEQ ID NO: 88890 - RNA, 25 nt, Artificial Sequence
  Description of Artificial Sequence: Synthetic oligonucleotide
caaagaaagauagagcaagacaaga

SEQ ID NO: 88891 - RNA, 25 nt, Artificial Sequence
  Description of Artificial Sequence: Synthetic oligonucleotide
aagaaagauagagcaagacaagaaa

SEQ ID NO: 88892 - RNA, 25 nt, Artificial Sequence
  Description of Artificial Sequence: Synthetic oligonucleotide
gaaagcauuuguuuguacaagaucc

SEQ ID NO: 88893 - RNA, 25 nt, Artificial Sequence
  Description of Artificial Sequence: Synthetic oligonucleotide
ugaguuaaacgaacguacuugcaga

SEQ ID NO: 88894 - RNA, 25 nt, Artificial Sequence
  Description of Artificial Sequence: Synthetic oligonucleotide
acugauacagaacgaucgauacaga

SEQ ID NO: 88895 - RNA, 25 nt, Artificial Sequence
  Description of Artificial Sequence: Synthetic oligonucleotide
auauuauauauauauaaaaauaaau

SEQ ID NO: 88896 - RNA, 25 nt, Artificial Sequence
  Description of Artificial Sequence: Synthetic oligonucleotide
auuauauauauauaaaaauaaauau

SEQ ID NO: 88897 - RNA, 25 nt, Artificial Sequence
  Description of Artificial Sequence: Synthetic oligonucleotide
ucacuggauguauuugacugcugug

SEQ ID NO: 88898 - RNA, 25 nt, Artificial Sequence
  Description of Artificial Sequence: Synthetic oligonucleotide
cagggaagaggaggagaugagagac

SEQ ID NO: 88899 - RNA, 25 nt, Artificial Sequence
  Description of Artificial Sequence: Synthetic oligonucleotide
augaucuuuuuuuugucccacuugg

SEQ ID NO: 88900 - RNA, 27 nt, Artificial Sequence
  Description of Artificial Sequence: Synthetic oligonucleotide
ggccgugaacuccucaucaaaauaccu

SEQ ID NO: 88901 - RNA, 27 nt, Artificial Sequence
  Description of Artificial Sequence: Synthetic oligonucleotide
uggugugauggugaucaucugggccgu

SEQ ID NO: 88902 - RNA, 27 nt, Artificial Sequence
  Description of Artificial Sequence: Synthetic oligonucleotide
aaacccgcaggauaguuuucuucccua

SEQ ID NO: 88903 - RNA, 27 nt, Artificial Sequence
  Description of Artificial Sequence: Synthetic oligonucleotide
caaacuggaugaaauaaauuaaaaccc

SEQ ID NO: 88904 - RNA, 27 nt, Artificial Sequence
  Description of Artificial Sequence: Synthetic oligonucleotide
agaaguccuuaacauuucccuacguga

SEQ ID NO: 88905 - RNA, 27 nt, Artificial Sequence
  Description of Artificial Sequence: Synthetic oligonucleotide
cucugucccacuggguaaacccuggcc

SEQ ID NO: 88906 - RNA, 27 nt, Artificial Sequence
  Description of Artificial Sequence: Synthetic oligonucleotide
cacaauaacaaauuuaaaccuugcucc

SEQ ID NO: 88907 - RNA, 27 nt, Artificial Sequence
  Description of Artificial Sequence: Synthetic oligonucleotide
aaaugcauuugaacaacauaauacaca

SEQ ID NO: 88908 - RNA, 27 nt, Artificial Sequence
  Description of Artificial Sequence: Synthetic oligonucleotide
ggcuuuccugucacaaagauuaaaaac

SEQ ID NO: 88909 - RNA, 27 nt, Artificial Sequence
  Description of Artificial Sequence: Synthetic oligonucleotide
agggcuuuccugucacaaagauuaaaa

SEQ ID NO: 88910 - RNA, 27 nt, Artificial Sequence
  Description of Artificial Sequence: Synthetic oligonucleotide
ggccaugcugggagacauaagcagcag

SEQ ID NO: 88911 - RNA, 27 nt, Artificial Sequence
  Description of Artificial Sequence: Synthetic oligonucleotide
ucagggagaagcuucugaaacacuucu

SEQ ID NO: 88912 - RNA, 27 nt, Artificial Sequence
  Description of Artificial Sequence: Synthetic oligonucleotide
aagggcuucuuccuuauugauggucag

SEQ ID NO: 88913 - RNA, 27 nt, Artificial Sequence
  Description of Artificial Sequence: Synthetic oligonucleotide
ugaagggcuucuuccuuauugaugguc

SEQ ID NO: 88914 - RNA, 27 nt, Artificial Sequence
  Description of Artificial Sequence: Synthetic oligonucleotide
cgcugaagggcuucuuccuuauugaug

SEQ ID NO: 88915 - RNA, 27 nt, Artificial Sequence
  Description of Artificial Sequence: Synthetic oligonucleotide
gccgcugaagggcuucuuccuuauuga

SEQ ID NO: 88916 - RNA, 27 nt, Artificial Sequence
  Description of Artificial Sequence: Synthetic oligonucleotide
acuggccgcugaagggcuucuuccuua

SEQ ID NO: 88917 - RNA, 27 nt, Artificial Sequence
  Description of Artificial Sequence: Synthetic oligonucleotide
cggagcuuuucaccuuuaguuaugcuu

SEQ ID NO: 88918 - RNA, 27 nt, Artificial Sequence
  Description of Artificial Sequence: Synthetic oligonucleotide
ccggagcuuuucaccuuuaguuaugcu

SEQ ID NO: 88919 - RNA, 27 nt, Artificial Sequence
  Description of Artificial Sequence: Synthetic oligonucleotide
cagacuguugacuggcgugauguaguu

SEQ ID NO: 88920 - RNA, 27 nt, Artificial Sequence
  Description of Artificial Sequence: Synthetic oligonucleotide
cuuuugaacucugcuuaaauccagugg

SEQ ID NO: 88921 - RNA, 27 nt, Artificial Sequence
  Description of Artificial Sequence: Synthetic oligonucleotide
gcuuuugaacucugcuuaaauccagug

SEQ ID NO: 88922 - RNA, 27 nt, Artificial Sequence
  Description of Artificial Sequence: Synthetic oligonucleotide
agggcuuuugaacucugcuuaaaucca

SEQ ID NO: 88923 - RNA, 27 nt, Artificial Sequence
  Description of Artificial Sequence: Synthetic oligonucleotide
aagggcuuuugaacucugcuuaaaucc

SEQ ID NO: 88924 - RNA, 27 nt, Artificial Sequence
  Description of Artificial Sequence: Synthetic oligonucleotide
ugaagggcuuuugaacucugcuuaaau

SEQ ID NO: 88925 - RNA, 27 nt, Artificial Sequence
  Description of Artificial Sequence: Synthetic oligonucleotide
cugaagggcuuuugaacucugcuuaaa

SEQ ID NO: 88926 - RNA, 27 nt, Artificial Sequence
  Description of Artificial Sequence: Synthetic oligonucleotide
cgcugaagggcuuuugaacucugcuua

SEQ ID NO: 88927 - RNA, 27 nt, Artificial Sequence
  Description of Artificial Sequence: Synthetic oligonucleotide
cgagcggcuucacucagacccugaggc

SEQ ID NO: 88928 - RNA, 27 nt, Artificial Sequence
  Description of Artificial Sequence: Synthetic oligonucleotide
uugacuggcgugauguaguugcuuggg

SEQ ID NO: 88929 - RNA, 27 nt, Artificial Sequence
  Description of Artificial Sequence: Synthetic oligonucleotide
cacgcaccaagaagcugccauugaucc

SEQ ID NO: 88930 - RNA, 27 nt, Artificial Sequence
  Description of Artificial Sequence: Synthetic oligonucleotide
cugaugaauccaaugugggcuggaauc

SEQ ID NO: 88931 - RNA, 27 nt, Artificial Sequence
  Description of Artificial Sequence: Synthetic oligonucleotide
cuuagguauuccacauucucagcugug

SEQ ID NO: 88932 - RNA, 27 nt, Artificial Sequence
  Description of Artificial Sequence: Synthetic oligonucleotide
ugagccucaaauuaggagauacguuuu

SEQ ID NO: 88933 - RNA, 27 nt, Artificial Sequence
  Description of Artificial Sequence: Synthetic oligonucleotide
ccaauuguagagaaauuauuuuaggaa

SEQ ID NO: 88934 - RNA, 27 nt, Artificial Sequence
  Description of Artificial Sequence: Synthetic oligonucleotide
ggcuccuaacuagcugaaucuuccaau

SEQ ID NO: 88935 - RNA, 27 nt, Artificial Sequence
  Description of Artificial Sequence: Synthetic oligonucleotide
guggauauugacuaggagaguuuaaaa

SEQ ID NO: 88936 - RNA, 27 nt, Artificial Sequence
  Description of Artificial Sequence: Synthetic oligonucleotide
ugugacugaacauaacuguaggcugaa

SEQ ID NO: 88937 - RNA, 27 nt, Artificial Sequence
  Description of Artificial Sequence: Synthetic oligonucleotide
guaugugugugugacugaacauaacug

SEQ ID NO: 88938 - RNA, 27 nt, Artificial Sequence
  Description of Artificial Sequence: Synthetic oligonucleotide
aagcaaaaggaacauuuuguaugugug

SEQ ID NO: 88939 - RNA, 27 nt, Artificial Sequence
  Description of Artificial Sequence: Synthetic oligonucleotide
aaaaauuacuuuaaaagcaaaaggaac

SEQ ID NO: 88940 - RNA, 27 nt, Artificial Sequence
  Description of Artificial Sequence: Synthetic oligonucleotide
ccauugacuguugcuucacaggucaga

SEQ ID NO: 88941 - RNA, 27 nt, Artificial Sequence
  Description of Artificial Sequence: Synthetic oligonucleotide
auugguuugucgaugugugagauaguu

SEQ ID NO: 88942 - RNA, 27 nt, Artificial Sequence
  Description of Artificial Sequence: Synthetic oligonucleotide
agugguagcaguacaauugaggacaag

SEQ ID NO: 88943 - RNA, 27 nt, Artificial Sequence
  Description of Artificial Sequence: Synthetic oligonucleotide
uaagaccgcuugccagcuacgguuuca

SEQ ID NO: 88944 - RNA, 27 nt, Artificial Sequence
  Description of Artificial Sequence: Synthetic oligonucleotide
agccgguaagaccgcuugccagcuacg

SEQ ID NO: 88945 - RNA, 27 nt, Artificial Sequence
  Description of Artificial Sequence: Synthetic oligonucleotide
gguaacccaucuuuuaaccauacaacu

SEQ ID NO: 88946 - RNA, 27 nt, Artificial Sequence
  Description of Artificial Sequence: Synthetic oligonucleotide
ucgcagguaacccaucuuuuaaccaua

SEQ ID NO: 88947 - RNA, 27 nt, Artificial Sequence
  Description of Artificial Sequence: Synthetic oligonucleotide
cucagcaagauuguauaauucccugca

SEQ ID NO: 88948 - RNA, 27 nt, Artificial Sequence
  Description of Artificial Sequence: Synthetic oligonucleotide
acuguuuuaugcucagcaagauuguau

SEQ ID NO: 88949 - RNA, 27 nt, Artificial Sequence
  Description of Artificial Sequence: Synthetic oligonucleotide
aggauaaaggacucuucauuauuggaa

SEQ ID NO: 88950 - RNA, 27 nt, Artificial Sequence
  Description of Artificial Sequence: Synthetic oligonucleotide
caacuugcguuggaacauccaaagugu

SEQ ID NO: 88951 - RNA, 27 nt, Artificial Sequence
  Description of Artificial Sequence: Synthetic oligonucleotide
augguuucaguuuaguggaagcauuua

SEQ ID NO: 88952 - RNA, 27 nt, Artificial Sequence
  Description of Artificial Sequence: Synthetic oligonucleotide
auauuuaacaaagucaaacuuucucac

SEQ ID NO: 88953 - RNA, 27 nt, Artificial Sequence
  Description of Artificial Sequence: Synthetic oligonucleotide
aacuuuuaauauacaguaguucuuuuc

SEQ ID NO: 88954 - RNA, 27 nt, Artificial Sequence
  Description of Artificial Sequence: Synthetic oligonucleotide
guuaagucaaaacccguauuucuaaag

SEQ ID NO: 88955 - RNA, 27 nt, Artificial Sequence
  Description of Artificial Sequence: Synthetic oligonucleotide
gugcugaguuugcuguacccauguuga

SEQ ID NO: 88956 - RNA, 27 nt, Artificial Sequence
  Description of Artificial Sequence: Synthetic oligonucleotide
ugaggucagcaucuucugugucuuuac

SEQ ID NO: 88957 - RNA, 27 nt, Artificial Sequence
  Description of Artificial Sequence: Synthetic oligonucleotide
gcgaucugaauaaaccucccuacuagc

SEQ ID NO: 88958 - RNA, 27 nt, Artificial Sequence
  Description of Artificial Sequence: Synthetic oligonucleotide
aucccagaacccugcugcagaaggcca

SEQ ID NO: 88959 - RNA, 27 nt, Artificial Sequence
  Description of Artificial Sequence: Synthetic oligonucleotide
cauaauuuccaauauguaccagaccuu

SEQ ID NO: 88960 - RNA, 27 nt, Artificial Sequence
  Description of Artificial Sequence: Synthetic oligonucleotide
cuagugcuuccaucggaaggacuaggu

SEQ ID NO: 88961 - RNA, 27 nt, Artificial Sequence
  Description of Artificial Sequence: Synthetic oligonucleotide
uccacauaaaaacaauauucacuggga

SEQ ID NO: 88962 - RNA, 27 nt, Artificial Sequence
  Description of Artificial Sequence: Synthetic oligonucleotide
ucuaccaauuccaacuugaauucauug

SEQ ID NO: 88963 - RNA, 27 nt, Artificial Sequence
  Description of Artificial Sequence: Synthetic oligonucleotide
ucuccaagucuaaaucuguguccugag

SEQ ID NO: 88964 - RNA, 27 nt, Artificial Sequence
  Description of Artificial Sequence: Synthetic oligonucleotide
uggaauacuguaacugugcuuugagga

SEQ ID NO: 88965 - RNA, 27 nt, Artificial Sequence
  Description of Artificial Sequence: Synthetic oligonucleotide
uuaauucaucagugguggcagugguag

SEQ ID NO: 88966 - RNA, 27 nt, Artificial Sequence
  Description of Artificial Sequence: Synthetic oligonucleotide
gugaugauguggcacuaguaguuucuu

SEQ ID NO: 88967 - RNA, 27 nt, Artificial Sequence
  Description of Artificial Sequence: Synthetic oligonucleotide
ucuguuuggugaggcuguccgacuuug

SEQ ID NO: 88968 - RNA, 27 nt, Artificial Sequence
  Description of Artificial Sequence: Synthetic oligonucleotide
ccaucauguuccauuuuucgcuuucuc

SEQ ID NO: 88969 - RNA, 27 nt, Artificial Sequence
  Description of Artificial Sequence: Synthetic oligonucleotide
gcagucuacaugcuaaaucagagggua

SEQ ID NO: 88970 - RNA, 27 nt, Artificial Sequence
  Description of Artificial Sequence: Synthetic oligonucleotide
cauaaauagauccuuaaauagcucaaa

SEQ ID NO: 88971 - RNA, 27 nt, Artificial Sequence
  Description of Artificial Sequence: Synthetic oligonucleotide
ugauaauagugcuuuuucaccuuuuuc

SEQ ID NO: 88972 - RNA, 27 nt, Artificial Sequence
  Description of Artificial Sequence: Synthetic oligonucleotide
gcagaacugauaauagugcuuuuucac

SEQ ID NO: 88973 - RNA, 27 nt, Artificial Sequence
  Description of Artificial Sequence: Synthetic oligonucleotide
guagguuuaaucuuucuuuucagccau

SEQ ID NO: 88974 - RNA, 27 nt, Artificial Sequence
  Description of Artificial Sequence: Synthetic oligonucleotide
agaaggauuuuauuauaaggguuuaau

SEQ ID NO: 88975 - RNA, 27 nt, Artificial Sequence
  Description of Artificial Sequence: Synthetic oligonucleotide
gucuacagcauuggcuaauaguaugaa

SEQ ID NO: 88976 - RNA, 27 nt, Artificial Sequence
  Description of Artificial Sequence: Synthetic oligonucleotide
cuauuccuaucaaaaugcuucugucua

SEQ ID NO: 88977 - RNA, 27 nt, Artificial Sequence
  Description of Artificial Sequence: Synthetic oligonucleotide
ucagggccauuaucuuauuugcucuau

SEQ ID NO: 88978 - RNA, 27 nt, Artificial Sequence
  Description of Artificial Sequence: Synthetic oligonucleotide
ugcuugaggaagagaaaaauguugguc

SEQ ID NO: 88979 - RNA, 27 nt, Artificial Sequence
  Description of Artificial Sequence: Synthetic oligonucleotide
ugggcugaacuuuucucauacuuaaag

SEQ ID NO: 88980 - RNA, 27 nt, Artificial Sequence
  Description of Artificial Sequence: Synthetic oligonucleotide
gguucagcagccaucuuuauuccugcg

SEQ ID NO: 88981 - RNA, 27 nt, Artificial Sequence
  Description of Artificial Sequence: Synthetic oligonucleotide
ugaagagaacuuggucauucaaauuuc

SEQ ID NO: 88982 - RNA, 27 nt, Artificial Sequence
  Description of Artificial Sequence: Synthetic oligonucleotide
cucuaggcuggcuaucuuuauacauac

SEQ ID NO: 88983 - RNA, 27 nt, Artificial Sequence
  Description of Artificial Sequence: Synthetic oligonucleotide
acacuucacagagauaguuacagccau

SEQ ID NO: 88984 - RNA, 27 nt, Artificial Sequence
  Description of Artificial Sequence: Synthetic oligonucleotide
uugaaauuuucucacacuucacagaga

SEQ ID NO: 88985 - RNA, 27 nt, Artificial Sequence
  Description of Artificial Sequence: Synthetic oligonucleotide
ucaggaggauucauuuccuuaaaggaa

SEQ ID NO: 88986 - RNA, 27 nt, Artificial Sequence
  Description of Artificial Sequence: Synthetic oligonucleotide
auaugaugucacuuuuuguauccuuga

SEQ ID NO: 88987 - RNA, 27 nt, Artificial Sequence
  Description of Artificial Sequence: Synthetic oligonucleotide
uaugaugaagauucaaauugcaucuua

SEQ ID NO: 88988 - RNA, 27 nt, Artificial Sequence
  Description of Artificial Sequence: Synthetic oligonucleotide
uuaauagcuagucuucguuuugaacag

SEQ ID NO: 88989 - RNA, 27 nt, Artificial Sequence
  Description of Artificial Sequence: Synthetic oligonucleotide
auuuuuaguagagaugagguuucacca

SEQ ID NO: 88990 - RNA, 27 nt, Artificial Sequence
  Description of Artificial Sequence: Synthetic oligonucleotide
aggcgagauagagcuucucuuucguuc

SEQ ID NO: 88991 - RNA, 27 nt, Artificial Sequence
  Description of Artificial Sequence: Synthetic oligonucleotide
aacuggaccgaaggcgcuuguggagaa

SEQ ID NO: 88992 - RNA, 27 nt, Artificial Sequence
  Description of Artificial Sequence: Synthetic oligonucleotide
gcggcuacaucuuuggaaucuucuccu

SEQ ID NO: 88993 - RNA, 27 nt, Artificial Sequence
  Description of Artificial Sequence: Synthetic oligonucleotide
caagucuccucauugaauccagauugg

SEQ ID NO: 88994 - RNA, 27 nt, Artificial Sequence
  Description of Artificial Sequence: Synthetic oligonucleotide
uccucacuacucucaaaucuguucugg

SEQ ID NO: 88995 - RNA, 27 nt, Artificial Sequence
  Description of Artificial Sequence: Synthetic oligonucleotide
uuuguacucaucugcacagcucuggcu

SEQ ID NO: 88996 - RNA, 27 nt, Artificial Sequence
  Description of Artificial Sequence: Synthetic oligonucleotide
gcccauuaacaacaacaaucugaggug

SEQ ID NO: 88997 - RNA, 27 nt, Artificial Sequence
  Description of Artificial Sequence: Synthetic oligonucleotide
aauaaauuaaaaauaauuaaaauagug

SEQ ID NO: 88998 - RNA, 27 nt, Artificial Sequence
  Description of Artificial Sequence: Synthetic oligonucleotide
cauauuuaaauauuaauaaauuaaaaa

SEQ ID NO: 88999 - RNA, 27 nt, Artificial Sequence
  Description of Artificial Sequence: Synthetic oligonucleotide
gaaacaaaggauauucaaacugcauag

SEQ ID NO: 89000 - RNA, 27 nt, Artificial Sequence
  Description of Artificial Sequence: Synthetic oligonucleotide
caaacacuuagacgccagcagcauggg

SEQ ID NO: 89001 - RNA, 27 nt, Artificial Sequence
  Description of Artificial Sequence: Synthetic oligonucleotide
uuugucacaggugaaaugcacaucuga

SEQ ID NO: 89002 - RNA, 27 nt, Artificial Sequence
  Description of Artificial Sequence: Synthetic oligonucleotide
uaauucagccuggcacagguuuugauc

SEQ ID NO: 89003 - RNA, 27 nt, Artificial Sequence
  Description of Artificial Sequence: Synthetic oligonucleotide
auuguaagaaugacuacccacauucac

SEQ ID NO: 89004 - RNA, 27 nt, Artificial Sequence
  Description of Artificial Sequence: Synthetic oligonucleotide
caauuguaagaaugacuacccacauuc

SEQ ID NO: 89005 - RNA, 27 nt, Artificial Sequence
  Description of Artificial Sequence: Synthetic oligonucleotide
guacacucucugaugcucauuuucaua

SEQ ID NO: 89006 - RNA, 27 nt, Artificial Sequence
  Description of Artificial Sequence: Synthetic oligonucleotide
cugcugaguucuacaugaaaagcaaau

SEQ ID NO: 89007 - RNA, 27 nt, Artificial Sequence
  Description of Artificial Sequence: Synthetic oligonucleotide
uacugaaaauaaauauagaaauacaac

SEQ ID NO: 89008 - RNA, 27 nt, Artificial Sequence
  Description of Artificial Sequence: Synthetic oligonucleotide
uuccauuuaagaaacauuaaucaaaac

SEQ ID NO: 89009 - RNA, 27 nt, Artificial Sequence
  Description of Artificial Sequence: Synthetic oligonucleotide
acaauuuuaggcacuauacacguuguu

SEQ ID NO: 89010 - RNA, 27 nt, Artificial Sequence
  Description of Artificial Sequence: Synthetic oligonucleotide
ccagauguuaguagccaaggauauggu

SEQ ID NO: 89011 - RNA, 27 nt, Artificial Sequence
  Description of Artificial Sequence: Synthetic oligonucleotide
agcucacagucuccagauguuaguagc

SEQ ID NO: 89012 - RNA, 27 nt, Artificial Sequence
  Description of Artificial Sequence: Synthetic oligonucleotide
auuaauaaaaagcacacaacuuauggc

SEQ ID NO: 89013 - RNA, 27 nt, Artificial Sequence
  Description of Artificial Sequence: Synthetic oligonucleotide
aauguaagaagagccaaaaugaugcau

SEQ ID NO: 89014 - RNA, 27 nt, Artificial Sequence
  Description of Artificial Sequence: Synthetic oligonucleotide
acauuuuuacaaauguaagaagagcca

SEQ ID NO: 89015 - RNA, 27 nt, Artificial Sequence
  Description of Artificial Sequence: Synthetic oligonucleotide
aauaugaauuaagaugaccuaaucugu

SEQ ID NO: 89016 - RNA, 27 nt, Artificial Sequence
  Description of Artificial Sequence: Synthetic oligonucleotide
ucaugauuaguucuuucaauuccaucc

SEQ ID NO: 89017 - RNA, 27 nt, Artificial Sequence
  Description of Artificial Sequence: Synthetic oligonucleotide
cccaagagcagaaggaaugagugugca

SEQ ID NO: 89018 - RNA, 27 nt, Artificial Sequence
  Description of Artificial Sequence: Synthetic oligonucleotide
cucaaagcuacugguuaccucuacacc

SEQ ID NO: 89019 - RNA, 27 nt, Artificial Sequence
  Description of Artificial Sequence: Synthetic oligonucleotide
ugaaauauuacguggcaugugguuggg

SEQ ID NO: 89020 - RNA, 27 nt, Artificial Sequence
  Description of Artificial Sequence: Synthetic oligonucleotide
agugaagagaauaacuuguuuccgaag

SEQ ID NO: 89021 - RNA, 27 nt, Artificial Sequence
  Description of Artificial Sequence: Synthetic oligonucleotide
uuucuuagcauuaguuauugggaguga

SEQ ID NO: 89022 - RNA, 27 nt, Artificial Sequence
  Description of Artificial Sequence: Synthetic oligonucleotide
uugauuuucagcauuucuuagcauuag

SEQ ID NO: 89023 - RNA, 27 nt, Artificial Sequence
  Description of Artificial Sequence: Synthetic oligonucleotide
aaaguaaucauauuuagagaaagacag

SEQ ID NO: 89024 - RNA, 27 nt, Artificial Sequence
  Description of Artificial Sequence: Synthetic oligonucleotide
uguagaacaaaaugccugaaauucagc

SEQ ID NO: 89025 - RNA, 27 nt, Artificial Sequence
  Description of Artificial Sequence: Synthetic oligonucleotide
gagagucccgggugagagggaaucgcc

SEQ ID NO: 89026 - RNA, 27 nt, Artificial Sequence
  Description of Artificial Sequence: Synthetic oligonucleotide
cuuuacuuuaaagguucacuuuccuug

SEQ ID NO: 89027 - RNA, 27 nt, Artificial Sequence
  Description of Artificial Sequence: Synthetic oligonucleotide
ccaggcuuccagagcaugcagccuccu

SEQ ID NO: 89028 - RNA, 27 nt, Artificial Sequence
  Description of Artificial Sequence: Synthetic oligonucleotide
cucucuuuuguuuucuguucagagaaa

SEQ ID NO: 89029 - RNA, 27 nt, Artificial Sequence
  Description of Artificial Sequence: Synthetic oligonucleotide
cggcauaacugauuacagccaaguuca

SEQ ID NO: 89030 - RNA, 27 nt, Artificial Sequence
  Description of Artificial Sequence: Synthetic oligonucleotide
uggacuucuuuuaauuuuggcuucuuc

SEQ ID NO: 89031 - RNA, 27 nt, Artificial Sequence
  Description of Artificial Sequence: Synthetic oligonucleotide
uaaccucaccuggacuucuuuuaauuu

SEQ ID NO: 89032 - RNA, 27 nt, Artificial Sequence
  Description of Artificial Sequence: Synthetic oligonucleotide
guccucuucccgauaauccggauucag

SEQ ID NO: 89033 - RNA, 27 nt, Artificial Sequence
  Description of Artificial Sequence: Synthetic oligonucleotide
acaauacuugcuuugaugucacauuaa

SEQ ID NO: 89034 - RNA, 27 nt, Artificial Sequence
  Description of Artificial Sequence: Synthetic oligonucleotide
gagugcuacaauacuugcuuugauguc

SEQ ID NO: 89035 - RNA, 27 nt, Artificial Sequence
  Description of Artificial Sequence: Synthetic oligonucleotide
auuugugguuuuguuuucucucucucu

SEQ ID NO: 89036 - RNA, 27 nt, Artificial Sequence
  Description of Artificial Sequence: Synthetic oligonucleotide
uguaugggcuuaaauacuacagcgagg

SEQ ID NO: 89037 - RNA, 27 nt, Artificial Sequence
  Description of Artificial Sequence: Synthetic oligonucleotide
cuguaugggcuuaaauacuacagcgag

SEQ ID NO: 89038 - RNA, 27 nt, Artificial Sequence
  Description of Artificial Sequence: Synthetic oligonucleotide
ggaagguuucuguaugggcuuaaauac

SEQ ID NO: 89039 - RNA, 27 nt, Artificial Sequence
  Description of Artificial Sequence: Synthetic oligonucleotide
guagguauaccauguuuauuuuaauac

SEQ ID NO: 89040 - RNA, 27 nt, Artificial Sequence
  Description of Artificial Sequence: Synthetic oligonucleotide
uccgaaaacuggccgaucagaacagcc

SEQ ID NO: 89041 - RNA, 27 nt, Artificial Sequence
  Description of Artificial Sequence: Synthetic oligonucleotide
cccuguuccaaaguucaaauuauuugu

SEQ ID NO: 89042 - RNA, 27 nt, Artificial Sequence
  Description of Artificial Sequence: Synthetic oligonucleotide
acuggaaaguuaaauuaaggucgcaau

SEQ ID NO: 89043 - RNA, 27 nt, Artificial Sequence
  Description of Artificial Sequence: Synthetic oligonucleotide
caaaaccaaacuuuagcuuucucagcc

SEQ ID NO: 89044 - RNA, 27 nt, Artificial Sequence
  Description of Artificial Sequence: Synthetic oligonucleotide
uacagugggaaguagcaucuuuacuuu

SEQ ID NO: 89045 - RNA, 27 nt, Artificial Sequence
  Description of Artificial Sequence: Synthetic oligonucleotide
ucauaugguaucagcaauuaagcagua

SEQ ID NO: 89046 - RNA, 27 nt, Artificial Sequence
  Description of Artificial Sequence: Synthetic oligonucleotide
cagcccauguuucauucauaugguauc

SEQ ID NO: 89047 - RNA, 27 nt, Artificial Sequence
  Description of Artificial Sequence: Synthetic oligonucleotide
uaugaaaaaguuggauaagaaaguugg

SEQ ID NO: 89048 - RNA, 27 nt, Artificial Sequence
  Description of Artificial Sequence: Synthetic oligonucleotide
uccggccucaugaugucaugcaaggcu

SEQ ID NO: 89049 - RNA, 27 nt, Artificial Sequence
  Description of Artificial Sequence: Synthetic oligonucleotide
acaaaugcagucauauacaaauucagg

SEQ ID NO: 89050 - RNA, 27 nt, Artificial Sequence
  Description of Artificial Sequence: Synthetic oligonucleotide
gguaguaaacauucuacuaggauucuu

SEQ ID NO: 89051 - RNA, 27 nt, Artificial Sequence
  Description of Artificial Sequence: Synthetic oligonucleotide
uuucaucaaaaaauucuucccuuucug

SEQ ID NO: 89052 - RNA, 27 nt, Artificial Sequence
  Description of Artificial Sequence: Synthetic oligonucleotide
aaauucacacacuggcaugccgauagc

SEQ ID NO: 89053 - RNA, 27 nt, Artificial Sequence
  Description of Artificial Sequence: Synthetic oligonucleotide
acauacauugcucuacuaugaggugaa

SEQ ID NO: 89054 - RNA, 27 nt, Artificial Sequence
  Description of Artificial Sequence: Synthetic oligonucleotide
uauauaugugcuuuggcaauucuggug

SEQ ID NO: 89055 - RNA, 27 nt, Artificial Sequence
  Description of Artificial Sequence: Synthetic oligonucleotide
ggagaaacuauuacccagaucaccacu

SEQ ID NO: 89056 - RNA, 27 nt, Artificial Sequence
  Description of Artificial Sequence: Synthetic oligonucleotide
auuuggagaaacuauuacccagaucac

SEQ ID NO: 89057 - RNA, 27 nt, Artificial Sequence
  Description of Artificial Sequence: Synthetic oligonucleotide
uuucuaggaaguauucaucacauccac

SEQ ID NO: 89058 - RNA, 27 nt, Artificial Sequence
  Description of Artificial Sequence: Synthetic oligonucleotide
cauauaugguguagcuguggaaaugcg

SEQ ID NO: 89059 - RNA, 27 nt, Artificial Sequence
  Description of Artificial Sequence: Synthetic oligonucleotide
cuccauucauauaugguguagcugugg

SEQ ID NO: 89060 - RNA, 27 nt, Artificial Sequence
  Description of Artificial Sequence: Synthetic oligonucleotide
aucuucuucucguguaagaacugcagc

SEQ ID NO: 89061 - RNA, 27 nt, Artificial Sequence
  Description of Artificial Sequence: Synthetic oligonucleotide
ucccuguaaaugaucuucuucucgugu

SEQ ID NO: 89062 - RNA, 27 nt, Artificial Sequence
  Description of Artificial Sequence: Synthetic oligonucleotide
gucccuguaaaugaucuucuucucgug

SEQ ID NO: 89063 - RNA, 27 nt, Artificial Sequence
  Description of Artificial Sequence: Synthetic oligonucleotide
ucaggucccuguaaaugaucuucuucu

SEQ ID NO: 89064 - RNA, 27 nt, Artificial Sequence
  Description of Artificial Sequence: Synthetic oligonucleotide
gaugcagucaaacaccucuuccucugu

SEQ ID NO: 89065 - RNA, 27 nt, Artificial Sequence
  Description of Artificial Sequence: Synthetic oligonucleotide
cgaugcagucaaacaccucuuccucug

SEQ ID NO: 89066 - RNA, 27 nt, Artificial Sequence
  Description of Artificial Sequence: Synthetic oligonucleotide
cccugugaacucgcccucaaaguagcg

SEQ ID NO: 89067 - RNA, 27 nt, Artificial Sequence
  Description of Artificial Sequence: Synthetic oligonucleotide
ggacagaggugccaggagaugcccuca

SEQ ID NO: 89068 - RNA, 27 nt, Artificial Sequence
  Description of Artificial Sequence: Synthetic oligonucleotide
uuaaaaagacaaaccauaucacuccuu

SEQ ID NO: 89069 - RNA, 27 nt, Artificial Sequence
  Description of Artificial Sequence: Synthetic oligonucleotide
cuuaaaaagacaaaccauaucacuccu

SEQ ID NO: 89070 - RNA, 27 nt, Artificial Sequence
  Description of Artificial Sequence: Synthetic oligonucleotide
gacaaccuuuaggaucuuuacugcaac

SEQ ID NO: 89071 - RNA, 27 nt, Artificial Sequence
  Description of Artificial Sequence: Synthetic oligonucleotide
gucgacaaccuuuaggaucuuuacugc

SEQ ID NO: 89072 - RNA, 27 nt, Artificial Sequence
  Description of Artificial Sequence: Synthetic oligonucleotide
acaauugccagguuguccuuugucaug

SEQ ID NO: 89073 - RNA, 27 nt, Artificial Sequence
  Description of Artificial Sequence: Synthetic oligonucleotide
ccucgcaccacugggucacaauugcca

SEQ ID NO: 89074 - RNA, 27 nt, Artificial Sequence
  Description of Artificial Sequence: Synthetic oligonucleotide
auuucaugucucuauggaugauguucu

SEQ ID NO: 89075 - RNA, 27 nt, Artificial Sequence
  Description of Artificial Sequence: Synthetic oligonucleotide
uggagaaauauauuguuggauuucaug

SEQ ID NO: 89076 - RNA, 27 nt, Artificial Sequence
  Description of Artificial Sequence: Synthetic oligonucleotide
agccuucauggagaaauauauuguugg

SEQ ID NO: 89077 - RNA, 27 nt, Artificial Sequence
  Description of Artificial Sequence: Synthetic oligonucleotide
accacuccagcgugacuuuacuguugc

SEQ ID NO: 89078 - RNA, 27 nt, Artificial Sequence
  Description of Artificial Sequence: Synthetic oligonucleotide
ccucucuuccuuuacuuucuucacaca

SEQ ID NO: 89079 - RNA, 27 nt, Artificial Sequence
  Description of Artificial Sequence: Synthetic oligonucleotide
gcccgaugcaaggauggcucggaagcg

SEQ ID NO: 89080 - RNA, 27 nt, Artificial Sequence
  Description of Artificial Sequence: Synthetic oligonucleotide
cacaguaggauauucaaccuccauuuc

SEQ ID NO: 89081 - RNA, 27 nt, Artificial Sequence
  Description of Artificial Sequence: Synthetic oligonucleotide
uuacacaguaggauauucaaccuccau

SEQ ID NO: 89082 - RNA, 27 nt, Artificial Sequence
  Description of Artificial Sequence: Synthetic oligonucleotide
uacacuacaagggaaaacucaaaaucu

SEQ ID NO: 89083 - RNA, 27 nt, Artificial Sequence
  Description of Artificial Sequence: Synthetic oligonucleotide
caaucaacaaagaacaaacaggauaaa

SEQ ID NO: 89084 - RNA, 27 nt, Artificial Sequence
  Description of Artificial Sequence: Synthetic oligonucleotide
uuucaaucaacaaagaacaaacaggau

SEQ ID NO: 89085 - RNA, 27 nt, Artificial Sequence
  Description of Artificial Sequence: Synthetic oligonucleotide
auggaagaaaaagaaggcuguagagaa

SEQ ID NO: 89086 - RNA, 27 nt, Artificial Sequence
  Description of Artificial Sequence: Synthetic oligonucleotide
uagaaggaagauuagcuauggaagaaa

SEQ ID NO: 89087 - RNA, 27 nt, Artificial Sequence
  Description of Artificial Sequence: Synthetic oligonucleotide
augaagcauucaacaggaagauuauuu

SEQ ID NO: 89088 - RNA, 27 nt, Artificial Sequence
  Description of Artificial Sequence: Synthetic oligonucleotide
caugaagcauucaacaggaagauuauu

SEQ ID NO: 89089 - RNA, 27 nt, Artificial Sequence
  Description of Artificial Sequence: Synthetic oligonucleotide
ucaaaguagaauucaagucaugaagca

SEQ ID NO: 89090 - RNA, 27 nt, Artificial Sequence
  Description of Artificial Sequence: Synthetic oligonucleotide
gucuguaguugcuucucucccucuuag

SEQ ID NO: 89091 - RNA, 27 nt, Artificial Sequence
  Description of Artificial Sequence: Synthetic oligonucleotide
guugaccuuggucugguaggagacggc

SEQ ID NO: 89092 - RNA, 27 nt, Artificial Sequence
  Description of Artificial Sequence: Synthetic oligonucleotide
gucgagauagucgggccgauugaucuc

SEQ ID NO: 89093 - RNA, 27 nt, Artificial Sequence
  Description of Artificial Sequence: Synthetic oligonucleotide
guuugggaagguuggauguucguccuc

SEQ ID NO: 89094 - RNA, 27 nt, Artificial Sequence
  Description of Artificial Sequence: Synthetic oligonucleotide
aguucuaagcuuggguuccgacccuaa

SEQ ID NO: 89095 - RNA, 27 nt, Artificial Sequence
  Description of Artificial Sequence: Synthetic oligonucleotide
uuaaaguucuaagcuuggguuccgacc

SEQ ID NO: 89096 - RNA, 27 nt, Artificial Sequence
  Description of Artificial Sequence: Synthetic oligonucleotide
guugcuuaaaguucuaagcuuggguuc

SEQ ID NO: 89097 - RNA, 27 nt, Artificial Sequence
  Description of Artificial Sequence: Synthetic oligonucleotide
gugguggucuuguugcuuaaaguucua

SEQ ID NO: 89098 - RNA, 27 nt, Artificial Sequence
  Description of Artificial Sequence: Synthetic oligonucleotide
acuuuauuucucgccacugaauaguag

SEQ ID NO: 89099 - RNA, 27 nt, Artificial Sequence
  Description of Artificial Sequence: Synthetic oligonucleotide
aacuuuauuucucgccacugaauagua

SEQ ID NO: 89100 - RNA, 27 nt, Artificial Sequence
  Description of Artificial Sequence: Synthetic oligonucleotide
ggaucauuuccuguuaucuguguuugu

SEQ ID NO: 89101 - RNA, 27 nt, Artificial Sequence
  Description of Artificial Sequence: Synthetic oligonucleotide
guuucauuucuucucuuuucuuaaggc

SEQ ID NO: 89102 - RNA, 27 nt, Artificial Sequence
  Description of Artificial Sequence: Synthetic oligonucleotide
ggaggauggaaacacacuccuucaguu

SEQ ID NO: 89103 - RNA, 27 nt, Artificial Sequence
  Description of Artificial Sequence: Synthetic oligonucleotide
ucaaagauuuucagucccgcggugaca

SEQ ID NO: 89104 - RNA, 27 nt, Artificial Sequence
  Description of Artificial Sequence: Synthetic oligonucleotide
ccugaacggcacgcuuauuucugcugu

SEQ ID NO: 89105 - RNA, 27 nt, Artificial Sequence
  Description of Artificial Sequence: Synthetic oligonucleotide
cuucuggacccugaacggcacgcuuau

SEQ ID NO: 89106 - RNA, 27 nt, Artificial Sequence
  Description of Artificial Sequence: Synthetic oligonucleotide
caagcagucuugagugacuguuucuuc

SEQ ID NO: 89107 - RNA, 27 nt, Artificial Sequence
  Description of Artificial Sequence: Synthetic oligonucleotide
ccaaagacauggaccuucuuccucuga

SEQ ID NO: 89108 - RNA, 27 nt, Artificial Sequence
  Description of Artificial Sequence: Synthetic oligonucleotide
guguuucaggcauauuuugaauacauc

SEQ ID NO: 89109 - RNA, 27 nt, Artificial Sequence
  Description of Artificial Sequence: Synthetic oligonucleotide
gagguacagagaaagggaggaaaauag

SEQ ID NO: 89110 - RNA, 27 nt, Artificial Sequence
  Description of Artificial Sequence: Synthetic oligonucleotide
ucuugucuugcucuaucuuucuuuggu

SEQ ID NO: 89111 - RNA, 27 nt, Artificial Sequence
  Description of Artificial Sequence: Synthetic oligonucleotide
uuucuugucuugcucuaucuuucuuug

SEQ ID NO: 89112 - RNA, 27 nt, Artificial Sequence
  Description of Artificial Sequence: Synthetic oligonucleotide
ggaucuuguacaaacaaaugcuuucuc

SEQ ID NO: 89113 - RNA, 27 nt, Artificial Sequence
  Description of Artificial Sequence: Synthetic oligonucleotide
ucugcaaguacguucguuuaacucaag

SEQ ID NO: 89114 - RNA, 27 nt, Artificial Sequence
  Description of Artificial Sequence: Synthetic oligonucleotide
ucuguaucgaucguucuguaucagucu

SEQ ID NO: 89115 - RNA, 27 nt, Artificial Sequence
  Description of Artificial Sequence: Synthetic oligonucleotide
auuuauuuuuauauauauauaauauau

SEQ ID NO: 89116 - RNA, 27 nt, Artificial Sequence
  Description of Artificial Sequence: Synthetic oligonucleotide
auauuuauuuuuauauauauauaauau

SEQ ID NO: 89117 - RNA, 27 nt, Artificial Sequence
  Description of Artificial Sequence: Synthetic oligonucleotide
cacagcagucaaauacauccagugaag

SEQ ID NO: 89118 - RNA, 27 nt, Artificial Sequence
  Description of Artificial Sequence: Synthetic oligonucleotide
gucucucaucuccuccucuucccuguc

SEQ ID NO: 89119 - RNA, 27 nt, Artificial Sequence
  Description of Artificial Sequence: Synthetic oligonucleotide
ccaagugggacaaaaaaaagaucaugc

SEQ ID NO: 89120 - RNA, 14 nt, Artificial Sequence
  Description of Artificial Sequence: Synthetic oligonucleotide
guauuuugaugagg

SEQ ID NO: 89121 - RNA, 12 nt, Artificial Sequence
  Description of Artificial Sequence: Synthetic oligonucleotide
ggcccagaugau

SEQ ID NO: 89122 - RNA, 14 nt, Artificial Sequence
  Description of Artificial Sequence: Synthetic oligonucleotide
gggaagaaaacuau

SEQ ID NO: 89123 - RNA, 15 nt, Artificial Sequence
  Description of Artificial Sequence: Synthetic oligonucleotide
guuuuaauuuauuuc

SEQ ID NO: 89124 - RNA, 12 nt, Artificial Sequence
  Description of Artificial Sequence: Synthetic oligonucleotide
acguagggaaau

SEQ ID NO: 89125 - RNA, 12 nt, Artificial Sequence
  Description of Artificial Sequence: Synthetic oligonucleotide
ccaggguuuacc

SEQ ID NO: 89126 - RNA, 11 nt, Artificial Sequence
  Description of Artificial Sequence: Synthetic oligonucleotide
agcaagguuua

SEQ ID NO: 89127 - RNA, 12 nt, Artificial Sequence
  Description of Artificial Sequence: Synthetic oligonucleotide
uguauuauguug

SEQ ID NO: 89128 - RNA, 15 nt, Artificial Sequence
  Description of Artificial Sequence: Synthetic oligonucleotide
uuuuaaucuuuguga

SEQ ID NO: 89129 - RNA, 14 nt, Artificial Sequence
  Description of Artificial Sequence: Synthetic oligonucleotide
uuaaucuuugugac

SEQ ID NO: 89130 - RNA, 13 nt, Artificial Sequence
  Description of Artificial Sequence: Synthetic oligonucleotide
gcugcuuaugucu

SEQ ID NO: 89131 - RNA, 14 nt, Artificial Sequence
  Description of Artificial Sequence: Synthetic oligonucleotide
aaguguuucagaag

SEQ ID NO: 89132 - RNA, 13 nt, Artificial Sequence
  Description of Artificial Sequence: Synthetic oligonucleotide
gaccaucaauaag

SEQ ID NO: 89133 - RNA, 13 nt, Artificial Sequence
  Description of Artificial Sequence: Synthetic oligonucleotide
ccaucaauaagga

SEQ ID NO: 89134 - RNA, 14 nt, Artificial Sequence
  Description of Artificial Sequence: Synthetic oligonucleotide
ucaauaaggaagaa

SEQ ID NO: 89135 - RNA, 14 nt, Artificial Sequence
  Description of Artificial Sequence: Synthetic oligonucleotide
aauaaggaagaagc

SEQ ID NO: 89136 - RNA, 13 nt, Artificial Sequence
  Description of Artificial Sequence: Synthetic oligonucleotide
aggaagaagcccu

SEQ ID NO: 89137 - RNA, 13 nt, Artificial Sequence
  Description of Artificial Sequence: Synthetic oligonucleotide
gcauaacuaaagg

SEQ ID NO: 89138 - RNA, 14 nt, Artificial Sequence
  Description of Artificial Sequence: Synthetic oligonucleotide
cauaacuaaaggug

SEQ ID NO: 89139 - RNA, 12 nt, Artificial Sequence
  Description of Artificial Sequence: Synthetic oligonucleotide
cuacaucacgcc

SEQ ID NO: 89140 - RNA, 12 nt, Artificial Sequence
  Description of Artificial Sequence: Synthetic oligonucleotide
acuggauuuaag

SEQ ID NO: 89141 - RNA, 12 nt, Artificial Sequence
  Description of Artificial Sequence: Synthetic oligonucleotide
cuggauuuaagc

SEQ ID NO: 89142 - RNA, 13 nt, Artificial Sequence
  Description of Artificial Sequence: Synthetic oligonucleotide
gauuuaagcagag

SEQ ID NO: 89143 - RNA, 13 nt, Artificial Sequence
  Description of Artificial Sequence: Synthetic oligonucleotide
auuuaagcagagu

SEQ ID NO: 89144 - RNA, 13 nt, Artificial Sequence
  Description of Artificial Sequence: Synthetic oligonucleotide
uuaagcagaguuc

SEQ ID NO: 89145 - RNA, 13 nt, Artificial Sequence
  Description of Artificial Sequence: Synthetic oligonucleotide
uaagcagaguuca

SEQ ID NO: 89146 - RNA, 14 nt, Artificial Sequence
  Description of Artificial Sequence: Synthetic oligonucleotide
agcagaguucaaaa

SEQ ID NO: 89147 - RNA, 12 nt, Artificial Sequence
  Description of Artificial Sequence: Synthetic oligonucleotide
cucagggucuga

SEQ ID NO: 89148 - RNA, 13 nt, Artificial Sequence
  Description of Artificial Sequence: Synthetic oligonucleotide
caagcaacuacau

SEQ ID NO: 89149 - RNA, 12 nt, Artificial Sequence
  Description of Artificial Sequence: Synthetic oligonucleotide
aucaauggcagc

SEQ ID NO: 89150 - RNA, 11 nt, Artificial Sequence
  Description of Artificial Sequence: Synthetic oligonucleotide
uuccagcccac

SEQ ID NO: 89151 - RNA, 12 nt, Artificial Sequence
  Description of Artificial Sequence: Synthetic oligonucleotide
cagcugagaaug

SEQ ID NO: 89152 - RNA, 13 nt, Artificial Sequence
  Description of Artificial Sequence: Synthetic oligonucleotide
aacguaucuccua

SEQ ID NO: 89153 - RNA, 14 nt, Artificial Sequence
  Description of Artificial Sequence: Synthetic oligonucleotide
ccuaaaauaauuuc

SEQ ID NO: 89154 - RNA, 13 nt, Artificial Sequence
  Description of Artificial Sequence: Synthetic oligonucleotide
uggaagauucagc

SEQ ID NO: 89155 - RNA, 12 nt, Artificial Sequence
  Description of Artificial Sequence: Synthetic oligonucleotide
uuaaacucuccu

SEQ ID NO: 89156 - RNA, 12 nt, Artificial Sequence
  Description of Artificial Sequence: Synthetic oligonucleotide
cagccuacaguu

SEQ ID NO: 89157 - RNA, 13 nt, Artificial Sequence
  Description of Artificial Sequence: Synthetic oligonucleotide
guuauguucaguc

SEQ ID NO: 89158 - RNA, 13 nt, Artificial Sequence
  Description of Artificial Sequence: Synthetic oligonucleotide
cacauacaaaaug

SEQ ID NO: 89159 - RNA, 9 nt, Artificial Sequence
  Description of Artificial Sequence: Synthetic oligonucleotide
uccuuuugc

SEQ ID NO: 89160 - RNA, 12 nt, Artificial Sequence
  Description of Artificial Sequence: Synthetic oligonucleotide
ugaccugugaag

SEQ ID NO: 89161 - RNA, 12 nt, Artificial Sequence
  Description of Artificial Sequence: Synthetic oligonucleotide
cuaucucacaca

SEQ ID NO: 89162 - RNA, 13 nt, Artificial Sequence
  Description of Artificial Sequence: Synthetic oligonucleotide
uguccucaauugu

SEQ ID NO: 89163 - RNA, 12 nt, Artificial Sequence
  Description of Artificial Sequence: Synthetic oligonucleotide
aaaccguagcug

SEQ ID NO: 89164 - RNA, 12 nt, Artificial Sequence
  Description of Artificial Sequence: Synthetic oligonucleotide
uagcuggcaagc

SEQ ID NO: 89165 - RNA, 14 nt, Artificial Sequence
  Description of Artificial Sequence: Synthetic oligonucleotide
uuguaugguuaaaa

SEQ ID NO: 89166 - RNA, 14 nt, Artificial Sequence
  Description of Artificial Sequence: Synthetic oligonucleotide
ugguuaaaagaugg

SEQ ID NO: 89167 - RNA, 13 nt, Artificial Sequence
  Description of Artificial Sequence: Synthetic oligonucleotide
cagggaauuauac

SEQ ID NO: 89168 - RNA, 12 nt, Artificial Sequence
  Description of Artificial Sequence: Synthetic oligonucleotide
acaaucuugcug

SEQ ID NO: 89169 - RNA, 13 nt, Artificial Sequence
  Description of Artificial Sequence: Synthetic oligonucleotide
ccaauaaugaaga

SEQ ID NO: 89170 - RNA, 13 nt, Artificial Sequence
  Description of Artificial Sequence: Synthetic oligonucleotide
acuuuggauguuc

SEQ ID NO: 89171 - RNA, 12 nt, Artificial Sequence
  Description of Artificial Sequence: Synthetic oligonucleotide
aaugcuuccacu

SEQ ID NO: 89172 - RNA, 11 nt, Artificial Sequence
  Description of Artificial Sequence: Synthetic oligonucleotide
gagaaaguuug

SEQ ID NO: 89173 - RNA, 11 nt, Artificial Sequence
  Description of Artificial Sequence: Synthetic oligonucleotide
aaagaacuacu

SEQ ID NO: 89174 - RNA, 12 nt, Artificial Sequence
  Description of Artificial Sequence: Synthetic oligonucleotide
uuagaaauacgg

SEQ ID NO: 89175 - RNA, 12 nt, Artificial Sequence
  Description of Artificial Sequence: Synthetic oligonucleotide
aacauggguaca

SEQ ID NO: 89176 - RNA, 14 nt, Artificial Sequence
  Description of Artificial Sequence: Synthetic oligonucleotide
aaagacacagaaga

SEQ ID NO: 89177 - RNA, 11 nt, Artificial Sequence
  Description of Artificial Sequence: Synthetic oligonucleotide
uaguagggagg

SEQ ID NO: 89178 - RNA, 12 nt, Artificial Sequence
  Description of Artificial Sequence: Synthetic oligonucleotide
gccuucugcagc

SEQ ID NO: 89179 - RNA, 10 nt, Artificial Sequence
  Description of Artificial Sequence: Synthetic oligonucleotide
ggucugguac

SEQ ID NO: 89180 - RNA, 12 nt, Artificial Sequence
  Description of Artificial Sequence: Synthetic oligonucleotide
cuaguccuuccg

SEQ ID NO: 89181 - RNA, 12 nt, Artificial Sequence
  Description of Artificial Sequence: Synthetic oligonucleotide
ccagugaauauu

SEQ ID NO: 89182 - RNA, 13 nt, Artificial Sequence
  Description of Artificial Sequence: Synthetic oligonucleotide
augaauucaaguu

SEQ ID NO: 89183 - RNA, 12 nt, Artificial Sequence
  Description of Artificial Sequence: Synthetic oligonucleotide
caggacacagau

SEQ ID NO: 89184 - RNA, 12 nt, Artificial Sequence
  Description of Artificial Sequence: Synthetic oligonucleotide
cucaaagcacag

SEQ ID NO: 89185 - RNA, 10 nt, Artificial Sequence
  Description of Artificial Sequence: Synthetic oligonucleotide
accacugcca

SEQ ID NO: 89186 - RNA, 13 nt, Artificial Sequence
  Description of Artificial Sequence: Synthetic oligonucleotide
gaaacuacuagug

SEQ ID NO: 89187 - RNA, 12 nt, Artificial Sequence
  Description of Artificial Sequence: Synthetic oligonucleotide
aagucggacagc

SEQ ID NO: 89188 - RNA, 13 nt, Artificial Sequence
  Description of Artificial Sequence: Synthetic oligonucleotide
gaaagcgaaaaau

SEQ ID NO: 89189 - RNA, 13 nt, Artificial Sequence
  Description of Artificial Sequence: Synthetic oligonucleotide
cccucugauuuag

SEQ ID NO: 89190 - RNA, 12 nt, Artificial Sequence
  Description of Artificial Sequence: Synthetic oligonucleotide
ugagcuauuuaa

SEQ ID NO: 89191 - RNA, 13 nt, Artificial Sequence
  Description of Artificial Sequence: Synthetic oligonucleotide
aaaaggugaaaaa

SEQ ID NO: 89192 - RNA, 14 nt, Artificial Sequence
  Description of Artificial Sequence: Synthetic oligonucleotide
gaaaaagcacuauu

SEQ ID NO: 89193 - RNA, 12 nt, Artificial Sequence
  Description of Artificial Sequence: Synthetic oligonucleotide
ggcugaaaagaa

SEQ ID NO: 89194 - RNA, 12 nt, Artificial Sequence
  Description of Artificial Sequence: Synthetic oligonucleotide
uaaacccuuaua

SEQ ID NO: 89195 - RNA, 13 nt, Artificial Sequence
  Description of Artificial Sequence: Synthetic oligonucleotide
cauacuauuagcc

SEQ ID NO: 89196 - RNA, 12 nt, Artificial Sequence
  Description of Artificial Sequence: Synthetic oligonucleotide
gacagaagcauu

SEQ ID NO: 89197 - RNA, 14 nt, Artificial Sequence
  Description of Artificial Sequence: Synthetic oligonucleotide
agagcaaauaagau

SEQ ID NO: 89198 - RNA, 14 nt, Artificial Sequence
  Description of Artificial Sequence: Synthetic oligonucleotide
ccaacauuuuucuc

SEQ ID NO: 89199 - RNA, 15 nt, Artificial Sequence
  Description of Artificial Sequence: Synthetic oligonucleotide
uuaaguaugagaaaa

SEQ ID NO: 89200 - RNA, 14 nt, Artificial Sequence
  Description of Artificial Sequence: Synthetic oligonucleotide
caggaauaaagaug

SEQ ID NO: 89201 - RNA, 13 nt, Artificial Sequence
  Description of Artificial Sequence: Synthetic oligonucleotide
aauuugaaugacc

SEQ ID NO: 89202 - RNA, 14 nt, Artificial Sequence
  Description of Artificial Sequence: Synthetic oligonucleotide
auguauaaagauag

SEQ ID NO: 89203 - RNA, 12 nt, Artificial Sequence
  Description of Artificial Sequence: Synthetic oligonucleotide
ggcuguaacuau

SEQ ID NO: 89204 - RNA, 11 nt, Artificial Sequence
  Description of Artificial Sequence: Synthetic oligonucleotide
ucugugaagug

SEQ ID NO: 89205 - RNA, 14 nt, Artificial Sequence
  Description of Artificial Sequence: Synthetic oligonucleotide
ccuuuaaggaaaug

SEQ ID NO: 89206 - RNA, 13 nt, Artificial Sequence
  Description of Artificial Sequence: Synthetic oligonucleotide
aaggauacaaaaa

SEQ ID NO: 89207 - RNA, 12 nt, Artificial Sequence
  Description of Artificial Sequence: Synthetic oligonucleotide
agaugcaauuug

SEQ ID NO: 89208 - RNA, 12 nt, Artificial Sequence
  Description of Artificial Sequence: Synthetic oligonucleotide
guucaaaacgaa

SEQ ID NO: 89209 - RNA, 11 nt, Artificial Sequence
  Description of Artificial Sequence: Synthetic oligonucleotide
gugaaaccuca

SEQ ID NO: 89210 - RNA, 13 nt, Artificial Sequence
  Description of Artificial Sequence: Synthetic oligonucleotide
acgaaagagaagc

SEQ ID NO: 89211 - RNA, 12 nt, Artificial Sequence
  Description of Artificial Sequence: Synthetic oligonucleotide
cuccacaagcgc

SEQ ID NO: 89212 - RNA, 14 nt, Artificial Sequence
  Description of Artificial Sequence: Synthetic oligonucleotide
gagaagauuccaaa

SEQ ID NO: 89213 - RNA, 13 nt, Artificial Sequence
  Description of Artificial Sequence: Synthetic oligonucleotide
aaucuggauucaa

SEQ ID NO: 89214 - RNA, 13 nt, Artificial Sequence
  Description of Artificial Sequence: Synthetic oligonucleotide
agaacagauuuga

SEQ ID NO: 89215 - RNA, 11 nt, Artificial Sequence
  Description of Artificial Sequence: Synthetic oligonucleotide
ccagagcugug

SEQ ID NO: 89216 - RNA, 12 nt, Artificial Sequence
  Description of Artificial Sequence: Synthetic oligonucleotide
ccucagauuguu

SEQ ID NO: 89217 - RNA, 12 nt, Artificial Sequence
  Description of Artificial Sequence: Synthetic oligonucleotide
cuauuuuaauua

SEQ ID NO: 89218 - RNA, 13 nt, Artificial Sequence
  Description of Artificial Sequence: Synthetic oligonucleotide
uuuaauuuauuaa

SEQ ID NO: 89219 - RNA, 12 nt, Artificial Sequence
  Description of Artificial Sequence: Synthetic oligonucleotide
augcaguuugaa

SEQ ID NO: 89220 - RNA, 11 nt, Artificial Sequence
  Description of Artificial Sequence: Synthetic oligonucleotide
caugcugcugg

SEQ ID NO: 89221 - RNA, 13 nt, Artificial Sequence
  Description of Artificial Sequence: Synthetic oligonucleotide
agaugugcauuuc

SEQ ID NO: 89222 - RNA, 12 nt, Artificial Sequence
  Description of Artificial Sequence: Synthetic oligonucleotide
ucaaaaccugug

SEQ ID NO: 89223 - RNA, 11 nt, Artificial Sequence
  Description of Artificial Sequence: Synthetic oligonucleotide
gaaugugggua

SEQ ID NO: 89224 - RNA, 10 nt, Artificial Sequence
  Description of Artificial Sequence: Synthetic oligonucleotide
auguggguag

SEQ ID NO: 89225 - RNA, 13 nt, Artificial Sequence
  Description of Artificial Sequence: Synthetic oligonucleotide
ugaaaaugagcau

SEQ ID NO: 89226 - RNA, 13 nt, Artificial Sequence
  Description of Artificial Sequence: Synthetic oligonucleotide
uugcuuuucaugu

SEQ ID NO: 89227 - RNA, 12 nt, Artificial Sequence
  Description of Artificial Sequence: Synthetic oligonucleotide
uguauuucuaua

SEQ ID NO: 89228 - RNA, 13 nt, Artificial Sequence
  Description of Artificial Sequence: Synthetic oligonucleotide
uuugauuaauguu

SEQ ID NO: 89229 - RNA, 12 nt, Artificial Sequence
  Description of Artificial Sequence: Synthetic oligonucleotide
caacguguauag

SEQ ID NO: 89230 - RNA, 12 nt, Artificial Sequence
  Description of Artificial Sequence: Synthetic oligonucleotide
cauauccuuggc

SEQ ID NO: 89231 - RNA, 13 nt, Artificial Sequence
  Description of Artificial Sequence: Synthetic oligonucleotide
uacuaacaucugg

SEQ ID NO: 89232 - RNA, 11 nt, Artificial Sequence
  Description of Artificial Sequence: Synthetic oligonucleotide
cauaaguugug

SEQ ID NO: 89233 - RNA, 12 nt, Artificial Sequence
  Description of Artificial Sequence: Synthetic oligonucleotide
gcaucauuuugg

SEQ ID NO: 89234 - RNA, 10 nt, Artificial Sequence
  Description of Artificial Sequence: Synthetic oligonucleotide
gcucuucuua

SEQ ID NO: 89235 - RNA, 10 nt, Artificial Sequence
  Description of Artificial Sequence: Synthetic oligonucleotide
agauuagguc

SEQ ID NO: 89236 - RNA, 12 nt, Artificial Sequence
  Description of Artificial Sequence: Synthetic oligonucleotide
auggaauugaaa

SEQ ID NO: 89237 - RNA, 13 nt, Artificial Sequence
  Description of Artificial Sequence: Synthetic oligonucleotide
cacacucauuccu

SEQ ID NO: 89238 - RNA, 12 nt, Artificial Sequence
  Description of Artificial Sequence: Synthetic oligonucleotide
uguagagguaac

SEQ ID NO: 89239 - RNA, 11 nt, Artificial Sequence
  Description of Artificial Sequence: Synthetic oligonucleotide
caaccacaugc

SEQ ID NO: 89240 - RNA, 12 nt, Artificial Sequence
  Description of Artificial Sequence: Synthetic oligonucleotide
ucggaaacaagu

SEQ ID NO: 89241 - RNA, 11 nt, Artificial Sequence
  Description of Artificial Sequence: Synthetic oligonucleotide
acucccaauaa

SEQ ID NO: 89242 - RNA, 13 nt, Artificial Sequence
  Description of Artificial Sequence: Synthetic oligonucleotide
aaugcuaagaaau

SEQ ID NO: 89243 - RNA, 11 nt, Artificial Sequence
  Description of Artificial Sequence: Synthetic oligonucleotide
gucuuucucua

SEQ ID NO: 89244 - RNA, 11 nt, Artificial Sequence
  Description of Artificial Sequence: Synthetic oligonucleotide
ugaauuucagg

SEQ ID NO: 89245 - RNA, 13 nt, Artificial Sequence
  Description of Artificial Sequence: Synthetic oligonucleotide
cgauucccucuca

SEQ ID NO: 89246 - RNA, 11 nt, Artificial Sequence
  Description of Artificial Sequence: Synthetic oligonucleotide
aggaaagugaa

SEQ ID NO: 89247 - RNA, 12 nt, Artificial Sequence
  Description of Artificial Sequence: Synthetic oligonucleotide
gaggcugcaugc

SEQ ID NO: 89248 - RNA, 11 nt, Artificial Sequence
  Description of Artificial Sequence: Synthetic oligonucleotide
ucucugaacag

SEQ ID NO: 89249 - RNA, 12 nt, Artificial Sequence
  Description of Artificial Sequence: Synthetic oligonucleotide
aacuuggcugua

SEQ ID NO: 89250 - RNA, 12 nt, Artificial Sequence
  Description of Artificial Sequence: Synthetic oligonucleotide
agaagccaaaau

SEQ ID NO: 89251 - RNA, 14 nt, Artificial Sequence
  Description of Artificial Sequence: Synthetic oligonucleotide
auuaaaagaagucc

SEQ ID NO: 89252 - RNA, 14 nt, Artificial Sequence
  Description of Artificial Sequence: Synthetic oligonucleotide
gaauccggauuauc

SEQ ID NO: 89253 - RNA, 12 nt, Artificial Sequence
  Description of Artificial Sequence: Synthetic oligonucleotide
aaugugacauca

SEQ ID NO: 89254 - RNA, 13 nt, Artificial Sequence
  Description of Artificial Sequence: Synthetic oligonucleotide
caucaaagcaagu

SEQ ID NO: 89255 - RNA, 11 nt, Artificial Sequence
  Description of Artificial Sequence: Synthetic oligonucleotide
agagagagaaa

SEQ ID NO: 89256 - RNA, 13 nt, Artificial Sequence
  Description of Artificial Sequence: Synthetic oligonucleotide
ucgcuguaguauu

SEQ ID NO: 89257 - RNA, 14 nt, Artificial Sequence
  Description of Artificial Sequence: Synthetic oligonucleotide
cgcuguaguauuua

SEQ ID NO: 89258 - RNA, 13 nt, Artificial Sequence
  Description of Artificial Sequence: Synthetic oligonucleotide
auuuaagcccaua

SEQ ID NO: 89259 - RNA, 15 nt, Artificial Sequence
  Description of Artificial Sequence: Synthetic oligonucleotide
auuaaaauaaacaug

SEQ ID NO: 89260 - RNA, 12 nt, Artificial Sequence
  Description of Artificial Sequence: Synthetic oligonucleotide
cuguucugaucg

SEQ ID NO: 89261 - RNA, 16 nt, Artificial Sequence
  Description of Artificial Sequence: Synthetic oligonucleotide
aaauaauuugaacuuu

SEQ ID NO: 89262 - RNA, 12 nt, Artificial Sequence
  Description of Artificial Sequence: Synthetic oligonucleotide
ugcgaccuuaau

SEQ ID NO: 89263 - RNA, 11 nt, Artificial Sequence
  Description of Artificial Sequence: Synthetic oligonucleotide
cugagaaagcu

SEQ ID NO: 89264 - RNA, 13 nt, Artificial Sequence
  Description of Artificial Sequence: Synthetic oligonucleotide
aguaaagaugcua

SEQ ID NO: 89265 - RNA, 12 nt, Artificial Sequence
  Description of Artificial Sequence: Synthetic oligonucleotide
cugcuuaauugc

SEQ ID NO: 89266 - RNA, 14 nt, Artificial Sequence
  Description of Artificial Sequence: Synthetic oligonucleotide
uaccauaugaauga

SEQ ID NO: 89267 - RNA, 12 nt, Artificial Sequence
  Description of Artificial Sequence: Synthetic oligonucleotide
aacuuucuuauc

SEQ ID NO: 89268 - RNA, 13 nt, Artificial Sequence
  Description of Artificial Sequence: Synthetic oligonucleotide
ccuugcaugacau

SEQ ID NO: 89269 - RNA, 14 nt, Artificial Sequence
  Description of Artificial Sequence: Synthetic oligonucleotide
ugaauuuguauaug

SEQ ID NO: 89270 - RNA, 12 nt, Artificial Sequence
  Description of Artificial Sequence: Synthetic oligonucleotide
gaauccuaguag

SEQ ID NO: 89271 - RNA, 10 nt, Artificial Sequence
  Description of Artificial Sequence: Synthetic oligonucleotide
gaaagggaag

SEQ ID NO: 89272 - RNA, 11 nt, Artificial Sequence
  Description of Artificial Sequence: Synthetic oligonucleotide
uaucggcaugc

SEQ ID NO: 89273 - RNA, 12 nt, Artificial Sequence
  Description of Artificial Sequence: Synthetic oligonucleotide
caccucauagua

SEQ ID NO: 89274 - RNA, 11 nt, Artificial Sequence
  Description of Artificial Sequence: Synthetic oligonucleotide
ccagaauugcc

SEQ ID NO: 89275 - RNA, 11 nt, Artificial Sequence
  Description of Artificial Sequence: Synthetic oligonucleotide
uggugaucugg

SEQ ID NO: 89276 - RNA, 12 nt, Artificial Sequence
  Description of Artificial Sequence: Synthetic oligonucleotide
gaucuggguaau

SEQ ID NO: 89277 - RNA, 12 nt, Artificial Sequence
  Description of Artificial Sequence: Synthetic oligonucleotide
ggaugugaugaa

SEQ ID NO: 89278 - RNA, 12 nt, Artificial Sequence
  Description of Artificial Sequence: Synthetic oligonucleotide
cauuuccacagc

SEQ ID NO: 89279 - RNA, 11 nt, Artificial Sequence
  Description of Artificial Sequence: Synthetic oligonucleotide
acagcuacacc

SEQ ID NO: 89280 - RNA, 12 nt, Artificial Sequence
  Description of Artificial Sequence: Synthetic oligonucleotide
ugcaguucuuac

SEQ ID NO: 89281 - RNA, 12 nt, Artificial Sequence
  Description of Artificial Sequence: Synthetic oligonucleotide
acgagaagaaga

SEQ ID NO: 89282 - RNA, 12 nt, Artificial Sequence
  Description of Artificial Sequence: Synthetic oligonucleotide
cgagaagaagau

SEQ ID NO: 89283 - RNA, 15 nt, Artificial Sequence
  Description of Artificial Sequence: Synthetic oligonucleotide
aagaagaucauuuac

SEQ ID NO: 89284 - RNA, 11 nt, Artificial Sequence
  Description of Artificial Sequence: Synthetic oligonucleotide
agaggaagagg

SEQ ID NO: 89285 - RNA, 12 nt, Artificial Sequence
  Description of Artificial Sequence: Synthetic oligonucleotide
gaggaagaggug

SEQ ID NO: 89286 - RNA, 13 nt, Artificial Sequence
  Description of Artificial Sequence: Synthetic oligonucleotide
cuacuuugagggc

SEQ ID NO: 89287 - RNA, 12 nt, Artificial Sequence
  Description of Artificial Sequence: Synthetic oligonucleotide
agggcaucuccu

SEQ ID NO: 89288 - RNA, 10 nt, Artificial Sequence
  Description of Artificial Sequence: Synthetic oligonucleotide
ggagugauau

SEQ ID NO: 89289 - RNA, 11 nt, Artificial Sequence
  Description of Artificial Sequence: Synthetic oligonucleotide
gagugauaugg

SEQ ID NO: 89290 - RNA, 12 nt, Artificial Sequence
  Description of Artificial Sequence: Synthetic oligonucleotide
ugcaguaaagau

SEQ ID NO: 89291 - RNA, 13 nt, Artificial Sequence
  Description of Artificial Sequence: Synthetic oligonucleotide
aguaaagauccua

SEQ ID NO: 89292 - RNA, 12 nt, Artificial Sequence
  Description of Artificial Sequence: Synthetic oligonucleotide
ugacaaaggaca

SEQ ID NO: 89293 - RNA, 13 nt, Artificial Sequence
  Description of Artificial Sequence: Synthetic oligonucleotide
gcaauugugaccc

SEQ ID NO: 89294 - RNA, 12 nt, Artificial Sequence
  Description of Artificial Sequence: Synthetic oligonucleotide
aacaucauccau

SEQ ID NO: 89295 - RNA, 12 nt, Artificial Sequence
  Description of Artificial Sequence: Synthetic oligonucleotide
ugaaauccaaca

SEQ ID NO: 89296 - RNA, 15 nt, Artificial Sequence
  Description of Artificial Sequence: Synthetic oligonucleotide
aacaauauauuucuc

SEQ ID NO: 89297 - RNA, 14 nt, Artificial Sequence
  Description of Artificial Sequence: Synthetic oligonucleotide
aacaguaaagucac

SEQ ID NO: 89298 - RNA, 14 nt, Artificial Sequence
  Description of Artificial Sequence: Synthetic oligonucleotide
ugugaagaaaguaa

SEQ ID NO: 89299 - RNA, 13 nt, Artificial Sequence
  Description of Artificial Sequence: Synthetic oligonucleotide
cuuccgagccauc

SEQ ID NO: 89300 - RNA, 12 nt, Artificial Sequence
  Description of Artificial Sequence: Synthetic oligonucleotide
aauggagguuga

SEQ ID NO: 89301 - RNA, 12 nt, Artificial Sequence
  Description of Artificial Sequence: Synthetic oligonucleotide
ggagguugaaua

SEQ ID NO: 89302 - RNA, 13 nt, Artificial Sequence
  Description of Artificial Sequence: Synthetic oligonucleotide
auuuugaguuuuc

SEQ ID NO: 89303 - RNA, 12 nt, Artificial Sequence
  Description of Artificial Sequence: Synthetic oligonucleotide
uauccuguuugu

SEQ ID NO: 89304 - RNA, 11 nt, Artificial Sequence
  Description of Artificial Sequence: Synthetic oligonucleotide
ccuguuuguuc

SEQ ID NO: 89305 - RNA, 10 nt, Artificial Sequence
  Description of Artificial Sequence: Synthetic oligonucleotide
cucuacagcc

SEQ ID NO: 89306 - RNA, 12 nt, Artificial Sequence
  Description of Artificial Sequence: Synthetic oligonucleotide
ucuuccauagcu

SEQ ID NO: 89307 - RNA, 12 nt, Artificial Sequence
  Description of Artificial Sequence: Synthetic oligonucleotide
auaaucuuccug

SEQ ID NO: 89308 - RNA, 12 nt, Artificial Sequence
  Description of Artificial Sequence: Synthetic oligonucleotide
uaaucuuccugu

SEQ ID NO: 89309 - RNA, 12 nt, Artificial Sequence
  Description of Artificial Sequence: Synthetic oligonucleotide
cuucaugacuug

SEQ ID NO: 89310 - RNA, 12 nt, Artificial Sequence
  Description of Artificial Sequence: Synthetic oligonucleotide
aagagggagaga

SEQ ID NO: 89311 - RNA, 12 nt, Artificial Sequence
  Description of Artificial Sequence: Synthetic oligonucleotide
cgucuccuacca

SEQ ID NO: 89312 - RNA, 12 nt, Artificial Sequence
  Description of Artificial Sequence: Synthetic oligonucleotide
gaucaaucggcc

SEQ ID NO: 89313 - RNA, 12 nt, Artificial Sequence
  Description of Artificial Sequence: Synthetic oligonucleotide
ggacgaacaucc

SEQ ID NO: 89314 - RNA, 11 nt, Artificial Sequence
  Description of Artificial Sequence: Synthetic oligonucleotide
agggucggaac

SEQ ID NO: 89315 - RNA, 10 nt, Artificial Sequence
  Description of Artificial Sequence: Synthetic oligonucleotide
ucggaaccca

SEQ ID NO: 89316 - RNA, 11 nt, Artificial Sequence
  Description of Artificial Sequence: Synthetic oligonucleotide
acccaagcuua

SEQ ID NO: 89317 - RNA, 14 nt, Artificial Sequence
  Description of Artificial Sequence: Synthetic oligonucleotide
gaacuuuaagcaac

SEQ ID NO: 89318 - RNA, 11 nt, Artificial Sequence
  Description of Artificial Sequence: Synthetic oligonucleotide
acuauucagug

SEQ ID NO: 89319 - RNA, 11 nt, Artificial Sequence
  Description of Artificial Sequence: Synthetic oligonucleotide
cuauucagugg

SEQ ID NO: 89320 - RNA, 13 nt, Artificial Sequence
  Description of Artificial Sequence: Synthetic oligonucleotide
aaacacagauaac

SEQ ID NO: 89321 - RNA, 12 nt, Artificial Sequence
  Description of Artificial Sequence: Synthetic oligonucleotide
cuuaagaaaaga

SEQ ID NO: 89322 - RNA, 12 nt, Artificial Sequence
  Description of Artificial Sequence: Synthetic oligonucleotide
cugaaggagugu

SEQ ID NO: 89323 - RNA, 10 nt, Artificial Sequence
  Description of Artificial Sequence: Synthetic oligonucleotide
ucaccgcggg

SEQ ID NO: 89324 - RNA, 14 nt, Artificial Sequence
  Description of Artificial Sequence: Synthetic oligonucleotide
agcagaaauaagcg

SEQ ID NO: 89325 - RNA, 12 nt, Artificial Sequence
  Description of Artificial Sequence: Synthetic oligonucleotide
aagcgugccguu

SEQ ID NO: 89326 - RNA, 12 nt, Artificial Sequence
  Description of Artificial Sequence: Synthetic oligonucleotide
agaaacagucac

SEQ ID NO: 89327 - RNA, 12 nt, Artificial Sequence
  Description of Artificial Sequence: Synthetic oligonucleotide
agaggaagaagg

SEQ ID NO: 89328 - RNA, 14 nt, Artificial Sequence
  Description of Artificial Sequence: Synthetic oligonucleotide
uguauucaaaauau

SEQ ID NO: 89329 - RNA, 13 nt, Artificial Sequence
  Description of Artificial Sequence: Synthetic oligonucleotide
auuuuccucccuu

SEQ ID NO: 89330 - RNA, 13 nt, Artificial Sequence
  Description of Artificial Sequence: Synthetic oligonucleotide
caaagaaagauag

SEQ ID NO: 89331 - RNA, 12 nt, Artificial Sequence
  Description of Artificial Sequence: Synthetic oligonucleotide
aagaaagauaga

SEQ ID NO: 89332 - RNA, 13 nt, Artificial Sequence
  Description of Artificial Sequence: Synthetic oligonucleotide
gaaagcauuuguu

SEQ ID NO: 89333 - RNA, 13 nt, Artificial Sequence
  Description of Artificial Sequence: Synthetic oligonucleotide
ugaguuaaacgaa

SEQ ID NO: 89334 - RNA, 12 nt, Artificial Sequence
  Description of Artificial Sequence: Synthetic oligonucleotide
acugauacagaa

SEQ ID NO: 89335 - RNA, 12 nt, Artificial Sequence
  Description of Artificial Sequence: Synthetic oligonucleotide
auauuauauaua

SEQ ID NO: 89336 - RNA, 12 nt, Artificial Sequence
  Description of Artificial Sequence: Synthetic oligonucleotide
auuauauauaua

SEQ ID NO: 89337 - RNA, 12 nt, Artificial Sequence
  Description of Artificial Sequence: Synthetic oligonucleotide
ucacuggaugua

SEQ ID NO: 89338 - RNA, 12 nt, Artificial Sequence
  Description of Artificial Sequence: Synthetic oligonucleotide
cagggaagagga

SEQ ID NO: 89339 - RNA, 15 nt, Artificial Sequence
  Description of Artificial Sequence: Synthetic oligonucleotide
augaucuuuuuuuug

SEQ ID NO: 89340 - RNA, 11 nt, Artificial Sequence
  Description of Artificial Sequence: Synthetic oligonucleotide
aguucacggcc

SEQ ID NO: 89341 - RNA, 13 nt, Artificial Sequence
  Description of Artificial Sequence: Synthetic oligonucleotide
caccaucacacca

SEQ ID NO: 89342 - RNA, 11 nt, Artificial Sequence
  Description of Artificial Sequence: Synthetic oligonucleotide
ccugcggguuu

SEQ ID NO: 89343 - RNA, 10 nt, Artificial Sequence
  Description of Artificial Sequence: Synthetic oligonucleotide
auccaguuug

SEQ ID NO: 89344 - RNA, 13 nt, Artificial Sequence
  Description of Artificial Sequence: Synthetic oligonucleotide
guuaaggacuucu

SEQ ID NO: 89345 - RNA, 13 nt, Artificial Sequence
  Description of Artificial Sequence: Synthetic oligonucleotide
cagugggacagag

SEQ ID NO: 89346 - RNA, 14 nt, Artificial Sequence
  Description of Artificial Sequence: Synthetic oligonucleotide
aauuuguuauugug

SEQ ID NO: 89347 - RNA, 13 nt, Artificial Sequence
  Description of Artificial Sequence: Synthetic oligonucleotide
uucaaaugcauuu

SEQ ID NO: 89348 - RNA, 10 nt, Artificial Sequence
  Description of Artificial Sequence: Synthetic oligonucleotide
caggaaagcc

SEQ ID NO: 89349 - RNA, 11 nt, Artificial Sequence
  Description of Artificial Sequence: Synthetic oligonucleotide
aggaaagcccu

SEQ ID NO: 89350 - RNA, 12 nt, Artificial Sequence
  Description of Artificial Sequence: Synthetic oligonucleotide
cccagcauggcc

SEQ ID NO: 89351 - RNA, 11 nt, Artificial Sequence
  Description of Artificial Sequence: Synthetic oligonucleotide
cuucucccuga

SEQ ID NO: 89352 - RNA, 12 nt, Artificial Sequence
  Description of Artificial Sequence: Synthetic oligonucleotide
gaagaagcccuu

SEQ ID NO: 89353 - RNA, 12 nt, Artificial Sequence
  Description of Artificial Sequence: Synthetic oligonucleotide
agaagcccuuca

SEQ ID NO: 89354 - RNA, 11 nt, Artificial Sequence
  Description of Artificial Sequence: Synthetic oligonucleotide
gcccuucagcg

SEQ ID NO: 89355 - RNA, 11 nt, Artificial Sequence
  Description of Artificial Sequence: Synthetic oligonucleotide
ccuucagcggc

SEQ ID NO: 89356 - RNA, 12 nt, Artificial Sequence
  Description of Artificial Sequence: Synthetic oligonucleotide
ucagcggccagu

SEQ ID NO: 89357 - RNA, 12 nt, Artificial Sequence
  Description of Artificial Sequence: Synthetic oligonucleotide
ugaaaagcuccg

SEQ ID NO: 89358 - RNA, 11 nt, Artificial Sequence
  Description of Artificial Sequence: Synthetic oligonucleotide
aaaagcuccgg

SEQ ID NO: 89359 - RNA, 13 nt, Artificial Sequence
  Description of Artificial Sequence: Synthetic oligonucleotide
agucaacagucug

SEQ ID NO: 89360 - RNA, 13 nt, Artificial Sequence
  Description of Artificial Sequence: Synthetic oligonucleotide
cagaguucaaaag

SEQ ID NO: 89361 - RNA, 13 nt, Artificial Sequence
  Description of Artificial Sequence: Synthetic oligonucleotide
agaguucaaaagc

SEQ ID NO: 89362 - RNA, 12 nt, Artificial Sequence
  Description of Artificial Sequence: Synthetic oligonucleotide
uucaaaagcccu

SEQ ID NO: 89363 - RNA, 12 nt, Artificial Sequence
  Description of Artificial Sequence: Synthetic oligonucleotide
ucaaaagcccuu

SEQ ID NO: 89364 - RNA, 12 nt, Artificial Sequence
  Description of Artificial Sequence: Synthetic oligonucleotide
aaaagcccuuca

SEQ ID NO: 89365 - RNA, 12 nt, Artificial Sequence
  Description of Artificial Sequence: Synthetic oligonucleotide
aaagcccuucag

SEQ ID NO: 89366 - RNA, 13 nt, Artificial Sequence
  Description of Artificial Sequence: Synthetic oligonucleotide
gugaagccgcucg

SEQ ID NO: 89367 - RNA, 12 nt, Artificial Sequence
  Description of Artificial Sequence: Synthetic oligonucleotide
cacgccagucaa

SEQ ID NO: 89368 - RNA, 13 nt, Artificial Sequence
  Description of Artificial Sequence: Synthetic oligonucleotide
uucuuggugcgug

SEQ ID NO: 89369 - RNA, 14 nt, Artificial Sequence
  Description of Artificial Sequence: Synthetic oligonucleotide
auuggauucaucag

SEQ ID NO: 89370 - RNA, 13 nt, Artificial Sequence
  Description of Artificial Sequence: Synthetic oligonucleotide
uggaauaccuaag

SEQ ID NO: 89371 - RNA, 12 nt, Artificial Sequence
  Description of Artificial Sequence: Synthetic oligonucleotide
auuugaggcuca

SEQ ID NO: 89372 - RNA, 11 nt, Artificial Sequence
  Description of Artificial Sequence: Synthetic oligonucleotide
ucuacaauugg

SEQ ID NO: 89373 - RNA, 12 nt, Artificial Sequence
  Description of Artificial Sequence: Synthetic oligonucleotide
uaguuaggagcc

SEQ ID NO: 89374 - RNA, 13 nt, Artificial Sequence
  Description of Artificial Sequence: Synthetic oligonucleotide
agucaauauccac

SEQ ID NO: 89375 - RNA, 13 nt, Artificial Sequence
  Description of Artificial Sequence: Synthetic oligonucleotide
auguucagucaca

SEQ ID NO: 89376 - RNA, 12 nt, Artificial Sequence
  Description of Artificial Sequence: Synthetic oligonucleotide
acacacacauac

SEQ ID NO: 89377 - RNA, 12 nt, Artificial Sequence
  Description of Artificial Sequence: Synthetic oligonucleotide
uuccuuuugcuu

SEQ ID NO: 89378 - RNA, 16 nt, Artificial Sequence
  Description of Artificial Sequence: Synthetic oligonucleotide
uuuuaaaguaauuuuu

SEQ ID NO: 89379 - RNA, 13 nt, Artificial Sequence
  Description of Artificial Sequence: Synthetic oligonucleotide
caacagucaaugg

SEQ ID NO: 89380 - RNA, 13 nt, Artificial Sequence
  Description of Artificial Sequence: Synthetic oligonucleotide
ucgacaaaccaau

SEQ ID NO: 89381 - RNA, 12 nt, Artificial Sequence
  Description of Artificial Sequence: Synthetic oligonucleotide
acugcuaccacu

SEQ ID NO: 89382 - RNA, 13 nt, Artificial Sequence
  Description of Artificial Sequence: Synthetic oligonucleotide
gcaagcggucuua

SEQ ID NO: 89383 - RNA, 13 nt, Artificial Sequence
  Description of Artificial Sequence: Synthetic oligonucleotide
ggucuuaccggcu

SEQ ID NO: 89384 - RNA, 11 nt, Artificial Sequence
  Description of Artificial Sequence: Synthetic oligonucleotide
gauggguuacc

SEQ ID NO: 89385 - RNA, 11 nt, Artificial Sequence
  Description of Artificial Sequence: Synthetic oligonucleotide
guuaccugcga

SEQ ID NO: 89386 - RNA, 12 nt, Artificial Sequence
  Description of Artificial Sequence: Synthetic oligonucleotide
aaucuugcugag

SEQ ID NO: 89387 - RNA, 13 nt, Artificial Sequence
  Description of Artificial Sequence: Synthetic oligonucleotide
agcauaaaacagu

SEQ ID NO: 89388 - RNA, 12 nt, Artificial Sequence
  Description of Artificial Sequence: Synthetic oligonucleotide
guccuuuauccu

SEQ ID NO: 89389 - RNA, 12 nt, Artificial Sequence
  Description of Artificial Sequence: Synthetic oligonucleotide
caacgcaaguug

SEQ ID NO: 89390 - RNA, 13 nt, Artificial Sequence
  Description of Artificial Sequence: Synthetic oligonucleotide
aaacugaaaccau

SEQ ID NO: 89391 - RNA, 14 nt, Artificial Sequence
  Description of Artificial Sequence: Synthetic oligonucleotide
acuuuguuaaauau

SEQ ID NO: 89392 - RNA, 14 nt, Artificial Sequence
  Description of Artificial Sequence: Synthetic oligonucleotide
guauauuaaaaguu

SEQ ID NO: 89393 - RNA, 13 nt, Artificial Sequence
  Description of Artificial Sequence: Synthetic oligonucleotide
guuuugacuuaac

SEQ ID NO: 89394 - RNA, 13 nt, Artificial Sequence
  Description of Artificial Sequence: Synthetic oligonucleotide
gcaaacucagcac

SEQ ID NO: 89395 - RNA, 11 nt, Artificial Sequence
  Description of Artificial Sequence: Synthetic oligonucleotide
ugcugaccuca

SEQ ID NO: 89396 - RNA, 14 nt, Artificial Sequence
  Description of Artificial Sequence: Synthetic oligonucleotide
uuuauucagaucgc

SEQ ID NO: 89397 - RNA, 13 nt, Artificial Sequence
  Description of Artificial Sequence: Synthetic oligonucleotide
aggguucugggau

SEQ ID NO: 89398 - RNA, 15 nt, Artificial Sequence
  Description of Artificial Sequence: Synthetic oligonucleotide
auauuggaaauuaug

SEQ ID NO: 89399 - RNA, 13 nt, Artificial Sequence
  Description of Artificial Sequence: Synthetic oligonucleotide
auggaagcacuag

SEQ ID NO: 89400 - RNA, 13 nt, Artificial Sequence
  Description of Artificial Sequence: Synthetic oligonucleotide
guuuuuaugugga

SEQ ID NO: 89401 - RNA, 12 nt, Artificial Sequence
  Description of Artificial Sequence: Synthetic oligonucleotide
ggaauugguaga

SEQ ID NO: 89402 - RNA, 13 nt, Artificial Sequence
  Description of Artificial Sequence: Synthetic oligonucleotide
uuagacuuggaga

SEQ ID NO: 89403 - RNA, 13 nt, Artificial Sequence
  Description of Artificial Sequence: Synthetic oligonucleotide
uuacaguauucca

SEQ ID NO: 89404 - RNA, 15 nt, Artificial Sequence
  Description of Artificial Sequence: Synthetic oligonucleotide
ccacugaugaauuaa

SEQ ID NO: 89405 - RNA, 12 nt, Artificial Sequence
  Description of Artificial Sequence: Synthetic oligonucleotide
ccacaucaucac

SEQ ID NO: 89406 - RNA, 13 nt, Artificial Sequence
  Description of Artificial Sequence: Synthetic oligonucleotide
cucaccaaacaga

SEQ ID NO: 89407 - RNA, 12 nt, Artificial Sequence
  Description of Artificial Sequence: Synthetic oligonucleotide
ggaacaugaugg

SEQ ID NO: 89408 - RNA, 12 nt, Artificial Sequence
  Description of Artificial Sequence: Synthetic oligonucleotide
cauguagacugc

SEQ ID NO: 89409 - RNA, 13 nt, Artificial Sequence
  Description of Artificial Sequence: Synthetic oligonucleotide
ggaucuauuuaug

SEQ ID NO: 89410 - RNA, 12 nt, Artificial Sequence
  Description of Artificial Sequence: Synthetic oligonucleotide
gcacuauuauca

SEQ ID NO: 89411 - RNA, 11 nt, Artificial Sequence
  Description of Artificial Sequence: Synthetic oligonucleotide
aucaguucugc

SEQ ID NO: 89412 - RNA, 13 nt, Artificial Sequence
  Description of Artificial Sequence: Synthetic oligonucleotide
agauuaaaccuac

SEQ ID NO: 89413 - RNA, 13 nt, Artificial Sequence
  Description of Artificial Sequence: Synthetic oligonucleotide
auaaaauccuucu

SEQ ID NO: 89414 - RNA, 12 nt, Artificial Sequence
  Description of Artificial Sequence: Synthetic oligonucleotide
aaugcuguagac

SEQ ID NO: 89415 - RNA, 13 nt, Artificial Sequence
  Description of Artificial Sequence: Synthetic oligonucleotide
uugauaggaauag

SEQ ID NO: 89416 - RNA, 11 nt, Artificial Sequence
  Description of Artificial Sequence: Synthetic oligonucleotide
aauggcccuga

SEQ ID NO: 89417 - RNA, 11 nt, Artificial Sequence
  Description of Artificial Sequence: Synthetic oligonucleotide
uuccucaagca

SEQ ID NO: 89418 - RNA, 10 nt, Artificial Sequence
  Description of Artificial Sequence: Synthetic oligonucleotide
guucagccca

SEQ ID NO: 89419 - RNA, 11 nt, Artificial Sequence
  Description of Artificial Sequence: Synthetic oligonucleotide
gcugcugaacc

SEQ ID NO: 89420 - RNA, 12 nt, Artificial Sequence
  Description of Artificial Sequence: Synthetic oligonucleotide
aaguucucuuca

SEQ ID NO: 89421 - RNA, 11 nt, Artificial Sequence
  Description of Artificial Sequence: Synthetic oligonucleotide
ccagccuagag

SEQ ID NO: 89422 - RNA, 13 nt, Artificial Sequence
  Description of Artificial Sequence: Synthetic oligonucleotide
cucugugaagugu

SEQ ID NO: 89423 - RNA, 14 nt, Artificial Sequence
  Description of Artificial Sequence: Synthetic oligonucleotide
ugagaaaauuucaa

SEQ ID NO: 89424 - RNA, 11 nt, Artificial Sequence
  Description of Artificial Sequence: Synthetic oligonucleotide
aauccuccuga

SEQ ID NO: 89425 - RNA, 12 nt, Artificial Sequence
  Description of Artificial Sequence: Synthetic oligonucleotide
gugacaucauau

SEQ ID NO: 89426 - RNA, 13 nt, Artificial Sequence
  Description of Artificial Sequence: Synthetic oligonucleotide
aaucuucaucaua

SEQ ID NO: 89427 - RNA, 13 nt, Artificial Sequence
  Description of Artificial Sequence: Synthetic oligonucleotide
gacuagcuauuaa

SEQ ID NO: 89428 - RNA, 14 nt, Artificial Sequence
  Description of Artificial Sequence: Synthetic oligonucleotide
ucucuacuaaaaau

SEQ ID NO: 89429 - RNA, 12 nt, Artificial Sequence
  Description of Artificial Sequence: Synthetic oligonucleotide
ucuaucucgccu

SEQ ID NO: 89430 - RNA, 13 nt, Artificial Sequence
  Description of Artificial Sequence: Synthetic oligonucleotide
cuucgguccaguu

SEQ ID NO: 89431 - RNA, 11 nt, Artificial Sequence
  Description of Artificial Sequence: Synthetic oligonucleotide
gauguagccgc

SEQ ID NO: 89432 - RNA, 12 nt, Artificial Sequence
  Description of Artificial Sequence: Synthetic oligonucleotide
ugaggagacuug

SEQ ID NO: 89433 - RNA, 12 nt, Artificial Sequence
  Description of Artificial Sequence: Synthetic oligonucleotide
gaguagugagga

SEQ ID NO: 89434 - RNA, 14 nt, Artificial Sequence
  Description of Artificial Sequence: Synthetic oligonucleotide
cagaugaguacaaa

SEQ ID NO: 89435 - RNA, 13 nt, Artificial Sequence
  Description of Artificial Sequence: Synthetic oligonucleotide
guuguuaaugggc

SEQ ID NO: 89436 - RNA, 13 nt, Artificial Sequence
  Description of Artificial Sequence: Synthetic oligonucleotide
uuuuuaauuuauu

SEQ ID NO: 89437 - RNA, 12 nt, Artificial Sequence
  Description of Artificial Sequence: Synthetic oligonucleotide
uauuuaaauaug

SEQ ID NO: 89438 - RNA, 13 nt, Artificial Sequence
  Description of Artificial Sequence: Synthetic oligonucleotide
uauccuuuguuuc

SEQ ID NO: 89439 - RNA, 14 nt, Artificial Sequence
  Description of Artificial Sequence: Synthetic oligonucleotide
cgucuaaguguuug

SEQ ID NO: 89440 - RNA, 12 nt, Artificial Sequence
  Description of Artificial Sequence: Synthetic oligonucleotide
accugugacaaa

SEQ ID NO: 89441 - RNA, 13 nt, Artificial Sequence
  Description of Artificial Sequence: Synthetic oligonucleotide
ccaggcugaauua

SEQ ID NO: 89442 - RNA, 14 nt, Artificial Sequence
  Description of Artificial Sequence: Synthetic oligonucleotide
gucauucuuacaau

SEQ ID NO: 89443 - RNA, 15 nt, Artificial Sequence
  Description of Artificial Sequence: Synthetic oligonucleotide
ucauucuuacaauug

SEQ ID NO: 89444 - RNA, 12 nt, Artificial Sequence
  Description of Artificial Sequence: Synthetic oligonucleotide
cagagaguguac

SEQ ID NO: 89445 - RNA, 12 nt, Artificial Sequence
  Description of Artificial Sequence: Synthetic oligonucleotide
agaacucagcag

SEQ ID NO: 89446 - RNA, 13 nt, Artificial Sequence
  Description of Artificial Sequence: Synthetic oligonucleotide
uuuauuuucagua

SEQ ID NO: 89447 - RNA, 12 nt, Artificial Sequence
  Description of Artificial Sequence: Synthetic oligonucleotide
ucuuaaauggaa

SEQ ID NO: 89448 - RNA, 13 nt, Artificial Sequence
  Description of Artificial Sequence: Synthetic oligonucleotide
ugccuaaaauugu

SEQ ID NO: 89449 - RNA, 12 nt, Artificial Sequence
  Description of Artificial Sequence: Synthetic oligonucleotide
agacugugagcu

SEQ ID NO: 89450 - RNA, 14 nt, Artificial Sequence
  Description of Artificial Sequence: Synthetic oligonucleotide
ugcuuuuuauuaau

SEQ ID NO: 89451 - RNA, 13 nt, Artificial Sequence
  Description of Artificial Sequence: Synthetic oligonucleotide
cucuucuuacauu

SEQ ID NO: 89452 - RNA, 15 nt, Artificial Sequence
  Description of Artificial Sequence: Synthetic oligonucleotide
cauuuguaaaaaugu

SEQ ID NO: 89453 - RNA, 15 nt, Artificial Sequence
  Description of Artificial Sequence: Synthetic oligonucleotide
aucuuaauucauauu

SEQ ID NO: 89454 - RNA, 13 nt, Artificial Sequence
  Description of Artificial Sequence: Synthetic oligonucleotide
gaacuaaucauga

SEQ ID NO: 89455 - RNA, 12 nt, Artificial Sequence
  Description of Artificial Sequence: Synthetic oligonucleotide
ucugcucuuggg

SEQ ID NO: 89456 - RNA, 13 nt, Artificial Sequence
  Description of Artificial Sequence: Synthetic oligonucleotide
caguagcuuugag

SEQ ID NO: 89457 - RNA, 14 nt, Artificial Sequence
  Description of Artificial Sequence: Synthetic oligonucleotide
cacguaauauuuca

SEQ ID NO: 89458 - RNA, 13 nt, Artificial Sequence
  Description of Artificial Sequence: Synthetic oligonucleotide
uauucucuucacu

SEQ ID NO: 89459 - RNA, 14 nt, Artificial Sequence
  Description of Artificial Sequence: Synthetic oligonucleotide
cuaaugcuaagaaa

SEQ ID NO: 89460 - RNA, 12 nt, Artificial Sequence
  Description of Artificial Sequence: Synthetic oligonucleotide
gcugaaaaucaa

SEQ ID NO: 89461 - RNA, 14 nt, Artificial Sequence
  Description of Artificial Sequence: Synthetic oligonucleotide
aauaugauuacuuu

SEQ ID NO: 89462 - RNA, 14 nt, Artificial Sequence
  Description of Artificial Sequence: Synthetic oligonucleotide
cauuuuguucuaca

SEQ ID NO: 89463 - RNA, 12 nt, Artificial Sequence
  Description of Artificial Sequence: Synthetic oligonucleotide
cccgggacucuc

SEQ ID NO: 89464 - RNA, 14 nt, Artificial Sequence
  Description of Artificial Sequence: Synthetic oligonucleotide
ccuuuaaaguaaag

SEQ ID NO: 89465 - RNA, 13 nt, Artificial Sequence
  Description of Artificial Sequence: Synthetic oligonucleotide
ucuggaagccugg

SEQ ID NO: 89466 - RNA, 14 nt, Artificial Sequence
  Description of Artificial Sequence: Synthetic oligonucleotide
aaaacaaaagagag

SEQ ID NO: 89467 - RNA, 13 nt, Artificial Sequence
  Description of Artificial Sequence: Synthetic oligonucleotide
aucaguuaugccg

SEQ ID NO: 89468 - RNA, 13 nt, Artificial Sequence
  Description of Artificial Sequence: Synthetic oligonucleotide
uaaaagaagucca

SEQ ID NO: 89469 - RNA, 11 nt, Artificial Sequence
  Description of Artificial Sequence: Synthetic oligonucleotide
aggugagguua

SEQ ID NO: 89470 - RNA, 11 nt, Artificial Sequence
  Description of Artificial Sequence: Synthetic oligonucleotide
gggaagaggac

SEQ ID NO: 89471 - RNA, 13 nt, Artificial Sequence
  Description of Artificial Sequence: Synthetic oligonucleotide
aagcaaguauugu

SEQ ID NO: 89472 - RNA, 12 nt, Artificial Sequence
  Description of Artificial Sequence: Synthetic oligonucleotide
auuguagcacuc

SEQ ID NO: 89473 - RNA, 14 nt, Artificial Sequence
  Description of Artificial Sequence: Synthetic oligonucleotide
acaaaaccacaaau

SEQ ID NO: 89474 - RNA, 12 nt, Artificial Sequence
  Description of Artificial Sequence: Synthetic oligonucleotide
uaagcccauaca

SEQ ID NO: 89475 - RNA, 11 nt, Artificial Sequence
  Description of Artificial Sequence: Synthetic oligonucleotide
agcccauacag

SEQ ID NO: 89476 - RNA, 12 nt, Artificial Sequence
  Description of Artificial Sequence: Synthetic oligonucleotide
cagaaaccuucc

SEQ ID NO: 89477 - RNA, 10 nt, Artificial Sequence
  Description of Artificial Sequence: Synthetic oligonucleotide
guauaccuac

SEQ ID NO: 89478 - RNA, 13 nt, Artificial Sequence
  Description of Artificial Sequence: Synthetic oligonucleotide
gccaguuuucgga

SEQ ID NO: 89479 - RNA, 9 nt, Artificial Sequence
  Description of Artificial Sequence: Synthetic oligonucleotide
ggaacaggg

SEQ ID NO: 89480 - RNA, 13 nt, Artificial Sequence
  Description of Artificial Sequence: Synthetic oligonucleotide
uuaacuuuccagu

SEQ ID NO: 89481 - RNA, 14 nt, Artificial Sequence
  Description of Artificial Sequence: Synthetic oligonucleotide
aaaguuugguuuug

SEQ ID NO: 89482 - RNA, 12 nt, Artificial Sequence
  Description of Artificial Sequence: Synthetic oligonucleotide
cuucccacugua

SEQ ID NO: 89483 - RNA, 13 nt, Artificial Sequence
  Description of Artificial Sequence: Synthetic oligonucleotide
ugauaccauauga

SEQ ID NO: 89484 - RNA, 11 nt, Artificial Sequence
  Description of Artificial Sequence: Synthetic oligonucleotide
aacaugggcug

SEQ ID NO: 89485 - RNA, 13 nt, Artificial Sequence
  Description of Artificial Sequence: Synthetic oligonucleotide
caacuuuuucaua

SEQ ID NO: 89486 - RNA, 12 nt, Artificial Sequence
  Description of Artificial Sequence: Synthetic oligonucleotide
caugaggccgga

SEQ ID NO: 89487 - RNA, 11 nt, Artificial Sequence
  Description of Artificial Sequence: Synthetic oligonucleotide
acugcauuugu

SEQ ID NO: 89488 - RNA, 13 nt, Artificial Sequence
  Description of Artificial Sequence: Synthetic oligonucleotide
aauguuuacuacc

SEQ ID NO: 89489 - RNA, 15 nt, Artificial Sequence
  Description of Artificial Sequence: Synthetic oligonucleotide
aauuuuuugaugaaa

SEQ ID NO: 89490 - RNA, 14 nt, Artificial Sequence
  Description of Artificial Sequence: Synthetic oligonucleotide
cagugugugaauuu

SEQ ID NO: 89491 - RNA, 13 nt, Artificial Sequence
  Description of Artificial Sequence: Synthetic oligonucleotide
gagcaauguaugu

SEQ ID NO: 89492 - RNA, 14 nt, Artificial Sequence
  Description of Artificial Sequence: Synthetic oligonucleotide
aaagcacauauaua

SEQ ID NO: 89493 - RNA, 14 nt, Artificial Sequence
  Description of Artificial Sequence: Synthetic oligonucleotide
guaauaguuucucc

SEQ ID NO: 89494 - RNA, 13 nt, Artificial Sequence
  Description of Artificial Sequence: Synthetic oligonucleotide
aguuucuccaaau

SEQ ID NO: 89495 - RNA, 13 nt, Artificial Sequence
  Description of Artificial Sequence: Synthetic oligonucleotide
uacuuccuagaaa

SEQ ID NO: 89496 - RNA, 13 nt, Artificial Sequence
  Description of Artificial Sequence: Synthetic oligonucleotide
uacaccauauaug

SEQ ID NO: 89497 - RNA, 14 nt, Artificial Sequence
  Description of Artificial Sequence: Synthetic oligonucleotide
auauaugaauggag

SEQ ID NO: 89498 - RNA, 13 nt, Artificial Sequence
  Description of Artificial Sequence: Synthetic oligonucleotide
acgagaagaagau

SEQ ID NO: 89499 - RNA, 13 nt, Artificial Sequence
  Description of Artificial Sequence: Synthetic oligonucleotide
ucauuuacaggga

SEQ ID NO: 89500 - RNA, 13 nt, Artificial Sequence
  Description of Artificial Sequence: Synthetic oligonucleotide
cauuuacagggac

SEQ ID NO: 89501 - RNA, 10 nt, Artificial Sequence
  Description of Artificial Sequence: Synthetic oligonucleotide
agggaccuga

SEQ ID NO: 89502 - RNA, 14 nt, Artificial Sequence
  Description of Artificial Sequence: Synthetic oligonucleotide
uguuugacugcauc

SEQ ID NO: 89503 - RNA, 13 nt, Artificial Sequence
  Description of Artificial Sequence: Synthetic oligonucleotide
uuugacugcaucg

SEQ ID NO: 89504 - RNA, 12 nt, Artificial Sequence
  Description of Artificial Sequence: Synthetic oligonucleotide
gaguucacaggg

SEQ ID NO: 89505 - RNA, 13 nt, Artificial Sequence
  Description of Artificial Sequence: Synthetic oligonucleotide
ggcaccucugucc

SEQ ID NO: 89506 - RNA, 15 nt, Artificial Sequence
  Description of Artificial Sequence: Synthetic oligonucleotide
gguuugucuuuuuaa

SEQ ID NO: 89507 - RNA, 14 nt, Artificial Sequence
  Description of Artificial Sequence: Synthetic oligonucleotide
uuugucuuuuuaag

SEQ ID NO: 89508 - RNA, 13 nt, Artificial Sequence
  Description of Artificial Sequence: Synthetic oligonucleotide
ccuaaagguuguc

SEQ ID NO: 89509 - RNA, 12 nt, Artificial Sequence
  Description of Artificial Sequence: Synthetic oligonucleotide
aagguugucgac

SEQ ID NO: 89510 - RNA, 13 nt, Artificial Sequence
  Description of Artificial Sequence: Synthetic oligonucleotide
accuggcaauugu

SEQ ID NO: 89511 - RNA, 12 nt, Artificial Sequence
  Description of Artificial Sequence: Synthetic oligonucleotide
aguggugcgagg

SEQ ID NO: 89512 - RNA, 13 nt, Artificial Sequence
  Description of Artificial Sequence: Synthetic oligonucleotide
agagacaugaaau

SEQ ID NO: 89513 - RNA, 13 nt, Artificial Sequence
  Description of Artificial Sequence: Synthetic oligonucleotide
auauauuucucca

SEQ ID NO: 89514 - RNA, 10 nt, Artificial Sequence
  Description of Artificial Sequence: Synthetic oligonucleotide
caugaaggcu

SEQ ID NO: 89515 - RNA, 11 nt, Artificial Sequence
  Description of Artificial Sequence: Synthetic oligonucleotide
gcuggaguggu

SEQ ID NO: 89516 - RNA, 11 nt, Artificial Sequence
  Description of Artificial Sequence: Synthetic oligonucleotide
aggaagagagg

SEQ ID NO: 89517 - RNA, 12 nt, Artificial Sequence
  Description of Artificial Sequence: Synthetic oligonucleotide
cuugcaucgggc

SEQ ID NO: 89518 - RNA, 13 nt, Artificial Sequence
  Description of Artificial Sequence: Synthetic oligonucleotide
auauccuacugug

SEQ ID NO: 89519 - RNA, 13 nt, Artificial Sequence
  Description of Artificial Sequence: Synthetic oligonucleotide
uccuacuguguaa

SEQ ID NO: 89520 - RNA, 12 nt, Artificial Sequence
  Description of Artificial Sequence: Synthetic oligonucleotide
ccuuguagugua

SEQ ID NO: 89521 - RNA, 13 nt, Artificial Sequence
  Description of Artificial Sequence: Synthetic oligonucleotide
ucuuuguugauug

SEQ ID NO: 89522 - RNA, 14 nt, Artificial Sequence
  Description of Artificial Sequence: Synthetic oligonucleotide
uuuguugauugaaa

SEQ ID NO: 89523 - RNA, 15 nt, Artificial Sequence
  Description of Artificial Sequence: Synthetic oligonucleotide
uucuuuuucuuccau

SEQ ID NO: 89524 - RNA, 13 nt, Artificial Sequence
  Description of Artificial Sequence: Synthetic oligonucleotide
aaucuuccuucua

SEQ ID NO: 89525 - RNA, 13 nt, Artificial Sequence
  Description of Artificial Sequence: Synthetic oligonucleotide
uugaaugcuucau

SEQ ID NO: 89526 - RNA, 13 nt, Artificial Sequence
  Description of Artificial Sequence: Synthetic oligonucleotide
ugaaugcuucaug

SEQ ID NO: 89527 - RNA, 13 nt, Artificial Sequence
  Description of Artificial Sequence: Synthetic oligonucleotide
aauucuacuuuga

SEQ ID NO: 89528 - RNA, 13 nt, Artificial Sequence
  Description of Artificial Sequence: Synthetic oligonucleotide
agcaacuacagac

SEQ ID NO: 89529 - RNA, 13 nt, Artificial Sequence
  Description of Artificial Sequence: Synthetic oligonucleotide
gaccaaggucaac

SEQ ID NO: 89530 - RNA, 13 nt, Artificial Sequence
  Description of Artificial Sequence: Synthetic oligonucleotide
cgacuaucucgac

SEQ ID NO: 89531 - RNA, 13 nt, Artificial Sequence
  Description of Artificial Sequence: Synthetic oligonucleotide
aaccuucccaaac

SEQ ID NO: 89532 - RNA, 14 nt, Artificial Sequence
  Description of Artificial Sequence: Synthetic oligonucleotide
ccaagcuuagaacu

SEQ ID NO: 89533 - RNA, 15 nt, Artificial Sequence
  Description of Artificial Sequence: Synthetic oligonucleotide
agcuuagaacuuuaa

SEQ ID NO: 89534 - RNA, 11 nt, Artificial Sequence
  Description of Artificial Sequence: Synthetic oligonucleotide
aagaccaccac

SEQ ID NO: 89535 - RNA, 14 nt, Artificial Sequence
  Description of Artificial Sequence: Synthetic oligonucleotide
gcgagaaauaaagu

SEQ ID NO: 89536 - RNA, 14 nt, Artificial Sequence
  Description of Artificial Sequence: Synthetic oligonucleotide
cgagaaauaaaguu

SEQ ID NO: 89537 - RNA, 12 nt, Artificial Sequence
  Description of Artificial Sequence: Synthetic oligonucleotide
aggaaaugaucc

SEQ ID NO: 89538 - RNA, 13 nt, Artificial Sequence
  Description of Artificial Sequence: Synthetic oligonucleotide
gaagaaaugaaac

SEQ ID NO: 89539 - RNA, 13 nt, Artificial Sequence
  Description of Artificial Sequence: Synthetic oligonucleotide
guuuccauccucc

SEQ ID NO: 89540 - RNA, 15 nt, Artificial Sequence
  Description of Artificial Sequence: Synthetic oligonucleotide
acugaaaaucuuuga

SEQ ID NO: 89541 - RNA, 11 nt, Artificial Sequence
  Description of Artificial Sequence: Synthetic oligonucleotide
ugccguucagg

SEQ ID NO: 89542 - RNA, 13 nt, Artificial Sequence
  Description of Artificial Sequence: Synthetic oligonucleotide
caggguccagaag

SEQ ID NO: 89543 - RNA, 13 nt, Artificial Sequence
  Description of Artificial Sequence: Synthetic oligonucleotide
ucaagacugcuug

SEQ ID NO: 89544 - RNA, 13 nt, Artificial Sequence
  Description of Artificial Sequence: Synthetic oligonucleotide
uccaugucuuugg

SEQ ID NO: 89545 - RNA, 11 nt, Artificial Sequence
  Description of Artificial Sequence: Synthetic oligonucleotide
gccugaaacac

SEQ ID NO: 89546 - RNA, 12 nt, Artificial Sequence
  Description of Artificial Sequence: Synthetic oligonucleotide
ucucuguaccuc

SEQ ID NO: 89547 - RNA, 12 nt, Artificial Sequence
  Description of Artificial Sequence: Synthetic oligonucleotide
agcaagacaaga

SEQ ID NO: 89548 - RNA, 13 nt, Artificial Sequence
  Description of Artificial Sequence: Synthetic oligonucleotide
gcaagacaagaaa

SEQ ID NO: 89549 - RNA, 12 nt, Artificial Sequence
  Description of Artificial Sequence: Synthetic oligonucleotide
uguacaagaucc

SEQ ID NO: 89550 - RNA, 12 nt, Artificial Sequence
  Description of Artificial Sequence: Synthetic oligonucleotide
cguacuugcaga

SEQ ID NO: 89551 - RNA, 13 nt, Artificial Sequence
  Description of Artificial Sequence: Synthetic oligonucleotide
cgaucgauacaga

SEQ ID NO: 89552 - RNA, 13 nt, Artificial Sequence
  Description of Artificial Sequence: Synthetic oligonucleotide
uauaaaaauaaau

SEQ ID NO: 89553 - RNA, 13 nt, Artificial Sequence
  Description of Artificial Sequence: Synthetic oligonucleotide
uaaaaauaaauau

SEQ ID NO: 89554 - RNA, 13 nt, Artificial Sequence
  Description of Artificial Sequence: Synthetic oligonucleotide
uuugacugcugug

SEQ ID NO: 89555 - RNA, 13 nt, Artificial Sequence
  Description of Artificial Sequence: Synthetic oligonucleotide
ggagaugagagac

SEQ ID NO: 89556 - RNA, 10 nt, Artificial Sequence
  Description of Artificial Sequence: Synthetic oligonucleotide
ucccacuugg

SEQ ID NO: 89557 - RNA, 10 nt, Artificial Sequence
  Description of Artificial Sequence: Synthetic oligonucleotide
guucacggcc

SEQ ID NO: 89558 - RNA, 12 nt, Artificial Sequence
  Description of Artificial Sequence: Synthetic oligonucleotide
accaucacacca

SEQ ID NO: 89559 - RNA, 10 nt, Artificial Sequence
  Description of Artificial Sequence: Synthetic oligonucleotide
cugcggguuu

SEQ ID NO: 89560 - RNA, 9 nt, Artificial Sequence
  Description of Artificial Sequence: Synthetic oligonucleotide
uccaguuug

SEQ ID NO: 89561 - RNA, 12 nt, Artificial Sequence
  Description of Artificial Sequence: Synthetic oligonucleotide
uuaaggacuucu

SEQ ID NO: 89562 - RNA, 12 nt, Artificial Sequence
  Description of Artificial Sequence: Synthetic oligonucleotide
agugggacagag

SEQ ID NO: 89563 - RNA, 13 nt, Artificial Sequence
  Description of Artificial Sequence: Synthetic oligonucleotide
auuuguuauugug

SEQ ID NO: 89564 - RNA, 12 nt, Artificial Sequence
  Description of Artificial Sequence: Synthetic oligonucleotide
ucaaaugcauuu

SEQ ID NO: 89565 - RNA, 9 nt, Artificial Sequence
  Description of Artificial Sequence: Synthetic oligonucleotide
aggaaagcc

SEQ ID NO: 89566 - RNA, 10 nt, Artificial Sequence
  Description of Artificial Sequence: Synthetic oligonucleotide
ggaaagcccu

SEQ ID NO: 89567 - RNA, 11 nt, Artificial Sequence
  Description of Artificial Sequence: Synthetic oligonucleotide
ccagcauggcc

SEQ ID NO: 89568 - RNA, 10 nt, Artificial Sequence
  Description of Artificial Sequence: Synthetic oligonucleotide
uucucccuga

SEQ ID NO: 89569 - RNA, 11 nt, Artificial Sequence
  Description of Artificial Sequence: Synthetic oligonucleotide
aagaagcccuu

SEQ ID NO: 89570 - RNA, 11 nt, Artificial Sequence
  Description of Artificial Sequence: Synthetic oligonucleotide
gaagcccuuca

SEQ ID NO: 89571 - RNA, 10 nt, Artificial Sequence
  Description of Artificial Sequence: Synthetic oligonucleotide
cccuucagcg

SEQ ID NO: 89572 - RNA, 10 nt, Artificial Sequence
  Description of Artificial Sequence: Synthetic oligonucleotide
cuucagcggc

SEQ ID NO: 89573 - RNA, 11 nt, Artificial Sequence
  Description of Artificial Sequence: Synthetic oligonucleotide
cagcggccagu

SEQ ID NO: 89574 - RNA, 11 nt, Artificial Sequence
  Description of Artificial Sequence: Synthetic oligonucleotide
gaaaagcuccg

SEQ ID NO: 89575 - RNA, 10 nt, Artificial Sequence
  Description of Artificial Sequence: Synthetic oligonucleotide
aaagcuccgg

SEQ ID NO: 89576 - RNA, 12 nt, Artificial Sequence
  Description of Artificial Sequence: Synthetic oligonucleotide
gucaacagucug

SEQ ID NO: 89577 - RNA, 12 nt, Artificial Sequence
  Description of Artificial Sequence: Synthetic oligonucleotide
agaguucaaaag

SEQ ID NO: 89578 - RNA, 12 nt, Artificial Sequence
  Description of Artificial Sequence: Synthetic oligonucleotide
gaguucaaaagc

SEQ ID NO: 89579 - RNA, 11 nt, Artificial Sequence
  Description of Artificial Sequence: Synthetic oligonucleotide
ucaaaagcccu

SEQ ID NO: 89580 - RNA, 11 nt, Artificial Sequence
  Description of Artificial Sequence: Synthetic oligonucleotide
caaaagcccuu

SEQ ID NO: 89581 - RNA, 11 nt, Artificial Sequence
  Description of Artificial Sequence: Synthetic oligonucleotide
aaagcccuuca

SEQ ID NO: 89582 - RNA, 11 nt, Artificial Sequence
  Description of Artificial Sequence: Synthetic oligonucleotide
aagcccuucag

SEQ ID NO: 89583 - RNA, 12 nt, Artificial Sequence
  Description of Artificial Sequence: Synthetic oligonucleotide
ugaagccgcucg

SEQ ID NO: 89584 - RNA, 11 nt, Artificial Sequence
  Description of Artificial Sequence: Synthetic oligonucleotide
acgccagucaa

SEQ ID NO: 89585 - RNA, 12 nt, Artificial Sequence
  Description of Artificial Sequence: Synthetic oligonucleotide
ucuuggugcgug

SEQ ID NO: 89586 - RNA, 13 nt, Artificial Sequence
  Description of Artificial Sequence: Synthetic oligonucleotide
uuggauucaucag

SEQ ID NO: 89587 - RNA, 12 nt, Artificial Sequence
  Description of Artificial Sequence: Synthetic oligonucleotide
ggaauaccuaag

SEQ ID NO: 89588 - RNA, 11 nt, Artificial Sequence
  Description of Artificial Sequence: Synthetic oligonucleotide
uuugaggcuca

SEQ ID NO: 89589 - RNA, 10 nt, Artificial Sequence
  Description of Artificial Sequence: Synthetic oligonucleotide
cuacaauugg

SEQ ID NO: 89590 - RNA, 11 nt, Artificial Sequence
  Description of Artificial Sequence: Synthetic oligonucleotide
aguuaggagcc

SEQ ID NO: 89591 - RNA, 12 nt, Artificial Sequence
  Description of Artificial Sequence: Synthetic oligonucleotide
gucaauauccac

SEQ ID NO: 89592 - RNA, 12 nt, Artificial Sequence
  Description of Artificial Sequence: Synthetic oligonucleotide
uguucagucaca

SEQ ID NO: 89593 - RNA, 11 nt, Artificial Sequence
  Description of Artificial Sequence: Synthetic oligonucleotide
cacacacauac

SEQ ID NO: 89594 - RNA, 11 nt, Artificial Sequence
  Description of Artificial Sequence: Synthetic oligonucleotide
uccuuuugcuu

SEQ ID NO: 89595 - RNA, 15 nt, Artificial Sequence
  Description of Artificial Sequence: Synthetic oligonucleotide
uuuaaaguaauuuuu

SEQ ID NO: 89596 - RNA, 12 nt, Artificial Sequence
  Description of Artificial Sequence: Synthetic oligonucleotide
aacagucaaugg

SEQ ID NO: 89597 - RNA, 12 nt, Artificial Sequence
  Description of Artificial Sequence: Synthetic oligonucleotide
cgacaaaccaau

SEQ ID NO: 89598 - RNA, 11 nt, Artificial Sequence
  Description of Artificial Sequence: Synthetic oligonucleotide
cugcuaccacu

SEQ ID NO: 89599 - RNA, 12 nt, Artificial Sequence
  Description of Artificial Sequence: Synthetic oligonucleotide
caagcggucuua

SEQ ID NO: 89600 - RNA, 12 nt, Artificial Sequence
  Description of Artificial Sequence: Synthetic oligonucleotide
gucuuaccggcu

SEQ ID NO: 89601 - RNA, 10 nt, Artificial Sequence
  Description of Artificial Sequence: Synthetic oligonucleotide
auggguuacc

SEQ ID NO: 89602 - RNA, 10 nt, Artificial Sequence
  Description of Artificial Sequence: Synthetic oligonucleotide
uuaccugcga

SEQ ID NO: 89603 - RNA, 11 nt, Artificial Sequence
  Description of Artificial Sequence: Synthetic oligonucleotide
aucuugcugag

SEQ ID NO: 89604 - RNA, 12 nt, Artificial Sequence
  Description of Artificial Sequence: Synthetic oligonucleotide
gcauaaaacagu

SEQ ID NO: 89605 - RNA, 11 nt, Artificial Sequence
  Description of Artificial Sequence: Synthetic oligonucleotide
uccuuuauccu

SEQ ID NO: 89606 - RNA, 11 nt, Artificial Sequence
  Description of Artificial Sequence: Synthetic oligonucleotide
aacgcaaguug

SEQ ID NO: 89607 - RNA, 12 nt, Artificial Sequence
  Description of Artificial Sequence: Synthetic oligonucleotide
aacugaaaccau

SEQ ID NO: 89608 - RNA, 13 nt, Artificial Sequence
  Description of Artificial Sequence: Synthetic oligonucleotide
cuuuguuaaauau

SEQ ID NO: 89609 - RNA, 13 nt, Artificial Sequence
  Description of Artificial Sequence: Synthetic oligonucleotide
uauauuaaaaguu

SEQ ID NO: 89610 - RNA, 12 nt, Artificial Sequence
  Description of Artificial Sequence: Synthetic oligonucleotide
uuuugacuuaac

SEQ ID NO: 89611 - RNA, 12 nt, Artificial Sequence
  Description of Artificial Sequence: Synthetic oligonucleotide
caaacucagcac

SEQ ID NO: 89612 - RNA, 10 nt, Artificial Sequence
  Description of Artificial Sequence: Synthetic oligonucleotide
gcugaccuca

SEQ ID NO: 89613 - RNA, 13 nt, Artificial Sequence
  Description of Artificial Sequence: Synthetic oligonucleotide
uuauucagaucgc

SEQ ID NO: 89614 - RNA, 12 nt, Artificial Sequence
  Description of Artificial Sequence: Synthetic oligonucleotide
ggguucugggau

SEQ ID NO: 89615 - RNA, 14 nt, Artificial Sequence
  Description of Artificial Sequence: Synthetic oligonucleotide
uauuggaaauuaug

SEQ ID NO: 89616 - RNA, 12 nt, Artificial Sequence
  Description of Artificial Sequence: Synthetic oligonucleotide
uggaagcacuag

SEQ ID NO: 89617 - RNA, 12 nt, Artificial Sequence
  Description of Artificial Sequence: Synthetic oligonucleotide
uuuuuaugugga

SEQ ID NO: 89618 - RNA, 11 nt, Artificial Sequence
  Description of Artificial Sequence: Synthetic oligonucleotide
gaauugguaga

SEQ ID NO: 89619 - RNA, 12 nt, Artificial Sequence
  Description of Artificial Sequence: Synthetic oligonucleotide
uagacuuggaga

SEQ ID NO: 89620 - RNA, 12 nt, Artificial Sequence
  Description of Artificial Sequence: Synthetic oligonucleotide
uacaguauucca

SEQ ID NO: 89621 - RNA, 14 nt, Artificial Sequence
  Description of Artificial Sequence: Synthetic oligonucleotide
cacugaugaauuaa

SEQ ID NO: 89622 - RNA, 11 nt, Artificial Sequence
  Description of Artificial Sequence: Synthetic oligonucleotide
cacaucaucac

SEQ ID NO: 89623 - RNA, 12 nt, Artificial Sequence
  Description of Artificial Sequence: Synthetic oligonucleotide
ucaccaaacaga

SEQ ID NO: 89624 - RNA, 11 nt, Artificial Sequence
  Description of Artificial Sequence: Synthetic oligonucleotide
gaacaugaugg

SEQ ID NO: 89625 - RNA, 11 nt, Artificial Sequence
  Description of Artificial Sequence: Synthetic oligonucleotide
auguagacugc

SEQ ID NO: 89626 - RNA, 12 nt, Artificial Sequence
  Description of Artificial Sequence: Synthetic oligonucleotide
gaucuauuuaug

SEQ ID NO: 89627 - RNA, 11 nt, Artificial Sequence
  Description of Artificial Sequence: Synthetic oligonucleotide
cacuauuauca

SEQ ID NO: 89628 - RNA, 10 nt, Artificial Sequence
  Description of Artificial Sequence: Synthetic oligonucleotide
ucaguucugc

SEQ ID NO: 89629 - RNA, 12 nt, Artificial Sequence
  Description of Artificial Sequence: Synthetic oligonucleotide
gauuaaaccuac

SEQ ID NO: 89630 - RNA, 12 nt, Artificial Sequence
  Description of Artificial Sequence: Synthetic oligonucleotide
uaaaauccuucu

SEQ ID NO: 89631 - RNA, 11 nt, Artificial Sequence
  Description of Artificial Sequence: Synthetic oligonucleotide
augcuguagac

SEQ ID NO: 89632 - RNA, 12 nt, Artificial Sequence
  Description of Artificial Sequence: Synthetic oligonucleotide
ugauaggaauag

SEQ ID NO: 89633 - RNA, 10 nt, Artificial Sequence
  Description of Artificial Sequence: Synthetic oligonucleotide
auggcccuga

SEQ ID NO: 89634 - RNA, 10 nt, Artificial Sequence
  Description of Artificial Sequence: Synthetic oligonucleotide
uccucaagca

SEQ ID NO: 89635 - RNA, 9 nt, Artificial Sequence
  Description of Artificial Sequence: Synthetic oligonucleotide
uucagccca

SEQ ID NO: 89636 - RNA, 10 nt, Artificial Sequence
  Description of Artificial Sequence: Synthetic oligonucleotide
cugcugaacc

SEQ ID NO: 89637 - RNA, 11 nt, Artificial Sequence
  Description of Artificial Sequence: Synthetic oligonucleotide
aguucucuuca

SEQ ID NO: 89638 - RNA, 10 nt, Artificial Sequence
  Description of Artificial Sequence: Synthetic oligonucleotide
cagccuagag

SEQ ID NO: 89639 - RNA, 12 nt, Artificial Sequence
  Description of Artificial Sequence: Synthetic oligonucleotide
ucugugaagugu

SEQ ID NO: 89640 - RNA, 13 nt, Artificial Sequence
  Description of Artificial Sequence: Synthetic oligonucleotide
gagaaaauuucaa

SEQ ID NO: 89641 - RNA, 10 nt, Artificial Sequence
  Description of Artificial Sequence: Synthetic oligonucleotide
auccuccuga

SEQ ID NO: 89642 - RNA, 11 nt, Artificial Sequence
  Description of Artificial Sequence: Synthetic oligonucleotide
ugacaucauau

SEQ ID NO: 89643 - RNA, 12 nt, Artificial Sequence
  Description of Artificial Sequence: Synthetic oligonucleotide
aucuucaucaua

SEQ ID NO: 89644 - RNA, 12 nt, Artificial Sequence
  Description of Artificial Sequence: Synthetic oligonucleotide
acuagcuauuaa

SEQ ID NO: 89645 - RNA, 13 nt, Artificial Sequence
  Description of Artificial Sequence: Synthetic oligonucleotide
cucuacuaaaaau

SEQ ID NO: 89646 - RNA, 11 nt, Artificial Sequence
  Description of Artificial Sequence: Synthetic oligonucleotide
cuaucucgccu

SEQ ID NO: 89647 - RNA, 12 nt, Artificial Sequence
  Description of Artificial Sequence: Synthetic oligonucleotide
uucgguccaguu

SEQ ID NO: 89648 - RNA, 10 nt, Artificial Sequence
  Description of Artificial Sequence: Synthetic oligonucleotide
auguagccgc

SEQ ID NO: 89649 - RNA, 11 nt, Artificial Sequence
  Description of Artificial Sequence: Synthetic oligonucleotide
gaggagacuug

SEQ ID NO: 89650 - RNA, 11 nt, Artificial Sequence
  Description of Artificial Sequence: Synthetic oligonucleotide
aguagugagga

SEQ ID NO: 89651 - RNA, 13 nt, Artificial Sequence
  Description of Artificial Sequence: Synthetic oligonucleotide
agaugaguacaaa

SEQ ID NO: 89652 - RNA, 12 nt, Artificial Sequence
  Description of Artificial Sequence: Synthetic oligonucleotide
uuguuaaugggc

SEQ ID NO: 89653 - RNA, 12 nt, Artificial Sequence
  Description of Artificial Sequence: Synthetic oligonucleotide
uuuuaauuuauu

SEQ ID NO: 89654 - RNA, 11 nt, Artificial Sequence
  Description of Artificial Sequence: Synthetic oligonucleotide
auuuaaauaug

SEQ ID NO: 89655 - RNA, 12 nt, Artificial Sequence
  Description of Artificial Sequence: Synthetic oligonucleotide
auccuuuguuuc

SEQ ID NO: 89656 - RNA, 13 nt, Artificial Sequence
  Description of Artificial Sequence: Synthetic oligonucleotide
gucuaaguguuug

SEQ ID NO: 89657 - RNA, 11 nt, Artificial Sequence
  Description of Artificial Sequence: Synthetic oligonucleotide
ccugugacaaa

SEQ ID NO: 89658 - RNA, 12 nt, Artificial Sequence
  Description of Artificial Sequence: Synthetic oligonucleotide
caggcugaauua

SEQ ID NO: 89659 - RNA, 13 nt, Artificial Sequence
  Description of Artificial Sequence: Synthetic oligonucleotide
ucauucuuacaau

SEQ ID NO: 89660 - RNA, 14 nt, Artificial Sequence
  Description of Artificial Sequence: Synthetic oligonucleotide
cauucuuacaauug

SEQ ID NO: 89661 - RNA, 11 nt, Artificial Sequence
  Description of Artificial Sequence: Synthetic oligonucleotide
agagaguguac

SEQ ID NO: 89662 - RNA, 11 nt, Artificial Sequence
  Description of Artificial Sequence: Synthetic oligonucleotide
gaacucagcag

SEQ ID NO: 89663 - RNA, 12 nt, Artificial Sequence
  Description of Artificial Sequence: Synthetic oligonucleotide
uuauuuucagua

SEQ ID NO: 89664 - RNA, 11 nt, Artificial Sequence
  Description of Artificial Sequence: Synthetic oligonucleotide
cuuaaauggaa

SEQ ID NO: 89665 - RNA, 12 nt, Artificial Sequence
  Description of Artificial Sequence: Synthetic oligonucleotide
gccuaaaauugu

SEQ ID NO: 89666 - RNA, 12 nt, Artificial Sequence
  Description of Artificial Sequence: Synthetic oligonucleotide
acuaacaucugg

SEQ ID NO: 89667 - RNA, 11 nt, Artificial Sequence
  Description of Artificial Sequence: Synthetic oligonucleotide
gacugugagcu

SEQ ID NO: 89668 - RNA, 13 nt, Artificial Sequence
  Description of Artificial Sequence: Synthetic oligonucleotide
gcuuuuuauuaau

SEQ ID NO: 89669 - RNA, 12 nt, Artificial Sequence
  Description of Artificial Sequence: Synthetic oligonucleotide
ucuucuuacauu

SEQ ID NO: 89670 - RNA, 14 nt, Artificial Sequence
  Description of Artificial Sequence: Synthetic oligonucleotide
auuuguaaaaaugu

SEQ ID NO: 89671 - RNA, 14 nt, Artificial Sequence
  Description of Artificial Sequence: Synthetic oligonucleotide
ucuuaauucauauu

SEQ ID NO: 89672 - RNA, 12 nt, Artificial Sequence
  Description of Artificial Sequence: Synthetic oligonucleotide
aacuaaucauga

SEQ ID NO: 89673 - RNA, 11 nt, Artificial Sequence
  Description of Artificial Sequence: Synthetic oligonucleotide
cugcucuuggg

SEQ ID NO: 89674 - RNA, 12 nt, Artificial Sequence
  Description of Artificial Sequence: Synthetic oligonucleotide
aguagcuuugag

SEQ ID NO: 89675 - RNA, 13 nt, Artificial Sequence
  Description of Artificial Sequence: Synthetic oligonucleotide
acguaauauuuca

SEQ ID NO: 89676 - RNA, 12 nt, Artificial Sequence
  Description of Artificial Sequence: Synthetic oligonucleotide
auucucuucacu

SEQ ID NO: 89677 - RNA, 13 nt, Artificial Sequence
  Description of Artificial Sequence: Synthetic oligonucleotide
uaaugcuaagaaa

SEQ ID NO: 89678 - RNA, 11 nt, Artificial Sequence
  Description of Artificial Sequence: Synthetic oligonucleotide
cugaaaaucaa

SEQ ID NO: 89679 - RNA, 13 nt, Artificial Sequence
  Description of Artificial Sequence: Synthetic oligonucleotide
auaugauuacuuu

SEQ ID NO: 89680 - RNA, 13 nt, Artificial Sequence
  Description of Artificial Sequence: Synthetic oligonucleotide
auuuuguucuaca

SEQ ID NO: 89681 - RNA, 11 nt, Artificial Sequence
  Description of Artificial Sequence: Synthetic oligonucleotide
ccgggacucuc

SEQ ID NO: 89682 - RNA, 13 nt, Artificial Sequence
  Description of Artificial Sequence: Synthetic oligonucleotide
cuuuaaaguaaag

SEQ ID NO: 89683 - RNA, 12 nt, Artificial Sequence
  Description of Artificial Sequence: Synthetic oligonucleotide
cuggaagccugg

SEQ ID NO: 89684 - RNA, 13 nt, Artificial Sequence
  Description of Artificial Sequence: Synthetic oligonucleotide
aaacaaaagagag

SEQ ID NO: 89685 - RNA, 12 nt, Artificial Sequence
  Description of Artificial Sequence: Synthetic oligonucleotide
ucaguuaugccg

SEQ ID NO: 89686 - RNA, 12 nt, Artificial Sequence
  Description of Artificial Sequence: Synthetic oligonucleotide
aaaagaagucca

SEQ ID NO: 89687 - RNA, 10 nt, Artificial Sequence
  Description of Artificial Sequence: Synthetic oligonucleotide
ggugagguua

SEQ ID NO: 89688 - RNA, 10 nt, Artificial Sequence
  Description of Artificial Sequence: Synthetic oligonucleotide
ggaagaggac

SEQ ID NO: 89689 - RNA, 12 nt, Artificial Sequence
  Description of Artificial Sequence: Synthetic oligonucleotide
agcaaguauugu

SEQ ID NO: 89690 - RNA, 11 nt, Artificial Sequence
  Description of Artificial Sequence: Synthetic oligonucleotide
uuguagcacuc

SEQ ID NO: 89691 - RNA, 13 nt, Artificial Sequence
  Description of Artificial Sequence: Synthetic oligonucleotide
caaaaccacaaau

SEQ ID NO: 89692 - RNA, 11 nt, Artificial Sequence
  Description of Artificial Sequence: Synthetic oligonucleotide
aagcccauaca

SEQ ID NO: 89693 - RNA, 10 nt, Artificial Sequence
  Description of Artificial Sequence: Synthetic oligonucleotide
gcccauacag

SEQ ID NO: 89694 - RNA, 11 nt, Artificial Sequence
  Description of Artificial Sequence: Synthetic oligonucleotide
agaaaccuucc

SEQ ID NO: 89695 - RNA, 9 nt, Artificial Sequence
  Description of Artificial Sequence: Synthetic oligonucleotide
uauaccuac

SEQ ID NO: 89696 - RNA, 12 nt, Artificial Sequence
  Description of Artificial Sequence: Synthetic oligonucleotide
ccaguuuucgga

SEQ ID NO: 89697 - RNA, 8 nt, Artificial Sequence
  Description of Artificial Sequence: Synthetic oligonucleotide
gaacaggg

SEQ ID NO: 89698 - RNA, 12 nt, Artificial Sequence
  Description of Artificial Sequence: Synthetic oligonucleotide
uaacuuuccagu

SEQ ID NO: 89699 - RNA, 13 nt, Artificial Sequence
  Description of Artificial Sequence: Synthetic oligonucleotide
aaguuugguuuug

SEQ ID NO: 89700 - RNA, 11 nt, Artificial Sequence
  Description of Artificial Sequence: Synthetic oligonucleotide
uucccacugua

SEQ ID NO: 89701 - RNA, 12 nt, Artificial Sequence
  Description of Artificial Sequence: Synthetic oligonucleotide
gauaccauauga

SEQ ID NO: 89702 - RNA, 10 nt, Artificial Sequence
  Description of Artificial Sequence: Synthetic oligonucleotide
acaugggcug

SEQ ID NO: 89703 - RNA, 12 nt, Artificial Sequence
  Description of Artificial Sequence: Synthetic oligonucleotide
aacuuuuucaua

SEQ ID NO: 89704 - RNA, 11 nt, Artificial Sequence
  Description of Artificial Sequence: Synthetic oligonucleotide
augaggccgga

SEQ ID NO: 89705 - RNA, 10 nt, Artificial Sequence
  Description of Artificial Sequence: Synthetic oligonucleotide
cugcauuugu

SEQ ID NO: 89706 - RNA, 12 nt, Artificial Sequence
  Description of Artificial Sequence: Synthetic oligonucleotide
auguuuacuacc

SEQ ID NO: 89707 - RNA, 14 nt, Artificial Sequence
  Description of Artificial Sequence: Synthetic oligonucleotide
auuuuuugaugaaa

SEQ ID NO: 89708 - RNA, 13 nt, Artificial Sequence
  Description of Artificial Sequence: Synthetic oligonucleotide
agugugugaauuu

SEQ ID NO: 89709 - RNA, 12 nt, Artificial Sequence
  Description of Artificial Sequence: Synthetic oligonucleotide
agcaauguaugu

SEQ ID NO: 89710 - RNA, 13 nt, Artificial Sequence
  Description of Artificial Sequence: Synthetic oligonucleotide
aagcacauauaua

SEQ ID NO: 89711 - RNA, 13 nt, Artificial Sequence
  Description of Artificial Sequence: Synthetic oligonucleotide
uaauaguuucucc

SEQ ID NO: 89712 - RNA, 12 nt, Artificial Sequence
  Description of Artificial Sequence: Synthetic oligonucleotide
guuucuccaaau

SEQ ID NO: 89713 - RNA, 12 nt, Artificial Sequence
  Description of Artificial Sequence: Synthetic oligonucleotide
acuuccuagaaa

SEQ ID NO: 89714 - RNA, 12 nt, Artificial Sequence
  Description of Artificial Sequence: Synthetic oligonucleotide
acaccauauaug

SEQ ID NO: 89715 - RNA, 13 nt, Artificial Sequence
  Description of Artificial Sequence: Synthetic oligonucleotide
uauaugaauggag

SEQ ID NO: 89716 - RNA, 12 nt, Artificial Sequence
  Description of Artificial Sequence: Synthetic oligonucleotide
cauuuacaggga

SEQ ID NO: 89717 - RNA, 12 nt, Artificial Sequence
  Description of Artificial Sequence: Synthetic oligonucleotide
auuuacagggac

SEQ ID NO: 89718 - RNA, 9 nt, Artificial Sequence
  Description of Artificial Sequence: Synthetic oligonucleotide
gggaccuga

SEQ ID NO: 89719 - RNA, 13 nt, Artificial Sequence
  Description of Artificial Sequence: Synthetic oligonucleotide
guuugacugcauc

SEQ ID NO: 89720 - RNA, 12 nt, Artificial Sequence
  Description of Artificial Sequence: Synthetic oligonucleotide
uugacugcaucg

SEQ ID NO: 89721 - RNA, 11 nt, Artificial Sequence
  Description of Artificial Sequence: Synthetic oligonucleotide
aguucacaggg

SEQ ID NO: 89722 - RNA, 12 nt, Artificial Sequence
  Description of Artificial Sequence: Synthetic oligonucleotide
gcaccucugucc

SEQ ID NO: 89723 - RNA, 14 nt, Artificial Sequence
  Description of Artificial Sequence: Synthetic oligonucleotide
guuugucuuuuuaa

SEQ ID NO: 89724 - RNA, 13 nt, Artificial Sequence
  Description of Artificial Sequence: Synthetic oligonucleotide
uugucuuuuuaag

SEQ ID NO: 89725 - RNA, 12 nt, Artificial Sequence
  Description of Artificial Sequence: Synthetic oligonucleotide
cuaaagguuguc

SEQ ID NO: 89726 - RNA, 11 nt, Artificial Sequence
  Description of Artificial Sequence: Synthetic oligonucleotide
agguugucgac

SEQ ID NO: 89727 - RNA, 12 nt, Artificial Sequence
  Description of Artificial Sequence: Synthetic oligonucleotide
ccuggcaauugu

SEQ ID NO: 89728 - RNA, 11 nt, Artificial Sequence
  Description of Artificial Sequence: Synthetic oligonucleotide
guggugcgagg

SEQ ID NO: 89729 - RNA, 12 nt, Artificial Sequence
  Description of Artificial Sequence: Synthetic oligonucleotide
gagacaugaaau

SEQ ID NO: 89730 - RNA, 12 nt, Artificial Sequence
  Description of Artificial Sequence: Synthetic oligonucleotide
uauauuucucca

SEQ ID NO: 89731 - RNA, 9 nt, Artificial Sequence
  Description of Artificial Sequence: Synthetic oligonucleotide
augaaggcu

SEQ ID NO: 89732 - RNA, 10 nt, Artificial Sequence
  Description of Artificial Sequence: Synthetic oligonucleotide
cuggaguggu

SEQ ID NO: 89733 - RNA, 10 nt, Artificial Sequence
  Description of Artificial Sequence: Synthetic oligonucleotide
ggaagagagg

SEQ ID NO: 89734 - RNA, 11 nt, Artificial Sequence
  Description of Artificial Sequence: Synthetic oligonucleotide
uugcaucgggc

SEQ ID NO: 89735 - RNA, 12 nt, Artificial Sequence
  Description of Artificial Sequence: Synthetic oligonucleotide
uauccuacugug

SEQ ID NO: 89736 - RNA, 12 nt, Artificial Sequence
  Description of Artificial Sequence: Synthetic oligonucleotide
ccuacuguguaa

SEQ ID NO: 89737 - RNA, 11 nt, Artificial Sequence
  Description of Artificial Sequence: Synthetic oligonucleotide
cuuguagugua

SEQ ID NO: 89738 - RNA, 12 nt, Artificial Sequence
  Description of Artificial Sequence: Synthetic oligonucleotide
cuuuguugauug

SEQ ID NO: 89739 - RNA, 13 nt, Artificial Sequence
  Description of Artificial Sequence: Synthetic oligonucleotide
uuguugauugaaa

SEQ ID NO: 89740 - RNA, 14 nt, Artificial Sequence
  Description of Artificial Sequence: Synthetic oligonucleotide
ucuuuuucuuccau

SEQ ID NO: 89741 - RNA, 12 nt, Artificial Sequence
  Description of Artificial Sequence: Synthetic oligonucleotide
aucuuccuucua

SEQ ID NO: 89742 - RNA, 12 nt, Artificial Sequence
  Description of Artificial Sequence: Synthetic oligonucleotide
ugaaugcuucau

SEQ ID NO: 89743 - RNA, 12 nt, Artificial Sequence
  Description of Artificial Sequence: Synthetic oligonucleotide
gaaugcuucaug

SEQ ID NO: 89744 - RNA, 12 nt, Artificial Sequence
  Description of Artificial Sequence: Synthetic oligonucleotide
auucuacuuuga

SEQ ID NO: 89745 - RNA, 12 nt, Artificial Sequence
  Description of Artificial Sequence: Synthetic oligonucleotide
gcaacuacagac

SEQ ID NO: 89746 - RNA, 12 nt, Artificial Sequence
  Description of Artificial Sequence: Synthetic oligonucleotide
accaaggucaac

SEQ ID NO: 89747 - RNA, 12 nt, Artificial Sequence
  Description of Artificial Sequence: Synthetic oligonucleotide
gacuaucucgac

SEQ ID NO: 89748 - RNA, 12 nt, Artificial Sequence
  Description of Artificial Sequence: Synthetic oligonucleotide
accuucccaaac

SEQ ID NO: 89749 - RNA, 13 nt, Artificial Sequence
  Description of Artificial Sequence: Synthetic oligonucleotide
caagcuuagaacu

SEQ ID NO: 89750 - RNA, 14 nt, Artificial Sequence
  Description of Artificial Sequence: Synthetic oligonucleotide
gcuuagaacuuuaa

SEQ ID NO: 89751 - RNA, 13 nt, Artificial Sequence
  Description of Artificial Sequence: Synthetic oligonucleotide
aacuuuaagcaac

SEQ ID NO: 89752 - RNA, 10 nt, Artificial Sequence
  Description of Artificial Sequence: Synthetic oligonucleotide
agaccaccac

SEQ ID NO: 89753 - RNA, 13 nt, Artificial Sequence
  Description of Artificial Sequence: Synthetic oligonucleotide
cgagaaauaaagu

SEQ ID NO: 89754 - RNA, 13 nt, Artificial Sequence
  Description of Artificial Sequence: Synthetic oligonucleotide
gagaaauaaaguu

SEQ ID NO: 89755 - RNA, 11 nt, Artificial Sequence
  Description of Artificial Sequence: Synthetic oligonucleotide
ggaaaugaucc

SEQ ID NO: 89756 - RNA, 12 nt, Artificial Sequence
  Description of Artificial Sequence: Synthetic oligonucleotide
aagaaaugaaac

SEQ ID NO: 89757 - RNA, 12 nt, Artificial Sequence
  Description of Artificial Sequence: Synthetic oligonucleotide
uuuccauccucc

SEQ ID NO: 89758 - RNA, 14 nt, Artificial Sequence
  Description of Artificial Sequence: Synthetic oligonucleotide
cugaaaaucuuuga

SEQ ID NO: 89759 - RNA, 10 nt, Artificial Sequence
  Description of Artificial Sequence: Synthetic oligonucleotide
gccguucagg

SEQ ID NO: 89760 - RNA, 12 nt, Artificial Sequence
  Description of Artificial Sequence: Synthetic oligonucleotide
aggguccagaag

SEQ ID NO: 89761 - RNA, 12 nt, Artificial Sequence
  Description of Artificial Sequence: Synthetic oligonucleotide
caagacugcuug

SEQ ID NO: 89762 - RNA, 12 nt, Artificial Sequence
  Description of Artificial Sequence: Synthetic oligonucleotide
ccaugucuuugg

SEQ ID NO: 89763 - RNA, 10 nt, Artificial Sequence
  Description of Artificial Sequence: Synthetic oligonucleotide
ccugaaacac

SEQ ID NO: 89764 - RNA, 11 nt, Artificial Sequence
  Description of Artificial Sequence: Synthetic oligonucleotide
cucuguaccuc

SEQ ID NO: 89765 - RNA, 11 nt, Artificial Sequence
  Description of Artificial Sequence: Synthetic oligonucleotide
gcaagacaaga

SEQ ID NO: 89766 - RNA, 12 nt, Artificial Sequence
  Description of Artificial Sequence: Synthetic oligonucleotide
caagacaagaaa

SEQ ID NO: 89767 - RNA, 11 nt, Artificial Sequence
  Description of Artificial Sequence: Synthetic oligonucleotide
guacaagaucc

SEQ ID NO: 89768 - RNA, 11 nt, Artificial Sequence
  Description of Artificial Sequence: Synthetic oligonucleotide
guacuugcaga

SEQ ID NO: 89769 - RNA, 12 nt, Artificial Sequence
  Description of Artificial Sequence: Synthetic oligonucleotide
gaucgauacaga

SEQ ID NO: 89770 - RNA, 12 nt, Artificial Sequence
  Description of Artificial Sequence: Synthetic oligonucleotide
auaaaaauaaau

SEQ ID NO: 89771 - RNA, 12 nt, Artificial Sequence
  Description of Artificial Sequence: Synthetic oligonucleotide
aaaaauaaauau

SEQ ID NO: 89772 - RNA, 12 nt, Artificial Sequence
  Description of Artificial Sequence: Synthetic oligonucleotide
uugacugcugug

SEQ ID NO: 89773 - RNA, 12 nt, Artificial Sequence
  Description of Artificial Sequence: Synthetic oligonucleotide
gagaugagagac

SEQ ID NO: 89774 - RNA, 9 nt, Artificial Sequence
  Description of Artificial Sequence: Synthetic oligonucleotide
cccacuugg

SEQ ID NO: 89775 - RNA, 2368 nt, Homo sapiens
gcggugccgcccgccguggccgccucagcccaccagccgggaccgcgagccaugcuguccgccgcccgcccccaggguuguuaaagccagacugcgaacucucgccacugccgccaccgccgcgucccgucccaccgucgcgggcaacaaccaaagucgccgcaacugcagcacagagcgggcaaagccaggcaggccauggggcucugggcgcuguugccuggcuggguuucugcuacgcugcugcuggcgcuggccgcucugcccgcagcccuggcugccaacagcaguggccgauggugggguauugugaacguagccuccuccacgaaccugcuuacagacuccaagagucugcaacugguacucgagcccagucugcagcuguugagccgcaaacagcggcgucugauacgccaaaauccggggauccugcacagcgugaguggggggcugcagagugccgugcgcgagugcaaguggcaguuccggaaucgccgcuggaacugucccacugcuccagggccccaccucuucggcaagaucgucaaccgaggcugucgagaaacggcguuuaucuucgcuaucaccuccgccggggucacccauucgguggcgcgcuccugcucagaagguuccaucgaauccugcacgugugacuaccggcggcgcggccccgggggccccgacuggcacugggggggcugcagcgacaacauugacuucggccgccucuucggccgggaguucguggacuccggggagaaggggcgggaccugcgcuuccucaugaaccuucacaacaacgaggcaggccguacgaccguauucuccgagaugcgccaggagugcaagugccacgggauguccggcucaugcacggugcgcacgugcuggaugcggcugcccacgcugcgcgccgugggcgaugugcugcgcgaccgcuucgacggcgccucgcgcguccuguacggcaaccgcggcagcaaccgcgcuucgcgagcggagcugcugcgccuggagccggaagacccggcccacaaaccgcccuccccccacgaccucgucuacuucgagaaaucgcccaacuucugcacguacagcggacgccugggcacagcaggcacggcagggcgcgccuguaacagcucgucgcccgcgcuggacggcugcgagcugcucugcugcggcaggggccaccgcacgcgcacgcagcgcgucaccgagcgcugcaacugcaccuuccacuggugcugccacgucagcugccgcaacugcacgcacacgcgcguacugcacgagugucugugaggcgcugcgcggacucgcccccaggaaacgcucuccucgagcccucccccaaacagacucgcuagcacucaagacccgguuauucgcccacccgaguaccuccagucacacuccccgcgguucauacgcaucccaucucucccacuuccuccuaccuggggacuccucaaaccacuugccuggggcggcaugaacccucuugccauccugauggaccugccccggaccuaccucccucccucuccgcgggagaccccuuguugcacugcccccugcuuggccaggaggugagagaaggauggguccccuccgccauggggucggcuccugauggugucauucugccugcuccaucgcgccagcgaccucucugccucucuucuuccccuuuguccugcguuuucuccggguccuccuaagucccuuccuauucuccugccaugggugcagacccugaacccacaccugggcaucagggccuuucuccuccccaccuguagcugaagcaggagguuacagggcaaaagggcagcugugaugauguggaaaugagguugggggaaccagcagaaaugcccccauucucccagucucugucguggagccauugaacagcugugagccaugccucccugggccaccuccuaccccuuccuguccugccuccucaucaguguguaaauaauuugcacugaaacguggauacagagccacgaguuuggauguuguaaauaaaacuauuuauugugcugggucccagccugguuugcaaagaccaccuccaacccaacccaaucccucuccacucuucucuccuuucucccugcagccuuuucuggucccucuucucuccucaguuucucaaagaugcguuugccuccuggaaucaguauuuccuuccacuguagcuauuagcggcuccucgcccccaccaguguagcaucuuccucugcagaauaaaaucucuauuuuuaucgaugacuugguggcuuuuccuugaauccagaacacaaccuuguuugugguguccccuauccuccccuuuuaccacucccag

SEQ ID NO: 89776 - RNA, 19 nt, Artificial Sequence
  Description of Artificial Sequence: Synthetic oligonucleotide
gcggugccgcccgccgugg

SEQ ID NO: 89777 - RNA, 19 nt, Artificial Sequence
  Description of Artificial Sequence: Synthetic oligonucleotide
gccgccucagcccaccagc

SEQ ID NO: 89778 - RNA, 19 nt, Artificial Sequence
  Description of Artificial Sequence: Synthetic oligonucleotide
ccgggaccgcgagccaugc

SEQ ID NO: 89779 - RNA, 19 nt, Artificial Sequence
  Description of Artificial Sequence: Synthetic oligonucleotide
cuguccgccgcccgccccc

SEQ ID NO: 89780 - RNA, 19 nt, Artificial Sequence
  Description of Artificial Sequence: Synthetic oligonucleotide
caggguuguuaaagccaga

SEQ ID NO: 89781 - RNA, 19 nt, Artificial Sequence
  Description of Artificial Sequence: Synthetic oligonucleotide
acugcgaacucucgccacu

SEQ ID NO: 89782 - RNA, 19 nt, Artificial Sequence
  Description of Artificial Sequence: Synthetic oligonucleotide
ugccgccaccgccgcgucc

SEQ ID NO: 89783 - RNA, 19 nt, Artificial Sequence
  Description of Artificial Sequence: Synthetic oligonucleotide
ccgucccaccgucgcgggc

SEQ ID NO: 89784 - RNA, 19 nt, Artificial Sequence
  Description of Artificial Sequence: Synthetic oligonucleotide
caacaaccaaagucgccgc

SEQ ID NO: 89785 - RNA, 19 nt, Artificial Sequence
  Description of Artificial Sequence: Synthetic oligonucleotide
caacugcagcacagagcgg

SEQ ID NO: 89786 - RNA, 19 nt, Artificial Sequence
  Description of Artificial Sequence: Synthetic oligonucleotide
ggcaaagccaggcaggcca

SEQ ID NO: 89787 - RNA, 19 nt, Artificial Sequence
  Description of Artificial Sequence: Synthetic oligonucleotide
auggggcucugggcgcugu

SEQ ID NO: 89788 - RNA, 19 nt, Artificial Sequence
  Description of Artificial Sequence: Synthetic oligonucleotide
uugccuggcuggguuucug

SEQ ID NO: 89789 - RNA, 19 nt, Artificial Sequence
  Description of Artificial Sequence: Synthetic oligonucleotide
gcuacgcugcugcuggcgc

SEQ ID NO: 89790 - RNA, 19 nt, Artificial Sequence
  Description of Artificial Sequence: Synthetic oligonucleotide
cuggccgcucugcccgcag

SEQ ID NO: 89791 - RNA, 19 nt, Artificial Sequence
  Description of Artificial Sequence: Synthetic oligonucleotide
gcccuggcugccaacagca

SEQ ID NO: 89792 - RNA, 19 nt, Artificial Sequence
  Description of Artificial Sequence: Synthetic oligonucleotide
aguggccgaugguggggua

SEQ ID NO: 89793 - RNA, 19 nt, Artificial Sequence
  Description of Artificial Sequence: Synthetic oligonucleotide
auugugaacguagccuccu

SEQ ID NO: 89794 - RNA, 19 nt, Artificial Sequence
  Description of Artificial Sequence: Synthetic oligonucleotide
uccacgaaccugcuuacag

SEQ ID NO: 89795 - RNA, 19 nt, Artificial Sequence
  Description of Artificial Sequence: Synthetic oligonucleotide
gacuccaagagucugcaac

SEQ ID NO: 89796 - RNA, 19 nt, Artificial Sequence
  Description of Artificial Sequence: Synthetic oligonucleotide
cugguacucgagcccaguc

SEQ ID NO: 89797 - RNA, 19 nt, Artificial Sequence
  Description of Artificial Sequence: Synthetic oligonucleotide
cugcagcuguugagccgca

SEQ ID NO: 89798 - RNA, 19 nt, Artificial Sequence
  Description of Artificial Sequence: Synthetic oligonucleotide
aaacagcggcgucugauac

SEQ ID NO: 89799 - RNA, 19 nt, Artificial Sequence
  Description of Artificial Sequence: Synthetic oligonucleotide
cgccaaaauccggggaucc

SEQ ID NO: 89800 - RNA, 19 nt, Artificial Sequence
  Description of Artificial Sequence: Synthetic oligonucleotide
cugcacagcgugagugggg

SEQ ID NO: 89801 - RNA, 19 nt, Artificial Sequence
  Description of Artificial Sequence: Synthetic oligonucleotide
gggcugcagagugccgugc

SEQ ID NO: 89802 - RNA, 19 nt, Artificial Sequence
  Description of Artificial Sequence: Synthetic oligonucleotide
cgcgagugcaaguggcagu

SEQ ID NO: 89803 - RNA, 19 nt, Artificial Sequence
  Description of Artificial Sequence: Synthetic oligonucleotide
uuccggaaucgccgcugga

SEQ ID NO: 89804 - RNA, 19 nt, Artificial Sequence
  Description of Artificial Sequence: Synthetic oligonucleotide
aacugucccacugcuccag

SEQ ID NO: 89805 - RNA, 19 nt, Artificial Sequence
  Description of Artificial Sequence: Synthetic oligonucleotide
gggccccaccucuucggca

SEQ ID NO: 89806 - RNA, 19 nt, Artificial Sequence
  Description of Artificial Sequence: Synthetic oligonucleotide
aagaucgucaaccgaggcu

SEQ ID NO: 89807 - RNA, 19 nt, Artificial Sequence
  Description of Artificial Sequence: Synthetic oligonucleotide
ugucgagaaacggcguuua

SEQ ID NO: 89808 - RNA, 19 nt, Artificial Sequence
  Description of Artificial Sequence: Synthetic oligonucleotide
aucuucgcuaucaccuccg

SEQ ID NO: 89809 - RNA, 19 nt, Artificial Sequence
  Description of Artificial Sequence: Synthetic oligonucleotide
gccggggucacccauucgg

SEQ ID NO: 89810 - RNA, 19 nt, Artificial Sequence
  Description of Artificial Sequence: Synthetic oligonucleotide
guggcgcgcuccugcucag

SEQ ID NO: 89811 - RNA, 19 nt, Artificial Sequence
  Description of Artificial Sequence: Synthetic oligonucleotide
gaagguuccaucgaauccu

SEQ ID NO: 89812 - RNA, 19 nt, Artificial Sequence
  Description of Artificial Sequence: Synthetic oligonucleotide
ugcacgugugacuaccggc

SEQ ID NO: 89813 - RNA, 19 nt, Artificial Sequence
  Description of Artificial Sequence: Synthetic oligonucleotide
cggcgcggccccgggggcc

SEQ ID NO: 89814 - RNA, 19 nt, Artificial Sequence
  Description of Artificial Sequence: Synthetic oligonucleotide
cccgacuggcacugggggg

SEQ ID NO: 89815 - RNA, 19 nt, Artificial Sequence
  Description of Artificial Sequence: Synthetic oligonucleotide
ggcugcagcgacaacauug

SEQ ID NO: 89816 - RNA, 19 nt, Artificial Sequence
  Description of Artificial Sequence: Synthetic oligonucleotide
gacuucggccgccucuucg

SEQ ID NO: 89817 - RNA, 19 nt, Artificial Sequence
  Description of Artificial Sequence: Synthetic oligonucleotide
ggccgggaguucguggacu

SEQ ID NO: 89818 - RNA, 19 nt, Artificial Sequence
  Description of Artificial Sequence: Synthetic oligonucleotide
uccggggagaaggggcggg

SEQ ID NO: 89819 - RNA, 19 nt, Artificial Sequence
  Description of Artificial Sequence: Synthetic oligonucleotide
gaccugcgcuuccucauga

SEQ ID NO: 89820 - RNA, 19 nt, Artificial Sequence
  Description of Artificial Sequence: Synthetic oligonucleotide
aaccuucacaacaacgagg

SEQ ID NO: 89821 - RNA, 19 nt, Artificial Sequence
  Description of Artificial Sequence: Synthetic oligonucleotide
gcaggccguacgaccguau

SEQ ID NO: 89822 - RNA, 19 nt, Artificial Sequence
  Description of Artificial Sequence: Synthetic oligonucleotide
uucuccgagaugcgccagg

SEQ ID NO: 89823 - RNA, 19 nt, Artificial Sequence
  Description of Artificial Sequence: Synthetic oligonucleotide
gagugcaagugccacggga

SEQ ID NO: 89824 - RNA, 19 nt, Artificial Sequence
  Description of Artificial Sequence: Synthetic oligonucleotide
auguccggcucaugcacgg

SEQ ID NO: 89825 - RNA, 19 nt, Artificial Sequence
  Description of Artificial Sequence: Synthetic oligonucleotide
gugcgcacgugcuggaugc

SEQ ID NO: 89826 - RNA, 19 nt, Artificial Sequence
  Description of Artificial Sequence: Synthetic oligonucleotide
cggcugcccacgcugcgcg

SEQ ID NO: 89827 - RNA, 19 nt, Artificial Sequence
  Description of Artificial Sequence: Synthetic oligonucleotide
gccgugggcgaugugcugc

SEQ ID NO: 89828 - RNA, 19 nt, Artificial Sequence
  Description of Artificial Sequence: Synthetic oligonucleotide
cgcgaccgcuucgacggcg

SEQ ID NO: 89829 - RNA, 19 nt, Artificial Sequence
  Description of Artificial Sequence: Synthetic oligonucleotide
gccucgcgcguccuguacg

SEQ ID NO: 89830 - RNA, 19 nt, Artificial Sequence
  Description of Artificial Sequence: Synthetic oligonucleotide
ggcaaccgcggcagcaacc

SEQ ID NO: 89831 - RNA, 19 nt, Artificial Sequence
  Description of Artificial Sequence: Synthetic oligonucleotide
cgcgcuucgcgagcggagc

SEQ ID NO: 89832 - RNA, 19 nt, Artificial Sequence
  Description of Artificial Sequence: Synthetic oligonucleotide
cugcugcgccuggagccgg

SEQ ID NO: 89833 - RNA, 19 nt, Artificial Sequence
  Description of Artificial Sequence: Synthetic oligonucleotide
gaagacccggcccacaaac

SEQ ID NO: 89834 - RNA, 19 nt, Artificial Sequence
  Description of Artificial Sequence: Synthetic oligonucleotide
ccgcccuccccccacgacc

SEQ ID NO: 89835 - RNA, 19 nt, Artificial Sequence
  Description of Artificial Sequence: Synthetic oligonucleotide
cucgucuacuucgagaaau

SEQ ID NO: 89836 - RNA, 19 nt, Artificial Sequence
  Description of Artificial Sequence: Synthetic oligonucleotide
ucgcccaacuucugcacgu

SEQ ID NO: 89837 - RNA, 19 nt, Artificial Sequence
  Description of Artificial Sequence: Synthetic oligonucleotide
uacagcggacgccugggca

SEQ ID NO: 89838 - RNA, 19 nt, Artificial Sequence
  Description of Artificial Sequence: Synthetic oligonucleotide
acagcaggcacggcagggc

SEQ ID NO: 89839 - RNA, 19 nt, Artificial Sequence
  Description of Artificial Sequence: Synthetic oligonucleotide
cgcgccuguaacagcucgu

SEQ ID NO: 89840 - RNA, 19 nt, Artificial Sequence
  Description of Artificial Sequence: Synthetic oligonucleotide
ucgcccgcgcuggacggcu

SEQ ID NO: 89841 - RNA, 19 nt, Artificial Sequence
  Description of Artificial Sequence: Synthetic oligonucleotide
ugcgagcugcucugcugcg

SEQ ID NO: 89842 - RNA, 19 nt, Artificial Sequence
  Description of Artificial Sequence: Synthetic oligonucleotide
ggcaggggccaccgcacgc

SEQ ID NO: 89843 - RNA, 19 nt, Artificial Sequence
  Description of Artificial Sequence: Synthetic oligonucleotide
cgcacgcagcgcgucaccg

SEQ ID NO: 89844 - RNA, 19 nt, Artificial Sequence
  Description of Artificial Sequence: Synthetic oligonucleotide
gagcgcugcaacugcaccu

SEQ ID NO: 89845 - RNA, 19 nt, Artificial Sequence
  Description of Artificial Sequence: Synthetic oligonucleotide
uuccacuggugcugccacg

SEQ ID NO: 89846 - RNA, 19 nt, Artificial Sequence
  Description of Artificial Sequence: Synthetic oligonucleotide
gucagcugccgcaacugca

SEQ ID NO: 89847 - RNA, 19 nt, Artificial Sequence
  Description of Artificial Sequence: Synthetic oligonucleotide
acgcacacgcgcguacugc

SEQ ID NO: 89848 - RNA, 19 nt, Artificial Sequence
  Description of Artificial Sequence: Synthetic oligonucleotide
cacgagugucugugaggcg

SEQ ID NO: 89849 - RNA, 19 nt, Artificial Sequence
  Description of Artificial Sequence: Synthetic oligonucleotide
gcugcgcggacucgccccc

SEQ ID NO: 89850 - RNA, 19 nt, Artificial Sequence
  Description of Artificial Sequence: Synthetic oligonucleotide
caggaaacgcucuccucga

SEQ ID NO: 89851 - RNA, 19 nt, Artificial Sequence
  Description of Artificial Sequence: Synthetic oligonucleotide
agcccucccccaaacagac

SEQ ID NO: 89852 - RNA, 19 nt, Artificial Sequence
  Description of Artificial Sequence: Synthetic oligonucleotide
cucgcuagcacucaagacc

SEQ ID NO: 89853 - RNA, 19 nt, Artificial Sequence
  Description of Artificial Sequence: Synthetic oligonucleotide
ccgguuauucgcccacccg

SEQ ID NO: 89854 - RNA, 19 nt, Artificial Sequence
  Description of Artificial Sequence: Synthetic oligonucleotide
gaguaccuccagucacacu

SEQ ID NO: 89855 - RNA, 19 nt, Artificial Sequence
  Description of Artificial Sequence: Synthetic oligonucleotide
uccccgcgguucauacgca

SEQ ID NO: 89856 - RNA, 19 nt, Artificial Sequence
  Description of Artificial Sequence: Synthetic oligonucleotide
aucccaucucucccacuuc

SEQ ID NO: 89857 - RNA, 19 nt, Artificial Sequence
  Description of Artificial Sequence: Synthetic oligonucleotide
ccuccuaccuggggacucc

SEQ ID NO: 89858 - RNA, 19 nt, Artificial Sequence
  Description of Artificial Sequence: Synthetic oligonucleotide
cucaaaccacuugccuggg

SEQ ID NO: 89859 - RNA, 19 nt, Artificial Sequence
  Description of Artificial Sequence: Synthetic oligonucleotide
ggcggcaugaacccucuug

SEQ ID NO: 89860 - RNA, 19 nt, Artificial Sequence
  Description of Artificial Sequence: Synthetic oligonucleotide
gccauccugauggaccugc

SEQ ID NO: 89861 - RNA, 19 nt, Artificial Sequence
  Description of Artificial Sequence: Synthetic oligonucleotide
ccccggaccuaccucccuc

SEQ ID NO: 89862 - RNA, 19 nt, Artificial Sequence
  Description of Artificial Sequence: Synthetic oligonucleotide
cccucuccgcgggagaccc

SEQ ID NO: 89863 - RNA, 19 nt, Artificial Sequence
  Description of Artificial Sequence: Synthetic oligonucleotide
ccuuguugcacugcccccu

SEQ ID NO: 89864 - RNA, 19 nt, Artificial Sequence
  Description of Artificial Sequence: Synthetic oligonucleotide
ugcuuggccaggaggugag

SEQ ID NO: 89865 - RNA, 19 nt, Artificial Sequence
  Description of Artificial Sequence: Synthetic oligonucleotide
gagaaggauggguccccuc

SEQ ID NO: 89866 - RNA, 19 nt, Artificial Sequence
  Description of Artificial Sequence: Synthetic oligonucleotide
ccgccauggggucggcucc

SEQ ID NO: 89867 - RNA, 19 nt, Artificial Sequence
  Description of Artificial Sequence: Synthetic oligonucleotide
cugauggugucauucugcc

SEQ ID NO: 89868 - RNA, 19 nt, Artificial Sequence
  Description of Artificial Sequence: Synthetic oligonucleotide
cugcuccaucgcgccagcg

SEQ ID NO: 89869 - RNA, 19 nt, Artificial Sequence
  Description of Artificial Sequence: Synthetic oligonucleotide
gaccucucugccucucuuc

SEQ ID NO: 89870 - RNA, 19 nt, Artificial Sequence
  Description of Artificial Sequence: Synthetic oligonucleotide
cuuccccuuuguccugcgu

SEQ ID NO: 89871 - RNA, 19 nt, Artificial Sequence
  Description of Artificial Sequence: Synthetic oligonucleotide
uuuucuccggguccuccua

SEQ ID NO: 89872 - RNA, 19 nt, Artificial Sequence
  Description of Artificial Sequence: Synthetic oligonucleotide
aagucccuuccuauucucc

SEQ ID NO: 89873 - RNA, 19 nt, Artificial Sequence
  Description of Artificial Sequence: Synthetic oligonucleotide
cugccaugggugcagaccc

SEQ ID NO: 89874 - RNA, 19 nt, Artificial Sequence
  Description of Artificial Sequence: Synthetic oligonucleotide
cugaacccacaccugggca

SEQ ID NO: 89875 - RNA, 19 nt, Artificial Sequence
  Description of Artificial Sequence: Synthetic oligonucleotide
aucagggccuuucuccucc

SEQ ID NO: 89876 - RNA, 19 nt, Artificial Sequence
  Description of Artificial Sequence: Synthetic oligonucleotide
cccaccuguagcugaagca

SEQ ID NO: 89877 - RNA, 19 nt, Artificial Sequence
  Description of Artificial Sequence: Synthetic oligonucleotide
aggagguuacagggcaaaa

SEQ ID NO: 89878 - RNA, 19 nt, Artificial Sequence
  Description of Artificial Sequence: Synthetic oligonucleotide
agggcagcugugaugaugu

SEQ ID NO: 89879 - RNA, 19 nt, Artificial Sequence
  Description of Artificial Sequence: Synthetic oligonucleotide
uggaaaugagguuggggga

SEQ ID NO: 89880 - RNA, 19 nt, Artificial Sequence
  Description of Artificial Sequence: Synthetic oligonucleotide
aaccagcagaaaugccccc

SEQ ID NO: 89881 - RNA, 19 nt, Artificial Sequence
  Description of Artificial Sequence: Synthetic oligonucleotide
cauucucccagucucuguc

SEQ ID NO: 89882 - RNA, 19 nt, Artificial Sequence
  Description of Artificial Sequence: Synthetic oligonucleotide
cguggagccauugaacagc

SEQ ID NO: 89883 - RNA, 19 nt, Artificial Sequence
  Description of Artificial Sequence: Synthetic oligonucleotide
cugugagccaugccucccu

SEQ ID NO: 89884 - RNA, 19 nt, Artificial Sequence
  Description of Artificial Sequence: Synthetic oligonucleotide
ugggccaccuccuaccccu

SEQ ID NO: 89885 - RNA, 19 nt, Artificial Sequence
  Description of Artificial Sequence: Synthetic oligonucleotide
uuccuguccugccuccuca

SEQ ID NO: 89886 - RNA, 19 nt, Artificial Sequence
  Description of Artificial Sequence: Synthetic oligonucleotide
aucaguguguaaauaauuu

SEQ ID NO: 89887 - RNA, 19 nt, Artificial Sequence
  Description of Artificial Sequence: Synthetic oligonucleotide
ugcacugaaacguggauac

SEQ ID NO: 89888 - RNA, 19 nt, Artificial Sequence
  Description of Artificial Sequence: Synthetic oligonucleotide
cagagccacgaguuuggau

SEQ ID NO: 89889 - RNA, 19 nt, Artificial Sequence
  Description of Artificial Sequence: Synthetic oligonucleotide
uguuguaaauaaaacuauu

SEQ ID NO: 89890 - RNA, 19 nt, Artificial Sequence
  Description of Artificial Sequence: Synthetic oligonucleotide
uuauugugcugggucccag

SEQ ID NO: 89891 - RNA, 19 nt, Artificial Sequence
  Description of Artificial Sequence: Synthetic oligonucleotide
gccugguuugcaaagacca

SEQ ID NO: 89892 - RNA, 19 nt, Artificial Sequence
  Description of Artificial Sequence: Synthetic oligonucleotide
accuccaacccaacccaau

SEQ ID NO: 89893 - RNA, 19 nt, Artificial Sequence
  Description of Artificial Sequence: Synthetic oligonucleotide
ucccucuccacucuucucu

SEQ ID NO: 89894 - RNA, 19 nt, Artificial Sequence
  Description of Artificial Sequence: Synthetic oligonucleotide
uccuuucucccugcagccu

SEQ ID NO: 89895 - RNA, 19 nt, Artificial Sequence
  Description of Artificial Sequence: Synthetic oligonucleotide
uuuucuggucccucuucuc

SEQ ID NO: 89896 - RNA, 19 nt, Artificial Sequence
  Description of Artificial Sequence: Synthetic oligonucleotide
cuccucaguuucucaaaga

SEQ ID NO: 89897 - RNA, 19 nt, Artificial Sequence
  Description of Artificial Sequence: Synthetic oligonucleotide
augcguuugccuccuggaa

SEQ ID NO: 89898 - RNA, 19 nt, Artificial Sequence
  Description of Artificial Sequence: Synthetic oligonucleotide
aucaguauuuccuuccacu

SEQ ID NO: 89899 - RNA, 19 nt, Artificial Sequence
  Description of Artificial Sequence: Synthetic oligonucleotide
uguagcuauuagcggcucc

SEQ ID NO: 89900 - RNA, 19 nt, Artificial Sequence
  Description of Artificial Sequence: Synthetic oligonucleotide
cucgcccccaccaguguag

SEQ ID NO: 89901 - RNA, 19 nt, Artificial Sequence
  Description of Artificial Sequence: Synthetic oligonucleotide
gcaucuuccucugcagaau

SEQ ID NO: 89902 - RNA, 19 nt, Artificial Sequence
  Description of Artificial Sequence: Synthetic oligonucleotide
uaaaaucucuauuuuuauc

SEQ ID NO: 89903 - RNA, 19 nt, Artificial Sequence
  Description of Artificial Sequence: Synthetic oligonucleotide
cgaugacuugguggcuuuu

SEQ ID NO: 89904 - RNA, 19 nt, Artificial Sequence
  Description of Artificial Sequence: Synthetic oligonucleotide
uccuugaauccagaacaca

SEQ ID NO: 89905 - RNA, 19 nt, Artificial Sequence
  Description of Artificial Sequence: Synthetic oligonucleotide
aaccuuguuuguggugucc

SEQ ID NO: 89906 - RNA, 19 nt, Artificial Sequence
  Description of Artificial Sequence: Synthetic oligonucleotide
cccuauccuccccuuuuac

SEQ ID NO: 89907 - RNA, 19 nt, Artificial Sequence
  Description of Artificial Sequence: Synthetic oligonucleotide
ccccuuuuaccacucccag

SEQ ID NO: 89908 - RNA, 25 nt, Artificial Sequence
  Description of Artificial Sequence: Synthetic oligonucleotide
gcggugccgcccgccguggccgccu

SEQ ID NO: 89909 - RNA, 25 nt, Artificial Sequence
  Description of Artificial Sequence: Synthetic oligonucleotide
ucagcccaccagccgggaccgcgag

SEQ ID NO: 89910 - RNA, 25 nt, Artificial Sequence
  Description of Artificial Sequence: Synthetic oligonucleotide
gccaugcuguccgccgcccgccccc

SEQ ID NO: 89911 - RNA, 25 nt, Artificial Sequence
  Description of Artificial Sequence: Synthetic oligonucleotide
caggguuguuaaagccagacugcga

SEQ ID NO: 89912 - RNA, 25 nt, Artificial Sequence
  Description of Artificial Sequence: Synthetic oligonucleotide
aacucucgccacugccgccaccgcc

SEQ ID NO: 89913 - RNA, 25 nt, Artificial Sequence
  Description of Artificial Sequence: Synthetic oligonucleotide
cgcgucccgucccaccgucgcgggc

SEQ ID NO: 89914 - RNA, 25 nt, Artificial Sequence
  Description of Artificial Sequence: Synthetic oligonucleotide
caacaaccaaagucgccgcaacugc

SEQ ID NO: 89915 - RNA, 25 nt, Artificial Sequence
  Description of Artificial Sequence: Synthetic oligonucleotide
cagcacagagcgggcaaagccaggc

SEQ ID NO: 89916 - RNA, 25 nt, Artificial Sequence
  Description of Artificial Sequence: Synthetic oligonucleotide
caggccauggggcucugggcgcugu

SEQ ID NO: 89917 - RNA, 25 nt, Artificial Sequence
  Description of Artificial Sequence: Synthetic oligonucleotide
uugccuggcuggguuucugcuacgc

SEQ ID NO: 89918 - RNA, 25 nt, Artificial Sequence
  Description of Artificial Sequence: Synthetic oligonucleotide
cugcugcuggcgcuggccgcucugc

SEQ ID NO: 89919 - RNA, 25 nt, Artificial Sequence
  Description of Artificial Sequence: Synthetic oligonucleotide
cccgcagcccuggcugccaacagca

SEQ ID NO: 89920 - RNA, 25 nt, Artificial Sequence
  Description of Artificial Sequence: Synthetic oligonucleotide
aguggccgauggugggguauuguga

SEQ ID NO: 89921 - RNA, 25 nt, Artificial Sequence
  Description of Artificial Sequence: Synthetic oligonucleotide
aacguagccuccuccacgaaccugc

SEQ ID NO: 89922 - RNA, 25 nt, Artificial Sequence
  Description of Artificial Sequence: Synthetic oligonucleotide
cuuacagacuccaagagucugcaac

SEQ ID NO: 89923 - RNA, 25 nt, Artificial Sequence
  Description of Artificial Sequence: Synthetic oligonucleotide
cugguacucgagcccagucugcagc

SEQ ID NO: 89924 - RNA, 25 nt, Artificial Sequence
  Description of Artificial Sequence: Synthetic oligonucleotide
cuguugagccgcaaacagcggcguc

SEQ ID NO: 89925 - RNA, 25 nt, Artificial Sequence
  Description of Artificial Sequence: Synthetic oligonucleotide
cugauacgccaaaauccggggaucc

SEQ ID NO: 89926 - RNA, 25 nt, Artificial Sequence
  Description of Artificial Sequence: Synthetic oligonucleotide
cugcacagcgugaguggggggcugc

SEQ ID NO: 89927 - RNA, 25 nt, Artificial Sequence
  Description of Artificial Sequence: Synthetic oligonucleotide
cagagugccgugcgcgagugcaagu

SEQ ID NO: 89928 - RNA, 25 nt, Artificial Sequence
  Description of Artificial Sequence: Synthetic oligonucleotide
uggcaguuccggaaucgccgcugga

SEQ ID NO: 89929 - RNA, 25 nt, Artificial Sequence
  Description of Artificial Sequence: Synthetic oligonucleotide
aacugucccacugcuccagggcccc

SEQ ID NO: 89930 - RNA, 25 nt, Artificial Sequence
  Description of Artificial Sequence: Synthetic oligonucleotide
caccucuucggcaagaucgucaacc

SEQ ID NO: 89931 - RNA, 25 nt, Artificial Sequence
  Description of Artificial Sequence: Synthetic oligonucleotide
cgaggcugucgagaaacggcguuua

SEQ ID NO: 89932 - RNA, 25 nt, Artificial Sequence
  Description of Artificial Sequence: Synthetic oligonucleotide
aucuucgcuaucaccuccgccgggg

SEQ ID NO: 89933 - RNA, 25 nt, Artificial Sequence
  Description of Artificial Sequence: Synthetic oligonucleotide
gucacccauucgguggcgcgcuccu

SEQ ID NO: 89934 - RNA, 25 nt, Artificial Sequence
  Description of Artificial Sequence: Synthetic oligonucleotide
ugcucagaagguuccaucgaauccu

SEQ ID NO: 89935 - RNA, 25 nt, Artificial Sequence
  Description of Artificial Sequence: Synthetic oligonucleotide
ugcacgugugacuaccggcggcgcg

SEQ ID NO: 89936 - RNA, 25 nt, Artificial Sequence
  Description of Artificial Sequence: Synthetic oligonucleotide
ggccccgggggccccgacuggcacu

SEQ ID NO: 89937 - RNA, 25 nt, Artificial Sequence
  Description of Artificial Sequence: Synthetic oligonucleotide
ugggggggcugcagcgacaacauug

SEQ ID NO: 89938 - RNA, 25 nt, Artificial Sequence
  Description of Artificial Sequence: Synthetic oligonucleotide
gacuucggccgccucuucggccggg

SEQ ID NO: 89939 - RNA, 25 nt, Artificial Sequence
  Description of Artificial Sequence: Synthetic oligonucleotide
gaguucguggacuccggggagaagg

SEQ ID NO: 89940 - RNA, 25 nt, Artificial Sequence
  Description of Artificial Sequence: Synthetic oligonucleotide
gggcgggaccugcgcuuccucauga

SEQ ID NO: 89941 - RNA, 25 nt, Artificial Sequence
  Description of Artificial Sequence: Synthetic oligonucleotide
aaccuucacaacaacgaggcaggcc

SEQ ID NO: 89942 - RNA, 25 nt, Artificial Sequence
  Description of Artificial Sequence: Synthetic oligonucleotide
cguacgaccguauucuccgagaugc

SEQ ID NO: 89943 - RNA, 25 nt, Artificial Sequence
  Description of Artificial Sequence: Synthetic oligonucleotide
cgccaggagugcaagugccacggga

SEQ ID NO: 89944 - RNA, 25 nt, Artificial Sequence
  Description of Artificial Sequence: Synthetic oligonucleotide
auguccggcucaugcacggugcgca

SEQ ID NO: 89945 - RNA, 25 nt, Artificial Sequence
  Description of Artificial Sequence: Synthetic oligonucleotide
acgugcuggaugcggcugcccacgc

SEQ ID NO: 89946 - RNA, 25 nt, Artificial Sequence
  Description of Artificial Sequence: Synthetic oligonucleotide
cugcgcgccgugggcgaugugcugc

SEQ ID NO: 89947 - RNA, 25 nt, Artificial Sequence
  Description of Artificial Sequence: Synthetic oligonucleotide
cgcgaccgcuucgacggcgccucgc

SEQ ID NO: 89948 - RNA, 25 nt, Artificial Sequence
  Description of Artificial Sequence: Synthetic oligonucleotide
cgcguccuguacggcaaccgcggca

SEQ ID NO: 89949 - RNA, 25 nt, Artificial Sequence
  Description of Artificial Sequence: Synthetic oligonucleotide
agcaaccgcgcuucgcgagcggagc

SEQ ID NO: 89950 - RNA, 25 nt, Artificial Sequence
  Description of Artificial Sequence: Synthetic oligonucleotide
cugcugcgccuggagccggaagacc

SEQ ID NO: 89951 - RNA, 25 nt, Artificial Sequence
  Description of Artificial Sequence: Synthetic oligonucleotide
ccggcccacaaaccgcccucccccc

SEQ ID NO: 89952 - RNA, 25 nt, Artificial Sequence
  Description of Artificial Sequence: Synthetic oligonucleotide
cacgaccucgucuacuucgagaaau

SEQ ID NO: 89953 - RNA, 25 nt, Artificial Sequence
  Description of Artificial Sequence: Synthetic oligonucleotide
ucgcccaacuucugcacguacagcg

SEQ ID NO: 89954 - RNA, 25 nt, Artificial Sequence
  Description of Artificial Sequence: Synthetic oligonucleotide
ggacgccugggcacagcaggcacgg

SEQ ID NO: 89955 - RNA, 25 nt, Artificial Sequence
  Description of Artificial Sequence: Synthetic oligonucleotide
gcagggcgcgccuguaacagcucgu

SEQ ID NO: 89956 - RNA, 25 nt, Artificial Sequence
  Description of Artificial Sequence: Synthetic oligonucleotide
ucgcccgcgcuggacggcugcgagc

SEQ ID NO: 89957 - RNA, 25 nt, Artificial Sequence
  Description of Artificial Sequence: Synthetic oligonucleotide
cugcucugcugcggcaggggccacc

SEQ ID NO: 89958 - RNA, 25 nt, Artificial Sequence
  Description of Artificial Sequence: Synthetic oligonucleotide
cgcacgcgcacgcagcgcgucaccg

SEQ ID NO: 89959 - RNA, 25 nt, Artificial Sequence
  Description of Artificial Sequence: Synthetic oligonucleotide
gagcgcugcaacugcaccuuccacu

SEQ ID NO: 89960 - RNA, 25 nt, Artificial Sequence
  Description of Artificial Sequence: Synthetic oligonucleotide
uggugcugccacgucagcugccgca

SEQ ID NO: 89961 - RNA, 25 nt, Artificial Sequence
  Description of Artificial Sequence: Synthetic oligonucleotide
aacugcacgcacacgcgcguacugc

SEQ ID NO: 89962 - RNA, 25 nt, Artificial Sequence
  Description of Artificial Sequence: Synthetic oligonucleotide
cacgagugucugugaggcgcugcgc

SEQ ID NO: 89963 - RNA, 25 nt, Artificial Sequence
  Description of Artificial Sequence: Synthetic oligonucleotide
cggacucgcccccaggaaacgcucu

SEQ ID NO: 89964 - RNA, 25 nt, Artificial Sequence
  Description of Artificial Sequence: Synthetic oligonucleotide
uccucgagcccucccccaaacagac

SEQ ID NO: 89965 - RNA, 25 nt, Artificial Sequence
  Description of Artificial Sequence: Synthetic oligonucleotide
cucgcuagcacucaagacccgguua

SEQ ID NO: 89966 - RNA, 25 nt, Artificial Sequence
  Description of Artificial Sequence: Synthetic oligonucleotide
auucgcccacccgaguaccuccagu

SEQ ID NO: 89967 - RNA, 25 nt, Artificial Sequence
  Description of Artificial Sequence: Synthetic oligonucleotide
ucacacuccccgcgguucauacgca

SEQ ID NO: 89968 - RNA, 25 nt, Artificial Sequence
  Description of Artificial Sequence: Synthetic oligonucleotide
aucccaucucucccacuuccuccua

SEQ ID NO: 89969 - RNA, 25 nt, Artificial Sequence
  Description of Artificial Sequence: Synthetic oligonucleotide
accuggggacuccucaaaccacuug

SEQ ID NO: 89970 - RNA, 25 nt, Artificial Sequence
  Description of Artificial Sequence: Synthetic oligonucleotide
gccuggggcggcaugaacccucuug

SEQ ID NO: 89971 - RNA, 25 nt, Artificial Sequence
  Description of Artificial Sequence: Synthetic oligonucleotide
gccauccugauggaccugccccgga

SEQ ID NO: 89972 - RNA, 25 nt, Artificial Sequence
  Description of Artificial Sequence: Synthetic oligonucleotide
accuaccucccucccucuccgcggg

SEQ ID NO: 89973 - RNA, 25 nt, Artificial Sequence
  Description of Artificial Sequence: Synthetic oligonucleotide
gagaccccuuguugcacugcccccu

SEQ ID NO: 89974 - RNA, 25 nt, Artificial Sequence
  Description of Artificial Sequence: Synthetic oligonucleotide
ugcuuggccaggaggugagagaagg

SEQ ID NO: 89975 - RNA, 25 nt, Artificial Sequence
  Description of Artificial Sequence: Synthetic oligonucleotide
gauggguccccuccgccaugggguc

SEQ ID NO: 89976 - RNA, 25 nt, Artificial Sequence
  Description of Artificial Sequence: Synthetic oligonucleotide
cggcuccugauggugucauucugcc

SEQ ID NO: 89977 - RNA, 25 nt, Artificial Sequence
  Description of Artificial Sequence: Synthetic oligonucleotide
cugcuccaucgcgccagcgaccucu

SEQ ID NO: 89978 - RNA, 25 nt, Artificial Sequence
  Description of Artificial Sequence: Synthetic oligonucleotide
ucugccucucuucuuccccuuuguc

SEQ ID NO: 89979 - RNA, 25 nt, Artificial Sequence
  Description of Artificial Sequence: Synthetic oligonucleotide
ccugcguuuucuccggguccuccua

SEQ ID NO: 89980 - RNA, 25 nt, Artificial Sequence
  Description of Artificial Sequence: Synthetic oligonucleotide
aagucccuuccuauucuccugccau

SEQ ID NO: 89981 - RNA, 25 nt, Artificial Sequence
  Description of Artificial Sequence: Synthetic oligonucleotide
ugggugcagacccugaacccacacc

SEQ ID NO: 89982 - RNA, 25 nt, Artificial Sequence
  Description of Artificial Sequence: Synthetic oligonucleotide
cugggcaucagggccuuucuccucc

SEQ ID NO: 89983 - RNA, 25 nt, Artificial Sequence
  Description of Artificial Sequence: Synthetic oligonucleotide
cccaccuguagcugaagcaggaggu

SEQ ID NO: 89984 - RNA, 25 nt, Artificial Sequence
  Description of Artificial Sequence: Synthetic oligonucleotide
uuacagggcaaaagggcagcuguga

SEQ ID NO: 89985 - RNA, 25 nt, Artificial Sequence
  Description of Artificial Sequence: Synthetic oligonucleotide
augauguggaaaugagguuggggga

SEQ ID NO: 89986 - RNA, 25 nt, Artificial Sequence
  Description of Artificial Sequence: Synthetic oligonucleotide
aaccagcagaaaugcccccauucuc

SEQ ID NO: 89987 - RNA, 25 nt, Artificial Sequence
  Description of Artificial Sequence: Synthetic oligonucleotide
cccagucucugucguggagccauug

SEQ ID NO: 89988 - RNA, 25 nt, Artificial Sequence
  Description of Artificial Sequence: Synthetic oligonucleotide
gaacagcugugagccaugccucccu

SEQ ID NO: 89989 - RNA, 25 nt, Artificial Sequence
  Description of Artificial Sequence: Synthetic oligonucleotide
ugggccaccuccuaccccuuccugu

SEQ ID NO: 89990 - RNA, 25 nt, Artificial Sequence
  Description of Artificial Sequence: Synthetic oligonucleotide
uccugccuccucaucaguguguaaa

SEQ ID NO: 89991 - RNA, 25 nt, Artificial Sequence
  Description of Artificial Sequence: Synthetic oligonucleotide
auaauuugcacugaaacguggauac

SEQ ID NO: 89992 - RNA, 25 nt, Artificial Sequence
  Description of Artificial Sequence: Synthetic oligonucleotide
cagagccacgaguuuggauguugua

SEQ ID NO: 89993 - RNA, 25 nt, Artificial Sequence
  Description of Artificial Sequence: Synthetic oligonucleotide
aaauaaaacuauuuauugugcuggg

SEQ ID NO: 89994 - RNA, 25 nt, Artificial Sequence
  Description of Artificial Sequence: Synthetic oligonucleotide
gucccagccugguuugcaaagacca

SEQ ID NO: 89995 - RNA, 25 nt, Artificial Sequence
  Description of Artificial Sequence: Synthetic oligonucleotide
accuccaacccaacccaaucccucu

SEQ ID NO: 89996 - RNA, 25 nt, Artificial Sequence
  Description of Artificial Sequence: Synthetic oligonucleotide
uccacucuucucuccuuucucccug

SEQ ID NO: 89997 - RNA, 25 nt, Artificial Sequence
  Description of Artificial Sequence: Synthetic oligonucleotide
gcagccuuuucuggucccucuucuc

SEQ ID NO: 89998 - RNA, 25 nt, Artificial Sequence
  Description of Artificial Sequence: Synthetic oligonucleotide
cuccucaguuucucaaagaugcguu

SEQ ID NO: 89999 - RNA, 25 nt, Artificial Sequence
  Description of Artificial Sequence: Synthetic oligonucleotide
uugccuccuggaaucaguauuuccu

SEQ ID NO: 90000 - RNA, 25 nt, Artificial Sequence
  Description of Artificial Sequence: Synthetic oligonucleotide
uuccacuguagcuauuagcggcucc

SEQ ID NO: 90001 - RNA, 25 nt, Artificial Sequence
  Description of Artificial Sequence: Synthetic oligonucleotide
cucgcccccaccaguguagcaucuu

SEQ ID NO: 90002 - RNA, 25 nt, Artificial Sequence
  Description of Artificial Sequence: Synthetic oligonucleotide
uccucugcagaauaaaaucucuauu

SEQ ID NO: 90003 - RNA, 25 nt, Artificial Sequence
  Description of Artificial Sequence: Synthetic oligonucleotide
uuuuaucgaugacuugguggcuuuu

SEQ ID NO: 90004 - RNA, 25 nt, Artificial Sequence
  Description of Artificial Sequence: Synthetic oligonucleotide
uccuugaauccagaacacaaccuug

SEQ ID NO: 90005 - RNA, 25 nt, Artificial Sequence
  Description of Artificial Sequence: Synthetic oligonucleotide
guuugugguguccccuauccucccc

SEQ ID NO: 90006 - RNA, 25 nt, Artificial Sequence
  Description of Artificial Sequence: Synthetic oligonucleotide
uauccuccccuuuuaccacucccag

SEQ ID NO: 90007 - RNA, 2301 nt, Homo sapiens
agcagagcggacgggcgcgcgggaggcgcgcagagcuuucgggcugcaggcgcucgcugccgcuggggaauugggcugugggcgaggcgguccgggcuggccuuuaucgcucgcugggcccaucguuugaaacuuuaucagcgagucgccacucgucgcaggaccgagcggggggcgggggcgcggcgaggcggcggccgugacgaggcgcucccggagcugagcgcuucugcucugggcacgcauggcgcccgcacacggagucugaccugaugcagacgcaaggggguuaauaugaacgccccucucgguggaaucuggcucuggcucccucugcucuugaccuggcucacccccgaggucaacucuucauggugguacaugagagcuacagguggcuccuccagggugaugugcgauaaugugccaggccuggugagcagccagcggcagcugugucaccgacauccagaugugaugcgugccauuagccagggcguggccgaguggacagcagaaugccagcaccaguuccgccagcaccgcuggaauugcaacacccuggacagggaucacagccuuuuuggcaggguccuacuccgaaguagucgggaaucugccuuuguuuaugccaucuccucagcuggaguuguauuugccaucaccagggccuguagccaaggagaaguaaaauccuguuccugugauccaaagaagaugggaagcgccaaggacagcaaaggcauuuuugauugggguggcugcagugauaacauugacuaugggaucaaauuugcccgcgcauuuguggaugcaaaggaaaggaaaggaaaggaugccagagcccugaugaaucuucacaacaacagagcuggcaggaaggcuguaaagcgguucuugaaacaagagugcaagugccacggggugagcggcucauguacucucaggacaugcuggcuggccauggccgacuucaggaaaacgggcgauuaucucuggaggaaguacaauggggccauccagguggucaugaaccaggauggcacagguuucacuguggcuaacgagagguuuaagaagccaacgaaaaaugaccucguguauuuugagaauucuccagacuacuguaucagggaccgagaggcaggcucccuggguacagcaggccgugugugcaaccugacuucccggggcauggacagcugugaagucaugugcugugggagaggcuacgacaccucccaugucacccggaugaccaaguguggguguaaguuccacuggugcugcgccgugcgcugucaggacugccuggaagcucuggaugugcacacaugcaaggcccccaagaacgcugacuggacaaccgcuacaugaccccagcaggcgucaccauccaccuucccuucuacaaggacuccauuggaucugcaagaacacuggaccuuuggguucuuucuggggggauauuuccuaaggcauguggccuuuaucucaacggaagcccccucuuccucccugggggccccaggauggggggccacacgcugcaccuaaagccuacccuauucuauccaucuccugguguucugcagucaucuccccuccuggcgaguucucuuuggaaauagcaugacaggcuguucagccgggaggguggugggcccagaccacugucuccacccaccuugacguuucuucuuucuagagcaguuggccaagcagaaaaaaaagugucucaaaggagcuuucucaaugucuucccacaaauggucccaauuaagaaauuccauacuucucucagauggaacaguaaagaaagcagaaucaacugccccugacuuaacuuuaacuuuugaaaagaccaagacuuuugucuguacaagugguuuuacagcuaccacccuuaggguaauugguaauuaccuggagaagaauggcuuucaauacccuuuuaaguuuaaaauguguauuuuucaaggcauuuauugccauauuaaaaucugauguaacaagguggggacguguguccuuugguacuaugguguguuguaucuuuguaagagcaaaagccucagaaagggauugcuuugcauuacuguccccuugauauaaaaaaucuuuagggaaugagaguuccuucucacuuagaaucugaagggaauuaaaaagaagaugaauggucuggcaauauucuguaacuauugggugaauaugguggaaaauaauuuaguggauggaauaucagaaguauaucuguacagaucaagaaaaaaaggaagaauaaaauuccuauaucau

SEQ ID NO: 90008 - RNA, 19 nt, Artificial Sequence
  Description of Artificial Sequence: Synthetic oligonucleotide
agcagagcggacgggcgcg

SEQ ID NO: 90009 - RNA, 19 nt, Artificial Sequence
  Description of Artificial Sequence: Synthetic oligonucleotide
gcgggaggcgcgcagagcu

SEQ ID NO: 90010 - RNA, 19 nt, Artificial Sequence
  Description of Artificial Sequence: Synthetic oligonucleotide
uuucgggcugcaggcgcuc

SEQ ID NO: 90011 - RNA, 19 nt, Artificial Sequence
  Description of Artificial Sequence: Synthetic oligonucleotide
cgcugccgcuggggaauug

SEQ ID NO: 90012 - RNA, 19 nt, Artificial Sequence
  Description of Artificial Sequence: Synthetic oligonucleotide
gggcugugggcgaggcggu

SEQ ID NO: 90013 - RNA, 19 nt, Artificial Sequence
  Description of Artificial Sequence: Synthetic oligonucleotide
uccgggcuggccuuuaucg

SEQ ID NO: 90014 - RNA, 19 nt, Artificial Sequence
  Description of Artificial Sequence: Synthetic oligonucleotide
gcucgcugggcccaucguu

SEQ ID NO: 90015 - RNA, 19 nt, Artificial Sequence
  Description of Artificial Sequence: Synthetic oligonucleotide
uugaaacuuuaucagcgag

SEQ ID NO: 90016 - RNA, 19 nt, Artificial Sequence
  Description of Artificial Sequence: Synthetic oligonucleotide
gucgccacucgucgcagga

SEQ ID NO: 90017 - RNA, 19 nt, Artificial Sequence
  Description of Artificial Sequence: Synthetic oligonucleotide
accgagcggggggcggggg

SEQ ID NO: 90018 - RNA, 19 nt, Artificial Sequence
  Description of Artificial Sequence: Synthetic oligonucleotide
gcgcggcgaggcggcggcc

SEQ ID NO: 90019 - RNA, 19 nt, Artificial Sequence
  Description of Artificial Sequence: Synthetic oligonucleotide
cgugacgaggcgcucccgg

SEQ ID NO: 90020 - RNA, 19 nt, Artificial Sequence
  Description of Artificial Sequence: Synthetic oligonucleotide
gagcugagcgcuucugcuc

SEQ ID NO: 90021 - RNA, 19 nt, Artificial Sequence
  Description of Artificial Sequence: Synthetic oligonucleotide
cugggcacgcauggcgccc

SEQ ID NO: 90022 - RNA, 19 nt, Artificial Sequence
  Description of Artificial Sequence: Synthetic oligonucleotide
cgcacacggagucugaccu

SEQ ID NO: 90023 - RNA, 19 nt, Artificial Sequence
  Description of Artificial Sequence: Synthetic oligonucleotide
ugaugcagacgcaaggggg

SEQ ID NO: 90024 - RNA, 19 nt, Artificial Sequence
  Description of Artificial Sequence: Synthetic oligonucleotide
guuaauaugaacgccccuc

SEQ ID NO: 90025 - RNA, 19 nt, Artificial Sequence
  Description of Artificial Sequence: Synthetic oligonucleotide
cucgguggaaucuggcucu

SEQ ID NO: 90026 - RNA, 19 nt, Artificial Sequence
  Description of Artificial Sequence: Synthetic oligonucleotide
uggcucccucugcucuuga

SEQ ID NO: 90027 - RNA, 19 nt, Artificial Sequence
  Description of Artificial Sequence: Synthetic oligonucleotide
accuggcucacccccgagg

SEQ ID NO: 90028 - RNA, 19 nt, Artificial Sequence
  Description of Artificial Sequence: Synthetic oligonucleotide
gucaacucuucaugguggu

SEQ ID NO: 90029 - RNA, 19 nt, Artificial Sequence
  Description of Artificial Sequence: Synthetic oligonucleotide
uacaugagagcuacaggug

SEQ ID NO: 90030 - RNA, 19 nt, Artificial Sequence
  Description of Artificial Sequence: Synthetic oligonucleotide
ggcuccuccagggugaugu

SEQ ID NO: 90031 - RNA, 19 nt, Artificial Sequence
  Description of Artificial Sequence: Synthetic oligonucleotide
ugcgauaaugugccaggcc

SEQ ID NO: 90032 - RNA, 19 nt, Artificial Sequence
  Description of Artificial Sequence: Synthetic oligonucleotide
cuggugagcagccagcggc

SEQ ID NO: 90033 - RNA, 19 nt, Artificial Sequence
  Description of Artificial Sequence: Synthetic oligonucleotide
cagcugugucaccgacauc

SEQ ID NO: 90034 - RNA, 19 nt, Artificial Sequence
  Description of Artificial Sequence: Synthetic oligonucleotide
ccagaugugaugcgugcca

SEQ ID NO: 90035 - RNA, 19 nt, Artificial Sequence
  Description of Artificial Sequence: Synthetic oligonucleotide
auuagccagggcguggccg

SEQ ID NO: 90036 - RNA, 19 nt, Artificial Sequence
  Description of Artificial Sequence: Synthetic oligonucleotide
gaguggacagcagaaugcc

SEQ ID NO: 90037 - RNA, 19 nt, Artificial Sequence
  Description of Artificial Sequence: Synthetic oligonucleotide
cagcaccaguuccgccagc

SEQ ID NO: 90038 - RNA, 19 nt, Artificial Sequence
  Description of Artificial Sequence: Synthetic oligonucleotide
caccgcuggaauugcaaca

SEQ ID NO: 90039 - RNA, 19 nt, Artificial Sequence
  Description of Artificial Sequence: Synthetic oligonucleotide
acccuggacagggaucaca

SEQ ID NO: 90040 - RNA, 19 nt, Artificial Sequence
  Description of Artificial Sequence: Synthetic oligonucleotide
agccuuuuuggcagggucc

SEQ ID NO: 90041 - RNA, 19 nt, Artificial Sequence
  Description of Artificial Sequence: Synthetic oligonucleotide
cuacuccgaaguagucggg

SEQ ID NO: 90042 - RNA, 19 nt, Artificial Sequence
  Description of Artificial Sequence: Synthetic oligonucleotide
gaaucugccuuuguuuaug

SEQ ID NO: 90043 - RNA, 19 nt, Artificial Sequence
  Description of Artificial Sequence: Synthetic oligonucleotide
gccaucuccucagcuggag

SEQ ID NO: 90044 - RNA, 19 nt, Artificial Sequence
  Description of Artificial Sequence: Synthetic oligonucleotide
guuguauuugccaucacca

SEQ ID NO: 90045 - RNA, 19 nt, Artificial Sequence
  Description of Artificial Sequence: Synthetic oligonucleotide
agggccuguagccaaggag

SEQ ID NO: 90046 - RNA, 19 nt, Artificial Sequence
  Description of Artificial Sequence: Synthetic oligonucleotide
gaaguaaaauccuguuccu

SEQ ID NO: 90047 - RNA, 19 nt, Artificial Sequence
  Description of Artificial Sequence: Synthetic oligonucleotide
ugugauccaaagaagaugg

SEQ ID NO: 90048 - RNA, 19 nt, Artificial Sequence
  Description of Artificial Sequence: Synthetic oligonucleotide
ggaagcgccaaggacagca

SEQ ID NO: 90049 - RNA, 19 nt, Artificial Sequence
  Description of Artificial Sequence: Synthetic oligonucleotide
aaaggcauuuuugauuggg

SEQ ID NO: 90050 - RNA, 19 nt, Artificial Sequence
  Description of Artificial Sequence: Synthetic oligonucleotide
gguggcugcagugauaaca

SEQ ID NO: 90051 - RNA, 19 nt, Artificial Sequence
  Description of Artificial Sequence: Synthetic oligonucleotide
auugacuaugggaucaaau

SEQ ID NO: 90052 - RNA, 19 nt, Artificial Sequence
  Description of Artificial Sequence: Synthetic oligonucleotide
uuugcccgcgcauuugugg

SEQ ID NO: 90053 - RNA, 19 nt, Artificial Sequence
  Description of Artificial Sequence: Synthetic oligonucleotide
gaugcaaaggaaaggaaag

SEQ ID NO: 90054 - RNA, 19 nt, Artificial Sequence
  Description of Artificial Sequence: Synthetic oligonucleotide
ggaaaggaugccagagccc

SEQ ID NO: 90055 - RNA, 19 nt, Artificial Sequence
  Description of Artificial Sequence: Synthetic oligonucleotide
cugaugaaucuucacaaca

SEQ ID NO: 90056 - RNA, 19 nt, Artificial Sequence
  Description of Artificial Sequence: Synthetic oligonucleotide
aacagagcuggcaggaagg

SEQ ID NO: 90057 - RNA, 19 nt, Artificial Sequence
  Description of Artificial Sequence: Synthetic oligonucleotide
gcuguaaagcgguucuuga

SEQ ID NO: 90058 - RNA, 19 nt, Artificial Sequence
  Description of Artificial Sequence: Synthetic oligonucleotide
aaacaagagugcaagugcc

SEQ ID NO: 90059 - RNA, 19 nt, Artificial Sequence
  Description of Artificial Sequence: Synthetic oligonucleotide
cacggggugagcggcucau

SEQ ID NO: 90060 - RNA, 19 nt, Artificial Sequence
  Description of Artificial Sequence: Synthetic oligonucleotide
uguacucucaggacaugcu

SEQ ID NO: 90061 - RNA, 19 nt, Artificial Sequence
  Description of Artificial Sequence: Synthetic oligonucleotide
uggcuggccauggccgacu

SEQ ID NO: 90062 - RNA, 19 nt, Artificial Sequence
  Description of Artificial Sequence: Synthetic oligonucleotide
uucaggaaaacgggcgauu

SEQ ID NO: 90063 - RNA, 19 nt, Artificial Sequence
  Description of Artificial Sequence: Synthetic oligonucleotide
uaucucuggaggaaguaca

SEQ ID NO: 90064 - RNA, 19 nt, Artificial Sequence
  Description of Artificial Sequence: Synthetic oligonucleotide
aauggggccauccaggugg

SEQ ID NO: 90065 - RNA, 19 nt, Artificial Sequence
  Description of Artificial Sequence: Synthetic oligonucleotide
gucaugaaccaggauggca

SEQ ID NO: 90066 - RNA, 19 nt, Artificial Sequence
  Description of Artificial Sequence: Synthetic oligonucleotide
acagguuucacuguggcua

SEQ ID NO: 90067 - RNA, 19 nt, Artificial Sequence
  Description of Artificial Sequence: Synthetic oligonucleotide
aacgagagguuuaagaagc

SEQ ID NO: 90068 - RNA, 19 nt, Artificial Sequence
  Description of Artificial Sequence: Synthetic oligonucleotide
ccaacgaaaaaugaccucg

SEQ ID NO: 90069 - RNA, 19 nt, Artificial Sequence
  Description of Artificial Sequence: Synthetic oligonucleotide
guguauuuugagaauucuc

SEQ ID NO: 90070 - RNA, 19 nt, Artificial Sequence
  Description of Artificial Sequence: Synthetic oligonucleotide
ccagacuacuguaucaggg

SEQ ID NO: 90071 - RNA, 19 nt, Artificial Sequence
  Description of Artificial Sequence: Synthetic oligonucleotide
gaccgagaggcaggcuccc

SEQ ID NO: 90072 - RNA, 19 nt, Artificial Sequence
  Description of Artificial Sequence: Synthetic oligonucleotide
cuggguacagcaggccgug

SEQ ID NO: 90073 - RNA, 19 nt, Artificial Sequence
  Description of Artificial Sequence: Synthetic oligonucleotide
gugugcaaccugacuuccc

SEQ ID NO: 90074 - RNA, 19 nt, Artificial Sequence
  Description of Artificial Sequence: Synthetic oligonucleotide
cggggcauggacagcugug

SEQ ID NO: 90075 - RNA, 19 nt, Artificial Sequence
  Description of Artificial Sequence: Synthetic oligonucleotide
gaagucaugugcuguggga

SEQ ID NO: 90076 - RNA, 19 nt, Artificial Sequence
  Description of Artificial Sequence: Synthetic oligonucleotide
agaggcuacgacaccuccc

SEQ ID NO: 90077 - RNA, 19 nt, Artificial Sequence
  Description of Artificial Sequence: Synthetic oligonucleotide
caugucacccggaugacca

SEQ ID NO: 90078 - RNA, 19 nt, Artificial Sequence
  Description of Artificial Sequence: Synthetic oligonucleotide
aaguguggguguaaguucc

SEQ ID NO: 90079 - RNA, 19 nt, Artificial Sequence
  Description of Artificial Sequence: Synthetic oligonucleotide
cacuggugcugcgccgugc

SEQ ID NO: 90080 - RNA, 19 nt, Artificial Sequence
  Description of Artificial Sequence: Synthetic oligonucleotide
cgcugucaggacugccugg

SEQ ID NO: 90081 - RNA, 19 nt, Artificial Sequence
  Description of Artificial Sequence: Synthetic oligonucleotide
gaagcucuggaugugcaca

SEQ ID NO: 90082 - RNA, 19 nt, Artificial Sequence
  Description of Artificial Sequence: Synthetic oligonucleotide
acaugcaaggcccccaaga

SEQ ID NO: 90083 - RNA, 19 nt, Artificial Sequence
  Description of Artificial Sequence: Synthetic oligonucleotide
aacgcugacuggacaaccg

SEQ ID NO: 90084 - RNA, 19 nt, Artificial Sequence
  Description of Artificial Sequence: Synthetic oligonucleotide
gcuacaugaccccagcagg

SEQ ID NO: 90085 - RNA, 19 nt, Artificial Sequence
  Description of Artificial Sequence: Synthetic oligonucleotide
gcgucaccauccaccuucc

SEQ ID NO: 90086 - RNA, 19 nt, Artificial Sequence
  Description of Artificial Sequence: Synthetic oligonucleotide
ccuucuacaaggacuccau

SEQ ID NO: 90087 - RNA, 19 nt, Artificial Sequence
  Description of Artificial Sequence: Synthetic oligonucleotide
uuggaucugcaagaacacu

SEQ ID NO: 90088 - RNA, 19 nt, Artificial Sequence
  Description of Artificial Sequence: Synthetic oligonucleotide
uggaccuuuggguucuuuc

SEQ ID NO: 90089 - RNA, 19 nt, Artificial Sequence
  Description of Artificial Sequence: Synthetic oligonucleotide
cuggggggauauuuccuaa

SEQ ID NO: 90090 - RNA, 19 nt, Artificial Sequence
  Description of Artificial Sequence: Synthetic oligonucleotide
aggcauguggccuuuaucu

SEQ ID NO: 90091 - RNA, 19 nt, Artificial Sequence
  Description of Artificial Sequence: Synthetic oligonucleotide
ucaacggaagcccccucuu

SEQ ID NO: 90092 - RNA, 19 nt, Artificial Sequence
  Description of Artificial Sequence: Synthetic oligonucleotide
uccucccugggggccccag

SEQ ID NO: 90093 - RNA, 19 nt, Artificial Sequence
  Description of Artificial Sequence: Synthetic oligonucleotide
ggauggggggccacacgcu

SEQ ID NO: 90094 - RNA, 19 nt, Artificial Sequence
  Description of Artificial Sequence: Synthetic oligonucleotide
ugcaccuaaagccuacccu

SEQ ID NO: 90095 - RNA, 19 nt, Artificial Sequence
  Description of Artificial Sequence: Synthetic oligonucleotide
uauucuauccaucuccugg

SEQ ID NO: 90096 - RNA, 19 nt, Artificial Sequence
  Description of Artificial Sequence: Synthetic oligonucleotide
guguucugcagucaucucc

SEQ ID NO: 90097 - RNA, 19 nt, Artificial Sequence
  Description of Artificial Sequence: Synthetic oligonucleotide
cccuccuggcgaguucucu

SEQ ID NO: 90098 - RNA, 19 nt, Artificial Sequence
  Description of Artificial Sequence: Synthetic oligonucleotide
uuuggaaauagcaugacag

SEQ ID NO: 90099 - RNA, 19 nt, Artificial Sequence
  Description of Artificial Sequence: Synthetic oligonucleotide
ggcuguucagccgggaggg

SEQ ID NO: 90100 - RNA, 19 nt, Artificial Sequence
  Description of Artificial Sequence: Synthetic oligonucleotide
guggugggcccagaccacu

SEQ ID NO: 90101 - RNA, 19 nt, Artificial Sequence
  Description of Artificial Sequence: Synthetic oligonucleotide
ugucuccacccaccuugac

SEQ ID NO: 90102 - RNA, 19 nt, Artificial Sequence
  Description of Artificial Sequence: Synthetic oligonucleotide
cguuucuucuuucuagagc

SEQ ID NO: 90103 - RNA, 19 nt, Artificial Sequence
  Description of Artificial Sequence: Synthetic oligonucleotide
caguuggccaagcagaaaa

SEQ ID NO: 90104 - RNA, 19 nt, Artificial Sequence
  Description of Artificial Sequence: Synthetic oligonucleotide
aaaaagugucucaaaggag

SEQ ID NO: 90105 - RNA, 19 nt, Artificial Sequence
  Description of Artificial Sequence: Synthetic oligonucleotide
gcuuucucaaugucuuccc

SEQ ID NO: 90106 - RNA, 19 nt, Artificial Sequence
  Description of Artificial Sequence: Synthetic oligonucleotide
cacaaauggucccaauuaa

SEQ ID NO: 90107 - RNA, 19 nt, Artificial Sequence
  Description of Artificial Sequence: Synthetic oligonucleotide
agaaauuccauacuucucu

SEQ ID NO: 90108 - RNA, 19 nt, Artificial Sequence
  Description of Artificial Sequence: Synthetic oligonucleotide
ucagauggaacaguaaaga

SEQ ID NO: 90109 - RNA, 19 nt, Artificial Sequence
  Description of Artificial Sequence: Synthetic oligonucleotide
aaagcagaaucaacugccc

SEQ ID NO: 90110 - RNA, 19 nt, Artificial Sequence
  Description of Artificial Sequence: Synthetic oligonucleotide
ccugacuuaacuuuaacuu

SEQ ID NO: 90111 - RNA, 19 nt, Artificial Sequence
  Description of Artificial Sequence: Synthetic oligonucleotide
uuugaaaagaccaagacuu

SEQ ID NO: 90112 - RNA, 19 nt, Artificial Sequence
  Description of Artificial Sequence: Synthetic oligonucleotide
uuugucuguacaagugguu

SEQ ID NO: 90113 - RNA, 19 nt, Artificial Sequence
  Description of Artificial Sequence: Synthetic oligonucleotide
uuuacagcuaccacccuua

SEQ ID NO: 90114 - RNA, 19 nt, Artificial Sequence
  Description of Artificial Sequence: Synthetic oligonucleotide
aggguaauugguaauuacc

SEQ ID NO: 90115 - RNA, 19 nt, Artificial Sequence
  Description of Artificial Sequence: Synthetic oligonucleotide
cuggagaagaauggcuuuc

SEQ ID NO: 90116 - RNA, 19 nt, Artificial Sequence
  Description of Artificial Sequence: Synthetic oligonucleotide
caauacccuuuuaaguuua

SEQ ID NO: 90117 - RNA, 19 nt, Artificial Sequence
  Description of Artificial Sequence: Synthetic oligonucleotide
aaaauguguauuuuucaag

SEQ ID NO: 90118 - RNA, 19 nt, Artificial Sequence
  Description of Artificial Sequence: Synthetic oligonucleotide
ggcauuuauugccauauua

SEQ ID NO: 90119 - RNA, 19 nt, Artificial Sequence
  Description of Artificial Sequence: Synthetic oligonucleotide
aaaaucugauguaacaagg

SEQ ID NO: 90120 - RNA, 19 nt, Artificial Sequence
  Description of Artificial Sequence: Synthetic oligonucleotide
guggggacguguguccuuu

SEQ ID NO: 90121 - RNA, 19 nt, Artificial Sequence
  Description of Artificial Sequence: Synthetic oligonucleotide
ugguacuaugguguguugu

SEQ ID NO: 90122 - RNA, 19 nt, Artificial Sequence
  Description of Artificial Sequence: Synthetic oligonucleotide
uaucuuuguaagagcaaaa

SEQ ID NO: 90123 - RNA, 19 nt, Artificial Sequence
  Description of Artificial Sequence: Synthetic oligonucleotide
agccucagaaagggauugc

SEQ ID NO: 90124 - RNA, 19 nt, Artificial Sequence
  Description of Artificial Sequence: Synthetic oligonucleotide
cuuugcauuacuguccccu

SEQ ID NO: 90125 - RNA, 19 nt, Artificial Sequence
  Description of Artificial Sequence: Synthetic oligonucleotide
uugauauaaaaaaucuuua

SEQ ID NO: 90126 - RNA, 19 nt, Artificial Sequence
  Description of Artificial Sequence: Synthetic oligonucleotide
agggaaugagaguuccuuc

SEQ ID NO: 90127 - RNA, 19 nt, Artificial Sequence
  Description of Artificial Sequence: Synthetic oligonucleotide
cucacuuagaaucugaagg

SEQ ID NO: 90128 - RNA, 19 nt, Artificial Sequence
  Description of Artificial Sequence: Synthetic oligonucleotide
ggaauuaaaaagaagauga

SEQ ID NO: 90129 - RNA, 19 nt, Artificial Sequence
  Description of Artificial Sequence: Synthetic oligonucleotide
aauggucuggcaauauucu

SEQ ID NO: 90130 - RNA, 19 nt, Artificial Sequence
  Description of Artificial Sequence: Synthetic oligonucleotide
uguaacuauugggugaaua

SEQ ID NO: 90131 - RNA, 19 nt, Artificial Sequence
  Description of Artificial Sequence: Synthetic oligonucleotide
augguggaaaauaauuuag

SEQ ID NO: 90132 - RNA, 19 nt, Artificial Sequence
  Description of Artificial Sequence: Synthetic oligonucleotide
guggauggaauaucagaag

SEQ ID NO: 90133 - RNA, 19 nt, Artificial Sequence
  Description of Artificial Sequence: Synthetic oligonucleotide
guauaucuguacagaucaa

SEQ ID NO: 90134 - RNA, 19 nt, Artificial Sequence
  Description of Artificial Sequence: Synthetic oligonucleotide
agaaaaaaaggaagaauaa

SEQ ID NO: 90135 - RNA, 19 nt, Artificial Sequence
  Description of Artificial Sequence: Synthetic oligonucleotide
aauaaaauuccuauaucau

SEQ ID NO: 90136 - RNA, 25 nt, Artificial Sequence
  Description of Artificial Sequence: Synthetic oligonucleotide
agcagagcggacgggcgcgcgggag

SEQ ID NO: 90137 - RNA, 25 nt, Artificial Sequence
  Description of Artificial Sequence: Synthetic oligonucleotide
ggcgcgcagagcuuucgggcugcag

SEQ ID NO: 90138 - RNA, 25 nt, Artificial Sequence
  Description of Artificial Sequence: Synthetic oligonucleotide
ggcgcucgcugccgcuggggaauug

SEQ ID NO: 90139 - RNA, 25 nt, Artificial Sequence
  Description of Artificial Sequence: Synthetic oligonucleotide
gggcugugggcgaggcgguccgggc

SEQ ID NO: 90140 - RNA, 25 nt, Artificial Sequence
  Description of Artificial Sequence: Synthetic oligonucleotide
cuggccuuuaucgcucgcugggccc

SEQ ID NO: 90141 - RNA, 25 nt, Artificial Sequence
  Description of Artificial Sequence: Synthetic oligonucleotide
caucguuugaaacuuuaucagcgag

SEQ ID NO: 90142 - RNA, 25 nt, Artificial Sequence
  Description of Artificial Sequence: Synthetic oligonucleotide
gucgccacucgucgcaggaccgagc

SEQ ID NO: 90143 - RNA, 25 nt, Artificial Sequence
  Description of Artificial Sequence: Synthetic oligonucleotide
cggggggcgggggcgcggcgaggcg

SEQ ID NO: 90144 - RNA, 25 nt, Artificial Sequence
  Description of Artificial Sequence: Synthetic oligonucleotide
ggcggccgugacgaggcgcucccgg

SEQ ID NO: 90145 - RNA, 25 nt, Artificial Sequence
  Description of Artificial Sequence: Synthetic oligonucleotide
gagcugagcgcuucugcucugggca

SEQ ID NO: 90146 - RNA, 25 nt, Artificial Sequence
  Description of Artificial Sequence: Synthetic oligonucleotide
acgcauggcgcccgcacacggaguc

SEQ ID NO: 90147 - RNA, 25 nt, Artificial Sequence
  Description of Artificial Sequence: Synthetic oligonucleotide
cugaccugaugcagacgcaaggggg

SEQ ID NO: 90148 - RNA, 25 nt, Artificial Sequence
  Description of Artificial Sequence: Synthetic oligonucleotide
guuaauaugaacgccccucucggug

SEQ ID NO: 90149 - RNA, 25 nt, Artificial Sequence
  Description of Artificial Sequence: Synthetic oligonucleotide
ggaaucuggcucuggcucccucugc

SEQ ID NO: 90150 - RNA, 25 nt, Artificial Sequence
  Description of Artificial Sequence: Synthetic oligonucleotide
cucuugaccuggcucacccccgagg

SEQ ID NO: 90151 - RNA, 25 nt, Artificial Sequence
  Description of Artificial Sequence: Synthetic oligonucleotide
gucaacucuucauggugguacauga

SEQ ID NO: 90152 - RNA, 25 nt, Artificial Sequence
  Description of Artificial Sequence: Synthetic oligonucleotide
agagcuacagguggcuccuccaggg

SEQ ID NO: 90153 - RNA, 25 nt, Artificial Sequence
  Description of Artificial Sequence: Synthetic oligonucleotide
gugaugugcgauaaugugccaggcc

SEQ ID NO: 90154 - RNA, 25 nt, Artificial Sequence
  Description of Artificial Sequence: Synthetic oligonucleotide
cuggugagcagccagcggcagcugu

SEQ ID NO: 90155 - RNA, 25 nt, Artificial Sequence
  Description of Artificial Sequence: Synthetic oligonucleotide
ugucaccgacauccagaugugaugc

SEQ ID NO: 90156 - RNA, 25 nt, Artificial Sequence
  Description of Artificial Sequence: Synthetic oligonucleotide
cgugccauuagccagggcguggccg

SEQ ID NO: 90157 - RNA, 25 nt, Artificial Sequence
  Description of Artificial Sequence: Synthetic oligonucleotide
gaguggacagcagaaugccagcacc

SEQ ID NO: 90158 - RNA, 25 nt, Artificial Sequence
  Description of Artificial Sequence: Synthetic oligonucleotide
caguuccgccagcaccgcuggaauu

SEQ ID NO: 90159 - RNA, 25 nt, Artificial Sequence
  Description of Artificial Sequence: Synthetic oligonucleotide
ugcaacacccuggacagggaucaca

SEQ ID NO: 90160 - RNA, 25 nt, Artificial Sequence
  Description of Artificial Sequence: Synthetic oligonucleotide
agccuuuuuggcaggguccuacucc

SEQ ID NO: 90161 - RNA, 25 nt, Artificial Sequence
  Description of Artificial Sequence: Synthetic oligonucleotide
cgaaguagucgggaaucugccuuug

SEQ ID NO: 90162 - RNA, 25 nt, Artificial Sequence
  Description of Artificial Sequence: Synthetic oligonucleotide
guuuaugccaucuccucagcuggag

SEQ ID NO: 90163 - RNA, 25 nt, Artificial Sequence
  Description of Artificial Sequence: Synthetic oligonucleotide
guuguauuugccaucaccagggccu

SEQ ID NO: 90164 - RNA, 25 nt, Artificial Sequence
  Description of Artificial Sequence: Synthetic oligonucleotide
uguagccaaggagaaguaaaauccu

SEQ ID NO: 90165 - RNA, 25 nt, Artificial Sequence
  Description of Artificial Sequence: Synthetic oligonucleotide
uguuccugugauccaaagaagaugg

SEQ ID NO: 90166 - RNA, 25 nt, Artificial Sequence
  Description of Artificial Sequence: Synthetic oligonucleotide
ggaagcgccaaggacagcaaaggca

SEQ ID NO: 90167 - RNA, 25 nt, Artificial Sequence
  Description of Artificial Sequence: Synthetic oligonucleotide
auuuuugauugggguggcugcagug

SEQ ID NO: 90168 - RNA, 25 nt, Artificial Sequence
  Description of Artificial Sequence: Synthetic oligonucleotide
gauaacauugacuaugggaucaaau

SEQ ID NO: 90169 - RNA, 25 nt, Artificial Sequence
  Description of Artificial Sequence: Synthetic oligonucleotide
uuugcccgcgcauuuguggaugcaa

SEQ ID NO: 90170 - RNA, 25 nt, Artificial Sequence
  Description of Artificial Sequence: Synthetic oligonucleotide
aaggaaaggaaaggaaaggaugcca

SEQ ID NO: 90171 - RNA, 25 nt, Artificial Sequence
  Description of Artificial Sequence: Synthetic oligonucleotide
agagcccugaugaaucuucacaaca

SEQ ID NO: 90172 - RNA, 25 nt, Artificial Sequence
  Description of Artificial Sequence: Synthetic oligonucleotide
aacagagcuggcaggaaggcuguaa

SEQ ID NO: 90173 - RNA, 25 nt, Artificial Sequence
  Description of Artificial Sequence: Synthetic oligonucleotide
aagcgguucuugaaacaagagugca

SEQ ID NO: 90174 - RNA, 25 nt, Artificial Sequence
  Description of Artificial Sequence: Synthetic oligonucleotide
aagugccacggggugagcggcucau

SEQ ID NO: 90175 - RNA, 25 nt, Artificial Sequence
  Description of Artificial Sequence: Synthetic oligonucleotide
uguacucucaggacaugcuggcugg

SEQ ID NO: 90176 - RNA, 25 nt, Artificial Sequence
  Description of Artificial Sequence: Synthetic oligonucleotide
gccauggccgacuucaggaaaacgg

SEQ ID NO: 90177 - RNA, 25 nt, Artificial Sequence
  Description of Artificial Sequence: Synthetic oligonucleotide
ggcgauuaucucuggaggaaguaca

SEQ ID NO: 90178 - RNA, 25 nt, Artificial Sequence
  Description of Artificial Sequence: Synthetic oligonucleotide
aauggggccauccagguggucauga

SEQ ID NO: 90179 - RNA, 25 nt, Artificial Sequence
  Description of Artificial Sequence: Synthetic oligonucleotide
aaccaggauggcacagguuucacug

SEQ ID NO: 90180 - RNA, 25 nt, Artificial Sequence
  Description of Artificial Sequence: Synthetic oligonucleotide
guggcuaacgagagguuuaagaagc

SEQ ID NO: 90181 - RNA, 25 nt, Artificial Sequence
  Description of Artificial Sequence: Synthetic oligonucleotide
ccaacgaaaaaugaccucguguauu

SEQ ID NO: 90182 - RNA, 25 nt, Artificial Sequence
  Description of Artificial Sequence: Synthetic oligonucleotide
uuugagaauucuccagacuacugua

SEQ ID NO: 90183 - RNA, 25 nt, Artificial Sequence
  Description of Artificial Sequence: Synthetic oligonucleotide
aucagggaccgagaggcaggcuccc

SEQ ID NO: 90184 - RNA, 25 nt, Artificial Sequence
  Description of Artificial Sequence: Synthetic oligonucleotide
cuggguacagcaggccgugugugca

SEQ ID NO: 90185 - RNA, 25 nt, Artificial Sequence
  Description of Artificial Sequence: Synthetic oligonucleotide
aaccugacuucccggggcauggaca

SEQ ID NO: 90186 - RNA, 25 nt, Artificial Sequence
  Description of Artificial Sequence: Synthetic oligonucleotide
agcugugaagucaugugcuguggga

SEQ ID NO: 90187 - RNA, 25 nt, Artificial Sequence
  Description of Artificial Sequence: Synthetic oligonucleotide
agaggcuacgacaccucccauguca

SEQ ID NO: 90188 - RNA, 25 nt, Artificial Sequence
  Description of Artificial Sequence: Synthetic oligonucleotide
acccggaugaccaagugugggugua

SEQ ID NO: 90189 - RNA, 25 nt, Artificial Sequence
  Description of Artificial Sequence: Synthetic oligonucleotide
aaguuccacuggugcugcgccgugc

SEQ ID NO: 90190 - RNA, 25 nt, Artificial Sequence
  Description of Artificial Sequence: Synthetic oligonucleotide
cgcugucaggacugccuggaagcuc

SEQ ID NO: 90191 - RNA, 25 nt, Artificial Sequence
  Description of Artificial Sequence: Synthetic oligonucleotide
cuggaugugcacacaugcaaggccc

SEQ ID NO: 90192 - RNA, 25 nt, Artificial Sequence
  Description of Artificial Sequence: Synthetic oligonucleotide
cccaagaacgcugacuggacaaccg

SEQ ID NO: 90193 - RNA, 25 nt, Artificial Sequence
  Description of Artificial Sequence: Synthetic oligonucleotide
gcuacaugaccccagcaggcgucac

SEQ ID NO: 90194 - RNA, 25 nt, Artificial Sequence
  Description of Artificial Sequence: Synthetic oligonucleotide
ccauccaccuucccuucuacaagga

SEQ ID NO: 90195 - RNA, 25 nt, Artificial Sequence
  Description of Artificial Sequence: Synthetic oligonucleotide
acuccauuggaucugcaagaacacu

SEQ ID NO: 90196 - RNA, 25 nt, Artificial Sequence
  Description of Artificial Sequence: Synthetic oligonucleotide
uggaccuuuggguucuuucuggggg

SEQ ID NO: 90197 - RNA, 25 nt, Artificial Sequence
  Description of Artificial Sequence: Synthetic oligonucleotide
ggauauuuccuaaggcauguggccu

SEQ ID NO: 90198 - RNA, 25 nt, Artificial Sequence
  Description of Artificial Sequence: Synthetic oligonucleotide
uuuaucucaacggaagcccccucuu

SEQ ID NO: 90199 - RNA, 25 nt, Artificial Sequence
  Description of Artificial Sequence: Synthetic oligonucleotide
uccucccugggggccccaggauggg

SEQ ID NO: 90200 - RNA, 25 nt, Artificial Sequence
  Description of Artificial Sequence: Synthetic oligonucleotide
ggggccacacgcugcaccuaaagcc

SEQ ID NO: 90201 - RNA, 25 nt, Artificial Sequence
  Description of Artificial Sequence: Synthetic oligonucleotide
cuacccuauucuauccaucuccugg

SEQ ID NO: 90202 - RNA, 25 nt, Artificial Sequence
  Description of Artificial Sequence: Synthetic oligonucleotide
guguucugcagucaucuccccuccu

SEQ ID NO: 90203 - RNA, 25 nt, Artificial Sequence
  Description of Artificial Sequence: Synthetic oligonucleotide
uggcgaguucucuuuggaaauagca

SEQ ID NO: 90204 - RNA, 25 nt, Artificial Sequence
  Description of Artificial Sequence: Synthetic oligonucleotide
augacaggcuguucagccgggaggg

SEQ ID NO: 90205 - RNA, 25 nt, Artificial Sequence
  Description of Artificial Sequence: Synthetic oligonucleotide
guggugggcccagaccacugucucc

SEQ ID NO: 90206 - RNA, 25 nt, Artificial Sequence
  Description of Artificial Sequence: Synthetic oligonucleotide
cacccaccuugacguuucuucuuuc

SEQ ID NO: 90207 - RNA, 25 nt, Artificial Sequence
  Description of Artificial Sequence: Synthetic oligonucleotide
cuagagcaguuggccaagcagaaaa

SEQ ID NO: 90208 - RNA, 25 nt, Artificial Sequence
  Description of Artificial Sequence: Synthetic oligonucleotide
aaaaagugucucaaaggagcuuucu

SEQ ID NO: 90209 - RNA, 25 nt, Artificial Sequence
  Description of Artificial Sequence: Synthetic oligonucleotide
ucaaugucuucccacaaaugguccc

SEQ ID NO: 90210 - RNA, 25 nt, Artificial Sequence
  Description of Artificial Sequence: Synthetic oligonucleotide
caauuaagaaauuccauacuucucu

SEQ ID NO: 90211 - RNA, 25 nt, Artificial Sequence
  Description of Artificial Sequence: Synthetic oligonucleotide
ucagauggaacaguaaagaaagcag

SEQ ID NO: 90212 - RNA, 25 nt, Artificial Sequence
  Description of Artificial Sequence: Synthetic oligonucleotide
gaaucaacugccccugacuuaacuu

SEQ ID NO: 90213 - RNA, 25 nt, Artificial Sequence
  Description of Artificial Sequence: Synthetic oligonucleotide
uuaacuuuugaaaagaccaagacuu

SEQ ID NO: 90214 - RNA, 25 nt, Artificial Sequence
  Description of Artificial Sequence: Synthetic oligonucleotide
uuugucuguacaagugguuuuacag

SEQ ID NO: 90215 - RNA, 25 nt, Artificial Sequence
  Description of Artificial Sequence: Synthetic oligonucleotide
gcuaccacccuuaggguaauuggua

SEQ ID NO: 90216 - RNA, 25 nt, Artificial Sequence
  Description of Artificial Sequence: Synthetic oligonucleotide
aauuaccuggagaagaauggcuuuc

SEQ ID NO: 90217 - RNA, 25 nt, Artificial Sequence
  Description of Artificial Sequence: Synthetic oligonucleotide
caauacccuuuuaaguuuaaaaugu

SEQ ID NO: 90218 - RNA, 25 nt, Artificial Sequence
  Description of Artificial Sequence: Synthetic oligonucleotide
uguauuuuucaaggcauuuauugcc

SEQ ID NO: 90219 - RNA, 25 nt, Artificial Sequence
  Description of Artificial Sequence: Synthetic oligonucleotide
cauauuaaaaucugauguaacaagg

SEQ ID NO: 90220 - RNA, 25 nt, Artificial Sequence
  Description of Artificial Sequence: Synthetic oligonucleotide
guggggacguguguccuuugguacu

SEQ ID NO: 90221 - RNA, 25 nt, Artificial Sequence
  Description of Artificial Sequence: Synthetic oligonucleotide
uaugguguguuguaucuuuguaaga

SEQ ID NO: 90222 - RNA, 25 nt, Artificial Sequence
  Description of Artificial Sequence: Synthetic oligonucleotide
agcaaaagccucagaaagggauugc

SEQ ID NO: 90223 - RNA, 25 nt, Artificial Sequence
  Description of Artificial Sequence: Synthetic oligonucleotide
cuuugcauuacuguccccuugauau

SEQ ID NO: 90224 - RNA, 25 nt, Artificial Sequence
  Description of Artificial Sequence: Synthetic oligonucleotide
uaaaaaaucuuuagggaaugagagu

SEQ ID NO: 90225 - RNA, 25 nt, Artificial Sequence
  Description of Artificial Sequence: Synthetic oligonucleotide
uuccuucucacuuagaaucugaagg

SEQ ID NO: 90226 - RNA, 25 nt, Artificial Sequence
  Description of Artificial Sequence: Synthetic oligonucleotide
ggaauuaaaaagaagaugaaugguc

SEQ ID NO: 90227 - RNA, 25 nt, Artificial Sequence
  Description of Artificial Sequence: Synthetic oligonucleotide
cuggcaauauucuguaacuauuggg

SEQ ID NO: 90228 - RNA, 25 nt, Artificial Sequence
  Description of Artificial Sequence: Synthetic oligonucleotide
gugaauaugguggaaaauaauuuag

SEQ ID NO: 90229 - RNA, 25 nt, Artificial Sequence
  Description of Artificial Sequence: Synthetic oligonucleotide
guggauggaauaucagaaguauauc

SEQ ID NO: 90230 - RNA, 25 nt, Artificial Sequence
  Description of Artificial Sequence: Synthetic oligonucleotide
cuguacagaucaagaaaaaaaggaa

SEQ ID NO: 90231 - RNA, 25 nt, Artificial Sequence
  Description of Artificial Sequence: Synthetic oligonucleotide
aggaagaauaaaauuccuauaucau

SEQ ID NO: 90232 - RNA, 2932 nt, Homo sapiens
agcucccagggcccggccccccccggcgcucacgcucucggggcggacucccggcccuccgcgcccucucgcgcggcgauggccccacucggauacuucuuacuccucugcagccugaagcaggcucugggcagcuacccgaucugguggucgcuggcuguugggccacaguauuccucccugggcucgcagcccauccugugugccagcaucccgggccugguccccaagcagcuccgcuucugcaggaacuacguggagaucaugcccagcguggccgagggcaucaagauuggcauccaggagugccagcaccaguuccgcggccgccgguggaacugcaccaccguccacgacagccuggccaucuucgggcccgugcuggacaaagcuaccagggagucggccuuuguccacgccauugccucagccgguguggccuuugcagugacacgcucaugugcagaaggcacggccgccaucuguggcugcagcagccgccaccagggcucaccaggcaagggcuggaagugggguggcuguagcgaggacaucgaguuuggugggauggugucucgggaguucgccgacgcccgggagaaccggccagaugcccgcucagccaugaaccgccacaacaacgaggcugggcgccaggccaucgccagccacaugcaccucaagugcaagugccacgggcugucgggcagcugcgaggugaagacaugcugguggucgcaacccgacuuccgcgccaucggugacuuccucaaggacaaguacgacagcgccucggagauggugguggagaagcaccgggagucccgcggcuggguggagacccugcggccgcgcuacaccuacuucaaggugcccacggagcgcgaccuggucuacuacgaggccucgcccaacuucugcgagcccaacccugagacgggcuccuucggcacgcgcgaccgcaccugcaacgucagcucgcacggcaucgacggcugcgaccugcugugcugcggccgcggccacaacgcgcgagcggagcggcgccgggagaagugccgcugcguguuccacuggugcugcuacgucagcugccaggagugcacgcgcgucuacgacgugcacaccugcaaguaggcaccggccgcggcucccccuggacggggcgggcccugccugagggugggcuuuucccuggguggagcaggacucccaccuaaacggggcaguacuccucccugggggcgggacuccucccuggggguggggcuccuaccugggggcagaacuccuaccugaaggcagggcuccucccuggagcuagugucuccucucugguggcugggcugcuccugaaugaggcggagcuccaggauggggaggggcucugcguuggcuucucccuggggacggggcuccccuggacagaggcggggcuacagauugggcggggcuucucuugggugggacagggcuucuccugcgggggcgaggccccucccaguaagggcguggcucugggugggcggggcacuagguaggcuucuaccugcaggcggggcuccuccugaaggaggcggggcucuaggauggggcacggcucugggguaggcugcucccugagggcggagcgccuccuuaggagugggguuuuaugguggaugaggcuucuuccuggauggggcagagcuucuccugaccagggcaaggccccuuccacgggggcuguggcucugggugggcguggccugcauaggcuccuuccuguggguggggcuucucugggaccaggcuccaauggggcggggcuucucuccgcgggugggacucuucccugggaaccgcccuccugauuaaggcguggcuucugcaggaaucccggcuccagagcaggaaauucagcccaccagccaccucauccccaacccccuguaagguuccauccaccccugcgucgagcugggaagguuccaugaagcgagucggguccccaacccgugccccugggauccgagggccccucuccaagcgccuggcuuuggaaugcuccaggcgcgccgacgccugugccaccccuuccucagccugggguuugaccacccaccugaccaggggcccuaccuggggaaagccugaagggccucccagcccccaaccccaagaccaagcuuaguccugggagaggacagggacuucgcagaggcaagcgaccgaggcccucccaaagaggcccgcccugcccgggcucccacaccgucagguacuccugccagggaacuggccugcugcgccccaggccccgcccgucucugcucugcucagcugcgcccccuucuuugcagcugcccagccccuccucccugcccucgggucuccccaccugcacuccauccagcuacaggagagauagaagccucucgucccgucccucccuuuccuccgccuguccacagccccuuaagggaaagguaggaagagagguccagccccccaggcugcccagagcugcuggucucauuugggggcguucgggagguuuggggggcaucaaccccccgacugugcugcucgcgaaggucccacagcccugagaugggccggcccccuuccuggccccucauggcgggacuggagaaaugguccgcuuuccuggagccaauggcccggccccuccugacucauccgccuggcccgggaaugaauggggaggccgcugaacccacccggcccauaucccugguugccucauggccagcgccccucagccucugccacugugaaccggcucccacccucaaggugcggggagaagaagcggccaggcggggcgccccaagagcccaaaagagggcacaccgccauccucugccucaaauucugcguuuuugguuuuaauguuauaucugaugcugcuauauccacuguccaacgg

SEQ ID NO: 90233 - RNA, 19 nt, Artificial Sequence
  Description of Artificial Sequence: Synthetic oligonucleotide
agcucccagggcccggccc

SEQ ID NO: 90234 - RNA, 19 nt, Artificial Sequence
  Description of Artificial Sequence: Synthetic oligonucleotide
ccccccggcgcucacgcuc

SEQ ID NO: 90235 - RNA, 19 nt, Artificial Sequence
  Description of Artificial Sequence: Synthetic oligonucleotide
cucggggcggacucccggc

SEQ ID NO: 90236 - RNA, 19 nt, Artificial Sequence
  Description of Artificial Sequence: Synthetic oligonucleotide
cccuccgcgcccucucgcg

SEQ ID NO: 90237 - RNA, 19 nt, Artificial Sequence
  Description of Artificial Sequence: Synthetic oligonucleotide
gcggcgauggccccacucg

SEQ ID NO: 90238 - RNA, 19 nt, Artificial Sequence
  Description of Artificial Sequence: Synthetic oligonucleotide
ggauacuucuuacuccucu

SEQ ID NO: 90239 - RNA, 19 nt, Artificial Sequence
  Description of Artificial Sequence: Synthetic oligonucleotide
ugcagccugaagcaggcuc

SEQ ID NO: 90240 - RNA, 19 nt, Artificial Sequence
  Description of Artificial Sequence: Synthetic oligonucleotide
cugggcagcuacccgaucu

SEQ ID NO: 90241 - RNA, 19 nt, Artificial Sequence
  Description of Artificial Sequence: Synthetic oligonucleotide
ugguggucgcuggcuguug

SEQ ID NO: 90242 - RNA, 19 nt, Artificial Sequence
  Description of Artificial Sequence: Synthetic oligonucleotide
gggccacaguauuccuccc

SEQ ID NO: 90243 - RNA, 19 nt, Artificial Sequence
  Description of Artificial Sequence: Synthetic oligonucleotide
cugggcucgcagcccaucc

SEQ ID NO: 90244 - RNA, 19 nt, Artificial Sequence
  Description of Artificial Sequence: Synthetic oligonucleotide
cugugugccagcaucccgg

SEQ ID NO: 90245 - RNA, 19 nt, Artificial Sequence
  Description of Artificial Sequence: Synthetic oligonucleotide
ggccugguccccaagcagc

SEQ ID NO: 90246 - RNA, 19 nt, Artificial Sequence
  Description of Artificial Sequence: Synthetic oligonucleotide
cuccgcuucugcaggaacu

SEQ ID NO: 90247 - RNA, 19 nt, Artificial Sequence
  Description of Artificial Sequence: Synthetic oligonucleotide
uacguggagaucaugccca

SEQ ID NO: 90248 - RNA, 19 nt, Artificial Sequence
  Description of Artificial Sequence: Synthetic oligonucleotide
agcguggccgagggcauca

SEQ ID NO: 90249 - RNA, 19 nt, Artificial Sequence
  Description of Artificial Sequence: Synthetic oligonucleotide
aagauuggcauccaggagu

SEQ ID NO: 90250 - RNA, 19 nt, Artificial Sequence
  Description of Artificial Sequence: Synthetic oligonucleotide
ugccagcaccaguuccgcg

SEQ ID NO: 90251 - RNA, 19 nt, Artificial Sequence
  Description of Artificial Sequence: Synthetic oligonucleotide
ggccgccgguggaacugca

SEQ ID NO: 90252 - RNA, 19 nt, Artificial Sequence
  Description of Artificial Sequence: Synthetic oligonucleotide
accaccguccacgacagcc

SEQ ID NO: 90253 - RNA, 19 nt, Artificial Sequence
  Description of Artificial Sequence: Synthetic oligonucleotide
cuggccaucuucgggcccg

SEQ ID NO: 90254 - RNA, 19 nt, Artificial Sequence
  Description of Artificial Sequence: Synthetic oligonucleotide
gugcuggacaaagcuacca

SEQ ID NO: 90255 - RNA, 19 nt, Artificial Sequence
  Description of Artificial Sequence: Synthetic oligonucleotide
agggagucggccuuugucc

SEQ ID NO: 90256 - RNA, 19 nt, Artificial Sequence
  Description of Artificial Sequence: Synthetic oligonucleotide
cacgccauugccucagccg

SEQ ID NO: 90257 - RNA, 19 nt, Artificial Sequence
  Description of Artificial Sequence: Synthetic oligonucleotide
gguguggccuuugcaguga

SEQ ID NO: 90258 - RNA, 19 nt, Artificial Sequence
  Description of Artificial Sequence: Synthetic oligonucleotide
acacgcucaugugcagaag

SEQ ID NO: 90259 - RNA, 19 nt, Artificial Sequence
  Description of Artificial Sequence: Synthetic oligonucleotide
ggcacggccgccaucugug

SEQ ID NO: 90260 - RNA, 19 nt, Artificial Sequence
  Description of Artificial Sequence: Synthetic oligonucleotide
ggcugcagcagccgccacc

SEQ ID NO: 90261 - RNA, 19 nt, Artificial Sequence
  Description of Artificial Sequence: Synthetic oligonucleotide
cagggcucaccaggcaagg

SEQ ID NO: 90262 - RNA, 19 nt, Artificial Sequence
  Description of Artificial Sequence: Synthetic oligonucleotide
ggcuggaagugggguggcu

SEQ ID NO: 90263 - RNA, 19 nt, Artificial Sequence
  Description of Artificial Sequence: Synthetic oligonucleotide
uguagcgaggacaucgagu

SEQ ID NO: 90264 - RNA, 19 nt, Artificial Sequence
  Description of Artificial Sequence: Synthetic oligonucleotide
uuuggugggauggugucuc

SEQ ID NO: 90265 - RNA, 19 nt, Artificial Sequence
  Description of Artificial Sequence: Synthetic oligonucleotide
cgggaguucgccgacgccc

SEQ ID NO: 90266 - RNA, 19 nt, Artificial Sequence
  Description of Artificial Sequence: Synthetic oligonucleotide
cgggagaaccggccagaug

SEQ ID NO: 90267 - RNA, 19 nt, Artificial Sequence
  Description of Artificial Sequence: Synthetic oligonucleotide
gcccgcucagccaugaacc

SEQ ID NO: 90268 - RNA, 19 nt, Artificial Sequence
  Description of Artificial Sequence: Synthetic oligonucleotide
cgccacaacaacgaggcug

SEQ ID NO: 90269 - RNA, 19 nt, Artificial Sequence
  Description of Artificial Sequence: Synthetic oligonucleotide
gggcgccaggccaucgcca

SEQ ID NO: 90270 - RNA, 19 nt, Artificial Sequence
  Description of Artificial Sequence: Synthetic oligonucleotide
agccacaugcaccucaagu

SEQ ID NO: 90271 - RNA, 19 nt, Artificial Sequence
  Description of Artificial Sequence: Synthetic oligonucleotide
ugcaagugccacgggcugu

SEQ ID NO: 90272 - RNA, 19 nt, Artificial Sequence
  Description of Artificial Sequence: Synthetic oligonucleotide
ucgggcagcugcgagguga

SEQ ID NO: 90273 - RNA, 19 nt, Artificial Sequence
  Description of Artificial Sequence: Synthetic oligonucleotide
aagacaugcugguggucgc

SEQ ID NO: 90274 - RNA, 19 nt, Artificial Sequence
  Description of Artificial Sequence: Synthetic oligonucleotide
caacccgacuuccgcgcca

SEQ ID NO: 90275 - RNA, 19 nt, Artificial Sequence
  Description of Artificial Sequence: Synthetic oligonucleotide
aucggugacuuccucaagg

SEQ ID NO: 90276 - RNA, 19 nt, Artificial Sequence
  Description of Artificial Sequence: Synthetic oligonucleotide
gacaaguacgacagcgccu

SEQ ID NO: 90277 - RNA, 19 nt, Artificial Sequence
  Description of Artificial Sequence: Synthetic oligonucleotide
ucggagauggugguggaga

SEQ ID NO: 90278 - RNA, 19 nt, Artificial Sequence
  Description of Artificial Sequence: Synthetic oligonucleotide
aagcaccgggagucccgcg

SEQ ID NO: 90279 - RNA, 19 nt, Artificial Sequence
  Description of Artificial Sequence: Synthetic oligonucleotide
ggcuggguggagacccugc

SEQ ID NO: 90280 - RNA, 19 nt, Artificial Sequence
  Description of Artificial Sequence: Synthetic oligonucleotide
cggccgcgcuacaccuacu

SEQ ID NO: 90281 - RNA, 19 nt, Artificial Sequence
  Description of Artificial Sequence: Synthetic oligonucleotide
uucaaggugcccacggagc

SEQ ID NO: 90282 - RNA, 19 nt, Artificial Sequence
  Description of Artificial Sequence: Synthetic oligonucleotide
cgcgaccuggucuacuacg

SEQ ID NO: 90283 - RNA, 19 nt, Artificial Sequence
  Description of Artificial Sequence: Synthetic oligonucleotide
gaggccucgcccaacuucu

SEQ ID NO: 90284 - RNA, 19 nt, Artificial Sequence
  Description of Artificial Sequence: Synthetic oligonucleotide
ugcgagcccaacccugaga

SEQ ID NO: 90285 - RNA, 19 nt, Artificial Sequence
  Description of Artificial Sequence: Synthetic oligonucleotide
acgggcuccuucggcacgc

SEQ ID NO: 90286 - RNA, 19 nt, Artificial Sequence
  Description of Artificial Sequence: Synthetic oligonucleotide
cgcgaccgcaccugcaacg

SEQ ID NO: 90287 - RNA, 19 nt, Artificial Sequence
  Description of Artificial Sequence: Synthetic oligonucleotide
gucagcucgcacggcaucg

SEQ ID NO: 90288 - RNA, 19 nt, Artificial Sequence
  Description of Artificial Sequence: Synthetic oligonucleotide
gacggcugcgaccugcugu

SEQ ID NO: 90289 - RNA, 19 nt, Artificial Sequence
  Description of Artificial Sequence: Synthetic oligonucleotide
ugcugcggccgcggccaca

SEQ ID NO: 90290 - RNA, 19 nt, Artificial Sequence
  Description of Artificial Sequence: Synthetic oligonucleotide
aacgcgcgagcggagcggc

SEQ ID NO: 90291 - RNA, 19 nt, Artificial Sequence
  Description of Artificial Sequence: Synthetic oligonucleotide
cgccgggagaagugccgcu

SEQ ID NO: 90292 - RNA, 19 nt, Artificial Sequence
  Description of Artificial Sequence: Synthetic oligonucleotide
ugcguguuccacuggugcu

SEQ ID NO: 90293 - RNA, 19 nt, Artificial Sequence
  Description of Artificial Sequence: Synthetic oligonucleotide
ugcuacgucagcugccagg

SEQ ID NO: 90294 - RNA, 19 nt, Artificial Sequence
  Description of Artificial Sequence: Synthetic oligonucleotide
gagugcacgcgcgucuacg

SEQ ID NO: 90295 - RNA, 19 nt, Artificial Sequence
  Description of Artificial Sequence: Synthetic oligonucleotide
gacgugcacaccugcaagu

SEQ ID NO: 90296 - RNA, 19 nt, Artificial Sequence
  Description of Artificial Sequence: Synthetic oligonucleotide
uaggcaccggccgcggcuc

SEQ ID NO: 90297 - RNA, 19 nt, Artificial Sequence
  Description of Artificial Sequence: Synthetic oligonucleotide
cccccuggacggggcgggc

SEQ ID NO: 90298 - RNA, 19 nt, Artificial Sequence
  Description of Artificial Sequence: Synthetic oligonucleotide
cccugccugagggugggcu

SEQ ID NO: 90299 - RNA, 19 nt, Artificial Sequence
  Description of Artificial Sequence: Synthetic oligonucleotide
uuuucccuggguggagcag

SEQ ID NO: 90300 - RNA, 19 nt, Artificial Sequence
  Description of Artificial Sequence: Synthetic oligonucleotide
ggacucccaccuaaacggg

SEQ ID NO: 90301 - RNA, 19 nt, Artificial Sequence
  Description of Artificial Sequence: Synthetic oligonucleotide
ggcaguacuccucccuggg

SEQ ID NO: 90302 - RNA, 19 nt, Artificial Sequence
  Description of Artificial Sequence: Synthetic oligonucleotide
gggcgggacuccucccugg

SEQ ID NO: 90303 - RNA, 19 nt, Artificial Sequence
  Description of Artificial Sequence: Synthetic oligonucleotide
gggguggggcuccuaccug

SEQ ID NO: 90304 - RNA, 19 nt, Artificial Sequence
  Description of Artificial Sequence: Synthetic oligonucleotide
gggggcagaacuccuaccu

SEQ ID NO: 90305 - RNA, 19 nt, Artificial Sequence
  Description of Artificial Sequence: Synthetic oligonucleotide
ugaaggcagggcuccuccc

SEQ ID NO: 90306 - RNA, 19 nt, Artificial Sequence
  Description of Artificial Sequence: Synthetic oligonucleotide
cuggagcuagugucuccuc

SEQ ID NO: 90307 - RNA, 19 nt, Artificial Sequence
  Description of Artificial Sequence: Synthetic oligonucleotide
cucugguggcugggcugcu

SEQ ID NO: 90308 - RNA, 19 nt, Artificial Sequence
  Description of Artificial Sequence: Synthetic oligonucleotide
uccugaaugaggcggagcu

SEQ ID NO: 90309 - RNA, 19 nt, Artificial Sequence
  Description of Artificial Sequence: Synthetic oligonucleotide
uccaggauggggaggggcu

SEQ ID NO: 90310 - RNA, 19 nt, Artificial Sequence
  Description of Artificial Sequence: Synthetic oligonucleotide
ucugcguuggcuucucccu

SEQ ID NO: 90311 - RNA, 19 nt, Artificial Sequence
  Description of Artificial Sequence: Synthetic oligonucleotide
uggggacggggcuccccug

SEQ ID NO: 90312 - RNA, 19 nt, Artificial Sequence
  Description of Artificial Sequence: Synthetic oligonucleotide
ggacagaggcggggcuaca

SEQ ID NO: 90313 - RNA, 19 nt, Artificial Sequence
  Description of Artificial Sequence: Synthetic oligonucleotide
agauugggcggggcuucuc

SEQ ID NO: 90314 - RNA, 19 nt, Artificial Sequence
  Description of Artificial Sequence: Synthetic oligonucleotide
cuugggugggacagggcuu

SEQ ID NO: 90315 - RNA, 19 nt, Artificial Sequence
  Description of Artificial Sequence: Synthetic oligonucleotide
ucuccugcgggggcgaggc

SEQ ID NO: 90316 - RNA, 19 nt, Artificial Sequence
  Description of Artificial Sequence: Synthetic oligonucleotide
ccccucccaguaagggcgu

SEQ ID NO: 90317 - RNA, 19 nt, Artificial Sequence
  Description of Artificial Sequence: Synthetic oligonucleotide
uggcucugggugggcgggg

SEQ ID NO: 90318 - RNA, 19 nt, Artificial Sequence
  Description of Artificial Sequence: Synthetic oligonucleotide
gcacuagguaggcuucuac

SEQ ID NO: 90319 - RNA, 19 nt, Artificial Sequence
  Description of Artificial Sequence: Synthetic oligonucleotide
ccugcaggcggggcuccuc

SEQ ID NO: 90320 - RNA, 19 nt, Artificial Sequence
  Description of Artificial Sequence: Synthetic oligonucleotide
ccugaaggaggcggggcuc

SEQ ID NO: 90321 - RNA, 19 nt, Artificial Sequence
  Description of Artificial Sequence: Synthetic oligonucleotide
cuaggauggggcacggcuc

SEQ ID NO: 90322 - RNA, 19 nt, Artificial Sequence
  Description of Artificial Sequence: Synthetic oligonucleotide
cugggguaggcugcucccu

SEQ ID NO: 90323 - RNA, 19 nt, Artificial Sequence
  Description of Artificial Sequence: Synthetic oligonucleotide
ugagggcggagcgccuccu

SEQ ID NO: 90324 - RNA, 19 nt, Artificial Sequence
  Description of Artificial Sequence: Synthetic oligonucleotide
uuaggagugggguuuuaug

SEQ ID NO: 90325 - RNA, 19 nt, Artificial Sequence
  Description of Artificial Sequence: Synthetic oligonucleotide
gguggaugaggcuucuucc

SEQ ID NO: 90326 - RNA, 19 nt, Artificial Sequence
  Description of Artificial Sequence: Synthetic oligonucleotide
cuggauggggcagagcuuc

SEQ ID NO: 90327 - RNA, 19 nt, Artificial Sequence
  Description of Artificial Sequence: Synthetic oligonucleotide
cuccugaccagggcaaggc

SEQ ID NO: 90328 - RNA, 19 nt, Artificial Sequence
  Description of Artificial Sequence: Synthetic oligonucleotide
ccccuuccacgggggcugu

SEQ ID NO: 90329 - RNA, 19 nt, Artificial Sequence
  Description of Artificial Sequence: Synthetic oligonucleotide
uggcucugggugggcgugg

SEQ ID NO: 90330 - RNA, 19 nt, Artificial Sequence
  Description of Artificial Sequence: Synthetic oligonucleotide
gccugcauaggcuccuucc

SEQ ID NO: 90331 - RNA, 19 nt, Artificial Sequence
  Description of Artificial Sequence: Synthetic oligonucleotide
cuguggguggggcuucucu

SEQ ID NO: 90332 - RNA, 19 nt, Artificial Sequence
  Description of Artificial Sequence: Synthetic oligonucleotide
ugggaccaggcuccaaugg

SEQ ID NO: 90333 - RNA, 19 nt, Artificial Sequence
  Description of Artificial Sequence: Synthetic oligonucleotide
gggcggggcuucucuccgc

SEQ ID NO: 90334 - RNA, 19 nt, Artificial Sequence
  Description of Artificial Sequence: Synthetic oligonucleotide
cgggugggacucuucccug

SEQ ID NO: 90335 - RNA, 19 nt, Artificial Sequence
  Description of Artificial Sequence: Synthetic oligonucleotide
gggaaccgcccuccugauu

SEQ ID NO: 90336 - RNA, 19 nt, Artificial Sequence
  Description of Artificial Sequence: Synthetic oligonucleotide
uaaggcguggcuucugcag

SEQ ID NO: 90337 - RNA, 19 nt, Artificial Sequence
  Description of Artificial Sequence: Synthetic oligonucleotide
ggaaucccggcuccagagc

SEQ ID NO: 90338 - RNA, 19 nt, Artificial Sequence
  Description of Artificial Sequence: Synthetic oligonucleotide
caggaaauucagcccacca

SEQ ID NO: 90339 - RNA, 19 nt, Artificial Sequence
  Description of Artificial Sequence: Synthetic oligonucleotide
agccaccucauccccaacc

SEQ ID NO: 90340 - RNA, 19 nt, Artificial Sequence
  Description of Artificial Sequence: Synthetic oligonucleotide
ccccuguaagguuccaucc

SEQ ID NO: 90341 - RNA, 19 nt, Artificial Sequence
  Description of Artificial Sequence: Synthetic oligonucleotide
caccccugcgucgagcugg

SEQ ID NO: 90342 - RNA, 19 nt, Artificial Sequence
  Description of Artificial Sequence: Synthetic oligonucleotide
ggaagguuccaugaagcga

SEQ ID NO: 90343 - RNA, 19 nt, Artificial Sequence
  Description of Artificial Sequence: Synthetic oligonucleotide
agucggguccccaacccgu

SEQ ID NO: 90344 - RNA, 19 nt, Artificial Sequence
  Description of Artificial Sequence: Synthetic oligonucleotide
ugccccugggauccgaggg

SEQ ID NO: 90345 - RNA, 19 nt, Artificial Sequence
  Description of Artificial Sequence: Synthetic oligonucleotide
gccccucuccaagcgccug

SEQ ID NO: 90346 - RNA, 19 nt, Artificial Sequence
  Description of Artificial Sequence: Synthetic oligonucleotide
ggcuuuggaaugcuccagg

SEQ ID NO: 90347 - RNA, 19 nt, Artificial Sequence
  Description of Artificial Sequence: Synthetic oligonucleotide
gcgcgccgacgccugugcc

SEQ ID NO: 90348 - RNA, 19 nt, Artificial Sequence
  Description of Artificial Sequence: Synthetic oligonucleotide
caccccuuccucagccugg

SEQ ID NO: 90349 - RNA, 19 nt, Artificial Sequence
  Description of Artificial Sequence: Synthetic oligonucleotide
ggguuugaccacccaccug

SEQ ID NO: 90350 - RNA, 19 nt, Artificial Sequence
  Description of Artificial Sequence: Synthetic oligonucleotide
gaccaggggcccuaccugg

SEQ ID NO: 90351 - RNA, 19 nt, Artificial Sequence
  Description of Artificial Sequence: Synthetic oligonucleotide
gggaaagccugaagggccu

SEQ ID NO: 90352 - RNA, 19 nt, Artificial Sequence
  Description of Artificial Sequence: Synthetic oligonucleotide
ucccagcccccaaccccaa

SEQ ID NO: 90353 - RNA, 19 nt, Artificial Sequence
  Description of Artificial Sequence: Synthetic oligonucleotide
agaccaagcuuaguccugg

SEQ ID NO: 90354 - RNA, 19 nt, Artificial Sequence
  Description of Artificial Sequence: Synthetic oligonucleotide
ggagaggacagggacuucg

SEQ ID NO: 90355 - RNA, 19 nt, Artificial Sequence
  Description of Artificial Sequence: Synthetic oligonucleotide
gcagaggcaagcgaccgag

SEQ ID NO: 90356 - RNA, 19 nt, Artificial Sequence
  Description of Artificial Sequence: Synthetic oligonucleotide
ggcccucccaaagaggccc

SEQ ID NO: 90357 - RNA, 19 nt, Artificial Sequence
  Description of Artificial Sequence: Synthetic oligonucleotide
cgcccugcccgggcuccca

SEQ ID NO: 90358 - RNA, 19 nt, Artificial Sequence
  Description of Artificial Sequence: Synthetic oligonucleotide
acaccgucagguacuccug

SEQ ID NO: 90359 - RNA, 19 nt, Artificial Sequence
  Description of Artificial Sequence: Synthetic oligonucleotide
gccagggaacuggccugcu

SEQ ID NO: 90360 - RNA, 19 nt, Artificial Sequence
  Description of Artificial Sequence: Synthetic oligonucleotide
ugcgccccaggccccgccc

SEQ ID NO: 90361 - RNA, 19 nt, Artificial Sequence
  Description of Artificial Sequence: Synthetic oligonucleotide
cgucucugcucugcucagc

SEQ ID NO: 90362 - RNA, 19 nt, Artificial Sequence
  Description of Artificial Sequence: Synthetic oligonucleotide
cugcgcccccuucuuugca

SEQ ID NO: 90363 - RNA, 19 nt, Artificial Sequence
  Description of Artificial Sequence: Synthetic oligonucleotide
agcugcccagccccuccuc

SEQ ID NO: 90364 - RNA, 19 nt, Artificial Sequence
  Description of Artificial Sequence: Synthetic oligonucleotide
cccugcccucgggucuccc

SEQ ID NO: 90365 - RNA, 19 nt, Artificial Sequence
  Description of Artificial Sequence: Synthetic oligonucleotide
ccaccugcacuccauccag

SEQ ID NO: 90366 - RNA, 19 nt, Artificial Sequence
  Description of Artificial Sequence: Synthetic oligonucleotide
gcuacaggagagauagaag

SEQ ID NO: 90367 - RNA, 19 nt, Artificial Sequence
  Description of Artificial Sequence: Synthetic oligonucleotide
gccucucgucccgucccuc

SEQ ID NO: 90368 - RNA, 19 nt, Artificial Sequence
  Description of Artificial Sequence: Synthetic oligonucleotide
cccuuuccuccgccugucc

SEQ ID NO: 90369 - RNA, 19 nt, Artificial Sequence
  Description of Artificial Sequence: Synthetic oligonucleotide
cacagccccuuaagggaaa

SEQ ID NO: 90370 - RNA, 19 nt, Artificial Sequence
  Description of Artificial Sequence: Synthetic oligonucleotide
agguaggaagagaggucca

SEQ ID NO: 90371 - RNA, 19 nt, Artificial Sequence
  Description of Artificial Sequence: Synthetic oligonucleotide
agccccccaggcugcccag

SEQ ID NO: 90372 - RNA, 19 nt, Artificial Sequence
  Description of Artificial Sequence: Synthetic oligonucleotide
gagcugcuggucucauuug

SEQ ID NO: 90373 - RNA, 19 nt, Artificial Sequence
  Description of Artificial Sequence: Synthetic oligonucleotide
gggggcguucgggagguuu

SEQ ID NO: 90374 - RNA, 19 nt, Artificial Sequence
  Description of Artificial Sequence: Synthetic oligonucleotide
uggggggcaucaacccccc

SEQ ID NO: 90375 - RNA, 19 nt, Artificial Sequence
  Description of Artificial Sequence: Synthetic oligonucleotide
cgacugugcugcucgcgaa

SEQ ID NO: 90376 - RNA, 19 nt, Artificial Sequence
  Description of Artificial Sequence: Synthetic oligonucleotide
aggucccacagcccugaga

SEQ ID NO: 90377 - RNA, 19 nt, Artificial Sequence
  Description of Artificial Sequence: Synthetic oligonucleotide
augggccggcccccuuccu

SEQ ID NO: 90378 - RNA, 19 nt, Artificial Sequence
  Description of Artificial Sequence: Synthetic oligonucleotide
uggccccucauggcgggac

SEQ ID NO: 90379 - RNA, 19 nt, Artificial Sequence
  Description of Artificial Sequence: Synthetic oligonucleotide
cuggagaaaugguccgcuu

SEQ ID NO: 90380 - RNA, 19 nt, Artificial Sequence
  Description of Artificial Sequence: Synthetic oligonucleotide
uuccuggagccaauggccc

SEQ ID NO: 90381 - RNA, 19 nt, Artificial Sequence
  Description of Artificial Sequence: Synthetic oligonucleotide
cggccccuccugacucauc

SEQ ID NO: 90382 - RNA, 19 nt, Artificial Sequence
  Description of Artificial Sequence: Synthetic oligonucleotide
ccgccuggcccgggaauga

SEQ ID NO: 90383 - RNA, 19 nt, Artificial Sequence
  Description of Artificial Sequence: Synthetic oligonucleotide
aauggggaggccgcugaac

SEQ ID NO: 90384 - RNA, 19 nt, Artificial Sequence
  Description of Artificial Sequence: Synthetic oligonucleotide
cccacccggcccauauccc

SEQ ID NO: 90385 - RNA, 19 nt, Artificial Sequence
  Description of Artificial Sequence: Synthetic oligonucleotide
cugguugccucauggccag

SEQ ID NO: 90386 - RNA, 19 nt, Artificial Sequence
  Description of Artificial Sequence: Synthetic oligonucleotide
gcgccccucagccucugcc

SEQ ID NO: 90387 - RNA, 19 nt, Artificial Sequence
  Description of Artificial Sequence: Synthetic oligonucleotide
cacugugaaccggcuccca

SEQ ID NO: 90388 - RNA, 19 nt, Artificial Sequence
  Description of Artificial Sequence: Synthetic oligonucleotide
acccucaaggugcggggag

SEQ ID NO: 90389 - RNA, 19 nt, Artificial Sequence
  Description of Artificial Sequence: Synthetic oligonucleotide
gaagaagcggccaggcggg

SEQ ID NO: 90390 - RNA, 19 nt, Artificial Sequence
  Description of Artificial Sequence: Synthetic oligonucleotide
ggcgccccaagagcccaaa

SEQ ID NO: 90391 - RNA, 19 nt, Artificial Sequence
  Description of Artificial Sequence: Synthetic oligonucleotide
aagagggcacaccgccauc

SEQ ID NO: 90392 - RNA, 19 nt, Artificial Sequence
  Description of Artificial Sequence: Synthetic oligonucleotide
ccucugccucaaauucugc

SEQ ID NO: 90393 - RNA, 19 nt, Artificial Sequence
  Description of Artificial Sequence: Synthetic oligonucleotide
cguuuuugguuuuaauguu

SEQ ID NO: 90394 - RNA, 19 nt, Artificial Sequence
  Description of Artificial Sequence: Synthetic oligonucleotide
uauaucugaugcugcuaua

SEQ ID NO: 90395 - RNA, 19 nt, Artificial Sequence
  Description of Artificial Sequence: Synthetic oligonucleotide
uauauccacuguccaacgg

SEQ ID NO: 90396 - RNA, 25 nt, Artificial Sequence
  Description of Artificial Sequence: Synthetic oligonucleotide
agcucccagggcccggccccccccg

SEQ ID NO: 90397 - RNA, 25 nt, Artificial Sequence
  Description of Artificial Sequence: Synthetic oligonucleotide
ggcgcucacgcucucggggcggacu

SEQ ID NO: 90398 - RNA, 25 nt, Artificial Sequence
  Description of Artificial Sequence: Synthetic oligonucleotide
ucccggcccuccgcgcccucucgcg

SEQ ID NO: 90399 - RNA, 25 nt, Artificial Sequence
  Description of Artificial Sequence: Synthetic oligonucleotide
gcggcgauggccccacucggauacu

SEQ ID NO: 90400 - RNA, 25 nt, Artificial Sequence
  Description of Artificial Sequence: Synthetic oligonucleotide
uucuuacuccucugcagccugaagc

SEQ ID NO: 90401 - RNA, 25 nt, Artificial Sequence
  Description of Artificial Sequence: Synthetic oligonucleotide
caggcucugggcagcuacccgaucu

SEQ ID NO: 90402 - RNA, 25 nt, Artificial Sequence
  Description of Artificial Sequence: Synthetic oligonucleotide
ugguggucgcuggcuguugggccac

SEQ ID NO: 90403 - RNA, 25 nt, Artificial Sequence
  Description of Artificial Sequence: Synthetic oligonucleotide
caguauuccucccugggcucgcagc

SEQ ID NO: 90404 - RNA, 25 nt, Artificial Sequence
  Description of Artificial Sequence: Synthetic oligonucleotide
cccauccugugugccagcaucccgg

SEQ ID NO: 90405 - RNA, 25 nt, Artificial Sequence
  Description of Artificial Sequence: Synthetic oligonucleotide
ggccugguccccaagcagcuccgcu

SEQ ID NO: 90406 - RNA, 25 nt, Artificial Sequence
  Description of Artificial Sequence: Synthetic oligonucleotide
uucugcaggaacuacguggagauca

SEQ ID NO: 90407 - RNA, 25 nt, Artificial Sequence
  Description of Artificial Sequence: Synthetic oligonucleotide
augcccagcguggccgagggcauca

SEQ ID NO: 90408 - RNA, 25 nt, Artificial Sequence
  Description of Artificial Sequence: Synthetic oligonucleotide
aagauuggcauccaggagugccagc

SEQ ID NO: 90409 - RNA, 25 nt, Artificial Sequence
  Description of Artificial Sequence: Synthetic oligonucleotide
caccaguuccgcggccgccggugga

SEQ ID NO: 90410 - RNA, 25 nt, Artificial Sequence
  Description of Artificial Sequence: Synthetic oligonucleotide
aacugcaccaccguccacgacagcc

SEQ ID NO: 90411 - RNA, 25 nt, Artificial Sequence
  Description of Artificial Sequence: Synthetic oligonucleotide
cuggccaucuucgggcccgugcugg

SEQ ID NO: 90412 - RNA, 25 nt, Artificial Sequence
  Description of Artificial Sequence: Synthetic oligonucleotide
gacaaagcuaccagggagucggccu

SEQ ID NO: 90413 - RNA, 25 nt, Artificial Sequence
  Description of Artificial Sequence: Synthetic oligonucleotide
uuuguccacgccauugccucagccg

SEQ ID NO: 90414 - RNA, 25 nt, Artificial Sequence
  Description of Artificial Sequence: Synthetic oligonucleotide
gguguggccuuugcagugacacgcu

SEQ ID NO: 90415 - RNA, 25 nt, Artificial Sequence
  Description of Artificial Sequence: Synthetic oligonucleotide
ucaugugcagaaggcacggccgcca

SEQ ID NO: 90416 - RNA, 25 nt, Artificial Sequence
  Description of Artificial Sequence: Synthetic oligonucleotide
aucuguggcugcagcagccgccacc

SEQ ID NO: 90417 - RNA, 25 nt, Artificial Sequence
  Description of Artificial Sequence: Synthetic oligonucleotide
cagggcucaccaggcaagggcugga

SEQ ID NO: 90418 - RNA, 25 nt, Artificial Sequence
  Description of Artificial Sequence: Synthetic oligonucleotide
aagugggguggcuguagcgaggaca

SEQ ID NO: 90419 - RNA, 25 nt, Artificial Sequence
  Description of Artificial Sequence: Synthetic oligonucleotide
aucgaguuuggugggauggugucuc

SEQ ID NO: 90420 - RNA, 25 nt, Artificial Sequence
  Description of Artificial Sequence: Synthetic oligonucleotide
cgggaguucgccgacgcccgggaga

SEQ ID NO: 90421 - RNA, 25 nt, Artificial Sequence
  Description of Artificial Sequence: Synthetic oligonucleotide
aaccggccagaugcccgcucagcca

SEQ ID NO: 90422 - RNA, 25 nt, Artificial Sequence
  Description of Artificial Sequence: Synthetic oligonucleotide
augaaccgccacaacaacgaggcug

SEQ ID NO: 90423 - RNA, 25 nt, Artificial Sequence
  Description of Artificial Sequence: Synthetic oligonucleotide
gggcgccaggccaucgccagccaca

SEQ ID NO: 90424 - RNA, 25 nt, Artificial Sequence
  Description of Artificial Sequence: Synthetic oligonucleotide
augcaccucaagugcaagugccacg

SEQ ID NO: 90425 - RNA, 25 nt, Artificial Sequence
  Description of Artificial Sequence: Synthetic oligonucleotide
gggcugucgggcagcugcgagguga

SEQ ID NO: 90426 - RNA, 25 nt, Artificial Sequence
  Description of Artificial Sequence: Synthetic oligonucleotide
aagacaugcugguggucgcaacccg

SEQ ID NO: 90427 - RNA, 25 nt, Artificial Sequence
  Description of Artificial Sequence: Synthetic oligonucleotide
gacuuccgcgccaucggugacuucc

SEQ ID NO: 90428 - RNA, 25 nt, Artificial Sequence
  Description of Artificial Sequence: Synthetic oligonucleotide
cucaaggacaaguacgacagcgccu

SEQ ID NO: 90429 - RNA, 25 nt, Artificial Sequence
  Description of Artificial Sequence: Synthetic oligonucleotide
ucggagauggugguggagaagcacc

SEQ ID NO: 90430 - RNA, 25 nt, Artificial Sequence
  Description of Artificial Sequence: Synthetic oligonucleotide
cgggagucccgcggcuggguggaga

SEQ ID NO: 90431 - RNA, 25 nt, Artificial Sequence
  Description of Artificial Sequence: Synthetic oligonucleotide
acccugcggccgcgcuacaccuacu

SEQ ID NO: 90432 - RNA, 25 nt, Artificial Sequence
  Description of Artificial Sequence: Synthetic oligonucleotide
uucaaggugcccacggagcgcgacc

SEQ ID NO: 90433 - RNA, 25 nt, Artificial Sequence
  Description of Artificial Sequence: Synthetic oligonucleotide
cuggucuacuacgaggccucgccca

SEQ ID NO: 90434 - RNA, 25 nt, Artificial Sequence
  Description of Artificial Sequence: Synthetic oligonucleotide
aacuucugcgagcccaacccugaga

SEQ ID NO: 90435 - RNA, 25 nt, Artificial Sequence
  Description of Artificial Sequence: Synthetic oligonucleotide
acgggcuccuucggcacgcgcgacc

SEQ ID NO: 90436 - RNA, 25 nt, Artificial Sequence
  Description of Artificial Sequence: Synthetic oligonucleotide
cgcaccugcaacgucagcucgcacg

SEQ ID NO: 90437 - RNA, 25 nt, Artificial Sequence
  Description of Artificial Sequence: Synthetic oligonucleotide
ggcaucgacggcugcgaccugcugu

SEQ ID NO: 90438 - RNA, 25 nt, Artificial Sequence
  Description of Artificial Sequence: Synthetic oligonucleotide
ugcugcggccgcggccacaacgcgc

SEQ ID NO: 90439 - RNA, 25 nt, Artificial Sequence
  Description of Artificial Sequence: Synthetic oligonucleotide
cgagcggagcggcgccgggagaagu

SEQ ID NO: 90440 - RNA, 25 nt, Artificial Sequence
  Description of Artificial Sequence: Synthetic oligonucleotide
ugccgcugcguguuccacuggugcu

SEQ ID NO: 90441 - RNA, 25 nt, Artificial Sequence
  Description of Artificial Sequence: Synthetic oligonucleotide
ugcuacgucagcugccaggagugca

SEQ ID NO: 90442 - RNA, 25 nt, Artificial Sequence
  Description of Artificial Sequence: Synthetic oligonucleotide
acgcgcgucuacgacgugcacaccu

SEQ ID NO: 90443 - RNA, 25 nt, Artificial Sequence
  Description of Artificial Sequence: Synthetic oligonucleotide
ugcaaguaggcaccggccgcggcuc

SEQ ID NO: 90444 - RNA, 25 nt, Artificial Sequence
  Description of Artificial Sequence: Synthetic oligonucleotide
cccccuggacggggcgggcccugcc

SEQ ID NO: 90445 - RNA, 25 nt, Artificial Sequence
  Description of Artificial Sequence: Synthetic oligonucleotide
cugagggugggcuuuucccugggug

SEQ ID NO: 90446 - RNA, 25 nt, Artificial Sequence
  Description of Artificial Sequence: Synthetic oligonucleotide
ggagcaggacucccaccuaaacggg

SEQ ID NO: 90447 - RNA, 25 nt, Artificial Sequence
  Description of Artificial Sequence: Synthetic oligonucleotide
ggcaguacuccucccugggggcggg

SEQ ID NO: 90448 - RNA, 25 nt, Artificial Sequence
  Description of Artificial Sequence: Synthetic oligonucleotide
gacuccucccuggggguggggcucc

SEQ ID NO: 90449 - RNA, 25 nt, Artificial Sequence
  Description of Artificial Sequence: Synthetic oligonucleotide
cuaccugggggcagaacuccuaccu

SEQ ID NO: 90450 - RNA, 25 nt, Artificial Sequence
  Description of Artificial Sequence: Synthetic oligonucleotide
ugaaggcagggcuccucccuggagc

SEQ ID NO: 90451 - RNA, 25 nt, Artificial Sequence
  Description of Artificial Sequence: Synthetic oligonucleotide
cuagugucuccucucugguggcugg

SEQ ID NO: 90452 - RNA, 25 nt, Artificial Sequence
  Description of Artificial Sequence: Synthetic oligonucleotide
ggcugcuccugaaugaggcggagcu

SEQ ID NO: 90453 - RNA, 25 nt, Artificial Sequence
  Description of Artificial Sequence: Synthetic oligonucleotide
uccaggauggggaggggcucugcgu

SEQ ID NO: 90454 - RNA, 25 nt, Artificial Sequence
  Description of Artificial Sequence: Synthetic oligonucleotide
uuggcuucucccuggggacggggcu

SEQ ID NO: 90455 - RNA, 25 nt, Artificial Sequence
  Description of Artificial Sequence: Synthetic oligonucleotide
uccccuggacagaggcggggcuaca

SEQ ID NO: 90456 - RNA, 25 nt, Artificial Sequence
  Description of Artificial Sequence: Synthetic oligonucleotide
agauugggcggggcuucucuugggu

SEQ ID NO: 90457 - RNA, 25 nt, Artificial Sequence
  Description of Artificial Sequence: Synthetic oligonucleotide
ugggacagggcuucuccugcggggg

SEQ ID NO: 90458 - RNA, 25 nt, Artificial Sequence
  Description of Artificial Sequence: Synthetic oligonucleotide
gcgaggccccucccaguaagggcgu

SEQ ID NO: 90459 - RNA, 25 nt, Artificial Sequence
  Description of Artificial Sequence: Synthetic oligonucleotide
uggcucugggugggcggggcacuag

SEQ ID NO: 90460 - RNA, 25 nt, Artificial Sequence
  Description of Artificial Sequence: Synthetic oligonucleotide
gguaggcuucuaccugcaggcgggg

SEQ ID NO: 90461 - RNA, 25 nt, Artificial Sequence
  Description of Artificial Sequence: Synthetic oligonucleotide
gcuccuccugaaggaggcggggcuc

SEQ ID NO: 90462 - RNA, 25 nt, Artificial Sequence
  Description of Artificial Sequence: Synthetic oligonucleotide
cuaggauggggcacggcucuggggu

SEQ ID NO: 90463 - RNA, 25 nt, Artificial Sequence
  Description of Artificial Sequence: Synthetic oligonucleotide
uaggcugcucccugagggcggagcg

SEQ ID NO: 90464 - RNA, 25 nt, Artificial Sequence
  Description of Artificial Sequence: Synthetic oligonucleotide
gccuccuuaggagugggguuuuaug

SEQ ID NO: 90465 - RNA, 25 nt, Artificial Sequence
  Description of Artificial Sequence: Synthetic oligonucleotide
gguggaugaggcuucuuccuggaug

SEQ ID NO: 90466 - RNA, 25 nt, Artificial Sequence
  Description of Artificial Sequence: Synthetic oligonucleotide
ggggcagagcuucuccugaccaggg

SEQ ID NO: 90467 - RNA, 25 nt, Artificial Sequence
  Description of Artificial Sequence: Synthetic oligonucleotide
gcaaggccccuuccacgggggcugu

SEQ ID NO: 90468 - RNA, 25 nt, Artificial Sequence
  Description of Artificial Sequence: Synthetic oligonucleotide
uggcucugggugggcguggccugca

SEQ ID NO: 90469 - RNA, 25 nt, Artificial Sequence
  Description of Artificial Sequence: Synthetic oligonucleotide
auaggcuccuuccuguggguggggc

SEQ ID NO: 90470 - RNA, 25 nt, Artificial Sequence
  Description of Artificial Sequence: Synthetic oligonucleotide
cuucucugggaccaggcuccaaugg

SEQ ID NO: 90471 - RNA, 25 nt, Artificial Sequence
  Description of Artificial Sequence: Synthetic oligonucleotide
gggcggggcuucucuccgcgggugg

SEQ ID NO: 90472 - RNA, 25 nt, Artificial Sequence
  Description of Artificial Sequence: Synthetic oligonucleotide
ggacucuucccugggaaccgcccuc

SEQ ID NO: 90473 - RNA, 25 nt, Artificial Sequence
  Description of Artificial Sequence: Synthetic oligonucleotide
ccugauuaaggcguggcuucugcag

SEQ ID NO: 90474 - RNA, 25 nt, Artificial Sequence
  Description of Artificial Sequence: Synthetic oligonucleotide
ggaaucccggcuccagagcaggaaa

SEQ ID NO: 90475 - RNA, 25 nt, Artificial Sequence
  Description of Artificial Sequence: Synthetic oligonucleotide
auucagcccaccagccaccucaucc

SEQ ID NO: 90476 - RNA, 25 nt, Artificial Sequence
  Description of Artificial Sequence: Synthetic oligonucleotide
cccaacccccuguaagguuccaucc

SEQ ID NO: 90477 - RNA, 25 nt, Artificial Sequence
  Description of Artificial Sequence: Synthetic oligonucleotide
caccccugcgucgagcugggaaggu

SEQ ID NO: 90478 - RNA, 25 nt, Artificial Sequence
  Description of Artificial Sequence: Synthetic oligonucleotide
uuccaugaagcgagucgggucccca

SEQ ID NO: 90479 - RNA, 25 nt, Artificial Sequence
  Description of Artificial Sequence: Synthetic oligonucleotide
aacccgugccccugggauccgaggg

SEQ ID NO: 90480 - RNA, 25 nt, Artificial Sequence
  Description of Artificial Sequence: Synthetic oligonucleotide
gccccucuccaagcgccuggcuuug

SEQ ID NO: 90481 - RNA, 25 nt, Artificial Sequence
  Description of Artificial Sequence: Synthetic oligonucleotide
ggaaugcuccaggcgcgccgacgcc

SEQ ID NO: 90482 - RNA, 25 nt, Artificial Sequence
  Description of Artificial Sequence: Synthetic oligonucleotide
cugugccaccccuuccucagccugg

SEQ ID NO: 90483 - RNA, 25 nt, Artificial Sequence
  Description of Artificial Sequence: Synthetic oligonucleotide
ggguuugaccacccaccugaccagg

SEQ ID NO: 90484 - RNA, 25 nt, Artificial Sequence
  Description of Artificial Sequence: Synthetic oligonucleotide
gggcccuaccuggggaaagccugaa

SEQ ID NO: 90485 - RNA, 25 nt, Artificial Sequence
  Description of Artificial Sequence: Synthetic oligonucleotide
agggccucccagcccccaaccccaa

SEQ ID NO: 90486 - RNA, 25 nt, Artificial Sequence
  Description of Artificial Sequence: Synthetic oligonucleotide
agaccaagcuuaguccugggagagg

SEQ ID NO: 90487 - RNA, 25 nt, Artificial Sequence
  Description of Artificial Sequence: Synthetic oligonucleotide
gacagggacuucgcagaggcaagcg

SEQ ID NO: 90488 - RNA, 25 nt, Artificial Sequence
  Description of Artificial Sequence: Synthetic oligonucleotide
gaccgaggcccucccaaagaggccc

SEQ ID NO: 90489 - RNA, 25 nt, Artificial Sequence
  Description of Artificial Sequence: Synthetic oligonucleotide
cgcccugcccgggcucccacaccgu

SEQ ID NO: 90490 - RNA, 25 nt, Artificial Sequence
  Description of Artificial Sequence: Synthetic oligonucleotide
ucagguacuccugccagggaacugg

SEQ ID NO: 90491 - RNA, 25 nt, Artificial Sequence
  Description of Artificial Sequence: Synthetic oligonucleotide
gccugcugcgccccaggccccgccc

SEQ ID NO: 90492 - RNA, 25 nt, Artificial Sequence
  Description of Artificial Sequence: Synthetic oligonucleotide
cgucucugcucugcucagcugcgcc

SEQ ID NO: 90493 - RNA, 25 nt, Artificial Sequence
  Description of Artificial Sequence: Synthetic oligonucleotide
ccccuucuuugcagcugcccagccc

SEQ ID NO: 90494 - RNA, 25 nt, Artificial Sequence
  Description of Artificial Sequence: Synthetic oligonucleotide
ccuccucccugcccucgggucuccc

SEQ ID NO: 90495 - RNA, 25 nt, Artificial Sequence
  Description of Artificial Sequence: Synthetic oligonucleotide
ccaccugcacuccauccagcuacag

SEQ ID NO: 90496 - RNA, 25 nt, Artificial Sequence
  Description of Artificial Sequence: Synthetic oligonucleotide
ggagagauagaagccucucgucccg

SEQ ID NO: 90497 - RNA, 25 nt, Artificial Sequence
  Description of Artificial Sequence: Synthetic oligonucleotide
gucccucccuuuccuccgccugucc

SEQ ID NO: 90498 - RNA, 25 nt, Artificial Sequence
  Description of Artificial Sequence: Synthetic oligonucleotide
cacagccccuuaagggaaagguagg

SEQ ID NO: 90499 - RNA, 25 nt, Artificial Sequence
  Description of Artificial Sequence: Synthetic oligonucleotide
gaagagagguccagccccccaggcu

SEQ ID NO: 90500 - RNA, 25 nt, Artificial Sequence
  Description of Artificial Sequence: Synthetic oligonucleotide
ugcccagagcugcuggucucauuug

SEQ ID NO: 90501 - RNA, 25 nt, Artificial Sequence
  Description of Artificial Sequence: Synthetic oligonucleotide
gggggcguucgggagguuugggggg

SEQ ID NO: 90502 - RNA, 25 nt, Artificial Sequence
  Description of Artificial Sequence: Synthetic oligonucleotide
gcaucaaccccccgacugugcugcu

SEQ ID NO: 90503 - RNA, 25 nt, Artificial Sequence
  Description of Artificial Sequence: Synthetic oligonucleotide
ucgcgaaggucccacagcccugaga

SEQ ID NO: 90504 - RNA, 25 nt, Artificial Sequence
  Description of Artificial Sequence: Synthetic oligonucleotide
augggccggcccccuuccuggcccc

SEQ ID NO: 90505 - RNA, 25 nt, Artificial Sequence
  Description of Artificial Sequence: Synthetic oligonucleotide
cucauggcgggacuggagaaauggu

SEQ ID NO: 90506 - RNA, 25 nt, Artificial Sequence
  Description of Artificial Sequence: Synthetic oligonucleotide
uccgcuuuccuggagccaauggccc

SEQ ID NO: 90507 - RNA, 25 nt, Artificial Sequence
  Description of Artificial Sequence: Synthetic oligonucleotide
cggccccuccugacucauccgccug

SEQ ID NO: 90508 - RNA, 25 nt, Artificial Sequence
  Description of Artificial Sequence: Synthetic oligonucleotide
ggcccgggaaugaauggggaggccg

SEQ ID NO: 90509 - RNA, 25 nt, Artificial Sequence
  Description of Artificial Sequence: Synthetic oligonucleotide
gcugaacccacccggcccauauccc

SEQ ID NO: 90510 - RNA, 25 nt, Artificial Sequence
  Description of Artificial Sequence: Synthetic oligonucleotide
cugguugccucauggccagcgcccc

SEQ ID NO: 90511 - RNA, 25 nt, Artificial Sequence
  Description of Artificial Sequence: Synthetic oligonucleotide
cucagccucugccacugugaaccgg

SEQ ID NO: 90512 - RNA, 25 nt, Artificial Sequence
  Description of Artificial Sequence: Synthetic oligonucleotide
gcucccacccucaaggugcggggag

SEQ ID NO: 90513 - RNA, 25 nt, Artificial Sequence
  Description of Artificial Sequence: Synthetic oligonucleotide
gaagaagcggccaggcggggcgccc

SEQ ID NO: 90514 - RNA, 25 nt, Artificial Sequence
  Description of Artificial Sequence: Synthetic oligonucleotide
ccaagagcccaaaagagggcacacc

SEQ ID NO: 90515 - RNA, 25 nt, Artificial Sequence
  Description of Artificial Sequence: Synthetic oligonucleotide
cgccauccucugccucaaauucugc

SEQ ID NO: 90516 - RNA, 25 nt, Artificial Sequence
  Description of Artificial Sequence: Synthetic oligonucleotide
cguuuuugguuuuaauguuauaucu

SEQ ID NO: 90517 - RNA, 25 nt, Artificial Sequence
  Description of Artificial Sequence: Synthetic oligonucleotide
ugaugcugcuauauccacuguccaa

SEQ ID NO: 90518 - RNA, 25 nt, Artificial Sequence
  Description of Artificial Sequence: Synthetic oligonucleotide
ugcugcuauauccacuguccaacgg

SEQ ID NO: 90519 - DNA, 21 bp, Artificial Sequence
  Description of Artificial Sequence: Synthetic oligonucleotide
  Description of Combined DNA/RNA Molecule: Synthetic oligonucleotide
cuacacaaaucagcgauuutt

SEQ ID NO: 90520 - DNA, 21 bp, Artificial Sequence
  Description of Artificial Sequence: Synthetic oligonucleotide
  Description of Combined DNA/RNA Molecule: Synthetic oligonucleotide
aaaucgcugauuuguguagtt

SEQ ID NO: 90521 - DNA, 25 bp, Artificial Sequence
  Description of Artificial Sequence: Synthetic oligonucleotide
  Description of Combined DNA/RNA Molecule: Synthetic oligonucleotide
cuacacaaaucagcgauuuccaugt

SEQ ID NO: 90522 - RNA, 27 nt, Artificial Sequence
  Description of Artificial Sequence: Synthetic oligonucleotide
acauggaaaucgcugauuuguguaguc

SEQ ID NO: 90523 - RNA, 13 nt, Artificial Sequence
  Description of Artificial Sequence: Synthetic oligonucleotide
cuacacaaaucag

SEQ ID NO: 90524 - DNA, 11 bp, Artificial Sequence
  Description of Artificial Sequence: Synthetic oligonucleotide
  Description of Combined DNA/RNA Molecule: Synthetic oligonucleotide
gauuuccaugt

SEQ ID NO: 90525 - DNA, 21 bp, Artificial Sequence
  Description of Artificial Sequence: Synthetic oligonucleotide
  Description of Combined DNA/RNA Molecule: Synthetic oligonucleotide
ggaucuuauuucuucggagtt

SEQ ID NO: 90526 - DNA, 21 bp, Artificial Sequence
  Description of Artificial Sequence: Synthetic oligonucleotide
  Description of Combined DNA/RNA Molecule: Synthetic oligonucleotide
cuccgaagaaauaagaucctt

SEQ ID NO: 90527 - RNA, 11 nt, Artificial Sequence
  Description of Artificial Sequence: Synthetic oligonucleotide
ggaucuuauuu

SEQ ID NO: 90528 - DNA, 10 bp, Artificial Sequence
  Description of Artificial Sequence: Synthetic oligonucleotide
  Description of Combined DNA/RNA Molecule: Synthetic oligonucleotide
cuucggagtt

SEQ ID NO: 90529 - RNA, 27 nt, Artificial Sequence
  Description of Artificial Sequence: Synthetic oligonucleotide
cauugucuccgaagaaauaagauccuu

SEQ ID NO: 90530 - RNA, 8 nt, Artificial Sequence
  Description of Artificial Sequence: Synthetic oligonucleotide
  modified_base (2): LNA-G
ggaucuua

SEQ ID NO: 90531 - DNA, 17 bp, Artificial Sequence
  Description of Artificial Sequence: Synthetic oligonucleotide
  Description of Combined DNA/RNA Molecule: Synthetic oligonucleotide
uuucuucggagacaatg

SEQ ID NO: 90532 - DNA, 16 bp, Artificial Sequence
  Description of Artificial Sequence: Synthetic oligonucleotide
  Description of Combined DNA/RNA Molecule: Synthetic oligonucleotide
uucuucggagacaatg

SEQ ID NO: 90533 - DNA, 15 bp, Artificial Sequence
  Description of Artificial Sequence: Synthetic oligonucleotide
  Description of Combined DNA/RNA Molecule: Synthetic oligonucleotide
ucuucggagacaatg

SEQ ID NO: 90534 - DNA, 14 bp, Artificial Sequence
  Description of Artificial Sequence: Synthetic oligonucleotide
  Description of Combined DNA/RNA Molecule: Synthetic oligonucleotide
cuucggagacaatg

SEQ ID NO: 90535 - DNA, 13 bp, Artificial Sequence
  Description of Artificial Sequence: Synthetic oligonucleotide
  Description of Combined DNA/RNA Molecule: Synthetic oligonucleotide
uucggagacaatg

SEQ ID NO: 90536 - DNA, 12 bp, Artificial Sequence
  Description of Artificial Sequence: Synthetic oligonucleotide
  Description of Combined DNA/RNA Molecule: Synthetic oligonucleotide
ucggagacaatg

SEQ ID NO: 90537 - DNA, 11 bp, Artificial Sequence
  Description of Artificial Sequence: Synthetic oligonucleotide
  Description of Combined DNA/RNA Molecule: Synthetic oligonucleotide
cggagacaatg

SEQ ID NO: 90538 - RNA, 9 nt, Artificial Sequence
  Description of Artificial Sequence: Synthetic oligonucleotide
  modified_base (2): LNA-G
ggaucuuau

SEQ ID NO: 90539 - RNA, 10 nt, Artificial Sequence
  Description of Artificial Sequence: Synthetic oligonucleotide
  modified_base (2): LNA-G
ggaucuuauu

SEQ ID NO: 90540 - RNA, 11 nt, Artificial Sequence
  Description of Artificial Sequence: Synthetic oligonucleotide
  modified_base (2): LNA-G
ggaucuuauuu

SEQ ID NO: 90541 - RNA, 12 nt, Artificial Sequence
  Description of Artificial Sequence: Synthetic oligonucleotide
  modified_base (2): LNA-G
ggaucuuauuuc

SEQ ID NO: 90542 - RNA, 8 nt, Artificial Sequence
  Description of Artificial Sequence: Synthetic oligonucleotide
  modified_base (3): LNA-A
cuacacaa

SEQ ID NO: 90543 - DNA, 13 bp, Artificial Sequence
  Description of Artificial Sequence: Synthetic oligonucleotide
  Description of Combined DNA/RNA Molecule: Synthetic oligonucleotide
  modified_base (8): LNA-A
aucagcgauuutt

SEQ ID NO: 90544 - DNA, 12 bp, Artificial Sequence
  Description of Artificial Sequence: Synthetic oligonucleotide
  Description of Combined DNA/RNA Molecule: Synthetic oligonucleotide
  modified_base (7): LNA-A
ucagcgauuutt

SEQ ID NO: 90545 - DNA, 11 bp, Artificial Sequence
  Description of Artificial Sequence: Synthetic oligonucleotide
  Description of Combined DNA/RNA Molecule: Synthetic oligonucleotide
  modified_base (6): LNA-A
cagcgauuutt

SEQ ID NO: 90546 - DNA, 10 bp, Artificial Sequence
  Description of Artificial Sequence: Synthetic oligonucleotide
  Description of Combined DNA/RNA Molecule: Synthetic oligonucleotide
  modified_base (5): LNA-A
agcgauuutt

SEQ ID NO: 90547 - DNA, 9 bp, Artificial Sequence
  Description of Artificial Sequence: Synthetic oligonucleotide
  Description of Combined DNA/RNA Molecule: Synthetic oligonucleotide
  modified_base (4): LNA-A
gcgauuutt

SEQ ID NO: 90548 - DNA, 8 bp, Artificial Sequence
  Description of Artificial Sequence: Synthetic oligonucleotide
  Description of Combined DNA/RNA Molecule: Synthetic oligonucleotide
  modified_base (3): LNA-A
cgauuutt

SEQ ID NO: 90549 - DNA, 7 bp, Artificial Sequence
  Description of Artificial Sequence: Synthetic oligonucleotide
  Description of Combined DNA/RNA Molecule: Synthetic oligonucleotide
  modified_base (2): LNA-A
gauuutt

SEQ ID NO: 90550 - RNA, 9 nt, Artificial Sequence
  Description of Artificial Sequence: Synthetic oligonucleotide
  modified_base (3): LNA-A
cuacacaaa

SEQ ID NO: 90551 - RNA, 10 nt, Artificial Sequence
  Description of Artificial Sequence: Synthetic oligonucleotide
  modified_base (3): LNA-A
cuacacaaau

SEQ ID NO: 90552 - RNA, 11 nt, Artificial Sequence
  Description of Artificial Sequence: Synthetic oligonucleotide
  modified_base (3): LNA-A
cuacacaaauc

SEQ ID NO: 90553 - RNA, 12 nt, Artificial Sequence
  Description of Artificial Sequence: Synthetic oligonucleotide
  modified_base (3): LNA-A
cuacacaaauca

SEQ ID NO: 90554 - RNA, 13 nt, Artificial Sequence
  Description of Artificial Sequence: Synthetic oligonucleotide
  modified_base (3): LNA-A
cuacacaaaucag

SEQ ID NO: 90555 - RNA, 14 nt, Artificial Sequence
  Description of Artificial Sequence: Synthetic oligonucleotide
  modified_base (3): LNA-A
cuacacaaaucagc

SEQ ID NO: 90556 - RNA, 13 nt, Artificial Sequence
  Description of Artificial Sequence: Synthetic oligonucleotide
  modified_base (2): LNA-G
ggaucuuauuucu

SEQ ID NO: 90557 - RNA, 14 nt, Artificial Sequence
  Description of Artificial Sequence: Synthetic oligonucleotide
  modified_base (2): LNA-G
ggaucuuauuucuu

SEQ ID NO: 90558 - RNA, 8 nt, Artificial Sequence
  Description of Artificial Sequence: Synthetic oligonucleotide
  modified_base (2): LNA-G
  modified_base (8): LNA-A
ggaucuua

SEQ ID NO: 90559 - RNA, 9 nt, Artificial Sequence
  Description of Artificial Sequence: Synthetic oligonucleotide
  modified_base (2): LNA-G
  modified_base (9): LNA-U
ggaucuuau

SEQ ID NO: 90560 - RNA, 10 nt, Artificial Sequence
  Description of Artificial Sequence: Synthetic oligonucleotide
  modified_base (2): LNA-G
  modified_base (10): LNA-U
ggaucuuauu

SEQ ID NO: 90561 - RNA, 11 nt, Artificial Sequence
  Description of Artificial Sequence: Synthetic oligonucleotide
  modified_base (2): LNA-G
  modified_base (11): LNA-U
ggaucuuauuu

SEQ ID NO: 90562 - RNA, 12 nt, Artificial Sequence
  Description of Artificial Sequence: Synthetic oligonucleotide
  modified_base (2): LNA-G
  modified_base (12): LNA-C
ggaucuuauuuc

SEQ ID NO: 90563 - RNA, 13 nt, Artificial Sequence
  Description of Artificial Sequence: Synthetic oligonucleotide
  modified_base (2): LNA-G
  modified_base (13): LNA-U
ggaucuuauuucu

SEQ ID NO: 90564 - RNA, 14 nt, Artificial Sequence
  Description of Artificial Sequence: Synthetic oligonucleotide
  modified_base (2): LNA-G
  modified_base (14): LNA-U
ggaucuuauuucuu

SEQ ID NO: 90565 - DNA, 13 bp, Artificial Sequence
  Description of Artificial Sequence: Synthetic oligonucleotide
  Description of Combined DNA/RNA Molecule: Synthetic oligonucleotide
  modified_base (8): LNA-G
uuucuucggagtt

SEQ ID NO: 90566 - DNA, 12 bp, Artificial Sequence
  Description of Artificial Sequence: Synthetic oligonucleotide
  Description of Combined DNA/RNA Molecule: Synthetic oligonucleotide
  modified_base (7): LNA-G
uucuucggagtt

SEQ ID NO: 90567 - DNA, 11 bp, Artificial Sequence
  Description of Artificial Sequence: Synthetic oligonucleotide
  Description of Combined DNA/RNA Molecule: Synthetic oligonucleotide
  modified_base (6): LNA-G
ucuucggagtt

SEQ ID NO: 90568 - DNA, 10 bp, Artificial Sequence
  Description of Artificial Sequence: Synthetic oligonucleotide
  Description of Combined DNA/RNA Molecule: Synthetic oligonucleotide
  modified_base (5): LNA-G
cuucggagtt

SEQ ID NO: 90569 - DNA, 9 bp, Artificial Sequence
  Description of Artificial Sequence: Synthetic oligonucleotide
  Description of Combined DNA/RNA Molecule: Synthetic oligonucleotide
  modified_base (4): LNA-G
uucggagtt

SEQ ID NO: 90570 - DNA, 8 bp, Artificial Sequence
  Description of Artificial Sequence: Synthetic oligonucleotide
  Description of Combined DNA/RNA Molecule: Synthetic oligonucleotide
  modified_base (3): LNA-G
ucggagtt

SEQ ID NO: 90571 - DNA, 7 bp, Artificial Sequence
  Description of Artificial Sequence: Synthetic oligonucleotide
  Description of Combined DNA/RNA Molecule: Synthetic oligonucleotide
  modified_base (2): LNA-G
cggagtt

SEQ ID NO: 90572 - DNA, 13 bp, Artificial Sequence
  Description of Artificial Sequence: Synthetic oligonucleotide
  Description of Combined DNA/RNA Molecule: Synthetic oligonucleotide
  modified_base (1): LNA-U
  modified_base (8): LNA-G
uuucuucggagtt

SEQ ID NO: 90573 - DNA, 12 bp, Artificial Sequence
  Description of Artificial Sequence: Synthetic oligonucleotide
  Description of Combined DNA/RNA Molecule: Synthetic oligonucleotide
  modified_base (1): LNA-U
  modified_base (7): LNA-G
uucuucggagtt

SEQ ID NO: 90574 - DNA, 11 bp, Artificial Sequence
  Description of Artificial Sequence: Synthetic oligonucleotide
  Description of Combined DNA/RNA Molecule: Synthetic oligonucleotide
  modified_base (1): LNA-U
  modified_base (6): LNA-G
ucuucggagtt

SEQ ID NO: 90575 - DNA, 10 bp, Artificial Sequence
  Description of Artificial Sequence: Synthetic oligonucleotide
  Description of Combined DNA/RNA Molecule: Synthetic oligonucleotide
  modified_base (1): LNA-C
  modified_base (5): LNA-G
cuucggagtt

SEQ ID NO: 90576 - DNA, 9 bp, Artificial Sequence
  Description of Artificial Sequence: Synthetic oligonucleotide
  Description of Combined DNA/RNA Molecule: Synthetic oligonucleotide
  modified_base (1): LNA-U
  modified_base (4): LNA-G
uucggagtt

SEQ ID NO: 90577 - DNA, 8 bp, Artificial Sequence
  Description of Artificial Sequence: Synthetic oligonucleotide
  Description of Combined DNA/RNA Molecule: Synthetic oligonucleotide
  modified_base (1): LNA-U
  modified_base (3): LNA-G
ucggagtt

SEQ ID NO: 90578 - DNA, 7 bp, Artificial Sequence
  Description of Artificial Sequence: Synthetic oligonucleotide
  Description of Combined DNA/RNA Molecule: Synthetic oligonucleotide
  modified_base (1): LNA-C
  modified_base (2): LNA-G
cggagtt

SEQ ID NO: 90579 - DNA, 21 bp, Artificial Sequence
  Description of Artificial Sequence: Synthetic oligonucleotide
  Description of Combined DNA/RNA Molecule: Synthetic oligonucleotide
  modified_base (2): LNA-G
  modified_base (16): LNA-G
ggaucuuauuucuucggagtt

SEQ ID NO: 90580 - DNA, 25 bp, Artificial Sequence
  Description of Artificial Sequence: Synthetic oligonucleotide
  Description of Combined DNA/RNA Molecule: Synthetic oligonucleotide
ggaucuuauuucuucggagacaatg

SEQ ID NO: 90581 - RNA, 25 nt, Artificial Sequence
  Description of Artificial Sequence: Synthetic oligonucleotide
uaagcagaguucaaaagcccuucag

SEQ ID NO: 90582 - RNA, 25 nt, Artificial Sequence
  Description of Artificial Sequence: Synthetic oligonucleotide
agcagaguucaaaagcccuucagcg

SEQ ID NO: 90583 - RNA, 25 nt, Artificial Sequence
  Description of Artificial Sequence: Synthetic oligonucleotide
cucagggucugagugaagccgcucg

SEQ ID NO: 90584 - RNA, 25 nt, Artificial Sequence
  Description of Artificial Sequence: Synthetic oligonucleotide
caagcaacuacaucacgccagucaa

SEQ ID NO: 90585 - RNA, 25 nt, Artificial Sequence
  Description of Artificial Sequence: Synthetic oligonucleotide
aucaauggcagcuucuuggugcgug

SEQ ID NO: 90586 - RNA, 25 nt, Artificial Sequence
  Description of Artificial Sequence: Synthetic oligonucleotide
uuccagcccacauuggauucaucag

SEQ ID NO: 90587 - RNA, 25 nt, Artificial Sequence
  Description of Artificial Sequence: Synthetic oligonucleotide
cagcugagaauguggaauaccuaag

SEQ ID NO: 90588 - RNA, 25 nt, Artificial Sequence
  Description of Artificial Sequence: Synthetic oligonucleotide
aacguaucuccuaauuugaggcuca

SEQ ID NO: 90589 - RNA, 25 nt, Artificial Sequence
  Description of Artificial Sequence: Synthetic oligonucleotide
ccuaaaauaauuucucuacaauugg

SEQ ID NO: 90590 - RNA, 25 nt, Artificial Sequence
  Description of Artificial Sequence: Synthetic oligonucleotide
uggaagauucagcuaguuaggagcc

SEQ ID NO: 90591 - RNA, 25 nt, Artificial Sequence
  Description of Artificial Sequence: Synthetic oligonucleotide
uuaaacucuccuagucaauauccac

SEQ ID NO: 90592 - RNA, 25 nt, Artificial Sequence
  Description of Artificial Sequence: Synthetic oligonucleotide
cagccuacaguuauguucagucaca

SEQ ID NO: 90593 - RNA, 25 nt, Artificial Sequence
  Description of Artificial Sequence: Synthetic oligonucleotide
guuauguucagucacacacacauac

SEQ ID NO: 90594 - RNA, 25 nt, Artificial Sequence
  Description of Artificial Sequence: Synthetic oligonucleotide
cacauacaaaauguuccuuuugcuu

SEQ ID NO: 90595 - RNA, 25 nt, Artificial Sequence
  Description of Artificial Sequence: Synthetic oligonucleotide
uccuuuugcuuuuaaaguaauuuuu

SEQ ID NO: 90596 - RNA, 25 nt, Artificial Sequence
  Description of Artificial Sequence: Synthetic oligonucleotide
ugaccugugaagcaacagucaaugg

SEQ ID NO: 90597 - RNA, 25 nt, Artificial Sequence
  Description of Artificial Sequence: Synthetic oligonucleotide
cuaucucacacaucgacaaaccaau

SEQ ID NO: 90598 - RNA, 25 nt, Artificial Sequence
  Description of Artificial Sequence: Synthetic oligonucleotide
uguccucaauuguacugcuaccacu

SEQ ID NO: 90599 - RNA, 25 nt, Artificial Sequence
  Description of Artificial Sequence: Synthetic oligonucleotide
aaaccguagcuggcaagcggucuua

SEQ ID NO: 90600 - RNA, 25 nt, Artificial Sequence
  Description of Artificial Sequence: Synthetic oligonucleotide
uagcuggcaagcggucuuaccggcu

SEQ ID NO: 90601 - RNA, 25 nt, Artificial Sequence
  Description of Artificial Sequence: Synthetic oligonucleotide
uuguaugguuaaaagauggguuacc

SEQ ID NO: 90602 - RNA, 25 nt, Artificial Sequence
  Description of Artificial Sequence: Synthetic oligonucleotide
ugguuaaaagauggguuaccugcga

SEQ ID NO: 90603 - RNA, 25 nt, Artificial Sequence
  Description of Artificial Sequence: Synthetic oligonucleotide
cagggaauuauacaaucuugcugag

SEQ ID NO: 90604 - RNA, 25 nt, Artificial Sequence
  Description of Artificial Sequence: Synthetic oligonucleotide
acaaucuugcugagcauaaaacagu

SEQ ID NO: 90605 - RNA, 25 nt, Artificial Sequence
  Description of Artificial Sequence: Synthetic oligonucleotide
ccaauaaugaagaguccuuuauccu

SEQ ID NO: 90606 - RNA, 25 nt, Artificial Sequence
  Description of Artificial Sequence: Synthetic oligonucleotide
acuuuggauguuccaacgcaaguug

SEQ ID NO: 90607 - RNA, 25 nt, Artificial Sequence
  Description of Artificial Sequence: Synthetic oligonucleotide
aaugcuuccacuaaacugaaaccau

SEQ ID NO: 90608 - RNA, 25 nt, Artificial Sequence
  Description of Artificial Sequence: Synthetic oligonucleotide
gagaaaguuugacuuuguuaaauau

SEQ ID NO: 90609 - RNA, 25 nt, Artificial Sequence
  Description of Artificial Sequence: Synthetic oligonucleotide
aaagaacuacuguauauuaaaaguu

SEQ ID NO: 90610 - RNA, 25 nt, Artificial Sequence
  Description of Artificial Sequence: Synthetic oligonucleotide
uuagaaauacggguuuugacuuaac

SEQ ID NO: 90611 - RNA, 25 nt, Artificial Sequence
  Description of Artificial Sequence: Synthetic oligonucleotide
aacauggguacagcaaacucagcac

SEQ ID NO: 90612 - RNA, 25 nt, Artificial Sequence
  Description of Artificial Sequence: Synthetic oligonucleotide
aaagacacagaagaugcugaccuca

SEQ ID NO: 90613 - RNA, 25 nt, Artificial Sequence
  Description of Artificial Sequence: Synthetic oligonucleotide
uaguagggagguuuauucagaucgc

SEQ ID NO: 90614 - RNA, 25 nt, Artificial Sequence
  Description of Artificial Sequence: Synthetic oligonucleotide
gccuucugcagcaggguucugggau

SEQ ID NO: 90615 - RNA, 25 nt, Artificial Sequence
  Description of Artificial Sequence: Synthetic oligonucleotide
ggucugguacauauuggaaauuaug

SEQ ID NO: 90616 - RNA, 25 nt, Artificial Sequence
  Description of Artificial Sequence: Synthetic oligonucleotide
cuaguccuuccgauggaagcacuag

SEQ ID NO: 90617 - RNA, 25 nt, Artificial Sequence
  Description of Artificial Sequence: Synthetic oligonucleotide
ccagugaauauuguuuuuaugugga

SEQ ID NO: 90618 - RNA, 25 nt, Artificial Sequence
  Description of Artificial Sequence: Synthetic oligonucleotide
augaauucaaguuggaauugguaga

SEQ ID NO: 90619 - RNA, 25 nt, Artificial Sequence
  Description of Artificial Sequence: Synthetic oligonucleotide
caggacacagauuuagacuuggaga

SEQ ID NO: 90620 - RNA, 25 nt, Artificial Sequence
  Description of Artificial Sequence: Synthetic oligonucleotide
cucaaagcacaguuacaguauucca

SEQ ID NO: 90621 - RNA, 25 nt, Artificial Sequence
  Description of Artificial Sequence: Synthetic oligonucleotide
accacugccaccacugaugaauuaa

SEQ ID NO: 90622 - RNA, 25 nt, Artificial Sequence
  Description of Artificial Sequence: Synthetic oligonucleotide
gaaacuacuagugccacaucaucac

SEQ ID NO: 90623 - RNA, 25 nt, Artificial Sequence
  Description of Artificial Sequence: Synthetic oligonucleotide
aagucggacagccucaccaaacaga

SEQ ID NO: 90624 - RNA, 25 nt, Artificial Sequence
  Description of Artificial Sequence: Synthetic oligonucleotide
gaaagcgaaaaauggaacaugaugg

SEQ ID NO: 90625 - RNA, 25 nt, Artificial Sequence
  Description of Artificial Sequence: Synthetic oligonucleotide
cccucugauuuagcauguagacugc

SEQ ID NO: 90626 - RNA, 25 nt, Artificial Sequence
  Description of Artificial Sequence: Synthetic oligonucleotide
ugagcuauuuaaggaucuauuuaug

SEQ ID NO: 90627 - RNA, 25 nt, Artificial Sequence
  Description of Artificial Sequence: Synthetic oligonucleotide
aaaaggugaaaaagcacuauuauca

SEQ ID NO: 90628 - RNA, 25 nt, Artificial Sequence
  Description of Artificial Sequence: Synthetic oligonucleotide
gaaaaagcacuauuaucaguucugc

SEQ ID NO: 90629 - RNA, 25 nt, Artificial Sequence
  Description of Artificial Sequence: Synthetic oligonucleotide
ggcugaaaagaaagauuaaaccuac

SEQ ID NO: 90630 - RNA, 25 nt, Artificial Sequence
  Description of Artificial Sequence: Synthetic oligonucleotide
uaaacccuuauaauaaaauccuucu

SEQ ID NO: 90631 - RNA, 25 nt, Artificial Sequence
  Description of Artificial Sequence: Synthetic oligonucleotide
cauacuauuagccaaugcuguagac

SEQ ID NO: 90632 - RNA, 25 nt, Artificial Sequence
  Description of Artificial Sequence: Synthetic oligonucleotide
gacagaagcauuuugauaggaauag

SEQ ID NO: 90633 - RNA, 25 nt, Artificial Sequence
  Description of Artificial Sequence: Synthetic oligonucleotide
agagcaaauaagauaauggcccuga

SEQ ID NO: 90634 - RNA, 25 nt, Artificial Sequence
  Description of Artificial Sequence: Synthetic oligonucleotide
ccaacauuuuucucuuccucaagca

SEQ ID NO: 90635 - RNA, 25 nt, Artificial Sequence
  Description of Artificial Sequence: Synthetic oligonucleotide
uuaaguaugagaaaaguucagccca

SEQ ID NO: 90636 - RNA, 25 nt, Artificial Sequence
  Description of Artificial Sequence: Synthetic oligonucleotide
caggaauaaagauggcugcugaacc

SEQ ID NO: 90637 - RNA, 25 nt, Artificial Sequence
  Description of Artificial Sequence: Synthetic oligonucleotide
aauuugaaugaccaaguucucuuca

SEQ ID NO: 90638 - RNA, 25 nt, Artificial Sequence
  Description of Artificial Sequence: Synthetic oligonucleotide
auguauaaagauagccagccuagag

SEQ ID NO: 90639 - RNA, 25 nt, Artificial Sequence
  Description of Artificial Sequence: Synthetic oligonucleotide
ggcuguaacuaucucugugaagugu

SEQ ID NO: 90640 - RNA, 25 nt, Artificial Sequence
  Description of Artificial Sequence: Synthetic oligonucleotide
ucugugaagugugagaaaauuucaa

SEQ ID NO: 90641 - RNA, 25 nt, Artificial Sequence
  Description of Artificial Sequence: Synthetic oligonucleotide
ccuuuaaggaaaugaauccuccuga

SEQ ID NO: 90642 - RNA, 25 nt, Artificial Sequence
  Description of Artificial Sequence: Synthetic oligonucleotide
aaggauacaaaaagugacaucauau

SEQ ID NO: 90643 - RNA, 25 nt, Artificial Sequence
  Description of Artificial Sequence: Synthetic oligonucleotide
agaugcaauuugaaucuucaucaua

SEQ ID NO: 90644 - RNA, 25 nt, Artificial Sequence
  Description of Artificial Sequence: Synthetic oligonucleotide
guucaaaacgaagacuagcuauuaa

SEQ ID NO: 90645 - RNA, 25 nt, Artificial Sequence
  Description of Artificial Sequence: Synthetic oligonucleotide
gugaaaccucaucucuacuaaaaau

SEQ ID NO: 90646 - RNA, 25 nt, Artificial Sequence
  Description of Artificial Sequence: Synthetic oligonucleotide
acgaaagagaagcucuaucucgccu

SEQ ID NO: 90647 - RNA, 25 nt, Artificial Sequence
  Description of Artificial Sequence: Synthetic oligonucleotide
cuccacaagcgccuucgguccaguu

SEQ ID NO: 90648 - RNA, 25 nt, Artificial Sequence
  Description of Artificial Sequence: Synthetic oligonucleotide
gagaagauuccaaagauguagccgc

SEQ ID NO: 90649 - RNA, 25 nt, Artificial Sequence
  Description of Artificial Sequence: Synthetic oligonucleotide
aaucuggauucaaugaggagacuug

SEQ ID NO: 90650 - RNA, 25 nt, Artificial Sequence
  Description of Artificial Sequence: Synthetic oligonucleotide
agaacagauuugagaguagugagga

SEQ ID NO: 90651 - RNA, 25 nt, Artificial Sequence
  Description of Artificial Sequence: Synthetic oligonucleotide
ccagagcugugcagaugaguacaaa

SEQ ID NO: 90652 - RNA, 25 nt, Artificial Sequence
  Description of Artificial Sequence: Synthetic oligonucleotide
ccucagauuguuguuguuaaugggc

SEQ ID NO: 90653 - RNA, 25 nt, Artificial Sequence
  Description of Artificial Sequence: Synthetic oligonucleotide
cuauuuuaauuauuuuuaauuuauu

SEQ ID NO: 90654 - RNA, 25 nt, Artificial Sequence
  Description of Artificial Sequence: Synthetic oligonucleotide
uuuaauuuauuaauauuuaaauaug

SEQ ID NO: 90655 - RNA, 25 nt, Artificial Sequence
  Description of Artificial Sequence: Synthetic oligonucleotide
augcaguuugaauauccuuuguuuc

SEQ ID NO: 90656 - RNA, 25 nt, Artificial Sequence
  Description of Artificial Sequence: Synthetic oligonucleotide
caugcugcuggcgucuaaguguuug

SEQ ID NO: 90657 - RNA, 25 nt, Artificial Sequence
  Description of Artificial Sequence: Synthetic oligonucleotide
agaugugcauuucaccugugacaaa

SEQ ID NO: 90658 - RNA, 25 nt, Artificial Sequence
  Description of Artificial Sequence: Synthetic oligonucleotide
ucaaaaccugugccaggcugaauua

SEQ ID NO: 90659 - RNA, 25 nt, Artificial Sequence
  Description of Artificial Sequence: Synthetic oligonucleotide
gaauguggguagucauucuuacaau

SEQ ID NO: 90660 - RNA, 25 nt, Artificial Sequence
  Description of Artificial Sequence: Synthetic oligonucleotide
auguggguagucauucuuacaauug

SEQ ID NO: 90661 - RNA, 25 nt, Artificial Sequence
  Description of Artificial Sequence: Synthetic oligonucleotide
ugaaaaugagcaucagagaguguac

SEQ ID NO: 90662 - RNA, 25 nt, Artificial Sequence
  Description of Artificial Sequence: Synthetic oligonucleotide
uugcuuuucauguagaacucagcag

SEQ ID NO: 90663 - RNA, 25 nt, Artificial Sequence
  Description of Artificial Sequence: Synthetic oligonucleotide
uguauuucuauauuuauuuucagua

SEQ ID NO: 90664 - RNA, 25 nt, Artificial Sequence
  Description of Artificial Sequence: Synthetic oligonucleotide
uuugauuaauguuucuuaaauggaa

SEQ ID NO: 90665 - RNA, 25 nt, Artificial Sequence
  Description of Artificial Sequence: Synthetic oligonucleotide
caacguguauagugccuaaaauugu

SEQ ID NO: 90666 - RNA, 25 nt, Artificial Sequence
  Description of Artificial Sequence: Synthetic oligonucleotide
cauauccuuggcuacuaacaucugg

SEQ ID NO: 90667 - RNA, 25 nt, Artificial Sequence
  Description of Artificial Sequence: Synthetic oligonucleotide
uacuaacaucuggagacugugagcu

SEQ ID NO: 90668 - RNA, 25 nt, Artificial Sequence
  Description of Artificial Sequence: Synthetic oligonucleotide
cauaaguugugugcuuuuuauuaau

SEQ ID NO: 90669 - RNA, 25 nt, Artificial Sequence
  Description of Artificial Sequence: Synthetic oligonucleotide
gcaucauuuuggcucuucuuacauu

SEQ ID NO: 90670 - RNA, 25 nt, Artificial Sequence
  Description of Artificial Sequence: Synthetic oligonucleotide
gcucuucuuacauuuguaaaaaugu

SEQ ID NO: 90671 - RNA, 25 nt, Artificial Sequence
  Description of Artificial Sequence: Synthetic oligonucleotide
agauuaggucaucuuaauucauauu

SEQ ID NO: 90672 - RNA, 25 nt, Artificial Sequence
  Description of Artificial Sequence: Synthetic oligonucleotide
auggaauugaaagaacuaaucauga

SEQ ID NO: 90673 - RNA, 25 nt, Artificial Sequence
  Description of Artificial Sequence: Synthetic oligonucleotide
cacacucauuccuucugcucuuggg

SEQ ID NO: 90674 - RNA, 25 nt, Artificial Sequence
  Description of Artificial Sequence: Synthetic oligonucleotide
uguagagguaaccaguagcuuugag

SEQ ID NO: 90675 - RNA, 25 nt, Artificial Sequence
  Description of Artificial Sequence: Synthetic oligonucleotide
caaccacaugccacguaauauuuca

SEQ ID NO: 90676 - RNA, 25 nt, Artificial Sequence
  Description of Artificial Sequence: Synthetic oligonucleotide
ucggaaacaaguuauucucuucacu

SEQ ID NO: 90677 - RNA, 25 nt, Artificial Sequence
  Description of Artificial Sequence: Synthetic oligonucleotide
acucccaauaacuaaugcuaagaaa

SEQ ID NO: 90678 - RNA, 25 nt, Artificial Sequence
  Description of Artificial Sequence: Synthetic oligonucleotide
aaugcuaagaaaugcugaaaaucaa

SEQ ID NO: 90679 - RNA, 25 nt, Artificial Sequence
  Description of Artificial Sequence: Synthetic oligonucleotide
gucuuucucuaaauaugauuacuuu

SEQ ID NO: 90680 - RNA, 25 nt, Artificial Sequence
  Description of Artificial Sequence: Synthetic oligonucleotide
ugaauuucaggcauuuuguucuaca

SEQ ID NO: 90681 - RNA, 25 nt, Artificial Sequence
  Description of Artificial Sequence: Synthetic oligonucleotide
cgauucccucucacccgggacucuc

SEQ ID NO: 90682 - RNA, 25 nt, Artificial Sequence
  Description of Artificial Sequence: Synthetic oligonucleotide
aggaaagugaaccuuuaaaguaaag

SEQ ID NO: 90683 - RNA, 25 nt, Artificial Sequence
  Description of Artificial Sequence: Synthetic oligonucleotide
gaggcugcaugcucuggaagccugg

SEQ ID NO: 90684 - RNA, 25 nt, Artificial Sequence
  Description of Artificial Sequence: Synthetic oligonucleotide
ucucugaacagaaaacaaaagagag

SEQ ID NO: 90685 - RNA, 25 nt, Artificial Sequence
  Description of Artificial Sequence: Synthetic oligonucleotide
aacuuggcuguaaucaguuaugccg

SEQ ID NO: 90686 - RNA, 25 nt, Artificial Sequence
  Description of Artificial Sequence: Synthetic oligonucleotide
agaagccaaaauuaaaagaagucca

SEQ ID NO: 90687 - RNA, 25 nt, Artificial Sequence
  Description of Artificial Sequence: Synthetic oligonucleotide
auuaaaagaaguccaggugagguua

SEQ ID NO: 90688 - RNA, 25 nt, Artificial Sequence
  Description of Artificial Sequence: Synthetic oligonucleotide
gaauccggauuaucgggaagaggac

SEQ ID NO: 90689 - RNA, 25 nt, Artificial Sequence
  Description of Artificial Sequence: Synthetic oligonucleotide
aaugugacaucaaagcaaguauugu

SEQ ID NO: 90690 - RNA, 25 nt, Artificial Sequence
  Description of Artificial Sequence: Synthetic oligonucleotide
caucaaagcaaguauuguagcacuc

SEQ ID NO: 90691 - RNA, 25 nt, Artificial Sequence
  Description of Artificial Sequence: Synthetic oligonucleotide
agagagagaaaacaaaaccacaaau

SEQ ID NO: 90692 - RNA, 25 nt, Artificial Sequence
  Description of Artificial Sequence: Synthetic oligonucleotide
ucgcuguaguauuuaagcccauaca

SEQ ID NO: 90693 - RNA, 25 nt, Artificial Sequence
  Description of Artificial Sequence: Synthetic oligonucleotide
cgcuguaguauuuaagcccauacag

SEQ ID NO: 90694 - RNA, 25 nt, Artificial Sequence
  Description of Artificial Sequence: Synthetic oligonucleotide
auuuaagcccauacagaaaccuucc

SEQ ID NO: 90695 - RNA, 25 nt, Artificial Sequence
  Description of Artificial Sequence: Synthetic oligonucleotide
auuaaaauaaacaugguauaccuac

SEQ ID NO: 90696 - RNA, 25 nt, Artificial Sequence
  Description of Artificial Sequence: Synthetic oligonucleotide
cuguucugaucggccaguuuucgga

SEQ ID NO: 90697 - RNA, 25 nt, Artificial Sequence
  Description of Artificial Sequence: Synthetic oligonucleotide
aaauaauuugaacuuuggaacaggg

SEQ ID NO: 90698 - RNA, 25 nt, Artificial Sequence
  Description of Artificial Sequence: Synthetic oligonucleotide
ugcgaccuuaauuuaacuuuccagu

SEQ ID NO: 90699 - RNA, 25 nt, Artificial Sequence
  Description of Artificial Sequence: Synthetic oligonucleotide
cugagaaagcuaaaguuugguuuug

SEQ ID NO: 90700 - RNA, 25 nt, Artificial Sequence
  Description of Artificial Sequence: Synthetic oligonucleotide
aguaaagaugcuacuucccacugua

SEQ ID NO: 90701 - RNA, 25 nt, Artificial Sequence
  Description of Artificial Sequence: Synthetic oligonucleotide
cugcuuaauugcugauaccauauga

SEQ ID NO: 90702 - RNA, 25 nt, Artificial Sequence
  Description of Artificial Sequence: Synthetic oligonucleotide
uaccauaugaaugaaacaugggcug

SEQ ID NO: 90703 - RNA, 25 nt, Artificial Sequence
  Description of Artificial Sequence: Synthetic oligonucleotide
aacuuucuuauccaacuuuuucaua

SEQ ID NO: 90704 - RNA, 25 nt, Artificial Sequence
  Description of Artificial Sequence: Synthetic oligonucleotide
ccuugcaugacaucaugaggccgga

SEQ ID NO: 90705 - RNA, 25 nt, Artificial Sequence
  Description of Artificial Sequence: Synthetic oligonucleotide
ugaauuuguauaugacugcauuugu

SEQ ID NO: 90706 - RNA, 25 nt, Artificial Sequence
  Description of Artificial Sequence: Synthetic oligonucleotide
gaauccuaguagaauguuuacuacc

SEQ ID NO: 90707 - RNA, 25 nt, Artificial Sequence
  Description of Artificial Sequence: Synthetic oligonucleotide
gaaagggaagaauuuuuugaugaaa

SEQ ID NO: 90708 - RNA, 25 nt, Artificial Sequence
  Description of Artificial Sequence: Synthetic oligonucleotide
uaucggcaugccagugugugaauuu

SEQ ID NO: 90709 - RNA, 25 nt, Artificial Sequence
  Description of Artificial Sequence: Synthetic oligonucleotide
caccucauaguagagcaauguaugu

SEQ ID NO: 90710 - RNA, 25 nt, Artificial Sequence
  Description of Artificial Sequence: Synthetic oligonucleotide
ccagaauugccaaagcacauauaua

SEQ ID NO: 90711 - RNA, 25 nt, Artificial Sequence
  Description of Artificial Sequence: Synthetic oligonucleotide
uggugaucuggguaauaguuucucc

SEQ ID NO: 90712 - RNA, 25 nt, Artificial Sequence
  Description of Artificial Sequence: Synthetic oligonucleotide
gaucuggguaauaguuucuccaaau

SEQ ID NO: 90713 - RNA, 25 nt, Artificial Sequence
  Description of Artificial Sequence: Synthetic oligonucleotide
ggaugugaugaauacuuccuagaaa

SEQ ID NO: 90714 - RNA, 25 nt, Artificial Sequence
  Description of Artificial Sequence: Synthetic oligonucleotide
cauuuccacagcuacaccauauaug

SEQ ID NO: 90715 - RNA, 25 nt, Artificial Sequence
  Description of Artificial Sequence: Synthetic oligonucleotide
acagcuacaccauauaugaauggag

SEQ ID NO: 90716 - RNA, 25 nt, Artificial Sequence
  Description of Artificial Sequence: Synthetic oligonucleotide
ugcaguucuuacacgagaagaagau

SEQ ID NO: 90717 - RNA, 25 nt, Artificial Sequence
  Description of Artificial Sequence: Synthetic oligonucleotide
acgagaagaagaucauuuacaggga

SEQ ID NO: 90718 - RNA, 25 nt, Artificial Sequence
  Description of Artificial Sequence: Synthetic oligonucleotide
cgagaagaagaucauuuacagggac

SEQ ID NO: 90719 - RNA, 25 nt, Artificial Sequence
  Description of Artificial Sequence: Synthetic oligonucleotide
aagaagaucauuuacagggaccuga

SEQ ID NO: 90720 - RNA, 25 nt, Artificial Sequence
  Description of Artificial Sequence: Synthetic oligonucleotide
agaggaagagguguuugacugcauc

SEQ ID NO: 90721 - RNA, 25 nt, Artificial Sequence
  Description of Artificial Sequence: Synthetic oligonucleotide
gaggaagagguguuugacugcaucg

SEQ ID NO: 90722 - RNA, 25 nt, Artificial Sequence
  Description of Artificial Sequence: Synthetic oligonucleotide
cuacuuugagggcgaguucacaggg

SEQ ID NO: 90723 - RNA, 25 nt, Artificial Sequence
  Description of Artificial Sequence: Synthetic oligonucleotide
agggcaucuccuggcaccucugucc

SEQ ID NO: 90724 - RNA, 25 nt, Artificial Sequence
  Description of Artificial Sequence: Synthetic oligonucleotide
ggagugauaugguuugucuuuuuaa

SEQ ID NO: 90725 - RNA, 25 nt, Artificial Sequence
  Description of Artificial Sequence: Synthetic oligonucleotide
gagugauaugguuugucuuuuuaag

SEQ ID NO: 90726 - RNA, 25 nt, Artificial Sequence
  Description of Artificial Sequence: Synthetic oligonucleotide
ugcaguaaagauccuaaagguuguc

SEQ ID NO: 90727 - RNA, 25 nt, Artificial Sequence
  Description of Artificial Sequence: Synthetic oligonucleotide
aguaaagauccuaaagguugucgac

SEQ ID NO: 90728 - RNA, 25 nt, Artificial Sequence
  Description of Artificial Sequence: Synthetic oligonucleotide
ugacaaaggacaaccuggcaauugu

SEQ ID NO: 90729 - RNA, 25 nt, Artificial Sequence
  Description of Artificial Sequence: Synthetic oligonucleotide
gcaauugugacccaguggugcgagg

SEQ ID NO: 90730 - RNA, 25 nt, Artificial Sequence
  Description of Artificial Sequence: Synthetic oligonucleotide
aacaucauccauagagacaugaaau

SEQ ID NO: 90731 - RNA, 25 nt, Artificial Sequence
  Description of Artificial Sequence: Synthetic oligonucleotide
ugaaauccaacaauauauuucucca

SEQ ID NO: 90732 - RNA, 25 nt, Artificial Sequence
  Description of Artificial Sequence: Synthetic oligonucleotide
aacaauauauuucuccaugaaggcu

SEQ ID NO: 90733 - RNA, 25 nt, Artificial Sequence
  Description of Artificial Sequence: Synthetic oligonucleotide
aacaguaaagucacgcuggaguggu

SEQ ID NO: 90734 - RNA, 25 nt, Artificial Sequence
  Description of Artificial Sequence: Synthetic oligonucleotide
ugugaagaaaguaaaggaagagagg

SEQ ID NO: 90735 - RNA, 25 nt, Artificial Sequence
  Description of Artificial Sequence: Synthetic oligonucleotide
cuuccgagccauccuugcaucgggc

SEQ ID NO: 90736 - RNA, 25 nt, Artificial Sequence
  Description of Artificial Sequence: Synthetic oligonucleotide
aauggagguugaauauccuacugug

SEQ ID NO: 90737 - RNA, 25 nt, Artificial Sequence
  Description of Artificial Sequence: Synthetic oligonucleotide
ggagguugaauauccuacuguguaa

SEQ ID NO: 90738 - RNA, 25 nt, Artificial Sequence
  Description of Artificial Sequence: Synthetic oligonucleotide
auuuugaguuuucccuuguagugua

SEQ ID NO: 90739 - RNA, 25 nt, Artificial Sequence
  Description of Artificial Sequence: Synthetic oligonucleotide
uauccuguuuguucuuuguugauug

SEQ ID NO: 90740 - RNA, 25 nt, Artificial Sequence
  Description of Artificial Sequence: Synthetic oligonucleotide
ccuguuuguucuuuguugauugaaa

SEQ ID NO: 90741 - RNA, 25 nt, Artificial Sequence
  Description of Artificial Sequence: Synthetic oligonucleotide
cucuacagccuucuuuuucuuccau

SEQ ID NO: 90742 - RNA, 25 nt, Artificial Sequence
  Description of Artificial Sequence: Synthetic oligonucleotide
ucuuccauagcuaaucuuccuucua

SEQ ID NO: 90743 - RNA, 25 nt, Artificial Sequence
  Description of Artificial Sequence: Synthetic oligonucleotide
auaaucuuccuguugaaugcuucau

SEQ ID NO: 90744 - RNA, 25 nt, Artificial Sequence
  Description of Artificial Sequence: Synthetic oligonucleotide
uaaucuuccuguugaaugcuucaug

SEQ ID NO: 90745 - RNA, 25 nt, Artificial Sequence
  Description of Artificial Sequence: Synthetic oligonucleotide
cuucaugacuugaauucuacuuuga

SEQ ID NO: 90746 - RNA, 25 nt, Artificial Sequence
  Description of Artificial Sequence: Synthetic oligonucleotide
aagagggagagaagcaacuacagac

SEQ ID NO: 90747 - RNA, 25 nt, Artificial Sequence
  Description of Artificial Sequence: Synthetic oligonucleotide
cgucuccuaccagaccaaggucaac

SEQ ID NO: 90748 - RNA, 25 nt, Artificial Sequence
  Description of Artificial Sequence: Synthetic oligonucleotide
gaucaaucggcccgacuaucucgac

SEQ ID NO: 90749 - RNA, 25 nt, Artificial Sequence
  Description of Artificial Sequence: Synthetic oligonucleotide
ggacgaacauccaaccuucccaaac

SEQ ID NO: 90750 - RNA, 25 nt, Artificial Sequence
  Description of Artificial Sequence: Synthetic oligonucleotide
agggucggaacccaagcuuagaacu

SEQ ID NO: 90751 - RNA, 25 nt, Artificial Sequence
  Description of Artificial Sequence: Synthetic oligonucleotide
ucggaacccaagcuuagaacuuuaa

SEQ ID NO: 90752 - RNA, 25 nt, Artificial Sequence
  Description of Artificial Sequence: Synthetic oligonucleotide
acccaagcuuagaacuuuaagcaac

SEQ ID NO: 90753 - RNA, 25 nt, Artificial Sequence
  Description of Artificial Sequence: Synthetic oligonucleotide
gaacuuuaagcaacaagaccaccac

SEQ ID NO: 90754 - RNA, 25 nt, Artificial Sequence
  Description of Artificial Sequence: Synthetic oligonucleotide
acuauucaguggcgagaaauaaagu

SEQ ID NO: 90755 - RNA, 25 nt, Artificial Sequence
  Description of Artificial Sequence: Synthetic oligonucleotide
cuauucaguggcgagaaauaaaguu

SEQ ID NO: 90756 - RNA, 25 nt, Artificial Sequence
  Description of Artificial Sequence: Synthetic oligonucleotide
aaacacagauaacaggaaaugaucc

SEQ ID NO: 90757 - RNA, 25 nt, Artificial Sequence
  Description of Artificial Sequence: Synthetic oligonucleotide
cuuaagaaaagagaagaaaugaaac

SEQ ID NO: 90758 - RNA, 25 nt, Artificial Sequence
  Description of Artificial Sequence: Synthetic oligonucleotide
cugaaggaguguguuuccauccucc

SEQ ID NO: 90759 - RNA, 25 nt, Artificial Sequence
  Description of Artificial Sequence: Synthetic oligonucleotide
ucaccgcgggacugaaaaucuuuga

SEQ ID NO: 90760 - RNA, 25 nt, Artificial Sequence
  Description of Artificial Sequence: Synthetic oligonucleotide
agcagaaauaagcgugccguucagg

SEQ ID NO: 90761 - RNA, 25 nt, Artificial Sequence
  Description of Artificial Sequence: Synthetic oligonucleotide
aagcgugccguucaggguccagaag

SEQ ID NO: 90762 - RNA, 25 nt, Artificial Sequence
  Description of Artificial Sequence: Synthetic oligonucleotide
agaaacagucacucaagacugcuug

SEQ ID NO: 90763 - RNA, 25 nt, Artificial Sequence
  Description of Artificial Sequence: Synthetic oligonucleotide
agaggaagaagguccaugucuuugg

SEQ ID NO: 90764 - RNA, 25 nt, Artificial Sequence
  Description of Artificial Sequence: Synthetic oligonucleotide
uguauucaaaauaugccugaaacac

SEQ ID NO: 90765 - RNA, 25 nt, Artificial Sequence
  Description of Artificial Sequence: Synthetic oligonucleotide
auuuuccucccuuucucuguaccuc

SEQ ID NO: 90766 - RNA, 25 nt, Artificial Sequence
  Description of Artificial Sequence: Synthetic oligonucleotide
caaagaaagauagagcaagacaaga

SEQ ID NO: 90767 - RNA, 25 nt, Artificial Sequence
  Description of Artificial Sequence: Synthetic oligonucleotide
aagaaagauagagcaagacaagaaa

SEQ ID NO: 90768 - RNA, 25 nt, Artificial Sequence
  Description of Artificial Sequence: Synthetic oligonucleotide
gaaagcauuuguuuguacaagaucc

SEQ ID NO: 90769 - RNA, 25 nt, Artificial Sequence
  Description of Artificial Sequence: Synthetic oligonucleotide
ugaguuaaacgaacguacuugcaga

SEQ ID NO: 90770 - RNA, 25 nt, Artificial Sequence
  Description of Artificial Sequence: Synthetic oligonucleotide
acugauacagaacgaucgauacaga

SEQ ID NO: 90771 - RNA, 25 nt, Artificial Sequence
  Description of Artificial Sequence: Synthetic oligonucleotide
auauuauauauauauaaaaauaaau

SEQ ID NO: 90772 - RNA, 25 nt, Artificial Sequence
  Description of Artificial Sequence: Synthetic oligonucleotide
auuauauauauauaaaaauaaauau

SEQ ID NO: 90773 - RNA, 25 nt, Artificial Sequence
  Description of Artificial Sequence: Synthetic oligonucleotide
ucacuggauguauuugacugcugug

SEQ ID NO: 90774 - RNA, 25 nt, Artificial Sequence
  Description of Artificial Sequence: Synthetic oligonucleotide
cagggaagaggaggagaugagagac

SEQ ID NO: 90775 - RNA, 25 nt, Artificial Sequence
  Description of Artificial Sequence: Synthetic oligonucleotide
augaucuuuuuuuugucccacuugg

SEQ ID NO: 90776 - RNA, 27 nt, Artificial Sequence
  Description of Artificial Sequence: Synthetic oligonucleotide
ggccgugaacuccucaucaaaauaccu

SEQ ID NO: 90777 - RNA, 27 nt, Artificial Sequence
  Description of Artificial Sequence: Synthetic oligonucleotide
uggugugauggugaucaucugggccgu

SEQ ID NO: 90778 - RNA, 27 nt, Artificial Sequence
  Description of Artificial Sequence: Synthetic oligonucleotide
aaacccgcaggauaguuuucuucccua

SEQ ID NO: 90779 - RNA, 27 nt, Artificial Sequence
  Description of Artificial Sequence: Synthetic oligonucleotide
caaacuggaugaaauaaauuaaaaccc

SEQ ID NO: 90780 - RNA, 27 nt, Artificial Sequence
  Description of Artificial Sequence: Synthetic oligonucleotide
agaaguccuuaacauuucccuacguga

SEQ ID NO: 90781 - RNA, 27 nt, Artificial Sequence
  Description of Artificial Sequence: Synthetic oligonucleotide
cucugucccacuggguaaacccuggcc

SEQ ID NO: 90782 - RNA, 27 nt, Artificial Sequence
  Description of Artificial Sequence: Synthetic oligonucleotide
cacaauaacaaauuuaaaccuugcucc

SEQ ID NO: 90783 - RNA, 27 nt, Artificial Sequence
  Description of Artificial Sequence: Synthetic oligonucleotide
aaaugcauuugaacaacauaauacaca

SEQ ID NO: 90784 - RNA, 27 nt, Artificial Sequence
  Description of Artificial Sequence: Synthetic oligonucleotide
ggcuuuccugucacaaagauuaaaaac

SEQ ID NO: 90785 - RNA, 27 nt, Artificial Sequence
  Description of Artificial Sequence: Synthetic oligonucleotide
agggcuuuccugucacaaagauuaaaa

SEQ ID NO: 90786 - RNA, 27 nt, Artificial Sequence
  Description of Artificial Sequence: Synthetic oligonucleotide
ggccaugcugggagacauaagcagcag

SEQ ID NO: 90787 - RNA, 27 nt, Artificial Sequence
  Description of Artificial Sequence: Synthetic oligonucleotide
ucagggagaagcuucugaaacacuucu

SEQ ID NO: 90788 - RNA, 27 nt, Artificial Sequence
  Description of Artificial Sequence: Synthetic oligonucleotide
aagggcuucuuccuuauugauggucag

SEQ ID NO: 90789 - RNA, 27 nt, Artificial Sequence
  Description of Artificial Sequence: Synthetic oligonucleotide
ugaagggcuucuuccuuauugaugguc

SEQ ID NO: 90790 - RNA, 27 nt, Artificial Sequence
  Description of Artificial Sequence: Synthetic oligonucleotide
cgcugaagggcuucuuccuuauugaug

SEQ ID NO: 90791 - RNA, 27 nt, Artificial Sequence
  Description of Artificial Sequence: Synthetic oligonucleotide
gccgcugaagggcuucuuccuuauuga

SEQ ID NO: 90792 - RNA, 27 nt, Artificial Sequence
  Description of Artificial Sequence: Synthetic oligonucleotide
acuggccgcugaagggcuucuuccuua

SEQ ID NO: 90793 - RNA, 27 nt, Artificial Sequence
  Description of Artificial Sequence: Synthetic oligonucleotide
cggagcuuuucaccuuuaguuaugcuu

SEQ ID NO: 90794 - RNA, 27 nt, Artificial Sequence
  Description of Artificial Sequence: Synthetic oligonucleotide
ccggagcuuuucaccuuuaguuaugcu

SEQ ID NO: 90795 - RNA, 27 nt, Artificial Sequence
  Description of Artificial Sequence: Synthetic oligonucleotide
cagacuguugacuggcgugauguaguu

SEQ ID NO: 90796 - RNA, 27 nt, Artificial Sequence
  Description of Artificial Sequence: Synthetic oligonucleotide
cuuuugaacucugcuuaaauccagugg

SEQ ID NO: 90797 - RNA, 27 nt, Artificial Sequence
  Description of Artificial Sequence: Synthetic oligonucleotide
gcuuuugaacucugcuuaaauccagug

SEQ ID NO: 90798 - RNA, 27 nt, Artificial Sequence
  Description of Artificial Sequence: Synthetic oligonucleotide
agggcuuuugaacucugcuuaaaucca

SEQ ID NO: 90799 - RNA, 27 nt, Artificial Sequence
  Description of Artificial Sequence: Synthetic oligonucleotide
aagggcuuuugaacucugcuuaaaucc

SEQ ID NO: 90800 - RNA, 27 nt, Artificial Sequence
  Description of Artificial Sequence: Synthetic oligonucleotide
ugaagggcuuuugaacucugcuuaaau

SEQ ID NO: 90801 - RNA, 27 nt, Artificial Sequence
  Description of Artificial Sequence: Synthetic oligonucleotide
cugaagggcuuuugaacucugcuuaaa

SEQ ID NO: 90802 - RNA, 27 nt, Artificial Sequence
  Description of Artificial Sequence: Synthetic oligonucleotide
cgcugaagggcuuuugaacucugcuua

SEQ ID NO: 90803 - RNA, 27 nt, Artificial Sequence
  Description of Artificial Sequence: Synthetic oligonucleotide
cgagcggcuucacucagacccugaggc

SEQ ID NO: 90804 - RNA, 27 nt, Artificial Sequence
  Description of Artificial Sequence: Synthetic oligonucleotide
uugacuggcgugauguaguugcuuggg

SEQ ID NO: 90805 - RNA, 27 nt, Artificial Sequence
  Description of Artificial Sequence: Synthetic oligonucleotide
cacgcaccaagaagcugccauugaucc

SEQ ID NO: 90806 - RNA, 27 nt, Artificial Sequence
  Description of Artificial Sequence: Synthetic oligonucleotide
cugaugaauccaaugugggcuggaauc

SEQ ID NO: 90807 - RNA, 27 nt, Artificial Sequence
  Description of Artificial Sequence: Synthetic oligonucleotide
cuuagguauuccacauucucagcugug

SEQ ID NO: 90808 - RNA, 27 nt, Artificial Sequence
  Description of Artificial Sequence: Synthetic oligonucleotide
ugagccucaaauuaggagauacguuuu

SEQ ID NO: 90809 - RNA, 27 nt, Artificial Sequence
  Description of Artificial Sequence: Synthetic oligonucleotide
ccaauuguagagaaauuauuuuaggaa

SEQ ID NO: 90810 - RNA, 27 nt, Artificial Sequence
  Description of Artificial Sequence: Synthetic oligonucleotide
ggcuccuaacuagcugaaucuuccaau

SEQ ID NO: 90811 - RNA, 27 nt, Artificial Sequence
  Description of Artificial Sequence: Synthetic oligonucleotide
guggauauugacuaggagaguuuaaaa

SEQ ID NO: 90812 - RNA, 27 nt, Artificial Sequence
  Description of Artificial Sequence: Synthetic oligonucleotide
ugugacugaacauaacuguaggcugaa

SEQ ID NO: 90813 - RNA, 27 nt, Artificial Sequence
  Description of Artificial Sequence: Synthetic oligonucleotide
guaugugugugugacugaacauaacug

SEQ ID NO: 90814 - RNA, 27 nt, Artificial Sequence
  Description of Artificial Sequence: Synthetic oligonucleotide
aagcaaaaggaacauuuuguaugugug

SEQ ID NO: 90815 - RNA, 27 nt, Artificial Sequence
  Description of Artificial Sequence: Synthetic oligonucleotide
aaaaauuacuuuaaaagcaaaaggaac

SEQ ID NO: 90816 - RNA, 27 nt, Artificial Sequence
  Description of Artificial Sequence: Synthetic oligonucleotide
ccauugacuguugcuucacaggucaga

SEQ ID NO: 90817 - RNA, 27 nt, Artificial Sequence
  Description of Artificial Sequence: Synthetic oligonucleotide
auugguuugucgaugugugagauaguu

SEQ ID NO: 90818 - RNA, 27 nt, Artificial Sequence
  Description of Artificial Sequence: Synthetic oligonucleotide
agugguagcaguacaauugaggacaag

SEQ ID NO: 90819 - RNA, 27 nt, Artificial Sequence
  Description of Artificial Sequence: Synthetic oligonucleotide
uaagaccgcuugccagcuacgguuuca

SEQ ID NO: 90820 - RNA, 27 nt, Artificial Sequence
  Description of Artificial Sequence: Synthetic oligonucleotide
agccgguaagaccgcuugccagcuacg

SEQ ID NO: 90821 - RNA, 27 nt, Artificial Sequence
  Description of Artificial Sequence: Synthetic oligonucleotide
gguaacccaucuuuuaaccauacaacu

SEQ ID NO: 90822 - RNA, 27 nt, Artificial Sequence
  Description of Artificial Sequence: Synthetic oligonucleotide
ucgcagguaacccaucuuuuaaccaua

SEQ ID NO: 90823 - RNA, 27 nt, Artificial Sequence
  Description of Artificial Sequence: Synthetic oligonucleotide
cucagcaagauuguauaauucccugca

SEQ ID NO: 90824 - RNA, 27 nt, Artificial Sequence
  Description of Artificial Sequence: Synthetic oligonucleotide
acuguuuuaugcucagcaagauuguau

SEQ ID NO: 90825 - RNA, 27 nt, Artificial Sequence
  Description of Artificial Sequence: Synthetic oligonucleotide
aggauaaaggacucuucauuauuggaa

SEQ ID NO: 90826 - RNA, 27 nt, Artificial Sequence
  Description of Artificial Sequence: Synthetic oligonucleotide
caacuugcguuggaacauccaaagugu

SEQ ID NO: 90827 - RNA, 27 nt, Artificial Sequence
  Description of Artificial Sequence: Synthetic oligonucleotide
augguuucaguuuaguggaagcauuua

SEQ ID NO: 90828 - RNA, 27 nt, Artificial Sequence
  Description of Artificial Sequence: Synthetic oligonucleotide
auauuuaacaaagucaaacuuucucac

SEQ ID NO: 90829 - RNA, 27 nt, Artificial Sequence
  Description of Artificial Sequence: Synthetic oligonucleotide
aacuuuuaauauacaguaguucuuuuc

SEQ ID NO: 90830 - RNA, 27 nt, Artificial Sequence
  Description of Artificial Sequence: Synthetic oligonucleotide
guuaagucaaaacccguauuucuaaag

SEQ ID NO: 90831 - RNA, 27 nt, Artificial Sequence
  Description of Artificial Sequence: Synthetic oligonucleotide
gugcugaguuugcuguacccauguuga

SEQ ID NO: 90832 - RNA, 27 nt, Artificial Sequence
  Description of Artificial Sequence: Synthetic oligonucleotide
ugaggucagcaucuucugugucuuuac

SEQ ID NO: 90833 - RNA, 27 nt, Artificial Sequence
  Description of Artificial Sequence: Synthetic oligonucleotide
gcgaucugaauaaaccucccuacuagc

SEQ ID NO: 90834 - RNA, 27 nt, Artificial Sequence
  Description of Artificial Sequence: Synthetic oligonucleotide
aucccagaacccugcugcagaaggcca

SEQ ID NO: 90835 - RNA, 27 nt, Artificial Sequence
  Description of Artificial Sequence: Synthetic oligonucleotide
cauaauuuccaauauguaccagaccuu

SEQ ID NO: 90836 - RNA, 27 nt, Artificial Sequence
  Description of Artificial Sequence: Synthetic oligonucleotide
cuagugcuuccaucggaaggacuaggu

SEQ ID NO: 90837 - RNA, 27 nt, Artificial Sequence
  Description of Artificial Sequence: Synthetic oligonucleotide
uccacauaaaaacaauauucacuggga

SEQ ID NO: 90838 - RNA, 27 nt, Artificial Sequence
  Description of Artificial Sequence: Synthetic oligonucleotide
ucuaccaauuccaacuugaauucauug

SEQ ID NO: 90839 - RNA, 27 nt, Artificial Sequence
  Description of Artificial Sequence: Synthetic oligonucleotide
ucuccaagucuaaaucuguguccugag

SEQ ID NO: 90840 - RNA, 27 nt, Artificial Sequence
  Description of Artificial Sequence: Synthetic oligonucleotide
uggaauacuguaacugugcuuugagga

SEQ ID NO: 90841 - RNA, 27 nt, Artificial Sequence
  Description of Artificial Sequence: Synthetic oligonucleotide
uuaauucaucagugguggcagugguag

SEQ ID NO: 90842 - RNA, 27 nt, Artificial Sequence
  Description of Artificial Sequence: Synthetic oligonucleotide
gugaugauguggcacuaguaguuucuu

SEQ ID NO: 90843 - RNA, 27 nt, Artificial Sequence
  Description of Artificial Sequence: Synthetic oligonucleotide
ucuguuuggugaggcuguccgacuuug

SEQ ID NO: 90844 - RNA, 27 nt, Artificial Sequence
  Description of Artificial Sequence: Synthetic oligonucleotide
ccaucauguuccauuuuucgcuuucuc

SEQ ID NO: 90845 - RNA, 27 nt, Artificial Sequence
  Description of Artificial Sequence: Synthetic oligonucleotide
gcagucuacaugcuaaaucagagggua

SEQ ID NO: 90846 - RNA, 27 nt, Artificial Sequence
  Description of Artificial Sequence: Synthetic oligonucleotide
cauaaauagauccuuaaauagcucaaa

SEQ ID NO: 90847 - RNA, 27 nt, Artificial Sequence
  Description of Artificial Sequence: Synthetic oligonucleotide
ugauaauagugcuuuuucaccuuuuuc

SEQ ID NO: 90848 - RNA, 27 nt, Artificial Sequence
  Description of Artificial Sequence: Synthetic oligonucleotide
gcagaacugauaauagugcuuuuucac

SEQ ID NO: 90849 - RNA, 27 nt, Artificial Sequence
  Description of Artificial Sequence: Synthetic oligonucleotide
guagguuuaaucuuucuuuucagccau

SEQ ID NO: 90850 - RNA, 27 nt, Artificial Sequence
  Description of Artificial Sequence: Synthetic oligonucleotide
agaaggauuuuauuauaaggguuuaau

SEQ ID NO: 90851 - RNA, 27 nt, Artificial Sequence
  Description of Artificial Sequence: Synthetic oligonucleotide
gucuacagcauuggcuaauaguaugaa

SEQ ID NO: 90852 - RNA, 27 nt, Artificial Sequence
  Description of Artificial Sequence: Synthetic oligonucleotide
cuauuccuaucaaaaugcuucugucua

SEQ ID NO: 90853 - RNA, 27 nt, Artificial Sequence
  Description of Artificial Sequence: Synthetic oligonucleotide
ucagggccauuaucuuauuugcucuau

SEQ ID NO: 90854 - RNA, 27 nt, Artificial Sequence
  Description of Artificial Sequence: Synthetic oligonucleotide
ugcuugaggaagagaaaaauguugguc

SEQ ID NO: 90855 - RNA, 27 nt, Artificial Sequence
  Description of Artificial Sequence: Synthetic oligonucleotide
ugggcugaacuuuucucauacuuaaag

SEQ ID NO: 90856 - RNA, 27 nt, Artificial Sequence
  Description of Artificial Sequence: Synthetic oligonucleotide
gguucagcagccaucuuuauuccugcg

SEQ ID NO: 90857 - RNA, 27 nt, Artificial Sequence
  Description of Artificial Sequence: Synthetic oligonucleotide
ugaagagaacuuggucauucaaauuuc

SEQ ID NO: 90858 - RNA, 27 nt, Artificial Sequence
  Description of Artificial Sequence: Synthetic oligonucleotide
cucuaggcuggcuaucuuuauacauac

SEQ ID NO: 90859 - RNA, 27 nt, Artificial Sequence
  Description of Artificial Sequence: Synthetic oligonucleotide
acacuucacagagauaguuacagccau

SEQ ID NO: 90860 - RNA, 27 nt, Artificial Sequence
  Description of Artificial Sequence: Synthetic oligonucleotide
uugaaauuuucucacacuucacagaga

SEQ ID NO: 90861 - RNA, 27 nt, Artificial Sequence
  Description of Artificial Sequence: Synthetic oligonucleotide
ucaggaggauucauuuccuuaaaggaa

SEQ ID NO: 90862 - RNA, 27 nt, Artificial Sequence
  Description of Artificial Sequence: Synthetic oligonucleotide
auaugaugucacuuuuuguauccuuga

SEQ ID NO: 90863 - RNA, 27 nt, Artificial Sequence
  Description of Artificial Sequence: Synthetic oligonucleotide
uaugaugaagauucaaauugcaucuua

SEQ ID NO: 90864 - RNA, 27 nt, Artificial Sequence
  Description of Artificial Sequence: Synthetic oligonucleotide
uuaauagcuagucuucguuuugaacag

SEQ ID NO: 90865 - RNA, 27 nt, Artificial Sequence
  Description of Artificial Sequence: Synthetic oligonucleotide
auuuuuaguagagaugagguuucacca

SEQ ID NO: 90866 - RNA, 27 nt, Artificial Sequence
  Description of Artificial Sequence: Synthetic oligonucleotide
aggcgagauagagcuucucuuucguuc

SEQ ID NO: 90867 - RNA, 27 nt, Artificial Sequence
  Description of Artificial Sequence: Synthetic oligonucleotide
aacuggaccgaaggcgcuuguggagaa

SEQ ID NO: 90868 - RNA, 27 nt, Artificial Sequence
  Description of Artificial Sequence: Synthetic oligonucleotide
gcggcuacaucuuuggaaucuucuccu

SEQ ID NO: 90869 - RNA, 27 nt, Artificial Sequence
  Description of Artificial Sequence: Synthetic oligonucleotide
caagucuccucauugaauccagauugg

SEQ ID NO: 90870 - RNA, 27 nt, Artificial Sequence
  Description of Artificial Sequence: Synthetic oligonucleotide
uccucacuacucucaaaucuguucugg

SEQ ID NO: 90871 - RNA, 27 nt, Artificial Sequence
  Description of Artificial Sequence: Synthetic oligonucleotide
uuuguacucaucugcacagcucuggcu

SEQ ID NO: 90872 - RNA, 27 nt, Artificial Sequence
  Description of Artificial Sequence: Synthetic oligonucleotide
gcccauuaacaacaacaaucugaggug

SEQ ID NO: 90873 - RNA, 27 nt, Artificial Sequence
  Description of Artificial Sequence: Synthetic oligonucleotide
aauaaauuaaaaauaauuaaaauagug

SEQ ID NO: 90874 - RNA, 27 nt, Artificial Sequence
  Description of Artificial Sequence: Synthetic oligonucleotide
cauauuuaaauauuaauaaauuaaaaa

SEQ ID NO: 90875 - RNA, 27 nt, Artificial Sequence
  Description of Artificial Sequence: Synthetic oligonucleotide
gaaacaaaggauauucaaacugcauag

SEQ ID NO: 90876 - RNA, 27 nt, Artificial Sequence
  Description of Artificial Sequence: Synthetic oligonucleotide
caaacacuuagacgccagcagcauggg

SEQ ID NO: 90877 - RNA, 27 nt, Artificial Sequence
  Description of Artificial Sequence: Synthetic oligonucleotide
uuugucacaggugaaaugcacaucuga

SEQ ID NO: 90878 - RNA, 27 nt, Artificial Sequence
  Description of Artificial Sequence: Synthetic oligonucleotide
uaauucagccuggcacagguuuugauc

SEQ ID NO: 90879 - RNA, 27 nt, Artificial Sequence
  Description of Artificial Sequence: Synthetic oligonucleotide
auuguaagaaugacuacccacauucac

SEQ ID NO: 90880 - RNA, 27 nt, Artificial Sequence
  Description of Artificial Sequence: Synthetic oligonucleotide
caauuguaagaaugacuacccacauuc

SEQ ID NO: 90881 - RNA, 27 nt, Artificial Sequence
  Description of Artificial Sequence: Synthetic oligonucleotide
guacacucucugaugcucauuuucaua

SEQ ID NO: 90882 - RNA, 27 nt, Artificial Sequence
  Description of Artificial Sequence: Synthetic oligonucleotide
cugcugaguucuacaugaaaagcaaau

SEQ ID NO: 90883 - RNA, 27 nt, Artificial Sequence
  Description of Artificial Sequence: Synthetic oligonucleotide
uacugaaaauaaauauagaaauacaac

SEQ ID NO: 90884 - RNA, 27 nt, Artificial Sequence
  Description of Artificial Sequence: Synthetic oligonucleotide
uuccauuuaagaaacauuaaucaaaac

SEQ ID NO: 90885 - RNA, 27 nt, Artificial Sequence
  Description of Artificial Sequence: Synthetic oligonucleotide
acaauuuuaggcacuauacacguuguu

SEQ ID NO: 90886 - RNA, 27 nt, Artificial Sequence
  Description of Artificial Sequence: Synthetic oligonucleotide
ccagauguuaguagccaaggauauggu

SEQ ID NO: 90887 - RNA, 27 nt, Artificial Sequence
  Description of Artificial Sequence: Synthetic oligonucleotide
agcucacagucuccagauguuaguagc

SEQ ID NO: 90888 - RNA, 27 nt, Artificial Sequence
  Description of Artificial Sequence: Synthetic oligonucleotide
auuaauaaaaagcacacaacuuauggc

SEQ ID NO: 90889 - RNA, 27 nt, Artificial Sequence
  Description of Artificial Sequence: Synthetic oligonucleotide
aauguaagaagagccaaaaugaugcau

SEQ ID NO: 90890 - RNA, 27 nt, Artificial Sequence
  Description of Artificial Sequence: Synthetic oligonucleotide
acauuuuuacaaauguaagaagagcca

SEQ ID NO: 90891 - RNA, 27 nt, Artificial Sequence
  Description of Artificial Sequence: Synthetic oligonucleotide
aauaugaauuaagaugaccuaaucugu

SEQ ID NO: 90892 - RNA, 27 nt, Artificial Sequence
  Description of Artificial Sequence: Synthetic oligonucleotide
ucaugauuaguucuuucaauuccaucc

SEQ ID NO: 90893 - RNA, 27 nt, Artificial Sequence
  Description of Artificial Sequence: Synthetic oligonucleotide
cccaagagcagaaggaaugagugugca

SEQ ID NO: 90894 - RNA, 27 nt, Artificial Sequence
  Description of Artificial Sequence: Synthetic oligonucleotide
cucaaagcuacugguuaccucuacacc

SEQ ID NO: 90895 - RNA, 27 nt, Artificial Sequence
  Description of Artificial Sequence: Synthetic oligonucleotide
ugaaauauuacguggcaugugguuggg

SEQ ID NO: 90896 - RNA, 27 nt, Artificial Sequence
  Description of Artificial Sequence: Synthetic oligonucleotide
agugaagagaauaacuuguuuccgaag

SEQ ID NO: 90897 - RNA, 27 nt, Artificial Sequence
  Description of Artificial Sequence: Synthetic oligonucleotide
uuucuuagcauuaguuauugggaguga

SEQ ID NO: 90898 - RNA, 27 nt, Artificial Sequence
  Description of Artificial Sequence: Synthetic oligonucleotide
uugauuuucagcauuucuuagcauuag

SEQ ID NO: 90899 - RNA, 27 nt, Artificial Sequence
  Description of Artificial Sequence: Synthetic oligonucleotide
aaaguaaucauauuuagagaaagacag

SEQ ID NO: 90900 - RNA, 27 nt, Artificial Sequence
  Description of Artificial Sequence: Synthetic oligonucleotide
uguagaacaaaaugccugaaauucagc

SEQ ID NO: 90901 - RNA, 27 nt, Artificial Sequence
  Description of Artificial Sequence: Synthetic oligonucleotide
gagagucccgggugagagggaaucgcc

SEQ ID NO: 90902 - RNA, 27 nt, Artificial Sequence
  Description of Artificial Sequence: Synthetic oligonucleotide
cuuuacuuuaaagguucacuuuccuug

SEQ ID NO: 90903 - RNA, 27 nt, Artificial Sequence
  Description of Artificial Sequence: Synthetic oligonucleotide
ccaggcuuccagagcaugcagccuccu

SEQ ID NO: 90904 - RNA, 27 nt, Artificial Sequence
  Description of Artificial Sequence: Synthetic oligonucleotide
cucucuuuuguuuucuguucagagaaa

SEQ ID NO: 90905 - RNA, 27 nt, Artificial Sequence
  Description of Artificial Sequence: Synthetic oligonucleotide
cggcauaacugauuacagccaaguuca

SEQ ID NO: 90906 - RNA, 27 nt, Artificial Sequence
  Description of Artificial Sequence: Synthetic oligonucleotide
uggacuucuuuuaauuuuggcuucuuc

SEQ ID NO: 90907 - RNA, 27 nt, Artificial Sequence
  Description of Artificial Sequence: Synthetic oligonucleotide
uaaccucaccuggacuucuuuuaauuu

SEQ ID NO: 90908 - RNA, 27 nt, Artificial Sequence
  Description of Artificial Sequence: Synthetic oligonucleotide
guccucuucccgauaauccggauucag

SEQ ID NO: 90909 - RNA, 27 nt, Artificial Sequence
  Description of Artificial Sequence: Synthetic oligonucleotide
acaauacuugcuuugaugucacauuaa

SEQ ID NO: 90910 - RNA, 27 nt, Artificial Sequence
  Description of Artificial Sequence: Synthetic oligonucleotide
gagugcuacaauacuugcuuugauguc

SEQ ID NO: 90911 - RNA, 27 nt, Artificial Sequence
  Description of Artificial Sequence: Synthetic oligonucleotide
auuugugguuuuguuuucucucucucu

SEQ ID NO: 90912 - RNA, 27 nt, Artificial Sequence
  Description of Artificial Sequence: Synthetic oligonucleotide
uguaugggcuuaaauacuacagcgagg

SEQ ID NO: 90913 - RNA, 27 nt, Artificial Sequence
  Description of Artificial Sequence: Synthetic oligonucleotide
cuguaugggcuuaaauacuacagcgag

SEQ ID NO: 90914 - RNA, 27 nt, Artificial Sequence
  Description of Artificial Sequence: Synthetic oligonucleotide
ggaagguuucuguaugggcuuaaauac

SEQ ID NO: 90915 - RNA, 27 nt, Artificial Sequence
  Description of Artificial Sequence: Synthetic oligonucleotide
guagguauaccauguuuauuuuaauac

SEQ ID NO: 90916 - RNA, 27 nt, Artificial Sequence
  Description of Artificial Sequence: Synthetic oligonucleotide
uccgaaaacuggccgaucagaacagcc

SEQ ID NO: 90917 - RNA, 27 nt, Artificial Sequence
  Description of Artificial Sequence: Synthetic oligonucleotide
cccuguuccaaaguucaaauuauuugu

SEQ ID NO: 90918 - RNA, 27 nt, Artificial Sequence
  Description of Artificial Sequence: Synthetic oligonucleotide
acuggaaaguuaaauuaaggucgcaau

SEQ ID NO: 90919 - RNA, 27 nt, Artificial Sequence
  Description of Artificial Sequence: Synthetic oligonucleotide
caaaaccaaacuuuagcuuucucagcc

SEQ ID NO: 90920 - RNA, 27 nt, Artificial Sequence
  Description of Artificial Sequence: Synthetic oligonucleotide
uacagugggaaguagcaucuuuacuuu

SEQ ID NO: 90921 - RNA, 27 nt, Artificial Sequence
  Description of Artificial Sequence: Synthetic oligonucleotide
ucauaugguaucagcaauuaagcagua

SEQ ID NO: 90922 - RNA, 27 nt, Artificial Sequence
  Description of Artificial Sequence: Synthetic oligonucleotide
cagcccauguuucauucauaugguauc

SEQ ID NO: 90923 - RNA, 27 nt, Artificial Sequence
  Description of Artificial Sequence: Synthetic oligonucleotide
uaugaaaaaguuggauaagaaaguugg

SEQ ID NO: 90924 - RNA, 27 nt, Artificial Sequence
  Description of Artificial Sequence: Synthetic oligonucleotide
uccggccucaugaugucaugcaaggcu

SEQ ID NO: 90925 - RNA, 27 nt, Artificial Sequence
  Description of Artificial Sequence: Synthetic oligonucleotide
acaaaugcagucauauacaaauucagg

SEQ ID NO: 90926 - RNA, 27 nt, Artificial Sequence
  Description of Artificial Sequence: Synthetic oligonucleotide
gguaguaaacauucuacuaggauucuu

SEQ ID NO: 90927 - RNA, 27 nt, Artificial Sequence
  Description of Artificial Sequence: Synthetic oligonucleotide
uuucaucaaaaaauucuucccuuucug

SEQ ID NO: 90928 - RNA, 27 nt, Artificial Sequence
  Description of Artificial Sequence: Synthetic oligonucleotide
aaauucacacacuggcaugccgauagc

SEQ ID NO: 90929 - RNA, 27 nt, Artificial Sequence
  Description of Artificial Sequence: Synthetic oligonucleotide
acauacauugcucuacuaugaggugaa

SEQ ID NO: 90930 - RNA, 27 nt, Artificial Sequence
  Description of Artificial Sequence: Synthetic oligonucleotide
uauauaugugcuuuggcaauucuggug

SEQ ID NO: 90931 - RNA, 27 nt, Artificial Sequence
  Description of Artificial Sequence: Synthetic oligonucleotide
ggagaaacuauuacccagaucaccacu

SEQ ID NO: 90932 - RNA, 27 nt, Artificial Sequence
  Description of Artificial Sequence: Synthetic oligonucleotide
auuuggagaaacuauuacccagaucac

SEQ ID NO: 90933 - RNA, 27 nt, Artificial Sequence
  Description of Artificial Sequence: Synthetic oligonucleotide
uuucuaggaaguauucaucacauccac

SEQ ID NO: 90934 - RNA, 27 nt, Artificial Sequence
  Description of Artificial Sequence: Synthetic oligonucleotide
cauauaugguguagcuguggaaaugcg

SEQ ID NO: 90935 - RNA, 27 nt, Artificial Sequence
  Description of Artificial Sequence: Synthetic oligonucleotide
cuccauucauauaugguguagcugugg

SEQ ID NO: 90936 - RNA, 27 nt, Artificial Sequence
  Description of Artificial Sequence: Synthetic oligonucleotide
aucuucuucucguguaagaacugcagc

SEQ ID NO: 90937 - RNA, 27 nt, Artificial Sequence
  Description of Artificial Sequence: Synthetic oligonucleotide
ucccuguaaaugaucuucuucucgugu

SEQ ID NO: 90938 - RNA, 27 nt, Artificial Sequence
  Description of Artificial Sequence: Synthetic oligonucleotide
gucccuguaaaugaucuucuucucgug

SEQ ID NO: 90939 - RNA, 27 nt, Artificial Sequence
  Description of Artificial Sequence: Synthetic oligonucleotide
ucaggucccuguaaaugaucuucuucu

SEQ ID NO: 90940 - RNA, 27 nt, Artificial Sequence
  Description of Artificial Sequence: Synthetic oligonucleotide
gaugcagucaaacaccucuuccucugu

SEQ ID NO: 90941 - RNA, 27 nt, Artificial Sequence
  Description of Artificial Sequence: Synthetic oligonucleotide
cgaugcagucaaacaccucuuccucug

SEQ ID NO: 90942 - RNA, 27 nt, Artificial Sequence
  Description of Artificial Sequence: Synthetic oligonucleotide
cccugugaacucgcccucaaaguagcg

SEQ ID NO: 90943 - RNA, 27 nt, Artificial Sequence
  Description of Artificial Sequence: Synthetic oligonucleotide
ggacagaggugccaggagaugcccuca

SEQ ID NO: 90944 - RNA, 27 nt, Artificial Sequence
  Description of Artificial Sequence: Synthetic oligonucleotide
uuaaaaagacaaaccauaucacuccuu

SEQ ID NO: 90945 - RNA, 27 nt, Artificial Sequence
  Description of Artificial Sequence: Synthetic oligonucleotide
cuuaaaaagacaaaccauaucacuccu

SEQ ID NO: 90946 - RNA, 27 nt, Artificial Sequence
  Description of Artificial Sequence: Synthetic oligonucleotide
gacaaccuuuaggaucuuuacugcaac

SEQ ID NO: 90947 - RNA, 27 nt, Artificial Sequence
  Description of Artificial Sequence: Synthetic oligonucleotide
gucgacaaccuuuaggaucuuuacugc

SEQ ID NO: 90948 - RNA, 27 nt, Artificial Sequence
  Description of Artificial Sequence: Synthetic oligonucleotide
acaauugccagguuguccuuugucaug

SEQ ID NO: 90949 - RNA, 27 nt, Artificial Sequence
  Description of Artificial Sequence: Synthetic oligonucleotide
ccucgcaccacugggucacaauugcca

SEQ ID NO: 90950 - RNA, 27 nt, Artificial Sequence
  Description of Artificial Sequence: Synthetic oligonucleotide
auuucaugucucuauggaugauguucu

SEQ ID NO: 90951 - RNA, 27 nt, Artificial Sequence
  Description of Artificial Sequence: Synthetic oligonucleotide
uggagaaauauauuguuggauuucaug

SEQ ID NO: 90952 - RNA, 27 nt, Artificial Sequence
  Description of Artificial Sequence: Synthetic oligonucleotide
agccuucauggagaaauauauuguugg

SEQ ID NO: 90953 - RNA, 27 nt, Artificial Sequence
  Description of Artificial Sequence: Synthetic oligonucleotide
accacuccagcgugacuuuacuguugc

SEQ ID NO: 90954 - RNA, 27 nt, Artificial Sequence
  Description of Artificial Sequence: Synthetic oligonucleotide
ccucucuuccuuuacuuucuucacaca

SEQ ID NO: 90955 - RNA, 27 nt, Artificial Sequence
  Description of Artificial Sequence: Synthetic oligonucleotide
gcccgaugcaaggauggcucggaagcg

SEQ ID NO: 90956 - RNA, 27 nt, Artificial Sequence
  Description of Artificial Sequence: Synthetic oligonucleotide
cacaguaggauauucaaccuccauuuc

SEQ ID NO: 90957 - RNA, 27 nt, Artificial Sequence
  Description of Artificial Sequence: Synthetic oligonucleotide
uuacacaguaggauauucaaccuccau

SEQ ID NO: 90958 - RNA, 27 nt, Artificial Sequence
  Description of Artificial Sequence: Synthetic oligonucleotide
uacacuacaagggaaaacucaaaaucu

SEQ ID NO: 90959 - RNA, 27 nt, Artificial Sequence
  Description of Artificial Sequence: Synthetic oligonucleotide
caaucaacaaagaacaaacaggauaaa

SEQ ID NO: 90960 - RNA, 27 nt, Artificial Sequence
  Description of Artificial Sequence: Synthetic oligonucleotide
uuucaaucaacaaagaacaaacaggau

SEQ ID NO: 90961 - RNA, 27 nt, Artificial Sequence
  Description of Artificial Sequence: Synthetic oligonucleotide
auggaagaaaaagaaggcuguagagaa

SEQ ID NO: 90962 - RNA, 27 nt, Artificial Sequence
  Description of Artificial Sequence: Synthetic oligonucleotide
uagaaggaagauuagcuauggaagaaa

SEQ ID NO: 90963 - RNA, 27 nt, Artificial Sequence
  Description of Artificial Sequence: Synthetic oligonucleotide
augaagcauucaacaggaagauuauuu

SEQ ID NO: 90964 - RNA, 27 nt, Artificial Sequence
  Description of Artificial Sequence: Synthetic oligonucleotide
caugaagcauucaacaggaagauuauu

SEQ ID NO: 90965 - RNA, 27 nt, Artificial Sequence
  Description of Artificial Sequence: Synthetic oligonucleotide
ucaaaguagaauucaagucaugaagca

SEQ ID NO: 90966 - RNA, 27 nt, Artificial Sequence
  Description of Artificial Sequence: Synthetic oligonucleotide
gucuguaguugcuucucucccucuuag

SEQ ID NO: 90967 - RNA, 27 nt, Artificial Sequence
  Description of Artificial Sequence: Synthetic oligonucleotide
guugaccuuggucugguaggagacggc

SEQ ID NO: 90968 - RNA, 27 nt, Artificial Sequence
  Description of Artificial Sequence: Synthetic oligonucleotide
gucgagauagucgggccgauugaucuc

SEQ ID NO: 90969 - RNA, 27 nt, Artificial Sequence
  Description of Artificial Sequence: Synthetic oligonucleotide
guuugggaagguuggauguucguccuc

SEQ ID NO: 90970 - RNA, 27 nt, Artificial Sequence
  Description of Artificial Sequence: Synthetic oligonucleotide
aguucuaagcuuggguuccgacccuaa

SEQ ID NO: 90971 - RNA, 27 nt, Artificial Sequence
  Description of Artificial Sequence: Synthetic oligonucleotide
uuaaaguucuaagcuuggguuccgacc

SEQ ID NO: 90972 - RNA, 27 nt, Artificial Sequence
  Description of Artificial Sequence: Synthetic oligonucleotide
guugcuuaaaguucuaagcuuggguuc

SEQ ID NO: 90973 - RNA, 27 nt, Artificial Sequence
  Description of Artificial Sequence: Synthetic oligonucleotide
gugguggucuuguugcuuaaaguucua

SEQ ID NO: 90974 - RNA, 27 nt, Artificial Sequence
  Description of Artificial Sequence: Synthetic oligonucleotide
acuuuauuucucgccacugaauaguag

SEQ ID NO: 90975 - RNA, 27 nt, Artificial Sequence
  Description of Artificial Sequence: Synthetic oligonucleotide
aacuuuauuucucgccacugaauagua

SEQ ID NO: 90976 - RNA, 27 nt, Artificial Sequence
  Description of Artificial Sequence: Synthetic oligonucleotide
ggaucauuuccuguuaucuguguuugu

SEQ ID NO: 90977 - RNA, 27 nt, Artificial Sequence
  Description of Artificial Sequence: Synthetic oligonucleotide
guuucauuucuucucuuuucuuaaggc

SEQ ID NO: 90978 - RNA, 27 nt, Artificial Sequence
  Description of Artificial Sequence: Synthetic oligonucleotide
ggaggauggaaacacacuccuucaguu

SEQ ID NO: 90979 - RNA, 27 nt, Artificial Sequence
  Description of Artificial Sequence: Synthetic oligonucleotide
ucaaagauuuucagucccgcggugaca

SEQ ID NO: 90980 - RNA, 27 nt, Artificial Sequence
  Description of Artificial Sequence: Synthetic oligonucleotide
ccugaacggcacgcuuauuucugcugu

SEQ ID NO: 90981 - RNA, 27 nt, Artificial Sequence
  Description of Artificial Sequence: Synthetic oligonucleotide
cuucuggacccugaacggcacgcuuau

SEQ ID NO: 90982 - RNA, 27 nt, Artificial Sequence
  Description of Artificial Sequence: Synthetic oligonucleotide
caagcagucuugagugacuguuucuuc

SEQ ID NO: 90983 - RNA, 27 nt, Artificial Sequence
  Description of Artificial Sequence: Synthetic oligonucleotide
ccaaagacauggaccuucuuccucuga

SEQ ID NO: 90984 - RNA, 27 nt, Artificial Sequence
  Description of Artificial Sequence: Synthetic oligonucleotide
guguuucaggcauauuuugaauacauc

SEQ ID NO: 90985 - RNA, 27 nt, Artificial Sequence
  Description of Artificial Sequence: Synthetic oligonucleotide
gagguacagagaaagggaggaaaauag

SEQ ID NO: 90986 - RNA, 27 nt, Artificial Sequence
  Description of Artificial Sequence: Synthetic oligonucleotide
ucuugucuugcucuaucuuucuuuggu

SEQ ID NO: 90987 - RNA, 27 nt, Artificial Sequence
  Description of Artificial Sequence: Synthetic oligonucleotide
uuucuugucuugcucuaucuuucuuug

SEQ ID NO: 90988 - RNA, 27 nt, Artificial Sequence
  Description of Artificial Sequence: Synthetic oligonucleotide
ggaucuuguacaaacaaaugcuuucuc

SEQ ID NO: 90989 - RNA, 27 nt, Artificial Sequence
  Description of Artificial Sequence: Synthetic oligonucleotide
ucugcaaguacguucguuuaacucaag

SEQ ID NO: 90990 - RNA, 27 nt, Artificial Sequence
  Description of Artificial Sequence: Synthetic oligonucleotide
ucuguaucgaucguucuguaucagucu

SEQ ID NO: 90991 - RNA, 27 nt, Artificial Sequence
  Description of Artificial Sequence: Synthetic oligonucleotide
auuuauuuuuauauauauauaauauau

SEQ ID NO: 90992 - RNA, 27 nt, Artificial Sequence
  Description of Artificial Sequence: Synthetic oligonucleotide
auauuuauuuuuauauauauauaauau

SEQ ID NO: 90993 - RNA, 27 nt, Artificial Sequence
  Description of Artificial Sequence: Synthetic oligonucleotide
cacagcagucaaauacauccagugaag

SEQ ID NO: 90994 - RNA, 27 nt, Artificial Sequence
  Description of Artificial Sequence: Synthetic oligonucleotide
gucucucaucuccuccucuucccuguc

SEQ ID NO: 90995 - RNA, 27 nt, Artificial Sequence
  Description of Artificial Sequence: Synthetic oligonucleotide
ccaagugggacaaaaaaaagaucaugc

SEQ ID NO: 90996 - RNA, 14 nt, Artificial Sequence
  Description of Artificial Sequence: Synthetic oligonucleotide
guauuuugaugagg

SEQ ID NO: 90997 - RNA, 12 nt, Artificial Sequence
  Description of Artificial Sequence: Synthetic oligonucleotide
ggcccagaugau

SEQ ID NO: 90998 - RNA, 14 nt, Artificial Sequence
  Description of Artificial Sequence: Synthetic oligonucleotide
gggaagaaaacuau

SEQ ID NO: 90999 - RNA, 15 nt, Artificial Sequence
  Description of Artificial Sequence: Synthetic oligonucleotide
guuuuaauuuauuuc

SEQ ID NO: 91000 - RNA, 12 nt, Artificial Sequence
  Description of Artificial Sequence: Synthetic oligonucleotide
acguagggaaau

SEQ ID NO: 91001 - RNA, 12 nt, Artificial Sequence
  Description of Artificial Sequence: Synthetic oligonucleotide
ccaggguuuacc

SEQ ID NO: 91002 - RNA, 11 nt, Artificial Sequence
  Description of Artificial Sequence: Synthetic oligonucleotide
agcaagguuua

SEQ ID NO: 91003 - RNA, 12 nt, Artificial Sequence
  Description of Artificial Sequence: Synthetic oligonucleotide
uguauuauguug

SEQ ID NO: 91004 - RNA, 15 nt, Artificial Sequence
  Description of Artificial Sequence: Synthetic oligonucleotide
uuuuaaucuuuguga

SEQ ID NO: 91005 - RNA, 14 nt, Artificial Sequence
  Description of Artificial Sequence: Synthetic oligonucleotide
uuaaucuuugugac

SEQ ID NO: 91006 - RNA, 13 nt, Artificial Sequence
  Description of Artificial Sequence: Synthetic oligonucleotide
gcugcuuaugucu

SEQ ID NO: 91007 - RNA, 14 nt, Artificial Sequence
  Description of Artificial Sequence: Synthetic oligonucleotide
aaguguuucagaag

SEQ ID NO: 91008 - RNA, 13 nt, Artificial Sequence
  Description of Artificial Sequence: Synthetic oligonucleotide
gaccaucaauaag

SEQ ID NO: 91009 - RNA, 13 nt, Artificial Sequence
  Description of Artificial Sequence: Synthetic oligonucleotide
ccaucaauaagga

SEQ ID NO: 91010 - RNA, 14 nt, Artificial Sequence
  Description of Artificial Sequence: Synthetic oligonucleotide
ucaauaaggaagaa

SEQ ID NO: 91011 - RNA, 14 nt, Artificial Sequence
  Description of Artificial Sequence: Synthetic oligonucleotide
aauaaggaagaagc

SEQ ID NO: 91012 - RNA, 13 nt, Artificial Sequence
  Description of Artificial Sequence: Synthetic oligonucleotide
aggaagaagcccu

SEQ ID NO: 91013 - RNA, 13 nt, Artificial Sequence
  Description of Artificial Sequence: Synthetic oligonucleotide
gcauaacuaaagg

SEQ ID NO: 91014 - RNA, 14 nt, Artificial Sequence
  Description of Artificial Sequence: Synthetic oligonucleotide
cauaacuaaaggug

SEQ ID NO: 91015 - RNA, 12 nt, Artificial Sequence
  Description of Artificial Sequence: Synthetic oligonucleotide
cuacaucacgcc

SEQ ID NO: 91016 - RNA, 12 nt, Artificial Sequence
  Description of Artificial Sequence: Synthetic oligonucleotide
acuggauuuaag

SEQ ID NO: 91017 - RNA, 12 nt, Artificial Sequence
  Description of Artificial Sequence: Synthetic oligonucleotide
cuggauuuaagc

SEQ ID NO: 91018 - RNA, 13 nt, Artificial Sequence
  Description of Artificial Sequence: Synthetic oligonucleotide
gauuuaagcagag

SEQ ID NO: 91019 - RNA, 13 nt, Artificial Sequence
  Description of Artificial Sequence: Synthetic oligonucleotide
auuuaagcagagu

SEQ ID NO: 91020 - RNA, 13 nt, Artificial Sequence
  Description of Artificial Sequence: Synthetic oligonucleotide
uuaagcagaguuc

SEQ ID NO: 91021 - RNA, 13 nt, Artificial Sequence
  Description of Artificial Sequence: Synthetic oligonucleotide
uaagcagaguuca

SEQ ID NO: 91022 - RNA, 14 nt, Artificial Sequence
  Description of Artificial Sequence: Synthetic oligonucleotide
agcagaguucaaaa

SEQ ID NO: 91023 - RNA, 12 nt, Artificial Sequence
  Description of Artificial Sequence: Synthetic oligonucleotide
cucagggucuga

SEQ ID NO: 91024 - RNA, 13 nt, Artificial Sequence
  Description of Artificial Sequence: Synthetic oligonucleotide
caagcaacuacau

SEQ ID NO: 91025 - RNA, 12 nt, Artificial Sequence
  Description of Artificial Sequence: Synthetic oligonucleotide
aucaauggcagc

SEQ ID NO: 91026 - RNA, 11 nt, Artificial Sequence
  Description of Artificial Sequence: Synthetic oligonucleotide
uuccagcccac

SEQ ID NO: 91027 - RNA, 12 nt, Artificial Sequence
  Description of Artificial Sequence: Synthetic oligonucleotide
cagcugagaaug

SEQ ID NO: 91028 - RNA, 13 nt, Artificial Sequence
  Description of Artificial Sequence: Synthetic oligonucleotide
aacguaucuccua

SEQ ID NO: 91029 - RNA, 14 nt, Artificial Sequence
  Description of Artificial Sequence: Synthetic oligonucleotide
ccuaaaauaauuuc

SEQ ID NO: 91030 - RNA, 13 nt, Artificial Sequence
  Description of Artificial Sequence: Synthetic oligonucleotide
uggaagauucagc

SEQ ID NO: 91031 - RNA, 12 nt, Artificial Sequence
  Description of Artificial Sequence: Synthetic oligonucleotide
uuaaacucuccu

SEQ ID NO: 91032 - RNA, 12 nt, Artificial Sequence
  Description of Artificial Sequence: Synthetic oligonucleotide
cagccuacaguu

SEQ ID NO: 91033 - RNA, 13 nt, Artificial Sequence
  Description of Artificial Sequence: Synthetic oligonucleotide
guuauguucaguc

SEQ ID NO: 91034 - RNA, 13 nt, Artificial Sequence
  Description of Artificial Sequence: Synthetic oligonucleotide
cacauacaaaaug

SEQ ID NO: 91035 - RNA, 9 nt, Artificial Sequence
  Description of Artificial Sequence: Synthetic oligonucleotide
uccuuuugc

SEQ ID NO: 91036 - RNA, 12 nt, Artificial Sequence
  Description of Artificial Sequence: Synthetic oligonucleotide
ugaccugugaag

SEQ ID NO: 91037 - RNA, 12 nt, Artificial Sequence
  Description of Artificial Sequence: Synthetic oligonucleotide
cuaucucacaca

SEQ ID NO: 91038 - RNA, 13 nt, Artificial Sequence
  Description of Artificial Sequence: Synthetic oligonucleotide
uguccucaauugu

SEQ ID NO: 91039 - RNA, 12 nt, Artificial Sequence
  Description of Artificial Sequence: Synthetic oligonucleotide
aaaccguagcug

SEQ ID NO: 91040 - RNA, 12 nt, Artificial Sequence
  Description of Artificial Sequence: Synthetic oligonucleotide
uagcuggcaagc

SEQ ID NO: 91041 - RNA, 14 nt, Artificial Sequence
  Description of Artificial Sequence: Synthetic oligonucleotide
uuguaugguuaaaa

SEQ ID NO: 91042 - RNA, 14 nt, Artificial Sequence
  Description of Artificial Sequence: Synthetic oligonucleotide
ugguuaaaagaugg

SEQ ID NO: 91043 - RNA, 13 nt, Artificial Sequence
  Description of Artificial Sequence: Synthetic oligonucleotide
cagggaauuauac

SEQ ID NO: 91044 - RNA, 12 nt, Artificial Sequence
  Description of Artificial Sequence: Synthetic oligonucleotide
acaaucuugcug

SEQ ID NO: 91045 - RNA, 13 nt, Artificial Sequence
  Description of Artificial Sequence: Synthetic oligonucleotide
ccaauaaugaaga

SEQ ID NO: 91046 - RNA, 13 nt, Artificial Sequence
  Description of Artificial Sequence: Synthetic oligonucleotide
acuuuggauguuc

SEQ ID NO: 91047 - RNA, 12 nt, Artificial Sequence
  Description of Artificial Sequence: Synthetic oligonucleotide
aaugcuuccacu

SEQ ID NO: 91048 - RNA, 11 nt, Artificial Sequence
  Description of Artificial Sequence: Synthetic oligonucleotide
gagaaaguuug

SEQ ID NO: 91049 - RNA, 11 nt, Artificial Sequence
  Description of Artificial Sequence: Synthetic oligonucleotide
aaagaacuacu

SEQ ID NO: 91050 - RNA, 12 nt, Artificial Sequence
  Description of Artificial Sequence: Synthetic oligonucleotide
uuagaaauacgg

SEQ ID NO: 91051 - RNA, 12 nt, Artificial Sequence
  Description of Artificial Sequence: Synthetic oligonucleotide
aacauggguaca

SEQ ID NO: 91052 - RNA, 14 nt, Artificial Sequence
  Description of Artificial Sequence: Synthetic oligonucleotide
aaagacacagaaga

SEQ ID NO: 91053 - RNA, 11 nt, Artificial Sequence
  Description of Artificial Sequence: Synthetic oligonucleotide
uaguagggagg

SEQ ID NO: 91054 - RNA, 12 nt, Artificial Sequence
  Description of Artificial Sequence: Synthetic oligonucleotide
gccuucugcagc

SEQ ID NO: 91055 - RNA, 10 nt, Artificial Sequence
  Description of Artificial Sequence: Synthetic oligonucleotide
ggucugguac

SEQ ID NO: 91056 - RNA, 12 nt, Artificial Sequence
  Description of Artificial Sequence: Synthetic oligonucleotide
cuaguccuuccg

SEQ ID NO: 91057 - RNA, 12 nt, Artificial Sequence
  Description of Artificial Sequence: Synthetic oligonucleotide
ccagugaauauu

SEQ ID NO: 91058 - RNA, 13 nt, Artificial Sequence
  Description of Artificial Sequence: Synthetic oligonucleotide
augaauucaaguu

SEQ ID NO: 91059 - RNA, 12 nt, Artificial Sequence
  Description of Artificial Sequence: Synthetic oligonucleotide
caggacacagau

SEQ ID NO: 91060 - RNA, 12 nt, Artificial Sequence
  Description of Artificial Sequence: Synthetic oligonucleotide
cucaaagcacag

SEQ ID NO: 91061 - RNA, 10 nt, Artificial Sequence
  Description of Artificial Sequence: Synthetic oligonucleotide
accacugcca

SEQ ID NO: 91062 - RNA, 13 nt, Artificial Sequence
  Description of Artificial Sequence: Synthetic oligonucleotide
gaaacuacuagug

SEQ ID NO: 91063 - RNA, 12 nt, Artificial Sequence
  Description of Artificial Sequence: Synthetic oligonucleotide
aagucggacagc

SEQ ID NO: 91064 - RNA, 13 nt, Artificial Sequence
  Description of Artificial Sequence: Synthetic oligonucleotide
gaaagcgaaaaau

SEQ ID NO: 91065 - RNA, 13 nt, Artificial Sequence
  Description of Artificial Sequence: Synthetic oligonucleotide
cccucugauuuag

SEQ ID NO: 91066 - RNA, 12 nt, Artificial Sequence
  Description of Artificial Sequence: Synthetic oligonucleotide
ugagcuauuuaa

SEQ ID NO: 91067 - RNA, 13 nt, Artificial Sequence
  Description of Artificial Sequence: Synthetic oligonucleotide
aaaaggugaaaaa

SEQ ID NO: 91068 - RNA, 14 nt, Artificial Sequence
  Description of Artificial Sequence: Synthetic oligonucleotide
gaaaaagcacuauu

SEQ ID NO: 91069 - RNA, 12 nt, Artificial Sequence
  Description of Artificial Sequence: Synthetic oligonucleotide
ggcugaaaagaa

SEQ ID NO: 91070 - RNA, 12 nt, Artificial Sequence
  Description of Artificial Sequence: Synthetic oligonucleotide
uaaacccuuaua

SEQ ID NO: 91071 - RNA, 13 nt, Artificial Sequence
  Description of Artificial Sequence: Synthetic oligonucleotide
cauacuauuagcc

SEQ ID NO: 91072 - RNA, 12 nt, Artificial Sequence
  Description of Artificial Sequence: Synthetic oligonucleotide
gacagaagcauu

SEQ ID NO: 91073 - RNA, 14 nt, Artificial Sequence
  Description of Artificial Sequence: Synthetic oligonucleotide
agagcaaauaagau

SEQ ID NO: 91074 - RNA, 14 nt, Artificial Sequence
  Description of Artificial Sequence: Synthetic oligonucleotide
ccaacauuuuucuc

SEQ ID NO: 91075 - RNA, 15 nt, Artificial Sequence
  Description of Artificial Sequence: Synthetic oligonucleotide
uuaaguaugagaaaa

SEQ ID NO: 91076 - RNA, 14 nt, Artificial Sequence
  Description of Artificial Sequence: Synthetic oligonucleotide
caggaauaaagaug

SEQ ID NO: 91077 - RNA, 13 nt, Artificial Sequence
  Description of Artificial Sequence: Synthetic oligonucleotide
aauuugaaugacc

SEQ ID NO: 91078 - RNA, 14 nt, Artificial Sequence
  Description of Artificial Sequence: Synthetic oligonucleotide
auguauaaagauag

SEQ ID NO: 91079 - RNA, 12 nt, Artificial Sequence
  Description of Artificial Sequence: Synthetic oligonucleotide
ggcuguaacuau

SEQ ID NO: 91080 - RNA, 11 nt, Artificial Sequence
  Description of Artificial Sequence: Synthetic oligonucleotide
ucugugaagug

SEQ ID NO: 91081 - RNA, 14 nt, Artificial Sequence
  Description of Artificial Sequence: Synthetic oligonucleotide
ccuuuaaggaaaug

SEQ ID NO: 91082 - RNA, 13 nt, Artificial Sequence
  Description of Artificial Sequence: Synthetic oligonucleotide
aaggauacaaaaa

SEQ ID NO: 91083 - RNA, 12 nt, Artificial Sequence
  Description of Artificial Sequence: Synthetic oligonucleotide
agaugcaauuug

SEQ ID NO: 91084 - RNA, 12 nt, Artificial Sequence
  Description of Artificial Sequence: Synthetic oligonucleotide
guucaaaacgaa

SEQ ID NO: 91085 - RNA, 11 nt, Artificial Sequence
  Description of Artificial Sequence: Synthetic oligonucleotide
gugaaaccuca

SEQ ID NO: 91086 - RNA, 13 nt, Artificial Sequence
  Description of Artificial Sequence: Synthetic oligonucleotide
acgaaagagaagc

SEQ ID NO: 91087 - RNA, 12 nt, Artificial Sequence
  Description of Artificial Sequence: Synthetic oligonucleotide
cuccacaagcgc

SEQ ID NO: 91088 - RNA, 14 nt, Artificial Sequence
  Description of Artificial Sequence: Synthetic oligonucleotide
gagaagauuccaaa

SEQ ID NO: 91089 - RNA, 13 nt, Artificial Sequence
  Description of Artificial Sequence: Synthetic oligonucleotide
aaucuggauucaa

SEQ ID NO: 91090 - RNA, 13 nt, Artificial Sequence
  Description of Artificial Sequence: Synthetic oligonucleotide
agaacagauuuga

SEQ ID NO: 91091 - RNA, 11 nt, Artificial Sequence
  Description of Artificial Sequence: Synthetic oligonucleotide
ccagagcugug

SEQ ID NO: 91092 - RNA, 12 nt, Artificial Sequence
  Description of Artificial Sequence: Synthetic oligonucleotide
ccucagauuguu

SEQ ID NO: 91093 - RNA, 12 nt, Artificial Sequence
  Description of Artificial Sequence: Synthetic oligonucleotide
cuauuuuaauua

SEQ ID NO: 91094 - RNA, 13 nt, Artificial Sequence
  Description of Artificial Sequence: Synthetic oligonucleotide
uuuaauuuauuaa

SEQ ID NO: 91095 - RNA, 12 nt, Artificial Sequence
  Description of Artificial Sequence: Synthetic oligonucleotide
augcaguuugaa

SEQ ID NO: 91096 - RNA, 11 nt, Artificial Sequence
  Description of Artificial Sequence: Synthetic oligonucleotide
caugcugcugg

SEQ ID NO: 91097 - RNA, 13 nt, Artificial Sequence
  Description of Artificial Sequence: Synthetic oligonucleotide
agaugugcauuuc

SEQ ID NO: 91098 - RNA, 12 nt, Artificial Sequence
  Description of Artificial Sequence: Synthetic oligonucleotide
ucaaaaccugug

SEQ ID NO: 91099 - RNA, 11 nt, Artificial Sequence
  Description of Artificial Sequence: Synthetic oligonucleotide
gaaugugggua

SEQ ID NO: 91100 - RNA, 10 nt, Artificial Sequence
  Description of Artificial Sequence: Synthetic oligonucleotide
auguggguag

SEQ ID NO: 91101 - RNA, 13 nt, Artificial Sequence
  Description of Artificial Sequence: Synthetic oligonucleotide
ugaaaaugagcau

SEQ ID NO: 91102 - RNA, 13 nt, Artificial Sequence
  Description of Artificial Sequence: Synthetic oligonucleotide
uugcuuuucaugu

SEQ ID NO: 91103 - RNA, 12 nt, Artificial Sequence
  Description of Artificial Sequence: Synthetic oligonucleotide
uguauuucuaua

SEQ ID NO: 91104 - RNA, 13 nt, Artificial Sequence
  Description of Artificial Sequence: Synthetic oligonucleotide
uuugauuaauguu

SEQ ID NO: 91105 - RNA, 12 nt, Artificial Sequence
  Description of Artificial Sequence: Synthetic oligonucleotide
caacguguauag

SEQ ID NO: 91106 - RNA, 12 nt, Artificial Sequence
  Description of Artificial Sequence: Synthetic oligonucleotide
cauauccuuggc

SEQ ID NO: 91107 - RNA, 13 nt, Artificial Sequence
  Description of Artificial Sequence: Synthetic oligonucleotide
uacuaacaucugg

SEQ ID NO: 91108 - RNA, 11 nt, Artificial Sequence
  Description of Artificial Sequence: Synthetic oligonucleotide
cauaaguugug

SEQ ID NO: 91109 - RNA, 12 nt, Artificial Sequence
  Description of Artificial Sequence: Synthetic oligonucleotide
gcaucauuuugg

SEQ ID NO: 91110 - RNA, 10 nt, Artificial Sequence
  Description of Artificial Sequence: Synthetic oligonucleotide
gcucuucuua

SEQ ID NO: 91111 - RNA, 10 nt, Artificial Sequence
  Description of Artificial Sequence: Synthetic oligonucleotide
agauuagguc

SEQ ID NO: 91112 - RNA, 12 nt, Artificial Sequence
  Description of Artificial Sequence: Synthetic oligonucleotide
auggaauugaaa

SEQ ID NO: 91113 - RNA, 13 nt, Artificial Sequence
  Description of Artificial Sequence: Synthetic oligonucleotide
cacacucauuccu

SEQ ID NO: 91114 - RNA, 12 nt, Artificial Sequence
  Description of Artificial Sequence: Synthetic oligonucleotide
uguagagguaac

SEQ ID NO: 91115 - RNA, 11 nt, Artificial Sequence
  Description of Artificial Sequence: Synthetic oligonucleotide
caaccacaugc

SEQ ID NO: 91116 - RNA, 12 nt, Artificial Sequence
  Description of Artificial Sequence: Synthetic oligonucleotide
ucggaaacaagu

SEQ ID NO: 91117 - RNA, 11 nt, Artificial Sequence
  Description of Artificial Sequence: Synthetic oligonucleotide
acucccaauaa

SEQ ID NO: 91118 - RNA, 13 nt, Artificial Sequence
  Description of Artificial Sequence: Synthetic oligonucleotide
aaugcuaagaaau

SEQ ID NO: 91119 - RNA, 11 nt, Artificial Sequence
  Description of Artificial Sequence: Synthetic oligonucleotide
gucuuucucua

SEQ ID NO: 91120 - RNA, 11 nt, Artificial Sequence
  Description of Artificial Sequence: Synthetic oligonucleotide
ugaauuucagg

SEQ ID NO: 91121 - RNA, 13 nt, Artificial Sequence
  Description of Artificial Sequence: Synthetic oligonucleotide
cgauucccucuca

SEQ ID NO: 91122 - RNA, 11 nt, Artificial Sequence
  Description of Artificial Sequence: Synthetic oligonucleotide
aggaaagugaa

SEQ ID NO: 91123 - RNA, 12 nt, Artificial Sequence
  Description of Artificial Sequence: Synthetic oligonucleotide
gaggcugcaugc

SEQ ID NO: 91124 - RNA, 11 nt, Artificial Sequence
  Description of Artificial Sequence: Synthetic oligonucleotide
ucucugaacag

SEQ ID NO: 91125 - RNA, 12 nt, Artificial Sequence
  Description of Artificial Sequence: Synthetic oligonucleotide
aacuuggcugua

SEQ ID NO: 91126 - RNA, 12 nt, Artificial Sequence
  Description of Artificial Sequence: Synthetic oligonucleotide
agaagccaaaau

SEQ ID NO: 91127 - RNA, 14 nt, Artificial Sequence
  Description of Artificial Sequence: Synthetic oligonucleotide
auuaaaagaagucc

SEQ ID NO: 91128 - RNA, 14 nt, Artificial Sequence
  Description of Artificial Sequence: Synthetic oligonucleotide
gaauccggauuauc

SEQ ID NO: 91129 - RNA, 12 nt, Artificial Sequence
  Description of Artificial Sequence: Synthetic oligonucleotide
aaugugacauca

SEQ ID NO: 91130 - RNA, 13 nt, Artificial Sequence
  Description of Artificial Sequence: Synthetic oligonucleotide
caucaaagcaagu

SEQ ID NO: 91131 - RNA, 11 nt, Artificial Sequence
  Description of Artificial Sequence: Synthetic oligonucleotide
agagagagaaa

SEQ ID NO: 91132 - RNA, 13 nt, Artificial Sequence
  Description of Artificial Sequence: Synthetic oligonucleotide
ucgcuguaguauu

SEQ ID NO: 91133 - RNA, 14 nt, Artificial Sequence
  Description of Artificial Sequence: Synthetic oligonucleotide
cgcuguaguauuua

SEQ ID NO: 91134 - RNA, 13 nt, Artificial Sequence
  Description of Artificial Sequence: Synthetic oligonucleotide
auuuaagcccaua

SEQ ID NO: 91135 - RNA, 15 nt, Artificial Sequence
  Description of Artificial Sequence: Synthetic oligonucleotide
auuaaaauaaacaug

SEQ ID NO: 91136 - RNA, 12 nt, Artificial Sequence
  Description of Artificial Sequence: Synthetic oligonucleotide
cuguucugaucg

SEQ ID NO: 91137 - RNA, 16 nt, Artificial Sequence
  Description of Artificial Sequence: Synthetic oligonucleotide
aaauaauuugaacuuu

SEQ ID NO: 91138 - RNA, 12 nt, Artificial Sequence
  Description of Artificial Sequence: Synthetic oligonucleotide
ugcgaccuuaau

SEQ ID NO: 91139 - RNA, 11 nt, Artificial Sequence
  Description of Artificial Sequence: Synthetic oligonucleotide
cugagaaagcu

SEQ ID NO: 91140 - RNA, 13 nt, Artificial Sequence
  Description of Artificial Sequence: Synthetic oligonucleotide
aguaaagaugcua

SEQ ID NO: 91141 - RNA, 12 nt, Artificial Sequence
  Description of Artificial Sequence: Synthetic oligonucleotide
cugcuuaauugc

SEQ ID NO: 91142 - RNA, 14 nt, Artificial Sequence
  Description of Artificial Sequence: Synthetic oligonucleotide
uaccauaugaauga

SEQ ID NO: 91143 - RNA, 12 nt, Artificial Sequence
  Description of Artificial Sequence: Synthetic oligonucleotide
aacuuucuuauc

SEQ ID NO: 91144 - RNA, 13 nt, Artificial Sequence
  Description of Artificial Sequence: Synthetic oligonucleotide
ccuugcaugacau

SEQ ID NO: 91145 - RNA, 14 nt, Artificial Sequence
  Description of Artificial Sequence: Synthetic oligonucleotide
ugaauuuguauaug

SEQ ID NO: 91146 - RNA, 12 nt, Artificial Sequence
  Description of Artificial Sequence: Synthetic oligonucleotide
gaauccuaguag

SEQ ID NO: 91147 - RNA, 10 nt, Artificial Sequence
  Description of Artificial Sequence: Synthetic oligonucleotide
gaaagggaag

SEQ ID NO: 91148 - RNA, 11 nt, Artificial Sequence
  Description of Artificial Sequence: Synthetic oligonucleotide
uaucggcaugc

SEQ ID NO: 91149 - RNA, 12 nt, Artificial Sequence
  Description of Artificial Sequence: Synthetic oligonucleotide
caccucauagua

SEQ ID NO: 91150 - RNA, 11 nt, Artificial Sequence
  Description of Artificial Sequence: Synthetic oligonucleotide
ccagaauugcc

SEQ ID NO: 91151 - RNA, 11 nt, Artificial Sequence
  Description of Artificial Sequence: Synthetic oligonucleotide
uggugaucugg

SEQ ID NO: 91152 - RNA, 12 nt, Artificial Sequence
  Description of Artificial Sequence: Synthetic oligonucleotide
gaucuggguaau

SEQ ID NO: 91153 - RNA, 12 nt, Artificial Sequence
  Description of Artificial Sequence: Synthetic oligonucleotide
ggaugugaugaa

SEQ ID NO: 91154 - RNA, 12 nt, Artificial Sequence
  Description of Artificial Sequence: Synthetic oligonucleotide
cauuuccacagc

SEQ ID NO: 91155 - RNA, 11 nt, Artificial Sequence
  Description of Artificial Sequence: Synthetic oligonucleotide
acagcuacacc

SEQ ID NO: 91156 - RNA, 12 nt, Artificial Sequence
  Description of Artificial Sequence: Synthetic oligonucleotide
ugcaguucuuac

SEQ ID NO: 91157 - RNA, 12 nt, Artificial Sequence
  Description of Artificial Sequence: Synthetic oligonucleotide
acgagaagaaga

SEQ ID NO: 91158 - RNA, 12 nt, Artificial Sequence
  Description of Artificial Sequence: Synthetic oligonucleotide
cgagaagaagau

SEQ ID NO: 91159 - RNA, 15 nt, Artificial Sequence
  Description of Artificial Sequence: Synthetic oligonucleotide
aagaagaucauuuac

SEQ ID NO: 91160 - RNA, 11 nt, Artificial Sequence
  Description of Artificial Sequence: Synthetic oligonucleotide
agaggaagagg

SEQ ID NO: 91161 - RNA, 12 nt, Artificial Sequence
  Description of Artificial Sequence: Synthetic oligonucleotide
gaggaagaggug

SEQ ID NO: 91162 - RNA, 13 nt, Artificial Sequence
  Description of Artificial Sequence: Synthetic oligonucleotide
cuacuuugagggc

SEQ ID NO: 91163 - RNA, 12 nt, Artificial Sequence
  Description of Artificial Sequence: Synthetic oligonucleotide
agggcaucuccu

SEQ ID NO: 91164 - RNA, 10 nt, Artificial Sequence
  Description of Artificial Sequence: Synthetic oligonucleotide
ggagugauau

SEQ ID NO: 91165 - RNA, 11 nt, Artificial Sequence
  Description of Artificial Sequence: Synthetic oligonucleotide
gagugauaugg

SEQ ID NO: 91166 - RNA, 12 nt, Artificial Sequence
  Description of Artificial Sequence: Synthetic oligonucleotide
ugcaguaaagau

SEQ ID NO: 91167 - RNA, 13 nt, Artificial Sequence
  Description of Artificial Sequence: Synthetic oligonucleotide
aguaaagauccua

SEQ ID NO: 91168 - RNA, 12 nt, Artificial Sequence
  Description of Artificial Sequence: Synthetic oligonucleotide
ugacaaaggaca

SEQ ID NO: 91169 - RNA, 13 nt, Artificial Sequence
  Description of Artificial Sequence: Synthetic oligonucleotide
gcaauugugaccc

SEQ ID NO: 91170 - RNA, 12 nt, Artificial Sequence
  Description of Artificial Sequence: Synthetic oligonucleotide
aacaucauccau

SEQ ID NO: 91171 - RNA, 12 nt, Artificial Sequence
  Description of Artificial Sequence: Synthetic oligonucleotide
ugaaauccaaca

SEQ ID NO: 91172 - RNA, 15 nt, Artificial Sequence
  Description of Artificial Sequence: Synthetic oligonucleotide
aacaauauauuucuc

SEQ ID NO: 91173 - RNA, 14 nt, Artificial Sequence
  Description of Artificial Sequence: Synthetic oligonucleotide
aacaguaaagucac

SEQ ID NO: 91174 - RNA, 14 nt, Artificial Sequence
  Description of Artificial Sequence: Synthetic oligonucleotide
ugugaagaaaguaa

SEQ ID NO: 91175 - RNA, 13 nt, Artificial Sequence
  Description of Artificial Sequence: Synthetic oligonucleotide
cuuccgagccauc

SEQ ID NO: 91176 - RNA, 12 nt, Artificial Sequence
  Description of Artificial Sequence: Synthetic oligonucleotide
aauggagguuga

SEQ ID NO: 91177 - RNA, 12 nt, Artificial Sequence
  Description of Artificial Sequence: Synthetic oligonucleotide
ggagguugaaua

SEQ ID NO: 91178 - RNA, 13 nt, Artificial Sequence
  Description of Artificial Sequence: Synthetic oligonucleotide
auuuugaguuuuc

SEQ ID NO: 91179 - RNA, 12 nt, Artificial Sequence
  Description of Artificial Sequence: Synthetic oligonucleotide
uauccuguuugu

SEQ ID NO: 91180 - RNA, 11 nt, Artificial Sequence
  Description of Artificial Sequence: Synthetic oligonucleotide
ccuguuuguuc

SEQ ID NO: 91181 - RNA, 10 nt, Artificial Sequence
  Description of Artificial Sequence: Synthetic oligonucleotide
cucuacagcc

SEQ ID NO: 91182 - RNA, 12 nt, Artificial Sequence
  Description of Artificial Sequence: Synthetic oligonucleotide
ucuuccauagcu

SEQ ID NO: 91183 - RNA, 12 nt, Artificial Sequence
  Description of Artificial Sequence: Synthetic oligonucleotide
auaaucuuccug

SEQ ID NO: 91184 - RNA, 12 nt, Artificial Sequence
  Description of Artificial Sequence: Synthetic oligonucleotide
uaaucuuccugu

SEQ ID NO: 91185 - RNA, 12 nt, Artificial Sequence
  Description of Artificial Sequence: Synthetic oligonucleotide
cuucaugacuug

SEQ ID NO: 91186 - RNA, 12 nt, Artificial Sequence
  Description of Artificial Sequence: Synthetic oligonucleotide
aagagggagaga

SEQ ID NO: 91187 - RNA, 12 nt, Artificial Sequence
  Description of Artificial Sequence: Synthetic oligonucleotide
cgucuccuacca

SEQ ID NO: 91188 - RNA, 12 nt, Artificial Sequence
  Description of Artificial Sequence: Synthetic oligonucleotide
gaucaaucggcc

SEQ ID NO: 91189 - RNA, 12 nt, Artificial Sequence
  Description of Artificial Sequence: Synthetic oligonucleotide
ggacgaacaucc

SEQ ID NO: 91190 - RNA, 11 nt, Artificial Sequence
  Description of Artificial Sequence: Synthetic oligonucleotide
agggucggaac

SEQ ID NO: 91191 - RNA, 10 nt, Artificial Sequence
  Description of Artificial Sequence: Synthetic oligonucleotide
ucggaaccca

SEQ ID NO: 91192 - RNA, 11 nt, Artificial Sequence
  Description of Artificial Sequence: Synthetic oligonucleotide
acccaagcuua

SEQ ID NO: 91193 - RNA, 14 nt, Artificial Sequence
  Description of Artificial Sequence: Synthetic oligonucleotide
gaacuuuaagcaac

SEQ ID NO: 91194 - RNA, 11 nt, Artificial Sequence
  Description of Artificial Sequence: Synthetic oligonucleotide
acuauucagug

SEQ ID NO: 91195 - RNA, 11 nt, Artificial Sequence
  Description of Artificial Sequence: Synthetic oligonucleotide
cuauucagugg

SEQ ID NO: 91196 - RNA, 13 nt, Artificial Sequence
  Description of Artificial Sequence: Synthetic oligonucleotide
aaacacagauaac

SEQ ID NO: 91197 - RNA, 12 nt, Artificial Sequence
  Description of Artificial Sequence: Synthetic oligonucleotide
cuuaagaaaaga

SEQ ID NO: 91198 - RNA, 12 nt, Artificial Sequence
  Description of Artificial Sequence: Synthetic oligonucleotide
cugaaggagugu

SEQ ID NO: 91199 - RNA, 10 nt, Artificial Sequence
  Description of Artificial Sequence: Synthetic oligonucleotide
ucaccgcggg

SEQ ID NO: 91200 - RNA, 14 nt, Artificial Sequence
  Description of Artificial Sequence: Synthetic oligonucleotide
agcagaaauaagcg

SEQ ID NO: 91201 - RNA, 12 nt, Artificial Sequence
  Description of Artificial Sequence: Synthetic oligonucleotide
aagcgugccguu

SEQ ID NO: 91202 - RNA, 12 nt, Artificial Sequence
  Description of Artificial Sequence: Synthetic oligonucleotide
agaaacagucac

SEQ ID NO: 91203 - RNA, 12 nt, Artificial Sequence
  Description of Artificial Sequence: Synthetic oligonucleotide
agaggaagaagg

SEQ ID NO: 91204 - RNA, 14 nt, Artificial Sequence
  Description of Artificial Sequence: Synthetic oligonucleotide
uguauucaaaauau

SEQ ID NO: 91205 - RNA, 13 nt, Artificial Sequence
  Description of Artificial Sequence: Synthetic oligonucleotide
auuuuccucccuu

SEQ ID NO: 91206 - RNA, 13 nt, Artificial Sequence
  Description of Artificial Sequence: Synthetic oligonucleotide
caaagaaagauag

SEQ ID NO: 91207 - RNA, 12 nt, Artificial Sequence
  Description of Artificial Sequence: Synthetic oligonucleotide
aagaaagauaga

SEQ ID NO: 91208 - RNA, 13 nt, Artificial Sequence
  Description of Artificial Sequence: Synthetic oligonucleotide
gaaagcauuuguu

SEQ ID NO: 91209 - RNA, 13 nt, Artificial Sequence
  Description of Artificial Sequence: Synthetic oligonucleotide
ugaguuaaacgaa

SEQ ID NO: 91210 - RNA, 12 nt, Artificial Sequence
  Description of Artificial Sequence: Synthetic oligonucleotide
acugauacagaa

SEQ ID NO: 91211 - RNA, 12 nt, Artificial Sequence
  Description of Artificial Sequence: Synthetic oligonucleotide
auauuauauaua

SEQ ID NO: 91212 - RNA, 12 nt, Artificial Sequence
  Description of Artificial Sequence: Synthetic oligonucleotide
auuauauauaua

SEQ ID NO: 91213 - RNA, 12 nt, Artificial Sequence
  Description of Artificial Sequence: Synthetic oligonucleotide
ucacuggaugua

SEQ ID NO: 91214 - RNA, 12 nt, Artificial Sequence
  Description of Artificial Sequence: Synthetic oligonucleotide
cagggaagagga

SEQ ID NO: 91215 - RNA, 15 nt, Artificial Sequence
  Description of Artificial Sequence: Synthetic oligonucleotide
augaucuuuuuuuug

SEQ ID NO: 91216 - RNA, 11 nt, Artificial Sequence
  Description of Artificial Sequence: Synthetic oligonucleotide
aguucacggcc

SEQ ID NO: 91217 - RNA, 13 nt, Artificial Sequence
  Description of Artificial Sequence: Synthetic oligonucleotide
caccaucacacca

SEQ ID NO: 91218 - RNA, 11 nt, Artificial Sequence
  Description of Artificial Sequence: Synthetic oligonucleotide
ccugcggguuu

SEQ ID NO: 91219 - RNA, 10 nt, Artificial Sequence
  Description of Artificial Sequence: Synthetic oligonucleotide
auccaguuug

SEQ ID NO: 91220 - RNA, 13 nt, Artificial Sequence
  Description of Artificial Sequence: Synthetic oligonucleotide
guuaaggacuucu

SEQ ID NO: 91221 - RNA, 13 nt, Artificial Sequence
  Description of Artificial Sequence: Synthetic oligonucleotide
cagugggacagag

SEQ ID NO: 91222 - RNA, 14 nt, Artificial Sequence
  Description of Artificial Sequence: Synthetic oligonucleotide
aauuuguuauugug

SEQ ID NO: 91223 - RNA, 13 nt, Artificial Sequence
  Description of Artificial Sequence: Synthetic oligonucleotide
uucaaaugcauuu

SEQ ID NO: 91224 - RNA, 10 nt, Artificial Sequence
  Description of Artificial Sequence: Synthetic oligonucleotide
caggaaagcc

SEQ ID NO: 91225 - RNA, 11 nt, Artificial Sequence
  Description of Artificial Sequence: Synthetic oligonucleotide
aggaaagcccu

SEQ ID NO: 91226 - RNA, 12 nt, Artificial Sequence
  Description of Artificial Sequence: Synthetic oligonucleotide
cccagcauggcc

SEQ ID NO: 91227 - RNA, 11 nt, Artificial Sequence
  Description of Artificial Sequence: Synthetic oligonucleotide
cuucucccuga

SEQ ID NO: 91228 - RNA, 12 nt, Artificial Sequence
  Description of Artificial Sequence: Synthetic oligonucleotide
gaagaagcccuu

SEQ ID NO: 91229 - RNA, 12 nt, Artificial Sequence
  Description of Artificial Sequence: Synthetic oligonucleotide
agaagcccuuca

SEQ ID NO: 91230 - RNA, 11 nt, Artificial Sequence
  Description of Artificial Sequence: Synthetic oligonucleotide
gcccuucagcg

SEQ ID NO: 91231 - RNA, 11 nt, Artificial Sequence
  Description of Artificial Sequence: Synthetic oligonucleotide
ccuucagcggc

SEQ ID NO: 91232 - RNA, 12 nt, Artificial Sequence
  Description of Artificial Sequence: Synthetic oligonucleotide
ucagcggccagu

SEQ ID NO: 91233 - RNA, 12 nt, Artificial Sequence
  Description of Artificial Sequence: Synthetic oligonucleotide
ugaaaagcuccg

SEQ ID NO: 91234 - RNA, 11 nt, Artificial Sequence
  Description of Artificial Sequence: Synthetic oligonucleotide
aaaagcuccgg

SEQ ID NO: 91235 - RNA, 13 nt, Artificial Sequence
  Description of Artificial Sequence: Synthetic oligonucleotide
agucaacagucug

SEQ ID NO: 91236 - RNA, 13 nt, Artificial Sequence
  Description of Artificial Sequence: Synthetic oligonucleotide
cagaguucaaaag

SEQ ID NO: 91237 - RNA, 13 nt, Artificial Sequence
  Description of Artificial Sequence: Synthetic oligonucleotide
agaguucaaaagc

SEQ ID NO: 91238 - RNA, 12 nt, Artificial Sequence
  Description of Artificial Sequence: Synthetic oligonucleotide
uucaaaagcccu

SEQ ID NO: 91239 - RNA, 12 nt, Artificial Sequence
  Description of Artificial Sequence: Synthetic oligonucleotide
ucaaaagcccuu

SEQ ID NO: 91240 - RNA, 12 nt, Artificial Sequence
  Description of Artificial Sequence: Synthetic oligonucleotide
aaaagcccuuca

SEQ ID NO: 91241 - RNA, 12 nt, Artificial Sequence
  Description of Artificial Sequence: Synthetic oligonucleotide
aaagcccuucag

SEQ ID NO: 91242 - RNA, 13 nt, Artificial Sequence
  Description of Artificial Sequence: Synthetic oligonucleotide
gugaagccgcucg

SEQ ID NO: 91243 - RNA, 12 nt, Artificial Sequence
  Description of Artificial Sequence: Synthetic oligonucleotide
cacgccagucaa

SEQ ID NO: 91244 - RNA, 13 nt, Artificial Sequence
  Description of Artificial Sequence: Synthetic oligonucleotide
uucuuggugcgug

SEQ ID NO: 91245 - RNA, 14 nt, Artificial Sequence
  Description of Artificial Sequence: Synthetic oligonucleotide
auuggauucaucag

SEQ ID NO: 91246 - RNA, 13 nt, Artificial Sequence
  Description of Artificial Sequence: Synthetic oligonucleotide
uggaauaccuaag

SEQ ID NO: 91247 - RNA, 12 nt, Artificial Sequence
  Description of Artificial Sequence: Synthetic oligonucleotide
auuugaggcuca

SEQ ID NO: 91248 - RNA, 11 nt, Artificial Sequence
  Description of Artificial Sequence: Synthetic oligonucleotide
ucuacaauugg

SEQ ID NO: 91249 - RNA, 12 nt, Artificial Sequence
  Description of Artificial Sequence: Synthetic oligonucleotide
uaguuaggagcc

SEQ ID NO: 91250 - RNA, 13 nt, Artificial Sequence
  Description of Artificial Sequence: Synthetic oligonucleotide
agucaauauccac

SEQ ID NO: 91251 - RNA, 13 nt, Artificial Sequence
  Description of Artificial Sequence: Synthetic oligonucleotide
auguucagucaca

SEQ ID NO: 91252 - RNA, 12 nt, Artificial Sequence
  Description of Artificial Sequence: Synthetic oligonucleotide
acacacacauac

SEQ ID NO: 91253 - RNA, 12 nt, Artificial Sequence
  Description of Artificial Sequence: Synthetic oligonucleotide
uuccuuuugcuu

SEQ ID NO: 91254 - RNA, 16 nt, Artificial Sequence
  Description of Artificial Sequence: Synthetic oligonucleotide
uuuuaaaguaauuuuu

SEQ ID NO: 91255 - RNA, 13 nt, Artificial Sequence
  Description of Artificial Sequence: Synthetic oligonucleotide
caacagucaaugg

SEQ ID NO: 91256 - RNA, 13 nt, Artificial Sequence
  Description of Artificial Sequence: Synthetic oligonucleotide
ucgacaaaccaau

SEQ ID NO: 91257 - RNA, 12 nt, Artificial Sequence
  Description of Artificial Sequence: Synthetic oligonucleotide
acugcuaccacu

SEQ ID NO: 91258 - RNA, 13 nt, Artificial Sequence
  Description of Artificial Sequence: Synthetic oligonucleotide
gcaagcggucuua

SEQ ID NO: 91259 - RNA, 13 nt, Artificial Sequence
  Description of Artificial Sequence: Synthetic oligonucleotide
ggucuuaccggcu

SEQ ID NO: 91260 - RNA, 11 nt, Artificial Sequence
  Description of Artificial Sequence: Synthetic oligonucleotide
gauggguuacc

SEQ ID NO: 91261 - RNA, 11 nt, Artificial Sequence
  Description of Artificial Sequence: Synthetic oligonucleotide
guuaccugcga

SEQ ID NO: 91262 - RNA, 12 nt, Artificial Sequence
  Description of Artificial Sequence: Synthetic oligonucleotide
aaucuugcugag

SEQ ID NO: 91263 - RNA, 13 nt, Artificial Sequence
  Description of Artificial Sequence: Synthetic oligonucleotide
agcauaaaacagu

SEQ ID NO: 91264 - RNA, 12 nt, Artificial Sequence
  Description of Artificial Sequence: Synthetic oligonucleotide
guccuuuauccu

SEQ ID NO: 91265 - RNA, 12 nt, Artificial Sequence
  Description of Artificial Sequence: Synthetic oligonucleotide
caacgcaaguug

SEQ ID NO: 91266 - RNA, 13 nt, Artificial Sequence
  Description of Artificial Sequence: Synthetic oligonucleotide
aaacugaaaccau

SEQ ID NO: 91267 - RNA, 14 nt, Artificial Sequence
  Description of Artificial Sequence: Synthetic oligonucleotide
acuuuguuaaauau

SEQ ID NO: 91268 - RNA, 14 nt, Artificial Sequence
  Description of Artificial Sequence: Synthetic oligonucleotide
guauauuaaaaguu

SEQ ID NO: 91269 - RNA, 13 nt, Artificial Sequence
  Description of Artificial Sequence: Synthetic oligonucleotide
guuuugacuuaac

SEQ ID NO: 91270 - RNA, 13 nt, Artificial Sequence
  Description of Artificial Sequence: Synthetic oligonucleotide
gcaaacucagcac

SEQ ID NO: 91271 - RNA, 11 nt, Artificial Sequence
  Description of Artificial Sequence: Synthetic oligonucleotide
ugcugaccuca

SEQ ID NO: 91272 - RNA, 14 nt, Artificial Sequence
  Description of Artificial Sequence: Synthetic oligonucleotide
uuuauucagaucgc

SEQ ID NO: 91273 - RNA, 13 nt, Artificial Sequence
  Description of Artificial Sequence: Synthetic oligonucleotide
aggguucugggau

SEQ ID NO: 91274 - RNA, 15 nt, Artificial Sequence
  Description of Artificial Sequence: Synthetic oligonucleotide
auauuggaaauuaug

SEQ ID NO: 91275 - RNA, 13 nt, Artificial Sequence
  Description of Artificial Sequence: Synthetic oligonucleotide
auggaagcacuag

SEQ ID NO: 91276 - RNA, 13 nt, Artificial Sequence
  Description of Artificial Sequence: Synthetic oligonucleotide
guuuuuaugugga

SEQ ID NO: 91277 - RNA, 12 nt, Artificial Sequence
  Description of Artificial Sequence: Synthetic oligonucleotide
ggaauugguaga

SEQ ID NO: 91278 - RNA, 13 nt, Artificial Sequence
  Description of Artificial Sequence: Synthetic oligonucleotide
uuagacuuggaga

SEQ ID NO: 91279 - RNA, 13 nt, Artificial Sequence
  Description of Artificial Sequence: Synthetic oligonucleotide
uuacaguauucca

SEQ ID NO: 91280 - RNA, 15 nt, Artificial Sequence
  Description of Artificial Sequence: Synthetic oligonucleotide
ccacugaugaauuaa

SEQ ID NO: 91281 - RNA, 12 nt, Artificial Sequence
  Description of Artificial Sequence: Synthetic oligonucleotide
ccacaucaucac

SEQ ID NO: 91282 - RNA, 13 nt, Artificial Sequence
  Description of Artificial Sequence: Synthetic oligonucleotide
cucaccaaacaga

SEQ ID NO: 91283 - RNA, 12 nt, Artificial Sequence
  Description of Artificial Sequence: Synthetic oligonucleotide
ggaacaugaugg

SEQ ID NO: 91284 - RNA, 12 nt, Artificial Sequence
  Description of Artificial Sequence: Synthetic oligonucleotide
cauguagacugc

SEQ ID NO: 91285 - RNA, 13 nt, Artificial Sequence
  Description of Artificial Sequence: Synthetic oligonucleotide
ggaucuauuuaug

SEQ ID NO: 91286 - RNA, 12 nt, Artificial Sequence
  Description of Artificial Sequence: Synthetic oligonucleotide
gcacuauuauca

SEQ ID NO: 91287 - RNA, 11 nt, Artificial Sequence
  Description of Artificial Sequence: Synthetic oligonucleotide
aucaguucugc

SEQ ID NO: 91288 - RNA, 13 nt, Artificial Sequence
  Description of Artificial Sequence: Synthetic oligonucleotide
agauuaaaccuac

SEQ ID NO: 91289 - RNA, 13 nt, Artificial Sequence
  Description of Artificial Sequence: Synthetic oligonucleotide
auaaaauccuucu

SEQ ID NO: 91290 - RNA, 12 nt, Artificial Sequence
  Description of Artificial Sequence: Synthetic oligonucleotide
aaugcuguagac

SEQ ID NO: 91291 - RNA, 13 nt, Artificial Sequence
  Description of Artificial Sequence: Synthetic oligonucleotide
uugauaggaauag

SEQ ID NO: 91292 - RNA, 11 nt, Artificial Sequence
  Description of Artificial Sequence: Synthetic oligonucleotide
aauggcccuga

SEQ ID NO: 91293 - RNA, 11 nt, Artificial Sequence
  Description of Artificial Sequence: Synthetic oligonucleotide
uuccucaagca

SEQ ID NO: 91294 - RNA, 10 nt, Artificial Sequence
  Description of Artificial Sequence: Synthetic oligonucleotide
guucagccca

SEQ ID NO: 91295 - RNA, 11 nt, Artificial Sequence
  Description of Artificial Sequence: Synthetic oligonucleotide
gcugcugaacc

SEQ ID NO: 91296 - RNA, 12 nt, Artificial Sequence
  Description of Artificial Sequence: Synthetic oligonucleotide
aaguucucuuca

SEQ ID NO: 91297 - RNA, 11 nt, Artificial Sequence
  Description of Artificial Sequence: Synthetic oligonucleotide
ccagccuagag

SEQ ID NO: 91298 - RNA, 13 nt, Artificial Sequence
  Description of Artificial Sequence: Synthetic oligonucleotide
cucugugaagugu

SEQ ID NO: 91299 - RNA, 14 nt, Artificial Sequence
  Description of Artificial Sequence: Synthetic oligonucleotide
ugagaaaauuucaa

SEQ ID NO: 91300 - RNA, 11 nt, Artificial Sequence
  Description of Artificial Sequence: Synthetic oligonucleotide
aauccuccuga

SEQ ID NO: 91301 - RNA, 12 nt, Artificial Sequence
  Description of Artificial Sequence: Synthetic oligonucleotide
gugacaucauau

SEQ ID NO: 91302 - RNA, 13 nt, Artificial Sequence
  Description of Artificial Sequence: Synthetic oligonucleotide
aaucuucaucaua

SEQ ID NO: 91303 - RNA, 13 nt, Artificial Sequence
  Description of Artificial Sequence: Synthetic oligonucleotide
gacuagcuauuaa

SEQ ID NO: 91304 - RNA, 14 nt, Artificial Sequence
  Description of Artificial Sequence: Synthetic oligonucleotide
ucucuacuaaaaau

SEQ ID NO: 91305 - RNA, 12 nt, Artificial Sequence
  Description of Artificial Sequence: Synthetic oligonucleotide
ucuaucucgccu

SEQ ID NO: 91306 - RNA, 13 nt, Artificial Sequence
  Description of Artificial Sequence: Synthetic oligonucleotide
cuucgguccaguu

SEQ ID NO: 91307 - RNA, 11 nt, Artificial Sequence
  Description of Artificial Sequence: Synthetic oligonucleotide
gauguagccgc

SEQ ID NO: 91308 - RNA, 12 nt, Artificial Sequence
  Description of Artificial Sequence: Synthetic oligonucleotide
ugaggagacuug

SEQ ID NO: 91309 - RNA, 12 nt, Artificial Sequence
  Description of Artificial Sequence: Synthetic oligonucleotide
gaguagugagga

SEQ ID NO: 91310 - RNA, 14 nt, Artificial Sequence
  Description of Artificial Sequence: Synthetic oligonucleotide
cagaugaguacaaa

SEQ ID NO: 91311 - RNA, 13 nt, Artificial Sequence
  Description of Artificial Sequence: Synthetic oligonucleotide
guuguuaaugggc

SEQ ID NO: 91312 - RNA, 13 nt, Artificial Sequence
  Description of Artificial Sequence: Synthetic oligonucleotide
uuuuuaauuuauu

SEQ ID NO: 91313 - RNA, 12 nt, Artificial Sequence
  Description of Artificial Sequence: Synthetic oligonucleotide
uauuuaaauaug

SEQ ID NO: 91314 - RNA, 13 nt, Artificial Sequence
  Description of Artificial Sequence: Synthetic oligonucleotide
uauccuuuguuuc

SEQ ID NO: 91315 - RNA, 14 nt, Artificial Sequence
  Description of Artificial Sequence: Synthetic oligonucleotide
cgucuaaguguuug

SEQ ID NO: 91316 - RNA, 12 nt, Artificial Sequence
  Description of Artificial Sequence: Synthetic oligonucleotide
accugugacaaa

SEQ ID NO: 91317 - RNA, 13 nt, Artificial Sequence
  Description of Artificial Sequence: Synthetic oligonucleotide
ccaggcugaauua

SEQ ID NO: 91318 - RNA, 14 nt, Artificial Sequence
  Description of Artificial Sequence: Synthetic oligonucleotide
gucauucuuacaau

SEQ ID NO: 91319 - RNA, 15 nt, Artificial Sequence
  Description of Artificial Sequence: Synthetic oligonucleotide
ucauucuuacaauug

SEQ ID NO: 91320 - RNA, 12 nt, Artificial Sequence
  Description of Artificial Sequence: Synthetic oligonucleotide
cagagaguguac

SEQ ID NO: 91321 - RNA, 12 nt, Artificial Sequence
  Description of Artificial Sequence: Synthetic oligonucleotide
agaacucagcag

SEQ ID NO: 91322 - RNA, 13 nt, Artificial Sequence
  Description of Artificial Sequence: Synthetic oligonucleotide
uuuauuuucagua

SEQ ID NO: 91323 - RNA, 12 nt, Artificial Sequence
  Description of Artificial Sequence: Synthetic oligonucleotide
ucuuaaauggaa

SEQ ID NO: 91324 - RNA, 13 nt, Artificial Sequence
  Description of Artificial Sequence: Synthetic oligonucleotide
ugccuaaaauugu

SEQ ID NO: 91325 - RNA, 12 nt, Artificial Sequence
  Description of Artificial Sequence: Synthetic oligonucleotide
agacugugagcu

SEQ ID NO: 91326 - RNA, 14 nt, Artificial Sequence
  Description of Artificial Sequence: Synthetic oligonucleotide
ugcuuuuuauuaau

SEQ ID NO: 91327 - RNA, 13 nt, Artificial Sequence
  Description of Artificial Sequence: Synthetic oligonucleotide
cucuucuuacauu

SEQ ID NO: 91328 - RNA, 15 nt, Artificial Sequence
  Description of Artificial Sequence: Synthetic oligonucleotide
cauuuguaaaaaugu

SEQ ID NO: 91329 - RNA, 15 nt, Artificial Sequence
  Description of Artificial Sequence: Synthetic oligonucleotide
aucuuaauucauauu

SEQ ID NO: 91330 - RNA, 13 nt, Artificial Sequence
  Description of Artificial Sequence: Synthetic oligonucleotide
gaacuaaucauga

SEQ ID NO: 91331 - RNA, 12 nt, Artificial Sequence
  Description of Artificial Sequence: Synthetic oligonucleotide
ucugcucuuggg

SEQ ID NO: 91332 - RNA, 13 nt, Artificial Sequence
  Description of Artificial Sequence: Synthetic oligonucleotide
caguagcuuugag

SEQ ID NO: 91333 - RNA, 14 nt, Artificial Sequence
  Description of Artificial Sequence: Synthetic oligonucleotide
cacguaauauuuca

SEQ ID NO: 91334 - RNA, 13 nt, Artificial Sequence
  Description of Artificial Sequence: Synthetic oligonucleotide
uauucucuucacu

SEQ ID NO: 91335 - RNA, 14 nt, Artificial Sequence
  Description of Artificial Sequence: Synthetic oligonucleotide
cuaaugcuaagaaa

SEQ ID NO: 91336 - RNA, 12 nt, Artificial Sequence
  Description of Artificial Sequence: Synthetic oligonucleotide
gcugaaaaucaa

SEQ ID NO: 91337 - RNA, 14 nt, Artificial Sequence
  Description of Artificial Sequence: Synthetic oligonucleotide
aauaugauuacuuu

SEQ ID NO: 91338 - RNA, 14 nt, Artificial Sequence
  Description of Artificial Sequence: Synthetic oligonucleotide
cauuuuguucuaca

SEQ ID NO: 91339 - RNA, 12 nt, Artificial Sequence
  Description of Artificial Sequence: Synthetic oligonucleotide
cccgggacucuc

SEQ ID NO: 91340 - RNA, 14 nt, Artificial Sequence
  Description of Artificial Sequence: Synthetic oligonucleotide
ccuuuaaaguaaag

SEQ ID NO: 91341 - RNA, 13 nt, Artificial Sequence
  Description of Artificial Sequence: Synthetic oligonucleotide
ucuggaagccugg

SEQ ID NO: 91342 - RNA, 14 nt, Artificial Sequence
  Description of Artificial Sequence: Synthetic oligonucleotide
aaaacaaaagagag

SEQ ID NO: 91343 - RNA, 13 nt, Artificial Sequence
  Description of Artificial Sequence: Synthetic oligonucleotide
aucaguuaugccg

SEQ ID NO: 91344 - RNA, 13 nt, Artificial Sequence
  Description of Artificial Sequence: Synthetic oligonucleotide
uaaaagaagucca

SEQ ID NO: 91345 - RNA, 11 nt, Artificial Sequence
  Description of Artificial Sequence: Synthetic oligonucleotide
aggugagguua

SEQ ID NO: 91346 - RNA, 11 nt, Artificial Sequence
  Description of Artificial Sequence: Synthetic oligonucleotide
gggaagaggac

SEQ ID NO: 91347 - RNA, 13 nt, Artificial Sequence
  Description of Artificial Sequence: Synthetic oligonucleotide
aagcaaguauugu

SEQ ID NO: 91348 - RNA, 12 nt, Artificial Sequence
  Description of Artificial Sequence: Synthetic oligonucleotide
auuguagcacuc

SEQ ID NO: 91349 - RNA, 14 nt, Artificial Sequence
  Description of Artificial Sequence: Synthetic oligonucleotide
acaaaaccacaaau

SEQ ID NO: 91350 - RNA, 12 nt, Artificial Sequence
  Description of Artificial Sequence: Synthetic oligonucleotide
uaagcccauaca

SEQ ID NO: 91351 - RNA, 11 nt, Artificial Sequence
  Description of Artificial Sequence: Synthetic oligonucleotide
agcccauacag

SEQ ID NO: 91352 - RNA, 12 nt, Artificial Sequence
  Description of Artificial Sequence: Synthetic oligonucleotide
cagaaaccuucc

SEQ ID NO: 91353 - RNA, 10 nt, Artificial Sequence
  Description of Artificial Sequence: Synthetic oligonucleotide
guauaccuac

SEQ ID NO: 91354 - RNA, 13 nt, Artificial Sequence
  Description of Artificial Sequence: Synthetic oligonucleotide
gccaguuuucgga

SEQ ID NO: 91355 - RNA, 9 nt, Artificial Sequence
  Description of Artificial Sequence: Synthetic oligonucleotide
ggaacaggg

SEQ ID NO: 91356 - RNA, 13 nt, Artificial Sequence
  Description of Artificial Sequence: Synthetic oligonucleotide
uuaacuuuccagu

SEQ ID NO: 91357 - RNA, 14 nt, Artificial Sequence
  Description of Artificial Sequence: Synthetic oligonucleotide
aaaguuugguuuug

SEQ ID NO: 91358 - RNA, 12 nt, Artificial Sequence
  Description of Artificial Sequence: Synthetic oligonucleotide
cuucccacugua

SEQ ID NO: 91359 - RNA, 13 nt, Artificial Sequence
  Description of Artificial Sequence: Synthetic oligonucleotide
ugauaccauauga

SEQ ID NO: 91360 - RNA, 11 nt, Artificial Sequence
  Description of Artificial Sequence: Synthetic oligonucleotide
aacaugggcug

SEQ ID NO: 91361 - RNA, 13 nt, Artificial Sequence
  Description of Artificial Sequence: Synthetic oligonucleotide
caacuuuuucaua

SEQ ID NO: 91362 - RNA, 12 nt, Artificial Sequence
  Description of Artificial Sequence: Synthetic oligonucleotide
caugaggccgga

SEQ ID NO: 91363 - RNA, 11 nt, Artificial Sequence
  Description of Artificial Sequence: Synthetic oligonucleotide
acugcauuugu

SEQ ID NO: 91364 - RNA, 13 nt, Artificial Sequence
  Description of Artificial Sequence: Synthetic oligonucleotide
aauguuuacuacc

SEQ ID NO: 91365 - RNA, 15 nt, Artificial Sequence
  Description of Artificial Sequence: Synthetic oligonucleotide
aauuuuuugaugaaa

SEQ ID NO: 91366 - RNA, 14 nt, Artificial Sequence
  Description of Artificial Sequence: Synthetic oligonucleotide
cagugugugaauuu

SEQ ID NO: 91367 - RNA, 13 nt, Artificial Sequence
  Description of Artificial Sequence: Synthetic oligonucleotide
gagcaauguaugu

SEQ ID NO: 91368 - RNA, 14 nt, Artificial Sequence
  Description of Artificial Sequence: Synthetic oligonucleotide
aaagcacauauaua

SEQ ID NO: 91369 - RNA, 14 nt, Artificial Sequence
  Description of Artificial Sequence: Synthetic oligonucleotide
guaauaguuucucc

SEQ ID NO: 91370 - RNA, 13 nt, Artificial Sequence
  Description of Artificial Sequence: Synthetic oligonucleotide
aguuucuccaaau

SEQ ID NO: 91371 - RNA, 13 nt, Artificial Sequence
  Description of Artificial Sequence: Synthetic oligonucleotide
uacuuccuagaaa

SEQ ID NO: 91372 - RNA, 13 nt, Artificial Sequence
  Description of Artificial Sequence: Synthetic oligonucleotide
uacaccauauaug

SEQ ID NO: 91373 - RNA, 14 nt, Artificial Sequence
  Description of Artificial Sequence: Synthetic oligonucleotide
auauaugaauggag

SEQ ID NO: 91374 - RNA, 13 nt, Artificial Sequence
  Description of Artificial Sequence: Synthetic oligonucleotide
acgagaagaagau

SEQ ID NO: 91375 - RNA, 13 nt, Artificial Sequence
  Description of Artificial Sequence: Synthetic oligonucleotide
ucauuuacaggga

SEQ ID NO: 91376 - RNA, 13 nt, Artificial Sequence
  Description of Artificial Sequence: Synthetic oligonucleotide
cauuuacagggac

SEQ ID NO: 91377 - RNA, 10 nt, Artificial Sequence
  Description of Artificial Sequence: Synthetic oligonucleotide
agggaccuga

SEQ ID NO: 91378 - RNA, 14 nt, Artificial Sequence
  Description of Artificial Sequence: Synthetic oligonucleotide
uguuugacugcauc

SEQ ID NO: 91379 - RNA, 13 nt, Artificial Sequence
  Description of Artificial Sequence: Synthetic oligonucleotide
uuugacugcaucg

SEQ ID NO: 91380 - RNA, 12 nt, Artificial Sequence
  Description of Artificial Sequence: Synthetic oligonucleotide
gaguucacaggg

SEQ ID NO: 91381 - RNA, 13 nt, Artificial Sequence
  Description of Artificial Sequence: Synthetic oligonucleotide
ggcaccucugucc

SEQ ID NO: 91382 - RNA, 15 nt, Artificial Sequence
  Description of Artificial Sequence: Synthetic oligonucleotide
gguuugucuuuuuaa

SEQ ID NO: 91383 - RNA, 14 nt, Artificial Sequence
  Description of Artificial Sequence: Synthetic oligonucleotide
uuugucuuuuuaag

SEQ ID NO: 91384 - RNA, 13 nt, Artificial Sequence
  Description of Artificial Sequence: Synthetic oligonucleotide
ccuaaagguuguc

SEQ ID NO: 91385 - RNA, 12 nt, Artificial Sequence
  Description of Artificial Sequence: Synthetic oligonucleotide
aagguugucgac

SEQ ID NO: 91386 - RNA, 13 nt, Artificial Sequence
  Description of Artificial Sequence: Synthetic oligonucleotide
accuggcaauugu

SEQ ID NO: 91387 - RNA, 12 nt, Artificial Sequence
  Description of Artificial Sequence: Synthetic oligonucleotide
aguggugcgagg

SEQ ID NO: 91388 - RNA, 13 nt, Artificial Sequence
  Description of Artificial Sequence: Synthetic oligonucleotide
agagacaugaaau

SEQ ID NO: 91389 - RNA, 13 nt, Artificial Sequence
  Description of Artificial Sequence: Synthetic oligonucleotide
auauauuucucca

SEQ ID NO: 91390 - RNA, 10 nt, Artificial Sequence
  Description of Artificial Sequence: Synthetic oligonucleotide
caugaaggcu

SEQ ID NO: 91391 - RNA, 11 nt, Artificial Sequence
  Description of Artificial Sequence: Synthetic oligonucleotide
gcuggaguggu

SEQ ID NO: 91392 - RNA, 11 nt, Artificial Sequence
  Description of Artificial Sequence: Synthetic oligonucleotide
aggaagagagg

SEQ ID NO: 91393 - RNA, 12 nt, Artificial Sequence
  Description of Artificial Sequence: Synthetic oligonucleotide
cuugcaucgggc

SEQ ID NO: 91394 - RNA, 13 nt, Artificial Sequence
  Description of Artificial Sequence: Synthetic oligonucleotide
auauccuacugug

SEQ ID NO: 91395 - RNA, 13 nt, Artificial Sequence
  Description of Artificial Sequence: Synthetic oligonucleotide
uccuacuguguaa

SEQ ID NO: 91396 - RNA, 12 nt, Artificial Sequence
  Description of Artificial Sequence: Synthetic oligonucleotide
ccuuguagugua

SEQ ID NO: 91397 - RNA, 13 nt, Artificial Sequence
  Description of Artificial Sequence: Synthetic oligonucleotide
ucuuuguugauug

SEQ ID NO: 91398 - RNA, 14 nt, Artificial Sequence
  Description of Artificial Sequence: Synthetic oligonucleotide
uuuguugauugaaa

SEQ ID NO: 91399 - RNA, 15 nt, Artificial Sequence
  Description of Artificial Sequence: Synthetic oligonucleotide
uucuuuuucuuccau

SEQ ID NO: 91400 - RNA, 13 nt, Artificial Sequence
  Description of Artificial Sequence: Synthetic oligonucleotide
aaucuuccuucua

SEQ ID NO: 91401 - RNA, 13 nt, Artificial Sequence
  Description of Artificial Sequence: Synthetic oligonucleotide
uugaaugcuucau

SEQ ID NO: 91402 - RNA, 13 nt, Artificial Sequence
  Description of Artificial Sequence: Synthetic oligonucleotide
ugaaugcuucaug

SEQ ID NO: 91403 - RNA, 13 nt, Artificial Sequence
  Description of Artificial Sequence: Synthetic oligonucleotide
aauucuacuuuga

SEQ ID NO: 91404 - RNA, 13 nt, Artificial Sequence
  Description of Artificial Sequence: Synthetic oligonucleotide
agcaacuacagac

SEQ ID NO: 91405 - RNA, 13 nt, Artificial Sequence
  Description of Artificial Sequence: Synthetic oligonucleotide
gaccaaggucaac

SEQ ID NO: 91406 - RNA, 13 nt, Artificial Sequence
  Description of Artificial Sequence: Synthetic oligonucleotide
cgacuaucucgac

SEQ ID NO: 91407 - RNA, 13 nt, Artificial Sequence
  Description of Artificial Sequence: Synthetic oligonucleotide
aaccuucccaaac

SEQ ID NO: 91408 - RNA, 14 nt, Artificial Sequence
  Description of Artificial Sequence: Synthetic oligonucleotide
ccaagcuuagaacu

SEQ ID NO: 91409 - RNA, 15 nt, Artificial Sequence
  Description of Artificial Sequence: Synthetic oligonucleotide
agcuuagaacuuuaa

SEQ ID NO: 91410 - RNA, 11 nt, Artificial Sequence
  Description of Artificial Sequence: Synthetic oligonucleotide
aagaccaccac

SEQ ID NO: 91411 - RNA, 14 nt, Artificial Sequence
  Description of Artificial Sequence: Synthetic oligonucleotide
gcgagaaauaaagu

SEQ ID NO: 91412 - RNA, 14 nt, Artificial Sequence
  Description of Artificial Sequence: Synthetic oligonucleotide
cgagaaauaaaguu

SEQ ID NO: 91413 - RNA, 12 nt, Artificial Sequence
  Description of Artificial Sequence: Synthetic oligonucleotide
aggaaaugaucc

SEQ ID NO: 91414 - RNA, 13 nt, Artificial Sequence
  Description of Artificial Sequence: Synthetic oligonucleotide
gaagaaaugaaac

SEQ ID NO: 91415 - RNA, 13 nt, Artificial Sequence
  Description of Artificial Sequence: Synthetic oligonucleotide
guuuccauccucc

SEQ ID NO: 91416 - RNA, 15 nt, Artificial Sequence
  Description of Artificial Sequence: Synthetic oligonucleotide
acugaaaaucuuuga

SEQ ID NO: 91417 - RNA, 11 nt, Artificial Sequence
  Description of Artificial Sequence: Synthetic oligonucleotide
ugccguucagg

SEQ ID NO: 91418 - RNA, 13 nt, Artificial Sequence
  Description of Artificial Sequence: Synthetic oligonucleotide
caggguccagaag

SEQ ID NO: 91419 - RNA, 13 nt, Artificial Sequence
  Description of Artificial Sequence: Synthetic oligonucleotide
ucaagacugcuug

SEQ ID NO: 91420 - RNA, 13 nt, Artificial Sequence
  Description of Artificial Sequence: Synthetic oligonucleotide
uccaugucuuugg

SEQ ID NO: 91421 - RNA, 11 nt, Artificial Sequence
  Description of Artificial Sequence: Synthetic oligonucleotide
gccugaaacac

SEQ ID NO: 91422 - RNA, 12 nt, Artificial Sequence
  Description of Artificial Sequence: Synthetic oligonucleotide
ucucuguaccuc

SEQ ID NO: 91423 - RNA, 12 nt, Artificial Sequence
  Description of Artificial Sequence: Synthetic oligonucleotide
agcaagacaaga

SEQ ID NO: 91424 - RNA, 13 nt, Artificial Sequence
  Description of Artificial Sequence: Synthetic oligonucleotide
gcaagacaagaaa

SEQ ID NO: 91425 - RNA, 12 nt, Artificial Sequence
  Description of Artificial Sequence: Synthetic oligonucleotide
uguacaagaucc

SEQ ID NO: 91426 - RNA, 12 nt, Artificial Sequence
  Description of Artificial Sequence: Synthetic oligonucleotide
cguacuugcaga

SEQ ID NO: 91427 - RNA, 13 nt, Artificial Sequence
  Description of Artificial Sequence: Synthetic oligonucleotide
cgaucgauacaga

SEQ ID NO: 91428 - RNA, 13 nt, Artificial Sequence
  Description of Artificial Sequence: Synthetic oligonucleotide
uauaaaaauaaau

SEQ ID NO: 91429 - RNA, 13 nt, Artificial Sequence
  Description of Artificial Sequence: Synthetic oligonucleotide
uaaaaauaaauau

SEQ ID NO: 91430 - RNA, 13 nt, Artificial Sequence
  Description of Artificial Sequence: Synthetic oligonucleotide
uuugacugcugug

SEQ ID NO: 91431 - RNA, 13 nt, Artificial Sequence
  Description of Artificial Sequence: Synthetic oligonucleotide
ggagaugagagac

SEQ ID NO: 91432 - RNA, 10 nt, Artificial Sequence
  Description of Artificial Sequence: Synthetic oligonucleotide
ucccacuugg

SEQ ID NO: 91433 - RNA, 10 nt, Artificial Sequence
  Description of Artificial Sequence: Synthetic oligonucleotide
guucacggcc

SEQ ID NO: 91434 - RNA, 12 nt, Artificial Sequence
  Description of Artificial Sequence: Synthetic oligonucleotide
accaucacacca

SEQ ID NO: 91435 - RNA, 10 nt, Artificial Sequence
  Description of Artificial Sequence: Synthetic oligonucleotide
cugcggguuu

SEQ ID NO: 91436 - RNA, 9 nt, Artificial Sequence
  Description of Artificial Sequence: Synthetic oligonucleotide
uccaguuug

SEQ ID NO: 91437 - RNA, 12 nt, Artificial Sequence
  Description of Artificial Sequence: Synthetic oligonucleotide
uuaaggacuucu

SEQ ID NO: 91438 - RNA, 12 nt, Artificial Sequence
  Description of Artificial Sequence: Synthetic oligonucleotide
agugggacagag

SEQ ID NO: 91439 - RNA, 13 nt, Artificial Sequence
  Description of Artificial Sequence: Synthetic oligonucleotide
auuuguuauugug

SEQ ID NO: 91440 - RNA, 12 nt, Artificial Sequence
  Description of Artificial Sequence: Synthetic oligonucleotide
ucaaaugcauuu

SEQ ID NO: 91441 - RNA, 9 nt, Artificial Sequence
  Description of Artificial Sequence: Synthetic oligonucleotide
aggaaagcc

SEQ ID NO: 91442 - RNA, 10 nt, Artificial Sequence
  Description of Artificial Sequence: Synthetic oligonucleotide
ggaaagcccu

SEQ ID NO: 91443 - RNA, 11 nt, Artificial Sequence
  Description of Artificial Sequence: Synthetic oligonucleotide
ccagcauggcc

SEQ ID NO: 91444 - RNA, 10 nt, Artificial Sequence
  Description of Artificial Sequence: Synthetic oligonucleotide
uucucccuga

SEQ ID NO: 91445 - RNA, 11 nt, Artificial Sequence
  Description of Artificial Sequence: Synthetic oligonucleotide
aagaagcccuu

SEQ ID NO: 91446 - RNA, 11 nt, Artificial Sequence
  Description of Artificial Sequence: Synthetic oligonucleotide
gaagcccuuca

SEQ ID NO: 91447 - RNA, 10 nt, Artificial Sequence
  Description of Artificial Sequence: Synthetic oligonucleotide
cccuucagcg

SEQ ID NO: 91448 - RNA, 10 nt, Artificial Sequence
  Description of Artificial Sequence: Synthetic oligonucleotide
cuucagcggc

SEQ ID NO: 91449 - RNA, 11 nt, Artificial Sequence
  Description of Artificial Sequence: Synthetic oligonucleotide
cagcggccagu

SEQ ID NO: 91450 - RNA, 11 nt, Artificial Sequence
  Description of Artificial Sequence: Synthetic oligonucleotide
gaaaagcuccg

SEQ ID NO: 91451 - RNA, 10 nt, Artificial Sequence
  Description of Artificial Sequence: Synthetic oligonucleotide
aaagcuccgg

SEQ ID NO: 91452 - RNA, 12 nt, Artificial Sequence
  Description of Artificial Sequence: Synthetic oligonucleotide
gucaacagucug

SEQ ID NO: 91453 - RNA, 12 nt, Artificial Sequence
  Description of Artificial Sequence: Synthetic oligonucleotide
agaguucaaaag

SEQ ID NO: 91454 - RNA, 12 nt, Artificial Sequence
  Description of Artificial Sequence: Synthetic oligonucleotide
gaguucaaaagc

SEQ ID NO: 91455 - RNA, 11 nt, Artificial Sequence
  Description of Artificial Sequence: Synthetic oligonucleotide
ucaaaagcccu

SEQ ID NO: 91456 - RNA, 11 nt, Artificial Sequence
  Description of Artificial Sequence: Synthetic oligonucleotide
caaaagcccuu

SEQ ID NO: 91457 - RNA, 11 nt, Artificial Sequence
  Description of Artificial Sequence: Synthetic oligonucleotide
aaagcccuuca

SEQ ID NO: 91458 - RNA, 11 nt, Artificial Sequence
  Description of Artificial Sequence: Synthetic oligonucleotide
aagcccuucag

SEQ ID NO: 91459 - RNA, 12 nt, Artificial Sequence
  Description of Artificial Sequence: Synthetic oligonucleotide
ugaagccgcucg

SEQ ID NO: 91460 - RNA, 11 nt, Artificial Sequence
  Description of Artificial Sequence: Synthetic oligonucleotide
acgccagucaa

SEQ ID NO: 91461 - RNA, 12 nt, Artificial Sequence
  Description of Artificial Sequence: Synthetic oligonucleotide
ucuuggugcgug

SEQ ID NO: 91462 - RNA, 13 nt, Artificial Sequence
  Description of Artificial Sequence: Synthetic oligonucleotide
uuggauucaucag

SEQ ID NO: 91463 - RNA, 12 nt, Artificial Sequence
  Description of Artificial Sequence: Synthetic oligonucleotide
ggaauaccuaag

SEQ ID NO: 91464 - RNA, 11 nt, Artificial Sequence
  Description of Artificial Sequence: Synthetic oligonucleotide
uuugaggcuca

SEQ ID NO: 91465 - RNA, 10 nt, Artificial Sequence
  Description of Artificial Sequence: Synthetic oligonucleotide
cuacaauugg

SEQ ID NO: 91466 - RNA, 11 nt, Artificial Sequence
  Description of Artificial Sequence: Synthetic oligonucleotide
aguuaggagcc

SEQ ID NO: 91467 - RNA, 12 nt, Artificial Sequence
  Description of Artificial Sequence: Synthetic oligonucleotide
gucaauauccac

SEQ ID NO: 91468 - RNA, 12 nt, Artificial Sequence
  Description of Artificial Sequence: Synthetic oligonucleotide
uguucagucaca

SEQ ID NO: 91469 - RNA, 11 nt, Artificial Sequence
  Description of Artificial Sequence: Synthetic oligonucleotide
cacacacauac

SEQ ID NO: 91470 - RNA, 11 nt, Artificial Sequence
  Description of Artificial Sequence: Synthetic oligonucleotide
uccuuuugcuu

SEQ ID NO: 91471 - RNA, 15 nt, Artificial Sequence
  Description of Artificial Sequence: Synthetic oligonucleotide
uuuaaaguaauuuuu

SEQ ID NO: 91472 - RNA, 12 nt, Artificial Sequence
  Description of Artificial Sequence: Synthetic oligonucleotide
aacagucaaugg

SEQ ID NO: 91473 - RNA, 12 nt, Artificial Sequence
  Description of Artificial Sequence: Synthetic oligonucleotide
cgacaaaccaau

SEQ ID NO: 91474 - RNA, 11 nt, Artificial Sequence
  Description of Artificial Sequence: Synthetic oligonucleotide
cugcuaccacu

SEQ ID NO: 91475 - RNA, 12 nt, Artificial Sequence
  Description of Artificial Sequence: Synthetic oligonucleotide
caagcggucuua

SEQ ID NO: 91476 - RNA, 12 nt, Artificial Sequence
  Description of Artificial Sequence: Synthetic oligonucleotide
gucuuaccggcu

SEQ ID NO: 91477 - RNA, 10 nt, Artificial Sequence
  Description of Artificial Sequence: Synthetic oligonucleotide
auggguuacc

SEQ ID NO: 91478 - RNA, 10 nt, Artificial Sequence
  Description of Artificial Sequence: Synthetic oligonucleotide
uuaccugcga

SEQ ID NO: 91479 - RNA, 11 nt, Artificial Sequence
  Description of Artificial Sequence: Synthetic oligonucleotide
aucuugcugag

SEQ ID NO: 91480 - RNA, 12 nt, Artificial Sequence
  Description of Artificial Sequence: Synthetic oligonucleotide
gcauaaaacagu

SEQ ID NO: 91481 - RNA, 11 nt, Artificial Sequence
  Description of Artificial Sequence: Synthetic oligonucleotide
uccuuuauccu

SEQ ID NO: 91482 - RNA, 11 nt, Artificial Sequence
  Description of Artificial Sequence: Synthetic oligonucleotide
aacgcaaguug

SEQ ID NO: 91483 - RNA, 12 nt, Artificial Sequence
  Description of Artificial Sequence: Synthetic oligonucleotide
aacugaaaccau

SEQ ID NO: 91484 - RNA, 13 nt, Artificial Sequence
  Description of Artificial Sequence: Synthetic oligonucleotide
cuuuguuaaauau

SEQ ID NO: 91485 - RNA, 13 nt, Artificial Sequence
  Description of Artificial Sequence: Synthetic oligonucleotide
uauauuaaaaguu

SEQ ID NO: 91486 - RNA, 12 nt, Artificial Sequence
  Description of Artificial Sequence: Synthetic oligonucleotide
uuuugacuuaac

SEQ ID NO: 91487 - RNA, 12 nt, Artificial Sequence
  Description of Artificial Sequence: Synthetic oligonucleotide
caaacucagcac

SEQ ID NO: 91488 - RNA, 10 nt, Artificial Sequence
  Description of Artificial Sequence: Synthetic oligonucleotide
gcugaccuca

SEQ ID NO: 91489 - RNA, 13 nt, Artificial Sequence
  Description of Artificial Sequence: Synthetic oligonucleotide
uuauucagaucgc

SEQ ID NO: 91490 - RNA, 12 nt, Artificial Sequence
  Description of Artificial Sequence: Synthetic oligonucleotide
ggguucugggau

SEQ ID NO: 91491 - RNA, 14 nt, Artificial Sequence
  Description of Artificial Sequence: Synthetic oligonucleotide
uauuggaaauuaug

SEQ ID NO: 91492 - RNA, 12 nt, Artificial Sequence
  Description of Artificial Sequence: Synthetic oligonucleotide
uggaagcacuag

SEQ ID NO: 91493 - RNA, 12 nt, Artificial Sequence
  Description of Artificial Sequence: Synthetic oligonucleotide
uuuuuaugugga

SEQ ID NO: 91494 - RNA, 11 nt, Artificial Sequence
  Description of Artificial Sequence: Synthetic oligonucleotide
gaauugguaga

SEQ ID NO: 91495 - RNA, 12 nt, Artificial Sequence
  Description of Artificial Sequence: Synthetic oligonucleotide
uagacuuggaga

SEQ ID NO: 91496 - RNA, 12 nt, Artificial Sequence
  Description of Artificial Sequence: Synthetic oligonucleotide
uacaguauucca

SEQ ID NO: 91497 - RNA, 14 nt, Artificial Sequence
  Description of Artificial Sequence: Synthetic oligonucleotide
cacugaugaauuaa

SEQ ID NO: 91498 - RNA, 11 nt, Artificial Sequence
  Description of Artificial Sequence: Synthetic oligonucleotide
cacaucaucac

SEQ ID NO: 91499 - RNA, 12 nt, Artificial Sequence
  Description of Artificial Sequence: Synthetic oligonucleotide
ucaccaaacaga

SEQ ID NO: 91500 - RNA, 11 nt, Artificial Sequence
  Description of Artificial Sequence: Synthetic oligonucleotide
gaacaugaugg

SEQ ID NO: 91501 - RNA, 11 nt, Artificial Sequence
  Description of Artificial Sequence: Synthetic oligonucleotide
auguagacugc

SEQ ID NO: 91502 - RNA, 12 nt, Artificial Sequence
  Description of Artificial Sequence: Synthetic oligonucleotide
gaucuauuuaug

SEQ ID NO: 91503 - RNA, 11 nt, Artificial Sequence
  Description of Artificial Sequence: Synthetic oligonucleotide
cacuauuauca

SEQ ID NO: 91504 - RNA, 10 nt, Artificial Sequence
  Description of Artificial Sequence: Synthetic oligonucleotide
ucaguucugc

SEQ ID NO: 91505 - RNA, 12 nt, Artificial Sequence
  Description of Artificial Sequence: Synthetic oligonucleotide
gauuaaaccuac

SEQ ID NO: 91506 - RNA, 12 nt, Artificial Sequence
  Description of Artificial Sequence: Synthetic oligonucleotide
uaaaauccuucu

SEQ ID NO: 91507 - RNA, 11 nt, Artificial Sequence
  Description of Artificial Sequence: Synthetic oligonucleotide
augcuguagac

SEQ ID NO: 91508 - RNA, 12 nt, Artificial Sequence
  Description of Artificial Sequence: Synthetic oligonucleotide
ugauaggaauag

SEQ ID NO: 91509 - RNA, 10 nt, Artificial Sequence
  Description of Artificial Sequence: Synthetic oligonucleotide
auggcccuga

SEQ ID NO: 91510 - RNA, 10 nt, Artificial Sequence
  Description of Artificial Sequence: Synthetic oligonucleotide
uccucaagca

SEQ ID NO: 91511 - RNA, 9 nt, Artificial Sequence
  Description of Artificial Sequence: Synthetic oligonucleotide
uucagccca

SEQ ID NO: 91512 - RNA, 10 nt, Artificial Sequence
  Description of Artificial Sequence: Synthetic oligonucleotide
cugcugaacc

SEQ ID NO: 91513 - RNA, 11 nt, Artificial Sequence
  Description of Artificial Sequence: Synthetic oligonucleotide
aguucucuuca

SEQ ID NO: 91514 - RNA, 10 nt, Artificial Sequence
  Description of Artificial Sequence: Synthetic oligonucleotide
cagccuagag

SEQ ID NO: 91515 - RNA, 12 nt, Artificial Sequence
  Description of Artificial Sequence: Synthetic oligonucleotide
ucugugaagugu

SEQ ID NO: 91516 - RNA, 13 nt, Artificial Sequence
  Description of Artificial Sequence: Synthetic oligonucleotide
gagaaaauuucaa

SEQ ID NO: 91517 - RNA, 10 nt, Artificial Sequence
  Description of Artificial Sequence: Synthetic oligonucleotide
auccuccuga

SEQ ID NO: 91518 - RNA, 11 nt, Artificial Sequence
  Description of Artificial Sequence: Synthetic oligonucleotide
ugacaucauau

SEQ ID NO: 91519 - RNA, 12 nt, Artificial Sequence
  Description of Artificial Sequence: Synthetic oligonucleotide
aucuucaucaua

SEQ ID NO: 91520 - RNA, 12 nt, Artificial Sequence
  Description of Artificial Sequence: Synthetic oligonucleotide
acuagcuauuaa

SEQ ID NO: 91521 - RNA, 13 nt, Artificial Sequence
  Description of Artificial Sequence: Synthetic oligonucleotide
cucuacuaaaaau

SEQ ID NO: 91522 - RNA, 11 nt, Artificial Sequence
  Description of Artificial Sequence: Synthetic oligonucleotide
cuaucucgccu

SEQ ID NO: 91523 - RNA, 12 nt, Artificial Sequence
  Description of Artificial Sequence: Synthetic oligonucleotide
uucgguccaguu

SEQ ID NO: 91524 - RNA, 10 nt, Artificial Sequence
  Description of Artificial Sequence: Synthetic oligonucleotide
auguagccgc

SEQ ID NO: 91525 - RNA, 11 nt, Artificial Sequence
  Description of Artificial Sequence: Synthetic oligonucleotide
gaggagacuug

SEQ ID NO: 91526 - RNA, 11 nt, Artificial Sequence
  Description of Artificial Sequence: Synthetic oligonucleotide
aguagugagga

SEQ ID NO: 91527 - RNA, 13 nt, Artificial Sequence
  Description of Artificial Sequence: Synthetic oligonucleotide
agaugaguacaaa

SEQ ID NO: 91528 - RNA, 12 nt, Artificial Sequence
  Description of Artificial Sequence: Synthetic oligonucleotide
uuguuaaugggc

SEQ ID NO: 91529 - RNA, 12 nt, Artificial Sequence
  Description of Artificial Sequence: Synthetic oligonucleotide
uuuuaauuuauu

SEQ ID NO: 91530 - RNA, 11 nt, Artificial Sequence
  Description of Artificial Sequence: Synthetic oligonucleotide
auuuaaauaug

SEQ ID NO: 91531 - RNA, 12 nt, Artificial Sequence
  Description of Artificial Sequence: Synthetic oligonucleotide
auccuuuguuuc

SEQ ID NO: 91532 - RNA, 13 nt, Artificial Sequence
  Description of Artificial Sequence: Synthetic oligonucleotide
gucuaaguguuug

SEQ ID NO: 91533 - RNA, 11 nt, Artificial Sequence
  Description of Artificial Sequence: Synthetic oligonucleotide
ccugugacaaa

SEQ ID NO: 91534 - RNA, 12 nt, Artificial Sequence
  Description of Artificial Sequence: Synthetic oligonucleotide
caggcugaauua

SEQ ID NO: 91535 - RNA, 13 nt, Artificial Sequence
  Description of Artificial Sequence: Synthetic oligonucleotide
ucauucuuacaau

SEQ ID NO: 91536 - RNA, 14 nt, Artificial Sequence
  Description of Artificial Sequence: Synthetic oligonucleotide
cauucuuacaauug

SEQ ID NO: 91537 - RNA, 11 nt, Artificial Sequence
  Description of Artificial Sequence: Synthetic oligonucleotide
agagaguguac

SEQ ID NO: 91538 - RNA, 11 nt, Artificial Sequence
  Description of Artificial Sequence: Synthetic oligonucleotide
gaacucagcag

SEQ ID NO: 91539 - RNA, 12 nt, Artificial Sequence
  Description of Artificial Sequence: Synthetic oligonucleotide
uuauuuucagua

SEQ ID NO: 91540 - RNA, 11 nt, Artificial Sequence
  Description of Artificial Sequence: Synthetic oligonucleotide
cuuaaauggaa

SEQ ID NO: 91541 - RNA, 12 nt, Artificial Sequence
  Description of Artificial Sequence: Synthetic oligonucleotide
gccuaaaauugu

SEQ ID NO: 91542 - RNA, 12 nt, Artificial Sequence
  Description of Artificial Sequence: Synthetic oligonucleotide
acuaacaucugg

SEQ ID NO: 91543 - RNA, 11 nt, Artificial Sequence
  Description of Artificial Sequence: Synthetic oligonucleotide
gacugugagcu

SEQ ID NO: 91544 - RNA, 13 nt, Artificial Sequence
  Description of Artificial Sequence: Synthetic oligonucleotide
gcuuuuuauuaau

SEQ ID NO: 91545 - RNA, 12 nt, Artificial Sequence
  Description of Artificial Sequence: Synthetic oligonucleotide
ucuucuuacauu

SEQ ID NO: 91546 - RNA, 14 nt, Artificial Sequence
  Description of Artificial Sequence: Synthetic oligonucleotide
auuuguaaaaaugu

SEQ ID NO: 91547 - RNA, 14 nt, Artificial Sequence
  Description of Artificial Sequence: Synthetic oligonucleotide
ucuuaauucauauu

SEQ ID NO: 91548 - RNA, 12 nt, Artificial Sequence
  Description of Artificial Sequence: Synthetic oligonucleotide
aacuaaucauga

SEQ ID NO: 91549 - RNA, 11 nt, Artificial Sequence
  Description of Artificial Sequence: Synthetic oligonucleotide
cugcucuuggg

SEQ ID NO: 91550 - RNA, 12 nt, Artificial Sequence
  Description of Artificial Sequence: Synthetic oligonucleotide
aguagcuuugag

SEQ ID NO: 91551 - RNA, 13 nt, Artificial Sequence
  Description of Artificial Sequence: Synthetic oligonucleotide
acguaauauuuca

SEQ ID NO: 91552 - RNA, 12 nt, Artificial Sequence
  Description of Artificial Sequence: Synthetic oligonucleotide
auucucuucacu

SEQ ID NO: 91553 - RNA, 13 nt, Artificial Sequence
  Description of Artificial Sequence: Synthetic oligonucleotide
uaaugcuaagaaa

SEQ ID NO: 91554 - RNA, 11 nt, Artificial Sequence
  Description of Artificial Sequence: Synthetic oligonucleotide
cugaaaaucaa

SEQ ID NO: 91555 - RNA, 13 nt, Artificial Sequence
  Description of Artificial Sequence: Synthetic oligonucleotide
auaugauuacuuu

SEQ ID NO: 91556 - RNA, 13 nt, Artificial Sequence
  Description of Artificial Sequence: Synthetic oligonucleotide
auuuuguucuaca

SEQ ID NO: 91557 - RNA, 11 nt, Artificial Sequence
  Description of Artificial Sequence: Synthetic oligonucleotide
ccgggacucuc

SEQ ID NO: 91558 - RNA, 13 nt, Artificial Sequence
  Description of Artificial Sequence: Synthetic oligonucleotide
cuuuaaaguaaag

SEQ ID NO: 91559 - RNA, 12 nt, Artificial Sequence
  Description of Artificial Sequence: Synthetic oligonucleotide
cuggaagccugg

SEQ ID NO: 91560 - RNA, 13 nt, Artificial Sequence
  Description of Artificial Sequence: Synthetic oligonucleotide
aaacaaaagagag

SEQ ID NO: 91561 - RNA, 12 nt, Artificial Sequence
  Description of Artificial Sequence: Synthetic oligonucleotide
ucaguuaugccg

SEQ ID NO: 91562 - RNA, 12 nt, Artificial Sequence
  Description of Artificial Sequence: Synthetic oligonucleotide
aaaagaagucca

SEQ ID NO: 91563 - RNA, 10 nt, Artificial Sequence
  Description of Artificial Sequence: Synthetic oligonucleotide
ggugagguua

SEQ ID NO: 91564 - RNA, 10 nt, Artificial Sequence
  Description of Artificial Sequence: Synthetic oligonucleotide
ggaagaggac

SEQ ID NO: 91565 - RNA, 12 nt, Artificial Sequence
  Description of Artificial Sequence: Synthetic oligonucleotide
agcaaguauugu

SEQ ID NO: 91566 - RNA, 11 nt, Artificial Sequence
  Description of Artificial Sequence: Synthetic oligonucleotide
uuguagcacuc

SEQ ID NO: 91567 - RNA, 13 nt, Artificial Sequence
  Description of Artificial Sequence: Synthetic oligonucleotide
caaaaccacaaau

SEQ ID NO: 91568 - RNA, 11 nt, Artificial Sequence
  Description of Artificial Sequence: Synthetic oligonucleotide
aagcccauaca

SEQ ID NO: 91569 - RNA, 10 nt, Artificial Sequence
  Description of Artificial Sequence: Synthetic oligonucleotide
gcccauacag

SEQ ID NO: 91570 - RNA, 11 nt, Artificial Sequence
  Description of Artificial Sequence: Synthetic oligonucleotide
agaaaccuucc

SEQ ID NO: 91571 - RNA, 9 nt, Artificial Sequence
  Description of Artificial Sequence: Synthetic oligonucleotide
uauaccuac

SEQ ID NO: 91572 - RNA, 12 nt, Artificial Sequence
  Description of Artificial Sequence: Synthetic oligonucleotide
ccaguuuucgga

SEQ ID NO: 91573 - RNA, 8 nt, Artificial Sequence
  Description of Artificial Sequence: Synthetic oligonucleotide
gaacaggg

SEQ ID NO: 91574 - RNA, 12 nt, Artificial Sequence
  Description of Artificial Sequence: Synthetic oligonucleotide
uaacuuuccagu

SEQ ID NO: 91575 - RNA, 13 nt, Artificial Sequence
  Description of Artificial Sequence: Synthetic oligonucleotide
aaguuugguuuug

SEQ ID NO: 91576 - RNA, 11 nt, Artificial Sequence
  Description of Artificial Sequence: Synthetic oligonucleotide
uucccacugua

SEQ ID NO: 91577 - RNA, 12 nt, Artificial Sequence
  Description of Artificial Sequence: Synthetic oligonucleotide
gauaccauauga

SEQ ID NO: 91578 - RNA, 10 nt, Artificial Sequence
  Description of Artificial Sequence: Synthetic oligonucleotide
acaugggcug

SEQ ID NO: 91579 - RNA, 12 nt, Artificial Sequence
  Description of Artificial Sequence: Synthetic oligonucleotide
aacuuuuucaua

SEQ ID NO: 91580 - RNA, 11 nt, Artificial Sequence
  Description of Artificial Sequence: Synthetic oligonucleotide
augaggccgga

SEQ ID NO: 91581 - RNA, 10 nt, Artificial Sequence
  Description of Artificial Sequence: Synthetic oligonucleotide
cugcauuugu

SEQ ID NO: 91582 - RNA, 12 nt, Artificial Sequence
  Description of Artificial Sequence: Synthetic oligonucleotide
auguuuacuacc

SEQ ID NO: 91583 - RNA, 14 nt, Artificial Sequence
  Description of Artificial Sequence: Synthetic oligonucleotide
auuuuuugaugaaa

SEQ ID NO: 91584 - RNA, 13 nt, Artificial Sequence
  Description of Artificial Sequence: Synthetic oligonucleotide
agugugugaauuu

SEQ ID NO: 91585 - RNA, 12 nt, Artificial Sequence
  Description of Artificial Sequence: Synthetic oligonucleotide
agcaauguaugu

SEQ ID NO: 91586 - RNA, 13 nt, Artificial Sequence
  Description of Artificial Sequence: Synthetic oligonucleotide
aagcacauauaua

SEQ ID NO: 91587 - RNA, 13 nt, Artificial Sequence
  Description of Artificial Sequence: Synthetic oligonucleotide
uaauaguuucucc

SEQ ID NO: 91588 - RNA, 12 nt, Artificial Sequence
  Description of Artificial Sequence: Synthetic oligonucleotide
guuucuccaaau

SEQ ID NO: 91589 - RNA, 12 nt, Artificial Sequence
  Description of Artificial Sequence: Synthetic oligonucleotide
acuuccuagaaa

SEQ ID NO: 91590 - RNA, 12 nt, Artificial Sequence
  Description of Artificial Sequence: Synthetic oligonucleotide
acaccauauaug

SEQ ID NO: 91591 - RNA, 13 nt, Artificial Sequence
  Description of Artificial Sequence: Synthetic oligonucleotide
uauaugaauggag

SEQ ID NO: 91592 - RNA, 12 nt, Artificial Sequence
  Description of Artificial Sequence: Synthetic oligonucleotide
cauuuacaggga

SEQ ID NO: 91593 - RNA, 12 nt, Artificial Sequence
  Description of Artificial Sequence: Synthetic oligonucleotide
auuuacagggac

SEQ ID NO: 91594 - RNA, 9 nt, Artificial Sequence
  Description of Artificial Sequence: Synthetic oligonucleotide
gggaccuga

SEQ ID NO: 91595 - RNA, 13 nt, Artificial Sequence
  Description of Artificial Sequence: Synthetic oligonucleotide
guuugacugcauc

SEQ ID NO: 91596 - RNA, 12 nt, Artificial Sequence
  Description of Artificial Sequence: Synthetic oligonucleotide
uugacugcaucg

SEQ ID NO: 91597 - RNA, 11 nt, Artificial Sequence
  Description of Artificial Sequence: Synthetic oligonucleotide
aguucacaggg

SEQ ID NO: 91598 - RNA, 12 nt, Artificial Sequence
  Description of Artificial Sequence: Synthetic oligonucleotide
gcaccucugucc

SEQ ID NO: 91599 - RNA, 14 nt, Artificial Sequence
  Description of Artificial Sequence: Synthetic oligonucleotide
guuugucuuuuuaa

SEQ ID NO: 91600 - RNA, 13 nt, Artificial Sequence
  Description of Artificial Sequence: Synthetic oligonucleotide
uugucuuuuuaag

SEQ ID NO: 91601 - RNA, 12 nt, Artificial Sequence
  Description of Artificial Sequence: Synthetic oligonucleotide
cuaaagguuguc

SEQ ID NO: 91602 - RNA, 11 nt, Artificial Sequence
  Description of Artificial Sequence: Synthetic oligonucleotide
agguugucgac

SEQ ID NO: 91603 - RNA, 12 nt, Artificial Sequence
  Description of Artificial Sequence: Synthetic oligonucleotide
ccuggcaauugu

SEQ ID NO: 91604 - RNA, 11 nt, Artificial Sequence
  Description of Artificial Sequence: Synthetic oligonucleotide
guggugcgagg

SEQ ID NO: 91605 - RNA, 12 nt, Artificial Sequence
  Description of Artificial Sequence: Synthetic oligonucleotide
gagacaugaaau

SEQ ID NO: 91606 - RNA, 12 nt, Artificial Sequence
  Description of Artificial Sequence: Synthetic oligonucleotide
uauauuucucca

SEQ ID NO: 91607 - RNA, 9 nt, Artificial Sequence
  Description of Artificial Sequence: Synthetic oligonucleotide
augaaggcu

SEQ ID NO: 91608 - RNA, 10 nt, Artificial Sequence
  Description of Artificial Sequence: Synthetic oligonucleotide
cuggaguggu

SEQ ID NO: 91609 - RNA, 10 nt, Artificial Sequence
  Description of Artificial Sequence: Synthetic oligonucleotide
ggaagagagg

SEQ ID NO: 91610 - RNA, 11 nt, Artificial Sequence
  Description of Artificial Sequence: Synthetic oligonucleotide
uugcaucgggc

SEQ ID NO: 91611 - RNA, 12 nt, Artificial Sequence
  Description of Artificial Sequence: Synthetic oligonucleotide
uauccuacugug

SEQ ID NO: 91612 - RNA, 12 nt, Artificial Sequence
  Description of Artificial Sequence: Synthetic oligonucleotide
ccuacuguguaa

SEQ ID NO: 91613 - RNA, 11 nt, Artificial Sequence
  Description of Artificial Sequence: Synthetic oligonucleotide
cuuguagugua

SEQ ID NO: 91614 - RNA, 12 nt, Artificial Sequence
  Description of Artificial Sequence: Synthetic oligonucleotide
cuuuguugauug

SEQ ID NO: 91615 - RNA, 13 nt, Artificial Sequence
  Description of Artificial Sequence: Synthetic oligonucleotide
uuguugauugaaa

SEQ ID NO: 91616 - RNA, 14 nt, Artificial Sequence
  Description of Artificial Sequence: Synthetic oligonucleotide
ucuuuuucuuccau

SEQ ID NO: 91617 - RNA, 12 nt, Artificial Sequence
  Description of Artificial Sequence: Synthetic oligonucleotide
aucuuccuucua

SEQ ID NO: 91618 - RNA, 12 nt, Artificial Sequence
  Description of Artificial Sequence: Synthetic oligonucleotide
ugaaugcuucau

SEQ ID NO: 91619 - RNA, 12 nt, Artificial Sequence
  Description of Artificial Sequence: Synthetic oligonucleotide
gaaugcuucaug

SEQ ID NO: 91620 - RNA, 12 nt, Artificial Sequence
  Description of Artificial Sequence: Synthetic oligonucleotide
auucuacuuuga

SEQ ID NO: 91621 - RNA, 12 nt, Artificial Sequence
  Description of Artificial Sequence: Synthetic oligonucleotide
gcaacuacagac

SEQ ID NO: 91622 - RNA, 12 nt, Artificial Sequence
  Description of Artificial Sequence: Synthetic oligonucleotide
accaaggucaac

SEQ ID NO: 91623 - RNA, 12 nt, Artificial Sequence
  Description of Artificial Sequence: Synthetic oligonucleotide
gacuaucucgac

SEQ ID NO: 91624 - RNA, 12 nt, Artificial Sequence
  Description of Artificial Sequence: Synthetic oligonucleotide
accuucccaaac

SEQ ID NO: 91625 - RNA, 13 nt, Artificial Sequence
  Description of Artificial Sequence: Synthetic oligonucleotide
caagcuuagaacu

SEQ ID NO: 91626 - RNA, 14 nt, Artificial Sequence
  Description of Artificial Sequence: Synthetic oligonucleotide
gcuuagaacuuuaa

SEQ ID NO: 91627 - RNA, 13 nt, Artificial Sequence
  Description of Artificial Sequence: Synthetic oligonucleotide
aacuuuaagcaac

SEQ ID NO: 91628 - RNA, 10 nt, Artificial Sequence
  Description of Artificial Sequence: Synthetic oligonucleotide
agaccaccac

SEQ ID NO: 91629 - RNA, 13 nt, Artificial Sequence
  Description of Artificial Sequence: Synthetic oligonucleotide
cgagaaauaaagu

SEQ ID NO: 91630 - RNA, 13 nt, Artificial Sequence
  Description of Artificial Sequence: Synthetic oligonucleotide
gagaaauaaaguu

SEQ ID NO: 91631 - RNA, 11 nt, Artificial Sequence
  Description of Artificial Sequence: Synthetic oligonucleotide
ggaaaugaucc

SEQ ID NO: 91632 - RNA, 12 nt, Artificial Sequence
  Description of Artificial Sequence: Synthetic oligonucleotide
aagaaaugaaac

SEQ ID NO: 91633 - RNA, 12 nt, Artificial Sequence
  Description of Artificial Sequence: Synthetic oligonucleotide
uuuccauccucc

SEQ ID NO: 91634 - RNA, 14 nt, Artificial Sequence
  Description of Artificial Sequence: Synthetic oligonucleotide
cugaaaaucuuuga

SEQ ID NO: 91635 - RNA, 10 nt, Artificial Sequence
  Description of Artificial Sequence: Synthetic oligonucleotide
gccguucagg

SEQ ID NO: 91636 - RNA, 12 nt, Artificial Sequence
  Description of Artificial Sequence: Synthetic oligonucleotide
aggguccagaag

SEQ ID NO: 91637 - RNA, 12 nt, Artificial Sequence
  Description of Artificial Sequence: Synthetic oligonucleotide
caagacugcuug

SEQ ID NO: 91638 - RNA, 12 nt, Artificial Sequence
  Description of Artificial Sequence: Synthetic oligonucleotide
ccaugucuuugg

SEQ ID NO: 91639 - RNA, 10 nt, Artificial Sequence
  Description of Artificial Sequence: Synthetic oligonucleotide
ccugaaacac

SEQ ID NO: 91640 - RNA, 11 nt, Artificial Sequence
  Description of Artificial Sequence: Synthetic oligonucleotide
cucuguaccuc

SEQ ID NO: 91641 - RNA, 11 nt, Artificial Sequence
  Description of Artificial Sequence: Synthetic oligonucleotide
gcaagacaaga

SEQ ID NO: 91642 - RNA, 12 nt, Artificial Sequence
  Description of Artificial Sequence: Synthetic oligonucleotide
caagacaagaaa

SEQ ID NO: 91643 - RNA, 11 nt, Artificial Sequence
  Description of Artificial Sequence: Synthetic oligonucleotide
guacaagaucc

SEQ ID NO: 91644 - RNA, 11 nt, Artificial Sequence
  Description of Artificial Sequence: Synthetic oligonucleotide
guacuugcaga

SEQ ID NO: 91645 - RNA, 12 nt, Artificial Sequence
  Description of Artificial Sequence: Synthetic oligonucleotide
gaucgauacaga

SEQ ID NO: 91646 - RNA, 12 nt, Artificial Sequence
  Description of Artificial Sequence: Synthetic oligonucleotide
auaaaaauaaau

SEQ ID NO: 91647 - RNA, 12 nt, Artificial Sequence
  Description of Artificial Sequence: Synthetic oligonucleotide
aaaaauaaauau

SEQ ID NO: 91648 - RNA, 12 nt, Artificial Sequence
  Description of Artificial Sequence: Synthetic oligonucleotide
uugacugcugug

SEQ ID NO: 91649 - RNA, 12 nt, Artificial Sequence
  Description of Artificial Sequence: Synthetic oligonucleotide
gagaugagagac

SEQ ID NO: 91650 - RNA, 9 nt, Artificial Sequence
  Description of Artificial Sequence: Synthetic oligonucleotide
cccacuugg

SEQ ID NO: 91651 - RNA, 3057 nt, Homo sapiens
cacuuucgagagugccgucuauuugccacacacuucccugaugaaaugucuggauuuggacuaaagaaaaaaggaaaggcuagcagucauccaacagaaucaugagacagacuuugccuuguaucuacuuuugggggggccuuuugcccuuugggaugcugugugcauccuccaccaccaagugcacuguuagccaugaaguugcugacugcagccaccugaaguugacucagguacccgaugaucuacccacaaacauaacaguguugaaccuuacccauaaucaacucagaagauuaccagccgccaacuucacaagguauagccagcuaacuagcuuggauguaggauuuaacaccaucucaaaacuggagccagaauugugccagaaacuucccauguuaaaaguuuugaaccuccagcacaaugagcuaucucaacuuucugauaaaaccuuugccuucugcacgaauuugacugaacuccaucucauguccaacucaauccagaaaauuaaaaauaaucccuuugucaagcagaagaauuuaaucacauuagaucugucucauaauggcuugucaucuacaaaauuaggaacucagguucagcuggaaaaucuccaagagcuucuauuaucaaacaauaaaauucaagcgcuaaaaagugaagaacuggauaucuuugccaauucaucuuuaaaaaaauuagaguugucaucgaaucaaauuaaagaguuuucuccaggguguuuucacgcaauuggaagauuauuuggccucuuucugaacaauguccagcugggucccagccuuacagagaagcuauguuuggaauuagcaaacacaagcauucggaaucugucucugaguaacagccagcuguccaccaccagcaauacaacuuucuugggacuaaaguggacaaaucucacuaugcucgaucuuuccuacaacaacuuaaaugugguugguaacgauuccuuugcuuggcuuccacaacuagaauauuucuuccuagaguauaauaauauacagcauuuguuuucucacucuuugcacgggcuuuucaaugugagguaccugaauuugaaacggucuuuuacuaaacaaaguauuucccuugccucacuccccaagauugaugauuuuucuuuucaguggcuaaaauguuuggagcaccuuaacauggaagauaaugauauuccaggcauaaaaagcaauauguucacaggauugauaaaccugaaauacuuaagucuauccaacuccuuuacaaguuugcgaacuuugacaaaugaaacauuuguaucacuugcucauucucccuuacacauacucaaccuaaccaagaauaaaaucucaaaaauagagagugaugcuuucucuugguugggccaccuagaaguacuugaccugggccuuaaugaaauugggcaagaacucacaggccaggaauggagaggucuagaaaauauuuucgaaaucuaucuuuccuacaacaaguaccugcagcugacuaggaacuccuuugccuuggucccaagccuucaacgacugaugcuccgaaggguggcccuuaaaaauguggauagcucuccuucaccauuccagccucuucguaacuugaccauucuggaucuaagcaacaacaacauagccaacauaaaugaugacauguuggagggucuugagaaacuagaaauucucgauuugcagcauaacaacuuagcacggcucuggaaacacgcaaacccugguggucccauuuauuuccuaaagggucugucucaccuccacauccuuaacuuggaguccaacggcuuugacgagaucccaguugaggucuucaaggauuuauuugaacuaaagaucaucgauuuaggauugaauaauuuaaacacacuuccagcaucugucuuuaauaaucaggugucucuaaagucauugaaccuucagaagaaucucauaacauccguugagaagaagguuuucgggccagcuuucaggaaccugacugaguuagauaugcgcuuuaaucccuuugauugcacgugugaaaguauugccugguuuguuaauuggauuaacgagacccauaccaacaucccugagcugucaagccacuaccuuugcaacacuccaccucacuaucauggguucccagugagacuuuuugauacaucaucuugcaaagacagugcccccuuugaacucuuuuucaugaucaauaccaguauccuguugauuuuuaucuuuauuguacuucucauccacuuugagggcuggaggauaucuuuuuauuggaauguuucaguacaucgaguucuugguuucaaagaaauagacagacagacagaacaguuugaauaugcagcauauauaauucaugccuauaaagauaaggauugggucugggaacauuucucuucaauggaaaaggaagaccaaucucucaaauuuugucuggaagaaagggacuuugaggcggguguuuuugaacuagaagcaauuguuaacagcaucaaaagaagcagaaaaauuauuuuuguuauaacacaccaucuauuaaaagacccauuaugcaaaagauucaagguacaucaugcaguucaacaagcuauugaacaaaaucuggauuccauuauauugguuuuccuugaggagauuccagauuauaaacugaaccaugcacucuguuugcgaagaggaauguuuaaaucucacugcaucuugaacuggccaguucagaaagaacggauaggugccuuucgucauaaauugcaaguagcacuuggauccaaaaacucuguacauuaaauuuauuuaaauauucaauuagcaaaggagaaacuuucucaauuuaaaaaguucuauggcaaauuuaaguuuuccauaaagguguuauaauuuguuuauucauauuuguaaaugauuauauucuaucacaauuacaucucuucuaggaaaaugugucuccuuauuucaggccuauuuuugacaauugacuuaauuuuacccaaaauaaaacauauaagcacguaaaaaaaaaaaaaaaaaa

SEQ ID NO: 91652 - RNA, 19 nt, Artificial Sequence
  Description of Artificial Sequence: Synthetic oligonucleotide
cacuuucgagagugccguc

SEQ ID NO: 91653 - RNA, 19 nt, Artificial Sequence
  Description of Artificial Sequence: Synthetic oligonucleotide
cuauuugccacacacuucc

SEQ ID NO: 91654 - RNA, 19 nt, Artificial Sequence
  Description of Artificial Sequence: Synthetic oligonucleotide
ccugaugaaaugucuggau

SEQ ID NO: 91655 - RNA, 19 nt, Artificial Sequence
  Description of Artificial Sequence: Synthetic oligonucleotide
uuuggacuaaagaaaaaag

SEQ ID NO: 91656 - RNA, 19 nt, Artificial Sequence
  Description of Artificial Sequence: Synthetic oligonucleotide
ggaaaggcuagcagucauc

SEQ ID NO: 91657 - RNA, 19 nt, Artificial Sequence
  Description of Artificial Sequence: Synthetic oligonucleotide
ccaacagaaucaugagaca

SEQ ID NO: 91658 - RNA, 19 nt, Artificial Sequence
  Description of Artificial Sequence: Synthetic oligonucleotide
agacuuugccuuguaucua

SEQ ID NO: 91659 - RNA, 19 nt, Artificial Sequence
  Description of Artificial Sequence: Synthetic oligonucleotide
acuuuugggggggccuuuu

SEQ ID NO: 91660 - RNA, 19 nt, Artificial Sequence
  Description of Artificial Sequence: Synthetic oligonucleotide
ugcccuuugggaugcugug

SEQ ID NO: 91661 - RNA, 19 nt, Artificial Sequence
  Description of Artificial Sequence: Synthetic oligonucleotide
gugcauccuccaccaccaa

SEQ ID NO: 91662 - RNA, 19 nt, Artificial Sequence
  Description of Artificial Sequence: Synthetic oligonucleotide
agugcacuguuagccauga

SEQ ID NO: 91663 - RNA, 19 nt, Artificial Sequence
  Description of Artificial Sequence: Synthetic oligonucleotide
aaguugcugacugcagcca

SEQ ID NO: 91664 - RNA, 19 nt, Artificial Sequence
  Description of Artificial Sequence: Synthetic oligonucleotide
accugaaguugacucaggu

SEQ ID NO: 91665 - RNA, 19 nt, Artificial Sequence
  Description of Artificial Sequence: Synthetic oligonucleotide
uacccgaugaucuacccac

SEQ ID NO: 91666 - RNA, 19 nt, Artificial Sequence
  Description of Artificial Sequence: Synthetic oligonucleotide
caaacauaacaguguugaa

SEQ ID NO: 91667 - RNA, 19 nt, Artificial Sequence
  Description of Artificial Sequence: Synthetic oligonucleotide
accuuacccauaaucaacu

SEQ ID NO: 91668 - RNA, 19 nt, Artificial Sequence
  Description of Artificial Sequence: Synthetic oligonucleotide
ucagaagauuaccagccgc

SEQ ID NO: 91669 - RNA, 19 nt, Artificial Sequence
  Description of Artificial Sequence: Synthetic oligonucleotide
ccaacuucacaagguauag

SEQ ID NO: 91670 - RNA, 19 nt, Artificial Sequence
  Description of Artificial Sequence: Synthetic oligonucleotide
gccagcuaacuagcuugga

SEQ ID NO: 91671 - RNA, 19 nt, Artificial Sequence
  Description of Artificial Sequence: Synthetic oligonucleotide
auguaggauuuaacaccau

SEQ ID NO: 91672 - RNA, 19 nt, Artificial Sequence
  Description of Artificial Sequence: Synthetic oligonucleotide
ucucaaaacuggagccaga

SEQ ID NO: 91673 - RNA, 19 nt, Artificial Sequence
  Description of Artificial Sequence: Synthetic oligonucleotide
aauugugccagaaacuucc

SEQ ID NO: 91674 - RNA, 19 nt, Artificial Sequence
  Description of Artificial Sequence: Synthetic oligonucleotide
ccauguuaaaaguuuugaa

SEQ ID NO: 91675 - RNA, 19 nt, Artificial Sequence
  Description of Artificial Sequence: Synthetic oligonucleotide
accuccagcacaaugagcu

SEQ ID NO: 91676 - RNA, 19 nt, Artificial Sequence
  Description of Artificial Sequence: Synthetic oligonucleotide
uaucucaacuuucugauaa

SEQ ID NO: 91677 - RNA, 19 nt, Artificial Sequence
  Description of Artificial Sequence: Synthetic oligonucleotide
aaaccuuugccuucugcac

SEQ ID NO: 91678 - RNA, 19 nt, Artificial Sequence
  Description of Artificial Sequence: Synthetic oligonucleotide
cgaauuugacugaacucca

SEQ ID NO: 91679 - RNA, 19 nt, Artificial Sequence
  Description of Artificial Sequence: Synthetic oligonucleotide
aucucauguccaacucaau

SEQ ID NO: 91680 - RNA, 19 nt, Artificial Sequence
  Description of Artificial Sequence: Synthetic oligonucleotide
uccagaaaauuaaaaauaa

SEQ ID NO: 91681 - RNA, 19 nt, Artificial Sequence
  Description of Artificial Sequence: Synthetic oligonucleotide
aucccuuugucaagcagaa

SEQ ID NO: 91682 - RNA, 19 nt, Artificial Sequence
  Description of Artificial Sequence: Synthetic oligonucleotide
agaauuuaaucacauuaga

SEQ ID NO: 91683 - RNA, 19 nt, Artificial Sequence
  Description of Artificial Sequence: Synthetic oligonucleotide
aucugucucauaauggcuu

SEQ ID NO: 91684 - RNA, 19 nt, Artificial Sequence
  Description of Artificial Sequence: Synthetic oligonucleotide
ugucaucuacaaaauuagg

SEQ ID NO: 91685 - RNA, 19 nt, Artificial Sequence
  Description of Artificial Sequence: Synthetic oligonucleotide
gaacucagguucagcugga

SEQ ID NO: 91686 - RNA, 19 nt, Artificial Sequence
  Description of Artificial Sequence: Synthetic oligonucleotide
aaaaucuccaagagcuucu

SEQ ID NO: 91687 - RNA, 19 nt, Artificial Sequence
  Description of Artificial Sequence: Synthetic oligonucleotide
uauuaucaaacaauaaaau

SEQ ID NO: 91688 - RNA, 19 nt, Artificial Sequence
  Description of Artificial Sequence: Synthetic oligonucleotide
uucaagcgcuaaaaaguga

SEQ ID NO: 91689 - RNA, 19 nt, Artificial Sequence
  Description of Artificial Sequence: Synthetic oligonucleotide
aagaacuggauaucuuugc

SEQ ID NO: 91690 - RNA, 19 nt, Artificial Sequence
  Description of Artificial Sequence: Synthetic oligonucleotide
ccaauucaucuuuaaaaaa

SEQ ID NO: 91691 - RNA, 19 nt, Artificial Sequence
  Description of Artificial Sequence: Synthetic oligonucleotide
aauuagaguugucaucgaa

SEQ ID NO: 91692 - RNA, 19 nt, Artificial Sequence
  Description of Artificial Sequence: Synthetic oligonucleotide
aucaaauuaaagaguuuuc

SEQ ID NO: 91693 - RNA, 19 nt, Artificial Sequence
  Description of Artificial Sequence: Synthetic oligonucleotide
cuccaggguguuuucacgc

SEQ ID NO: 91694 - RNA, 19 nt, Artificial Sequence
  Description of Artificial Sequence: Synthetic oligonucleotide
caauuggaagauuauuugg

SEQ ID NO: 91695 - RNA, 19 nt, Artificial Sequence
  Description of Artificial Sequence: Synthetic oligonucleotide
gccucuuucugaacaaugu

SEQ ID NO: 91696 - RNA, 19 nt, Artificial Sequence
  Description of Artificial Sequence: Synthetic oligonucleotide
uccagcugggucccagccu

SEQ ID NO: 91697 - RNA, 19 nt, Artificial Sequence
  Description of Artificial Sequence: Synthetic oligonucleotide
uuacagagaagcuauguuu

SEQ ID NO: 91698 - RNA, 19 nt, Artificial Sequence
  Description of Artificial Sequence: Synthetic oligonucleotide
uggaauuagcaaacacaag

SEQ ID NO: 91699 - RNA, 19 nt, Artificial Sequence
  Description of Artificial Sequence: Synthetic oligonucleotide
gcauucggaaucugucucu

SEQ ID NO: 91700 - RNA, 19 nt, Artificial Sequence
  Description of Artificial Sequence: Synthetic oligonucleotide
ugaguaacagccagcuguc

SEQ ID NO: 91701 - RNA, 19 nt, Artificial Sequence
  Description of Artificial Sequence: Synthetic oligonucleotide
ccaccaccagcaauacaac

SEQ ID NO: 91702 - RNA, 19 nt, Artificial Sequence
  Description of Artificial Sequence: Synthetic oligonucleotide
cuuucuugggacuaaagug

SEQ ID NO: 91703 - RNA, 19 nt, Artificial Sequence
  Description of Artificial Sequence: Synthetic oligonucleotide
ggacaaaucucacuaugcu

SEQ ID NO: 91704 - RNA, 19 nt, Artificial Sequence
  Description of Artificial Sequence: Synthetic oligonucleotide
ucgaucuuuccuacaacaa

SEQ ID NO: 91705 - RNA, 19 nt, Artificial Sequence
  Description of Artificial Sequence: Synthetic oligonucleotide
acuuaaaugugguugguaa

SEQ ID NO: 91706 - RNA, 19 nt, Artificial Sequence
  Description of Artificial Sequence: Synthetic oligonucleotide
acgauuccuuugcuuggcu

SEQ ID NO: 91707 - RNA, 19 nt, Artificial Sequence
  Description of Artificial Sequence: Synthetic oligonucleotide
uuccacaacuagaauauuu

SEQ ID NO: 91708 - RNA, 19 nt, Artificial Sequence
  Description of Artificial Sequence: Synthetic oligonucleotide
ucuuccuagaguauaauaa

SEQ ID NO: 91709 - RNA, 19 nt, Artificial Sequence
  Description of Artificial Sequence: Synthetic oligonucleotide
auauacagcauuuguuuuc

SEQ ID NO: 91710 - RNA, 19 nt, Artificial Sequence
  Description of Artificial Sequence: Synthetic oligonucleotide
cucacucuuugcacgggcu

SEQ ID NO: 91711 - RNA, 19 nt, Artificial Sequence
  Description of Artificial Sequence: Synthetic oligonucleotide
uuuucaaugugagguaccu

SEQ ID NO: 91712 - RNA, 19 nt, Artificial Sequence
  Description of Artificial Sequence: Synthetic oligonucleotide
ugaauuugaaacggucuuu

SEQ ID NO: 91713 - RNA, 19 nt, Artificial Sequence
  Description of Artificial Sequence: Synthetic oligonucleotide
uuacuaaacaaaguauuuc

SEQ ID NO: 91714 - RNA, 19 nt, Artificial Sequence
  Description of Artificial Sequence: Synthetic oligonucleotide
cccuugccucacuccccaa

SEQ ID NO: 91715 - RNA, 19 nt, Artificial Sequence
  Description of Artificial Sequence: Synthetic oligonucleotide
agauugaugauuuuucuuu

SEQ ID NO: 91716 - RNA, 19 nt, Artificial Sequence
  Description of Artificial Sequence: Synthetic oligonucleotide
uucaguggcuaaaauguuu

SEQ ID NO: 91717 - RNA, 19 nt, Artificial Sequence
  Description of Artificial Sequence: Synthetic oligonucleotide
uggagcaccuuaacaugga

SEQ ID NO: 91718 - RNA, 19 nt, Artificial Sequence
  Description of Artificial Sequence: Synthetic oligonucleotide
aagauaaugauauuccagg

SEQ ID NO: 91719 - RNA, 19 nt, Artificial Sequence
  Description of Artificial Sequence: Synthetic oligonucleotide
gcauaaaaagcaauauguu

SEQ ID NO: 91720 - RNA, 19 nt, Artificial Sequence
  Description of Artificial Sequence: Synthetic oligonucleotide
ucacaggauugauaaaccu

SEQ ID NO: 91721 - RNA, 19 nt, Artificial Sequence
  Description of Artificial Sequence: Synthetic oligonucleotide
ugaaauacuuaagucuauc

SEQ ID NO: 91722 - RNA, 19 nt, Artificial Sequence
  Description of Artificial Sequence: Synthetic oligonucleotide
ccaacuccuuuacaaguuu

SEQ ID NO: 91723 - RNA, 19 nt, Artificial Sequence
  Description of Artificial Sequence: Synthetic oligonucleotide
ugcgaacuuugacaaauga

SEQ ID NO: 91724 - RNA, 19 nt, Artificial Sequence
  Description of Artificial Sequence: Synthetic oligonucleotide
aaacauuuguaucacuugc

SEQ ID NO: 91725 - RNA, 19 nt, Artificial Sequence
  Description of Artificial Sequence: Synthetic oligonucleotide
cucauucucccuuacacau

SEQ ID NO: 91726 - RNA, 19 nt, Artificial Sequence
  Description of Artificial Sequence: Synthetic oligonucleotide
uacucaaccuaaccaagaa

SEQ ID NO: 91727 - RNA, 19 nt, Artificial Sequence
  Description of Artificial Sequence: Synthetic oligonucleotide
auaaaaucucaaaaauaga

SEQ ID NO: 91728 - RNA, 19 nt, Artificial Sequence
  Description of Artificial Sequence: Synthetic oligonucleotide
agagugaugcuuucucuug

SEQ ID NO: 91729 - RNA, 19 nt, Artificial Sequence
  Description of Artificial Sequence: Synthetic oligonucleotide
gguugggccaccuagaagu

SEQ ID NO: 91730 - RNA, 19 nt, Artificial Sequence
  Description of Artificial Sequence: Synthetic oligonucleotide
uacuugaccugggccuuaa

SEQ ID NO: 91731 - RNA, 19 nt, Artificial Sequence
  Description of Artificial Sequence: Synthetic oligonucleotide
augaaauugggcaagaacu

SEQ ID NO: 91732 - RNA, 19 nt, Artificial Sequence
  Description of Artificial Sequence: Synthetic oligonucleotide
ucacaggccaggaauggag

SEQ ID NO: 91733 - RNA, 19 nt, Artificial Sequence
  Description of Artificial Sequence: Synthetic oligonucleotide
gaggucuagaaaauauuuu

SEQ ID NO: 91734 - RNA, 19 nt, Artificial Sequence
  Description of Artificial Sequence: Synthetic oligonucleotide
ucgaaaucuaucuuuccua

SEQ ID NO: 91735 - RNA, 19 nt, Artificial Sequence
  Description of Artificial Sequence: Synthetic oligonucleotide
acaacaaguaccugcagcu

SEQ ID NO: 91736 - RNA, 19 nt, Artificial Sequence
  Description of Artificial Sequence: Synthetic oligonucleotide
ugacuaggaacuccuuugc

SEQ ID NO: 91737 - RNA, 19 nt, Artificial Sequence
  Description of Artificial Sequence: Synthetic oligonucleotide
ccuuggucccaagccuuca

SEQ ID NO: 91738 - RNA, 19 nt, Artificial Sequence
  Description of Artificial Sequence: Synthetic oligonucleotide
aacgacugaugcuccgaag

SEQ ID NO: 91739 - RNA, 19 nt, Artificial Sequence
  Description of Artificial Sequence: Synthetic oligonucleotide
ggguggcccuuaaaaaugu

SEQ ID NO: 91740 - RNA, 19 nt, Artificial Sequence
  Description of Artificial Sequence: Synthetic oligonucleotide
uggauagcucuccuucacc

SEQ ID NO: 91741 - RNA, 19 nt, Artificial Sequence
  Description of Artificial Sequence: Synthetic oligonucleotide
cauuccagccucuucguaa

SEQ ID NO: 91742 - RNA, 19 nt, Artificial Sequence
  Description of Artificial Sequence: Synthetic oligonucleotide
acuugaccauucuggaucu

SEQ ID NO: 91743 - RNA, 19 nt, Artificial Sequence
  Description of Artificial Sequence: Synthetic oligonucleotide
uaagcaacaacaacauagc

SEQ ID NO: 91744 - RNA, 19 nt, Artificial Sequence
  Description of Artificial Sequence: Synthetic oligonucleotide
ccaacauaaaugaugacau

SEQ ID NO: 91745 - RNA, 19 nt, Artificial Sequence
  Description of Artificial Sequence: Synthetic oligonucleotide
uguuggagggucuugagaa

SEQ ID NO: 91746 - RNA, 19 nt, Artificial Sequence
  Description of Artificial Sequence: Synthetic oligonucleotide
aacuagaaauucucgauuu

SEQ ID NO: 91747 - RNA, 19 nt, Artificial Sequence
  Description of Artificial Sequence: Synthetic oligonucleotide
ugcagcauaacaacuuagc

SEQ ID NO: 91748 - RNA, 19 nt, Artificial Sequence
  Description of Artificial Sequence: Synthetic oligonucleotide
cacggcucuggaaacacgc

SEQ ID NO: 91749 - RNA, 19 nt, Artificial Sequence
  Description of Artificial Sequence: Synthetic oligonucleotide
caaacccugguggucccau

SEQ ID NO: 91750 - RNA, 19 nt, Artificial Sequence
  Description of Artificial Sequence: Synthetic oligonucleotide
uuuauuuccuaaagggucu

SEQ ID NO: 91751 - RNA, 19 nt, Artificial Sequence
  Description of Artificial Sequence: Synthetic oligonucleotide
ugucucaccuccacauccu

SEQ ID NO: 91752 - RNA, 19 nt, Artificial Sequence
  Description of Artificial Sequence: Synthetic oligonucleotide
uuaacuuggaguccaacgg

SEQ ID NO: 91753 - RNA, 19 nt, Artificial Sequence
  Description of Artificial Sequence: Synthetic oligonucleotide
gcuuugacgagaucccagu

SEQ ID NO: 91754 - RNA, 19 nt, Artificial Sequence
  Description of Artificial Sequence: Synthetic oligonucleotide
uugaggucuucaaggauuu

SEQ ID NO: 91755 - RNA, 19 nt, Artificial Sequence
  Description of Artificial Sequence: Synthetic oligonucleotide
uauuugaacuaaagaucau

SEQ ID NO: 91756 - RNA, 19 nt, Artificial Sequence
  Description of Artificial Sequence: Synthetic oligonucleotide
ucgauuuaggauugaauaa

SEQ ID NO: 91757 - RNA, 19 nt, Artificial Sequence
  Description of Artificial Sequence: Synthetic oligonucleotide
auuuaaacacacuuccagc

SEQ ID NO: 91758 - RNA, 19 nt, Artificial Sequence
  Description of Artificial Sequence: Synthetic oligonucleotide
caucugucuuuaauaauca

SEQ ID NO: 91759 - RNA, 19 nt, Artificial Sequence
  Description of Artificial Sequence: Synthetic oligonucleotide
aggugucucuaaagucauu

SEQ ID NO: 91760 - RNA, 19 nt, Artificial Sequence
  Description of Artificial Sequence: Synthetic oligonucleotide
ugaaccuucagaagaaucu

SEQ ID NO: 91761 - RNA, 19 nt, Artificial Sequence
  Description of Artificial Sequence: Synthetic oligonucleotide
ucauaacauccguugagaa

SEQ ID NO: 91762 - RNA, 19 nt, Artificial Sequence
  Description of Artificial Sequence: Synthetic oligonucleotide
agaagguuuucgggccagc

SEQ ID NO: 91763 - RNA, 19 nt, Artificial Sequence
  Description of Artificial Sequence: Synthetic oligonucleotide
cuuucaggaaccugacuga

SEQ ID NO: 91764 - RNA, 19 nt, Artificial Sequence
  Description of Artificial Sequence: Synthetic oligonucleotide
aguuagauaugcgcuuuaa

SEQ ID NO: 91765 - RNA, 19 nt, Artificial Sequence
  Description of Artificial Sequence: Synthetic oligonucleotide
aucccuuugauugcacgug

SEQ ID NO: 91766 - RNA, 19 nt, Artificial Sequence
  Description of Artificial Sequence: Synthetic oligonucleotide
gugaaaguauugccugguu

SEQ ID NO: 91767 - RNA, 19 nt, Artificial Sequence
  Description of Artificial Sequence: Synthetic oligonucleotide
uuguuaauuggauuaacga

SEQ ID NO: 91768 - RNA, 19 nt, Artificial Sequence
  Description of Artificial Sequence: Synthetic oligonucleotide
agacccauaccaacauccc

SEQ ID NO: 91769 - RNA, 19 nt, Artificial Sequence
  Description of Artificial Sequence: Synthetic oligonucleotide
cugagcugucaagccacua

SEQ ID NO: 91770 - RNA, 19 nt, Artificial Sequence
  Description of Artificial Sequence: Synthetic oligonucleotide
accuuugcaacacuccacc

SEQ ID NO: 91771 - RNA, 19 nt, Artificial Sequence
  Description of Artificial Sequence: Synthetic oligonucleotide
cucacuaucauggguuccc

SEQ ID NO: 91772 - RNA, 19 nt, Artificial Sequence
  Description of Artificial Sequence: Synthetic oligonucleotide
cagugagacuuuuugauac

SEQ ID NO: 91773 - RNA, 19 nt, Artificial Sequence
  Description of Artificial Sequence: Synthetic oligonucleotide
caucaucuugcaaagacag

SEQ ID NO: 91774 - RNA, 19 nt, Artificial Sequence
  Description of Artificial Sequence: Synthetic oligonucleotide
gugcccccuuugaacucuu

SEQ ID NO: 91775 - RNA, 19 nt, Artificial Sequence
  Description of Artificial Sequence: Synthetic oligonucleotide
uuuucaugaucaauaccag

SEQ ID NO: 91776 - RNA, 19 nt, Artificial Sequence
  Description of Artificial Sequence: Synthetic oligonucleotide
guauccuguugauuuuuau

SEQ ID NO: 91777 - RNA, 19 nt, Artificial Sequence
  Description of Artificial Sequence: Synthetic oligonucleotide
ucuuuauuguacuucucau

SEQ ID NO: 91778 - RNA, 19 nt, Artificial Sequence
  Description of Artificial Sequence: Synthetic oligonucleotide
uccacuuugagggcuggag

SEQ ID NO: 91779 - RNA, 19 nt, Artificial Sequence
  Description of Artificial Sequence: Synthetic oligonucleotide
ggauaucuuuuuauuggaa

SEQ ID NO: 91780 - RNA, 19 nt, Artificial Sequence
  Description of Artificial Sequence: Synthetic oligonucleotide
auguuucaguacaucgagu

SEQ ID NO: 91781 - RNA, 19 nt, Artificial Sequence
  Description of Artificial Sequence: Synthetic oligonucleotide
uucuugguuucaaagaaau

SEQ ID NO: 91782 - RNA, 19 nt, Artificial Sequence
  Description of Artificial Sequence: Synthetic oligonucleotide
uagacagacagacagaaca

SEQ ID NO: 91783 - RNA, 19 nt, Artificial Sequence
  Description of Artificial Sequence: Synthetic oligonucleotide
aguuugaauaugcagcaua

SEQ ID NO: 91784 - RNA, 19 nt, Artificial Sequence
  Description of Artificial Sequence: Synthetic oligonucleotide
auauaauucaugccuauaa

SEQ ID NO: 91785 - RNA, 19 nt, Artificial Sequence
  Description of Artificial Sequence: Synthetic oligonucleotide
aagauaaggauugggucug

SEQ ID NO: 91786 - RNA, 19 nt, Artificial Sequence
  Description of Artificial Sequence: Synthetic oligonucleotide
gggaacauuucucuucaau

SEQ ID NO: 91787 - RNA, 19 nt, Artificial Sequence
  Description of Artificial Sequence: Synthetic oligonucleotide
uggaaaaggaagaccaauc

SEQ ID NO: 91788 - RNA, 19 nt, Artificial Sequence
  Description of Artificial Sequence: Synthetic oligonucleotide
cucucaaauuuugucugga

SEQ ID NO: 91789 - RNA, 19 nt, Artificial Sequence
  Description of Artificial Sequence: Synthetic oligonucleotide
aagaaagggacuuugaggc

SEQ ID NO: 91790 - RNA, 19 nt, Artificial Sequence
  Description of Artificial Sequence: Synthetic oligonucleotide
cggguguuuuugaacuaga

SEQ ID NO: 91791 - RNA, 19 nt, Artificial Sequence
  Description of Artificial Sequence: Synthetic oligonucleotide
aagcaauuguuaacagcau

SEQ ID NO: 91792 - RNA, 19 nt, Artificial Sequence
  Description of Artificial Sequence: Synthetic oligonucleotide
ucaaaagaagcagaaaaau

SEQ ID NO: 91793 - RNA, 19 nt, Artificial Sequence
  Description of Artificial Sequence: Synthetic oligonucleotide
uuauuuuuguuauaacaca

SEQ ID NO: 91794 - RNA, 19 nt, Artificial Sequence
  Description of Artificial Sequence: Synthetic oligonucleotide
accaucuauuaaaagaccc

SEQ ID NO: 91795 - RNA, 19 nt, Artificial Sequence
  Description of Artificial Sequence: Synthetic oligonucleotide
cauuaugcaaaagauucaa

SEQ ID NO: 91796 - RNA, 19 nt, Artificial Sequence
  Description of Artificial Sequence: Synthetic oligonucleotide
agguacaucaugcaguuca

SEQ ID NO: 91797 - RNA, 19 nt, Artificial Sequence
  Description of Artificial Sequence: Synthetic oligonucleotide
aacaagcuauugaacaaaa

SEQ ID NO: 91798 - RNA, 19 nt, Artificial Sequence
  Description of Artificial Sequence: Synthetic oligonucleotide
aucuggauuccauuauauu

SEQ ID NO: 91799 - RNA, 19 nt, Artificial Sequence
  Description of Artificial Sequence: Synthetic oligonucleotide
ugguuuuccuugaggagau

SEQ ID NO: 91800 - RNA, 19 nt, Artificial Sequence
  Description of Artificial Sequence: Synthetic oligonucleotide
uuccagauuauaaacugaa

SEQ ID NO: 91801 - RNA, 19 nt, Artificial Sequence
  Description of Artificial Sequence: Synthetic oligonucleotide
accaugcacucuguuugcg

SEQ ID NO: 91802 - RNA, 19 nt, Artificial Sequence
  Description of Artificial Sequence: Synthetic oligonucleotide
gaagaggaauguuuaaauc

SEQ ID NO: 91803 - RNA, 19 nt, Artificial Sequence
  Description of Artificial Sequence: Synthetic oligonucleotide
cucacugcaucuugaacug

SEQ ID NO: 91804 - RNA, 19 nt, Artificial Sequence
  Description of Artificial Sequence: Synthetic oligonucleotide
ggccaguucagaaagaacg

SEQ ID NO: 91805 - RNA, 19 nt, Artificial Sequence
  Description of Artificial Sequence: Synthetic oligonucleotide
ggauaggugccuuucguca

SEQ ID NO: 91806 - RNA, 19 nt, Artificial Sequence
  Description of Artificial Sequence: Synthetic oligonucleotide
auaaauugcaaguagcacu

SEQ ID NO: 91807 - RNA, 19 nt, Artificial Sequence
  Description of Artificial Sequence: Synthetic oligonucleotide
uuggauccaaaaacucugu

SEQ ID NO: 91808 - RNA, 19 nt, Artificial Sequence
  Description of Artificial Sequence: Synthetic oligonucleotide
uacauuaaauuuauuuaaa

SEQ ID NO: 91809 - RNA, 19 nt, Artificial Sequence
  Description of Artificial Sequence: Synthetic oligonucleotide
auauucaauuagcaaagga

SEQ ID NO: 91810 - RNA, 19 nt, Artificial Sequence
  Description of Artificial Sequence: Synthetic oligonucleotide
agaaacuuucucaauuuaa

SEQ ID NO: 91811 - RNA, 19 nt, Artificial Sequence
  Description of Artificial Sequence: Synthetic oligonucleotide
aaaaguucuauggcaaauu

SEQ ID NO: 91812 - RNA, 19 nt, Artificial Sequence
  Description of Artificial Sequence: Synthetic oligonucleotide
uuaaguuuuccauaaaggu

SEQ ID NO: 91813 - RNA, 19 nt, Artificial Sequence
  Description of Artificial Sequence: Synthetic oligonucleotide
uguuauaauuuguuuauuc

SEQ ID NO: 91814 - RNA, 19 nt, Artificial Sequence
  Description of Artificial Sequence: Synthetic oligonucleotide
cauauuuguaaaugauuau

SEQ ID NO: 91815 - RNA, 19 nt, Artificial Sequence
  Description of Artificial Sequence: Synthetic oligonucleotide
uauucuaucacaauuacau

SEQ ID NO: 91816 - RNA, 19 nt, Artificial Sequence
  Description of Artificial Sequence: Synthetic oligonucleotide
ucucuucuaggaaaaugug

SEQ ID NO: 91817 - RNA, 19 nt, Artificial Sequence
  Description of Artificial Sequence: Synthetic oligonucleotide
gucuccuuauuucaggccu

SEQ ID NO: 91818 - RNA, 19 nt, Artificial Sequence
  Description of Artificial Sequence: Synthetic oligonucleotide
uauuuuugacaauugacuu

SEQ ID NO: 91819 - RNA, 19 nt, Artificial Sequence
  Description of Artificial Sequence: Synthetic oligonucleotide
uaauuuuacccaaaauaaa

SEQ ID NO: 91820 - RNA, 19 nt, Artificial Sequence
  Description of Artificial Sequence: Synthetic oligonucleotide
aacauauaagcacguaaaa

SEQ ID NO: 91821 - RNA, 25 nt, Artificial Sequence
  Description of Artificial Sequence: Synthetic oligonucleotide
cacuuucgagagugccgucuauuug

SEQ ID NO: 91822 - RNA, 25 nt, Artificial Sequence
  Description of Artificial Sequence: Synthetic oligonucleotide
gccacacacuucccugaugaaaugu

SEQ ID NO: 91823 - RNA, 25 nt, Artificial Sequence
  Description of Artificial Sequence: Synthetic oligonucleotide
ucuggauuuggacuaaagaaaaaag

SEQ ID NO: 91824 - RNA, 25 nt, Artificial Sequence
  Description of Artificial Sequence: Synthetic oligonucleotide
ggaaaggcuagcagucauccaacag

SEQ ID NO: 91825 - RNA, 25 nt, Artificial Sequence
  Description of Artificial Sequence: Synthetic oligonucleotide
gaaucaugagacagacuuugccuug

SEQ ID NO: 91826 - RNA, 25 nt, Artificial Sequence
  Description of Artificial Sequence: Synthetic oligonucleotide
guaucuacuuuugggggggccuuuu

SEQ ID NO: 91827 - RNA, 25 nt, Artificial Sequence
  Description of Artificial Sequence: Synthetic oligonucleotide
ugcccuuugggaugcugugugcauc

SEQ ID NO: 91828 - RNA, 25 nt, Artificial Sequence
  Description of Artificial Sequence: Synthetic oligonucleotide
ccuccaccaccaagugcacuguuag

SEQ ID NO: 91829 - RNA, 25 nt, Artificial Sequence
  Description of Artificial Sequence: Synthetic oligonucleotide
gccaugaaguugcugacugcagcca

SEQ ID NO: 91830 - RNA, 25 nt, Artificial Sequence
  Description of Artificial Sequence: Synthetic oligonucleotide
accugaaguugacucagguacccga

SEQ ID NO: 91831 - RNA, 25 nt, Artificial Sequence
  Description of Artificial Sequence: Synthetic oligonucleotide
augaucuacccacaaacauaacagu

SEQ ID NO: 91832 - RNA, 25 nt, Artificial Sequence
  Description of Artificial Sequence: Synthetic oligonucleotide
uguugaaccuuacccauaaucaacu

SEQ ID NO: 91833 - RNA, 25 nt, Artificial Sequence
  Description of Artificial Sequence: Synthetic oligonucleotide
ucagaagauuaccagccgccaacuu

SEQ ID NO: 91834 - RNA, 25 nt, Artificial Sequence
  Description of Artificial Sequence: Synthetic oligonucleotide
ucacaagguauagccagcuaacuag

SEQ ID NO: 91835 - RNA, 25 nt, Artificial Sequence
  Description of Artificial Sequence: Synthetic oligonucleotide
gcuuggauguaggauuuaacaccau

SEQ ID NO: 91836 - RNA, 25 nt, Artificial Sequence
  Description of Artificial Sequence: Synthetic oligonucleotide
ucucaaaacuggagccagaauugug

SEQ ID NO: 91837 - RNA, 25 nt, Artificial Sequence
  Description of Artificial Sequence: Synthetic oligonucleotide
gccagaaacuucccauguuaaaagu

SEQ ID NO: 91838 - RNA, 25 nt, Artificial Sequence
  Description of Artificial Sequence: Synthetic oligonucleotide
uuuugaaccuccagcacaaugagcu

SEQ ID NO: 91839 - RNA, 25 nt, Artificial Sequence
  Description of Artificial Sequence: Synthetic oligonucleotide
uaucucaacuuucugauaaaaccuu

SEQ ID NO: 91840 - RNA, 25 nt, Artificial Sequence
  Description of Artificial Sequence: Synthetic oligonucleotide
uugccuucugcacgaauuugacuga

SEQ ID NO: 91841 - RNA, 25 nt, Artificial Sequence
  Description of Artificial Sequence: Synthetic oligonucleotide
aacuccaucucauguccaacucaau

SEQ ID NO: 91842 - RNA, 25 nt, Artificial Sequence
  Description of Artificial Sequence: Synthetic oligonucleotide
uccagaaaauuaaaaauaaucccuu

SEQ ID NO: 91843 - RNA, 25 nt, Artificial Sequence
  Description of Artificial Sequence: Synthetic oligonucleotide
uugucaagcagaagaauuuaaucac

SEQ ID NO: 91844 - RNA, 25 nt, Artificial Sequence
  Description of Artificial Sequence: Synthetic oligonucleotide
cauuagaucugucucauaauggcuu

SEQ ID NO: 91845 - RNA, 25 nt, Artificial Sequence
  Description of Artificial Sequence: Synthetic oligonucleotide
ugucaucuacaaaauuaggaacuca

SEQ ID NO: 91846 - RNA, 25 nt, Artificial Sequence
  Description of Artificial Sequence: Synthetic oligonucleotide
agguucagcuggaaaaucuccaaga

SEQ ID NO: 91847 - RNA, 25 nt, Artificial Sequence
  Description of Artificial Sequence: Synthetic oligonucleotide
agcuucuauuaucaaacaauaaaau

SEQ ID NO: 91848 - RNA, 25 nt, Artificial Sequence
  Description of Artificial Sequence: Synthetic oligonucleotide
uucaagcgcuaaaaagugaagaacu

SEQ ID NO: 91849 - RNA, 25 nt, Artificial Sequence
  Description of Artificial Sequence: Synthetic oligonucleotide
uggauaucuuugccaauucaucuuu

SEQ ID NO: 91850 - RNA, 25 nt, Artificial Sequence
  Description of Artificial Sequence: Synthetic oligonucleotide
uaaaaaaauuagaguugucaucgaa

SEQ ID NO: 91851 - RNA, 25 nt, Artificial Sequence
  Description of Artificial Sequence: Synthetic oligonucleotide
aucaaauuaaagaguuuucuccagg

SEQ ID NO: 91852 - RNA, 25 nt, Artificial Sequence
  Description of Artificial Sequence: Synthetic oligonucleotide
gguguuuucacgcaauuggaagauu

SEQ ID NO: 91853 - RNA, 25 nt, Artificial Sequence
  Description of Artificial Sequence: Synthetic oligonucleotide
uauuuggccucuuucugaacaaugu

SEQ ID NO: 91854 - RNA, 25 nt, Artificial Sequence
  Description of Artificial Sequence: Synthetic oligonucleotide
uccagcugggucccagccuuacaga

SEQ ID NO: 91855 - RNA, 25 nt, Artificial Sequence
  Description of Artificial Sequence: Synthetic oligonucleotide
agaagcuauguuuggaauuagcaaa

SEQ ID NO: 91856 - RNA, 25 nt, Artificial Sequence
  Description of Artificial Sequence: Synthetic oligonucleotide
acacaagcauucggaaucugucucu

SEQ ID NO: 91857 - RNA, 25 nt, Artificial Sequence
  Description of Artificial Sequence: Synthetic oligonucleotide
ugaguaacagccagcuguccaccac

SEQ ID NO: 91858 - RNA, 25 nt, Artificial Sequence
  Description of Artificial Sequence: Synthetic oligonucleotide
ccagcaauacaacuuucuugggacu

SEQ ID NO: 91859 - RNA, 25 nt, Artificial Sequence
  Description of Artificial Sequence: Synthetic oligonucleotide
uaaaguggacaaaucucacuaugcu

SEQ ID NO: 91860 - RNA, 25 nt, Artificial Sequence
  Description of Artificial Sequence: Synthetic oligonucleotide
ucgaucuuuccuacaacaacuuaaa

SEQ ID NO: 91861 - RNA, 25 nt, Artificial Sequence
  Description of Artificial Sequence: Synthetic oligonucleotide
augugguugguaacgauuccuuugc

SEQ ID NO: 91862 - RNA, 25 nt, Artificial Sequence
  Description of Artificial Sequence: Synthetic oligonucleotide
cuuggcuuccacaacuagaauauuu

SEQ ID NO: 91863 - RNA, 25 nt, Artificial Sequence
  Description of Artificial Sequence: Synthetic oligonucleotide
ucuuccuagaguauaauaauauaca

SEQ ID NO: 91864 - RNA, 25 nt, Artificial Sequence
  Description of Artificial Sequence: Synthetic oligonucleotide
agcauuuguuuucucacucuuugca

SEQ ID NO: 91865 - RNA, 25 nt, Artificial Sequence
  Description of Artificial Sequence: Synthetic oligonucleotide
acgggcuuuucaaugugagguaccu

SEQ ID NO: 91866 - RNA, 25 nt, Artificial Sequence
  Description of Artificial Sequence: Synthetic oligonucleotide
ugaauuugaaacggucuuuuacuaa

SEQ ID NO: 91867 - RNA, 25 nt, Artificial Sequence
  Description of Artificial Sequence: Synthetic oligonucleotide
aacaaaguauuucccuugccucacu

SEQ ID NO: 91868 - RNA, 25 nt, Artificial Sequence
  Description of Artificial Sequence: Synthetic oligonucleotide
uccccaagauugaugauuuuucuuu

SEQ ID NO: 91869 - RNA, 25 nt, Artificial Sequence
  Description of Artificial Sequence: Synthetic oligonucleotide
uucaguggcuaaaauguuuggagca

SEQ ID NO: 91870 - RNA, 25 nt, Artificial Sequence
  Description of Artificial Sequence: Synthetic oligonucleotide
accuuaacauggaagauaaugauau

SEQ ID NO: 91871 - RNA, 25 nt, Artificial Sequence
  Description of Artificial Sequence: Synthetic oligonucleotide
uuccaggcauaaaaagcaauauguu

SEQ ID NO: 91872 - RNA, 25 nt, Artificial Sequence
  Description of Artificial Sequence: Synthetic oligonucleotide
ucacaggauugauaaaccugaaaua

SEQ ID NO: 91873 - RNA, 25 nt, Artificial Sequence
  Description of Artificial Sequence: Synthetic oligonucleotide
acuuaagucuauccaacuccuuuac

SEQ ID NO: 91874 - RNA, 25 nt, Artificial Sequence
  Description of Artificial Sequence: Synthetic oligonucleotide
caaguuugcgaacuuugacaaauga

SEQ ID NO: 91875 - RNA, 25 nt, Artificial Sequence
  Description of Artificial Sequence: Synthetic oligonucleotide
aaacauuuguaucacuugcucauuc

SEQ ID NO: 91876 - RNA, 25 nt, Artificial Sequence
  Description of Artificial Sequence: Synthetic oligonucleotide
cucccuuacacauacucaaccuaac

SEQ ID NO: 91877 - RNA, 25 nt, Artificial Sequence
  Description of Artificial Sequence: Synthetic oligonucleotide
ccaagaauaaaaucucaaaaauaga

SEQ ID NO: 91878 - RNA, 25 nt, Artificial Sequence
  Description of Artificial Sequence: Synthetic oligonucleotide
agagugaugcuuucucuugguuggg

SEQ ID NO: 91879 - RNA, 25 nt, Artificial Sequence
  Description of Artificial Sequence: Synthetic oligonucleotide
gccaccuagaaguacuugaccuggg

SEQ ID NO: 91880 - RNA, 25 nt, Artificial Sequence
  Description of Artificial Sequence: Synthetic oligonucleotide
gccuuaaugaaauugggcaagaacu

SEQ ID NO: 91881 - RNA, 25 nt, Artificial Sequence
  Description of Artificial Sequence: Synthetic oligonucleotide
ucacaggccaggaauggagaggucu

SEQ ID NO: 91882 - RNA, 25 nt, Artificial Sequence
  Description of Artificial Sequence: Synthetic oligonucleotide
uagaaaauauuuucgaaaucuaucu

SEQ ID NO: 91883 - RNA, 25 nt, Artificial Sequence
  Description of Artificial Sequence: Synthetic oligonucleotide
uuuccuacaacaaguaccugcagcu

SEQ ID NO: 91884 - RNA, 25 nt, Artificial Sequence
  Description of Artificial Sequence: Synthetic oligonucleotide
ugacuaggaacuccuuugccuuggu

SEQ ID NO: 91885 - RNA, 25 nt, Artificial Sequence
  Description of Artificial Sequence: Synthetic oligonucleotide
ucccaagccuucaacgacugaugcu

SEQ ID NO: 91886 - RNA, 25 nt, Artificial Sequence
  Description of Artificial Sequence: Synthetic oligonucleotide
uccgaaggguggcccuuaaaaaugu

SEQ ID NO: 91887 - RNA, 25 nt, Artificial Sequence
  Description of Artificial Sequence: Synthetic oligonucleotide
uggauagcucuccuucaccauucca

SEQ ID NO: 91888 - RNA, 25 nt, Artificial Sequence
  Description of Artificial Sequence: Synthetic oligonucleotide
agccucuucguaacuugaccauucu

SEQ ID NO: 91889 - RNA, 25 nt, Artificial Sequence
  Description of Artificial Sequence: Synthetic oligonucleotide
uggaucuaagcaacaacaacauagc

SEQ ID NO: 91890 - RNA, 25 nt, Artificial Sequence
  Description of Artificial Sequence: Synthetic oligonucleotide
ccaacauaaaugaugacauguugga

SEQ ID NO: 91891 - RNA, 25 nt, Artificial Sequence
  Description of Artificial Sequence: Synthetic oligonucleotide
agggucuugagaaacuagaaauucu

SEQ ID NO: 91892 - RNA, 25 nt, Artificial Sequence
  Description of Artificial Sequence: Synthetic oligonucleotide
ucgauuugcagcauaacaacuuagc

SEQ ID NO: 91893 - RNA, 25 nt, Artificial Sequence
  Description of Artificial Sequence: Synthetic oligonucleotide
cacggcucuggaaacacgcaaaccc

SEQ ID NO: 91894 - RNA, 25 nt, Artificial Sequence
  Description of Artificial Sequence: Synthetic oligonucleotide
cugguggucccauuuauuuccuaaa

SEQ ID NO: 91895 - RNA, 25 nt, Artificial Sequence
  Description of Artificial Sequence: Synthetic oligonucleotide
agggucugucucaccuccacauccu

SEQ ID NO: 91896 - RNA, 25 nt, Artificial Sequence
  Description of Artificial Sequence: Synthetic oligonucleotide
uuaacuuggaguccaacggcuuuga

SEQ ID NO: 91897 - RNA, 25 nt, Artificial Sequence
  Description of Artificial Sequence: Synthetic oligonucleotide
acgagaucccaguugaggucuucaa

SEQ ID NO: 91898 - RNA, 25 nt, Artificial Sequence
  Description of Artificial Sequence: Synthetic oligonucleotide
aggauuuauuugaacuaaagaucau

SEQ ID NO: 91899 - RNA, 25 nt, Artificial Sequence
  Description of Artificial Sequence: Synthetic oligonucleotide
ucgauuuaggauugaauaauuuaaa

SEQ ID NO: 91900 - RNA, 25 nt, Artificial Sequence
  Description of Artificial Sequence: Synthetic oligonucleotide
acacacuuccagcaucugucuuuaa

SEQ ID NO: 91901 - RNA, 25 nt, Artificial Sequence
  Description of Artificial Sequence: Synthetic oligonucleotide
auaaucaggugucucuaaagucauu

SEQ ID NO: 91902 - RNA, 25 nt, Artificial Sequence
  Description of Artificial Sequence: Synthetic oligonucleotide
ugaaccuucagaagaaucucauaac

SEQ ID NO: 91903 - RNA, 25 nt, Artificial Sequence
  Description of Artificial Sequence: Synthetic oligonucleotide
cauccguugagaagaagguuuucgg

SEQ ID NO: 91904 - RNA, 25 nt, Artificial Sequence
  Description of Artificial Sequence: Synthetic oligonucleotide
ggccagcuuucaggaaccugacuga

SEQ ID NO: 91905 - RNA, 25 nt, Artificial Sequence
  Description of Artificial Sequence: Synthetic oligonucleotide
aguuagauaugcgcuuuaaucccuu

SEQ ID NO: 91906 - RNA, 25 nt, Artificial Sequence
  Description of Artificial Sequence: Synthetic oligonucleotide
uugauugcacgugugaaaguauugc

SEQ ID NO: 91907 - RNA, 25 nt, Artificial Sequence
  Description of Artificial Sequence: Synthetic oligonucleotide
ccugguuuguuaauuggauuaacga

SEQ ID NO: 91908 - RNA, 25 nt, Artificial Sequence
  Description of Artificial Sequence: Synthetic oligonucleotide
agacccauaccaacaucccugagcu

SEQ ID NO: 91909 - RNA, 25 nt, Artificial Sequence
  Description of Artificial Sequence: Synthetic oligonucleotide
ugucaagccacuaccuuugcaacac

SEQ ID NO: 91910 - RNA, 25 nt, Artificial Sequence
  Description of Artificial Sequence: Synthetic oligonucleotide
cuccaccucacuaucauggguuccc

SEQ ID NO: 91911 - RNA, 25 nt, Artificial Sequence
  Description of Artificial Sequence: Synthetic oligonucleotide
cagugagacuuuuugauacaucauc

SEQ ID NO: 91912 - RNA, 25 nt, Artificial Sequence
  Description of Artificial Sequence: Synthetic oligonucleotide
cuugcaaagacagugcccccuuuga

SEQ ID NO: 91913 - RNA, 25 nt, Artificial Sequence
  Description of Artificial Sequence: Synthetic oligonucleotide
aacucuuuuucaugaucaauaccag

SEQ ID NO: 91914 - RNA, 25 nt, Artificial Sequence
  Description of Artificial Sequence: Synthetic oligonucleotide
guauccuguugauuuuuaucuuuau

SEQ ID NO: 91915 - RNA, 25 nt, Artificial Sequence
  Description of Artificial Sequence: Synthetic oligonucleotide
uuguacuucucauccacuuugaggg

SEQ ID NO: 91916 - RNA, 25 nt, Artificial Sequence
  Description of Artificial Sequence: Synthetic oligonucleotide
gcuggaggauaucuuuuuauuggaa

SEQ ID NO: 91917 - RNA, 25 nt, Artificial Sequence
  Description of Artificial Sequence: Synthetic oligonucleotide
auguuucaguacaucgaguucuugg

SEQ ID NO: 91918 - RNA, 25 nt, Artificial Sequence
  Description of Artificial Sequence: Synthetic oligonucleotide
guuucaaagaaauagacagacagac

SEQ ID NO: 91919 - RNA, 25 nt, Artificial Sequence
  Description of Artificial Sequence: Synthetic oligonucleotide
cagaacaguuugaauaugcagcaua

SEQ ID NO: 91920 - RNA, 25 nt, Artificial Sequence
  Description of Artificial Sequence: Synthetic oligonucleotide
auauaauucaugccuauaaagauaa

SEQ ID NO: 91921 - RNA, 25 nt, Artificial Sequence
  Description of Artificial Sequence: Synthetic oligonucleotide
aggauugggucugggaacauuucuc

SEQ ID NO: 91922 - RNA, 25 nt, Artificial Sequence
  Description of Artificial Sequence: Synthetic oligonucleotide
cuucaauggaaaaggaagaccaauc

SEQ ID NO: 91923 - RNA, 25 nt, Artificial Sequence
  Description of Artificial Sequence: Synthetic oligonucleotide
cucucaaauuuugucuggaagaaag

SEQ ID NO: 91924 - RNA, 25 nt, Artificial Sequence
  Description of Artificial Sequence: Synthetic oligonucleotide
gggacuuugaggcggguguuuuuga

SEQ ID NO: 91925 - RNA, 25 nt, Artificial Sequence
  Description of Artificial Sequence: Synthetic oligonucleotide
aacuagaagcaauuguuaacagcau

SEQ ID NO: 91926 - RNA, 25 nt, Artificial Sequence
  Description of Artificial Sequence: Synthetic oligonucleotide
ucaaaagaagcagaaaaauuauuuu

SEQ ID NO: 91927 - RNA, 25 nt, Artificial Sequence
  Description of Artificial Sequence: Synthetic oligonucleotide
uuguuauaacacaccaucuauuaaa

SEQ ID NO: 91928 - RNA, 25 nt, Artificial Sequence
  Description of Artificial Sequence: Synthetic oligonucleotide
aagacccauuaugcaaaagauucaa

SEQ ID NO: 91929 - RNA, 25 nt, Artificial Sequence
  Description of Artificial Sequence: Synthetic oligonucleotide
agguacaucaugcaguucaacaagc

SEQ ID NO: 91930 - RNA, 25 nt, Artificial Sequence
  Description of Artificial Sequence: Synthetic oligonucleotide
cuauugaacaaaaucuggauuccau

SEQ ID NO: 91931 - RNA, 25 nt, Artificial Sequence
  Description of Artificial Sequence: Synthetic oligonucleotide
uuauauugguuuuccuugaggagau

SEQ ID NO: 91932 - RNA, 25 nt, Artificial Sequence
  Description of Artificial Sequence: Synthetic oligonucleotide
uuccagauuauaaacugaaccaugc

SEQ ID NO: 91933 - RNA, 25 nt, Artificial Sequence
  Description of Artificial Sequence: Synthetic oligonucleotide
cacucuguuugcgaagaggaauguu

SEQ ID NO: 91934 - RNA, 25 nt, Artificial Sequence
  Description of Artificial Sequence: Synthetic oligonucleotide
uuaaaucucacugcaucuugaacug

SEQ ID NO: 91935 - RNA, 25 nt, Artificial Sequence
  Description of Artificial Sequence: Synthetic oligonucleotide
ggccaguucagaaagaacggauagg

SEQ ID NO: 91936 - RNA, 25 nt, Artificial Sequence
  Description of Artificial Sequence: Synthetic oligonucleotide
gugccuuucgucauaaauugcaagu

SEQ ID NO: 91937 - RNA, 25 nt, Artificial Sequence
  Description of Artificial Sequence: Synthetic oligonucleotide
uagcacuuggauccaaaaacucugu

SEQ ID NO: 91938 - RNA, 25 nt, Artificial Sequence
  Description of Artificial Sequence: Synthetic oligonucleotide
uacauuaaauuuauuuaaauauuca

SEQ ID NO: 91939 - RNA, 25 nt, Artificial Sequence
  Description of Artificial Sequence: Synthetic oligonucleotide
aauuagcaaaggagaaacuuucuca

SEQ ID NO: 91940 - RNA, 25 nt, Artificial Sequence
  Description of Artificial Sequence: Synthetic oligonucleotide
aauuuaaaaaguucuauggcaaauu

SEQ ID NO: 91941 - RNA, 25 nt, Artificial Sequence
  Description of Artificial Sequence: Synthetic oligonucleotide
uuaaguuuuccauaaagguguuaua

SEQ ID NO: 91942 - RNA, 25 nt, Artificial Sequence
  Description of Artificial Sequence: Synthetic oligonucleotide
aauuuguuuauucauauuuguaaau

SEQ ID NO: 91943 - RNA, 25 nt, Artificial Sequence
  Description of Artificial Sequence: Synthetic oligonucleotide
ugauuauauucuaucacaauuacau

SEQ ID NO: 91944 - RNA, 25 nt, Artificial Sequence
  Description of Artificial Sequence: Synthetic oligonucleotide
ucucuucuaggaaaaugugucuccu

SEQ ID NO: 91945 - RNA, 25 nt, Artificial Sequence
  Description of Artificial Sequence: Synthetic oligonucleotide
uuauuucaggccuauuuuugacaau

SEQ ID NO: 91946 - RNA, 25 nt, Artificial Sequence
  Description of Artificial Sequence: Synthetic oligonucleotide
uugacuuaauuuuacccaaaauaaa

SEQ ID NO: 91947 - RNA, 4992 nt, Homo sapiens
gaagacuccagauauaggaucacuccaugccaucaagaaaguugaugcuauugggcccaucucaagcugaucuuggcaccucucaugcucugcucucuucaaccagaccucuacauuccauuuuggaagaagacuaaaaaugguguuuccaauguggacacugaagagacaaauucuuauccuuuuuaacauaauccuaauuuccaaacuccuuggggcuagaugguuuccuaaaacucugcccugugaugucacucuggauguuccaaagaaccaugugaucguggacugcacagacaagcauuugacagaaauuccuggagguauucccacgaacaccacgaaccucacccucaccauuaaccacauaccagacaucuccccagcguccuuucacagacuggaccaucugguagagaucgauuucagaugcaacuguguaccuauuccacuggggucaaaaaacaacaugugcaucaagaggcugcagauuaaacccagaagcuuuaguggacucacuuauuuaaaaucccuuuaccuggauggaaaccagcuacuagagauaccgcagggccucccgccuagcuuacagcuucucagccuugaggccaacaacaucuuuuccaucagaaaagagaaucuaacagaacuggccaacauagaaauacucuaccugggccaaaacuguuauuaucgaaauccuuguuauguuucauauucaauagagaaagaugccuuccuaaacuugacaaaguuaaaagugcucucccugaaagauaacaaugucacagccgucccuacuguuuugccaucuacuuuaacagaacuauaucucuacaacaacaugauugcaaaaauccaagaagaugauuuuaauaaccucaaccaauuacaaauucuugaccuaaguggaaauugcccucguuguuauaaugccccauuuccuugugcgccguguaaaaauaauucuccccuacagaucccuguaaaugcuuuugaugcgcugacagaauuaaaaguuuuacgucuacacaguaacucucuucagcaugugcccccaagaugguuuaagaacaucaacaaacuccaggaacuggaucugucccaaaacuucuuggccaaagaaauuggggaugcuaaauuucugcauuuucuccccagccucauccaauuggaucugucuuucaauuuugaacuucaggucuaucgugcaucuaugaaucuaucacaagcauuuucuucacugaaaagccugaaaauucugcggaucagaggauaugucuuuaaagaguugaaaagcuuuaaccucucgccauuacauaaucuucaaaaucuugaaguucuugaucuuggcacuaacuuuauaaaaauugcuaaccucagcauguuuaaacaauuuaaaagacugaaagucauagaucuuucagugaauaaaauaucaccuucaggagauucaagugaaguuggcuucugcucaaaugccagaacuucuguagaaaguuaugaaccccagguccuggaacaauuacauuauuucagauaugauaaguaugcaaggaguugcagauucaaaaacaaagaggcuucuuucaugucuguuaaugaaagcugcuacaaguaugggcagaccuuggaucuaaguaaaaauaguauauuuuuugucaaguccucugauuuucagcaucuuucuuuccucaaaugccugaaucugucaggaaaucucauuagccaaacucuuaauggcagugaauuccaaccuuuagcagagcugagauauuuggacuucuccaacaaccggcuugauuuacuccauucaacagcauuugaagagcuucacaaacuggaaguucuggauauaagcaguaauagccauuauuuucaaucagaaggaauuacucauaugcuaaacuuuaccaagaaccuaaagguucugcagaaacugaugaugaacgacaaugacaucucuuccuccaccagcaggaccauggagagugagucucuuagaacucuggaauucagaggaaaucacuuagauguuuuauggagagaaggugauaacagauacuuacaauuauucaagaaucugcuaaaauuagaggaauuagacaucucuaaaaauucccuaaguuucuugccuucuggaguuuuugaugguaugccuccaaaucuaaagaaucucucuuuggccaaaaaugggcucaaaucuuucaguuggaagaaacuccagugucuaaagaaccuggaaacuuuggaccucagccacaaccaacugaccacugucccugagagauuauccaacuguuccagaagccucaagaaucugauucuuaagaauaaucaaaucaggagucugacgaaguauuuucuacaagaugccuuccaguugcgauaucuggaucucagcucaaauaaaauccagaugauccaaaagaccagcuucccagaaaauguccucaacaaucugaagauguugcuuuugcaucauaaucgguuucugugcaccugugaugcugugugguuugucugguggguuaaccauacggaggugacuauuccuuaccuggccacagaugugacuuguguggggccaggagcacacaagggccaaagugugaucucccuggaucuguacaccugugaguuagaucugacuaaccugauucuguucucacuuuccauaucuguaucucucuuucucauggugaugaugacagcaagucaccucuauuucugggaugugugguauauuuaccauuucuguaaggccaagauaaagggguaucagcgucuaauaucaccagacuguugcuaugaugcuuuuauuguguaugacacuaaagacccagcugugaccgaguggguuuuggcugagcugguggccaaacuggaagacccaagagagaaacauuuuaauuuaugucucgaggaaagggacugguuaccagggcagccaguucuggaaaaccuuucccagagcauacagcuuagcaaaaagacaguguuugugaugacagacaaguaugcaaagacugaaaauuuuaagauagcauuuuacuugucccaucagaggcucauggaugaaaaaguugaugugauuaucuugauauuucuugagaagcccuuucagaaguccaaguuccuccagcuccggaaaaggcucugugggaguucuguccuugaguggccaacaaacccgcaagcucacccauacuucuggcagugucuaaagaacgcccuggccacagacaaucauguggccuauagucagguguucaaggaaacggucuagcccuucuuugcaaaacacaacugccuaguuuaccaaggagaggccuggcuguuuaaauuguuuucauauauaucacaccaaaagcguguuuugaaauucuucaagaaaugagauugcccauauuucaggggagccaccaacgucugucacaggaguuggaaagaugggguuuauauaaugcaucaagucuucuuucuuaucucucugugucucuauuugcacuugagucucucaccucagcuccuguaaaagaguggcaaguaaaaaacauggggcucugauucuccuguaauugugauaauuaaauauacacacaaucaugacauugagaagaacugcauuucuacccuuaaaaaguacugguauauacagaaauaggguuaaaaaaaacucaagcucucucuauaugagaccaaaauguacuagaguuaguuuagugaaauaaaaaaccagucagcuggccgggcaugguggcucaugcuuguaaucccagcacuuugggaggccgaggcagguggaucacgaggucaggaguuugagaccagucuggccaacauggugaaaccccgucuguacuaaaaauacaaaaauuagcugggcgugguggugggugccuguaaucccagcuacuugggaggcugaggcaggagaaucgcuugaacccgggagguggagguggcagugagccgagaucacgccacugcaaugcagcccgggcaacagagcuagacugucucaaaagaacaaaaaaaaaaaaacacaaaaaaacucagucagcuucuuaaccaauugcuuccgugucauccagggccccauucugugcagauugagugugggcaccacacaggugguugcugcuucagugcuuccugcucuuuuuccuugggccugcuucuggguuccauagggaaacaguaagaaagaaagacacauccuuaccauaaaugcauaugguccaccuacaaauagaaaaauauuuaaaugaucugccuuuauacaaagugauauucucuaccuuugauaauuuaccugcuuaaauguuuuuaucugcacugcaaaguacuguauccaaaguaaaauuuccucauccaauaucuuucaaacuguuuuguuaacuaaugccauauauuuguaaguaucugcacacuugauacagcaacguuagaugguuuugaugguaaacccuaaaggaggacuccaagaguguguauuuauuuauaguuuuaucagagaugacaauuauuugaaugccaauuauauggauuccuuucauuuuuugcuggaggaugggagaagaaaccaaaguuuauagaccuucacauugagaaagcuucaguuuugaacuucagcuaucagauucaaaaacaacagaaagaaccaagacauucuuaagaugccuguacuuucagcuggguauaaauucaugaguucaaagauugaaaccugaccaauuugcuuuauuucauggaagaagugaucuacaaagguguuugugccauuuggaaaacagcgugcauguguucaagccuuagauuggcgaugucguauuuuccucacguguggcaaugccaaaggcuuuacuuuaccugugaguacacacuauaugaauuauuuccaacguacauuuaaucaauaagggucacaaauucccaaaucaaucucuggaauaaauagagagguaauuaaauugcuggagccaacua

SEQ ID NO: 91948 - RNA, 19 nt, Artificial Sequence
  Description of Artificial Sequence: Synthetic oligonucleotide
gaagacuccagauauagga

SEQ ID NO: 91949 - RNA, 19 nt, Artificial Sequence
  Description of Artificial Sequence: Synthetic oligonucleotide
aucacuccaugccaucaag

SEQ ID NO: 91950 - RNA, 19 nt, Artificial Sequence
  Description of Artificial Sequence: Synthetic oligonucleotide
gaaaguugaugcuauuggg

SEQ ID NO: 91951 - RNA, 19 nt, Artificial Sequence
  Description of Artificial Sequence: Synthetic oligonucleotide
gcccaucucaagcugaucu

SEQ ID NO: 91952 - RNA, 19 nt, Artificial Sequence
  Description of Artificial Sequence: Synthetic oligonucleotide
uuggcaccucucaugcucu

SEQ ID NO: 91953 - RNA, 19 nt, Artificial Sequence
  Description of Artificial Sequence: Synthetic oligonucleotide
ugcucucuucaaccagacc

SEQ ID NO: 91954 - RNA, 19 nt, Artificial Sequence
  Description of Artificial Sequence: Synthetic oligonucleotide
cucuacauuccauuuugga

SEQ ID NO: 91955 - RNA, 19 nt, Artificial Sequence
  Description of Artificial Sequence: Synthetic oligonucleotide
aagaagacuaaaaauggug

SEQ ID NO: 91956 - RNA, 19 nt, Artificial Sequence
  Description of Artificial Sequence: Synthetic oligonucleotide
guuuccaauguggacacug

SEQ ID NO: 91957 - RNA, 19 nt, Artificial Sequence
  Description of Artificial Sequence: Synthetic oligonucleotide
gaagagacaaauucuuauc

SEQ ID NO: 91958 - RNA, 19 nt, Artificial Sequence
  Description of Artificial Sequence: Synthetic oligonucleotide
ccuuuuuaacauaauccua

SEQ ID NO: 91959 - RNA, 19 nt, Artificial Sequence
  Description of Artificial Sequence: Synthetic oligonucleotide
aauuuccaaacuccuuggg

SEQ ID NO: 91960 - RNA, 19 nt, Artificial Sequence
  Description of Artificial Sequence: Synthetic oligonucleotide
ggcuagaugguuuccuaaa

SEQ ID NO: 91961 - RNA, 19 nt, Artificial Sequence
  Description of Artificial Sequence: Synthetic oligonucleotide
aacucugcccugugauguc

SEQ ID NO: 91962 - RNA, 19 nt, Artificial Sequence
  Description of Artificial Sequence: Synthetic oligonucleotide
cacucuggauguuccaaag

SEQ ID NO: 91963 - RNA, 19 nt, Artificial Sequence
  Description of Artificial Sequence: Synthetic oligonucleotide
gaaccaugugaucguggac

SEQ ID NO: 91964 - RNA, 19 nt, Artificial Sequence
  Description of Artificial Sequence: Synthetic oligonucleotide
cugcacagacaagcauuug

SEQ ID NO: 91965 - RNA, 19 nt, Artificial Sequence
  Description of Artificial Sequence: Synthetic oligonucleotide
gacagaaauuccuggaggu

SEQ ID NO: 91966 - RNA, 19 nt, Artificial Sequence
  Description of Artificial Sequence: Synthetic oligonucleotide
uauucccacgaacaccacg

SEQ ID NO: 91967 - RNA, 19 nt, Artificial Sequence
  Description of Artificial Sequence: Synthetic oligonucleotide
gaaccucacccucaccauu

SEQ ID NO: 91968 - RNA, 19 nt, Artificial Sequence
  Description of Artificial Sequence: Synthetic oligonucleotide
uaaccacauaccagacauc

SEQ ID NO: 91969 - RNA, 19 nt, Artificial Sequence
  Description of Artificial Sequence: Synthetic oligonucleotide
cuccccagcguccuuucac

SEQ ID NO: 91970 - RNA, 19 nt, Artificial Sequence
  Description of Artificial Sequence: Synthetic oligonucleotide
cagacuggaccaucuggua

SEQ ID NO: 91971 - RNA, 19 nt, Artificial Sequence
  Description of Artificial Sequence: Synthetic oligonucleotide
agagaucgauuucagaugc

SEQ ID NO: 91972 - RNA, 19 nt, Artificial Sequence
  Description of Artificial Sequence: Synthetic oligonucleotide
caacuguguaccuauucca

SEQ ID NO: 91973 - RNA, 19 nt, Artificial Sequence
  Description of Artificial Sequence: Synthetic oligonucleotide
acuggggucaaaaaacaac

SEQ ID NO: 91974 - RNA, 19 nt, Artificial Sequence
  Description of Artificial Sequence: Synthetic oligonucleotide
caugugcaucaagaggcug

SEQ ID NO: 91975 - RNA, 19 nt, Artificial Sequence
  Description of Artificial Sequence: Synthetic oligonucleotide
gcagauuaaacccagaagc

SEQ ID NO: 91976 - RNA, 19 nt, Artificial Sequence
  Description of Artificial Sequence: Synthetic oligonucleotide
cuuuaguggacucacuuau

SEQ ID NO: 91977 - RNA, 19 nt, Artificial Sequence
  Description of Artificial Sequence: Synthetic oligonucleotide
uuuaaaaucccuuuaccug

SEQ ID NO: 91978 - RNA, 19 nt, Artificial Sequence
  Description of Artificial Sequence: Synthetic oligonucleotide
ggauggaaaccagcuacua

SEQ ID NO: 91979 - RNA, 19 nt, Artificial Sequence
  Description of Artificial Sequence: Synthetic oligonucleotide
agagauaccgcagggccuc

SEQ ID NO: 91980 - RNA, 19 nt, Artificial Sequence
  Description of Artificial Sequence: Synthetic oligonucleotide
cccgccuagcuuacagcuu

SEQ ID NO: 91981 - RNA, 19 nt, Artificial Sequence
  Description of Artificial Sequence: Synthetic oligonucleotide
ucucagccuugaggccaac

SEQ ID NO: 91982 - RNA, 19 nt, Artificial Sequence
  Description of Artificial Sequence: Synthetic oligonucleotide
caacaucuuuuccaucaga

SEQ ID NO: 91983 - RNA, 19 nt, Artificial Sequence
  Description of Artificial Sequence: Synthetic oligonucleotide
aaaagagaaucuaacagaa

SEQ ID NO: 91984 - RNA, 19 nt, Artificial Sequence
  Description of Artificial Sequence: Synthetic oligonucleotide
acuggccaacauagaaaua

SEQ ID NO: 91985 - RNA, 19 nt, Artificial Sequence
  Description of Artificial Sequence: Synthetic oligonucleotide
acucuaccugggccaaaac

SEQ ID NO: 91986 - RNA, 19 nt, Artificial Sequence
  Description of Artificial Sequence: Synthetic oligonucleotide
cuguuauuaucgaaauccu

SEQ ID NO: 91987 - RNA, 19 nt, Artificial Sequence
  Description of Artificial Sequence: Synthetic oligonucleotide
uuguuauguuucauauuca

SEQ ID NO: 91988 - RNA, 19 nt, Artificial Sequence
  Description of Artificial Sequence: Synthetic oligonucleotide
aauagagaaagaugccuuc

SEQ ID NO: 91989 - RNA, 19 nt, Artificial Sequence
  Description of Artificial Sequence: Synthetic oligonucleotide
ccuaaacuugacaaaguua

SEQ ID NO: 91990 - RNA, 19 nt, Artificial Sequence
  Description of Artificial Sequence: Synthetic oligonucleotide
aaaagugcucucccugaaa

SEQ ID NO: 91991 - RNA, 19 nt, Artificial Sequence
  Description of Artificial Sequence: Synthetic oligonucleotide
agauaacaaugucacagcc

SEQ ID NO: 91992 - RNA, 19 nt, Artificial Sequence
  Description of Artificial Sequence: Synthetic oligonucleotide
cgucccuacuguuuugcca

SEQ ID NO: 91993 - RNA, 19 nt, Artificial Sequence
  Description of Artificial Sequence: Synthetic oligonucleotide
aucuacuuuaacagaacua

SEQ ID NO: 91994 - RNA, 19 nt, Artificial Sequence
  Description of Artificial Sequence: Synthetic oligonucleotide
auaucucuacaacaacaug

SEQ ID NO: 91995 - RNA, 19 nt, Artificial Sequence
  Description of Artificial Sequence: Synthetic oligonucleotide
gauugcaaaaauccaagaa

SEQ ID NO: 91996 - RNA, 19 nt, Artificial Sequence
  Description of Artificial Sequence: Synthetic oligonucleotide
agaugauuuuaauaaccuc

SEQ ID NO: 91997 - RNA, 19 nt, Artificial Sequence
  Description of Artificial Sequence: Synthetic oligonucleotide
caaccaauuacaaauucuu

SEQ ID NO: 91998 - RNA, 19 nt, Artificial Sequence
  Description of Artificial Sequence: Synthetic oligonucleotide
ugaccuaaguggaaauugc

SEQ ID NO: 91999 - RNA, 19 nt, Artificial Sequence
  Description of Artificial Sequence: Synthetic oligonucleotide
cccucguuguuauaaugcc

SEQ ID NO: 92000 - RNA, 19 nt, Artificial Sequence
  Description of Artificial Sequence: Synthetic oligonucleotide
cccauuuccuugugcgccg

SEQ ID NO: 92001 - RNA, 19 nt, Artificial Sequence
  Description of Artificial Sequence: Synthetic oligonucleotide
guguaaaaauaauucuccc

SEQ ID NO: 92002 - RNA, 19 nt, Artificial Sequence
  Description of Artificial Sequence: Synthetic oligonucleotide
ccuacagaucccuguaaau

SEQ ID NO: 92003 - RNA, 19 nt, Artificial Sequence
  Description of Artificial Sequence: Synthetic oligonucleotide
ugcuuuugaugcgcugaca

SEQ ID NO: 92004 - RNA, 19 nt, Artificial Sequence
  Description of Artificial Sequence: Synthetic oligonucleotide
agaauuaaaaguuuuacgu

SEQ ID NO: 92005 - RNA, 19 nt, Artificial Sequence
  Description of Artificial Sequence: Synthetic oligonucleotide
ucuacacaguaacucucuu

SEQ ID NO: 92006 - RNA, 19 nt, Artificial Sequence
  Description of Artificial Sequence: Synthetic oligonucleotide
ucagcaugugcccccaaga

SEQ ID NO: 92007 - RNA, 19 nt, Artificial Sequence
  Description of Artificial Sequence: Synthetic oligonucleotide
augguuuaagaacaucaac

SEQ ID NO: 92008 - RNA, 19 nt, Artificial Sequence
  Description of Artificial Sequence: Synthetic oligonucleotide
caaacuccaggaacuggau

SEQ ID NO: 92009 - RNA, 19 nt, Artificial Sequence
  Description of Artificial Sequence: Synthetic oligonucleotide
ucugucccaaaacuucuug

SEQ ID NO: 92010 - RNA, 19 nt, Artificial Sequence
  Description of Artificial Sequence: Synthetic oligonucleotide
ggccaaagaaauuggggau

SEQ ID NO: 92011 - RNA, 19 nt, Artificial Sequence
  Description of Artificial Sequence: Synthetic oligonucleotide
ugcuaaauuucugcauuuu

SEQ ID NO: 92012 - RNA, 19 nt, Artificial Sequence
  Description of Artificial Sequence: Synthetic oligonucleotide
ucuccccagccucauccaa

SEQ ID NO: 92013 - RNA, 19 nt, Artificial Sequence
  Description of Artificial Sequence: Synthetic oligonucleotide
auuggaucugucuuucaau

SEQ ID NO: 92014 - RNA, 19 nt, Artificial Sequence
  Description of Artificial Sequence: Synthetic oligonucleotide
uuuugaacuucaggucuau

SEQ ID NO: 92015 - RNA, 19 nt, Artificial Sequence
  Description of Artificial Sequence: Synthetic oligonucleotide
ucgugcaucuaugaaucua

SEQ ID NO: 92016 - RNA, 19 nt, Artificial Sequence
  Description of Artificial Sequence: Synthetic oligonucleotide
aucacaagcauuuucuuca

SEQ ID NO: 92017 - RNA, 19 nt, Artificial Sequence
  Description of Artificial Sequence: Synthetic oligonucleotide
acugaaaagccugaaaauu

SEQ ID NO: 92018 - RNA, 19 nt, Artificial Sequence
  Description of Artificial Sequence: Synthetic oligonucleotide
ucugcggaucagaggauau

SEQ ID NO: 92019 - RNA, 19 nt, Artificial Sequence
  Description of Artificial Sequence: Synthetic oligonucleotide
ugucuuuaaagaguugaaa

SEQ ID NO: 92020 - RNA, 19 nt, Artificial Sequence
  Description of Artificial Sequence: Synthetic oligonucleotide
aagcuuuaaccucucgcca

SEQ ID NO: 92021 - RNA, 19 nt, Artificial Sequence
  Description of Artificial Sequence: Synthetic oligonucleotide
auuacauaaucuucaaaau

SEQ ID NO: 92022 - RNA, 19 nt, Artificial Sequence
  Description of Artificial Sequence: Synthetic oligonucleotide
ucuugaaguucuugaucuu

SEQ ID NO: 92023 - RNA, 19 nt, Artificial Sequence
  Description of Artificial Sequence: Synthetic oligonucleotide
uggcacuaacuuuauaaaa

SEQ ID NO: 92024 - RNA, 19 nt, Artificial Sequence
  Description of Artificial Sequence: Synthetic oligonucleotide
aauugcuaaccucagcaug

SEQ ID NO: 92025 - RNA, 19 nt, Artificial Sequence
  Description of Artificial Sequence: Synthetic oligonucleotide
guuuaaacaauuuaaaaga

SEQ ID NO: 92026 - RNA, 19 nt, Artificial Sequence
  Description of Artificial Sequence: Synthetic oligonucleotide
acugaaagucauagaucuu

SEQ ID NO: 92027 - RNA, 19 nt, Artificial Sequence
  Description of Artificial Sequence: Synthetic oligonucleotide
uucagugaauaaaauauca

SEQ ID NO: 92028 - RNA, 19 nt, Artificial Sequence
  Description of Artificial Sequence: Synthetic oligonucleotide
accuucaggagauucaagu

SEQ ID NO: 92029 - RNA, 19 nt, Artificial Sequence
  Description of Artificial Sequence: Synthetic oligonucleotide
ugaaguuggcuucugcuca

SEQ ID NO: 92030 - RNA, 19 nt, Artificial Sequence
  Description of Artificial Sequence: Synthetic oligonucleotide
aaaugccagaacuucugua

SEQ ID NO: 92031 - RNA, 19 nt, Artificial Sequence
  Description of Artificial Sequence: Synthetic oligonucleotide
agaaaguuaugaaccccag

SEQ ID NO: 92032 - RNA, 19 nt, Artificial Sequence
  Description of Artificial Sequence: Synthetic oligonucleotide
gguccuggaacaauuacau

SEQ ID NO: 92033 - RNA, 19 nt, Artificial Sequence
  Description of Artificial Sequence: Synthetic oligonucleotide
uuauuucagauaugauaag

SEQ ID NO: 92034 - RNA, 19 nt, Artificial Sequence
  Description of Artificial Sequence: Synthetic oligonucleotide
guaugcaaggaguugcaga

SEQ ID NO: 92035 - RNA, 19 nt, Artificial Sequence
  Description of Artificial Sequence: Synthetic oligonucleotide
auucaaaaacaaagaggcu

SEQ ID NO: 92036 - RNA, 19 nt, Artificial Sequence
  Description of Artificial Sequence: Synthetic oligonucleotide
uucuuucaugucuguuaau

SEQ ID NO: 92037 - RNA, 19 nt, Artificial Sequence
  Description of Artificial Sequence: Synthetic oligonucleotide
ugaaagcugcuacaaguau

SEQ ID NO: 92038 - RNA, 19 nt, Artificial Sequence
  Description of Artificial Sequence: Synthetic oligonucleotide
ugggcagaccuuggaucua

SEQ ID NO: 92039 - RNA, 19 nt, Artificial Sequence
  Description of Artificial Sequence: Synthetic oligonucleotide
aaguaaaaauaguauauuu

SEQ ID NO: 92040 - RNA, 19 nt, Artificial Sequence
  Description of Artificial Sequence: Synthetic oligonucleotide
uuuugucaaguccucugau

SEQ ID NO: 92041 - RNA, 19 nt, Artificial Sequence
  Description of Artificial Sequence: Synthetic oligonucleotide
uuuucagcaucuuucuuuc

SEQ ID NO: 92042 - RNA, 19 nt, Artificial Sequence
  Description of Artificial Sequence: Synthetic oligonucleotide
ccucaaaugccugaaucug

SEQ ID NO: 92043 - RNA, 19 nt, Artificial Sequence
  Description of Artificial Sequence: Synthetic oligonucleotide
gucaggaaaucucauuagc

SEQ ID NO: 92044 - RNA, 19 nt, Artificial Sequence
  Description of Artificial Sequence: Synthetic oligonucleotide
ccaaacucuuaauggcagu

SEQ ID NO: 92045 - RNA, 19 nt, Artificial Sequence
  Description of Artificial Sequence: Synthetic oligonucleotide
ugaauuccaaccuuuagca

SEQ ID NO: 92046 - RNA, 19 nt, Artificial Sequence
  Description of Artificial Sequence: Synthetic oligonucleotide
agagcugagauauuuggac

SEQ ID NO: 92047 - RNA, 19 nt, Artificial Sequence
  Description of Artificial Sequence: Synthetic oligonucleotide
cuucuccaacaaccggcuu

SEQ ID NO: 92048 - RNA, 19 nt, Artificial Sequence
  Description of Artificial Sequence: Synthetic oligonucleotide
ugauuuacuccauucaaca

SEQ ID NO: 92049 - RNA, 19 nt, Artificial Sequence
  Description of Artificial Sequence: Synthetic oligonucleotide
agcauuugaagagcuucac

SEQ ID NO: 92050 - RNA, 19 nt, Artificial Sequence
  Description of Artificial Sequence: Synthetic oligonucleotide
caaacuggaaguucuggau

SEQ ID NO: 92051 - RNA, 19 nt, Artificial Sequence
  Description of Artificial Sequence: Synthetic oligonucleotide
uauaagcaguaauagccau

SEQ ID NO: 92052 - RNA, 19 nt, Artificial Sequence
  Description of Artificial Sequence: Synthetic oligonucleotide
uuauuuucaaucagaagga

SEQ ID NO: 92053 - RNA, 19 nt, Artificial Sequence
  Description of Artificial Sequence: Synthetic oligonucleotide
aauuacucauaugcuaaac

SEQ ID NO: 92054 - RNA, 19 nt, Artificial Sequence
  Description of Artificial Sequence: Synthetic oligonucleotide
cuuuaccaagaaccuaaag

SEQ ID NO: 92055 - RNA, 19 nt, Artificial Sequence
  Description of Artificial Sequence: Synthetic oligonucleotide
gguucugcagaaacugaug

SEQ ID NO: 92056 - RNA, 19 nt, Artificial Sequence
  Description of Artificial Sequence: Synthetic oligonucleotide
gaugaacgacaaugacauc

SEQ ID NO: 92057 - RNA, 19 nt, Artificial Sequence
  Description of Artificial Sequence: Synthetic oligonucleotide
cucuuccuccaccagcagg

SEQ ID NO: 92058 - RNA, 19 nt, Artificial Sequence
  Description of Artificial Sequence: Synthetic oligonucleotide
gaccauggagagugagucu

SEQ ID NO: 92059 - RNA, 19 nt, Artificial Sequence
  Description of Artificial Sequence: Synthetic oligonucleotide
ucuuagaacucuggaauuc

SEQ ID NO: 92060 - RNA, 19 nt, Artificial Sequence
  Description of Artificial Sequence: Synthetic oligonucleotide
cagaggaaaucacuuagau

SEQ ID NO: 92061 - RNA, 19 nt, Artificial Sequence
  Description of Artificial Sequence: Synthetic oligonucleotide
uguuuuauggagagaaggu

SEQ ID NO: 92062 - RNA, 19 nt, Artificial Sequence
  Description of Artificial Sequence: Synthetic oligonucleotide
ugauaacagauacuuacaa

SEQ ID NO: 92063 - RNA, 19 nt, Artificial Sequence
  Description of Artificial Sequence: Synthetic oligonucleotide
auuauucaagaaucugcua

SEQ ID NO: 92064 - RNA, 19 nt, Artificial Sequence
  Description of Artificial Sequence: Synthetic oligonucleotide
aaaauuagaggaauuagac

SEQ ID NO: 92065 - RNA, 19 nt, Artificial Sequence
  Description of Artificial Sequence: Synthetic oligonucleotide
caucucuaaaaauucccua

SEQ ID NO: 92066 - RNA, 19 nt, Artificial Sequence
  Description of Artificial Sequence: Synthetic oligonucleotide
aaguuucuugccuucugga

SEQ ID NO: 92067 - RNA, 19 nt, Artificial Sequence
  Description of Artificial Sequence: Synthetic oligonucleotide
aguuuuugaugguaugccu

SEQ ID NO: 92068 - RNA, 19 nt, Artificial Sequence
  Description of Artificial Sequence: Synthetic oligonucleotide
uccaaaucuaaagaaucuc

SEQ ID NO: 92069 - RNA, 19 nt, Artificial Sequence
  Description of Artificial Sequence: Synthetic oligonucleotide
cucuuuggccaaaaauggg

SEQ ID NO: 92070 - RNA, 19 nt, Artificial Sequence
  Description of Artificial Sequence: Synthetic oligonucleotide
gcucaaaucuuucaguugg

SEQ ID NO: 92071 - RNA, 19 nt, Artificial Sequence
  Description of Artificial Sequence: Synthetic oligonucleotide
gaagaaacuccagugucua

SEQ ID NO: 92072 - RNA, 19 nt, Artificial Sequence
  Description of Artificial Sequence: Synthetic oligonucleotide
aaagaaccuggaaacuuug

SEQ ID NO: 92073 - RNA, 19 nt, Artificial Sequence
  Description of Artificial Sequence: Synthetic oligonucleotide
ggaccucagccacaaccaa

SEQ ID NO: 92074 - RNA, 19 nt, Artificial Sequence
  Description of Artificial Sequence: Synthetic oligonucleotide
acugaccacugucccugag

SEQ ID NO: 92075 - RNA, 19 nt, Artificial Sequence
  Description of Artificial Sequence: Synthetic oligonucleotide
gagauuauccaacuguucc

SEQ ID NO: 92076 - RNA, 19 nt, Artificial Sequence
  Description of Artificial Sequence: Synthetic oligonucleotide
cagaagccucaagaaucug

SEQ ID NO: 92077 - RNA, 19 nt, Artificial Sequence
  Description of Artificial Sequence: Synthetic oligonucleotide
gauucuuaagaauaaucaa

SEQ ID NO: 92078 - RNA, 19 nt, Artificial Sequence
  Description of Artificial Sequence: Synthetic oligonucleotide
aaucaggagucugacgaag

SEQ ID NO: 92079 - RNA, 19 nt, Artificial Sequence
  Description of Artificial Sequence: Synthetic oligonucleotide
guauuuucuacaagaugcc

SEQ ID NO: 92080 - RNA, 19 nt, Artificial Sequence
  Description of Artificial Sequence: Synthetic oligonucleotide
cuuccaguugcgauaucug

SEQ ID NO: 92081 - RNA, 19 nt, Artificial Sequence
  Description of Artificial Sequence: Synthetic oligonucleotide
ggaucucagcucaaauaaa

SEQ ID NO: 92082 - RNA, 19 nt, Artificial Sequence
  Description of Artificial Sequence: Synthetic oligonucleotide
aauccagaugauccaaaag

SEQ ID NO: 92083 - RNA, 19 nt, Artificial Sequence
  Description of Artificial Sequence: Synthetic oligonucleotide
gaccagcuucccagaaaau

SEQ ID NO: 92084 - RNA, 19 nt, Artificial Sequence
  Description of Artificial Sequence: Synthetic oligonucleotide
uguccucaacaaucugaag

SEQ ID NO: 92085 - RNA, 19 nt, Artificial Sequence
  Description of Artificial Sequence: Synthetic oligonucleotide
gauguugcuuuugcaucau

SEQ ID NO: 92086 - RNA, 19 nt, Artificial Sequence
  Description of Artificial Sequence: Synthetic oligonucleotide
uaaucgguuucugugcacc

SEQ ID NO: 92087 - RNA, 19 nt, Artificial Sequence
  Description of Artificial Sequence: Synthetic oligonucleotide
cugugaugcugugugguuu

SEQ ID NO: 92088 - RNA, 19 nt, Artificial Sequence
  Description of Artificial Sequence: Synthetic oligonucleotide
ugucugguggguuaaccau

SEQ ID NO: 92089 - RNA, 19 nt, Artificial Sequence
  Description of Artificial Sequence: Synthetic oligonucleotide
uacggaggugacuauuccu

SEQ ID NO: 92090 - RNA, 19 nt, Artificial Sequence
  Description of Artificial Sequence: Synthetic oligonucleotide
uuaccuggccacagaugug

SEQ ID NO: 92091 - RNA, 19 nt, Artificial Sequence
  Description of Artificial Sequence: Synthetic oligonucleotide
gacuuguguggggccagga

SEQ ID NO: 92092 - RNA, 19 nt, Artificial Sequence
  Description of Artificial Sequence: Synthetic oligonucleotide
agcacacaagggccaaagu

SEQ ID NO: 92093 - RNA, 19 nt, Artificial Sequence
  Description of Artificial Sequence: Synthetic oligonucleotide
ugugaucucccuggaucug

SEQ ID NO: 92094 - RNA, 19 nt, Artificial Sequence
  Description of Artificial Sequence: Synthetic oligonucleotide
guacaccugugaguuagau

SEQ ID NO: 92095 - RNA, 19 nt, Artificial Sequence
  Description of Artificial Sequence: Synthetic oligonucleotide
ucugacuaaccugauucug

SEQ ID NO: 92096 - RNA, 19 nt, Artificial Sequence
  Description of Artificial Sequence: Synthetic oligonucleotide
guucucacuuuccauaucu

SEQ ID NO: 92097 - RNA, 19 nt, Artificial Sequence
  Description of Artificial Sequence: Synthetic oligonucleotide
uguaucucucuuucucaug

SEQ ID NO: 92098 - RNA, 19 nt, Artificial Sequence
  Description of Artificial Sequence: Synthetic oligonucleotide
ggugaugaugacagcaagu

SEQ ID NO: 92099 - RNA, 19 nt, Artificial Sequence
  Description of Artificial Sequence: Synthetic oligonucleotide
ucaccucuauuucugggau

SEQ ID NO: 92100 - RNA, 19 nt, Artificial Sequence
  Description of Artificial Sequence: Synthetic oligonucleotide
ugugugguauauuuaccau

SEQ ID NO: 92101 - RNA, 19 nt, Artificial Sequence
  Description of Artificial Sequence: Synthetic oligonucleotide
uuucuguaaggccaagaua

SEQ ID NO: 92102 - RNA, 19 nt, Artificial Sequence
  Description of Artificial Sequence: Synthetic oligonucleotide
aaagggguaucagcgucua

SEQ ID NO: 92103 - RNA, 19 nt, Artificial Sequence
  Description of Artificial Sequence: Synthetic oligonucleotide
aauaucaccagacuguugc

SEQ ID NO: 92104 - RNA, 19 nt, Artificial Sequence
  Description of Artificial Sequence: Synthetic oligonucleotide
cuaugaugcuuuuauugug

SEQ ID NO: 92105 - RNA, 19 nt, Artificial Sequence
  Description of Artificial Sequence: Synthetic oligonucleotide
guaugacacuaaagaccca

SEQ ID NO: 92106 - RNA, 19 nt, Artificial Sequence
  Description of Artificial Sequence: Synthetic oligonucleotide
agcugugaccgaguggguu

SEQ ID NO: 92107 - RNA, 19 nt, Artificial Sequence
  Description of Artificial Sequence: Synthetic oligonucleotide
uuuggcugagcugguggcc

SEQ ID NO: 92108 - RNA, 19 nt, Artificial Sequence
  Description of Artificial Sequence: Synthetic oligonucleotide
caaacuggaagacccaaga

SEQ ID NO: 92109 - RNA, 19 nt, Artificial Sequence
  Description of Artificial Sequence: Synthetic oligonucleotide
agagaaacauuuuaauuua

SEQ ID NO: 92110 - RNA, 19 nt, Artificial Sequence
  Description of Artificial Sequence: Synthetic oligonucleotide
augucucgaggaaagggac

SEQ ID NO: 92111 - RNA, 19 nt, Artificial Sequence
  Description of Artificial Sequence: Synthetic oligonucleotide
cugguuaccagggcagcca

SEQ ID NO: 92112 - RNA, 19 nt, Artificial Sequence
  Description of Artificial Sequence: Synthetic oligonucleotide
aguucuggaaaaccuuucc

SEQ ID NO: 92113 - RNA, 19 nt, Artificial Sequence
  Description of Artificial Sequence: Synthetic oligonucleotide
ccagagcauacagcuuagc

SEQ ID NO: 92114 - RNA, 19 nt, Artificial Sequence
  Description of Artificial Sequence: Synthetic oligonucleotide
caaaaagacaguguuugug

SEQ ID NO: 92115 - RNA, 19 nt, Artificial Sequence
  Description of Artificial Sequence: Synthetic oligonucleotide
gaugacagacaaguaugca

SEQ ID NO: 92116 - RNA, 19 nt, Artificial Sequence
  Description of Artificial Sequence: Synthetic oligonucleotide
aaagacugaaaauuuuaag

SEQ ID NO: 92117 - RNA, 19 nt, Artificial Sequence
  Description of Artificial Sequence: Synthetic oligonucleotide
gauagcauuuuacuugucc

SEQ ID NO: 92118 - RNA, 19 nt, Artificial Sequence
  Description of Artificial Sequence: Synthetic oligonucleotide
ccaucagaggcucauggau

SEQ ID NO: 92119 - RNA, 19 nt, Artificial Sequence
  Description of Artificial Sequence: Synthetic oligonucleotide
ugaaaaaguugaugugauu

SEQ ID NO: 92120 - RNA, 19 nt, Artificial Sequence
  Description of Artificial Sequence: Synthetic oligonucleotide
uaucuugauauuucuugag

SEQ ID NO: 92121 - RNA, 19 nt, Artificial Sequence
  Description of Artificial Sequence: Synthetic oligonucleotide
gaagcccuuucagaagucc

SEQ ID NO: 92122 - RNA, 19 nt, Artificial Sequence
  Description of Artificial Sequence: Synthetic oligonucleotide
caaguuccuccagcuccgg

SEQ ID NO: 92123 - RNA, 19 nt, Artificial Sequence
  Description of Artificial Sequence: Synthetic oligonucleotide
gaaaaggcucugugggagu

SEQ ID NO: 92124 - RNA, 19 nt, Artificial Sequence
  Description of Artificial Sequence: Synthetic oligonucleotide
uucuguccuugaguggcca

SEQ ID NO: 92125 - RNA, 19 nt, Artificial Sequence
  Description of Artificial Sequence: Synthetic oligonucleotide
aacaaacccgcaagcucac

SEQ ID NO: 92126 - RNA, 19 nt, Artificial Sequence
  Description of Artificial Sequence: Synthetic oligonucleotide
cccauacuucuggcagugu

SEQ ID NO: 92127 - RNA, 19 nt, Artificial Sequence
  Description of Artificial Sequence: Synthetic oligonucleotide
ucuaaagaacgcccuggcc

SEQ ID NO: 92128 - RNA, 19 nt, Artificial Sequence
  Description of Artificial Sequence: Synthetic oligonucleotide
cacagacaaucauguggcc

SEQ ID NO: 92129 - RNA, 19 nt, Artificial Sequence
  Description of Artificial Sequence: Synthetic oligonucleotide
cuauagucagguguucaag

SEQ ID NO: 92130 - RNA, 19 nt, Artificial Sequence
  Description of Artificial Sequence: Synthetic oligonucleotide
ggaaacggucuagcccuuc

SEQ ID NO: 92131 - RNA, 19 nt, Artificial Sequence
  Description of Artificial Sequence: Synthetic oligonucleotide
cuuugcaaaacacaacugc

SEQ ID NO: 92132 - RNA, 19 nt, Artificial Sequence
  Description of Artificial Sequence: Synthetic oligonucleotide
ccuaguuuaccaaggagag

SEQ ID NO: 92133 - RNA, 19 nt, Artificial Sequence
  Description of Artificial Sequence: Synthetic oligonucleotide
ggccuggcuguuuaaauug

SEQ ID NO: 92134 - RNA, 19 nt, Artificial Sequence
  Description of Artificial Sequence: Synthetic oligonucleotide
guuuucauauauaucacac

SEQ ID NO: 92135 - RNA, 19 nt, Artificial Sequence
  Description of Artificial Sequence: Synthetic oligonucleotide
ccaaaagcguguuuugaaa

SEQ ID NO: 92136 - RNA, 19 nt, Artificial Sequence
  Description of Artificial Sequence: Synthetic oligonucleotide
auucuucaagaaaugagau

SEQ ID NO: 92137 - RNA, 19 nt, Artificial Sequence
  Description of Artificial Sequence: Synthetic oligonucleotide
uugcccauauuucagggga

SEQ ID NO: 92138 - RNA, 19 nt, Artificial Sequence
  Description of Artificial Sequence: Synthetic oligonucleotide
agccaccaacgucugucac

SEQ ID NO: 92139 - RNA, 19 nt, Artificial Sequence
  Description of Artificial Sequence: Synthetic oligonucleotide
caggaguuggaaagauggg

SEQ ID NO: 92140 - RNA, 19 nt, Artificial Sequence
  Description of Artificial Sequence: Synthetic oligonucleotide
gguuuauauaaugcaucaa

SEQ ID NO: 92141 - RNA, 19 nt, Artificial Sequence
  Description of Artificial Sequence: Synthetic oligonucleotide
agucuucuuucuuaucucu

SEQ ID NO: 92142 - RNA, 19 nt, Artificial Sequence
  Description of Artificial Sequence: Synthetic oligonucleotide
ucugugucucuauuugcac

SEQ ID NO: 92143 - RNA, 19 nt, Artificial Sequence
  Description of Artificial Sequence: Synthetic oligonucleotide
cuugagucucucaccucag

SEQ ID NO: 92144 - RNA, 19 nt, Artificial Sequence
  Description of Artificial Sequence: Synthetic oligonucleotide
gcuccuguaaaagaguggc

SEQ ID NO: 92145 - RNA, 19 nt, Artificial Sequence
  Description of Artificial Sequence: Synthetic oligonucleotide
caaguaaaaaacauggggc

SEQ ID NO: 92146 - RNA, 19 nt, Artificial Sequence
  Description of Artificial Sequence: Synthetic oligonucleotide
cucugauucuccuguaauu

SEQ ID NO: 92147 - RNA, 19 nt, Artificial Sequence
  Description of Artificial Sequence: Synthetic oligonucleotide
ugugauaauuaaauauaca

SEQ ID NO: 92148 - RNA, 19 nt, Artificial Sequence
  Description of Artificial Sequence: Synthetic oligonucleotide
acacaaucaugacauugag

SEQ ID NO: 92149 - RNA, 19 nt, Artificial Sequence
  Description of Artificial Sequence: Synthetic oligonucleotide
gaagaacugcauuucuacc

SEQ ID NO: 92150 - RNA, 19 nt, Artificial Sequence
  Description of Artificial Sequence: Synthetic oligonucleotide
ccuuaaaaaguacugguau

SEQ ID NO: 92151 - RNA, 19 nt, Artificial Sequence
  Description of Artificial Sequence: Synthetic oligonucleotide
uauacagaaauaggguuaa

SEQ ID NO: 92152 - RNA, 19 nt, Artificial Sequence
  Description of Artificial Sequence: Synthetic oligonucleotide
aaaaaaacucaagcucucu

SEQ ID NO: 92153 - RNA, 19 nt, Artificial Sequence
  Description of Artificial Sequence: Synthetic oligonucleotide
ucuauaugagaccaaaaug

SEQ ID NO: 92154 - RNA, 19 nt, Artificial Sequence
  Description of Artificial Sequence: Synthetic oligonucleotide
guacuagaguuaguuuagu

SEQ ID NO: 92155 - RNA, 19 nt, Artificial Sequence
  Description of Artificial Sequence: Synthetic oligonucleotide
ugaaauaaaaaaccaguca

SEQ ID NO: 92156 - RNA, 19 nt, Artificial Sequence
  Description of Artificial Sequence: Synthetic oligonucleotide
agcuggccgggcauggugg

SEQ ID NO: 92157 - RNA, 19 nt, Artificial Sequence
  Description of Artificial Sequence: Synthetic oligonucleotide
gcucaugcuuguaauccca

SEQ ID NO: 92158 - RNA, 19 nt, Artificial Sequence
  Description of Artificial Sequence: Synthetic oligonucleotide
agcacuuugggaggccgag

SEQ ID NO: 92159 - RNA, 19 nt, Artificial Sequence
  Description of Artificial Sequence: Synthetic oligonucleotide
ggcagguggaucacgaggu

SEQ ID NO: 92160 - RNA, 19 nt, Artificial Sequence
  Description of Artificial Sequence: Synthetic oligonucleotide
ucaggaguuugagaccagu

SEQ ID NO: 92161 - RNA, 19 nt, Artificial Sequence
  Description of Artificial Sequence: Synthetic oligonucleotide
ucuggccaacauggugaaa

SEQ ID NO: 92162 - RNA, 19 nt, Artificial Sequence
  Description of Artificial Sequence: Synthetic oligonucleotide
accccgucuguacuaaaaa

SEQ ID NO: 92163 - RNA, 19 nt, Artificial Sequence
  Description of Artificial Sequence: Synthetic oligonucleotide
auacaaaaauuagcugggc

SEQ ID NO: 92164 - RNA, 19 nt, Artificial Sequence
  Description of Artificial Sequence: Synthetic oligonucleotide
cgugguggugggugccugu

SEQ ID NO: 92165 - RNA, 19 nt, Artificial Sequence
  Description of Artificial Sequence: Synthetic oligonucleotide
uaaucccagcuacuuggga

SEQ ID NO: 92166 - RNA, 19 nt, Artificial Sequence
  Description of Artificial Sequence: Synthetic oligonucleotide
aggcugaggcaggagaauc

SEQ ID NO: 92167 - RNA, 19 nt, Artificial Sequence
  Description of Artificial Sequence: Synthetic oligonucleotide
cgcuugaacccgggaggug

SEQ ID NO: 92168 - RNA, 19 nt, Artificial Sequence
  Description of Artificial Sequence: Synthetic oligonucleotide
ggagguggcagugagccga

SEQ ID NO: 92169 - RNA, 19 nt, Artificial Sequence
  Description of Artificial Sequence: Synthetic oligonucleotide
agaucacgccacugcaaug

SEQ ID NO: 92170 - RNA, 19 nt, Artificial Sequence
  Description of Artificial Sequence: Synthetic oligonucleotide
gcagcccgggcaacagagc

SEQ ID NO: 92171 - RNA, 19 nt, Artificial Sequence
  Description of Artificial Sequence: Synthetic oligonucleotide
cuagacugucucaaaagaa

SEQ ID NO: 92172 - RNA, 19 nt, Artificial Sequence
  Description of Artificial Sequence: Synthetic oligonucleotide
aaaaaaacucagucagcuu

SEQ ID NO: 92173 - RNA, 19 nt, Artificial Sequence
  Description of Artificial Sequence: Synthetic oligonucleotide
ucuuaaccaauugcuuccg

SEQ ID NO: 92174 - RNA, 19 nt, Artificial Sequence
  Description of Artificial Sequence: Synthetic oligonucleotide
gugucauccagggccccau

SEQ ID NO: 92175 - RNA, 19 nt, Artificial Sequence
  Description of Artificial Sequence: Synthetic oligonucleotide
uucugugcagauugagugu

SEQ ID NO: 92176 - RNA, 19 nt, Artificial Sequence
  Description of Artificial Sequence: Synthetic oligonucleotide
ugggcaccacacagguggu

SEQ ID NO: 92177 - RNA, 19 nt, Artificial Sequence
  Description of Artificial Sequence: Synthetic oligonucleotide
uugcugcuucagugcuucc

SEQ ID NO: 92178 - RNA, 19 nt, Artificial Sequence
  Description of Artificial Sequence: Synthetic oligonucleotide
cugcucuuuuuccuugggc

SEQ ID NO: 92179 - RNA, 19 nt, Artificial Sequence
  Description of Artificial Sequence: Synthetic oligonucleotide
ccugcuucuggguuccaua

SEQ ID NO: 92180 - RNA, 19 nt, Artificial Sequence
  Description of Artificial Sequence: Synthetic oligonucleotide
agggaaacaguaagaaaga

SEQ ID NO: 92181 - RNA, 19 nt, Artificial Sequence
  Description of Artificial Sequence: Synthetic oligonucleotide
aaagacacauccuuaccau

SEQ ID NO: 92182 - RNA, 19 nt, Artificial Sequence
  Description of Artificial Sequence: Synthetic oligonucleotide
uaaaugcauaugguccacc

SEQ ID NO: 92183 - RNA, 19 nt, Artificial Sequence
  Description of Artificial Sequence: Synthetic oligonucleotide
cuacaaauagaaaaauauu

SEQ ID NO: 92184 - RNA, 19 nt, Artificial Sequence
  Description of Artificial Sequence: Synthetic oligonucleotide
uuaaaugaucugccuuuau

SEQ ID NO: 92185 - RNA, 19 nt, Artificial Sequence
  Description of Artificial Sequence: Synthetic oligonucleotide
uacaaagugauauucucua

SEQ ID NO: 92186 - RNA, 19 nt, Artificial Sequence
  Description of Artificial Sequence: Synthetic oligonucleotide
accuuugauaauuuaccug

SEQ ID NO: 92187 - RNA, 19 nt, Artificial Sequence
  Description of Artificial Sequence: Synthetic oligonucleotide
gcuuaaauguuuuuaucug

SEQ ID NO: 92188 - RNA, 19 nt, Artificial Sequence
  Description of Artificial Sequence: Synthetic oligonucleotide
gcacugcaaaguacuguau

SEQ ID NO: 92189 - RNA, 19 nt, Artificial Sequence
  Description of Artificial Sequence: Synthetic oligonucleotide
uccaaaguaaaauuuccuc

SEQ ID NO: 92190 - RNA, 19 nt, Artificial Sequence
  Description of Artificial Sequence: Synthetic oligonucleotide
cauccaauaucuuucaaac

SEQ ID NO: 92191 - RNA, 19 nt, Artificial Sequence
  Description of Artificial Sequence: Synthetic oligonucleotide
cuguuuuguuaacuaaugc

SEQ ID NO: 92192 - RNA, 19 nt, Artificial Sequence
  Description of Artificial Sequence: Synthetic oligonucleotide
ccauauauuuguaaguauc

SEQ ID NO: 92193 - RNA, 19 nt, Artificial Sequence
  Description of Artificial Sequence: Synthetic oligonucleotide
cugcacacuugauacagca

SEQ ID NO: 92194 - RNA, 19 nt, Artificial Sequence
  Description of Artificial Sequence: Synthetic oligonucleotide
aacguuagaugguuuugau

SEQ ID NO: 92195 - RNA, 19 nt, Artificial Sequence
  Description of Artificial Sequence: Synthetic oligonucleotide
ugguaaacccuaaaggagg

SEQ ID NO: 92196 - RNA, 19 nt, Artificial Sequence
  Description of Artificial Sequence: Synthetic oligonucleotide
gacuccaagaguguguauu

SEQ ID NO: 92197 - RNA, 19 nt, Artificial Sequence
  Description of Artificial Sequence: Synthetic oligonucleotide
uuauuuauaguuuuaucag

SEQ ID NO: 92198 - RNA, 19 nt, Artificial Sequence
  Description of Artificial Sequence: Synthetic oligonucleotide
gagaugacaauuauuugaa

SEQ ID NO: 92199 - RNA, 19 nt, Artificial Sequence
  Description of Artificial Sequence: Synthetic oligonucleotide
augccaauuauauggauuc

SEQ ID NO: 92200 - RNA, 19 nt, Artificial Sequence
  Description of Artificial Sequence: Synthetic oligonucleotide
ccuuucauuuuuugcugga

SEQ ID NO: 92201 - RNA, 19 nt, Artificial Sequence
  Description of Artificial Sequence: Synthetic oligonucleotide
aggaugggagaagaaacca

SEQ ID NO: 92202 - RNA, 19 nt, Artificial Sequence
  Description of Artificial Sequence: Synthetic oligonucleotide
aaaguuuauagaccuucac

SEQ ID NO: 92203 - RNA, 19 nt, Artificial Sequence
  Description of Artificial Sequence: Synthetic oligonucleotide
cauugagaaagcuucaguu

SEQ ID NO: 92204 - RNA, 19 nt, Artificial Sequence
  Description of Artificial Sequence: Synthetic oligonucleotide
uuugaacuucagcuaucag

SEQ ID NO: 92205 - RNA, 19 nt, Artificial Sequence
  Description of Artificial Sequence: Synthetic oligonucleotide
gauucaaaaacaacagaaa

SEQ ID NO: 92206 - RNA, 19 nt, Artificial Sequence
  Description of Artificial Sequence: Synthetic oligonucleotide
agaaccaagacauucuuaa

SEQ ID NO: 92207 - RNA, 19 nt, Artificial Sequence
  Description of Artificial Sequence: Synthetic oligonucleotide
agaugccuguacuuucagc

SEQ ID NO: 92208 - RNA, 19 nt, Artificial Sequence
  Description of Artificial Sequence: Synthetic oligonucleotide
cuggguauaaauucaugag

SEQ ID NO: 92209 - RNA, 19 nt, Artificial Sequence
  Description of Artificial Sequence: Synthetic oligonucleotide
guucaaagauugaaaccug

SEQ ID NO: 92210 - RNA, 19 nt, Artificial Sequence
  Description of Artificial Sequence: Synthetic oligonucleotide
gaccaauuugcuuuauuuc

SEQ ID NO: 92211 - RNA, 19 nt, Artificial Sequence
  Description of Artificial Sequence: Synthetic oligonucleotide
cauggaagaagugaucuac

SEQ ID NO: 92212 - RNA, 19 nt, Artificial Sequence
  Description of Artificial Sequence: Synthetic oligonucleotide
caaagguguuugugccauu

SEQ ID NO: 92213 - RNA, 19 nt, Artificial Sequence
  Description of Artificial Sequence: Synthetic oligonucleotide
uuggaaaacagcgugcaug

SEQ ID NO: 92214 - RNA, 19 nt, Artificial Sequence
  Description of Artificial Sequence: Synthetic oligonucleotide
guguucaagccuuagauug

SEQ ID NO: 92215 - RNA, 19 nt, Artificial Sequence
  Description of Artificial Sequence: Synthetic oligonucleotide
ggcgaugucguauuuuccu

SEQ ID NO: 92216 - RNA, 19 nt, Artificial Sequence
  Description of Artificial Sequence: Synthetic oligonucleotide
ucacguguggcaaugccaa

SEQ ID NO: 92217 - RNA, 19 nt, Artificial Sequence
  Description of Artificial Sequence: Synthetic oligonucleotide
aaggcuuuacuuuaccugu

SEQ ID NO: 92218 - RNA, 19 nt, Artificial Sequence
  Description of Artificial Sequence: Synthetic oligonucleotide
ugaguacacacuauaugaa

SEQ ID NO: 92219 - RNA, 19 nt, Artificial Sequence
  Description of Artificial Sequence: Synthetic oligonucleotide
auuauuuccaacguacauu

SEQ ID NO: 92220 - RNA, 19 nt, Artificial Sequence
  Description of Artificial Sequence: Synthetic oligonucleotide
uuaaucaauaagggucaca

SEQ ID NO: 92221 - RNA, 19 nt, Artificial Sequence
  Description of Artificial Sequence: Synthetic oligonucleotide
aaauucccaaaucaaucuc

SEQ ID NO: 92222 - RNA, 19 nt, Artificial Sequence
  Description of Artificial Sequence: Synthetic oligonucleotide
cuggaauaaauagagaggu

SEQ ID NO: 92223 - RNA, 19 nt, Artificial Sequence
  Description of Artificial Sequence: Synthetic oligonucleotide
uaauuaaauugcuggagcc

SEQ ID NO: 92224 - RNA, 19 nt, Artificial Sequence
  Description of Artificial Sequence: Synthetic oligonucleotide
aaauugcuggagccaacua

SEQ ID NO: 92225 - RNA, 25 nt, Artificial Sequence
  Description of Artificial Sequence: Synthetic oligonucleotide
gaagacuccagauauaggaucacuc

SEQ ID NO: 92226 - RNA, 25 nt, Artificial Sequence
  Description of Artificial Sequence: Synthetic oligonucleotide
ccaugccaucaagaaaguugaugcu

SEQ ID NO: 92227 - RNA, 25 nt, Artificial Sequence
  Description of Artificial Sequence: Synthetic oligonucleotide
uauugggcccaucucaagcugaucu

SEQ ID NO: 92228 - RNA, 25 nt, Artificial Sequence
  Description of Artificial Sequence: Synthetic oligonucleotide
uuggcaccucucaugcucugcucuc

SEQ ID NO: 92229 - RNA, 25 nt, Artificial Sequence
  Description of Artificial Sequence: Synthetic oligonucleotide
cuucaaccagaccucuacauuccau

SEQ ID NO: 92230 - RNA, 25 nt, Artificial Sequence
  Description of Artificial Sequence: Synthetic oligonucleotide
uuuuggaagaagacuaaaaauggug

SEQ ID NO: 92231 - RNA, 25 nt, Artificial Sequence
  Description of Artificial Sequence: Synthetic oligonucleotide
guuuccaauguggacacugaagaga

SEQ ID NO: 92232 - RNA, 25 nt, Artificial Sequence
  Description of Artificial Sequence: Synthetic oligonucleotide
acaaauucuuauccuuuuuaacaua

SEQ ID NO: 92233 - RNA, 25 nt, Artificial Sequence
  Description of Artificial Sequence: Synthetic oligonucleotide
aauccuaauuuccaaacuccuuggg

SEQ ID NO: 92234 - RNA, 25 nt, Artificial Sequence
  Description of Artificial Sequence: Synthetic oligonucleotide
ggcuagaugguuuccuaaaacucug

SEQ ID NO: 92235 - RNA, 25 nt, Artificial Sequence
  Description of Artificial Sequence: Synthetic oligonucleotide
gcccugugaugucacucuggauguu

SEQ ID NO: 92236 - RNA, 25 nt, Artificial Sequence
  Description of Artificial Sequence: Synthetic oligonucleotide
uccaaagaaccaugugaucguggac

SEQ ID NO: 92237 - RNA, 25 nt, Artificial Sequence
  Description of Artificial Sequence: Synthetic oligonucleotide
cugcacagacaagcauuugacagaa

SEQ ID NO: 92238 - RNA, 25 nt, Artificial Sequence
  Description of Artificial Sequence: Synthetic oligonucleotide
aauuccuggagguauucccacgaac

SEQ ID NO: 92239 - RNA, 25 nt, Artificial Sequence
  Description of Artificial Sequence: Synthetic oligonucleotide
caccacgaaccucacccucaccauu

SEQ ID NO: 92240 - RNA, 25 nt, Artificial Sequence
  Description of Artificial Sequence: Synthetic oligonucleotide
uaaccacauaccagacaucucccca

SEQ ID NO: 92241 - RNA, 25 nt, Artificial Sequence
  Description of Artificial Sequence: Synthetic oligonucleotide
agcguccuuucacagacuggaccau

SEQ ID NO: 92242 - RNA, 25 nt, Artificial Sequence
  Description of Artificial Sequence: Synthetic oligonucleotide
ucugguagagaucgauuucagaugc

SEQ ID NO: 92243 - RNA, 25 nt, Artificial Sequence
  Description of Artificial Sequence: Synthetic oligonucleotide
caacuguguaccuauuccacugggg

SEQ ID NO: 92244 - RNA, 25 nt, Artificial Sequence
  Description of Artificial Sequence: Synthetic oligonucleotide
gucaaaaaacaacaugugcaucaag

SEQ ID NO: 92245 - RNA, 25 nt, Artificial Sequence
  Description of Artificial Sequence: Synthetic oligonucleotide
gaggcugcagauuaaacccagaagc

SEQ ID NO: 92246 - RNA, 25 nt, Artificial Sequence
  Description of Artificial Sequence: Synthetic oligonucleotide
cuuuaguggacucacuuauuuaaaa

SEQ ID NO: 92247 - RNA, 25 nt, Artificial Sequence
  Description of Artificial Sequence: Synthetic oligonucleotide
aucccuuuaccuggauggaaaccag

SEQ ID NO: 92248 - RNA, 25 nt, Artificial Sequence
  Description of Artificial Sequence: Synthetic oligonucleotide
gcuacuagagauaccgcagggccuc

SEQ ID NO: 92249 - RNA, 25 nt, Artificial Sequence
  Description of Artificial Sequence: Synthetic oligonucleotide
cccgccuagcuuacagcuucucagc

SEQ ID NO: 92250 - RNA, 25 nt, Artificial Sequence
  Description of Artificial Sequence: Synthetic oligonucleotide
ccuugaggccaacaacaucuuuucc

SEQ ID NO: 92251 - RNA, 25 nt, Artificial Sequence
  Description of Artificial Sequence: Synthetic oligonucleotide
caucagaaaagagaaucuaacagaa

SEQ ID NO: 92252 - RNA, 25 nt, Artificial Sequence
  Description of Artificial Sequence: Synthetic oligonucleotide
acuggccaacauagaaauacucuac

SEQ ID NO: 92253 - RNA, 25 nt, Artificial Sequence
  Description of Artificial Sequence: Synthetic oligonucleotide
ccugggccaaaacuguuauuaucga

SEQ ID NO: 92254 - RNA, 25 nt, Artificial Sequence
  Description of Artificial Sequence: Synthetic oligonucleotide
aaauccuuguuauguuucauauuca

SEQ ID NO: 92255 - RNA, 25 nt, Artificial Sequence
  Description of Artificial Sequence: Synthetic oligonucleotide
aauagagaaagaugccuuccuaaac

SEQ ID NO: 92256 - RNA, 25 nt, Artificial Sequence
  Description of Artificial Sequence: Synthetic oligonucleotide
cuugacaaaguuaaaagugcucucc

SEQ ID NO: 92257 - RNA, 25 nt, Artificial Sequence
  Description of Artificial Sequence: Synthetic oligonucleotide
ccugaaagauaacaaugucacagcc

SEQ ID NO: 92258 - RNA, 25 nt, Artificial Sequence
  Description of Artificial Sequence: Synthetic oligonucleotide
cgucccuacuguuuugccaucuacu

SEQ ID NO: 92259 - RNA, 25 nt, Artificial Sequence
  Description of Artificial Sequence: Synthetic oligonucleotide
uuuaacagaacuauaucucuacaac

SEQ ID NO: 92260 - RNA, 25 nt, Artificial Sequence
  Description of Artificial Sequence: Synthetic oligonucleotide
caacaugauugcaaaaauccaagaa

SEQ ID NO: 92261 - RNA, 25 nt, Artificial Sequence
  Description of Artificial Sequence: Synthetic oligonucleotide
agaugauuuuaauaaccucaaccaa

SEQ ID NO: 92262 - RNA, 25 nt, Artificial Sequence
  Description of Artificial Sequence: Synthetic oligonucleotide
auuacaaauucuugaccuaagugga

SEQ ID NO: 92263 - RNA, 25 nt, Artificial Sequence
  Description of Artificial Sequence: Synthetic oligonucleotide
aaauugcccucguuguuauaaugcc

SEQ ID NO: 92264 - RNA, 25 nt, Artificial Sequence
  Description of Artificial Sequence: Synthetic oligonucleotide
cccauuuccuugugcgccguguaaa

SEQ ID NO: 92265 - RNA, 25 nt, Artificial Sequence
  Description of Artificial Sequence: Synthetic oligonucleotide
aaauaauucuccccuacagaucccu

SEQ ID NO: 92266 - RNA, 25 nt, Artificial Sequence
  Description of Artificial Sequence: Synthetic oligonucleotide
uguaaaugcuuuugaugcgcugaca

SEQ ID NO: 92267 - RNA, 25 nt, Artificial Sequence
  Description of Artificial Sequence: Synthetic oligonucleotide
agaauuaaaaguuuuacgucuacac

SEQ ID NO: 92268 - RNA, 25 nt, Artificial Sequence
  Description of Artificial Sequence: Synthetic oligonucleotide
caguaacucucuucagcaugugccc

SEQ ID NO: 92269 - RNA, 25 nt, Artificial Sequence
  Description of Artificial Sequence: Synthetic oligonucleotide
cccaagaugguuuaagaacaucaac

SEQ ID NO: 92270 - RNA, 25 nt, Artificial Sequence
  Description of Artificial Sequence: Synthetic oligonucleotide
caaacuccaggaacuggaucugucc

SEQ ID NO: 92271 - RNA, 25 nt, Artificial Sequence
  Description of Artificial Sequence: Synthetic oligonucleotide
ccaaaacuucuuggccaaagaaauu

SEQ ID NO: 92272 - RNA, 25 nt, Artificial Sequence
  Description of Artificial Sequence: Synthetic oligonucleotide
uggggaugcuaaauuucugcauuuu

SEQ ID NO: 92273 - RNA, 25 nt, Artificial Sequence
  Description of Artificial Sequence: Synthetic oligonucleotide
ucuccccagccucauccaauuggau

SEQ ID NO: 92274 - RNA, 25 nt, Artificial Sequence
  Description of Artificial Sequence: Synthetic oligonucleotide
ucugucuuucaauuuugaacuucag

SEQ ID NO: 92275 - RNA, 25 nt, Artificial Sequence
  Description of Artificial Sequence: Synthetic oligonucleotide
ggucuaucgugcaucuaugaaucua

SEQ ID NO: 92276 - RNA, 25 nt, Artificial Sequence
  Description of Artificial Sequence: Synthetic oligonucleotide
aucacaagcauuuucuucacugaaa

SEQ ID NO: 92277 - RNA, 25 nt, Artificial Sequence
  Description of Artificial Sequence: Synthetic oligonucleotide
aagccugaaaauucugcggaucaga

SEQ ID NO: 92278 - RNA, 25 nt, Artificial Sequence
  Description of Artificial Sequence: Synthetic oligonucleotide
aggauaugucuuuaaagaguugaaa

SEQ ID NO: 92279 - RNA, 25 nt, Artificial Sequence
  Description of Artificial Sequence: Synthetic oligonucleotide
aagcuuuaaccucucgccauuacau

SEQ ID NO: 92280 - RNA, 25 nt, Artificial Sequence
  Description of Artificial Sequence: Synthetic oligonucleotide
uaaucuucaaaaucuugaaguucuu

SEQ ID NO: 92281 - RNA, 25 nt, Artificial Sequence
  Description of Artificial Sequence: Synthetic oligonucleotide
ugaucuuggcacuaacuuuauaaaa

SEQ ID NO: 92282 - RNA, 25 nt, Artificial Sequence
  Description of Artificial Sequence: Synthetic oligonucleotide
aauugcuaaccucagcauguuuaaa

SEQ ID NO: 92283 - RNA, 25 nt, Artificial Sequence
  Description of Artificial Sequence: Synthetic oligonucleotide
acaauuuaaaagacugaaagucaua

SEQ ID NO: 92284 - RNA, 25 nt, Artificial Sequence
  Description of Artificial Sequence: Synthetic oligonucleotide
agaucuuucagugaauaaaauauca

SEQ ID NO: 92285 - RNA, 25 nt, Artificial Sequence
  Description of Artificial Sequence: Synthetic oligonucleotide
accuucaggagauucaagugaaguu

SEQ ID NO: 92286 - RNA, 25 nt, Artificial Sequence
  Description of Artificial Sequence: Synthetic oligonucleotide
uggcuucugcucaaaugccagaacu

SEQ ID NO: 92287 - RNA, 25 nt, Artificial Sequence
  Description of Artificial Sequence: Synthetic oligonucleotide
uucuguagaaaguuaugaaccccag

SEQ ID NO: 92288 - RNA, 25 nt, Artificial Sequence
  Description of Artificial Sequence: Synthetic oligonucleotide
gguccuggaacaauuacauuauuuc

SEQ ID NO: 92289 - RNA, 25 nt, Artificial Sequence
  Description of Artificial Sequence: Synthetic oligonucleotide
cagauaugauaaguaugcaaggagu

SEQ ID NO: 92290 - RNA, 25 nt, Artificial Sequence
  Description of Artificial Sequence: Synthetic oligonucleotide
uugcagauucaaaaacaaagaggcu

SEQ ID NO: 92291 - RNA, 25 nt, Artificial Sequence
  Description of Artificial Sequence: Synthetic oligonucleotide
uucuuucaugucuguuaaugaaagc

SEQ ID NO: 92292 - RNA, 25 nt, Artificial Sequence
  Description of Artificial Sequence: Synthetic oligonucleotide
cugcuacaaguaugggcagaccuug

SEQ ID NO: 92293 - RNA, 25 nt, Artificial Sequence
  Description of Artificial Sequence: Synthetic oligonucleotide
ggaucuaaguaaaaauaguauauuu

SEQ ID NO: 92294 - RNA, 25 nt, Artificial Sequence
  Description of Artificial Sequence: Synthetic oligonucleotide
uuuugucaaguccucugauuuucag

SEQ ID NO: 92295 - RNA, 25 nt, Artificial Sequence
  Description of Artificial Sequence: Synthetic oligonucleotide
gcaucuuucuuuccucaaaugccug

SEQ ID NO: 92296 - RNA, 25 nt, Artificial Sequence
  Description of Artificial Sequence: Synthetic oligonucleotide
gaaucugucaggaaaucucauuagc

SEQ ID NO: 92297 - RNA, 25 nt, Artificial Sequence
  Description of Artificial Sequence: Synthetic oligonucleotide
ccaaacucuuaauggcagugaauuc

SEQ ID NO: 92298 - RNA, 25 nt, Artificial Sequence
  Description of Artificial Sequence: Synthetic oligonucleotide
ccaaccuuuagcagagcugagauau

SEQ ID NO: 92299 - RNA, 25 nt, Artificial Sequence
  Description of Artificial Sequence: Synthetic oligonucleotide
uuuggacuucuccaacaaccggcuu

SEQ ID NO: 92300 - RNA, 25 nt, Artificial Sequence
  Description of Artificial Sequence: Synthetic oligonucleotide
ugauuuacuccauucaacagcauuu

SEQ ID NO: 92301 - RNA, 25 nt, Artificial Sequence
  Description of Artificial Sequence: Synthetic oligonucleotide
ugaagagcuucacaaacuggaaguu

SEQ ID NO: 92302 - RNA, 25 nt, Artificial Sequence
  Description of Artificial Sequence: Synthetic oligonucleotide
ucuggauauaagcaguaauagccau

SEQ ID NO: 92303 - RNA, 25 nt, Artificial Sequence
  Description of Artificial Sequence: Synthetic oligonucleotide
uuauuuucaaucagaaggaauuacu

SEQ ID NO: 92304 - RNA, 25 nt, Artificial Sequence
  Description of Artificial Sequence: Synthetic oligonucleotide
ucauaugcuaaacuuuaccaagaac

SEQ ID NO: 92305 - RNA, 25 nt, Artificial Sequence
  Description of Artificial Sequence: Synthetic oligonucleotide
ccuaaagguucugcagaaacugaug

SEQ ID NO: 92306 - RNA, 25 nt, Artificial Sequence
  Description of Artificial Sequence: Synthetic oligonucleotide
gaugaacgacaaugacaucucuucc

SEQ ID NO: 92307 - RNA, 25 nt, Artificial Sequence
  Description of Artificial Sequence: Synthetic oligonucleotide
cuccaccagcaggaccauggagagu

SEQ ID NO: 92308 - RNA, 25 nt, Artificial Sequence
  Description of Artificial Sequence: Synthetic oligonucleotide
ugagucucuuagaacucuggaauuc

SEQ ID NO: 92309 - RNA, 25 nt, Artificial Sequence
  Description of Artificial Sequence: Synthetic oligonucleotide
cagaggaaaucacuuagauguuuua

SEQ ID NO: 92310 - RNA, 25 nt, Artificial Sequence
  Description of Artificial Sequence: Synthetic oligonucleotide
auggagagaaggugauaacagauac

SEQ ID NO: 92311 - RNA, 25 nt, Artificial Sequence
  Description of Artificial Sequence: Synthetic oligonucleotide
cuuacaauuauucaagaaucugcua

SEQ ID NO: 92312 - RNA, 25 nt, Artificial Sequence
  Description of Artificial Sequence: Synthetic oligonucleotide
aaaauuagaggaauuagacaucucu

SEQ ID NO: 92313 - RNA, 25 nt, Artificial Sequence
  Description of Artificial Sequence: Synthetic oligonucleotide
uaaaaauucccuaaguuucuugccu

SEQ ID NO: 92314 - RNA, 25 nt, Artificial Sequence
  Description of Artificial Sequence: Synthetic oligonucleotide
uucuggaguuuuugaugguaugccu

SEQ ID NO: 92315 - RNA, 25 nt, Artificial Sequence
  Description of Artificial Sequence: Synthetic oligonucleotide
uccaaaucuaaagaaucucucuuug

SEQ ID NO: 92316 - RNA, 25 nt, Artificial Sequence
  Description of Artificial Sequence: Synthetic oligonucleotide
ggccaaaaaugggcucaaaucuuuc

SEQ ID NO: 92317 - RNA, 25 nt, Artificial Sequence
  Description of Artificial Sequence: Synthetic oligonucleotide
caguuggaagaaacuccagugucua

SEQ ID NO: 92318 - RNA, 25 nt, Artificial Sequence
  Description of Artificial Sequence: Synthetic oligonucleotide
aaagaaccuggaaacuuuggaccuc

SEQ ID NO: 92319 - RNA, 25 nt, Artificial Sequence
  Description of Artificial Sequence: Synthetic oligonucleotide
cagccacaaccaacugaccacuguc

SEQ ID NO: 92320 - RNA, 25 nt, Artificial Sequence
  Description of Artificial Sequence: Synthetic oligonucleotide
cccugagagauuauccaacuguucc

SEQ ID NO: 92321 - RNA, 25 nt, Artificial Sequence
  Description of Artificial Sequence: Synthetic oligonucleotide
cagaagccucaagaaucugauucuu

SEQ ID NO: 92322 - RNA, 25 nt, Artificial Sequence
  Description of Artificial Sequence: Synthetic oligonucleotide
uaagaauaaucaaaucaggagucug

SEQ ID NO: 92323 - RNA, 25 nt, Artificial Sequence
  Description of Artificial Sequence: Synthetic oligonucleotide
gacgaaguauuuucuacaagaugcc

SEQ ID NO: 92324 - RNA, 25 nt, Artificial Sequence
  Description of Artificial Sequence: Synthetic oligonucleotide
cuuccaguugcgauaucuggaucuc

SEQ ID NO: 92325 - RNA, 25 nt, Artificial Sequence
  Description of Artificial Sequence: Synthetic oligonucleotide
cagcucaaauaaaauccagaugauc

SEQ ID NO: 92326 - RNA, 25 nt, Artificial Sequence
  Description of Artificial Sequence: Synthetic oligonucleotide
ccaaaagaccagcuucccagaaaau

SEQ ID NO: 92327 - RNA, 25 nt, Artificial Sequence
  Description of Artificial Sequence: Synthetic oligonucleotide
uguccucaacaaucugaagauguug

SEQ ID NO: 92328 - RNA, 25 nt, Artificial Sequence
  Description of Artificial Sequence: Synthetic oligonucleotide
gcuuuugcaucauaaucgguuucug

SEQ ID NO: 92329 - RNA, 25 nt, Artificial Sequence
  Description of Artificial Sequence: Synthetic oligonucleotide
gugcaccugugaugcugugugguuu

SEQ ID NO: 92330 - RNA, 25 nt, Artificial Sequence
  Description of Artificial Sequence: Synthetic oligonucleotide
ugucugguggguuaaccauacggag

SEQ ID NO: 92331 - RNA, 25 nt, Artificial Sequence
  Description of Artificial Sequence: Synthetic oligonucleotide
ggugacuauuccuuaccuggccaca

SEQ ID NO: 92332 - RNA, 25 nt, Artificial Sequence
  Description of Artificial Sequence: Synthetic oligonucleotide
agaugugacuuguguggggccagga

SEQ ID NO: 92333 - RNA, 25 nt, Artificial Sequence
  Description of Artificial Sequence: Synthetic oligonucleotide
agcacacaagggccaaagugugauc

SEQ ID NO: 92334 - RNA, 25 nt, Artificial Sequence
  Description of Artificial Sequence: Synthetic oligonucleotide
cucccuggaucuguacaccugugag

SEQ ID NO: 92335 - RNA, 25 nt, Artificial Sequence
  Description of Artificial Sequence: Synthetic oligonucleotide
guuagaucugacuaaccugauucug

SEQ ID NO: 92336 - RNA, 25 nt, Artificial Sequence
  Description of Artificial Sequence: Synthetic oligonucleotide
guucucacuuuccauaucuguaucu

SEQ ID NO: 92337 - RNA, 25 nt, Artificial Sequence
  Description of Artificial Sequence: Synthetic oligonucleotide
ucucuuucucauggugaugaugaca

SEQ ID NO: 92338 - RNA, 25 nt, Artificial Sequence
  Description of Artificial Sequence: Synthetic oligonucleotide
agcaagucaccucuauuucugggau

SEQ ID NO: 92339 - RNA, 25 nt, Artificial Sequence
  Description of Artificial Sequence: Synthetic oligonucleotide
ugugugguauauuuaccauuucugu

SEQ ID NO: 92340 - RNA, 25 nt, Artificial Sequence
  Description of Artificial Sequence: Synthetic oligonucleotide
uaaggccaagauaaagggguaucag

SEQ ID NO: 92341 - RNA, 25 nt, Artificial Sequence
  Description of Artificial Sequence: Synthetic oligonucleotide
gcgucuaauaucaccagacuguugc

SEQ ID NO: 92342 - RNA, 25 nt, Artificial Sequence
  Description of Artificial Sequence: Synthetic oligonucleotide
cuaugaugcuuuuauuguguaugac

SEQ ID NO: 92343 - RNA, 25 nt, Artificial Sequence
  Description of Artificial Sequence: Synthetic oligonucleotide
cacuaaagacccagcugugaccgag

SEQ ID NO: 92344 - RNA, 25 nt, Artificial Sequence
  Description of Artificial Sequence: Synthetic oligonucleotide
guggguuuuggcugagcugguggcc

SEQ ID NO: 92345 - RNA, 25 nt, Artificial Sequence
  Description of Artificial Sequence: Synthetic oligonucleotide
caaacuggaagacccaagagagaaa

SEQ ID NO: 92346 - RNA, 25 nt, Artificial Sequence
  Description of Artificial Sequence: Synthetic oligonucleotide
acauuuuaauuuaugucucgaggaa

SEQ ID NO: 92347 - RNA, 25 nt, Artificial Sequence
  Description of Artificial Sequence: Synthetic oligonucleotide
aagggacugguuaccagggcagcca

SEQ ID NO: 92348 - RNA, 25 nt, Artificial Sequence
  Description of Artificial Sequence: Synthetic oligonucleotide
aguucuggaaaaccuuucccagagc

SEQ ID NO: 92349 - RNA, 25 nt, Artificial Sequence
  Description of Artificial Sequence: Synthetic oligonucleotide
cauacagcuuagcaaaaagacagug

SEQ ID NO: 92350 - RNA, 25 nt, Artificial Sequence
  Description of Artificial Sequence: Synthetic oligonucleotide
guuugugaugacagacaaguaugca

SEQ ID NO: 92351 - RNA, 25 nt, Artificial Sequence
  Description of Artificial Sequence: Synthetic oligonucleotide
aaagacugaaaauuuuaagauagca

SEQ ID NO: 92352 - RNA, 25 nt, Artificial Sequence
  Description of Artificial Sequence: Synthetic oligonucleotide
auuuuacuugucccaucagaggcuc

SEQ ID NO: 92353 - RNA, 25 nt, Artificial Sequence
  Description of Artificial Sequence: Synthetic oligonucleotide
cauggaugaaaaaguugaugugauu

SEQ ID NO: 92354 - RNA, 25 nt, Artificial Sequence
  Description of Artificial Sequence: Synthetic oligonucleotide
uaucuugauauuucuugagaagccc

SEQ ID NO: 92355 - RNA, 25 nt, Artificial Sequence
  Description of Artificial Sequence: Synthetic oligonucleotide
cuuucagaaguccaaguuccuccag

SEQ ID NO: 92356 - RNA, 25 nt, Artificial Sequence
  Description of Artificial Sequence: Synthetic oligonucleotide
gcuccggaaaaggcucugugggagu

SEQ ID NO: 92357 - RNA, 25 nt, Artificial Sequence
  Description of Artificial Sequence: Synthetic oligonucleotide
uucuguccuugaguggccaacaaac

SEQ ID NO: 92358 - RNA, 25 nt, Artificial Sequence
  Description of Artificial Sequence: Synthetic oligonucleotide
cccgcaagcucacccauacuucugg

SEQ ID NO: 92359 - RNA, 25 nt, Artificial Sequence
  Description of Artificial Sequence: Synthetic oligonucleotide
gcagugucuaaagaacgcccuggcc

SEQ ID NO: 92360 - RNA, 25 nt, Artificial Sequence
  Description of Artificial Sequence: Synthetic oligonucleotide
cacagacaaucauguggccuauagu

SEQ ID NO: 92361 - RNA, 25 nt, Artificial Sequence
  Description of Artificial Sequence: Synthetic oligonucleotide
ucagguguucaaggaaacggucuag

SEQ ID NO: 92362 - RNA, 25 nt, Artificial Sequence
  Description of Artificial Sequence: Synthetic oligonucleotide
gcccuucuuugcaaaacacaacugc

SEQ ID NO: 92363 - RNA, 25 nt, Artificial Sequence
  Description of Artificial Sequence: Synthetic oligonucleotide
ccuaguuuaccaaggagaggccugg

SEQ ID NO: 92364 - RNA, 25 nt, Artificial Sequence
  Description of Artificial Sequence: Synthetic oligonucleotide
gcuguuuaaauuguuuucauauaua

SEQ ID NO: 92365 - RNA, 25 nt, Artificial Sequence
  Description of Artificial Sequence: Synthetic oligonucleotide
aucacaccaaaagcguguuuugaaa

SEQ ID NO: 92366 - RNA, 25 nt, Artificial Sequence
  Description of Artificial Sequence: Synthetic oligonucleotide
auucuucaagaaaugagauugccca

SEQ ID NO: 92367 - RNA, 25 nt, Artificial Sequence
  Description of Artificial Sequence: Synthetic oligonucleotide
auauuucaggggagccaccaacguc

SEQ ID NO: 92368 - RNA, 25 nt, Artificial Sequence
  Description of Artificial Sequence: Synthetic oligonucleotide
cugucacaggaguuggaaagauggg

SEQ ID NO: 92369 - RNA, 25 nt, Artificial Sequence
  Description of Artificial Sequence: Synthetic oligonucleotide
gguuuauauaaugcaucaagucuuc

SEQ ID NO: 92370 - RNA, 25 nt, Artificial Sequence
  Description of Artificial Sequence: Synthetic oligonucleotide
cuuucuuaucucucugugucucuau

SEQ ID NO: 92371 - RNA, 25 nt, Artificial Sequence
  Description of Artificial Sequence: Synthetic oligonucleotide
uuugcacuugagucucucaccucag

SEQ ID NO: 92372 - RNA, 25 nt, Artificial Sequence
  Description of Artificial Sequence: Synthetic oligonucleotide
gcuccuguaaaagaguggcaaguaa

SEQ ID NO: 92373 - RNA, 25 nt, Artificial Sequence
  Description of Artificial Sequence: Synthetic oligonucleotide
aaaaacauggggcucugauucuccu

SEQ ID NO: 92374 - RNA, 25 nt, Artificial Sequence
  Description of Artificial Sequence: Synthetic oligonucleotide
uguaauugugauaauuaaauauaca

SEQ ID NO: 92375 - RNA, 25 nt, Artificial Sequence
  Description of Artificial Sequence: Synthetic oligonucleotide
acacaaucaugacauugagaagaac

SEQ ID NO: 92376 - RNA, 25 nt, Artificial Sequence
  Description of Artificial Sequence: Synthetic oligonucleotide
cugcauuucuacccuuaaaaaguac

SEQ ID NO: 92377 - RNA, 25 nt, Artificial Sequence
  Description of Artificial Sequence: Synthetic oligonucleotide
cugguauauacagaaauaggguuaa

SEQ ID NO: 92378 - RNA, 25 nt, Artificial Sequence
  Description of Artificial Sequence: Synthetic oligonucleotide
aaaaaaacucaagcucucucuauau

SEQ ID NO: 92379 - RNA, 25 nt, Artificial Sequence
  Description of Artificial Sequence: Synthetic oligonucleotide
ugagaccaaaauguacuagaguuag

SEQ ID NO: 92380 - RNA, 25 nt, Artificial Sequence
  Description of Artificial Sequence: Synthetic oligonucleotide
guuuagugaaauaaaaaaccaguca

SEQ ID NO: 92381 - RNA, 25 nt, Artificial Sequence
  Description of Artificial Sequence: Synthetic oligonucleotide
agcuggccgggcaugguggcucaug

SEQ ID NO: 92382 - RNA, 25 nt, Artificial Sequence
  Description of Artificial Sequence: Synthetic oligonucleotide
gcuuguaaucccagcacuuugggag

SEQ ID NO: 92383 - RNA, 25 nt, Artificial Sequence
  Description of Artificial Sequence: Synthetic oligonucleotide
ggccgaggcagguggaucacgaggu

SEQ ID NO: 92384 - RNA, 25 nt, Artificial Sequence
  Description of Artificial Sequence: Synthetic oligonucleotide
ucaggaguuugagaccagucuggcc

SEQ ID NO: 92385 - RNA, 25 nt, Artificial Sequence
  Description of Artificial Sequence: Synthetic oligonucleotide
caacauggugaaaccccgucuguac

SEQ ID NO: 92386 - RNA, 25 nt, Artificial Sequence
  Description of Artificial Sequence: Synthetic oligonucleotide
cuaaaaauacaaaaauuagcugggc

SEQ ID NO: 92387 - RNA, 25 nt, Artificial Sequence
  Description of Artificial Sequence: Synthetic oligonucleotide
cgugguggugggugccuguaauccc

SEQ ID NO: 92388 - RNA, 25 nt, Artificial Sequence
  Description of Artificial Sequence: Synthetic oligonucleotide
cagcuacuugggaggcugaggcagg

SEQ ID NO: 92389 - RNA, 25 nt, Artificial Sequence
  Description of Artificial Sequence: Synthetic oligonucleotide
gagaaucgcuugaacccgggaggug

SEQ ID NO: 92390 - RNA, 25 nt, Artificial Sequence
  Description of Artificial Sequence: Synthetic oligonucleotide
ggagguggcagugagccgagaucac

SEQ ID NO: 92391 - RNA, 25 nt, Artificial Sequence
  Description of Artificial Sequence: Synthetic oligonucleotide
cgccacugcaaugcagcccgggcaa

SEQ ID NO: 92392 - RNA, 25 nt, Artificial Sequence
  Description of Artificial Sequence: Synthetic oligonucleotide
acagagcuagacugucucaaaagaa

SEQ ID NO: 92393 - RNA, 25 nt, Artificial Sequence
  Description of Artificial Sequence: Synthetic oligonucleotide
acucagucagcuucuuaaccaauug

SEQ ID NO: 92394 - RNA, 25 nt, Artificial Sequence
  Description of Artificial Sequence: Synthetic oligonucleotide
gcuuccgugucauccagggccccau

SEQ ID NO: 92395 - RNA, 25 nt, Artificial Sequence
  Description of Artificial Sequence: Synthetic oligonucleotide
uucugugcagauugagugugggcac

SEQ ID NO: 92396 - RNA, 25 nt, Artificial Sequence
  Description of Artificial Sequence: Synthetic oligonucleotide
ccacacaggugguugcugcuucagu

SEQ ID NO: 92397 - RNA, 25 nt, Artificial Sequence
  Description of Artificial Sequence: Synthetic oligonucleotide
ugcuuccugcucuuuuuccuugggc

SEQ ID NO: 92398 - RNA, 25 nt, Artificial Sequence
  Description of Artificial Sequence: Synthetic oligonucleotide
ccugcuucuggguuccauagggaaa

SEQ ID NO: 92399 - RNA, 25 nt, Artificial Sequence
  Description of Artificial Sequence: Synthetic oligonucleotide
acaguaagaaagaaagacacauccu

SEQ ID NO: 92400 - RNA, 25 nt, Artificial Sequence
  Description of Artificial Sequence: Synthetic oligonucleotide
uuaccauaaaugcauaugguccacc

SEQ ID NO: 92401 - RNA, 25 nt, Artificial Sequence
  Description of Artificial Sequence: Synthetic oligonucleotide
cuacaaauagaaaaauauuuaaaug

SEQ ID NO: 92402 - RNA, 25 nt, Artificial Sequence
  Description of Artificial Sequence: Synthetic oligonucleotide
gaucugccuuuauacaaagugauau

SEQ ID NO: 92403 - RNA, 25 nt, Artificial Sequence
  Description of Artificial Sequence: Synthetic oligonucleotide
uucucuaccuuugauaauuuaccug

SEQ ID NO: 92404 - RNA, 25 nt, Artificial Sequence
  Description of Artificial Sequence: Synthetic oligonucleotide
gcuuaaauguuuuuaucugcacugc

SEQ ID NO: 92405 - RNA, 25 nt, Artificial Sequence
  Description of Artificial Sequence: Synthetic oligonucleotide
caaaguacuguauccaaaguaaaau

SEQ ID NO: 92406 - RNA, 25 nt, Artificial Sequence
  Description of Artificial Sequence: Synthetic oligonucleotide
uuuccucauccaauaucuuucaaac

SEQ ID NO: 92407 - RNA, 25 nt, Artificial Sequence
  Description of Artificial Sequence: Synthetic oligonucleotide
cuguuuuguuaacuaaugccauaua

SEQ ID NO: 92408 - RNA, 25 nt, Artificial Sequence
  Description of Artificial Sequence: Synthetic oligonucleotide
auuuguaaguaucugcacacuugau

SEQ ID NO: 92409 - RNA, 25 nt, Artificial Sequence
  Description of Artificial Sequence: Synthetic oligonucleotide
uacagcaacguuagaugguuuugau

SEQ ID NO: 92410 - RNA, 25 nt, Artificial Sequence
  Description of Artificial Sequence: Synthetic oligonucleotide
ugguaaacccuaaaggaggacucca

SEQ ID NO: 92411 - RNA, 25 nt, Artificial Sequence
  Description of Artificial Sequence: Synthetic oligonucleotide
aagaguguguauuuauuuauaguuu

SEQ ID NO: 92412 - RNA, 25 nt, Artificial Sequence
  Description of Artificial Sequence: Synthetic oligonucleotide
uuaucagagaugacaauuauuugaa

SEQ ID NO: 92413 - RNA, 25 nt, Artificial Sequence
  Description of Artificial Sequence: Synthetic oligonucleotide
augccaauuauauggauuccuuuca

SEQ ID NO: 92414 - RNA, 25 nt, Artificial Sequence
  Description of Artificial Sequence: Synthetic oligonucleotide
auuuuuugcuggaggaugggagaag

SEQ ID NO: 92415 - RNA, 25 nt, Artificial Sequence
  Description of Artificial Sequence: Synthetic oligonucleotide
gaaaccaaaguuuauagaccuucac

SEQ ID NO: 92416 - RNA, 25 nt, Artificial Sequence
  Description of Artificial Sequence: Synthetic oligonucleotide
cauugagaaagcuucaguuuugaac

SEQ ID NO: 92417 - RNA, 25 nt, Artificial Sequence
  Description of Artificial Sequence: Synthetic oligonucleotide
cuucagcuaucagauucaaaaacaa

SEQ ID NO: 92418 - RNA, 25 nt, Artificial Sequence
  Description of Artificial Sequence: Synthetic oligonucleotide
acagaaagaaccaagacauucuuaa

SEQ ID NO: 92419 - RNA, 25 nt, Artificial Sequence
  Description of Artificial Sequence: Synthetic oligonucleotide
agaugccuguacuuucagcugggua

SEQ ID NO: 92420 - RNA, 25 nt, Artificial Sequence
  Description of Artificial Sequence: Synthetic oligonucleotide
auaaauucaugaguucaaagauuga

SEQ ID NO: 92421 - RNA, 25 nt, Artificial Sequence
  Description of Artificial Sequence: Synthetic oligonucleotide
aaaccugaccaauuugcuuuauuuc

SEQ ID NO: 92422 - RNA, 25 nt, Artificial Sequence
  Description of Artificial Sequence: Synthetic oligonucleotide
cauggaagaagugaucuacaaaggu

SEQ ID NO: 92423 - RNA, 25 nt, Artificial Sequence
  Description of Artificial Sequence: Synthetic oligonucleotide
uguuugugccauuuggaaaacagcg

SEQ ID NO: 92424 - RNA, 25 nt, Artificial Sequence
  Description of Artificial Sequence: Synthetic oligonucleotide
gugcauguguucaagccuuagauug

SEQ ID NO: 92425 - RNA, 25 nt, Artificial Sequence
  Description of Artificial Sequence: Synthetic oligonucleotide
ggcgaugucguauuuuccucacgug

SEQ ID NO: 92426 - RNA, 25 nt, Artificial Sequence
  Description of Artificial Sequence: Synthetic oligonucleotide
guggcaaugccaaaggcuuuacuuu

SEQ ID NO: 92427 - RNA, 25 nt, Artificial Sequence
  Description of Artificial Sequence: Synthetic oligonucleotide
uaccugugaguacacacuauaugaa

SEQ ID NO: 92428 - RNA, 25 nt, Artificial Sequence
  Description of Artificial Sequence: Synthetic oligonucleotide
auuauuuccaacguacauuuaauca

SEQ ID NO: 92429 - RNA, 25 nt, Artificial Sequence
  Description of Artificial Sequence: Synthetic oligonucleotide
aauaagggucacaaauucccaaauc

SEQ ID NO: 92430 - RNA, 25 nt, Artificial Sequence
  Description of Artificial Sequence: Synthetic oligonucleotide
caaucucuggaauaaauagagaggu

SEQ ID NO: 92431 - RNA, 25 nt, Artificial Sequence
  Description of Artificial Sequence: Synthetic oligonucleotide
guaauuaaauugcuggagccaacua

SEQ ID NO: 92432 - RNA, 3468 nt, Homo sapiens
cuccugcauagaggguaccauucugcgcugcugcaaguuacggaaugaaaaauuagaacaacagaaacaugguucucuugacacuucaguguuagggaacaucagcaagacccaucccaggagaccuugaaggaagccuuugaaagggagaaugaaggagucaucuuugcaaaauagcuccugcagccugggaaaggagacuaaaaaggaaaacauguuccuucagucgucaaugcugaccugcauuuuccugcuaauaucugguuccugugaguuaugcgccgaagaaaauuuuucuagaagcuauccuugugaugagaaaaagcaaaaugacucaguuauugcagagugcagcaaucgucgacuacaggaaguuccccaaacggugggcaaauaugugacagaacuagaccugucugauaauuucaucacacacauaacgaaugaaucauuucaagggcugcaaaaucucacuaaaauaaaucuaaaccacaaccccaauguacagcaccagaacggaaaucccgguauacaaucaaauggcuugaauaucacagacggggcauuccucaaccuaaaaaaccuaagggaguuacugcuugaagacaaccaguuaccccaaauacccucugguuugccagagucuuugacagaacuuagucuaauucaaaacaauauauacaacauaacuaaagagggcauuucaagacuuauaaacuugaaaaaucucuauuuggccuggaacugcuauuuuaacaaaguuugcgagaaaacuaacauagaagauggaguauuugaaacgcugacaaauuuggaguugcuaucacuaucuuucaauucucuuucacacgugccacccaaacugccaagcucccuacgcaaacuuuuucugagcaacacccagaucaaauacauuagugaagaagauuucaagggauugauaaauuuaacauuacuagauuuaagcgggaacuguccgaggugcuucaaugccccauuuccaugcgugccuugugaugguggugcuucaauuaauauagaucguuuugcuuuucaaaacuugacccaacuucgauaccuaaaccucucuagcacuucccucaggaagauuaaugcugccugguuuaaaaauaugccucaucugaaggugcuggaucuugaauucaacuauuuagugggagaaauagccucuggggcauuuuuaacgaugcugccccgcuuagaaauacuugacuugucuuuuaacuauauaaaggggaguuauccacagcauauuaauauuuccagaaacuucucuaaacuuuugucucuacgggcauugcauuuaagagguuauguguuccaggaacucagagaagaugauuuccagccccugaugcagcuuccaaacuuaucgacuaucaacuuggguauuaauuuuauuaagcaaaucgauuucaaacuuuuccaaaauuucuccaaucuggaaauuauuuacuugucagaaaacagaauaucaccguugguaaaagauacccggcagaguuaugcaaauaguuccucuuuucaacgucauauccggaaacgacgcucaacagauuuugaguuugacccacauucgaacuuuuaucauuucacccguccuuuaauaaagccacaaugugcugcuuauggaaaagccuuagauuuaagccucaacaguauuuucuucauugggccaaaccaauuugaaaaucuuccugacauugccuguuuaaaucugucugcaaauagcaaugcucaaguguuaaguggaacugaauuuucagccauuccucaugucaaauauuuggauuugacaaacaauagacuagacuuugauaaugcuagugcucuuacugaauuguccgacuuggaaguucuagaucucagcuauaauucacacuauuucagaauagcaggcguaacacaucaucuagaauuuauucaaaauuucacaaaucuaaaaguuuuaaacuugagccacaacaacauuuauacuuuaacagauaaguauaaccuggaaagcaagucccugguagaauuaguuuucaguggcaaucgccuugacauuuuguggaaugaugaugacaacagguauaucuccauuuucaaaggucucaagaaucugacacgucuggauuuaucccuuaauaggcugaagcacaucccaaaugaagcauuccuuaauuugccagcgagucucacugaacuacauauaaaugauaauauguuaaaguuuuuuaacuggacauuacuccagcaguuuccucgucucgaguugcuugacuuacguggaaacaaacuacucuuuuuaacugauagccuaucugacuuuacaucuucccuucggacacugcugcugagucauaacaggauuucccaccuacccucuggcuuucuuucugaagucaguagucugaagcaccucgauuuaaguuccaaucugcuaaaaacaaucaacaaauccgcacuugaaacuaagaccaccaccaaauuaucuauguuggaacuacacggaaaccccuuugaaugcaccugugacauuggagauuuccgaagauggauggaugaacaucugaaugucaaaauucccagacugguagaugucauuugugccaguccuggggaucaaagagggaagaguauugugagucuggagcuaacaacuuguguuucagaugucacugcagugauauuauuuuucuucacguucuuuaucaccaccaugguuauguuggcugcccuggcucaccauuuguuuuacugggauguuugguuuauauauaauguguguuuagcuaagguaaaaggcuacaggucucuuuccacaucccaaacuuucuaugaugcuuacauuucuuaugacaccaaagaugccucuguuacugacugggugauaaaugagcugcgcuaccaccuugaagagagccgagacaaaaacguucuccuuugucuagaggagagggauugggauccgggauuggccaucaucgacaaccucaugcagagcaucaaccaaagcaagaaaacaguauuuguuuuaaccaaaaaauaugcaaaaagcuggaacuuuaaaacagcuuuuuacuuggcuuugcagaggcuaauggaugagaacauggaugugauuauauuuauccugcuggagccaguguuacagcauucucaguauuugaggcuacggcagcggaucuguaagagcuccauccuccaguggccugacaacccgaaggcagaaggcuuguuuuggcaaacucugagaaauguggucuugacugaaaaugauucacgguauaacaauauguaugucgauuccauuaagcaauacuaacugacguuaagucaugauuucgcgccauaauaaagaugcaaaggaaugacauuucuguauuaguuaucuauugcuauguaacaaauuaucccaaaacuuagugguuuaaaacaacacauuugcuggcccacaguuuu

SEQ ID NO: 92433 - RNA, 4211 nt, Homo sapiens
cuccugcauagaggguaccauucugcgcugcugcaaguuacggaaugaaaaauuagaacaacagaaacauggaaaacauguuccuucagucgucaaugcugaccugcauuuuccugcuaauaucugguuccugugaguuaugcgccgaagaaaauuuuucuagaagcuauccuugugaugagaaaaagcaaaaugacucaguuauugcagagugcagcaaucgucgacuacaggaaguuccccaaacggugggcaaauaugugacagaacuagaccugucugauaauuucaucacacacauaacgaaugaaucauuucaagggcugcaaaaucucacuaaaauaaaucuaaaccacaaccccaauguacagcaccagaacggaaaucccgguauacaaucaaauggcuugaauaucacagacggggcauuccucaaccuaaaaaaccuaagggaguuacugcuugaagacaaccaguuaccccaaauacccucugguuugccagagucuuugacagaacuuagucuaauucaaaacaauauauacaacauaacuaaagagggcauuucaagacuuauaaacuugaaaaaucucuauuuggccuggaacugcuauuuuaacaaaguuugcgagaaaacuaacauagaagauggaguauuugaaacgcugacaaauuuggaguugcuaucacuaucuuucaauucucuuucacacgugccacccaaacugccaagcucccuacgcaaacuuuuucugagcaacacccagaucaaauacauuagugaagaagauuucaagggauugauaaauuuaacauuacuagauuuaagcgggaacuguccgaggugcuucaaugccccauuuccaugcgugccuugugaugguggugcuucaauuaauauagaucguuuugcuuuucaaaacuugacccaacuucgauaccuaaaccucucuagcacuucccucaggaagauuaaugcugccugguuuaaaaauaugccucaucugaaggugcuggaucuugaauucaacuauuuagugggagaaauagccucuggggcauuuuuaacgaugcugccccgcuuagaaauacuugacuugucuuuuaacuauauaaaggggaguuauccacagcauauuaauauuuccagaaacuucucuaaacuuuugucucuacgggcauugcauuuaagagguuauguguuccaggaacucagagaagaugauuuccagccccugaugcagcuuccaaacuuaucgacuaucaacuuggguauuaauuuuauuaagcaaaucgauuucaaacuuuuccaaaauuucuccaaucuggaaauuauuuacuugucagaaaacagaauaucaccguugguaaaagauacccggcagaguuaugcaaauaguuccucuuuucaacgucauauccggaaacgacgcucaacagauuuugaguuugacccacauucgaacuuuuaucauuucacccguccuuuaauaaagccacaaugugcugcuuauggaaaagccuuagauuuaagccucaacaguauuuucuucauugggccaaaccaauuugaaaaucuuccugacauugccuguuuaaaucugucugcaaauagcaaugcucaaguguuaaguggaacugaauuuucagccauuccucaugucaaauauuuggauuugacaaacaauagacuagacuuugauaaugcuagugcucuuacugaauuguccgacuuggaaguucuagaucucagcuauaauucacacuauuucagaauagcaggcguaacacaucaucuagaauuuauucaaaauuucacaaaucuaaaaguuuuaaacuugagccacaacaacauuuauacuuuaacagauaaguauaaccuggaaagcaagucccugguagaauuaguuuucaguggcaaucgccuugacauuuuguggaaugaugaugacaacagguauaucuccauuuucaaaggucucaagaaucugacacgucuggauuuaucccuuaauaggcugaagcacaucccaaaugaagcauuccuuaauuugccagcgagucucacugaacuacauauaaaugauaauauguuaaaguuuuuuaacuggacauuacuccagcaguuuccucgucucgaguugcuugacuuacguggaaacaaacuacucuuuuuaacugauagccuaucugacuuuacaucuucccuucggacacugcugcugagucauaacaggauuucccaccuacccucuggcuuucuuucugaagucaguagucugaagcaccucgauuuaaguuccaaucugcuaaaaacaaucaacaaauccgcacuugaaacuaagaccaccaccaaauuaucuauguuggaacuacacggaaaccccuuugaaugcaccugugacauuggagauuuccgaagauggauggaugaacaucugaaugucaaaauucccagacugguagaugucauuugugccaguccuggggaucaaagagggaagaguauugugagucuggagcuaacaacuuguguuucagaugucacugcagugauauuauuuuucuucacguucuuuaucaccaccaugguuauguuggcugcccuggcucaccauuuguuuuacugggauguuugguuuauauauaauguguguuuagcuaagguaaaaggcuacaggucucuuuccacaucccaaacuuucuaugaugcuuacauuucuuaugacaccaaagaugccucuguuacugacugggugauaaaugagcugcgcuaccaccuugaagagagccgagacaaaaacguucuccuuugucuagaggagagggauugggauccgggauuggccaucaucgacaaccucaugcagagcaucaaccaaagcaagaaaacaguauuuguuuuaaccaaaaaauaugcaaaaagcuggaacuuuaaaacagcuuuuuacuuggcuuugcagaggcuaauggaugagaacauggaugugauuauauuuauccugcuggagccaguguuacagcauucucaguauuugaggcuacggcagcggaucuguaagagcuccauccuccaguggccugacaacccgaaggcagaaggcuuguuuuggcaaacucugagaaauguggucuugacugaaaaugauucacgguauaacaauauguaugucgauuccauuaagcaauacuaacugacguuaagucaugauuucgcgccauaauaaagaugcaaaggaaugacauuucuguauuaguuaucuauugcuauguaacaaauuaucccaaaacuuagugguuuaaaacaacacauuugcuggcccacaguuuuugagggucaggaguccaggcccagcauaacuggguccucugcucagggugucucagaggcugcaauguagguguucaccagagacauaggcaucacuggggucacacucaugugguuguuuucuggauucaauuccuccugggcuauuggccaaaggcuauacucauguaagccaugcgagccucucccacaaggcagcuugcuucaucagagcuagcaaaaaagagagguugcuagcaagaugaagucacaaucuuuuguaaucgaaucaaaaaagugauaucucaucacuuuggccauauucuauuuguuagaaguaaaccacaggucccaccagcuccaugggagugaccaccucaguccagggaaaacagcugaagaccaagauggugagcucugauugcuucaguuggucaucaacuauuuucccuugacugcuguccugggauggccugcuaucuugaugauagauugugaauaucaggaggcagggaucacuguggaccaucuuagcaguugaccuaacacaucuucuuuucaauaucuaagaacuuuugccacugugacuaaugguccuaauauuaagcuguuguuuauauuuaucauauaucuauggcuacaugguuauauuaugcugugguugcguucgguuuuauuuacaguugcuuuuacaaauauuugcuguaacauuugacuucuaagguuuagaugccauuuaagaacugagauggauagcuuuuaaagcaucuuuuacuucuuaccauuuuuuaaaaguaugcagcuaaauucgaagcuuuuggucuauauuguuaauugccauugcuguaaaucuuaaaaugaaugaauaaaaauguuucauuuuacaaaaaaaaaaaaaaaa

SEQ ID NO: 92434 - RNA, 19 nt, Artificial Sequence
  Description of Artificial Sequence: Synthetic oligonucleotide
cuccugcauagaggguacc

SEQ ID NO: 92435 - RNA, 19 nt, Artificial Sequence
  Description of Artificial Sequence: Synthetic oligonucleotide
cauucugcgcugcugcaag

SEQ ID NO: 92436 - RNA, 19 nt, Artificial Sequence
  Description of Artificial Sequence: Synthetic oligonucleotide
guuacggaaugaaaaauua

SEQ ID NO: 92437 - RNA, 19 nt, Artificial Sequence
  Description of Artificial Sequence: Synthetic oligonucleotide
agaacaacagaaacauggu

SEQ ID NO: 92438 - RNA, 19 nt, Artificial Sequence
  Description of Artificial Sequence: Synthetic oligonucleotide
uucucuugacacuucagug

SEQ ID NO: 92439 - RNA, 19 nt, Artificial Sequence
  Description of Artificial Sequence: Synthetic oligonucleotide
guuagggaacaucagcaag

SEQ ID NO: 92440 - RNA, 19 nt, Artificial Sequence
  Description of Artificial Sequence: Synthetic oligonucleotide
gacccaucccaggagaccu

SEQ ID NO: 92441 - RNA, 19 nt, Artificial Sequence
  Description of Artificial Sequence: Synthetic oligonucleotide
uugaaggaagccuuugaaa

SEQ ID NO: 92442 - RNA, 19 nt, Artificial Sequence
  Description of Artificial Sequence: Synthetic oligonucleotide
agggagaaugaaggaguca

SEQ ID NO: 92443 - RNA, 19 nt, Artificial Sequence
  Description of Artificial Sequence: Synthetic oligonucleotide
aucuuugcaaaauagcucc

SEQ ID NO: 92444 - RNA, 19 nt, Artificial Sequence
  Description of Artificial Sequence: Synthetic oligonucleotide
cugcagccugggaaaggag

SEQ ID NO: 92445 - RNA, 19 nt, Artificial Sequence
  Description of Artificial Sequence: Synthetic oligonucleotide
gacuaaaaaggaaaacaug

SEQ ID NO: 92446 - RNA, 19 nt, Artificial Sequence
  Description of Artificial Sequence: Synthetic oligonucleotide
guuccuucagucgucaaug

SEQ ID NO: 92447 - RNA, 19 nt, Artificial Sequence
  Description of Artificial Sequence: Synthetic oligonucleotide
gcugaccugcauuuuccug

SEQ ID NO: 92448 - RNA, 19 nt, Artificial Sequence
  Description of Artificial Sequence: Synthetic oligonucleotide
gcuaauaucugguuccugu

SEQ ID NO: 92449 - RNA, 19 nt, Artificial Sequence
  Description of Artificial Sequence: Synthetic oligonucleotide
ugaguuaugcgccgaagaa

SEQ ID NO: 92450 - RNA, 19 nt, Artificial Sequence
  Description of Artificial Sequence: Synthetic oligonucleotide
aaauuuuucuagaagcuau

SEQ ID NO: 92451 - RNA, 19 nt, Artificial Sequence
  Description of Artificial Sequence: Synthetic oligonucleotide
uccuugugaugagaaaaag

SEQ ID NO: 92452 - RNA, 19 nt, Artificial Sequence
  Description of Artificial Sequence: Synthetic oligonucleotide
gcaaaaugacucaguuauu

SEQ ID NO: 92453 - RNA, 19 nt, Artificial Sequence
  Description of Artificial Sequence: Synthetic oligonucleotide
ugcagagugcagcaaucgu

SEQ ID NO: 92454 - RNA, 19 nt, Artificial Sequence
  Description of Artificial Sequence: Synthetic oligonucleotide
ucgacuacaggaaguuccc

SEQ ID NO: 92455 - RNA, 19 nt, Artificial Sequence
  Description of Artificial Sequence: Synthetic oligonucleotide
ccaaacggugggcaaauau

SEQ ID NO: 92456 - RNA, 19 nt, Artificial Sequence
  Description of Artificial Sequence: Synthetic oligonucleotide
ugugacagaacuagaccug

SEQ ID NO: 92457 - RNA, 19 nt, Artificial Sequence
  Description of Artificial Sequence: Synthetic oligonucleotide
gucugauaauuucaucaca

SEQ ID NO: 92458 - RNA, 19 nt, Artificial Sequence
  Description of Artificial Sequence: Synthetic oligonucleotide
acacauaacgaaugaauca

SEQ ID NO: 92459 - RNA, 19 nt, Artificial Sequence
  Description of Artificial Sequence: Synthetic oligonucleotide
auuucaagggcugcaaaau

SEQ ID NO: 92460 - RNA, 19 nt, Artificial Sequence
  Description of Artificial Sequence: Synthetic oligonucleotide
ucucacuaaaauaaaucua

SEQ ID NO: 92461 - RNA, 19 nt, Artificial Sequence
  Description of Artificial Sequence: Synthetic oligonucleotide
aaaccacaaccccaaugua

SEQ ID NO: 92462 - RNA, 19 nt, Artificial Sequence
  Description of Artificial Sequence: Synthetic oligonucleotide
acagcaccagaacggaaau

SEQ ID NO: 92463 - RNA, 19 nt, Artificial Sequence
  Description of Artificial Sequence: Synthetic oligonucleotide
ucccgguauacaaucaaau

SEQ ID NO: 92464 - RNA, 19 nt, Artificial Sequence
  Description of Artificial Sequence: Synthetic oligonucleotide
uggcuugaauaucacagac

SEQ ID NO: 92465 - RNA, 19 nt, Artificial Sequence
  Description of Artificial Sequence: Synthetic oligonucleotide
cggggcauuccucaaccua

SEQ ID NO: 92466 - RNA, 19 nt, Artificial Sequence
  Description of Artificial Sequence: Synthetic oligonucleotide
aaaaaaccuaagggaguua

SEQ ID NO: 92467 - RNA, 19 nt, Artificial Sequence
  Description of Artificial Sequence: Synthetic oligonucleotide
acugcuugaagacaaccag

SEQ ID NO: 92468 - RNA, 19 nt, Artificial Sequence
  Description of Artificial Sequence: Synthetic oligonucleotide
guuaccccaaauacccucu

SEQ ID NO: 92469 - RNA, 19 nt, Artificial Sequence
  Description of Artificial Sequence: Synthetic oligonucleotide
ugguuugccagagucuuug

SEQ ID NO: 92470 - RNA, 19 nt, Artificial Sequence
  Description of Artificial Sequence: Synthetic oligonucleotide
gacagaacuuagucuaauu

SEQ ID NO: 92471 - RNA, 19 nt, Artificial Sequence
  Description of Artificial Sequence: Synthetic oligonucleotide
ucaaaacaauauauacaac

SEQ ID NO: 92472 - RNA, 19 nt, Artificial Sequence
  Description of Artificial Sequence: Synthetic oligonucleotide
cauaacuaaagagggcauu

SEQ ID NO: 92473 - RNA, 19 nt, Artificial Sequence
  Description of Artificial Sequence: Synthetic oligonucleotide
uucaagacuuauaaacuug

SEQ ID NO: 92474 - RNA, 19 nt, Artificial Sequence
  Description of Artificial Sequence: Synthetic oligonucleotide
gaaaaaucucuauuuggcc

SEQ ID NO: 92475 - RNA, 19 nt, Artificial Sequence
  Description of Artificial Sequence: Synthetic oligonucleotide
cuggaacugcuauuuuaac

SEQ ID NO: 92476 - RNA, 19 nt, Artificial Sequence
  Description of Artificial Sequence: Synthetic oligonucleotide
caaaguuugcgagaaaacu

SEQ ID NO: 92477 - RNA, 19 nt, Artificial Sequence
  Description of Artificial Sequence: Synthetic oligonucleotide
uaacauagaagauggagua

SEQ ID NO: 92478 - RNA, 19 nt, Artificial Sequence
  Description of Artificial Sequence: Synthetic oligonucleotide
auuugaaacgcugacaaau

SEQ ID NO: 92479 - RNA, 19 nt, Artificial Sequence
  Description of Artificial Sequence: Synthetic oligonucleotide
uuuggaguugcuaucacua

SEQ ID NO: 92480 - RNA, 19 nt, Artificial Sequence
  Description of Artificial Sequence: Synthetic oligonucleotide
aucuuucaauucucuuuca

SEQ ID NO: 92481 - RNA, 19 nt, Artificial Sequence
  Description of Artificial Sequence: Synthetic oligonucleotide
acacgugccacccaaacug

SEQ ID NO: 92482 - RNA, 19 nt, Artificial Sequence
  Description of Artificial Sequence: Synthetic oligonucleotide
gccaagcucccuacgcaaa

SEQ ID NO: 92483 - RNA, 19 nt, Artificial Sequence
  Description of Artificial Sequence: Synthetic oligonucleotide
acuuuuucugagcaacacc

SEQ ID NO: 92484 - RNA, 19 nt, Artificial Sequence
  Description of Artificial Sequence: Synthetic oligonucleotide
ccagaucaaauacauuagu

SEQ ID NO: 92485 - RNA, 19 nt, Artificial Sequence
  Description of Artificial Sequence: Synthetic oligonucleotide
ugaagaagauuucaaggga

SEQ ID NO: 92486 - RNA, 19 nt, Artificial Sequence
  Description of Artificial Sequence: Synthetic oligonucleotide
auugauaaauuuaacauua

SEQ ID NO: 92487 - RNA, 19 nt, Artificial Sequence
  Description of Artificial Sequence: Synthetic oligonucleotide
acuagauuuaagcgggaac

SEQ ID NO: 92488 - RNA, 19 nt, Artificial Sequence
  Description of Artificial Sequence: Synthetic oligonucleotide
cuguccgaggugcuucaau

SEQ ID NO: 92489 - RNA, 19 nt, Artificial Sequence
  Description of Artificial Sequence: Synthetic oligonucleotide
ugccccauuuccaugcgug

SEQ ID NO: 92490 - RNA, 19 nt, Artificial Sequence
  Description of Artificial Sequence: Synthetic oligonucleotide
gccuugugaugguggugcu

SEQ ID NO: 92491 - RNA, 19 nt, Artificial Sequence
  Description of Artificial Sequence: Synthetic oligonucleotide
uucaauuaauauagaucgu

SEQ ID NO: 92492 - RNA, 19 nt, Artificial Sequence
  Description of Artificial Sequence: Synthetic oligonucleotide
uuuugcuuuucaaaacuug

SEQ ID NO: 92493 - RNA, 19 nt, Artificial Sequence
  Description of Artificial Sequence: Synthetic oligonucleotide
gacccaacuucgauaccua

SEQ ID NO: 92494 - RNA, 19 nt, Artificial Sequence
  Description of Artificial Sequence: Synthetic oligonucleotide
aaaccucucuagcacuucc

SEQ ID NO: 92495 - RNA, 19 nt, Artificial Sequence
  Description of Artificial Sequence: Synthetic oligonucleotide
ccucaggaagauuaaugcu

SEQ ID NO: 92496 - RNA, 19 nt, Artificial Sequence
  Description of Artificial Sequence: Synthetic oligonucleotide
ugccugguuuaaaaauaug

SEQ ID NO: 92497 - RNA, 19 nt, Artificial Sequence
  Description of Artificial Sequence: Synthetic oligonucleotide
gccucaucugaaggugcug

SEQ ID NO: 92498 - RNA, 19 nt, Artificial Sequence
  Description of Artificial Sequence: Synthetic oligonucleotide
ggaucuugaauucaacuau

SEQ ID NO: 92499 - RNA, 19 nt, Artificial Sequence
  Description of Artificial Sequence: Synthetic oligonucleotide
uuuagugggagaaauagcc

SEQ ID NO: 92500 - RNA, 19 nt, Artificial Sequence
  Description of Artificial Sequence: Synthetic oligonucleotide
cucuggggcauuuuuaacg

SEQ ID NO: 92501 - RNA, 19 nt, Artificial Sequence
  Description of Artificial Sequence: Synthetic oligonucleotide
gaugcugccccgcuuagaa

SEQ ID NO: 92502 - RNA, 19 nt, Artificial Sequence
  Description of Artificial Sequence: Synthetic oligonucleotide
aauacuugacuugucuuuu

SEQ ID NO: 92503 - RNA, 19 nt, Artificial Sequence
  Description of Artificial Sequence: Synthetic oligonucleotide
uaacuauauaaaggggagu

SEQ ID NO: 92504 - RNA, 19 nt, Artificial Sequence
  Description of Artificial Sequence: Synthetic oligonucleotide
uuauccacagcauauuaau

SEQ ID NO: 92505 - RNA, 19 nt, Artificial Sequence
  Description of Artificial Sequence: Synthetic oligonucleotide
uauuuccagaaacuucucu

SEQ ID NO: 92506 - RNA, 19 nt, Artificial Sequence
  Description of Artificial Sequence: Synthetic oligonucleotide
uaaacuuuugucucuacgg

SEQ ID NO: 92507 - RNA, 19 nt, Artificial Sequence
  Description of Artificial Sequence: Synthetic oligonucleotide
ggcauugcauuuaagaggu

SEQ ID NO: 92508 - RNA, 19 nt, Artificial Sequence
  Description of Artificial Sequence: Synthetic oligonucleotide
uuauguguuccaggaacuc

SEQ ID NO: 92509 - RNA, 19 nt, Artificial Sequence
  Description of Artificial Sequence: Synthetic oligonucleotide
cagagaagaugauuuccag

SEQ ID NO: 92510 - RNA, 19 nt, Artificial Sequence
  Description of Artificial Sequence: Synthetic oligonucleotide
gccccugaugcagcuucca

SEQ ID NO: 92511 - RNA, 19 nt, Artificial Sequence
  Description of Artificial Sequence: Synthetic oligonucleotide
aaacuuaucgacuaucaac

SEQ ID NO: 92512 - RNA, 19 nt, Artificial Sequence
  Description of Artificial Sequence: Synthetic oligonucleotide
cuuggguauuaauuuuauu

SEQ ID NO: 92513 - RNA, 19 nt, Artificial Sequence
  Description of Artificial Sequence: Synthetic oligonucleotide
uaagcaaaucgauuucaaa

SEQ ID NO: 92514 - RNA, 19 nt, Artificial Sequence
  Description of Artificial Sequence: Synthetic oligonucleotide
acuuuuccaaaauuucucc

SEQ ID NO: 92515 - RNA, 19 nt, Artificial Sequence
  Description of Artificial Sequence: Synthetic oligonucleotide
caaucuggaaauuauuuac

SEQ ID NO: 92516 - RNA, 19 nt, Artificial Sequence
  Description of Artificial Sequence: Synthetic oligonucleotide
cuugucagaaaacagaaua

SEQ ID NO: 92517 - RNA, 19 nt, Artificial Sequence
  Description of Artificial Sequence: Synthetic oligonucleotide
aucaccguugguaaaagau

SEQ ID NO: 92518 - RNA, 19 nt, Artificial Sequence
  Description of Artificial Sequence: Synthetic oligonucleotide
uacccggcagaguuaugca

SEQ ID NO: 92519 - RNA, 19 nt, Artificial Sequence
  Description of Artificial Sequence: Synthetic oligonucleotide
aaauaguuccucuuuucaa

SEQ ID NO: 92520 - RNA, 19 nt, Artificial Sequence
  Description of Artificial Sequence: Synthetic oligonucleotide
acgucauauccggaaacga

SEQ ID NO: 92521 - RNA, 19 nt, Artificial Sequence
  Description of Artificial Sequence: Synthetic oligonucleotide
acgcucaacagauuuugag

SEQ ID NO: 92522 - RNA, 19 nt, Artificial Sequence
  Description of Artificial Sequence: Synthetic oligonucleotide
guuugacccacauucgaac

SEQ ID NO: 92523 - RNA, 19 nt, Artificial Sequence
  Description of Artificial Sequence: Synthetic oligonucleotide
cuuuuaucauuucacccgu

SEQ ID NO: 92524 - RNA, 19 nt, Artificial Sequence
  Description of Artificial Sequence: Synthetic oligonucleotide
uccuuuaauaaagccacaa

SEQ ID NO: 92525 - RNA, 19 nt, Artificial Sequence
  Description of Artificial Sequence: Synthetic oligonucleotide
augugcugcuuauggaaaa

SEQ ID NO: 92526 - RNA, 19 nt, Artificial Sequence
  Description of Artificial Sequence: Synthetic oligonucleotide
agccuuagauuuaagccuc

SEQ ID NO: 92527 - RNA, 19 nt, Artificial Sequence
  Description of Artificial Sequence: Synthetic oligonucleotide
caacaguauuuucuucauu

SEQ ID NO: 92528 - RNA, 19 nt, Artificial Sequence
  Description of Artificial Sequence: Synthetic oligonucleotide
ugggccaaaccaauuugaa

SEQ ID NO: 92529 - RNA, 19 nt, Artificial Sequence
  Description of Artificial Sequence: Synthetic oligonucleotide
aaaucuuccugacauugcc

SEQ ID NO: 92530 - RNA, 19 nt, Artificial Sequence
  Description of Artificial Sequence: Synthetic oligonucleotide
cuguuuaaaucugucugca

SEQ ID NO: 92531 - RNA, 19 nt, Artificial Sequence
  Description of Artificial Sequence: Synthetic oligonucleotide
aaauagcaaugcucaagug

SEQ ID NO: 92532 - RNA, 19 nt, Artificial Sequence
  Description of Artificial Sequence: Synthetic oligonucleotide
guuaaguggaacugaauuu

SEQ ID NO: 92533 - RNA, 19 nt, Artificial Sequence
  Description of Artificial Sequence: Synthetic oligonucleotide
uucagccauuccucauguc

SEQ ID NO: 92534 - RNA, 19 nt, Artificial Sequence
  Description of Artificial Sequence: Synthetic oligonucleotide
caaauauuuggauuugaca

SEQ ID NO: 92535 - RNA, 19 nt, Artificial Sequence
  Description of Artificial Sequence: Synthetic oligonucleotide
aaacaauagacuagacuuu

SEQ ID NO: 92536 - RNA, 19 nt, Artificial Sequence
  Description of Artificial Sequence: Synthetic oligonucleotide
ugauaaugcuagugcucuu

SEQ ID NO: 92537 - RNA, 19 nt, Artificial Sequence
  Description of Artificial Sequence: Synthetic oligonucleotide
uacugaauuguccgacuug

SEQ ID NO: 92538 - RNA, 19 nt, Artificial Sequence
  Description of Artificial Sequence: Synthetic oligonucleotide
ggaaguucuagaucucagc

SEQ ID NO: 92539 - RNA, 19 nt, Artificial Sequence
  Description of Artificial Sequence: Synthetic oligonucleotide
cuauaauucacacuauuuc

SEQ ID NO: 92540 - RNA, 19 nt, Artificial Sequence
  Description of Artificial Sequence: Synthetic oligonucleotide
cagaauagcaggcguaaca

SEQ ID NO: 92541 - RNA, 19 nt, Artificial Sequence
  Description of Artificial Sequence: Synthetic oligonucleotide
acaucaucuagaauuuauu

SEQ ID NO: 92542 - RNA, 19 nt, Artificial Sequence
  Description of Artificial Sequence: Synthetic oligonucleotide
ucaaaauuucacaaaucua

SEQ ID NO: 92543 - RNA, 19 nt, Artificial Sequence
  Description of Artificial Sequence: Synthetic oligonucleotide
aaaaguuuuaaacuugagc

SEQ ID NO: 92544 - RNA, 19 nt, Artificial Sequence
  Description of Artificial Sequence: Synthetic oligonucleotide
ccacaacaacauuuauacu

SEQ ID NO: 92545 - RNA, 19 nt, Artificial Sequence
  Description of Artificial Sequence: Synthetic oligonucleotide
uuuaacagauaaguauaac

SEQ ID NO: 92546 - RNA, 19 nt, Artificial Sequence
  Description of Artificial Sequence: Synthetic oligonucleotide
ccuggaaagcaagucccug

SEQ ID NO: 92547 - RNA, 19 nt, Artificial Sequence
  Description of Artificial Sequence: Synthetic oligonucleotide
gguagaauuaguuuucagu

SEQ ID NO: 92548 - RNA, 19 nt, Artificial Sequence
  Description of Artificial Sequence: Synthetic oligonucleotide
uggcaaucgccuugacauu

SEQ ID NO: 92549 - RNA, 19 nt, Artificial Sequence
  Description of Artificial Sequence: Synthetic oligonucleotide
uuuguggaaugaugaugac

SEQ ID NO: 92550 - RNA, 19 nt, Artificial Sequence
  Description of Artificial Sequence: Synthetic oligonucleotide
caacagguauaucuccauu

SEQ ID NO: 92551 - RNA, 19 nt, Artificial Sequence
  Description of Artificial Sequence: Synthetic oligonucleotide
uuucaaaggucucaagaau

SEQ ID NO: 92552 - RNA, 19 nt, Artificial Sequence
  Description of Artificial Sequence: Synthetic oligonucleotide
ucugacacgucuggauuua

SEQ ID NO: 92553 - RNA, 19 nt, Artificial Sequence
  Description of Artificial Sequence: Synthetic oligonucleotide
aucccuuaauaggcugaag

SEQ ID NO: 92554 - RNA, 19 nt, Artificial Sequence
  Description of Artificial Sequence: Synthetic oligonucleotide
gcacaucccaaaugaagca

SEQ ID NO: 92555 - RNA, 19 nt, Artificial Sequence
  Description of Artificial Sequence: Synthetic oligonucleotide
auuccuuaauuugccagcg

SEQ ID NO: 92556 - RNA, 19 nt, Artificial Sequence
  Description of Artificial Sequence: Synthetic oligonucleotide
gagucucacugaacuacau

SEQ ID NO: 92557 - RNA, 19 nt, Artificial Sequence
  Description of Artificial Sequence: Synthetic oligonucleotide
uauaaaugauaauauguua

SEQ ID NO: 92558 - RNA, 19 nt, Artificial Sequence
  Description of Artificial Sequence: Synthetic oligonucleotide
aaaguuuuuuaacuggaca

SEQ ID NO: 92559 - RNA, 19 nt, Artificial Sequence
  Description of Artificial Sequence: Synthetic oligonucleotide
auuacuccagcaguuuccu

SEQ ID NO: 92560 - RNA, 19 nt, Artificial Sequence
  Description of Artificial Sequence: Synthetic oligonucleotide
ucgucucgaguugcuugac

SEQ ID NO: 92561 - RNA, 19 nt, Artificial Sequence
  Description of Artificial Sequence: Synthetic oligonucleotide
cuuacguggaaacaaacua

SEQ ID NO: 92562 - RNA, 19 nt, Artificial Sequence
  Description of Artificial Sequence: Synthetic oligonucleotide
acucuuuuuaacugauagc

SEQ ID NO: 92563 - RNA, 19 nt, Artificial Sequence
  Description of Artificial Sequence: Synthetic oligonucleotide
ccuaucugacuuuacaucu

SEQ ID NO: 92564 - RNA, 19 nt, Artificial Sequence
  Description of Artificial Sequence: Synthetic oligonucleotide
uucccuucggacacugcug

SEQ ID NO: 92565 - RNA, 19 nt, Artificial Sequence
  Description of Artificial Sequence: Synthetic oligonucleotide
gcugagucauaacaggauu

SEQ ID NO: 92566 - RNA, 19 nt, Artificial Sequence
  Description of Artificial Sequence: Synthetic oligonucleotide
uucccaccuacccucuggc

SEQ ID NO: 92567 - RNA, 19 nt, Artificial Sequence
  Description of Artificial Sequence: Synthetic oligonucleotide
cuuucuuucugaagucagu

SEQ ID NO: 92568 - RNA, 19 nt, Artificial Sequence
  Description of Artificial Sequence: Synthetic oligonucleotide
uagucugaagcaccucgau

SEQ ID NO: 92569 - RNA, 19 nt, Artificial Sequence
  Description of Artificial Sequence: Synthetic oligonucleotide
uuuaaguuccaaucugcua

SEQ ID NO: 92570 - RNA, 19 nt, Artificial Sequence
  Description of Artificial Sequence: Synthetic oligonucleotide
aaaaacaaucaacaaaucc

SEQ ID NO: 92571 - RNA, 19 nt, Artificial Sequence
  Description of Artificial Sequence: Synthetic oligonucleotide
cgcacuugaaacuaagacc

SEQ ID NO: 92572 - RNA, 19 nt, Artificial Sequence
  Description of Artificial Sequence: Synthetic oligonucleotide
caccaccaaauuaucuaug

SEQ ID NO: 92573 - RNA, 19 nt, Artificial Sequence
  Description of Artificial Sequence: Synthetic oligonucleotide
guuggaacuacacggaaac

SEQ ID NO: 92574 - RNA, 19 nt, Artificial Sequence
  Description of Artificial Sequence: Synthetic oligonucleotide
ccccuuugaaugcaccugu

SEQ ID NO: 92575 - RNA, 19 nt, Artificial Sequence
  Description of Artificial Sequence: Synthetic oligonucleotide
ugacauuggagauuuccga

SEQ ID NO: 92576 - RNA, 19 nt, Artificial Sequence
  Description of Artificial Sequence: Synthetic oligonucleotide
aagauggauggaugaacau

SEQ ID NO: 92577 - RNA, 19 nt, Artificial Sequence
  Description of Artificial Sequence: Synthetic oligonucleotide
ucugaaugucaaaauuccc

SEQ ID NO: 92578 - RNA, 19 nt, Artificial Sequence
  Description of Artificial Sequence: Synthetic oligonucleotide
cagacugguagaugucauu

SEQ ID NO: 92579 - RNA, 19 nt, Artificial Sequence
  Description of Artificial Sequence: Synthetic oligonucleotide
uugugccaguccuggggau

SEQ ID NO: 92580 - RNA, 19 nt, Artificial Sequence
  Description of Artificial Sequence: Synthetic oligonucleotide
ucaaagagggaagaguauu

SEQ ID NO: 92581 - RNA, 19 nt, Artificial Sequence
  Description of Artificial Sequence: Synthetic oligonucleotide
ugugagucuggagcuaaca

SEQ ID NO: 92582 - RNA, 19 nt, Artificial Sequence
  Description of Artificial Sequence: Synthetic oligonucleotide
aacuuguguuucagauguc

SEQ ID NO: 92583 - RNA, 19 nt, Artificial Sequence
  Description of Artificial Sequence: Synthetic oligonucleotide
cacugcagugauauuauuu

SEQ ID NO: 92584 - RNA, 19 nt, Artificial Sequence
  Description of Artificial Sequence: Synthetic oligonucleotide
uuucuucacguucuuuauc

SEQ ID NO: 92585 - RNA, 19 nt, Artificial Sequence
  Description of Artificial Sequence: Synthetic oligonucleotide
caccaccaugguuauguug

SEQ ID NO: 92586 - RNA, 19 nt, Artificial Sequence
  Description of Artificial Sequence: Synthetic oligonucleotide
ggcugcccuggcucaccau

SEQ ID NO: 92587 - RNA, 19 nt, Artificial Sequence
  Description of Artificial Sequence: Synthetic oligonucleotide
uuuguuuuacugggauguu

SEQ ID NO: 92588 - RNA, 19 nt, Artificial Sequence
  Description of Artificial Sequence: Synthetic oligonucleotide
uugguuuauauauaaugug

SEQ ID NO: 92589 - RNA, 19 nt, Artificial Sequence
  Description of Artificial Sequence: Synthetic oligonucleotide
guguuuagcuaagguaaaa

SEQ ID NO: 92590 - RNA, 19 nt, Artificial Sequence
  Description of Artificial Sequence: Synthetic oligonucleotide
aggcuacaggucucuuucc

SEQ ID NO: 92591 - RNA, 19 nt, Artificial Sequence
  Description of Artificial Sequence: Synthetic oligonucleotide
cacaucccaaacuuucuau

SEQ ID NO: 92592 - RNA, 19 nt, Artificial Sequence
  Description of Artificial Sequence: Synthetic oligonucleotide
ugaugcuuacauuucuuau

SEQ ID NO: 92593 - RNA, 19 nt, Artificial Sequence
  Description of Artificial Sequence: Synthetic oligonucleotide
ugacaccaaagaugccucu

SEQ ID NO: 92594 - RNA, 19 nt, Artificial Sequence
  Description of Artificial Sequence: Synthetic oligonucleotide
uguuacugacugggugaua

SEQ ID NO: 92595 - RNA, 19 nt, Artificial Sequence
  Description of Artificial Sequence: Synthetic oligonucleotide
aaaugagcugcgcuaccac

SEQ ID NO: 92596 - RNA, 19 nt, Artificial Sequence
  Description of Artificial Sequence: Synthetic oligonucleotide
ccuugaagagagccgagac

SEQ ID NO: 92597 - RNA, 19 nt, Artificial Sequence
  Description of Artificial Sequence: Synthetic oligonucleotide
caaaaacguucuccuuugu

SEQ ID NO: 92598 - RNA, 19 nt, Artificial Sequence
  Description of Artificial Sequence: Synthetic oligonucleotide
ucuagaggagagggauugg

SEQ ID NO: 92599 - RNA, 19 nt, Artificial Sequence
  Description of Artificial Sequence: Synthetic oligonucleotide
ggauccgggauuggccauc

SEQ ID NO: 92600 - RNA, 19 nt, Artificial Sequence
  Description of Artificial Sequence: Synthetic oligonucleotide
caucgacaaccucaugcag

SEQ ID NO: 92601 - RNA, 19 nt, Artificial Sequence
  Description of Artificial Sequence: Synthetic oligonucleotide
gagcaucaaccaaagcaag

SEQ ID NO: 92602 - RNA, 19 nt, Artificial Sequence
  Description of Artificial Sequence: Synthetic oligonucleotide
gaaaacaguauuuguuuua

SEQ ID NO: 92603 - RNA, 19 nt, Artificial Sequence
  Description of Artificial Sequence: Synthetic oligonucleotide
aaccaaaaaauaugcaaaa

SEQ ID NO: 92604 - RNA, 19 nt, Artificial Sequence
  Description of Artificial Sequence: Synthetic oligonucleotide
aagcuggaacuuuaaaaca

SEQ ID NO: 92605 - RNA, 19 nt, Artificial Sequence
  Description of Artificial Sequence: Synthetic oligonucleotide
agcuuuuuacuuggcuuug

SEQ ID NO: 92606 - RNA, 19 nt, Artificial Sequence
  Description of Artificial Sequence: Synthetic oligonucleotide
gcagaggcuaauggaugag

SEQ ID NO: 92607 - RNA, 19 nt, Artificial Sequence
  Description of Artificial Sequence: Synthetic oligonucleotide
gaacauggaugugauuaua

SEQ ID NO: 92608 - RNA, 19 nt, Artificial Sequence
  Description of Artificial Sequence: Synthetic oligonucleotide
auuuauccugcuggagcca

SEQ ID NO: 92609 - RNA, 19 nt, Artificial Sequence
  Description of Artificial Sequence: Synthetic oligonucleotide
aguguuacagcauucucag

SEQ ID NO: 92610 - RNA, 19 nt, Artificial Sequence
  Description of Artificial Sequence: Synthetic oligonucleotide
guauuugaggcuacggcag

SEQ ID NO: 92611 - RNA, 19 nt, Artificial Sequence
  Description of Artificial Sequence: Synthetic oligonucleotide
gcggaucuguaagagcucc

SEQ ID NO: 92612 - RNA, 19 nt, Artificial Sequence
  Description of Artificial Sequence: Synthetic oligonucleotide
cauccuccaguggccugac

SEQ ID NO: 92613 - RNA, 19 nt, Artificial Sequence
  Description of Artificial Sequence: Synthetic oligonucleotide
caacccgaaggcagaaggc

SEQ ID NO: 92614 - RNA, 19 nt, Artificial Sequence
  Description of Artificial Sequence: Synthetic oligonucleotide
cuuguuuuggcaaacucug

SEQ ID NO: 92615 - RNA, 19 nt, Artificial Sequence
  Description of Artificial Sequence: Synthetic oligonucleotide
gagaaauguggucuugacu

SEQ ID NO: 92616 - RNA, 19 nt, Artificial Sequence
  Description of Artificial Sequence: Synthetic oligonucleotide
ugaaaaugauucacgguau

SEQ ID NO: 92617 - RNA, 19 nt, Artificial Sequence
  Description of Artificial Sequence: Synthetic oligonucleotide
uaacaauauguaugucgau

SEQ ID NO: 92618 - RNA, 19 nt, Artificial Sequence
  Description of Artificial Sequence: Synthetic oligonucleotide
uuccauuaagcaauacuaa

SEQ ID NO: 92619 - RNA, 19 nt, Artificial Sequence
  Description of Artificial Sequence: Synthetic oligonucleotide
acugacguuaagucaugau

SEQ ID NO: 92620 - RNA, 19 nt, Artificial Sequence
  Description of Artificial Sequence: Synthetic oligonucleotide
uuucgcgccauaauaaaga

SEQ ID NO: 92621 - RNA, 19 nt, Artificial Sequence
  Description of Artificial Sequence: Synthetic oligonucleotide
augcaaaggaaugacauuu

SEQ ID NO: 92622 - RNA, 19 nt, Artificial Sequence
  Description of Artificial Sequence: Synthetic oligonucleotide
ucuguauuaguuaucuauu

SEQ ID NO: 92623 - RNA, 19 nt, Artificial Sequence
  Description of Artificial Sequence: Synthetic oligonucleotide
ugcuauguaacaaauuauc

SEQ ID NO: 92624 - RNA, 19 nt, Artificial Sequence
  Description of Artificial Sequence: Synthetic oligonucleotide
cccaaaacuuagugguuua

SEQ ID NO: 92625 - RNA, 19 nt, Artificial Sequence
  Description of Artificial Sequence: Synthetic oligonucleotide
aaaacaacacauuugcugg

SEQ ID NO: 92626 - RNA, 19 nt, Artificial Sequence
  Description of Artificial Sequence: Synthetic oligonucleotide
uuugcuggcccacaguuuu

SEQ ID NO: 92627 - RNA, 19 nt, Artificial Sequence
  Description of Artificial Sequence: Synthetic oligonucleotide
agaacaacagaaacaugga

SEQ ID NO: 92628 - RNA, 19 nt, Artificial Sequence
  Description of Artificial Sequence: Synthetic oligonucleotide
aaaacauguuccuucaguc

SEQ ID NO: 92629 - RNA, 19 nt, Artificial Sequence
  Description of Artificial Sequence: Synthetic oligonucleotide
cgucaaugcugaccugcau

SEQ ID NO: 92630 - RNA, 19 nt, Artificial Sequence
  Description of Artificial Sequence: Synthetic oligonucleotide
uuuuccugcuaauaucugg

SEQ ID NO: 92631 - RNA, 19 nt, Artificial Sequence
  Description of Artificial Sequence: Synthetic oligonucleotide
guuccugugaguuaugcgc

SEQ ID NO: 92632 - RNA, 19 nt, Artificial Sequence
  Description of Artificial Sequence: Synthetic oligonucleotide
ccgaagaaaauuuuucuag

SEQ ID NO: 92633 - RNA, 19 nt, Artificial Sequence
  Description of Artificial Sequence: Synthetic oligonucleotide
gaagcuauccuugugauga

SEQ ID NO: 92634 - RNA, 19 nt, Artificial Sequence
  Description of Artificial Sequence: Synthetic oligonucleotide
agaaaaagcaaaaugacuc

SEQ ID NO: 92635 - RNA, 19 nt, Artificial Sequence
  Description of Artificial Sequence: Synthetic oligonucleotide
caguuauugcagagugcag

SEQ ID NO: 92636 - RNA, 19 nt, Artificial Sequence
  Description of Artificial Sequence: Synthetic oligonucleotide
gcaaucgucgacuacagga

SEQ ID NO: 92637 - RNA, 19 nt, Artificial Sequence
  Description of Artificial Sequence: Synthetic oligonucleotide
aaguuccccaaacgguggg

SEQ ID NO: 92638 - RNA, 19 nt, Artificial Sequence
  Description of Artificial Sequence: Synthetic oligonucleotide
gcaaauaugugacagaacu

SEQ ID NO: 92639 - RNA, 19 nt, Artificial Sequence
  Description of Artificial Sequence: Synthetic oligonucleotide
uagaccugucugauaauuu

SEQ ID NO: 92640 - RNA, 19 nt, Artificial Sequence
  Description of Artificial Sequence: Synthetic oligonucleotide
ucaucacacacauaacgaa

SEQ ID NO: 92641 - RNA, 19 nt, Artificial Sequence
  Description of Artificial Sequence: Synthetic oligonucleotide
augaaucauuucaagggcu

SEQ ID NO: 92642 - RNA, 19 nt, Artificial Sequence
  Description of Artificial Sequence: Synthetic oligonucleotide
ugcaaaaucucacuaaaau

SEQ ID NO: 92643 - RNA, 19 nt, Artificial Sequence
  Description of Artificial Sequence: Synthetic oligonucleotide
uaaaucuaaaccacaaccc

SEQ ID NO: 92644 - RNA, 19 nt, Artificial Sequence
  Description of Artificial Sequence: Synthetic oligonucleotide
ccaauguacagcaccagaa

SEQ ID NO: 92645 - RNA, 19 nt, Artificial Sequence
  Description of Artificial Sequence: Synthetic oligonucleotide
acggaaaucccgguauaca

SEQ ID NO: 92646 - RNA, 19 nt, Artificial Sequence
  Description of Artificial Sequence: Synthetic oligonucleotide
aaucaaauggcuugaauau

SEQ ID NO: 92647 - RNA, 19 nt, Artificial Sequence
  Description of Artificial Sequence: Synthetic oligonucleotide
ucacagacggggcauuccu

SEQ ID NO: 92648 - RNA, 19 nt, Artificial Sequence
  Description of Artificial Sequence: Synthetic oligonucleotide
ucaaccuaaaaaaccuaag

SEQ ID NO: 92649 - RNA, 19 nt, Artificial Sequence
  Description of Artificial Sequence: Synthetic oligonucleotide
gggaguuacugcuugaaga

SEQ ID NO: 92650 - RNA, 19 nt, Artificial Sequence
  Description of Artificial Sequence: Synthetic oligonucleotide
acaaccaguuaccccaaau

SEQ ID NO: 92651 - RNA, 19 nt, Artificial Sequence
  Description of Artificial Sequence: Synthetic oligonucleotide
uacccucugguuugccaga

SEQ ID NO: 92652 - RNA, 19 nt, Artificial Sequence
  Description of Artificial Sequence: Synthetic oligonucleotide
agucuuugacagaacuuag

SEQ ID NO: 92653 - RNA, 19 nt, Artificial Sequence
  Description of Artificial Sequence: Synthetic oligonucleotide
gucuaauucaaaacaauau

SEQ ID NO: 92654 - RNA, 19 nt, Artificial Sequence
  Description of Artificial Sequence: Synthetic oligonucleotide
uauacaacauaacuaaaga

SEQ ID NO: 92655 - RNA, 19 nt, Artificial Sequence
  Description of Artificial Sequence: Synthetic oligonucleotide
agggcauuucaagacuuau

SEQ ID NO: 92656 - RNA, 19 nt, Artificial Sequence
  Description of Artificial Sequence: Synthetic oligonucleotide
uaaacuugaaaaaucucua

SEQ ID NO: 92657 - RNA, 19 nt, Artificial Sequence
  Description of Artificial Sequence: Synthetic oligonucleotide
auuuggccuggaacugcua

SEQ ID NO: 92658 - RNA, 19 nt, Artificial Sequence
  Description of Artificial Sequence: Synthetic oligonucleotide
auuuuaacaaaguuugcga

SEQ ID NO: 92659 - RNA, 19 nt, Artificial Sequence
  Description of Artificial Sequence: Synthetic oligonucleotide
agaaaacuaacauagaaga

SEQ ID NO: 92660 - RNA, 19 nt, Artificial Sequence
  Description of Artificial Sequence: Synthetic oligonucleotide
auggaguauuugaaacgcu

SEQ ID NO: 92661 - RNA, 19 nt, Artificial Sequence
  Description of Artificial Sequence: Synthetic oligonucleotide
ugacaaauuuggaguugcu

SEQ ID NO: 92662 - RNA, 19 nt, Artificial Sequence
  Description of Artificial Sequence: Synthetic oligonucleotide
uaucacuaucuuucaauuc

SEQ ID NO: 92663 - RNA, 19 nt, Artificial Sequence
  Description of Artificial Sequence: Synthetic oligonucleotide
cucuuucacacgugccacc

SEQ ID NO: 92664 - RNA, 19 nt, Artificial Sequence
  Description of Artificial Sequence: Synthetic oligonucleotide
ccaaacugccaagcucccu

SEQ ID NO: 92665 - RNA, 19 nt, Artificial Sequence
  Description of Artificial Sequence: Synthetic oligonucleotide
uacgcaaacuuuuucugag

SEQ ID NO: 92666 - RNA, 19 nt, Artificial Sequence
  Description of Artificial Sequence: Synthetic oligonucleotide
gcaacacccagaucaaaua

SEQ ID NO: 92667 - RNA, 19 nt, Artificial Sequence
  Description of Artificial Sequence: Synthetic oligonucleotide
acauuagugaagaagauuu

SEQ ID NO: 92668 - RNA, 19 nt, Artificial Sequence
  Description of Artificial Sequence: Synthetic oligonucleotide
ucaagggauugauaaauuu

SEQ ID NO: 92669 - RNA, 19 nt, Artificial Sequence
  Description of Artificial Sequence: Synthetic oligonucleotide
uaacauuacuagauuuaag

SEQ ID NO: 92670 - RNA, 19 nt, Artificial Sequence
  Description of Artificial Sequence: Synthetic oligonucleotide
gcgggaacuguccgaggug

SEQ ID NO: 92671 - RNA, 19 nt, Artificial Sequence
  Description of Artificial Sequence: Synthetic oligonucleotide
gcuucaaugccccauuucc

SEQ ID NO: 92672 - RNA, 19 nt, Artificial Sequence
  Description of Artificial Sequence: Synthetic oligonucleotide
caugcgugccuugugaugg

SEQ ID NO: 92673 - RNA, 19 nt, Artificial Sequence
  Description of Artificial Sequence: Synthetic oligonucleotide
guggugcuucaauuaauau

SEQ ID NO: 92674 - RNA, 19 nt, Artificial Sequence
  Description of Artificial Sequence: Synthetic oligonucleotide
uagaucguuuugcuuuuca

SEQ ID NO: 92675 - RNA, 19 nt, Artificial Sequence
  Description of Artificial Sequence: Synthetic oligonucleotide
aaaacuugacccaacuucg

SEQ ID NO: 92676 - RNA, 19 nt, Artificial Sequence
  Description of Artificial Sequence: Synthetic oligonucleotide
gauaccuaaaccucucuag

SEQ ID NO: 92677 - RNA, 19 nt, Artificial Sequence
  Description of Artificial Sequence: Synthetic oligonucleotide
gcacuucccucaggaagau

SEQ ID NO: 92678 - RNA, 19 nt, Artificial Sequence
  Description of Artificial Sequence: Synthetic oligonucleotide
uuaaugcugccugguuuaa

SEQ ID NO: 92679 - RNA, 19 nt, Artificial Sequence
  Description of Artificial Sequence: Synthetic oligonucleotide
aaaauaugccucaucugaa

SEQ ID NO: 92680 - RNA, 19 nt, Artificial Sequence
  Description of Artificial Sequence: Synthetic oligonucleotide
aggugcuggaucuugaauu

SEQ ID NO: 92681 - RNA, 19 nt, Artificial Sequence
  Description of Artificial Sequence: Synthetic oligonucleotide
ucaacuauuuagugggaga

SEQ ID NO: 92682 - RNA, 19 nt, Artificial Sequence
  Description of Artificial Sequence: Synthetic oligonucleotide
aaauagccucuggggcauu

SEQ ID NO: 92683 - RNA, 19 nt, Artificial Sequence
  Description of Artificial Sequence: Synthetic oligonucleotide
uuuuaacgaugcugccccg

SEQ ID NO: 92684 - RNA, 19 nt, Artificial Sequence
  Description of Artificial Sequence: Synthetic oligonucleotide
gcuuagaaauacuugacuu

SEQ ID NO: 92685 - RNA, 19 nt, Artificial Sequence
  Description of Artificial Sequence: Synthetic oligonucleotide
ugucuuuuaacuauauaaa

SEQ ID NO: 92686 - RNA, 19 nt, Artificial Sequence
  Description of Artificial Sequence: Synthetic oligonucleotide
aggggaguuauccacagca

SEQ ID NO: 92687 - RNA, 19 nt, Artificial Sequence
  Description of Artificial Sequence: Synthetic oligonucleotide
auauuaauauuuccagaaa

SEQ ID NO: 92688 - RNA, 19 nt, Artificial Sequence
  Description of Artificial Sequence: Synthetic oligonucleotide
acuucucuaaacuuuuguc

SEQ ID NO: 92689 - RNA, 19 nt, Artificial Sequence
  Description of Artificial Sequence: Synthetic oligonucleotide
cucuacgggcauugcauuu

SEQ ID NO: 92690 - RNA, 19 nt, Artificial Sequence
  Description of Artificial Sequence: Synthetic oligonucleotide
uaagagguuauguguucca

SEQ ID NO: 92691 - RNA, 19 nt, Artificial Sequence
  Description of Artificial Sequence: Synthetic oligonucleotide
aggaacucagagaagauga

SEQ ID NO: 92692 - RNA, 19 nt, Artificial Sequence
  Description of Artificial Sequence: Synthetic oligonucleotide
auuuccagccccugaugca

SEQ ID NO: 92693 - RNA, 19 nt, Artificial Sequence
  Description of Artificial Sequence: Synthetic oligonucleotide
agcuuccaaacuuaucgac

SEQ ID NO: 92694 - RNA, 19 nt, Artificial Sequence
  Description of Artificial Sequence: Synthetic oligonucleotide
cuaucaacuuggguauuaa

SEQ ID NO: 92695 - RNA, 19 nt, Artificial Sequence
  Description of Artificial Sequence: Synthetic oligonucleotide
auuuuauuaagcaaaucga

SEQ ID NO: 92696 - RNA, 19 nt, Artificial Sequence
  Description of Artificial Sequence: Synthetic oligonucleotide
auuucaaacuuuuccaaaa

SEQ ID NO: 92697 - RNA, 19 nt, Artificial Sequence
  Description of Artificial Sequence: Synthetic oligonucleotide
auuucuccaaucuggaaau

SEQ ID NO: 92698 - RNA, 19 nt, Artificial Sequence
  Description of Artificial Sequence: Synthetic oligonucleotide
uuauuuacuugucagaaaa

SEQ ID NO: 92699 - RNA, 19 nt, Artificial Sequence
  Description of Artificial Sequence: Synthetic oligonucleotide
acagaauaucaccguuggu

SEQ ID NO: 92700 - RNA, 19 nt, Artificial Sequence
  Description of Artificial Sequence: Synthetic oligonucleotide
uaaaagauacccggcagag

SEQ ID NO: 92701 - RNA, 19 nt, Artificial Sequence
  Description of Artificial Sequence: Synthetic oligonucleotide
guuaugcaaauaguuccuc

SEQ ID NO: 92702 - RNA, 19 nt, Artificial Sequence
  Description of Artificial Sequence: Synthetic oligonucleotide
cuuuucaacgucauauccg

SEQ ID NO: 92703 - RNA, 19 nt, Artificial Sequence
  Description of Artificial Sequence: Synthetic oligonucleotide
ggaaacgacgcucaacaga

SEQ ID NO: 92704 - RNA, 19 nt, Artificial Sequence
  Description of Artificial Sequence: Synthetic oligonucleotide
auuuugaguuugacccaca

SEQ ID NO: 92705 - RNA, 19 nt, Artificial Sequence
  Description of Artificial Sequence: Synthetic oligonucleotide
auucgaacuuuuaucauuu

SEQ ID NO: 92706 - RNA, 19 nt, Artificial Sequence
  Description of Artificial Sequence: Synthetic oligonucleotide
ucacccguccuuuaauaaa

SEQ ID NO: 92707 - RNA, 19 nt, Artificial Sequence
  Description of Artificial Sequence: Synthetic oligonucleotide
agccacaaugugcugcuua

SEQ ID NO: 92708 - RNA, 19 nt, Artificial Sequence
  Description of Artificial Sequence: Synthetic oligonucleotide
auggaaaagccuuagauuu

SEQ ID NO: 92709 - RNA, 19 nt, Artificial Sequence
  Description of Artificial Sequence: Synthetic oligonucleotide
uaagccucaacaguauuuu

SEQ ID NO: 92710 - RNA, 19 nt, Artificial Sequence
  Description of Artificial Sequence: Synthetic oligonucleotide
ucuucauugggccaaacca

SEQ ID NO: 92711 - RNA, 19 nt, Artificial Sequence
  Description of Artificial Sequence: Synthetic oligonucleotide
aauuugaaaaucuuccuga

SEQ ID NO: 92712 - RNA, 19 nt, Artificial Sequence
  Description of Artificial Sequence: Synthetic oligonucleotide
acauugccuguuuaaaucu

SEQ ID NO: 92713 - RNA, 19 nt, Artificial Sequence
  Description of Artificial Sequence: Synthetic oligonucleotide
ugucugcaaauagcaaugc

SEQ ID NO: 92714 - RNA, 19 nt, Artificial Sequence
  Description of Artificial Sequence: Synthetic oligonucleotide
cucaaguguuaaguggaac

SEQ ID NO: 92715 - RNA, 19 nt, Artificial Sequence
  Description of Artificial Sequence: Synthetic oligonucleotide
cugaauuuucagccauucc

SEQ ID NO: 92716 - RNA, 19 nt, Artificial Sequence
  Description of Artificial Sequence: Synthetic oligonucleotide
cucaugucaaauauuugga

SEQ ID NO: 92717 - RNA, 19 nt, Artificial Sequence
  Description of Artificial Sequence: Synthetic oligonucleotide
auuugacaaacaauagacu

SEQ ID NO: 92718 - RNA, 19 nt, Artificial Sequence
  Description of Artificial Sequence: Synthetic oligonucleotide
uagacuuugauaaugcuag

SEQ ID NO: 92719 - RNA, 19 nt, Artificial Sequence
  Description of Artificial Sequence: Synthetic oligonucleotide
gugcucuuacugaauuguc

SEQ ID NO: 92720 - RNA, 19 nt, Artificial Sequence
  Description of Artificial Sequence: Synthetic oligonucleotide
ccgacuuggaaguucuaga

SEQ ID NO: 92721 - RNA, 19 nt, Artificial Sequence
  Description of Artificial Sequence: Synthetic oligonucleotide
aucucagcuauaauucaca

SEQ ID NO: 92722 - RNA, 19 nt, Artificial Sequence
  Description of Artificial Sequence: Synthetic oligonucleotide
acuauuucagaauagcagg

SEQ ID NO: 92723 - RNA, 19 nt, Artificial Sequence
  Description of Artificial Sequence: Synthetic oligonucleotide
gcguaacacaucaucuaga

SEQ ID NO: 92724 - RNA, 19 nt, Artificial Sequence
  Description of Artificial Sequence: Synthetic oligonucleotide
aauuuauucaaaauuucac

SEQ ID NO: 92725 - RNA, 19 nt, Artificial Sequence
  Description of Artificial Sequence: Synthetic oligonucleotide
caaaucuaaaaguuuuaaa

SEQ ID NO: 92726 - RNA, 19 nt, Artificial Sequence
  Description of Artificial Sequence: Synthetic oligonucleotide
acuugagccacaacaacau

SEQ ID NO: 92727 - RNA, 19 nt, Artificial Sequence
  Description of Artificial Sequence: Synthetic oligonucleotide
uuuauacuuuaacagauaa

SEQ ID NO: 92728 - RNA, 19 nt, Artificial Sequence
  Description of Artificial Sequence: Synthetic oligonucleotide
aguauaaccuggaaagcaa

SEQ ID NO: 92729 - RNA, 19 nt, Artificial Sequence
  Description of Artificial Sequence: Synthetic oligonucleotide
agucccugguagaauuagu

SEQ ID NO: 92730 - RNA, 19 nt, Artificial Sequence
  Description of Artificial Sequence: Synthetic oligonucleotide
uuuucaguggcaaucgccu

SEQ ID NO: 92731 - RNA, 19 nt, Artificial Sequence
  Description of Artificial Sequence: Synthetic oligonucleotide
uugacauuuuguggaauga

SEQ ID NO: 92732 - RNA, 19 nt, Artificial Sequence
  Description of Artificial Sequence: Synthetic oligonucleotide
augaugacaacagguauau

SEQ ID NO: 92733 - RNA, 19 nt, Artificial Sequence
  Description of Artificial Sequence: Synthetic oligonucleotide
ucuccauuuucaaaggucu

SEQ ID NO: 92734 - RNA, 19 nt, Artificial Sequence
  Description of Artificial Sequence: Synthetic oligonucleotide
ucaagaaucugacacgucu

SEQ ID NO: 92735 - RNA, 19 nt, Artificial Sequence
  Description of Artificial Sequence: Synthetic oligonucleotide
uggauuuaucccuuaauag

SEQ ID NO: 92736 - RNA, 19 nt, Artificial Sequence
  Description of Artificial Sequence: Synthetic oligonucleotide
ggcugaagcacaucccaaa

SEQ ID NO: 92737 - RNA, 19 nt, Artificial Sequence
  Description of Artificial Sequence: Synthetic oligonucleotide
augaagcauuccuuaauuu

SEQ ID NO: 92738 - RNA, 19 nt, Artificial Sequence
  Description of Artificial Sequence: Synthetic oligonucleotide
ugccagcgagucucacuga

SEQ ID NO: 92739 - RNA, 19 nt, Artificial Sequence
  Description of Artificial Sequence: Synthetic oligonucleotide
aacuacauauaaaugauaa

SEQ ID NO: 92740 - RNA, 19 nt, Artificial Sequence
  Description of Artificial Sequence: Synthetic oligonucleotide
auauguuaaaguuuuuuaa

SEQ ID NO: 92741 - RNA, 19 nt, Artificial Sequence
  Description of Artificial Sequence: Synthetic oligonucleotide
acuggacauuacuccagca

SEQ ID NO: 92742 - RNA, 19 nt, Artificial Sequence
  Description of Artificial Sequence: Synthetic oligonucleotide
aguuuccucgucucgaguu

SEQ ID NO: 92743 - RNA, 19 nt, Artificial Sequence
  Description of Artificial Sequence: Synthetic oligonucleotide
ugcuugacuuacguggaaa

SEQ ID NO: 92744 - RNA, 19 nt, Artificial Sequence
  Description of Artificial Sequence: Synthetic oligonucleotide
acaaacuacucuuuuuaac

SEQ ID NO: 92745 - RNA, 19 nt, Artificial Sequence
  Description of Artificial Sequence: Synthetic oligonucleotide
cugauagccuaucugacuu

SEQ ID NO: 92746 - RNA, 19 nt, Artificial Sequence
  Description of Artificial Sequence: Synthetic oligonucleotide
uuacaucuucccuucggac

SEQ ID NO: 92747 - RNA, 19 nt, Artificial Sequence
  Description of Artificial Sequence: Synthetic oligonucleotide
cacugcugcugagucauaa

SEQ ID NO: 92748 - RNA, 19 nt, Artificial Sequence
  Description of Artificial Sequence: Synthetic oligonucleotide
acaggauuucccaccuacc

SEQ ID NO: 92749 - RNA, 19 nt, Artificial Sequence
  Description of Artificial Sequence: Synthetic oligonucleotide
ccucuggcuuucuuucuga

SEQ ID NO: 92750 - RNA, 19 nt, Artificial Sequence
  Description of Artificial Sequence: Synthetic oligonucleotide
aagucaguagucugaagca

SEQ ID NO: 92751 - RNA, 19 nt, Artificial Sequence
  Description of Artificial Sequence: Synthetic oligonucleotide
accucgauuuaaguuccaa

SEQ ID NO: 92752 - RNA, 19 nt, Artificial Sequence
  Description of Artificial Sequence: Synthetic oligonucleotide
aucugcuaaaaacaaucaa

SEQ ID NO: 92753 - RNA, 19 nt, Artificial Sequence
  Description of Artificial Sequence: Synthetic oligonucleotide
acaaauccgcacuugaaac

SEQ ID NO: 92754 - RNA, 19 nt, Artificial Sequence
  Description of Artificial Sequence: Synthetic oligonucleotide
cuaagaccaccaccaaauu

SEQ ID NO: 92755 - RNA, 19 nt, Artificial Sequence
  Description of Artificial Sequence: Synthetic oligonucleotide
uaucuauguuggaacuaca

SEQ ID NO: 92756 - RNA, 19 nt, Artificial Sequence
  Description of Artificial Sequence: Synthetic oligonucleotide
acggaaaccccuuugaaug

SEQ ID NO: 92757 - RNA, 19 nt, Artificial Sequence
  Description of Artificial Sequence: Synthetic oligonucleotide
gcaccugugacauuggaga

SEQ ID NO: 92758 - RNA, 19 nt, Artificial Sequence
  Description of Artificial Sequence: Synthetic oligonucleotide
auuuccgaagauggaugga

SEQ ID NO: 92759 - RNA, 19 nt, Artificial Sequence
  Description of Artificial Sequence: Synthetic oligonucleotide
augaacaucugaaugucaa

SEQ ID NO: 92760 - RNA, 19 nt, Artificial Sequence
  Description of Artificial Sequence: Synthetic oligonucleotide
aaauucccagacugguaga

SEQ ID NO: 92761 - RNA, 19 nt, Artificial Sequence
  Description of Artificial Sequence: Synthetic oligonucleotide
augucauuugugccagucc

SEQ ID NO: 92762 - RNA, 19 nt, Artificial Sequence
  Description of Artificial Sequence: Synthetic oligonucleotide
cuggggaucaaagagggaa

SEQ ID NO: 92763 - RNA, 19 nt, Artificial Sequence
  Description of Artificial Sequence: Synthetic oligonucleotide
agaguauugugagucugga

SEQ ID NO: 92764 - RNA, 19 nt, Artificial Sequence
  Description of Artificial Sequence: Synthetic oligonucleotide
agcuaacaacuuguguuuc

SEQ ID NO: 92765 - RNA, 19 nt, Artificial Sequence
  Description of Artificial Sequence: Synthetic oligonucleotide
cagaugucacugcagugau

SEQ ID NO: 92766 - RNA, 19 nt, Artificial Sequence
  Description of Artificial Sequence: Synthetic oligonucleotide
uauuauuuuucuucacguu

SEQ ID NO: 92767 - RNA, 19 nt, Artificial Sequence
  Description of Artificial Sequence: Synthetic oligonucleotide
ucuuuaucaccaccauggu

SEQ ID NO: 92768 - RNA, 19 nt, Artificial Sequence
  Description of Artificial Sequence: Synthetic oligonucleotide
uuauguuggcugcccuggc

SEQ ID NO: 92769 - RNA, 19 nt, Artificial Sequence
  Description of Artificial Sequence: Synthetic oligonucleotide
cucaccauuuguuuuacug

SEQ ID NO: 92770 - RNA, 19 nt, Artificial Sequence
  Description of Artificial Sequence: Synthetic oligonucleotide
gggauguuugguuuauaua

SEQ ID NO: 92771 - RNA, 19 nt, Artificial Sequence
  Description of Artificial Sequence: Synthetic oligonucleotide
auaauguguguuuagcuaa

SEQ ID NO: 92772 - RNA, 19 nt, Artificial Sequence
  Description of Artificial Sequence: Synthetic oligonucleotide
agguaaaaggcuacagguc

SEQ ID NO: 92773 - RNA, 19 nt, Artificial Sequence
  Description of Artificial Sequence: Synthetic oligonucleotide
cucuuuccacaucccaaac

SEQ ID NO: 92774 - RNA, 19 nt, Artificial Sequence
  Description of Artificial Sequence: Synthetic oligonucleotide
cuuucuaugaugcuuacau

SEQ ID NO: 92775 - RNA, 19 nt, Artificial Sequence
  Description of Artificial Sequence: Synthetic oligonucleotide
uuucuuaugacaccaaaga

SEQ ID NO: 92776 - RNA, 19 nt, Artificial Sequence
  Description of Artificial Sequence: Synthetic oligonucleotide
augccucuguuacugacug

SEQ ID NO: 92777 - RNA, 19 nt, Artificial Sequence
  Description of Artificial Sequence: Synthetic oligonucleotide
gggugauaaaugagcugcg

SEQ ID NO: 92778 - RNA, 19 nt, Artificial Sequence
  Description of Artificial Sequence: Synthetic oligonucleotide
gcuaccaccuugaagagag

SEQ ID NO: 92779 - RNA, 19 nt, Artificial Sequence
  Description of Artificial Sequence: Synthetic oligonucleotide
gccgagacaaaaacguucu

SEQ ID NO: 92780 - RNA, 19 nt, Artificial Sequence
  Description of Artificial Sequence: Synthetic oligonucleotide
uccuuugucuagaggagag

SEQ ID NO: 92781 - RNA, 19 nt, Artificial Sequence
  Description of Artificial Sequence: Synthetic oligonucleotide
gggauugggauccgggauu

SEQ ID NO: 92782 - RNA, 19 nt, Artificial Sequence
  Description of Artificial Sequence: Synthetic oligonucleotide
uggccaucaucgacaaccu

SEQ ID NO: 92783 - RNA, 19 nt, Artificial Sequence
  Description of Artificial Sequence: Synthetic oligonucleotide
ucaugcagagcaucaacca

SEQ ID NO: 92784 - RNA, 19 nt, Artificial Sequence
  Description of Artificial Sequence: Synthetic oligonucleotide
aaagcaagaaaacaguauu

SEQ ID NO: 92785 - RNA, 19 nt, Artificial Sequence
  Description of Artificial Sequence: Synthetic oligonucleotide
uuguuuuaaccaaaaaaua

SEQ ID NO: 92786 - RNA, 19 nt, Artificial Sequence
  Description of Artificial Sequence: Synthetic oligonucleotide
augcaaaaagcuggaacuu

SEQ ID NO: 92787 - RNA, 19 nt, Artificial Sequence
  Description of Artificial Sequence: Synthetic oligonucleotide
uuaaaacagcuuuuuacuu

SEQ ID NO: 92788 - RNA, 19 nt, Artificial Sequence
  Description of Artificial Sequence: Synthetic oligonucleotide
uggcuuugcagaggcuaau

SEQ ID NO: 92789 - RNA, 19 nt, Artificial Sequence
  Description of Artificial Sequence: Synthetic oligonucleotide
uggaugagaacauggaugu

SEQ ID NO: 92790 - RNA, 19 nt, Artificial Sequence
  Description of Artificial Sequence: Synthetic oligonucleotide
ugauuauauuuauccugcu

SEQ ID NO: 92791 - RNA, 19 nt, Artificial Sequence
  Description of Artificial Sequence: Synthetic oligonucleotide
uggagccaguguuacagca

SEQ ID NO: 92792 - RNA, 19 nt, Artificial Sequence
  Description of Artificial Sequence: Synthetic oligonucleotide
auucucaguauuugaggcu

SEQ ID NO: 92793 - RNA, 19 nt, Artificial Sequence
  Description of Artificial Sequence: Synthetic oligonucleotide
uacggcagcggaucuguaa

SEQ ID NO: 92794 - RNA, 19 nt, Artificial Sequence
  Description of Artificial Sequence: Synthetic oligonucleotide
agagcuccauccuccagug

SEQ ID NO: 92795 - RNA, 19 nt, Artificial Sequence
  Description of Artificial Sequence: Synthetic oligonucleotide
ggccugacaacccgaaggc

SEQ ID NO: 92796 - RNA, 19 nt, Artificial Sequence
  Description of Artificial Sequence: Synthetic oligonucleotide
cagaaggcuuguuuuggca

SEQ ID NO: 92797 - RNA, 19 nt, Artificial Sequence
  Description of Artificial Sequence: Synthetic oligonucleotide
aaacucugagaaauguggu

SEQ ID NO: 92798 - RNA, 19 nt, Artificial Sequence
  Description of Artificial Sequence: Synthetic oligonucleotide
ucuugacugaaaaugauuc

SEQ ID NO: 92799 - RNA, 19 nt, Artificial Sequence
  Description of Artificial Sequence: Synthetic oligonucleotide
cacgguauaacaauaugua

SEQ ID NO: 92800 - RNA, 19 nt, Artificial Sequence
  Description of Artificial Sequence: Synthetic oligonucleotide
augucgauuccauuaagca

SEQ ID NO: 92801 - RNA, 19 nt, Artificial Sequence
  Description of Artificial Sequence: Synthetic oligonucleotide
aauacuaacugacguuaag

SEQ ID NO: 92802 - RNA, 19 nt, Artificial Sequence
  Description of Artificial Sequence: Synthetic oligonucleotide
gucaugauuucgcgccaua

SEQ ID NO: 92803 - RNA, 19 nt, Artificial Sequence
  Description of Artificial Sequence: Synthetic oligonucleotide
aauaaagaugcaaaggaau

SEQ ID NO: 92804 - RNA, 19 nt, Artificial Sequence
  Description of Artificial Sequence: Synthetic oligonucleotide
ugacauuucuguauuaguu

SEQ ID NO: 92805 - RNA, 19 nt, Artificial Sequence
  Description of Artificial Sequence: Synthetic oligonucleotide
uaucuauugcuauguaaca

SEQ ID NO: 92806 - RNA, 19 nt, Artificial Sequence
  Description of Artificial Sequence: Synthetic oligonucleotide
aaauuaucccaaaacuuag

SEQ ID NO: 92807 - RNA, 19 nt, Artificial Sequence
  Description of Artificial Sequence: Synthetic oligonucleotide
gugguuuaaaacaacacau

SEQ ID NO: 92808 - RNA, 19 nt, Artificial Sequence
  Description of Artificial Sequence: Synthetic oligonucleotide
uugagggucaggaguccag

SEQ ID NO: 92809 - RNA, 19 nt, Artificial Sequence
  Description of Artificial Sequence: Synthetic oligonucleotide
ggcccagcauaacuggguc

SEQ ID NO: 92810 - RNA, 19 nt, Artificial Sequence
  Description of Artificial Sequence: Synthetic oligonucleotide
ccucugcucagggugucuc

SEQ ID NO: 92811 - RNA, 19 nt, Artificial Sequence
  Description of Artificial Sequence: Synthetic oligonucleotide
cagaggcugcaauguaggu

SEQ ID NO: 92812 - RNA, 19 nt, Artificial Sequence
  Description of Artificial Sequence: Synthetic oligonucleotide
uguucaccagagacauagg

SEQ ID NO: 92813 - RNA, 19 nt, Artificial Sequence
  Description of Artificial Sequence: Synthetic oligonucleotide
gcaucacuggggucacacu

SEQ ID NO: 92814 - RNA, 19 nt, Artificial Sequence
  Description of Artificial Sequence: Synthetic oligonucleotide
ucaugugguuguuuucugg

SEQ ID NO: 92815 - RNA, 19 nt, Artificial Sequence
  Description of Artificial Sequence: Synthetic oligonucleotide
gauucaauuccuccugggc

SEQ ID NO: 92816 - RNA, 19 nt, Artificial Sequence
  Description of Artificial Sequence: Synthetic oligonucleotide
cuauuggccaaaggcuaua

SEQ ID NO: 92817 - RNA, 19 nt, Artificial Sequence
  Description of Artificial Sequence: Synthetic oligonucleotide
acucauguaagccaugcga

SEQ ID NO: 92818 - RNA, 19 nt, Artificial Sequence
  Description of Artificial Sequence: Synthetic oligonucleotide
agccucucccacaaggcag

SEQ ID NO: 92819 - RNA, 19 nt, Artificial Sequence
  Description of Artificial Sequence: Synthetic oligonucleotide
gcuugcuucaucagagcua

SEQ ID NO: 92820 - RNA, 19 nt, Artificial Sequence
  Description of Artificial Sequence: Synthetic oligonucleotide
agcaaaaaagagagguugc

SEQ ID NO: 92821 - RNA, 19 nt, Artificial Sequence
  Description of Artificial Sequence: Synthetic oligonucleotide
cuagcaagaugaagucaca

SEQ ID NO: 92822 - RNA, 19 nt, Artificial Sequence
  Description of Artificial Sequence: Synthetic oligonucleotide
aaucuuuuguaaucgaauc

SEQ ID NO: 92823 - RNA, 19 nt, Artificial Sequence
  Description of Artificial Sequence: Synthetic oligonucleotide
caaaaaagugauaucucau

SEQ ID NO: 92824 - RNA, 19 nt, Artificial Sequence
  Description of Artificial Sequence: Synthetic oligonucleotide
ucacuuuggccauauucua

SEQ ID NO: 92825 - RNA, 19 nt, Artificial Sequence
  Description of Artificial Sequence: Synthetic oligonucleotide
auuuguuagaaguaaacca

SEQ ID NO: 92826 - RNA, 19 nt, Artificial Sequence
  Description of Artificial Sequence: Synthetic oligonucleotide
acaggucccaccagcucca

SEQ ID NO: 92827 - RNA, 19 nt, Artificial Sequence
  Description of Artificial Sequence: Synthetic oligonucleotide
augggagugaccaccucag

SEQ ID NO: 92828 - RNA, 19 nt, Artificial Sequence
  Description of Artificial Sequence: Synthetic oligonucleotide
guccagggaaaacagcuga

SEQ ID NO: 92829 - RNA, 19 nt, Artificial Sequence
  Description of Artificial Sequence: Synthetic oligonucleotide
aagaccaagauggugagcu

SEQ ID NO: 92830 - RNA, 19 nt, Artificial Sequence
  Description of Artificial Sequence: Synthetic oligonucleotide
ucugauugcuucaguuggu

SEQ ID NO: 92831 - RNA, 19 nt, Artificial Sequence
  Description of Artificial Sequence: Synthetic oligonucleotide
ucaucaacuauuuucccuu

SEQ ID NO: 92832 - RNA, 19 nt, Artificial Sequence
  Description of Artificial Sequence: Synthetic oligonucleotide
ugacugcuguccugggaug

SEQ ID NO: 92833 - RNA, 19 nt, Artificial Sequence
  Description of Artificial Sequence: Synthetic oligonucleotide
ggccugcuaucuugaugau

SEQ ID NO: 92834 - RNA, 19 nt, Artificial Sequence
  Description of Artificial Sequence: Synthetic oligonucleotide
uagauugugaauaucagga

SEQ ID NO: 92835 - RNA, 19 nt, Artificial Sequence
  Description of Artificial Sequence: Synthetic oligonucleotide
aggcagggaucacugugga

SEQ ID NO: 92836 - RNA, 19 nt, Artificial Sequence
  Description of Artificial Sequence: Synthetic oligonucleotide
accaucuuagcaguugacc

SEQ ID NO: 92837 - RNA, 19 nt, Artificial Sequence
  Description of Artificial Sequence: Synthetic oligonucleotide
cuaacacaucuucuuuuca

SEQ ID NO: 92838 - RNA, 19 nt, Artificial Sequence
  Description of Artificial Sequence: Synthetic oligonucleotide
aauaucuaagaacuuuugc

SEQ ID NO: 92839 - RNA, 19 nt, Artificial Sequence
  Description of Artificial Sequence: Synthetic oligonucleotide
ccacugugacuaauggucc

SEQ ID NO: 92840 - RNA, 19 nt, Artificial Sequence
  Description of Artificial Sequence: Synthetic oligonucleotide
cuaauauuaagcuguuguu

SEQ ID NO: 92841 - RNA, 19 nt, Artificial Sequence
  Description of Artificial Sequence: Synthetic oligonucleotide
uuauauuuaucauauaucu

SEQ ID NO: 92842 - RNA, 19 nt, Artificial Sequence
  Description of Artificial Sequence: Synthetic oligonucleotide
uauggcuacaugguuauau

SEQ ID NO: 92843 - RNA, 19 nt, Artificial Sequence
  Description of Artificial Sequence: Synthetic oligonucleotide
uuaugcugugguugcguuc

SEQ ID NO: 92844 - RNA, 19 nt, Artificial Sequence
  Description of Artificial Sequence: Synthetic oligonucleotide
cgguuuuauuuacaguugc

SEQ ID NO: 92845 - RNA, 19 nt, Artificial Sequence
  Description of Artificial Sequence: Synthetic oligonucleotide
cuuuuacaaauauuugcug

SEQ ID NO: 92846 - RNA, 19 nt, Artificial Sequence
  Description of Artificial Sequence: Synthetic oligonucleotide
guaacauuugacuucuaag

SEQ ID NO: 92847 - RNA, 19 nt, Artificial Sequence
  Description of Artificial Sequence: Synthetic oligonucleotide
gguuuagaugccauuuaag

SEQ ID NO: 92848 - RNA, 19 nt, Artificial Sequence
  Description of Artificial Sequence: Synthetic oligonucleotide
gaacugagauggauagcuu

SEQ ID NO: 92849 - RNA, 19 nt, Artificial Sequence
  Description of Artificial Sequence: Synthetic oligonucleotide
uuuaaagcaucuuuuacuu

SEQ ID NO: 92850 - RNA, 19 nt, Artificial Sequence
  Description of Artificial Sequence: Synthetic oligonucleotide
ucuuaccauuuuuuaaaag

SEQ ID NO: 92851 - RNA, 19 nt, Artificial Sequence
  Description of Artificial Sequence: Synthetic oligonucleotide
guaugcagcuaaauucgaa

SEQ ID NO: 92852 - RNA, 19 nt, Artificial Sequence
  Description of Artificial Sequence: Synthetic oligonucleotide
agcuuuuggucuauauugu

SEQ ID NO: 92853 - RNA, 19 nt, Artificial Sequence
  Description of Artificial Sequence: Synthetic oligonucleotide
uuaauugccauugcuguaa

SEQ ID NO: 92854 - RNA, 19 nt, Artificial Sequence
  Description of Artificial Sequence: Synthetic oligonucleotide
aaucuuaaaaugaaugaau

SEQ ID NO: 92855 - RNA, 19 nt, Artificial Sequence
  Description of Artificial Sequence: Synthetic oligonucleotide
uaaaaauguuucauuuuac

SEQ ID NO: 92856 - RNA, 25 nt, Artificial Sequence
  Description of Artificial Sequence: Synthetic oligonucleotide
cuccugcauagaggguaccauucug

SEQ ID NO: 92857 - RNA, 25 nt, Artificial Sequence
  Description of Artificial Sequence: Synthetic oligonucleotide
gcgcugcugcaaguuacggaaugaa

SEQ ID NO: 92858 - RNA, 25 nt, Artificial Sequence
  Description of Artificial Sequence: Synthetic oligonucleotide
aaaauuagaacaacagaaacauggu

SEQ ID NO: 92859 - RNA, 25 nt, Artificial Sequence
  Description of Artificial Sequence: Synthetic oligonucleotide
uucucuugacacuucaguguuaggg

SEQ ID NO: 92860 - RNA, 25 nt, Artificial Sequence
  Description of Artificial Sequence: Synthetic oligonucleotide
gaacaucagcaagacccaucccagg

SEQ ID NO: 92861 - RNA, 25 nt, Artificial Sequence
  Description of Artificial Sequence: Synthetic oligonucleotide
gagaccuugaaggaagccuuugaaa

SEQ ID NO: 92862 - RNA, 25 nt, Artificial Sequence
  Description of Artificial Sequence: Synthetic oligonucleotide
agggagaaugaaggagucaucuuug

SEQ ID NO: 92863 - RNA, 25 nt, Artificial Sequence
  Description of Artificial Sequence: Synthetic oligonucleotide
gcaaaauagcuccugcagccuggga

SEQ ID NO: 92864 - RNA, 25 nt, Artificial Sequence
  Description of Artificial Sequence: Synthetic oligonucleotide
aaaggagacuaaaaaggaaaacaug

SEQ ID NO: 92865 - RNA, 25 nt, Artificial Sequence
  Description of Artificial Sequence: Synthetic oligonucleotide
guuccuucagucgucaaugcugacc

SEQ ID NO: 92866 - RNA, 25 nt, Artificial Sequence
  Description of Artificial Sequence: Synthetic oligonucleotide
cugcauuuuccugcuaauaucuggu

SEQ ID NO: 92867 - RNA, 25 nt, Artificial Sequence
  Description of Artificial Sequence: Synthetic oligonucleotide
uuccugugaguuaugcgccgaagaa

SEQ ID NO: 92868 - RNA, 25 nt, Artificial Sequence
  Description of Artificial Sequence: Synthetic oligonucleotide
aaauuuuucuagaagcuauccuugu

SEQ ID NO: 92869 - RNA, 25 nt, Artificial Sequence
  Description of Artificial Sequence: Synthetic oligonucleotide
ugaugagaaaaagcaaaaugacuca

SEQ ID NO: 92870 - RNA, 25 nt, Artificial Sequence
  Description of Artificial Sequence: Synthetic oligonucleotide
aguuauugcagagugcagcaaucgu

SEQ ID NO: 92871 - RNA, 25 nt, Artificial Sequence
  Description of Artificial Sequence: Synthetic oligonucleotide
ucgacuacaggaaguuccccaaacg

SEQ ID NO: 92872 - RNA, 25 nt, Artificial Sequence
  Description of Artificial Sequence: Synthetic oligonucleotide
ggugggcaaauaugugacagaacua

SEQ ID NO: 92873 - RNA, 25 nt, Artificial Sequence
  Description of Artificial Sequence: Synthetic oligonucleotide
agaccugucugauaauuucaucaca

SEQ ID NO: 92874 - RNA, 25 nt, Artificial Sequence
  Description of Artificial Sequence: Synthetic oligonucleotide
acacauaacgaaugaaucauuucaa

SEQ ID NO: 92875 - RNA, 25 nt, Artificial Sequence
  Description of Artificial Sequence: Synthetic oligonucleotide
agggcugcaaaaucucacuaaaaua

SEQ ID NO: 92876 - RNA, 25 nt, Artificial Sequence
  Description of Artificial Sequence: Synthetic oligonucleotide
aaaucuaaaccacaaccccaaugua

SEQ ID NO: 92877 - RNA, 25 nt, Artificial Sequence
  Description of Artificial Sequence: Synthetic oligonucleotide
acagcaccagaacggaaaucccggu

SEQ ID NO: 92878 - RNA, 25 nt, Artificial Sequence
  Description of Artificial Sequence: Synthetic oligonucleotide
uauacaaucaaauggcuugaauauc

SEQ ID NO: 92879 - RNA, 25 nt, Artificial Sequence
  Description of Artificial Sequence: Synthetic oligonucleotide
cacagacggggcauuccucaaccua

SEQ ID NO: 92880 - RNA, 25 nt, Artificial Sequence
  Description of Artificial Sequence: Synthetic oligonucleotide
aaaaaaccuaagggaguuacugcuu

SEQ ID NO: 92881 - RNA, 25 nt, Artificial Sequence
  Description of Artificial Sequence: Synthetic oligonucleotide
ugaagacaaccaguuaccccaaaua

SEQ ID NO: 92882 - RNA, 25 nt, Artificial Sequence
  Description of Artificial Sequence: Synthetic oligonucleotide
acccucugguuugccagagucuuug

SEQ ID NO: 92883 - RNA, 25 nt, Artificial Sequence
  Description of Artificial Sequence: Synthetic oligonucleotide
gacagaacuuagucuaauucaaaac

SEQ ID NO: 92884 - RNA, 25 nt, Artificial Sequence
  Description of Artificial Sequence: Synthetic oligonucleotide
caauauauacaacauaacuaaagag

SEQ ID NO: 92885 - RNA, 25 nt, Artificial Sequence
  Description of Artificial Sequence: Synthetic oligonucleotide
gggcauuucaagacuuauaaacuug

SEQ ID NO: 92886 - RNA, 25 nt, Artificial Sequence
  Description of Artificial Sequence: Synthetic oligonucleotide
gaaaaaucucuauuuggccuggaac

SEQ ID NO: 92887 - RNA, 25 nt, Artificial Sequence
  Description of Artificial Sequence: Synthetic oligonucleotide
cugcuauuuuaacaaaguuugcgag

SEQ ID NO: 92888 - RNA, 25 nt, Artificial Sequence
  Description of Artificial Sequence: Synthetic oligonucleotide
gaaaacuaacauagaagauggagua

SEQ ID NO: 92889 - RNA, 25 nt, Artificial Sequence
  Description of Artificial Sequence: Synthetic oligonucleotide
auuugaaacgcugacaaauuuggag

SEQ ID NO: 92890 - RNA, 25 nt, Artificial Sequence
  Description of Artificial Sequence: Synthetic oligonucleotide
guugcuaucacuaucuuucaauucu

SEQ ID NO: 92891 - RNA, 25 nt, Artificial Sequence
  Description of Artificial Sequence: Synthetic oligonucleotide
ucuuucacacgugccacccaaacug

SEQ ID NO: 92892 - RNA, 25 nt, Artificial Sequence
  Description of Artificial Sequence: Synthetic oligonucleotide
gccaagcucccuacgcaaacuuuuu

SEQ ID NO: 92893 - RNA, 25 nt, Artificial Sequence
  Description of Artificial Sequence: Synthetic oligonucleotide
ucugagcaacacccagaucaaauac

SEQ ID NO: 92894 - RNA, 25 nt, Artificial Sequence
  Description of Artificial Sequence: Synthetic oligonucleotide
cauuagugaagaagauuucaaggga

SEQ ID NO: 92895 - RNA, 25 nt, Artificial Sequence
  Description of Artificial Sequence: Synthetic oligonucleotide
auugauaaauuuaacauuacuagau

SEQ ID NO: 92896 - RNA, 25 nt, Artificial Sequence
  Description of Artificial Sequence: Synthetic oligonucleotide
uuuaagcgggaacuguccgaggugc

SEQ ID NO: 92897 - RNA, 25 nt, Artificial Sequence
  Description of Artificial Sequence: Synthetic oligonucleotide
cuucaaugccccauuuccaugcgug

SEQ ID NO: 92898 - RNA, 25 nt, Artificial Sequence
  Description of Artificial Sequence: Synthetic oligonucleotide
gccuugugaugguggugcuucaauu

SEQ ID NO: 92899 - RNA, 25 nt, Artificial Sequence
  Description of Artificial Sequence: Synthetic oligonucleotide
uaauauagaucguuuugcuuuucaa

SEQ ID NO: 92900 - RNA, 25 nt, Artificial Sequence
  Description of Artificial Sequence: Synthetic oligonucleotide
aaacuugacccaacuucgauaccua

SEQ ID NO: 92901 - RNA, 25 nt, Artificial Sequence
  Description of Artificial Sequence: Synthetic oligonucleotide
aaaccucucuagcacuucccucagg

SEQ ID NO: 92902 - RNA, 25 nt, Artificial Sequence
  Description of Artificial Sequence: Synthetic oligonucleotide
gaagauuaaugcugccugguuuaaa

SEQ ID NO: 92903 - RNA, 25 nt, Artificial Sequence
  Description of Artificial Sequence: Synthetic oligonucleotide
aaauaugccucaucugaaggugcug

SEQ ID NO: 92904 - RNA, 25 nt, Artificial Sequence
  Description of Artificial Sequence: Synthetic oligonucleotide
ggaucuugaauucaacuauuuagug

SEQ ID NO: 92905 - RNA, 25 nt, Artificial Sequence
  Description of Artificial Sequence: Synthetic oligonucleotide
gggagaaauagccucuggggcauuu

SEQ ID NO: 92906 - RNA, 25 nt, Artificial Sequence
  Description of Artificial Sequence: Synthetic oligonucleotide
uuuaacgaugcugccccgcuuagaa

SEQ ID NO: 92907 - RNA, 25 nt, Artificial Sequence
  Description of Artificial Sequence: Synthetic oligonucleotide
aauacuugacuugucuuuuaacuau

SEQ ID NO: 92908 - RNA, 25 nt, Artificial Sequence
  Description of Artificial Sequence: Synthetic oligonucleotide
uauaaaggggaguuauccacagcau

SEQ ID NO: 92909 - RNA, 25 nt, Artificial Sequence
  Description of Artificial Sequence: Synthetic oligonucleotide
uauuaauauuuccagaaacuucucu

SEQ ID NO: 92910 - RNA, 25 nt, Artificial Sequence
  Description of Artificial Sequence: Synthetic oligonucleotide
uaaacuuuugucucuacgggcauug

SEQ ID NO: 92911 - RNA, 25 nt, Artificial Sequence
  Description of Artificial Sequence: Synthetic oligonucleotide
gcauuuaagagguuauguguuccag

SEQ ID NO: 92912 - RNA, 25 nt, Artificial Sequence
  Description of Artificial Sequence: Synthetic oligonucleotide
ggaacucagagaagaugauuuccag

SEQ ID NO: 92913 - RNA, 25 nt, Artificial Sequence
  Description of Artificial Sequence: Synthetic oligonucleotide
gccccugaugcagcuuccaaacuua

SEQ ID NO: 92914 - RNA, 25 nt, Artificial Sequence
  Description of Artificial Sequence: Synthetic oligonucleotide
aucgacuaucaacuuggguauuaau

SEQ ID NO: 92915 - RNA, 25 nt, Artificial Sequence
  Description of Artificial Sequence: Synthetic oligonucleotide
uuuuauuaagcaaaucgauuucaaa

SEQ ID NO: 92916 - RNA, 25 nt, Artificial Sequence
  Description of Artificial Sequence: Synthetic oligonucleotide
acuuuuccaaaauuucuccaaucug

SEQ ID NO: 92917 - RNA, 25 nt, Artificial Sequence
  Description of Artificial Sequence: Synthetic oligonucleotide
ggaaauuauuuacuugucagaaaac

SEQ ID NO: 92918 - RNA, 25 nt, Artificial Sequence
  Description of Artificial Sequence: Synthetic oligonucleotide
cagaauaucaccguugguaaaagau

SEQ ID NO: 92919 - RNA, 25 nt, Artificial Sequence
  Description of Artificial Sequence: Synthetic oligonucleotide
uacccggcagaguuaugcaaauagu

SEQ ID NO: 92920 - RNA, 25 nt, Artificial Sequence
  Description of Artificial Sequence: Synthetic oligonucleotide
uuccucuuuucaacgucauauccgg

SEQ ID NO: 92921 - RNA, 25 nt, Artificial Sequence
  Description of Artificial Sequence: Synthetic oligonucleotide
gaaacgacgcucaacagauuuugag

SEQ ID NO: 92922 - RNA, 25 nt, Artificial Sequence
  Description of Artificial Sequence: Synthetic oligonucleotide
guuugacccacauucgaacuuuuau

SEQ ID NO: 92923 - RNA, 25 nt, Artificial Sequence
  Description of Artificial Sequence: Synthetic oligonucleotide
ucauuucacccguccuuuaauaaag

SEQ ID NO: 92924 - RNA, 25 nt, Artificial Sequence
  Description of Artificial Sequence: Synthetic oligonucleotide
gccacaaugugcugcuuauggaaaa

SEQ ID NO: 92925 - RNA, 25 nt, Artificial Sequence
  Description of Artificial Sequence: Synthetic oligonucleotide
agccuuagauuuaagccucaacagu

SEQ ID NO: 92926 - RNA, 25 nt, Artificial Sequence
  Description of Artificial Sequence: Synthetic oligonucleotide
uauuuucuucauugggccaaaccaa

SEQ ID NO: 92927 - RNA, 25 nt, Artificial Sequence
  Description of Artificial Sequence: Synthetic oligonucleotide
auuugaaaaucuuccugacauugcc

SEQ ID NO: 92928 - RNA, 25 nt, Artificial Sequence
  Description of Artificial Sequence: Synthetic oligonucleotide
cuguuuaaaucugucugcaaauagc

SEQ ID NO: 92929 - RNA, 25 nt, Artificial Sequence
  Description of Artificial Sequence: Synthetic oligonucleotide
caaugcucaaguguuaaguggaacu

SEQ ID NO: 92930 - RNA, 25 nt, Artificial Sequence
  Description of Artificial Sequence: Synthetic oligonucleotide
ugaauuuucagccauuccucauguc

SEQ ID NO: 92931 - RNA, 25 nt, Artificial Sequence
  Description of Artificial Sequence: Synthetic oligonucleotide
caaauauuuggauuugacaaacaau

SEQ ID NO: 92932 - RNA, 25 nt, Artificial Sequence
  Description of Artificial Sequence: Synthetic oligonucleotide
uagacuagacuuugauaaugcuagu

SEQ ID NO: 92933 - RNA, 25 nt, Artificial Sequence
  Description of Artificial Sequence: Synthetic oligonucleotide
ugcucuuacugaauuguccgacuug

SEQ ID NO: 92934 - RNA, 25 nt, Artificial Sequence
  Description of Artificial Sequence: Synthetic oligonucleotide
ggaaguucuagaucucagcuauaau

SEQ ID NO: 92935 - RNA, 25 nt, Artificial Sequence
  Description of Artificial Sequence: Synthetic oligonucleotide
uucacacuauuucagaauagcaggc

SEQ ID NO: 92936 - RNA, 25 nt, Artificial Sequence
  Description of Artificial Sequence: Synthetic oligonucleotide
cguaacacaucaucuagaauuuauu

SEQ ID NO: 92937 - RNA, 25 nt, Artificial Sequence
  Description of Artificial Sequence: Synthetic oligonucleotide
ucaaaauuucacaaaucuaaaaguu

SEQ ID NO: 92938 - RNA, 25 nt, Artificial Sequence
  Description of Artificial Sequence: Synthetic oligonucleotide
uuuaaacuugagccacaacaacauu

SEQ ID NO: 92939 - RNA, 25 nt, Artificial Sequence
  Description of Artificial Sequence: Synthetic oligonucleotide
uuauacuuuaacagauaaguauaac

SEQ ID NO: 92940 - RNA, 25 nt, Artificial Sequence
  Description of Artificial Sequence: Synthetic oligonucleotide
ccuggaaagcaagucccugguagaa

SEQ ID NO: 92941 - RNA, 25 nt, Artificial Sequence
  Description of Artificial Sequence: Synthetic oligonucleotide
auuaguuuucaguggcaaucgccuu

SEQ ID NO: 92942 - RNA, 25 nt, Artificial Sequence
  Description of Artificial Sequence: Synthetic oligonucleotide
ugacauuuuguggaaugaugaugac

SEQ ID NO: 92943 - RNA, 25 nt, Artificial Sequence
  Description of Artificial Sequence: Synthetic oligonucleotide
caacagguauaucuccauuuucaaa

SEQ ID NO: 92944 - RNA, 25 nt, Artificial Sequence
  Description of Artificial Sequence: Synthetic oligonucleotide
aggucucaagaaucugacacgucug

SEQ ID NO: 92945 - RNA, 25 nt, Artificial Sequence
  Description of Artificial Sequence: Synthetic oligonucleotide
ggauuuaucccuuaauaggcugaag

SEQ ID NO: 92946 - RNA, 25 nt, Artificial Sequence
  Description of Artificial Sequence: Synthetic oligonucleotide
gcacaucccaaaugaagcauuccuu

SEQ ID NO: 92947 - RNA, 25 nt, Artificial Sequence
  Description of Artificial Sequence: Synthetic oligonucleotide
uaauuugccagcgagucucacugaa

SEQ ID NO: 92948 - RNA, 25 nt, Artificial Sequence
  Description of Artificial Sequence: Synthetic oligonucleotide
acuacauauaaaugauaauauguua

SEQ ID NO: 92949 - RNA, 25 nt, Artificial Sequence
  Description of Artificial Sequence: Synthetic oligonucleotide
aaaguuuuuuaacuggacauuacuc

SEQ ID NO: 92950 - RNA, 25 nt, Artificial Sequence
  Description of Artificial Sequence: Synthetic oligonucleotide
ccagcaguuuccucgucucgaguug

SEQ ID NO: 92951 - RNA, 25 nt, Artificial Sequence
  Description of Artificial Sequence: Synthetic oligonucleotide
gcuugacuuacguggaaacaaacua

SEQ ID NO: 92952 - RNA, 25 nt, Artificial Sequence
  Description of Artificial Sequence: Synthetic oligonucleotide
acucuuuuuaacugauagccuaucu

SEQ ID NO: 92953 - RNA, 25 nt, Artificial Sequence
  Description of Artificial Sequence: Synthetic oligonucleotide
ugacuuuacaucuucccuucggaca

SEQ ID NO: 92954 - RNA, 25 nt, Artificial Sequence
  Description of Artificial Sequence: Synthetic oligonucleotide
acugcugcugagucauaacaggauu

SEQ ID NO: 92955 - RNA, 25 nt, Artificial Sequence
  Description of Artificial Sequence: Synthetic oligonucleotide
uucccaccuacccucuggcuuucuu

SEQ ID NO: 92956 - RNA, 25 nt, Artificial Sequence
  Description of Artificial Sequence: Synthetic oligonucleotide
uucugaagucaguagucugaagcac

SEQ ID NO: 92957 - RNA, 25 nt, Artificial Sequence
  Description of Artificial Sequence: Synthetic oligonucleotide
ccucgauuuaaguuccaaucugcua

SEQ ID NO: 92958 - RNA, 25 nt, Artificial Sequence
  Description of Artificial Sequence: Synthetic oligonucleotide
aaaaacaaucaacaaauccgcacuu

SEQ ID NO: 92959 - RNA, 25 nt, Artificial Sequence
  Description of Artificial Sequence: Synthetic oligonucleotide
ugaaacuaagaccaccaccaaauua

SEQ ID NO: 92960 - RNA, 25 nt, Artificial Sequence
  Description of Artificial Sequence: Synthetic oligonucleotide
aucuauguuggaacuacacggaaac

SEQ ID NO: 92961 - RNA, 25 nt, Artificial Sequence
  Description of Artificial Sequence: Synthetic oligonucleotide
ccccuuugaaugcaccugugacauu

SEQ ID NO: 92962 - RNA, 25 nt, Artificial Sequence
  Description of Artificial Sequence: Synthetic oligonucleotide
uggagauuuccgaagauggauggau

SEQ ID NO: 92963 - RNA, 25 nt, Artificial Sequence
  Description of Artificial Sequence: Synthetic oligonucleotide
ugaacaucugaaugucaaaauuccc

SEQ ID NO: 92964 - RNA, 25 nt, Artificial Sequence
  Description of Artificial Sequence: Synthetic oligonucleotide
cagacugguagaugucauuugugcc

SEQ ID NO: 92965 - RNA, 25 nt, Artificial Sequence
  Description of Artificial Sequence: Synthetic oligonucleotide
caguccuggggaucaaagagggaag

SEQ ID NO: 92966 - RNA, 25 nt, Artificial Sequence
  Description of Artificial Sequence: Synthetic oligonucleotide
gaguauugugagucuggagcuaaca

SEQ ID NO: 92967 - RNA, 25 nt, Artificial Sequence
  Description of Artificial Sequence: Synthetic oligonucleotide
aacuuguguuucagaugucacugca

SEQ ID NO: 92968 - RNA, 25 nt, Artificial Sequence
  Description of Artificial Sequence: Synthetic oligonucleotide
agugauauuauuuuucuucacguuc

SEQ ID NO: 92969 - RNA, 25 nt, Artificial Sequence
  Description of Artificial Sequence: Synthetic oligonucleotide
cuuuaucaccaccaugguuauguug

SEQ ID NO: 92970 - RNA, 25 nt, Artificial Sequence
  Description of Artificial Sequence: Synthetic oligonucleotide
ggcugcccuggcucaccauuuguuu

SEQ ID NO: 92971 - RNA, 25 nt, Artificial Sequence
  Description of Artificial Sequence: Synthetic oligonucleotide
uuacugggauguuugguuuauauau

SEQ ID NO: 92972 - RNA, 25 nt, Artificial Sequence
  Description of Artificial Sequence: Synthetic oligonucleotide
uaauguguguuuagcuaagguaaaa

SEQ ID NO: 92973 - RNA, 25 nt, Artificial Sequence
  Description of Artificial Sequence: Synthetic oligonucleotide
aggcuacaggucucuuuccacaucc

SEQ ID NO: 92974 - RNA, 25 nt, Artificial Sequence
  Description of Artificial Sequence: Synthetic oligonucleotide
ccaaacuuucuaugaugcuuacauu

SEQ ID NO: 92975 - RNA, 25 nt, Artificial Sequence
  Description of Artificial Sequence: Synthetic oligonucleotide
uucuuaugacaccaaagaugccucu

SEQ ID NO: 92976 - RNA, 25 nt, Artificial Sequence
  Description of Artificial Sequence: Synthetic oligonucleotide
uguuacugacugggugauaaaugag

SEQ ID NO: 92977 - RNA, 25 nt, Artificial Sequence
  Description of Artificial Sequence: Synthetic oligonucleotide
gcugcgcuaccaccuugaagagagc

SEQ ID NO: 92978 - RNA, 25 nt, Artificial Sequence
  Description of Artificial Sequence: Synthetic oligonucleotide
ccgagacaaaaacguucuccuuugu

SEQ ID NO: 92979 - RNA, 25 nt, Artificial Sequence
  Description of Artificial Sequence: Synthetic oligonucleotide
ucuagaggagagggauugggauccg

SEQ ID NO: 92980 - RNA, 25 nt, Artificial Sequence
  Description of Artificial Sequence: Synthetic oligonucleotide
gggauuggccaucaucgacaaccuc

SEQ ID NO: 92981 - RNA, 25 nt, Artificial Sequence
  Description of Artificial Sequence: Synthetic oligonucleotide
caugcagagcaucaaccaaagcaag

SEQ ID NO: 92982 - RNA, 25 nt, Artificial Sequence
  Description of Artificial Sequence: Synthetic oligonucleotide
gaaaacaguauuuguuuuaaccaaa

SEQ ID NO: 92983 - RNA, 25 nt, Artificial Sequence
  Description of Artificial Sequence: Synthetic oligonucleotide
aaaauaugcaaaaagcuggaacuuu

SEQ ID NO: 92984 - RNA, 25 nt, Artificial Sequence
  Description of Artificial Sequence: Synthetic oligonucleotide
uaaaacagcuuuuuacuuggcuuug

SEQ ID NO: 92985 - RNA, 25 nt, Artificial Sequence
  Description of Artificial Sequence: Synthetic oligonucleotide
gcagaggcuaauggaugagaacaug

SEQ ID NO: 92986 - RNA, 25 nt, Artificial Sequence
  Description of Artificial Sequence: Synthetic oligonucleotide
ggaugugauuauauuuauccugcug

SEQ ID NO: 92987 - RNA, 25 nt, Artificial Sequence
  Description of Artificial Sequence: Synthetic oligonucleotide
ggagccaguguuacagcauucucag

SEQ ID NO: 92988 - RNA, 25 nt, Artificial Sequence
  Description of Artificial Sequence: Synthetic oligonucleotide
guauuugaggcuacggcagcggauc

SEQ ID NO: 92989 - RNA, 25 nt, Artificial Sequence
  Description of Artificial Sequence: Synthetic oligonucleotide
cuguaagagcuccauccuccagugg

SEQ ID NO: 92990 - RNA, 25 nt, Artificial Sequence
  Description of Artificial Sequence: Synthetic oligonucleotide
gccugacaacccgaaggcagaaggc

SEQ ID NO: 92991 - RNA, 25 nt, Artificial Sequence
  Description of Artificial Sequence: Synthetic oligonucleotide
cuuguuuuggcaaacucugagaaau

SEQ ID NO: 92992 - RNA, 25 nt, Artificial Sequence
  Description of Artificial Sequence: Synthetic oligonucleotide
uguggucuugacugaaaaugauuca

SEQ ID NO: 92993 - RNA, 25 nt, Artificial Sequence
  Description of Artificial Sequence: Synthetic oligonucleotide
acgguauaacaauauguaugucgau

SEQ ID NO: 92994 - RNA, 25 nt, Artificial Sequence
  Description of Artificial Sequence: Synthetic oligonucleotide
uuccauuaagcaauacuaacugacg

SEQ ID NO: 92995 - RNA, 25 nt, Artificial Sequence
  Description of Artificial Sequence: Synthetic oligonucleotide
guuaagucaugauuucgcgccauaa

SEQ ID NO: 92996 - RNA, 25 nt, Artificial Sequence
  Description of Artificial Sequence: Synthetic oligonucleotide
auaaagaugcaaaggaaugacauuu

SEQ ID NO: 92997 - RNA, 25 nt, Artificial Sequence
  Description of Artificial Sequence: Synthetic oligonucleotide
ucuguauuaguuaucuauugcuaug

SEQ ID NO: 92998 - RNA, 25 nt, Artificial Sequence
  Description of Artificial Sequence: Synthetic oligonucleotide
guaacaaauuaucccaaaacuuagu

SEQ ID NO: 92999 - RNA, 25 nt, Artificial Sequence
  Description of Artificial Sequence: Synthetic oligonucleotide
ugguuuaaaacaacacauuugcugg

SEQ ID NO: 93000 - RNA, 25 nt, Artificial Sequence
  Description of Artificial Sequence: Synthetic oligonucleotide
aacacauuugcuggcccacaguuuu

SEQ ID NO: 93001 - RNA, 25 nt, Artificial Sequence
  Description of Artificial Sequence: Synthetic oligonucleotide
aaaauuagaacaacagaaacaugga

SEQ ID NO: 93002 - RNA, 25 nt, Artificial Sequence
  Description of Artificial Sequence: Synthetic oligonucleotide
aaaacauguuccuucagucgucaau

SEQ ID NO: 93003 - RNA, 25 nt, Artificial Sequence
  Description of Artificial Sequence: Synthetic oligonucleotide
ugcugaccugcauuuuccugcuaau

SEQ ID NO: 93004 - RNA, 25 nt, Artificial Sequence
  Description of Artificial Sequence: Synthetic oligonucleotide
uaucugguuccugugaguuaugcgc

SEQ ID NO: 93005 - RNA, 25 nt, Artificial Sequence
  Description of Artificial Sequence: Synthetic oligonucleotide
ccgaagaaaauuuuucuagaagcua

SEQ ID NO: 93006 - RNA, 25 nt, Artificial Sequence
  Description of Artificial Sequence: Synthetic oligonucleotide
auccuugugaugagaaaaagcaaaa

SEQ ID NO: 93007 - RNA, 25 nt, Artificial Sequence
  Description of Artificial Sequence: Synthetic oligonucleotide
augacucaguuauugcagagugcag

SEQ ID NO: 93008 - RNA, 25 nt, Artificial Sequence
  Description of Artificial Sequence: Synthetic oligonucleotide
gcaaucgucgacuacaggaaguucc

SEQ ID NO: 93009 - RNA, 25 nt, Artificial Sequence
  Description of Artificial Sequence: Synthetic oligonucleotide
cccaaacggugggcaaauaugugac

SEQ ID NO: 93010 - RNA, 25 nt, Artificial Sequence
  Description of Artificial Sequence: Synthetic oligonucleotide
cagaacuagaccugucugauaauuu

SEQ ID NO: 93011 - RNA, 25 nt, Artificial Sequence
  Description of Artificial Sequence: Synthetic oligonucleotide
ucaucacacacauaacgaaugaauc

SEQ ID NO: 93012 - RNA, 25 nt, Artificial Sequence
  Description of Artificial Sequence: Synthetic oligonucleotide
cauuucaagggcugcaaaaucucac

SEQ ID NO: 93013 - RNA, 25 nt, Artificial Sequence
  Description of Artificial Sequence: Synthetic oligonucleotide
cuaaaauaaaucuaaaccacaaccc

SEQ ID NO: 93014 - RNA, 25 nt, Artificial Sequence
  Description of Artificial Sequence: Synthetic oligonucleotide
ccaauguacagcaccagaacggaaa

SEQ ID NO: 93015 - RNA, 25 nt, Artificial Sequence
  Description of Artificial Sequence: Synthetic oligonucleotide
aucccgguauacaaucaaauggcuu

SEQ ID NO: 93016 - RNA, 25 nt, Artificial Sequence
  Description of Artificial Sequence: Synthetic oligonucleotide
ugaauaucacagacggggcauuccu

SEQ ID NO: 93017 - RNA, 25 nt, Artificial Sequence
  Description of Artificial Sequence: Synthetic oligonucleotide
ucaaccuaaaaaaccuaagggaguu

SEQ ID NO: 93018 - RNA, 25 nt, Artificial Sequence
  Description of Artificial Sequence: Synthetic oligonucleotide
uacugcuugaagacaaccaguuacc

SEQ ID NO: 93019 - RNA, 25 nt, Artificial Sequence
  Description of Artificial Sequence: Synthetic oligonucleotide
cccaaauacccucugguuugccaga

SEQ ID NO: 93020 - RNA, 25 nt, Artificial Sequence
  Description of Artificial Sequence: Synthetic oligonucleotide
agucuuugacagaacuuagucuaau

SEQ ID NO: 93021 - RNA, 25 nt, Artificial Sequence
  Description of Artificial Sequence: Synthetic oligonucleotide
uucaaaacaauauauacaacauaac

SEQ ID NO: 93022 - RNA, 25 nt, Artificial Sequence
  Description of Artificial Sequence: Synthetic oligonucleotide
cuaaagagggcauuucaagacuuau

SEQ ID NO: 93023 - RNA, 25 nt, Artificial Sequence
  Description of Artificial Sequence: Synthetic oligonucleotide
uaaacuugaaaaaucucuauuuggc

SEQ ID NO: 93024 - RNA, 25 nt, Artificial Sequence
  Description of Artificial Sequence: Synthetic oligonucleotide
ccuggaacugcuauuuuaacaaagu

SEQ ID NO: 93025 - RNA, 25 nt, Artificial Sequence
  Description of Artificial Sequence: Synthetic oligonucleotide
uuugcgagaaaacuaacauagaaga

SEQ ID NO: 93026 - RNA, 25 nt, Artificial Sequence
  Description of Artificial Sequence: Synthetic oligonucleotide
auggaguauuugaaacgcugacaaa

SEQ ID NO: 93027 - RNA, 25 nt, Artificial Sequence
  Description of Artificial Sequence: Synthetic oligonucleotide
auuuggaguugcuaucacuaucuuu

SEQ ID NO: 93028 - RNA, 25 nt, Artificial Sequence
  Description of Artificial Sequence: Synthetic oligonucleotide
ucaauucucuuucacacgugccacc

SEQ ID NO: 93029 - RNA, 25 nt, Artificial Sequence
  Description of Artificial Sequence: Synthetic oligonucleotide
ccaaacugccaagcucccuacgcaa

SEQ ID NO: 93030 - RNA, 25 nt, Artificial Sequence
  Description of Artificial Sequence: Synthetic oligonucleotide
aacuuuuucugagcaacacccagau

SEQ ID NO: 93031 - RNA, 25 nt, Artificial Sequence
  Description of Artificial Sequence: Synthetic oligonucleotide
ucaaauacauuagugaagaagauuu

SEQ ID NO: 93032 - RNA, 25 nt, Artificial Sequence
  Description of Artificial Sequence: Synthetic oligonucleotide
ucaagggauugauaaauuuaacauu

SEQ ID NO: 93033 - RNA, 25 nt, Artificial Sequence
  Description of Artificial Sequence: Synthetic oligonucleotide
uacuagauuuaagcgggaacugucc

SEQ ID NO: 93034 - RNA, 25 nt, Artificial Sequence
  Description of Artificial Sequence: Synthetic oligonucleotide
cgaggugcuucaaugccccauuucc

SEQ ID NO: 93035 - RNA, 25 nt, Artificial Sequence
  Description of Artificial Sequence: Synthetic oligonucleotide
caugcgugccuugugaugguggugc

SEQ ID NO: 93036 - RNA, 25 nt, Artificial Sequence
  Description of Artificial Sequence: Synthetic oligonucleotide
cuucaauuaauauagaucguuuugc

SEQ ID NO: 93037 - RNA, 25 nt, Artificial Sequence
  Description of Artificial Sequence: Synthetic oligonucleotide
cuuuucaaaacuugacccaacuucg

SEQ ID NO: 93038 - RNA, 25 nt, Artificial Sequence
  Description of Artificial Sequence: Synthetic oligonucleotide
gauaccuaaaccucucuagcacuuc

SEQ ID NO: 93039 - RNA, 25 nt, Artificial Sequence
  Description of Artificial Sequence: Synthetic oligonucleotide
cccucaggaagauuaaugcugccug

SEQ ID NO: 93040 - RNA, 25 nt, Artificial Sequence
  Description of Artificial Sequence: Synthetic oligonucleotide
gguuuaaaaauaugccucaucugaa

SEQ ID NO: 93041 - RNA, 25 nt, Artificial Sequence
  Description of Artificial Sequence: Synthetic oligonucleotide
aggugcuggaucuugaauucaacua

SEQ ID NO: 93042 - RNA, 25 nt, Artificial Sequence
  Description of Artificial Sequence: Synthetic oligonucleotide
auuuagugggagaaauagccucugg

SEQ ID NO: 93043 - RNA, 25 nt, Artificial Sequence
  Description of Artificial Sequence: Synthetic oligonucleotide
gggcauuuuuaacgaugcugccccg

SEQ ID NO: 93044 - RNA, 25 nt, Artificial Sequence
  Description of Artificial Sequence: Synthetic oligonucleotide
gcuuagaaauacuugacuugucuuu

SEQ ID NO: 93045 - RNA, 25 nt, Artificial Sequence
  Description of Artificial Sequence: Synthetic oligonucleotide
uuaacuauauaaaggggaguuaucc

SEQ ID NO: 93046 - RNA, 25 nt, Artificial Sequence
  Description of Artificial Sequence: Synthetic oligonucleotide
cacagcauauuaauauuuccagaaa

SEQ ID NO: 93047 - RNA, 25 nt, Artificial Sequence
  Description of Artificial Sequence: Synthetic oligonucleotide
acuucucuaaacuuuugucucuacg

SEQ ID NO: 93048 - RNA, 25 nt, Artificial Sequence
  Description of Artificial Sequence: Synthetic oligonucleotide
gggcauugcauuuaagagguuaugu

SEQ ID NO: 93049 - RNA, 25 nt, Artificial Sequence
  Description of Artificial Sequence: Synthetic oligonucleotide
uguuccaggaacucagagaagauga

SEQ ID NO: 93050 - RNA, 25 nt, Artificial Sequence
  Description of Artificial Sequence: Synthetic oligonucleotide
auuuccagccccugaugcagcuucc

SEQ ID NO: 93051 - RNA, 25 nt, Artificial Sequence
  Description of Artificial Sequence: Synthetic oligonucleotide
caaacuuaucgacuaucaacuuggg

SEQ ID NO: 93052 - RNA, 25 nt, Artificial Sequence
  Description of Artificial Sequence: Synthetic oligonucleotide
guauuaauuuuauuaagcaaaucga

SEQ ID NO: 93053 - RNA, 25 nt, Artificial Sequence
  Description of Artificial Sequence: Synthetic oligonucleotide
auuucaaacuuuuccaaaauuucuc

SEQ ID NO: 93054 - RNA, 25 nt, Artificial Sequence
  Description of Artificial Sequence: Synthetic oligonucleotide
ccaaucuggaaauuauuuacuuguc

SEQ ID NO: 93055 - RNA, 25 nt, Artificial Sequence
  Description of Artificial Sequence: Synthetic oligonucleotide
cagaaaacagaauaucaccguuggu

SEQ ID NO: 93056 - RNA, 25 nt, Artificial Sequence
  Description of Artificial Sequence: Synthetic oligonucleotide
uaaaagauacccggcagaguuaugc

SEQ ID NO: 93057 - RNA, 25 nt, Artificial Sequence
  Description of Artificial Sequence: Synthetic oligonucleotide
caaauaguuccucuuuucaacguca

SEQ ID NO: 93058 - RNA, 25 nt, Artificial Sequence
  Description of Artificial Sequence: Synthetic oligonucleotide
auauccggaaacgacgcucaacaga

SEQ ID NO: 93059 - RNA, 25 nt, Artificial Sequence
  Description of Artificial Sequence: Synthetic oligonucleotide
auuuugaguuugacccacauucgaa

SEQ ID NO: 93060 - RNA, 25 nt, Artificial Sequence
  Description of Artificial Sequence: Synthetic oligonucleotide
acuuuuaucauuucacccguccuuu

SEQ ID NO: 93061 - RNA, 25 nt, Artificial Sequence
  Description of Artificial Sequence: Synthetic oligonucleotide
uaauaaagccacaaugugcugcuua

SEQ ID NO: 93062 - RNA, 25 nt, Artificial Sequence
  Description of Artificial Sequence: Synthetic oligonucleotide
auggaaaagccuuagauuuaagccu

SEQ ID NO: 93063 - RNA, 25 nt, Artificial Sequence
  Description of Artificial Sequence: Synthetic oligonucleotide
ucaacaguauuuucuucauugggcc

SEQ ID NO: 93064 - RNA, 25 nt, Artificial Sequence
  Description of Artificial Sequence: Synthetic oligonucleotide
caaaccaauuugaaaaucuuccuga

SEQ ID NO: 93065 - RNA, 25 nt, Artificial Sequence
  Description of Artificial Sequence: Synthetic oligonucleotide
acauugccuguuuaaaucugucugc

SEQ ID NO: 93066 - RNA, 25 nt, Artificial Sequence
  Description of Artificial Sequence: Synthetic oligonucleotide
caaauagcaaugcucaaguguuaag

SEQ ID NO: 93067 - RNA, 25 nt, Artificial Sequence
  Description of Artificial Sequence: Synthetic oligonucleotide
guggaacugaauuuucagccauucc

SEQ ID NO: 93068 - RNA, 25 nt, Artificial Sequence
  Description of Artificial Sequence: Synthetic oligonucleotide
cucaugucaaauauuuggauuugac

SEQ ID NO: 93069 - RNA, 25 nt, Artificial Sequence
  Description of Artificial Sequence: Synthetic oligonucleotide
caaacaauagacuagacuuugauaa

SEQ ID NO: 93070 - RNA, 25 nt, Artificial Sequence
  Description of Artificial Sequence: Synthetic oligonucleotide
augcuagugcucuuacugaauuguc

SEQ ID NO: 93071 - RNA, 25 nt, Artificial Sequence
  Description of Artificial Sequence: Synthetic oligonucleotide
ccgacuuggaaguucuagaucucag

SEQ ID NO: 93072 - RNA, 25 nt, Artificial Sequence
  Description of Artificial Sequence: Synthetic oligonucleotide
gcuauaauucacacuauuucagaau

SEQ ID NO: 93073 - RNA, 25 nt, Artificial Sequence
  Description of Artificial Sequence: Synthetic oligonucleotide
uagcaggcguaacacaucaucuaga

SEQ ID NO: 93074 - RNA, 25 nt, Artificial Sequence
  Description of Artificial Sequence: Synthetic oligonucleotide
aauuuauucaaaauuucacaaaucu

SEQ ID NO: 93075 - RNA, 25 nt, Artificial Sequence
  Description of Artificial Sequence: Synthetic oligonucleotide
uaaaaguuuuaaacuugagccacaa

SEQ ID NO: 93076 - RNA, 25 nt, Artificial Sequence
  Description of Artificial Sequence: Synthetic oligonucleotide
acaacauuuauacuuuaacagauaa

SEQ ID NO: 93077 - RNA, 25 nt, Artificial Sequence
  Description of Artificial Sequence: Synthetic oligonucleotide
aguauaaccuggaaagcaagucccu

SEQ ID NO: 93078 - RNA, 25 nt, Artificial Sequence
  Description of Artificial Sequence: Synthetic oligonucleotide
ugguagaauuaguuuucaguggcaa

SEQ ID NO: 93079 - RNA, 25 nt, Artificial Sequence
  Description of Artificial Sequence: Synthetic oligonucleotide
aucgccuugacauuuuguggaauga

SEQ ID NO: 93080 - RNA, 25 nt, Artificial Sequence
  Description of Artificial Sequence: Synthetic oligonucleotide
augaugacaacagguauaucuccau

SEQ ID NO: 93081 - RNA, 25 nt, Artificial Sequence
  Description of Artificial Sequence: Synthetic oligonucleotide
uuuucaaaggucucaagaaucugac

SEQ ID NO: 93082 - RNA, 25 nt, Artificial Sequence
  Description of Artificial Sequence: Synthetic oligonucleotide
cacgucuggauuuaucccuuaauag

SEQ ID NO: 93083 - RNA, 25 nt, Artificial Sequence
  Description of Artificial Sequence: Synthetic oligonucleotide
ggcugaagcacaucccaaaugaagc

SEQ ID NO: 93084 - RNA, 25 nt, Artificial Sequence
  Description of Artificial Sequence: Synthetic oligonucleotide
cauuccuuaauuugccagcgagucu

SEQ ID NO: 93085 - RNA, 25 nt, Artificial Sequence
  Description of Artificial Sequence: Synthetic oligonucleotide
ucacugaacuacauauaaaugauaa

SEQ ID NO: 93086 - RNA, 25 nt, Artificial Sequence
  Description of Artificial Sequence: Synthetic oligonucleotide
auauguuaaaguuuuuuaacuggac

SEQ ID NO: 93087 - RNA, 25 nt, Artificial Sequence
  Description of Artificial Sequence: Synthetic oligonucleotide
cauuacuccagcaguuuccucgucu

SEQ ID NO: 93088 - RNA, 25 nt, Artificial Sequence
  Description of Artificial Sequence: Synthetic oligonucleotide
ucgaguugcuugacuuacguggaaa

SEQ ID NO: 93089 - RNA, 25 nt, Artificial Sequence
  Description of Artificial Sequence: Synthetic oligonucleotide
acaaacuacucuuuuuaacugauag

SEQ ID NO: 93090 - RNA, 25 nt, Artificial Sequence
  Description of Artificial Sequence: Synthetic oligonucleotide
gccuaucugacuuuacaucuucccu

SEQ ID NO: 93091 - RNA, 25 nt, Artificial Sequence
  Description of Artificial Sequence: Synthetic oligonucleotide
uucggacacugcugcugagucauaa

SEQ ID NO: 93092 - RNA, 25 nt, Artificial Sequence
  Description of Artificial Sequence: Synthetic oligonucleotide
acaggauuucccaccuacccucugg

SEQ ID NO: 93093 - RNA, 25 nt, Artificial Sequence
  Description of Artificial Sequence: Synthetic oligonucleotide
gcuuucuuucugaagucaguagucu

SEQ ID NO: 93094 - RNA, 25 nt, Artificial Sequence
  Description of Artificial Sequence: Synthetic oligonucleotide
ugaagcaccucgauuuaaguuccaa

SEQ ID NO: 93095 - RNA, 25 nt, Artificial Sequence
  Description of Artificial Sequence: Synthetic oligonucleotide
aucugcuaaaaacaaucaacaaauc

SEQ ID NO: 93096 - RNA, 25 nt, Artificial Sequence
  Description of Artificial Sequence: Synthetic oligonucleotide
ccgcacuugaaacuaagaccaccac

SEQ ID NO: 93097 - RNA, 25 nt, Artificial Sequence
  Description of Artificial Sequence: Synthetic oligonucleotide
ccaaauuaucuauguuggaacuaca

SEQ ID NO: 93098 - RNA, 25 nt, Artificial Sequence
  Description of Artificial Sequence: Synthetic oligonucleotide
acggaaaccccuuugaaugcaccug

SEQ ID NO: 93099 - RNA, 25 nt, Artificial Sequence
  Description of Artificial Sequence: Synthetic oligonucleotide
gugacauuggagauuuccgaagaug

SEQ ID NO: 93100 - RNA, 25 nt, Artificial Sequence
  Description of Artificial Sequence: Synthetic oligonucleotide
ggauggaugaacaucugaaugucaa

SEQ ID NO: 93101 - RNA, 25 nt, Artificial Sequence
  Description of Artificial Sequence: Synthetic oligonucleotide
aaauucccagacugguagaugucau

SEQ ID NO: 93102 - RNA, 25 nt, Artificial Sequence
  Description of Artificial Sequence: Synthetic oligonucleotide
uuugugccaguccuggggaucaaag

SEQ ID NO: 93103 - RNA, 25 nt, Artificial Sequence
  Description of Artificial Sequence: Synthetic oligonucleotide
gagggaagaguauugugagucugga

SEQ ID NO: 93104 - RNA, 25 nt, Artificial Sequence
  Description of Artificial Sequence: Synthetic oligonucleotide
agcuaacaacuuguguuucagaugu

SEQ ID NO: 93105 - RNA, 25 nt, Artificial Sequence
  Description of Artificial Sequence: Synthetic oligonucleotide
ucacugcagugauauuauuuuucuu

SEQ ID NO: 93106 - RNA, 25 nt, Artificial Sequence
  Description of Artificial Sequence: Synthetic oligonucleotide
ucacguucuuuaucaccaccauggu

SEQ ID NO: 93107 - RNA, 25 nt, Artificial Sequence
  Description of Artificial Sequence: Synthetic oligonucleotide
uuauguuggcugcccuggcucacca

SEQ ID NO: 93108 - RNA, 25 nt, Artificial Sequence
  Description of Artificial Sequence: Synthetic oligonucleotide
auuuguuuuacugggauguuugguu

SEQ ID NO: 93109 - RNA, 25 nt, Artificial Sequence
  Description of Artificial Sequence: Synthetic oligonucleotide
uuauauauaauguguguuuagcuaa

SEQ ID NO: 93110 - RNA, 25 nt, Artificial Sequence
  Description of Artificial Sequence: Synthetic oligonucleotide
agguaaaaggcuacaggucucuuuc

SEQ ID NO: 93111 - RNA, 25 nt, Artificial Sequence
  Description of Artificial Sequence: Synthetic oligonucleotide
ccacaucccaaacuuucuaugaugc

SEQ ID NO: 93112 - RNA, 25 nt, Artificial Sequence
  Description of Artificial Sequence: Synthetic oligonucleotide
cuuacauuucuuaugacaccaaaga

SEQ ID NO: 93113 - RNA, 25 nt, Artificial Sequence
  Description of Artificial Sequence: Synthetic oligonucleotide
augccucuguuacugacugggugau

SEQ ID NO: 93114 - RNA, 25 nt, Artificial Sequence
  Description of Artificial Sequence: Synthetic oligonucleotide
uaaaugagcugcgcuaccaccuuga

SEQ ID NO: 93115 - RNA, 25 nt, Artificial Sequence
  Description of Artificial Sequence: Synthetic oligonucleotide
aagagagccgagacaaaaacguucu

SEQ ID NO: 93116 - RNA, 25 nt, Artificial Sequence
  Description of Artificial Sequence: Synthetic oligonucleotide
uccuuugucuagaggagagggauug

SEQ ID NO: 93117 - RNA, 25 nt, Artificial Sequence
  Description of Artificial Sequence: Synthetic oligonucleotide
gggauccgggauuggccaucaucga

SEQ ID NO: 93118 - RNA, 25 nt, Artificial Sequence
  Description of Artificial Sequence: Synthetic oligonucleotide
acaaccucaugcagagcaucaacca

SEQ ID NO: 93119 - RNA, 25 nt, Artificial Sequence
  Description of Artificial Sequence: Synthetic oligonucleotide
aaagcaagaaaacaguauuuguuuu

SEQ ID NO: 93120 - RNA, 25 nt, Artificial Sequence
  Description of Artificial Sequence: Synthetic oligonucleotide
uaaccaaaaaauaugcaaaaagcug

SEQ ID NO: 93121 - RNA, 25 nt, Artificial Sequence
  Description of Artificial Sequence: Synthetic oligonucleotide
ggaacuuuaaaacagcuuuuuacuu

SEQ ID NO: 93122 - RNA, 25 nt, Artificial Sequence
  Description of Artificial Sequence: Synthetic oligonucleotide
uggcuuugcagaggcuaauggauga

SEQ ID NO: 93123 - RNA, 25 nt, Artificial Sequence
  Description of Artificial Sequence: Synthetic oligonucleotide
agaacauggaugugauuauauuuau

SEQ ID NO: 93124 - RNA, 25 nt, Artificial Sequence
  Description of Artificial Sequence: Synthetic oligonucleotide
uccugcuggagccaguguuacagca

SEQ ID NO: 93125 - RNA, 25 nt, Artificial Sequence
  Description of Artificial Sequence: Synthetic oligonucleotide
auucucaguauuugaggcuacggca

SEQ ID NO: 93126 - RNA, 25 nt, Artificial Sequence
  Description of Artificial Sequence: Synthetic oligonucleotide
agcggaucuguaagagcuccauccu

SEQ ID NO: 93127 - RNA, 25 nt, Artificial Sequence
  Description of Artificial Sequence: Synthetic oligonucleotide
uccaguggccugacaacccgaaggc

SEQ ID NO: 93128 - RNA, 25 nt, Artificial Sequence
  Description of Artificial Sequence: Synthetic oligonucleotide
cagaaggcuuguuuuggcaaacucu

SEQ ID NO: 93129 - RNA, 25 nt, Artificial Sequence
  Description of Artificial Sequence: Synthetic oligonucleotide
ugagaaauguggucuugacugaaaa

SEQ ID NO: 93130 - RNA, 25 nt, Artificial Sequence
  Description of Artificial Sequence: Synthetic oligonucleotide
augauucacgguauaacaauaugua

SEQ ID NO: 93131 - RNA, 25 nt, Artificial Sequence
  Description of Artificial Sequence: Synthetic oligonucleotide
augucgauuccauuaagcaauacua

SEQ ID NO: 93132 - RNA, 25 nt, Artificial Sequence
  Description of Artificial Sequence: Synthetic oligonucleotide
aacugacguuaagucaugauuucgc

SEQ ID NO: 93133 - RNA, 25 nt, Artificial Sequence
  Description of Artificial Sequence: Synthetic oligonucleotide
cgccauaauaaagaugcaaaggaau

SEQ ID NO: 93134 - RNA, 25 nt, Artificial Sequence
  Description of Artificial Sequence: Synthetic oligonucleotide
ugacauuucuguauuaguuaucuau

SEQ ID NO: 93135 - RNA, 25 nt, Artificial Sequence
  Description of Artificial Sequence: Synthetic oligonucleotide
uugcuauguaacaaauuaucccaaa

SEQ ID NO: 93136 - RNA, 25 nt, Artificial Sequence
  Description of Artificial Sequence: Synthetic oligonucleotide
aacuuagugguuuaaaacaacacau

SEQ ID NO: 93137 - RNA, 25 nt, Artificial Sequence
  Description of Artificial Sequence: Synthetic oligonucleotide
uuugcuggcccacaguuuuugaggg

SEQ ID NO: 93138 - RNA, 25 nt, Artificial Sequence
  Description of Artificial Sequence: Synthetic oligonucleotide
gucaggaguccaggcccagcauaac

SEQ ID NO: 93139 - RNA, 25 nt, Artificial Sequence
  Description of Artificial Sequence: Synthetic oligonucleotide
cuggguccucugcucagggugucuc

SEQ ID NO: 93140 - RNA, 25 nt, Artificial Sequence
  Description of Artificial Sequence: Synthetic oligonucleotide
cagaggcugcaauguagguguucac

SEQ ID NO: 93141 - RNA, 25 nt, Artificial Sequence
  Description of Artificial Sequence: Synthetic oligonucleotide
ccagagacauaggcaucacuggggu

SEQ ID NO: 93142 - RNA, 25 nt, Artificial Sequence
  Description of Artificial Sequence: Synthetic oligonucleotide
ucacacucaugugguuguuuucugg

SEQ ID NO: 93143 - RNA, 25 nt, Artificial Sequence
  Description of Artificial Sequence: Synthetic oligonucleotide
gauucaauuccuccugggcuauugg

SEQ ID NO: 93144 - RNA, 25 nt, Artificial Sequence
  Description of Artificial Sequence: Synthetic oligonucleotide
gccaaaggcuauacucauguaagcc

SEQ ID NO: 93145 - RNA, 25 nt, Artificial Sequence
  Description of Artificial Sequence: Synthetic oligonucleotide
caugcgagccucucccacaaggcag

SEQ ID NO: 93146 - RNA, 25 nt, Artificial Sequence
  Description of Artificial Sequence: Synthetic oligonucleotide
gcuugcuucaucagagcuagcaaaa

SEQ ID NO: 93147 - RNA, 25 nt, Artificial Sequence
  Description of Artificial Sequence: Synthetic oligonucleotide
aaagagagguugcuagcaagaugaa

SEQ ID NO: 93148 - RNA, 25 nt, Artificial Sequence
  Description of Artificial Sequence: Synthetic oligonucleotide
agucacaaucuuuuguaaucgaauc

SEQ ID NO: 93149 - RNA, 25 nt, Artificial Sequence
  Description of Artificial Sequence: Synthetic oligonucleotide
caaaaaagugauaucucaucacuuu

SEQ ID NO: 93150 - RNA, 25 nt, Artificial Sequence
  Description of Artificial Sequence: Synthetic oligonucleotide
uggccauauucuauuuguuagaagu

SEQ ID NO: 93151 - RNA, 25 nt, Artificial Sequence
  Description of Artificial Sequence: Synthetic oligonucleotide
uaaaccacaggucccaccagcucca

SEQ ID NO: 93152 - RNA, 25 nt, Artificial Sequence
  Description of Artificial Sequence: Synthetic oligonucleotide
augggagugaccaccucaguccagg

SEQ ID NO: 93153 - RNA, 25 nt, Artificial Sequence
  Description of Artificial Sequence: Synthetic oligonucleotide
ggaaaacagcugaagaccaagaugg

SEQ ID NO: 93154 - RNA, 25 nt, Artificial Sequence
  Description of Artificial Sequence: Synthetic oligonucleotide
gugagcucugauugcuucaguuggu

SEQ ID NO: 93155 - RNA, 25 nt, Artificial Sequence
  Description of Artificial Sequence: Synthetic oligonucleotide
ucaucaacuauuuucccuugacugc

SEQ ID NO: 93156 - RNA, 25 nt, Artificial Sequence
  Description of Artificial Sequence: Synthetic oligonucleotide
cuguccugggauggccugcuaucuu

SEQ ID NO: 93157 - RNA, 25 nt, Artificial Sequence
  Description of Artificial Sequence: Synthetic oligonucleotide
ugaugauagauugugaauaucagga

SEQ ID NO: 93158 - RNA, 25 nt, Artificial Sequence
  Description of Artificial Sequence: Synthetic oligonucleotide
aggcagggaucacuguggaccaucu

SEQ ID NO: 93159 - RNA, 25 nt, Artificial Sequence
  Description of Artificial Sequence: Synthetic oligonucleotide
uuagcaguugaccuaacacaucuuc

SEQ ID NO: 93160 - RNA, 25 nt, Artificial Sequence
  Description of Artificial Sequence: Synthetic oligonucleotide
cuuuucaauaucuaagaacuuuugc

SEQ ID NO: 93161 - RNA, 25 nt, Artificial Sequence
  Description of Artificial Sequence: Synthetic oligonucleotide
ccacugugacuaaugguccuaauau

SEQ ID NO: 93162 - RNA, 25 nt, Artificial Sequence
  Description of Artificial Sequence: Synthetic oligonucleotide
uuaagcuguuguuuauauuuaucau

SEQ ID NO: 93163 - RNA, 25 nt, Artificial Sequence
  Description of Artificial Sequence: Synthetic oligonucleotide
uauaucuauggcuacaugguuauau

SEQ ID NO: 93164 - RNA, 25 nt, Artificial Sequence
  Description of Artificial Sequence: Synthetic oligonucleotide
uuaugcugugguugcguucgguuuu

SEQ ID NO: 93165 - RNA, 25 nt, Artificial Sequence
  Description of Artificial Sequence: Synthetic oligonucleotide
uauuuacaguugcuuuuacaaauau

SEQ ID NO: 93166 - RNA, 25 nt, Artificial Sequence
  Description of Artificial Sequence: Synthetic oligonucleotide
uuugcuguaacauuugacuucuaag

SEQ ID NO: 93167 - RNA, 25 nt, Artificial Sequence
  Description of Artificial Sequence: Synthetic oligonucleotide
gguuuagaugccauuuaagaacuga

SEQ ID NO: 93168 - RNA, 25 nt, Artificial Sequence
  Description of Artificial Sequence: Synthetic oligonucleotide
agauggauagcuuuuaaagcaucuu

SEQ ID NO: 93169 - RNA, 25 nt, Artificial Sequence
  Description of Artificial Sequence: Synthetic oligonucleotide
uuuacuucuuaccauuuuuuaaaag

SEQ ID NO: 93170 - RNA, 25 nt, Artificial Sequence
  Description of Artificial Sequence: Synthetic oligonucleotide
guaugcagcuaaauucgaagcuuuu

SEQ ID NO: 93171 - RNA, 25 nt, Artificial Sequence
  Description of Artificial Sequence: Synthetic oligonucleotide
uggucuauauuguuaauugccauug

SEQ ID NO: 93172 - RNA, 25 nt, Artificial Sequence
  Description of Artificial Sequence: Synthetic oligonucleotide
gcuguaaaucuuaaaaugaaugaau

SEQ ID NO: 93173 - RNA, 25 nt, Artificial Sequence
  Description of Artificial Sequence: Synthetic oligonucleotide
uaaaaauguuucauuuuacaaaaaa

SEQ ID NO: 93174 - RNA, 3868 nt, Homo sapiens
ggaggucuuguuuccggaagauguugcaaggcuguggugaaggcaggugcagccuagccuccugcucaagcuacacccuggcccuccacgcaugaggcccugcagaacucuggagauggugccuacaagggcagaaaaggacaagucggcagccgcuguccugagggcaccagcuguggugcaggagccaagaccugaggguggaaguguccucuuagaauggggagugcccagcaagguguacccgcuacuggugcuauccagaauucccaucucucccugcucucugccugagcucugggccuuagcuccucccugggcuugguagaggacaggugugaggcccucaugggauguaggcugucugagaggggaguggaaagaggaaggggugaaggagcugucugccauuugacuaugcaaauggccuuugacucaugggacccuguccuccucacugggggcaggguggaguggagggggagcuacuaggcugguauaaaaaucuuacuuccucuauucucugagccgcugcugccccugugggaagggaccucgagugugaagcauccuucccuguagcugcuguccagucugcccgccagacccucuggagaagccccugccccccagcauggguuucugccgcagcgcccugcacccgcugucucuccuggugcaggccaucaugcuggccaugacccuggcccuggguaccuugccugccuuccuacccugugagcuccagccccacggccuggugaacugcaacuggcuguuccugaagucugugccccacuucuccauggcagcaccccguggcaaugucaccagccuuuccuuguccuccaaccgcauccaccaccuccaugauucugacuuugcccaccugcccagccugcggcaucucaaccucaaguggaacugcccgccgguuggccucagccccaugcacuuccccugccacaugaccaucgagcccagcaccuucuuggcugugcccacccuggaagagcuaaaccugagcuacaacaacaucaugacugugccugcgcugcccaaaucccucauaucccugucccucagccauaccaacauccugaugcuagacucugccagccucgccggccugcaugcccugcgcuuccuauucauggacggcaacuguuauuacaagaaccccugcaggcaggcacuggagguggccccgggugcccuccuuggccugggcaaccucacccaccugucacucaaguacaacaaccucacuguggugccccgcaaccugccuuccagccuggaguaucugcuguuguccuacaaccgcaucgucaaacuggcgccugaggaccuggccaaucugaccgcccugcgugugcucgaugugggcggaaauugccgccgcugcgaccacgcucccaaccccugcauggagugcccucgucacuucccccagcuacaucccgauaccuucagccaccugagccgucuugaaggccugguguugaaggacaguucucucuccuggcugaaugccaguugguuccgugggcugggaaaccuccgagugcuggaccugagugagaacuuccucuacaaaugcaucacuaaaaccaaggccuuccagggccuaacacagcugcgcaagcuuaaccuguccuucaauuaccaaaagaggguguccuuugcccaccugucucuggccccuuccuucgggagccuggucgcccugaaggagcuggacaugcacggcaucuucuuccgcucacucgaugagaccacgcuccggccacuggcccgccugcccaugcuccagacucugcgucugcagaugaacuucaucaaccaggcccagcucggcaucuucagggccuucccuggccugcgcuacguggaccugucggacaaccgcaucagcggagcuucggagcugacagccaccaugggggaggcagauggaggggagaaggucuggcugcagccuggggaccuugcuccggccccaguggacacucccagcucugaagacuucaggcccaacugcagcacccucaacuucaccuuggaucugucacggaacaaccuggugaccgugcagccggagauguuugcccagcucucgcaccugcagugccugcgccugagccacaacugcaucucgcaggcagucaauggcucccaguuccugccgcugaccggucugcaggugcuagaccugucccacaauaagcuggaccucuaccacgagcacucauucacggagcuaccacgacuggaggcccuggaccucagcuacaacagccagcccuuuggcaugcagggcgugggccacaacuucagcuucguggcucaccugcgcacccugcgccaccucagccuggcccacaacaacauccacagccaagugucccagcagcucugcaguacgucgcugcgggcccuggacuucagcggcaaugcacugggccauaugugggccgagggagaccucuaucugcacuucuuccaaggccugagcgguuugaucuggcuggacuugucccagaaccgccugcacacccuccugccccaaacccugcgcaaccuccccaagagccuacaggugcugcgucuccgugacaauuaccuggccuucuuuaagugguggagccuccacuuccugcccaaacuggaaguccucgaccuggcaggaaaccagcugaaggcccugaccaauggcagccugccugcuggcacccggcuccggaggcuggaugucagcugcaacagcaucagcuucguggcccccggcuucuuuuccaaggccaaggagcugcgagagcucaaccuuagcgccaacgcccucaagacaguggaccacuccugguuugggccccuggcgagugcccugcaaauacuagauguaagcgccaacccucugcacugcgccuguggggcggccuuuauggacuuccugcuggaggugcaggcugccgugcccggucugcccagccgggugaaguguggcaguccgggccagcuccagggccucagcaucuuugcacaggaccugcgccucugccuggaugaggcccucuccugggacuguuucgcccucucgcugcuggcuguggcucugggccugggugugcccaugcugcaucaccucuguggcugggaccucugguacugcuuccaccugugccuggccuggcuucccuggcgggggcggcaaagugggcgagaugaggaugcccugcccuacgaugccuucguggucuucgacaaaacgcagagcgcaguggcagacuggguguacaacgagcuucgggggcagcuggaggagugccgugggcgcugggcacuccgccugugccuggaggaacgcgacuggcugccuggcaaaacccucuuugagaaccugugggccucggucuauggcagccgcaagacgcuguuugugcuggcccacacggaccgggucaguggucucuugcgcgccagcuuccugcuggcccagcagcgccugcuggaggaccgcaaggacgucguggugcuggugauccugagcccugacggccgccgcucccgcuaugugcggcugcgccagcgccucugccgccagaguguccuccucuggccccaccagcccaguggucagcgcagcuucugggcccagcugggcauggcccugaccagggacaaccaccacuucuauaaccggaacuucugccagggacccacggccgaauagccgugagccggaauccugcacggugccaccuccacacucaccucaccucugccugccuggucugacccuccccugcucgccucccucaccccacaccugacacagagcaggcacucaauaaaugcuaccgaaggc

SEQ ID NO: 93175 - RNA, 19 nt, Artificial Sequence
  Description of Artificial Sequence: Synthetic oligonucleotide
ggaggucuuguuuccggaa

SEQ ID NO: 93176 - RNA, 19 nt, Artificial Sequence
  Description of Artificial Sequence: Synthetic oligonucleotide
agauguugcaaggcugugg

SEQ ID NO: 93177 - RNA, 19 nt, Artificial Sequence
  Description of Artificial Sequence: Synthetic oligonucleotide
gugaaggcaggugcagccu

SEQ ID NO: 93178 - RNA, 19 nt, Artificial Sequence
  Description of Artificial Sequence: Synthetic oligonucleotide
uagccuccugcucaagcua

SEQ ID NO: 93179 - RNA, 19 nt, Artificial Sequence
  Description of Artificial Sequence: Synthetic oligonucleotide
acacccuggcccuccacgc

SEQ ID NO: 93180 - RNA, 19 nt, Artificial Sequence
  Description of Artificial Sequence: Synthetic oligonucleotide
caugaggcccugcagaacu

SEQ ID NO: 93181 - RNA, 19 nt, Artificial Sequence
  Description of Artificial Sequence: Synthetic oligonucleotide
ucuggagauggugccuaca

SEQ ID NO: 93182 - RNA, 19 nt, Artificial Sequence
  Description of Artificial Sequence: Synthetic oligonucleotide
aagggcagaaaaggacaag

SEQ ID NO: 93183 - RNA, 19 nt, Artificial Sequence
  Description of Artificial Sequence: Synthetic oligonucleotide
gucggcagccgcuguccug

SEQ ID NO: 93184 - RNA, 19 nt, Artificial Sequence
  Description of Artificial Sequence: Synthetic oligonucleotide
gagggcaccagcuguggug

SEQ ID NO: 93185 - RNA, 19 nt, Artificial Sequence
  Description of Artificial Sequence: Synthetic oligonucleotide
gcaggagccaagaccugag

SEQ ID NO: 93186 - RNA, 19 nt, Artificial Sequence
  Description of Artificial Sequence: Synthetic oligonucleotide
ggguggaaguguccucuua

SEQ ID NO: 93187 - RNA, 19 nt, Artificial Sequence
  Description of Artificial Sequence: Synthetic oligonucleotide
agaauggggagugcccagc

SEQ ID NO: 93188 - RNA, 19 nt, Artificial Sequence
  Description of Artificial Sequence: Synthetic oligonucleotide
caagguguacccgcuacug

SEQ ID NO: 93189 - RNA, 19 nt, Artificial Sequence
  Description of Artificial Sequence: Synthetic oligonucleotide
ggugcuauccagaauuccc

SEQ ID NO: 93190 - RNA, 19 nt, Artificial Sequence
  Description of Artificial Sequence: Synthetic oligonucleotide
caucucucccugcucucug

SEQ ID NO: 93191 - RNA, 19 nt, Artificial Sequence
  Description of Artificial Sequence: Synthetic oligonucleotide
gccugagcucugggccuua

SEQ ID NO: 93192 - RNA, 19 nt, Artificial Sequence
  Description of Artificial Sequence: Synthetic oligonucleotide
agcuccucccugggcuugg

SEQ ID NO: 93193 - RNA, 19 nt, Artificial Sequence
  Description of Artificial Sequence: Synthetic oligonucleotide
guagaggacaggugugagg

SEQ ID NO: 93194 - RNA, 19 nt, Artificial Sequence
  Description of Artificial Sequence: Synthetic oligonucleotide
gcccucaugggauguaggc

SEQ ID NO: 93195 - RNA, 19 nt, Artificial Sequence
  Description of Artificial Sequence: Synthetic oligonucleotide
cugucugagaggggagugg

SEQ ID NO: 93196 - RNA, 19 nt, Artificial Sequence
  Description of Artificial Sequence: Synthetic oligonucleotide
gaaagaggaaggggugaag

SEQ ID NO: 93197 - RNA, 19 nt, Artificial Sequence
  Description of Artificial Sequence: Synthetic oligonucleotide
ggagcugucugccauuuga

SEQ ID NO: 93198 - RNA, 19 nt, Artificial Sequence
  Description of Artificial Sequence: Synthetic oligonucleotide
acuaugcaaauggccuuug

SEQ ID NO: 93199 - RNA, 19 nt, Artificial Sequence
  Description of Artificial Sequence: Synthetic oligonucleotide
gacucaugggacccugucc

SEQ ID NO: 93200 - RNA, 19 nt, Artificial Sequence
  Description of Artificial Sequence: Synthetic oligonucleotide
cuccucacugggggcaggg

SEQ ID NO: 93201 - RNA, 19 nt, Artificial Sequence
  Description of Artificial Sequence: Synthetic oligonucleotide
guggaguggagggggagcu

SEQ ID NO: 93202 - RNA, 19 nt, Artificial Sequence
  Description of Artificial Sequence: Synthetic oligonucleotide
uacuaggcugguauaaaaa

SEQ ID NO: 93203 - RNA, 19 nt, Artificial Sequence
  Description of Artificial Sequence: Synthetic oligonucleotide
aucuuacuuccucuauucu

SEQ ID NO: 93204 - RNA, 19 nt, Artificial Sequence
  Description of Artificial Sequence: Synthetic oligonucleotide
ucugagccgcugcugcccc

SEQ ID NO: 93205 - RNA, 19 nt, Artificial Sequence
  Description of Artificial Sequence: Synthetic oligonucleotide
cugugggaagggaccucga

SEQ ID NO: 93206 - RNA, 19 nt, Artificial Sequence
  Description of Artificial Sequence: Synthetic oligonucleotide
agugugaagcauccuuccc

SEQ ID NO: 93207 - RNA, 19 nt, Artificial Sequence
  Description of Artificial Sequence: Synthetic oligonucleotide
cuguagcugcuguccaguc

SEQ ID NO: 93208 - RNA, 19 nt, Artificial Sequence
  Description of Artificial Sequence: Synthetic oligonucleotide
cugcccgccagacccucug

SEQ ID NO: 93209 - RNA, 19 nt, Artificial Sequence
  Description of Artificial Sequence: Synthetic oligonucleotide
ggagaagccccugcccccc

SEQ ID NO: 93210 - RNA, 19 nt, Artificial Sequence
  Description of Artificial Sequence: Synthetic oligonucleotide
cagcauggguuucugccgc

SEQ ID NO: 93211 - RNA, 19 nt, Artificial Sequence
  Description of Artificial Sequence: Synthetic oligonucleotide
cagcgcccugcacccgcug

SEQ ID NO: 93212 - RNA, 19 nt, Artificial Sequence
  Description of Artificial Sequence: Synthetic oligonucleotide
gucucuccuggugcaggcc

SEQ ID NO: 93213 - RNA, 19 nt, Artificial Sequence
  Description of Artificial Sequence: Synthetic oligonucleotide
caucaugcuggccaugacc

SEQ ID NO: 93214 - RNA, 19 nt, Artificial Sequence
  Description of Artificial Sequence: Synthetic oligonucleotide
ccuggcccuggguaccuug

SEQ ID NO: 93215 - RNA, 19 nt, Artificial Sequence
  Description of Artificial Sequence: Synthetic oligonucleotide
gccugccuuccuacccugu

SEQ ID NO: 93216 - RNA, 19 nt, Artificial Sequence
  Description of Artificial Sequence: Synthetic oligonucleotide
ugagcuccagccccacggc

SEQ ID NO: 93217 - RNA, 19 nt, Artificial Sequence
  Description of Artificial Sequence: Synthetic oligonucleotide
ccuggugaacugcaacugg

SEQ ID NO: 93218 - RNA, 19 nt, Artificial Sequence
  Description of Artificial Sequence: Synthetic oligonucleotide
gcuguuccugaagucugug

SEQ ID NO: 93219 - RNA, 19 nt, Artificial Sequence
  Description of Artificial Sequence: Synthetic oligonucleotide
gccccacuucuccauggca

SEQ ID NO: 93220 - RNA, 19 nt, Artificial Sequence
  Description of Artificial Sequence: Synthetic oligonucleotide
agcaccccguggcaauguc

SEQ ID NO: 93221 - RNA, 19 nt, Artificial Sequence
  Description of Artificial Sequence: Synthetic oligonucleotide
caccagccuuuccuugucc

SEQ ID NO: 93222 - RNA, 19 nt, Artificial Sequence
  Description of Artificial Sequence: Synthetic oligonucleotide
cuccaaccgcauccaccac

SEQ ID NO: 93223 - RNA, 19 nt, Artificial Sequence
  Description of Artificial Sequence: Synthetic oligonucleotide
ccuccaugauucugacuuu

SEQ ID NO: 93224 - RNA, 19 nt, Artificial Sequence
  Description of Artificial Sequence: Synthetic oligonucleotide
ugcccaccugcccagccug

SEQ ID NO: 93225 - RNA, 19 nt, Artificial Sequence
  Description of Artificial Sequence: Synthetic oligonucleotide
gcggcaucucaaccucaag

SEQ ID NO: 93226 - RNA, 19 nt, Artificial Sequence
  Description of Artificial Sequence: Synthetic oligonucleotide
guggaacugcccgccgguu

SEQ ID NO: 93227 - RNA, 19 nt, Artificial Sequence
  Description of Artificial Sequence: Synthetic oligonucleotide
uggccucagccccaugcac

SEQ ID NO: 93228 - RNA, 19 nt, Artificial Sequence
  Description of Artificial Sequence: Synthetic oligonucleotide
cuuccccugccacaugacc

SEQ ID NO: 93229 - RNA, 19 nt, Artificial Sequence
  Description of Artificial Sequence: Synthetic oligonucleotide
caucgagcccagcaccuuc

SEQ ID NO: 93230 - RNA, 19 nt, Artificial Sequence
  Description of Artificial Sequence: Synthetic oligonucleotide
cuuggcugugcccacccug

SEQ ID NO: 93231 - RNA, 19 nt, Artificial Sequence
  Description of Artificial Sequence: Synthetic oligonucleotide
ggaagagcuaaaccugagc

SEQ ID NO: 93232 - RNA, 19 nt, Artificial Sequence
  Description of Artificial Sequence: Synthetic oligonucleotide
cuacaacaacaucaugacu

SEQ ID NO: 93233 - RNA, 19 nt, Artificial Sequence
  Description of Artificial Sequence: Synthetic oligonucleotide
ugugccugcgcugcccaaa

SEQ ID NO: 93234 - RNA, 19 nt, Artificial Sequence
  Description of Artificial Sequence: Synthetic oligonucleotide
aucccucauaucccugucc

SEQ ID NO: 93235 - RNA, 19 nt, Artificial Sequence
  Description of Artificial Sequence: Synthetic oligonucleotide
ccucagccauaccaacauc

SEQ ID NO: 93236 - RNA, 19 nt, Artificial Sequence
  Description of Artificial Sequence: Synthetic oligonucleotide
ccugaugcuagacucugcc

SEQ ID NO: 93237 - RNA, 19 nt, Artificial Sequence
  Description of Artificial Sequence: Synthetic oligonucleotide
cagccucgccggccugcau

SEQ ID NO: 93238 - RNA, 19 nt, Artificial Sequence
  Description of Artificial Sequence: Synthetic oligonucleotide
ugcccugcgcuuccuauuc

SEQ ID NO: 93239 - RNA, 19 nt, Artificial Sequence
  Description of Artificial Sequence: Synthetic oligonucleotide
cauggacggcaacuguuau

SEQ ID NO: 93240 - RNA, 19 nt, Artificial Sequence
  Description of Artificial Sequence: Synthetic oligonucleotide
uuacaagaaccccugcagg

SEQ ID NO: 93241 - RNA, 19 nt, Artificial Sequence
  Description of Artificial Sequence: Synthetic oligonucleotide
gcaggcacuggagguggcc

SEQ ID NO: 93242 - RNA, 19 nt, Artificial Sequence
  Description of Artificial Sequence: Synthetic oligonucleotide
cccgggugcccuccuuggc

SEQ ID NO: 93243 - RNA, 19 nt, Artificial Sequence
  Description of Artificial Sequence: Synthetic oligonucleotide
ccugggcaaccucacccac

SEQ ID NO: 93244 - RNA, 19 nt, Artificial Sequence
  Description of Artificial Sequence: Synthetic oligonucleotide
ccugucacucaaguacaac

SEQ ID NO: 93245 - RNA, 19 nt, Artificial Sequence
  Description of Artificial Sequence: Synthetic oligonucleotide
caaccucacuguggugccc

SEQ ID NO: 93246 - RNA, 19 nt, Artificial Sequence
  Description of Artificial Sequence: Synthetic oligonucleotide
ccgcaaccugccuuccagc

SEQ ID NO: 93247 - RNA, 19 nt, Artificial Sequence
  Description of Artificial Sequence: Synthetic oligonucleotide
ccuggaguaucugcuguug

SEQ ID NO: 93248 - RNA, 19 nt, Artificial Sequence
  Description of Artificial Sequence: Synthetic oligonucleotide
guccuacaaccgcaucguc

SEQ ID NO: 93249 - RNA, 19 nt, Artificial Sequence
  Description of Artificial Sequence: Synthetic oligonucleotide
caaacuggcgccugaggac

SEQ ID NO: 93250 - RNA, 19 nt, Artificial Sequence
  Description of Artificial Sequence: Synthetic oligonucleotide
ccuggccaaucugaccgcc

SEQ ID NO: 93251 - RNA, 19 nt, Artificial Sequence
  Description of Artificial Sequence: Synthetic oligonucleotide
ccugcgugugcucgaugug

SEQ ID NO: 93252 - RNA, 19 nt, Artificial Sequence
  Description of Artificial Sequence: Synthetic oligonucleotide
gggcggaaauugccgccgc

SEQ ID NO: 93253 - RNA, 19 nt, Artificial Sequence
  Description of Artificial Sequence: Synthetic oligonucleotide
cugcgaccacgcucccaac

SEQ ID NO: 93254 - RNA, 19 nt, Artificial Sequence
  Description of Artificial Sequence: Synthetic oligonucleotide
ccccugcauggagugcccu

SEQ ID NO: 93255 - RNA, 19 nt, Artificial Sequence
  Description of Artificial Sequence: Synthetic oligonucleotide
ucgucacuucccccagcua

SEQ ID NO: 93256 - RNA, 19 nt, Artificial Sequence
  Description of Artificial Sequence: Synthetic oligonucleotide
acaucccgauaccuucagc

SEQ ID NO: 93257 - RNA, 19 nt, Artificial Sequence
  Description of Artificial Sequence: Synthetic oligonucleotide
ccaccugagccgucuugaa

SEQ ID NO: 93258 - RNA, 19 nt, Artificial Sequence
  Description of Artificial Sequence: Synthetic oligonucleotide
aggccugguguugaaggac

SEQ ID NO: 93259 - RNA, 19 nt, Artificial Sequence
  Description of Artificial Sequence: Synthetic oligonucleotide
caguucucucuccuggcug

SEQ ID NO: 93260 - RNA, 19 nt, Artificial Sequence
  Description of Artificial Sequence: Synthetic oligonucleotide
gaaugccaguugguuccgu

SEQ ID NO: 93261 - RNA, 19 nt, Artificial Sequence
  Description of Artificial Sequence: Synthetic oligonucleotide
ugggcugggaaaccuccga

SEQ ID NO: 93262 - RNA, 19 nt, Artificial Sequence
  Description of Artificial Sequence: Synthetic oligonucleotide
agugcuggaccugagugag

SEQ ID NO: 93263 - RNA, 19 nt, Artificial Sequence
  Description of Artificial Sequence: Synthetic oligonucleotide
gaacuuccucuacaaaugc

SEQ ID NO: 93264 - RNA, 19 nt, Artificial Sequence
  Description of Artificial Sequence: Synthetic oligonucleotide
caucacuaaaaccaaggcc

SEQ ID NO: 93265 - RNA, 19 nt, Artificial Sequence
  Description of Artificial Sequence: Synthetic oligonucleotide
cuuccagggccuaacacag

SEQ ID NO: 93266 - RNA, 19 nt, Artificial Sequence
  Description of Artificial Sequence: Synthetic oligonucleotide
gcugcgcaagcuuaaccug

SEQ ID NO: 93267 - RNA, 19 nt, Artificial Sequence
  Description of Artificial Sequence: Synthetic oligonucleotide
guccuucaauuaccaaaag

SEQ ID NO: 93268 - RNA, 19 nt, Artificial Sequence
  Description of Artificial Sequence: Synthetic oligonucleotide
gaggguguccuuugcccac

SEQ ID NO: 93269 - RNA, 19 nt, Artificial Sequence
  Description of Artificial Sequence: Synthetic oligonucleotide
ccugucucuggccccuucc

SEQ ID NO: 93270 - RNA, 19 nt, Artificial Sequence
  Description of Artificial Sequence: Synthetic oligonucleotide
cuucgggagccuggucgcc

SEQ ID NO: 93271 - RNA, 19 nt, Artificial Sequence
  Description of Artificial Sequence: Synthetic oligonucleotide
ccugaaggagcuggacaug

SEQ ID NO: 93272 - RNA, 19 nt, Artificial Sequence
  Description of Artificial Sequence: Synthetic oligonucleotide
gcacggcaucuucuuccgc

SEQ ID NO: 93273 - RNA, 19 nt, Artificial Sequence
  Description of Artificial Sequence: Synthetic oligonucleotide
cucacucgaugagaccacg

SEQ ID NO: 93274 - RNA, 19 nt, Artificial Sequence
  Description of Artificial Sequence: Synthetic oligonucleotide
gcuccggccacuggcccgc

SEQ ID NO: 93275 - RNA, 19 nt, Artificial Sequence
  Description of Artificial Sequence: Synthetic oligonucleotide
ccugcccaugcuccagacu

SEQ ID NO: 93276 - RNA, 19 nt, Artificial Sequence
  Description of Artificial Sequence: Synthetic oligonucleotide
ucugcgucugcagaugaac

SEQ ID NO: 93277 - RNA, 19 nt, Artificial Sequence
  Description of Artificial Sequence: Synthetic oligonucleotide
cuucaucaaccaggcccag

SEQ ID NO: 93278 - RNA, 19 nt, Artificial Sequence
  Description of Artificial Sequence: Synthetic oligonucleotide
gcucggcaucuucagggcc

SEQ ID NO: 93279 - RNA, 19 nt, Artificial Sequence
  Description of Artificial Sequence: Synthetic oligonucleotide
cuucccuggccugcgcuac

SEQ ID NO: 93280 - RNA, 19 nt, Artificial Sequence
  Description of Artificial Sequence: Synthetic oligonucleotide
cguggaccugucggacaac

SEQ ID NO: 93281 - RNA, 19 nt, Artificial Sequence
  Description of Artificial Sequence: Synthetic oligonucleotide
ccgcaucagcggagcuucg

SEQ ID NO: 93282 - RNA, 19 nt, Artificial Sequence
  Description of Artificial Sequence: Synthetic oligonucleotide
ggagcugacagccaccaug

SEQ ID NO: 93283 - RNA, 19 nt, Artificial Sequence
  Description of Artificial Sequence: Synthetic oligonucleotide
gggggaggcagauggaggg

SEQ ID NO: 93284 - RNA, 19 nt, Artificial Sequence
  Description of Artificial Sequence: Synthetic oligonucleotide
ggagaaggucuggcugcag

SEQ ID NO: 93285 - RNA, 19 nt, Artificial Sequence
  Description of Artificial Sequence: Synthetic oligonucleotide
gccuggggaccuugcuccg

SEQ ID NO: 93286 - RNA, 19 nt, Artificial Sequence
  Description of Artificial Sequence: Synthetic oligonucleotide
ggccccaguggacacuccc

SEQ ID NO: 93287 - RNA, 19 nt, Artificial Sequence
  Description of Artificial Sequence: Synthetic oligonucleotide
cagcucugaagacuucagg

SEQ ID NO: 93288 - RNA, 19 nt, Artificial Sequence
  Description of Artificial Sequence: Synthetic oligonucleotide
gcccaacugcagcacccuc

SEQ ID NO: 93289 - RNA, 19 nt, Artificial Sequence
  Description of Artificial Sequence: Synthetic oligonucleotide
caacuucaccuuggaucug

SEQ ID NO: 93290 - RNA, 19 nt, Artificial Sequence
  Description of Artificial Sequence: Synthetic oligonucleotide
gucacggaacaaccuggug

SEQ ID NO: 93291 - RNA, 19 nt, Artificial Sequence
  Description of Artificial Sequence: Synthetic oligonucleotide
gaccgugcagccggagaug

SEQ ID NO: 93292 - RNA, 19 nt, Artificial Sequence
  Description of Artificial Sequence: Synthetic oligonucleotide
guuugcccagcucucgcac

SEQ ID NO: 93293 - RNA, 19 nt, Artificial Sequence
  Description of Artificial Sequence: Synthetic oligonucleotide
ccugcagugccugcgccug

SEQ ID NO: 93294 - RNA, 19 nt, Artificial Sequence
  Description of Artificial Sequence: Synthetic oligonucleotide
gagccacaacugcaucucg

SEQ ID NO: 93295 - RNA, 19 nt, Artificial Sequence
  Description of Artificial Sequence: Synthetic oligonucleotide
gcaggcagucaauggcucc

SEQ ID NO: 93296 - RNA, 19 nt, Artificial Sequence
  Description of Artificial Sequence: Synthetic oligonucleotide
ccaguuccugccgcugacc

SEQ ID NO: 93297 - RNA, 19 nt, Artificial Sequence
  Description of Artificial Sequence: Synthetic oligonucleotide
cggucugcaggugcuagac

SEQ ID NO: 93298 - RNA, 19 nt, Artificial Sequence
  Description of Artificial Sequence: Synthetic oligonucleotide
ccugucccacaauaagcug

SEQ ID NO: 93299 - RNA, 19 nt, Artificial Sequence
  Description of Artificial Sequence: Synthetic oligonucleotide
ggaccucuaccacgagcac

SEQ ID NO: 93300 - RNA, 19 nt, Artificial Sequence
  Description of Artificial Sequence: Synthetic oligonucleotide
cucauucacggagcuacca

SEQ ID NO: 93301 - RNA, 19 nt, Artificial Sequence
  Description of Artificial Sequence: Synthetic oligonucleotide
acgacuggaggcccuggac

SEQ ID NO: 93302 - RNA, 19 nt, Artificial Sequence
  Description of Artificial Sequence: Synthetic oligonucleotide
ccucagcuacaacagccag

SEQ ID NO: 93303 - RNA, 19 nt, Artificial Sequence
  Description of Artificial Sequence: Synthetic oligonucleotide
gcccuuuggcaugcagggc

SEQ ID NO: 93304 - RNA, 19 nt, Artificial Sequence
  Description of Artificial Sequence: Synthetic oligonucleotide
cgugggccacaacuucagc

SEQ ID NO: 93305 - RNA, 19 nt, Artificial Sequence
  Description of Artificial Sequence: Synthetic oligonucleotide
cuucguggcucaccugcgc

SEQ ID NO: 93306 - RNA, 19 nt, Artificial Sequence
  Description of Artificial Sequence: Synthetic oligonucleotide
cacccugcgccaccucagc

SEQ ID NO: 93307 - RNA, 19 nt, Artificial Sequence
  Description of Artificial Sequence: Synthetic oligonucleotide
ccuggcccacaacaacauc

SEQ ID NO: 93308 - RNA, 19 nt, Artificial Sequence
  Description of Artificial Sequence: Synthetic oligonucleotide
ccacagccaagugucccag

SEQ ID NO: 93309 - RNA, 19 nt, Artificial Sequence
  Description of Artificial Sequence: Synthetic oligonucleotide
gcagcucugcaguacgucg

SEQ ID NO: 93310 - RNA, 19 nt, Artificial Sequence
  Description of Artificial Sequence: Synthetic oligonucleotide
gcugcgggcccuggacuuc

SEQ ID NO: 93311 - RNA, 19 nt, Artificial Sequence
  Description of Artificial Sequence: Synthetic oligonucleotide
cagcggcaaugcacugggc

SEQ ID NO: 93312 - RNA, 19 nt, Artificial Sequence
  Description of Artificial Sequence: Synthetic oligonucleotide
ccauaugugggccgaggga

SEQ ID NO: 93313 - RNA, 19 nt, Artificial Sequence
  Description of Artificial Sequence: Synthetic oligonucleotide
agaccucuaucugcacuuc

SEQ ID NO: 93314 - RNA, 19 nt, Artificial Sequence
  Description of Artificial Sequence: Synthetic oligonucleotide
cuuccaaggccugagcggu

SEQ ID NO: 93315 - RNA, 19 nt, Artificial Sequence
  Description of Artificial Sequence: Synthetic oligonucleotide
uuugaucuggcuggacuug

SEQ ID NO: 93316 - RNA, 19 nt, Artificial Sequence
  Description of Artificial Sequence: Synthetic oligonucleotide
gucccagaaccgccugcac

SEQ ID NO: 93317 - RNA, 19 nt, Artificial Sequence
  Description of Artificial Sequence: Synthetic oligonucleotide
cacccuccugccccaaacc

SEQ ID NO: 93318 - RNA, 19 nt, Artificial Sequence
  Description of Artificial Sequence: Synthetic oligonucleotide
ccugcgcaaccuccccaag

SEQ ID NO: 93319 - RNA, 19 nt, Artificial Sequence
  Description of Artificial Sequence: Synthetic oligonucleotide
gagccuacaggugcugcgu

SEQ ID NO: 93320 - RNA, 19 nt, Artificial Sequence
  Description of Artificial Sequence: Synthetic oligonucleotide
ucuccgugacaauuaccug

SEQ ID NO: 93321 - RNA, 19 nt, Artificial Sequence
  Description of Artificial Sequence: Synthetic oligonucleotide
ggccuucuuuaaguggugg

SEQ ID NO: 93322 - RNA, 19 nt, Artificial Sequence
  Description of Artificial Sequence: Synthetic oligonucleotide
gagccuccacuuccugccc

SEQ ID NO: 93323 - RNA, 19 nt, Artificial Sequence
  Description of Artificial Sequence: Synthetic oligonucleotide
caaacuggaaguccucgac

SEQ ID NO: 93324 - RNA, 19 nt, Artificial Sequence
  Description of Artificial Sequence: Synthetic oligonucleotide
ccuggcaggaaaccagcug

SEQ ID NO: 93325 - RNA, 19 nt, Artificial Sequence
  Description of Artificial Sequence: Synthetic oligonucleotide
gaaggcccugaccaauggc

SEQ ID NO: 93326 - RNA, 19 nt, Artificial Sequence
  Description of Artificial Sequence: Synthetic oligonucleotide
cagccugccugcuggcacc

SEQ ID NO: 93327 - RNA, 19 nt, Artificial Sequence
  Description of Artificial Sequence: Synthetic oligonucleotide
ccggcuccggaggcuggau

SEQ ID NO: 93328 - RNA, 19 nt, Artificial Sequence
  Description of Artificial Sequence: Synthetic oligonucleotide
ugucagcugcaacagcauc

SEQ ID NO: 93329 - RNA, 19 nt, Artificial Sequence
  Description of Artificial Sequence: Synthetic oligonucleotide
cagcuucguggcccccggc

SEQ ID NO: 93330 - RNA, 19 nt, Artificial Sequence
  Description of Artificial Sequence: Synthetic oligonucleotide
cuucuuuuccaaggccaag

SEQ ID NO: 93331 - RNA, 19 nt, Artificial Sequence
  Description of Artificial Sequence: Synthetic oligonucleotide
ggagcugcgagagcucaac

SEQ ID NO: 93332 - RNA, 19 nt, Artificial Sequence
  Description of Artificial Sequence: Synthetic oligonucleotide
ccuuagcgccaacgcccuc

SEQ ID NO: 93333 - RNA, 19 nt, Artificial Sequence
  Description of Artificial Sequence: Synthetic oligonucleotide
caagacaguggaccacucc

SEQ ID NO: 93334 - RNA, 19 nt, Artificial Sequence
  Description of Artificial Sequence: Synthetic oligonucleotide
cugguuugggccccuggcg

SEQ ID NO: 93335 - RNA, 19 nt, Artificial Sequence
  Description of Artificial Sequence: Synthetic oligonucleotide
gagugcccugcaaauacua

SEQ ID NO: 93336 - RNA, 19 nt, Artificial Sequence
  Description of Artificial Sequence: Synthetic oligonucleotide
agauguaagcgccaacccu

SEQ ID NO: 93337 - RNA, 19 nt, Artificial Sequence
  Description of Artificial Sequence: Synthetic oligonucleotide
ucugcacugcgccuguggg

SEQ ID NO: 93338 - RNA, 19 nt, Artificial Sequence
  Description of Artificial Sequence: Synthetic oligonucleotide
ggcggccuuuauggacuuc

SEQ ID NO: 93339 - RNA, 19 nt, Artificial Sequence
  Description of Artificial Sequence: Synthetic oligonucleotide
ccugcuggaggugcaggcu

SEQ ID NO: 93340 - RNA, 19 nt, Artificial Sequence
  Description of Artificial Sequence: Synthetic oligonucleotide
ugccgugcccggucugccc

SEQ ID NO: 93341 - RNA, 19 nt, Artificial Sequence
  Description of Artificial Sequence: Synthetic oligonucleotide
cagccgggugaaguguggc

SEQ ID NO: 93342 - RNA, 19 nt, Artificial Sequence
  Description of Artificial Sequence: Synthetic oligonucleotide
caguccgggccagcuccag

SEQ ID NO: 93343 - RNA, 19 nt, Artificial Sequence
  Description of Artificial Sequence: Synthetic oligonucleotide
gggccucagcaucuuugca

SEQ ID NO: 93344 - RNA, 19 nt, Artificial Sequence
  Description of Artificial Sequence: Synthetic oligonucleotide
acaggaccugcgccucugc

SEQ ID NO: 93345 - RNA, 19 nt, Artificial Sequence
  Description of Artificial Sequence: Synthetic oligonucleotide
ccuggaugaggcccucucc

SEQ ID NO: 93346 - RNA, 19 nt, Artificial Sequence
  Description of Artificial Sequence: Synthetic oligonucleotide
cugggacuguuucgcccuc

SEQ ID NO: 93347 - RNA, 19 nt, Artificial Sequence
  Description of Artificial Sequence: Synthetic oligonucleotide
cucgcugcuggcuguggcu

SEQ ID NO: 93348 - RNA, 19 nt, Artificial Sequence
  Description of Artificial Sequence: Synthetic oligonucleotide
ucugggccugggugugccc

SEQ ID NO: 93349 - RNA, 19 nt, Artificial Sequence
  Description of Artificial Sequence: Synthetic oligonucleotide
caugcugcaucaccucugu

SEQ ID NO: 93350 - RNA, 19 nt, Artificial Sequence
  Description of Artificial Sequence: Synthetic oligonucleotide
uggcugggaccucugguac

SEQ ID NO: 93351 - RNA, 19 nt, Artificial Sequence
  Description of Artificial Sequence: Synthetic oligonucleotide
cugcuuccaccugugccug

SEQ ID NO: 93352 - RNA, 19 nt, Artificial Sequence
  Description of Artificial Sequence: Synthetic oligonucleotide
ggccuggcuucccuggcgg

SEQ ID NO: 93353 - RNA, 19 nt, Artificial Sequence
  Description of Artificial Sequence: Synthetic oligonucleotide
ggggcggcaaagugggcga

SEQ ID NO: 93354 - RNA, 19 nt, Artificial Sequence
  Description of Artificial Sequence: Synthetic oligonucleotide
agaugaggaugcccugccc

SEQ ID NO: 93355 - RNA, 19 nt, Artificial Sequence
  Description of Artificial Sequence: Synthetic oligonucleotide
cuacgaugccuucgugguc

SEQ ID NO: 93356 - RNA, 19 nt, Artificial Sequence
  Description of Artificial Sequence: Synthetic oligonucleotide
cuucgacaaaacgcagagc

SEQ ID NO: 93357 - RNA, 19 nt, Artificial Sequence
  Description of Artificial Sequence: Synthetic oligonucleotide
cgcaguggcagacugggug

SEQ ID NO: 93358 - RNA, 19 nt, Artificial Sequence
  Description of Artificial Sequence: Synthetic oligonucleotide
guacaacgagcuucggggg

SEQ ID NO: 93359 - RNA, 19 nt, Artificial Sequence
  Description of Artificial Sequence: Synthetic oligonucleotide
gcagcuggaggagugccgu

SEQ ID NO: 93360 - RNA, 19 nt, Artificial Sequence
  Description of Artificial Sequence: Synthetic oligonucleotide
ugggcgcugggcacuccgc

SEQ ID NO: 93361 - RNA, 19 nt, Artificial Sequence
  Description of Artificial Sequence: Synthetic oligonucleotide
ccugugccuggaggaacgc

SEQ ID NO: 93362 - RNA, 19 nt, Artificial Sequence
  Description of Artificial Sequence: Synthetic oligonucleotide
cgacuggcugccuggcaaa

SEQ ID NO: 93363 - RNA, 19 nt, Artificial Sequence
  Description of Artificial Sequence: Synthetic oligonucleotide
aacccucuuugagaaccug

SEQ ID NO: 93364 - RNA, 19 nt, Artificial Sequence
  Description of Artificial Sequence: Synthetic oligonucleotide
gugggccucggucuauggc

SEQ ID NO: 93365 - RNA, 19 nt, Artificial Sequence
  Description of Artificial Sequence: Synthetic oligonucleotide
cagccgcaagacgcuguuu

SEQ ID NO: 93366 - RNA, 19 nt, Artificial Sequence
  Description of Artificial Sequence: Synthetic oligonucleotide
ugugcuggcccacacggac

SEQ ID NO: 93367 - RNA, 19 nt, Artificial Sequence
  Description of Artificial Sequence: Synthetic oligonucleotide
ccgggucaguggucucuug

SEQ ID NO: 93368 - RNA, 19 nt, Artificial Sequence
  Description of Artificial Sequence: Synthetic oligonucleotide
gcgcgccagcuuccugcug

SEQ ID NO: 93369 - RNA, 19 nt, Artificial Sequence
  Description of Artificial Sequence: Synthetic oligonucleotide
ggcccagcagcgccugcug

SEQ ID NO: 93370 - RNA, 19 nt, Artificial Sequence
  Description of Artificial Sequence: Synthetic oligonucleotide
ggaggaccgcaaggacguc

SEQ ID NO: 93371 - RNA, 19 nt, Artificial Sequence
  Description of Artificial Sequence: Synthetic oligonucleotide
cguggugcuggugauccug

SEQ ID NO: 93372 - RNA, 19 nt, Artificial Sequence
  Description of Artificial Sequence: Synthetic oligonucleotide
gagcccugacggccgccgc

SEQ ID NO: 93373 - RNA, 19 nt, Artificial Sequence
  Description of Artificial Sequence: Synthetic oligonucleotide
cucccgcuaugugcggcug

SEQ ID NO: 93374 - RNA, 19 nt, Artificial Sequence
  Description of Artificial Sequence: Synthetic oligonucleotide
gcgccagcgccucugccgc

SEQ ID NO: 93375 - RNA, 19 nt, Artificial Sequence
  Description of Artificial Sequence: Synthetic oligonucleotide
ccagaguguccuccucugg

SEQ ID NO: 93376 - RNA, 19 nt, Artificial Sequence
  Description of Artificial Sequence: Synthetic oligonucleotide
gccccaccagcccaguggu

SEQ ID NO: 93377 - RNA, 19 nt, Artificial Sequence
  Description of Artificial Sequence: Synthetic oligonucleotide
ucagcgcagcuucugggcc

SEQ ID NO: 93378 - RNA, 19 nt, Artificial Sequence
  Description of Artificial Sequence: Synthetic oligonucleotide
ccagcugggcauggcccug

SEQ ID NO: 93379 - RNA, 19 nt, Artificial Sequence
  Description of Artificial Sequence: Synthetic oligonucleotide
gaccagggacaaccaccac

SEQ ID NO: 93380 - RNA, 19 nt, Artificial Sequence
  Description of Artificial Sequence: Synthetic oligonucleotide
cuucuauaaccggaacuuc

SEQ ID NO: 93381 - RNA, 19 nt, Artificial Sequence
  Description of Artificial Sequence: Synthetic oligonucleotide
cugccagggacccacggcc

SEQ ID NO: 93382 - RNA, 19 nt, Artificial Sequence
  Description of Artificial Sequence: Synthetic oligonucleotide
cgaauagccgugagccgga

SEQ ID NO: 93383 - RNA, 19 nt, Artificial Sequence
  Description of Artificial Sequence: Synthetic oligonucleotide
aauccugcacggugccacc

SEQ ID NO: 93384 - RNA, 19 nt, Artificial Sequence
  Description of Artificial Sequence: Synthetic oligonucleotide
cuccacacucaccucaccu

SEQ ID NO: 93385 - RNA, 19 nt, Artificial Sequence
  Description of Artificial Sequence: Synthetic oligonucleotide
ucugccugccuggucugac

SEQ ID NO: 93386 - RNA, 19 nt, Artificial Sequence
  Description of Artificial Sequence: Synthetic oligonucleotide
cccuccccugcucgccucc

SEQ ID NO: 93387 - RNA, 19 nt, Artificial Sequence
  Description of Artificial Sequence: Synthetic oligonucleotide
ccucaccccacaccugaca

SEQ ID NO: 93388 - RNA, 19 nt, Artificial Sequence
  Description of Artificial Sequence: Synthetic oligonucleotide
acagagcaggcacucaaua

SEQ ID NO: 93389 - RNA, 19 nt, Artificial Sequence
  Description of Artificial Sequence: Synthetic oligonucleotide
aauaaaugcuaccgaaggc

SEQ ID NO: 93390 - RNA, 25 nt, Artificial Sequence
  Description of Artificial Sequence: Synthetic oligonucleotide
ggaggucuuguuuccggaagauguu

SEQ ID NO: 93391 - RNA, 25 nt, Artificial Sequence
  Description of Artificial Sequence: Synthetic oligonucleotide
ugcaaggcuguggugaaggcaggug

SEQ ID NO: 93392 - RNA, 25 nt, Artificial Sequence
  Description of Artificial Sequence: Synthetic oligonucleotide
gcagccuagccuccugcucaagcua

SEQ ID NO: 93393 - RNA, 25 nt, Artificial Sequence
  Description of Artificial Sequence: Synthetic oligonucleotide
acacccuggcccuccacgcaugagg

SEQ ID NO: 93394 - RNA, 25 nt, Artificial Sequence
  Description of Artificial Sequence: Synthetic oligonucleotide
gcccugcagaacucuggagauggug

SEQ ID NO: 93395 - RNA, 25 nt, Artificial Sequence
  Description of Artificial Sequence: Synthetic oligonucleotide
gccuacaagggcagaaaaggacaag

SEQ ID NO: 93396 - RNA, 25 nt, Artificial Sequence
  Description of Artificial Sequence: Synthetic oligonucleotide
gucggcagccgcuguccugagggca

SEQ ID NO: 93397 - RNA, 25 nt, Artificial Sequence
  Description of Artificial Sequence: Synthetic oligonucleotide
accagcuguggugcaggagccaaga

SEQ ID NO: 93398 - RNA, 25 nt, Artificial Sequence
  Description of Artificial Sequence: Synthetic oligonucleotide
accugaggguggaaguguccucuua

SEQ ID NO: 93399 - RNA, 25 nt, Artificial Sequence
  Description of Artificial Sequence: Synthetic oligonucleotide
agaauggggagugcccagcaaggug

SEQ ID NO: 93400 - RNA, 25 nt, Artificial Sequence
  Description of Artificial Sequence: Synthetic oligonucleotide
guacccgcuacuggugcuauccaga

SEQ ID NO: 93401 - RNA, 25 nt, Artificial Sequence
  Description of Artificial Sequence: Synthetic oligonucleotide
aauucccaucucucccugcucucug

SEQ ID NO: 93402 - RNA, 25 nt, Artificial Sequence
  Description of Artificial Sequence: Synthetic oligonucleotide
gccugagcucugggccuuagcuccu

SEQ ID NO: 93403 - RNA, 25 nt, Artificial Sequence
  Description of Artificial Sequence: Synthetic oligonucleotide
ucccugggcuugguagaggacaggu

SEQ ID NO: 93404 - RNA, 25 nt, Artificial Sequence
  Description of Artificial Sequence: Synthetic oligonucleotide
ugugaggcccucaugggauguaggc

SEQ ID NO: 93405 - RNA, 25 nt, Artificial Sequence
  Description of Artificial Sequence: Synthetic oligonucleotide
cugucugagaggggaguggaaagag

SEQ ID NO: 93406 - RNA, 25 nt, Artificial Sequence
  Description of Artificial Sequence: Synthetic oligonucleotide
ggaaggggugaaggagcugucugcc

SEQ ID NO: 93407 - RNA, 25 nt, Artificial Sequence
  Description of Artificial Sequence: Synthetic oligonucleotide
cauuugacuaugcaaauggccuuug

SEQ ID NO: 93408 - RNA, 25 nt, Artificial Sequence
  Description of Artificial Sequence: Synthetic oligonucleotide
gacucaugggacccuguccuccuca

SEQ ID NO: 93409 - RNA, 25 nt, Artificial Sequence
  Description of Artificial Sequence: Synthetic oligonucleotide
acugggggcaggguggaguggaggg

SEQ ID NO: 93410 - RNA, 25 nt, Artificial Sequence
  Description of Artificial Sequence: Synthetic oligonucleotide
gggagcuacuaggcugguauaaaaa

SEQ ID NO: 93411 - RNA, 25 nt, Artificial Sequence
  Description of Artificial Sequence: Synthetic oligonucleotide
aucuuacuuccucuauucucugagc

SEQ ID NO: 93412 - RNA, 25 nt, Artificial Sequence
  Description of Artificial Sequence: Synthetic oligonucleotide
ccgcugcugccccugugggaaggga

SEQ ID NO: 93413 - RNA, 25 nt, Artificial Sequence
  Description of Artificial Sequence: Synthetic oligonucleotide
accucgagugugaagcauccuuccc

SEQ ID NO: 93414 - RNA, 25 nt, Artificial Sequence
  Description of Artificial Sequence: Synthetic oligonucleotide
cuguagcugcuguccagucugcccg

SEQ ID NO: 93415 - RNA, 25 nt, Artificial Sequence
  Description of Artificial Sequence: Synthetic oligonucleotide
gccagacccucuggagaagccccug

SEQ ID NO: 93416 - RNA, 25 nt, Artificial Sequence
  Description of Artificial Sequence: Synthetic oligonucleotide
gccccccagcauggguuucugccgc

SEQ ID NO: 93417 - RNA, 25 nt, Artificial Sequence
  Description of Artificial Sequence: Synthetic oligonucleotide
cagcgcccugcacccgcugucucuc

SEQ ID NO: 93418 - RNA, 25 nt, Artificial Sequence
  Description of Artificial Sequence: Synthetic oligonucleotide
ccuggugcaggccaucaugcuggcc

SEQ ID NO: 93419 - RNA, 25 nt, Artificial Sequence
  Description of Artificial Sequence: Synthetic oligonucleotide
caugacccuggcccuggguaccuug

SEQ ID NO: 93420 - RNA, 25 nt, Artificial Sequence
  Description of Artificial Sequence: Synthetic oligonucleotide
gccugccuuccuacccugugagcuc

SEQ ID NO: 93421 - RNA, 25 nt, Artificial Sequence
  Description of Artificial Sequence: Synthetic oligonucleotide
ccagccccacggccuggugaacugc

SEQ ID NO: 93422 - RNA, 25 nt, Artificial Sequence
  Description of Artificial Sequence: Synthetic oligonucleotide
caacuggcuguuccugaagucugug

SEQ ID NO: 93423 - RNA, 25 nt, Artificial Sequence
  Description of Artificial Sequence: Synthetic oligonucleotide
gccccacuucuccauggcagcaccc

SEQ ID NO: 93424 - RNA, 25 nt, Artificial Sequence
  Description of Artificial Sequence: Synthetic oligonucleotide
ccguggcaaugucaccagccuuucc

SEQ ID NO: 93425 - RNA, 25 nt, Artificial Sequence
  Description of Artificial Sequence: Synthetic oligonucleotide
cuuguccuccaaccgcauccaccac

SEQ ID NO: 93426 - RNA, 25 nt, Artificial Sequence
  Description of Artificial Sequence: Synthetic oligonucleotide
ccuccaugauucugacuuugcccac

SEQ ID NO: 93427 - RNA, 25 nt, Artificial Sequence
  Description of Artificial Sequence: Synthetic oligonucleotide
ccugcccagccugcggcaucucaac

SEQ ID NO: 93428 - RNA, 25 nt, Artificial Sequence
  Description of Artificial Sequence: Synthetic oligonucleotide
ccucaaguggaacugcccgccgguu

SEQ ID NO: 93429 - RNA, 25 nt, Artificial Sequence
  Description of Artificial Sequence: Synthetic oligonucleotide
uggccucagccccaugcacuucccc

SEQ ID NO: 93430 - RNA, 25 nt, Artificial Sequence
  Description of Artificial Sequence: Synthetic oligonucleotide
cugccacaugaccaucgagcccagc

SEQ ID NO: 93431 - RNA, 25 nt, Artificial Sequence
  Description of Artificial Sequence: Synthetic oligonucleotide
caccuucuuggcugugcccacccug

SEQ ID NO: 93432 - RNA, 25 nt, Artificial Sequence
  Description of Artificial Sequence: Synthetic oligonucleotide
ggaagagcuaaaccugagcuacaac

SEQ ID NO: 93433 - RNA, 25 nt, Artificial Sequence
  Description of Artificial Sequence: Synthetic oligonucleotide
caacaucaugacugugccugcgcug

SEQ ID NO: 93434 - RNA, 25 nt, Artificial Sequence
  Description of Artificial Sequence: Synthetic oligonucleotide
gcccaaaucccucauaucccugucc

SEQ ID NO: 93435 - RNA, 25 nt, Artificial Sequence
  Description of Artificial Sequence: Synthetic oligonucleotide
ccucagccauaccaacauccugaug

SEQ ID NO: 93436 - RNA, 25 nt, Artificial Sequence
  Description of Artificial Sequence: Synthetic oligonucleotide
gcuagacucugccagccucgccggc

SEQ ID NO: 93437 - RNA, 25 nt, Artificial Sequence
  Description of Artificial Sequence: Synthetic oligonucleotide
ccugcaugcccugcgcuuccuauuc

SEQ ID NO: 93438 - RNA, 25 nt, Artificial Sequence
  Description of Artificial Sequence: Synthetic oligonucleotide
cauggacggcaacuguuauuacaag

SEQ ID NO: 93439 - RNA, 25 nt, Artificial Sequence
  Description of Artificial Sequence: Synthetic oligonucleotide
gaaccccugcaggcaggcacuggag

SEQ ID NO: 93440 - RNA, 25 nt, Artificial Sequence
  Description of Artificial Sequence: Synthetic oligonucleotide
gguggccccgggugcccuccuuggc

SEQ ID NO: 93441 - RNA, 25 nt, Artificial Sequence
  Description of Artificial Sequence: Synthetic oligonucleotide
ccugggcaaccucacccaccuguca

SEQ ID NO: 93442 - RNA, 25 nt, Artificial Sequence
  Description of Artificial Sequence: Synthetic oligonucleotide
acucaaguacaacaaccucacugug

SEQ ID NO: 93443 - RNA, 25 nt, Artificial Sequence
  Description of Artificial Sequence: Synthetic oligonucleotide
ggugccccgcaaccugccuuccagc

SEQ ID NO: 93444 - RNA, 25 nt, Artificial Sequence
  Description of Artificial Sequence: Synthetic oligonucleotide
ccuggaguaucugcuguuguccuac

SEQ ID NO: 93445 - RNA, 25 nt, Artificial Sequence
  Description of Artificial Sequence: Synthetic oligonucleotide
caaccgcaucgucaaacuggcgccu

SEQ ID NO: 93446 - RNA, 25 nt, Artificial Sequence
  Description of Artificial Sequence: Synthetic oligonucleotide
ugaggaccuggccaaucugaccgcc

SEQ ID NO: 93447 - RNA, 25 nt, Artificial Sequence
  Description of Artificial Sequence: Synthetic oligonucleotide
ccugcgugugcucgaugugggcgga

SEQ ID NO: 93448 - RNA, 25 nt, Artificial Sequence
  Description of Artificial Sequence: Synthetic oligonucleotide
aaauugccgccgcugcgaccacgcu

SEQ ID NO: 93449 - RNA, 25 nt, Artificial Sequence
  Description of Artificial Sequence: Synthetic oligonucleotide
ucccaaccccugcauggagugcccu

SEQ ID NO: 93450 - RNA, 25 nt, Artificial Sequence
  Description of Artificial Sequence: Synthetic oligonucleotide
ucgucacuucccccagcuacauccc

SEQ ID NO: 93451 - RNA, 25 nt, Artificial Sequence
  Description of Artificial Sequence: Synthetic oligonucleotide
cgauaccuucagccaccugagccgu

SEQ ID NO: 93452 - RNA, 25 nt, Artificial Sequence
  Description of Artificial Sequence: Synthetic oligonucleotide
ucuugaaggccugguguugaaggac

SEQ ID NO: 93453 - RNA, 25 nt, Artificial Sequence
  Description of Artificial Sequence: Synthetic oligonucleotide
caguucucucuccuggcugaaugcc

SEQ ID NO: 93454 - RNA, 25 nt, Artificial Sequence
  Description of Artificial Sequence: Synthetic oligonucleotide
caguugguuccgugggcugggaaac

SEQ ID NO: 93455 - RNA, 25 nt, Artificial Sequence
  Description of Artificial Sequence: Synthetic oligonucleotide
ccuccgagugcuggaccugagugag

SEQ ID NO: 93456 - RNA, 25 nt, Artificial Sequence
  Description of Artificial Sequence: Synthetic oligonucleotide
gaacuuccucuacaaaugcaucacu

SEQ ID NO: 93457 - RNA, 25 nt, Artificial Sequence
  Description of Artificial Sequence: Synthetic oligonucleotide
uaaaaccaaggccuuccagggccua

SEQ ID NO: 93458 - RNA, 25 nt, Artificial Sequence
  Description of Artificial Sequence: Synthetic oligonucleotide
aacacagcugcgcaagcuuaaccug

SEQ ID NO: 93459 - RNA, 25 nt, Artificial Sequence
  Description of Artificial Sequence: Synthetic oligonucleotide
guccuucaauuaccaaaagagggug

SEQ ID NO: 93460 - RNA, 25 nt, Artificial Sequence
  Description of Artificial Sequence: Synthetic oligonucleotide
guccuuugcccaccugucucuggcc

SEQ ID NO: 93461 - RNA, 25 nt, Artificial Sequence
  Description of Artificial Sequence: Synthetic oligonucleotide
cccuuccuucgggagccuggucgcc

SEQ ID NO: 93462 - RNA, 25 nt, Artificial Sequence
  Description of Artificial Sequence: Synthetic oligonucleotide
ccugaaggagcuggacaugcacggc

SEQ ID NO: 93463 - RNA, 25 nt, Artificial Sequence
  Description of Artificial Sequence: Synthetic oligonucleotide
caucuucuuccgcucacucgaugag

SEQ ID NO: 93464 - RNA, 25 nt, Artificial Sequence
  Description of Artificial Sequence: Synthetic oligonucleotide
gaccacgcuccggccacuggcccgc

SEQ ID NO: 93465 - RNA, 25 nt, Artificial Sequence
  Description of Artificial Sequence: Synthetic oligonucleotide
ccugcccaugcuccagacucugcgu

SEQ ID NO: 93466 - RNA, 25 nt, Artificial Sequence
  Description of Artificial Sequence: Synthetic oligonucleotide
ucugcagaugaacuucaucaaccag

SEQ ID NO: 93467 - RNA, 25 nt, Artificial Sequence
  Description of Artificial Sequence: Synthetic oligonucleotide
ggcccagcucggcaucuucagggcc

SEQ ID NO: 93468 - RNA, 25 nt, Artificial Sequence
  Description of Artificial Sequence: Synthetic oligonucleotide
cuucccuggccugcgcuacguggac

SEQ ID NO: 93469 - RNA, 25 nt, Artificial Sequence
  Description of Artificial Sequence: Synthetic oligonucleotide
ccugucggacaaccgcaucagcgga

SEQ ID NO: 93470 - RNA, 25 nt, Artificial Sequence
  Description of Artificial Sequence: Synthetic oligonucleotide
agcuucggagcugacagccaccaug

SEQ ID NO: 93471 - RNA, 25 nt, Artificial Sequence
  Description of Artificial Sequence: Synthetic oligonucleotide
gggggaggcagauggaggggagaag

SEQ ID NO: 93472 - RNA, 25 nt, Artificial Sequence
  Description of Artificial Sequence: Synthetic oligonucleotide
ggucuggcugcagccuggggaccuu

SEQ ID NO: 93473 - RNA, 25 nt, Artificial Sequence
  Description of Artificial Sequence: Synthetic oligonucleotide
ugcuccggccccaguggacacuccc

SEQ ID NO: 93474 - RNA, 25 nt, Artificial Sequence
  Description of Artificial Sequence: Synthetic oligonucleotide
cagcucugaagacuucaggcccaac

SEQ ID NO: 93475 - RNA, 25 nt, Artificial Sequence
  Description of Artificial Sequence: Synthetic oligonucleotide
cugcagcacccucaacuucaccuug

SEQ ID NO: 93476 - RNA, 25 nt, Artificial Sequence
  Description of Artificial Sequence: Synthetic oligonucleotide
ggaucugucacggaacaaccuggug

SEQ ID NO: 93477 - RNA, 25 nt, Artificial Sequence
  Description of Artificial Sequence: Synthetic oligonucleotide
gaccgugcagccggagauguuugcc

SEQ ID NO: 93478 - RNA, 25 nt, Artificial Sequence
  Description of Artificial Sequence: Synthetic oligonucleotide
ccagcucucgcaccugcagugccug

SEQ ID NO: 93479 - RNA, 25 nt, Artificial Sequence
  Description of Artificial Sequence: Synthetic oligonucleotide
gcgccugagccacaacugcaucucg

SEQ ID NO: 93480 - RNA, 25 nt, Artificial Sequence
  Description of Artificial Sequence: Synthetic oligonucleotide
gcaggcagucaauggcucccaguuc

SEQ ID NO: 93481 - RNA, 25 nt, Artificial Sequence
  Description of Artificial Sequence: Synthetic oligonucleotide
ccugccgcugaccggucugcaggug

SEQ ID NO: 93482 - RNA, 25 nt, Artificial Sequence
  Description of Artificial Sequence: Synthetic oligonucleotide
gcuagaccugucccacaauaagcug

SEQ ID NO: 93483 - RNA, 25 nt, Artificial Sequence
  Description of Artificial Sequence: Synthetic oligonucleotide
ggaccucuaccacgagcacucauuc

SEQ ID NO: 93484 - RNA, 25 nt, Artificial Sequence
  Description of Artificial Sequence: Synthetic oligonucleotide
cacggagcuaccacgacuggaggcc

SEQ ID NO: 93485 - RNA, 25 nt, Artificial Sequence
  Description of Artificial Sequence: Synthetic oligonucleotide
ccuggaccucagcuacaacagccag

SEQ ID NO: 93486 - RNA, 25 nt, Artificial Sequence
  Description of Artificial Sequence: Synthetic oligonucleotide
gcccuuuggcaugcagggcgugggc

SEQ ID NO: 93487 - RNA, 25 nt, Artificial Sequence
  Description of Artificial Sequence: Synthetic oligonucleotide
ccacaacuucagcuucguggcucac

SEQ ID NO: 93488 - RNA, 25 nt, Artificial Sequence
  Description of Artificial Sequence: Synthetic oligonucleotide
ccugcgcacccugcgccaccucagc

SEQ ID NO: 93489 - RNA, 25 nt, Artificial Sequence
  Description of Artificial Sequence: Synthetic oligonucleotide
ccuggcccacaacaacauccacagc

SEQ ID NO: 93490 - RNA, 25 nt, Artificial Sequence
  Description of Artificial Sequence: Synthetic oligonucleotide
ccaagugucccagcagcucugcagu

SEQ ID NO: 93491 - RNA, 25 nt, Artificial Sequence
  Description of Artificial Sequence: Synthetic oligonucleotide
uacgucgcugcgggcccuggacuuc

SEQ ID NO: 93492 - RNA, 25 nt, Artificial Sequence
  Description of Artificial Sequence: Synthetic oligonucleotide
cagcggcaaugcacugggccauaug

SEQ ID NO: 93493 - RNA, 25 nt, Artificial Sequence
  Description of Artificial Sequence: Synthetic oligonucleotide
gugggccgagggagaccucuaucug

SEQ ID NO: 93494 - RNA, 25 nt, Artificial Sequence
  Description of Artificial Sequence: Synthetic oligonucleotide
gcacuucuuccaaggccugagcggu

SEQ ID NO: 93495 - RNA, 25 nt, Artificial Sequence
  Description of Artificial Sequence: Synthetic oligonucleotide
uuugaucuggcuggacuugucccag

SEQ ID NO: 93496 - RNA, 25 nt, Artificial Sequence
  Description of Artificial Sequence: Synthetic oligonucleotide
gaaccgccugcacacccuccugccc

SEQ ID NO: 93497 - RNA, 25 nt, Artificial Sequence
  Description of Artificial Sequence: Synthetic oligonucleotide
ccaaacccugcgcaaccuccccaag

SEQ ID NO: 93498 - RNA, 25 nt, Artificial Sequence
  Description of Artificial Sequence: Synthetic oligonucleotide
gagccuacaggugcugcgucuccgu

SEQ ID NO: 93499 - RNA, 25 nt, Artificial Sequence
  Description of Artificial Sequence: Synthetic oligonucleotide
ugacaauuaccuggccuucuuuaag

SEQ ID NO: 93500 - RNA, 25 nt, Artificial Sequence
  Description of Artificial Sequence: Synthetic oligonucleotide
gugguggagccuccacuuccugccc

SEQ ID NO: 93501 - RNA, 25 nt, Artificial Sequence
  Description of Artificial Sequence: Synthetic oligonucleotide
caaacuggaaguccucgaccuggca

SEQ ID NO: 93502 - RNA, 25 nt, Artificial Sequence
  Description of Artificial Sequence: Synthetic oligonucleotide
aggaaaccagcugaaggcccugacc

SEQ ID NO: 93503 - RNA, 25 nt, Artificial Sequence
  Description of Artificial Sequence: Synthetic oligonucleotide
caauggcagccugccugcuggcacc

SEQ ID NO: 93504 - RNA, 25 nt, Artificial Sequence
  Description of Artificial Sequence: Synthetic oligonucleotide
ccggcuccggaggcuggaugucagc

SEQ ID NO: 93505 - RNA, 25 nt, Artificial Sequence
  Description of Artificial Sequence: Synthetic oligonucleotide
cugcaacagcaucagcuucguggcc

SEQ ID NO: 93506 - RNA, 25 nt, Artificial Sequence
  Description of Artificial Sequence: Synthetic oligonucleotide
ccccggcuucuuuuccaaggccaag

SEQ ID NO: 93507 - RNA, 25 nt, Artificial Sequence
  Description of Artificial Sequence: Synthetic oligonucleotide
ggagcugcgagagcucaaccuuagc

SEQ ID NO: 93508 - RNA, 25 nt, Artificial Sequence
  Description of Artificial Sequence: Synthetic oligonucleotide
cgccaacgcccucaagacaguggac

SEQ ID NO: 93509 - RNA, 25 nt, Artificial Sequence
  Description of Artificial Sequence: Synthetic oligonucleotide
ccacuccugguuugggccccuggcg

SEQ ID NO: 93510 - RNA, 25 nt, Artificial Sequence
  Description of Artificial Sequence: Synthetic oligonucleotide
gagugcccugcaaauacuagaugua

SEQ ID NO: 93511 - RNA, 25 nt, Artificial Sequence
  Description of Artificial Sequence: Synthetic oligonucleotide
aagcgccaacccucugcacugcgcc

SEQ ID NO: 93512 - RNA, 25 nt, Artificial Sequence
  Description of Artificial Sequence: Synthetic oligonucleotide
cuguggggcggccuuuauggacuuc

SEQ ID NO: 93513 - RNA, 25 nt, Artificial Sequence
  Description of Artificial Sequence: Synthetic oligonucleotide
ccugcuggaggugcaggcugccgug

SEQ ID NO: 93514 - RNA, 25 nt, Artificial Sequence
  Description of Artificial Sequence: Synthetic oligonucleotide
gcccggucugcccagccgggugaag

SEQ ID NO: 93515 - RNA, 25 nt, Artificial Sequence
  Description of Artificial Sequence: Synthetic oligonucleotide
guguggcaguccgggccagcuccag

SEQ ID NO: 93516 - RNA, 25 nt, Artificial Sequence
  Description of Artificial Sequence: Synthetic oligonucleotide
gggccucagcaucuuugcacaggac

SEQ ID NO: 93517 - RNA, 25 nt, Artificial Sequence
  Description of Artificial Sequence: Synthetic oligonucleotide
ccugcgccucugccuggaugaggcc

SEQ ID NO: 93518 - RNA, 25 nt, Artificial Sequence
  Description of Artificial Sequence: Synthetic oligonucleotide
ccucuccugggacuguuucgcccuc

SEQ ID NO: 93519 - RNA, 25 nt, Artificial Sequence
  Description of Artificial Sequence: Synthetic oligonucleotide
cucgcugcuggcuguggcucugggc

SEQ ID NO: 93520 - RNA, 25 nt, Artificial Sequence
  Description of Artificial Sequence: Synthetic oligonucleotide
ccugggugugcccaugcugcaucac

SEQ ID NO: 93521 - RNA, 25 nt, Artificial Sequence
  Description of Artificial Sequence: Synthetic oligonucleotide
ccucuguggcugggaccucugguac

SEQ ID NO: 93522 - RNA, 25 nt, Artificial Sequence
  Description of Artificial Sequence: Synthetic oligonucleotide
cugcuuccaccugugccuggccugg

SEQ ID NO: 93523 - RNA, 25 nt, Artificial Sequence
  Description of Artificial Sequence: Synthetic oligonucleotide
gcuucccuggcgggggcggcaaagu

SEQ ID NO: 93524 - RNA, 25 nt, Artificial Sequence
  Description of Artificial Sequence: Synthetic oligonucleotide
ugggcgagaugaggaugcccugccc

SEQ ID NO: 93525 - RNA, 25 nt, Artificial Sequence
  Description of Artificial Sequence: Synthetic oligonucleotide
cuacgaugccuucguggucuucgac

SEQ ID NO: 93526 - RNA, 25 nt, Artificial Sequence
  Description of Artificial Sequence: Synthetic oligonucleotide
caaaacgcagagcgcaguggcagac

SEQ ID NO: 93527 - RNA, 25 nt, Artificial Sequence
  Description of Artificial Sequence: Synthetic oligonucleotide
cuggguguacaacgagcuucggggg

SEQ ID NO: 93528 - RNA, 25 nt, Artificial Sequence
  Description of Artificial Sequence: Synthetic oligonucleotide
gcagcuggaggagugccgugggcgc

SEQ ID NO: 93529 - RNA, 25 nt, Artificial Sequence
  Description of Artificial Sequence: Synthetic oligonucleotide
cugggcacuccgccugugccuggag

SEQ ID NO: 93530 - RNA, 25 nt, Artificial Sequence
  Description of Artificial Sequence: Synthetic oligonucleotide
ggaacgcgacuggcugccuggcaaa

SEQ ID NO: 93531 - RNA, 25 nt, Artificial Sequence
  Description of Artificial Sequence: Synthetic oligonucleotide
aacccucuuugagaaccugugggcc

SEQ ID NO: 93532 - RNA, 25 nt, Artificial Sequence
  Description of Artificial Sequence: Synthetic oligonucleotide
cucggucuauggcagccgcaagacg

SEQ ID NO: 93533 - RNA, 25 nt, Artificial Sequence
  Description of Artificial Sequence: Synthetic oligonucleotide
gcuguuugugcuggcccacacggac

SEQ ID NO: 93534 - RNA, 25 nt, Artificial Sequence
  Description of Artificial Sequence: Synthetic oligonucleotide
ccgggucaguggucucuugcgcgcc

SEQ ID NO: 93535 - RNA, 25 nt, Artificial Sequence
  Description of Artificial Sequence: Synthetic oligonucleotide
cagcuuccugcuggcccagcagcgc

SEQ ID NO: 93536 - RNA, 25 nt, Artificial Sequence
  Description of Artificial Sequence: Synthetic oligonucleotide
ccugcuggaggaccgcaaggacguc

SEQ ID NO: 93537 - RNA, 25 nt, Artificial Sequence
  Description of Artificial Sequence: Synthetic oligonucleotide
cguggugcuggugauccugagcccu

SEQ ID NO: 93538 - RNA, 25 nt, Artificial Sequence
  Description of Artificial Sequence: Synthetic oligonucleotide
ugacggccgccgcucccgcuaugug

SEQ ID NO: 93539 - RNA, 25 nt, Artificial Sequence
  Description of Artificial Sequence: Synthetic oligonucleotide
gcggcugcgccagcgccucugccgc

SEQ ID NO: 93540 - RNA, 25 nt, Artificial Sequence
  Description of Artificial Sequence: Synthetic oligonucleotide
ccagaguguccuccucuggccccac

SEQ ID NO: 93541 - RNA, 25 nt, Artificial Sequence
  Description of Artificial Sequence: Synthetic oligonucleotide
ccagcccaguggucagcgcagcuuc

SEQ ID NO: 93542 - RNA, 25 nt, Artificial Sequence
  Description of Artificial Sequence: Synthetic oligonucleotide
cugggcccagcugggcauggcccug

SEQ ID NO: 93543 - RNA, 25 nt, Artificial Sequence
  Description of Artificial Sequence: Synthetic oligonucleotide
gaccagggacaaccaccacuucuau

SEQ ID NO: 93544 - RNA, 25 nt, Artificial Sequence
  Description of Artificial Sequence: Synthetic oligonucleotide
uaaccggaacuucugccagggaccc

SEQ ID NO: 93545 - RNA, 25 nt, Artificial Sequence
  Description of Artificial Sequence: Synthetic oligonucleotide
cacggccgaauagccgugagccgga

SEQ ID NO: 93546 - RNA, 25 nt, Artificial Sequence
  Description of Artificial Sequence: Synthetic oligonucleotide
aauccugcacggugccaccuccaca

SEQ ID NO: 93547 - RNA, 25 nt, Artificial Sequence
  Description of Artificial Sequence: Synthetic oligonucleotide
acucaccucaccucugccugccugg

SEQ ID NO: 93548 - RNA, 25 nt, Artificial Sequence
  Description of Artificial Sequence: Synthetic oligonucleotide
gucugacccuccccugcucgccucc

SEQ ID NO: 93549 - RNA, 25 nt, Artificial Sequence
  Description of Artificial Sequence: Synthetic oligonucleotide
ccucaccccacaccugacacagagc

SEQ ID NO: 93550 - RNA, 25 nt, Artificial Sequence
  Description of Artificial Sequence: Synthetic oligonucleotide
caggcacucaauaaaugcuaccgaa

SEQ ID NO: 93551 - RNA, 25 nt, Artificial Sequence
  Description of Artificial Sequence: Synthetic oligonucleotide
gcacucaauaaaugcuaccgaaggc

SEQ ID NO: 93552 - DNA, 21 bp, Artificial Sequence
  Description of Artificial Sequence: Synthetic oligonucleotide
  Description of Combined DNA/RNA Molecule: Synthetic oligonucleotide
cuacacaaaucagcgauuutt

SEQ ID NO: 93553 - DNA, 21 bp, Artificial Sequence
  Description of Artificial Sequence: Synthetic oligonucleotide
  Description of Combined DNA/RNA Molecule: Synthetic oligonucleotide
aaaucgcugauuuguguagtt

SEQ ID NO: 93554 - DNA, 25 bp, Artificial Sequence
  Description of Artificial Sequence: Synthetic oligonucleotide
  Description of Combined DNA/RNA Molecule: Synthetic oligonucleotide
cuacacaaaucagcgauuuccaugt

SEQ ID NO: 93555 - RNA, 27 nt, Artificial Sequence
  Description of Artificial Sequence: Synthetic oligonucleotide
acauggaaaucgcugauuuguguaguc

SEQ ID NO: 93556 - RNA, 13 nt, Artificial Sequence
  Description of Artificial Sequence: Synthetic oligonucleotide
cuacacaaaucag

SEQ ID NO: 93557 - DNA, 11 bp, Artificial Sequence
  Description of Artificial Sequence: Synthetic oligonucleotide
  Description of Combined DNA/RNA Molecule: Synthetic oligonucleotide
gauuuccaugt

SEQ ID NO: 93558 - DNA, 21 bp, Artificial Sequence
  Description of Artificial Sequence: Synthetic oligonucleotide
  Description of Combined DNA/RNA Molecule: Synthetic oligonucleotide
ggaucuuauuucuucggagtt

SEQ ID NO: 93559 - DNA, 21 bp, Artificial Sequence
  Description of Artificial Sequence: Synthetic oligonucleotide
  Description of Combined DNA/RNA Molecule: Synthetic oligonucleotide
cuccgaagaaauaagaucctt

SEQ ID NO: 93560 - RNA, 11 nt, Artificial Sequence
  Description of Artificial Sequence: Synthetic oligonucleotide
ggaucuuauuu

SEQ ID NO: 93561 - DNA, 10 bp, Artificial Sequence
  Description of Artificial Sequence: Synthetic oligonucleotide
  Description of Combined DNA/RNA Molecule: Synthetic oligonucleotide
cuucggagtt

SEQ ID NO: 93562 - RNA, 27 nt, Artificial Sequence
  Description of Artificial Sequence: Synthetic oligonucleotide
cauugucuccgaagaaauaagauccuu

SEQ ID NO: 93563 - RNA, 8 nt, Artificial Sequence
  Description of Artificial Sequence: Synthetic oligonucleotide
  modified_base (2): LNA-G
ggaucuua

SEQ ID NO: 93564 - DNA, 17 bp, Artificial Sequence
  Description of Artificial Sequence: Synthetic oligonucleotide
  Description of Combined DNA/RNA Molecule: Synthetic oligonucleotide
uuucuucggagacaatg

SEQ ID NO: 93565 - DNA, 16 bp, Artificial Sequence
  Description of Artificial Sequence: Synthetic oligonucleotide
  Description of Combined DNA/RNA Molecule: Synthetic oligonucleotide
uucuucggagacaatg

SEQ ID NO: 93566 - DNA, 15 bp, Artificial Sequence
  Description of Artificial Sequence: Synthetic oligonucleotide
  Description of Combined DNA/RNA Molecule: Synthetic oligonucleotide
ucuucggagacaatg

SEQ ID NO: 93567 - DNA, 14 bp, Artificial Sequence
  Description of Artificial Sequence: Synthetic oligonucleotide
  Description of Combined DNA/RNA Molecule: Synthetic oligonucleotide
cuucggagacaatg

SEQ ID NO: 93568 - DNA, 13 bp, Artificial Sequence
  Description of Artificial Sequence: Synthetic oligonucleotide
  Description of Combined DNA/RNA Molecule: Synthetic oligonucleotide
uucggagacaatg

SEQ ID NO: 93569 - DNA, 12 bp, Artificial Sequence
  Description of Artificial Sequence: Synthetic oligonucleotide
  Description of Combined DNA/RNA Molecule: Synthetic oligonucleotide
ucggagacaatg

SEQ ID NO: 93570 - DNA, 11 bp, Artificial Sequence
  Description of Artificial Sequence: Synthetic oligonucleotide
  Description of Combined DNA/RNA Molecule: Synthetic oligonucleotide
cggagacaatg

SEQ ID NO: 93571 - RNA, 9 nt, Artificial Sequence
  Description of Artificial Sequence: Synthetic oligonucleotide
  modified_base (2): LNA-G
ggaucuuau

SEQ ID NO: 93572 - RNA, 10 nt, Artificial Sequence
  Description of Artificial Sequence: Synthetic oligonucleotide
  modified_base (2): LNA-G
ggaucuuauu

SEQ ID NO: 93573 - RNA, 11 nt, Artificial Sequence
  Description of Artificial Sequence: Synthetic oligonucleotide
  modified_base (2): LNA-G
ggaucuuauuu

SEQ ID NO: 93574 - RNA, 12 nt, Artificial Sequence
  Description of Artificial Sequence: Synthetic oligonucleotide
  modified_base (2): LNA-G
ggaucuuauuuc

SEQ ID NO: 93575 - RNA, 8 nt, Artificial Sequence
  Description of Artificial Sequence: Synthetic oligonucleotide
  modified_base (3): LNA-A
cuacacaa

SEQ ID NO: 93576 - DNA, 13 bp, Artificial Sequence
  Description of Artificial Sequence: Synthetic oligonucleotide
  Description of Combined DNA/RNA Molecule: Synthetic oligonucleotide
  modified_base (8): LNA-A
aucagcgauuutt

SEQ ID NO: 93577 - DNA, 12 bp, Artificial Sequence
  Description of Artificial Sequence: Synthetic oligonucleotide
  Description of Combined DNA/RNA Molecule: Synthetic oligonucleotide
  modified_base (7): LNA-A
ucagcgauuutt

SEQ ID NO: 93578 - DNA, 11 bp, Artificial Sequence
  Description of Artificial Sequence: Synthetic oligonucleotide
  Description of Combined DNA/RNA Molecule: Synthetic oligonucleotide
  modified_base (6): LNA-A
cagcgauuutt

SEQ ID NO: 93579 - DNA, 10 bp, Artificial Sequence
  Description of Artificial Sequence: Synthetic oligonucleotide
  Description of Combined DNA/RNA Molecule: Synthetic oligonucleotide
  modified_base (5): LNA-A
agcgauuutt

SEQ ID NO: 93580 - DNA, 9 bp, Artificial Sequence
  Description of Artificial Sequence: Synthetic oligonucleotide
  Description of Combined DNA/RNA Molecule: Synthetic oligonucleotide
  modified_base (4): LNA-A
gcgauuutt

SEQ ID NO: 93581 - DNA, 8 bp, Artificial Sequence
  Description of Artificial Sequence: Synthetic oligonucleotide
  Description of Combined DNA/RNA Molecule: Synthetic oligonucleotide
  modified_base (3): LNA-A
cgauuutt

SEQ ID NO: 93582 - DNA, 7 bp, Artificial Sequence
  Description of Artificial Sequence: Synthetic oligonucleotide
  Description of Combined DNA/RNA Molecule: Synthetic oligonucleotide
  modified_base (2): LNA-A
gauuutt

SEQ ID NO: 93583 - RNA, 9 nt, Artificial Sequence
  Description of Artificial Sequence: Synthetic oligonucleotide
  modified_base (3): LNA-A
cuacacaaa

SEQ ID NO: 93584 - RNA, 10 nt, Artificial Sequence
  Description of Artificial Sequence: Synthetic oligonucleotide
  modified_base (3): LNA-A
cuacacaaau

SEQ ID NO: 93585 - RNA, 11 nt, Artificial Sequence
  Description of Artificial Sequence: Synthetic oligonucleotide
  modified_base (3): LNA-A
cuacacaaauc

SEQ ID NO: 93586 - RNA, 12 nt, Artificial Sequence
  Description of Artificial Sequence: Synthetic oligonucleotide
  modified_base (3): LNA-A
cuacacaaauca

SEQ ID NO: 93587 - RNA, 13 nt, Artificial Sequence
  Description of Artificial Sequence: Synthetic oligonucleotide
  modified_base (3): LNA-A
cuacacaaaucag

SEQ ID NO: 93588 - RNA, 14 nt, Artificial Sequence
  Description of Artificial Sequence: Synthetic oligonucleotide
  modified_base (3): LNA-A
cuacacaaaucagc

SEQ ID NO: 93589 - RNA, 13 nt, Artificial Sequence
  Description of Artificial Sequence: Synthetic oligonucleotide
  modified_base (2): LNA-G
ggaucuuauuucu

SEQ ID NO: 93590 - RNA, 14 nt, Artificial Sequence
  Description of Artificial Sequence: Synthetic oligonucleotide
  modified_base (2): LNA-G
ggaucuuauuucuu

SEQ ID NO: 93591 - RNA, 8 nt, Artificial Sequence
  Description of Artificial Sequence: Synthetic oligonucleotide
  modified_base (2): LNA-G
  modified_base (8): LNA-A
ggaucuua

SEQ ID NO: 93592 - RNA, 9 nt, Artificial Sequence
  Description of Artificial Sequence: Synthetic oligonucleotide
  modified_base (2): LNA-G
  modified_base (9): LNA-U
ggaucuuau

SEQ ID NO: 93593 - RNA, 10 nt, Artificial Sequence
  Description of Artificial Sequence: Synthetic oligonucleotide
  modified_base (2): LNA-G
  modified_base (10): LNA-U
ggaucuuauu

SEQ ID NO: 93594 - RNA, 11 nt, Artificial Sequence
  Description of Artificial Sequence: Synthetic oligonucleotide
  modified_base (2): LNA-G
  modified_base (11): LNA-U
ggaucuuauuu

SEQ ID NO: 93595 - RNA, 12 nt, Artificial Sequence
  Description of Artificial Sequence: Synthetic oligonucleotide
  modified_base (2): LNA-G
  modified_base (12): LNA-C
ggaucuuauuuc

SEQ ID NO: 93596 - RNA, 13 nt, Artificial Sequence
  Description of Artificial Sequence: Synthetic oligonucleotide
  modified_base (2): LNA-G
  modified_base (13): LNA-U
ggaucuuauuucu

SEQ ID NO: 93597 - RNA, 14 nt, Artificial Sequence
  Description of Artificial Sequence: Synthetic oligonucleotide
  modified_base (2): LNA-G
  modified_base (14): LNA-U
ggaucuuauuucuu

SEQ ID NO: 93598 - DNA, 13 bp, Artificial Sequence
  Description of Artificial Sequence: Synthetic oligonucleotide
  Description of Combined DNA/RNA Molecule: Synthetic oligonucleotide
  modified_base (8): LNA-G
uuucuucggagtt

SEQ ID NO: 93599 - DNA, 12 bp, Artificial Sequence
  Description of Artificial Sequence: Synthetic oligonucleotide
  Description of Combined DNA/RNA Molecule: Synthetic oligonucleotide
  modified_base (7): LNA-G
uucuucggagtt

SEQ ID NO: 93600 - DNA, 11 bp, Artificial Sequence
  Description of Artificial Sequence: Synthetic oligonucleotide
  Description of Combined DNA/RNA Molecule: Synthetic oligonucleotide
  modified_base (6): LNA-G
ucuucggagtt

SEQ ID NO: 93601 - DNA, 10 bp, Artificial Sequence
  Description of Artificial Sequence: Synthetic oligonucleotide
  Description of Combined DNA/RNA Molecule: Synthetic oligonucleotide
  modified_base (5): LNA-G
cuucggagtt

SEQ ID NO: 93602 - DNA, 9 bp, Artificial Sequence
  Description of Artificial Sequence: Synthetic oligonucleotide
  Description of Combined DNA/RNA Molecule: Synthetic oligonucleotide
  modified_base (4): LNA-G
uucggagtt

SEQ ID NO: 93603 - DNA, 8 bp, Artificial Sequence
  Description of Artificial Sequence: Synthetic oligonucleotide
  Description of Combined DNA/RNA Molecule: Synthetic oligonucleotide
  modified_base (3): LNA-G
ucggagtt

SEQ ID NO: 93604 - DNA, 7 bp, Artificial Sequence
  Description of Artificial Sequence: Synthetic oligonucleotide
  Description of Combined DNA/RNA Molecule: Synthetic oligonucleotide
  modified_base (2): LNA-G
cggagtt

SEQ ID NO: 93605 - DNA, 13 bp, Artificial Sequence
  Description of Artificial Sequence: Synthetic oligonucleotide
  Description of Combined DNA/RNA Molecule: Synthetic oligonucleotide
  modified_base (1): LNA-U
  modified_base (8): LNA-G
uuucuucggagtt

SEQ ID NO: 93606 - DNA, 12 bp, Artificial Sequence
  Description of Artificial Sequence: Synthetic oligonucleotide
  Description of Combined DNA/RNA Molecule: Synthetic oligonucleotide
  modified_base (1): LNA-U
  modified_base (7): LNA-G
uucuucggagtt

SEQ ID NO: 93607 - DNA, 11 bp, Artificial Sequence
  Description of Artificial Sequence: Synthetic oligonucleotide
  Description of Combined DNA/RNA Molecule: Synthetic oligonucleotide
  modified_base (1): LNA-U
  modified_base (6): LNA-G
ucuucggagtt

SEQ ID NO: 93608 - DNA, 10 bp, Artificial Sequence
  Description of Artificial Sequence: Synthetic oligonucleotide
  Description of Combined DNA/RNA Molecule: Synthetic oligonucleotide
  modified_base (1): LNA-C
  modified_base (5): LNA-G
cuucggagtt

SEQ ID NO: 93609 - DNA, 9 bp, Artificial Sequence
  Description of Artificial Sequence: Synthetic oligonucleotide
  Description of Combined DNA/RNA Molecule: Synthetic oligonucleotide
  modified_base (1): LNA-U
  modified_base (4): LNA-G
uucggagtt

SEQ ID NO: 93610 - DNA, 8 bp, Artificial Sequence
  Description of Artificial Sequence: Synthetic oligonucleotide
  Description of Combined DNA/RNA Molecule: Synthetic oligonucleotide
  modified_base (1): LNA-U
  modified_base (3): LNA-G
ucggagtt

SEQ ID NO: 93611 - DNA, 7 bp, Artificial Sequence
  Description of Artificial Sequence: Synthetic oligonucleotide
  Description of Combined DNA/RNA Molecule: Synthetic oligonucleotide
  modified_base (1): LNA-C
  modified_base (2): LNA-G
cggagtt

SEQ ID NO: 93612 - DNA, 21 bp, Artificial Sequence
  Description of Artificial Sequence: Synthetic oligonucleotide
  Description of Combined DNA/RNA Molecule: Synthetic oligonucleotide
  modified_base (2): LNA-G
  modified_base (16): LNA-G
ggaucuuauuucuucggagtt

SEQ ID NO: 93613 - DNA, 25 bp, Artificial Sequence
  Description of Artificial Sequence: Synthetic oligonucleotide
  Description of Combined DNA/RNA Molecule: Synthetic oligonucleotide
ggaucuuauuucuucggagacaatg

SEQ ID NO: 93614 - RNA, 25 nt, Artificial Sequence
  Description of Artificial Sequence: Synthetic oligonucleotide
uaagcagaguucaaaagcccuucag

SEQ ID NO: 93615 - RNA, 25 nt, Artificial Sequence
  Description of Artificial Sequence: Synthetic oligonucleotide
agcagaguucaaaagcccuucagcg

SEQ ID NO: 93616 - RNA, 25 nt, Artificial Sequence
  Description of Artificial Sequence: Synthetic oligonucleotide
cucagggucugagugaagccgcucg

SEQ ID NO: 93617 - RNA, 25 nt, Artificial Sequence
  Description of Artificial Sequence: Synthetic oligonucleotide
caagcaacuacaucacgccagucaa

SEQ ID NO: 93618 - RNA, 25 nt, Artificial Sequence
  Description of Artificial Sequence: Synthetic oligonucleotide
aucaauggcagcuucuuggugcgug

SEQ ID NO: 93619 - RNA, 25 nt, Artificial Sequence
  Description of Artificial Sequence: Synthetic oligonucleotide
uuccagcccacauuggauucaucag

SEQ ID NO: 93620 - RNA, 25 nt, Artificial Sequence
  Description of Artificial Sequence: Synthetic oligonucleotide
cagcugagaauguggaauaccuaag

SEQ ID NO: 93621 - RNA, 25 nt, Artificial Sequence
  Description of Artificial Sequence: Synthetic oligonucleotide
aacguaucuccuaauuugaggcuca

SEQ ID NO: 93622 - RNA, 25 nt, Artificial Sequence
  Description of Artificial Sequence: Synthetic oligonucleotide
ccuaaaauaauuucucuacaauugg

SEQ ID NO: 93623 - RNA, 25 nt, Artificial Sequence
  Description of Artificial Sequence: Synthetic oligonucleotide
uggaagauucagcuaguuaggagcc

SEQ ID NO: 93624 - RNA, 25 nt, Artificial Sequence
  Description of Artificial Sequence: Synthetic oligonucleotide
uuaaacucuccuagucaauauccac

SEQ ID NO: 93625 - RNA, 25 nt, Artificial Sequence
  Description of Artificial Sequence: Synthetic oligonucleotide
cagccuacaguuauguucagucaca

SEQ ID NO: 93626 - RNA, 25 nt, Artificial Sequence
  Description of Artificial Sequence: Synthetic oligonucleotide
guuauguucagucacacacacauac

SEQ ID NO: 93627 - RNA, 25 nt, Artificial Sequence
  Description of Artificial Sequence: Synthetic oligonucleotide
cacauacaaaauguuccuuuugcuu

SEQ ID NO: 93628 - RNA, 25 nt, Artificial Sequence
  Description of Artificial Sequence: Synthetic oligonucleotide
uccuuuugcuuuuaaaguaauuuuu

SEQ ID NO: 93629 - RNA, 25 nt, Artificial Sequence
  Description of Artificial Sequence: Synthetic oligonucleotide
ugaccugugaagcaacagucaaugg

SEQ ID NO: 93630 - RNA, 25 nt, Artificial Sequence
  Description of Artificial Sequence: Synthetic oligonucleotide
cuaucucacacaucgacaaaccaau

SEQ ID NO: 93631 - RNA, 25 nt, Artificial Sequence
  Description of Artificial Sequence: Synthetic oligonucleotide
uguccucaauuguacugcuaccacu

SEQ ID NO: 93632 - RNA, 25 nt, Artificial Sequence
  Description of Artificial Sequence: Synthetic oligonucleotide
aaaccguagcuggcaagcggucuua

SEQ ID NO: 93633 - RNA, 25 nt, Artificial Sequence
  Description of Artificial Sequence: Synthetic oligonucleotide
uagcuggcaagcggucuuaccggcu

SEQ ID NO: 93634 - RNA, 25 nt, Artificial Sequence
  Description of Artificial Sequence: Synthetic oligonucleotide
uuguaugguuaaaagauggguuacc

SEQ ID NO: 93635 - RNA, 25 nt, Artificial Sequence
  Description of Artificial Sequence: Synthetic oligonucleotide
ugguuaaaagauggguuaccugcga

SEQ ID NO: 93636 - RNA, 25 nt, Artificial Sequence
  Description of Artificial Sequence: Synthetic oligonucleotide
cagggaauuauacaaucuugcugag

SEQ ID NO: 93637 - RNA, 25 nt, Artificial Sequence
  Description of Artificial Sequence: Synthetic oligonucleotide
acaaucuugcugagcauaaaacagu

SEQ ID NO: 93638 - RNA, 25 nt, Artificial Sequence
  Description of Artificial Sequence: Synthetic oligonucleotide
ccaauaaugaagaguccuuuauccu

SEQ ID NO: 93639 - RNA, 25 nt, Artificial Sequence
  Description of Artificial Sequence: Synthetic oligonucleotide
acuuuggauguuccaacgcaaguug

SEQ ID NO: 93640 - RNA, 25 nt, Artificial Sequence
  Description of Artificial Sequence: Synthetic oligonucleotide
aaugcuuccacuaaacugaaaccau

SEQ ID NO: 93641 - RNA, 25 nt, Artificial Sequence
  Description of Artificial Sequence: Synthetic oligonucleotide
gagaaaguuugacuuuguuaaauau

SEQ ID NO: 93642 - RNA, 25 nt, Artificial Sequence
  Description of Artificial Sequence: Synthetic oligonucleotide
aaagaacuacuguauauuaaaaguu

SEQ ID NO: 93643 - RNA, 25 nt, Artificial Sequence
  Description of Artificial Sequence: Synthetic oligonucleotide
uuagaaauacggguuuugacuuaac

SEQ ID NO: 93644 - RNA, 25 nt, Artificial Sequence
  Description of Artificial Sequence: Synthetic oligonucleotide
aacauggguacagcaaacucagcac

SEQ ID NO: 93645 - RNA, 25 nt, Artificial Sequence
  Description of Artificial Sequence: Synthetic oligonucleotide
aaagacacagaagaugcugaccuca

SEQ ID NO: 93646 - RNA, 25 nt, Artificial Sequence
  Description of Artificial Sequence: Synthetic oligonucleotide
uaguagggagguuuauucagaucgc

SEQ ID NO: 93647 - RNA, 25 nt, Artificial Sequence
  Description of Artificial Sequence: Synthetic oligonucleotide
gccuucugcagcaggguucugggau

SEQ ID NO: 93648 - RNA, 25 nt, Artificial Sequence
  Description of Artificial Sequence: Synthetic oligonucleotide
ggucugguacauauuggaaauuaug

SEQ ID NO: 93649 - RNA, 25 nt, Artificial Sequence
  Description of Artificial Sequence: Synthetic oligonucleotide
cuaguccuuccgauggaagcacuag

SEQ ID NO: 93650 - RNA, 25 nt, Artificial Sequence
  Description of Artificial Sequence: Synthetic oligonucleotide
ccagugaauauuguuuuuaugugga

SEQ ID NO: 93651 - RNA, 25 nt, Artificial Sequence
  Description of Artificial Sequence: Synthetic oligonucleotide
augaauucaaguuggaauugguaga

SEQ ID NO: 93652 - RNA, 25 nt, Artificial Sequence
  Description of Artificial Sequence: Synthetic oligonucleotide
caggacacagauuuagacuuggaga

SEQ ID NO: 93653 - RNA, 25 nt, Artificial Sequence
  Description of Artificial Sequence: Synthetic oligonucleotide
cucaaagcacaguuacaguauucca

SEQ ID NO: 93654 - RNA, 25 nt, Artificial Sequence
  Description of Artificial Sequence: Synthetic oligonucleotide
accacugccaccacugaugaauuaa

SEQ ID NO: 93655 - RNA, 25 nt, Artificial Sequence
  Description of Artificial Sequence: Synthetic oligonucleotide
gaaacuacuagugccacaucaucac

SEQ ID NO: 93656 - RNA, 25 nt, Artificial Sequence
  Description of Artificial Sequence: Synthetic oligonucleotide
aagucggacagccucaccaaacaga

SEQ ID NO: 93657 - RNA, 25 nt, Artificial Sequence
  Description of Artificial Sequence: Synthetic oligonucleotide
gaaagcgaaaaauggaacaugaugg

SEQ ID NO: 93658 - RNA, 25 nt, Artificial Sequence
  Description of Artificial Sequence: Synthetic oligonucleotide
cccucugauuuagcauguagacugc

SEQ ID NO: 93659 - RNA, 25 nt, Artificial Sequence
  Description of Artificial Sequence: Synthetic oligonucleotide
ugagcuauuuaaggaucuauuuaug

SEQ ID NO: 93660 - RNA, 25 nt, Artificial Sequence
  Description of Artificial Sequence: Synthetic oligonucleotide
aaaaggugaaaaagcacuauuauca

SEQ ID NO: 93661 - RNA, 25 nt, Artificial Sequence
  Description of Artificial Sequence: Synthetic oligonucleotide
gaaaaagcacuauuaucaguucugc

SEQ ID NO: 93662 - RNA, 25 nt, Artificial Sequence
  Description of Artificial Sequence: Synthetic oligonucleotide
ggcugaaaagaaagauuaaaccuac

SEQ ID NO: 93663 - RNA, 25 nt, Artificial Sequence
  Description of Artificial Sequence: Synthetic oligonucleotide
uaaacccuuauaauaaaauccuucu

SEQ ID NO: 93664 - RNA, 25 nt, Artificial Sequence
  Description of Artificial Sequence: Synthetic oligonucleotide
cauacuauuagccaaugcuguagac

SEQ ID NO: 93665 - RNA, 25 nt, Artificial Sequence
  Description of Artificial Sequence: Synthetic oligonucleotide
gacagaagcauuuugauaggaauag

SEQ ID NO: 93666 - RNA, 25 nt, Artificial Sequence
  Description of Artificial Sequence: Synthetic oligonucleotide
agagcaaauaagauaauggcccuga

SEQ ID NO: 93667 - RNA, 25 nt, Artificial Sequence
  Description of Artificial Sequence: Synthetic oligonucleotide
ccaacauuuuucucuuccucaagca

SEQ ID NO: 93668 - RNA, 25 nt, Artificial Sequence
  Description of Artificial Sequence: Synthetic oligonucleotide
uuaaguaugagaaaaguucagccca

SEQ ID NO: 93669 - RNA, 25 nt, Artificial Sequence
  Description of Artificial Sequence: Synthetic oligonucleotide
caggaauaaagauggcugcugaacc

SEQ ID NO: 93670 - RNA, 25 nt, Artificial Sequence
  Description of Artificial Sequence: Synthetic oligonucleotide
aauuugaaugaccaaguucucuuca

SEQ ID NO: 93671 - RNA, 25 nt, Artificial Sequence
  Description of Artificial Sequence: Synthetic oligonucleotide
auguauaaagauagccagccuagag

SEQ ID NO: 93672 - RNA, 25 nt, Artificial Sequence
  Description of Artificial Sequence: Synthetic oligonucleotide
ggcuguaacuaucucugugaagugu

SEQ ID NO: 93673 - RNA, 25 nt, Artificial Sequence
  Description of Artificial Sequence: Synthetic oligonucleotide
ucugugaagugugagaaaauuucaa

SEQ ID NO: 93674 - RNA, 25 nt, Artificial Sequence
  Description of Artificial Sequence: Synthetic oligonucleotide
ccuuuaaggaaaugaauccuccuga

SEQ ID NO: 93675 - RNA, 25 nt, Artificial Sequence
  Description of Artificial Sequence: Synthetic oligonucleotide
aaggauacaaaaagugacaucauau

SEQ ID NO: 93676 - RNA, 25 nt, Artificial Sequence
  Description of Artificial Sequence: Synthetic oligonucleotide
agaugcaauuugaaucuucaucaua

SEQ ID NO: 93677 - RNA, 25 nt, Artificial Sequence
  Description of Artificial Sequence: Synthetic oligonucleotide
guucaaaacgaagacuagcuauuaa

SEQ ID NO: 93678 - RNA, 25 nt, Artificial Sequence
  Description of Artificial Sequence: Synthetic oligonucleotide
gugaaaccucaucucuacuaaaaau

SEQ ID NO: 93679 - RNA, 25 nt, Artificial Sequence
  Description of Artificial Sequence: Synthetic oligonucleotide
acgaaagagaagcucuaucucgccu

SEQ ID NO: 93680 - RNA, 25 nt, Artificial Sequence
  Description of Artificial Sequence: Synthetic oligonucleotide
cuccacaagcgccuucgguccaguu

SEQ ID NO: 93681 - RNA, 25 nt, Artificial Sequence
  Description of Artificial Sequence: Synthetic oligonucleotide
gagaagauuccaaagauguagccgc

SEQ ID NO: 93682 - RNA, 25 nt, Artificial Sequence
  Description of Artificial Sequence: Synthetic oligonucleotide
aaucuggauucaaugaggagacuug

SEQ ID NO: 93683 - RNA, 25 nt, Artificial Sequence
  Description of Artificial Sequence: Synthetic oligonucleotide
agaacagauuugagaguagugagga

SEQ ID NO: 93684 - RNA, 25 nt, Artificial Sequence
  Description of Artificial Sequence: Synthetic oligonucleotide
ccagagcugugcagaugaguacaaa

SEQ ID NO: 93685 - RNA, 25 nt, Artificial Sequence
  Description of Artificial Sequence: Synthetic oligonucleotide
ccucagauuguuguuguuaaugggc

SEQ ID NO: 93686 - RNA, 25 nt, Artificial Sequence
  Description of Artificial Sequence: Synthetic oligonucleotide
cuauuuuaauuauuuuuaauuuauu

SEQ ID NO: 93687 - RNA, 25 nt, Artificial Sequence
  Description of Artificial Sequence: Synthetic oligonucleotide
uuuaauuuauuaauauuuaaauaug

SEQ ID NO: 93688 - RNA, 25 nt, Artificial Sequence
  Description of Artificial Sequence: Synthetic oligonucleotide
augcaguuugaauauccuuuguuuc

SEQ ID NO: 93689 - RNA, 25 nt, Artificial Sequence
  Description of Artificial Sequence: Synthetic oligonucleotide
caugcugcuggcgucuaaguguuug

SEQ ID NO: 93690 - RNA, 25 nt, Artificial Sequence
  Description of Artificial Sequence: Synthetic oligonucleotide
agaugugcauuucaccugugacaaa

SEQ ID NO: 93691 - RNA, 25 nt, Artificial Sequence
  Description of Artificial Sequence: Synthetic oligonucleotide
ucaaaaccugugccaggcugaauua

SEQ ID NO: 93692 - RNA, 25 nt, Artificial Sequence
  Description of Artificial Sequence: Synthetic oligonucleotide
gaauguggguagucauucuuacaau

SEQ ID NO: 93693 - RNA, 25 nt, Artificial Sequence
  Description of Artificial Sequence: Synthetic oligonucleotide
auguggguagucauucuuacaauug

SEQ ID NO: 93694 - RNA, 25 nt, Artificial Sequence
  Description of Artificial Sequence: Synthetic oligonucleotide
ugaaaaugagcaucagagaguguac

SEQ ID NO: 93695 - RNA, 25 nt, Artificial Sequence
  Description of Artificial Sequence: Synthetic oligonucleotide
uugcuuuucauguagaacucagcag

SEQ ID NO: 93696 - RNA, 25 nt, Artificial Sequence
  Description of Artificial Sequence: Synthetic oligonucleotide
uguauuucuauauuuauuuucagua

SEQ ID NO: 93697 - RNA, 25 nt, Artificial Sequence
  Description of Artificial Sequence: Synthetic oligonucleotide
uuugauuaauguuucuuaaauggaa

SEQ ID NO: 93698 - RNA, 25 nt, Artificial Sequence
  Description of Artificial Sequence: Synthetic oligonucleotide
caacguguauagugccuaaaauugu

SEQ ID NO: 93699 - RNA, 25 nt, Artificial Sequence
  Description of Artificial Sequence: Synthetic oligonucleotide
cauauccuuggcuacuaacaucugg

SEQ ID NO: 93700 - RNA, 25 nt, Artificial Sequence
  Description of Artificial Sequence: Synthetic oligonucleotide
uacuaacaucuggagacugugagcu

SEQ ID NO: 93701 - RNA, 25 nt, Artificial Sequence
  Description of Artificial Sequence: Synthetic oligonucleotide
cauaaguugugugcuuuuuauuaau

SEQ ID NO: 93702 - RNA, 25 nt, Artificial Sequence
  Description of Artificial Sequence: Synthetic oligonucleotide
gcaucauuuuggcucuucuuacauu

SEQ ID NO: 93703 - RNA, 25 nt, Artificial Sequence
  Description of Artificial Sequence: Synthetic oligonucleotide
gcucuucuuacauuuguaaaaaugu

SEQ ID NO: 93704 - RNA, 25 nt, Artificial Sequence
  Description of Artificial Sequence: Synthetic oligonucleotide
agauuaggucaucuuaauucauauu

SEQ ID NO: 93705 - RNA, 25 nt, Artificial Sequence
  Description of Artificial Sequence: Synthetic oligonucleotide
auggaauugaaagaacuaaucauga

SEQ ID NO: 93706 - RNA, 25 nt, Artificial Sequence
  Description of Artificial Sequence: Synthetic oligonucleotide
cacacucauuccuucugcucuuggg

SEQ ID NO: 93707 - RNA, 25 nt, Artificial Sequence
  Description of Artificial Sequence: Synthetic oligonucleotide
uguagagguaaccaguagcuuugag

SEQ ID NO: 93708 - RNA, 25 nt, Artificial Sequence
  Description of Artificial Sequence: Synthetic oligonucleotide
caaccacaugccacguaauauuuca

SEQ ID NO: 93709 - RNA, 25 nt, Artificial Sequence
  Description of Artificial Sequence: Synthetic oligonucleotide
ucggaaacaaguuauucucuucacu

SEQ ID NO: 93710 - RNA, 25 nt, Artificial Sequence
  Description of Artificial Sequence: Synthetic oligonucleotide
acucccaauaacuaaugcuaagaaa

SEQ ID NO: 93711 - RNA, 25 nt, Artificial Sequence
  Description of Artificial Sequence: Synthetic oligonucleotide
aaugcuaagaaaugcugaaaaucaa

SEQ ID NO: 93712 - RNA, 25 nt, Artificial Sequence
  Description of Artificial Sequence: Synthetic oligonucleotide
gucuuucucuaaauaugauuacuuu

SEQ ID NO: 93713 - RNA, 25 nt, Artificial Sequence
  Description of Artificial Sequence: Synthetic oligonucleotide
ugaauuucaggcauuuuguucuaca

SEQ ID NO: 93714 - RNA, 25 nt, Artificial Sequence
  Description of Artificial Sequence: Synthetic oligonucleotide
cgauucccucucacccgggacucuc

SEQ ID NO: 93715 - RNA, 25 nt, Artificial Sequence
  Description of Artificial Sequence: Synthetic oligonucleotide
aggaaagugaaccuuuaaaguaaag

SEQ ID NO: 93716 - RNA, 25 nt, Artificial Sequence
  Description of Artificial Sequence: Synthetic oligonucleotide
gaggcugcaugcucuggaagccugg

SEQ ID NO: 93717 - RNA, 25 nt, Artificial Sequence
  Description of Artificial Sequence: Synthetic oligonucleotide
ucucugaacagaaaacaaaagagag

SEQ ID NO: 93718 - RNA, 25 nt, Artificial Sequence
  Description of Artificial Sequence: Synthetic oligonucleotide
aacuuggcuguaaucaguuaugccg

SEQ ID NO: 93719 - RNA, 25 nt, Artificial Sequence
  Description of Artificial Sequence: Synthetic oligonucleotide
agaagccaaaauuaaaagaagucca

SEQ ID NO: 93720 - RNA, 25 nt, Artificial Sequence
  Description of Artificial Sequence: Synthetic oligonucleotide
auuaaaagaaguccaggugagguua

SEQ ID NO: 93721 - RNA, 25 nt, Artificial Sequence
  Description of Artificial Sequence: Synthetic oligonucleotide
gaauccggauuaucgggaagaggac

SEQ ID NO: 93722 - RNA, 25 nt, Artificial Sequence
  Description of Artificial Sequence: Synthetic oligonucleotide
aaugugacaucaaagcaaguauugu

SEQ ID NO: 93723 - RNA, 25 nt, Artificial Sequence
  Description of Artificial Sequence: Synthetic oligonucleotide
caucaaagcaaguauuguagcacuc

SEQ ID NO: 93724 - RNA, 25 nt, Artificial Sequence
  Description of Artificial Sequence: Synthetic oligonucleotide
agagagagaaaacaaaaccacaaau

SEQ ID NO: 93725 - RNA, 25 nt, Artificial Sequence
  Description of Artificial Sequence: Synthetic oligonucleotide
ucgcuguaguauuuaagcccauaca

SEQ ID NO: 93726 - RNA, 25 nt, Artificial Sequence
  Description of Artificial Sequence: Synthetic oligonucleotide
cgcuguaguauuuaagcccauacag

SEQ ID NO: 93727 - RNA, 25 nt, Artificial Sequence
  Description of Artificial Sequence: Synthetic oligonucleotide
auuuaagcccauacagaaaccuucc

SEQ ID NO: 93728 - RNA, 25 nt, Artificial Sequence
  Description of Artificial Sequence: Synthetic oligonucleotide
auuaaaauaaacaugguauaccuac

SEQ ID NO: 93729 - RNA, 25 nt, Artificial Sequence
  Description of Artificial Sequence: Synthetic oligonucleotide
cuguucugaucggccaguuuucgga

SEQ ID NO: 93730 - RNA, 25 nt, Artificial Sequence
  Description of Artificial Sequence: Synthetic oligonucleotide
aaauaauuugaacuuuggaacaggg

SEQ ID NO: 93731 - RNA, 25 nt, Artificial Sequence
  Description of Artificial Sequence: Synthetic oligonucleotide
ugcgaccuuaauuuaacuuuccagu

SEQ ID NO: 93732 - RNA, 25 nt, Artificial Sequence
  Description of Artificial Sequence: Synthetic oligonucleotide
cugagaaagcuaaaguuugguuuug

SEQ ID NO: 93733 - RNA, 25 nt, Artificial Sequence
  Description of Artificial Sequence: Synthetic oligonucleotide
aguaaagaugcuacuucccacugua

SEQ ID NO: 93734 - RNA, 25 nt, Artificial Sequence
  Description of Artificial Sequence: Synthetic oligonucleotide
cugcuuaauugcugauaccauauga

SEQ ID NO: 93735 - RNA, 25 nt, Artificial Sequence
  Description of Artificial Sequence: Synthetic oligonucleotide
uaccauaugaaugaaacaugggcug

SEQ ID NO: 93736 - RNA, 25 nt, Artificial Sequence
  Description of Artificial Sequence: Synthetic oligonucleotide
aacuuucuuauccaacuuuuucaua

SEQ ID NO: 93737 - RNA, 25 nt, Artificial Sequence
  Description of Artificial Sequence: Synthetic oligonucleotide
ccuugcaugacaucaugaggccgga

SEQ ID NO: 93738 - RNA, 25 nt, Artificial Sequence
  Description of Artificial Sequence: Synthetic oligonucleotide
ugaauuuguauaugacugcauuugu

SEQ ID NO: 93739 - RNA, 25 nt, Artificial Sequence
  Description of Artificial Sequence: Synthetic oligonucleotide
gaauccuaguagaauguuuacuacc

SEQ ID NO: 93740 - RNA, 25 nt, Artificial Sequence
  Description of Artificial Sequence: Synthetic oligonucleotide
gaaagggaagaauuuuuugaugaaa

SEQ ID NO: 93741 - RNA, 25 nt, Artificial Sequence
  Description of Artificial Sequence: Synthetic oligonucleotide
uaucggcaugccagugugugaauuu

SEQ ID NO: 93742 - RNA, 25 nt, Artificial Sequence
  Description of Artificial Sequence: Synthetic oligonucleotide
caccucauaguagagcaauguaugu

SEQ ID NO: 93743 - RNA, 25 nt, Artificial Sequence
  Description of Artificial Sequence: Synthetic oligonucleotide
ccagaauugccaaagcacauauaua

SEQ ID NO: 93744 - RNA, 25 nt, Artificial Sequence
  Description of Artificial Sequence: Synthetic oligonucleotide
uggugaucuggguaauaguuucucc

SEQ ID NO: 93745 - RNA, 25 nt, Artificial Sequence
  Description of Artificial Sequence: Synthetic oligonucleotide
gaucuggguaauaguuucuccaaau

SEQ ID NO: 93746 - RNA, 25 nt, Artificial Sequence
  Description of Artificial Sequence: Synthetic oligonucleotide
ggaugugaugaauacuuccuagaaa

SEQ ID NO: 93747 - RNA, 25 nt, Artificial Sequence
  Description of Artificial Sequence: Synthetic oligonucleotide
cauuuccacagcuacaccauauaug

SEQ ID NO: 93748 - RNA, 25 nt, Artificial Sequence
  Description of Artificial Sequence: Synthetic oligonucleotide
acagcuacaccauauaugaauggag

SEQ ID NO: 93749 - RNA, 25 nt, Artificial Sequence
  Description of Artificial Sequence: Synthetic oligonucleotide
ugcaguucuuacacgagaagaagau

SEQ ID NO: 93750 - RNA, 25 nt, Artificial Sequence
  Description of Artificial Sequence: Synthetic oligonucleotide
acgagaagaagaucauuuacaggga

SEQ ID NO: 93751 - RNA, 25 nt, Artificial Sequence
  Description of Artificial Sequence: Synthetic oligonucleotide
cgagaagaagaucauuuacagggac

SEQ ID NO: 93752 - RNA, 25 nt, Artificial Sequence
  Description of Artificial Sequence: Synthetic oligonucleotide
aagaagaucauuuacagggaccuga

SEQ ID NO: 93753 - RNA, 25 nt, Artificial Sequence
  Description of Artificial Sequence: Synthetic oligonucleotide
agaggaagagguguuugacugcauc

SEQ ID NO: 93754 - RNA, 25 nt, Artificial Sequence
  Description of Artificial Sequence: Synthetic oligonucleotide
gaggaagagguguuugacugcaucg

SEQ ID NO: 93755 - RNA, 25 nt, Artificial Sequence
  Description of Artificial Sequence: Synthetic oligonucleotide
cuacuuugagggcgaguucacaggg

SEQ ID NO: 93756 - RNA, 25 nt, Artificial Sequence
  Description of Artificial Sequence: Synthetic oligonucleotide
agggcaucuccuggcaccucugucc

SEQ ID NO: 93757 - RNA, 25 nt, Artificial Sequence
  Description of Artificial Sequence: Synthetic oligonucleotide
ggagugauaugguuugucuuuuuaa

SEQ ID NO: 93758 - RNA, 25 nt, Artificial Sequence
  Description of Artificial Sequence: Synthetic oligonucleotide
gagugauaugguuugucuuuuuaag

SEQ ID NO: 93759 - RNA, 25 nt, Artificial Sequence
  Description of Artificial Sequence: Synthetic oligonucleotide
ugcaguaaagauccuaaagguuguc

SEQ ID NO: 93760 - RNA, 25 nt, Artificial Sequence
  Description of Artificial Sequence: Synthetic oligonucleotide
aguaaagauccuaaagguugucgac

SEQ ID NO: 93761 - RNA, 25 nt, Artificial Sequence
  Description of Artificial Sequence: Synthetic oligonucleotide
ugacaaaggacaaccuggcaauugu

SEQ ID NO: 93762 - RNA, 25 nt, Artificial Sequence
  Description of Artificial Sequence: Synthetic oligonucleotide
gcaauugugacccaguggugcgagg

SEQ ID NO: 93763 - RNA, 25 nt, Artificial Sequence
  Description of Artificial Sequence: Synthetic oligonucleotide
aacaucauccauagagacaugaaau

SEQ ID NO: 93764 - RNA, 25 nt, Artificial Sequence
  Description of Artificial Sequence: Synthetic oligonucleotide
ugaaauccaacaauauauuucucca

SEQ ID NO: 93765 - RNA, 25 nt, Artificial Sequence
  Description of Artificial Sequence: Synthetic oligonucleotide
aacaauauauuucuccaugaaggcu

SEQ ID NO: 93766 - RNA, 25 nt, Artificial Sequence
  Description of Artificial Sequence: Synthetic oligonucleotide
aacaguaaagucacgcuggaguggu

SEQ ID NO: 93767 - RNA, 25 nt, Artificial Sequence
  Description of Artificial Sequence: Synthetic oligonucleotide
ugugaagaaaguaaaggaagagagg

SEQ ID NO: 93768 - RNA, 25 nt, Artificial Sequence
  Description of Artificial Sequence: Synthetic oligonucleotide
cuuccgagccauccuugcaucgggc

SEQ ID NO: 93769 - RNA, 25 nt, Artificial Sequence
  Description of Artificial Sequence: Synthetic oligonucleotide
aauggagguugaauauccuacugug

SEQ ID NO: 93770 - RNA, 25 nt, Artificial Sequence
  Description of Artificial Sequence: Synthetic oligonucleotide
ggagguugaauauccuacuguguaa

SEQ ID NO: 93771 - RNA, 25 nt, Artificial Sequence
  Description of Artificial Sequence: Synthetic oligonucleotide
auuuugaguuuucccuuguagugua

SEQ ID NO: 93772 - RNA, 25 nt, Artificial Sequence
  Description of Artificial Sequence: Synthetic oligonucleotide
uauccuguuuguucuuuguugauug

SEQ ID NO: 93773 - RNA, 25 nt, Artificial Sequence
  Description of Artificial Sequence: Synthetic oligonucleotide
ccuguuuguucuuuguugauugaaa

SEQ ID NO: 93774 - RNA, 25 nt, Artificial Sequence
  Description of Artificial Sequence: Synthetic oligonucleotide
cucuacagccuucuuuuucuuccau

SEQ ID NO: 93775 - RNA, 25 nt, Artificial Sequence
  Description of Artificial Sequence: Synthetic oligonucleotide
ucuuccauagcuaaucuuccuucua

SEQ ID NO: 93776 - RNA, 25 nt, Artificial Sequence
  Description of Artificial Sequence: Synthetic oligonucleotide
auaaucuuccuguugaaugcuucau

SEQ ID NO: 93777 - RNA, 25 nt, Artificial Sequence
  Description of Artificial Sequence: Synthetic oligonucleotide
uaaucuuccuguugaaugcuucaug

SEQ ID NO: 93778 - RNA, 25 nt, Artificial Sequence
  Description of Artificial Sequence: Synthetic oligonucleotide
cuucaugacuugaauucuacuuuga

SEQ ID NO: 93779 - RNA, 25 nt, Artificial Sequence
  Description of Artificial Sequence: Synthetic oligonucleotide
aagagggagagaagcaacuacagac

SEQ ID NO: 93780 - RNA, 25 nt, Artificial Sequence
  Description of Artificial Sequence: Synthetic oligonucleotide
cgucuccuaccagaccaaggucaac

SEQ ID NO: 93781 - RNA, 25 nt, Artificial Sequence
  Description of Artificial Sequence: Synthetic oligonucleotide
gaucaaucggcccgacuaucucgac

SEQ ID NO: 93782 - RNA, 25 nt, Artificial Sequence
  Description of Artificial Sequence: Synthetic oligonucleotide
ggacgaacauccaaccuucccaaac

SEQ ID NO: 93783 - RNA, 25 nt, Artificial Sequence
  Description of Artificial Sequence: Synthetic oligonucleotide
agggucggaacccaagcuuagaacu

SEQ ID NO: 93784 - RNA, 25 nt, Artificial Sequence
  Description of Artificial Sequence: Synthetic oligonucleotide
ucggaacccaagcuuagaacuuuaa

SEQ ID NO: 93785 - RNA, 25 nt, Artificial Sequence
  Description of Artificial Sequence: Synthetic oligonucleotide
acccaagcuuagaacuuuaagcaac

SEQ ID NO: 93786 - RNA, 25 nt, Artificial Sequence
  Description of Artificial Sequence: Synthetic oligonucleotide
gaacuuuaagcaacaagaccaccac

SEQ ID NO: 93787 - RNA, 25 nt, Artificial Sequence
  Description of Artificial Sequence: Synthetic oligonucleotide
acuauucaguggcgagaaauaaagu

SEQ ID NO: 93788 - RNA, 25 nt, Artificial Sequence
  Description of Artificial Sequence: Synthetic oligonucleotide
cuauucaguggcgagaaauaaaguu

SEQ ID NO: 93789 - RNA, 25 nt, Artificial Sequence
  Description of Artificial Sequence: Synthetic oligonucleotide
aaacacagauaacaggaaaugaucc

SEQ ID NO: 93790 - RNA, 25 nt, Artificial Sequence
  Description of Artificial Sequence: Synthetic oligonucleotide
cuuaagaaaagagaagaaaugaaac

SEQ ID NO: 93791 - RNA, 25 nt, Artificial Sequence
  Description of Artificial Sequence: Synthetic oligonucleotide
cugaaggaguguguuuccauccucc

SEQ ID NO: 93792 - RNA, 25 nt, Artificial Sequence
  Description of Artificial Sequence: Synthetic oligonucleotide
ucaccgcgggacugaaaaucuuuga

SEQ ID NO: 93793 - RNA, 25 nt, Artificial Sequence
  Description of Artificial Sequence: Synthetic oligonucleotide
agcagaaauaagcgugccguucagg

SEQ ID NO: 93794 - RNA, 25 nt, Artificial Sequence
  Description of Artificial Sequence: Synthetic oligonucleotide
aagcgugccguucaggguccagaag

SEQ ID NO: 93795 - RNA, 25 nt, Artificial Sequence
  Description of Artificial Sequence: Synthetic oligonucleotide
agaaacagucacucaagacugcuug

SEQ ID NO: 93796 - RNA, 25 nt, Artificial Sequence
  Description of Artificial Sequence: Synthetic oligonucleotide
agaggaagaagguccaugucuuugg

SEQ ID NO: 93797 - RNA, 25 nt, Artificial Sequence
  Description of Artificial Sequence: Synthetic oligonucleotide
uguauucaaaauaugccugaaacac

SEQ ID NO: 93798 - RNA, 25 nt, Artificial Sequence
  Description of Artificial Sequence: Synthetic oligonucleotide
auuuuccucccuuucucuguaccuc

SEQ ID NO: 93799 - RNA, 25 nt, Artificial Sequence
  Description of Artificial Sequence: Synthetic oligonucleotide
caaagaaagauagagcaagacaaga

SEQ ID NO: 93800 - RNA, 25 nt, Artificial Sequence
  Description of Artificial Sequence: Synthetic oligonucleotide
aagaaagauagagcaagacaagaaa

SEQ ID NO: 93801 - RNA, 25 nt, Artificial Sequence
  Description of Artificial Sequence: Synthetic oligonucleotide
gaaagcauuuguuuguacaagaucc

SEQ ID NO: 93802 - RNA, 25 nt, Artificial Sequence
  Description of Artificial Sequence: Synthetic oligonucleotide
ugaguuaaacgaacguacuugcaga

SEQ ID NO: 93803 - RNA, 25 nt, Artificial Sequence
  Description of Artificial Sequence: Synthetic oligonucleotide
acugauacagaacgaucgauacaga

SEQ ID NO: 93804 - RNA, 25 nt, Artificial Sequence
  Description of Artificial Sequence: Synthetic oligonucleotide
auauuauauauauauaaaaauaaau

SEQ ID NO: 93805 - RNA, 25 nt, Artificial Sequence
  Description of Artificial Sequence: Synthetic oligonucleotide
auuauauauauauaaaaauaaauau

SEQ ID NO: 93806 - RNA, 25 nt, Artificial Sequence
  Description of Artificial Sequence: Synthetic oligonucleotide
ucacuggauguauuugacugcugug

SEQ ID NO: 93807 - RNA, 25 nt, Artificial Sequence
  Description of Artificial Sequence: Synthetic oligonucleotide
cagggaagaggaggagaugagagac

SEQ ID NO: 93808 - RNA, 25 nt, Artificial Sequence
  Description of Artificial Sequence: Synthetic oligonucleotide
augaucuuuuuuuugucccacuugg

SEQ ID NO: 93809 - RNA, 27 nt, Artificial Sequence
  Description of Artificial Sequence: Synthetic oligonucleotide
ggccgugaacuccucaucaaaauaccu

SEQ ID NO: 93810 - RNA, 27 nt, Artificial Sequence
  Description of Artificial Sequence: Synthetic oligonucleotide
uggugugauggugaucaucugggccgu

SEQ ID NO: 93811 - RNA, 27 nt, Artificial Sequence
  Description of Artificial Sequence: Synthetic oligonucleotide
aaacccgcaggauaguuuucuucccua

SEQ ID NO: 93812 - RNA, 27 nt, Artificial Sequence
  Description of Artificial Sequence: Synthetic oligonucleotide
caaacuggaugaaauaaauuaaaaccc

SEQ ID NO: 93813 - RNA, 27 nt, Artificial Sequence
  Description of Artificial Sequence: Synthetic oligonucleotide
agaaguccuuaacauuucccuacguga

SEQ ID NO: 93814 - RNA, 27 nt, Artificial Sequence
  Description of Artificial Sequence: Synthetic oligonucleotide
cucugucccacuggguaaacccuggcc

SEQ ID NO: 93815 - RNA, 27 nt, Artificial Sequence
  Description of Artificial Sequence: Synthetic oligonucleotide
cacaauaacaaauuuaaaccuugcucc

SEQ ID NO: 93816 - RNA, 27 nt, Artificial Sequence
  Description of Artificial Sequence: Synthetic oligonucleotide
aaaugcauuugaacaacauaauacaca

SEQ ID NO: 93817 - RNA, 27 nt, Artificial Sequence
  Description of Artificial Sequence: Synthetic oligonucleotide
ggcuuuccugucacaaagauuaaaaac

SEQ ID NO: 93818 - RNA, 27 nt, Artificial Sequence
  Description of Artificial Sequence: Synthetic oligonucleotide
agggcuuuccugucacaaagauuaaaa

SEQ ID NO: 93819 - RNA, 27 nt, Artificial Sequence
  Description of Artificial Sequence: Synthetic oligonucleotide
ggccaugcugggagacauaagcagcag

SEQ ID NO: 93820 - RNA, 27 nt, Artificial Sequence
  Description of Artificial Sequence: Synthetic oligonucleotide
ucagggagaagcuucugaaacacuucu

SEQ ID NO: 93821 - RNA, 27 nt, Artificial Sequence
  Description of Artificial Sequence: Synthetic oligonucleotide
aagggcuucuuccuuauugauggucag

SEQ ID NO: 93822 - RNA, 27 nt, Artificial Sequence
  Description of Artificial Sequence: Synthetic oligonucleotide
ugaagggcuucuuccuuauugaugguc

SEQ ID NO: 93823 - RNA, 27 nt, Artificial Sequence
  Description of Artificial Sequence: Synthetic oligonucleotide
cgcugaagggcuucuuccuuauugaug

SEQ ID NO: 93824 - RNA, 27 nt, Artificial Sequence
  Description of Artificial Sequence: Synthetic oligonucleotide
gccgcugaagggcuucuuccuuauuga

SEQ ID NO: 93825 - RNA, 27 nt, Artificial Sequence
  Description of Artificial Sequence: Synthetic oligonucleotide
acuggccgcugaagggcuucuuccuua

SEQ ID NO: 93826 - RNA, 27 nt, Artificial Sequence
  Description of Artificial Sequence: Synthetic oligonucleotide
cggagcuuuucaccuuuaguuaugcuu

SEQ ID NO: 93827 - RNA, 27 nt, Artificial Sequence
  Description of Artificial Sequence: Synthetic oligonucleotide
ccggagcuuuucaccuuuaguuaugcu

SEQ ID NO: 93828 - RNA, 27 nt, Artificial Sequence
  Description of Artificial Sequence: Synthetic oligonucleotide
cagacuguugacuggcgugauguaguu

SEQ ID NO: 93829 - RNA, 27 nt, Artificial Sequence
  Description of Artificial Sequence: Synthetic oligonucleotide
cuuuugaacucugcuuaaauccagugg

SEQ ID NO: 93830 - RNA, 27 nt, Artificial Sequence
  Description of Artificial Sequence: Synthetic oligonucleotide
gcuuuugaacucugcuuaaauccagug

SEQ ID NO: 93831 - RNA, 27 nt, Artificial Sequence
  Description of Artificial Sequence: Synthetic oligonucleotide
agggcuuuugaacucugcuuaaaucca

SEQ ID NO: 93832 - RNA, 27 nt, Artificial Sequence
  Description of Artificial Sequence: Synthetic oligonucleotide
aagggcuuuugaacucugcuuaaaucc

SEQ ID NO: 93833 - RNA, 27 nt, Artificial Sequence
  Description of Artificial Sequence: Synthetic oligonucleotide
ugaagggcuuuugaacucugcuuaaau

SEQ ID NO: 93834 - RNA, 27 nt, Artificial Sequence
  Description of Artificial Sequence: Synthetic oligonucleotide
cugaagggcuuuugaacucugcuuaaa

SEQ ID NO: 93835 - RNA, 27 nt, Artificial Sequence
  Description of Artificial Sequence: Synthetic oligonucleotide
cgcugaagggcuuuugaacucugcuua

SEQ ID NO: 93836 - RNA, 27 nt, Artificial Sequence
  Description of Artificial Sequence: Synthetic oligonucleotide
cgagcggcuucacucagacccugaggc

SEQ ID NO: 93837 - RNA, 27 nt, Artificial Sequence
  Description of Artificial Sequence: Synthetic oligonucleotide
uugacuggcgugauguaguugcuuggg

SEQ ID NO: 93838 - RNA, 27 nt, Artificial Sequence
  Description of Artificial Sequence: Synthetic oligonucleotide
cacgcaccaagaagcugccauugaucc

SEQ ID NO: 93839 - RNA, 27 nt, Artificial Sequence
  Description of Artificial Sequence: Synthetic oligonucleotide
cugaugaauccaaugugggcuggaauc

SEQ ID NO: 93840 - RNA, 27 nt, Artificial Sequence
  Description of Artificial Sequence: Synthetic oligonucleotide
cuuagguauuccacauucucagcugug

SEQ ID NO: 93841 - RNA, 27 nt, Artificial Sequence
  Description of Artificial Sequence: Synthetic oligonucleotide
ugagccucaaauuaggagauacguuuu

SEQ ID NO: 93842 - RNA, 27 nt, Artificial Sequence
  Description of Artificial Sequence: Synthetic oligonucleotide
ccaauuguagagaaauuauuuuaggaa

SEQ ID NO: 93843 - RNA, 27 nt, Artificial Sequence
  Description of Artificial Sequence: Synthetic oligonucleotide
ggcuccuaacuagcugaaucuuccaau

SEQ ID NO: 93844 - RNA, 27 nt, Artificial Sequence
  Description of Artificial Sequence: Synthetic oligonucleotide
guggauauugacuaggagaguuuaaaa

SEQ ID NO: 93845 - RNA, 27 nt, Artificial Sequence
  Description of Artificial Sequence: Synthetic oligonucleotide
ugugacugaacauaacuguaggcugaa

SEQ ID NO: 93846 - RNA, 27 nt, Artificial Sequence
  Description of Artificial Sequence: Synthetic oligonucleotide
guaugugugugugacugaacauaacug

SEQ ID NO: 93847 - RNA, 27 nt, Artificial Sequence
  Description of Artificial Sequence: Synthetic oligonucleotide
aagcaaaaggaacauuuuguaugugug

SEQ ID NO: 93848 - RNA, 27 nt, Artificial Sequence
  Description of Artificial Sequence: Synthetic oligonucleotide
aaaaauuacuuuaaaagcaaaaggaac

SEQ ID NO: 93849 - RNA, 27 nt, Artificial Sequence
  Description of Artificial Sequence: Synthetic oligonucleotide
ccauugacuguugcuucacaggucaga

SEQ ID NO: 93850 - RNA, 27 nt, Artificial Sequence
  Description of Artificial Sequence: Synthetic oligonucleotide
auugguuugucgaugugugagauaguu

SEQ ID NO: 93851 - RNA, 27 nt, Artificial Sequence
  Description of Artificial Sequence: Synthetic oligonucleotide
agugguagcaguacaauugaggacaag

SEQ ID NO: 93852 - RNA, 27 nt, Artificial Sequence
  Description of Artificial Sequence: Synthetic oligonucleotide
uaagaccgcuugccagcuacgguuuca

SEQ ID NO: 93853 - RNA, 27 nt, Artificial Sequence
  Description of Artificial Sequence: Synthetic oligonucleotide
agccgguaagaccgcuugccagcuacg

SEQ ID NO: 93854 - RNA, 27 nt, Artificial Sequence
  Description of Artificial Sequence: Synthetic oligonucleotide
gguaacccaucuuuuaaccauacaacu

SEQ ID NO: 93855 - RNA, 27 nt, Artificial Sequence
  Description of Artificial Sequence: Synthetic oligonucleotide
ucgcagguaacccaucuuuuaaccaua

SEQ ID NO: 93856 - RNA, 27 nt, Artificial Sequence
  Description of Artificial Sequence: Synthetic oligonucleotide
cucagcaagauuguauaauucccugca

SEQ ID NO: 93857 - RNA, 27 nt, Artificial Sequence
  Description of Artificial Sequence: Synthetic oligonucleotide
acuguuuuaugcucagcaagauuguau

SEQ ID NO: 93858 - RNA, 27 nt, Artificial Sequence
  Description of Artificial Sequence: Synthetic oligonucleotide
aggauaaaggacucuucauuauuggaa

SEQ ID NO: 93859 - RNA, 27 nt, Artificial Sequence
  Description of Artificial Sequence: Synthetic oligonucleotide
caacuugcguuggaacauccaaagugu

SEQ ID NO: 93860 - RNA, 27 nt, Artificial Sequence
  Description of Artificial Sequence: Synthetic oligonucleotide
augguuucaguuuaguggaagcauuua

SEQ ID NO: 93861 - RNA, 27 nt, Artificial Sequence
  Description of Artificial Sequence: Synthetic oligonucleotide
auauuuaacaaagucaaacuuucucac

SEQ ID NO: 93862 - RNA, 27 nt, Artificial Sequence
  Description of Artificial Sequence: Synthetic oligonucleotide
aacuuuuaauauacaguaguucuuuuc

SEQ ID NO: 93863 - RNA, 27 nt, Artificial Sequence
  Description of Artificial Sequence: Synthetic oligonucleotide
guuaagucaaaacccguauuucuaaag

SEQ ID NO: 93864 - RNA, 27 nt, Artificial Sequence
  Description of Artificial Sequence: Synthetic oligonucleotide
gugcugaguuugcuguacccauguuga

SEQ ID NO: 93865 - RNA, 27 nt, Artificial Sequence
  Description of Artificial Sequence: Synthetic oligonucleotide
ugaggucagcaucuucugugucuuuac

SEQ ID NO: 93866 - RNA, 27 nt, Artificial Sequence
  Description of Artificial Sequence: Synthetic oligonucleotide
gcgaucugaauaaaccucccuacuagc

SEQ ID NO: 93867 - RNA, 27 nt, Artificial Sequence
  Description of Artificial Sequence: Synthetic oligonucleotide
aucccagaacccugcugcagaaggcca

SEQ ID NO: 93868 - RNA, 27 nt, Artificial Sequence
  Description of Artificial Sequence: Synthetic oligonucleotide
cauaauuuccaauauguaccagaccuu

SEQ ID NO: 93869 - RNA, 27 nt, Artificial Sequence
  Description of Artificial Sequence: Synthetic oligonucleotide
cuagugcuuccaucggaaggacuaggu

SEQ ID NO: 93870 - RNA, 27 nt, Artificial Sequence
  Description of Artificial Sequence: Synthetic oligonucleotide
uccacauaaaaacaauauucacuggga

SEQ ID NO: 93871 - RNA, 27 nt, Artificial Sequence
  Description of Artificial Sequence: Synthetic oligonucleotide
ucuaccaauuccaacuugaauucauug

SEQ ID NO: 93872 - RNA, 27 nt, Artificial Sequence
  Description of Artificial Sequence: Synthetic oligonucleotide
ucuccaagucuaaaucuguguccugag

SEQ ID NO: 93873 - RNA, 27 nt, Artificial Sequence
  Description of Artificial Sequence: Synthetic oligonucleotide
uggaauacuguaacugugcuuugagga

SEQ ID NO: 93874 - RNA, 27 nt, Artificial Sequence
  Description of Artificial Sequence: Synthetic oligonucleotide
uuaauucaucagugguggcagugguag

SEQ ID NO: 93875 - RNA, 27 nt, Artificial Sequence
  Description of Artificial Sequence: Synthetic oligonucleotide
gugaugauguggcacuaguaguuucuu

SEQ ID NO: 93876 - RNA, 27 nt, Artificial Sequence
  Description of Artificial Sequence: Synthetic oligonucleotide
ucuguuuggugaggcuguccgacuuug

SEQ ID NO: 93877 - RNA, 27 nt, Artificial Sequence
  Description of Artificial Sequence: Synthetic oligonucleotide
ccaucauguuccauuuuucgcuuucuc

SEQ ID NO: 93878 - RNA, 27 nt, Artificial Sequence
  Description of Artificial Sequence: Synthetic oligonucleotide
gcagucuacaugcuaaaucagagggua

SEQ ID NO: 93879 - RNA, 27 nt, Artificial Sequence
  Description of Artificial Sequence: Synthetic oligonucleotide
cauaaauagauccuuaaauagcucaaa

SEQ ID NO: 93880 - RNA, 27 nt, Artificial Sequence
  Description of Artificial Sequence: Synthetic oligonucleotide
ugauaauagugcuuuuucaccuuuuuc

SEQ ID NO: 93881 - RNA, 27 nt, Artificial Sequence
  Description of Artificial Sequence: Synthetic oligonucleotide
gcagaacugauaauagugcuuuuucac

SEQ ID NO: 93882 - RNA, 27 nt, Artificial Sequence
  Description of Artificial Sequence: Synthetic oligonucleotide
guagguuuaaucuuucuuuucagccau

SEQ ID NO: 93883 - RNA, 27 nt, Artificial Sequence
  Description of Artificial Sequence: Synthetic oligonucleotide
agaaggauuuuauuauaaggguuuaau

SEQ ID NO: 93884 - RNA, 27 nt, Artificial Sequence
  Description of Artificial Sequence: Synthetic oligonucleotide
gucuacagcauuggcuaauaguaugaa

SEQ ID NO: 93885 - RNA, 27 nt, Artificial Sequence
  Description of Artificial Sequence: Synthetic oligonucleotide
cuauuccuaucaaaaugcuucugucua

SEQ ID NO: 93886 - RNA, 27 nt, Artificial Sequence
  Description of Artificial Sequence: Synthetic oligonucleotide
ucagggccauuaucuuauuugcucuau

SEQ ID NO: 93887 - RNA, 27 nt, Artificial Sequence
  Description of Artificial Sequence: Synthetic oligonucleotide
ugcuugaggaagagaaaaauguugguc

SEQ ID NO: 93888 - RNA, 27 nt, Artificial Sequence
  Description of Artificial Sequence: Synthetic oligonucleotide
ugggcugaacuuuucucauacuuaaag

SEQ ID NO: 93889 - RNA, 27 nt, Artificial Sequence
  Description of Artificial Sequence: Synthetic oligonucleotide
gguucagcagccaucuuuauuccugcg

SEQ ID NO: 93890 - RNA, 27 nt, Artificial Sequence
  Description of Artificial Sequence: Synthetic oligonucleotide
ugaagagaacuuggucauucaaauuuc

SEQ ID NO: 93891 - RNA, 27 nt, Artificial Sequence
  Description of Artificial Sequence: Synthetic oligonucleotide
cucuaggcuggcuaucuuuauacauac

SEQ ID NO: 93892 - RNA, 27 nt, Artificial Sequence
  Description of Artificial Sequence: Synthetic oligonucleotide
acacuucacagagauaguuacagccau

SEQ ID NO: 93893 - RNA, 27 nt, Artificial Sequence
  Description of Artificial Sequence: Synthetic oligonucleotide
uugaaauuuucucacacuucacagaga

SEQ ID NO: 93894 - RNA, 27 nt, Artificial Sequence
  Description of Artificial Sequence: Synthetic oligonucleotide
ucaggaggauucauuuccuuaaaggaa

SEQ ID NO: 93895 - RNA, 27 nt, Artificial Sequence
  Description of Artificial Sequence: Synthetic oligonucleotide
auaugaugucacuuuuuguauccuuga

SEQ ID NO: 93896 - RNA, 27 nt, Artificial Sequence
  Description of Artificial Sequence: Synthetic oligonucleotide
uaugaugaagauucaaauugcaucuua

SEQ ID NO: 93897 - RNA, 27 nt, Artificial Sequence
  Description of Artificial Sequence: Synthetic oligonucleotide
uuaauagcuagucuucguuuugaacag

SEQ ID NO: 93898 - RNA, 27 nt, Artificial Sequence
  Description of Artificial Sequence: Synthetic oligonucleotide
auuuuuaguagagaugagguuucacca

SEQ ID NO: 93899 - RNA, 27 nt, Artificial Sequence
  Description of Artificial Sequence: Synthetic oligonucleotide
aggcgagauagagcuucucuuucguuc

SEQ ID NO: 93900 - RNA, 27 nt, Artificial Sequence
  Description of Artificial Sequence: Synthetic oligonucleotide
aacuggaccgaaggcgcuuguggagaa

SEQ ID NO: 93901 - RNA, 27 nt, Artificial Sequence
  Description of Artificial Sequence: Synthetic oligonucleotide
gcggcuacaucuuuggaaucuucuccu

SEQ ID NO: 93902 - RNA, 27 nt, Artificial Sequence
  Description of Artificial Sequence: Synthetic oligonucleotide
caagucuccucauugaauccagauugg

SEQ ID NO: 93903 - RNA, 27 nt, Artificial Sequence
  Description of Artificial Sequence: Synthetic oligonucleotide
uccucacuacucucaaaucuguucugg

SEQ ID NO: 93904 - RNA, 27 nt, Artificial Sequence
  Description of Artificial Sequence: Synthetic oligonucleotide
uuuguacucaucugcacagcucuggcu

SEQ ID NO: 93905 - RNA, 27 nt, Artificial Sequence
  Description of Artificial Sequence: Synthetic oligonucleotide
gcccauuaacaacaacaaucugaggug

SEQ ID NO: 93906 - RNA, 27 nt, Artificial Sequence
  Description of Artificial Sequence: Synthetic oligonucleotide
aauaaauuaaaaauaauuaaaauagug

SEQ ID NO: 93907 - RNA, 27 nt, Artificial Sequence
  Description of Artificial Sequence: Synthetic oligonucleotide
cauauuuaaauauuaauaaauuaaaaa

SEQ ID NO: 93908 - RNA, 27 nt, Artificial Sequence
  Description of Artificial Sequence: Synthetic oligonucleotide
gaaacaaaggauauucaaacugcauag

SEQ ID NO: 93909 - RNA, 27 nt, Artificial Sequence
  Description of Artificial Sequence: Synthetic oligonucleotide
caaacacuuagacgccagcagcauggg

SEQ ID NO: 93910 - RNA, 27 nt, Artificial Sequence
  Description of Artificial Sequence: Synthetic oligonucleotide
uuugucacaggugaaaugcacaucuga

SEQ ID NO: 93911 - RNA, 27 nt, Artificial Sequence
  Description of Artificial Sequence: Synthetic oligonucleotide
uaauucagccuggcacagguuuugauc

SEQ ID NO: 93912 - RNA, 27 nt, Artificial Sequence
  Description of Artificial Sequence: Synthetic oligonucleotide
auuguaagaaugacuacccacauucac

SEQ ID NO: 93913 - RNA, 27 nt, Artificial Sequence
  Description of Artificial Sequence: Synthetic oligonucleotide
caauuguaagaaugacuacccacauuc

SEQ ID NO: 93914 - RNA, 27 nt, Artificial Sequence
  Description of Artificial Sequence: Synthetic oligonucleotide
guacacucucugaugcucauuuucaua

SEQ ID NO: 93915 - RNA, 27 nt, Artificial Sequence
  Description of Artificial Sequence: Synthetic oligonucleotide
cugcugaguucuacaugaaaagcaaau

SEQ ID NO: 93916 - RNA, 27 nt, Artificial Sequence
  Description of Artificial Sequence: Synthetic oligonucleotide
uacugaaaauaaauauagaaauacaac

SEQ ID NO: 93917 - RNA, 27 nt, Artificial Sequence
  Description of Artificial Sequence: Synthetic oligonucleotide
uuccauuuaagaaacauuaaucaaaac

SEQ ID NO: 93918 - RNA, 27 nt, Artificial Sequence
  Description of Artificial Sequence: Synthetic oligonucleotide
acaauuuuaggcacuauacacguuguu

SEQ ID NO: 93919 - RNA, 27 nt, Artificial Sequence
  Description of Artificial Sequence: Synthetic oligonucleotide
ccagauguuaguagccaaggauauggu

SEQ ID NO: 93920 - RNA, 27 nt, Artificial Sequence
  Description of Artificial Sequence: Synthetic oligonucleotide
agcucacagucuccagauguuaguagc

SEQ ID NO: 93921 - RNA, 27 nt, Artificial Sequence
  Description of Artificial Sequence: Synthetic oligonucleotide
auuaauaaaaagcacacaacuuauggc

SEQ ID NO: 93922 - RNA, 27 nt, Artificial Sequence
  Description of Artificial Sequence: Synthetic oligonucleotide
aauguaagaagagccaaaaugaugcau

SEQ ID NO: 93923 - RNA, 27 nt, Artificial Sequence
  Description of Artificial Sequence: Synthetic oligonucleotide
acauuuuuacaaauguaagaagagcca

SEQ ID NO: 93924 - RNA, 27 nt, Artificial Sequence
  Description of Artificial Sequence: Synthetic oligonucleotide
aauaugaauuaagaugaccuaaucugu

SEQ ID NO: 93925 - RNA, 27 nt, Artificial Sequence
  Description of Artificial Sequence: Synthetic oligonucleotide
ucaugauuaguucuuucaauuccaucc

SEQ ID NO: 93926 - RNA, 27 nt, Artificial Sequence
  Description of Artificial Sequence: Synthetic oligonucleotide
cccaagagcagaaggaaugagugugca

SEQ ID NO: 93927 - RNA, 27 nt, Artificial Sequence
  Description of Artificial Sequence: Synthetic oligonucleotide
cucaaagcuacugguuaccucuacacc

SEQ ID NO: 93928 - RNA, 27 nt, Artificial Sequence
  Description of Artificial Sequence: Synthetic oligonucleotide
ugaaauauuacguggcaugugguuggg

SEQ ID NO: 93929 - RNA, 27 nt, Artificial Sequence
  Description of Artificial Sequence: Synthetic oligonucleotide
agugaagagaauaacuuguuuccgaag

SEQ ID NO: 93930 - RNA, 27 nt, Artificial Sequence
  Description of Artificial Sequence: Synthetic oligonucleotide
uuucuuagcauuaguuauugggaguga

SEQ ID NO: 93931 - RNA, 27 nt, Artificial Sequence
  Description of Artificial Sequence: Synthetic oligonucleotide
uugauuuucagcauuucuuagcauuag

SEQ ID NO: 93932 - RNA, 27 nt, Artificial Sequence
  Description of Artificial Sequence: Synthetic oligonucleotide
aaaguaaucauauuuagagaaagacag

SEQ ID NO: 93933 - RNA, 27 nt, Artificial Sequence
  Description of Artificial Sequence: Synthetic oligonucleotide
uguagaacaaaaugccugaaauucagc

SEQ ID NO: 93934 - RNA, 27 nt, Artificial Sequence
  Description of Artificial Sequence: Synthetic oligonucleotide
gagagucccgggugagagggaaucgcc

SEQ ID NO: 93935 - RNA, 27 nt, Artificial Sequence
  Description of Artificial Sequence: Synthetic oligonucleotide
cuuuacuuuaaagguucacuuuccuug

SEQ ID NO: 93936 - RNA, 27 nt, Artificial Sequence
  Description of Artificial Sequence: Synthetic oligonucleotide
ccaggcuuccagagcaugcagccuccu

SEQ ID NO: 93937 - RNA, 27 nt, Artificial Sequence
  Description of Artificial Sequence: Synthetic oligonucleotide
cucucuuuuguuuucuguucagagaaa

SEQ ID NO: 93938 - RNA, 27 nt, Artificial Sequence
  Description of Artificial Sequence: Synthetic oligonucleotide
cggcauaacugauuacagccaaguuca

SEQ ID NO: 93939 - RNA, 27 nt, Artificial Sequence
  Description of Artificial Sequence: Synthetic oligonucleotide
uggacuucuuuuaauuuuggcuucuuc

SEQ ID NO: 93940 - RNA, 27 nt, Artificial Sequence
  Description of Artificial Sequence: Synthetic oligonucleotide
uaaccucaccuggacuucuuuuaauuu

SEQ ID NO: 93941 - RNA, 27 nt, Artificial Sequence
  Description of Artificial Sequence: Synthetic oligonucleotide
guccucuucccgauaauccggauucag

SEQ ID NO: 93942 - RNA, 27 nt, Artificial Sequence
  Description of Artificial Sequence: Synthetic oligonucleotide
acaauacuugcuuugaugucacauuaa

SEQ ID NO: 93943 - RNA, 27 nt, Artificial Sequence
  Description of Artificial Sequence: Synthetic oligonucleotide
gagugcuacaauacuugcuuugauguc

SEQ ID NO: 93944 - RNA, 27 nt, Artificial Sequence
  Description of Artificial Sequence: Synthetic oligonucleotide
auuugugguuuuguuuucucucucucu

SEQ ID NO: 93945 - RNA, 27 nt, Artificial Sequence
  Description of Artificial Sequence: Synthetic oligonucleotide
uguaugggcuuaaauacuacagcgagg

SEQ ID NO: 93946 - RNA, 27 nt, Artificial Sequence
  Description of Artificial Sequence: Synthetic oligonucleotide
cuguaugggcuuaaauacuacagcgag

SEQ ID NO: 93947 - RNA, 27 nt, Artificial Sequence
  Description of Artificial Sequence: Synthetic oligonucleotide
ggaagguuucuguaugggcuuaaauac

SEQ ID NO: 93948 - RNA, 27 nt, Artificial Sequence
  Description of Artificial Sequence: Synthetic oligonucleotide
guagguauaccauguuuauuuuaauac

SEQ ID NO: 93949 - RNA, 27 nt, Artificial Sequence
  Description of Artificial Sequence: Synthetic oligonucleotide
uccgaaaacuggccgaucagaacagcc

SEQ ID NO: 93950 - RNA, 27 nt, Artificial Sequence
  Description of Artificial Sequence: Synthetic oligonucleotide
cccuguuccaaaguucaaauuauuugu

SEQ ID NO: 93951 - RNA, 27 nt, Artificial Sequence
  Description of Artificial Sequence: Synthetic oligonucleotide
acuggaaaguuaaauuaaggucgcaau

SEQ ID NO: 93952 - RNA, 27 nt, Artificial Sequence
  Description of Artificial Sequence: Synthetic oligonucleotide
caaaaccaaacuuuagcuuucucagcc

SEQ ID NO: 93953 - RNA, 27 nt, Artificial Sequence
  Description of Artificial Sequence: Synthetic oligonucleotide
uacagugggaaguagcaucuuuacuuu

SEQ ID NO: 93954 - RNA, 27 nt, Artificial Sequence
  Description of Artificial Sequence: Synthetic oligonucleotide
ucauaugguaucagcaauuaagcagua

SEQ ID NO: 93955 - RNA, 27 nt, Artificial Sequence
  Description of Artificial Sequence: Synthetic oligonucleotide
cagcccauguuucauucauaugguauc

SEQ ID NO: 93956 - RNA, 27 nt, Artificial Sequence
  Description of Artificial Sequence: Synthetic oligonucleotide
uaugaaaaaguuggauaagaaaguugg

SEQ ID NO: 93957 - RNA, 27 nt, Artificial Sequence
  Description of Artificial Sequence: Synthetic oligonucleotide
uccggccucaugaugucaugcaaggcu

SEQ ID NO: 93958 - RNA, 27 nt, Artificial Sequence
  Description of Artificial Sequence: Synthetic oligonucleotide
acaaaugcagucauauacaaauucagg

SEQ ID NO: 93959 - RNA, 27 nt, Artificial Sequence
  Description of Artificial Sequence: Synthetic oligonucleotide
gguaguaaacauucuacuaggauucuu

SEQ ID NO: 93960 - RNA, 27 nt, Artificial Sequence
  Description of Artificial Sequence: Synthetic oligonucleotide
uuucaucaaaaaauucuucccuuucug

SEQ ID NO: 93961 - RNA, 27 nt, Artificial Sequence
  Description of Artificial Sequence: Synthetic oligonucleotide
aaauucacacacuggcaugccgauagc

SEQ ID NO: 93962 - RNA, 27 nt, Artificial Sequence
  Description of Artificial Sequence: Synthetic oligonucleotide
acauacauugcucuacuaugaggugaa

SEQ ID NO: 93963 - RNA, 27 nt, Artificial Sequence
  Description of Artificial Sequence: Synthetic oligonucleotide
uauauaugugcuuuggcaauucuggug

SEQ ID NO: 93964 - RNA, 27 nt, Artificial Sequence
  Description of Artificial Sequence: Synthetic oligonucleotide
ggagaaacuauuacccagaucaccacu

SEQ ID NO: 93965 - RNA, 27 nt, Artificial Sequence
  Description of Artificial Sequence: Synthetic oligonucleotide
auuuggagaaacuauuacccagaucac

SEQ ID NO: 93966 - RNA, 27 nt, Artificial Sequence
  Description of Artificial Sequence: Synthetic oligonucleotide
uuucuaggaaguauucaucacauccac

SEQ ID NO: 93967 - RNA, 27 nt, Artificial Sequence
  Description of Artificial Sequence: Synthetic oligonucleotide
cauauaugguguagcuguggaaaugcg

SEQ ID NO: 93968 - RNA, 27 nt, Artificial Sequence
  Description of Artificial Sequence: Synthetic oligonucleotide
cuccauucauauaugguguagcugugg

SEQ ID NO: 93969 - RNA, 27 nt, Artificial Sequence
  Description of Artificial Sequence: Synthetic oligonucleotide
aucuucuucucguguaagaacugcagc

SEQ ID NO: 93970 - RNA, 27 nt, Artificial Sequence
  Description of Artificial Sequence: Synthetic oligonucleotide
ucccuguaaaugaucuucuucucgugu

SEQ ID NO: 93971 - RNA, 27 nt, Artificial Sequence
  Description of Artificial Sequence: Synthetic oligonucleotide
gucccuguaaaugaucuucuucucgug

SEQ ID NO: 93972 - RNA, 27 nt, Artificial Sequence
  Description of Artificial Sequence: Synthetic oligonucleotide
ucaggucccuguaaaugaucuucuucu

SEQ ID NO: 93973 - RNA, 27 nt, Artificial Sequence
  Description of Artificial Sequence: Synthetic oligonucleotide
gaugcagucaaacaccucuuccucugu

SEQ ID NO: 93974 - RNA, 27 nt, Artificial Sequence
  Description of Artificial Sequence: Synthetic oligonucleotide
cgaugcagucaaacaccucuuccucug

SEQ ID NO: 93975 - RNA, 27 nt, Artificial Sequence
  Description of Artificial Sequence: Synthetic oligonucleotide
cccugugaacucgcccucaaaguagcg

SEQ ID NO: 93976 - RNA, 27 nt, Artificial Sequence
  Description of Artificial Sequence: Synthetic oligonucleotide
ggacagaggugccaggagaugcccuca

SEQ ID NO: 93977 - RNA, 27 nt, Artificial Sequence
  Description of Artificial Sequence: Synthetic oligonucleotide
uuaaaaagacaaaccauaucacuccuu

SEQ ID NO: 93978 - RNA, 27 nt, Artificial Sequence
  Description of Artificial Sequence: Synthetic oligonucleotide
cuuaaaaagacaaaccauaucacuccu

SEQ ID NO: 93979 - RNA, 27 nt, Artificial Sequence
  Description of Artificial Sequence: Synthetic oligonucleotide
gacaaccuuuaggaucuuuacugcaac

SEQ ID NO: 93980 - RNA, 27 nt, Artificial Sequence
  Description of Artificial Sequence: Synthetic oligonucleotide
gucgacaaccuuuaggaucuuuacugc

SEQ ID NO: 93981 - RNA, 27 nt, Artificial Sequence
  Description of Artificial Sequence: Synthetic oligonucleotide
acaauugccagguuguccuuugucaug

SEQ ID NO: 93982 - RNA, 27 nt, Artificial Sequence
  Description of Artificial Sequence: Synthetic oligonucleotide
ccucgcaccacugggucacaauugcca

SEQ ID NO: 93983 - RNA, 27 nt, Artificial Sequence
  Description of Artificial Sequence: Synthetic oligonucleotide
auuucaugucucuauggaugauguucu

SEQ ID NO: 93984 - RNA, 27 nt, Artificial Sequence
  Description of Artificial Sequence: Synthetic oligonucleotide
uggagaaauauauuguuggauuucaug

SEQ ID NO: 93985 - RNA, 27 nt, Artificial Sequence
  Description of Artificial Sequence: Synthetic oligonucleotide
agccuucauggagaaauauauuguugg

SEQ ID NO: 93986 - RNA, 27 nt, Artificial Sequence
  Description of Artificial Sequence: Synthetic oligonucleotide
accacuccagcgugacuuuacuguugc

SEQ ID NO: 93987 - RNA, 27 nt, Artificial Sequence
  Description of Artificial Sequence: Synthetic oligonucleotide
ccucucuuccuuuacuuucuucacaca

SEQ ID NO: 93988 - RNA, 27 nt, Artificial Sequence
  Description of Artificial Sequence: Synthetic oligonucleotide
gcccgaugcaaggauggcucggaagcg

SEQ ID NO: 93989 - RNA, 27 nt, Artificial Sequence
  Description of Artificial Sequence: Synthetic oligonucleotide
cacaguaggauauucaaccuccauuuc

SEQ ID NO: 93990 - RNA, 27 nt, Artificial Sequence
  Description of Artificial Sequence: Synthetic oligonucleotide
uuacacaguaggauauucaaccuccau

SEQ ID NO: 93991 - RNA, 27 nt, Artificial Sequence
  Description of Artificial Sequence: Synthetic oligonucleotide
uacacuacaagggaaaacucaaaaucu

SEQ ID NO: 93992 - RNA, 27 nt, Artificial Sequence
  Description of Artificial Sequence: Synthetic oligonucleotide
caaucaacaaagaacaaacaggauaaa

SEQ ID NO: 93993 - RNA, 27 nt, Artificial Sequence
  Description of Artificial Sequence: Synthetic oligonucleotide
uuucaaucaacaaagaacaaacaggau

SEQ ID NO: 93994 - RNA, 27 nt, Artificial Sequence
  Description of Artificial Sequence: Synthetic oligonucleotide
auggaagaaaaagaaggcuguagagaa

SEQ ID NO: 93995 - RNA, 27 nt, Artificial Sequence
  Description of Artificial Sequence: Synthetic oligonucleotide
uagaaggaagauuagcuauggaagaaa

SEQ ID NO: 93996 - RNA, 27 nt, Artificial Sequence
  Description of Artificial Sequence: Synthetic oligonucleotide
augaagcauucaacaggaagauuauuu

SEQ ID NO: 93997 - RNA, 27 nt, Artificial Sequence
  Description of Artificial Sequence: Synthetic oligonucleotide
caugaagcauucaacaggaagauuauu

SEQ ID NO: 93998 - RNA, 27 nt, Artificial Sequence
  Description of Artificial Sequence: Synthetic oligonucleotide
ucaaaguagaauucaagucaugaagca

SEQ ID NO: 93999 - RNA, 27 nt, Artificial Sequence
  Description of Artificial Sequence: Synthetic oligonucleotide
gucuguaguugcuucucucccucuuag

SEQ ID NO: 94000 - RNA, 27 nt, Artificial Sequence
  Description of Artificial Sequence: Synthetic oligonucleotide
guugaccuuggucugguaggagacggc

SEQ ID NO: 94001 - RNA, 27 nt, Artificial Sequence
  Description of Artificial Sequence: Synthetic oligonucleotide
gucgagauagucgggccgauugaucuc

SEQ ID NO: 94002 - RNA, 27 nt, Artificial Sequence
  Description of Artificial Sequence: Synthetic oligonucleotide
guuugggaagguuggauguucguccuc

SEQ ID NO: 94003 - RNA, 27 nt, Artificial Sequence
  Description of Artificial Sequence: Synthetic oligonucleotide
aguucuaagcuuggguuccgacccuaa

SEQ ID NO: 94004 - RNA, 27 nt, Artificial Sequence
  Description of Artificial Sequence: Synthetic oligonucleotide
uuaaaguucuaagcuuggguuccgacc

SEQ ID NO: 94005 - RNA, 27 nt, Artificial Sequence
  Description of Artificial Sequence: Synthetic oligonucleotide
guugcuuaaaguucuaagcuuggguuc

SEQ ID NO: 94006 - RNA, 27 nt, Artificial Sequence
  Description of Artificial Sequence: Synthetic oligonucleotide
gugguggucuuguugcuuaaaguucua

SEQ ID NO: 94007 - RNA, 27 nt, Artificial Sequence
  Description of Artificial Sequence: Synthetic oligonucleotide
acuuuauuucucgccacugaauaguag

SEQ ID NO: 94008 - RNA, 27 nt, Artificial Sequence
  Description of Artificial Sequence: Synthetic oligonucleotide
aacuuuauuucucgccacugaauagua

SEQ ID NO: 94009 - RNA, 27 nt, Artificial Sequence
  Description of Artificial Sequence: Synthetic oligonucleotide
ggaucauuuccuguuaucuguguuugu

SEQ ID NO: 94010 - RNA, 27 nt, Artificial Sequence
  Description of Artificial Sequence: Synthetic oligonucleotide
guuucauuucuucucuuuucuuaaggc

SEQ ID NO: 94011 - RNA, 27 nt, Artificial Sequence
  Description of Artificial Sequence: Synthetic oligonucleotide
ggaggauggaaacacacuccuucaguu

SEQ ID NO: 94012 - RNA, 27 nt, Artificial Sequence
  Description of Artificial Sequence: Synthetic oligonucleotide
ucaaagauuuucagucccgcggugaca

SEQ ID NO: 94013 - RNA, 27 nt, Artificial Sequence
  Description of Artificial Sequence: Synthetic oligonucleotide
ccugaacggcacgcuuauuucugcugu

SEQ ID NO: 94014 - RNA, 27 nt, Artificial Sequence
  Description of Artificial Sequence: Synthetic oligonucleotide
cuucuggacccugaacggcacgcuuau

SEQ ID NO: 94015 - RNA, 27 nt, Artificial Sequence
  Description of Artificial Sequence: Synthetic oligonucleotide
caagcagucuugagugacuguuucuuc

SEQ ID NO: 94016 - RNA, 27 nt, Artificial Sequence
  Description of Artificial Sequence: Synthetic oligonucleotide
ccaaagacauggaccuucuuccucuga

SEQ ID NO: 94017 - RNA, 27 nt, Artificial Sequence
  Description of Artificial Sequence: Synthetic oligonucleotide
guguuucaggcauauuuugaauacauc

SEQ ID NO: 94018 - RNA, 27 nt, Artificial Sequence
  Description of Artificial Sequence: Synthetic oligonucleotide
gagguacagagaaagggaggaaaauag

SEQ ID NO: 94019 - RNA, 27 nt, Artificial Sequence
  Description of Artificial Sequence: Synthetic oligonucleotide
ucuugucuugcucuaucuuucuuuggu

SEQ ID NO: 94020 - RNA, 27 nt, Artificial Sequence
  Description of Artificial Sequence: Synthetic oligonucleotide
uuucuugucuugcucuaucuuucuuug

SEQ ID NO: 94021 - RNA, 27 nt, Artificial Sequence
  Description of Artificial Sequence: Synthetic oligonucleotide
ggaucuuguacaaacaaaugcuuucuc

SEQ ID NO: 94022 - RNA, 27 nt, Artificial Sequence
  Description of Artificial Sequence: Synthetic oligonucleotide
ucugcaaguacguucguuuaacucaag

SEQ ID NO: 94023 - RNA, 27 nt, Artificial Sequence
  Description of Artificial Sequence: Synthetic oligonucleotide
ucuguaucgaucguucuguaucagucu

SEQ ID NO: 94024 - RNA, 27 nt, Artificial Sequence
  Description of Artificial Sequence: Synthetic oligonucleotide
auuuauuuuuauauauauauaauauau

SEQ ID NO: 94025 - RNA, 27 nt, Artificial Sequence
  Description of Artificial Sequence: Synthetic oligonucleotide
auauuuauuuuuauauauauauaauau

SEQ ID NO: 94026 - RNA, 27 nt, Artificial Sequence
  Description of Artificial Sequence: Synthetic oligonucleotide
cacagcagucaaauacauccagugaag

SEQ ID NO: 94027 - RNA, 27 nt, Artificial Sequence
  Description of Artificial Sequence: Synthetic oligonucleotide
gucucucaucuccuccucuucccuguc

SEQ ID NO: 94028 - RNA, 27 nt, Artificial Sequence
  Description of Artificial Sequence: Synthetic oligonucleotide
ccaagugggacaaaaaaaagaucaugc

SEQ ID NO: 94029 - RNA, 14 nt, Artificial Sequence
  Description of Artificial Sequence: Synthetic oligonucleotide
guauuuugaugagg

SEQ ID NO: 94030 - RNA, 12 nt, Artificial Sequence
  Description of Artificial Sequence: Synthetic oligonucleotide
ggcccagaugau

SEQ ID NO: 94031 - RNA, 14 nt, Artificial Sequence
  Description of Artificial Sequence: Synthetic oligonucleotide
gggaagaaaacuau

SEQ ID NO: 94032 - RNA, 15 nt, Artificial Sequence
  Description of Artificial Sequence: Synthetic oligonucleotide
guuuuaauuuauuuc

SEQ ID NO: 94033 - RNA, 12 nt, Artificial Sequence
  Description of Artificial Sequence: Synthetic oligonucleotide
acguagggaaau

SEQ ID NO: 94034 - RNA, 12 nt, Artificial Sequence
  Description of Artificial Sequence: Synthetic oligonucleotide
ccaggguuuacc

SEQ ID NO: 94035 - RNA, 11 nt, Artificial Sequence
  Description of Artificial Sequence: Synthetic oligonucleotide
agcaagguuua

SEQ ID NO: 94036 - RNA, 12 nt, Artificial Sequence
  Description of Artificial Sequence: Synthetic oligonucleotide
uguauuauguug

SEQ ID NO: 94037 - RNA, 15 nt, Artificial Sequence
  Description of Artificial Sequence: Synthetic oligonucleotide
uuuuaaucuuuguga

SEQ ID NO: 94038 - RNA, 14 nt, Artificial Sequence
  Description of Artificial Sequence: Synthetic oligonucleotide
uuaaucuuugugac

SEQ ID NO: 94039 - RNA, 13 nt, Artificial Sequence
  Description of Artificial Sequence: Synthetic oligonucleotide
gcugcuuaugucu

SEQ ID NO: 94040 - RNA, 14 nt, Artificial Sequence
  Description of Artificial Sequence: Synthetic oligonucleotide
aaguguuucagaag

SEQ ID NO: 94041 - RNA, 13 nt, Artificial Sequence
  Description of Artificial Sequence: Synthetic oligonucleotide
gaccaucaauaag

SEQ ID NO: 94042 - RNA, 13 nt, Artificial Sequence
  Description of Artificial Sequence: Synthetic oligonucleotide
ccaucaauaagga

SEQ ID NO: 94043 - RNA, 14 nt, Artificial Sequence
  Description of Artificial Sequence: Synthetic oligonucleotide
ucaauaaggaagaa

SEQ ID NO: 94044 - RNA, 14 nt, Artificial Sequence
  Description of Artificial Sequence: Synthetic oligonucleotide
aauaaggaagaagc

SEQ ID NO: 94045 - RNA, 13 nt, Artificial Sequence
  Description of Artificial Sequence: Synthetic oligonucleotide
aggaagaagcccu

SEQ ID NO: 94046 - RNA, 13 nt, Artificial Sequence
  Description of Artificial Sequence: Synthetic oligonucleotide
gcauaacuaaagg

SEQ ID NO: 94047 - RNA, 14 nt, Artificial Sequence
  Description of Artificial Sequence: Synthetic oligonucleotide
cauaacuaaaggug

SEQ ID NO: 94048 - RNA, 12 nt, Artificial Sequence
  Description of Artificial Sequence: Synthetic oligonucleotide
cuacaucacgcc

SEQ ID NO: 94049 - RNA, 12 nt, Artificial Sequence
  Description of Artificial Sequence: Synthetic oligonucleotide
acuggauuuaag

SEQ ID NO: 94050 - RNA, 12 nt, Artificial Sequence
  Description of Artificial Sequence: Synthetic oligonucleotide
cuggauuuaagc

SEQ ID NO: 94051 - RNA, 13 nt, Artificial Sequence
  Description of Artificial Sequence: Synthetic oligonucleotide
gauuuaagcagag

SEQ ID NO: 94052 - RNA, 13 nt, Artificial Sequence
  Description of Artificial Sequence: Synthetic oligonucleotide
auuuaagcagagu

SEQ ID NO: 94053 - RNA, 13 nt, Artificial Sequence
  Description of Artificial Sequence: Synthetic oligonucleotide
uuaagcagaguuc

SEQ ID NO: 94054 - RNA, 13 nt, Artificial Sequence
  Description of Artificial Sequence: Synthetic oligonucleotide
uaagcagaguuca

SEQ ID NO: 94055 - RNA, 14 nt, Artificial Sequence
  Description of Artificial Sequence: Synthetic oligonucleotide
agcagaguucaaaa

SEQ ID NO: 94056 - RNA, 12 nt, Artificial Sequence
  Description of Artificial Sequence: Synthetic oligonucleotide
cucagggucuga

SEQ ID NO: 94057 - RNA, 13 nt, Artificial Sequence
  Description of Artificial Sequence: Synthetic oligonucleotide
caagcaacuacau

SEQ ID NO: 94058 - RNA, 12 nt, Artificial Sequence
  Description of Artificial Sequence: Synthetic oligonucleotide
aucaauggcagc

SEQ ID NO: 94059 - RNA, 11 nt, Artificial Sequence
  Description of Artificial Sequence: Synthetic oligonucleotide
uuccagcccac

SEQ ID NO: 94060 - RNA, 12 nt, Artificial Sequence
  Description of Artificial Sequence: Synthetic oligonucleotide
cagcugagaaug

SEQ ID NO: 94061 - RNA, 13 nt, Artificial Sequence
  Description of Artificial Sequence: Synthetic oligonucleotide
aacguaucuccua

SEQ ID NO: 94062 - RNA, 14 nt, Artificial Sequence
  Description of Artificial Sequence: Synthetic oligonucleotide
ccuaaaauaauuuc

SEQ ID NO: 94063 - RNA, 13 nt, Artificial Sequence
  Description of Artificial Sequence: Synthetic oligonucleotide
uggaagauucagc

SEQ ID NO: 94064 - RNA, 12 nt, Artificial Sequence
  Description of Artificial Sequence: Synthetic oligonucleotide
uuaaacucuccu

SEQ ID NO: 94065 - RNA, 12 nt, Artificial Sequence
  Description of Artificial Sequence: Synthetic oligonucleotide
cagccuacaguu

SEQ ID NO: 94066 - RNA, 13 nt, Artificial Sequence
  Description of Artificial Sequence: Synthetic oligonucleotide
guuauguucaguc

SEQ ID NO: 94067 - RNA, 13 nt, Artificial Sequence
  Description of Artificial Sequence: Synthetic oligonucleotide
cacauacaaaaug

SEQ ID NO: 94068 - RNA, 9 nt, Artificial Sequence
  Description of Artificial Sequence: Synthetic oligonucleotide
uccuuuugc

SEQ ID NO: 94069 - RNA, 12 nt, Artificial Sequence
  Description of Artificial Sequence: Synthetic oligonucleotide
ugaccugugaag

SEQ ID NO: 94070 - RNA, 12 nt, Artificial Sequence
  Description of Artificial Sequence: Synthetic oligonucleotide
cuaucucacaca

SEQ ID NO: 94071 - RNA, 13 nt, Artificial Sequence
  Description of Artificial Sequence: Synthetic oligonucleotide
uguccucaauugu

SEQ ID NO: 94072 - RNA, 12 nt, Artificial Sequence
  Description of Artificial Sequence: Synthetic oligonucleotide
aaaccguagcug

SEQ ID NO: 94073 - RNA, 12 nt, Artificial Sequence
  Description of Artificial Sequence: Synthetic oligonucleotide
uagcuggcaagc

SEQ ID NO: 94074 - RNA, 14 nt, Artificial Sequence
  Description of Artificial Sequence: Synthetic oligonucleotide
uuguaugguuaaaa

SEQ ID NO: 94075 - RNA, 14 nt, Artificial Sequence
  Description of Artificial Sequence: Synthetic oligonucleotide
ugguuaaaagaugg

SEQ ID NO: 94076 - RNA, 13 nt, Artificial Sequence
  Description of Artificial Sequence: Synthetic oligonucleotide
cagggaauuauac

SEQ ID NO: 94077 - RNA, 12 nt, Artificial Sequence
  Description of Artificial Sequence: Synthetic oligonucleotide
acaaucuugcug

SEQ ID NO: 94078 - RNA, 13 nt, Artificial Sequence
  Description of Artificial Sequence: Synthetic oligonucleotide
ccaauaaugaaga

SEQ ID NO: 94079 - RNA, 13 nt, Artificial Sequence
  Description of Artificial Sequence: Synthetic oligonucleotide
acuuuggauguuc

SEQ ID NO: 94080 - RNA, 12 nt, Artificial Sequence
  Description of Artificial Sequence: Synthetic oligonucleotide
aaugcuuccacu

SEQ ID NO: 94081 - RNA, 11 nt, Artificial Sequence
  Description of Artificial Sequence: Synthetic oligonucleotide
gagaaaguuug

SEQ ID NO: 94082 - RNA, 11 nt, Artificial Sequence
  Description of Artificial Sequence: Synthetic oligonucleotide
aaagaacuacu

SEQ ID NO: 94083 - RNA, 12 nt, Artificial Sequence
  Description of Artificial Sequence: Synthetic oligonucleotide
uuagaaauacgg

SEQ ID NO: 94084 - RNA, 12 nt, Artificial Sequence
  Description of Artificial Sequence: Synthetic oligonucleotide
aacauggguaca

SEQ ID NO: 94085 - RNA, 14 nt, Artificial Sequence
  Description of Artificial Sequence: Synthetic oligonucleotide
aaagacacagaaga

SEQ ID NO: 94086 - RNA, 11 nt, Artificial Sequence
  Description of Artificial Sequence: Synthetic oligonucleotide
uaguagggagg

SEQ ID NO: 94087 - RNA, 12 nt, Artificial Sequence
  Description of Artificial Sequence: Synthetic oligonucleotide
gccuucugcagc

SEQ ID NO: 94088 - RNA, 10 nt, Artificial Sequence
  Description of Artificial Sequence: Synthetic oligonucleotide
ggucugguac

SEQ ID NO: 94089 - RNA, 12 nt, Artificial Sequence
  Description of Artificial Sequence: Synthetic oligonucleotide
cuaguccuuccg

SEQ ID NO: 94090 - RNA, 12 nt, Artificial Sequence
  Description of Artificial Sequence: Synthetic oligonucleotide
ccagugaauauu

SEQ ID NO: 94091 - RNA, 13 nt, Artificial Sequence
  Description of Artificial Sequence: Synthetic oligonucleotide
augaauucaaguu

SEQ ID NO: 94092 - RNA, 12 nt, Artificial Sequence
  Description of Artificial Sequence: Synthetic oligonucleotide
caggacacagau

SEQ ID NO: 94093 - RNA, 12 nt, Artificial Sequence
  Description of Artificial Sequence: Synthetic oligonucleotide
cucaaagcacag

SEQ ID NO: 94094 - RNA, 10 nt, Artificial Sequence
  Description of Artificial Sequence: Synthetic oligonucleotide
accacugcca

SEQ ID NO: 94095 - RNA, 13 nt, Artificial Sequence
  Description of Artificial Sequence: Synthetic oligonucleotide
gaaacuacuagug

SEQ ID NO: 94096 - RNA, 12 nt, Artificial Sequence
  Description of Artificial Sequence: Synthetic oligonucleotide
aagucggacagc

SEQ ID NO: 94097 - RNA, 13 nt, Artificial Sequence
  Description of Artificial Sequence: Synthetic oligonucleotide
gaaagcgaaaaau

SEQ ID NO: 94098 - RNA, 13 nt, Artificial Sequence
  Description of Artificial Sequence: Synthetic oligonucleotide
cccucugauuuag

SEQ ID NO: 94099 - RNA, 12 nt, Artificial Sequence
  Description of Artificial Sequence: Synthetic oligonucleotide
ugagcuauuuaa

SEQ ID NO: 94100 - RNA, 13 nt, Artificial Sequence
  Description of Artificial Sequence: Synthetic oligonucleotide
aaaaggugaaaaa

SEQ ID NO: 94101 - RNA, 14 nt, Artificial Sequence
  Description of Artificial Sequence: Synthetic oligonucleotide
gaaaaagcacuauu

SEQ ID NO: 94102 - RNA, 12 nt, Artificial Sequence
  Description of Artificial Sequence: Synthetic oligonucleotide
ggcugaaaagaa

SEQ ID NO: 94103 - RNA, 12 nt, Artificial Sequence
  Description of Artificial Sequence: Synthetic oligonucleotide
uaaacccuuaua

SEQ ID NO: 94104 - RNA, 13 nt, Artificial Sequence
  Description of Artificial Sequence: Synthetic oligonucleotide
cauacuauuagcc

SEQ ID NO: 94105 - RNA, 12 nt, Artificial Sequence
  Description of Artificial Sequence: Synthetic oligonucleotide
gacagaagcauu

SEQ ID NO: 94106 - RNA, 14 nt, Artificial Sequence
  Description of Artificial Sequence: Synthetic oligonucleotide
agagcaaauaagau

SEQ ID NO: 94107 - RNA, 14 nt, Artificial Sequence
  Description of Artificial Sequence: Synthetic oligonucleotide
ccaacauuuuucuc

SEQ ID NO: 94108 - RNA, 15 nt, Artificial Sequence
  Description of Artificial Sequence: Synthetic oligonucleotide
uuaaguaugagaaaa

SEQ ID NO: 94109 - RNA, 14 nt, Artificial Sequence
  Description of Artificial Sequence: Synthetic oligonucleotide
caggaauaaagaug

SEQ ID NO: 94110 - RNA, 13 nt, Artificial Sequence
  Description of Artificial Sequence: Synthetic oligonucleotide
aauuugaaugacc

SEQ ID NO: 94111 - RNA, 14 nt, Artificial Sequence
  Description of Artificial Sequence: Synthetic oligonucleotide
auguauaaagauag

SEQ ID NO: 94112 - RNA, 12 nt, Artificial Sequence
  Description of Artificial Sequence: Synthetic oligonucleotide
ggcuguaacuau

SEQ ID NO: 94113 - RNA, 11 nt, Artificial Sequence
  Description of Artificial Sequence: Synthetic oligonucleotide
ucugugaagug

SEQ ID NO: 94114 - RNA, 14 nt, Artificial Sequence
  Description of Artificial Sequence: Synthetic oligonucleotide
ccuuuaaggaaaug

SEQ ID NO: 94115 - RNA, 13 nt, Artificial Sequence
  Description of Artificial Sequence: Synthetic oligonucleotide
aaggauacaaaaa

SEQ ID NO: 94116 - RNA, 12 nt, Artificial Sequence
  Description of Artificial Sequence: Synthetic oligonucleotide
agaugcaauuug

SEQ ID NO: 94117 - RNA, 12 nt, Artificial Sequence
  Description of Artificial Sequence: Synthetic oligonucleotide
guucaaaacgaa

SEQ ID NO: 94118 - RNA, 11 nt, Artificial Sequence
  Description of Artificial Sequence: Synthetic oligonucleotide
gugaaaccuca

SEQ ID NO: 94119 - RNA, 13 nt, Artificial Sequence
  Description of Artificial Sequence: Synthetic oligonucleotide
acgaaagagaagc

SEQ ID NO: 94120 - RNA, 12 nt, Artificial Sequence
  Description of Artificial Sequence: Synthetic oligonucleotide
cuccacaagcgc

SEQ ID NO: 94121 - RNA, 14 nt, Artificial Sequence
  Description of Artificial Sequence: Synthetic oligonucleotide
gagaagauuccaaa

SEQ ID NO: 94122 - RNA, 13 nt, Artificial Sequence
  Description of Artificial Sequence: Synthetic oligonucleotide
aaucuggauucaa

SEQ ID NO: 94123 - RNA, 13 nt, Artificial Sequence
  Description of Artificial Sequence: Synthetic oligonucleotide
agaacagauuuga

SEQ ID NO: 94124 - RNA, 11 nt, Artificial Sequence
  Description of Artificial Sequence: Synthetic oligonucleotide
ccagagcugug

SEQ ID NO: 94125 - RNA, 12 nt, Artificial Sequence
  Description of Artificial Sequence: Synthetic oligonucleotide
ccucagauuguu

SEQ ID NO: 94126 - RNA, 12 nt, Artificial Sequence
  Description of Artificial Sequence: Synthetic oligonucleotide
cuauuuuaauua

SEQ ID NO: 94127 - RNA, 13 nt, Artificial Sequence
  Description of Artificial Sequence: Synthetic oligonucleotide
uuuaauuuauuaa

SEQ ID NO: 94128 - RNA, 12 nt, Artificial Sequence
  Description of Artificial Sequence: Synthetic oligonucleotide
augcaguuugaa

SEQ ID NO: 94129 - RNA, 11 nt, Artificial Sequence
  Description of Artificial Sequence: Synthetic oligonucleotide
caugcugcugg

SEQ ID NO: 94130 - RNA, 13 nt, Artificial Sequence
  Description of Artificial Sequence: Synthetic oligonucleotide
agaugugcauuuc

SEQ ID NO: 94131 - RNA, 12 nt, Artificial Sequence
  Description of Artificial Sequence: Synthetic oligonucleotide
ucaaaaccugug

SEQ ID NO: 94132 - RNA, 11 nt, Artificial Sequence
  Description of Artificial Sequence: Synthetic oligonucleotide
gaaugugggua

SEQ ID NO: 94133 - RNA, 10 nt, Artificial Sequence
  Description of Artificial Sequence: Synthetic oligonucleotide
auguggguag

SEQ ID NO: 94134 - RNA, 13 nt, Artificial Sequence
  Description of Artificial Sequence: Synthetic oligonucleotide
ugaaaaugagcau

SEQ ID NO: 94135 - RNA, 13 nt, Artificial Sequence
  Description of Artificial Sequence: Synthetic oligonucleotide
uugcuuuucaugu

SEQ ID NO: 94136 - RNA, 12 nt, Artificial Sequence
  Description of Artificial Sequence: Synthetic oligonucleotide
uguauuucuaua

SEQ ID NO: 94137 - RNA, 13 nt, Artificial Sequence
  Description of Artificial Sequence: Synthetic oligonucleotide
uuugauuaauguu

SEQ ID NO: 94138 - RNA, 12 nt, Artificial Sequence
  Description of Artificial Sequence: Synthetic oligonucleotide
caacguguauag

SEQ ID NO: 94139 - RNA, 12 nt, Artificial Sequence
  Description of Artificial Sequence: Synthetic oligonucleotide
cauauccuuggc

SEQ ID NO: 94140 - RNA, 13 nt, Artificial Sequence
  Description of Artificial Sequence: Synthetic oligonucleotide
uacuaacaucugg

SEQ ID NO: 94141 - RNA, 11 nt, Artificial Sequence
  Description of Artificial Sequence: Synthetic oligonucleotide
cauaaguugug

SEQ ID NO: 94142 - RNA, 12 nt, Artificial Sequence
  Description of Artificial Sequence: Synthetic oligonucleotide
gcaucauuuugg

SEQ ID NO: 94143 - RNA, 10 nt, Artificial Sequence
  Description of Artificial Sequence: Synthetic oligonucleotide
gcucuucuua

SEQ ID NO: 94144 - RNA, 10 nt, Artificial Sequence
  Description of Artificial Sequence: Synthetic oligonucleotide
agauuagguc

SEQ ID NO: 94145 - RNA, 12 nt, Artificial Sequence
  Description of Artificial Sequence: Synthetic oligonucleotide
auggaauugaaa

SEQ ID NO: 94146 - RNA, 13 nt, Artificial Sequence
  Description of Artificial Sequence: Synthetic oligonucleotide
cacacucauuccu

SEQ ID NO: 94147 - RNA, 12 nt, Artificial Sequence
  Description of Artificial Sequence: Synthetic oligonucleotide
uguagagguaac

SEQ ID NO: 94148 - RNA, 11 nt, Artificial Sequence
  Description of Artificial Sequence: Synthetic oligonucleotide
caaccacaugc

SEQ ID NO: 94149 - RNA, 12 nt, Artificial Sequence
  Description of Artificial Sequence: Synthetic oligonucleotide
ucggaaacaagu

SEQ ID NO: 94150 - RNA, 11 nt, Artificial Sequence
  Description of Artificial Sequence: Synthetic oligonucleotide
acucccaauaa

SEQ ID NO: 94151 - RNA, 13 nt, Artificial Sequence
  Description of Artificial Sequence: Synthetic oligonucleotide
aaugcuaagaaau

SEQ ID NO: 94152 - RNA, 11 nt, Artificial Sequence
  Description of Artificial Sequence: Synthetic oligonucleotide
gucuuucucua

SEQ ID NO: 94153 - RNA, 11 nt, Artificial Sequence
  Description of Artificial Sequence: Synthetic oligonucleotide
ugaauuucagg

SEQ ID NO: 94154 - RNA, 13 nt, Artificial Sequence
  Description of Artificial Sequence: Synthetic oligonucleotide
cgauucccucuca

SEQ ID NO: 94155 - RNA, 11 nt, Artificial Sequence
  Description of Artificial Sequence: Synthetic oligonucleotide
aggaaagugaa

SEQ ID NO: 94156 - RNA, 12 nt, Artificial Sequence
  Description of Artificial Sequence: Synthetic oligonucleotide
gaggcugcaugc

SEQ ID NO: 94157 - RNA, 11 nt, Artificial Sequence
  Description of Artificial Sequence: Synthetic oligonucleotide
ucucugaacag

SEQ ID NO: 94158 - RNA, 12 nt, Artificial Sequence
  Description of Artificial Sequence: Synthetic oligonucleotide
aacuuggcugua

SEQ ID NO: 94159 - RNA, 12 nt, Artificial Sequence
  Description of Artificial Sequence: Synthetic oligonucleotide
agaagccaaaau

SEQ ID NO: 94160 - RNA, 14 nt, Artificial Sequence
  Description of Artificial Sequence: Synthetic oligonucleotide
auuaaaagaagucc

SEQ ID NO: 94161 - RNA, 14 nt, Artificial Sequence
  Description of Artificial Sequence: Synthetic oligonucleotide
gaauccggauuauc

SEQ ID NO: 94162 - RNA, 12 nt, Artificial Sequence
  Description of Artificial Sequence: Synthetic oligonucleotide
aaugugacauca

SEQ ID NO: 94163 - RNA, 13 nt, Artificial Sequence
  Description of Artificial Sequence: Synthetic oligonucleotide
caucaaagcaagu

SEQ ID NO: 94164 - RNA, 11 nt, Artificial Sequence
  Description of Artificial Sequence: Synthetic oligonucleotide
agagagagaaa

SEQ ID NO: 94165 - RNA, 13 nt, Artificial Sequence
  Description of Artificial Sequence: Synthetic oligonucleotide
ucgcuguaguauu

SEQ ID NO: 94166 - RNA, 14 nt, Artificial Sequence
  Description of Artificial Sequence: Synthetic oligonucleotide
cgcuguaguauuua

SEQ ID NO: 94167 - RNA, 13 nt, Artificial Sequence
  Description of Artificial Sequence: Synthetic oligonucleotide
auuuaagcccaua

SEQ ID NO: 94168 - RNA, 15 nt, Artificial Sequence
  Description of Artificial Sequence: Synthetic oligonucleotide
auuaaaauaaacaug

SEQ ID NO: 94169 - RNA, 12 nt, Artificial Sequence
  Description of Artificial Sequence: Synthetic oligonucleotide
cuguucugaucg

SEQ ID NO: 94170 - RNA, 16 nt, Artificial Sequence
  Description of Artificial Sequence: Synthetic oligonucleotide
aaauaauuugaacuuu

SEQ ID NO: 94171 - RNA, 12 nt, Artificial Sequence
  Description of Artificial Sequence: Synthetic oligonucleotide
ugcgaccuuaau

SEQ ID NO: 94172 - RNA, 11 nt, Artificial Sequence
  Description of Artificial Sequence: Synthetic oligonucleotide
cugagaaagcu

SEQ ID NO: 94173 - RNA, 13 nt, Artificial Sequence
  Description of Artificial Sequence: Synthetic oligonucleotide
aguaaagaugcua

SEQ ID NO: 94174 - RNA, 12 nt, Artificial Sequence
  Description of Artificial Sequence: Synthetic oligonucleotide
cugcuuaauugc

SEQ ID NO: 94175 - RNA, 14 nt, Artificial Sequence
  Description of Artificial Sequence: Synthetic oligonucleotide
uaccauaugaauga

SEQ ID NO: 94176 - RNA, 12 nt, Artificial Sequence
  Description of Artificial Sequence: Synthetic oligonucleotide
aacuuucuuauc

SEQ ID NO: 94177 - RNA, 13 nt, Artificial Sequence
  Description of Artificial Sequence: Synthetic oligonucleotide
ccuugcaugacau

SEQ ID NO: 94178 - RNA, 14 nt, Artificial Sequence
  Description of Artificial Sequence: Synthetic oligonucleotide
ugaauuuguauaug

SEQ ID NO: 94179 - RNA, 12 nt, Artificial Sequence
  Description of Artificial Sequence: Synthetic oligonucleotide
gaauccuaguag

SEQ ID NO: 94180 - RNA, 10 nt, Artificial Sequence
  Description of Artificial Sequence: Synthetic oligonucleotide
gaaagggaag

SEQ ID NO: 94181 - RNA, 11 nt, Artificial Sequence
  Description of Artificial Sequence: Synthetic oligonucleotide
uaucggcaugc

SEQ ID NO: 94182 - RNA, 12 nt, Artificial Sequence
  Description of Artificial Sequence: Synthetic oligonucleotide
caccucauagua

SEQ ID NO: 94183 - RNA, 11 nt, Artificial Sequence
  Description of Artificial Sequence: Synthetic oligonucleotide
ccagaauugcc

SEQ ID NO: 94184 - RNA, 11 nt, Artificial Sequence
  Description of Artificial Sequence: Synthetic oligonucleotide
uggugaucugg

SEQ ID NO: 94185 - RNA, 12 nt, Artificial Sequence
  Description of Artificial Sequence: Synthetic oligonucleotide
gaucuggguaau

SEQ ID NO: 94186 - RNA, 12 nt, Artificial Sequence
  Description of Artificial Sequence: Synthetic oligonucleotide
ggaugugaugaa

SEQ ID NO: 94187 - RNA, 12 nt, Artificial Sequence
  Description of Artificial Sequence: Synthetic oligonucleotide
cauuuccacagc

SEQ ID NO: 94188 - RNA, 11 nt, Artificial Sequence
  Description of Artificial Sequence: Synthetic oligonucleotide
acagcuacacc

SEQ ID NO: 94189 - RNA, 12 nt, Artificial Sequence
  Description of Artificial Sequence: Synthetic oligonucleotide
ugcaguucuuac

SEQ ID NO: 94190 - RNA, 12 nt, Artificial Sequence
  Description of Artificial Sequence: Synthetic oligonucleotide
acgagaagaaga

SEQ ID NO: 94191 - RNA, 12 nt, Artificial Sequence
  Description of Artificial Sequence: Synthetic oligonucleotide
cgagaagaagau

SEQ ID NO: 94192 - RNA, 15 nt, Artificial Sequence
  Description of Artificial Sequence: Synthetic oligonucleotide
aagaagaucauuuac

SEQ ID NO: 94193 - RNA, 11 nt, Artificial Sequence
  Description of Artificial Sequence: Synthetic oligonucleotide
agaggaagagg

SEQ ID NO: 94194 - RNA, 12 nt, Artificial Sequence
  Description of Artificial Sequence: Synthetic oligonucleotide
gaggaagaggug

SEQ ID NO: 94195 - RNA, 13 nt, Artificial Sequence
  Description of Artificial Sequence: Synthetic oligonucleotide
cuacuuugagggc

SEQ ID NO: 94196 - RNA, 12 nt, Artificial Sequence
  Description of Artificial Sequence: Synthetic oligonucleotide
agggcaucuccu

SEQ ID NO: 94197 - RNA, 10 nt, Artificial Sequence
  Description of Artificial Sequence: Synthetic oligonucleotide
ggagugauau

SEQ ID NO: 94198 - RNA, 11 nt, Artificial Sequence
  Description of Artificial Sequence: Synthetic oligonucleotide
gagugauaugg

SEQ ID NO: 94199 - RNA, 12 nt, Artificial Sequence
  Description of Artificial Sequence: Synthetic oligonucleotide
ugcaguaaagau

SEQ ID NO: 94200 - RNA, 13 nt, Artificial Sequence
  Description of Artificial Sequence: Synthetic oligonucleotide
aguaaagauccua

SEQ ID NO: 94201 - RNA, 12 nt, Artificial Sequence
  Description of Artificial Sequence: Synthetic oligonucleotide
ugacaaaggaca

SEQ ID NO: 94202 - RNA, 13 nt, Artificial Sequence
  Description of Artificial Sequence: Synthetic oligonucleotide
gcaauugugaccc

SEQ ID NO: 94203 - RNA, 12 nt, Artificial Sequence
  Description of Artificial Sequence: Synthetic oligonucleotide
aacaucauccau

SEQ ID NO: 94204 - RNA, 12 nt, Artificial Sequence
  Description of Artificial Sequence: Synthetic oligonucleotide
ugaaauccaaca

SEQ ID NO: 94205 - RNA, 15 nt, Artificial Sequence
  Description of Artificial Sequence: Synthetic oligonucleotide
aacaauauauuucuc

SEQ ID NO: 94206 - RNA, 14 nt, Artificial Sequence
  Description of Artificial Sequence: Synthetic oligonucleotide
aacaguaaagucac

SEQ ID NO: 94207 - RNA, 14 nt, Artificial Sequence
  Description of Artificial Sequence: Synthetic oligonucleotide
ugugaagaaaguaa

SEQ ID NO: 94208 - RNA, 13 nt, Artificial Sequence
  Description of Artificial Sequence: Synthetic oligonucleotide
cuuccgagccauc

SEQ ID NO: 94209 - RNA, 12 nt, Artificial Sequence
  Description of Artificial Sequence: Synthetic oligonucleotide
aauggagguuga

SEQ ID NO: 94210 - RNA, 12 nt, Artificial Sequence
  Description of Artificial Sequence: Synthetic oligonucleotide
ggagguugaaua

SEQ ID NO: 94211 - RNA, 13 nt, Artificial Sequence
  Description of Artificial Sequence: Synthetic oligonucleotide
auuuugaguuuuc

SEQ ID NO: 94212 - RNA, 12 nt, Artificial Sequence
  Description of Artificial Sequence: Synthetic oligonucleotide
uauccuguuugu

SEQ ID NO: 94213 - RNA, 11 nt, Artificial Sequence
  Description of Artificial Sequence: Synthetic oligonucleotide
ccuguuuguuc

SEQ ID NO: 94214 - RNA, 10 nt, Artificial Sequence
  Description of Artificial Sequence: Synthetic oligonucleotide
cucuacagcc

SEQ ID NO: 94215 - RNA, 12 nt, Artificial Sequence
  Description of Artificial Sequence: Synthetic oligonucleotide
ucuuccauagcu

SEQ ID NO: 94216 - RNA, 12 nt, Artificial Sequence
  Description of Artificial Sequence: Synthetic oligonucleotide
auaaucuuccug

SEQ ID NO: 94217 - RNA, 12 nt, Artificial Sequence
  Description of Artificial Sequence: Synthetic oligonucleotide
uaaucuuccugu

SEQ ID NO: 94218 - RNA, 12 nt, Artificial Sequence
  Description of Artificial Sequence: Synthetic oligonucleotide
cuucaugacuug

SEQ ID NO: 94219 - RNA, 12 nt, Artificial Sequence
  Description of Artificial Sequence: Synthetic oligonucleotide
aagagggagaga

SEQ ID NO: 94220 - RNA, 12 nt, Artificial Sequence
  Description of Artificial Sequence: Synthetic oligonucleotide
cgucuccuacca

SEQ ID NO: 94221 - RNA, 12 nt, Artificial Sequence
  Description of Artificial Sequence: Synthetic oligonucleotide
gaucaaucggcc

SEQ ID NO: 94222 - RNA, 12 nt, Artificial Sequence
  Description of Artificial Sequence: Synthetic oligonucleotide
ggacgaacaucc

SEQ ID NO: 94223 - RNA, 11 nt, Artificial Sequence
  Description of Artificial Sequence: Synthetic oligonucleotide
agggucggaac

SEQ ID NO: 94224 - RNA, 10 nt, Artificial Sequence
  Description of Artificial Sequence: Synthetic oligonucleotide
ucggaaccca

SEQ ID NO: 94225 - RNA, 11 nt, Artificial Sequence
  Description of Artificial Sequence: Synthetic oligonucleotide
acccaagcuua

SEQ ID NO: 94226 - RNA, 14 nt, Artificial Sequence
  Description of Artificial Sequence: Synthetic oligonucleotide
gaacuuuaagcaac

SEQ ID NO: 94227 - RNA, 11 nt, Artificial Sequence
  Description of Artificial Sequence: Synthetic oligonucleotide
acuauucagug

SEQ ID NO: 94228 - RNA, 11 nt, Artificial Sequence
  Description of Artificial Sequence: Synthetic oligonucleotide
cuauucagugg

SEQ ID NO: 94229 - RNA, 13 nt, Artificial Sequence
  Description of Artificial Sequence: Synthetic oligonucleotide
aaacacagauaac

SEQ ID NO: 94230 - RNA, 12 nt, Artificial Sequence
  Description of Artificial Sequence: Synthetic oligonucleotide
cuuaagaaaaga

SEQ ID NO: 94231 - RNA, 12 nt, Artificial Sequence
  Description of Artificial Sequence: Synthetic oligonucleotide
cugaaggagugu

SEQ ID NO: 94232 - RNA, 10 nt, Artificial Sequence
  Description of Artificial Sequence: Synthetic oligonucleotide
ucaccgcggg

SEQ ID NO: 94233 - RNA, 14 nt, Artificial Sequence
  Description of Artificial Sequence: Synthetic oligonucleotide
agcagaaauaagcg

SEQ ID NO: 94234 - RNA, 12 nt, Artificial Sequence
  Description of Artificial Sequence: Synthetic oligonucleotide
aagcgugccguu

SEQ ID NO: 94235 - RNA, 12 nt, Artificial Sequence
  Description of Artificial Sequence: Synthetic oligonucleotide
agaaacagucac

SEQ ID NO: 94236 - RNA, 12 nt, Artificial Sequence
  Description of Artificial Sequence: Synthetic oligonucleotide
agaggaagaagg

SEQ ID NO: 94237 - RNA, 14 nt, Artificial Sequence
  Description of Artificial Sequence: Synthetic oligonucleotide
uguauucaaaauau

SEQ ID NO: 94238 - RNA, 13 nt, Artificial Sequence
  Description of Artificial Sequence: Synthetic oligonucleotide
auuuuccucccuu

SEQ ID NO: 94239 - RNA, 13 nt, Artificial Sequence
  Description of Artificial Sequence: Synthetic oligonucleotide
caaagaaagauag

SEQ ID NO: 94240 - RNA, 12 nt, Artificial Sequence
  Description of Artificial Sequence: Synthetic oligonucleotide
aagaaagauaga

SEQ ID NO: 94241 - RNA, 13 nt, Artificial Sequence
  Description of Artificial Sequence: Synthetic oligonucleotide
gaaagcauuuguu

SEQ ID NO: 94242 - RNA, 13 nt, Artificial Sequence
  Description of Artificial Sequence: Synthetic oligonucleotide
ugaguuaaacgaa

SEQ ID NO: 94243 - RNA, 12 nt, Artificial Sequence
  Description of Artificial Sequence: Synthetic oligonucleotide
acugauacagaa

SEQ ID NO: 94244 - RNA, 12 nt, Artificial Sequence
  Description of Artificial Sequence: Synthetic oligonucleotide
auauuauauaua

SEQ ID NO: 94245 - RNA, 12 nt, Artificial Sequence
  Description of Artificial Sequence: Synthetic oligonucleotide
auuauauauaua

SEQ ID NO: 94246 - RNA, 12 nt, Artificial Sequence
  Description of Artificial Sequence: Synthetic oligonucleotide
ucacuggaugua

SEQ ID NO: 94247 - RNA, 12 nt, Artificial Sequence
  Description of Artificial Sequence: Synthetic oligonucleotide
cagggaagagga

SEQ ID NO: 94248 - RNA, 15 nt, Artificial Sequence
  Description of Artificial Sequence: Synthetic oligonucleotide
augaucuuuuuuuug

SEQ ID NO: 94249 - RNA, 11 nt, Artificial Sequence
  Description of Artificial Sequence: Synthetic oligonucleotide
aguucacggcc

SEQ ID NO: 94250 - RNA, 13 nt, Artificial Sequence
  Description of Artificial Sequence: Synthetic oligonucleotide
caccaucacacca

SEQ ID NO: 94251 - RNA, 11 nt, Artificial Sequence
  Description of Artificial Sequence: Synthetic oligonucleotide
ccugcggguuu

SEQ ID NO: 94252 - RNA, 10 nt, Artificial Sequence
  Description of Artificial Sequence: Synthetic oligonucleotide
auccaguuug

SEQ ID NO: 94253 - RNA, 13 nt, Artificial Sequence
  Description of Artificial Sequence: Synthetic oligonucleotide
guuaaggacuucu

SEQ ID NO: 94254 - RNA, 13 nt, Artificial Sequence
  Description of Artificial Sequence: Synthetic oligonucleotide
cagugggacagag

SEQ ID NO: 94255 - RNA, 14 nt, Artificial Sequence
  Description of Artificial Sequence: Synthetic oligonucleotide
aauuuguuauugug

SEQ ID NO: 94256 - RNA, 13 nt, Artificial Sequence
  Description of Artificial Sequence: Synthetic oligonucleotide
uucaaaugcauuu

SEQ ID NO: 94257 - RNA, 10 nt, Artificial Sequence
  Description of Artificial Sequence: Synthetic oligonucleotide
caggaaagcc

SEQ ID NO: 94258 - RNA, 11 nt, Artificial Sequence
  Description of Artificial Sequence: Synthetic oligonucleotide
aggaaagcccu

SEQ ID NO: 94259 - RNA, 12 nt, Artificial Sequence
  Description of Artificial Sequence: Synthetic oligonucleotide
cccagcauggcc

SEQ ID NO: 94260 - RNA, 11 nt, Artificial Sequence
  Description of Artificial Sequence: Synthetic oligonucleotide
cuucucccuga

SEQ ID NO: 94261 - RNA, 12 nt, Artificial Sequence
  Description of Artificial Sequence: Synthetic oligonucleotide
gaagaagcccuu

SEQ ID NO: 94262 - RNA, 12 nt, Artificial Sequence
  Description of Artificial Sequence: Synthetic oligonucleotide
agaagcccuuca

SEQ ID NO: 94263 - RNA, 11 nt, Artificial Sequence
  Description of Artificial Sequence: Synthetic oligonucleotide
gcccuucagcg

SEQ ID NO: 94264 - RNA, 11 nt, Artificial Sequence
  Description of Artificial Sequence: Synthetic oligonucleotide
ccuucagcggc

SEQ ID NO: 94265 - RNA, 12 nt, Artificial Sequence
  Description of Artificial Sequence: Synthetic oligonucleotide
ucagcggccagu

SEQ ID NO: 94266 - RNA, 12 nt, Artificial Sequence
  Description of Artificial Sequence: Synthetic oligonucleotide
ugaaaagcuccg

SEQ ID NO: 94267 - RNA, 11 nt, Artificial Sequence
  Description of Artificial Sequence: Synthetic oligonucleotide
aaaagcuccgg

SEQ ID NO: 94268 - RNA, 13 nt, Artificial Sequence
  Description of Artificial Sequence: Synthetic oligonucleotide
agucaacagucug

SEQ ID NO: 94269 - RNA, 13 nt, Artificial Sequence
  Description of Artificial Sequence: Synthetic oligonucleotide
cagaguucaaaag

SEQ ID NO: 94270 - RNA, 13 nt, Artificial Sequence
  Description of Artificial Sequence: Synthetic oligonucleotide
agaguucaaaagc

SEQ ID NO: 94271 - RNA, 12 nt, Artificial Sequence
  Description of Artificial Sequence: Synthetic oligonucleotide
uucaaaagcccu

SEQ ID NO: 94272 - RNA, 12 nt, Artificial Sequence
  Description of Artificial Sequence: Synthetic oligonucleotide
ucaaaagcccuu

SEQ ID NO: 94273 - RNA, 12 nt, Artificial Sequence
  Description of Artificial Sequence: Synthetic oligonucleotide
aaaagcccuuca

SEQ ID NO: 94274 - RNA, 12 nt, Artificial Sequence
  Description of Artificial Sequence: Synthetic oligonucleotide
aaagcccuucag

SEQ ID NO: 94275 - RNA, 13 nt, Artificial Sequence
  Description of Artificial Sequence: Synthetic oligonucleotide
gugaagccgcucg

SEQ ID NO: 94276 - RNA, 12 nt, Artificial Sequence
  Description of Artificial Sequence: Synthetic oligonucleotide
cacgccagucaa

SEQ ID NO: 94277 - RNA, 13 nt, Artificial Sequence
  Description of Artificial Sequence: Synthetic oligonucleotide
uucuuggugcgug

SEQ ID NO: 94278 - RNA, 14 nt, Artificial Sequence
  Description of Artificial Sequence: Synthetic oligonucleotide
auuggauucaucag

SEQ ID NO: 94279 - RNA, 13 nt, Artificial Sequence
  Description of Artificial Sequence: Synthetic oligonucleotide
uggaauaccuaag

SEQ ID NO: 94280 - RNA, 12 nt, Artificial Sequence
  Description of Artificial Sequence: Synthetic oligonucleotide
auuugaggcuca

SEQ ID NO: 94281 - RNA, 11 nt, Artificial Sequence
  Description of Artificial Sequence: Synthetic oligonucleotide
ucuacaauugg

SEQ ID NO: 94282 - RNA, 12 nt, Artificial Sequence
  Description of Artificial Sequence: Synthetic oligonucleotide
uaguuaggagcc

SEQ ID NO: 94283 - RNA, 13 nt, Artificial Sequence
  Description of Artificial Sequence: Synthetic oligonucleotide
agucaauauccac

SEQ ID NO: 94284 - RNA, 13 nt, Artificial Sequence
  Description of Artificial Sequence: Synthetic oligonucleotide
auguucagucaca

SEQ ID NO: 94285 - RNA, 12 nt, Artificial Sequence
  Description of Artificial Sequence: Synthetic oligonucleotide
acacacacauac

SEQ ID NO: 94286 - RNA, 12 nt, Artificial Sequence
  Description of Artificial Sequence: Synthetic oligonucleotide
uuccuuuugcuu

SEQ ID NO: 94287 - RNA, 16 nt, Artificial Sequence
  Description of Artificial Sequence: Synthetic oligonucleotide
uuuuaaaguaauuuuu

SEQ ID NO: 94288 - RNA, 13 nt, Artificial Sequence
  Description of Artificial Sequence: Synthetic oligonucleotide
caacagucaaugg

SEQ ID NO: 94289 - RNA, 13 nt, Artificial Sequence
  Description of Artificial Sequence: Synthetic oligonucleotide
ucgacaaaccaau

SEQ ID NO: 94290 - RNA, 12 nt, Artificial Sequence
  Description of Artificial Sequence: Synthetic oligonucleotide
acugcuaccacu

SEQ ID NO: 94291 - RNA, 13 nt, Artificial Sequence
  Description of Artificial Sequence: Synthetic oligonucleotide
gcaagcggucuua

SEQ ID NO: 94292 - RNA, 13 nt, Artificial Sequence
  Description of Artificial Sequence: Synthetic oligonucleotide
ggucuuaccggcu

SEQ ID NO: 94293 - RNA, 11 nt, Artificial Sequence
  Description of Artificial Sequence: Synthetic oligonucleotide
gauggguuacc

SEQ ID NO: 94294 - RNA, 11 nt, Artificial Sequence
  Description of Artificial Sequence: Synthetic oligonucleotide
guuaccugcga

SEQ ID NO: 94295 - RNA, 12 nt, Artificial Sequence
  Description of Artificial Sequence: Synthetic oligonucleotide
aaucuugcugag

SEQ ID NO: 94296 - RNA, 13 nt, Artificial Sequence
  Description of Artificial Sequence: Synthetic oligonucleotide
agcauaaaacagu

SEQ ID NO: 94297 - RNA, 12 nt, Artificial Sequence
  Description of Artificial Sequence: Synthetic oligonucleotide
guccuuuauccu

SEQ ID NO: 94298 - RNA, 12 nt, Artificial Sequence
  Description of Artificial Sequence: Synthetic oligonucleotide
caacgcaaguug

SEQ ID NO: 94299 - RNA, 13 nt, Artificial Sequence
  Description of Artificial Sequence: Synthetic oligonucleotide
aaacugaaaccau

SEQ ID NO: 94300 - RNA, 14 nt, Artificial Sequence
  Description of Artificial Sequence: Synthetic oligonucleotide
acuuuguuaaauau

SEQ ID NO: 94301 - RNA, 14 nt, Artificial Sequence
  Description of Artificial Sequence: Synthetic oligonucleotide
guauauuaaaaguu

SEQ ID NO: 94302 - RNA, 13 nt, Artificial Sequence
  Description of Artificial Sequence: Synthetic oligonucleotide
guuuugacuuaac

SEQ ID NO: 94303 - RNA, 13 nt, Artificial Sequence
  Description of Artificial Sequence: Synthetic oligonucleotide
gcaaacucagcac

SEQ ID NO: 94304 - RNA, 11 nt, Artificial Sequence
  Description of Artificial Sequence: Synthetic oligonucleotide
ugcugaccuca

SEQ ID NO: 94305 - RNA, 14 nt, Artificial Sequence
  Description of Artificial Sequence: Synthetic oligonucleotide
uuuauucagaucgc

SEQ ID NO: 94306 - RNA, 13 nt, Artificial Sequence
  Description of Artificial Sequence: Synthetic oligonucleotide
aggguucugggau

SEQ ID NO: 94307 - RNA, 15 nt, Artificial Sequence
  Description of Artificial Sequence: Synthetic oligonucleotide
auauuggaaauuaug

SEQ ID NO: 94308 - RNA, 13 nt, Artificial Sequence
  Description of Artificial Sequence: Synthetic oligonucleotide
auggaagcacuag

SEQ ID NO: 94309 - RNA, 13 nt, Artificial Sequence
  Description of Artificial Sequence: Synthetic oligonucleotide
guuuuuaugugga

SEQ ID NO: 94310 - RNA, 12 nt, Artificial Sequence
  Description of Artificial Sequence: Synthetic oligonucleotide
ggaauugguaga

SEQ ID NO: 94311 - RNA, 13 nt, Artificial Sequence
  Description of Artificial Sequence: Synthetic oligonucleotide
uuagacuuggaga

SEQ ID NO: 94312 - RNA, 13 nt, Artificial Sequence
  Description of Artificial Sequence: Synthetic oligonucleotide
uuacaguauucca

SEQ ID NO: 94313 - RNA, 15 nt, Artificial Sequence
  Description of Artificial Sequence: Synthetic oligonucleotide
ccacugaugaauuaa

SEQ ID NO: 94314 - RNA, 12 nt, Artificial Sequence
  Description of Artificial Sequence: Synthetic oligonucleotide
ccacaucaucac

SEQ ID NO: 94315 - RNA, 13 nt, Artificial Sequence
  Description of Artificial Sequence: Synthetic oligonucleotide
cucaccaaacaga

SEQ ID NO: 94316 - RNA, 12 nt, Artificial Sequence
  Description of Artificial Sequence: Synthetic oligonucleotide
ggaacaugaugg

SEQ ID NO: 94317 - RNA, 12 nt, Artificial Sequence
  Description of Artificial Sequence: Synthetic oligonucleotide
cauguagacugc

SEQ ID NO: 94318 - RNA, 13 nt, Artificial Sequence
  Description of Artificial Sequence: Synthetic oligonucleotide
ggaucuauuuaug

SEQ ID NO: 94319 - RNA, 12 nt, Artificial Sequence
  Description of Artificial Sequence: Synthetic oligonucleotide
gcacuauuauca

SEQ ID NO: 94320 - RNA, 11 nt, Artificial Sequence
  Description of Artificial Sequence: Synthetic oligonucleotide
aucaguucugc

SEQ ID NO: 94321 - RNA, 13 nt, Artificial Sequence
  Description of Artificial Sequence: Synthetic oligonucleotide
agauuaaaccuac

SEQ ID NO: 94322 - RNA, 13 nt, Artificial Sequence
  Description of Artificial Sequence: Synthetic oligonucleotide
auaaaauccuucu

SEQ ID NO: 94323 - RNA, 12 nt, Artificial Sequence
  Description of Artificial Sequence: Synthetic oligonucleotide
aaugcuguagac

SEQ ID NO: 94324 - RNA, 13 nt, Artificial Sequence
  Description of Artificial Sequence: Synthetic oligonucleotide
uugauaggaauag

SEQ ID NO: 94325 - RNA, 11 nt, Artificial Sequence
  Description of Artificial Sequence: Synthetic oligonucleotide
aauggcccuga

SEQ ID NO: 94326 - RNA, 11 nt, Artificial Sequence
  Description of Artificial Sequence: Synthetic oligonucleotide
uuccucaagca

SEQ ID NO: 94327 - RNA, 10 nt, Artificial Sequence
  Description of Artificial Sequence: Synthetic oligonucleotide
guucagccca

SEQ ID NO: 94328 - RNA, 11 nt, Artificial Sequence
  Description of Artificial Sequence: Synthetic oligonucleotide
gcugcugaacc

SEQ ID NO: 94329 - RNA, 12 nt, Artificial Sequence
  Description of Artificial Sequence: Synthetic oligonucleotide
aaguucucuuca

SEQ ID NO: 94330 - RNA, 11 nt, Artificial Sequence
  Description of Artificial Sequence: Synthetic oligonucleotide
ccagccuagag

SEQ ID NO: 94331 - RNA, 13 nt, Artificial Sequence
  Description of Artificial Sequence: Synthetic oligonucleotide
cucugugaagugu

SEQ ID NO: 94332 - RNA, 14 nt, Artificial Sequence
  Description of Artificial Sequence: Synthetic oligonucleotide
ugagaaaauuucaa

SEQ ID NO: 94333 - RNA, 11 nt, Artificial Sequence
  Description of Artificial Sequence: Synthetic oligonucleotide
aauccuccuga

SEQ ID NO: 94334 - RNA, 12 nt, Artificial Sequence
  Description of Artificial Sequence: Synthetic oligonucleotide
gugacaucauau

SEQ ID NO: 94335 - RNA, 13 nt, Artificial Sequence
  Description of Artificial Sequence: Synthetic oligonucleotide
aaucuucaucaua

SEQ ID NO: 94336 - RNA, 13 nt, Artificial Sequence
  Description of Artificial Sequence: Synthetic oligonucleotide
gacuagcuauuaa

SEQ ID NO: 94337 - RNA, 14 nt, Artificial Sequence
  Description of Artificial Sequence: Synthetic oligonucleotide
ucucuacuaaaaau

SEQ ID NO: 94338 - RNA, 12 nt, Artificial Sequence
  Description of Artificial Sequence: Synthetic oligonucleotide
ucuaucucgccu

SEQ ID NO: 94339 - RNA, 13 nt, Artificial Sequence
  Description of Artificial Sequence: Synthetic oligonucleotide
cuucgguccaguu

SEQ ID NO: 94340 - RNA, 11 nt, Artificial Sequence
  Description of Artificial Sequence: Synthetic oligonucleotide
gauguagccgc

SEQ ID NO: 94341 - RNA, 12 nt, Artificial Sequence
  Description of Artificial Sequence: Synthetic oligonucleotide
ugaggagacuug

SEQ ID NO: 94342 - RNA, 12 nt, Artificial Sequence
  Description of Artificial Sequence: Synthetic oligonucleotide
gaguagugagga

SEQ ID NO: 94343 - RNA, 14 nt, Artificial Sequence
  Description of Artificial Sequence: Synthetic oligonucleotide
cagaugaguacaaa

SEQ ID NO: 94344 - RNA, 13 nt, Artificial Sequence
  Description of Artificial Sequence: Synthetic oligonucleotide
guuguuaaugggc

SEQ ID NO: 94345 - RNA, 13 nt, Artificial Sequence
  Description of Artificial Sequence: Synthetic oligonucleotide
uuuuuaauuuauu

SEQ ID NO: 94346 - RNA, 12 nt, Artificial Sequence
  Description of Artificial Sequence: Synthetic oligonucleotide
uauuuaaauaug

SEQ ID NO: 94347 - RNA, 13 nt, Artificial Sequence
  Description of Artificial Sequence: Synthetic oligonucleotide
uauccuuuguuuc

SEQ ID NO: 94348 - RNA, 14 nt, Artificial Sequence
  Description of Artificial Sequence: Synthetic oligonucleotide
cgucuaaguguuug

SEQ ID NO: 94349 - RNA, 12 nt, Artificial Sequence
  Description of Artificial Sequence: Synthetic oligonucleotide
accugugacaaa

SEQ ID NO: 94350 - RNA, 13 nt, Artificial Sequence
  Description of Artificial Sequence: Synthetic oligonucleotide
ccaggcugaauua

SEQ ID NO: 94351 - RNA, 14 nt, Artificial Sequence
  Description of Artificial Sequence: Synthetic oligonucleotide
gucauucuuacaau

SEQ ID NO: 94352 - RNA, 15 nt, Artificial Sequence
  Description of Artificial Sequence: Synthetic oligonucleotide
ucauucuuacaauug

SEQ ID NO: 94353 - RNA, 12 nt, Artificial Sequence
  Description of Artificial Sequence: Synthetic oligonucleotide
cagagaguguac

SEQ ID NO: 94354 - RNA, 12 nt, Artificial Sequence
  Description of Artificial Sequence: Synthetic oligonucleotide
agaacucagcag

SEQ ID NO: 94355 - RNA, 13 nt, Artificial Sequence
  Description of Artificial Sequence: Synthetic oligonucleotide
uuuauuuucagua

SEQ ID NO: 94356 - RNA, 12 nt, Artificial Sequence
  Description of Artificial Sequence: Synthetic oligonucleotide
ucuuaaauggaa

SEQ ID NO: 94357 - RNA, 13 nt, Artificial Sequence
  Description of Artificial Sequence: Synthetic oligonucleotide
ugccuaaaauugu

SEQ ID NO: 94358 - RNA, 12 nt, Artificial Sequence
  Description of Artificial Sequence: Synthetic oligonucleotide
agacugugagcu

SEQ ID NO: 94359 - RNA, 14 nt, Artificial Sequence
  Description of Artificial Sequence: Synthetic oligonucleotide
ugcuuuuuauuaau

SEQ ID NO: 94360 - RNA, 13 nt, Artificial Sequence
  Description of Artificial Sequence: Synthetic oligonucleotide
cucuucuuacauu

SEQ ID NO: 94361 - RNA, 15 nt, Artificial Sequence
  Description of Artificial Sequence: Synthetic oligonucleotide
cauuuguaaaaaugu

SEQ ID NO: 94362 - RNA, 15 nt, Artificial Sequence
  Description of Artificial Sequence: Synthetic oligonucleotide
aucuuaauucauauu

SEQ ID NO: 94363 - RNA, 13 nt, Artificial Sequence
  Description of Artificial Sequence: Synthetic oligonucleotide
gaacuaaucauga

SEQ ID NO: 94364 - RNA, 12 nt, Artificial Sequence
  Description of Artificial Sequence: Synthetic oligonucleotide
ucugcucuuggg

SEQ ID NO: 94365 - RNA, 13 nt, Artificial Sequence
  Description of Artificial Sequence: Synthetic oligonucleotide
caguagcuuugag

SEQ ID NO: 94366 - RNA, 14 nt, Artificial Sequence
  Description of Artificial Sequence: Synthetic oligonucleotide
cacguaauauuuca

SEQ ID NO: 94367 - RNA, 13 nt, Artificial Sequence
  Description of Artificial Sequence: Synthetic oligonucleotide
uauucucuucacu

SEQ ID NO: 94368 - RNA, 14 nt, Artificial Sequence
  Description of Artificial Sequence: Synthetic oligonucleotide
cuaaugcuaagaaa

SEQ ID NO: 94369 - RNA, 12 nt, Artificial Sequence
  Description of Artificial Sequence: Synthetic oligonucleotide
gcugaaaaucaa

SEQ ID NO: 94370 - RNA, 14 nt, Artificial Sequence
  Description of Artificial Sequence: Synthetic oligonucleotide
aauaugauuacuuu

SEQ ID NO: 94371 - RNA, 14 nt, Artificial Sequence
  Description of Artificial Sequence: Synthetic oligonucleotide
cauuuuguucuaca

SEQ ID NO: 94372 - RNA, 12 nt, Artificial Sequence
  Description of Artificial Sequence: Synthetic oligonucleotide
cccgggacucuc

SEQ ID NO: 94373 - RNA, 14 nt, Artificial Sequence
  Description of Artificial Sequence: Synthetic oligonucleotide
ccuuuaaaguaaag

SEQ ID NO: 94374 - RNA, 13 nt, Artificial Sequence
  Description of Artificial Sequence: Synthetic oligonucleotide
ucuggaagccugg

SEQ ID NO: 94375 - RNA, 14 nt, Artificial Sequence
  Description of Artificial Sequence: Synthetic oligonucleotide
aaaacaaaagagag

SEQ ID NO: 94376 - RNA, 13 nt, Artificial Sequence
  Description of Artificial Sequence: Synthetic oligonucleotide
aucaguuaugccg

SEQ ID NO: 94377 - RNA, 13 nt, Artificial Sequence
  Description of Artificial Sequence: Synthetic oligonucleotide
uaaaagaagucca

SEQ ID NO: 94378 - RNA, 11 nt, Artificial Sequence
  Description of Artificial Sequence: Synthetic oligonucleotide
aggugagguua

SEQ ID NO: 94379 - RNA, 11 nt, Artificial Sequence
  Description of Artificial Sequence: Synthetic oligonucleotide
gggaagaggac

SEQ ID NO: 94380 - RNA, 13 nt, Artificial Sequence
  Description of Artificial Sequence: Synthetic oligonucleotide
aagcaaguauugu

SEQ ID NO: 94381 - RNA, 12 nt, Artificial Sequence
  Description of Artificial Sequence: Synthetic oligonucleotide
auuguagcacuc

SEQ ID NO: 94382 - RNA, 14 nt, Artificial Sequence
  Description of Artificial Sequence: Synthetic oligonucleotide
acaaaaccacaaau

SEQ ID NO: 94383 - RNA, 12 nt, Artificial Sequence
  Description of Artificial Sequence: Synthetic oligonucleotide
uaagcccauaca

SEQ ID NO: 94384 - RNA, 11 nt, Artificial Sequence
  Description of Artificial Sequence: Synthetic oligonucleotide
agcccauacag

SEQ ID NO: 94385 - RNA, 12 nt, Artificial Sequence
  Description of Artificial Sequence: Synthetic oligonucleotide
cagaaaccuucc

SEQ ID NO: 94386 - RNA, 10 nt, Artificial Sequence
  Description of Artificial Sequence: Synthetic oligonucleotide
guauaccuac

SEQ ID NO: 94387 - RNA, 13 nt, Artificial Sequence
  Description of Artificial Sequence: Synthetic oligonucleotide
gccaguuuucgga

SEQ ID NO: 94388 - RNA, 9 nt, Artificial Sequence
  Description of Artificial Sequence: Synthetic oligonucleotide
ggaacaggg

SEQ ID NO: 94389 - RNA, 13 nt, Artificial Sequence
  Description of Artificial Sequence: Synthetic oligonucleotide
uuaacuuuccagu

SEQ ID NO: 94390 - RNA, 14 nt, Artificial Sequence
  Description of Artificial Sequence: Synthetic oligonucleotide
aaaguuugguuuug

SEQ ID NO: 94391 - RNA, 12 nt, Artificial Sequence
  Description of Artificial Sequence: Synthetic oligonucleotide
cuucccacugua

SEQ ID NO: 94392 - RNA, 13 nt, Artificial Sequence
  Description of Artificial Sequence: Synthetic oligonucleotide
ugauaccauauga

SEQ ID NO: 94393 - RNA, 11 nt, Artificial Sequence
  Description of Artificial Sequence: Synthetic oligonucleotide
aacaugggcug

SEQ ID NO: 94394 - RNA, 13 nt, Artificial Sequence
  Description of Artificial Sequence: Synthetic oligonucleotide
caacuuuuucaua

SEQ ID NO: 94395 - RNA, 12 nt, Artificial Sequence
  Description of Artificial Sequence: Synthetic oligonucleotide
caugaggccgga

SEQ ID NO: 94396 - RNA, 11 nt, Artificial Sequence
  Description of Artificial Sequence: Synthetic oligonucleotide
acugcauuugu

SEQ ID NO: 94397 - RNA, 13 nt, Artificial Sequence
  Description of Artificial Sequence: Synthetic oligonucleotide
aauguuuacuacc

SEQ ID NO: 94398 - RNA, 15 nt, Artificial Sequence
  Description of Artificial Sequence: Synthetic oligonucleotide
aauuuuuugaugaaa

SEQ ID NO: 94399 - RNA, 14 nt, Artificial Sequence
  Description of Artificial Sequence: Synthetic oligonucleotide
cagugugugaauuu

SEQ ID NO: 94400 - RNA, 13 nt, Artificial Sequence
  Description of Artificial Sequence: Synthetic oligonucleotide
gagcaauguaugu

SEQ ID NO: 94401 - RNA, 14 nt, Artificial Sequence
  Description of Artificial Sequence: Synthetic oligonucleotide
aaagcacauauaua

SEQ ID NO: 94402 - RNA, 14 nt, Artificial Sequence
  Description of Artificial Sequence: Synthetic oligonucleotide
guaauaguuucucc

SEQ ID NO: 94403 - RNA, 13 nt, Artificial Sequence
  Description of Artificial Sequence: Synthetic oligonucleotide
aguuucuccaaau

SEQ ID NO: 94404 - RNA, 13 nt, Artificial Sequence
  Description of Artificial Sequence: Synthetic oligonucleotide
uacuuccuagaaa

SEQ ID NO: 94405 - RNA, 13 nt, Artificial Sequence
  Description of Artificial Sequence: Synthetic oligonucleotide
uacaccauauaug

SEQ ID NO: 94406 - RNA, 14 nt, Artificial Sequence
  Description of Artificial Sequence: Synthetic oligonucleotide
auauaugaauggag

SEQ ID NO: 94407 - RNA, 13 nt, Artificial Sequence
  Description of Artificial Sequence: Synthetic oligonucleotide
acgagaagaagau

SEQ ID NO: 94408 - RNA, 13 nt, Artificial Sequence
  Description of Artificial Sequence: Synthetic oligonucleotide
ucauuuacaggga

SEQ ID NO: 94409 - RNA, 13 nt, Artificial Sequence
  Description of Artificial Sequence: Synthetic oligonucleotide
cauuuacagggac

SEQ ID NO: 94410 - RNA, 10 nt, Artificial Sequence
  Description of Artificial Sequence: Synthetic oligonucleotide
agggaccuga

SEQ ID NO: 94411 - RNA, 14 nt, Artificial Sequence
  Description of Artificial Sequence: Synthetic oligonucleotide
uguuugacugcauc

SEQ ID NO: 94412 - RNA, 13 nt, Artificial Sequence
  Description of Artificial Sequence: Synthetic oligonucleotide
uuugacugcaucg

SEQ ID NO: 94413 - RNA, 12 nt, Artificial Sequence
  Description of Artificial Sequence: Synthetic oligonucleotide
gaguucacaggg

SEQ ID NO: 94414 - RNA, 13 nt, Artificial Sequence
  Description of Artificial Sequence: Synthetic oligonucleotide
ggcaccucugucc

SEQ ID NO: 94415 - RNA, 15 nt, Artificial Sequence
  Description of Artificial Sequence: Synthetic oligonucleotide
gguuugucuuuuuaa

SEQ ID NO: 94416 - RNA, 14 nt, Artificial Sequence
  Description of Artificial Sequence: Synthetic oligonucleotide
uuugucuuuuuaag

SEQ ID NO: 94417 - RNA, 13 nt, Artificial Sequence
  Description of Artificial Sequence: Synthetic oligonucleotide
ccuaaagguuguc

SEQ ID NO: 94418 - RNA, 12 nt, Artificial Sequence
  Description of Artificial Sequence: Synthetic oligonucleotide
aagguugucgac

SEQ ID NO: 94419 - RNA, 13 nt, Artificial Sequence
  Description of Artificial Sequence: Synthetic oligonucleotide
accuggcaauugu

SEQ ID NO: 94420 - RNA, 12 nt, Artificial Sequence
  Description of Artificial Sequence: Synthetic oligonucleotide
aguggugcgagg

SEQ ID NO: 94421 - RNA, 13 nt, Artificial Sequence
  Description of Artificial Sequence: Synthetic oligonucleotide
agagacaugaaau

SEQ ID NO: 94422 - RNA, 13 nt, Artificial Sequence
  Description of Artificial Sequence: Synthetic oligonucleotide
auauauuucucca

SEQ ID NO: 94423 - RNA, 10 nt, Artificial Sequence
  Description of Artificial Sequence: Synthetic oligonucleotide
caugaaggcu

SEQ ID NO: 94424 - RNA, 11 nt, Artificial Sequence
  Description of Artificial Sequence: Synthetic oligonucleotide
gcuggaguggu

SEQ ID NO: 94425 - RNA, 11 nt, Artificial Sequence
  Description of Artificial Sequence: Synthetic oligonucleotide
aggaagagagg

SEQ ID NO: 94426 - RNA, 12 nt, Artificial Sequence
  Description of Artificial Sequence: Synthetic oligonucleotide
cuugcaucgggc

SEQ ID NO: 94427 - RNA, 13 nt, Artificial Sequence
  Description of Artificial Sequence: Synthetic oligonucleotide
auauccuacugug

SEQ ID NO: 94428 - RNA, 13 nt, Artificial Sequence
  Description of Artificial Sequence: Synthetic oligonucleotide
uccuacuguguaa

SEQ ID NO: 94429 - RNA, 12 nt, Artificial Sequence
  Description of Artificial Sequence: Synthetic oligonucleotide
ccuuguagugua

SEQ ID NO: 94430 - RNA, 13 nt, Artificial Sequence
  Description of Artificial Sequence: Synthetic oligonucleotide
ucuuuguugauug

SEQ ID NO: 94431 - RNA, 14 nt, Artificial Sequence
  Description of Artificial Sequence: Synthetic oligonucleotide
uuuguugauugaaa

SEQ ID NO: 94432 - RNA, 15 nt, Artificial Sequence
  Description of Artificial Sequence: Synthetic oligonucleotide
uucuuuuucuuccau

SEQ ID NO: 94433 - RNA, 13 nt, Artificial Sequence
  Description of Artificial Sequence: Synthetic oligonucleotide
aaucuuccuucua

SEQ ID NO: 94434 - RNA, 13 nt, Artificial Sequence
  Description of Artificial Sequence: Synthetic oligonucleotide
uugaaugcuucau

SEQ ID NO: 94435 - RNA, 13 nt, Artificial Sequence
  Description of Artificial Sequence: Synthetic oligonucleotide
ugaaugcuucaug

SEQ ID NO: 94436 - RNA, 13 nt, Artificial Sequence
  Description of Artificial Sequence: Synthetic oligonucleotide
aauucuacuuuga

SEQ ID NO: 94437 - RNA, 13 nt, Artificial Sequence
  Description of Artificial Sequence: Synthetic oligonucleotide
agcaacuacagac

SEQ ID NO: 94438 - RNA, 13 nt, Artificial Sequence
  Description of Artificial Sequence: Synthetic oligonucleotide
gaccaaggucaac

SEQ ID NO: 94439 - RNA, 13 nt, Artificial Sequence
  Description of Artificial Sequence: Synthetic oligonucleotide
cgacuaucucgac

SEQ ID NO: 94440 - RNA, 13 nt, Artificial Sequence
  Description of Artificial Sequence: Synthetic oligonucleotide
aaccuucccaaac

SEQ ID NO: 94441 - RNA, 14 nt, Artificial Sequence
  Description of Artificial Sequence: Synthetic oligonucleotide
ccaagcuuagaacu

SEQ ID NO: 94442 - RNA, 15 nt, Artificial Sequence
  Description of Artificial Sequence: Synthetic oligonucleotide
agcuuagaacuuuaa

SEQ ID NO: 94443 - RNA, 11 nt, Artificial Sequence
  Description of Artificial Sequence: Synthetic oligonucleotide
aagaccaccac

SEQ ID NO: 94444 - RNA, 14 nt, Artificial Sequence
  Description of Artificial Sequence: Synthetic oligonucleotide
gcgagaaauaaagu

SEQ ID NO: 94445 - RNA, 14 nt, Artificial Sequence
  Description of Artificial Sequence: Synthetic oligonucleotide
cgagaaauaaaguu

SEQ ID NO: 94446 - RNA, 12 nt, Artificial Sequence
  Description of Artificial Sequence: Synthetic oligonucleotide
aggaaaugaucc

SEQ ID NO: 94447 - RNA, 13 nt, Artificial Sequence
  Description of Artificial Sequence: Synthetic oligonucleotide
gaagaaaugaaac

SEQ ID NO: 94448 - RNA, 13 nt, Artificial Sequence
  Description of Artificial Sequence: Synthetic oligonucleotide
guuuccauccucc

SEQ ID NO: 94449 - RNA, 15 nt, Artificial Sequence
  Description of Artificial Sequence: Synthetic oligonucleotide
acugaaaaucuuuga

SEQ ID NO: 94450 - RNA, 11 nt, Artificial Sequence
  Description of Artificial Sequence: Synthetic oligonucleotide
ugccguucagg

SEQ ID NO: 94451 - RNA, 13 nt, Artificial Sequence
  Description of Artificial Sequence: Synthetic oligonucleotide
caggguccagaag

SEQ ID NO: 94452 - RNA, 13 nt, Artificial Sequence
  Description of Artificial Sequence: Synthetic oligonucleotide
ucaagacugcuug

SEQ ID NO: 94453 - RNA, 13 nt, Artificial Sequence
  Description of Artificial Sequence: Synthetic oligonucleotide
uccaugucuuugg

SEQ ID NO: 94454 - RNA, 11 nt, Artificial Sequence
  Description of Artificial Sequence: Synthetic oligonucleotide
gccugaaacac

SEQ ID NO: 94455 - RNA, 12 nt, Artificial Sequence
  Description of Artificial Sequence: Synthetic oligonucleotide
ucucuguaccuc

SEQ ID NO: 94456 - RNA, 12 nt, Artificial Sequence
  Description of Artificial Sequence: Synthetic oligonucleotide
agcaagacaaga

SEQ ID NO: 94457 - RNA, 13 nt, Artificial Sequence
  Description of Artificial Sequence: Synthetic oligonucleotide
gcaagacaagaaa

SEQ ID NO: 94458 - RNA, 12 nt, Artificial Sequence
  Description of Artificial Sequence: Synthetic oligonucleotide
uguacaagaucc

SEQ ID NO: 94459 - RNA, 12 nt, Artificial Sequence
  Description of Artificial Sequence: Synthetic oligonucleotide
cguacuugcaga

SEQ ID NO: 94460 - RNA, 13 nt, Artificial Sequence
  Description of Artificial Sequence: Synthetic oligonucleotide
cgaucgauacaga

SEQ ID NO: 94461 - RNA, 13 nt, Artificial Sequence
  Description of Artificial Sequence: Synthetic oligonucleotide
uauaaaaauaaau

SEQ ID NO: 94462 - RNA, 13 nt, Artificial Sequence
  Description of Artificial Sequence: Synthetic oligonucleotide
uaaaaauaaauau

SEQ ID NO: 94463 - RNA, 13 nt, Artificial Sequence
  Description of Artificial Sequence: Synthetic oligonucleotide
uuugacugcugug

SEQ ID NO: 94464 - RNA, 13 nt, Artificial Sequence
  Description of Artificial Sequence: Synthetic oligonucleotide
ggagaugagagac

SEQ ID NO: 94465 - RNA, 10 nt, Artificial Sequence
  Description of Artificial Sequence: Synthetic oligonucleotide
ucccacuugg

SEQ ID NO: 94466 - RNA, 10 nt, Artificial Sequence
  Description of Artificial Sequence: Synthetic oligonucleotide
guucacggcc

SEQ ID NO: 94467 - RNA, 12 nt, Artificial Sequence
  Description of Artificial Sequence: Synthetic oligonucleotide
accaucacacca

SEQ ID NO: 94468 - RNA, 10 nt, Artificial Sequence
  Description of Artificial Sequence: Synthetic oligonucleotide
cugcggguuu

SEQ ID NO: 94469 - RNA, 9 nt, Artificial Sequence
  Description of Artificial Sequence: Synthetic oligonucleotide
uccaguuug

SEQ ID NO: 94470 - RNA, 12 nt, Artificial Sequence
  Description of Artificial Sequence: Synthetic oligonucleotide
uuaaggacuucu

SEQ ID NO: 94471 - RNA, 12 nt, Artificial Sequence
  Description of Artificial Sequence: Synthetic oligonucleotide
agugggacagag

SEQ ID NO: 94472 - RNA, 13 nt, Artificial Sequence
  Description of Artificial Sequence: Synthetic oligonucleotide
auuuguuauugug

SEQ ID NO: 94473 - RNA, 12 nt, Artificial Sequence
  Description of Artificial Sequence: Synthetic oligonucleotide
ucaaaugcauuu

SEQ ID NO: 94474 - RNA, 9 nt, Artificial Sequence
  Description of Artificial Sequence: Synthetic oligonucleotide
aggaaagcc

SEQ ID NO: 94475 - RNA, 10 nt, Artificial Sequence
  Description of Artificial Sequence: Synthetic oligonucleotide
ggaaagcccu

SEQ ID NO: 94476 - RNA, 11 nt, Artificial Sequence
  Description of Artificial Sequence: Synthetic oligonucleotide
ccagcauggcc

SEQ ID NO: 94477 - RNA, 10 nt, Artificial Sequence
  Description of Artificial Sequence: Synthetic oligonucleotide
uucucccuga

SEQ ID NO: 94478 - RNA, 11 nt, Artificial Sequence
  Description of Artificial Sequence: Synthetic oligonucleotide
aagaagcccuu

SEQ ID NO: 94479 - RNA, 11 nt, Artificial Sequence
  Description of Artificial Sequence: Synthetic oligonucleotide
gaagcccuuca

SEQ ID NO: 94480 - RNA, 10 nt, Artificial Sequence
  Description of Artificial Sequence: Synthetic oligonucleotide
cccuucagcg

SEQ ID NO: 94481 - RNA, 10 nt, Artificial Sequence
  Description of Artificial Sequence: Synthetic oligonucleotide
cuucagcggc

SEQ ID NO: 94482 - RNA, 11 nt, Artificial Sequence
  Description of Artificial Sequence: Synthetic oligonucleotide
cagcggccagu

SEQ ID NO: 94483 - RNA, 11 nt, Artificial Sequence
  Description of Artificial Sequence: Synthetic oligonucleotide
gaaaagcuccg

SEQ ID NO: 94484 - RNA, 10 nt, Artificial Sequence
  Description of Artificial Sequence: Synthetic oligonucleotide
aaagcuccgg

SEQ ID NO: 94485 - RNA, 12 nt, Artificial Sequence
  Description of Artificial Sequence: Synthetic oligonucleotide
gucaacagucug

SEQ ID NO: 94486 - RNA, 12 nt, Artificial Sequence
  Description of Artificial Sequence: Synthetic oligonucleotide
agaguucaaaag

SEQ ID NO: 94487 - RNA, 12 nt, Artificial Sequence
  Description of Artificial Sequence: Synthetic oligonucleotide
gaguucaaaagc

SEQ ID NO: 94488 - RNA, 11 nt, Artificial Sequence
  Description of Artificial Sequence: Synthetic oligonucleotide
ucaaaagcccu

SEQ ID NO: 94489 - RNA, 11 nt, Artificial Sequence
  Description of Artificial Sequence: Synthetic oligonucleotide
caaaagcccuu

SEQ ID NO: 94490 - RNA, 11 nt, Artificial Sequence
  Description of Artificial Sequence: Synthetic oligonucleotide
aaagcccuuca

SEQ ID NO: 94491 - RNA, 11 nt, Artificial Sequence
  Description of Artificial Sequence: Synthetic oligonucleotide
aagcccuucag

SEQ ID NO: 94492 - RNA, 12 nt, Artificial Sequence
  Description of Artificial Sequence: Synthetic oligonucleotide
ugaagccgcucg

SEQ ID NO: 94493 - RNA, 11 nt, Artificial Sequence
  Description of Artificial Sequence: Synthetic oligonucleotide
acgccagucaa

SEQ ID NO: 94494 - RNA, 12 nt, Artificial Sequence
  Description of Artificial Sequence: Synthetic oligonucleotide
ucuuggugcgug

SEQ ID NO: 94495 - RNA, 13 nt, Artificial Sequence
  Description of Artificial Sequence: Synthetic oligonucleotide
uuggauucaucag

SEQ ID NO: 94496 - RNA, 12 nt, Artificial Sequence
  Description of Artificial Sequence: Synthetic oligonucleotide
ggaauaccuaag

SEQ ID NO: 94497 - RNA, 11 nt, Artificial Sequence
  Description of Artificial Sequence: Synthetic oligonucleotide
uuugaggcuca

SEQ ID NO: 94498 - RNA, 10 nt, Artificial Sequence
  Description of Artificial Sequence: Synthetic oligonucleotide
cuacaauugg

SEQ ID NO: 94499 - RNA, 11 nt, Artificial Sequence
  Description of Artificial Sequence: Synthetic oligonucleotide
aguuaggagcc

SEQ ID NO: 94500 - RNA, 12 nt, Artificial Sequence
  Description of Artificial Sequence: Synthetic oligonucleotide
gucaauauccac

SEQ ID NO: 94501 - RNA, 12 nt, Artificial Sequence
  Description of Artificial Sequence: Synthetic oligonucleotide
uguucagucaca

SEQ ID NO: 94502 - RNA, 11 nt, Artificial Sequence
  Description of Artificial Sequence: Synthetic oligonucleotide
cacacacauac

SEQ ID NO: 94503 - RNA, 11 nt, Artificial Sequence
  Description of Artificial Sequence: Synthetic oligonucleotide
uccuuuugcuu

SEQ ID NO: 94504 - RNA, 15 nt, Artificial Sequence
  Description of Artificial Sequence: Synthetic oligonucleotide
uuuaaaguaauuuuu

SEQ ID NO: 94505 - RNA, 12 nt, Artificial Sequence
  Description of Artificial Sequence: Synthetic oligonucleotide
aacagucaaugg

SEQ ID NO: 94506 - RNA, 12 nt, Artificial Sequence
  Description of Artificial Sequence: Synthetic oligonucleotide
cgacaaaccaau

SEQ ID NO: 94507 - RNA, 11 nt, Artificial Sequence
  Description of Artificial Sequence: Synthetic oligonucleotide
cugcuaccacu

SEQ ID NO: 94508 - RNA, 12 nt, Artificial Sequence
  Description of Artificial Sequence: Synthetic oligonucleotide
caagcggucuua

SEQ ID NO: 94509 - RNA, 12 nt, Artificial Sequence
  Description of Artificial Sequence: Synthetic oligonucleotide
gucuuaccggcu

SEQ ID NO: 94510 - RNA, 10 nt, Artificial Sequence
  Description of Artificial Sequence: Synthetic oligonucleotide
auggguuacc

SEQ ID NO: 94511 - RNA, 10 nt, Artificial Sequence
  Description of Artificial Sequence: Synthetic oligonucleotide
uuaccugcga

SEQ ID NO: 94512 - RNA, 11 nt, Artificial Sequence
  Description of Artificial Sequence: Synthetic oligonucleotide
aucuugcugag

SEQ ID NO: 94513 - RNA, 12 nt, Artificial Sequence
  Description of Artificial Sequence: Synthetic oligonucleotide
gcauaaaacagu

SEQ ID NO: 94514 - RNA, 11 nt, Artificial Sequence
  Description of Artificial Sequence: Synthetic oligonucleotide
uccuuuauccu

SEQ ID NO: 94515 - RNA, 11 nt, Artificial Sequence
  Description of Artificial Sequence: Synthetic oligonucleotide
aacgcaaguug

SEQ ID NO: 94516 - RNA, 12 nt, Artificial Sequence
  Description of Artificial Sequence: Synthetic oligonucleotide
aacugaaaccau

SEQ ID NO: 94517 - RNA, 13 nt, Artificial Sequence
  Description of Artificial Sequence: Synthetic oligonucleotide
cuuuguuaaauau

SEQ ID NO: 94518 - RNA, 13 nt, Artificial Sequence
  Description of Artificial Sequence: Synthetic oligonucleotide
uauauuaaaaguu

SEQ ID NO: 94519 - RNA, 12 nt, Artificial Sequence
  Description of Artificial Sequence: Synthetic oligonucleotide
uuuugacuuaac

SEQ ID NO: 94520 - RNA, 12 nt, Artificial Sequence
  Description of Artificial Sequence: Synthetic oligonucleotide
caaacucagcac

SEQ ID NO: 94521 - RNA, 10 nt, Artificial Sequence
  Description of Artificial Sequence: Synthetic oligonucleotide
gcugaccuca

SEQ ID NO: 94522 - RNA, 13 nt, Artificial Sequence
  Description of Artificial Sequence: Synthetic oligonucleotide
uuauucagaucgc

SEQ ID NO: 94523 - RNA, 12 nt, Artificial Sequence
  Description of Artificial Sequence: Synthetic oligonucleotide
ggguucugggau

SEQ ID NO: 94524 - RNA, 14 nt, Artificial Sequence
  Description of Artificial Sequence: Synthetic oligonucleotide
uauuggaaauuaug

SEQ ID NO: 94525 - RNA, 12 nt, Artificial Sequence
  Description of Artificial Sequence: Synthetic oligonucleotide
uggaagcacuag

SEQ ID NO: 94526 - RNA, 12 nt, Artificial Sequence
  Description of Artificial Sequence: Synthetic oligonucleotide
uuuuuaugugga

SEQ ID NO: 94527 - RNA, 11 nt, Artificial Sequence
  Description of Artificial Sequence: Synthetic oligonucleotide
gaauugguaga

SEQ ID NO: 94528 - RNA, 12 nt, Artificial Sequence
  Description of Artificial Sequence: Synthetic oligonucleotide
uagacuuggaga

SEQ ID NO: 94529 - RNA, 12 nt, Artificial Sequence
  Description of Artificial Sequence: Synthetic oligonucleotide
uacaguauucca

SEQ ID NO: 94530 - RNA, 14 nt, Artificial Sequence
  Description of Artificial Sequence: Synthetic oligonucleotide
cacugaugaauuaa

SEQ ID NO: 94531 - RNA, 11 nt, Artificial Sequence
  Description of Artificial Sequence: Synthetic oligonucleotide
cacaucaucac

SEQ ID NO: 94532 - RNA, 12 nt, Artificial Sequence
  Description of Artificial Sequence: Synthetic oligonucleotide
ucaccaaacaga

SEQ ID NO: 94533 - RNA, 11 nt, Artificial Sequence
  Description of Artificial Sequence: Synthetic oligonucleotide
gaacaugaugg

SEQ ID NO: 94534 - RNA, 11 nt, Artificial Sequence
  Description of Artificial Sequence: Synthetic oligonucleotide
auguagacugc

SEQ ID NO: 94535 - RNA, 12 nt, Artificial Sequence
  Description of Artificial Sequence: Synthetic oligonucleotide
gaucuauuuaug

SEQ ID NO: 94536 - RNA, 11 nt, Artificial Sequence
  Description of Artificial Sequence: Synthetic oligonucleotide
cacuauuauca

SEQ ID NO: 94537 - RNA, 10 nt, Artificial Sequence
  Description of Artificial Sequence: Synthetic oligonucleotide
ucaguucugc

SEQ ID NO: 94538 - RNA, 12 nt, Artificial Sequence
  Description of Artificial Sequence: Synthetic oligonucleotide
gauuaaaccuac

SEQ ID NO: 94539 - RNA, 12 nt, Artificial Sequence
  Description of Artificial Sequence: Synthetic oligonucleotide
uaaaauccuucu

SEQ ID NO: 94540 - RNA, 11 nt, Artificial Sequence
  Description of Artificial Sequence: Synthetic oligonucleotide
augcuguagac

SEQ ID NO: 94541 - RNA, 12 nt, Artificial Sequence
  Description of Artificial Sequence: Synthetic oligonucleotide
ugauaggaauag

SEQ ID NO: 94542 - RNA, 10 nt, Artificial Sequence
  Description of Artificial Sequence: Synthetic oligonucleotide
auggcccuga

SEQ ID NO: 94543 - RNA, 10 nt, Artificial Sequence
  Description of Artificial Sequence: Synthetic oligonucleotide
uccucaagca

SEQ ID NO: 94544 - RNA, 9 nt, Artificial Sequence
  Description of Artificial Sequence: Synthetic oligonucleotide
uucagccca

SEQ ID NO: 94545 - RNA, 10 nt, Artificial Sequence
  Description of Artificial Sequence: Synthetic oligonucleotide
cugcugaacc

SEQ ID NO: 94546 - RNA, 11 nt, Artificial Sequence
  Description of Artificial Sequence: Synthetic oligonucleotide
aguucucuuca

SEQ ID NO: 94547 - RNA, 10 nt, Artificial Sequence
  Description of Artificial Sequence: Synthetic oligonucleotide
cagccuagag

SEQ ID NO: 94548 - RNA, 12 nt, Artificial Sequence
  Description of Artificial Sequence: Synthetic oligonucleotide
ucugugaagugu

SEQ ID NO: 94549 - RNA, 13 nt, Artificial Sequence
  Description of Artificial Sequence: Synthetic oligonucleotide
gagaaaauuucaa

SEQ ID NO: 94550 - RNA, 10 nt, Artificial Sequence
  Description of Artificial Sequence: Synthetic oligonucleotide
auccuccuga

SEQ ID NO: 94551 - RNA, 11 nt, Artificial Sequence
  Description of Artificial Sequence: Synthetic oligonucleotide
ugacaucauau

SEQ ID NO: 94552 - RNA, 12 nt, Artificial Sequence
  Description of Artificial Sequence: Synthetic oligonucleotide
aucuucaucaua

SEQ ID NO: 94553 - RNA, 12 nt, Artificial Sequence
  Description of Artificial Sequence: Synthetic oligonucleotide
acuagcuauuaa

SEQ ID NO: 94554 - RNA, 13 nt, Artificial Sequence
  Description of Artificial Sequence: Synthetic oligonucleotide
cucuacuaaaaau

SEQ ID NO: 94555 - RNA, 11 nt, Artificial Sequence
  Description of Artificial Sequence: Synthetic oligonucleotide
cuaucucgccu

SEQ ID NO: 94556 - RNA, 12 nt, Artificial Sequence
  Description of Artificial Sequence: Synthetic oligonucleotide
uucgguccaguu

SEQ ID NO: 94557 - RNA, 10 nt, Artificial Sequence
  Description of Artificial Sequence: Synthetic oligonucleotide
auguagccgc

SEQ ID NO: 94558 - RNA, 11 nt, Artificial Sequence
  Description of Artificial Sequence: Synthetic oligonucleotide
gaggagacuug

SEQ ID NO: 94559 - RNA, 11 nt, Artificial Sequence
  Description of Artificial Sequence: Synthetic oligonucleotide
aguagugagga

SEQ ID NO: 94560 - RNA, 13 nt, Artificial Sequence
  Description of Artificial Sequence: Synthetic oligonucleotide
agaugaguacaaa

SEQ ID NO: 94561 - RNA, 12 nt, Artificial Sequence
  Description of Artificial Sequence: Synthetic oligonucleotide
uuguuaaugggc

SEQ ID NO: 94562 - RNA, 12 nt, Artificial Sequence
  Description of Artificial Sequence: Synthetic oligonucleotide
uuuuaauuuauu

SEQ ID NO: 94563 - RNA, 11 nt, Artificial Sequence
  Description of Artificial Sequence: Synthetic oligonucleotide
auuuaaauaug

SEQ ID NO: 94564 - RNA, 12 nt, Artificial Sequence
  Description of Artificial Sequence: Synthetic oligonucleotide
auccuuuguuuc

SEQ ID NO: 94565 - RNA, 13 nt, Artificial Sequence
  Description of Artificial Sequence: Synthetic oligonucleotide
gucuaaguguuug

SEQ ID NO: 94566 - RNA, 11 nt, Artificial Sequence
  Description of Artificial Sequence: Synthetic oligonucleotide
ccugugacaaa

SEQ ID NO: 94567 - RNA, 12 nt, Artificial Sequence
  Description of Artificial Sequence: Synthetic oligonucleotide
caggcugaauua

SEQ ID NO: 94568 - RNA, 13 nt, Artificial Sequence
  Description of Artificial Sequence: Synthetic oligonucleotide
ucauucuuacaau

SEQ ID NO: 94569 - RNA, 14 nt, Artificial Sequence
  Description of Artificial Sequence: Synthetic oligonucleotide
cauucuuacaauug

SEQ ID NO: 94570 - RNA, 11 nt, Artificial Sequence
  Description of Artificial Sequence: Synthetic oligonucleotide
agagaguguac

SEQ ID NO: 94571 - RNA, 11 nt, Artificial Sequence
  Description of Artificial Sequence: Synthetic oligonucleotide
gaacucagcag

SEQ ID NO: 94572 - RNA, 12 nt, Artificial Sequence
  Description of Artificial Sequence: Synthetic oligonucleotide
uuauuuucagua

SEQ ID NO: 94573 - RNA, 11 nt, Artificial Sequence
  Description of Artificial Sequence: Synthetic oligonucleotide
cuuaaauggaa

SEQ ID NO: 94574 - RNA, 12 nt, Artificial Sequence
  Description of Artificial Sequence: Synthetic oligonucleotide
gccuaaaauugu

SEQ ID NO: 94575 - RNA, 12 nt, Artificial Sequence
  Description of Artificial Sequence: Synthetic oligonucleotide
acuaacaucugg

SEQ ID NO: 94576 - RNA, 11 nt, Artificial Sequence
  Description of Artificial Sequence: Synthetic oligonucleotide
gacugugagcu

SEQ ID NO: 94577 - RNA, 13 nt, Artificial Sequence
  Description of Artificial Sequence: Synthetic oligonucleotide
gcuuuuuauuaau

SEQ ID NO: 94578 - RNA, 12 nt, Artificial Sequence
  Description of Artificial Sequence: Synthetic oligonucleotide
ucuucuuacauu

SEQ ID NO: 94579 - RNA, 14 nt, Artificial Sequence
  Description of Artificial Sequence: Synthetic oligonucleotide
auuuguaaaaaugu

SEQ ID NO: 94580 - RNA, 14 nt, Artificial Sequence
  Description of Artificial Sequence: Synthetic oligonucleotide
ucuuaauucauauu

SEQ ID NO: 94581 - RNA, 12 nt, Artificial Sequence
  Description of Artificial Sequence: Synthetic oligonucleotide
aacuaaucauga

SEQ ID NO: 94582 - RNA, 11 nt, Artificial Sequence
  Description of Artificial Sequence: Synthetic oligonucleotide
cugcucuuggg

SEQ ID NO: 94583 - RNA, 12 nt, Artificial Sequence
  Description of Artificial Sequence: Synthetic oligonucleotide
aguagcuuugag

SEQ ID NO: 94584 - RNA, 13 nt, Artificial Sequence
  Description of Artificial Sequence: Synthetic oligonucleotide
acguaauauuuca

SEQ ID NO: 94585 - RNA, 12 nt, Artificial Sequence
  Description of Artificial Sequence: Synthetic oligonucleotide
auucucuucacu

SEQ ID NO: 94586 - RNA, 13 nt, Artificial Sequence
  Description of Artificial Sequence: Synthetic oligonucleotide
uaaugcuaagaaa

SEQ ID NO: 94587 - RNA, 11 nt, Artificial Sequence
  Description of Artificial Sequence: Synthetic oligonucleotide
cugaaaaucaa

SEQ ID NO: 94588 - RNA, 13 nt, Artificial Sequence
  Description of Artificial Sequence: Synthetic oligonucleotide
auaugauuacuuu

SEQ ID NO: 94589 - RNA, 13 nt, Artificial Sequence
  Description of Artificial Sequence: Synthetic oligonucleotide
auuuuguucuaca

SEQ ID NO: 94590 - RNA, 11 nt, Artificial Sequence
  Description of Artificial Sequence: Synthetic oligonucleotide
ccgggacucuc

SEQ ID NO: 94591 - RNA, 13 nt, Artificial Sequence
  Description of Artificial Sequence: Synthetic oligonucleotide
cuuuaaaguaaag

SEQ ID NO: 94592 - RNA, 12 nt, Artificial Sequence
  Description of Artificial Sequence: Synthetic oligonucleotide
cuggaagccugg

SEQ ID NO: 94593 - RNA, 13 nt, Artificial Sequence
  Description of Artificial Sequence: Synthetic oligonucleotide
aaacaaaagagag

SEQ ID NO: 94594 - RNA, 12 nt, Artificial Sequence
  Description of Artificial Sequence: Synthetic oligonucleotide
ucaguuaugccg

SEQ ID NO: 94595 - RNA, 12 nt, Artificial Sequence
  Description of Artificial Sequence: Synthetic oligonucleotide
aaaagaagucca

SEQ ID NO: 94596 - RNA, 10 nt, Artificial Sequence
  Description of Artificial Sequence: Synthetic oligonucleotide
ggugagguua

SEQ ID NO: 94597 - RNA, 10 nt, Artificial Sequence
  Description of Artificial Sequence: Synthetic oligonucleotide
ggaagaggac

SEQ ID NO: 94598 - RNA, 12 nt, Artificial Sequence
  Description of Artificial Sequence: Synthetic oligonucleotide
agcaaguauugu

SEQ ID NO: 94599 - RNA, 11 nt, Artificial Sequence
  Description of Artificial Sequence: Synthetic oligonucleotide
uuguagcacuc

SEQ ID NO: 94600 - RNA, 13 nt, Artificial Sequence
  Description of Artificial Sequence: Synthetic oligonucleotide
caaaaccacaaau

SEQ ID NO: 94601 - RNA, 11 nt, Artificial Sequence
  Description of Artificial Sequence: Synthetic oligonucleotide
aagcccauaca

SEQ ID NO: 94602 - RNA, 10 nt, Artificial Sequence
  Description of Artificial Sequence: Synthetic oligonucleotide
gcccauacag

SEQ ID NO: 94603 - RNA, 11 nt, Artificial Sequence
  Description of Artificial Sequence: Synthetic oligonucleotide
agaaaccuucc

SEQ ID NO: 94604 - RNA, 9 nt, Artificial Sequence
  Description of Artificial Sequence: Synthetic oligonucleotide
uauaccuac

SEQ ID NO: 94605 - RNA, 12 nt, Artificial Sequence
  Description of Artificial Sequence: Synthetic oligonucleotide
ccaguuuucgga

SEQ ID NO: 94606 - RNA, 8 nt, Artificial Sequence
  Description of Artificial Sequence: Synthetic oligonucleotide
gaacaggg

SEQ ID NO: 94607 - RNA, 12 nt, Artificial Sequence
  Description of Artificial Sequence: Synthetic oligonucleotide
uaacuuuccagu

SEQ ID NO: 94608 - RNA, 13 nt, Artificial Sequence
  Description of Artificial Sequence: Synthetic oligonucleotide
aaguuugguuuug

SEQ ID NO: 94609 - RNA, 11 nt, Artificial Sequence
  Description of Artificial Sequence: Synthetic oligonucleotide
uucccacugua

SEQ ID NO: 94610 - RNA, 12 nt, Artificial Sequence
  Description of Artificial Sequence: Synthetic oligonucleotide
gauaccauauga

SEQ ID NO: 94611 - RNA, 10 nt, Artificial Sequence
  Description of Artificial Sequence: Synthetic oligonucleotide
acaugggcug

SEQ ID NO: 94612 - RNA, 12 nt, Artificial Sequence
  Description of Artificial Sequence: Synthetic oligonucleotide
aacuuuuucaua

SEQ ID NO: 94613 - RNA, 11 nt, Artificial Sequence
  Description of Artificial Sequence: Synthetic oligonucleotide
augaggccgga

SEQ ID NO: 94614 - RNA, 10 nt, Artificial Sequence
  Description of Artificial Sequence: Synthetic oligonucleotide
cugcauuugu

SEQ ID NO: 94615 - RNA, 12 nt, Artificial Sequence
  Description of Artificial Sequence: Synthetic oligonucleotide
auguuuacuacc

SEQ ID NO: 94616 - RNA, 14 nt, Artificial Sequence
  Description of Artificial Sequence: Synthetic oligonucleotide
auuuuuugaugaaa

SEQ ID NO: 94617 - RNA, 13 nt, Artificial Sequence
  Description of Artificial Sequence: Synthetic oligonucleotide
agugugugaauuu

SEQ ID NO: 94618 - RNA, 12 nt, Artificial Sequence
  Description of Artificial Sequence: Synthetic oligonucleotide
agcaauguaugu

SEQ ID NO: 94619 - RNA, 13 nt, Artificial Sequence
  Description of Artificial Sequence: Synthetic oligonucleotide
aagcacauauaua

SEQ ID NO: 94620 - RNA, 13 nt, Artificial Sequence
  Description of Artificial Sequence: Synthetic oligonucleotide
uaauaguuucucc

SEQ ID NO: 94621 - RNA, 12 nt, Artificial Sequence
  Description of Artificial Sequence: Synthetic oligonucleotide
guuucuccaaau

SEQ ID NO: 94622 - RNA, 12 nt, Artificial Sequence
  Description of Artificial Sequence: Synthetic oligonucleotide
acuuccuagaaa

SEQ ID NO: 94623 - RNA, 12 nt, Artificial Sequence
  Description of Artificial Sequence: Synthetic oligonucleotide
acaccauauaug

SEQ ID NO: 94624 - RNA, 13 nt, Artificial Sequence
  Description of Artificial Sequence: Synthetic oligonucleotide
uauaugaauggag

SEQ ID NO: 94625 - RNA, 12 nt, Artificial Sequence
  Description of Artificial Sequence: Synthetic oligonucleotide
cauuuacaggga

SEQ ID NO: 94626 - RNA, 12 nt, Artificial Sequence
  Description of Artificial Sequence: Synthetic oligonucleotide
auuuacagggac

SEQ ID NO: 94627 - RNA, 9 nt, Artificial Sequence
  Description of Artificial Sequence: Synthetic oligonucleotide
gggaccuga

SEQ ID NO: 94628 - RNA, 13 nt, Artificial Sequence
  Description of Artificial Sequence: Synthetic oligonucleotide
guuugacugcauc

SEQ ID NO: 94629 - RNA, 12 nt, Artificial Sequence
  Description of Artificial Sequence: Synthetic oligonucleotide
uugacugcaucg

SEQ ID NO: 94630 - RNA, 11 nt, Artificial Sequence
  Description of Artificial Sequence: Synthetic oligonucleotide
aguucacaggg

SEQ ID NO: 94631 - RNA, 12 nt, Artificial Sequence
  Description of Artificial Sequence: Synthetic oligonucleotide
gcaccucugucc

SEQ ID NO: 94632 - RNA, 14 nt, Artificial Sequence
  Description of Artificial Sequence: Synthetic oligonucleotide
guuugucuuuuuaa

SEQ ID NO: 94633 - RNA, 13 nt, Artificial Sequence
  Description of Artificial Sequence: Synthetic oligonucleotide
uugucuuuuuaag

SEQ ID NO: 94634 - RNA, 12 nt, Artificial Sequence
  Description of Artificial Sequence: Synthetic oligonucleotide
cuaaagguuguc

SEQ ID NO: 94635 - RNA, 11 nt, Artificial Sequence
  Description of Artificial Sequence: Synthetic oligonucleotide
agguugucgac

SEQ ID NO: 94636 - RNA, 12 nt, Artificial Sequence
  Description of Artificial Sequence: Synthetic oligonucleotide
ccuggcaauugu

SEQ ID NO: 94637 - RNA, 11 nt, Artificial Sequence
  Description of Artificial Sequence: Synthetic oligonucleotide
guggugcgagg

SEQ ID NO: 94638 - RNA, 12 nt, Artificial Sequence
  Description of Artificial Sequence: Synthetic oligonucleotide
gagacaugaaau

SEQ ID NO: 94639 - RNA, 12 nt, Artificial Sequence
  Description of Artificial Sequence: Synthetic oligonucleotide
uauauuucucca

SEQ ID NO: 94640 - RNA, 9 nt, Artificial Sequence
  Description of Artificial Sequence: Synthetic oligonucleotide
augaaggcu

SEQ ID NO: 94641 - RNA, 10 nt, Artificial Sequence
  Description of Artificial Sequence: Synthetic oligonucleotide
cuggaguggu

SEQ ID NO: 94642 - RNA, 10 nt, Artificial Sequence
  Description of Artificial Sequence: Synthetic oligonucleotide
ggaagagagg

SEQ ID NO: 94643 - RNA, 11 nt, Artificial Sequence
  Description of Artificial Sequence: Synthetic oligonucleotide
uugcaucgggc

SEQ ID NO: 94644 - RNA, 12 nt, Artificial Sequence
  Description of Artificial Sequence: Synthetic oligonucleotide
uauccuacugug

SEQ ID NO: 94645 - RNA, 12 nt, Artificial Sequence
  Description of Artificial Sequence: Synthetic oligonucleotide
ccuacuguguaa

SEQ ID NO: 94646 - RNA, 11 nt, Artificial Sequence
  Description of Artificial Sequence: Synthetic oligonucleotide
cuuguagugua

SEQ ID NO: 94647 - RNA, 12 nt, Artificial Sequence
  Description of Artificial Sequence: Synthetic oligonucleotide
cuuuguugauug

SEQ ID NO: 94648 - RNA, 13 nt, Artificial Sequence
  Description of Artificial Sequence: Synthetic oligonucleotide
uuguugauugaaa

SEQ ID NO: 94649 - RNA, 14 nt, Artificial Sequence
  Description of Artificial Sequence: Synthetic oligonucleotide
ucuuuuucuuccau

SEQ ID NO: 94650 - RNA, 12 nt, Artificial Sequence
  Description of Artificial Sequence: Synthetic oligonucleotide
aucuuccuucua

SEQ ID NO: 94651 - RNA, 12 nt, Artificial Sequence
  Description of Artificial Sequence: Synthetic oligonucleotide
ugaaugcuucau

SEQ ID NO: 94652 - RNA, 12 nt, Artificial Sequence
  Description of Artificial Sequence: Synthetic oligonucleotide
gaaugcuucaug

SEQ ID NO: 94653 - RNA, 12 nt, Artificial Sequence
  Description of Artificial Sequence: Synthetic oligonucleotide
auucuacuuuga

SEQ ID NO: 94654 - RNA, 12 nt, Artificial Sequence
  Description of Artificial Sequence: Synthetic oligonucleotide
gcaacuacagac

SEQ ID NO: 94655 - RNA, 12 nt, Artificial Sequence
  Description of Artificial Sequence: Synthetic oligonucleotide
accaaggucaac

SEQ ID NO: 94656 - RNA, 12 nt, Artificial Sequence
  Description of Artificial Sequence: Synthetic oligonucleotide
gacuaucucgac

SEQ ID NO: 94657 - RNA, 12 nt, Artificial Sequence
  Description of Artificial Sequence: Synthetic oligonucleotide
accuucccaaac

SEQ ID NO: 94658 - RNA, 13 nt, Artificial Sequence
  Description of Artificial Sequence: Synthetic oligonucleotide
caagcuuagaacu

SEQ ID NO: 94659 - RNA, 14 nt, Artificial Sequence
  Description of Artificial Sequence: Synthetic oligonucleotide
gcuuagaacuuuaa

SEQ ID NO: 94660 - RNA, 13 nt, Artificial Sequence
  Description of Artificial Sequence: Synthetic oligonucleotide
aacuuuaagcaac

SEQ ID NO: 94661 - RNA, 10 nt, Artificial Sequence
  Description of Artificial Sequence: Synthetic oligonucleotide
agaccaccac

SEQ ID NO: 94662 - RNA, 13 nt, Artificial Sequence
  Description of Artificial Sequence: Synthetic oligonucleotide
cgagaaauaaagu

SEQ ID NO: 94663 - RNA, 13 nt, Artificial Sequence
  Description of Artificial Sequence: Synthetic oligonucleotide
gagaaauaaaguu

SEQ ID NO: 94664 - RNA, 11 nt, Artificial Sequence
  Description of Artificial Sequence: Synthetic oligonucleotide
ggaaaugaucc

SEQ ID NO: 94665 - RNA, 12 nt, Artificial Sequence
  Description of Artificial Sequence: Synthetic oligonucleotide
aagaaaugaaac

SEQ ID NO: 94666 - RNA, 12 nt, Artificial Sequence
  Description of Artificial Sequence: Synthetic oligonucleotide
uuuccauccucc

SEQ ID NO: 94667 - RNA, 14 nt, Artificial Sequence
  Description of Artificial Sequence: Synthetic oligonucleotide
cugaaaaucuuuga

SEQ ID NO: 94668 - RNA, 10 nt, Artificial Sequence
  Description of Artificial Sequence: Synthetic oligonucleotide
gccguucagg

SEQ ID NO: 94669 - RNA, 12 nt, Artificial Sequence
  Description of Artificial Sequence: Synthetic oligonucleotide
aggguccagaag

SEQ ID NO: 94670 - RNA, 12 nt, Artificial Sequence
  Description of Artificial Sequence: Synthetic oligonucleotide
caagacugcuug

SEQ ID NO: 94671 - RNA, 12 nt, Artificial Sequence
  Description of Artificial Sequence: Synthetic oligonucleotide
ccaugucuuugg

SEQ ID NO: 94672 - RNA, 10 nt, Artificial Sequence
  Description of Artificial Sequence: Synthetic oligonucleotide
ccugaaacac

SEQ ID NO: 94673 - RNA, 11 nt, Artificial Sequence
  Description of Artificial Sequence: Synthetic oligonucleotide
cucuguaccuc

SEQ ID NO: 94674 - RNA, 11 nt, Artificial Sequence
  Description of Artificial Sequence: Synthetic oligonucleotide
gcaagacaaga

SEQ ID NO: 94675 - RNA, 12 nt, Artificial Sequence
  Description of Artificial Sequence: Synthetic oligonucleotide
caagacaagaaa

SEQ ID NO: 94676 - RNA, 11 nt, Artificial Sequence
  Description of Artificial Sequence: Synthetic oligonucleotide
guacaagaucc

SEQ ID NO: 94677 - RNA, 11 nt, Artificial Sequence
  Description of Artificial Sequence: Synthetic oligonucleotide
guacuugcaga

SEQ ID NO: 94678 - RNA, 12 nt, Artificial Sequence
  Description of Artificial Sequence: Synthetic oligonucleotide
gaucgauacaga

SEQ ID NO: 94679 - RNA, 12 nt, Artificial Sequence
  Description of Artificial Sequence: Synthetic oligonucleotide
auaaaaauaaau

SEQ ID NO: 94680 - RNA, 12 nt, Artificial Sequence
  Description of Artificial Sequence: Synthetic oligonucleotide
aaaaauaaauau

SEQ ID NO: 94681 - RNA, 12 nt, Artificial Sequence
  Description of Artificial Sequence: Synthetic oligonucleotide
uugacugcugug

SEQ ID NO: 94682 - RNA, 12 nt, Artificial Sequence
  Description of Artificial Sequence: Synthetic oligonucleotide
gagaugagagac

SEQ ID NO: 94683 - RNA, 9 nt, Artificial Sequence
  Description of Artificial Sequence: Synthetic oligonucleotide
cccacuugg

SEQ ID NO: 94684 - RNA, 1652 nt, Homo sapiens
cugcuuaaaccucugucucugacggucccugccaaucgcucuggucgaccccaacacacuaggaggacagacacaggcuccaaacuccacuaaccagagcugugauugugcccgcugaguggacugcguugucagggagugagugcuccaucaucgggagaauccaagcaggaccgccauggaggaaggucaauauucagagaucgaggagcuucccaggaggcgguguugcaggcgugggacucagaucgugcugcuggggcuggugaccgccgcucugugggcugggcugcugacucugcuucuccuguggcacugggacaccacacagagucuaaaacagcuggaagagagggcugcccggaacgucucucaaguuuccaagaacuuggaaagccaccacggugaccagauggcgcagaaaucccaguccacgcagauuucacaggaacuggaggaacuucgagcugaacagcagagauugaaaucucaggacuuggagcuguccuggaaccugaacgggcuucaagcagaucugagcagcuucaagucccaggaauugaacgagaggaacgaagcuucagauuugcuggaaagacuccgggaggaggugacaaagcuaaggauggaguugcagguguccagcggcuuugugugcaacacgugcccugaaaaguggaucaauuuccaacggaagugcuacuacuucggcaagggcaccaagcaguggguccacgcccgguaugccugugacgacauggaagggcagcuggucagcauccacagcccggaggagcaggacuuccugaccaagcaugccagccacaccggcuccuggauuggccuucggaacuuggaccugaagggggaguuuaucuggguggaugggagccacguggacuacagcaacugggcuccaggggagcccaccagccggagccagggcgaggacugcgugaugaugcggggcuccggucgcuggaacgacgccuucugcgaccguaagcugggcgccugggugugcgaccggcuggccacaugcacgccgccagccagcgaagguuccgcggaguccaugggaccugauucaagaccagacccugacggccgccugcccacccccucugccccucuccacucuugagcauggauacagccaggcccagagcaagacccugaagacccccaaccacggccuaaaagccucuuuguggcugaaaggucccugugacauuuucugccacccaaacggaggcagcugacacaucucccgcuccucuauggccccugccuucccaggaguacaccccaacagcacccucuccagaugggagugcccccaacagcacccucuccagaugagaguacaccccaacagcacccucuccagaugagaguacaccccaacagcacccucuccagaugagaguacaccccaacagcacccucuccagaugcagccccaucuccucagcaccccaggaccugaguauccccagcucagguggugaguccuccuguccagccugcaucaauaaaauggggcagugauggccucccaaaaaaaaaaaaaaaaaaaaaaaaaaaaaaaaaaaaaaaaaaaaaaaaaaaaaaaaaaaaaaaaaaaaaaaaaaaaaaaaaaaaaaaaaaaa

SEQ ID NO: 94685 - RNA, 19 nt, Artificial Sequence
  Description of Artificial Sequence: Synthetic oligonucleotide
cugcuuaaaccucugucuc

SEQ ID NO: 94686 - RNA, 19 nt, Artificial Sequence
  Description of Artificial Sequence: Synthetic oligonucleotide
cugacggucccugccaauc

SEQ ID NO: 94687 - RNA, 19 nt, Artificial Sequence
  Description of Artificial Sequence: Synthetic oligonucleotide
cgcucuggucgaccccaac

SEQ ID NO: 94688 - RNA, 19 nt, Artificial Sequence
  Description of Artificial Sequence: Synthetic oligonucleotide
cacacuaggaggacagaca

SEQ ID NO: 94689 - RNA, 19 nt, Artificial Sequence
  Description of Artificial Sequence: Synthetic oligonucleotide
acaggcuccaaacuccacu

SEQ ID NO: 94690 - RNA, 19 nt, Artificial Sequence
  Description of Artificial Sequence: Synthetic oligonucleotide
uaaccagagcugugauugu

SEQ ID NO: 94691 - RNA, 19 nt, Artificial Sequence
  Description of Artificial Sequence: Synthetic oligonucleotide
ugcccgcugaguggacugc

SEQ ID NO: 94692 - RNA, 19 nt, Artificial Sequence
  Description of Artificial Sequence: Synthetic oligonucleotide
cguugucagggagugagug

SEQ ID NO: 94693 - RNA, 19 nt, Artificial Sequence
  Description of Artificial Sequence: Synthetic oligonucleotide
gcuccaucaucgggagaau

SEQ ID NO: 94694 - RNA, 19 nt, Artificial Sequence
  Description of Artificial Sequence: Synthetic oligonucleotide
uccaagcaggaccgccaug

SEQ ID NO: 94695 - RNA, 19 nt, Artificial Sequence
  Description of Artificial Sequence: Synthetic oligonucleotide
ggaggaaggucaauauuca

SEQ ID NO: 94696 - RNA, 19 nt, Artificial Sequence
  Description of Artificial Sequence: Synthetic oligonucleotide
agagaucgaggagcuuccc

SEQ ID NO: 94697 - RNA, 19 nt, Artificial Sequence
  Description of Artificial Sequence: Synthetic oligonucleotide
caggaggcgguguugcagg

SEQ ID NO: 94698 - RNA, 19 nt, Artificial Sequence
  Description of Artificial Sequence: Synthetic oligonucleotide
gcgugggacucagaucgug

SEQ ID NO: 94699 - RNA, 19 nt, Artificial Sequence
  Description of Artificial Sequence: Synthetic oligonucleotide
gcugcuggggcuggugacc

SEQ ID NO: 94700 - RNA, 19 nt, Artificial Sequence
  Description of Artificial Sequence: Synthetic oligonucleotide
cgccgcucugugggcuggg

SEQ ID NO: 94701 - RNA, 19 nt, Artificial Sequence
  Description of Artificial Sequence: Synthetic oligonucleotide
gcugcugacucugcuucuc

SEQ ID NO: 94702 - RNA, 19 nt, Artificial Sequence
  Description of Artificial Sequence: Synthetic oligonucleotide
ccuguggcacugggacacc

SEQ ID NO: 94703 - RNA, 19 nt, Artificial Sequence
  Description of Artificial Sequence: Synthetic oligonucleotide
cacacagagucuaaaacag

SEQ ID NO: 94704 - RNA, 19 nt, Artificial Sequence
  Description of Artificial Sequence: Synthetic oligonucleotide
gcuggaagagagggcugcc

SEQ ID NO: 94705 - RNA, 19 nt, Artificial Sequence
  Description of Artificial Sequence: Synthetic oligonucleotide
ccggaacgucucucaaguu

SEQ ID NO: 94706 - RNA, 19 nt, Artificial Sequence
  Description of Artificial Sequence: Synthetic oligonucleotide
uuccaagaacuuggaaagc

SEQ ID NO: 94707 - RNA, 19 nt, Artificial Sequence
  Description of Artificial Sequence: Synthetic oligonucleotide
ccaccacggugaccagaug

SEQ ID NO: 94708 - RNA, 19 nt, Artificial Sequence
  Description of Artificial Sequence: Synthetic oligonucleotide
ggcgcagaaaucccagucc

SEQ ID NO: 94709 - RNA, 19 nt, Artificial Sequence
  Description of Artificial Sequence: Synthetic oligonucleotide
cacgcagauuucacaggaa

SEQ ID NO: 94710 - RNA, 19 nt, Artificial Sequence
  Description of Artificial Sequence: Synthetic oligonucleotide
acuggaggaacuucgagcu

SEQ ID NO: 94711 - RNA, 19 nt, Artificial Sequence
  Description of Artificial Sequence: Synthetic oligonucleotide
ugaacagcagagauugaaa

SEQ ID NO: 94712 - RNA, 19 nt, Artificial Sequence
  Description of Artificial Sequence: Synthetic oligonucleotide
aucucaggacuuggagcug

SEQ ID NO: 94713 - RNA, 19 nt, Artificial Sequence
  Description of Artificial Sequence: Synthetic oligonucleotide
guccuggaaccugaacggg

SEQ ID NO: 94714 - RNA, 19 nt, Artificial Sequence
  Description of Artificial Sequence: Synthetic oligonucleotide
gcuucaagcagaucugagc

SEQ ID NO: 94715 - RNA, 19 nt, Artificial Sequence
  Description of Artificial Sequence: Synthetic oligonucleotide
cagcuucaagucccaggaa

SEQ ID NO: 94716 - RNA, 19 nt, Artificial Sequence
  Description of Artificial Sequence: Synthetic oligonucleotide
auugaacgagaggaacgaa

SEQ ID NO: 94717 - RNA, 19 nt, Artificial Sequence
  Description of Artificial Sequence: Synthetic oligonucleotide
agcuucagauuugcuggaa

SEQ ID NO: 94718 - RNA, 19 nt, Artificial Sequence
  Description of Artificial Sequence: Synthetic oligonucleotide
aagacuccgggaggaggug

SEQ ID NO: 94719 - RNA, 19 nt, Artificial Sequence
  Description of Artificial Sequence: Synthetic oligonucleotide
gacaaagcuaaggauggag

SEQ ID NO: 94720 - RNA, 19 nt, Artificial Sequence
  Description of Artificial Sequence: Synthetic oligonucleotide
guugcagguguccagcggc

SEQ ID NO: 94721 - RNA, 19 nt, Artificial Sequence
  Description of Artificial Sequence: Synthetic oligonucleotide
cuuugugugcaacacgugc

SEQ ID NO: 94722 - RNA, 19 nt, Artificial Sequence
  Description of Artificial Sequence: Synthetic oligonucleotide
cccugaaaaguggaucaau

SEQ ID NO: 94723 - RNA, 19 nt, Artificial Sequence
  Description of Artificial Sequence: Synthetic oligonucleotide
uuuccaacggaagugcuac

SEQ ID NO: 94724 - RNA, 19 nt, Artificial Sequence
  Description of Artificial Sequence: Synthetic oligonucleotide
cuacuucggcaagggcacc

SEQ ID NO: 94725 - RNA, 19 nt, Artificial Sequence
  Description of Artificial Sequence: Synthetic oligonucleotide
caagcaguggguccacgcc

SEQ ID NO: 94726 - RNA, 19 nt, Artificial Sequence
  Description of Artificial Sequence: Synthetic oligonucleotide
ccgguaugccugugacgac

SEQ ID NO: 94727 - RNA, 19 nt, Artificial Sequence
  Description of Artificial Sequence: Synthetic oligonucleotide
cauggaagggcagcugguc

SEQ ID NO: 94728 - RNA, 19 nt, Artificial Sequence
  Description of Artificial Sequence: Synthetic oligonucleotide
cagcauccacagcccggag

SEQ ID NO: 94729 - RNA, 19 nt, Artificial Sequence
  Description of Artificial Sequence: Synthetic oligonucleotide
ggagcaggacuuccugacc

SEQ ID NO: 94730 - RNA, 19 nt, Artificial Sequence
  Description of Artificial Sequence: Synthetic oligonucleotide
caagcaugccagccacacc

SEQ ID NO: 94731 - RNA, 19 nt, Artificial Sequence
  Description of Artificial Sequence: Synthetic oligonucleotide
cggcuccuggauuggccuu

SEQ ID NO: 94732 - RNA, 19 nt, Artificial Sequence
  Description of Artificial Sequence: Synthetic oligonucleotide
ucggaacuuggaccugaag

SEQ ID NO: 94733 - RNA, 19 nt, Artificial Sequence
  Description of Artificial Sequence: Synthetic oligonucleotide
gggggaguuuaucugggug

SEQ ID NO: 94734 - RNA, 19 nt, Artificial Sequence
  Description of Artificial Sequence: Synthetic oligonucleotide
ggaugggagccacguggac

SEQ ID NO: 94735 - RNA, 19 nt, Artificial Sequence
  Description of Artificial Sequence: Synthetic oligonucleotide
cuacagcaacugggcucca

SEQ ID NO: 94736 - RNA, 19 nt, Artificial Sequence
  Description of Artificial Sequence: Synthetic oligonucleotide
aggggagcccaccagccgg

SEQ ID NO: 94737 - RNA, 19 nt, Artificial Sequence
  Description of Artificial Sequence: Synthetic oligonucleotide
gagccagggcgaggacugc

SEQ ID NO: 94738 - RNA, 19 nt, Artificial Sequence
  Description of Artificial Sequence: Synthetic oligonucleotide
cgugaugaugcggggcucc

SEQ ID NO: 94739 - RNA, 19 nt, Artificial Sequence
  Description of Artificial Sequence: Synthetic oligonucleotide
cggucgcuggaacgacgcc

SEQ ID NO: 94740 - RNA, 19 nt, Artificial Sequence
  Description of Artificial Sequence: Synthetic oligonucleotide
cuucugcgaccguaagcug

SEQ ID NO: 94741 - RNA, 19 nt, Artificial Sequence
  Description of Artificial Sequence: Synthetic oligonucleotide
gggcgccugggugugcgac

SEQ ID NO: 94742 - RNA, 19 nt, Artificial Sequence
  Description of Artificial Sequence: Synthetic oligonucleotide
ccggcuggccacaugcacg

SEQ ID NO: 94743 - RNA, 19 nt, Artificial Sequence
  Description of Artificial Sequence: Synthetic oligonucleotide
gccgccagccagcgaaggu

SEQ ID NO: 94744 - RNA, 19 nt, Artificial Sequence
  Description of Artificial Sequence: Synthetic oligonucleotide
uuccgcggaguccauggga

SEQ ID NO: 94745 - RNA, 19 nt, Artificial Sequence
  Description of Artificial Sequence: Synthetic oligonucleotide
accugauucaagaccagac

SEQ ID NO: 94746 - RNA, 19 nt, Artificial Sequence
  Description of Artificial Sequence: Synthetic oligonucleotide
cccugacggccgccugccc

SEQ ID NO: 94747 - RNA, 19 nt, Artificial Sequence
  Description of Artificial Sequence: Synthetic oligonucleotide
cacccccucugccccucuc

SEQ ID NO: 94748 - RNA, 19 nt, Artificial Sequence
  Description of Artificial Sequence: Synthetic oligonucleotide
ccacucuugagcauggaua

SEQ ID NO: 94749 - RNA, 19 nt, Artificial Sequence
  Description of Artificial Sequence: Synthetic oligonucleotide
acagccaggcccagagcaa

SEQ ID NO: 94750 - RNA, 19 nt, Artificial Sequence
  Description of Artificial Sequence: Synthetic oligonucleotide
agacccugaagacccccaa

SEQ ID NO: 94751 - RNA, 19 nt, Artificial Sequence
  Description of Artificial Sequence: Synthetic oligonucleotide
accacggccuaaaagccuc

SEQ ID NO: 94752 - RNA, 19 nt, Artificial Sequence
  Description of Artificial Sequence: Synthetic oligonucleotide
cuuuguggcugaaaggucc

SEQ ID NO: 94753 - RNA, 19 nt, Artificial Sequence
  Description of Artificial Sequence: Synthetic oligonucleotide
ccugugacauuuucugcca

SEQ ID NO: 94754 - RNA, 19 nt, Artificial Sequence
  Description of Artificial Sequence: Synthetic oligonucleotide
acccaaacggaggcagcug

SEQ ID NO: 94755 - RNA, 19 nt, Artificial Sequence
  Description of Artificial Sequence: Synthetic oligonucleotide
gacacaucucccgcuccuc

SEQ ID NO: 94756 - RNA, 19 nt, Artificial Sequence
  Description of Artificial Sequence: Synthetic oligonucleotide
cuauggccccugccuuccc

SEQ ID NO: 94757 - RNA, 19 nt, Artificial Sequence
  Description of Artificial Sequence: Synthetic oligonucleotide
caggaguacaccccaacag

SEQ ID NO: 94758 - RNA, 19 nt, Artificial Sequence
  Description of Artificial Sequence: Synthetic oligonucleotide
gcacccucuccagauggga

SEQ ID NO: 94759 - RNA, 19 nt, Artificial Sequence
  Description of Artificial Sequence: Synthetic oligonucleotide
agugcccccaacagcaccc

SEQ ID NO: 94760 - RNA, 19 nt, Artificial Sequence
  Description of Artificial Sequence: Synthetic oligonucleotide
cucuccagaugagaguaca

SEQ ID NO: 94761 - RNA, 19 nt, Artificial Sequence
  Description of Artificial Sequence: Synthetic oligonucleotide
accccaacagcacccucuc

SEQ ID NO: 94762 - RNA, 19 nt, Artificial Sequence
  Description of Artificial Sequence: Synthetic oligonucleotide
ccagaugagaguacacccc

SEQ ID NO: 94763 - RNA, 19 nt, Artificial Sequence
  Description of Artificial Sequence: Synthetic oligonucleotide
caacagcacccucuccaga

SEQ ID NO: 94764 - RNA, 19 nt, Artificial Sequence
  Description of Artificial Sequence: Synthetic oligonucleotide
augagaguacaccccaaca

SEQ ID NO: 94765 - RNA, 19 nt, Artificial Sequence
  Description of Artificial Sequence: Synthetic oligonucleotide
agcacccucuccagaugca

SEQ ID NO: 94766 - RNA, 19 nt, Artificial Sequence
  Description of Artificial Sequence: Synthetic oligonucleotide
agccccaucuccucagcac

SEQ ID NO: 94767 - RNA, 19 nt, Artificial Sequence
  Description of Artificial Sequence: Synthetic oligonucleotide
ccccaggaccugaguaucc

SEQ ID NO: 94768 - RNA, 19 nt, Artificial Sequence
  Description of Artificial Sequence: Synthetic oligonucleotide
cccagcucagguggugagu

SEQ ID NO: 94769 - RNA, 19 nt, Artificial Sequence
  Description of Artificial Sequence: Synthetic oligonucleotide
uccuccuguccagccugca

SEQ ID NO: 94770 - RNA, 19 nt, Artificial Sequence
  Description of Artificial Sequence: Synthetic oligonucleotide
aucaauaaaauggggcagu

SEQ ID NO: 94771 - RNA, 19 nt, Artificial Sequence
  Description of Artificial Sequence: Synthetic oligonucleotide
ugauggccucccaaaaaaa

SEQ ID NO: 94772 - RNA, 25 nt, Artificial Sequence
  Description of Artificial Sequence: Synthetic oligonucleotide
cugcuuaaaccucugucucugacgg

SEQ ID NO: 94773 - RNA, 25 nt, Artificial Sequence
  Description of Artificial Sequence: Synthetic oligonucleotide
gucccugccaaucgcucuggucgac

SEQ ID NO: 94774 - RNA, 25 nt, Artificial Sequence
  Description of Artificial Sequence: Synthetic oligonucleotide
ccccaacacacuaggaggacagaca

SEQ ID NO: 94775 - RNA, 25 nt, Artificial Sequence
  Description of Artificial Sequence: Synthetic oligonucleotide
acaggcuccaaacuccacuaaccag

SEQ ID NO: 94776 - RNA, 25 nt, Artificial Sequence
  Description of Artificial Sequence: Synthetic oligonucleotide
gagcugugauugugcccgcugagug

SEQ ID NO: 94777 - RNA, 25 nt, Artificial Sequence
  Description of Artificial Sequence: Synthetic oligonucleotide
ggacugcguugucagggagugagug

SEQ ID NO: 94778 - RNA, 25 nt, Artificial Sequence
  Description of Artificial Sequence: Synthetic oligonucleotide
gcuccaucaucgggagaauccaagc

SEQ ID NO: 94779 - RNA, 25 nt, Artificial Sequence
  Description of Artificial Sequence: Synthetic oligonucleotide
caggaccgccauggaggaaggucaa

SEQ ID NO: 94780 - RNA, 25 nt, Artificial Sequence
  Description of Artificial Sequence: Synthetic oligonucleotide
auauucagagaucgaggagcuuccc

SEQ ID NO: 94781 - RNA, 25 nt, Artificial Sequence
  Description of Artificial Sequence: Synthetic oligonucleotide
caggaggcgguguugcaggcguggg

SEQ ID NO: 94782 - RNA, 25 nt, Artificial Sequence
  Description of Artificial Sequence: Synthetic oligonucleotide
gacucagaucgugcugcuggggcug

SEQ ID NO: 94783 - RNA, 25 nt, Artificial Sequence
  Description of Artificial Sequence: Synthetic oligonucleotide
ggugaccgccgcucugugggcuggg

SEQ ID NO: 94784 - RNA, 25 nt, Artificial Sequence
  Description of Artificial Sequence: Synthetic oligonucleotide
gcugcugacucugcuucuccugugg

SEQ ID NO: 94785 - RNA, 25 nt, Artificial Sequence
  Description of Artificial Sequence: Synthetic oligonucleotide
gcacugggacaccacacagagucua

SEQ ID NO: 94786 - RNA, 25 nt, Artificial Sequence
  Description of Artificial Sequence: Synthetic oligonucleotide
aaaacagcuggaagagagggcugcc

SEQ ID NO: 94787 - RNA, 25 nt, Artificial Sequence
  Description of Artificial Sequence: Synthetic oligonucleotide
ccggaacgucucucaaguuuccaag

SEQ ID NO: 94788 - RNA, 25 nt, Artificial Sequence
  Description of Artificial Sequence: Synthetic oligonucleotide
gaacuuggaaagccaccacggugac

SEQ ID NO: 94789 - RNA, 25 nt, Artificial Sequence
  Description of Artificial Sequence: Synthetic oligonucleotide
ccagauggcgcagaaaucccagucc

SEQ ID NO: 94790 - RNA, 25 nt, Artificial Sequence
  Description of Artificial Sequence: Synthetic oligonucleotide
cacgcagauuucacaggaacuggag

SEQ ID NO: 94791 - RNA, 25 nt, Artificial Sequence
  Description of Artificial Sequence: Synthetic oligonucleotide
ggaacuucgagcugaacagcagaga

SEQ ID NO: 94792 - RNA, 25 nt, Artificial Sequence
  Description of Artificial Sequence: Synthetic oligonucleotide
auugaaaucucaggacuuggagcug

SEQ ID NO: 94793 - RNA, 25 nt, Artificial Sequence
  Description of Artificial Sequence: Synthetic oligonucleotide
guccuggaaccugaacgggcuucaa

SEQ ID NO: 94794 - RNA, 25 nt, Artificial Sequence
  Description of Artificial Sequence: Synthetic oligonucleotide
agcagaucugagcagcuucaagucc

SEQ ID NO: 94795 - RNA, 25 nt, Artificial Sequence
  Description of Artificial Sequence: Synthetic oligonucleotide
ccaggaauugaacgagaggaacgaa

SEQ ID NO: 94796 - RNA, 25 nt, Artificial Sequence
  Description of Artificial Sequence: Synthetic oligonucleotide
agcuucagauuugcuggaaagacuc

SEQ ID NO: 94797 - RNA, 25 nt, Artificial Sequence
  Description of Artificial Sequence: Synthetic oligonucleotide
ccgggaggaggugacaaagcuaagg

SEQ ID NO: 94798 - RNA, 25 nt, Artificial Sequence
  Description of Artificial Sequence: Synthetic oligonucleotide
gauggaguugcagguguccagcggc

SEQ ID NO: 94799 - RNA, 25 nt, Artificial Sequence
  Description of Artificial Sequence: Synthetic oligonucleotide
cuuugugugcaacacgugcccugaa

SEQ ID NO: 94800 - RNA, 25 nt, Artificial Sequence
  Description of Artificial Sequence: Synthetic oligonucleotide
aaaguggaucaauuuccaacggaag

SEQ ID NO: 94801 - RNA, 25 nt, Artificial Sequence
  Description of Artificial Sequence: Synthetic oligonucleotide
gugcuacuacuucggcaagggcacc

SEQ ID NO: 94802 - RNA, 25 nt, Artificial Sequence
  Description of Artificial Sequence: Synthetic oligonucleotide
caagcaguggguccacgcccgguau

SEQ ID NO: 94803 - RNA, 25 nt, Artificial Sequence
  Description of Artificial Sequence: Synthetic oligonucleotide
ugccugugacgacauggaagggcag

SEQ ID NO: 94804 - RNA, 25 nt, Artificial Sequence
  Description of Artificial Sequence: Synthetic oligonucleotide
gcuggucagcauccacagcccggag

SEQ ID NO: 94805 - RNA, 25 nt, Artificial Sequence
  Description of Artificial Sequence: Synthetic oligonucleotide
ggagcaggacuuccugaccaagcau

SEQ ID NO: 94806 - RNA, 25 nt, Artificial Sequence
  Description of Artificial Sequence: Synthetic oligonucleotide
ugccagccacaccggcuccuggauu

SEQ ID NO: 94807 - RNA, 25 nt, Artificial Sequence
  Description of Artificial Sequence: Synthetic oligonucleotide
uggccuucggaacuuggaccugaag

SEQ ID NO: 94808 - RNA, 25 nt, Artificial Sequence
  Description of Artificial Sequence: Synthetic oligonucleotide
gggggaguuuaucuggguggauggg

SEQ ID NO: 94809 - RNA, 25 nt, Artificial Sequence
  Description of Artificial Sequence: Synthetic oligonucleotide
gagccacguggacuacagcaacugg

SEQ ID NO: 94810 - RNA, 25 nt, Artificial Sequence
  Description of Artificial Sequence: Synthetic oligonucleotide
ggcuccaggggagcccaccagccgg

SEQ ID NO: 94811 - RNA, 25 nt, Artificial Sequence
  Description of Artificial Sequence: Synthetic oligonucleotide
gagccagggcgaggacugcgugaug

SEQ ID NO: 94812 - RNA, 25 nt, Artificial Sequence
  Description of Artificial Sequence: Synthetic oligonucleotide
gaugcggggcuccggucgcuggaac

SEQ ID NO: 94813 - RNA, 25 nt, Artificial Sequence
  Description of Artificial Sequence: Synthetic oligonucleotide
cgacgccuucugcgaccguaagcug

SEQ ID NO: 94814 - RNA, 25 nt, Artificial Sequence
  Description of Artificial Sequence: Synthetic oligonucleotide
gggcgccugggugugcgaccggcug

SEQ ID NO: 94815 - RNA, 25 nt, Artificial Sequence
  Description of Artificial Sequence: Synthetic oligonucleotide
ggccacaugcacgccgccagccagc

SEQ ID NO: 94816 - RNA, 25 nt, Artificial Sequence
  Description of Artificial Sequence: Synthetic oligonucleotide
cgaagguuccgcggaguccauggga

SEQ ID NO: 94817 - RNA, 25 nt, Artificial Sequence
  Description of Artificial Sequence: Synthetic oligonucleotide
accugauucaagaccagacccugac

SEQ ID NO: 94818 - RNA, 25 nt, Artificial Sequence
  Description of Artificial Sequence: Synthetic oligonucleotide
cggccgccugcccacccccucugcc

SEQ ID NO: 94819 - RNA, 25 nt, Artificial Sequence
  Description of Artificial Sequence: Synthetic oligonucleotide
cccucuccacucuugagcauggaua

SEQ ID NO: 94820 - RNA, 25 nt, Artificial Sequence
  Description of Artificial Sequence: Synthetic oligonucleotide
acagccaggcccagagcaagacccu

SEQ ID NO: 94821 - RNA, 25 nt, Artificial Sequence
  Description of Artificial Sequence: Synthetic oligonucleotide
ugaagacccccaaccacggccuaaa

SEQ ID NO: 94822 - RNA, 25 nt, Artificial Sequence
  Description of Artificial Sequence: Synthetic oligonucleotide
aagccucuuuguggcugaaaggucc

SEQ ID NO: 94823 - RNA, 25 nt, Artificial Sequence
  Description of Artificial Sequence: Synthetic oligonucleotide
ccugugacauuuucugccacccaaa

SEQ ID NO: 94824 - RNA, 25 nt, Artificial Sequence
  Description of Artificial Sequence: Synthetic oligonucleotide
acggaggcagcugacacaucucccg

SEQ ID NO: 94825 - RNA, 25 nt, Artificial Sequence
  Description of Artificial Sequence: Synthetic oligonucleotide
gcuccucuauggccccugccuuccc

SEQ ID NO: 94826 - RNA, 25 nt, Artificial Sequence
  Description of Artificial Sequence: Synthetic oligonucleotide
caggaguacaccccaacagcacccu

SEQ ID NO: 94827 - RNA, 25 nt, Artificial Sequence
  Description of Artificial Sequence: Synthetic oligonucleotide
ucuccagaugggagugcccccaaca

SEQ ID NO: 94828 - RNA, 25 nt, Artificial Sequence
  Description of Artificial Sequence: Synthetic oligonucleotide
agcacccucuccagaugagaguaca

SEQ ID NO: 94829 - RNA, 25 nt, Artificial Sequence
  Description of Artificial Sequence: Synthetic oligonucleotide
accccaacagcacccucuccagaug

SEQ ID NO: 94830 - RNA, 25 nt, Artificial Sequence
  Description of Artificial Sequence: Synthetic oligonucleotide
gagaguacaccccaacagcacccuc

SEQ ID NO: 94831 - RNA, 25 nt, Artificial Sequence
  Description of Artificial Sequence: Synthetic oligonucleotide
cuccagaugagaguacaccccaaca

SEQ ID NO: 94832 - RNA, 25 nt, Artificial Sequence
  Description of Artificial Sequence: Synthetic oligonucleotide
agcacccucuccagaugcagcccca

SEQ ID NO: 94833 - RNA, 25 nt, Artificial Sequence
  Description of Artificial Sequence: Synthetic oligonucleotide
aucuccucagcaccccaggaccuga

SEQ ID NO: 94834 - RNA, 25 nt, Artificial Sequence
  Description of Artificial Sequence: Synthetic oligonucleotide
aguauccccagcucagguggugagu

SEQ ID NO: 94835 - RNA, 25 nt, Artificial Sequence
  Description of Artificial Sequence: Synthetic oligonucleotide
uccuccuguccagccugcaucaaua

SEQ ID NO: 94836 - RNA, 25 nt, Artificial Sequence
  Description of Artificial Sequence: Synthetic oligonucleotide
aaaauggggcagugauggccuccca

SEQ ID NO: 94837 - DNA, 21 bp, Artificial Sequence
  Description of Artificial Sequence: Synthetic oligonucleotide
  Description of Combined DNA/RNA Molecule: Synthetic oligonucleotide
cuacacaaaucagcgauuutt

SEQ ID NO: 94838 - DNA, 21 bp, Artificial Sequence
  Description of Artificial Sequence: Synthetic oligonucleotide
  Description of Combined DNA/RNA Molecule: Synthetic oligonucleotide
aaaucgcugauuuguguagtt

SEQ ID NO: 94839 - DNA, 25 bp, Artificial Sequence
  Description of Artificial Sequence: Synthetic oligonucleotide
  Description of Combined DNA/RNA Molecule: Synthetic oligonucleotide
cuacacaaaucagcgauuuccaugt

SEQ ID NO: 94840 - RNA, 27 nt, Artificial Sequence
  Description of Artificial Sequence: Synthetic oligonucleotide
acauggaaaucgcugauuuguguaguc

SEQ ID NO: 94841 - RNA, 13 nt, Artificial Sequence
  Description of Artificial Sequence: Synthetic oligonucleotide
cuacacaaaucag

SEQ ID NO: 94842 - DNA, 11 bp, Artificial Sequence
  Description of Artificial Sequence: Synthetic oligonucleotide
  Description of Combined DNA/RNA Molecule: Synthetic oligonucleotide
gauuuccaugt

SEQ ID NO: 94843 - DNA, 21 bp, Artificial Sequence
  Description of Artificial Sequence: Synthetic oligonucleotide
  Description of Combined DNA/RNA Molecule: Synthetic oligonucleotide
ggaucuuauuucuucggagtt

SEQ ID NO: 94844 - DNA, 21 bp, Artificial Sequence
  Description of Artificial Sequence: Synthetic oligonucleotide
  Description of Combined DNA/RNA Molecule: Synthetic oligonucleotide
cuccgaagaaauaagaucctt

SEQ ID NO: 94845 - RNA, 11 nt, Artificial Sequence
  Description of Artificial Sequence: Synthetic oligonucleotide
ggaucuuauuu

SEQ ID NO: 94846 - DNA, 10 bp, Artificial Sequence
  Description of Artificial Sequence: Synthetic oligonucleotide
  Description of Combined DNA/RNA Molecule: Synthetic oligonucleotide
cuucggagtt

SEQ ID NO: 94847 - RNA, 27 nt, Artificial Sequence
  Description of Artificial Sequence: Synthetic oligonucleotide
cauugucuccgaagaaauaagauccuu

SEQ ID NO: 94848 - RNA, 8 nt, Artificial Sequence
  Description of Artificial Sequence: Synthetic oligonucleotide
  modified_base (2): LNA-G
ggaucuua

SEQ ID NO: 94849 - DNA, 17 bp, Artificial Sequence
  Description of Artificial Sequence: Synthetic oligonucleotide
  Description of Combined DNA/RNA Molecule: Synthetic oligonucleotide
uuucuucggagacaatg

SEQ ID NO: 94850 - DNA, 16 bp, Artificial Sequence
  Description of Artificial Sequence: Synthetic oligonucleotide
  Description of Combined DNA/RNA Molecule: Synthetic oligonucleotide
uucuucggagacaatg

SEQ ID NO: 94851 - DNA, 15 bp, Artificial Sequence
  Description of Artificial Sequence: Synthetic oligonucleotide
  Description of Combined DNA/RNA Molecule: Synthetic oligonucleotide
ucuucggagacaatg

SEQ ID NO: 94852 - DNA, 14 bp, Artificial Sequence
  Description of Artificial Sequence: Synthetic oligonucleotide
  Description of Combined DNA/RNA Molecule: Synthetic oligonucleotide
cuucggagacaatg

SEQ ID NO: 94853 - DNA, 13 bp, Artificial Sequence
  Description of Artificial Sequence: Synthetic oligonucleotide
  Description of Combined DNA/RNA Molecule: Synthetic oligonucleotide
uucggagacaatg

SEQ ID NO: 94854 - DNA, 12 bp, Artificial Sequence
  Description of Artificial Sequence: Synthetic oligonucleotide
  Description of Combined DNA/RNA Molecule: Synthetic oligonucleotide
ucggagacaatg

SEQ ID NO: 94855 - DNA, 11 bp, Artificial Sequence
  Description of Artificial Sequence: Synthetic oligonucleotide
  Description of Combined DNA/RNA Molecule: Synthetic oligonucleotide
cggagacaatg

SEQ ID NO: 94856 - RNA, 9 nt, Artificial Sequence
  Description of Artificial Sequence: Synthetic oligonucleotide
  modified_base (2): LNA-G
ggaucuuau

SEQ ID NO: 94857 - RNA, 10 nt, Artificial Sequence
  Description of Artificial Sequence: Synthetic oligonucleotide
  modified_base (2): LNA-G
ggaucuuauu

SEQ ID NO: 94858 - RNA, 11 nt, Artificial Sequence
  Description of Artificial Sequence: Synthetic oligonucleotide
  modified_base (2): LNA-G
ggaucuuauuu

SEQ ID NO: 94859 - RNA, 12 nt, Artificial Sequence
  Description of Artificial Sequence: Synthetic oligonucleotide
  modified_base (2): LNA-G
ggaucuuauuuc

SEQ ID NO: 94860 - RNA, 8 nt, Artificial Sequence
  Description of Artificial Sequence: Synthetic oligonucleotide
  modified_base (3): LNA-A
cuacacaa

SEQ ID NO: 94861 - DNA, 13 bp, Artificial Sequence
  Description of Artificial Sequence: Synthetic oligonucleotide
  Description of Combined DNA/RNA Molecule: Synthetic oligonucleotide
  modified_base (8): LNA-A
aucagcgauuutt

SEQ ID NO: 94862 - DNA, 12 bp, Artificial Sequence
  Description of Artificial Sequence: Synthetic oligonucleotide
  Description of Combined DNA/RNA Molecule: Synthetic oligonucleotide
  modified_base (7): LNA-A
ucagcgauuutt

SEQ ID NO: 94863 - DNA, 11 bp, Artificial Sequence
  Description of Artificial Sequence: Synthetic oligonucleotide
  Description of Combined DNA/RNA Molecule: Synthetic oligonucleotide
  modified_base (6): LNA-A
cagcgauuutt

SEQ ID NO: 94864 - DNA, 10 bp, Artificial Sequence
  Description of Artificial Sequence: Synthetic oligonucleotide
  Description of Combined DNA/RNA Molecule: Synthetic oligonucleotide
  modified_base (5): LNA-A
agcgauuutt

SEQ ID NO: 94865 - DNA, 9 bp, Artificial Sequence
  Description of Artificial Sequence: Synthetic oligonucleotide
  Description of Combined DNA/RNA Molecule: Synthetic oligonucleotide
  modified_base (4): LNA-A
gcgauuutt

SEQ ID NO: 94866 - DNA, 8 bp, Artificial Sequence
  Description of Artificial Sequence: Synthetic oligonucleotide
  Description of Combined DNA/RNA Molecule: Synthetic oligonucleotide
  modified_base (3): LNA-A
cgauuutt

SEQ ID NO: 94867 - DNA, 7 bp, Artificial Sequence
  Description of Artificial Sequence: Synthetic oligonucleotide
  Description of Combined DNA/RNA Molecule: Synthetic oligonucleotide
  modified_base (2): LNA-A
gauuutt

SEQ ID NO: 94868 - RNA, 9 nt, Artificial Sequence
  Description of Artificial Sequence: Synthetic oligonucleotide
  modified_base (3): LNA-A
cuacacaaa

SEQ ID NO: 94869 - RNA, 10 nt, Artificial Sequence
  Description of Artificial Sequence: Synthetic oligonucleotide
  modified_base (3): LNA-A
cuacacaaau

SEQ ID NO: 94870 - RNA, 11 nt, Artificial Sequence
  Description of Artificial Sequence: Synthetic oligonucleotide
  modified_base (3): LNA-A
cuacacaaauc

SEQ ID NO: 94871 - RNA, 12 nt, Artificial Sequence
  Description of Artificial Sequence: Synthetic oligonucleotide
  modified_base (3): LNA-A
cuacacaaauca

SEQ ID NO: 94872 - RNA, 13 nt, Artificial Sequence
  Description of Artificial Sequence: Synthetic oligonucleotide
  modified_base (3): LNA-A
cuacacaaaucag

SEQ ID NO: 94873 - RNA, 14 nt, Artificial Sequence
  Description of Artificial Sequence: Synthetic oligonucleotide
  modified_base (3): LNA-A
cuacacaaaucagc

SEQ ID NO: 94874 - RNA, 13 nt, Artificial Sequence
  Description of Artificial Sequence: Synthetic oligonucleotide
  modified_base (2): LNA-G
ggaucuuauuucu

SEQ ID NO: 94875 - RNA, 14 nt, Artificial Sequence
  Description of Artificial Sequence: Synthetic oligonucleotide
  modified_base (2): LNA-G
ggaucuuauuucuu

SEQ ID NO: 94876 - RNA, 8 nt, Artificial Sequence
  Description of Artificial Sequence: Synthetic oligonucleotide
  modified_base (2): LNA-G
  modified_base (8): LNA-A
ggaucuua

SEQ ID NO: 94877 - RNA, 9 nt, Artificial Sequence
  Description of Artificial Sequence: Synthetic oligonucleotide
  modified_base (2): LNA-G
  modified_base (9): LNA-U
ggaucuuau

SEQ ID NO: 94878 - RNA, 10 nt, Artificial Sequence
  Description of Artificial Sequence: Synthetic oligonucleotide
  modified_base (2): LNA-G
  modified_base (10): LNA-U
ggaucuuauu

SEQ ID NO: 94879 - RNA, 11 nt, Artificial Sequence
  Description of Artificial Sequence: Synthetic oligonucleotide
  modified_base (2): LNA-G
  modified_base (11): LNA-U
ggaucuuauuu

SEQ ID NO: 94880 - RNA, 12 nt, Artificial Sequence
  Description of Artificial Sequence: Synthetic oligonucleotide
  modified_base (2): LNA-G
  modified_base (12): LNA-C
ggaucuuauuuc

SEQ ID NO: 94881 - RNA, 13 nt, Artificial Sequence
  Description of Artificial Sequence: Synthetic oligonucleotide
  modified_base (2): LNA-G
  modified_base (13): LNA-U
ggaucuuauuucu

SEQ ID NO: 94882 - RNA, 14 nt, Artificial Sequence
  Description of Artificial Sequence: Synthetic oligonucleotide
  modified_base (2): LNA-G
  modified_base (14): LNA-U
ggaucuuauuucuu

SEQ ID NO: 94883 - DNA, 13 bp, Artificial Sequence
  Description of Artificial Sequence: Synthetic oligonucleotide
  Description of Combined DNA/RNA Molecule: Synthetic oligonucleotide
  modified_base (8): LNA-G
uuucuucggagtt

SEQ ID NO: 94884 - DNA, 12 bp, Artificial Sequence
  Description of Artificial Sequence: Synthetic oligonucleotide
  Description of Combined DNA/RNA Molecule: Synthetic oligonucleotide
  modified_base (7): LNA-G
uucuucggagtt

SEQ ID NO: 94885 - DNA, 11 bp, Artificial Sequence
  Description of Artificial Sequence: Synthetic oligonucleotide
  Description of Combined DNA/RNA Molecule: Synthetic oligonucleotide
  modified_base (6): LNA-G
ucuucggagtt

SEQ ID NO: 94886 - DNA, 10 bp, Artificial Sequence
  Description of Artificial Sequence: Synthetic oligonucleotide
  Description of Combined DNA/RNA Molecule: Synthetic oligonucleotide
  modified_base (5): LNA-G
cuucggagtt

SEQ ID NO: 94887 - DNA, 9 bp, Artificial Sequence
  Description of Artificial Sequence: Synthetic oligonucleotide
  Description of Combined DNA/RNA Molecule: Synthetic oligonucleotide
  modified_base (4): LNA-G
uucggagtt

SEQ ID NO: 94888 - DNA, 8 bp, Artificial Sequence
  Description of Artificial Sequence: Synthetic oligonucleotide
  Description of Combined DNA/RNA Molecule: Synthetic oligonucleotide
  modified_base (3): LNA-G
ucggagtt

SEQ ID NO: 94889 - DNA, 7 bp, Artificial Sequence
  Description of Artificial Sequence: Synthetic oligonucleotide
  Description of Combined DNA/RNA Molecule: Synthetic oligonucleotide
  modified_base (2): LNA-G
cggagtt

SEQ ID NO: 94890 - DNA, 13 bp, Artificial Sequence
  Description of Artificial Sequence: Synthetic oligonucleotide
  Description of Combined DNA/RNA Molecule: Synthetic oligonucleotide
  modified_base (1): LNA-U
  modified_base (8): LNA-G
uuucuucggagtt

SEQ ID NO: 94891 - DNA, 12 bp, Artificial Sequence
  Description of Artificial Sequence: Synthetic oligonucleotide
  Description of Combined DNA/RNA Molecule: Synthetic oligonucleotide
  modified_base (1): LNA-U
  modified_base (7): LNA-G
uucuucggagtt

SEQ ID NO: 94892 - DNA, 11 bp, Artificial Sequence
  Description of Artificial Sequence: Synthetic oligonucleotide
  Description of Combined DNA/RNA Molecule: Synthetic oligonucleotide
  modified_base (1): LNA-U
  modified_base (6): LNA-G
ucuucggagtt

SEQ ID NO: 94893 - DNA, 10 bp, Artificial Sequence
  Description of Artificial Sequence: Synthetic oligonucleotide
  Description of Combined DNA/RNA Molecule: Synthetic oligonucleotide
  modified_base (1): LNA-C
  modified_base (5): LNA-G
cuucggagtt

SEQ ID NO: 94894 - DNA, 9 bp, Artificial Sequence
  Description of Artificial Sequence: Synthetic oligonucleotide
  Description of Combined DNA/RNA Molecule: Synthetic oligonucleotide
  modified_base (1): LNA-U
  modified_base (4): LNA-G
uucggagtt

SEQ ID NO: 94895 - DNA, 8 bp, Artificial Sequence
  Description of Artificial Sequence: Synthetic oligonucleotide
  Description of Combined DNA/RNA Molecule: Synthetic oligonucleotide
  modified_base (1): LNA-U
  modified_base (3): LNA-G
ucggagtt

SEQ ID NO: 94896 - DNA, 7 bp, Artificial Sequence
  Description of Artificial Sequence: Synthetic oligonucleotide
  Description of Combined DNA/RNA Molecule: Synthetic oligonucleotide
  modified_base (1): LNA-C
  modified_base (2): LNA-G
cggagtt

SEQ ID NO: 94897 - DNA, 21 bp, Artificial Sequence
  Description of Artificial Sequence: Synthetic oligonucleotide
  Description of Combined DNA/RNA Molecule: Synthetic oligonucleotide
  modified_base (2): LNA-G
  modified_base (16): LNA-G
ggaucuuauuucuucggagtt

SEQ ID NO: 94898 - DNA, 25 bp, Artificial Sequence
  Description of Artificial Sequence: Synthetic oligonucleotide
  Description of Combined DNA/RNA Molecule: Synthetic oligonucleotide
ggaucuuauuucuucggagacaatg

SEQ ID NO: 94899 - RNA, 25 nt, Artificial Sequence
  Description of Artificial Sequence: Synthetic oligonucleotide
uaagcagaguucaaaagcccuucag

SEQ ID NO: 94900 - RNA, 25 nt, Artificial Sequence
  Description of Artificial Sequence: Synthetic oligonucleotide
agcagaguucaaaagcccuucagcg

SEQ ID NO: 94901 - RNA, 25 nt, Artificial Sequence
  Description of Artificial Sequence: Synthetic oligonucleotide
cucagggucugagugaagccgcucg

SEQ ID NO: 94902 - RNA, 25 nt, Artificial Sequence
  Description of Artificial Sequence: Synthetic oligonucleotide
caagcaacuacaucacgccagucaa

SEQ ID NO: 94903 - RNA, 25 nt, Artificial Sequence
  Description of Artificial Sequence: Synthetic oligonucleotide
aucaauggcagcuucuuggugcgug

SEQ ID NO: 94904 - RNA, 25 nt, Artificial Sequence
  Description of Artificial Sequence: Synthetic oligonucleotide
uuccagcccacauuggauucaucag

SEQ ID NO: 94905 - RNA, 25 nt, Artificial Sequence
  Description of Artificial Sequence: Synthetic oligonucleotide
cagcugagaauguggaauaccuaag

SEQ ID NO: 94906 - RNA, 25 nt, Artificial Sequence
  Description of Artificial Sequence: Synthetic oligonucleotide
aacguaucuccuaauuugaggcuca

SEQ ID NO: 94907 - RNA, 25 nt, Artificial Sequence
  Description of Artificial Sequence: Synthetic oligonucleotide
ccuaaaauaauuucucuacaauugg

SEQ ID NO: 94908 - RNA, 25 nt, Artificial Sequence
  Description of Artificial Sequence: Synthetic oligonucleotide
uggaagauucagcuaguuaggagcc

SEQ ID NO: 94909 - RNA, 25 nt, Artificial Sequence
  Description of Artificial Sequence: Synthetic oligonucleotide
uuaaacucuccuagucaauauccac

SEQ ID NO: 94910 - RNA, 25 nt, Artificial Sequence
  Description of Artificial Sequence: Synthetic oligonucleotide
cagccuacaguuauguucagucaca

SEQ ID NO: 94911 - RNA, 25 nt, Artificial Sequence
  Description of Artificial Sequence: Synthetic oligonucleotide
guuauguucagucacacacacauac

SEQ ID NO: 94912 - RNA, 25 nt, Artificial Sequence
  Description of Artificial Sequence: Synthetic oligonucleotide
cacauacaaaauguuccuuuugcuu

SEQ ID NO: 94913 - RNA, 25 nt, Artificial Sequence
  Description of Artificial Sequence: Synthetic oligonucleotide
uccuuuugcuuuuaaaguaauuuuu

SEQ ID NO: 94914 - RNA, 25 nt, Artificial Sequence
  Description of Artificial Sequence: Synthetic oligonucleotide
ugaccugugaagcaacagucaaugg

SEQ ID NO: 94915 - RNA, 25 nt, Artificial Sequence
  Description of Artificial Sequence: Synthetic oligonucleotide
cuaucucacacaucgacaaaccaau

SEQ ID NO: 94916 - RNA, 25 nt, Artificial Sequence
  Description of Artificial Sequence: Synthetic oligonucleotide
uguccucaauuguacugcuaccacu

SEQ ID NO: 94917 - RNA, 25 nt, Artificial Sequence
  Description of Artificial Sequence: Synthetic oligonucleotide
aaaccguagcuggcaagcggucuua

SEQ ID NO: 94918 - RNA, 25 nt, Artificial Sequence
  Description of Artificial Sequence: Synthetic oligonucleotide
uagcuggcaagcggucuuaccggcu

SEQ ID NO: 94919 - RNA, 25 nt, Artificial Sequence
  Description of Artificial Sequence: Synthetic oligonucleotide
uuguaugguuaaaagauggguuacc

SEQ ID NO: 94920 - RNA, 25 nt, Artificial Sequence
  Description of Artificial Sequence: Synthetic oligonucleotide
ugguuaaaagauggguuaccugcga

SEQ ID NO: 94921 - RNA, 25 nt, Artificial Sequence
  Description of Artificial Sequence: Synthetic oligonucleotide
cagggaauuauacaaucuugcugag

SEQ ID NO: 94922 - RNA, 25 nt, Artificial Sequence
  Description of Artificial Sequence: Synthetic oligonucleotide
acaaucuugcugagcauaaaacagu

SEQ ID NO: 94923 - RNA, 25 nt, Artificial Sequence
  Description of Artificial Sequence: Synthetic oligonucleotide
ccaauaaugaagaguccuuuauccu

SEQ ID NO: 94924 - RNA, 25 nt, Artificial Sequence
  Description of Artificial Sequence: Synthetic oligonucleotide
acuuuggauguuccaacgcaaguug

SEQ ID NO: 94925 - RNA, 25 nt, Artificial Sequence
  Description of Artificial Sequence: Synthetic oligonucleotide
aaugcuuccacuaaacugaaaccau

SEQ ID NO: 94926 - RNA, 25 nt, Artificial Sequence
  Description of Artificial Sequence: Synthetic oligonucleotide
gagaaaguuugacuuuguuaaauau

SEQ ID NO: 94927 - RNA, 25 nt, Artificial Sequence
  Description of Artificial Sequence: Synthetic oligonucleotide
aaagaacuacuguauauuaaaaguu

SEQ ID NO: 94928 - RNA, 25 nt, Artificial Sequence
  Description of Artificial Sequence: Synthetic oligonucleotide
uuagaaauacggguuuugacuuaac

SEQ ID NO: 94929 - RNA, 25 nt, Artificial Sequence
  Description of Artificial Sequence: Synthetic oligonucleotide
aacauggguacagcaaacucagcac

SEQ ID NO: 94930 - RNA, 25 nt, Artificial Sequence
  Description of Artificial Sequence: Synthetic oligonucleotide
aaagacacagaagaugcugaccuca

SEQ ID NO: 94931 - RNA, 25 nt, Artificial Sequence
  Description of Artificial Sequence: Synthetic oligonucleotide
uaguagggagguuuauucagaucgc

SEQ ID NO: 94932 - RNA, 25 nt, Artificial Sequence
  Description of Artificial Sequence: Synthetic oligonucleotide
gccuucugcagcaggguucugggau

SEQ ID NO: 94933 - RNA, 25 nt, Artificial Sequence
  Description of Artificial Sequence: Synthetic oligonucleotide
ggucugguacauauuggaaauuaug

SEQ ID NO: 94934 - RNA, 25 nt, Artificial Sequence
  Description of Artificial Sequence: Synthetic oligonucleotide
cuaguccuuccgauggaagcacuag

SEQ ID NO: 94935 - RNA, 25 nt, Artificial Sequence
  Description of Artificial Sequence: Synthetic oligonucleotide
ccagugaauauuguuuuuaugugga

SEQ ID NO: 94936 - RNA, 25 nt, Artificial Sequence
  Description of Artificial Sequence: Synthetic oligonucleotide
augaauucaaguuggaauugguaga

SEQ ID NO: 94937 - RNA, 25 nt, Artificial Sequence
  Description of Artificial Sequence: Synthetic oligonucleotide
caggacacagauuuagacuuggaga

SEQ ID NO: 94938 - RNA, 25 nt, Artificial Sequence
  Description of Artificial Sequence: Synthetic oligonucleotide
cucaaagcacaguuacaguauucca

SEQ ID NO: 94939 - RNA, 25 nt, Artificial Sequence
  Description of Artificial Sequence: Synthetic oligonucleotide
accacugccaccacugaugaauuaa

SEQ ID NO: 94940 - RNA, 25 nt, Artificial Sequence
  Description of Artificial Sequence: Synthetic oligonucleotide
gaaacuacuagugccacaucaucac

SEQ ID NO: 94941 - RNA, 25 nt, Artificial Sequence
  Description of Artificial Sequence: Synthetic oligonucleotide
aagucggacagccucaccaaacaga

SEQ ID NO: 94942 - RNA, 25 nt, Artificial Sequence
  Description of Artificial Sequence: Synthetic oligonucleotide
gaaagcgaaaaauggaacaugaugg

SEQ ID NO: 94943 - RNA, 25 nt, Artificial Sequence
  Description of Artificial Sequence: Synthetic oligonucleotide
cccucugauuuagcauguagacugc

SEQ ID NO: 94944 - RNA, 25 nt, Artificial Sequence
  Description of Artificial Sequence: Synthetic oligonucleotide
ugagcuauuuaaggaucuauuuaug

SEQ ID NO: 94945 - RNA, 25 nt, Artificial Sequence
  Description of Artificial Sequence: Synthetic oligonucleotide
aaaaggugaaaaagcacuauuauca

SEQ ID NO: 94946 - RNA, 25 nt, Artificial Sequence
  Description of Artificial Sequence: Synthetic oligonucleotide
gaaaaagcacuauuaucaguucugc

SEQ ID NO: 94947 - RNA, 25 nt, Artificial Sequence
  Description of Artificial Sequence: Synthetic oligonucleotide
ggcugaaaagaaagauuaaaccuac

SEQ ID NO: 94948 - RNA, 25 nt, Artificial Sequence
  Description of Artificial Sequence: Synthetic oligonucleotide
uaaacccuuauaauaaaauccuucu

SEQ ID NO: 94949 - RNA, 25 nt, Artificial Sequence
  Description of Artificial Sequence: Synthetic oligonucleotide
cauacuauuagccaaugcuguagac

SEQ ID NO: 94950 - RNA, 25 nt, Artificial Sequence
  Description of Artificial Sequence: Synthetic oligonucleotide
gacagaagcauuuugauaggaauag

SEQ ID NO: 94951 - RNA, 25 nt, Artificial Sequence
  Description of Artificial Sequence: Synthetic oligonucleotide
agagcaaauaagauaauggcccuga

SEQ ID NO: 94952 - RNA, 25 nt, Artificial Sequence
  Description of Artificial Sequence: Synthetic oligonucleotide
ccaacauuuuucucuuccucaagca

SEQ ID NO: 94953 - RNA, 25 nt, Artificial Sequence
  Description of Artificial Sequence: Synthetic oligonucleotide
uuaaguaugagaaaaguucagccca

SEQ ID NO: 94954 - RNA, 25 nt, Artificial Sequence
  Description of Artificial Sequence: Synthetic oligonucleotide
caggaauaaagauggcugcugaacc

SEQ ID NO: 94955 - RNA, 25 nt, Artificial Sequence
  Description of Artificial Sequence: Synthetic oligonucleotide
aauuugaaugaccaaguucucuuca

SEQ ID NO: 94956 - RNA, 25 nt, Artificial Sequence
  Description of Artificial Sequence: Synthetic oligonucleotide
auguauaaagauagccagccuagag

SEQ ID NO: 94957 - RNA, 25 nt, Artificial Sequence
  Description of Artificial Sequence: Synthetic oligonucleotide
ggcuguaacuaucucugugaagugu

SEQ ID NO: 94958 - RNA, 25 nt, Artificial Sequence
  Description of Artificial Sequence: Synthetic oligonucleotide
ucugugaagugugagaaaauuucaa

SEQ ID NO: 94959 - RNA, 25 nt, Artificial Sequence
  Description of Artificial Sequence: Synthetic oligonucleotide
ccuuuaaggaaaugaauccuccuga

SEQ ID NO: 94960 - RNA, 25 nt, Artificial Sequence
  Description of Artificial Sequence: Synthetic oligonucleotide
aaggauacaaaaagugacaucauau

SEQ ID NO: 94961 - RNA, 25 nt, Artificial Sequence
  Description of Artificial Sequence: Synthetic oligonucleotide
agaugcaauuugaaucuucaucaua

SEQ ID NO: 94962 - RNA, 25 nt, Artificial Sequence
  Description of Artificial Sequence: Synthetic oligonucleotide
guucaaaacgaagacuagcuauuaa

SEQ ID NO: 94963 - RNA, 25 nt, Artificial Sequence
  Description of Artificial Sequence: Synthetic oligonucleotide
gugaaaccucaucucuacuaaaaau

SEQ ID NO: 94964 - RNA, 25 nt, Artificial Sequence
  Description of Artificial Sequence: Synthetic oligonucleotide
acgaaagagaagcucuaucucgccu

SEQ ID NO: 94965 - RNA, 25 nt, Artificial Sequence
  Description of Artificial Sequence: Synthetic oligonucleotide
cuccacaagcgccuucgguccaguu

SEQ ID NO: 94966 - RNA, 25 nt, Artificial Sequence
  Description of Artificial Sequence: Synthetic oligonucleotide
gagaagauuccaaagauguagccgc

SEQ ID NO: 94967 - RNA, 25 nt, Artificial Sequence
  Description of Artificial Sequence: Synthetic oligonucleotide
aaucuggauucaaugaggagacuug

SEQ ID NO: 94968 - RNA, 25 nt, Artificial Sequence
  Description of Artificial Sequence: Synthetic oligonucleotide
agaacagauuugagaguagugagga

SEQ ID NO: 94969 - RNA, 25 nt, Artificial Sequence
  Description of Artificial Sequence: Synthetic oligonucleotide
ccagagcugugcagaugaguacaaa

SEQ ID NO: 94970 - RNA, 25 nt, Artificial Sequence
  Description of Artificial Sequence: Synthetic oligonucleotide
ccucagauuguuguuguuaaugggc

SEQ ID NO: 94971 - RNA, 25 nt, Artificial Sequence
  Description of Artificial Sequence: Synthetic oligonucleotide
cuauuuuaauuauuuuuaauuuauu

SEQ ID NO: 94972 - RNA, 25 nt, Artificial Sequence
  Description of Artificial Sequence: Synthetic oligonucleotide
uuuaauuuauuaauauuuaaauaug

SEQ ID NO: 94973 - RNA, 25 nt, Artificial Sequence
  Description of Artificial Sequence: Synthetic oligonucleotide
augcaguuugaauauccuuuguuuc

SEQ ID NO: 94974 - RNA, 25 nt, Artificial Sequence
  Description of Artificial Sequence: Synthetic oligonucleotide
caugcugcuggcgucuaaguguuug

SEQ ID NO: 94975 - RNA, 25 nt, Artificial Sequence
  Description of Artificial Sequence: Synthetic oligonucleotide
agaugugcauuucaccugugacaaa

SEQ ID NO: 94976 - RNA, 25 nt, Artificial Sequence
  Description of Artificial Sequence: Synthetic oligonucleotide
ucaaaaccugugccaggcugaauua

SEQ ID NO: 94977 - RNA, 25 nt, Artificial Sequence
  Description of Artificial Sequence: Synthetic oligonucleotide
gaauguggguagucauucuuacaau

SEQ ID NO: 94978 - RNA, 25 nt, Artificial Sequence
  Description of Artificial Sequence: Synthetic oligonucleotide
auguggguagucauucuuacaauug

SEQ ID NO: 94979 - RNA, 25 nt, Artificial Sequence
  Description of Artificial Sequence: Synthetic oligonucleotide
ugaaaaugagcaucagagaguguac

SEQ ID NO: 94980 - RNA, 25 nt, Artificial Sequence
  Description of Artificial Sequence: Synthetic oligonucleotide
uugcuuuucauguagaacucagcag

SEQ ID NO: 94981 - RNA, 25 nt, Artificial Sequence
  Description of Artificial Sequence: Synthetic oligonucleotide
uguauuucuauauuuauuuucagua

SEQ ID NO: 94982 - RNA, 25 nt, Artificial Sequence
  Description of Artificial Sequence: Synthetic oligonucleotide
uuugauuaauguuucuuaaauggaa

SEQ ID NO: 94983 - RNA, 25 nt, Artificial Sequence
  Description of Artificial Sequence: Synthetic oligonucleotide
caacguguauagugccuaaaauugu

SEQ ID NO: 94984 - RNA, 25 nt, Artificial Sequence
  Description of Artificial Sequence: Synthetic oligonucleotide
cauauccuuggcuacuaacaucugg

SEQ ID NO: 94985 - RNA, 25 nt, Artificial Sequence
  Description of Artificial Sequence: Synthetic oligonucleotide
uacuaacaucuggagacugugagcu

SEQ ID NO: 94986 - RNA, 25 nt, Artificial Sequence
  Description of Artificial Sequence: Synthetic oligonucleotide
cauaaguugugugcuuuuuauuaau

SEQ ID NO: 94987 - RNA, 25 nt, Artificial Sequence
  Description of Artificial Sequence: Synthetic oligonucleotide
gcaucauuuuggcucuucuuacauu

SEQ ID NO: 94988 - RNA, 25 nt, Artificial Sequence
  Description of Artificial Sequence: Synthetic oligonucleotide
gcucuucuuacauuuguaaaaaugu

SEQ ID NO: 94989 - RNA, 25 nt, Artificial Sequence
  Description of Artificial Sequence: Synthetic oligonucleotide
agauuaggucaucuuaauucauauu

SEQ ID NO: 94990 - RNA, 25 nt, Artificial Sequence
  Description of Artificial Sequence: Synthetic oligonucleotide
auggaauugaaagaacuaaucauga

SEQ ID NO: 94991 - RNA, 25 nt, Artificial Sequence
  Description of Artificial Sequence: Synthetic oligonucleotide
cacacucauuccuucugcucuuggg

SEQ ID NO: 94992 - RNA, 25 nt, Artificial Sequence
  Description of Artificial Sequence: Synthetic oligonucleotide
uguagagguaaccaguagcuuugag

SEQ ID NO: 94993 - RNA, 25 nt, Artificial Sequence
  Description of Artificial Sequence: Synthetic oligonucleotide
caaccacaugccacguaauauuuca

SEQ ID NO: 94994 - RNA, 25 nt, Artificial Sequence
  Description of Artificial Sequence: Synthetic oligonucleotide
ucggaaacaaguuauucucuucacu

SEQ ID NO: 94995 - RNA, 25 nt, Artificial Sequence
  Description of Artificial Sequence: Synthetic oligonucleotide
acucccaauaacuaaugcuaagaaa

SEQ ID NO: 94996 - RNA, 25 nt, Artificial Sequence
  Description of Artificial Sequence: Synthetic oligonucleotide
aaugcuaagaaaugcugaaaaucaa

SEQ ID NO: 94997 - RNA, 25 nt, Artificial Sequence
  Description of Artificial Sequence: Synthetic oligonucleotide
gucuuucucuaaauaugauuacuuu

SEQ ID NO: 94998 - RNA, 25 nt, Artificial Sequence
  Description of Artificial Sequence: Synthetic oligonucleotide
ugaauuucaggcauuuuguucuaca

SEQ ID NO: 94999 - RNA, 25 nt, Artificial Sequence
  Description of Artificial Sequence: Synthetic oligonucleotide
cgauucccucucacccgggacucuc

SEQ ID NO: 95000 - RNA, 25 nt, Artificial Sequence
  Description of Artificial Sequence: Synthetic oligonucleotide
aggaaagugaaccuuuaaaguaaag

SEQ ID NO: 95001 - RNA, 25 nt, Artificial Sequence
  Description of Artificial Sequence: Synthetic oligonucleotide
gaggcugcaugcucuggaagccugg

SEQ ID NO: 95002 - RNA, 25 nt, Artificial Sequence
  Description of Artificial Sequence: Synthetic oligonucleotide
ucucugaacagaaaacaaaagagag

SEQ ID NO: 95003 - RNA, 25 nt, Artificial Sequence
  Description of Artificial Sequence: Synthetic oligonucleotide
aacuuggcuguaaucaguuaugccg

SEQ ID NO: 95004 - RNA, 25 nt, Artificial Sequence
  Description of Artificial Sequence: Synthetic oligonucleotide
agaagccaaaauuaaaagaagucca

SEQ ID NO: 95005 - RNA, 25 nt, Artificial Sequence
  Description of Artificial Sequence: Synthetic oligonucleotide
auuaaaagaaguccaggugagguua

SEQ ID NO: 95006 - RNA, 25 nt, Artificial Sequence
  Description of Artificial Sequence: Synthetic oligonucleotide
gaauccggauuaucgggaagaggac

SEQ ID NO: 95007 - RNA, 25 nt, Artificial Sequence
  Description of Artificial Sequence: Synthetic oligonucleotide
aaugugacaucaaagcaaguauugu

SEQ ID NO: 95008 - RNA, 25 nt, Artificial Sequence
  Description of Artificial Sequence: Synthetic oligonucleotide
caucaaagcaaguauuguagcacuc

SEQ ID NO: 95009 - RNA, 25 nt, Artificial Sequence
  Description of Artificial Sequence: Synthetic oligonucleotide
agagagagaaaacaaaaccacaaau

SEQ ID NO: 95010 - RNA, 25 nt, Artificial Sequence
  Description of Artificial Sequence: Synthetic oligonucleotide
ucgcuguaguauuuaagcccauaca

SEQ ID NO: 95011 - RNA, 25 nt, Artificial Sequence
  Description of Artificial Sequence: Synthetic oligonucleotide
cgcuguaguauuuaagcccauacag

SEQ ID NO: 95012 - RNA, 25 nt, Artificial Sequence
  Description of Artificial Sequence: Synthetic oligonucleotide
auuuaagcccauacagaaaccuucc

SEQ ID NO: 95013 - RNA, 25 nt, Artificial Sequence
  Description of Artificial Sequence: Synthetic oligonucleotide
auuaaaauaaacaugguauaccuac

SEQ ID NO: 95014 - RNA, 25 nt, Artificial Sequence
  Description of Artificial Sequence: Synthetic oligonucleotide
cuguucugaucggccaguuuucgga

SEQ ID NO: 95015 - RNA, 25 nt, Artificial Sequence
  Description of Artificial Sequence: Synthetic oligonucleotide
aaauaauuugaacuuuggaacaggg

SEQ ID NO: 95016 - RNA, 25 nt, Artificial Sequence
  Description of Artificial Sequence: Synthetic oligonucleotide
ugcgaccuuaauuuaacuuuccagu

SEQ ID NO: 95017 - RNA, 25 nt, Artificial Sequence
  Description of Artificial Sequence: Synthetic oligonucleotide
cugagaaagcuaaaguuugguuuug

SEQ ID NO: 95018 - RNA, 25 nt, Artificial Sequence
  Description of Artificial Sequence: Synthetic oligonucleotide
aguaaagaugcuacuucccacugua

SEQ ID NO: 95019 - RNA, 25 nt, Artificial Sequence
  Description of Artificial Sequence: Synthetic oligonucleotide
cugcuuaauugcugauaccauauga

SEQ ID NO: 95020 - RNA, 25 nt, Artificial Sequence
  Description of Artificial Sequence: Synthetic oligonucleotide
uaccauaugaaugaaacaugggcug

SEQ ID NO: 95021 - RNA, 25 nt, Artificial Sequence
  Description of Artificial Sequence: Synthetic oligonucleotide
aacuuucuuauccaacuuuuucaua

SEQ ID NO: 95022 - RNA, 25 nt, Artificial Sequence
  Description of Artificial Sequence: Synthetic oligonucleotide
ccuugcaugacaucaugaggccgga

SEQ ID NO: 95023 - RNA, 25 nt, Artificial Sequence
  Description of Artificial Sequence: Synthetic oligonucleotide
ugaauuuguauaugacugcauuugu

SEQ ID NO: 95024 - RNA, 25 nt, Artificial Sequence
  Description of Artificial Sequence: Synthetic oligonucleotide
gaauccuaguagaauguuuacuacc

SEQ ID NO: 95025 - RNA, 25 nt, Artificial Sequence
  Description of Artificial Sequence: Synthetic oligonucleotide
gaaagggaagaauuuuuugaugaaa

SEQ ID NO: 95026 - RNA, 25 nt, Artificial Sequence
  Description of Artificial Sequence: Synthetic oligonucleotide
uaucggcaugccagugugugaauuu

SEQ ID NO: 95027 - RNA, 25 nt, Artificial Sequence
  Description of Artificial Sequence: Synthetic oligonucleotide
caccucauaguagagcaauguaugu

SEQ ID NO: 95028 - RNA, 25 nt, Artificial Sequence
  Description of Artificial Sequence: Synthetic oligonucleotide
ccagaauugccaaagcacauauaua

SEQ ID NO: 95029 - RNA, 25 nt, Artificial Sequence
  Description of Artificial Sequence: Synthetic oligonucleotide
uggugaucuggguaauaguuucucc

SEQ ID NO: 95030 - RNA, 25 nt, Artificial Sequence
  Description of Artificial Sequence: Synthetic oligonucleotide
gaucuggguaauaguuucuccaaau

SEQ ID NO: 95031 - RNA, 25 nt, Artificial Sequence
  Description of Artificial Sequence: Synthetic oligonucleotide
ggaugugaugaauacuuccuagaaa

SEQ ID NO: 95032 - RNA, 25 nt, Artificial Sequence
  Description of Artificial Sequence: Synthetic oligonucleotide
cauuuccacagcuacaccauauaug

SEQ ID NO: 95033 - RNA, 25 nt, Artificial Sequence
  Description of Artificial Sequence: Synthetic oligonucleotide
acagcuacaccauauaugaauggag

SEQ ID NO: 95034 - RNA, 25 nt, Artificial Sequence
  Description of Artificial Sequence: Synthetic oligonucleotide
ugcaguucuuacacgagaagaagau

SEQ ID NO: 95035 - RNA, 25 nt, Artificial Sequence
  Description of Artificial Sequence: Synthetic oligonucleotide
acgagaagaagaucauuuacaggga

SEQ ID NO: 95036 - RNA, 25 nt, Artificial Sequence
  Description of Artificial Sequence: Synthetic oligonucleotide
cgagaagaagaucauuuacagggac

SEQ ID NO: 95037 - RNA, 25 nt, Artificial Sequence
  Description of Artificial Sequence: Synthetic oligonucleotide
aagaagaucauuuacagggaccuga

SEQ ID NO: 95038 - RNA, 25 nt, Artificial Sequence
  Description of Artificial Sequence: Synthetic oligonucleotide
agaggaagagguguuugacugcauc

SEQ ID NO: 95039 - RNA, 25 nt, Artificial Sequence
  Description of Artificial Sequence: Synthetic oligonucleotide
gaggaagagguguuugacugcaucg

SEQ ID NO: 95040 - RNA, 25 nt, Artificial Sequence
  Description of Artificial Sequence: Synthetic oligonucleotide
cuacuuugagggcgaguucacaggg

SEQ ID NO: 95041 - RNA, 25 nt, Artificial Sequence
  Description of Artificial Sequence: Synthetic oligonucleotide
agggcaucuccuggcaccucugucc

SEQ ID NO: 95042 - RNA, 25 nt, Artificial Sequence
  Description of Artificial Sequence: Synthetic oligonucleotide
ggagugauaugguuugucuuuuuaa

SEQ ID NO: 95043 - RNA, 25 nt, Artificial Sequence
  Description of Artificial Sequence: Synthetic oligonucleotide
gagugauaugguuugucuuuuuaag

SEQ ID NO: 95044 - RNA, 25 nt, Artificial Sequence
  Description of Artificial Sequence: Synthetic oligonucleotide
ugcaguaaagauccuaaagguuguc

SEQ ID NO: 95045 - RNA, 25 nt, Artificial Sequence
  Description of Artificial Sequence: Synthetic oligonucleotide
aguaaagauccuaaagguugucgac

SEQ ID NO: 95046 - RNA, 25 nt, Artificial Sequence
  Description of Artificial Sequence: Synthetic oligonucleotide
ugacaaaggacaaccuggcaauugu

SEQ ID NO: 95047 - RNA, 25 nt, Artificial Sequence
  Description of Artificial Sequence: Synthetic oligonucleotide
gcaauugugacccaguggugcgagg

SEQ ID NO: 95048 - RNA, 25 nt, Artificial Sequence
  Description of Artificial Sequence: Synthetic oligonucleotide
aacaucauccauagagacaugaaau

SEQ ID NO: 95049 - RNA, 25 nt, Artificial Sequence
  Description of Artificial Sequence: Synthetic oligonucleotide
ugaaauccaacaauauauuucucca

SEQ ID NO: 95050 - RNA, 25 nt, Artificial Sequence
  Description of Artificial Sequence: Synthetic oligonucleotide
aacaauauauuucuccaugaaggcu

SEQ ID NO: 95051 - RNA, 25 nt, Artificial Sequence
  Description of Artificial Sequence: Synthetic oligonucleotide
aacaguaaagucacgcuggaguggu

SEQ ID NO: 95052 - RNA, 25 nt, Artificial Sequence
  Description of Artificial Sequence: Synthetic oligonucleotide
ugugaagaaaguaaaggaagagagg

SEQ ID NO: 95053 - RNA, 25 nt, Artificial Sequence
  Description of Artificial Sequence: Synthetic oligonucleotide
cuuccgagccauccuugcaucgggc

SEQ ID NO: 95054 - RNA, 25 nt, Artificial Sequence
  Description of Artificial Sequence: Synthetic oligonucleotide
aauggagguugaauauccuacugug

SEQ ID NO: 95055 - RNA, 25 nt, Artificial Sequence
  Description of Artificial Sequence: Synthetic oligonucleotide
ggagguugaauauccuacuguguaa

SEQ ID NO: 95056 - RNA, 25 nt, Artificial Sequence
  Description of Artificial Sequence: Synthetic oligonucleotide
auuuugaguuuucccuuguagugua

SEQ ID NO: 95057 - RNA, 25 nt, Artificial Sequence
  Description of Artificial Sequence: Synthetic oligonucleotide
uauccuguuuguucuuuguugauug

SEQ ID NO: 95058 - RNA, 25 nt, Artificial Sequence
  Description of Artificial Sequence: Synthetic oligonucleotide
ccuguuuguucuuuguugauugaaa

SEQ ID NO: 95059 - RNA, 25 nt, Artificial Sequence
  Description of Artificial Sequence: Synthetic oligonucleotide
cucuacagccuucuuuuucuuccau

SEQ ID NO: 95060 - RNA, 25 nt, Artificial Sequence
  Description of Artificial Sequence: Synthetic oligonucleotide
ucuuccauagcuaaucuuccuucua

SEQ ID NO: 95061 - RNA, 25 nt, Artificial Sequence
  Description of Artificial Sequence: Synthetic oligonucleotide
auaaucuuccuguugaaugcuucau

SEQ ID NO: 95062 - RNA, 25 nt, Artificial Sequence
  Description of Artificial Sequence: Synthetic oligonucleotide
uaaucuuccuguugaaugcuucaug

SEQ ID NO: 95063 - RNA, 25 nt, Artificial Sequence
  Description of Artificial Sequence: Synthetic oligonucleotide
cuucaugacuugaauucuacuuuga

SEQ ID NO: 95064 - RNA, 25 nt, Artificial Sequence
  Description of Artificial Sequence: Synthetic oligonucleotide
aagagggagagaagcaacuacagac

SEQ ID NO: 95065 - RNA, 25 nt, Artificial Sequence
  Description of Artificial Sequence: Synthetic oligonucleotide
cgucuccuaccagaccaaggucaac

SEQ ID NO: 95066 - RNA, 25 nt, Artificial Sequence
  Description of Artificial Sequence: Synthetic oligonucleotide
gaucaaucggcccgacuaucucgac

SEQ ID NO: 95067 - RNA, 25 nt, Artificial Sequence
  Description of Artificial Sequence: Synthetic oligonucleotide
ggacgaacauccaaccuucccaaac

SEQ ID NO: 95068 - RNA, 25 nt, Artificial Sequence
  Description of Artificial Sequence: Synthetic oligonucleotide
agggucggaacccaagcuuagaacu

SEQ ID NO: 95069 - RNA, 25 nt, Artificial Sequence
  Description of Artificial Sequence: Synthetic oligonucleotide
ucggaacccaagcuuagaacuuuaa

SEQ ID NO: 95070 - RNA, 25 nt, Artificial Sequence
  Description of Artificial Sequence: Synthetic oligonucleotide
acccaagcuuagaacuuuaagcaac

SEQ ID NO: 95071 - RNA, 25 nt, Artificial Sequence
  Description of Artificial Sequence: Synthetic oligonucleotide
gaacuuuaagcaacaagaccaccac

SEQ ID NO: 95072 - RNA, 25 nt, Artificial Sequence
  Description of Artificial Sequence: Synthetic oligonucleotide
acuauucaguggcgagaaauaaagu

SEQ ID NO: 95073 - RNA, 25 nt, Artificial Sequence
  Description of Artificial Sequence: Synthetic oligonucleotide
cuauucaguggcgagaaauaaaguu

SEQ ID NO: 95074 - RNA, 25 nt, Artificial Sequence
  Description of Artificial Sequence: Synthetic oligonucleotide
aaacacagauaacaggaaaugaucc

SEQ ID NO: 95075 - RNA, 25 nt, Artificial Sequence
  Description of Artificial Sequence: Synthetic oligonucleotide
cuuaagaaaagagaagaaaugaaac

SEQ ID NO: 95076 - RNA, 25 nt, Artificial Sequence
  Description of Artificial Sequence: Synthetic oligonucleotide
cugaaggaguguguuuccauccucc

SEQ ID NO: 95077 - RNA, 25 nt, Artificial Sequence
  Description of Artificial Sequence: Synthetic oligonucleotide
ucaccgcgggacugaaaaucuuuga

SEQ ID NO: 95078 - RNA, 25 nt, Artificial Sequence
  Description of Artificial Sequence: Synthetic oligonucleotide
agcagaaauaagcgugccguucagg

SEQ ID NO: 95079 - RNA, 25 nt, Artificial Sequence
  Description of Artificial Sequence: Synthetic oligonucleotide
aagcgugccguucaggguccagaag

SEQ ID NO: 95080 - RNA, 25 nt, Artificial Sequence
  Description of Artificial Sequence: Synthetic oligonucleotide
agaaacagucacucaagacugcuug

SEQ ID NO: 95081 - RNA, 25 nt, Artificial Sequence
  Description of Artificial Sequence: Synthetic oligonucleotide
agaggaagaagguccaugucuuugg

SEQ ID NO: 95082 - RNA, 25 nt, Artificial Sequence
  Description of Artificial Sequence: Synthetic oligonucleotide
uguauucaaaauaugccugaaacac

SEQ ID NO: 95083 - RNA, 25 nt, Artificial Sequence
  Description of Artificial Sequence: Synthetic oligonucleotide
auuuuccucccuuucucuguaccuc

SEQ ID NO: 95084 - RNA, 25 nt, Artificial Sequence
  Description of Artificial Sequence: Synthetic oligonucleotide
caaagaaagauagagcaagacaaga

SEQ ID NO: 95085 - RNA, 25 nt, Artificial Sequence
  Description of Artificial Sequence: Synthetic oligonucleotide
aagaaagauagagcaagacaagaaa

SEQ ID NO: 95086 - RNA, 25 nt, Artificial Sequence
  Description of Artificial Sequence: Synthetic oligonucleotide
gaaagcauuuguuuguacaagaucc

SEQ ID NO: 95087 - RNA, 25 nt, Artificial Sequence
  Description of Artificial Sequence: Synthetic oligonucleotide
ugaguuaaacgaacguacuugcaga

SEQ ID NO: 95088 - RNA, 25 nt, Artificial Sequence
  Description of Artificial Sequence: Synthetic oligonucleotide
acugauacagaacgaucgauacaga

SEQ ID NO: 95089 - RNA, 25 nt, Artificial Sequence
  Description of Artificial Sequence: Synthetic oligonucleotide
auauuauauauauauaaaaauaaau

SEQ ID NO: 95090 - RNA, 25 nt, Artificial Sequence
  Description of Artificial Sequence: Synthetic oligonucleotide
auuauauauauauaaaaauaaauau

SEQ ID NO: 95091 - RNA, 25 nt, Artificial Sequence
  Description of Artificial Sequence: Synthetic oligonucleotide
ucacuggauguauuugacugcugug

SEQ ID NO: 95092 - RNA, 25 nt, Artificial Sequence
  Description of Artificial Sequence: Synthetic oligonucleotide
cagggaagaggaggagaugagagac

SEQ ID NO: 95093 - RNA, 25 nt, Artificial Sequence
  Description of Artificial Sequence: Synthetic oligonucleotide
augaucuuuuuuuugucccacuugg

SEQ ID NO: 95094 - RNA, 27 nt, Artificial Sequence
  Description of Artificial Sequence: Synthetic oligonucleotide
ggccgugaacuccucaucaaaauaccu

SEQ ID NO: 95095 - RNA, 27 nt, Artificial Sequence
  Description of Artificial Sequence: Synthetic oligonucleotide
uggugugauggugaucaucugggccgu

SEQ ID NO: 95096 - RNA, 27 nt, Artificial Sequence
  Description of Artificial Sequence: Synthetic oligonucleotide
aaacccgcaggauaguuuucuucccua

SEQ ID NO: 95097 - RNA, 27 nt, Artificial Sequence
  Description of Artificial Sequence: Synthetic oligonucleotide
caaacuggaugaaauaaauuaaaaccc

SEQ ID NO: 95098 - RNA, 27 nt, Artificial Sequence
  Description of Artificial Sequence: Synthetic oligonucleotide
agaaguccuuaacauuucccuacguga

SEQ ID NO: 95099 - RNA, 27 nt, Artificial Sequence
  Description of Artificial Sequence: Synthetic oligonucleotide
cucugucccacuggguaaacccuggcc

SEQ ID NO: 95100 - RNA, 27 nt, Artificial Sequence
  Description of Artificial Sequence: Synthetic oligonucleotide
cacaauaacaaauuuaaaccuugcucc

SEQ ID NO: 95101 - RNA, 27 nt, Artificial Sequence
  Description of Artificial Sequence: Synthetic oligonucleotide
aaaugcauuugaacaacauaauacaca

SEQ ID NO: 95102 - RNA, 27 nt, Artificial Sequence
  Description of Artificial Sequence: Synthetic oligonucleotide
ggcuuuccugucacaaagauuaaaaac

SEQ ID NO: 95103 - RNA, 27 nt, Artificial Sequence
  Description of Artificial Sequence: Synthetic oligonucleotide
agggcuuuccugucacaaagauuaaaa

SEQ ID NO: 95104 - RNA, 27 nt, Artificial Sequence
  Description of Artificial Sequence: Synthetic oligonucleotide
ggccaugcugggagacauaagcagcag

SEQ ID NO: 95105 - RNA, 27 nt, Artificial Sequence
  Description of Artificial Sequence: Synthetic oligonucleotide
ucagggagaagcuucugaaacacuucu

SEQ ID NO: 95106 - RNA, 27 nt, Artificial Sequence
  Description of Artificial Sequence: Synthetic oligonucleotide
aagggcuucuuccuuauugauggucag

SEQ ID NO: 95107 - RNA, 27 nt, Artificial Sequence
  Description of Artificial Sequence: Synthetic oligonucleotide
ugaagggcuucuuccuuauugaugguc

SEQ ID NO: 95108 - RNA, 27 nt, Artificial Sequence
  Description of Artificial Sequence: Synthetic oligonucleotide
cgcugaagggcuucuuccuuauugaug

SEQ ID NO: 95109 - RNA, 27 nt, Artificial Sequence
  Description of Artificial Sequence: Synthetic oligonucleotide
gccgcugaagggcuucuuccuuauuga

SEQ ID NO: 95110 - RNA, 27 nt, Artificial Sequence
  Description of Artificial Sequence: Synthetic oligonucleotide
acuggccgcugaagggcuucuuccuua

SEQ ID NO: 95111 - RNA, 27 nt, Artificial Sequence
  Description of Artificial Sequence: Synthetic oligonucleotide
cggagcuuuucaccuuuaguuaugcuu

SEQ ID NO: 95112 - RNA, 27 nt, Artificial Sequence
  Description of Artificial Sequence: Synthetic oligonucleotide
ccggagcuuuucaccuuuaguuaugcu

SEQ ID NO: 95113 - RNA, 27 nt, Artificial Sequence
  Description of Artificial Sequence: Synthetic oligonucleotide
cagacuguugacuggcgugauguaguu

SEQ ID NO: 95114 - RNA, 27 nt, Artificial Sequence
  Description of Artificial Sequence: Synthetic oligonucleotide
cuuuugaacucugcuuaaauccagugg

SEQ ID NO: 95115 - RNA, 27 nt, Artificial Sequence
  Description of Artificial Sequence: Synthetic oligonucleotide
gcuuuugaacucugcuuaaauccagug

SEQ ID NO: 95116 - RNA, 27 nt, Artificial Sequence
  Description of Artificial Sequence: Synthetic oligonucleotide
agggcuuuugaacucugcuuaaaucca

SEQ ID NO: 95117 - RNA, 27 nt, Artificial Sequence
  Description of Artificial Sequence: Synthetic oligonucleotide
aagggcuuuugaacucugcuuaaaucc

SEQ ID NO: 95118 - RNA, 27 nt, Artificial Sequence
  Description of Artificial Sequence: Synthetic oligonucleotide
ugaagggcuuuugaacucugcuuaaau

SEQ ID NO: 95119 - RNA, 27 nt, Artificial Sequence
  Description of Artificial Sequence: Synthetic oligonucleotide
cugaagggcuuuugaacucugcuuaaa

SEQ ID NO: 95120 - RNA, 27 nt, Artificial Sequence
  Description of Artificial Sequence: Synthetic oligonucleotide
cgcugaagggcuuuugaacucugcuua

SEQ ID NO: 95121 - RNA, 27 nt, Artificial Sequence
  Description of Artificial Sequence: Synthetic oligonucleotide
cgagcggcuucacucagacccugaggc

SEQ ID NO: 95122 - RNA, 27 nt, Artificial Sequence
  Description of Artificial Sequence: Synthetic oligonucleotide
uugacuggcgugauguaguugcuuggg

SEQ ID NO: 95123 - RNA, 27 nt, Artificial Sequence
  Description of Artificial Sequence: Synthetic oligonucleotide
cacgcaccaagaagcugccauugaucc

SEQ ID NO: 95124 - RNA, 27 nt, Artificial Sequence
  Description of Artificial Sequence: Synthetic oligonucleotide
cugaugaauccaaugugggcuggaauc

SEQ ID NO: 95125 - RNA, 27 nt, Artificial Sequence
  Description of Artificial Sequence: Synthetic oligonucleotide
cuuagguauuccacauucucagcugug

SEQ ID NO: 95126 - RNA, 27 nt, Artificial Sequence
  Description of Artificial Sequence: Synthetic oligonucleotide
ugagccucaaauuaggagauacguuuu

SEQ ID NO: 95127 - RNA, 27 nt, Artificial Sequence
  Description of Artificial Sequence: Synthetic oligonucleotide
ccaauuguagagaaauuauuuuaggaa

SEQ ID NO: 95128 - RNA, 27 nt, Artificial Sequence
  Description of Artificial Sequence: Synthetic oligonucleotide
ggcuccuaacuagcugaaucuuccaau

SEQ ID NO: 95129 - RNA, 27 nt, Artificial Sequence
  Description of Artificial Sequence: Synthetic oligonucleotide
guggauauugacuaggagaguuuaaaa

SEQ ID NO: 95130 - RNA, 27 nt, Artificial Sequence
  Description of Artificial Sequence: Synthetic oligonucleotide
ugugacugaacauaacuguaggcugaa

SEQ ID NO: 95131 - RNA, 27 nt, Artificial Sequence
  Description of Artificial Sequence: Synthetic oligonucleotide
guaugugugugugacugaacauaacug

SEQ ID NO: 95132 - RNA, 27 nt, Artificial Sequence
  Description of Artificial Sequence: Synthetic oligonucleotide
aagcaaaaggaacauuuuguaugugug

SEQ ID NO: 95133 - RNA, 27 nt, Artificial Sequence
  Description of Artificial Sequence: Synthetic oligonucleotide
aaaaauuacuuuaaaagcaaaaggaac

SEQ ID NO: 95134 - RNA, 27 nt, Artificial Sequence
  Description of Artificial Sequence: Synthetic oligonucleotide
ccauugacuguugcuucacaggucaga

SEQ ID NO: 95135 - RNA, 27 nt, Artificial Sequence
  Description of Artificial Sequence: Synthetic oligonucleotide
auugguuugucgaugugugagauaguu

SEQ ID NO: 95136 - RNA, 27 nt, Artificial Sequence
  Description of Artificial Sequence: Synthetic oligonucleotide
agugguagcaguacaauugaggacaag

SEQ ID NO: 95137 - RNA, 27 nt, Artificial Sequence
  Description of Artificial Sequence: Synthetic oligonucleotide
uaagaccgcuugccagcuacgguuuca

SEQ ID NO: 95138 - RNA, 27 nt, Artificial Sequence
  Description of Artificial Sequence: Synthetic oligonucleotide
agccgguaagaccgcuugccagcuacg

SEQ ID NO: 95139 - RNA, 27 nt, Artificial Sequence
  Description of Artificial Sequence: Synthetic oligonucleotide
gguaacccaucuuuuaaccauacaacu

SEQ ID NO: 95140 - RNA, 27 nt, Artificial Sequence
  Description of Artificial Sequence: Synthetic oligonucleotide
ucgcagguaacccaucuuuuaaccaua

SEQ ID NO: 95141 - RNA, 27 nt, Artificial Sequence
  Description of Artificial Sequence: Synthetic oligonucleotide
cucagcaagauuguauaauucccugca

SEQ ID NO: 95142 - RNA, 27 nt, Artificial Sequence
  Description of Artificial Sequence: Synthetic oligonucleotide
acuguuuuaugcucagcaagauuguau

SEQ ID NO: 95143 - RNA, 27 nt, Artificial Sequence
  Description of Artificial Sequence: Synthetic oligonucleotide
aggauaaaggacucuucauuauuggaa

SEQ ID NO: 95144 - RNA, 27 nt, Artificial Sequence
  Description of Artificial Sequence: Synthetic oligonucleotide
caacuugcguuggaacauccaaagugu

SEQ ID NO: 95145 - RNA, 27 nt, Artificial Sequence
  Description of Artificial Sequence: Synthetic oligonucleotide
augguuucaguuuaguggaagcauuua

SEQ ID NO: 95146 - RNA, 27 nt, Artificial Sequence
  Description of Artificial Sequence: Synthetic oligonucleotide
auauuuaacaaagucaaacuuucucac

SEQ ID NO: 95147 - RNA, 27 nt, Artificial Sequence
  Description of Artificial Sequence: Synthetic oligonucleotide
aacuuuuaauauacaguaguucuuuuc

SEQ ID NO: 95148 - RNA, 27 nt, Artificial Sequence
  Description of Artificial Sequence: Synthetic oligonucleotide
guuaagucaaaacccguauuucuaaag

SEQ ID NO: 95149 - RNA, 27 nt, Artificial Sequence
  Description of Artificial Sequence: Synthetic oligonucleotide
gugcugaguuugcuguacccauguuga

SEQ ID NO: 95150 - RNA, 27 nt, Artificial Sequence
  Description of Artificial Sequence: Synthetic oligonucleotide
ugaggucagcaucuucugugucuuuac

SEQ ID NO: 95151 - RNA, 27 nt, Artificial Sequence
  Description of Artificial Sequence: Synthetic oligonucleotide
gcgaucugaauaaaccucccuacuagc

SEQ ID NO: 95152 - RNA, 27 nt, Artificial Sequence
  Description of Artificial Sequence: Synthetic oligonucleotide
aucccagaacccugcugcagaaggcca

SEQ ID NO: 95153 - RNA, 27 nt, Artificial Sequence
  Description of Artificial Sequence: Synthetic oligonucleotide
cauaauuuccaauauguaccagaccuu

SEQ ID NO: 95154 - RNA, 27 nt, Artificial Sequence
  Description of Artificial Sequence: Synthetic oligonucleotide
cuagugcuuccaucggaaggacuaggu

SEQ ID NO: 95155 - RNA, 27 nt, Artificial Sequence
  Description of Artificial Sequence: Synthetic oligonucleotide
uccacauaaaaacaauauucacuggga

SEQ ID NO: 95156 - RNA, 27 nt, Artificial Sequence
  Description of Artificial Sequence: Synthetic oligonucleotide
ucuaccaauuccaacuugaauucauug

SEQ ID NO: 95157 - RNA, 27 nt, Artificial Sequence
  Description of Artificial Sequence: Synthetic oligonucleotide
ucuccaagucuaaaucuguguccugag

SEQ ID NO: 95158 - RNA, 27 nt, Artificial Sequence
  Description of Artificial Sequence: Synthetic oligonucleotide
uggaauacuguaacugugcuuugagga

SEQ ID NO: 95159 - RNA, 27 nt, Artificial Sequence
  Description of Artificial Sequence: Synthetic oligonucleotide
uuaauucaucagugguggcagugguag

SEQ ID NO: 95160 - RNA, 27 nt, Artificial Sequence
  Description of Artificial Sequence: Synthetic oligonucleotide
gugaugauguggcacuaguaguuucuu

SEQ ID NO: 95161 - RNA, 27 nt, Artificial Sequence
  Description of Artificial Sequence: Synthetic oligonucleotide
ucuguuuggugaggcuguccgacuuug

SEQ ID NO: 95162 - RNA, 27 nt, Artificial Sequence
  Description of Artificial Sequence: Synthetic oligonucleotide
ccaucauguuccauuuuucgcuuucuc

SEQ ID NO: 95163 - RNA, 27 nt, Artificial Sequence
  Description of Artificial Sequence: Synthetic oligonucleotide
gcagucuacaugcuaaaucagagggua

SEQ ID NO: 95164 - RNA, 27 nt, Artificial Sequence
  Description of Artificial Sequence: Synthetic oligonucleotide
cauaaauagauccuuaaauagcucaaa

SEQ ID NO: 95165 - RNA, 27 nt, Artificial Sequence
  Description of Artificial Sequence: Synthetic oligonucleotide
ugauaauagugcuuuuucaccuuuuuc

SEQ ID NO: 95166 - RNA, 27 nt, Artificial Sequence
  Description of Artificial Sequence: Synthetic oligonucleotide
gcagaacugauaauagugcuuuuucac

SEQ ID NO: 95167 - RNA, 27 nt, Artificial Sequence
  Description of Artificial Sequence: Synthetic oligonucleotide
guagguuuaaucuuucuuuucagccau

SEQ ID NO: 95168 - RNA, 27 nt, Artificial Sequence
  Description of Artificial Sequence: Synthetic oligonucleotide
agaaggauuuuauuauaaggguuuaau

SEQ ID NO: 95169 - RNA, 27 nt, Artificial Sequence
  Description of Artificial Sequence: Synthetic oligonucleotide
gucuacagcauuggcuaauaguaugaa

SEQ ID NO: 95170 - RNA, 27 nt, Artificial Sequence
  Description of Artificial Sequence: Synthetic oligonucleotide
cuauuccuaucaaaaugcuucugucua

SEQ ID NO: 95171 - RNA, 27 nt, Artificial Sequence
  Description of Artificial Sequence: Synthetic oligonucleotide
ucagggccauuaucuuauuugcucuau

SEQ ID NO: 95172 - RNA, 27 nt, Artificial Sequence
  Description of Artificial Sequence: Synthetic oligonucleotide
ugcuugaggaagagaaaaauguugguc

SEQ ID NO: 95173 - RNA, 27 nt, Artificial Sequence
  Description of Artificial Sequence: Synthetic oligonucleotide
ugggcugaacuuuucucauacuuaaag

SEQ ID NO: 95174 - RNA, 27 nt, Artificial Sequence
  Description of Artificial Sequence: Synthetic oligonucleotide
gguucagcagccaucuuuauuccugcg

SEQ ID NO: 95175 - RNA, 27 nt, Artificial Sequence
  Description of Artificial Sequence: Synthetic oligonucleotide
ugaagagaacuuggucauucaaauuuc

SEQ ID NO: 95176 - RNA, 27 nt, Artificial Sequence
  Description of Artificial Sequence: Synthetic oligonucleotide
cucuaggcuggcuaucuuuauacauac

SEQ ID NO: 95177 - RNA, 27 nt, Artificial Sequence
  Description of Artificial Sequence: Synthetic oligonucleotide
acacuucacagagauaguuacagccau

SEQ ID NO: 95178 - RNA, 27 nt, Artificial Sequence
  Description of Artificial Sequence: Synthetic oligonucleotide
uugaaauuuucucacacuucacagaga

SEQ ID NO: 95179 - RNA, 27 nt, Artificial Sequence
  Description of Artificial Sequence: Synthetic oligonucleotide
ucaggaggauucauuuccuuaaaggaa

SEQ ID NO: 95180 - RNA, 27 nt, Artificial Sequence
  Description of Artificial Sequence: Synthetic oligonucleotide
auaugaugucacuuuuuguauccuuga

SEQ ID NO: 95181 - RNA, 27 nt, Artificial Sequence
  Description of Artificial Sequence: Synthetic oligonucleotide
uaugaugaagauucaaauugcaucuua

SEQ ID NO: 95182 - RNA, 27 nt, Artificial Sequence
  Description of Artificial Sequence: Synthetic oligonucleotide
uuaauagcuagucuucguuuugaacag

SEQ ID NO: 95183 - RNA, 27 nt, Artificial Sequence
  Description of Artificial Sequence: Synthetic oligonucleotide
auuuuuaguagagaugagguuucacca

SEQ ID NO: 95184 - RNA, 27 nt, Artificial Sequence
  Description of Artificial Sequence: Synthetic oligonucleotide
aggcgagauagagcuucucuuucguuc

SEQ ID NO: 95185 - RNA, 27 nt, Artificial Sequence
  Description of Artificial Sequence: Synthetic oligonucleotide
aacuggaccgaaggcgcuuguggagaa

SEQ ID NO: 95186 - RNA, 27 nt, Artificial Sequence
  Description of Artificial Sequence: Synthetic oligonucleotide
gcggcuacaucuuuggaaucuucuccu

SEQ ID NO: 95187 - RNA, 27 nt, Artificial Sequence
  Description of Artificial Sequence: Synthetic oligonucleotide
caagucuccucauugaauccagauugg

SEQ ID NO: 95188 - RNA, 27 nt, Artificial Sequence
  Description of Artificial Sequence: Synthetic oligonucleotide
uccucacuacucucaaaucuguucugg

SEQ ID NO: 95189 - RNA, 27 nt, Artificial Sequence
  Description of Artificial Sequence: Synthetic oligonucleotide
uuuguacucaucugcacagcucuggcu

SEQ ID NO: 95190 - RNA, 27 nt, Artificial Sequence
  Description of Artificial Sequence: Synthetic oligonucleotide
gcccauuaacaacaacaaucugaggug

SEQ ID NO: 95191 - RNA, 27 nt, Artificial Sequence
  Description of Artificial Sequence: Synthetic oligonucleotide
aauaaauuaaaaauaauuaaaauagug

SEQ ID NO: 95192 - RNA, 27 nt, Artificial Sequence
  Description of Artificial Sequence: Synthetic oligonucleotide
cauauuuaaauauuaauaaauuaaaaa

SEQ ID NO: 95193 - RNA, 27 nt, Artificial Sequence
  Description of Artificial Sequence: Synthetic oligonucleotide
gaaacaaaggauauucaaacugcauag

SEQ ID NO: 95194 - RNA, 27 nt, Artificial Sequence
  Description of Artificial Sequence: Synthetic oligonucleotide
caaacacuuagacgccagcagcauggg

SEQ ID NO: 95195 - RNA, 27 nt, Artificial Sequence
  Description of Artificial Sequence: Synthetic oligonucleotide
uuugucacaggugaaaugcacaucuga

SEQ ID NO: 95196 - RNA, 27 nt, Artificial Sequence
  Description of Artificial Sequence: Synthetic oligonucleotide
uaauucagccuggcacagguuuugauc

SEQ ID NO: 95197 - RNA, 27 nt, Artificial Sequence
  Description of Artificial Sequence: Synthetic oligonucleotide
auuguaagaaugacuacccacauucac

SEQ ID NO: 95198 - RNA, 27 nt, Artificial Sequence
  Description of Artificial Sequence: Synthetic oligonucleotide
caauuguaagaaugacuacccacauuc

SEQ ID NO: 95199 - RNA, 27 nt, Artificial Sequence
  Description of Artificial Sequence: Synthetic oligonucleotide
guacacucucugaugcucauuuucaua

SEQ ID NO: 95200 - RNA, 27 nt, Artificial Sequence
  Description of Artificial Sequence: Synthetic oligonucleotide
cugcugaguucuacaugaaaagcaaau

SEQ ID NO: 95201 - RNA, 27 nt, Artificial Sequence
  Description of Artificial Sequence: Synthetic oligonucleotide
uacugaaaauaaauauagaaauacaac

SEQ ID NO: 95202 - RNA, 27 nt, Artificial Sequence
  Description of Artificial Sequence: Synthetic oligonucleotide
uuccauuuaagaaacauuaaucaaaac

SEQ ID NO: 95203 - RNA, 27 nt, Artificial Sequence
  Description of Artificial Sequence: Synthetic oligonucleotide
acaauuuuaggcacuauacacguuguu

SEQ ID NO: 95204 - RNA, 27 nt, Artificial Sequence
  Description of Artificial Sequence: Synthetic oligonucleotide
ccagauguuaguagccaaggauauggu

SEQ ID NO: 95205 - RNA, 27 nt, Artificial Sequence
  Description of Artificial Sequence: Synthetic oligonucleotide
agcucacagucuccagauguuaguagc

SEQ ID NO: 95206 - RNA, 27 nt, Artificial Sequence
  Description of Artificial Sequence: Synthetic oligonucleotide
auuaauaaaaagcacacaacuuauggc

SEQ ID NO: 95207 - RNA, 27 nt, Artificial Sequence
  Description of Artificial Sequence: Synthetic oligonucleotide
aauguaagaagagccaaaaugaugcau

SEQ ID NO: 95208 - RNA, 27 nt, Artificial Sequence
  Description of Artificial Sequence: Synthetic oligonucleotide
acauuuuuacaaauguaagaagagcca

SEQ ID NO: 95209 - RNA, 27 nt, Artificial Sequence
  Description of Artificial Sequence: Synthetic oligonucleotide
aauaugaauuaagaugaccuaaucugu

SEQ ID NO: 95210 - RNA, 27 nt, Artificial Sequence
  Description of Artificial Sequence: Synthetic oligonucleotide
ucaugauuaguucuuucaauuccaucc

SEQ ID NO: 95211 - RNA, 27 nt, Artificial Sequence
  Description of Artificial Sequence: Synthetic oligonucleotide
cccaagagcagaaggaaugagugugca

SEQ ID NO: 95212 - RNA, 27 nt, Artificial Sequence
  Description of Artificial Sequence: Synthetic oligonucleotide
cucaaagcuacugguuaccucuacacc

SEQ ID NO: 95213 - RNA, 27 nt, Artificial Sequence
  Description of Artificial Sequence: Synthetic oligonucleotide
ugaaauauuacguggcaugugguuggg

SEQ ID NO: 95214 - RNA, 27 nt, Artificial Sequence
  Description of Artificial Sequence: Synthetic oligonucleotide
agugaagagaauaacuuguuuccgaag

SEQ ID NO: 95215 - RNA, 27 nt, Artificial Sequence
  Description of Artificial Sequence: Synthetic oligonucleotide
uuucuuagcauuaguuauugggaguga

SEQ ID NO: 95216 - RNA, 27 nt, Artificial Sequence
  Description of Artificial Sequence: Synthetic oligonucleotide
uugauuuucagcauuucuuagcauuag

SEQ ID NO: 95217 - RNA, 27 nt, Artificial Sequence
  Description of Artificial Sequence: Synthetic oligonucleotide
aaaguaaucauauuuagagaaagacag

SEQ ID NO: 95218 - RNA, 27 nt, Artificial Sequence
  Description of Artificial Sequence: Synthetic oligonucleotide
uguagaacaaaaugccugaaauucagc

SEQ ID NO: 95219 - RNA, 27 nt, Artificial Sequence
  Description of Artificial Sequence: Synthetic oligonucleotide
gagagucccgggugagagggaaucgcc

SEQ ID NO: 95220 - RNA, 27 nt, Artificial Sequence
  Description of Artificial Sequence: Synthetic oligonucleotide
cuuuacuuuaaagguucacuuuccuug

SEQ ID NO: 95221 - RNA, 27 nt, Artificial Sequence
  Description of Artificial Sequence: Synthetic oligonucleotide
ccaggcuuccagagcaugcagccuccu

SEQ ID NO: 95222 - RNA, 27 nt, Artificial Sequence
  Description of Artificial Sequence: Synthetic oligonucleotide
cucucuuuuguuuucuguucagagaaa

SEQ ID NO: 95223 - RNA, 27 nt, Artificial Sequence
  Description of Artificial Sequence: Synthetic oligonucleotide
cggcauaacugauuacagccaaguuca

SEQ ID NO: 95224 - RNA, 27 nt, Artificial Sequence
  Description of Artificial Sequence: Synthetic oligonucleotide
uggacuucuuuuaauuuuggcuucuuc

SEQ ID NO: 95225 - RNA, 27 nt, Artificial Sequence
  Description of Artificial Sequence: Synthetic oligonucleotide
uaaccucaccuggacuucuuuuaauuu

SEQ ID NO: 95226 - RNA, 27 nt, Artificial Sequence
  Description of Artificial Sequence: Synthetic oligonucleotide
guccucuucccgauaauccggauucag

SEQ ID NO: 95227 - RNA, 27 nt, Artificial Sequence
  Description of Artificial Sequence: Synthetic oligonucleotide
acaauacuugcuuugaugucacauuaa

SEQ ID NO: 95228 - RNA, 27 nt, Artificial Sequence
  Description of Artificial Sequence: Synthetic oligonucleotide
gagugcuacaauacuugcuuugauguc

SEQ ID NO: 95229 - RNA, 27 nt, Artificial Sequence
  Description of Artificial Sequence: Synthetic oligonucleotide
auuugugguuuuguuuucucucucucu

SEQ ID NO: 95230 - RNA, 27 nt, Artificial Sequence
  Description of Artificial Sequence: Synthetic oligonucleotide
uguaugggcuuaaauacuacagcgagg

SEQ ID NO: 95231 - RNA, 27 nt, Artificial Sequence
  Description of Artificial Sequence: Synthetic oligonucleotide
cuguaugggcuuaaauacuacagcgag

SEQ ID NO: 95232 - RNA, 27 nt, Artificial Sequence
  Description of Artificial Sequence: Synthetic oligonucleotide
ggaagguuucuguaugggcuuaaauac

SEQ ID NO: 95233 - RNA, 27 nt, Artificial Sequence
  Description of Artificial Sequence: Synthetic oligonucleotide
guagguauaccauguuuauuuuaauac

SEQ ID NO: 95234 - RNA, 27 nt, Artificial Sequence
  Description of Artificial Sequence: Synthetic oligonucleotide
uccgaaaacuggccgaucagaacagcc

SEQ ID NO: 95235 - RNA, 27 nt, Artificial Sequence
  Description of Artificial Sequence: Synthetic oligonucleotide
cccuguuccaaaguucaaauuauuugu

SEQ ID NO: 95236 - RNA, 27 nt, Artificial Sequence
  Description of Artificial Sequence: Synthetic oligonucleotide
acuggaaaguuaaauuaaggucgcaau

SEQ ID NO: 95237 - RNA, 27 nt, Artificial Sequence
  Description of Artificial Sequence: Synthetic oligonucleotide
caaaaccaaacuuuagcuuucucagcc

SEQ ID NO: 95238 - RNA, 27 nt, Artificial Sequence
  Description of Artificial Sequence: Synthetic oligonucleotide
uacagugggaaguagcaucuuuacuuu

SEQ ID NO: 95239 - RNA, 27 nt, Artificial Sequence
  Description of Artificial Sequence: Synthetic oligonucleotide
ucauaugguaucagcaauuaagcagua

SEQ ID NO: 95240 - RNA, 27 nt, Artificial Sequence
  Description of Artificial Sequence: Synthetic oligonucleotide
cagcccauguuucauucauaugguauc

SEQ ID NO: 95241 - RNA, 27 nt, Artificial Sequence
  Description of Artificial Sequence: Synthetic oligonucleotide
uaugaaaaaguuggauaagaaaguugg

SEQ ID NO: 95242 - RNA, 27 nt, Artificial Sequence
  Description of Artificial Sequence: Synthetic oligonucleotide
uccggccucaugaugucaugcaaggcu

SEQ ID NO: 95243 - RNA, 27 nt, Artificial Sequence
  Description of Artificial Sequence: Synthetic oligonucleotide
acaaaugcagucauauacaaauucagg

SEQ ID NO: 95244 - RNA, 27 nt, Artificial Sequence
  Description of Artificial Sequence: Synthetic oligonucleotide
gguaguaaacauucuacuaggauucuu

SEQ ID NO: 95245 - RNA, 27 nt, Artificial Sequence
  Description of Artificial Sequence: Synthetic oligonucleotide
uuucaucaaaaaauucuucccuuucug

SEQ ID NO: 95246 - RNA, 27 nt, Artificial Sequence
  Description of Artificial Sequence: Synthetic oligonucleotide
aaauucacacacuggcaugccgauagc

SEQ ID NO: 95247 - RNA, 27 nt, Artificial Sequence
  Description of Artificial Sequence: Synthetic oligonucleotide
acauacauugcucuacuaugaggugaa

SEQ ID NO: 95248 - RNA, 27 nt, Artificial Sequence
  Description of Artificial Sequence: Synthetic oligonucleotide
uauauaugugcuuuggcaauucuggug

SEQ ID NO: 95249 - RNA, 27 nt, Artificial Sequence
  Description of Artificial Sequence: Synthetic oligonucleotide
ggagaaacuauuacccagaucaccacu

SEQ ID NO: 95250 - RNA, 27 nt, Artificial Sequence
  Description of Artificial Sequence: Synthetic oligonucleotide
auuuggagaaacuauuacccagaucac

SEQ ID NO: 95251 - RNA, 27 nt, Artificial Sequence
  Description of Artificial Sequence: Synthetic oligonucleotide
uuucuaggaaguauucaucacauccac

SEQ ID NO: 95252 - RNA, 27 nt, Artificial Sequence
  Description of Artificial Sequence: Synthetic oligonucleotide
cauauaugguguagcuguggaaaugcg

SEQ ID NO: 95253 - RNA, 27 nt, Artificial Sequence
  Description of Artificial Sequence: Synthetic oligonucleotide
cuccauucauauaugguguagcugugg

SEQ ID NO: 95254 - RNA, 27 nt, Artificial Sequence
  Description of Artificial Sequence: Synthetic oligonucleotide
aucuucuucucguguaagaacugcagc

SEQ ID NO: 95255 - RNA, 27 nt, Artificial Sequence
  Description of Artificial Sequence: Synthetic oligonucleotide
ucccuguaaaugaucuucuucucgugu

SEQ ID NO: 95256 - RNA, 27 nt, Artificial Sequence
  Description of Artificial Sequence: Synthetic oligonucleotide
gucccuguaaaugaucuucuucucgug

SEQ ID NO: 95257 - RNA, 27 nt, Artificial Sequence
  Description of Artificial Sequence: Synthetic oligonucleotide
ucaggucccuguaaaugaucuucuucu

SEQ ID NO: 95258 - RNA, 27 nt, Artificial Sequence
  Description of Artificial Sequence: Synthetic oligonucleotide
gaugcagucaaacaccucuuccucugu

SEQ ID NO: 95259 - RNA, 27 nt, Artificial Sequence
  Description of Artificial Sequence: Synthetic oligonucleotide
cgaugcagucaaacaccucuuccucug

SEQ ID NO: 95260 - RNA, 27 nt, Artificial Sequence
  Description of Artificial Sequence: Synthetic oligonucleotide
cccugugaacucgcccucaaaguagcg

SEQ ID NO: 95261 - RNA, 27 nt, Artificial Sequence
  Description of Artificial Sequence: Synthetic oligonucleotide
ggacagaggugccaggagaugcccuca

SEQ ID NO: 95262 - RNA, 27 nt, Artificial Sequence
  Description of Artificial Sequence: Synthetic oligonucleotide
uuaaaaagacaaaccauaucacuccuu

SEQ ID NO: 95263 - RNA, 27 nt, Artificial Sequence
  Description of Artificial Sequence: Synthetic oligonucleotide
cuuaaaaagacaaaccauaucacuccu

SEQ ID NO: 95264 - RNA, 27 nt, Artificial Sequence
  Description of Artificial Sequence: Synthetic oligonucleotide
gacaaccuuuaggaucuuuacugcaac

SEQ ID NO: 95265 - RNA, 27 nt, Artificial Sequence
  Description of Artificial Sequence: Synthetic oligonucleotide
gucgacaaccuuuaggaucuuuacugc

SEQ ID NO: 95266 - RNA, 27 nt, Artificial Sequence
  Description of Artificial Sequence: Synthetic oligonucleotide
acaauugccagguuguccuuugucaug

SEQ ID NO: 95267 - RNA, 27 nt, Artificial Sequence
  Description of Artificial Sequence: Synthetic oligonucleotide
ccucgcaccacugggucacaauugcca

SEQ ID NO: 95268 - RNA, 27 nt, Artificial Sequence
  Description of Artificial Sequence: Synthetic oligonucleotide
auuucaugucucuauggaugauguucu

SEQ ID NO: 95269 - RNA, 27 nt, Artificial Sequence
  Description of Artificial Sequence: Synthetic oligonucleotide
uggagaaauauauuguuggauuucaug

SEQ ID NO: 95270 - RNA, 27 nt, Artificial Sequence
  Description of Artificial Sequence: Synthetic oligonucleotide
agccuucauggagaaauauauuguugg

SEQ ID NO: 95271 - RNA, 27 nt, Artificial Sequence
  Description of Artificial Sequence: Synthetic oligonucleotide
accacuccagcgugacuuuacuguugc

SEQ ID NO: 95272 - RNA, 27 nt, Artificial Sequence
  Description of Artificial Sequence: Synthetic oligonucleotide
ccucucuuccuuuacuuucuucacaca

SEQ ID NO: 95273 - RNA, 27 nt, Artificial Sequence
  Description of Artificial Sequence: Synthetic oligonucleotide
gcccgaugcaaggauggcucggaagcg

SEQ ID NO: 95274 - RNA, 27 nt, Artificial Sequence
  Description of Artificial Sequence: Synthetic oligonucleotide
cacaguaggauauucaaccuccauuuc

SEQ ID NO: 95275 - RNA, 27 nt, Artificial Sequence
  Description of Artificial Sequence: Synthetic oligonucleotide
uuacacaguaggauauucaaccuccau

SEQ ID NO: 95276 - RNA, 27 nt, Artificial Sequence
  Description of Artificial Sequence: Synthetic oligonucleotide
uacacuacaagggaaaacucaaaaucu

SEQ ID NO: 95277 - RNA, 27 nt, Artificial Sequence
  Description of Artificial Sequence: Synthetic oligonucleotide
caaucaacaaagaacaaacaggauaaa

SEQ ID NO: 95278 - RNA, 27 nt, Artificial Sequence
  Description of Artificial Sequence: Synthetic oligonucleotide
uuucaaucaacaaagaacaaacaggau

SEQ ID NO: 95279 - RNA, 27 nt, Artificial Sequence
  Description of Artificial Sequence: Synthetic oligonucleotide
auggaagaaaaagaaggcuguagagaa

SEQ ID NO: 95280 - RNA, 27 nt, Artificial Sequence
  Description of Artificial Sequence: Synthetic oligonucleotide
uagaaggaagauuagcuauggaagaaa

SEQ ID NO: 95281 - RNA, 27 nt, Artificial Sequence
  Description of Artificial Sequence: Synthetic oligonucleotide
augaagcauucaacaggaagauuauuu

SEQ ID NO: 95282 - RNA, 27 nt, Artificial Sequence
  Description of Artificial Sequence: Synthetic oligonucleotide
caugaagcauucaacaggaagauuauu

SEQ ID NO: 95283 - RNA, 27 nt, Artificial Sequence
  Description of Artificial Sequence: Synthetic oligonucleotide
ucaaaguagaauucaagucaugaagca

SEQ ID NO: 95284 - RNA, 27 nt, Artificial Sequence
  Description of Artificial Sequence: Synthetic oligonucleotide
gucuguaguugcuucucucccucuuag

SEQ ID NO: 95285 - RNA, 27 nt, Artificial Sequence
  Description of Artificial Sequence: Synthetic oligonucleotide
guugaccuuggucugguaggagacggc

SEQ ID NO: 95286 - RNA, 27 nt, Artificial Sequence
  Description of Artificial Sequence: Synthetic oligonucleotide
gucgagauagucgggccgauugaucuc

SEQ ID NO: 95287 - RNA, 27 nt, Artificial Sequence
  Description of Artificial Sequence: Synthetic oligonucleotide
guuugggaagguuggauguucguccuc

SEQ ID NO: 95288 - RNA, 27 nt, Artificial Sequence
  Description of Artificial Sequence: Synthetic oligonucleotide
aguucuaagcuuggguuccgacccuaa

SEQ ID NO: 95289 - RNA, 27 nt, Artificial Sequence
  Description of Artificial Sequence: Synthetic oligonucleotide
uuaaaguucuaagcuuggguuccgacc

SEQ ID NO: 95290 - RNA, 27 nt, Artificial Sequence
  Description of Artificial Sequence: Synthetic oligonucleotide
guugcuuaaaguucuaagcuuggguuc

SEQ ID NO: 95291 - RNA, 27 nt, Artificial Sequence
  Description of Artificial Sequence: Synthetic oligonucleotide
gugguggucuuguugcuuaaaguucua

SEQ ID NO: 95292 - RNA, 27 nt, Artificial Sequence
  Description of Artificial Sequence: Synthetic oligonucleotide
acuuuauuucucgccacugaauaguag

SEQ ID NO: 95293 - RNA, 27 nt, Artificial Sequence
  Description of Artificial Sequence: Synthetic oligonucleotide
aacuuuauuucucgccacugaauagua

SEQ ID NO: 95294 - RNA, 27 nt, Artificial Sequence
  Description of Artificial Sequence: Synthetic oligonucleotide
ggaucauuuccuguuaucuguguuugu

SEQ ID NO: 95295 - RNA, 27 nt, Artificial Sequence
  Description of Artificial Sequence: Synthetic oligonucleotide
guuucauuucuucucuuuucuuaaggc

SEQ ID NO: 95296 - RNA, 27 nt, Artificial Sequence
  Description of Artificial Sequence: Synthetic oligonucleotide
ggaggauggaaacacacuccuucaguu

SEQ ID NO: 95297 - RNA, 27 nt, Artificial Sequence
  Description of Artificial Sequence: Synthetic oligonucleotide
ucaaagauuuucagucccgcggugaca

SEQ ID NO: 95298 - RNA, 27 nt, Artificial Sequence
  Description of Artificial Sequence: Synthetic oligonucleotide
ccugaacggcacgcuuauuucugcugu

SEQ ID NO: 95299 - RNA, 27 nt, Artificial Sequence
  Description of Artificial Sequence: Synthetic oligonucleotide
cuucuggacccugaacggcacgcuuau

SEQ ID NO: 95300 - RNA, 27 nt, Artificial Sequence
  Description of Artificial Sequence: Synthetic oligonucleotide
caagcagucuugagugacuguuucuuc

SEQ ID NO: 95301 - RNA, 27 nt, Artificial Sequence
  Description of Artificial Sequence: Synthetic oligonucleotide
ccaaagacauggaccuucuuccucuga

SEQ ID NO: 95302 - RNA, 27 nt, Artificial Sequence
  Description of Artificial Sequence: Synthetic oligonucleotide
guguuucaggcauauuuugaauacauc

SEQ ID NO: 95303 - RNA, 27 nt, Artificial Sequence
  Description of Artificial Sequence: Synthetic oligonucleotide
gagguacagagaaagggaggaaaauag

SEQ ID NO: 95304 - RNA, 27 nt, Artificial Sequence
  Description of Artificial Sequence: Synthetic oligonucleotide
ucuugucuugcucuaucuuucuuuggu

SEQ ID NO: 95305 - RNA, 27 nt, Artificial Sequence
  Description of Artificial Sequence: Synthetic oligonucleotide
uuucuugucuugcucuaucuuucuuug

SEQ ID NO: 95306 - RNA, 27 nt, Artificial Sequence
  Description of Artificial Sequence: Synthetic oligonucleotide
ggaucuuguacaaacaaaugcuuucuc

SEQ ID NO: 95307 - RNA, 27 nt, Artificial Sequence
  Description of Artificial Sequence: Synthetic oligonucleotide
ucugcaaguacguucguuuaacucaag

SEQ ID NO: 95308 - RNA, 27 nt, Artificial Sequence
  Description of Artificial Sequence: Synthetic oligonucleotide
ucuguaucgaucguucuguaucagucu

SEQ ID NO: 95309 - RNA, 27 nt, Artificial Sequence
  Description of Artificial Sequence: Synthetic oligonucleotide
auuuauuuuuauauauauauaauauau

SEQ ID NO: 95310 - RNA, 27 nt, Artificial Sequence
  Description of Artificial Sequence: Synthetic oligonucleotide
auauuuauuuuuauauauauauaauau

SEQ ID NO: 95311 - RNA, 27 nt, Artificial Sequence
  Description of Artificial Sequence: Synthetic oligonucleotide
cacagcagucaaauacauccagugaag

SEQ ID NO: 95312 - RNA, 27 nt, Artificial Sequence
  Description of Artificial Sequence: Synthetic oligonucleotide
gucucucaucuccuccucuucccuguc

SEQ ID NO: 95313 - RNA, 27 nt, Artificial Sequence
  Description of Artificial Sequence: Synthetic oligonucleotide
ccaagugggacaaaaaaaagaucaugc

SEQ ID NO: 95314 - RNA, 14 nt, Artificial Sequence
  Description of Artificial Sequence: Synthetic oligonucleotide
guauuuugaugagg

SEQ ID NO: 95315 - RNA, 12 nt, Artificial Sequence
  Description of Artificial Sequence: Synthetic oligonucleotide
ggcccagaugau

SEQ ID NO: 95316 - RNA, 14 nt, Artificial Sequence
  Description of Artificial Sequence: Synthetic oligonucleotide
gggaagaaaacuau

SEQ ID NO: 95317 - RNA, 15 nt, Artificial Sequence
  Description of Artificial Sequence: Synthetic oligonucleotide
guuuuaauuuauuuc

SEQ ID NO: 95318 - RNA, 12 nt, Artificial Sequence
  Description of Artificial Sequence: Synthetic oligonucleotide
acguagggaaau

SEQ ID NO: 95319 - RNA, 12 nt, Artificial Sequence
  Description of Artificial Sequence: Synthetic oligonucleotide
ccaggguuuacc

SEQ ID NO: 95320 - RNA, 11 nt, Artificial Sequence
  Description of Artificial Sequence: Synthetic oligonucleotide
agcaagguuua

SEQ ID NO: 95321 - RNA, 12 nt, Artificial Sequence
  Description of Artificial Sequence: Synthetic oligonucleotide
uguauuauguug

SEQ ID NO: 95322 - RNA, 15 nt, Artificial Sequence
  Description of Artificial Sequence: Synthetic oligonucleotide
uuuuaaucuuuguga

SEQ ID NO: 95323 - RNA, 14 nt, Artificial Sequence
  Description of Artificial Sequence: Synthetic oligonucleotide
uuaaucuuugugac

SEQ ID NO: 95324 - RNA, 13 nt, Artificial Sequence
  Description of Artificial Sequence: Synthetic oligonucleotide
gcugcuuaugucu

SEQ ID NO: 95325 - RNA, 14 nt, Artificial Sequence
  Description of Artificial Sequence: Synthetic oligonucleotide
aaguguuucagaag

SEQ ID NO: 95326 - RNA, 13 nt, Artificial Sequence
  Description of Artificial Sequence: Synthetic oligonucleotide
gaccaucaauaag

SEQ ID NO: 95327 - RNA, 13 nt, Artificial Sequence
  Description of Artificial Sequence: Synthetic oligonucleotide
ccaucaauaagga

SEQ ID NO: 95328 - RNA, 14 nt, Artificial Sequence
  Description of Artificial Sequence: Synthetic oligonucleotide
ucaauaaggaagaa

SEQ ID NO: 95329 - RNA, 14 nt, Artificial Sequence
  Description of Artificial Sequence: Synthetic oligonucleotide
aauaaggaagaagc

SEQ ID NO: 95330 - RNA, 13 nt, Artificial Sequence
  Description of Artificial Sequence: Synthetic oligonucleotide
aggaagaagcccu

SEQ ID NO: 95331 - RNA, 13 nt, Artificial Sequence
  Description of Artificial Sequence: Synthetic oligonucleotide
gcauaacuaaagg

SEQ ID NO: 95332 - RNA, 14 nt, Artificial Sequence
  Description of Artificial Sequence: Synthetic oligonucleotide
cauaacuaaaggug

SEQ ID NO: 95333 - RNA, 12 nt, Artificial Sequence
  Description of Artificial Sequence: Synthetic oligonucleotide
cuacaucacgcc

SEQ ID NO: 95334 - RNA, 12 nt, Artificial Sequence
  Description of Artificial Sequence: Synthetic oligonucleotide
acuggauuuaag

SEQ ID NO: 95335 - RNA, 12 nt, Artificial Sequence
  Description of Artificial Sequence: Synthetic oligonucleotide
cuggauuuaagc

SEQ ID NO: 95336 - RNA, 13 nt, Artificial Sequence
  Description of Artificial Sequence: Synthetic oligonucleotide
gauuuaagcagag

SEQ ID NO: 95337 - RNA, 13 nt, Artificial Sequence
  Description of Artificial Sequence: Synthetic oligonucleotide
auuuaagcagagu

SEQ ID NO: 95338 - RNA, 13 nt, Artificial Sequence
  Description of Artificial Sequence: Synthetic oligonucleotide
uuaagcagaguuc

SEQ ID NO: 95339 - RNA, 13 nt, Artificial Sequence
  Description of Artificial Sequence: Synthetic oligonucleotide
uaagcagaguuca

SEQ ID NO: 95340 - RNA, 14 nt, Artificial Sequence
  Description of Artificial Sequence: Synthetic oligonucleotide
agcagaguucaaaa

SEQ ID NO: 95341 - RNA, 12 nt, Artificial Sequence
  Description of Artificial Sequence: Synthetic oligonucleotide
cucagggucuga

SEQ ID NO: 95342 - RNA, 13 nt, Artificial Sequence
  Description of Artificial Sequence: Synthetic oligonucleotide
caagcaacuacau

SEQ ID NO: 95343 - RNA, 12 nt, Artificial Sequence
  Description of Artificial Sequence: Synthetic oligonucleotide
aucaauggcagc

SEQ ID NO: 95344 - RNA, 11 nt, Artificial Sequence
  Description of Artificial Sequence: Synthetic oligonucleotide
uuccagcccac

SEQ ID NO: 95345 - RNA, 12 nt, Artificial Sequence
  Description of Artificial Sequence: Synthetic oligonucleotide
cagcugagaaug

SEQ ID NO: 95346 - RNA, 13 nt, Artificial Sequence
  Description of Artificial Sequence: Synthetic oligonucleotide
aacguaucuccua

SEQ ID NO: 95347 - RNA, 14 nt, Artificial Sequence
  Description of Artificial Sequence: Synthetic oligonucleotide
ccuaaaauaauuuc

SEQ ID NO: 95348 - RNA, 13 nt, Artificial Sequence
  Description of Artificial Sequence: Synthetic oligonucleotide
uggaagauucagc

SEQ ID NO: 95349 - RNA, 12 nt, Artificial Sequence
  Description of Artificial Sequence: Synthetic oligonucleotide
uuaaacucuccu

SEQ ID NO: 95350 - RNA, 12 nt, Artificial Sequence
  Description of Artificial Sequence: Synthetic oligonucleotide
cagccuacaguu

SEQ ID NO: 95351 - RNA, 13 nt, Artificial Sequence
  Description of Artificial Sequence: Synthetic oligonucleotide
guuauguucaguc

SEQ ID NO: 95352 - RNA, 13 nt, Artificial Sequence
  Description of Artificial Sequence: Synthetic oligonucleotide
cacauacaaaaug

SEQ ID NO: 95353 - RNA, 9 nt, Artificial Sequence
  Description of Artificial Sequence: Synthetic oligonucleotide
uccuuuugc

SEQ ID NO: 95354 - RNA, 12 nt, Artificial Sequence
  Description of Artificial Sequence: Synthetic oligonucleotide
ugaccugugaag

SEQ ID NO: 95355 - RNA, 12 nt, Artificial Sequence
  Description of Artificial Sequence: Synthetic oligonucleotide
cuaucucacaca

SEQ ID NO: 95356 - RNA, 13 nt, Artificial Sequence
  Description of Artificial Sequence: Synthetic oligonucleotide
uguccucaauugu

SEQ ID NO: 95357 - RNA, 12 nt, Artificial Sequence
  Description of Artificial Sequence: Synthetic oligonucleotide
aaaccguagcug

SEQ ID NO: 95358 - RNA, 12 nt, Artificial Sequence
  Description of Artificial Sequence: Synthetic oligonucleotide
uagcuggcaagc

SEQ ID NO: 95359 - RNA, 14 nt, Artificial Sequence
  Description of Artificial Sequence: Synthetic oligonucleotide
uuguaugguuaaaa

SEQ ID NO: 95360 - RNA, 14 nt, Artificial Sequence
  Description of Artificial Sequence: Synthetic oligonucleotide
ugguuaaaagaugg

SEQ ID NO: 95361 - RNA, 13 nt, Artificial Sequence
  Description of Artificial Sequence: Synthetic oligonucleotide
cagggaauuauac

SEQ ID NO: 95362 - RNA, 12 nt, Artificial Sequence
  Description of Artificial Sequence: Synthetic oligonucleotide
acaaucuugcug

SEQ ID NO: 95363 - RNA, 13 nt, Artificial Sequence
  Description of Artificial Sequence: Synthetic oligonucleotide
ccaauaaugaaga

SEQ ID NO: 95364 - RNA, 13 nt, Artificial Sequence
  Description of Artificial Sequence: Synthetic oligonucleotide
acuuuggauguuc

SEQ ID NO: 95365 - RNA, 12 nt, Artificial Sequence
  Description of Artificial Sequence: Synthetic oligonucleotide
aaugcuuccacu

SEQ ID NO: 95366 - RNA, 11 nt, Artificial Sequence
  Description of Artificial Sequence: Synthetic oligonucleotide
gagaaaguuug

SEQ ID NO: 95367 - RNA, 11 nt, Artificial Sequence
  Description of Artificial Sequence: Synthetic oligonucleotide
aaagaacuacu

SEQ ID NO: 95368 - RNA, 12 nt, Artificial Sequence
  Description of Artificial Sequence: Synthetic oligonucleotide
uuagaaauacgg

SEQ ID NO: 95369 - RNA, 12 nt, Artificial Sequence
  Description of Artificial Sequence: Synthetic oligonucleotide
aacauggguaca

SEQ ID NO: 95370 - RNA, 14 nt, Artificial Sequence
  Description of Artificial Sequence: Synthetic oligonucleotide
aaagacacagaaga

SEQ ID NO: 95371 - RNA, 11 nt, Artificial Sequence
  Description of Artificial Sequence: Synthetic oligonucleotide
uaguagggagg

SEQ ID NO: 95372 - RNA, 12 nt, Artificial Sequence
  Description of Artificial Sequence: Synthetic oligonucleotide
gccuucugcagc

SEQ ID NO: 95373 - RNA, 10 nt, Artificial Sequence
  Description of Artificial Sequence: Synthetic oligonucleotide
ggucugguac

SEQ ID NO: 95374 - RNA, 12 nt, Artificial Sequence
  Description of Artificial Sequence: Synthetic oligonucleotide
cuaguccuuccg

SEQ ID NO: 95375 - RNA, 12 nt, Artificial Sequence
  Description of Artificial Sequence: Synthetic oligonucleotide
ccagugaauauu

SEQ ID NO: 95376 - RNA, 13 nt, Artificial Sequence
  Description of Artificial Sequence: Synthetic oligonucleotide
augaauucaaguu

SEQ ID NO: 95377 - RNA, 12 nt, Artificial Sequence
  Description of Artificial Sequence: Synthetic oligonucleotide
caggacacagau

SEQ ID NO: 95378 - RNA, 12 nt, Artificial Sequence
  Description of Artificial Sequence: Synthetic oligonucleotide
cucaaagcacag

SEQ ID NO: 95379 - RNA, 10 nt, Artificial Sequence
  Description of Artificial Sequence: Synthetic oligonucleotide
accacugcca

SEQ ID NO: 95380 - RNA, 13 nt, Artificial Sequence
  Description of Artificial Sequence: Synthetic oligonucleotide
gaaacuacuagug

SEQ ID NO: 95381 - RNA, 12 nt, Artificial Sequence
  Description of Artificial Sequence: Synthetic oligonucleotide
aagucggacagc

SEQ ID NO: 95382 - RNA, 13 nt, Artificial Sequence
  Description of Artificial Sequence: Synthetic oligonucleotide
gaaagcgaaaaau

SEQ ID NO: 95383 - RNA, 13 nt, Artificial Sequence
  Description of Artificial Sequence: Synthetic oligonucleotide
cccucugauuuag

SEQ ID NO: 95384 - RNA, 12 nt, Artificial Sequence
  Description of Artificial Sequence: Synthetic oligonucleotide
ugagcuauuuaa

SEQ ID NO: 95385 - RNA, 13 nt, Artificial Sequence
  Description of Artificial Sequence: Synthetic oligonucleotide
aaaaggugaaaaa

SEQ ID NO: 95386 - RNA, 14 nt, Artificial Sequence
  Description of Artificial Sequence: Synthetic oligonucleotide
gaaaaagcacuauu

SEQ ID NO: 95387 - RNA, 12 nt, Artificial Sequence
  Description of Artificial Sequence: Synthetic oligonucleotide
ggcugaaaagaa

SEQ ID NO: 95388 - RNA, 12 nt, Artificial Sequence
  Description of Artificial Sequence: Synthetic oligonucleotide
uaaacccuuaua

SEQ ID NO: 95389 - RNA, 13 nt, Artificial Sequence
  Description of Artificial Sequence: Synthetic oligonucleotide
cauacuauuagcc

SEQ ID NO: 95390 - RNA, 12 nt, Artificial Sequence
  Description of Artificial Sequence: Synthetic oligonucleotide
gacagaagcauu

SEQ ID NO: 95391 - RNA, 14 nt, Artificial Sequence
  Description of Artificial Sequence: Synthetic oligonucleotide
agagcaaauaagau

SEQ ID NO: 95392 - RNA, 14 nt, Artificial Sequence
  Description of Artificial Sequence: Synthetic oligonucleotide
ccaacauuuuucuc

SEQ ID NO: 95393 - RNA, 15 nt, Artificial Sequence
  Description of Artificial Sequence: Synthetic oligonucleotide
uuaaguaugagaaaa

SEQ ID NO: 95394 - RNA, 14 nt, Artificial Sequence
  Description of Artificial Sequence: Synthetic oligonucleotide
caggaauaaagaug

SEQ ID NO: 95395 - RNA, 13 nt, Artificial Sequence
  Description of Artificial Sequence: Synthetic oligonucleotide
aauuugaaugacc

SEQ ID NO: 95396 - RNA, 14 nt, Artificial Sequence
  Description of Artificial Sequence: Synthetic oligonucleotide
auguauaaagauag

SEQ ID NO: 95397 - RNA, 12 nt, Artificial Sequence
  Description of Artificial Sequence: Synthetic oligonucleotide
ggcuguaacuau

SEQ ID NO: 95398 - RNA, 11 nt, Artificial Sequence
  Description of Artificial Sequence: Synthetic oligonucleotide
ucugugaagug

SEQ ID NO: 95399 - RNA, 14 nt, Artificial Sequence
  Description of Artificial Sequence: Synthetic oligonucleotide
ccuuuaaggaaaug

SEQ ID NO: 95400 - RNA, 13 nt, Artificial Sequence
  Description of Artificial Sequence: Synthetic oligonucleotide
aaggauacaaaaa

SEQ ID NO: 95401 - RNA, 12 nt, Artificial Sequence
  Description of Artificial Sequence: Synthetic oligonucleotide
agaugcaauuug

SEQ ID NO: 95402 - RNA, 12 nt, Artificial Sequence
  Description of Artificial Sequence: Synthetic oligonucleotide
guucaaaacgaa

SEQ ID NO: 95403 - RNA, 11 nt, Artificial Sequence
  Description of Artificial Sequence: Synthetic oligonucleotide
gugaaaccuca

SEQ ID NO: 95404 - RNA, 13 nt, Artificial Sequence
  Description of Artificial Sequence: Synthetic oligonucleotide
acgaaagagaagc

SEQ ID NO: 95405 - RNA, 12 nt, Artificial Sequence
  Description of Artificial Sequence: Synthetic oligonucleotide
cuccacaagcgc

SEQ ID NO: 95406 - RNA, 14 nt, Artificial Sequence
  Description of Artificial Sequence: Synthetic oligonucleotide
gagaagauuccaaa

SEQ ID NO: 95407 - RNA, 13 nt, Artificial Sequence
  Description of Artificial Sequence: Synthetic oligonucleotide
aaucuggauucaa

SEQ ID NO: 95408 - RNA, 13 nt, Artificial Sequence
  Description of Artificial Sequence: Synthetic oligonucleotide
agaacagauuuga

SEQ ID NO: 95409 - RNA, 11 nt, Artificial Sequence
  Description of Artificial Sequence: Synthetic oligonucleotide
ccagagcugug

SEQ ID NO: 95410 - RNA, 12 nt, Artificial Sequence
  Description of Artificial Sequence: Synthetic oligonucleotide
ccucagauuguu

SEQ ID NO: 95411 - RNA, 12 nt, Artificial Sequence
  Description of Artificial Sequence: Synthetic oligonucleotide
cuauuuuaauua

SEQ ID NO: 95412 - RNA, 13 nt, Artificial Sequence
  Description of Artificial Sequence: Synthetic oligonucleotide
uuuaauuuauuaa

SEQ ID NO: 95413 - RNA, 12 nt, Artificial Sequence
  Description of Artificial Sequence: Synthetic oligonucleotide
augcaguuugaa

SEQ ID NO: 95414 - RNA, 11 nt, Artificial Sequence
  Description of Artificial Sequence: Synthetic oligonucleotide
caugcugcugg

SEQ ID NO: 95415 - RNA, 13 nt, Artificial Sequence
  Description of Artificial Sequence: Synthetic oligonucleotide
agaugugcauuuc

SEQ ID NO: 95416 - RNA, 12 nt, Artificial Sequence
  Description of Artificial Sequence: Synthetic oligonucleotide
ucaaaaccugug

SEQ ID NO: 95417 - RNA, 11 nt, Artificial Sequence
  Description of Artificial Sequence: Synthetic oligonucleotide
gaaugugggua

SEQ ID NO: 95418 - RNA, 10 nt, Artificial Sequence
  Description of Artificial Sequence: Synthetic oligonucleotide
auguggguag

SEQ ID NO: 95419 - RNA, 13 nt, Artificial Sequence
  Description of Artificial Sequence: Synthetic oligonucleotide
ugaaaaugagcau

SEQ ID NO: 95420 - RNA, 13 nt, Artificial Sequence
  Description of Artificial Sequence: Synthetic oligonucleotide
uugcuuuucaugu

SEQ ID NO: 95421 - RNA, 12 nt, Artificial Sequence
  Description of Artificial Sequence: Synthetic oligonucleotide
uguauuucuaua

SEQ ID NO: 95422 - RNA, 13 nt, Artificial Sequence
  Description of Artificial Sequence: Synthetic oligonucleotide
uuugauuaauguu

SEQ ID NO: 95423 - RNA, 12 nt, Artificial Sequence
  Description of Artificial Sequence: Synthetic oligonucleotide
caacguguauag

SEQ ID NO: 95424 - RNA, 12 nt, Artificial Sequence
  Description of Artificial Sequence: Synthetic oligonucleotide
cauauccuuggc

SEQ ID NO: 95425 - RNA, 13 nt, Artificial Sequence
  Description of Artificial Sequence: Synthetic oligonucleotide
uacuaacaucugg

SEQ ID NO: 95426 - RNA, 11 nt, Artificial Sequence
  Description of Artificial Sequence: Synthetic oligonucleotide
cauaaguugug

SEQ ID NO: 95427 - RNA, 12 nt, Artificial Sequence
  Description of Artificial Sequence: Synthetic oligonucleotide
gcaucauuuugg

SEQ ID NO: 95428 - RNA, 10 nt, Artificial Sequence
  Description of Artificial Sequence: Synthetic oligonucleotide
gcucuucuua

SEQ ID NO: 95429 - RNA, 10 nt, Artificial Sequence
  Description of Artificial Sequence: Synthetic oligonucleotide
agauuagguc

SEQ ID NO: 95430 - RNA, 12 nt, Artificial Sequence
  Description of Artificial Sequence: Synthetic oligonucleotide
auggaauugaaa

SEQ ID NO: 95431 - RNA, 13 nt, Artificial Sequence
  Description of Artificial Sequence: Synthetic oligonucleotide
cacacucauuccu

SEQ ID NO: 95432 - RNA, 12 nt, Artificial Sequence
  Description of Artificial Sequence: Synthetic oligonucleotide
uguagagguaac

SEQ ID NO: 95433 - RNA, 11 nt, Artificial Sequence
  Description of Artificial Sequence: Synthetic oligonucleotide
caaccacaugc

SEQ ID NO: 95434 - RNA, 12 nt, Artificial Sequence
  Description of Artificial Sequence: Synthetic oligonucleotide
ucggaaacaagu

SEQ ID NO: 95435 - RNA, 11 nt, Artificial Sequence
  Description of Artificial Sequence: Synthetic oligonucleotide
acucccaauaa

SEQ ID NO: 95436 - RNA, 13 nt, Artificial Sequence
  Description of Artificial Sequence: Synthetic oligonucleotide
aaugcuaagaaau

SEQ ID NO: 95437 - RNA, 11 nt, Artificial Sequence
  Description of Artificial Sequence: Synthetic oligonucleotide
gucuuucucua

SEQ ID NO: 95438 - RNA, 11 nt, Artificial Sequence
  Description of Artificial Sequence: Synthetic oligonucleotide
ugaauuucagg

SEQ ID NO: 95439 - RNA, 13 nt, Artificial Sequence
  Description of Artificial Sequence: Synthetic oligonucleotide
cgauucccucuca

SEQ ID NO: 95440 - RNA, 11 nt, Artificial Sequence
  Description of Artificial Sequence: Synthetic oligonucleotide
aggaaagugaa

SEQ ID NO: 95441 - RNA, 12 nt, Artificial Sequence
  Description of Artificial Sequence: Synthetic oligonucleotide
gaggcugcaugc

SEQ ID NO: 95442 - RNA, 11 nt, Artificial Sequence
  Description of Artificial Sequence: Synthetic oligonucleotide
ucucugaacag

SEQ ID NO: 95443 - RNA, 12 nt, Artificial Sequence
  Description of Artificial Sequence: Synthetic oligonucleotide
aacuuggcugua

SEQ ID NO: 95444 - RNA, 12 nt, Artificial Sequence
  Description of Artificial Sequence: Synthetic oligonucleotide
agaagccaaaau

SEQ ID NO: 95445 - RNA, 14 nt, Artificial Sequence
  Description of Artificial Sequence: Synthetic oligonucleotide
auuaaaagaagucc

SEQ ID NO: 95446 - RNA, 14 nt, Artificial Sequence
  Description of Artificial Sequence: Synthetic oligonucleotide
gaauccggauuauc

SEQ ID NO: 95447 - RNA, 12 nt, Artificial Sequence
  Description of Artificial Sequence: Synthetic oligonucleotide
aaugugacauca

SEQ ID NO: 95448 - RNA, 13 nt, Artificial Sequence
  Description of Artificial Sequence: Synthetic oligonucleotide
caucaaagcaagu

SEQ ID NO: 95449 - RNA, 11 nt, Artificial Sequence
  Description of Artificial Sequence: Synthetic oligonucleotide
agagagagaaa

SEQ ID NO: 95450 - RNA, 13 nt, Artificial Sequence
  Description of Artificial Sequence: Synthetic oligonucleotide
ucgcuguaguauu

SEQ ID NO: 95451 - RNA, 14 nt, Artificial Sequence
  Description of Artificial Sequence: Synthetic oligonucleotide
cgcuguaguauuua

SEQ ID NO: 95452 - RNA, 13 nt, Artificial Sequence
  Description of Artificial Sequence: Synthetic oligonucleotide
auuuaagcccaua

SEQ ID NO: 95453 - RNA, 15 nt, Artificial Sequence
  Description of Artificial Sequence: Synthetic oligonucleotide
auuaaaauaaacaug

SEQ ID NO: 95454 - RNA, 12 nt, Artificial Sequence
  Description of Artificial Sequence: Synthetic oligonucleotide
cuguucugaucg

SEQ ID NO: 95455 - RNA, 16 nt, Artificial Sequence
  Description of Artificial Sequence: Synthetic oligonucleotide
aaauaauuugaacuuu

SEQ ID NO: 95456 - RNA, 12 nt, Artificial Sequence
  Description of Artificial Sequence: Synthetic oligonucleotide
ugcgaccuuaau

SEQ ID NO: 95457 - RNA, 11 nt, Artificial Sequence
  Description of Artificial Sequence: Synthetic oligonucleotide
cugagaaagcu

SEQ ID NO: 95458 - RNA, 13 nt, Artificial Sequence
  Description of Artificial Sequence: Synthetic oligonucleotide
aguaaagaugcua

SEQ ID NO: 95459 - RNA, 12 nt, Artificial Sequence
  Description of Artificial Sequence: Synthetic oligonucleotide
cugcuuaauugc

SEQ ID NO: 95460 - RNA, 14 nt, Artificial Sequence
  Description of Artificial Sequence: Synthetic oligonucleotide
uaccauaugaauga

SEQ ID NO: 95461 - RNA, 12 nt, Artificial Sequence
  Description of Artificial Sequence: Synthetic oligonucleotide
aacuuucuuauc

SEQ ID NO: 95462 - RNA, 13 nt, Artificial Sequence
  Description of Artificial Sequence: Synthetic oligonucleotide
ccuugcaugacau

SEQ ID NO: 95463 - RNA, 14 nt, Artificial Sequence
  Description of Artificial Sequence: Synthetic oligonucleotide
ugaauuuguauaug

SEQ ID NO: 95464 - RNA, 12 nt, Artificial Sequence
  Description of Artificial Sequence: Synthetic oligonucleotide
gaauccuaguag

SEQ ID NO: 95465 - RNA, 10 nt, Artificial Sequence
  Description of Artificial Sequence: Synthetic oligonucleotide
gaaagggaag

SEQ ID NO: 95466 - RNA, 11 nt, Artificial Sequence
  Description of Artificial Sequence: Synthetic oligonucleotide
uaucggcaugc

SEQ ID NO: 95467 - RNA, 12 nt, Artificial Sequence
  Description of Artificial Sequence: Synthetic oligonucleotide
caccucauagua

SEQ ID NO: 95468 - RNA, 11 nt, Artificial Sequence
  Description of Artificial Sequence: Synthetic oligonucleotide
ccagaauugcc

SEQ ID NO: 95469 - RNA, 11 nt, Artificial Sequence
  Description of Artificial Sequence: Synthetic oligonucleotide
uggugaucugg

SEQ ID NO: 95470 - RNA, 12 nt, Artificial Sequence
  Description of Artificial Sequence: Synthetic oligonucleotide
gaucuggguaau

SEQ ID NO: 95471 - RNA, 12 nt, Artificial Sequence
  Description of Artificial Sequence: Synthetic oligonucleotide
ggaugugaugaa

SEQ ID NO: 95472 - RNA, 12 nt, Artificial Sequence
  Description of Artificial Sequence: Synthetic oligonucleotide
cauuuccacagc

SEQ ID NO: 95473 - RNA, 11 nt, Artificial Sequence
  Description of Artificial Sequence: Synthetic oligonucleotide
acagcuacacc

SEQ ID NO: 95474 - RNA, 12 nt, Artificial Sequence
  Description of Artificial Sequence: Synthetic oligonucleotide
ugcaguucuuac

SEQ ID NO: 95475 - RNA, 12 nt, Artificial Sequence
  Description of Artificial Sequence: Synthetic oligonucleotide
acgagaagaaga

SEQ ID NO: 95476 - RNA, 12 nt, Artificial Sequence
  Description of Artificial Sequence: Synthetic oligonucleotide
cgagaagaagau

SEQ ID NO: 95477 - RNA, 15 nt, Artificial Sequence
  Description of Artificial Sequence: Synthetic oligonucleotide
aagaagaucauuuac

SEQ ID NO: 95478 - RNA, 11 nt, Artificial Sequence
  Description of Artificial Sequence: Synthetic oligonucleotide
agaggaagagg

SEQ ID NO: 95479 - RNA, 12 nt, Artificial Sequence
  Description of Artificial Sequence: Synthetic oligonucleotide
gaggaagaggug

SEQ ID NO: 95480 - RNA, 13 nt, Artificial Sequence
  Description of Artificial Sequence: Synthetic oligonucleotide
cuacuuugagggc

SEQ ID NO: 95481 - RNA, 12 nt, Artificial Sequence
  Description of Artificial Sequence: Synthetic oligonucleotide
agggcaucuccu

SEQ ID NO: 95482 - RNA, 10 nt, Artificial Sequence
  Description of Artificial Sequence: Synthetic oligonucleotide
ggagugauau

SEQ ID NO: 95483 - RNA, 11 nt, Artificial Sequence
  Description of Artificial Sequence: Synthetic oligonucleotide
gagugauaugg

SEQ ID NO: 95484 - RNA, 12 nt, Artificial Sequence
  Description of Artificial Sequence: Synthetic oligonucleotide
ugcaguaaagau

SEQ ID NO: 95485 - RNA, 13 nt, Artificial Sequence
  Description of Artificial Sequence: Synthetic oligonucleotide
aguaaagauccua

SEQ ID NO: 95486 - RNA, 12 nt, Artificial Sequence
  Description of Artificial Sequence: Synthetic oligonucleotide
ugacaaaggaca

SEQ ID NO: 95487 - RNA, 13 nt, Artificial Sequence
  Description of Artificial Sequence: Synthetic oligonucleotide
gcaauugugaccc

SEQ ID NO: 95488 - RNA, 12 nt, Artificial Sequence
  Description of Artificial Sequence: Synthetic oligonucleotide
aacaucauccau

SEQ ID NO: 95489 - RNA, 12 nt, Artificial Sequence
  Description of Artificial Sequence: Synthetic oligonucleotide
ugaaauccaaca

SEQ ID NO: 95490 - RNA, 15 nt, Artificial Sequence
  Description of Artificial Sequence: Synthetic oligonucleotide
aacaauauauuucuc

SEQ ID NO: 95491 - RNA, 14 nt, Artificial Sequence
  Description of Artificial Sequence: Synthetic oligonucleotide
aacaguaaagucac

SEQ ID NO: 95492 - RNA, 14 nt, Artificial Sequence
  Description of Artificial Sequence: Synthetic oligonucleotide
ugugaagaaaguaa

SEQ ID NO: 95493 - RNA, 13 nt, Artificial Sequence
  Description of Artificial Sequence: Synthetic oligonucleotide
cuuccgagccauc

SEQ ID NO: 95494 - RNA, 12 nt, Artificial Sequence
  Description of Artificial Sequence: Synthetic oligonucleotide
aauggagguuga

SEQ ID NO: 95495 - RNA, 12 nt, Artificial Sequence
  Description of Artificial Sequence: Synthetic oligonucleotide
ggagguugaaua

SEQ ID NO: 95496 - RNA, 13 nt, Artificial Sequence
  Description of Artificial Sequence: Synthetic oligonucleotide
auuuugaguuuuc

SEQ ID NO: 95497 - RNA, 12 nt, Artificial Sequence
  Description of Artificial Sequence: Synthetic oligonucleotide
uauccuguuugu

SEQ ID NO: 95498 - RNA, 11 nt, Artificial Sequence
  Description of Artificial Sequence: Synthetic oligonucleotide
ccuguuuguuc

SEQ ID NO: 95499 - RNA, 10 nt, Artificial Sequence
  Description of Artificial Sequence: Synthetic oligonucleotide
cucuacagcc

SEQ ID NO: 95500 - RNA, 12 nt, Artificial Sequence
  Description of Artificial Sequence: Synthetic oligonucleotide
ucuuccauagcu

SEQ ID NO: 95501 - RNA, 12 nt, Artificial Sequence
  Description of Artificial Sequence: Synthetic oligonucleotide
auaaucuuccug

SEQ ID NO: 95502 - RNA, 12 nt, Artificial Sequence
  Description of Artificial Sequence: Synthetic oligonucleotide
uaaucuuccugu

SEQ ID NO: 95503 - RNA, 12 nt, Artificial Sequence
  Description of Artificial Sequence: Synthetic oligonucleotide
cuucaugacuug

SEQ ID NO: 95504 - RNA, 12 nt, Artificial Sequence
  Description of Artificial Sequence: Synthetic oligonucleotide
aagagggagaga

SEQ ID NO: 95505 - RNA, 12 nt, Artificial Sequence
  Description of Artificial Sequence: Synthetic oligonucleotide
cgucuccuacca

SEQ ID NO: 95506 - RNA, 12 nt, Artificial Sequence
  Description of Artificial Sequence: Synthetic oligonucleotide
gaucaaucggcc

SEQ ID NO: 95507 - RNA, 12 nt, Artificial Sequence
  Description of Artificial Sequence: Synthetic oligonucleotide
ggacgaacaucc

SEQ ID NO: 95508 - RNA, 11 nt, Artificial Sequence
  Description of Artificial Sequence: Synthetic oligonucleotide
agggucggaac

SEQ ID NO: 95509 - RNA, 10 nt, Artificial Sequence
  Description of Artificial Sequence: Synthetic oligonucleotide
ucggaaccca

SEQ ID NO: 95510 - RNA, 11 nt, Artificial Sequence
  Description of Artificial Sequence: Synthetic oligonucleotide
acccaagcuua

SEQ ID NO: 95511 - RNA, 14 nt, Artificial Sequence
  Description of Artificial Sequence: Synthetic oligonucleotide
gaacuuuaagcaac

SEQ ID NO: 95512 - RNA, 11 nt, Artificial Sequence
  Description of Artificial Sequence: Synthetic oligonucleotide
acuauucagug

SEQ ID NO: 95513 - RNA, 11 nt, Artificial Sequence
  Description of Artificial Sequence: Synthetic oligonucleotide
cuauucagugg

SEQ ID NO: 95514 - RNA, 13 nt, Artificial Sequence
  Description of Artificial Sequence: Synthetic oligonucleotide
aaacacagauaac

SEQ ID NO: 95515 - RNA, 12 nt, Artificial Sequence
  Description of Artificial Sequence: Synthetic oligonucleotide
cuuaagaaaaga

SEQ ID NO: 95516 - RNA, 12 nt, Artificial Sequence
  Description of Artificial Sequence: Synthetic oligonucleotide
cugaaggagugu

SEQ ID NO: 95517 - RNA, 10 nt, Artificial Sequence
  Description of Artificial Sequence: Synthetic oligonucleotide
ucaccgcggg

SEQ ID NO: 95518 - RNA, 14 nt, Artificial Sequence
  Description of Artificial Sequence: Synthetic oligonucleotide
agcagaaauaagcg

SEQ ID NO: 95519 - RNA, 12 nt, Artificial Sequence
  Description of Artificial Sequence: Synthetic oligonucleotide
aagcgugccguu

SEQ ID NO: 95520 - RNA, 12 nt, Artificial Sequence
  Description of Artificial Sequence: Synthetic oligonucleotide
agaaacagucac

SEQ ID NO: 95521 - RNA, 12 nt, Artificial Sequence
  Description of Artificial Sequence: Synthetic oligonucleotide
agaggaagaagg

SEQ ID NO: 95522 - RNA, 14 nt, Artificial Sequence
  Description of Artificial Sequence: Synthetic oligonucleotide
uguauucaaaauau

SEQ ID NO: 95523 - RNA, 13 nt, Artificial Sequence
  Description of Artificial Sequence: Synthetic oligonucleotide
auuuuccucccuu

SEQ ID NO: 95524 - RNA, 13 nt, Artificial Sequence
  Description of Artificial Sequence: Synthetic oligonucleotide
caaagaaagauag

SEQ ID NO: 95525 - RNA, 12 nt, Artificial Sequence
  Description of Artificial Sequence: Synthetic oligonucleotide
aagaaagauaga

SEQ ID NO: 95526 - RNA, 13 nt, Artificial Sequence
  Description of Artificial Sequence: Synthetic oligonucleotide
gaaagcauuuguu

SEQ ID NO: 95527 - RNA, 13 nt, Artificial Sequence
  Description of Artificial Sequence: Synthetic oligonucleotide
ugaguuaaacgaa

SEQ ID NO: 95528 - RNA, 12 nt, Artificial Sequence
  Description of Artificial Sequence: Synthetic oligonucleotide
acugauacagaa

SEQ ID NO: 95529 - RNA, 12 nt, Artificial Sequence
  Description of Artificial Sequence: Synthetic oligonucleotide
auauuauauaua

SEQ ID NO: 95530 - RNA, 12 nt, Artificial Sequence
  Description of Artificial Sequence: Synthetic oligonucleotide
auuauauauaua

SEQ ID NO: 95531 - RNA, 12 nt, Artificial Sequence
  Description of Artificial Sequence: Synthetic oligonucleotide
ucacuggaugua

SEQ ID NO: 95532 - RNA, 12 nt, Artificial Sequence
  Description of Artificial Sequence: Synthetic oligonucleotide
cagggaagagga

SEQ ID NO: 95533 - RNA, 15 nt, Artificial Sequence
  Description of Artificial Sequence: Synthetic oligonucleotide
augaucuuuuuuuug

SEQ ID NO: 95534 - RNA, 11 nt, Artificial Sequence
  Description of Artificial Sequence: Synthetic oligonucleotide
aguucacggcc

SEQ ID NO: 95535 - RNA, 13 nt, Artificial Sequence
  Description of Artificial Sequence: Synthetic oligonucleotide
caccaucacacca

SEQ ID NO: 95536 - RNA, 11 nt, Artificial Sequence
  Description of Artificial Sequence: Synthetic oligonucleotide
ccugcggguuu

SEQ ID NO: 95537 - RNA, 10 nt, Artificial Sequence
  Description of Artificial Sequence: Synthetic oligonucleotide
auccaguuug

SEQ ID NO: 95538 - RNA, 13 nt, Artificial Sequence
  Description of Artificial Sequence: Synthetic oligonucleotide
guuaaggacuucu

SEQ ID NO: 95539 - RNA, 13 nt, Artificial Sequence
  Description of Artificial Sequence: Synthetic oligonucleotide
cagugggacagag

SEQ ID NO: 95540 - RNA, 14 nt, Artificial Sequence
  Description of Artificial Sequence: Synthetic oligonucleotide
aauuuguuauugug

SEQ ID NO: 95541 - RNA, 13 nt, Artificial Sequence
  Description of Artificial Sequence: Synthetic oligonucleotide
uucaaaugcauuu

SEQ ID NO: 95542 - RNA, 10 nt, Artificial Sequence
  Description of Artificial Sequence: Synthetic oligonucleotide
caggaaagcc

SEQ ID NO: 95543 - RNA, 11 nt, Artificial Sequence
  Description of Artificial Sequence: Synthetic oligonucleotide
aggaaagcccu

SEQ ID NO: 95544 - RNA, 12 nt, Artificial Sequence
  Description of Artificial Sequence: Synthetic oligonucleotide
cccagcauggcc

SEQ ID NO: 95545 - RNA, 11 nt, Artificial Sequence
  Description of Artificial Sequence: Synthetic oligonucleotide
cuucucccuga

SEQ ID NO: 95546 - RNA, 12 nt, Artificial Sequence
  Description of Artificial Sequence: Synthetic oligonucleotide
gaagaagcccuu

SEQ ID NO: 95547 - RNA, 12 nt, Artificial Sequence
  Description of Artificial Sequence: Synthetic oligonucleotide
agaagcccuuca

SEQ ID NO: 95548 - RNA, 11 nt, Artificial Sequence
  Description of Artificial Sequence: Synthetic oligonucleotide
gcccuucagcg

SEQ ID NO: 95549 - RNA, 11 nt, Artificial Sequence
  Description of Artificial Sequence: Synthetic oligonucleotide
ccuucagcggc

SEQ ID NO: 95550 - RNA, 12 nt, Artificial Sequence
  Description of Artificial Sequence: Synthetic oligonucleotide
ucagcggccagu

SEQ ID NO: 95551 - RNA, 12 nt, Artificial Sequence
  Description of Artificial Sequence: Synthetic oligonucleotide
ugaaaagcuccg

SEQ ID NO: 95552 - RNA, 11 nt, Artificial Sequence
  Description of Artificial Sequence: Synthetic oligonucleotide
aaaagcuccgg

SEQ ID NO: 95553 - RNA, 13 nt, Artificial Sequence
  Description of Artificial Sequence: Synthetic oligonucleotide
agucaacagucug

SEQ ID NO: 95554 - RNA, 13 nt, Artificial Sequence
  Description of Artificial Sequence: Synthetic oligonucleotide
cagaguucaaaag

SEQ ID NO: 95555 - RNA, 13 nt, Artificial Sequence
  Description of Artificial Sequence: Synthetic oligonucleotide
agaguucaaaagc

SEQ ID NO: 95556 - RNA, 12 nt, Artificial Sequence
  Description of Artificial Sequence: Synthetic oligonucleotide
uucaaaagcccu

SEQ ID NO: 95557 - RNA, 12 nt, Artificial Sequence
  Description of Artificial Sequence: Synthetic oligonucleotide
ucaaaagcccuu

SEQ ID NO: 95558 - RNA, 12 nt, Artificial Sequence
  Description of Artificial Sequence: Synthetic oligonucleotide
aaaagcccuuca

SEQ ID NO: 95559 - RNA, 12 nt, Artificial Sequence
  Description of Artificial Sequence: Synthetic oligonucleotide
aaagcccuucag

SEQ ID NO: 95560 - RNA, 13 nt, Artificial Sequence
  Description of Artificial Sequence: Synthetic oligonucleotide
gugaagccgcucg

SEQ ID NO: 95561 - RNA, 12 nt, Artificial Sequence
  Description of Artificial Sequence: Synthetic oligonucleotide
cacgccagucaa

SEQ ID NO: 95562 - RNA, 13 nt, Artificial Sequence
  Description of Artificial Sequence: Synthetic oligonucleotide
uucuuggugcgug

SEQ ID NO: 95563 - RNA, 14 nt, Artificial Sequence
  Description of Artificial Sequence: Synthetic oligonucleotide
auuggauucaucag

SEQ ID NO: 95564 - RNA, 13 nt, Artificial Sequence
  Description of Artificial Sequence: Synthetic oligonucleotide
uggaauaccuaag

SEQ ID NO: 95565 - RNA, 12 nt, Artificial Sequence
  Description of Artificial Sequence: Synthetic oligonucleotide
auuugaggcuca

SEQ ID NO: 95566 - RNA, 11 nt, Artificial Sequence
  Description of Artificial Sequence: Synthetic oligonucleotide
ucuacaauugg

SEQ ID NO: 95567 - RNA, 12 nt, Artificial Sequence
  Description of Artificial Sequence: Synthetic oligonucleotide
uaguuaggagcc

SEQ ID NO: 95568 - RNA, 13 nt, Artificial Sequence
  Description of Artificial Sequence: Synthetic oligonucleotide
agucaauauccac

SEQ ID NO: 95569 - RNA, 13 nt, Artificial Sequence
  Description of Artificial Sequence: Synthetic oligonucleotide
auguucagucaca

SEQ ID NO: 95570 - RNA, 12 nt, Artificial Sequence
  Description of Artificial Sequence: Synthetic oligonucleotide
acacacacauac

SEQ ID NO: 95571 - RNA, 12 nt, Artificial Sequence
  Description of Artificial Sequence: Synthetic oligonucleotide
uuccuuuugcuu

SEQ ID NO: 95572 - RNA, 16 nt, Artificial Sequence
  Description of Artificial Sequence: Synthetic oligonucleotide
uuuuaaaguaauuuuu

SEQ ID NO: 95573 - RNA, 13 nt, Artificial Sequence
  Description of Artificial Sequence: Synthetic oligonucleotide
caacagucaaugg

SEQ ID NO: 95574 - RNA, 13 nt, Artificial Sequence
  Description of Artificial Sequence: Synthetic oligonucleotide
ucgacaaaccaau

SEQ ID NO: 95575 - RNA, 12 nt, Artificial Sequence
  Description of Artificial Sequence: Synthetic oligonucleotide
acugcuaccacu

SEQ ID NO: 95576 - RNA, 13 nt, Artificial Sequence
  Description of Artificial Sequence: Synthetic oligonucleotide
gcaagcggucuua

SEQ ID NO: 95577 - RNA, 13 nt, Artificial Sequence
  Description of Artificial Sequence: Synthetic oligonucleotide
ggucuuaccggcu

SEQ ID NO: 95578 - RNA, 11 nt, Artificial Sequence
  Description of Artificial Sequence: Synthetic oligonucleotide
gauggguuacc

SEQ ID NO: 95579 - RNA, 11 nt, Artificial Sequence
  Description of Artificial Sequence: Synthetic oligonucleotide
guuaccugcga

SEQ ID NO: 95580 - RNA, 12 nt, Artificial Sequence
  Description of Artificial Sequence: Synthetic oligonucleotide
aaucuugcugag

SEQ ID NO: 95581 - RNA, 13 nt, Artificial Sequence
  Description of Artificial Sequence: Synthetic oligonucleotide
agcauaaaacagu

SEQ ID NO: 95582 - RNA, 12 nt, Artificial Sequence
  Description of Artificial Sequence: Synthetic oligonucleotide
guccuuuauccu

SEQ ID NO: 95583 - RNA, 12 nt, Artificial Sequence
  Description of Artificial Sequence: Synthetic oligonucleotide
caacgcaaguug

SEQ ID NO: 95584 - RNA, 13 nt, Artificial Sequence
  Description of Artificial Sequence: Synthetic oligonucleotide
aaacugaaaccau

SEQ ID NO: 95585 - RNA, 14 nt, Artificial Sequence
  Description of Artificial Sequence: Synthetic oligonucleotide
acuuuguuaaauau

SEQ ID NO: 95586 - RNA, 14 nt, Artificial Sequence
  Description of Artificial Sequence: Synthetic oligonucleotide
guauauuaaaaguu

SEQ ID NO: 95587 - RNA, 13 nt, Artificial Sequence
  Description of Artificial Sequence: Synthetic oligonucleotide
guuuugacuuaac

SEQ ID NO: 95588 - RNA, 13 nt, Artificial Sequence
  Description of Artificial Sequence: Synthetic oligonucleotide
gcaaacucagcac

SEQ ID NO: 95589 - RNA, 11 nt, Artificial Sequence
  Description of Artificial Sequence: Synthetic oligonucleotide
ugcugaccuca

SEQ ID NO: 95590 - RNA, 14 nt, Artificial Sequence
  Description of Artificial Sequence: Synthetic oligonucleotide
uuuauucagaucgc

SEQ ID NO: 95591 - RNA, 13 nt, Artificial Sequence
  Description of Artificial Sequence: Synthetic oligonucleotide
aggguucugggau

SEQ ID NO: 95592 - RNA, 15 nt, Artificial Sequence
  Description of Artificial Sequence: Synthetic oligonucleotide
auauuggaaauuaug

SEQ ID NO: 95593 - RNA, 13 nt, Artificial Sequence
  Description of Artificial Sequence: Synthetic oligonucleotide
auggaagcacuag

SEQ ID NO: 95594 - RNA, 13 nt, Artificial Sequence
  Description of Artificial Sequence: Synthetic oligonucleotide
guuuuuaugugga

SEQ ID NO: 95595 - RNA, 12 nt, Artificial Sequence
  Description of Artificial Sequence: Synthetic oligonucleotide
ggaauugguaga

SEQ ID NO: 95596 - RNA, 13 nt, Artificial Sequence
  Description of Artificial Sequence: Synthetic oligonucleotide
uuagacuuggaga

SEQ ID NO: 95597 - RNA, 13 nt, Artificial Sequence
  Description of Artificial Sequence: Synthetic oligonucleotide
uuacaguauucca

SEQ ID NO: 95598 - RNA, 15 nt, Artificial Sequence
  Description of Artificial Sequence: Synthetic oligonucleotide
ccacugaugaauuaa

SEQ ID NO: 95599 - RNA, 12 nt, Artificial Sequence
  Description of Artificial Sequence: Synthetic oligonucleotide
ccacaucaucac

SEQ ID NO: 95600 - RNA, 13 nt, Artificial Sequence
  Description of Artificial Sequence: Synthetic oligonucleotide
cucaccaaacaga

SEQ ID NO: 95601 - RNA, 12 nt, Artificial Sequence
  Description of Artificial Sequence: Synthetic oligonucleotide
ggaacaugaugg

SEQ ID NO: 95602 - RNA, 12 nt, Artificial Sequence
  Description of Artificial Sequence: Synthetic oligonucleotide
cauguagacugc

SEQ ID NO: 95603 - RNA, 13 nt, Artificial Sequence
  Description of Artificial Sequence: Synthetic oligonucleotide
ggaucuauuuaug

SEQ ID NO: 95604 - RNA, 12 nt, Artificial Sequence
  Description of Artificial Sequence: Synthetic oligonucleotide
gcacuauuauca

SEQ ID NO: 95605 - RNA, 11 nt, Artificial Sequence
  Description of Artificial Sequence: Synthetic oligonucleotide
aucaguucugc

SEQ ID NO: 95606 - RNA, 13 nt, Artificial Sequence
  Description of Artificial Sequence: Synthetic oligonucleotide
agauuaaaccuac

SEQ ID NO: 95607 - RNA, 13 nt, Artificial Sequence
  Description of Artificial Sequence: Synthetic oligonucleotide
auaaaauccuucu

SEQ ID NO: 95608 - RNA, 12 nt, Artificial Sequence
  Description of Artificial Sequence: Synthetic oligonucleotide
aaugcuguagac

SEQ ID NO: 95609 - RNA, 13 nt, Artificial Sequence
  Description of Artificial Sequence: Synthetic oligonucleotide
uugauaggaauag

SEQ ID NO: 95610 - RNA, 11 nt, Artificial Sequence
  Description of Artificial Sequence: Synthetic oligonucleotide
aauggcccuga

SEQ ID NO: 95611 - RNA, 11 nt, Artificial Sequence
  Description of Artificial Sequence: Synthetic oligonucleotide
uuccucaagca

SEQ ID NO: 95612 - RNA, 10 nt, Artificial Sequence
  Description of Artificial Sequence: Synthetic oligonucleotide
guucagccca

SEQ ID NO: 95613 - RNA, 11 nt, Artificial Sequence
  Description of Artificial Sequence: Synthetic oligonucleotide
gcugcugaacc

SEQ ID NO: 95614 - RNA, 12 nt, Artificial Sequence
  Description of Artificial Sequence: Synthetic oligonucleotide
aaguucucuuca

SEQ ID NO: 95615 - RNA, 11 nt, Artificial Sequence
  Description of Artificial Sequence: Synthetic oligonucleotide
ccagccuagag

SEQ ID NO: 95616 - RNA, 13 nt, Artificial Sequence
  Description of Artificial Sequence: Synthetic oligonucleotide
cucugugaagugu

SEQ ID NO: 95617 - RNA, 14 nt, Artificial Sequence
  Description of Artificial Sequence: Synthetic oligonucleotide
ugagaaaauuucaa

SEQ ID NO: 95618 - RNA, 11 nt, Artificial Sequence
  Description of Artificial Sequence: Synthetic oligonucleotide
aauccuccuga

SEQ ID NO: 95619 - RNA, 12 nt, Artificial Sequence
  Description of Artificial Sequence: Synthetic oligonucleotide
gugacaucauau

SEQ ID NO: 95620 - RNA, 13 nt, Artificial Sequence
  Description of Artificial Sequence: Synthetic oligonucleotide
aaucuucaucaua

SEQ ID NO: 95621 - RNA, 13 nt, Artificial Sequence
  Description of Artificial Sequence: Synthetic oligonucleotide
gacuagcuauuaa

SEQ ID NO: 95622 - RNA, 14 nt, Artificial Sequence
  Description of Artificial Sequence: Synthetic oligonucleotide
ucucuacuaaaaau

SEQ ID NO: 95623 - RNA, 12 nt, Artificial Sequence
  Description of Artificial Sequence: Synthetic oligonucleotide
ucuaucucgccu

SEQ ID NO: 95624 - RNA, 13 nt, Artificial Sequence
  Description of Artificial Sequence: Synthetic oligonucleotide
cuucgguccaguu

SEQ ID NO: 95625 - RNA, 11 nt, Artificial Sequence
  Description of Artificial Sequence: Synthetic oligonucleotide
gauguagccgc

SEQ ID NO: 95626 - RNA, 12 nt, Artificial Sequence
  Description of Artificial Sequence: Synthetic oligonucleotide
ugaggagacuug

SEQ ID NO: 95627 - RNA, 12 nt, Artificial Sequence
  Description of Artificial Sequence: Synthetic oligonucleotide
gaguagugagga

SEQ ID NO: 95628 - RNA, 14 nt, Artificial Sequence
  Description of Artificial Sequence: Synthetic oligonucleotide
cagaugaguacaaa

SEQ ID NO: 95629 - RNA, 13 nt, Artificial Sequence
  Description of Artificial Sequence: Synthetic oligonucleotide
guuguuaaugggc

SEQ ID NO: 95630 - RNA, 13 nt, Artificial Sequence
  Description of Artificial Sequence: Synthetic oligonucleotide
uuuuuaauuuauu

SEQ ID NO: 95631 - RNA, 12 nt, Artificial Sequence
  Description of Artificial Sequence: Synthetic oligonucleotide
uauuuaaauaug

SEQ ID NO: 95632 - RNA, 13 nt, Artificial Sequence
  Description of Artificial Sequence: Synthetic oligonucleotide
uauccuuuguuuc

SEQ ID NO: 95633 - RNA, 14 nt, Artificial Sequence
  Description of Artificial Sequence: Synthetic oligonucleotide
cgucuaaguguuug

SEQ ID NO: 95634 - RNA, 12 nt, Artificial Sequence
  Description of Artificial Sequence: Synthetic oligonucleotide
accugugacaaa

SEQ ID NO: 95635 - RNA, 13 nt, Artificial Sequence
  Description of Artificial Sequence: Synthetic oligonucleotide
ccaggcugaauua

SEQ ID NO: 95636 - RNA, 14 nt, Artificial Sequence
  Description of Artificial Sequence: Synthetic oligonucleotide
gucauucuuacaau

SEQ ID NO: 95637 - RNA, 15 nt, Artificial Sequence
  Description of Artificial Sequence: Synthetic oligonucleotide
ucauucuuacaauug

SEQ ID NO: 95638 - RNA, 12 nt, Artificial Sequence
  Description of Artificial Sequence: Synthetic oligonucleotide
cagagaguguac

SEQ ID NO: 95639 - RNA, 12 nt, Artificial Sequence
  Description of Artificial Sequence: Synthetic oligonucleotide
agaacucagcag

SEQ ID NO: 95640 - RNA, 13 nt, Artificial Sequence
  Description of Artificial Sequence: Synthetic oligonucleotide
uuuauuuucagua

SEQ ID NO: 95641 - RNA, 12 nt, Artificial Sequence
  Description of Artificial Sequence: Synthetic oligonucleotide
ucuuaaauggaa

SEQ ID NO: 95642 - RNA, 13 nt, Artificial Sequence
  Description of Artificial Sequence: Synthetic oligonucleotide
ugccuaaaauugu

SEQ ID NO: 95643 - RNA, 12 nt, Artificial Sequence
  Description of Artificial Sequence: Synthetic oligonucleotide
agacugugagcu

SEQ ID NO: 95644 - RNA, 14 nt, Artificial Sequence
  Description of Artificial Sequence: Synthetic oligonucleotide
ugcuuuuuauuaau

SEQ ID NO: 95645 - RNA, 13 nt, Artificial Sequence
  Description of Artificial Sequence: Synthetic oligonucleotide
cucuucuuacauu

SEQ ID NO: 95646 - RNA, 15 nt, Artificial Sequence
  Description of Artificial Sequence: Synthetic oligonucleotide
cauuuguaaaaaugu

SEQ ID NO: 95647 - RNA, 15 nt, Artificial Sequence
  Description of Artificial Sequence: Synthetic oligonucleotide
aucuuaauucauauu

SEQ ID NO: 95648 - RNA, 13 nt, Artificial Sequence
  Description of Artificial Sequence: Synthetic oligonucleotide
gaacuaaucauga

SEQ ID NO: 95649 - RNA, 12 nt, Artificial Sequence
  Description of Artificial Sequence: Synthetic oligonucleotide
ucugcucuuggg

SEQ ID NO: 95650 - RNA, 13 nt, Artificial Sequence
  Description of Artificial Sequence: Synthetic oligonucleotide
caguagcuuugag

SEQ ID NO: 95651 - RNA, 14 nt, Artificial Sequence
  Description of Artificial Sequence: Synthetic oligonucleotide
cacguaauauuuca

SEQ ID NO: 95652 - RNA, 13 nt, Artificial Sequence
  Description of Artificial Sequence: Synthetic oligonucleotide
uauucucuucacu

SEQ ID NO: 95653 - RNA, 14 nt, Artificial Sequence
  Description of Artificial Sequence: Synthetic oligonucleotide
cuaaugcuaagaaa

SEQ ID NO: 95654 - RNA, 12 nt, Artificial Sequence
  Description of Artificial Sequence: Synthetic oligonucleotide
gcugaaaaucaa

SEQ ID NO: 95655 - RNA, 14 nt, Artificial Sequence
  Description of Artificial Sequence: Synthetic oligonucleotide
aauaugauuacuuu

SEQ ID NO: 95656 - RNA, 14 nt, Artificial Sequence
  Description of Artificial Sequence: Synthetic oligonucleotide
cauuuuguucuaca

SEQ ID NO: 95657 - RNA, 12 nt, Artificial Sequence
  Description of Artificial Sequence: Synthetic oligonucleotide
cccgggacucuc

SEQ ID NO: 95658 - RNA, 14 nt, Artificial Sequence
  Description of Artificial Sequence: Synthetic oligonucleotide
ccuuuaaaguaaag

SEQ ID NO: 95659 - RNA, 13 nt, Artificial Sequence
  Description of Artificial Sequence: Synthetic oligonucleotide
ucuggaagccugg

SEQ ID NO: 95660 - RNA, 14 nt, Artificial Sequence
  Description of Artificial Sequence: Synthetic oligonucleotide
aaaacaaaagagag

SEQ ID NO: 95661 - RNA, 13 nt, Artificial Sequence
  Description of Artificial Sequence: Synthetic oligonucleotide
aucaguuaugccg

SEQ ID NO: 95662 - RNA, 13 nt, Artificial Sequence
  Description of Artificial Sequence: Synthetic oligonucleotide
uaaaagaagucca

SEQ ID NO: 95663 - RNA, 11 nt, Artificial Sequence
  Description of Artificial Sequence: Synthetic oligonucleotide
aggugagguua

SEQ ID NO: 95664 - RNA, 11 nt, Artificial Sequence
  Description of Artificial Sequence: Synthetic oligonucleotide
gggaagaggac

SEQ ID NO: 95665 - RNA, 13 nt, Artificial Sequence
  Description of Artificial Sequence: Synthetic oligonucleotide
aagcaaguauugu

SEQ ID NO: 95666 - RNA, 12 nt, Artificial Sequence
  Description of Artificial Sequence: Synthetic oligonucleotide
auuguagcacuc

SEQ ID NO: 95667 - RNA, 14 nt, Artificial Sequence
  Description of Artificial Sequence: Synthetic oligonucleotide
acaaaaccacaaau

SEQ ID NO: 95668 - RNA, 12 nt, Artificial Sequence
  Description of Artificial Sequence: Synthetic oligonucleotide
uaagcccauaca

SEQ ID NO: 95669 - RNA, 11 nt, Artificial Sequence
  Description of Artificial Sequence: Synthetic oligonucleotide
agcccauacag

SEQ ID NO: 95670 - RNA, 12 nt, Artificial Sequence
  Description of Artificial Sequence: Synthetic oligonucleotide
cagaaaccuucc

SEQ ID NO: 95671 - RNA, 10 nt, Artificial Sequence
  Description of Artificial Sequence: Synthetic oligonucleotide
guauaccuac

SEQ ID NO: 95672 - RNA, 13 nt, Artificial Sequence
  Description of Artificial Sequence: Synthetic oligonucleotide
gccaguuuucgga

SEQ ID NO: 95673 - RNA, 9 nt, Artificial Sequence
  Description of Artificial Sequence: Synthetic oligonucleotide
ggaacaggg

SEQ ID NO: 95674 - RNA, 13 nt, Artificial Sequence
  Description of Artificial Sequence: Synthetic oligonucleotide
uuaacuuuccagu

SEQ ID NO: 95675 - RNA, 14 nt, Artificial Sequence
  Description of Artificial Sequence: Synthetic oligonucleotide
aaaguuugguuuug

SEQ ID NO: 95676 - RNA, 12 nt, Artificial Sequence
  Description of Artificial Sequence: Synthetic oligonucleotide
cuucccacugua

SEQ ID NO: 95677 - RNA, 13 nt, Artificial Sequence
  Description of Artificial Sequence: Synthetic oligonucleotide
ugauaccauauga

SEQ ID NO: 95678 - RNA, 11 nt, Artificial Sequence
  Description of Artificial Sequence: Synthetic oligonucleotide
aacaugggcug

SEQ ID NO: 95679 - RNA, 13 nt, Artificial Sequence
  Description of Artificial Sequence: Synthetic oligonucleotide
caacuuuuucaua

SEQ ID NO: 95680 - RNA, 12 nt, Artificial Sequence
  Description of Artificial Sequence: Synthetic oligonucleotide
caugaggccgga

SEQ ID NO: 95681 - RNA, 11 nt, Artificial Sequence
  Description of Artificial Sequence: Synthetic oligonucleotide
acugcauuugu

SEQ ID NO: 95682 - RNA, 13 nt, Artificial Sequence
  Description of Artificial Sequence: Synthetic oligonucleotide
aauguuuacuacc

SEQ ID NO: 95683 - RNA, 15 nt, Artificial Sequence
  Description of Artificial Sequence: Synthetic oligonucleotide
aauuuuuugaugaaa

SEQ ID NO: 95684 - RNA, 14 nt, Artificial Sequence
  Description of Artificial Sequence: Synthetic oligonucleotide
cagugugugaauuu

SEQ ID NO: 95685 - RNA, 13 nt, Artificial Sequence
  Description of Artificial Sequence: Synthetic oligonucleotide
gagcaauguaugu

SEQ ID NO: 95686 - RNA, 14 nt, Artificial Sequence
  Description of Artificial Sequence: Synthetic oligonucleotide
aaagcacauauaua

SEQ ID NO: 95687 - RNA, 14 nt, Artificial Sequence
  Description of Artificial Sequence: Synthetic oligonucleotide
guaauaguuucucc

SEQ ID NO: 95688 - RNA, 13 nt, Artificial Sequence
  Description of Artificial Sequence: Synthetic oligonucleotide
aguuucuccaaau

SEQ ID NO: 95689 - RNA, 13 nt, Artificial Sequence
  Description of Artificial Sequence: Synthetic oligonucleotide
uacuuccuagaaa

SEQ ID NO: 95690 - RNA, 13 nt, Artificial Sequence
  Description of Artificial Sequence: Synthetic oligonucleotide
uacaccauauaug

SEQ ID NO: 95691 - RNA, 14 nt, Artificial Sequence
  Description of Artificial Sequence: Synthetic oligonucleotide
auauaugaauggag

SEQ ID NO: 95692 - RNA, 13 nt, Artificial Sequence
  Description of Artificial Sequence: Synthetic oligonucleotide
acgagaagaagau

SEQ ID NO: 95693 - RNA, 13 nt, Artificial Sequence
  Description of Artificial Sequence: Synthetic oligonucleotide
ucauuuacaggga

SEQ ID NO: 95694 - RNA, 13 nt, Artificial Sequence
  Description of Artificial Sequence: Synthetic oligonucleotide
cauuuacagggac

SEQ ID NO: 95695 - RNA, 10 nt, Artificial Sequence
  Description of Artificial Sequence: Synthetic oligonucleotide
agggaccuga

SEQ ID NO: 95696 - RNA, 14 nt, Artificial Sequence
  Description of Artificial Sequence: Synthetic oligonucleotide
uguuugacugcauc

SEQ ID NO: 95697 - RNA, 13 nt, Artificial Sequence
  Description of Artificial Sequence: Synthetic oligonucleotide
uuugacugcaucg

SEQ ID NO: 95698 - RNA, 12 nt, Artificial Sequence
  Description of Artificial Sequence: Synthetic oligonucleotide
gaguucacaggg

SEQ ID NO: 95699 - RNA, 13 nt, Artificial Sequence
  Description of Artificial Sequence: Synthetic oligonucleotide
ggcaccucugucc

SEQ ID NO: 95700 - RNA, 15 nt, Artificial Sequence
  Description of Artificial Sequence: Synthetic oligonucleotide
gguuugucuuuuuaa

SEQ ID NO: 95701 - RNA, 14 nt, Artificial Sequence
  Description of Artificial Sequence: Synthetic oligonucleotide
uuugucuuuuuaag

SEQ ID NO: 95702 - RNA, 13 nt, Artificial Sequence
  Description of Artificial Sequence: Synthetic oligonucleotide
ccuaaagguuguc

SEQ ID NO: 95703 - RNA, 12 nt, Artificial Sequence
  Description of Artificial Sequence: Synthetic oligonucleotide
aagguugucgac

SEQ ID NO: 95704 - RNA, 13 nt, Artificial Sequence
  Description of Artificial Sequence: Synthetic oligonucleotide
accuggcaauugu

SEQ ID NO: 95705 - RNA, 12 nt, Artificial Sequence
  Description of Artificial Sequence: Synthetic oligonucleotide
aguggugcgagg

SEQ ID NO: 95706 - RNA, 13 nt, Artificial Sequence
  Description of Artificial Sequence: Synthetic oligonucleotide
agagacaugaaau

SEQ ID NO: 95707 - RNA, 13 nt, Artificial Sequence
  Description of Artificial Sequence: Synthetic oligonucleotide
auauauuucucca

SEQ ID NO: 95708 - RNA, 10 nt, Artificial Sequence
  Description of Artificial Sequence: Synthetic oligonucleotide
caugaaggcu

SEQ ID NO: 95709 - RNA, 11 nt, Artificial Sequence
  Description of Artificial Sequence: Synthetic oligonucleotide
gcuggaguggu

SEQ ID NO: 95710 - RNA, 11 nt, Artificial Sequence
  Description of Artificial Sequence: Synthetic oligonucleotide
aggaagagagg

SEQ ID NO: 95711 - RNA, 12 nt, Artificial Sequence
  Description of Artificial Sequence: Synthetic oligonucleotide
cuugcaucgggc

SEQ ID NO: 95712 - RNA, 13 nt, Artificial Sequence
  Description of Artificial Sequence: Synthetic oligonucleotide
auauccuacugug

SEQ ID NO: 95713 - RNA, 13 nt, Artificial Sequence
  Description of Artificial Sequence: Synthetic oligonucleotide
uccuacuguguaa

SEQ ID NO: 95714 - RNA, 12 nt, Artificial Sequence
  Description of Artificial Sequence: Synthetic oligonucleotide
ccuuguagugua

SEQ ID NO: 95715 - RNA, 13 nt, Artificial Sequence
  Description of Artificial Sequence: Synthetic oligonucleotide
ucuuuguugauug

SEQ ID NO: 95716 - RNA, 14 nt, Artificial Sequence
  Description of Artificial Sequence: Synthetic oligonucleotide
uuuguugauugaaa

SEQ ID NO: 95717 - RNA, 15 nt, Artificial Sequence
  Description of Artificial Sequence: Synthetic oligonucleotide
uucuuuuucuuccau

SEQ ID NO: 95718 - RNA, 13 nt, Artificial Sequence
  Description of Artificial Sequence: Synthetic oligonucleotide
aaucuuccuucua

SEQ ID NO: 95719 - RNA, 13 nt, Artificial Sequence
  Description of Artificial Sequence: Synthetic oligonucleotide
uugaaugcuucau

SEQ ID NO: 95720 - RNA, 13 nt, Artificial Sequence
  Description of Artificial Sequence: Synthetic oligonucleotide
ugaaugcuucaug

SEQ ID NO: 95721 - RNA, 13 nt, Artificial Sequence
  Description of Artificial Sequence: Synthetic oligonucleotide
aauucuacuuuga

SEQ ID NO: 95722 - RNA, 13 nt, Artificial Sequence
  Description of Artificial Sequence: Synthetic oligonucleotide
agcaacuacagac

SEQ ID NO: 95723 - RNA, 13 nt, Artificial Sequence
  Description of Artificial Sequence: Synthetic oligonucleotide
gaccaaggucaac

SEQ ID NO: 95724 - RNA, 13 nt, Artificial Sequence
  Description of Artificial Sequence: Synthetic oligonucleotide
cgacuaucucgac

SEQ ID NO: 95725 - RNA, 13 nt, Artificial Sequence
  Description of Artificial Sequence: Synthetic oligonucleotide
aaccuucccaaac

SEQ ID NO: 95726 - RNA, 14 nt, Artificial Sequence
  Description of Artificial Sequence: Synthetic oligonucleotide
ccaagcuuagaacu

SEQ ID NO: 95727 - RNA, 15 nt, Artificial Sequence
  Description of Artificial Sequence: Synthetic oligonucleotide
agcuuagaacuuuaa

SEQ ID NO: 95728 - RNA, 11 nt, Artificial Sequence
  Description of Artificial Sequence: Synthetic oligonucleotide
aagaccaccac

SEQ ID NO: 95729 - RNA, 14 nt, Artificial Sequence
  Description of Artificial Sequence: Synthetic oligonucleotide
gcgagaaauaaagu

SEQ ID NO: 95730 - RNA, 14 nt, Artificial Sequence
  Description of Artificial Sequence: Synthetic oligonucleotide
cgagaaauaaaguu

SEQ ID NO: 95731 - RNA, 12 nt, Artificial Sequence
  Description of Artificial Sequence: Synthetic oligonucleotide
aggaaaugaucc

SEQ ID NO: 95732 - RNA, 13 nt, Artificial Sequence
  Description of Artificial Sequence: Synthetic oligonucleotide
gaagaaaugaaac

SEQ ID NO: 95733 - RNA, 13 nt, Artificial Sequence
  Description of Artificial Sequence: Synthetic oligonucleotide
guuuccauccucc

SEQ ID NO: 95734 - RNA, 15 nt, Artificial Sequence
  Description of Artificial Sequence: Synthetic oligonucleotide
acugaaaaucuuuga

SEQ ID NO: 95735 - RNA, 11 nt, Artificial Sequence
  Description of Artificial Sequence: Synthetic oligonucleotide
ugccguucagg

SEQ ID NO: 95736 - RNA, 13 nt, Artificial Sequence
  Description of Artificial Sequence: Synthetic oligonucleotide
caggguccagaag

SEQ ID NO: 95737 - RNA, 13 nt, Artificial Sequence
  Description of Artificial Sequence: Synthetic oligonucleotide
ucaagacugcuug

SEQ ID NO: 95738 - RNA, 13 nt, Artificial Sequence
  Description of Artificial Sequence: Synthetic oligonucleotide
uccaugucuuugg

SEQ ID NO: 95739 - RNA, 11 nt, Artificial Sequence
  Description of Artificial Sequence: Synthetic oligonucleotide
gccugaaacac

SEQ ID NO: 95740 - RNA, 12 nt, Artificial Sequence
  Description of Artificial Sequence: Synthetic oligonucleotide
ucucuguaccuc

SEQ ID NO: 95741 - RNA, 12 nt, Artificial Sequence
  Description of Artificial Sequence: Synthetic oligonucleotide
agcaagacaaga

SEQ ID NO: 95742 - RNA, 13 nt, Artificial Sequence
  Description of Artificial Sequence: Synthetic oligonucleotide
gcaagacaagaaa

SEQ ID NO: 95743 - RNA, 12 nt, Artificial Sequence
  Description of Artificial Sequence: Synthetic oligonucleotide
uguacaagaucc

SEQ ID NO: 95744 - RNA, 12 nt, Artificial Sequence
  Description of Artificial Sequence: Synthetic oligonucleotide
cguacuugcaga

SEQ ID NO: 95745 - RNA, 13 nt, Artificial Sequence
  Description of Artificial Sequence: Synthetic oligonucleotide
cgaucgauacaga

SEQ ID NO: 95746 - RNA, 13 nt, Artificial Sequence
  Description of Artificial Sequence: Synthetic oligonucleotide
uauaaaaauaaau

SEQ ID NO: 95747 - RNA, 13 nt, Artificial Sequence
  Description of Artificial Sequence: Synthetic oligonucleotide
uaaaaauaaauau

SEQ ID NO: 95748 - RNA, 13 nt, Artificial Sequence
  Description of Artificial Sequence: Synthetic oligonucleotide
uuugacugcugug

SEQ ID NO: 95749 - RNA, 13 nt, Artificial Sequence
  Description of Artificial Sequence: Synthetic oligonucleotide
ggagaugagagac

SEQ ID NO: 95750 - RNA, 10 nt, Artificial Sequence
  Description of Artificial Sequence: Synthetic oligonucleotide
ucccacuugg

SEQ ID NO: 95751 - RNA, 10 nt, Artificial Sequence
  Description of Artificial Sequence: Synthetic oligonucleotide
guucacggcc

SEQ ID NO: 95752 - RNA, 12 nt, Artificial Sequence
  Description of Artificial Sequence: Synthetic oligonucleotide
accaucacacca

SEQ ID NO: 95753 - RNA, 10 nt, Artificial Sequence
  Description of Artificial Sequence: Synthetic oligonucleotide
cugcggguuu

SEQ ID NO: 95754 - RNA, 9 nt, Artificial Sequence
  Description of Artificial Sequence: Synthetic oligonucleotide
uccaguuug

SEQ ID NO: 95755 - RNA, 12 nt, Artificial Sequence
  Description of Artificial Sequence: Synthetic oligonucleotide
uuaaggacuucu

SEQ ID NO: 95756 - RNA, 12 nt, Artificial Sequence
  Description of Artificial Sequence: Synthetic oligonucleotide
agugggacagag

SEQ ID NO: 95757 - RNA, 13 nt, Artificial Sequence
  Description of Artificial Sequence: Synthetic oligonucleotide
auuuguuauugug

SEQ ID NO: 95758 - RNA, 12 nt, Artificial Sequence
  Description of Artificial Sequence: Synthetic oligonucleotide
ucaaaugcauuu

SEQ ID NO: 95759 - RNA, 9 nt, Artificial Sequence
  Description of Artificial Sequence: Synthetic oligonucleotide
aggaaagcc

SEQ ID NO: 95760 - RNA, 10 nt, Artificial Sequence
  Description of Artificial Sequence: Synthetic oligonucleotide
ggaaagcccu

SEQ ID NO: 95761 - RNA, 11 nt, Artificial Sequence
  Description of Artificial Sequence: Synthetic oligonucleotide
ccagcauggcc

SEQ ID NO: 95762 - RNA, 10 nt, Artificial Sequence
  Description of Artificial Sequence: Synthetic oligonucleotide
uucucccuga

SEQ ID NO: 95763 - RNA, 11 nt, Artificial Sequence
  Description of Artificial Sequence: Synthetic oligonucleotide
aagaagcccuu

SEQ ID NO: 95764 - RNA, 11 nt, Artificial Sequence
  Description of Artificial Sequence: Synthetic oligonucleotide
gaagcccuuca

SEQ ID NO: 95765 - RNA, 10 nt, Artificial Sequence
  Description of Artificial Sequence: Synthetic oligonucleotide
cccuucagcg

SEQ ID NO: 95766 - RNA, 10 nt, Artificial Sequence
  Description of Artificial Sequence: Synthetic oligonucleotide
cuucagcggc

SEQ ID NO: 95767 - RNA, 11 nt, Artificial Sequence
  Description of Artificial Sequence: Synthetic oligonucleotide
cagcggccagu

SEQ ID NO: 95768 - RNA, 11 nt, Artificial Sequence
  Description of Artificial Sequence: Synthetic oligonucleotide
gaaaagcuccg

SEQ ID NO: 95769 - RNA, 10 nt, Artificial Sequence
  Description of Artificial Sequence: Synthetic oligonucleotide
aaagcuccgg

SEQ ID NO: 95770 - RNA, 12 nt, Artificial Sequence
  Description of Artificial Sequence: Synthetic oligonucleotide
gucaacagucug

SEQ ID NO: 95771 - RNA, 12 nt, Artificial Sequence
  Description of Artificial Sequence: Synthetic oligonucleotide
agaguucaaaag

SEQ ID NO: 95772 - RNA, 12 nt, Artificial Sequence
  Description of Artificial Sequence: Synthetic oligonucleotide
gaguucaaaagc

SEQ ID NO: 95773 - RNA, 11 nt, Artificial Sequence
  Description of Artificial Sequence: Synthetic oligonucleotide
ucaaaagcccu

SEQ ID NO: 95774 - RNA, 11 nt, Artificial Sequence
  Description of Artificial Sequence: Synthetic oligonucleotide
caaaagcccuu

SEQ ID NO: 95775 - RNA, 11 nt, Artificial Sequence
  Description of Artificial Sequence: Synthetic oligonucleotide
aaagcccuuca

SEQ ID NO: 95776 - RNA, 11 nt, Artificial Sequence
  Description of Artificial Sequence: Synthetic oligonucleotide
aagcccuucag

SEQ ID NO: 95777 - RNA, 12 nt, Artificial Sequence
  Description of Artificial Sequence: Synthetic oligonucleotide
ugaagccgcucg

SEQ ID NO: 95778 - RNA, 11 nt, Artificial Sequence
  Description of Artificial Sequence: Synthetic oligonucleotide
acgccagucaa

SEQ ID NO: 95779 - RNA, 12 nt, Artificial Sequence
  Description of Artificial Sequence: Synthetic oligonucleotide
ucuuggugcgug

SEQ ID NO: 95780 - RNA, 13 nt, Artificial Sequence
  Description of Artificial Sequence: Synthetic oligonucleotide
uuggauucaucag

SEQ ID NO: 95781 - RNA, 12 nt, Artificial Sequence
  Description of Artificial Sequence: Synthetic oligonucleotide
ggaauaccuaag

SEQ ID NO: 95782 - RNA, 11 nt, Artificial Sequence
  Description of Artificial Sequence: Synthetic oligonucleotide
uuugaggcuca

SEQ ID NO: 95783 - RNA, 10 nt, Artificial Sequence
  Description of Artificial Sequence: Synthetic oligonucleotide
cuacaauugg

SEQ ID NO: 95784 - RNA, 11 nt, Artificial Sequence
  Description of Artificial Sequence: Synthetic oligonucleotide
aguuaggagcc

SEQ ID NO: 95785 - RNA, 12 nt, Artificial Sequence
  Description of Artificial Sequence: Synthetic oligonucleotide
gucaauauccac

SEQ ID NO: 95786 - RNA, 12 nt, Artificial Sequence
  Description of Artificial Sequence: Synthetic oligonucleotide
uguucagucaca

SEQ ID NO: 95787 - RNA, 11 nt, Artificial Sequence
  Description of Artificial Sequence: Synthetic oligonucleotide
cacacacauac

SEQ ID NO: 95788 - RNA, 11 nt, Artificial Sequence
  Description of Artificial Sequence: Synthetic oligonucleotide
uccuuuugcuu

SEQ ID NO: 95789 - RNA, 15 nt, Artificial Sequence
  Description of Artificial Sequence: Synthetic oligonucleotide
uuuaaaguaauuuuu

SEQ ID NO: 95790 - RNA, 12 nt, Artificial Sequence
  Description of Artificial Sequence: Synthetic oligonucleotide
aacagucaaugg

SEQ ID NO: 95791 - RNA, 12 nt, Artificial Sequence
  Description of Artificial Sequence: Synthetic oligonucleotide
cgacaaaccaau

SEQ ID NO: 95792 - RNA, 11 nt, Artificial Sequence
  Description of Artificial Sequence: Synthetic oligonucleotide
cugcuaccacu

SEQ ID NO: 95793 - RNA, 12 nt, Artificial Sequence
  Description of Artificial Sequence: Synthetic oligonucleotide
caagcggucuua

SEQ ID NO: 95794 - RNA, 12 nt, Artificial Sequence
  Description of Artificial Sequence: Synthetic oligonucleotide
gucuuaccggcu

SEQ ID NO: 95795 - RNA, 10 nt, Artificial Sequence
  Description of Artificial Sequence: Synthetic oligonucleotide
auggguuacc

SEQ ID NO: 95796 - RNA, 10 nt, Artificial Sequence
  Description of Artificial Sequence: Synthetic oligonucleotide
uuaccugcga

SEQ ID NO: 95797 - RNA, 11 nt, Artificial Sequence
  Description of Artificial Sequence: Synthetic oligonucleotide
aucuugcugag

SEQ ID NO: 95798 - RNA, 12 nt, Artificial Sequence
  Description of Artificial Sequence: Synthetic oligonucleotide
gcauaaaacagu

SEQ ID NO: 95799 - RNA, 11 nt, Artificial Sequence
  Description of Artificial Sequence: Synthetic oligonucleotide
uccuuuauccu

SEQ ID NO: 95800 - RNA, 11 nt, Artificial Sequence
  Description of Artificial Sequence: Synthetic oligonucleotide
aacgcaaguug

SEQ ID NO: 95801 - RNA, 12 nt, Artificial Sequence
  Description of Artificial Sequence: Synthetic oligonucleotide
aacugaaaccau

SEQ ID NO: 95802 - RNA, 13 nt, Artificial Sequence
  Description of Artificial Sequence: Synthetic oligonucleotide
cuuuguuaaauau

SEQ ID NO: 95803 - RNA, 13 nt, Artificial Sequence
  Description of Artificial Sequence: Synthetic oligonucleotide
uauauuaaaaguu

SEQ ID NO: 95804 - RNA, 12 nt, Artificial Sequence
  Description of Artificial Sequence: Synthetic oligonucleotide
uuuugacuuaac

SEQ ID NO: 95805 - RNA, 12 nt, Artificial Sequence
  Description of Artificial Sequence: Synthetic oligonucleotide
caaacucagcac

SEQ ID NO: 95806 - RNA, 10 nt, Artificial Sequence
  Description of Artificial Sequence: Synthetic oligonucleotide
gcugaccuca

SEQ ID NO: 95807 - RNA, 13 nt, Artificial Sequence
  Description of Artificial Sequence: Synthetic oligonucleotide
uuauucagaucgc

SEQ ID NO: 95808 - RNA, 12 nt, Artificial Sequence
  Description of Artificial Sequence: Synthetic oligonucleotide
ggguucugggau

SEQ ID NO: 95809 - RNA, 14 nt, Artificial Sequence
  Description of Artificial Sequence: Synthetic oligonucleotide
uauuggaaauuaug

SEQ ID NO: 95810 - RNA, 12 nt, Artificial Sequence
  Description of Artificial Sequence: Synthetic oligonucleotide
uggaagcacuag

SEQ ID NO: 95811 - RNA, 12 nt, Artificial Sequence
  Description of Artificial Sequence: Synthetic oligonucleotide
uuuuuaugugga

SEQ ID NO: 95812 - RNA, 11 nt, Artificial Sequence
  Description of Artificial Sequence: Synthetic oligonucleotide
gaauugguaga

SEQ ID NO: 95813 - RNA, 12 nt, Artificial Sequence
  Description of Artificial Sequence: Synthetic oligonucleotide
uagacuuggaga

SEQ ID NO: 95814 - RNA, 12 nt, Artificial Sequence
  Description of Artificial Sequence: Synthetic oligonucleotide
uacaguauucca

SEQ ID NO: 95815 - RNA, 14 nt, Artificial Sequence
  Description of Artificial Sequence: Synthetic oligonucleotide
cacugaugaauuaa

SEQ ID NO: 95816 - RNA, 11 nt, Artificial Sequence
  Description of Artificial Sequence: Synthetic oligonucleotide
cacaucaucac

SEQ ID NO: 95817 - RNA, 12 nt, Artificial Sequence
  Description of Artificial Sequence: Synthetic oligonucleotide
ucaccaaacaga

SEQ ID NO: 95818 - RNA, 11 nt, Artificial Sequence
  Description of Artificial Sequence: Synthetic oligonucleotide
gaacaugaugg

SEQ ID NO: 95819 - RNA, 11 nt, Artificial Sequence
  Description of Artificial Sequence: Synthetic oligonucleotide
auguagacugc

SEQ ID NO: 95820 - RNA, 12 nt, Artificial Sequence
  Description of Artificial Sequence: Synthetic oligonucleotide
gaucuauuuaug

SEQ ID NO: 95821 - RNA, 11 nt, Artificial Sequence
  Description of Artificial Sequence: Synthetic oligonucleotide
cacuauuauca

SEQ ID NO: 95822 - RNA, 10 nt, Artificial Sequence
  Description of Artificial Sequence: Synthetic oligonucleotide
ucaguucugc

SEQ ID NO: 95823 - RNA, 12 nt, Artificial Sequence
  Description of Artificial Sequence: Synthetic oligonucleotide
gauuaaaccuac

SEQ ID NO: 95824 - RNA, 12 nt, Artificial Sequence
  Description of Artificial Sequence: Synthetic oligonucleotide
uaaaauccuucu

SEQ ID NO: 95825 - RNA, 11 nt, Artificial Sequence
  Description of Artificial Sequence: Synthetic oligonucleotide
augcuguagac

SEQ ID NO: 95826 - RNA, 12 nt, Artificial Sequence
  Description of Artificial Sequence: Synthetic oligonucleotide
ugauaggaauag

SEQ ID NO: 95827 - RNA, 10 nt, Artificial Sequence
  Description of Artificial Sequence: Synthetic oligonucleotide
auggcccuga

SEQ ID NO: 95828 - RNA, 10 nt, Artificial Sequence
  Description of Artificial Sequence: Synthetic oligonucleotide
uccucaagca

SEQ ID NO: 95829 - RNA, 9 nt, Artificial Sequence
  Description of Artificial Sequence: Synthetic oligonucleotide
uucagccca

SEQ ID NO: 95830 - RNA, 10 nt, Artificial Sequence
  Description of Artificial Sequence: Synthetic oligonucleotide
cugcugaacc

SEQ ID NO: 95831 - RNA, 11 nt, Artificial Sequence
  Description of Artificial Sequence: Synthetic oligonucleotide
aguucucuuca

SEQ ID NO: 95832 - RNA, 10 nt, Artificial Sequence
  Description of Artificial Sequence: Synthetic oligonucleotide
cagccuagag

SEQ ID NO: 95833 - RNA, 12 nt, Artificial Sequence
  Description of Artificial Sequence: Synthetic oligonucleotide
ucugugaagugu

SEQ ID NO: 95834 - RNA, 13 nt, Artificial Sequence
  Description of Artificial Sequence: Synthetic oligonucleotide
gagaaaauuucaa

SEQ ID NO: 95835 - RNA, 10 nt, Artificial Sequence
  Description of Artificial Sequence: Synthetic oligonucleotide
auccuccuga

SEQ ID NO: 95836 - RNA, 11 nt, Artificial Sequence
  Description of Artificial Sequence: Synthetic oligonucleotide
ugacaucauau

SEQ ID NO: 95837 - RNA, 12 nt, Artificial Sequence
  Description of Artificial Sequence: Synthetic oligonucleotide
aucuucaucaua

SEQ ID NO: 95838 - RNA, 12 nt, Artificial Sequence
  Description of Artificial Sequence: Synthetic oligonucleotide
acuagcuauuaa

SEQ ID NO: 95839 - RNA, 13 nt, Artificial Sequence
  Description of Artificial Sequence: Synthetic oligonucleotide
cucuacuaaaaau

SEQ ID NO: 95840 - RNA, 11 nt, Artificial Sequence
  Description of Artificial Sequence: Synthetic oligonucleotide
cuaucucgccu

SEQ ID NO: 95841 - RNA, 12 nt, Artificial Sequence
  Description of Artificial Sequence: Synthetic oligonucleotide
uucgguccaguu

SEQ ID NO: 95842 - RNA, 10 nt, Artificial Sequence
  Description of Artificial Sequence: Synthetic oligonucleotide
auguagccgc

SEQ ID NO: 95843 - RNA, 11 nt, Artificial Sequence
  Description of Artificial Sequence: Synthetic oligonucleotide
gaggagacuug

SEQ ID NO: 95844 - RNA, 11 nt, Artificial Sequence
  Description of Artificial Sequence: Synthetic oligonucleotide
aguagugagga

SEQ ID NO: 95845 - RNA, 13 nt, Artificial Sequence
  Description of Artificial Sequence: Synthetic oligonucleotide
agaugaguacaaa

SEQ ID NO: 95846 - RNA, 12 nt, Artificial Sequence
  Description of Artificial Sequence: Synthetic oligonucleotide
uuguuaaugggc

SEQ ID NO: 95847 - RNA, 12 nt, Artificial Sequence
  Description of Artificial Sequence: Synthetic oligonucleotide
uuuuaauuuauu

SEQ ID NO: 95848 - RNA, 11 nt, Artificial Sequence
  Description of Artificial Sequence: Synthetic oligonucleotide
auuuaaauaug

SEQ ID NO: 95849 - RNA, 12 nt, Artificial Sequence
  Description of Artificial Sequence: Synthetic oligonucleotide
auccuuuguuuc

SEQ ID NO: 95850 - RNA, 13 nt, Artificial Sequence
  Description of Artificial Sequence: Synthetic oligonucleotide
gucuaaguguuug

SEQ ID NO: 95851 - RNA, 11 nt, Artificial Sequence
  Description of Artificial Sequence: Synthetic oligonucleotide
ccugugacaaa

SEQ ID NO: 95852 - RNA, 12 nt, Artificial Sequence
  Description of Artificial Sequence: Synthetic oligonucleotide
caggcugaauua

SEQ ID NO: 95853 - RNA, 13 nt, Artificial Sequence
  Description of Artificial Sequence: Synthetic oligonucleotide
ucauucuuacaau

SEQ ID NO: 95854 - RNA, 14 nt, Artificial Sequence
  Description of Artificial Sequence: Synthetic oligonucleotide
cauucuuacaauug

SEQ ID NO: 95855 - RNA, 11 nt, Artificial Sequence
  Description of Artificial Sequence: Synthetic oligonucleotide
agagaguguac

SEQ ID NO: 95856 - RNA, 11 nt, Artificial Sequence
  Description of Artificial Sequence: Synthetic oligonucleotide
gaacucagcag

SEQ ID NO: 95857 - RNA, 12 nt, Artificial Sequence
  Description of Artificial Sequence: Synthetic oligonucleotide
uuauuuucagua

SEQ ID NO: 95858 - RNA, 11 nt, Artificial Sequence
  Description of Artificial Sequence: Synthetic oligonucleotide
cuuaaauggaa

SEQ ID NO: 95859 - RNA, 12 nt, Artificial Sequence
  Description of Artificial Sequence: Synthetic oligonucleotide
gccuaaaauugu

SEQ ID NO: 95860 - RNA, 12 nt, Artificial Sequence
  Description of Artificial Sequence: Synthetic oligonucleotide
acuaacaucugg

SEQ ID NO: 95861 - RNA, 11 nt, Artificial Sequence
  Description of Artificial Sequence: Synthetic oligonucleotide
gacugugagcu

SEQ ID NO: 95862 - RNA, 13 nt, Artificial Sequence
  Description of Artificial Sequence: Synthetic oligonucleotide
gcuuuuuauuaau

SEQ ID NO: 95863 - RNA, 12 nt, Artificial Sequence
  Description of Artificial Sequence: Synthetic oligonucleotide
ucuucuuacauu

SEQ ID NO: 95864 - RNA, 14 nt, Artificial Sequence
  Description of Artificial Sequence: Synthetic oligonucleotide
auuuguaaaaaugu

SEQ ID NO: 95865 - RNA, 14 nt, Artificial Sequence
  Description of Artificial Sequence: Synthetic oligonucleotide
ucuuaauucauauu

SEQ ID NO: 95866 - RNA, 12 nt, Artificial Sequence
  Description of Artificial Sequence: Synthetic oligonucleotide
aacuaaucauga

SEQ ID NO: 95867 - RNA, 11 nt, Artificial Sequence
  Description of Artificial Sequence: Synthetic oligonucleotide
cugcucuuggg

SEQ ID NO: 95868 - RNA, 12 nt, Artificial Sequence
  Description of Artificial Sequence: Synthetic oligonucleotide
aguagcuuugag

SEQ ID NO: 95869 - RNA, 13 nt, Artificial Sequence
  Description of Artificial Sequence: Synthetic oligonucleotide
acguaauauuuca

SEQ ID NO: 95870 - RNA, 12 nt, Artificial Sequence
  Description of Artificial Sequence: Synthetic oligonucleotide
auucucuucacu

SEQ ID NO: 95871 - RNA, 13 nt, Artificial Sequence
  Description of Artificial Sequence: Synthetic oligonucleotide
uaaugcuaagaaa

SEQ ID NO: 95872 - RNA, 11 nt, Artificial Sequence
  Description of Artificial Sequence: Synthetic oligonucleotide
cugaaaaucaa

SEQ ID NO: 95873 - RNA, 13 nt, Artificial Sequence
  Description of Artificial Sequence: Synthetic oligonucleotide
auaugauuacuuu

SEQ ID NO: 95874 - RNA, 13 nt, Artificial Sequence
  Description of Artificial Sequence: Synthetic oligonucleotide
auuuuguucuaca

SEQ ID NO: 95875 - RNA, 11 nt, Artificial Sequence
  Description of Artificial Sequence: Synthetic oligonucleotide
ccgggacucuc

SEQ ID NO: 95876 - RNA, 13 nt, Artificial Sequence
  Description of Artificial Sequence: Synthetic oligonucleotide
cuuuaaaguaaag

SEQ ID NO: 95877 - RNA, 12 nt, Artificial Sequence
  Description of Artificial Sequence: Synthetic oligonucleotide
cuggaagccugg

SEQ ID NO: 95878 - RNA, 13 nt, Artificial Sequence
  Description of Artificial Sequence: Synthetic oligonucleotide
aaacaaaagagag

SEQ ID NO: 95879 - RNA, 12 nt, Artificial Sequence
  Description of Artificial Sequence: Synthetic oligonucleotide
ucaguuaugccg

SEQ ID NO: 95880 - RNA, 12 nt, Artificial Sequence
  Description of Artificial Sequence: Synthetic oligonucleotide
aaaagaagucca

SEQ ID NO: 95881 - RNA, 10 nt, Artificial Sequence
  Description of Artificial Sequence: Synthetic oligonucleotide
ggugagguua

SEQ ID NO: 95882 - RNA, 10 nt, Artificial Sequence
  Description of Artificial Sequence: Synthetic oligonucleotide
ggaagaggac

SEQ ID NO: 95883 - RNA, 12 nt, Artificial Sequence
  Description of Artificial Sequence: Synthetic oligonucleotide
agcaaguauugu

SEQ ID NO: 95884 - RNA, 11 nt, Artificial Sequence
  Description of Artificial Sequence: Synthetic oligonucleotide
uuguagcacuc

SEQ ID NO: 95885 - RNA, 13 nt, Artificial Sequence
  Description of Artificial Sequence: Synthetic oligonucleotide
caaaaccacaaau

SEQ ID NO: 95886 - RNA, 11 nt, Artificial Sequence
  Description of Artificial Sequence: Synthetic oligonucleotide
aagcccauaca

SEQ ID NO: 95887 - RNA, 10 nt, Artificial Sequence
  Description of Artificial Sequence: Synthetic oligonucleotide
gcccauacag

SEQ ID NO: 95888 - RNA, 11 nt, Artificial Sequence
  Description of Artificial Sequence: Synthetic oligonucleotide
agaaaccuucc

SEQ ID NO: 95889 - RNA, 9 nt, Artificial Sequence
  Description of Artificial Sequence: Synthetic oligonucleotide
uauaccuac

SEQ ID NO: 95890 - RNA, 12 nt, Artificial Sequence
  Description of Artificial Sequence: Synthetic oligonucleotide
ccaguuuucgga

SEQ ID NO: 95891 - RNA, 8 nt, Artificial Sequence
  Description of Artificial Sequence: Synthetic oligonucleotide
gaacaggg

SEQ ID NO: 95892 - RNA, 12 nt, Artificial Sequence
  Description of Artificial Sequence: Synthetic oligonucleotide
uaacuuuccagu

SEQ ID NO: 95893 - RNA, 13 nt, Artificial Sequence
  Description of Artificial Sequence: Synthetic oligonucleotide
aaguuugguuuug

SEQ ID NO: 95894 - RNA, 11 nt, Artificial Sequence
  Description of Artificial Sequence: Synthetic oligonucleotide
uucccacugua

SEQ ID NO: 95895 - RNA, 12 nt, Artificial Sequence
  Description of Artificial Sequence: Synthetic oligonucleotide
gauaccauauga

SEQ ID NO: 95896 - RNA, 10 nt, Artificial Sequence
  Description of Artificial Sequence: Synthetic oligonucleotide
acaugggcug

SEQ ID NO: 95897 - RNA, 12 nt, Artificial Sequence
  Description of Artificial Sequence: Synthetic oligonucleotide
aacuuuuucaua

SEQ ID NO: 95898 - RNA, 11 nt, Artificial Sequence
  Description of Artificial Sequence: Synthetic oligonucleotide
augaggccgga

SEQ ID NO: 95899 - RNA, 10 nt, Artificial Sequence
  Description of Artificial Sequence: Synthetic oligonucleotide
cugcauuugu

SEQ ID NO: 95900 - RNA, 12 nt, Artificial Sequence
  Description of Artificial Sequence: Synthetic oligonucleotide
auguuuacuacc

SEQ ID NO: 95901 - RNA, 14 nt, Artificial Sequence
  Description of Artificial Sequence: Synthetic oligonucleotide
auuuuuugaugaaa

SEQ ID NO: 95902 - RNA, 13 nt, Artificial Sequence
  Description of Artificial Sequence: Synthetic oligonucleotide
agugugugaauuu

SEQ ID NO: 95903 - RNA, 12 nt, Artificial Sequence
  Description of Artificial Sequence: Synthetic oligonucleotide
agcaauguaugu

SEQ ID NO: 95904 - RNA, 13 nt, Artificial Sequence
  Description of Artificial Sequence: Synthetic oligonucleotide
aagcacauauaua

SEQ ID NO: 95905 - RNA, 13 nt, Artificial Sequence
  Description of Artificial Sequence: Synthetic oligonucleotide
uaauaguuucucc

SEQ ID NO: 95906 - RNA, 12 nt, Artificial Sequence
  Description of Artificial Sequence: Synthetic oligonucleotide
guuucuccaaau

SEQ ID NO: 95907 - RNA, 12 nt, Artificial Sequence
  Description of Artificial Sequence: Synthetic oligonucleotide
acuuccuagaaa

SEQ ID NO: 95908 - RNA, 12 nt, Artificial Sequence
  Description of Artificial Sequence: Synthetic oligonucleotide
acaccauauaug

SEQ ID NO: 95909 - RNA, 13 nt, Artificial Sequence
  Description of Artificial Sequence: Synthetic oligonucleotide
uauaugaauggag

SEQ ID NO: 95910 - RNA, 12 nt, Artificial Sequence
  Description of Artificial Sequence: Synthetic oligonucleotide
cauuuacaggga

SEQ ID NO: 95911 - RNA, 12 nt, Artificial Sequence
  Description of Artificial Sequence: Synthetic oligonucleotide
auuuacagggac

SEQ ID NO: 95912 - RNA, 9 nt, Artificial Sequence
  Description of Artificial Sequence: Synthetic oligonucleotide
gggaccuga

SEQ ID NO: 95913 - RNA, 13 nt, Artificial Sequence
  Description of Artificial Sequence: Synthetic oligonucleotide
guuugacugcauc

SEQ ID NO: 95914 - RNA, 12 nt, Artificial Sequence
  Description of Artificial Sequence: Synthetic oligonucleotide
uugacugcaucg

SEQ ID NO: 95915 - RNA, 11 nt, Artificial Sequence
  Description of Artificial Sequence: Synthetic oligonucleotide
aguucacaggg

SEQ ID NO: 95916 - RNA, 12 nt, Artificial Sequence
  Description of Artificial Sequence: Synthetic oligonucleotide
gcaccucugucc

SEQ ID NO: 95917 - RNA, 14 nt, Artificial Sequence
  Description of Artificial Sequence: Synthetic oligonucleotide
guuugucuuuuuaa

SEQ ID NO: 95918 - RNA, 13 nt, Artificial Sequence
  Description of Artificial Sequence: Synthetic oligonucleotide
uugucuuuuuaag

SEQ ID NO: 95919 - RNA, 12 nt, Artificial Sequence
  Description of Artificial Sequence: Synthetic oligonucleotide
cuaaagguuguc

SEQ ID NO: 95920 - RNA, 11 nt, Artificial Sequence
  Description of Artificial Sequence: Synthetic oligonucleotide
agguugucgac

SEQ ID NO: 95921 - RNA, 12 nt, Artificial Sequence
  Description of Artificial Sequence: Synthetic oligonucleotide
ccuggcaauugu

SEQ ID NO: 95922 - RNA, 11 nt, Artificial Sequence
  Description of Artificial Sequence: Synthetic oligonucleotide
guggugcgagg

SEQ ID NO: 95923 - RNA, 12 nt, Artificial Sequence
  Description of Artificial Sequence: Synthetic oligonucleotide
gagacaugaaau

SEQ ID NO: 95924 - RNA, 12 nt, Artificial Sequence
  Description of Artificial Sequence: Synthetic oligonucleotide
uauauuucucca

SEQ ID NO: 95925 - RNA, 9 nt, Artificial Sequence
  Description of Artificial Sequence: Synthetic oligonucleotide
augaaggcu

SEQ ID NO: 95926 - RNA, 10 nt, Artificial Sequence
  Description of Artificial Sequence: Synthetic oligonucleotide
cuggaguggu

SEQ ID NO: 95927 - RNA, 10 nt, Artificial Sequence
  Description of Artificial Sequence: Synthetic oligonucleotide
ggaagagagg

SEQ ID NO: 95928 - RNA, 11 nt, Artificial Sequence
  Description of Artificial Sequence: Synthetic oligonucleotide
uugcaucgggc

SEQ ID NO: 95929 - RNA, 12 nt, Artificial Sequence
  Description of Artificial Sequence: Synthetic oligonucleotide
uauccuacugug

SEQ ID NO: 95930 - RNA, 12 nt, Artificial Sequence
  Description of Artificial Sequence: Synthetic oligonucleotide
ccuacuguguaa

SEQ ID NO: 95931 - RNA, 11 nt, Artificial Sequence
  Description of Artificial Sequence: Synthetic oligonucleotide
cuuguagugua

SEQ ID NO: 95932 - RNA, 12 nt, Artificial Sequence
  Description of Artificial Sequence: Synthetic oligonucleotide
cuuuguugauug

SEQ ID NO: 95933 - RNA, 13 nt, Artificial Sequence
  Description of Artificial Sequence: Synthetic oligonucleotide
uuguugauugaaa

SEQ ID NO: 95934 - RNA, 14 nt, Artificial Sequence
  Description of Artificial Sequence: Synthetic oligonucleotide
ucuuuuucuuccau

SEQ ID NO: 95935 - RNA, 12 nt, Artificial Sequence
  Description of Artificial Sequence: Synthetic oligonucleotide
aucuuccuucua

SEQ ID NO: 95936 - RNA, 12 nt, Artificial Sequence
  Description of Artificial Sequence: Synthetic oligonucleotide
ugaaugcuucau

SEQ ID NO: 95937 - RNA, 12 nt, Artificial Sequence
  Description of Artificial Sequence: Synthetic oligonucleotide
gaaugcuucaug

SEQ ID NO: 95938 - RNA, 12 nt, Artificial Sequence
  Description of Artificial Sequence: Synthetic oligonucleotide
auucuacuuuga

SEQ ID NO: 95939 - RNA, 12 nt, Artificial Sequence
  Description of Artificial Sequence: Synthetic oligonucleotide
gcaacuacagac

SEQ ID NO: 95940 - RNA, 12 nt, Artificial Sequence
  Description of Artificial Sequence: Synthetic oligonucleotide
accaaggucaac

SEQ ID NO: 95941 - RNA, 12 nt, Artificial Sequence
  Description of Artificial Sequence: Synthetic oligonucleotide
gacuaucucgac

SEQ ID NO: 95942 - RNA, 12 nt, Artificial Sequence
  Description of Artificial Sequence: Synthetic oligonucleotide
accuucccaaac

SEQ ID NO: 95943 - RNA, 13 nt, Artificial Sequence
  Description of Artificial Sequence: Synthetic oligonucleotide
caagcuuagaacu

SEQ ID NO: 95944 - RNA, 14 nt, Artificial Sequence
  Description of Artificial Sequence: Synthetic oligonucleotide
gcuuagaacuuuaa

SEQ ID NO: 95945 - RNA, 13 nt, Artificial Sequence
  Description of Artificial Sequence: Synthetic oligonucleotide
aacuuuaagcaac

SEQ ID NO: 95946 - RNA, 10 nt, Artificial Sequence
  Description of Artificial Sequence: Synthetic oligonucleotide
agaccaccac

SEQ ID NO: 95947 - RNA, 13 nt, Artificial Sequence
  Description of Artificial Sequence: Synthetic oligonucleotide
cgagaaauaaagu

SEQ ID NO: 95948 - RNA, 13 nt, Artificial Sequence
  Description of Artificial Sequence: Synthetic oligonucleotide
gagaaauaaaguu

SEQ ID NO: 95949 - RNA, 11 nt, Artificial Sequence
  Description of Artificial Sequence: Synthetic oligonucleotide
ggaaaugaucc

SEQ ID NO: 95950 - RNA, 12 nt, Artificial Sequence
  Description of Artificial Sequence: Synthetic oligonucleotide
aagaaaugaaac

SEQ ID NO: 95951 - RNA, 12 nt, Artificial Sequence
  Description of Artificial Sequence: Synthetic oligonucleotide
uuuccauccucc

SEQ ID NO: 95952 - RNA, 14 nt, Artificial Sequence
  Description of Artificial Sequence: Synthetic oligonucleotide
cugaaaaucuuuga

SEQ ID NO: 95953 - RNA, 10 nt, Artificial Sequence
  Description of Artificial Sequence: Synthetic oligonucleotide
gccguucagg

SEQ ID NO: 95954 - RNA, 12 nt, Artificial Sequence
  Description of Artificial Sequence: Synthetic oligonucleotide
aggguccagaag

SEQ ID NO: 95955 - RNA, 12 nt, Artificial Sequence
  Description of Artificial Sequence: Synthetic oligonucleotide
caagacugcuug

SEQ ID NO: 95956 - RNA, 12 nt, Artificial Sequence
  Description of Artificial Sequence: Synthetic oligonucleotide
ccaugucuuugg

SEQ ID NO: 95957 - RNA, 10 nt, Artificial Sequence
  Description of Artificial Sequence: Synthetic oligonucleotide
ccugaaacac

SEQ ID NO: 95958 - RNA, 11 nt, Artificial Sequence
  Description of Artificial Sequence: Synthetic oligonucleotide
cucuguaccuc

SEQ ID NO: 95959 - RNA, 11 nt, Artificial Sequence
  Description of Artificial Sequence: Synthetic oligonucleotide
gcaagacaaga

SEQ ID NO: 95960 - RNA, 12 nt, Artificial Sequence
  Description of Artificial Sequence: Synthetic oligonucleotide
caagacaagaaa

SEQ ID NO: 95961 - RNA, 11 nt, Artificial Sequence
  Description of Artificial Sequence: Synthetic oligonucleotide
guacaagaucc

SEQ ID NO: 95962 - RNA, 11 nt, Artificial Sequence
  Description of Artificial Sequence: Synthetic oligonucleotide
guacuugcaga

SEQ ID NO: 95963 - RNA, 12 nt, Artificial Sequence
  Description of Artificial Sequence: Synthetic oligonucleotide
gaucgauacaga

SEQ ID NO: 95964 - RNA, 12 nt, Artificial Sequence
  Description of Artificial Sequence: Synthetic oligonucleotide
auaaaaauaaau

SEQ ID NO: 95965 - RNA, 12 nt, Artificial Sequence
  Description of Artificial Sequence: Synthetic oligonucleotide
aaaaauaaauau

SEQ ID NO: 95966 - RNA, 12 nt, Artificial Sequence
  Description of Artificial Sequence: Synthetic oligonucleotide
uugacugcugug

SEQ ID NO: 95967 - RNA, 12 nt, Artificial Sequence
  Description of Artificial Sequence: Synthetic oligonucleotide
gagaugagagac

SEQ ID NO: 95968 - RNA, 9 nt, Artificial Sequence
  Description of Artificial Sequence: Synthetic oligonucleotide
cccacuugg

SEQ ID NO: 95969 - RNA, 2084 nt, Homo sapiens
aaccgcaucugcagcgagcaacugagaagccaagacugagccggcggccgcggcgcagcgaacgagcagugaccgugcuccuacccagcucugcuucacagcgcccaccugucuccgccccucggccccucgcccggcuuugccuaaccgccacgaugauguucucgggcuucaacgcagacuacgaggcgucauccucccgcugcagcagcgcguccccggccggggauagccucucuuacuaccacucacccgcagacuccuucuccagcaugggcucgccugucaacgcgcaggacuucugcacggaccuggccgucuccagugccaacuucauucccacggucacugccaucucgaccaguccggaccugcaguggcuggugcagcccgcccucgucuccucuguggccccaucgcagaccagagccccucacccuuucggaguccccgcccccuccgcuggggcuuacuccagggcuggcguugugaagaccaugacaggaggccgagcgcagagcauuggcaggaggggcaagguggaacaguuaucuccagaagaagaagagaaaaggagaauccgaagggaaaggaauaagauggcugcagccaaaugccgcaaccggaggagggagcugacugauacacuccaagcggagacagaccaacuagaagaugagaagucugcuuugcagaccgagauugccaaccugcugaaggagaaggaaaaacuagaguucauccuggcagcucaccgaccugccugcaagaucccugaugaccugggcuucccagaagagaugucuguggcuucccuugaucugacugggggccugccagagguugccaccccggagucugaggaggccuucacccugccucuccucaaugacccugagcccaagcccucaguggaaccugucaagagcaucagcagcauggagcugaagaccgagcccuuugaugacuuccuguucccagcaucauccaggcccaguggcucugagacagcccgcuccgugccagacauggaccuaucuggguccuucuaugcagcagacugggagccucugcacaguggcucccuggggauggggcccauggccacagagcuggagccccugugcacuccgguggucaccuguacucccagcugcacugcuuacacgucuuccuucgucuucaccuaccccgaggcugacuccuuccccagcugugcagcugcccaccgcaagggcagcagcagcaaugagccuuccucugacucgcucagcucacccacgcugcuggcccugugagggggcagggaaggggaggcagccggcacccacaagugccacugcccgagcuggugcauuacagagaggagaaacacaucuucccuagaggguuccuguagaccuagggaggaccuuaucugugcgugaaacacaccaggcugugggccucaaggacuugaaagcauccauguguggacucaaguccuuaccucuuccggagauguagcaaaacgcauggaguguguauuguucccagugacacuucagagagcugguaguuaguagcauguugagccaggccugggucugugucucuuuucucuuucuccuuagucuucucauagcauuaacuaaucuauuggguucauuauuggaauuaaccuggugcuggauauuuucaaauuguaucuagugcagcugauuuuaacaauaacuacuguguuccuggcaauaguguguucugauuagaaaugaccaauauuauacuaagaaaagauacgacuuuauuuucugguagauagaaauaaauagcuauauccauguacuguaguuuuucuucaacaucaauguucauuguaauguuacugaucaugcauuguugagguggucugaauguucugacauuaacaguuuuccaugaaaacguuuuauuguguuuuuaauuuauuuauuaagauggauucucagauauuuauauuuuuauuuuauuuuuuucuaccuugaggucuuuugacauguggaaagugaauuugaaugaaaaauuuaagcauuguuugcuuauuguuccaagacauugucaauaaa

SEQ ID NO: 95970 - RNA, 19 nt, Artificial Sequence
  Description of Artificial Sequence: Synthetic oligonucleotide
aaccgcaucugcagcgagc

SEQ ID NO: 95971 - RNA, 19 nt, Artificial Sequence
  Description of Artificial Sequence: Synthetic oligonucleotide
caacugagaagccaagacu

SEQ ID NO: 95972 - RNA, 19 nt, Artificial Sequence
  Description of Artificial Sequence: Synthetic oligonucleotide
ugagccggcggccgcggcg

SEQ ID NO: 95973 - RNA, 19 nt, Artificial Sequence
  Description of Artificial Sequence: Synthetic oligonucleotide
gcagcgaacgagcagugac

SEQ ID NO: 95974 - RNA, 19 nt, Artificial Sequence
  Description of Artificial Sequence: Synthetic oligonucleotide
ccgugcuccuacccagcuc

SEQ ID NO: 95975 - RNA, 19 nt, Artificial Sequence
  Description of Artificial Sequence: Synthetic oligonucleotide
cugcuucacagcgcccacc

SEQ ID NO: 95976 - RNA, 19 nt, Artificial Sequence
  Description of Artificial Sequence: Synthetic oligonucleotide
cugucuccgccccucggcc

SEQ ID NO: 95977 - RNA, 19 nt, Artificial Sequence
  Description of Artificial Sequence: Synthetic oligonucleotide
cccucgcccggcuuugccu

SEQ ID NO: 95978 - RNA, 19 nt, Artificial Sequence
  Description of Artificial Sequence: Synthetic oligonucleotide
uaaccgccacgaugauguu

SEQ ID NO: 95979 - RNA, 19 nt, Artificial Sequence
  Description of Artificial Sequence: Synthetic oligonucleotide
ucucgggcuucaacgcaga

SEQ ID NO: 95980 - RNA, 19 nt, Artificial Sequence
  Description of Artificial Sequence: Synthetic oligonucleotide
acuacgaggcgucauccuc

SEQ ID NO: 95981 - RNA, 19 nt, Artificial Sequence
  Description of Artificial Sequence: Synthetic oligonucleotide
cccgcugcagcagcgcguc

SEQ ID NO: 95982 - RNA, 19 nt, Artificial Sequence
  Description of Artificial Sequence: Synthetic oligonucleotide
ccccggccggggauagccu

SEQ ID NO: 95983 - RNA, 19 nt, Artificial Sequence
  Description of Artificial Sequence: Synthetic oligonucleotide
ucucuuacuaccacucacc

SEQ ID NO: 95984 - RNA, 19 nt, Artificial Sequence
  Description of Artificial Sequence: Synthetic oligonucleotide
ccgcagacuccuucuccag

SEQ ID NO: 95985 - RNA, 19 nt, Artificial Sequence
  Description of Artificial Sequence: Synthetic oligonucleotide
gcaugggcucgccugucaa

SEQ ID NO: 95986 - RNA, 19 nt, Artificial Sequence
  Description of Artificial Sequence: Synthetic oligonucleotide
acgcgcaggacuucugcac

SEQ ID NO: 95987 - RNA, 19 nt, Artificial Sequence
  Description of Artificial Sequence: Synthetic oligonucleotide
cggaccuggccgucuccag

SEQ ID NO: 95988 - RNA, 19 nt, Artificial Sequence
  Description of Artificial Sequence: Synthetic oligonucleotide
gugccaacuucauucccac

SEQ ID NO: 95989 - RNA, 19 nt, Artificial Sequence
  Description of Artificial Sequence: Synthetic oligonucleotide
cggucacugccaucucgac

SEQ ID NO: 95990 - RNA, 19 nt, Artificial Sequence
  Description of Artificial Sequence: Synthetic oligonucleotide
ccaguccggaccugcagug

SEQ ID NO: 95991 - RNA, 19 nt, Artificial Sequence
  Description of Artificial Sequence: Synthetic oligonucleotide
ggcuggugcagcccgcccu

SEQ ID NO: 95992 - RNA, 19 nt, Artificial Sequence
  Description of Artificial Sequence: Synthetic oligonucleotide
ucgucuccucuguggcccc

SEQ ID NO: 95993 - RNA, 19 nt, Artificial Sequence
  Description of Artificial Sequence: Synthetic oligonucleotide
caucgcagaccagagcccc

SEQ ID NO: 95994 - RNA, 19 nt, Artificial Sequence
  Description of Artificial Sequence: Synthetic oligonucleotide
cucacccuuucggaguccc

SEQ ID NO: 95995 - RNA, 19 nt, Artificial Sequence
  Description of Artificial Sequence: Synthetic oligonucleotide
ccgcccccuccgcuggggc

SEQ ID NO: 95996 - RNA, 19 nt, Artificial Sequence
  Description of Artificial Sequence: Synthetic oligonucleotide
cuuacuccagggcuggcgu

SEQ ID NO: 95997 - RNA, 19 nt, Artificial Sequence
  Description of Artificial Sequence: Synthetic oligonucleotide
uugugaagaccaugacagg

SEQ ID NO: 95998 - RNA, 19 nt, Artificial Sequence
  Description of Artificial Sequence: Synthetic oligonucleotide
gaggccgagcgcagagcau

SEQ ID NO: 95999 - RNA, 19 nt, Artificial Sequence
  Description of Artificial Sequence: Synthetic oligonucleotide
uuggcaggaggggcaaggu

SEQ ID NO: 96000 - RNA, 19 nt, Artificial Sequence
  Description of Artificial Sequence: Synthetic oligonucleotide
uggaacaguuaucuccaga

SEQ ID NO: 96001 - RNA, 19 nt, Artificial Sequence
  Description of Artificial Sequence: Synthetic oligonucleotide
aagaagaagagaaaaggag

SEQ ID NO: 96002 - RNA, 19 nt, Artificial Sequence
  Description of Artificial Sequence: Synthetic oligonucleotide
gaauccgaagggaaaggaa

SEQ ID NO: 96003 - RNA, 19 nt, Artificial Sequence
  Description of Artificial Sequence: Synthetic oligonucleotide
auaagauggcugcagccaa

SEQ ID NO: 96004 - RNA, 19 nt, Artificial Sequence
  Description of Artificial Sequence: Synthetic oligonucleotide
aaugccgcaaccggaggag

SEQ ID NO: 96005 - RNA, 19 nt, Artificial Sequence
  Description of Artificial Sequence: Synthetic oligonucleotide
gggagcugacugauacacu

SEQ ID NO: 96006 - RNA, 19 nt, Artificial Sequence
  Description of Artificial Sequence: Synthetic oligonucleotide
uccaagcggagacagacca

SEQ ID NO: 96007 - RNA, 19 nt, Artificial Sequence
  Description of Artificial Sequence: Synthetic oligonucleotide
aacuagaagaugagaaguc

SEQ ID NO: 96008 - RNA, 19 nt, Artificial Sequence
  Description of Artificial Sequence: Synthetic oligonucleotide
cugcuuugcagaccgagau

SEQ ID NO: 96009 - RNA, 19 nt, Artificial Sequence
  Description of Artificial Sequence: Synthetic oligonucleotide
uugccaaccugcugaagga

SEQ ID NO: 96010 - RNA, 19 nt, Artificial Sequence
  Description of Artificial Sequence: Synthetic oligonucleotide
agaaggaaaaacuagaguu

SEQ ID NO: 96011 - RNA, 19 nt, Artificial Sequence
  Description of Artificial Sequence: Synthetic oligonucleotide
ucauccuggcagcucaccg

SEQ ID NO: 96012 - RNA, 19 nt, Artificial Sequence
  Description of Artificial Sequence: Synthetic oligonucleotide
gaccugccugcaagauccc

SEQ ID NO: 96013 - RNA, 19 nt, Artificial Sequence
  Description of Artificial Sequence: Synthetic oligonucleotide
cugaugaccugggcuuccc

SEQ ID NO: 96014 - RNA, 19 nt, Artificial Sequence
  Description of Artificial Sequence: Synthetic oligonucleotide
cagaagagaugucuguggc

SEQ ID NO: 96015 - RNA, 19 nt, Artificial Sequence
  Description of Artificial Sequence: Synthetic oligonucleotide
cuucccuugaucugacugg

SEQ ID NO: 96016 - RNA, 19 nt, Artificial Sequence
  Description of Artificial Sequence: Synthetic oligonucleotide
ggggccugccagagguugc

SEQ ID NO: 96017 - RNA, 19 nt, Artificial Sequence
  Description of Artificial Sequence: Synthetic oligonucleotide
ccaccccggagucugagga

SEQ ID NO: 96018 - RNA, 19 nt, Artificial Sequence
  Description of Artificial Sequence: Synthetic oligonucleotide
aggccuucacccugccucu

SEQ ID NO: 96019 - RNA, 19 nt, Artificial Sequence
  Description of Artificial Sequence: Synthetic oligonucleotide
uccucaaugacccugagcc

SEQ ID NO: 96020 - RNA, 19 nt, Artificial Sequence
  Description of Artificial Sequence: Synthetic oligonucleotide
ccaagcccucaguggaacc

SEQ ID NO: 96021 - RNA, 19 nt, Artificial Sequence
  Description of Artificial Sequence: Synthetic oligonucleotide
cugucaagagcaucagcag

SEQ ID NO: 96022 - RNA, 19 nt, Artificial Sequence
  Description of Artificial Sequence: Synthetic oligonucleotide
gcauggagcugaagaccga

SEQ ID NO: 96023 - RNA, 19 nt, Artificial Sequence
  Description of Artificial Sequence: Synthetic oligonucleotide
agcccuuugaugacuuccu

SEQ ID NO: 96024 - RNA, 19 nt, Artificial Sequence
  Description of Artificial Sequence: Synthetic oligonucleotide
uguucccagcaucauccag

SEQ ID NO: 96025 - RNA, 19 nt, Artificial Sequence
  Description of Artificial Sequence: Synthetic oligonucleotide
ggcccaguggcucugagac

SEQ ID NO: 96026 - RNA, 19 nt, Artificial Sequence
  Description of Artificial Sequence: Synthetic oligonucleotide
cagcccgcuccgugccaga

SEQ ID NO: 96027 - RNA, 19 nt, Artificial Sequence
  Description of Artificial Sequence: Synthetic oligonucleotide
acauggaccuaucuggguc

SEQ ID NO: 96028 - RNA, 19 nt, Artificial Sequence
  Description of Artificial Sequence: Synthetic oligonucleotide
ccuucuaugcagcagacug

SEQ ID NO: 96029 - RNA, 19 nt, Artificial Sequence
  Description of Artificial Sequence: Synthetic oligonucleotide
gggagccucugcacagugg

SEQ ID NO: 96030 - RNA, 19 nt, Artificial Sequence
  Description of Artificial Sequence: Synthetic oligonucleotide
gcucccuggggauggggcc

SEQ ID NO: 96031 - RNA, 19 nt, Artificial Sequence
  Description of Artificial Sequence: Synthetic oligonucleotide
ccauggccacagagcugga

SEQ ID NO: 96032 - RNA, 19 nt, Artificial Sequence
  Description of Artificial Sequence: Synthetic oligonucleotide
agccccugugcacuccggu

SEQ ID NO: 96033 - RNA, 19 nt, Artificial Sequence
  Description of Artificial Sequence: Synthetic oligonucleotide
uggucaccuguacucccag

SEQ ID NO: 96034 - RNA, 19 nt, Artificial Sequence
  Description of Artificial Sequence: Synthetic oligonucleotide
gcugcacugcuuacacguc

SEQ ID NO: 96035 - RNA, 19 nt, Artificial Sequence
  Description of Artificial Sequence: Synthetic oligonucleotide
cuuccuucgucuucaccua

SEQ ID NO: 96036 - RNA, 19 nt, Artificial Sequence
  Description of Artificial Sequence: Synthetic oligonucleotide
accccgaggcugacuccuu

SEQ ID NO: 96037 - RNA, 19 nt, Artificial Sequence
  Description of Artificial Sequence: Synthetic oligonucleotide
uccccagcugugcagcugc

SEQ ID NO: 96038 - RNA, 19 nt, Artificial Sequence
  Description of Artificial Sequence: Synthetic oligonucleotide
cccaccgcaagggcagcag

SEQ ID NO: 96039 - RNA, 19 nt, Artificial Sequence
  Description of Artificial Sequence: Synthetic oligonucleotide
gcagcaaugagccuuccuc

SEQ ID NO: 96040 - RNA, 19 nt, Artificial Sequence
  Description of Artificial Sequence: Synthetic oligonucleotide
cugacucgcucagcucacc

SEQ ID NO: 96041 - RNA, 19 nt, Artificial Sequence
  Description of Artificial Sequence: Synthetic oligonucleotide
ccacgcugcuggcccugug

SEQ ID NO: 96042 - RNA, 19 nt, Artificial Sequence
  Description of Artificial Sequence: Synthetic oligonucleotide
gagggggcagggaagggga

SEQ ID NO: 96043 - RNA, 19 nt, Artificial Sequence
  Description of Artificial Sequence: Synthetic oligonucleotide
aggcagccggcacccacaa

SEQ ID NO: 96044 - RNA, 19 nt, Artificial Sequence
  Description of Artificial Sequence: Synthetic oligonucleotide
agugccacugcccgagcug

SEQ ID NO: 96045 - RNA, 19 nt, Artificial Sequence
  Description of Artificial Sequence: Synthetic oligonucleotide
ggugcauuacagagaggag

SEQ ID NO: 96046 - RNA, 19 nt, Artificial Sequence
  Description of Artificial Sequence: Synthetic oligonucleotide
gaaacacaucuucccuaga

SEQ ID NO: 96047 - RNA, 19 nt, Artificial Sequence
  Description of Artificial Sequence: Synthetic oligonucleotide
aggguuccuguagaccuag

SEQ ID NO: 96048 - RNA, 19 nt, Artificial Sequence
  Description of Artificial Sequence: Synthetic oligonucleotide
gggaggaccuuaucugugc

SEQ ID NO: 96049 - RNA, 19 nt, Artificial Sequence
  Description of Artificial Sequence: Synthetic oligonucleotide
cgugaaacacaccaggcug

SEQ ID NO: 96050 - RNA, 19 nt, Artificial Sequence
  Description of Artificial Sequence: Synthetic oligonucleotide
gugggccucaaggacuuga

SEQ ID NO: 96051 - RNA, 19 nt, Artificial Sequence
  Description of Artificial Sequence: Synthetic oligonucleotide
aaagcauccauguguggac

SEQ ID NO: 96052 - RNA, 19 nt, Artificial Sequence
  Description of Artificial Sequence: Synthetic oligonucleotide
cucaaguccuuaccucuuc

SEQ ID NO: 96053 - RNA, 19 nt, Artificial Sequence
  Description of Artificial Sequence: Synthetic oligonucleotide
ccggagauguagcaaaacg

SEQ ID NO: 96054 - RNA, 19 nt, Artificial Sequence
  Description of Artificial Sequence: Synthetic oligonucleotide
gcauggaguguguauuguu

SEQ ID NO: 96055 - RNA, 19 nt, Artificial Sequence
  Description of Artificial Sequence: Synthetic oligonucleotide
ucccagugacacuucagag

SEQ ID NO: 96056 - RNA, 19 nt, Artificial Sequence
  Description of Artificial Sequence: Synthetic oligonucleotide
gagcugguaguuaguagca

SEQ ID NO: 96057 - RNA, 19 nt, Artificial Sequence
  Description of Artificial Sequence: Synthetic oligonucleotide
auguugagccaggccuggg

SEQ ID NO: 96058 - RNA, 19 nt, Artificial Sequence
  Description of Artificial Sequence: Synthetic oligonucleotide
gucugugucucuuuucucu

SEQ ID NO: 96059 - RNA, 19 nt, Artificial Sequence
  Description of Artificial Sequence: Synthetic oligonucleotide
uuucuccuuagucuucuca

SEQ ID NO: 96060 - RNA, 19 nt, Artificial Sequence
  Description of Artificial Sequence: Synthetic oligonucleotide
auagcauuaacuaaucuau

SEQ ID NO: 96061 - RNA, 19 nt, Artificial Sequence
  Description of Artificial Sequence: Synthetic oligonucleotide
uuggguucauuauuggaau

SEQ ID NO: 96062 - RNA, 19 nt, Artificial Sequence
  Description of Artificial Sequence: Synthetic oligonucleotide
uuaaccuggugcuggauau

SEQ ID NO: 96063 - RNA, 19 nt, Artificial Sequence
  Description of Artificial Sequence: Synthetic oligonucleotide
uuuucaaauuguaucuagu

SEQ ID NO: 96064 - RNA, 19 nt, Artificial Sequence
  Description of Artificial Sequence: Synthetic oligonucleotide
ugcagcugauuuuaacaau

SEQ ID NO: 96065 - RNA, 19 nt, Artificial Sequence
  Description of Artificial Sequence: Synthetic oligonucleotide
uaacuacuguguuccuggc

SEQ ID NO: 96066 - RNA, 19 nt, Artificial Sequence
  Description of Artificial Sequence: Synthetic oligonucleotide
caauaguguguucugauua

SEQ ID NO: 96067 - RNA, 19 nt, Artificial Sequence
  Description of Artificial Sequence: Synthetic oligonucleotide
agaaaugaccaauauuaua

SEQ ID NO: 96068 - RNA, 19 nt, Artificial Sequence
  Description of Artificial Sequence: Synthetic oligonucleotide
acuaagaaaagauacgacu

SEQ ID NO: 96069 - RNA, 19 nt, Artificial Sequence
  Description of Artificial Sequence: Synthetic oligonucleotide
uuuauuuucugguagauag

SEQ ID NO: 96070 - RNA, 19 nt, Artificial Sequence
  Description of Artificial Sequence: Synthetic oligonucleotide
gaaauaaauagcuauaucc

SEQ ID NO: 96071 - RNA, 19 nt, Artificial Sequence
  Description of Artificial Sequence: Synthetic oligonucleotide
cauguacuguaguuuuucu

SEQ ID NO: 96072 - RNA, 19 nt, Artificial Sequence
  Description of Artificial Sequence: Synthetic oligonucleotide
uucaacaucaauguucauu

SEQ ID NO: 96073 - RNA, 19 nt, Artificial Sequence
  Description of Artificial Sequence: Synthetic oligonucleotide
uguaauguuacugaucaug

SEQ ID NO: 96074 - RNA, 19 nt, Artificial Sequence
  Description of Artificial Sequence: Synthetic oligonucleotide
gcauuguugagguggucug

SEQ ID NO: 96075 - RNA, 19 nt, Artificial Sequence
  Description of Artificial Sequence: Synthetic oligonucleotide
gaauguucugacauuaaca

SEQ ID NO: 96076 - RNA, 19 nt, Artificial Sequence
  Description of Artificial Sequence: Synthetic oligonucleotide
aguuuuccaugaaaacguu

SEQ ID NO: 96077 - RNA, 19 nt, Artificial Sequence
  Description of Artificial Sequence: Synthetic oligonucleotide
uuuauuguguuuuuaauuu

SEQ ID NO: 96078 - RNA, 19 nt, Artificial Sequence
  Description of Artificial Sequence: Synthetic oligonucleotide
uauuuauuaagauggauuc

SEQ ID NO: 96079 - RNA, 19 nt, Artificial Sequence
  Description of Artificial Sequence: Synthetic oligonucleotide
cucagauauuuauauuuuu

SEQ ID NO: 96080 - RNA, 19 nt, Artificial Sequence
  Description of Artificial Sequence: Synthetic oligonucleotide
uauuuuauuuuuuucuacc

SEQ ID NO: 96081 - RNA, 19 nt, Artificial Sequence
  Description of Artificial Sequence: Synthetic oligonucleotide
cuugaggucuuuugacaug

SEQ ID NO: 96082 - RNA, 19 nt, Artificial Sequence
  Description of Artificial Sequence: Synthetic oligonucleotide
guggaaagugaauuugaau

SEQ ID NO: 96083 - RNA, 19 nt, Artificial Sequence
  Description of Artificial Sequence: Synthetic oligonucleotide
ugaaaaauuuaagcauugu

SEQ ID NO: 96084 - RNA, 19 nt, Artificial Sequence
  Description of Artificial Sequence: Synthetic oligonucleotide
uuugcuuauuguuccaaga

SEQ ID NO: 96085 - RNA, 19 nt, Artificial Sequence
  Description of Artificial Sequence: Synthetic oligonucleotide
ccaagacauugucaauaaa

SEQ ID NO: 96086 - RNA, 25 nt, Artificial Sequence
  Description of Artificial Sequence: Synthetic oligonucleotide
aaccgcaucugcagcgagcaacuga

SEQ ID NO: 96087 - RNA, 25 nt, Artificial Sequence
  Description of Artificial Sequence: Synthetic oligonucleotide
agaagccaagacugagccggcggcc

SEQ ID NO: 96088 - RNA, 25 nt, Artificial Sequence
  Description of Artificial Sequence: Synthetic oligonucleotide
cgcggcgcagcgaacgagcagugac

SEQ ID NO: 96089 - RNA, 25 nt, Artificial Sequence
  Description of Artificial Sequence: Synthetic oligonucleotide
ccgugcuccuacccagcucugcuuc

SEQ ID NO: 96090 - RNA, 25 nt, Artificial Sequence
  Description of Artificial Sequence: Synthetic oligonucleotide
cacagcgcccaccugucuccgcccc

SEQ ID NO: 96091 - RNA, 25 nt, Artificial Sequence
  Description of Artificial Sequence: Synthetic oligonucleotide
cucggccccucgcccggcuuugccu

SEQ ID NO: 96092 - RNA, 25 nt, Artificial Sequence
  Description of Artificial Sequence: Synthetic oligonucleotide
uaaccgccacgaugauguucucggg

SEQ ID NO: 96093 - RNA, 25 nt, Artificial Sequence
  Description of Artificial Sequence: Synthetic oligonucleotide
gcuucaacgcagacuacgaggcguc

SEQ ID NO: 96094 - RNA, 25 nt, Artificial Sequence
  Description of Artificial Sequence: Synthetic oligonucleotide
cauccucccgcugcagcagcgcguc

SEQ ID NO: 96095 - RNA, 25 nt, Artificial Sequence
  Description of Artificial Sequence: Synthetic oligonucleotide
ccccggccggggauagccucucuua

SEQ ID NO: 96096 - RNA, 25 nt, Artificial Sequence
  Description of Artificial Sequence: Synthetic oligonucleotide
acuaccacucacccgcagacuccuu

SEQ ID NO: 96097 - RNA, 25 nt, Artificial Sequence
  Description of Artificial Sequence: Synthetic oligonucleotide
ucuccagcaugggcucgccugucaa

SEQ ID NO: 96098 - RNA, 25 nt, Artificial Sequence
  Description of Artificial Sequence: Synthetic oligonucleotide
acgcgcaggacuucugcacggaccu

SEQ ID NO: 96099 - RNA, 25 nt, Artificial Sequence
  Description of Artificial Sequence: Synthetic oligonucleotide
uggccgucuccagugccaacuucau

SEQ ID NO: 96100 - RNA, 25 nt, Artificial Sequence
  Description of Artificial Sequence: Synthetic oligonucleotide
uucccacggucacugccaucucgac

SEQ ID NO: 96101 - RNA, 25 nt, Artificial Sequence
  Description of Artificial Sequence: Synthetic oligonucleotide
ccaguccggaccugcaguggcuggu

SEQ ID NO: 96102 - RNA, 25 nt, Artificial Sequence
  Description of Artificial Sequence: Synthetic oligonucleotide
ugcagcccgcccucgucuccucugu

SEQ ID NO: 96103 - RNA, 25 nt, Artificial Sequence
  Description of Artificial Sequence: Synthetic oligonucleotide
uggccccaucgcagaccagagcccc

SEQ ID NO: 96104 - RNA, 25 nt, Artificial Sequence
  Description of Artificial Sequence: Synthetic oligonucleotide
cucacccuuucggaguccccgcccc

SEQ ID NO: 96105 - RNA, 25 nt, Artificial Sequence
  Description of Artificial Sequence: Synthetic oligonucleotide
ccuccgcuggggcuuacuccagggc

SEQ ID NO: 96106 - RNA, 25 nt, Artificial Sequence
  Description of Artificial Sequence: Synthetic oligonucleotide
cuggcguugugaagaccaugacagg

SEQ ID NO: 96107 - RNA, 25 nt, Artificial Sequence
  Description of Artificial Sequence: Synthetic oligonucleotide
gaggccgagcgcagagcauuggcag

SEQ ID NO: 96108 - RNA, 25 nt, Artificial Sequence
  Description of Artificial Sequence: Synthetic oligonucleotide
ggaggggcaagguggaacaguuauc

SEQ ID NO: 96109 - RNA, 25 nt, Artificial Sequence
  Description of Artificial Sequence: Synthetic oligonucleotide
cuccagaagaagaagagaaaaggag

SEQ ID NO: 96110 - RNA, 25 nt, Artificial Sequence
  Description of Artificial Sequence: Synthetic oligonucleotide
gaauccgaagggaaaggaauaagau

SEQ ID NO: 96111 - RNA, 25 nt, Artificial Sequence
  Description of Artificial Sequence: Synthetic oligonucleotide
uggcugcagccaaaugccgcaaccg

SEQ ID NO: 96112 - RNA, 25 nt, Artificial Sequence
  Description of Artificial Sequence: Synthetic oligonucleotide
ggaggagggagcugacugauacacu

SEQ ID NO: 96113 - RNA, 25 nt, Artificial Sequence
  Description of Artificial Sequence: Synthetic oligonucleotide
uccaagcggagacagaccaacuaga

SEQ ID NO: 96114 - RNA, 25 nt, Artificial Sequence
  Description of Artificial Sequence: Synthetic oligonucleotide
aagaugagaagucugcuuugcagac

SEQ ID NO: 96115 - RNA, 25 nt, Artificial Sequence
  Description of Artificial Sequence: Synthetic oligonucleotide
ccgagauugccaaccugcugaagga

SEQ ID NO: 96116 - RNA, 25 nt, Artificial Sequence
  Description of Artificial Sequence: Synthetic oligonucleotide
agaaggaaaaacuagaguucauccu

SEQ ID NO: 96117 - RNA, 25 nt, Artificial Sequence
  Description of Artificial Sequence: Synthetic oligonucleotide
uggcagcucaccgaccugccugcaa

SEQ ID NO: 96118 - RNA, 25 nt, Artificial Sequence
  Description of Artificial Sequence: Synthetic oligonucleotide
agaucccugaugaccugggcuuccc

SEQ ID NO: 96119 - RNA, 25 nt, Artificial Sequence
  Description of Artificial Sequence: Synthetic oligonucleotide
cagaagagaugucuguggcuucccu

SEQ ID NO: 96120 - RNA, 25 nt, Artificial Sequence
  Description of Artificial Sequence: Synthetic oligonucleotide
uugaucugacugggggccugccaga

SEQ ID NO: 96121 - RNA, 25 nt, Artificial Sequence
  Description of Artificial Sequence: Synthetic oligonucleotide
agguugccaccccggagucugagga

SEQ ID NO: 96122 - RNA, 25 nt, Artificial Sequence
  Description of Artificial Sequence: Synthetic oligonucleotide
aggccuucacccugccucuccucaa

SEQ ID NO: 96123 - RNA, 25 nt, Artificial Sequence
  Description of Artificial Sequence: Synthetic oligonucleotide
augacccugagcccaagcccucagu

SEQ ID NO: 96124 - RNA, 25 nt, Artificial Sequence
  Description of Artificial Sequence: Synthetic oligonucleotide
uggaaccugucaagagcaucagcag

SEQ ID NO: 96125 - RNA, 25 nt, Artificial Sequence
  Description of Artificial Sequence: Synthetic oligonucleotide
gcauggagcugaagaccgagcccuu

SEQ ID NO: 96126 - RNA, 25 nt, Artificial Sequence
  Description of Artificial Sequence: Synthetic oligonucleotide
uugaugacuuccuguucccagcauc

SEQ ID NO: 96127 - RNA, 25 nt, Artificial Sequence
  Description of Artificial Sequence: Synthetic oligonucleotide
cauccaggcccaguggcucugagac

SEQ ID NO: 96128 - RNA, 25 nt, Artificial Sequence
  Description of Artificial Sequence: Synthetic oligonucleotide
cagcccgcuccgugccagacaugga

SEQ ID NO: 96129 - RNA, 25 nt, Artificial Sequence
  Description of Artificial Sequence: Synthetic oligonucleotide
accuaucuggguccuucuaugcagc

SEQ ID NO: 96130 - RNA, 25 nt, Artificial Sequence
  Description of Artificial Sequence: Synthetic oligonucleotide
cagacugggagccucugcacagugg

SEQ ID NO: 96131 - RNA, 25 nt, Artificial Sequence
  Description of Artificial Sequence: Synthetic oligonucleotide
gcucccuggggauggggcccauggc

SEQ ID NO: 96132 - RNA, 25 nt, Artificial Sequence
  Description of Artificial Sequence: Synthetic oligonucleotide
ccacagagcuggagccccugugcac

SEQ ID NO: 96133 - RNA, 25 nt, Artificial Sequence
  Description of Artificial Sequence: Synthetic oligonucleotide
cuccgguggucaccuguacucccag

SEQ ID NO: 96134 - RNA, 25 nt, Artificial Sequence
  Description of Artificial Sequence: Synthetic oligonucleotide
gcugcacugcuuacacgucuuccuu

SEQ ID NO: 96135 - RNA, 25 nt, Artificial Sequence
  Description of Artificial Sequence: Synthetic oligonucleotide
ucgucuucaccuaccccgaggcuga

SEQ ID NO: 96136 - RNA, 25 nt, Artificial Sequence
  Description of Artificial Sequence: Synthetic oligonucleotide
acuccuuccccagcugugcagcugc

SEQ ID NO: 96137 - RNA, 25 nt, Artificial Sequence
  Description of Artificial Sequence: Synthetic oligonucleotide
cccaccgcaagggcagcagcagcaa

SEQ ID NO: 96138 - RNA, 25 nt, Artificial Sequence
  Description of Artificial Sequence: Synthetic oligonucleotide
augagccuuccucugacucgcucag

SEQ ID NO: 96139 - RNA, 25 nt, Artificial Sequence
  Description of Artificial Sequence: Synthetic oligonucleotide
gcucacccacgcugcuggcccugug

SEQ ID NO: 96140 - RNA, 25 nt, Artificial Sequence
  Description of Artificial Sequence: Synthetic oligonucleotide
gagggggcagggaaggggaggcagc

SEQ ID NO: 96141 - RNA, 25 nt, Artificial Sequence
  Description of Artificial Sequence: Synthetic oligonucleotide
ccggcacccacaagugccacugccc

SEQ ID NO: 96142 - RNA, 25 nt, Artificial Sequence
  Description of Artificial Sequence: Synthetic oligonucleotide
cgagcuggugcauuacagagaggag

SEQ ID NO: 96143 - RNA, 25 nt, Artificial Sequence
  Description of Artificial Sequence: Synthetic oligonucleotide
gaaacacaucuucccuagaggguuc

SEQ ID NO: 96144 - RNA, 25 nt, Artificial Sequence
  Description of Artificial Sequence: Synthetic oligonucleotide
ccuguagaccuagggaggaccuuau

SEQ ID NO: 96145 - RNA, 25 nt, Artificial Sequence
  Description of Artificial Sequence: Synthetic oligonucleotide
ucugugcgugaaacacaccaggcug

SEQ ID NO: 96146 - RNA, 25 nt, Artificial Sequence
  Description of Artificial Sequence: Synthetic oligonucleotide
gugggccucaaggacuugaaagcau

SEQ ID NO: 96147 - RNA, 25 nt, Artificial Sequence
  Description of Artificial Sequence: Synthetic oligonucleotide
uccauguguggacucaaguccuuac

SEQ ID NO: 96148 - RNA, 25 nt, Artificial Sequence
  Description of Artificial Sequence: Synthetic oligonucleotide
ccucuuccggagauguagcaaaacg

SEQ ID NO: 96149 - RNA, 25 nt, Artificial Sequence
  Description of Artificial Sequence: Synthetic oligonucleotide
gcauggaguguguauuguucccagu

SEQ ID NO: 96150 - RNA, 25 nt, Artificial Sequence
  Description of Artificial Sequence: Synthetic oligonucleotide
ugacacuucagagagcugguaguua

SEQ ID NO: 96151 - RNA, 25 nt, Artificial Sequence
  Description of Artificial Sequence: Synthetic oligonucleotide
aguagcauguugagccaggccuggg

SEQ ID NO: 96152 - RNA, 25 nt, Artificial Sequence
  Description of Artificial Sequence: Synthetic oligonucleotide
gucugugucucuuuucucuuucucc

SEQ ID NO: 96153 - RNA, 25 nt, Artificial Sequence
  Description of Artificial Sequence: Synthetic oligonucleotide
cuuagucuucucauagcauuaacua

SEQ ID NO: 96154 - RNA, 25 nt, Artificial Sequence
  Description of Artificial Sequence: Synthetic oligonucleotide
aaucuauuggguucauuauuggaau

SEQ ID NO: 96155 - RNA, 25 nt, Artificial Sequence
  Description of Artificial Sequence: Synthetic oligonucleotide
uuaaccuggugcuggauauuuucaa

SEQ ID NO: 96156 - RNA, 25 nt, Artificial Sequence
  Description of Artificial Sequence: Synthetic oligonucleotide
aauuguaucuagugcagcugauuuu

SEQ ID NO: 96157 - RNA, 25 nt, Artificial Sequence
  Description of Artificial Sequence: Synthetic oligonucleotide
uaacaauaacuacuguguuccuggc

SEQ ID NO: 96158 - RNA, 25 nt, Artificial Sequence
  Description of Artificial Sequence: Synthetic oligonucleotide
caauaguguguucugauuagaaaug

SEQ ID NO: 96159 - RNA, 25 nt, Artificial Sequence
  Description of Artificial Sequence: Synthetic oligonucleotide
gaccaauauuauacuaagaaaagau

SEQ ID NO: 96160 - RNA, 25 nt, Artificial Sequence
  Description of Artificial Sequence: Synthetic oligonucleotide
uacgacuuuauuuucugguagauag

SEQ ID NO: 96161 - RNA, 25 nt, Artificial Sequence
  Description of Artificial Sequence: Synthetic oligonucleotide
gaaauaaauagcuauauccauguac

SEQ ID NO: 96162 - RNA, 25 nt, Artificial Sequence
  Description of Artificial Sequence: Synthetic oligonucleotide
cuguaguuuuucuucaacaucaaug

SEQ ID NO: 96163 - RNA, 25 nt, Artificial Sequence
  Description of Artificial Sequence: Synthetic oligonucleotide
guucauuguaauguuacugaucaug

SEQ ID NO: 96164 - RNA, 25 nt, Artificial Sequence
  Description of Artificial Sequence: Synthetic oligonucleotide
gcauuguugagguggucugaauguu

SEQ ID NO: 96165 - RNA, 25 nt, Artificial Sequence
  Description of Artificial Sequence: Synthetic oligonucleotide
ucugacauuaacaguuuuccaugaa

SEQ ID NO: 96166 - RNA, 25 nt, Artificial Sequence
  Description of Artificial Sequence: Synthetic oligonucleotide
aaacguuuuauuguguuuuuaauuu

SEQ ID NO: 96167 - RNA, 25 nt, Artificial Sequence
  Description of Artificial Sequence: Synthetic oligonucleotide
uauuuauuaagauggauucucagau

SEQ ID NO: 96168 - RNA, 25 nt, Artificial Sequence
  Description of Artificial Sequence: Synthetic oligonucleotide
uauuuauauuuuuauuuuauuuuuu

SEQ ID NO: 96169 - RNA, 25 nt, Artificial Sequence
  Description of Artificial Sequence: Synthetic oligonucleotide
uucuaccuugaggucuuuugacaug

SEQ ID NO: 96170 - RNA, 25 nt, Artificial Sequence
  Description of Artificial Sequence: Synthetic oligonucleotide
guggaaagugaauuugaaugaaaaa

SEQ ID NO: 96171 - RNA, 25 nt, Artificial Sequence
  Description of Artificial Sequence: Synthetic oligonucleotide
auuuaagcauuguuugcuuauuguu

SEQ ID NO: 96172 - RNA, 25 nt, Artificial Sequence
  Description of Artificial Sequence: Synthetic oligonucleotide
auuguuccaagacauugucaauaaa

SEQ ID NO: 96173 - RNA, 3775 nt, Homo sapiens
cauucauaagacucagagcuacggccacggcagggacacgcggaaccaagacuuggaaacuugauuguugugguucuucuuggggguuaugaaauuucauuaaucuuuuuuuuuuccggggagaaaguuuuuggaaagauucuuccagauauuucuucauuuucuuuuggaggaccgacuuacuuuuuuuggucuucuuuauuacuccccuccccccgugggacccgccggacgcguggaggagaccguagcugaagcugauucuguacagcgggacagcgcuuucugccccugggggagcaaccccucccucgccccuggguccuacggagccugcacuuucaagagguacagcggcauccugugggggccugggcaccgcaggaagacugcacagaaacuuugccauuguuggaacgggacguugcuccuuccccgagcuuccccggacagcguacuuugaggacucgcucagcucaccggggacucccacggcucaccccggacuugcaccuuacuuccccaacccggccauagccuuggcuucccggcgaccucagcguggucacaggggccccccugugcccagggaaauguuucaggcuuuccccggagacuacgacuccggcucccggugcagcuccucacccucugccgagucucaauaucugucuucgguggacuccuucggcaguccacccaccgccgcggccucccaggagugcgccggucucggggaaaugcccgguuccuucgugcccacggucaccgcgaucacaaccagccaggaccuccaguggcuugugcaacccacccucaucucuuccauggcccagucccaggggcagccacuggccucccagcccccggucgucgaccccuacgacaugccgggaaccagcuacuccacaccaggcaugaguggcuacagcaguggcggagcgaguggcaguggugggccuuccaccagcggaacuaccagugggccugggccugcccgcccagcccgagcccggccuaggagaccccgagaggagacgcucaccccagaggaagaggagaagcgaagggugcgccgggaacgaaauaaacuagcagcagcuaaaugcaggaaccggcggagggagcugaccgaccgacuccaggcggagacagaucaguuggaggaagaaaaagcagagcuggagucggagaucgccgagcuccaaaaggagaaggaacgucuggaguuugugcugguggcccacaaaccgggcugcaagauccccuacgaagaggggcccgggccgggcccgcuggcggaggugagagauuugccgggcucagcaccggcuaaggaagauggcuucagcuggcugcugccgcccccgccaccaccgccccugcccuuccagaccagccaagacgcaccccccaaccugacggcuucucucuuuacacacagugaaguucaaguccucggcgaccccuuccccguuguuaacccuucguacacuucuucguuuguccucaccugcccggaggucuccgcguucgccggcgcccaacgcaccagcggcagugaccagccuuccgauccccugaacucgcccucccuccucgcucggugaacucuuuagacacacaaaacaaacaaacacaugggggagagagacuuggaagaggaggaggaggaggagaaggaggagagagaggggaagagacaaaguggguguguggccucccuggcuccuccgucugacccucugcggccacugcgccacugccaucggacaggaggauuccuuguguuuuguccugccucuuguuucugugccccggcgaggccggagagcuggugacuuuggggacagggggugggaaggggauggacacccccagcugacuguuggcucucugacgucaacccaagcucuggggauggguggggaggggggcgggugacgcccaccuucgggcaguccugugugaggaugaagggacgggggugggagguaggcuguggggugggcuggaguccucuccagagaggcucaacaaggaaaaaugccacucccuacccaaugucucccacacccacccuuuuuuuggggugcccagguugguuuccccugcacucccgaccuuagcuuauugaucccacauuuccauggugugagauccucuuuacucugggcagaagugagcccccccuuaaagggaauucgaugccccccuagaauaaucucauccccccacccgacuucuuuugaaaugugaacguccuuccuugacugucuagccacucccucccagaaaaacuggcucugauuggaauuucuggccuccuaaggcuccccaccccgaaaucagcccccagccuuguuucugaugacaguguuaucccaagacccugcccccugccagccgacccuccuggccuuccucguugggccgcucugauuucaggcagcaggggcugcugugaugccguccugcuggagugauuuauacugugaaaugaguuggccagauuguggggugcagcuggguggggcagcacaccucuggggggauaauguccccacucccgaaagccuuuccucggucucccuuccguccaucccccuucuuccuccccucaacagugaguuagacucaagggggugacagaaccgagaagggggugacaguccuccauccacguggccucucucucucuccucaggacccucagcccuggccuuuuucuuuaaggucccccgaccaauccccagccuaggacgccaacuucucccaccccuuggccccucacauccucuccaggaaggcagugaggggcugugacauuuuuccggagaagauuucagagcugaggcuuugguacccccaaacccccaauauuuuuggacuggcagacucaaggggcuggaaucucaugauuccaugcccgaguccgcccaucccugaccaugguuuuggcucucccaccccgccguucccugcgcuucaucucaugaggauuucuuuaugaggcaaauuuauauuuuuuaauaucgggggguggaccacgccgcccuccauccgugcugcaugaaaaacauuccacgugccccuugucgcgcgucucccauccugaucccagacccauuccuuagcuauuuaucccuuuccugguuuccgaaaggcaauuauaucuauuauguauaaguaaauauauuauauauggaugugugugugugcgugcgcgugagugugugagcgcuucugcagccucggccuaggucacguuggcccucaaagcgagccguugaauuggaaacugcuucuagaaacucuggcucagccugucucgggcugacccuuuucugaucgucucggccccucugauuguucccgauggucucucucccucugucuuuucuccuccgccuguguccaucugaccguuuucacuugucuccuuucugacugucccugccaaugcuccagcugucgucugacucuggguucguuggggacaugagauuuuauuuuuugugagugagacugagggaucguagauuuuuacaaucuguaucuuugacaauucugggugcgagugugagagugugagcagggcuugcuccugccaaccacaauucaaugaauccccgaccccccuaccccaugcuguacuugugguucucuuuuuguauuuugcaucugaccccggggggcugggacagauuggcaaugggccguccccucuccccuugguucugcacuguugccaauaaaaagcucuuaaaaacgc

SEQ ID NO: 96174 - RNA, 19 nt, Artificial Sequence
  Description of Artificial Sequence: Synthetic oligonucleotide
cauucauaagacucagagc

SEQ ID NO: 96175 - RNA, 19 nt, Artificial Sequence
  Description of Artificial Sequence: Synthetic oligonucleotide
cuacggccacggcagggac

SEQ ID NO: 96176 - RNA, 19 nt, Artificial Sequence
  Description of Artificial Sequence: Synthetic oligonucleotide
cacgcggaaccaagacuug

SEQ ID NO: 96177 - RNA, 19 nt, Artificial Sequence
  Description of Artificial Sequence: Synthetic oligonucleotide
ggaaacuugauuguugugg

SEQ ID NO: 96178 - RNA, 19 nt, Artificial Sequence
  Description of Artificial Sequence: Synthetic oligonucleotide
guucuucuuggggguuaug

SEQ ID NO: 96179 - RNA, 19 nt, Artificial Sequence
  Description of Artificial Sequence: Synthetic oligonucleotide
gaaauuucauuaaucuuuu

SEQ ID NO: 96180 - RNA, 19 nt, Artificial Sequence
  Description of Artificial Sequence: Synthetic oligonucleotide
uuuuuuuccggggagaaag

SEQ ID NO: 96181 - RNA, 19 nt, Artificial Sequence
  Description of Artificial Sequence: Synthetic oligonucleotide
guuuuuggaaagauucuuc

SEQ ID NO: 96182 - RNA, 19 nt, Artificial Sequence
  Description of Artificial Sequence: Synthetic oligonucleotide
ccagauauuucuucauuuu

SEQ ID NO: 96183 - RNA, 19 nt, Artificial Sequence
  Description of Artificial Sequence: Synthetic oligonucleotide
ucuuuuggaggaccgacuu

SEQ ID NO: 96184 - RNA, 19 nt, Artificial Sequence
  Description of Artificial Sequence: Synthetic oligonucleotide
uacuuuuuuuggucuucuu

SEQ ID NO: 96185 - RNA, 19 nt, Artificial Sequence
  Description of Artificial Sequence: Synthetic oligonucleotide
uuauuacuccccucccccc

SEQ ID NO: 96186 - RNA, 19 nt, Artificial Sequence
  Description of Artificial Sequence: Synthetic oligonucleotide
cgugggacccgccggacgc

SEQ ID NO: 96187 - RNA, 19 nt, Artificial Sequence
  Description of Artificial Sequence: Synthetic oligonucleotide
cguggaggagaccguagcu

SEQ ID NO: 96188 - RNA, 19 nt, Artificial Sequence
  Description of Artificial Sequence: Synthetic oligonucleotide
ugaagcugauucuguacag

SEQ ID NO: 96189 - RNA, 19 nt, Artificial Sequence
  Description of Artificial Sequence: Synthetic oligonucleotide
gcgggacagcgcuuucugc

SEQ ID NO: 96190 - RNA, 19 nt, Artificial Sequence
  Description of Artificial Sequence: Synthetic oligonucleotide
ccccugggggagcaacccc

SEQ ID NO: 96191 - RNA, 19 nt, Artificial Sequence
  Description of Artificial Sequence: Synthetic oligonucleotide
cucccucgccccugggucc

SEQ ID NO: 96192 - RNA, 19 nt, Artificial Sequence
  Description of Artificial Sequence: Synthetic oligonucleotide
cuacggagccugcacuuuc

SEQ ID NO: 96193 - RNA, 19 nt, Artificial Sequence
  Description of Artificial Sequence: Synthetic oligonucleotide
caagagguacagcggcauc

SEQ ID NO: 96194 - RNA, 19 nt, Artificial Sequence
  Description of Artificial Sequence: Synthetic oligonucleotide
ccugugggggccugggcac

SEQ ID NO: 96195 - RNA, 19 nt, Artificial Sequence
  Description of Artificial Sequence: Synthetic oligonucleotide
ccgcaggaagacugcacag

SEQ ID NO: 96196 - RNA, 19 nt, Artificial Sequence
  Description of Artificial Sequence: Synthetic oligonucleotide
gaaacuuugccauuguugg

SEQ ID NO: 96197 - RNA, 19 nt, Artificial Sequence
  Description of Artificial Sequence: Synthetic oligonucleotide
gaacgggacguugcuccuu

SEQ ID NO: 96198 - RNA, 19 nt, Artificial Sequence
  Description of Artificial Sequence: Synthetic oligonucleotide
uccccgagcuuccccggac

SEQ ID NO: 96199 - RNA, 19 nt, Artificial Sequence
  Description of Artificial Sequence: Synthetic oligonucleotide
cagcguacuuugaggacuc

SEQ ID NO: 96200 - RNA, 19 nt, Artificial Sequence
  Description of Artificial Sequence: Synthetic oligonucleotide
cgcucagcucaccggggac

SEQ ID NO: 96201 - RNA, 19 nt, Artificial Sequence
  Description of Artificial Sequence: Synthetic oligonucleotide
cucccacggcucaccccgg

SEQ ID NO: 96202 - RNA, 19 nt, Artificial Sequence
  Description of Artificial Sequence: Synthetic oligonucleotide
gacuugcaccuuacuuccc

SEQ ID NO: 96203 - RNA, 19 nt, Artificial Sequence
  Description of Artificial Sequence: Synthetic oligonucleotide
ccaacccggccauagccuu

SEQ ID NO: 96204 - RNA, 19 nt, Artificial Sequence
  Description of Artificial Sequence: Synthetic oligonucleotide
uggcuucccggcgaccuca

SEQ ID NO: 96205 - RNA, 19 nt, Artificial Sequence
  Description of Artificial Sequence: Synthetic oligonucleotide
agcguggucacaggggccc

SEQ ID NO: 96206 - RNA, 19 nt, Artificial Sequence
  Description of Artificial Sequence: Synthetic oligonucleotide
ccccugugcccagggaaau

SEQ ID NO: 96207 - RNA, 19 nt, Artificial Sequence
  Description of Artificial Sequence: Synthetic oligonucleotide
uguuucaggcuuuccccgg

SEQ ID NO: 96208 - RNA, 19 nt, Artificial Sequence
  Description of Artificial Sequence: Synthetic oligonucleotide
gagacuacgacuccggcuc

SEQ ID NO: 96209 - RNA, 19 nt, Artificial Sequence
  Description of Artificial Sequence: Synthetic oligonucleotide
cccggugcagcuccucacc

SEQ ID NO: 96210 - RNA, 19 nt, Artificial Sequence
  Description of Artificial Sequence: Synthetic oligonucleotide
ccucugccgagucucaaua

SEQ ID NO: 96211 - RNA, 19 nt, Artificial Sequence
  Description of Artificial Sequence: Synthetic oligonucleotide
aucugucuucgguggacuc

SEQ ID NO: 96212 - RNA, 19 nt, Artificial Sequence
  Description of Artificial Sequence: Synthetic oligonucleotide
ccuucggcaguccacccac

SEQ ID NO: 96213 - RNA, 19 nt, Artificial Sequence
  Description of Artificial Sequence: Synthetic oligonucleotide
ccgccgcggccucccagga

SEQ ID NO: 96214 - RNA, 19 nt, Artificial Sequence
  Description of Artificial Sequence: Synthetic oligonucleotide
agugcgccggucucgggga

SEQ ID NO: 96215 - RNA, 19 nt, Artificial Sequence
  Description of Artificial Sequence: Synthetic oligonucleotide
aaaugcccgguuccuucgu

SEQ ID NO: 96216 - RNA, 19 nt, Artificial Sequence
  Description of Artificial Sequence: Synthetic oligonucleotide
ugcccacggucaccgcgau

SEQ ID NO: 96217 - RNA, 19 nt, Artificial Sequence
  Description of Artificial Sequence: Synthetic oligonucleotide
ucacaaccagccaggaccu

SEQ ID NO: 96218 - RNA, 19 nt, Artificial Sequence
  Description of Artificial Sequence: Synthetic oligonucleotide
uccaguggcuugugcaacc

SEQ ID NO: 96219 - RNA, 19 nt, Artificial Sequence
  Description of Artificial Sequence: Synthetic oligonucleotide
ccacccucaucucuuccau

SEQ ID NO: 96220 - RNA, 19 nt, Artificial Sequence
  Description of Artificial Sequence: Synthetic oligonucleotide
uggcccagucccaggggca

SEQ ID NO: 96221 - RNA, 19 nt, Artificial Sequence
  Description of Artificial Sequence: Synthetic oligonucleotide
agccacuggccucccagcc

SEQ ID NO: 96222 - RNA, 19 nt, Artificial Sequence
  Description of Artificial Sequence: Synthetic oligonucleotide
ccccggucgucgaccccua

SEQ ID NO: 96223 - RNA, 19 nt, Artificial Sequence
  Description of Artificial Sequence: Synthetic oligonucleotide
acgacaugccgggaaccag

SEQ ID NO: 96224 - RNA, 19 nt, Artificial Sequence
  Description of Artificial Sequence: Synthetic oligonucleotide
gcuacuccacaccaggcau

SEQ ID NO: 96225 - RNA, 19 nt, Artificial Sequence
  Description of Artificial Sequence: Synthetic oligonucleotide
ugaguggcuacagcagugg

SEQ ID NO: 96226 - RNA, 19 nt, Artificial Sequence
  Description of Artificial Sequence: Synthetic oligonucleotide
gcggagcgaguggcagugg

SEQ ID NO: 96227 - RNA, 19 nt, Artificial Sequence
  Description of Artificial Sequence: Synthetic oligonucleotide
gugggccuuccaccagcgg

SEQ ID NO: 96228 - RNA, 19 nt, Artificial Sequence
  Description of Artificial Sequence: Synthetic oligonucleotide
gaacuaccagugggccugg

SEQ ID NO: 96229 - RNA, 19 nt, Artificial Sequence
  Description of Artificial Sequence: Synthetic oligonucleotide
ggccugcccgcccagcccg

SEQ ID NO: 96230 - RNA, 19 nt, Artificial Sequence
  Description of Artificial Sequence: Synthetic oligonucleotide
gagcccggccuaggagacc

SEQ ID NO: 96231 - RNA, 19 nt, Artificial Sequence
  Description of Artificial Sequence: Synthetic oligonucleotide
cccgagaggagacgcucac

SEQ ID NO: 96232 - RNA, 19 nt, Artificial Sequence
  Description of Artificial Sequence: Synthetic oligonucleotide
ccccagaggaagaggagaa

SEQ ID NO: 96233 - RNA, 19 nt, Artificial Sequence
  Description of Artificial Sequence: Synthetic oligonucleotide
agcgaagggugcgccggga

SEQ ID NO: 96234 - RNA, 19 nt, Artificial Sequence
  Description of Artificial Sequence: Synthetic oligonucleotide
aacgaaauaaacuagcagc

SEQ ID NO: 96235 - RNA, 19 nt, Artificial Sequence
  Description of Artificial Sequence: Synthetic oligonucleotide
cagcuaaaugcaggaaccg

SEQ ID NO: 96236 - RNA, 19 nt, Artificial Sequence
  Description of Artificial Sequence: Synthetic oligonucleotide
ggcggagggagcugaccga

SEQ ID NO: 96237 - RNA, 19 nt, Artificial Sequence
  Description of Artificial Sequence: Synthetic oligonucleotide
accgacuccaggcggagac

SEQ ID NO: 96238 - RNA, 19 nt, Artificial Sequence
  Description of Artificial Sequence: Synthetic oligonucleotide
cagaucaguuggaggaaga

SEQ ID NO: 96239 - RNA, 19 nt, Artificial Sequence
  Description of Artificial Sequence: Synthetic oligonucleotide
aaaaagcagagcuggaguc

SEQ ID NO: 96240 - RNA, 19 nt, Artificial Sequence
  Description of Artificial Sequence: Synthetic oligonucleotide
cggagaucgccgagcucca

SEQ ID NO: 96241 - RNA, 19 nt, Artificial Sequence
  Description of Artificial Sequence: Synthetic oligonucleotide
aaaaggagaaggaacgucu

SEQ ID NO: 96242 - RNA, 19 nt, Artificial Sequence
  Description of Artificial Sequence: Synthetic oligonucleotide
uggaguuugugcugguggc

SEQ ID NO: 96243 - RNA, 19 nt, Artificial Sequence
  Description of Artificial Sequence: Synthetic oligonucleotide
cccacaaaccgggcugcaa

SEQ ID NO: 96244 - RNA, 19 nt, Artificial Sequence
  Description of Artificial Sequence: Synthetic oligonucleotide
agauccccuacgaagaggg

SEQ ID NO: 96245 - RNA, 19 nt, Artificial Sequence
  Description of Artificial Sequence: Synthetic oligonucleotide
ggcccgggccgggcccgcu

SEQ ID NO: 96246 - RNA, 19 nt, Artificial Sequence
  Description of Artificial Sequence: Synthetic oligonucleotide
uggcggaggugagagauuu

SEQ ID NO: 96247 - RNA, 19 nt, Artificial Sequence
  Description of Artificial Sequence: Synthetic oligonucleotide
ugccgggcucagcaccggc

SEQ ID NO: 96248 - RNA, 19 nt, Artificial Sequence
  Description of Artificial Sequence: Synthetic oligonucleotide
cuaaggaagauggcuucag

SEQ ID NO: 96249 - RNA, 19 nt, Artificial Sequence
  Description of Artificial Sequence: Synthetic oligonucleotide
gcuggcugcugccgccccc

SEQ ID NO: 96250 - RNA, 19 nt, Artificial Sequence
  Description of Artificial Sequence: Synthetic oligonucleotide
cgccaccaccgccccugcc

SEQ ID NO: 96251 - RNA, 19 nt, Artificial Sequence
  Description of Artificial Sequence: Synthetic oligonucleotide
ccuuccagaccagccaaga

SEQ ID NO: 96252 - RNA, 19 nt, Artificial Sequence
  Description of Artificial Sequence: Synthetic oligonucleotide
acgcaccccccaaccugac

SEQ ID NO: 96253 - RNA, 19 nt, Artificial Sequence
  Description of Artificial Sequence: Synthetic oligonucleotide
cggcuucucucuuuacaca

SEQ ID NO: 96254 - RNA, 19 nt, Artificial Sequence
  Description of Artificial Sequence: Synthetic oligonucleotide
acagugaaguucaaguccu

SEQ ID NO: 96255 - RNA, 19 nt, Artificial Sequence
  Description of Artificial Sequence: Synthetic oligonucleotide
ucggcgaccccuuccccgu

SEQ ID NO: 96256 - RNA, 19 nt, Artificial Sequence
  Description of Artificial Sequence: Synthetic oligonucleotide
uuguuaacccuucguacac

SEQ ID NO: 96257 - RNA, 19 nt, Artificial Sequence
  Description of Artificial Sequence: Synthetic oligonucleotide
cuucuucguuuguccucac

SEQ ID NO: 96258 - RNA, 19 nt, Artificial Sequence
  Description of Artificial Sequence: Synthetic oligonucleotide
ccugcccggaggucuccgc

SEQ ID NO: 96259 - RNA, 19 nt, Artificial Sequence
  Description of Artificial Sequence: Synthetic oligonucleotide
cguucgccggcgcccaacg

SEQ ID NO: 96260 - RNA, 19 nt, Artificial Sequence
  Description of Artificial Sequence: Synthetic oligonucleotide
gcaccagcggcagugacca

SEQ ID NO: 96261 - RNA, 19 nt, Artificial Sequence
  Description of Artificial Sequence: Synthetic oligonucleotide
agccuuccgauccccugaa

SEQ ID NO: 96262 - RNA, 19 nt, Artificial Sequence
  Description of Artificial Sequence: Synthetic oligonucleotide
acucgcccucccuccucgc

SEQ ID NO: 96263 - RNA, 19 nt, Artificial Sequence
  Description of Artificial Sequence: Synthetic oligonucleotide
cucggugaacucuuuagac

SEQ ID NO: 96264 - RNA, 19 nt, Artificial Sequence
  Description of Artificial Sequence: Synthetic oligonucleotide
cacacaaaacaaacaaaca

SEQ ID NO: 96265 - RNA, 19 nt, Artificial Sequence
  Description of Artificial Sequence: Synthetic oligonucleotide
acaugggggagagagacuu

SEQ ID NO: 96266 - RNA, 19 nt, Artificial Sequence
  Description of Artificial Sequence: Synthetic oligonucleotide
uggaagaggaggaggagga

SEQ ID NO: 96267 - RNA, 19 nt, Artificial Sequence
  Description of Artificial Sequence: Synthetic oligonucleotide
aggagaaggaggagagaga

SEQ ID NO: 96268 - RNA, 19 nt, Artificial Sequence
  Description of Artificial Sequence: Synthetic oligonucleotide
aggggaagagacaaagugg

SEQ ID NO: 96269 - RNA, 19 nt, Artificial Sequence
  Description of Artificial Sequence: Synthetic oligonucleotide
gguguguggccucccuggc

SEQ ID NO: 96270 - RNA, 19 nt, Artificial Sequence
  Description of Artificial Sequence: Synthetic oligonucleotide
cuccuccgucugacccucu

SEQ ID NO: 96271 - RNA, 19 nt, Artificial Sequence
  Description of Artificial Sequence: Synthetic oligonucleotide
ugcggccacugcgccacug

SEQ ID NO: 96272 - RNA, 19 nt, Artificial Sequence
  Description of Artificial Sequence: Synthetic oligonucleotide
gccaucggacaggaggauu

SEQ ID NO: 96273 - RNA, 19 nt, Artificial Sequence
  Description of Artificial Sequence: Synthetic oligonucleotide
uccuuguguuuuguccugc

SEQ ID NO: 96274 - RNA, 19 nt, Artificial Sequence
  Description of Artificial Sequence: Synthetic oligonucleotide
ccucuuguuucugugcccc

SEQ ID NO: 96275 - RNA, 19 nt, Artificial Sequence
  Description of Artificial Sequence: Synthetic oligonucleotide
cggcgaggccggagagcug

SEQ ID NO: 96276 - RNA, 19 nt, Artificial Sequence
  Description of Artificial Sequence: Synthetic oligonucleotide
ggugacuuuggggacaggg

SEQ ID NO: 96277 - RNA, 19 nt, Artificial Sequence
  Description of Artificial Sequence: Synthetic oligonucleotide
gggugggaaggggauggac

SEQ ID NO: 96278 - RNA, 19 nt, Artificial Sequence
  Description of Artificial Sequence: Synthetic oligonucleotide
cacccccagcugacuguug

SEQ ID NO: 96279 - RNA, 19 nt, Artificial Sequence
  Description of Artificial Sequence: Synthetic oligonucleotide
ggcucucugacgucaaccc

SEQ ID NO: 96280 - RNA, 19 nt, Artificial Sequence
  Description of Artificial Sequence: Synthetic oligonucleotide
caagcucuggggaugggug

SEQ ID NO: 96281 - RNA, 19 nt, Artificial Sequence
  Description of Artificial Sequence: Synthetic oligonucleotide
ggggaggggggcgggugac

SEQ ID NO: 96282 - RNA, 19 nt, Artificial Sequence
  Description of Artificial Sequence: Synthetic oligonucleotide
cgcccaccuucgggcaguc

SEQ ID NO: 96283 - RNA, 19 nt, Artificial Sequence
  Description of Artificial Sequence: Synthetic oligonucleotide
ccugugugaggaugaaggg

SEQ ID NO: 96284 - RNA, 19 nt, Artificial Sequence
  Description of Artificial Sequence: Synthetic oligonucleotide
gacgggggugggagguagg

SEQ ID NO: 96285 - RNA, 19 nt, Artificial Sequence
  Description of Artificial Sequence: Synthetic oligonucleotide
gcuguggggugggcuggag

SEQ ID NO: 96286 - RNA, 19 nt, Artificial Sequence
  Description of Artificial Sequence: Synthetic oligonucleotide
guccucuccagagaggcuc

SEQ ID NO: 96287 - RNA, 19 nt, Artificial Sequence
  Description of Artificial Sequence: Synthetic oligonucleotide
caacaaggaaaaaugccac

SEQ ID NO: 96288 - RNA, 19 nt, Artificial Sequence
  Description of Artificial Sequence: Synthetic oligonucleotide
cucccuacccaaugucucc

SEQ ID NO: 96289 - RNA, 19 nt, Artificial Sequence
  Description of Artificial Sequence: Synthetic oligonucleotide
ccacacccacccuuuuuuu

SEQ ID NO: 96290 - RNA, 19 nt, Artificial Sequence
  Description of Artificial Sequence: Synthetic oligonucleotide
uggggugcccagguugguu

SEQ ID NO: 96291 - RNA, 19 nt, Artificial Sequence
  Description of Artificial Sequence: Synthetic oligonucleotide
uuccccugcacucccgacc

SEQ ID NO: 96292 - RNA, 19 nt, Artificial Sequence
  Description of Artificial Sequence: Synthetic oligonucleotide
cuuagcuuauugaucccac

SEQ ID NO: 96293 - RNA, 19 nt, Artificial Sequence
  Description of Artificial Sequence: Synthetic oligonucleotide
cauuuccauggugugagau

SEQ ID NO: 96294 - RNA, 19 nt, Artificial Sequence
  Description of Artificial Sequence: Synthetic oligonucleotide
uccucuuuacucugggcag

SEQ ID NO: 96295 - RNA, 19 nt, Artificial Sequence
  Description of Artificial Sequence: Synthetic oligonucleotide
gaagugagcccccccuuaa

SEQ ID NO: 96296 - RNA, 19 nt, Artificial Sequence
  Description of Artificial Sequence: Synthetic oligonucleotide
aagggaauucgaugccccc

SEQ ID NO: 96297 - RNA, 19 nt, Artificial Sequence
  Description of Artificial Sequence: Synthetic oligonucleotide
ccuagaauaaucucauccc

SEQ ID NO: 96298 - RNA, 19 nt, Artificial Sequence
  Description of Artificial Sequence: Synthetic oligonucleotide
ccccacccgacuucuuuug

SEQ ID NO: 96299 - RNA, 19 nt, Artificial Sequence
  Description of Artificial Sequence: Synthetic oligonucleotide
gaaaugugaacguccuucc

SEQ ID NO: 96300 - RNA, 19 nt, Artificial Sequence
  Description of Artificial Sequence: Synthetic oligonucleotide
cuugacugucuagccacuc

SEQ ID NO: 96301 - RNA, 19 nt, Artificial Sequence
  Description of Artificial Sequence: Synthetic oligonucleotide
cccucccagaaaaacuggc

SEQ ID NO: 96302 - RNA, 19 nt, Artificial Sequence
  Description of Artificial Sequence: Synthetic oligonucleotide
cucugauuggaauuucugg

SEQ ID NO: 96303 - RNA, 19 nt, Artificial Sequence
  Description of Artificial Sequence: Synthetic oligonucleotide
gccuccuaaggcuccccac

SEQ ID NO: 96304 - RNA, 19 nt, Artificial Sequence
  Description of Artificial Sequence: Synthetic oligonucleotide
ccccgaaaucagcccccag

SEQ ID NO: 96305 - RNA, 19 nt, Artificial Sequence
  Description of Artificial Sequence: Synthetic oligonucleotide
gccuuguuucugaugacag

SEQ ID NO: 96306 - RNA, 19 nt, Artificial Sequence
  Description of Artificial Sequence: Synthetic oligonucleotide
guguuaucccaagacccug

SEQ ID NO: 96307 - RNA, 19 nt, Artificial Sequence
  Description of Artificial Sequence: Synthetic oligonucleotide
gcccccugccagccgaccc

SEQ ID NO: 96308 - RNA, 19 nt, Artificial Sequence
  Description of Artificial Sequence: Synthetic oligonucleotide
cuccuggccuuccucguug

SEQ ID NO: 96309 - RNA, 19 nt, Artificial Sequence
  Description of Artificial Sequence: Synthetic oligonucleotide
gggccgcucugauuucagg

SEQ ID NO: 96310 - RNA, 19 nt, Artificial Sequence
  Description of Artificial Sequence: Synthetic oligonucleotide
gcagcaggggcugcuguga

SEQ ID NO: 96311 - RNA, 19 nt, Artificial Sequence
  Description of Artificial Sequence: Synthetic oligonucleotide
augccguccugcuggagug

SEQ ID NO: 96312 - RNA, 19 nt, Artificial Sequence
  Description of Artificial Sequence: Synthetic oligonucleotide
gauuuauacugugaaauga

SEQ ID NO: 96313 - RNA, 19 nt, Artificial Sequence
  Description of Artificial Sequence: Synthetic oligonucleotide
aguuggccagauugugggg

SEQ ID NO: 96314 - RNA, 19 nt, Artificial Sequence
  Description of Artificial Sequence: Synthetic oligonucleotide
gugcagcuggguggggcag

SEQ ID NO: 96315 - RNA, 19 nt, Artificial Sequence
  Description of Artificial Sequence: Synthetic oligonucleotide
gcacaccucuggggggaua

SEQ ID NO: 96316 - RNA, 19 nt, Artificial Sequence
  Description of Artificial Sequence: Synthetic oligonucleotide
aauguccccacucccgaaa

SEQ ID NO: 96317 - RNA, 19 nt, Artificial Sequence
  Description of Artificial Sequence: Synthetic oligonucleotide
agccuuuccucggucuccc

SEQ ID NO: 96318 - RNA, 19 nt, Artificial Sequence
  Description of Artificial Sequence: Synthetic oligonucleotide
cuuccguccaucccccuuc

SEQ ID NO: 96319 - RNA, 19 nt, Artificial Sequence
  Description of Artificial Sequence: Synthetic oligonucleotide
cuuccuccccucaacagug

SEQ ID NO: 96320 - RNA, 19 nt, Artificial Sequence
  Description of Artificial Sequence: Synthetic oligonucleotide
gaguuagacucaagggggu

SEQ ID NO: 96321 - RNA, 19 nt, Artificial Sequence
  Description of Artificial Sequence: Synthetic oligonucleotide
ugacagaaccgagaagggg

SEQ ID NO: 96322 - RNA, 19 nt, Artificial Sequence
  Description of Artificial Sequence: Synthetic oligonucleotide
ggugacaguccuccaucca

SEQ ID NO: 96323 - RNA, 19 nt, Artificial Sequence
  Description of Artificial Sequence: Synthetic oligonucleotide
acguggccucucucucucu

SEQ ID NO: 96324 - RNA, 19 nt, Artificial Sequence
  Description of Artificial Sequence: Synthetic oligonucleotide
uccucaggacccucagccc

SEQ ID NO: 96325 - RNA, 19 nt, Artificial Sequence
  Description of Artificial Sequence: Synthetic oligonucleotide
cuggccuuuuucuuuaagg

SEQ ID NO: 96326 - RNA, 19 nt, Artificial Sequence
  Description of Artificial Sequence: Synthetic oligonucleotide
gucccccgaccaaucccca

SEQ ID NO: 96327 - RNA, 19 nt, Artificial Sequence
  Description of Artificial Sequence: Synthetic oligonucleotide
agccuaggacgccaacuuc

SEQ ID NO: 96328 - RNA, 19 nt, Artificial Sequence
  Description of Artificial Sequence: Synthetic oligonucleotide
cucccaccccuuggccccu

SEQ ID NO: 96329 - RNA, 19 nt, Artificial Sequence
  Description of Artificial Sequence: Synthetic oligonucleotide
ucacauccucuccaggaag

SEQ ID NO: 96330 - RNA, 19 nt, Artificial Sequence
  Description of Artificial Sequence: Synthetic oligonucleotide
ggcagugaggggcugugac

SEQ ID NO: 96331 - RNA, 19 nt, Artificial Sequence
  Description of Artificial Sequence: Synthetic oligonucleotide
cauuuuuccggagaagauu

SEQ ID NO: 96332 - RNA, 19 nt, Artificial Sequence
  Description of Artificial Sequence: Synthetic oligonucleotide
uucagagcugaggcuuugg

SEQ ID NO: 96333 - RNA, 19 nt, Artificial Sequence
  Description of Artificial Sequence: Synthetic oligonucleotide
guacccccaaacccccaau

SEQ ID NO: 96334 - RNA, 19 nt, Artificial Sequence
  Description of Artificial Sequence: Synthetic oligonucleotide
uauuuuuggacuggcagac

SEQ ID NO: 96335 - RNA, 19 nt, Artificial Sequence
  Description of Artificial Sequence: Synthetic oligonucleotide
cucaaggggcuggaaucuc

SEQ ID NO: 96336 - RNA, 19 nt, Artificial Sequence
  Description of Artificial Sequence: Synthetic oligonucleotide
caugauuccaugcccgagu

SEQ ID NO: 96337 - RNA, 19 nt, Artificial Sequence
  Description of Artificial Sequence: Synthetic oligonucleotide
uccgcccaucccugaccau

SEQ ID NO: 96338 - RNA, 19 nt, Artificial Sequence
  Description of Artificial Sequence: Synthetic oligonucleotide
ugguuuuggcucucccacc

SEQ ID NO: 96339 - RNA, 19 nt, Artificial Sequence
  Description of Artificial Sequence: Synthetic oligonucleotide
cccgccguucccugcgcuu

SEQ ID NO: 96340 - RNA, 19 nt, Artificial Sequence
  Description of Artificial Sequence: Synthetic oligonucleotide
ucaucucaugaggauuucu

SEQ ID NO: 96341 - RNA, 19 nt, Artificial Sequence
  Description of Artificial Sequence: Synthetic oligonucleotide
uuuaugaggcaaauuuaua

SEQ ID NO: 96342 - RNA, 19 nt, Artificial Sequence
  Description of Artificial Sequence: Synthetic oligonucleotide
auuuuuuaauaucgggggg

SEQ ID NO: 96343 - RNA, 19 nt, Artificial Sequence
  Description of Artificial Sequence: Synthetic oligonucleotide
guggaccacgccgcccucc

SEQ ID NO: 96344 - RNA, 19 nt, Artificial Sequence
  Description of Artificial Sequence: Synthetic oligonucleotide
cauccgugcugcaugaaaa

SEQ ID NO: 96345 - RNA, 19 nt, Artificial Sequence
  Description of Artificial Sequence: Synthetic oligonucleotide
aacauuccacgugccccuu

SEQ ID NO: 96346 - RNA, 19 nt, Artificial Sequence
  Description of Artificial Sequence: Synthetic oligonucleotide
ugucgcgcgucucccaucc

SEQ ID NO: 96347 - RNA, 19 nt, Artificial Sequence
  Description of Artificial Sequence: Synthetic oligonucleotide
cugaucccagacccauucc

SEQ ID NO: 96348 - RNA, 19 nt, Artificial Sequence
  Description of Artificial Sequence: Synthetic oligonucleotide
cuuagcuauuuaucccuuu

SEQ ID NO: 96349 - RNA, 19 nt, Artificial Sequence
  Description of Artificial Sequence: Synthetic oligonucleotide
uccugguuuccgaaaggca

SEQ ID NO: 96350 - RNA, 19 nt, Artificial Sequence
  Description of Artificial Sequence: Synthetic oligonucleotide
aauuauaucuauuauguau

SEQ ID NO: 96351 - RNA, 19 nt, Artificial Sequence
  Description of Artificial Sequence: Synthetic oligonucleotide
uaaguaaauauauuauaua

SEQ ID NO: 96352 - RNA, 19 nt, Artificial Sequence
  Description of Artificial Sequence: Synthetic oligonucleotide
auggaugugugugugugcg

SEQ ID NO: 96353 - RNA, 19 nt, Artificial Sequence
  Description of Artificial Sequence: Synthetic oligonucleotide
gugcgcgugagugugugag

SEQ ID NO: 96354 - RNA, 19 nt, Artificial Sequence
  Description of Artificial Sequence: Synthetic oligonucleotide
gcgcuucugcagccucggc

SEQ ID NO: 96355 - RNA, 19 nt, Artificial Sequence
  Description of Artificial Sequence: Synthetic oligonucleotide
ccuaggucacguuggcccu

SEQ ID NO: 96356 - RNA, 19 nt, Artificial Sequence
  Description of Artificial Sequence: Synthetic oligonucleotide
ucaaagcgagccguugaau

SEQ ID NO: 96357 - RNA, 19 nt, Artificial Sequence
  Description of Artificial Sequence: Synthetic oligonucleotide
uuggaaacugcuucuagaa

SEQ ID NO: 96358 - RNA, 19 nt, Artificial Sequence
  Description of Artificial Sequence: Synthetic oligonucleotide
aacucuggcucagccuguc

SEQ ID NO: 96359 - RNA, 19 nt, Artificial Sequence
  Description of Artificial Sequence: Synthetic oligonucleotide
cucgggcugacccuuuucu

SEQ ID NO: 96360 - RNA, 19 nt, Artificial Sequence
  Description of Artificial Sequence: Synthetic oligonucleotide
ugaucgucucggccccucu

SEQ ID NO: 96361 - RNA, 19 nt, Artificial Sequence
  Description of Artificial Sequence: Synthetic oligonucleotide
ugauuguucccgauggucu

SEQ ID NO: 96362 - RNA, 19 nt, Artificial Sequence
  Description of Artificial Sequence: Synthetic oligonucleotide
ucucucccucugucuuuuc

SEQ ID NO: 96363 - RNA, 19 nt, Artificial Sequence
  Description of Artificial Sequence: Synthetic oligonucleotide
cuccuccgccuguguccau

SEQ ID NO: 96364 - RNA, 19 nt, Artificial Sequence
  Description of Artificial Sequence: Synthetic oligonucleotide
ucugaccguuuucacuugu

SEQ ID NO: 96365 - RNA, 19 nt, Artificial Sequence
  Description of Artificial Sequence: Synthetic oligonucleotide
ucuccuuucugacuguccc

SEQ ID NO: 96366 - RNA, 19 nt, Artificial Sequence
  Description of Artificial Sequence: Synthetic oligonucleotide
cugccaaugcuccagcugu

SEQ ID NO: 96367 - RNA, 19 nt, Artificial Sequence
  Description of Artificial Sequence: Synthetic oligonucleotide
ucgucugacucuggguucg

SEQ ID NO: 96368 - RNA, 19 nt, Artificial Sequence
  Description of Artificial Sequence: Synthetic oligonucleotide
guuggggacaugagauuuu

SEQ ID NO: 96369 - RNA, 19 nt, Artificial Sequence
  Description of Artificial Sequence: Synthetic oligonucleotide
uauuuuuugugagugagac

SEQ ID NO: 96370 - RNA, 19 nt, Artificial Sequence
  Description of Artificial Sequence: Synthetic oligonucleotide
cugagggaucguagauuuu

SEQ ID NO: 96371 - RNA, 19 nt, Artificial Sequence
  Description of Artificial Sequence: Synthetic oligonucleotide
uuacaaucuguaucuuuga

SEQ ID NO: 96372 - RNA, 19 nt, Artificial Sequence
  Description of Artificial Sequence: Synthetic oligonucleotide
acaauucugggugcgagug

SEQ ID NO: 96373 - RNA, 19 nt, Artificial Sequence
  Description of Artificial Sequence: Synthetic oligonucleotide
gugagagugugagcagggc

SEQ ID NO: 96374 - RNA, 19 nt, Artificial Sequence
  Description of Artificial Sequence: Synthetic oligonucleotide
cuugcuccugccaaccaca

SEQ ID NO: 96375 - RNA, 19 nt, Artificial Sequence
  Description of Artificial Sequence: Synthetic oligonucleotide
aauucaaugaauccccgac

SEQ ID NO: 96376 - RNA, 19 nt, Artificial Sequence
  Description of Artificial Sequence: Synthetic oligonucleotide
ccccccuaccccaugcugu

SEQ ID NO: 96377 - RNA, 19 nt, Artificial Sequence
  Description of Artificial Sequence: Synthetic oligonucleotide
uacuugugguucucuuuuu

SEQ ID NO: 96378 - RNA, 19 nt, Artificial Sequence
  Description of Artificial Sequence: Synthetic oligonucleotide
uguauuuugcaucugaccc

SEQ ID NO: 96379 - RNA, 19 nt, Artificial Sequence
  Description of Artificial Sequence: Synthetic oligonucleotide
ccggggggcugggacagau

SEQ ID NO: 96380 - RNA, 19 nt, Artificial Sequence
  Description of Artificial Sequence: Synthetic oligonucleotide
uuggcaaugggccgucccc

SEQ ID NO: 96381 - RNA, 19 nt, Artificial Sequence
  Description of Artificial Sequence: Synthetic oligonucleotide
cucuccccuugguucugca

SEQ ID NO: 96382 - RNA, 19 nt, Artificial Sequence
  Description of Artificial Sequence: Synthetic oligonucleotide
acuguugccaauaaaaagc

SEQ ID NO: 96383 - RNA, 19 nt, Artificial Sequence
  Description of Artificial Sequence: Synthetic oligonucleotide
aaaaagcucuuaaaaacgc

SEQ ID NO: 96384 - RNA, 25 nt, Artificial Sequence
  Description of Artificial Sequence: Synthetic oligonucleotide
cauucauaagacucagagcuacggc

SEQ ID NO: 96385 - RNA, 25 nt, Artificial Sequence
  Description of Artificial Sequence: Synthetic oligonucleotide
ccacggcagggacacgcggaaccaa

SEQ ID NO: 96386 - RNA, 25 nt, Artificial Sequence
  Description of Artificial Sequence: Synthetic oligonucleotide
agacuuggaaacuugauuguugugg

SEQ ID NO: 96387 - RNA, 25 nt, Artificial Sequence
  Description of Artificial Sequence: Synthetic oligonucleotide
guucuucuuggggguuaugaaauuu

SEQ ID NO: 96388 - RNA, 25 nt, Artificial Sequence
  Description of Artificial Sequence: Synthetic oligonucleotide
gagaaaguuuuuggaaagauucuuc

SEQ ID NO: 96389 - RNA, 25 nt, Artificial Sequence
  Description of Artificial Sequence: Synthetic oligonucleotide
ccagauauuucuucauuuucuuuug

SEQ ID NO: 96390 - RNA, 25 nt, Artificial Sequence
  Description of Artificial Sequence: Synthetic oligonucleotide
ggaggaccgacuuacuuuuuuuggu

SEQ ID NO: 96391 - RNA, 25 nt, Artificial Sequence
  Description of Artificial Sequence: Synthetic oligonucleotide
ucuucuuuauuacuccccucccccc

SEQ ID NO: 96392 - RNA, 25 nt, Artificial Sequence
  Description of Artificial Sequence: Synthetic oligonucleotide
cgugggacccgccggacgcguggag

SEQ ID NO: 96393 - RNA, 25 nt, Artificial Sequence
  Description of Artificial Sequence: Synthetic oligonucleotide
ggagaccguagcugaagcugauucu

SEQ ID NO: 96394 - RNA, 25 nt, Artificial Sequence
  Description of Artificial Sequence: Synthetic oligonucleotide
uguacagcgggacagcgcuuucugc

SEQ ID NO: 96395 - RNA, 25 nt, Artificial Sequence
  Description of Artificial Sequence: Synthetic oligonucleotide
ccccugggggagcaaccccucccuc

SEQ ID NO: 96396 - RNA, 25 nt, Artificial Sequence
  Description of Artificial Sequence: Synthetic oligonucleotide
cgccccuggguccuacggagccugc

SEQ ID NO: 96397 - RNA, 25 nt, Artificial Sequence
  Description of Artificial Sequence: Synthetic oligonucleotide
cacuuucaagagguacagcggcauc

SEQ ID NO: 96398 - RNA, 25 nt, Artificial Sequence
  Description of Artificial Sequence: Synthetic oligonucleotide
ccugugggggccugggcaccgcagg

SEQ ID NO: 96399 - RNA, 25 nt, Artificial Sequence
  Description of Artificial Sequence: Synthetic oligonucleotide
gaagacugcacagaaacuuugccau

SEQ ID NO: 96400 - RNA, 25 nt, Artificial Sequence
  Description of Artificial Sequence: Synthetic oligonucleotide
uuguuggaacgggacguugcuccuu

SEQ ID NO: 96401 - RNA, 25 nt, Artificial Sequence
  Description of Artificial Sequence: Synthetic oligonucleotide
uccccgagcuuccccggacagcgua

SEQ ID NO: 96402 - RNA, 25 nt, Artificial Sequence
  Description of Artificial Sequence: Synthetic oligonucleotide
acuuugaggacucgcucagcucacc

SEQ ID NO: 96403 - RNA, 25 nt, Artificial Sequence
  Description of Artificial Sequence: Synthetic oligonucleotide
cggggacucccacggcucaccccgg

SEQ ID NO: 96404 - RNA, 25 nt, Artificial Sequence
  Description of Artificial Sequence: Synthetic oligonucleotide
gacuugcaccuuacuuccccaaccc

SEQ ID NO: 96405 - RNA, 25 nt, Artificial Sequence
  Description of Artificial Sequence: Synthetic oligonucleotide
cggccauagccuuggcuucccggcg

SEQ ID NO: 96406 - RNA, 25 nt, Artificial Sequence
  Description of Artificial Sequence: Synthetic oligonucleotide
gaccucagcguggucacaggggccc

SEQ ID NO: 96407 - RNA, 25 nt, Artificial Sequence
  Description of Artificial Sequence: Synthetic oligonucleotide
ccccugugcccagggaaauguuuca

SEQ ID NO: 96408 - RNA, 25 nt, Artificial Sequence
  Description of Artificial Sequence: Synthetic oligonucleotide
aggcuuuccccggagacuacgacuc

SEQ ID NO: 96409 - RNA, 25 nt, Artificial Sequence
  Description of Artificial Sequence: Synthetic oligonucleotide
ccggcucccggugcagcuccucacc

SEQ ID NO: 96410 - RNA, 25 nt, Artificial Sequence
  Description of Artificial Sequence: Synthetic oligonucleotide
ccucugccgagucucaauaucuguc

SEQ ID NO: 96411 - RNA, 25 nt, Artificial Sequence
  Description of Artificial Sequence: Synthetic oligonucleotide
cuucgguggacuccuucggcagucc

SEQ ID NO: 96412 - RNA, 25 nt, Artificial Sequence
  Description of Artificial Sequence: Synthetic oligonucleotide
cacccaccgccgcggccucccagga

SEQ ID NO: 96413 - RNA, 25 nt, Artificial Sequence
  Description of Artificial Sequence: Synthetic oligonucleotide
agugcgccggucucggggaaaugcc

SEQ ID NO: 96414 - RNA, 25 nt, Artificial Sequence
  Description of Artificial Sequence: Synthetic oligonucleotide
ccgguuccuucgugcccacggucac

SEQ ID NO: 96415 - RNA, 25 nt, Artificial Sequence
  Description of Artificial Sequence: Synthetic oligonucleotide
ccgcgaucacaaccagccaggaccu

SEQ ID NO: 96416 - RNA, 25 nt, Artificial Sequence
  Description of Artificial Sequence: Synthetic oligonucleotide
uccaguggcuugugcaacccacccu

SEQ ID NO: 96417 - RNA, 25 nt, Artificial Sequence
  Description of Artificial Sequence: Synthetic oligonucleotide
ucaucucuuccauggcccaguccca

SEQ ID NO: 96418 - RNA, 25 nt, Artificial Sequence
  Description of Artificial Sequence: Synthetic oligonucleotide
aggggcagccacuggccucccagcc

SEQ ID NO: 96419 - RNA, 25 nt, Artificial Sequence
  Description of Artificial Sequence: Synthetic oligonucleotide
ccccggucgucgaccccuacgacau

SEQ ID NO: 96420 - RNA, 25 nt, Artificial Sequence
  Description of Artificial Sequence: Synthetic oligonucleotide
ugccgggaaccagcuacuccacacc

SEQ ID NO: 96421 - RNA, 25 nt, Artificial Sequence
  Description of Artificial Sequence: Synthetic oligonucleotide
caggcaugaguggcuacagcagugg

SEQ ID NO: 96422 - RNA, 25 nt, Artificial Sequence
  Description of Artificial Sequence: Synthetic oligonucleotide
gcggagcgaguggcaguggugggcc

SEQ ID NO: 96423 - RNA, 25 nt, Artificial Sequence
  Description of Artificial Sequence: Synthetic oligonucleotide
cuuccaccagcggaacuaccagugg

SEQ ID NO: 96424 - RNA, 25 nt, Artificial Sequence
  Description of Artificial Sequence: Synthetic oligonucleotide
ggccugggccugcccgcccagcccg

SEQ ID NO: 96425 - RNA, 25 nt, Artificial Sequence
  Description of Artificial Sequence: Synthetic oligonucleotide
gagcccggccuaggagaccccgaga

SEQ ID NO: 96426 - RNA, 25 nt, Artificial Sequence
  Description of Artificial Sequence: Synthetic oligonucleotide
aggagacgcucaccccagaggaaga

SEQ ID NO: 96427 - RNA, 25 nt, Artificial Sequence
  Description of Artificial Sequence: Synthetic oligonucleotide
aggagaagcgaagggugcgccggga

SEQ ID NO: 96428 - RNA, 25 nt, Artificial Sequence
  Description of Artificial Sequence: Synthetic oligonucleotide
aacgaaauaaacuagcagcagcuaa

SEQ ID NO: 96429 - RNA, 25 nt, Artificial Sequence
  Description of Artificial Sequence: Synthetic oligonucleotide
aaugcaggaaccggcggagggagcu

SEQ ID NO: 96430 - RNA, 25 nt, Artificial Sequence
  Description of Artificial Sequence: Synthetic oligonucleotide
ugaccgaccgacuccaggcggagac

SEQ ID NO: 96431 - RNA, 25 nt, Artificial Sequence
  Description of Artificial Sequence: Synthetic oligonucleotide
cagaucaguuggaggaagaaaaagc

SEQ ID NO: 96432 - RNA, 25 nt, Artificial Sequence
  Description of Artificial Sequence: Synthetic oligonucleotide
cagagcuggagucggagaucgccga

SEQ ID NO: 96433 - RNA, 25 nt, Artificial Sequence
  Description of Artificial Sequence: Synthetic oligonucleotide
agcuccaaaaggagaaggaacgucu

SEQ ID NO: 96434 - RNA, 25 nt, Artificial Sequence
  Description of Artificial Sequence: Synthetic oligonucleotide
uggaguuugugcugguggcccacaa

SEQ ID NO: 96435 - RNA, 25 nt, Artificial Sequence
  Description of Artificial Sequence: Synthetic oligonucleotide
aaccgggcugcaagauccccuacga

SEQ ID NO: 96436 - RNA, 25 nt, Artificial Sequence
  Description of Artificial Sequence: Synthetic oligonucleotide
aagaggggcccgggccgggcccgcu

SEQ ID NO: 96437 - RNA, 25 nt, Artificial Sequence
  Description of Artificial Sequence: Synthetic oligonucleotide
uggcggaggugagagauuugccggg

SEQ ID NO: 96438 - RNA, 25 nt, Artificial Sequence
  Description of Artificial Sequence: Synthetic oligonucleotide
gcucagcaccggcuaaggaagaugg

SEQ ID NO: 96439 - RNA, 25 nt, Artificial Sequence
  Description of Artificial Sequence: Synthetic oligonucleotide
gcuucagcuggcugcugccgccccc

SEQ ID NO: 96440 - RNA, 25 nt, Artificial Sequence
  Description of Artificial Sequence: Synthetic oligonucleotide
cgccaccaccgccccugcccuucca

SEQ ID NO: 96441 - RNA, 25 nt, Artificial Sequence
  Description of Artificial Sequence: Synthetic oligonucleotide
agaccagccaagacgcaccccccaa

SEQ ID NO: 96442 - RNA, 25 nt, Artificial Sequence
  Description of Artificial Sequence: Synthetic oligonucleotide
accugacggcuucucucuuuacaca

SEQ ID NO: 96443 - RNA, 25 nt, Artificial Sequence
  Description of Artificial Sequence: Synthetic oligonucleotide
acagugaaguucaaguccucggcga

SEQ ID NO: 96444 - RNA, 25 nt, Artificial Sequence
  Description of Artificial Sequence: Synthetic oligonucleotide
accccuuccccguuguuaacccuuc

SEQ ID NO: 96445 - RNA, 25 nt, Artificial Sequence
  Description of Artificial Sequence: Synthetic oligonucleotide
cguacacuucuucguuuguccucac

SEQ ID NO: 96446 - RNA, 25 nt, Artificial Sequence
  Description of Artificial Sequence: Synthetic oligonucleotide
ccugcccggaggucuccgcguucgc

SEQ ID NO: 96447 - RNA, 25 nt, Artificial Sequence
  Description of Artificial Sequence: Synthetic oligonucleotide
ccggcgcccaacgcaccagcggcag

SEQ ID NO: 96448 - RNA, 25 nt, Artificial Sequence
  Description of Artificial Sequence: Synthetic oligonucleotide
gugaccagccuuccgauccccugaa

SEQ ID NO: 96449 - RNA, 25 nt, Artificial Sequence
  Description of Artificial Sequence: Synthetic oligonucleotide
acucgcccucccuccucgcucggug

SEQ ID NO: 96450 - RNA, 25 nt, Artificial Sequence
  Description of Artificial Sequence: Synthetic oligonucleotide
gaacucuuuagacacacaaaacaaa

SEQ ID NO: 96451 - RNA, 25 nt, Artificial Sequence
  Description of Artificial Sequence: Synthetic oligonucleotide
acaaacacaugggggagagagacuu

SEQ ID NO: 96452 - RNA, 25 nt, Artificial Sequence
  Description of Artificial Sequence: Synthetic oligonucleotide
uggaagaggaggaggaggaggagaa

SEQ ID NO: 96453 - RNA, 25 nt, Artificial Sequence
  Description of Artificial Sequence: Synthetic oligonucleotide
aggaggagagagaggggaagagaca

SEQ ID NO: 96454 - RNA, 25 nt, Artificial Sequence
  Description of Artificial Sequence: Synthetic oligonucleotide
aaaguggguguguggccucccuggc

SEQ ID NO: 96455 - RNA, 25 nt, Artificial Sequence
  Description of Artificial Sequence: Synthetic oligonucleotide
cuccuccgucugacccucugcggcc

SEQ ID NO: 96456 - RNA, 25 nt, Artificial Sequence
  Description of Artificial Sequence: Synthetic oligonucleotide
cacugcgccacugccaucggacagg

SEQ ID NO: 96457 - RNA, 25 nt, Artificial Sequence
  Description of Artificial Sequence: Synthetic oligonucleotide
gaggauuccuuguguuuuguccugc

SEQ ID NO: 96458 - RNA, 25 nt, Artificial Sequence
  Description of Artificial Sequence: Synthetic oligonucleotide
ccucuuguuucugugccccggcgag

SEQ ID NO: 96459 - RNA, 25 nt, Artificial Sequence
  Description of Artificial Sequence: Synthetic oligonucleotide
ggccggagagcuggugacuuugggg

SEQ ID NO: 96460 - RNA, 25 nt, Artificial Sequence
  Description of Artificial Sequence: Synthetic oligonucleotide
gacagggggugggaaggggauggac

SEQ ID NO: 96461 - RNA, 25 nt, Artificial Sequence
  Description of Artificial Sequence: Synthetic oligonucleotide
cacccccagcugacuguuggcucuc

SEQ ID NO: 96462 - RNA, 25 nt, Artificial Sequence
  Description of Artificial Sequence: Synthetic oligonucleotide
cugacgucaacccaagcucugggga

SEQ ID NO: 96463 - RNA, 25 nt, Artificial Sequence
  Description of Artificial Sequence: Synthetic oligonucleotide
auggguggggaggggggcgggugac

SEQ ID NO: 96464 - RNA, 25 nt, Artificial Sequence
  Description of Artificial Sequence: Synthetic oligonucleotide
cgcccaccuucgggcaguccugugu

SEQ ID NO: 96465 - RNA, 25 nt, Artificial Sequence
  Description of Artificial Sequence: Synthetic oligonucleotide
ugaggaugaagggacggggguggga

SEQ ID NO: 96466 - RNA, 25 nt, Artificial Sequence
  Description of Artificial Sequence: Synthetic oligonucleotide
agguaggcuguggggugggcuggag

SEQ ID NO: 96467 - RNA, 25 nt, Artificial Sequence
  Description of Artificial Sequence: Synthetic oligonucleotide
guccucuccagagaggcucaacaag

SEQ ID NO: 96468 - RNA, 25 nt, Artificial Sequence
  Description of Artificial Sequence: Synthetic oligonucleotide
ggaaaaaugccacucccuacccaau

SEQ ID NO: 96469 - RNA, 25 nt, Artificial Sequence
  Description of Artificial Sequence: Synthetic oligonucleotide
ugucucccacacccacccuuuuuuu

SEQ ID NO: 96470 - RNA, 25 nt, Artificial Sequence
  Description of Artificial Sequence: Synthetic oligonucleotide
uggggugcccagguugguuuccccu

SEQ ID NO: 96471 - RNA, 25 nt, Artificial Sequence
  Description of Artificial Sequence: Synthetic oligonucleotide
ugcacucccgaccuuagcuuauuga

SEQ ID NO: 96472 - RNA, 25 nt, Artificial Sequence
  Description of Artificial Sequence: Synthetic oligonucleotide
aucccacauuuccauggugugagau

SEQ ID NO: 96473 - RNA, 25 nt, Artificial Sequence
  Description of Artificial Sequence: Synthetic oligonucleotide
uccucuuuacucugggcagaaguga

SEQ ID NO: 96474 - RNA, 25 nt, Artificial Sequence
  Description of Artificial Sequence: Synthetic oligonucleotide
agcccccccuuaaagggaauucgau

SEQ ID NO: 96475 - RNA, 25 nt, Artificial Sequence
  Description of Artificial Sequence: Synthetic oligonucleotide
ugccccccuagaauaaucucauccc

SEQ ID NO: 96476 - RNA, 25 nt, Artificial Sequence
  Description of Artificial Sequence: Synthetic oligonucleotide
ccccacccgacuucuuuugaaaugu

SEQ ID NO: 96477 - RNA, 25 nt, Artificial Sequence
  Description of Artificial Sequence: Synthetic oligonucleotide
ugaacguccuuccuugacugucuag

SEQ ID NO: 96478 - RNA, 25 nt, Artificial Sequence
  Description of Artificial Sequence: Synthetic oligonucleotide
gccacucccucccagaaaaacuggc

SEQ ID NO: 96479 - RNA, 25 nt, Artificial Sequence
  Description of Artificial Sequence: Synthetic oligonucleotide
cucugauuggaauuucuggccuccu

SEQ ID NO: 96480 - RNA, 25 nt, Artificial Sequence
  Description of Artificial Sequence: Synthetic oligonucleotide
uaaggcuccccaccccgaaaucagc

SEQ ID NO: 96481 - RNA, 25 nt, Artificial Sequence
  Description of Artificial Sequence: Synthetic oligonucleotide
cccccagccuuguuucugaugacag

SEQ ID NO: 96482 - RNA, 25 nt, Artificial Sequence
  Description of Artificial Sequence: Synthetic oligonucleotide
guguuaucccaagacccugcccccu

SEQ ID NO: 96483 - RNA, 25 nt, Artificial Sequence
  Description of Artificial Sequence: Synthetic oligonucleotide
ugccagccgacccuccuggccuucc

SEQ ID NO: 96484 - RNA, 25 nt, Artificial Sequence
  Description of Artificial Sequence: Synthetic oligonucleotide
cucguugggccgcucugauuucagg

SEQ ID NO: 96485 - RNA, 25 nt, Artificial Sequence
  Description of Artificial Sequence: Synthetic oligonucleotide
gcagcaggggcugcugugaugccgu

SEQ ID NO: 96486 - RNA, 25 nt, Artificial Sequence
  Description of Artificial Sequence: Synthetic oligonucleotide
uccugcuggagugauuuauacugug

SEQ ID NO: 96487 - RNA, 25 nt, Artificial Sequence
  Description of Artificial Sequence: Synthetic oligonucleotide
gaaaugaguuggccagauugugggg

SEQ ID NO: 96488 - RNA, 25 nt, Artificial Sequence
  Description of Artificial Sequence: Synthetic oligonucleotide
gugcagcuggguggggcagcacacc

SEQ ID NO: 96489 - RNA, 25 nt, Artificial Sequence
  Description of Artificial Sequence: Synthetic oligonucleotide
cucuggggggauaauguccccacuc

SEQ ID NO: 96490 - RNA, 25 nt, Artificial Sequence
  Description of Artificial Sequence: Synthetic oligonucleotide
cccgaaagccuuuccucggucuccc

SEQ ID NO: 96491 - RNA, 25 nt, Artificial Sequence
  Description of Artificial Sequence: Synthetic oligonucleotide
cuuccguccaucccccuucuuccuc

SEQ ID NO: 96492 - RNA, 25 nt, Artificial Sequence
  Description of Artificial Sequence: Synthetic oligonucleotide
ccccucaacagugaguuagacucaa

SEQ ID NO: 96493 - RNA, 25 nt, Artificial Sequence
  Description of Artificial Sequence: Synthetic oligonucleotide
agggggugacagaaccgagaagggg

SEQ ID NO: 96494 - RNA, 25 nt, Artificial Sequence
  Description of Artificial Sequence: Synthetic oligonucleotide
ggugacaguccuccauccacguggc

SEQ ID NO: 96495 - RNA, 25 nt, Artificial Sequence
  Description of Artificial Sequence: Synthetic oligonucleotide
ccucucucucucuccucaggacccu

SEQ ID NO: 96496 - RNA, 25 nt, Artificial Sequence
  Description of Artificial Sequence: Synthetic oligonucleotide
ucagcccuggccuuuuucuuuaagg

SEQ ID NO: 96497 - RNA, 25 nt, Artificial Sequence
  Description of Artificial Sequence: Synthetic oligonucleotide
gucccccgaccaauccccagccuag

SEQ ID NO: 96498 - RNA, 25 nt, Artificial Sequence
  Description of Artificial Sequence: Synthetic oligonucleotide
ggacgccaacuucucccaccccuug

SEQ ID NO: 96499 - RNA, 25 nt, Artificial Sequence
  Description of Artificial Sequence: Synthetic oligonucleotide
ggccccucacauccucuccaggaag

SEQ ID NO: 96500 - RNA, 25 nt, Artificial Sequence
  Description of Artificial Sequence: Synthetic oligonucleotide
ggcagugaggggcugugacauuuuu

SEQ ID NO: 96501 - RNA, 25 nt, Artificial Sequence
  Description of Artificial Sequence: Synthetic oligonucleotide
uccggagaagauuucagagcugagg

SEQ ID NO: 96502 - RNA, 25 nt, Artificial Sequence
  Description of Artificial Sequence: Synthetic oligonucleotide
gcuuugguacccccaaacccccaau

SEQ ID NO: 96503 - RNA, 25 nt, Artificial Sequence
  Description of Artificial Sequence: Synthetic oligonucleotide
uauuuuuggacuggcagacucaagg

SEQ ID NO: 96504 - RNA, 25 nt, Artificial Sequence
  Description of Artificial Sequence: Synthetic oligonucleotide
gggcuggaaucucaugauuccaugc

SEQ ID NO: 96505 - RNA, 25 nt, Artificial Sequence
  Description of Artificial Sequence: Synthetic oligonucleotide
cccgaguccgcccaucccugaccau

SEQ ID NO: 96506 - RNA, 25 nt, Artificial Sequence
  Description of Artificial Sequence: Synthetic oligonucleotide
ugguuuuggcucucccaccccgccg

SEQ ID NO: 96507 - RNA, 25 nt, Artificial Sequence
  Description of Artificial Sequence: Synthetic oligonucleotide
guucccugcgcuucaucucaugagg

SEQ ID NO: 96508 - RNA, 25 nt, Artificial Sequence
  Description of Artificial Sequence: Synthetic oligonucleotide
gauuucuuuaugaggcaaauuuaua

SEQ ID NO: 96509 - RNA, 25 nt, Artificial Sequence
  Description of Artificial Sequence: Synthetic oligonucleotide
auuuuuuaauaucgggggguggacc

SEQ ID NO: 96510 - RNA, 25 nt, Artificial Sequence
  Description of Artificial Sequence: Synthetic oligonucleotide
cacgccgcccuccauccgugcugca

SEQ ID NO: 96511 - RNA, 25 nt, Artificial Sequence
  Description of Artificial Sequence: Synthetic oligonucleotide
augaaaaacauuccacgugccccuu

SEQ ID NO: 96512 - RNA, 25 nt, Artificial Sequence
  Description of Artificial Sequence: Synthetic oligonucleotide
ugucgcgcgucucccauccugaucc

SEQ ID NO: 96513 - RNA, 25 nt, Artificial Sequence
  Description of Artificial Sequence: Synthetic oligonucleotide
ccagacccauuccuuagcuauuuau

SEQ ID NO: 96514 - RNA, 25 nt, Artificial Sequence
  Description of Artificial Sequence: Synthetic oligonucleotide
ucccuuuccugguuuccgaaaggca

SEQ ID NO: 96515 - RNA, 25 nt, Artificial Sequence
  Description of Artificial Sequence: Synthetic oligonucleotide
aauuauaucuauuauguauaaguaa

SEQ ID NO: 96516 - RNA, 25 nt, Artificial Sequence
  Description of Artificial Sequence: Synthetic oligonucleotide
aauauauuauauauggaugugugug

SEQ ID NO: 96517 - RNA, 25 nt, Artificial Sequence
  Description of Artificial Sequence: Synthetic oligonucleotide
gugugcgugcgcgugagugugugag

SEQ ID NO: 96518 - RNA, 25 nt, Artificial Sequence
  Description of Artificial Sequence: Synthetic oligonucleotide
gcgcuucugcagccucggccuaggu

SEQ ID NO: 96519 - RNA, 25 nt, Artificial Sequence
  Description of Artificial Sequence: Synthetic oligonucleotide
ucacguuggcccucaaagcgagccg

SEQ ID NO: 96520 - RNA, 25 nt, Artificial Sequence
  Description of Artificial Sequence: Synthetic oligonucleotide
guugaauuggaaacugcuucuagaa

SEQ ID NO: 96521 - RNA, 25 nt, Artificial Sequence
  Description of Artificial Sequence: Synthetic oligonucleotide
aacucuggcucagccugucucgggc

SEQ ID NO: 96522 - RNA, 25 nt, Artificial Sequence
  Description of Artificial Sequence: Synthetic oligonucleotide
cugacccuuuucugaucgucucggc

SEQ ID NO: 96523 - RNA, 25 nt, Artificial Sequence
  Description of Artificial Sequence: Synthetic oligonucleotide
ccccucugauuguucccgauggucu

SEQ ID NO: 96524 - RNA, 25 nt, Artificial Sequence
  Description of Artificial Sequence: Synthetic oligonucleotide
ucucucccucugucuuuucuccucc

SEQ ID NO: 96525 - RNA, 25 nt, Artificial Sequence
  Description of Artificial Sequence: Synthetic oligonucleotide
cgccuguguccaucugaccguuuuc

SEQ ID NO: 96526 - RNA, 25 nt, Artificial Sequence
  Description of Artificial Sequence: Synthetic oligonucleotide
cacuugucuccuuucugacuguccc

SEQ ID NO: 96527 - RNA, 25 nt, Artificial Sequence
  Description of Artificial Sequence: Synthetic oligonucleotide
cugccaaugcuccagcugucgucug

SEQ ID NO: 96528 - RNA, 25 nt, Artificial Sequence
  Description of Artificial Sequence: Synthetic oligonucleotide
gacucuggguucguuggggacauga

SEQ ID NO: 96529 - RNA, 25 nt, Artificial Sequence
  Description of Artificial Sequence: Synthetic oligonucleotide
agauuuuauuuuuugugagugagac

SEQ ID NO: 96530 - RNA, 25 nt, Artificial Sequence
  Description of Artificial Sequence: Synthetic oligonucleotide
cugagggaucguagauuuuuacaau

SEQ ID NO: 96531 - RNA, 25 nt, Artificial Sequence
  Description of Artificial Sequence: Synthetic oligonucleotide
ucuguaucuuugacaauucugggug

SEQ ID NO: 96532 - RNA, 25 nt, Artificial Sequence
  Description of Artificial Sequence: Synthetic oligonucleotide
gcgagugugagagugugagcagggc

SEQ ID NO: 96533 - RNA, 25 nt, Artificial Sequence
  Description of Artificial Sequence: Synthetic oligonucleotide
cuugcuccugccaaccacaauucaa

SEQ ID NO: 96534 - RNA, 25 nt, Artificial Sequence
  Description of Artificial Sequence: Synthetic oligonucleotide
augaauccccgaccccccuacccca

SEQ ID NO: 96535 - RNA, 25 nt, Artificial Sequence
  Description of Artificial Sequence: Synthetic oligonucleotide
augcuguacuugugguucucuuuuu

SEQ ID NO: 96536 - RNA, 25 nt, Artificial Sequence
  Description of Artificial Sequence: Synthetic oligonucleotide
uguauuuugcaucugaccccggggg

SEQ ID NO: 96537 - RNA, 25 nt, Artificial Sequence
  Description of Artificial Sequence: Synthetic oligonucleotide
ggcugggacagauuggcaaugggcc

SEQ ID NO: 96538 - RNA, 25 nt, Artificial Sequence
  Description of Artificial Sequence: Synthetic oligonucleotide
cguccccucuccccuugguucugca

SEQ ID NO: 96539 - RNA, 25 nt, Artificial Sequence
  Description of Artificial Sequence: Synthetic oligonucleotide
acuguugccaauaaaaagcucuuaa

SEQ ID NO: 96540 - RNA, 25 nt, Artificial Sequence
  Description of Artificial Sequence: Synthetic oligonucleotide
gccaauaaaaagcucuuaaaaacgc

SEQ ID NO: 96541 - RNA, 1693 nt, Homo sapiens
acgggccaaggcggcgcgucucggggguggagccuggaggugaccgcgccgcugcaacgcccccaccccccgcggucgcagugguucagcccgagaacuuuucauucauaaaaagaaaagacuccgcacggcgcgggugagucagaacccagcagccguguaccccgcagagccgccagccccgggcauguuccgagacuucggggaacccggcccgagcuccgggaacggcggcggguacggcggccccgcgcagcccccggccgcagcgcaggcagcccagcagaaguuccaccuggugccaagcaucaacaccaugaguggcagucaggagcugcaguggaugguacagccucauuuccuggggcccagcaguuaccccaggccucugaccuacccucaguacagccccccacaaccccggccaggagucauccgggcccuggggccgccuccagggguacgucgaaggccuugugaacagaucagcccggaggaagaggagcgccgccgaguaaggcgcgagcggaacaagcuggcugcggccaagugcaggaaccggaggaaggaacugaccgacuuccugcaggcggagacugacaaacuggaagaugagaaaucugggcugcagcgagagauugaggagcugcagaagcagaaggagcgccuagagcuggugcuggaagcccaccgacccaucugcaaaaucccggaaggagccaaggagggggacacaggcaguaccaguggcaccagcagcccaccagcccccugccgcccuguaccuuguaucucccuuuccccagggccugugcuugaaccugaggcacugcacacccccacacucaugaccacacccucccuaacuccuuucacccccagccuggucuucaccuaccccagcacuccugagccuugugccucagcucaucgcaagaguagcagcagcagcggagacccauccucugacccccuuggcucuccaacccuccucgcuuugugaggcgccugagcccuacucccugcagaugccacccuagccaaugucuccuccccuucccccaccgguccagcuggccuggacaguaucccacauccaacuccagcaacuucuucuccaucccucuaaugagacugaccauauugugcuucacaguagagccagcuuggggccaccaaagcugcccacuguuucucuugagcuggccucucuagcacaauuugcacuaaaucagagacaaaauauuucccauuugugccagaggaauccuggcagcccagagacuuuguagauccuuagagguccucuggagcccuaaccccuuccagaucacugccacacucuccaucacccucuuccugugauccacccaacccuaucuccugacagaaggugccacuuuacccaccuagaacacuaacucaccagccccacugccagcagcagcaggugauuggaccaggccauucugccgcccccuccugaaccgcacagcucaggaggcgcccuuggcuucugugaugagcugaucugcggaucucagcuuugagaagccuucagcuccagggaauccaagccuccacagcgagggcagcugcuauuuauuuuccuaaagagaguauuuuuauacaaaccuaccaaaauggaauaaaaggcuugaagcugugaaaaaaaaaaaaaaaaaaaaaaaaa

SEQ ID NO: 96542 - RNA, 19 nt, Artificial Sequence
  Description of Artificial Sequence: Synthetic oligonucleotide
acgggccaaggcggcgcgu

SEQ ID NO: 96543 - RNA, 19 nt, Artificial Sequence
  Description of Artificial Sequence: Synthetic oligonucleotide
ucucggggguggagccugg

SEQ ID NO: 96544 - RNA, 19 nt, Artificial Sequence
  Description of Artificial Sequence: Synthetic oligonucleotide
gaggugaccgcgccgcugc

SEQ ID NO: 96545 - RNA, 19 nt, Artificial Sequence
  Description of Artificial Sequence: Synthetic oligonucleotide
caacgcccccaccccccgc

SEQ ID NO: 96546 - RNA, 19 nt, Artificial Sequence
  Description of Artificial Sequence: Synthetic oligonucleotide
cggucgcagugguucagcc

SEQ ID NO: 96547 - RNA, 19 nt, Artificial Sequence
  Description of Artificial Sequence: Synthetic oligonucleotide
ccgagaacuuuucauucau

SEQ ID NO: 96548 - RNA, 19 nt, Artificial Sequence
  Description of Artificial Sequence: Synthetic oligonucleotide
uaaaaagaaaagacuccgc

SEQ ID NO: 96549 - RNA, 19 nt, Artificial Sequence
  Description of Artificial Sequence: Synthetic oligonucleotide
cacggcgcgggugagucag

SEQ ID NO: 96550 - RNA, 19 nt, Artificial Sequence
  Description of Artificial Sequence: Synthetic oligonucleotide
gaacccagcagccguguac

SEQ ID NO: 96551 - RNA, 19 nt, Artificial Sequence
  Description of Artificial Sequence: Synthetic oligonucleotide
ccccgcagagccgccagcc

SEQ ID NO: 96552 - RNA, 19 nt, Artificial Sequence
  Description of Artificial Sequence: Synthetic oligonucleotide
cccgggcauguuccgagac

SEQ ID NO: 96553 - RNA, 19 nt, Artificial Sequence
  Description of Artificial Sequence: Synthetic oligonucleotide
cuucggggaacccggcccg

SEQ ID NO: 96554 - RNA, 19 nt, Artificial Sequence
  Description of Artificial Sequence: Synthetic oligonucleotide
gagcuccgggaacggcggc

SEQ ID NO: 96555 - RNA, 19 nt, Artificial Sequence
  Description of Artificial Sequence: Synthetic oligonucleotide
cggguacggcggccccgcg

SEQ ID NO: 96556 - RNA, 19 nt, Artificial Sequence
  Description of Artificial Sequence: Synthetic oligonucleotide
gcagcccccggccgcagcg

SEQ ID NO: 96557 - RNA, 19 nt, Artificial Sequence
  Description of Artificial Sequence: Synthetic oligonucleotide
gcaggcagcccagcagaag

SEQ ID NO: 96558 - RNA, 19 nt, Artificial Sequence
  Description of Artificial Sequence: Synthetic oligonucleotide
guuccaccuggugccaagc

SEQ ID NO: 96559 - RNA, 19 nt, Artificial Sequence
  Description of Artificial Sequence: Synthetic oligonucleotide
caucaacaccaugaguggc

SEQ ID NO: 96560 - RNA, 19 nt, Artificial Sequence
  Description of Artificial Sequence: Synthetic oligonucleotide
cagucaggagcugcagugg

SEQ ID NO: 96561 - RNA, 19 nt, Artificial Sequence
  Description of Artificial Sequence: Synthetic oligonucleotide
gaugguacagccucauuuc

SEQ ID NO: 96562 - RNA, 19 nt, Artificial Sequence
  Description of Artificial Sequence: Synthetic oligonucleotide
ccuggggcccagcaguuac

SEQ ID NO: 96563 - RNA, 19 nt, Artificial Sequence
  Description of Artificial Sequence: Synthetic oligonucleotide
ccccaggccucugaccuac

SEQ ID NO: 96564 - RNA, 19 nt, Artificial Sequence
  Description of Artificial Sequence: Synthetic oligonucleotide
cccucaguacagcccccca

SEQ ID NO: 96565 - RNA, 19 nt, Artificial Sequence
  Description of Artificial Sequence: Synthetic oligonucleotide
acaaccccggccaggaguc

SEQ ID NO: 96566 - RNA, 19 nt, Artificial Sequence
  Description of Artificial Sequence: Synthetic oligonucleotide
cauccgggcccuggggccg

SEQ ID NO: 96567 - RNA, 19 nt, Artificial Sequence
  Description of Artificial Sequence: Synthetic oligonucleotide
gccuccagggguacgucga

SEQ ID NO: 96568 - RNA, 19 nt, Artificial Sequence
  Description of Artificial Sequence: Synthetic oligonucleotide
aaggccuugugaacagauc

SEQ ID NO: 96569 - RNA, 19 nt, Artificial Sequence
  Description of Artificial Sequence: Synthetic oligonucleotide
cagcccggaggaagaggag

SEQ ID NO: 96570 - RNA, 19 nt, Artificial Sequence
  Description of Artificial Sequence: Synthetic oligonucleotide
gcgccgccgaguaaggcgc

SEQ ID NO: 96571 - RNA, 19 nt, Artificial Sequence
  Description of Artificial Sequence: Synthetic oligonucleotide
cgagcggaacaagcuggcu

SEQ ID NO: 96572 - RNA, 19 nt, Artificial Sequence
  Description of Artificial Sequence: Synthetic oligonucleotide
ugcggccaagugcaggaac

SEQ ID NO: 96573 - RNA, 19 nt, Artificial Sequence
  Description of Artificial Sequence: Synthetic oligonucleotide
ccggaggaaggaacugacc

SEQ ID NO: 96574 - RNA, 19 nt, Artificial Sequence
  Description of Artificial Sequence: Synthetic oligonucleotide
cgacuuccugcaggcggag

SEQ ID NO: 96575 - RNA, 19 nt, Artificial Sequence
  Description of Artificial Sequence: Synthetic oligonucleotide
gacugacaaacuggaagau

SEQ ID NO: 96576 - RNA, 19 nt, Artificial Sequence
  Description of Artificial Sequence: Synthetic oligonucleotide
ugagaaaucugggcugcag

SEQ ID NO: 96577 - RNA, 19 nt, Artificial Sequence
  Description of Artificial Sequence: Synthetic oligonucleotide
gcgagagauugaggagcug

SEQ ID NO: 96578 - RNA, 19 nt, Artificial Sequence
  Description of Artificial Sequence: Synthetic oligonucleotide
gcagaagcagaaggagcgc

SEQ ID NO: 96579 - RNA, 19 nt, Artificial Sequence
  Description of Artificial Sequence: Synthetic oligonucleotide
ccuagagcuggugcuggaa

SEQ ID NO: 96580 - RNA, 19 nt, Artificial Sequence
  Description of Artificial Sequence: Synthetic oligonucleotide
agcccaccgacccaucugc

SEQ ID NO: 96581 - RNA, 19 nt, Artificial Sequence
  Description of Artificial Sequence: Synthetic oligonucleotide
caaaaucccggaaggagcc

SEQ ID NO: 96582 - RNA, 19 nt, Artificial Sequence
  Description of Artificial Sequence: Synthetic oligonucleotide
caaggagggggacacaggc

SEQ ID NO: 96583 - RNA, 19 nt, Artificial Sequence
  Description of Artificial Sequence: Synthetic oligonucleotide
caguaccaguggcaccagc

SEQ ID NO: 96584 - RNA, 19 nt, Artificial Sequence
  Description of Artificial Sequence: Synthetic oligonucleotide
cagcccaccagcccccugc

SEQ ID NO: 96585 - RNA, 19 nt, Artificial Sequence
  Description of Artificial Sequence: Synthetic oligonucleotide
ccgcccuguaccuuguauc

SEQ ID NO: 96586 - RNA, 19 nt, Artificial Sequence
  Description of Artificial Sequence: Synthetic oligonucleotide
cucccuuuccccagggccu

SEQ ID NO: 96587 - RNA, 19 nt, Artificial Sequence
  Description of Artificial Sequence: Synthetic oligonucleotide
ugugcuugaaccugaggca

SEQ ID NO: 96588 - RNA, 19 nt, Artificial Sequence
  Description of Artificial Sequence: Synthetic oligonucleotide
acugcacacccccacacuc

SEQ ID NO: 96589 - RNA, 19 nt, Artificial Sequence
  Description of Artificial Sequence: Synthetic oligonucleotide
caugaccacacccucccua

SEQ ID NO: 96590 - RNA, 19 nt, Artificial Sequence
  Description of Artificial Sequence: Synthetic oligonucleotide
aacuccuuucacccccagc

SEQ ID NO: 96591 - RNA, 19 nt, Artificial Sequence
  Description of Artificial Sequence: Synthetic oligonucleotide
ccuggucuucaccuacccc

SEQ ID NO: 96592 - RNA, 19 nt, Artificial Sequence
  Description of Artificial Sequence: Synthetic oligonucleotide
cagcacuccugagccuugu

SEQ ID NO: 96593 - RNA, 19 nt, Artificial Sequence
  Description of Artificial Sequence: Synthetic oligonucleotide
ugccucagcucaucgcaag

SEQ ID NO: 96594 - RNA, 19 nt, Artificial Sequence
  Description of Artificial Sequence: Synthetic oligonucleotide
gaguagcagcagcagcgga

SEQ ID NO: 96595 - RNA, 19 nt, Artificial Sequence
  Description of Artificial Sequence: Synthetic oligonucleotide
agacccauccucugacccc

SEQ ID NO: 96596 - RNA, 19 nt, Artificial Sequence
  Description of Artificial Sequence: Synthetic oligonucleotide
ccuuggcucuccaacccuc

SEQ ID NO: 96597 - RNA, 19 nt, Artificial Sequence
  Description of Artificial Sequence: Synthetic oligonucleotide
ccucgcuuugugaggcgcc

SEQ ID NO: 96598 - RNA, 19 nt, Artificial Sequence
  Description of Artificial Sequence: Synthetic oligonucleotide
cugagcccuacucccugca

SEQ ID NO: 96599 - RNA, 19 nt, Artificial Sequence
  Description of Artificial Sequence: Synthetic oligonucleotide
agaugccacccuagccaau

SEQ ID NO: 96600 - RNA, 19 nt, Artificial Sequence
  Description of Artificial Sequence: Synthetic oligonucleotide
ugucuccuccccuuccccc

SEQ ID NO: 96601 - RNA, 19 nt, Artificial Sequence
  Description of Artificial Sequence: Synthetic oligonucleotide
caccgguccagcuggccug

SEQ ID NO: 96602 - RNA, 19 nt, Artificial Sequence
  Description of Artificial Sequence: Synthetic oligonucleotide
ggacaguaucccacaucca

SEQ ID NO: 96603 - RNA, 19 nt, Artificial Sequence
  Description of Artificial Sequence: Synthetic oligonucleotide
aacuccagcaacuucuucu

SEQ ID NO: 96604 - RNA, 19 nt, Artificial Sequence
  Description of Artificial Sequence: Synthetic oligonucleotide
uccaucccucuaaugagac

SEQ ID NO: 96605 - RNA, 19 nt, Artificial Sequence
  Description of Artificial Sequence: Synthetic oligonucleotide
cugaccauauugugcuuca

SEQ ID NO: 96606 - RNA, 19 nt, Artificial Sequence
  Description of Artificial Sequence: Synthetic oligonucleotide
acaguagagccagcuuggg

SEQ ID NO: 96607 - RNA, 19 nt, Artificial Sequence
  Description of Artificial Sequence: Synthetic oligonucleotide
ggccaccaaagcugcccac

SEQ ID NO: 96608 - RNA, 19 nt, Artificial Sequence
  Description of Artificial Sequence: Synthetic oligonucleotide
cuguuucucuugagcuggc

SEQ ID NO: 96609 - RNA, 19 nt, Artificial Sequence
  Description of Artificial Sequence: Synthetic oligonucleotide
ccucucuagcacaauuugc

SEQ ID NO: 96610 - RNA, 19 nt, Artificial Sequence
  Description of Artificial Sequence: Synthetic oligonucleotide
cacuaaaucagagacaaaa

SEQ ID NO: 96611 - RNA, 19 nt, Artificial Sequence
  Description of Artificial Sequence: Synthetic oligonucleotide
auauuucccauuugugcca

SEQ ID NO: 96612 - RNA, 19 nt, Artificial Sequence
  Description of Artificial Sequence: Synthetic oligonucleotide
agaggaauccuggcagccc

SEQ ID NO: 96613 - RNA, 19 nt, Artificial Sequence
  Description of Artificial Sequence: Synthetic oligonucleotide
cagagacuuuguagauccu

SEQ ID NO: 96614 - RNA, 19 nt, Artificial Sequence
  Description of Artificial Sequence: Synthetic oligonucleotide
uuagagguccucuggagcc

SEQ ID NO: 96615 - RNA, 19 nt, Artificial Sequence
  Description of Artificial Sequence: Synthetic oligonucleotide
ccuaaccccuuccagauca

SEQ ID NO: 96616 - RNA, 19 nt, Artificial Sequence
  Description of Artificial Sequence: Synthetic oligonucleotide
acugccacacucuccauca

SEQ ID NO: 96617 - RNA, 19 nt, Artificial Sequence
  Description of Artificial Sequence: Synthetic oligonucleotide
acccucuuccugugaucca

SEQ ID NO: 96618 - RNA, 19 nt, Artificial Sequence
  Description of Artificial Sequence: Synthetic oligonucleotide
acccaacccuaucuccuga

SEQ ID NO: 96619 - RNA, 19 nt, Artificial Sequence
  Description of Artificial Sequence: Synthetic oligonucleotide
acagaaggugccacuuuac

SEQ ID NO: 96620 - RNA, 19 nt, Artificial Sequence
  Description of Artificial Sequence: Synthetic oligonucleotide
cccaccuagaacacuaacu

SEQ ID NO: 96621 - RNA, 19 nt, Artificial Sequence
  Description of Artificial Sequence: Synthetic oligonucleotide
ucaccagccccacugccag

SEQ ID NO: 96622 - RNA, 19 nt, Artificial Sequence
  Description of Artificial Sequence: Synthetic oligonucleotide
gcagcagcaggugauugga

SEQ ID NO: 96623 - RNA, 19 nt, Artificial Sequence
  Description of Artificial Sequence: Synthetic oligonucleotide
accaggccauucugccgcc

SEQ ID NO: 96624 - RNA, 19 nt, Artificial Sequence
  Description of Artificial Sequence: Synthetic oligonucleotide
ccccuccugaaccgcacag

SEQ ID NO: 96625 - RNA, 19 nt, Artificial Sequence
  Description of Artificial Sequence: Synthetic oligonucleotide
gcucaggaggcgcccuugg

SEQ ID NO: 96626 - RNA, 19 nt, Artificial Sequence
  Description of Artificial Sequence: Synthetic oligonucleotide
gcuucugugaugagcugau

SEQ ID NO: 96627 - RNA, 19 nt, Artificial Sequence
  Description of Artificial Sequence: Synthetic oligonucleotide
ucugcggaucucagcuuug

SEQ ID NO: 96628 - RNA, 19 nt, Artificial Sequence
  Description of Artificial Sequence: Synthetic oligonucleotide
gagaagccuucagcuccag

SEQ ID NO: 96629 - RNA, 19 nt, Artificial Sequence
  Description of Artificial Sequence: Synthetic oligonucleotide
gggaauccaagccuccaca

SEQ ID NO: 96630 - RNA, 19 nt, Artificial Sequence
  Description of Artificial Sequence: Synthetic oligonucleotide
agcgagggcagcugcuauu

SEQ ID NO: 96631 - RNA, 19 nt, Artificial Sequence
  Description of Artificial Sequence: Synthetic oligonucleotide
uuauuuuccuaaagagagu

SEQ ID NO: 96632 - RNA, 19 nt, Artificial Sequence
  Description of Artificial Sequence: Synthetic oligonucleotide
uauuuuuauacaaaccuac

SEQ ID NO: 96633 - RNA, 19 nt, Artificial Sequence
  Description of Artificial Sequence: Synthetic oligonucleotide
ccaaaauggaauaaaaggc

SEQ ID NO: 96634 - RNA, 19 nt, Artificial Sequence
  Description of Artificial Sequence: Synthetic oligonucleotide
cuugaagcugugaaaaaaa

SEQ ID NO: 96635 - RNA, 25 nt, Artificial Sequence
  Description of Artificial Sequence: Synthetic oligonucleotide
acgggccaaggcggcgcgucucggg

SEQ ID NO: 96636 - RNA, 25 nt, Artificial Sequence
  Description of Artificial Sequence: Synthetic oligonucleotide
ggguggagccuggaggugaccgcgc

SEQ ID NO: 96637 - RNA, 25 nt, Artificial Sequence
  Description of Artificial Sequence: Synthetic oligonucleotide
ccgcugcaacgcccccaccccccgc

SEQ ID NO: 96638 - RNA, 25 nt, Artificial Sequence
  Description of Artificial Sequence: Synthetic oligonucleotide
cggucgcagugguucagcccgagaa

SEQ ID NO: 96639 - RNA, 25 nt, Artificial Sequence
  Description of Artificial Sequence: Synthetic oligonucleotide
acuuuucauucauaaaaagaaaaga

SEQ ID NO: 96640 - RNA, 25 nt, Artificial Sequence
  Description of Artificial Sequence: Synthetic oligonucleotide
acuccgcacggcgcgggugagucag

SEQ ID NO: 96641 - RNA, 25 nt, Artificial Sequence
  Description of Artificial Sequence: Synthetic oligonucleotide
gaacccagcagccguguaccccgca

SEQ ID NO: 96642 - RNA, 25 nt, Artificial Sequence
  Description of Artificial Sequence: Synthetic oligonucleotide
agagccgccagccccgggcauguuc

SEQ ID NO: 96643 - RNA, 25 nt, Artificial Sequence
  Description of Artificial Sequence: Synthetic oligonucleotide
ccgagacuucggggaacccggcccg

SEQ ID NO: 96644 - RNA, 25 nt, Artificial Sequence
  Description of Artificial Sequence: Synthetic oligonucleotide
gagcuccgggaacggcggcggguac

SEQ ID NO: 96645 - RNA, 25 nt, Artificial Sequence
  Description of Artificial Sequence: Synthetic oligonucleotide
cggcggccccgcgcagcccccggcc

SEQ ID NO: 96646 - RNA, 25 nt, Artificial Sequence
  Description of Artificial Sequence: Synthetic oligonucleotide
cgcagcgcaggcagcccagcagaag

SEQ ID NO: 96647 - RNA, 25 nt, Artificial Sequence
  Description of Artificial Sequence: Synthetic oligonucleotide
guuccaccuggugccaagcaucaac

SEQ ID NO: 96648 - RNA, 25 nt, Artificial Sequence
  Description of Artificial Sequence: Synthetic oligonucleotide
caccaugaguggcagucaggagcug

SEQ ID NO: 96649 - RNA, 25 nt, Artificial Sequence
  Description of Artificial Sequence: Synthetic oligonucleotide
gcaguggaugguacagccucauuuc

SEQ ID NO: 96650 - RNA, 25 nt, Artificial Sequence
  Description of Artificial Sequence: Synthetic oligonucleotide
ccuggggcccagcaguuaccccagg

SEQ ID NO: 96651 - RNA, 25 nt, Artificial Sequence
  Description of Artificial Sequence: Synthetic oligonucleotide
gccucugaccuacccucaguacagc

SEQ ID NO: 96652 - RNA, 25 nt, Artificial Sequence
  Description of Artificial Sequence: Synthetic oligonucleotide
ccccccacaaccccggccaggaguc

SEQ ID NO: 96653 - RNA, 25 nt, Artificial Sequence
  Description of Artificial Sequence: Synthetic oligonucleotide
cauccgggcccuggggccgccucca

SEQ ID NO: 96654 - RNA, 25 nt, Artificial Sequence
  Description of Artificial Sequence: Synthetic oligonucleotide
agggguacgucgaaggccuugugaa

SEQ ID NO: 96655 - RNA, 25 nt, Artificial Sequence
  Description of Artificial Sequence: Synthetic oligonucleotide
acagaucagcccggaggaagaggag

SEQ ID NO: 96656 - RNA, 25 nt, Artificial Sequence
  Description of Artificial Sequence: Synthetic oligonucleotide
gcgccgccgaguaaggcgcgagcgg

SEQ ID NO: 96657 - RNA, 25 nt, Artificial Sequence
  Description of Artificial Sequence: Synthetic oligonucleotide
gaacaagcuggcugcggccaagugc

SEQ ID NO: 96658 - RNA, 25 nt, Artificial Sequence
  Description of Artificial Sequence: Synthetic oligonucleotide
caggaaccggaggaaggaacugacc

SEQ ID NO: 96659 - RNA, 25 nt, Artificial Sequence
  Description of Artificial Sequence: Synthetic oligonucleotide
cgacuuccugcaggcggagacugac

SEQ ID NO: 96660 - RNA, 25 nt, Artificial Sequence
  Description of Artificial Sequence: Synthetic oligonucleotide
caaacuggaagaugagaaaucuggg

SEQ ID NO: 96661 - RNA, 25 nt, Artificial Sequence
  Description of Artificial Sequence: Synthetic oligonucleotide
gcugcagcgagagauugaggagcug

SEQ ID NO: 96662 - RNA, 25 nt, Artificial Sequence
  Description of Artificial Sequence: Synthetic oligonucleotide
gcagaagcagaaggagcgccuagag

SEQ ID NO: 96663 - RNA, 25 nt, Artificial Sequence
  Description of Artificial Sequence: Synthetic oligonucleotide
gcuggugcuggaagcccaccgaccc

SEQ ID NO: 96664 - RNA, 25 nt, Artificial Sequence
  Description of Artificial Sequence: Synthetic oligonucleotide
caucugcaaaaucccggaaggagcc

SEQ ID NO: 96665 - RNA, 25 nt, Artificial Sequence
  Description of Artificial Sequence: Synthetic oligonucleotide
caaggagggggacacaggcaguacc

SEQ ID NO: 96666 - RNA, 25 nt, Artificial Sequence
  Description of Artificial Sequence: Synthetic oligonucleotide
caguggcaccagcagcccaccagcc

SEQ ID NO: 96667 - RNA, 25 nt, Artificial Sequence
  Description of Artificial Sequence: Synthetic oligonucleotide
ccccugccgcccuguaccuuguauc

SEQ ID NO: 96668 - RNA, 25 nt, Artificial Sequence
  Description of Artificial Sequence: Synthetic oligonucleotide
cucccuuuccccagggccugugcuu

SEQ ID NO: 96669 - RNA, 25 nt, Artificial Sequence
  Description of Artificial Sequence: Synthetic oligonucleotide
ugaaccugaggcacugcacaccccc

SEQ ID NO: 96670 - RNA, 25 nt, Artificial Sequence
  Description of Artificial Sequence: Synthetic oligonucleotide
cacacucaugaccacacccucccua

SEQ ID NO: 96671 - RNA, 25 nt, Artificial Sequence
  Description of Artificial Sequence: Synthetic oligonucleotide
aacuccuuucacccccagccugguc

SEQ ID NO: 96672 - RNA, 25 nt, Artificial Sequence
  Description of Artificial Sequence: Synthetic oligonucleotide
cuucaccuaccccagcacuccugag

SEQ ID NO: 96673 - RNA, 25 nt, Artificial Sequence
  Description of Artificial Sequence: Synthetic oligonucleotide
gccuugugccucagcucaucgcaag

SEQ ID NO: 96674 - RNA, 25 nt, Artificial Sequence
  Description of Artificial Sequence: Synthetic oligonucleotide
gaguagcagcagcagcggagaccca

SEQ ID NO: 96675 - RNA, 25 nt, Artificial Sequence
  Description of Artificial Sequence: Synthetic oligonucleotide
auccucugacccccuuggcucucca

SEQ ID NO: 96676 - RNA, 25 nt, Artificial Sequence
  Description of Artificial Sequence: Synthetic oligonucleotide
aacccuccucgcuuugugaggcgcc

SEQ ID NO: 96677 - RNA, 25 nt, Artificial Sequence
  Description of Artificial Sequence: Synthetic oligonucleotide
cugagcccuacucccugcagaugcc

SEQ ID NO: 96678 - RNA, 25 nt, Artificial Sequence
  Description of Artificial Sequence: Synthetic oligonucleotide
cacccuagccaaugucuccuccccu

SEQ ID NO: 96679 - RNA, 25 nt, Artificial Sequence
  Description of Artificial Sequence: Synthetic oligonucleotide
uucccccaccgguccagcuggccug

SEQ ID NO: 96680 - RNA, 25 nt, Artificial Sequence
  Description of Artificial Sequence: Synthetic oligonucleotide
ggacaguaucccacauccaacucca

SEQ ID NO: 96681 - RNA, 25 nt, Artificial Sequence
  Description of Artificial Sequence: Synthetic oligonucleotide
agcaacuucuucuccaucccucuaa

SEQ ID NO: 96682 - RNA, 25 nt, Artificial Sequence
  Description of Artificial Sequence: Synthetic oligonucleotide
augagacugaccauauugugcuuca

SEQ ID NO: 96683 - RNA, 25 nt, Artificial Sequence
  Description of Artificial Sequence: Synthetic oligonucleotide
acaguagagccagcuuggggccacc

SEQ ID NO: 96684 - RNA, 25 nt, Artificial Sequence
  Description of Artificial Sequence: Synthetic oligonucleotide
caaagcugcccacuguuucucuuga

SEQ ID NO: 96685 - RNA, 25 nt, Artificial Sequence
  Description of Artificial Sequence: Synthetic oligonucleotide
agcuggccucucuagcacaauuugc

SEQ ID NO: 96686 - RNA, 25 nt, Artificial Sequence
  Description of Artificial Sequence: Synthetic oligonucleotide
cacuaaaucagagacaaaauauuuc

SEQ ID NO: 96687 - RNA, 25 nt, Artificial Sequence
  Description of Artificial Sequence: Synthetic oligonucleotide
cccauuugugccagaggaauccugg

SEQ ID NO: 96688 - RNA, 25 nt, Artificial Sequence
  Description of Artificial Sequence: Synthetic oligonucleotide
gcagcccagagacuuuguagauccu

SEQ ID NO: 96689 - RNA, 25 nt, Artificial Sequence
  Description of Artificial Sequence: Synthetic oligonucleotide
uuagagguccucuggagcccuaacc

SEQ ID NO: 96690 - RNA, 25 nt, Artificial Sequence
  Description of Artificial Sequence: Synthetic oligonucleotide
cccuuccagaucacugccacacucu

SEQ ID NO: 96691 - RNA, 25 nt, Artificial Sequence
  Description of Artificial Sequence: Synthetic oligonucleotide
uccaucacccucuuccugugaucca

SEQ ID NO: 96692 - RNA, 25 nt, Artificial Sequence
  Description of Artificial Sequence: Synthetic oligonucleotide
acccaacccuaucuccugacagaag

SEQ ID NO: 96693 - RNA, 25 nt, Artificial Sequence
  Description of Artificial Sequence: Synthetic oligonucleotide
ggugccacuuuacccaccuagaaca

SEQ ID NO: 96694 - RNA, 25 nt, Artificial Sequence
  Description of Artificial Sequence: Synthetic oligonucleotide
acuaacucaccagccccacugccag

SEQ ID NO: 96695 - RNA, 25 nt, Artificial Sequence
  Description of Artificial Sequence: Synthetic oligonucleotide
gcagcagcaggugauuggaccaggc

SEQ ID NO: 96696 - RNA, 25 nt, Artificial Sequence
  Description of Artificial Sequence: Synthetic oligonucleotide
ccauucugccgcccccuccugaacc

SEQ ID NO: 96697 - RNA, 25 nt, Artificial Sequence
  Description of Artificial Sequence: Synthetic oligonucleotide
cgcacagcucaggaggcgcccuugg

SEQ ID NO: 96698 - RNA, 25 nt, Artificial Sequence
  Description of Artificial Sequence: Synthetic oligonucleotide
gcuucugugaugagcugaucugcgg

SEQ ID NO: 96699 - RNA, 25 nt, Artificial Sequence
  Description of Artificial Sequence: Synthetic oligonucleotide
gaucucagcuuugagaagccuucag

SEQ ID NO: 96700 - RNA, 25 nt, Artificial Sequence
  Description of Artificial Sequence: Synthetic oligonucleotide
gcuccagggaauccaagccuccaca

SEQ ID NO: 96701 - RNA, 25 nt, Artificial Sequence
  Description of Artificial Sequence: Synthetic oligonucleotide
agcgagggcagcugcuauuuauuuu

SEQ ID NO: 96702 - RNA, 25 nt, Artificial Sequence
  Description of Artificial Sequence: Synthetic oligonucleotide
uccuaaagagaguauuuuuauacaa

SEQ ID NO: 96703 - RNA, 25 nt, Artificial Sequence
  Description of Artificial Sequence: Synthetic oligonucleotide
aaccuaccaaaauggaauaaaaggc

SEQ ID NO: 96704 - RNA, 4015 nt, Homo sapiens
cgaacgagcggcgcucggcggggacagaaagagggagagagagagagagagagagggagaggcgcggccgggcgaggcgggcccguccgggagcgggcuccggggaaggggugcgggucugggcgccggagcggggagcggggccgcgucccucucagcgccagcucuacuugagccccacgagccgcugucccccuggcgcgcucggggccgcgggacgggcgcacgccgccuucuccuagucaaguauccgagccgccccgaaacucgggcggcgagucggccacgggaaguuuauucuccggcuccuuuucuaaaaggaagaaacagaaguuucucccagcggacagcuuuucuuuccgccuuuuuggcccugucugaaaucggggguccccagggcuggcaggccaggcucgcugggcuccuaaucuuuuuuuuaauuuccaauuuuugauugggccguggguccccgcugagcuccggcugcgcgcgggggcgggagggcgcgcgcaggggagggaccgagagacgcgccgacuuuuuagagggagggaucggguggacaacuggucccgcggcgcucgcagagccggaaagaagugcuguaagggacgcucgggggacgcuguuccugaggugucgccgccucccuguccucgcccuccgcggugggggagaaacccaggagcgaagcccagagcccgcggcgcggccggcggacgaacgagcgcgcagcagccggugcgcggccgcggcgagggcgggggaagaaaaacacccuguuuccucuccggcccccaccgcggaucauguaccaggauuaucccgggaacuuugacaccucgucccggggcagcagcggcucuccugcgcacgccgaguccuacuccagcggcggcggcggccagcagaaauuccggguagauaugccuggcucaggcagugcauucauccccaccaucaacgccaucacgaccagccaggaccugcaguggauggugcagcccacagugaucaccuccauguccaacccauacccucgcucgcaccccuacagcccccugccgggccuggccucugucccuggacacauggcccucccaagaccuggcgugaucaagaccauuggcaccaccgugggccgcaggaggagagaugagcagcugucuccugaagaggaggagaagcgucgcauccggcgggagaggaacaagcuggcugcagccaagugccggaaccgacgccgggagcugacagagaagcugcaggcggagacagaggagcuggaggaggagaagucaggccugcagaaggagauugcugagcugcagaaggagaaggagaagcuggaguucauguugguggcucacggcccagugugcaagauuagccccgaggagcgccgaucgcccccagccccugggcugcagcccaugcgcaguggggguggcucggugggcgcuguaguggugaaacaggagccccuggaagaggacagccccucguccucgucggcggggcuggacaaggcccagcgcucugucaucaagcccaucagcauugcugggggcuucuacggugaggagccccugcacacccccaucguggugaccuccacaccugcugucacuccgggcaccucgaaccucgucuucaccuauccuagcguccuggagcaggagucacccgcaucucccuccgaauccugcuccaaggcucaccgcagaagcaguagcagcggggaccaaucaucagacuccuugaacucccccacucugcuggcucuguaacccagugcaccucccuccccagcuccggaggggguccuccucgcuccuccuucccagggaccagcaccuucaagcgcuccagggccgugagggcaagagggggaccugccaccagggagcuuccuggcucugggggacccaggugggacuuagcagugaguauuggaagacuuggguugaucucuuagaagccaugggaccuccucccucauucaucuugcaagcaaaucccauuucuugaaaagccuuggagaacucgguuugguagacuuggacaucucucuggcuucugaagagccugaagcuggccuggaccauuccugucccuuuguuaccauacugucucuggagugaugguguccuucccugccccaccacgcaugcucagugccuuuugguuucaccuucccucgacuugacccuuuccucccccagcgucaguuucacucccucuugguuuuuaucaaauuugccaugacauuucaucuggguggucugaauauuaaagcucuucauuucuggagauggggcagcagguggcucuucugcuggggcugacuuguccagaaggggacaaagugcaauacagagccuucccuacccugacgccucccagucaucaucuccagaacucccagcggggcucccugagcucucaaggagaugcugccaucacugggaggcucagaggacccuuccugcccaccuucggagacggcuucuggaggaacggcuuggccagaagacagggugugagugagacaguggggcacagguuggguuugccaaacgccuaauuaccaggccaggaagcaugccaacaaagccacacggguguccuagccagcuucccuucaccuggugucuugaguagggcgucuccuguaauuacugccuugccauucugccccuggacccuucucuccggaccagggaggcgucccucccuaggagccacacauuauacuccaagucccugccgggcuccgccuuucccccacccuggcucucagggugacgccacccacagagauuuaaugagcgugggccuggaccuuccccagaugcugccaggcagccccuccccaagccucaaagaagcauuugcugaggauggagaggcaggggagggaggcgggaggccgucacuggaguggcgucugcagcagcugcugccccagcacccgcucagccuguccuggcugcucaccuccccgcagggcaccgggccuuuccugcccucuguggucaucugccaccugcuggaucaagugcuuucucuuuuacacuccccuguccccaccccagugcacucuucuggcccaggcagcaagcaagcugugaacagcuggccugagcugucgcuguggcuuguggcucaugcgccauuccugguugucuguugaaucuuucuggcugcuggaauuggagauaggauguuuugcuucccacugcaggagagcugcccccuuucacgggguuggggaagggucccccuggccuccagcaggagcacagcucagcagggucccugcugcccaccccucugagccuuuucuccccaggguauggcuccugcugaguuucuuguccagcagggccuugacaggaauccagggaguagcuccuggccagaaccagccucugcggggcuugugcucugcaaagacucugcugcuggggauucagcucuagaggucacaguauccucguuugaaagauaauuaagaucccccguggagaaagcagugacacauucacacagcuguucccucgcauguuauuucaugaacaugaccuguuuucgugcacuagacacacagaguggaacagccguaugcuuaaaguacaugggccagugggacuggaagugaccuguacaagugaugcagaaaggaggguuucaaagaaaaaggauuuuguuuaaaauacuuuaaaaauguuauuuccugcaucccuuggcugugaugccccucucccgauuucccaggggcucugggagggacccuucuaagaagauugggcaguuggguuucuggcuugagaugaauccaagcagcagaaugagccaggaguagcaggagaugggcaaagaaaacuggggugcacucagcucucacagggguaaucaucucaagugguauuuguagccaagugggagcuauuuucuuuuuugugcauauagauauuucuuaaaugaaaaaaaaaaaaaaaaaaaaaaaaaa

SEQ ID NO: 96705 - RNA, 19 nt, Artificial Sequence
  Description of Artificial Sequence: Synthetic oligonucleotide
cgaacgagcggcgcucggc

SEQ ID NO: 96706 - RNA, 19 nt, Artificial Sequence
  Description of Artificial Sequence: Synthetic oligonucleotide
cggggacagaaagagggag

SEQ ID NO: 96707 - RNA, 19 nt, Artificial Sequence
  Description of Artificial Sequence: Synthetic oligonucleotide
gagagagagagagagagag

SEQ ID NO: 96708 - RNA, 19 nt, Artificial Sequence
  Description of Artificial Sequence: Synthetic oligonucleotide
gggagaggcgcggccgggc

SEQ ID NO: 96709 - RNA, 19 nt, Artificial Sequence
  Description of Artificial Sequence: Synthetic oligonucleotide
cgaggcgggcccguccggg

SEQ ID NO: 96710 - RNA, 19 nt, Artificial Sequence
  Description of Artificial Sequence: Synthetic oligonucleotide
gagcgggcuccggggaagg

SEQ ID NO: 96711 - RNA, 19 nt, Artificial Sequence
  Description of Artificial Sequence: Synthetic oligonucleotide
gggugcgggucugggcgcc

SEQ ID NO: 96712 - RNA, 19 nt, Artificial Sequence
  Description of Artificial Sequence: Synthetic oligonucleotide
cggagcggggagcggggcc

SEQ ID NO: 96713 - RNA, 19 nt, Artificial Sequence
  Description of Artificial Sequence: Synthetic oligonucleotide
cgcgucccucucagcgcca

SEQ ID NO: 96714 - RNA, 19 nt, Artificial Sequence
  Description of Artificial Sequence: Synthetic oligonucleotide
agcucuacuugagccccac

SEQ ID NO: 96715 - RNA, 19 nt, Artificial Sequence
  Description of Artificial Sequence: Synthetic oligonucleotide
cgagccgcugucccccugg

SEQ ID NO: 96716 - RNA, 19 nt, Artificial Sequence
  Description of Artificial Sequence: Synthetic oligonucleotide
gcgcgcucggggccgcggg

SEQ ID NO: 96717 - RNA, 19 nt, Artificial Sequence
  Description of Artificial Sequence: Synthetic oligonucleotide
gacgggcgcacgccgccuu

SEQ ID NO: 96718 - RNA, 19 nt, Artificial Sequence
  Description of Artificial Sequence: Synthetic oligonucleotide
ucuccuagucaaguauccg

SEQ ID NO: 96719 - RNA, 19 nt, Artificial Sequence
  Description of Artificial Sequence: Synthetic oligonucleotide
gagccgccccgaaacucgg

SEQ ID NO: 96720 - RNA, 19 nt, Artificial Sequence
  Description of Artificial Sequence: Synthetic oligonucleotide
ggcggcgagucggccacgg

SEQ ID NO: 96721 - RNA, 19 nt, Artificial Sequence
  Description of Artificial Sequence: Synthetic oligonucleotide
ggaaguuuauucuccggcu

SEQ ID NO: 96722 - RNA, 19 nt, Artificial Sequence
  Description of Artificial Sequence: Synthetic oligonucleotide
uccuuuucuaaaaggaaga

SEQ ID NO: 96723 - RNA, 19 nt, Artificial Sequence
  Description of Artificial Sequence: Synthetic oligonucleotide
aaacagaaguuucucccag

SEQ ID NO: 96724 - RNA, 19 nt, Artificial Sequence
  Description of Artificial Sequence: Synthetic oligonucleotide
gcggacagcuuuucuuucc

SEQ ID NO: 96725 - RNA, 19 nt, Artificial Sequence
  Description of Artificial Sequence: Synthetic oligonucleotide
cgccuuuuuggcccugucu

SEQ ID NO: 96726 - RNA, 19 nt, Artificial Sequence
  Description of Artificial Sequence: Synthetic oligonucleotide
ugaaaucggggguccccag

SEQ ID NO: 96727 - RNA, 19 nt, Artificial Sequence
  Description of Artificial Sequence: Synthetic oligonucleotide
gggcuggcaggccaggcuc

SEQ ID NO: 96728 - RNA, 19 nt, Artificial Sequence
  Description of Artificial Sequence: Synthetic oligonucleotide
cgcugggcuccuaaucuuu

SEQ ID NO: 96729 - RNA, 19 nt, Artificial Sequence
  Description of Artificial Sequence: Synthetic oligonucleotide
uuuuuuaauuuccaauuuu

SEQ ID NO: 96730 - RNA, 19 nt, Artificial Sequence
  Description of Artificial Sequence: Synthetic oligonucleotide
uugauugggccgugggucc

SEQ ID NO: 96731 - RNA, 19 nt, Artificial Sequence
  Description of Artificial Sequence: Synthetic oligonucleotide
cccgcugagcuccggcugc

SEQ ID NO: 96732 - RNA, 19 nt, Artificial Sequence
  Description of Artificial Sequence: Synthetic oligonucleotide
cgcgcgggggcgggagggc

SEQ ID NO: 96733 - RNA, 19 nt, Artificial Sequence
  Description of Artificial Sequence: Synthetic oligonucleotide
cgcgcgcaggggagggacc

SEQ ID NO: 96734 - RNA, 19 nt, Artificial Sequence
  Description of Artificial Sequence: Synthetic oligonucleotide
cgagagacgcgccgacuuu

SEQ ID NO: 96735 - RNA, 19 nt, Artificial Sequence
  Description of Artificial Sequence: Synthetic oligonucleotide
uuuagagggagggaucggg

SEQ ID NO: 96736 - RNA, 19 nt, Artificial Sequence
  Description of Artificial Sequence: Synthetic oligonucleotide
guggacaacuggucccgcg

SEQ ID NO: 96737 - RNA, 19 nt, Artificial Sequence
  Description of Artificial Sequence: Synthetic oligonucleotide
ggcgcucgcagagccggaa

SEQ ID NO: 96738 - RNA, 19 nt, Artificial Sequence
  Description of Artificial Sequence: Synthetic oligonucleotide
aagaagugcuguaagggac

SEQ ID NO: 96739 - RNA, 19 nt, Artificial Sequence
  Description of Artificial Sequence: Synthetic oligonucleotide
cgcucgggggacgcuguuc

SEQ ID NO: 96740 - RNA, 19 nt, Artificial Sequence
  Description of Artificial Sequence: Synthetic oligonucleotide
ccugaggugucgccgccuc

SEQ ID NO: 96741 - RNA, 19 nt, Artificial Sequence
  Description of Artificial Sequence: Synthetic oligonucleotide
cccuguccucgcccuccgc

SEQ ID NO: 96742 - RNA, 19 nt, Artificial Sequence
  Description of Artificial Sequence: Synthetic oligonucleotide
cggugggggagaaacccag

SEQ ID NO: 96743 - RNA, 19 nt, Artificial Sequence
  Description of Artificial Sequence: Synthetic oligonucleotide
ggagcgaagcccagagccc

SEQ ID NO: 96744 - RNA, 19 nt, Artificial Sequence
  Description of Artificial Sequence: Synthetic oligonucleotide
cgcggcgcggccggcggac

SEQ ID NO: 96745 - RNA, 19 nt, Artificial Sequence
  Description of Artificial Sequence: Synthetic oligonucleotide
cgaacgagcgcgcagcagc

SEQ ID NO: 96746 - RNA, 19 nt, Artificial Sequence
  Description of Artificial Sequence: Synthetic oligonucleotide
ccggugcgcggccgcggcg

SEQ ID NO: 96747 - RNA, 19 nt, Artificial Sequence
  Description of Artificial Sequence: Synthetic oligonucleotide
gagggcgggggaagaaaaa

SEQ ID NO: 96748 - RNA, 19 nt, Artificial Sequence
  Description of Artificial Sequence: Synthetic oligonucleotide
acacccuguuuccucuccg

SEQ ID NO: 96749 - RNA, 19 nt, Artificial Sequence
  Description of Artificial Sequence: Synthetic oligonucleotide
ggcccccaccgcggaucau

SEQ ID NO: 96750 - RNA, 19 nt, Artificial Sequence
  Description of Artificial Sequence: Synthetic oligonucleotide
uguaccaggauuaucccgg

SEQ ID NO: 96751 - RNA, 19 nt, Artificial Sequence
  Description of Artificial Sequence: Synthetic oligonucleotide
ggaacuuugacaccucguc

SEQ ID NO: 96752 - RNA, 19 nt, Artificial Sequence
  Description of Artificial Sequence: Synthetic oligonucleotide
cccggggcagcagcggcuc

SEQ ID NO: 96753 - RNA, 19 nt, Artificial Sequence
  Description of Artificial Sequence: Synthetic oligonucleotide
cuccugcgcacgccgaguc

SEQ ID NO: 96754 - RNA, 19 nt, Artificial Sequence
  Description of Artificial Sequence: Synthetic oligonucleotide
ccuacuccagcggcggcgg

SEQ ID NO: 96755 - RNA, 19 nt, Artificial Sequence
  Description of Artificial Sequence: Synthetic oligonucleotide
gcggccagcagaaauuccg

SEQ ID NO: 96756 - RNA, 19 nt, Artificial Sequence
  Description of Artificial Sequence: Synthetic oligonucleotide
ggguagauaugccuggcuc

SEQ ID NO: 96757 - RNA, 19 nt, Artificial Sequence
  Description of Artificial Sequence: Synthetic oligonucleotide
caggcagugcauucauccc

SEQ ID NO: 96758 - RNA, 19 nt, Artificial Sequence
  Description of Artificial Sequence: Synthetic oligonucleotide
ccaccaucaacgccaucac

SEQ ID NO: 96759 - RNA, 19 nt, Artificial Sequence
  Description of Artificial Sequence: Synthetic oligonucleotide
cgaccagccaggaccugca

SEQ ID NO: 96760 - RNA, 19 nt, Artificial Sequence
  Description of Artificial Sequence: Synthetic oligonucleotide
aguggauggugcagcccac

SEQ ID NO: 96761 - RNA, 19 nt, Artificial Sequence
  Description of Artificial Sequence: Synthetic oligonucleotide
cagugaucaccuccauguc

SEQ ID NO: 96762 - RNA, 19 nt, Artificial Sequence
  Description of Artificial Sequence: Synthetic oligonucleotide
ccaacccauacccucgcuc

SEQ ID NO: 96763 - RNA, 19 nt, Artificial Sequence
  Description of Artificial Sequence: Synthetic oligonucleotide
cgcaccccuacagcccccu

SEQ ID NO: 96764 - RNA, 19 nt, Artificial Sequence
  Description of Artificial Sequence: Synthetic oligonucleotide
ugccgggccuggccucugu

SEQ ID NO: 96765 - RNA, 19 nt, Artificial Sequence
  Description of Artificial Sequence: Synthetic oligonucleotide
ucccuggacacauggcccu

SEQ ID NO: 96766 - RNA, 19 nt, Artificial Sequence
  Description of Artificial Sequence: Synthetic oligonucleotide
ucccaagaccuggcgugau

SEQ ID NO: 96767 - RNA, 19 nt, Artificial Sequence
  Description of Artificial Sequence: Synthetic oligonucleotide
ucaagaccauuggcaccac

SEQ ID NO: 96768 - RNA, 19 nt, Artificial Sequence
  Description of Artificial Sequence: Synthetic oligonucleotide
ccgugggccgcaggaggag

SEQ ID NO: 96769 - RNA, 19 nt, Artificial Sequence
  Description of Artificial Sequence: Synthetic oligonucleotide
gagaugagcagcugucucc

SEQ ID NO: 96770 - RNA, 19 nt, Artificial Sequence
  Description of Artificial Sequence: Synthetic oligonucleotide
cugaagaggaggagaagcg

SEQ ID NO: 96771 - RNA, 19 nt, Artificial Sequence
  Description of Artificial Sequence: Synthetic oligonucleotide
gucgcauccggcgggagag

SEQ ID NO: 96772 - RNA, 19 nt, Artificial Sequence
  Description of Artificial Sequence: Synthetic oligonucleotide
ggaacaagcuggcugcagc

SEQ ID NO: 96773 - RNA, 19 nt, Artificial Sequence
  Description of Artificial Sequence: Synthetic oligonucleotide
ccaagugccggaaccgacg

SEQ ID NO: 96774 - RNA, 19 nt, Artificial Sequence
  Description of Artificial Sequence: Synthetic oligonucleotide
gccgggagcugacagagaa

SEQ ID NO: 96775 - RNA, 19 nt, Artificial Sequence
  Description of Artificial Sequence: Synthetic oligonucleotide
agcugcaggcggagacaga

SEQ ID NO: 96776 - RNA, 19 nt, Artificial Sequence
  Description of Artificial Sequence: Synthetic oligonucleotide
aggagcuggaggaggagaa

SEQ ID NO: 96777 - RNA, 19 nt, Artificial Sequence
  Description of Artificial Sequence: Synthetic oligonucleotide
agucaggccugcagaagga

SEQ ID NO: 96778 - RNA, 19 nt, Artificial Sequence
  Description of Artificial Sequence: Synthetic oligonucleotide
agauugcugagcugcagaa

SEQ ID NO: 96779 - RNA, 19 nt, Artificial Sequence
  Description of Artificial Sequence: Synthetic oligonucleotide
aggagaaggagaagcugga

SEQ ID NO: 96780 - RNA, 19 nt, Artificial Sequence
  Description of Artificial Sequence: Synthetic oligonucleotide
aguucauguugguggcuca

SEQ ID NO: 96781 - RNA, 19 nt, Artificial Sequence
  Description of Artificial Sequence: Synthetic oligonucleotide
acggcccagugugcaagau

SEQ ID NO: 96782 - RNA, 19 nt, Artificial Sequence
  Description of Artificial Sequence: Synthetic oligonucleotide
uuagccccgaggagcgccg

SEQ ID NO: 96783 - RNA, 19 nt, Artificial Sequence
  Description of Artificial Sequence: Synthetic oligonucleotide
gaucgcccccagccccugg

SEQ ID NO: 96784 - RNA, 19 nt, Artificial Sequence
  Description of Artificial Sequence: Synthetic oligonucleotide
ggcugcagcccaugcgcag

SEQ ID NO: 96785 - RNA, 19 nt, Artificial Sequence
  Description of Artificial Sequence: Synthetic oligonucleotide
guggggguggcucgguggg

SEQ ID NO: 96786 - RNA, 19 nt, Artificial Sequence
  Description of Artificial Sequence: Synthetic oligonucleotide
gcgcuguaguggugaaaca

SEQ ID NO: 96787 - RNA, 19 nt, Artificial Sequence
  Description of Artificial Sequence: Synthetic oligonucleotide
aggagccccuggaagagga

SEQ ID NO: 96788 - RNA, 19 nt, Artificial Sequence
  Description of Artificial Sequence: Synthetic oligonucleotide
acagccccucguccucguc

SEQ ID NO: 96789 - RNA, 19 nt, Artificial Sequence
  Description of Artificial Sequence: Synthetic oligonucleotide
cggcggggcuggacaaggc

SEQ ID NO: 96790 - RNA, 19 nt, Artificial Sequence
  Description of Artificial Sequence: Synthetic oligonucleotide
cccagcgcucugucaucaa

SEQ ID NO: 96791 - RNA, 19 nt, Artificial Sequence
  Description of Artificial Sequence: Synthetic oligonucleotide
agcccaucagcauugcugg

SEQ ID NO: 96792 - RNA, 19 nt, Artificial Sequence
  Description of Artificial Sequence: Synthetic oligonucleotide
ggggcuucuacggugagga

SEQ ID NO: 96793 - RNA, 19 nt, Artificial Sequence
  Description of Artificial Sequence: Synthetic oligonucleotide
agccccugcacacccccau

SEQ ID NO: 96794 - RNA, 19 nt, Artificial Sequence
  Description of Artificial Sequence: Synthetic oligonucleotide
ucguggugaccuccacacc

SEQ ID NO: 96795 - RNA, 19 nt, Artificial Sequence
  Description of Artificial Sequence: Synthetic oligonucleotide
cugcugucacuccgggcac

SEQ ID NO: 96796 - RNA, 19 nt, Artificial Sequence
  Description of Artificial Sequence: Synthetic oligonucleotide
ccucgaaccucgucuucac

SEQ ID NO: 96797 - RNA, 19 nt, Artificial Sequence
  Description of Artificial Sequence: Synthetic oligonucleotide
ccuauccuagcguccugga

SEQ ID NO: 96798 - RNA, 19 nt, Artificial Sequence
  Description of Artificial Sequence: Synthetic oligonucleotide
agcaggagucacccgcauc

SEQ ID NO: 96799 - RNA, 19 nt, Artificial Sequence
  Description of Artificial Sequence: Synthetic oligonucleotide
cucccuccgaauccugcuc

SEQ ID NO: 96800 - RNA, 19 nt, Artificial Sequence
  Description of Artificial Sequence: Synthetic oligonucleotide
ccaaggcucaccgcagaag

SEQ ID NO: 96801 - RNA, 19 nt, Artificial Sequence
  Description of Artificial Sequence: Synthetic oligonucleotide
gcaguagcagcggggacca

SEQ ID NO: 96802 - RNA, 19 nt, Artificial Sequence
  Description of Artificial Sequence: Synthetic oligonucleotide
aaucaucagacuccuugaa

SEQ ID NO: 96803 - RNA, 19 nt, Artificial Sequence
  Description of Artificial Sequence: Synthetic oligonucleotide
acucccccacucugcuggc

SEQ ID NO: 96804 - RNA, 19 nt, Artificial Sequence
  Description of Artificial Sequence: Synthetic oligonucleotide
cucuguaacccagugcacc

SEQ ID NO: 96805 - RNA, 19 nt, Artificial Sequence
  Description of Artificial Sequence: Synthetic oligonucleotide
cucccuccccagcuccgga

SEQ ID NO: 96806 - RNA, 19 nt, Artificial Sequence
  Description of Artificial Sequence: Synthetic oligonucleotide
aggggguccuccucgcucc

SEQ ID NO: 96807 - RNA, 19 nt, Artificial Sequence
  Description of Artificial Sequence: Synthetic oligonucleotide
cuccuucccagggaccagc

SEQ ID NO: 96808 - RNA, 19 nt, Artificial Sequence
  Description of Artificial Sequence: Synthetic oligonucleotide
caccuucaagcgcuccagg

SEQ ID NO: 96809 - RNA, 19 nt, Artificial Sequence
  Description of Artificial Sequence: Synthetic oligonucleotide
ggccgugagggcaagaggg

SEQ ID NO: 96810 - RNA, 19 nt, Artificial Sequence
  Description of Artificial Sequence: Synthetic oligonucleotide
gggaccugccaccagggag

SEQ ID NO: 96811 - RNA, 19 nt, Artificial Sequence
  Description of Artificial Sequence: Synthetic oligonucleotide
gcuuccuggcucuggggga

SEQ ID NO: 96812 - RNA, 19 nt, Artificial Sequence
  Description of Artificial Sequence: Synthetic oligonucleotide
acccaggugggacuuagca

SEQ ID NO: 96813 - RNA, 19 nt, Artificial Sequence
  Description of Artificial Sequence: Synthetic oligonucleotide
agugaguauuggaagacuu

SEQ ID NO: 96814 - RNA, 19 nt, Artificial Sequence
  Description of Artificial Sequence: Synthetic oligonucleotide
uggguugaucucuuagaag

SEQ ID NO: 96815 - RNA, 19 nt, Artificial Sequence
  Description of Artificial Sequence: Synthetic oligonucleotide
gccaugggaccuccucccu

SEQ ID NO: 96816 - RNA, 19 nt, Artificial Sequence
  Description of Artificial Sequence: Synthetic oligonucleotide
ucauucaucuugcaagcaa

SEQ ID NO: 96817 - RNA, 19 nt, Artificial Sequence
  Description of Artificial Sequence: Synthetic oligonucleotide
aaucccauuucuugaaaag

SEQ ID NO: 96818 - RNA, 19 nt, Artificial Sequence
  Description of Artificial Sequence: Synthetic oligonucleotide
gccuuggagaacucgguuu

SEQ ID NO: 96819 - RNA, 19 nt, Artificial Sequence
  Description of Artificial Sequence: Synthetic oligonucleotide
ugguagacuuggacaucuc

SEQ ID NO: 96820 - RNA, 19 nt, Artificial Sequence
  Description of Artificial Sequence: Synthetic oligonucleotide
cucuggcuucugaagagcc

SEQ ID NO: 96821 - RNA, 19 nt, Artificial Sequence
  Description of Artificial Sequence: Synthetic oligonucleotide
cugaagcuggccuggacca

SEQ ID NO: 96822 - RNA, 19 nt, Artificial Sequence
  Description of Artificial Sequence: Synthetic oligonucleotide
auuccugucccuuuguuac

SEQ ID NO: 96823 - RNA, 19 nt, Artificial Sequence
  Description of Artificial Sequence: Synthetic oligonucleotide
ccauacugucucuggagug

SEQ ID NO: 96824 - RNA, 19 nt, Artificial Sequence
  Description of Artificial Sequence: Synthetic oligonucleotide
gaugguguccuucccugcc

SEQ ID NO: 96825 - RNA, 19 nt, Artificial Sequence
  Description of Artificial Sequence: Synthetic oligonucleotide
cccaccacgcaugcucagu

SEQ ID NO: 96826 - RNA, 19 nt, Artificial Sequence
  Description of Artificial Sequence: Synthetic oligonucleotide
ugccuuuugguuucaccuu

SEQ ID NO: 96827 - RNA, 19 nt, Artificial Sequence
  Description of Artificial Sequence: Synthetic oligonucleotide
ucccucgacuugacccuuu

SEQ ID NO: 96828 - RNA, 19 nt, Artificial Sequence
  Description of Artificial Sequence: Synthetic oligonucleotide
uccucccccagcgucaguu

SEQ ID NO: 96829 - RNA, 19 nt, Artificial Sequence
  Description of Artificial Sequence: Synthetic oligonucleotide
uucacucccucuugguuuu

SEQ ID NO: 96830 - RNA, 19 nt, Artificial Sequence
  Description of Artificial Sequence: Synthetic oligonucleotide
uuaucaaauuugccaugac

SEQ ID NO: 96831 - RNA, 19 nt, Artificial Sequence
  Description of Artificial Sequence: Synthetic oligonucleotide
cauuucaucuggguggucu

SEQ ID NO: 96832 - RNA, 19 nt, Artificial Sequence
  Description of Artificial Sequence: Synthetic oligonucleotide
ugaauauuaaagcucuuca

SEQ ID NO: 96833 - RNA, 19 nt, Artificial Sequence
  Description of Artificial Sequence: Synthetic oligonucleotide
auuucuggagauggggcag

SEQ ID NO: 96834 - RNA, 19 nt, Artificial Sequence
  Description of Artificial Sequence: Synthetic oligonucleotide
gcagguggcucuucugcug

SEQ ID NO: 96835 - RNA, 19 nt, Artificial Sequence
  Description of Artificial Sequence: Synthetic oligonucleotide
ggggcugacuuguccagaa

SEQ ID NO: 96836 - RNA, 19 nt, Artificial Sequence
  Description of Artificial Sequence: Synthetic oligonucleotide
aggggacaaagugcaauac

SEQ ID NO: 96837 - RNA, 19 nt, Artificial Sequence
  Description of Artificial Sequence: Synthetic oligonucleotide
cagagccuucccuacccug

SEQ ID NO: 96838 - RNA, 19 nt, Artificial Sequence
  Description of Artificial Sequence: Synthetic oligonucleotide
gacgccucccagucaucau

SEQ ID NO: 96839 - RNA, 19 nt, Artificial Sequence
  Description of Artificial Sequence: Synthetic oligonucleotide
ucuccagaacucccagcgg

SEQ ID NO: 96840 - RNA, 19 nt, Artificial Sequence
  Description of Artificial Sequence: Synthetic oligonucleotide
gggcucccugagcucucaa

SEQ ID NO: 96841 - RNA, 19 nt, Artificial Sequence
  Description of Artificial Sequence: Synthetic oligonucleotide
aggagaugcugccaucacu

SEQ ID NO: 96842 - RNA, 19 nt, Artificial Sequence
  Description of Artificial Sequence: Synthetic oligonucleotide
ugggaggcucagaggaccc

SEQ ID NO: 96843 - RNA, 19 nt, Artificial Sequence
  Description of Artificial Sequence: Synthetic oligonucleotide
cuuccugcccaccuucgga

SEQ ID NO: 96844 - RNA, 19 nt, Artificial Sequence
  Description of Artificial Sequence: Synthetic oligonucleotide
agacggcuucuggaggaac

SEQ ID NO: 96845 - RNA, 19 nt, Artificial Sequence
  Description of Artificial Sequence: Synthetic oligonucleotide
cggcuuggccagaagacag

SEQ ID NO: 96846 - RNA, 19 nt, Artificial Sequence
  Description of Artificial Sequence: Synthetic oligonucleotide
gggugugagugagacagug

SEQ ID NO: 96847 - RNA, 19 nt, Artificial Sequence
  Description of Artificial Sequence: Synthetic oligonucleotide
ggggcacagguuggguuug

SEQ ID NO: 96848 - RNA, 19 nt, Artificial Sequence
  Description of Artificial Sequence: Synthetic oligonucleotide
gccaaacgccuaauuacca

SEQ ID NO: 96849 - RNA, 19 nt, Artificial Sequence
  Description of Artificial Sequence: Synthetic oligonucleotide
aggccaggaagcaugccaa

SEQ ID NO: 96850 - RNA, 19 nt, Artificial Sequence
  Description of Artificial Sequence: Synthetic oligonucleotide
acaaagccacacggguguc

SEQ ID NO: 96851 - RNA, 19 nt, Artificial Sequence
  Description of Artificial Sequence: Synthetic oligonucleotide
ccuagccagcuucccuuca

SEQ ID NO: 96852 - RNA, 19 nt, Artificial Sequence
  Description of Artificial Sequence: Synthetic oligonucleotide
accuggugucuugaguagg

SEQ ID NO: 96853 - RNA, 19 nt, Artificial Sequence
  Description of Artificial Sequence: Synthetic oligonucleotide
ggcgucuccuguaauuacu

SEQ ID NO: 96854 - RNA, 19 nt, Artificial Sequence
  Description of Artificial Sequence: Synthetic oligonucleotide
ugccuugccauucugcccc

SEQ ID NO: 96855 - RNA, 19 nt, Artificial Sequence
  Description of Artificial Sequence: Synthetic oligonucleotide
cuggacccuucucuccgga

SEQ ID NO: 96856 - RNA, 19 nt, Artificial Sequence
  Description of Artificial Sequence: Synthetic oligonucleotide
accagggaggcgucccucc

SEQ ID NO: 96857 - RNA, 19 nt, Artificial Sequence
  Description of Artificial Sequence: Synthetic oligonucleotide
ccuaggagccacacauuau

SEQ ID NO: 96858 - RNA, 19 nt, Artificial Sequence
  Description of Artificial Sequence: Synthetic oligonucleotide
uacuccaagucccugccgg

SEQ ID NO: 96859 - RNA, 19 nt, Artificial Sequence
  Description of Artificial Sequence: Synthetic oligonucleotide
ggcuccgccuuucccccac

SEQ ID NO: 96860 - RNA, 19 nt, Artificial Sequence
  Description of Artificial Sequence: Synthetic oligonucleotide
cccuggcucucagggugac

SEQ ID NO: 96861 - RNA, 19 nt, Artificial Sequence
  Description of Artificial Sequence: Synthetic oligonucleotide
cgccacccacagagauuua

SEQ ID NO: 96862 - RNA, 19 nt, Artificial Sequence
  Description of Artificial Sequence: Synthetic oligonucleotide
aaugagcgugggccuggac

SEQ ID NO: 96863 - RNA, 19 nt, Artificial Sequence
  Description of Artificial Sequence: Synthetic oligonucleotide
ccuuccccagaugcugcca

SEQ ID NO: 96864 - RNA, 19 nt, Artificial Sequence
  Description of Artificial Sequence: Synthetic oligonucleotide
aggcagccccuccccaagc

SEQ ID NO: 96865 - RNA, 19 nt, Artificial Sequence
  Description of Artificial Sequence: Synthetic oligonucleotide
ccucaaagaagcauuugcu

SEQ ID NO: 96866 - RNA, 19 nt, Artificial Sequence
  Description of Artificial Sequence: Synthetic oligonucleotide
ugaggauggagaggcaggg

SEQ ID NO: 96867 - RNA, 19 nt, Artificial Sequence
  Description of Artificial Sequence: Synthetic oligonucleotide
ggagggaggcgggaggccg

SEQ ID NO: 96868 - RNA, 19 nt, Artificial Sequence
  Description of Artificial Sequence: Synthetic oligonucleotide
gucacuggaguggcgucug

SEQ ID NO: 96869 - RNA, 19 nt, Artificial Sequence
  Description of Artificial Sequence: Synthetic oligonucleotide
gcagcagcugcugccccag

SEQ ID NO: 96870 - RNA, 19 nt, Artificial Sequence
  Description of Artificial Sequence: Synthetic oligonucleotide
gcacccgcucagccugucc

SEQ ID NO: 96871 - RNA, 19 nt, Artificial Sequence
  Description of Artificial Sequence: Synthetic oligonucleotide
cuggcugcucaccuccccg

SEQ ID NO: 96872 - RNA, 19 nt, Artificial Sequence
  Description of Artificial Sequence: Synthetic oligonucleotide
gcagggcaccgggccuuuc

SEQ ID NO: 96873 - RNA, 19 nt, Artificial Sequence
  Description of Artificial Sequence: Synthetic oligonucleotide
ccugcccucuguggucauc

SEQ ID NO: 96874 - RNA, 19 nt, Artificial Sequence
  Description of Artificial Sequence: Synthetic oligonucleotide
cugccaccugcuggaucaa

SEQ ID NO: 96875 - RNA, 19 nt, Artificial Sequence
  Description of Artificial Sequence: Synthetic oligonucleotide
agugcuuucucuuuuacac

SEQ ID NO: 96876 - RNA, 19 nt, Artificial Sequence
  Description of Artificial Sequence: Synthetic oligonucleotide
cuccccuguccccacccca

SEQ ID NO: 96877 - RNA, 19 nt, Artificial Sequence
  Description of Artificial Sequence: Synthetic oligonucleotide
agugcacucuucuggccca

SEQ ID NO: 96878 - RNA, 19 nt, Artificial Sequence
  Description of Artificial Sequence: Synthetic oligonucleotide
aggcagcaagcaagcugug

SEQ ID NO: 96879 - RNA, 19 nt, Artificial Sequence
  Description of Artificial Sequence: Synthetic oligonucleotide
gaacagcuggccugagcug

SEQ ID NO: 96880 - RNA, 19 nt, Artificial Sequence
  Description of Artificial Sequence: Synthetic oligonucleotide
gucgcuguggcuuguggcu

SEQ ID NO: 96881 - RNA, 19 nt, Artificial Sequence
  Description of Artificial Sequence: Synthetic oligonucleotide
ucaugcgccauuccugguu

SEQ ID NO: 96882 - RNA, 19 nt, Artificial Sequence
  Description of Artificial Sequence: Synthetic oligonucleotide
ugucuguugaaucuuucug

SEQ ID NO: 96883 - RNA, 19 nt, Artificial Sequence
  Description of Artificial Sequence: Synthetic oligonucleotide
ggcugcuggaauuggagau

SEQ ID NO: 96884 - RNA, 19 nt, Artificial Sequence
  Description of Artificial Sequence: Synthetic oligonucleotide
uaggauguuuugcuuccca

SEQ ID NO: 96885 - RNA, 19 nt, Artificial Sequence
  Description of Artificial Sequence: Synthetic oligonucleotide
acugcaggagagcugcccc

SEQ ID NO: 96886 - RNA, 19 nt, Artificial Sequence
  Description of Artificial Sequence: Synthetic oligonucleotide
ccuuucacgggguugggga

SEQ ID NO: 96887 - RNA, 19 nt, Artificial Sequence
  Description of Artificial Sequence: Synthetic oligonucleotide
aagggucccccuggccucc

SEQ ID NO: 96888 - RNA, 19 nt, Artificial Sequence
  Description of Artificial Sequence: Synthetic oligonucleotide
cagcaggagcacagcucag

SEQ ID NO: 96889 - RNA, 19 nt, Artificial Sequence
  Description of Artificial Sequence: Synthetic oligonucleotide
gcagggucccugcugccca

SEQ ID NO: 96890 - RNA, 19 nt, Artificial Sequence
  Description of Artificial Sequence: Synthetic oligonucleotide
accccucugagccuuuucu

SEQ ID NO: 96891 - RNA, 19 nt, Artificial Sequence
  Description of Artificial Sequence: Synthetic oligonucleotide
uccccaggguauggcuccu

SEQ ID NO: 96892 - RNA, 19 nt, Artificial Sequence
  Description of Artificial Sequence: Synthetic oligonucleotide
ugcugaguuucuuguccag

SEQ ID NO: 96893 - RNA, 19 nt, Artificial Sequence
  Description of Artificial Sequence: Synthetic oligonucleotide
gcagggccuugacaggaau

SEQ ID NO: 96894 - RNA, 19 nt, Artificial Sequence
  Description of Artificial Sequence: Synthetic oligonucleotide
uccagggaguagcuccugg

SEQ ID NO: 96895 - RNA, 19 nt, Artificial Sequence
  Description of Artificial Sequence: Synthetic oligonucleotide
gccagaaccagccucugcg

SEQ ID NO: 96896 - RNA, 19 nt, Artificial Sequence
  Description of Artificial Sequence: Synthetic oligonucleotide
ggggcuugugcucugcaaa

SEQ ID NO: 96897 - RNA, 19 nt, Artificial Sequence
  Description of Artificial Sequence: Synthetic oligonucleotide
agacucugcugcuggggau

SEQ ID NO: 96898 - RNA, 19 nt, Artificial Sequence
  Description of Artificial Sequence: Synthetic oligonucleotide
uucagcucuagaggucaca

SEQ ID NO: 96899 - RNA, 19 nt, Artificial Sequence
  Description of Artificial Sequence: Synthetic oligonucleotide
aguauccucguuugaaaga

SEQ ID NO: 96900 - RNA, 19 nt, Artificial Sequence
  Description of Artificial Sequence: Synthetic oligonucleotide
auaauuaagaucccccgug

SEQ ID NO: 96901 - RNA, 19 nt, Artificial Sequence
  Description of Artificial Sequence: Synthetic oligonucleotide
ggagaaagcagugacacau

SEQ ID NO: 96902 - RNA, 19 nt, Artificial Sequence
  Description of Artificial Sequence: Synthetic oligonucleotide
uucacacagcuguucccuc

SEQ ID NO: 96903 - RNA, 19 nt, Artificial Sequence
  Description of Artificial Sequence: Synthetic oligonucleotide
cgcauguuauuucaugaac

SEQ ID NO: 96904 - RNA, 19 nt, Artificial Sequence
  Description of Artificial Sequence: Synthetic oligonucleotide
caugaccuguuuucgugca

SEQ ID NO: 96905 - RNA, 19 nt, Artificial Sequence
  Description of Artificial Sequence: Synthetic oligonucleotide
acuagacacacagagugga

SEQ ID NO: 96906 - RNA, 19 nt, Artificial Sequence
  Description of Artificial Sequence: Synthetic oligonucleotide
aacagccguaugcuuaaag

SEQ ID NO: 96907 - RNA, 19 nt, Artificial Sequence
  Description of Artificial Sequence: Synthetic oligonucleotide
guacaugggccagugggac

SEQ ID NO: 96908 - RNA, 19 nt, Artificial Sequence
  Description of Artificial Sequence: Synthetic oligonucleotide
cuggaagugaccuguacaa

SEQ ID NO: 96909 - RNA, 19 nt, Artificial Sequence
  Description of Artificial Sequence: Synthetic oligonucleotide
agugaugcagaaaggaggg

SEQ ID NO: 96910 - RNA, 19 nt, Artificial Sequence
  Description of Artificial Sequence: Synthetic oligonucleotide
guuucaaagaaaaaggauu

SEQ ID NO: 96911 - RNA, 19 nt, Artificial Sequence
  Description of Artificial Sequence: Synthetic oligonucleotide
uuuguuuaaaauacuuuaa

SEQ ID NO: 96912 - RNA, 19 nt, Artificial Sequence
  Description of Artificial Sequence: Synthetic oligonucleotide
aaaauguuauuuccugcau

SEQ ID NO: 96913 - RNA, 19 nt, Artificial Sequence
  Description of Artificial Sequence: Synthetic oligonucleotide
ucccuuggcugugaugccc

SEQ ID NO: 96914 - RNA, 19 nt, Artificial Sequence
  Description of Artificial Sequence: Synthetic oligonucleotide
ccucucccgauuucccagg

SEQ ID NO: 96915 - RNA, 19 nt, Artificial Sequence
  Description of Artificial Sequence: Synthetic oligonucleotide
gggcucugggagggacccu

SEQ ID NO: 96916 - RNA, 19 nt, Artificial Sequence
  Description of Artificial Sequence: Synthetic oligonucleotide
uucuaagaagauugggcag

SEQ ID NO: 96917 - RNA, 19 nt, Artificial Sequence
  Description of Artificial Sequence: Synthetic oligonucleotide
guuggguuucuggcuugag

SEQ ID NO: 96918 - RNA, 19 nt, Artificial Sequence
  Description of Artificial Sequence: Synthetic oligonucleotide
gaugaauccaagcagcaga

SEQ ID NO: 96919 - RNA, 19 nt, Artificial Sequence
  Description of Artificial Sequence: Synthetic oligonucleotide
aaugagccaggaguagcag

SEQ ID NO: 96920 - RNA, 19 nt, Artificial Sequence
  Description of Artificial Sequence: Synthetic oligonucleotide
ggagaugggcaaagaaaac

SEQ ID NO: 96921 - RNA, 19 nt, Artificial Sequence
  Description of Artificial Sequence: Synthetic oligonucleotide
cuggggugcacucagcucu

SEQ ID NO: 96922 - RNA, 19 nt, Artificial Sequence
  Description of Artificial Sequence: Synthetic oligonucleotide
ucacagggguaaucaucuc

SEQ ID NO: 96923 - RNA, 19 nt, Artificial Sequence
  Description of Artificial Sequence: Synthetic oligonucleotide
caagugguauuuguagcca

SEQ ID NO: 96924 - RNA, 19 nt, Artificial Sequence
  Description of Artificial Sequence: Synthetic oligonucleotide
aagugggagcuauuuucuu

SEQ ID NO: 96925 - RNA, 19 nt, Artificial Sequence
  Description of Artificial Sequence: Synthetic oligonucleotide
uuuuugugcauauagauau

SEQ ID NO: 96926 - RNA, 19 nt, Artificial Sequence
  Description of Artificial Sequence: Synthetic oligonucleotide
uuucuuaaaugaaaaaaaa

SEQ ID NO: 96927 - RNA, 25 nt, Artificial Sequence
  Description of Artificial Sequence: Synthetic oligonucleotide
cgaacgagcggcgcucggcggggac

SEQ ID NO: 96928 - RNA, 25 nt, Artificial Sequence
  Description of Artificial Sequence: Synthetic oligonucleotide
cagaaagagggagagagagagagag

SEQ ID NO: 96929 - RNA, 25 nt, Artificial Sequence
  Description of Artificial Sequence: Synthetic oligonucleotide
gagagagggagaggcgcggccgggc

SEQ ID NO: 96930 - RNA, 25 nt, Artificial Sequence
  Description of Artificial Sequence: Synthetic oligonucleotide
cgaggcgggcccguccgggagcggg

SEQ ID NO: 96931 - RNA, 25 nt, Artificial Sequence
  Description of Artificial Sequence: Synthetic oligonucleotide
gcuccggggaaggggugcgggucug

SEQ ID NO: 96932 - RNA, 25 nt, Artificial Sequence
  Description of Artificial Sequence: Synthetic oligonucleotide
gggcgccggagcggggagcggggcc

SEQ ID NO: 96933 - RNA, 25 nt, Artificial Sequence
  Description of Artificial Sequence: Synthetic oligonucleotide
cgcgucccucucagcgccagcucua

SEQ ID NO: 96934 - RNA, 25 nt, Artificial Sequence
  Description of Artificial Sequence: Synthetic oligonucleotide
acuugagccccacgagccgcugucc

SEQ ID NO: 96935 - RNA, 25 nt, Artificial Sequence
  Description of Artificial Sequence: Synthetic oligonucleotide
ccccuggcgcgcucggggccgcggg

SEQ ID NO: 96936 - RNA, 25 nt, Artificial Sequence
  Description of Artificial Sequence: Synthetic oligonucleotide
gacgggcgcacgccgccuucuccua

SEQ ID NO: 96937 - RNA, 25 nt, Artificial Sequence
  Description of Artificial Sequence: Synthetic oligonucleotide
agucaaguauccgagccgccccgaa

SEQ ID NO: 96938 - RNA, 25 nt, Artificial Sequence
  Description of Artificial Sequence: Synthetic oligonucleotide
aacucgggcggcgagucggccacgg

SEQ ID NO: 96939 - RNA, 25 nt, Artificial Sequence
  Description of Artificial Sequence: Synthetic oligonucleotide
ggaaguuuauucuccggcuccuuuu

SEQ ID NO: 96940 - RNA, 25 nt, Artificial Sequence
  Description of Artificial Sequence: Synthetic oligonucleotide
ucuaaaaggaagaaacagaaguuuc

SEQ ID NO: 96941 - RNA, 25 nt, Artificial Sequence
  Description of Artificial Sequence: Synthetic oligonucleotide
cucccagcggacagcuuuucuuucc

SEQ ID NO: 96942 - RNA, 25 nt, Artificial Sequence
  Description of Artificial Sequence: Synthetic oligonucleotide
cgccuuuuuggcccugucugaaauc

SEQ ID NO: 96943 - RNA, 25 nt, Artificial Sequence
  Description of Artificial Sequence: Synthetic oligonucleotide
cggggguccccagggcuggcaggcc

SEQ ID NO: 96944 - RNA, 25 nt, Artificial Sequence
  Description of Artificial Sequence: Synthetic oligonucleotide
caggcucgcugggcuccuaaucuuu

SEQ ID NO: 96945 - RNA, 25 nt, Artificial Sequence
  Description of Artificial Sequence: Synthetic oligonucleotide
uuuuuuaauuuccaauuuuugauug

SEQ ID NO: 96946 - RNA, 25 nt, Artificial Sequence
  Description of Artificial Sequence: Synthetic oligonucleotide
gggccguggguccccgcugagcucc

SEQ ID NO: 96947 - RNA, 25 nt, Artificial Sequence
  Description of Artificial Sequence: Synthetic oligonucleotide
cggcugcgcgcgggggcgggagggc

SEQ ID NO: 96948 - RNA, 25 nt, Artificial Sequence
  Description of Artificial Sequence: Synthetic oligonucleotide
cgcgcgcaggggagggaccgagaga

SEQ ID NO: 96949 - RNA, 25 nt, Artificial Sequence
  Description of Artificial Sequence: Synthetic oligonucleotide
acgcgccgacuuuuuagagggaggg

SEQ ID NO: 96950 - RNA, 25 nt, Artificial Sequence
  Description of Artificial Sequence: Synthetic oligonucleotide
gaucggguggacaacuggucccgcg

SEQ ID NO: 96951 - RNA, 25 nt, Artificial Sequence
  Description of Artificial Sequence: Synthetic oligonucleotide
ggcgcucgcagagccggaaagaagu

SEQ ID NO: 96952 - RNA, 25 nt, Artificial Sequence
  Description of Artificial Sequence: Synthetic oligonucleotide
ugcuguaagggacgcucgggggacg

SEQ ID NO: 96953 - RNA, 25 nt, Artificial Sequence
  Description of Artificial Sequence: Synthetic oligonucleotide
gcuguuccugaggugucgccgccuc

SEQ ID NO: 96954 - RNA, 25 nt, Artificial Sequence
  Description of Artificial Sequence: Synthetic oligonucleotide
cccuguccucgcccuccgcgguggg

SEQ ID NO: 96955 - RNA, 25 nt, Artificial Sequence
  Description of Artificial Sequence: Synthetic oligonucleotide
gggagaaacccaggagcgaagccca

SEQ ID NO: 96956 - RNA, 25 nt, Artificial Sequence
  Description of Artificial Sequence: Synthetic oligonucleotide
agagcccgcggcgcggccggcggac

SEQ ID NO: 96957 - RNA, 25 nt, Artificial Sequence
  Description of Artificial Sequence: Synthetic oligonucleotide
cgaacgagcgcgcagcagccggugc

SEQ ID NO: 96958 - RNA, 25 nt, Artificial Sequence
  Description of Artificial Sequence: Synthetic oligonucleotide
cgcggccgcggcgagggcgggggaa

SEQ ID NO: 96959 - RNA, 25 nt, Artificial Sequence
  Description of Artificial Sequence: Synthetic oligonucleotide
agaaaaacacccuguuuccucuccg

SEQ ID NO: 96960 - RNA, 25 nt, Artificial Sequence
  Description of Artificial Sequence: Synthetic oligonucleotide
ggcccccaccgcggaucauguacca

SEQ ID NO: 96961 - RNA, 25 nt, Artificial Sequence
  Description of Artificial Sequence: Synthetic oligonucleotide
aggauuaucccgggaacuuugacac

SEQ ID NO: 96962 - RNA, 25 nt, Artificial Sequence
  Description of Artificial Sequence: Synthetic oligonucleotide
ccucgucccggggcagcagcggcuc

SEQ ID NO: 96963 - RNA, 25 nt, Artificial Sequence
  Description of Artificial Sequence: Synthetic oligonucleotide
cuccugcgcacgccgaguccuacuc

SEQ ID NO: 96964 - RNA, 25 nt, Artificial Sequence
  Description of Artificial Sequence: Synthetic oligonucleotide
ccagcggcggcggcggccagcagaa

SEQ ID NO: 96965 - RNA, 25 nt, Artificial Sequence
  Description of Artificial Sequence: Synthetic oligonucleotide
aauuccggguagauaugccuggcuc

SEQ ID NO: 96966 - RNA, 25 nt, Artificial Sequence
  Description of Artificial Sequence: Synthetic oligonucleotide
caggcagugcauucauccccaccau

SEQ ID NO: 96967 - RNA, 25 nt, Artificial Sequence
  Description of Artificial Sequence: Synthetic oligonucleotide
ucaacgccaucacgaccagccagga

SEQ ID NO: 96968 - RNA, 25 nt, Artificial Sequence
  Description of Artificial Sequence: Synthetic oligonucleotide
accugcaguggauggugcagcccac

SEQ ID NO: 96969 - RNA, 25 nt, Artificial Sequence
  Description of Artificial Sequence: Synthetic oligonucleotide
cagugaucaccuccauguccaaccc

SEQ ID NO: 96970 - RNA, 25 nt, Artificial Sequence
  Description of Artificial Sequence: Synthetic oligonucleotide
cauacccucgcucgcaccccuacag

SEQ ID NO: 96971 - RNA, 25 nt, Artificial Sequence
  Description of Artificial Sequence: Synthetic oligonucleotide
gcccccugccgggccuggccucugu

SEQ ID NO: 96972 - RNA, 25 nt, Artificial Sequence
  Description of Artificial Sequence: Synthetic oligonucleotide
ucccuggacacauggcccucccaag

SEQ ID NO: 96973 - RNA, 25 nt, Artificial Sequence
  Description of Artificial Sequence: Synthetic oligonucleotide
gaccuggcgugaucaagaccauugg

SEQ ID NO: 96974 - RNA, 25 nt, Artificial Sequence
  Description of Artificial Sequence: Synthetic oligonucleotide
gcaccaccgugggccgcaggaggag

SEQ ID NO: 96975 - RNA, 25 nt, Artificial Sequence
  Description of Artificial Sequence: Synthetic oligonucleotide
gagaugagcagcugucuccugaaga

SEQ ID NO: 96976 - RNA, 25 nt, Artificial Sequence
  Description of Artificial Sequence: Synthetic oligonucleotide
aggaggagaagcgucgcauccggcg

SEQ ID NO: 96977 - RNA, 25 nt, Artificial Sequence
  Description of Artificial Sequence: Synthetic oligonucleotide
gggagaggaacaagcuggcugcagc

SEQ ID NO: 96978 - RNA, 25 nt, Artificial Sequence
  Description of Artificial Sequence: Synthetic oligonucleotide
ccaagugccggaaccgacgccggga

SEQ ID NO: 96979 - RNA, 25 nt, Artificial Sequence
  Description of Artificial Sequence: Synthetic oligonucleotide
agcugacagagaagcugcaggcgga

SEQ ID NO: 96980 - RNA, 25 nt, Artificial Sequence
  Description of Artificial Sequence: Synthetic oligonucleotide
agacagaggagcuggaggaggagaa

SEQ ID NO: 96981 - RNA, 25 nt, Artificial Sequence
  Description of Artificial Sequence: Synthetic oligonucleotide
agucaggccugcagaaggagauugc

SEQ ID NO: 96982 - RNA, 25 nt, Artificial Sequence
  Description of Artificial Sequence: Synthetic oligonucleotide
cugagcugcagaaggagaaggagaa

SEQ ID NO: 96983 - RNA, 25 nt, Artificial Sequence
  Description of Artificial Sequence: Synthetic oligonucleotide
agcuggaguucauguugguggcuca

SEQ ID NO: 96984 - RNA, 25 nt, Artificial Sequence
  Description of Artificial Sequence: Synthetic oligonucleotide
acggcccagugugcaagauuagccc

SEQ ID NO: 96985 - RNA, 25 nt, Artificial Sequence
  Description of Artificial Sequence: Synthetic oligonucleotide
ccgaggagcgccgaucgcccccagc

SEQ ID NO: 96986 - RNA, 25 nt, Artificial Sequence
  Description of Artificial Sequence: Synthetic oligonucleotide
ccccugggcugcagcccaugcgcag

SEQ ID NO: 96987 - RNA, 25 nt, Artificial Sequence
  Description of Artificial Sequence: Synthetic oligonucleotide
guggggguggcucggugggcgcugu

SEQ ID NO: 96988 - RNA, 25 nt, Artificial Sequence
  Description of Artificial Sequence: Synthetic oligonucleotide
uaguggugaaacaggagccccugga

SEQ ID NO: 96989 - RNA, 25 nt, Artificial Sequence
  Description of Artificial Sequence: Synthetic oligonucleotide
aagaggacagccccucguccucguc

SEQ ID NO: 96990 - RNA, 25 nt, Artificial Sequence
  Description of Artificial Sequence: Synthetic oligonucleotide
cggcggggcuggacaaggcccagcg

SEQ ID NO: 96991 - RNA, 25 nt, Artificial Sequence
  Description of Artificial Sequence: Synthetic oligonucleotide
gcucugucaucaagcccaucagcau

SEQ ID NO: 96992 - RNA, 25 nt, Artificial Sequence
  Description of Artificial Sequence: Synthetic oligonucleotide
uugcugggggcuucuacggugagga

SEQ ID NO: 96993 - RNA, 25 nt, Artificial Sequence
  Description of Artificial Sequence: Synthetic oligonucleotide
agccccugcacacccccaucguggu

SEQ ID NO: 96994 - RNA, 25 nt, Artificial Sequence
  Description of Artificial Sequence: Synthetic oligonucleotide
ugaccuccacaccugcugucacucc

SEQ ID NO: 96995 - RNA, 25 nt, Artificial Sequence
  Description of Artificial Sequence: Synthetic oligonucleotide
cgggcaccucgaaccucgucuucac

SEQ ID NO: 96996 - RNA, 25 nt, Artificial Sequence
  Description of Artificial Sequence: Synthetic oligonucleotide
ccuauccuagcguccuggagcagga

SEQ ID NO: 96997 - RNA, 25 nt, Artificial Sequence
  Description of Artificial Sequence: Synthetic oligonucleotide
agucacccgcaucucccuccgaauc

SEQ ID NO: 96998 - RNA, 25 nt, Artificial Sequence
  Description of Artificial Sequence: Synthetic oligonucleotide
ccugcuccaaggcucaccgcagaag

SEQ ID NO: 96999 - RNA, 25 nt, Artificial Sequence
  Description of Artificial Sequence: Synthetic oligonucleotide
gcaguagcagcggggaccaaucauc

SEQ ID NO: 97000 - RNA, 25 nt, Artificial Sequence
  Description of Artificial Sequence: Synthetic oligonucleotide
cagacuccuugaacucccccacucu

SEQ ID NO: 97001 - RNA, 25 nt, Artificial Sequence
  Description of Artificial Sequence: Synthetic oligonucleotide
ugcuggcucuguaacccagugcacc

SEQ ID NO: 97002 - RNA, 25 nt, Artificial Sequence
  Description of Artificial Sequence: Synthetic oligonucleotide
cucccuccccagcuccggagggggu

SEQ ID NO: 97003 - RNA, 25 nt, Artificial Sequence
  Description of Artificial Sequence: Synthetic oligonucleotide
uccuccucgcuccuccuucccaggg

SEQ ID NO: 97004 - RNA, 25 nt, Artificial Sequence
  Description of Artificial Sequence: Synthetic oligonucleotide
gaccagcaccuucaagcgcuccagg

SEQ ID NO: 97005 - RNA, 25 nt, Artificial Sequence
  Description of Artificial Sequence: Synthetic oligonucleotide
ggccgugagggcaagagggggaccu

SEQ ID NO: 97006 - RNA, 25 nt, Artificial Sequence
  Description of Artificial Sequence: Synthetic oligonucleotide
ugccaccagggagcuuccuggcucu

SEQ ID NO: 97007 - RNA, 25 nt, Artificial Sequence
  Description of Artificial Sequence: Synthetic oligonucleotide
ugggggacccaggugggacuuagca

SEQ ID NO: 97008 - RNA, 25 nt, Artificial Sequence
  Description of Artificial Sequence: Synthetic oligonucleotide
agugaguauuggaagacuuggguug

SEQ ID NO: 97009 - RNA, 25 nt, Artificial Sequence
  Description of Artificial Sequence: Synthetic oligonucleotide
gaucucuuagaagccaugggaccuc

SEQ ID NO: 97010 - RNA, 25 nt, Artificial Sequence
  Description of Artificial Sequence: Synthetic oligonucleotide
ccucccucauucaucuugcaagcaa

SEQ ID NO: 97011 - RNA, 25 nt, Artificial Sequence
  Description of Artificial Sequence: Synthetic oligonucleotide
aaucccauuucuugaaaagccuugg

SEQ ID NO: 97012 - RNA, 25 nt, Artificial Sequence
  Description of Artificial Sequence: Synthetic oligonucleotide
gagaacucgguuugguagacuugga

SEQ ID NO: 97013 - RNA, 25 nt, Artificial Sequence
  Description of Artificial Sequence: Synthetic oligonucleotide
acaucucucuggcuucugaagagcc

SEQ ID NO: 97014 - RNA, 25 nt, Artificial Sequence
  Description of Artificial Sequence: Synthetic oligonucleotide
cugaagcuggccuggaccauuccug

SEQ ID NO: 97015 - RNA, 25 nt, Artificial Sequence
  Description of Artificial Sequence: Synthetic oligonucleotide
gucccuuuguuaccauacugucucu

SEQ ID NO: 97016 - RNA, 25 nt, Artificial Sequence
  Description of Artificial Sequence: Synthetic oligonucleotide
uggagugaugguguccuucccugcc

SEQ ID NO: 97017 - RNA, 25 nt, Artificial Sequence
  Description of Artificial Sequence: Synthetic oligonucleotide
cccaccacgcaugcucagugccuuu

SEQ ID NO: 97018 - RNA, 25 nt, Artificial Sequence
  Description of Artificial Sequence: Synthetic oligonucleotide
uugguuucaccuucccucgacuuga

SEQ ID NO: 97019 - RNA, 25 nt, Artificial Sequence
  Description of Artificial Sequence: Synthetic oligonucleotide
acccuuuccucccccagcgucaguu

SEQ ID NO: 97020 - RNA, 25 nt, Artificial Sequence
  Description of Artificial Sequence: Synthetic oligonucleotide
uucacucccucuugguuuuuaucaa

SEQ ID NO: 97021 - RNA, 25 nt, Artificial Sequence
  Description of Artificial Sequence: Synthetic oligonucleotide
aauuugccaugacauuucaucuggg

SEQ ID NO: 97022 - RNA, 25 nt, Artificial Sequence
  Description of Artificial Sequence: Synthetic oligonucleotide
guggucugaauauuaaagcucuuca

SEQ ID NO: 97023 - RNA, 25 nt, Artificial Sequence
  Description of Artificial Sequence: Synthetic oligonucleotide
auuucuggagauggggcagcaggug

SEQ ID NO: 97024 - RNA, 25 nt, Artificial Sequence
  Description of Artificial Sequence: Synthetic oligonucleotide
ggcucuucugcuggggcugacuugu

SEQ ID NO: 97025 - RNA, 25 nt, Artificial Sequence
  Description of Artificial Sequence: Synthetic oligonucleotide
uccagaaggggacaaagugcaauac

SEQ ID NO: 97026 - RNA, 25 nt, Artificial Sequence
  Description of Artificial Sequence: Synthetic oligonucleotide
cagagccuucccuacccugacgccu

SEQ ID NO: 97027 - RNA, 25 nt, Artificial Sequence
  Description of Artificial Sequence: Synthetic oligonucleotide
ucccagucaucaucuccagaacucc

SEQ ID NO: 97028 - RNA, 25 nt, Artificial Sequence
  Description of Artificial Sequence: Synthetic oligonucleotide
ccagcggggcucccugagcucucaa

SEQ ID NO: 97029 - RNA, 25 nt, Artificial Sequence
  Description of Artificial Sequence: Synthetic oligonucleotide
aggagaugcugccaucacugggagg

SEQ ID NO: 97030 - RNA, 25 nt, Artificial Sequence
  Description of Artificial Sequence: Synthetic oligonucleotide
gcucagaggacccuuccugcccacc

SEQ ID NO: 97031 - RNA, 25 nt, Artificial Sequence
  Description of Artificial Sequence: Synthetic oligonucleotide
cuucggagacggcuucuggaggaac

SEQ ID NO: 97032 - RNA, 25 nt, Artificial Sequence
  Description of Artificial Sequence: Synthetic oligonucleotide
cggcuuggccagaagacagggugug

SEQ ID NO: 97033 - RNA, 25 nt, Artificial Sequence
  Description of Artificial Sequence: Synthetic oligonucleotide
gagugagacaguggggcacagguug

SEQ ID NO: 97034 - RNA, 25 nt, Artificial Sequence
  Description of Artificial Sequence: Synthetic oligonucleotide
ggguuugccaaacgccuaauuacca

SEQ ID NO: 97035 - RNA, 25 nt, Artificial Sequence
  Description of Artificial Sequence: Synthetic oligonucleotide
aggccaggaagcaugccaacaaagc

SEQ ID NO: 97036 - RNA, 25 nt, Artificial Sequence
  Description of Artificial Sequence: Synthetic oligonucleotide
ccacacggguguccuagccagcuuc

SEQ ID NO: 97037 - RNA, 25 nt, Artificial Sequence
  Description of Artificial Sequence: Synthetic oligonucleotide
cccuucaccuggugucuugaguagg

SEQ ID NO: 97038 - RNA, 25 nt, Artificial Sequence
  Description of Artificial Sequence: Synthetic oligonucleotide
ggcgucuccuguaauuacugccuug

SEQ ID NO: 97039 - RNA, 25 nt, Artificial Sequence
  Description of Artificial Sequence: Synthetic oligonucleotide
gccauucugccccuggacccuucuc

SEQ ID NO: 97040 - RNA, 25 nt, Artificial Sequence
  Description of Artificial Sequence: Synthetic oligonucleotide
cuccggaccagggaggcgucccucc

SEQ ID NO: 97041 - RNA, 25 nt, Artificial Sequence
  Description of Artificial Sequence: Synthetic oligonucleotide
ccuaggagccacacauuauacucca

SEQ ID NO: 97042 - RNA, 25 nt, Artificial Sequence
  Description of Artificial Sequence: Synthetic oligonucleotide
aagucccugccgggcuccgccuuuc

SEQ ID NO: 97043 - RNA, 25 nt, Artificial Sequence
  Description of Artificial Sequence: Synthetic oligonucleotide
cccccacccuggcucucagggugac

SEQ ID NO: 97044 - RNA, 25 nt, Artificial Sequence
  Description of Artificial Sequence: Synthetic oligonucleotide
cgccacccacagagauuuaaugagc

SEQ ID NO: 97045 - RNA, 25 nt, Artificial Sequence
  Description of Artificial Sequence: Synthetic oligonucleotide
cgugggccuggaccuuccccagaug

SEQ ID NO: 97046 - RNA, 25 nt, Artificial Sequence
  Description of Artificial Sequence: Synthetic oligonucleotide
gcugccaggcagccccuccccaagc

SEQ ID NO: 97047 - RNA, 25 nt, Artificial Sequence
  Description of Artificial Sequence: Synthetic oligonucleotide
ccucaaagaagcauuugcugaggau

SEQ ID NO: 97048 - RNA, 25 nt, Artificial Sequence
  Description of Artificial Sequence: Synthetic oligonucleotide
uggagaggcaggggagggaggcggg

SEQ ID NO: 97049 - RNA, 25 nt, Artificial Sequence
  Description of Artificial Sequence: Synthetic oligonucleotide
gaggccgucacuggaguggcgucug

SEQ ID NO: 97050 - RNA, 25 nt, Artificial Sequence
  Description of Artificial Sequence: Synthetic oligonucleotide
gcagcagcugcugccccagcacccg

SEQ ID NO: 97051 - RNA, 25 nt, Artificial Sequence
  Description of Artificial Sequence: Synthetic oligonucleotide
gcucagccuguccuggcugcucacc

SEQ ID NO: 97052 - RNA, 25 nt, Artificial Sequence
  Description of Artificial Sequence: Synthetic oligonucleotide
cuccccgcagggcaccgggccuuuc

SEQ ID NO: 97053 - RNA, 25 nt, Artificial Sequence
  Description of Artificial Sequence: Synthetic oligonucleotide
ccugcccucuguggucaucugccac

SEQ ID NO: 97054 - RNA, 25 nt, Artificial Sequence
  Description of Artificial Sequence: Synthetic oligonucleotide
ccugcuggaucaagugcuuucucuu

SEQ ID NO: 97055 - RNA, 25 nt, Artificial Sequence
  Description of Artificial Sequence: Synthetic oligonucleotide
uuuacacuccccuguccccacccca

SEQ ID NO: 97056 - RNA, 25 nt, Artificial Sequence
  Description of Artificial Sequence: Synthetic oligonucleotide
agugcacucuucuggcccaggcagc

SEQ ID NO: 97057 - RNA, 25 nt, Artificial Sequence
  Description of Artificial Sequence: Synthetic oligonucleotide
caagcaagcugugaacagcuggccu

SEQ ID NO: 97058 - RNA, 25 nt, Artificial Sequence
  Description of Artificial Sequence: Synthetic oligonucleotide
ugagcugucgcuguggcuuguggcu

SEQ ID NO: 97059 - RNA, 25 nt, Artificial Sequence
  Description of Artificial Sequence: Synthetic oligonucleotide
ucaugcgccauuccugguugucugu

SEQ ID NO: 97060 - RNA, 25 nt, Artificial Sequence
  Description of Artificial Sequence: Synthetic oligonucleotide
uugaaucuuucuggcugcuggaauu

SEQ ID NO: 97061 - RNA, 25 nt, Artificial Sequence
  Description of Artificial Sequence: Synthetic oligonucleotide
uggagauaggauguuuugcuuccca

SEQ ID NO: 97062 - RNA, 25 nt, Artificial Sequence
  Description of Artificial Sequence: Synthetic oligonucleotide
acugcaggagagcugcccccuuuca

SEQ ID NO: 97063 - RNA, 25 nt, Artificial Sequence
  Description of Artificial Sequence: Synthetic oligonucleotide
acgggguuggggaagggucccccug

SEQ ID NO: 97064 - RNA, 25 nt, Artificial Sequence
  Description of Artificial Sequence: Synthetic oligonucleotide
ggccuccagcaggagcacagcucag

SEQ ID NO: 97065 - RNA, 25 nt, Artificial Sequence
  Description of Artificial Sequence: Synthetic oligonucleotide
gcagggucccugcugcccaccccuc

SEQ ID NO: 97066 - RNA, 25 nt, Artificial Sequence
  Description of Artificial Sequence: Synthetic oligonucleotide
cugagccuuuucuccccaggguaug

SEQ ID NO: 97067 - RNA, 25 nt, Artificial Sequence
  Description of Artificial Sequence: Synthetic oligonucleotide
ggcuccugcugaguuucuuguccag

SEQ ID NO: 97068 - RNA, 25 nt, Artificial Sequence
  Description of Artificial Sequence: Synthetic oligonucleotide
gcagggccuugacaggaauccaggg

SEQ ID NO: 97069 - RNA, 25 nt, Artificial Sequence
  Description of Artificial Sequence: Synthetic oligonucleotide
gaguagcuccuggccagaaccagcc

SEQ ID NO: 97070 - RNA, 25 nt, Artificial Sequence
  Description of Artificial Sequence: Synthetic oligonucleotide
cucugcggggcuugugcucugcaaa

SEQ ID NO: 97071 - RNA, 25 nt, Artificial Sequence
  Description of Artificial Sequence: Synthetic oligonucleotide
agacucugcugcuggggauucagcu

SEQ ID NO: 97072 - RNA, 25 nt, Artificial Sequence
  Description of Artificial Sequence: Synthetic oligonucleotide
ucuagaggucacaguauccucguuu

SEQ ID NO: 97073 - RNA, 25 nt, Artificial Sequence
  Description of Artificial Sequence: Synthetic oligonucleotide
ugaaagauaauuaagaucccccgug

SEQ ID NO: 97074 - RNA, 25 nt, Artificial Sequence
  Description of Artificial Sequence: Synthetic oligonucleotide
ggagaaagcagugacacauucacac

SEQ ID NO: 97075 - RNA, 25 nt, Artificial Sequence
  Description of Artificial Sequence: Synthetic oligonucleotide
cagcuguucccucgcauguuauuuc

SEQ ID NO: 97076 - RNA, 25 nt, Artificial Sequence
  Description of Artificial Sequence: Synthetic oligonucleotide
caugaacaugaccuguuuucgugca

SEQ ID NO: 97077 - RNA, 25 nt, Artificial Sequence
  Description of Artificial Sequence: Synthetic oligonucleotide
acuagacacacagaguggaacagcc

SEQ ID NO: 97078 - RNA, 25 nt, Artificial Sequence
  Description of Artificial Sequence: Synthetic oligonucleotide
cguaugcuuaaaguacaugggccag

SEQ ID NO: 97079 - RNA, 25 nt, Artificial Sequence
  Description of Artificial Sequence: Synthetic oligonucleotide
gugggacuggaagugaccuguacaa

SEQ ID NO: 97080 - RNA, 25 nt, Artificial Sequence
  Description of Artificial Sequence: Synthetic oligonucleotide
agugaugcagaaaggaggguuucaa

SEQ ID NO: 97081 - RNA, 25 nt, Artificial Sequence
  Description of Artificial Sequence: Synthetic oligonucleotide
aagaaaaaggauuuuguuuaaaaua

SEQ ID NO: 97082 - RNA, 25 nt, Artificial Sequence
  Description of Artificial Sequence: Synthetic oligonucleotide
acuuuaaaaauguuauuuccugcau

SEQ ID NO: 97083 - RNA, 25 nt, Artificial Sequence
  Description of Artificial Sequence: Synthetic oligonucleotide
ucccuuggcugugaugccccucucc

SEQ ID NO: 97084 - RNA, 25 nt, Artificial Sequence
  Description of Artificial Sequence: Synthetic oligonucleotide
ccgauuucccaggggcucugggagg

SEQ ID NO: 97085 - RNA, 25 nt, Artificial Sequence
  Description of Artificial Sequence: Synthetic oligonucleotide
ggacccuucuaagaagauugggcag

SEQ ID NO: 97086 - RNA, 25 nt, Artificial Sequence
  Description of Artificial Sequence: Synthetic oligonucleotide
guuggguuucuggcuugagaugaau

SEQ ID NO: 97087 - RNA, 25 nt, Artificial Sequence
  Description of Artificial Sequence: Synthetic oligonucleotide
uccaagcagcagaaugagccaggag

SEQ ID NO: 97088 - RNA, 25 nt, Artificial Sequence
  Description of Artificial Sequence: Synthetic oligonucleotide
guagcaggagaugggcaaagaaaac

SEQ ID NO: 97089 - RNA, 25 nt, Artificial Sequence
  Description of Artificial Sequence: Synthetic oligonucleotide
cuggggugcacucagcucucacagg

SEQ ID NO: 97090 - RNA, 25 nt, Artificial Sequence
  Description of Artificial Sequence: Synthetic oligonucleotide
ggguaaucaucucaagugguauuug

SEQ ID NO: 97091 - RNA, 25 nt, Artificial Sequence
  Description of Artificial Sequence: Synthetic oligonucleotide
guagccaagugggagcuauuuucuu

SEQ ID NO: 97092 - RNA, 25 nt, Artificial Sequence
  Description of Artificial Sequence: Synthetic oligonucleotide
uuuuugugcauauagauauuucuua

SEQ ID NO: 97093 - DNA, 21 bp, Artificial Sequence
  Description of Artificial Sequence: Synthetic oligonucleotide
  Description of Combined DNA/RNA Molecule: Synthetic oligonucleotide
cuacacaaaucagcgauuutt

SEQ ID NO: 97094 - DNA, 21 bp, Artificial Sequence
  Description of Artificial Sequence: Synthetic oligonucleotide
  Description of Combined DNA/RNA Molecule: Synthetic oligonucleotide
aaaucgcugauuuguguagtt

SEQ ID NO: 97095 - DNA, 25 bp, Artificial Sequence
  Description of Artificial Sequence: Synthetic oligonucleotide
  Description of Combined DNA/RNA Molecule: Synthetic oligonucleotide
cuacacaaaucagcgauuuccaugt

SEQ ID NO: 97096 - RNA, 27 nt, Artificial Sequence
  Description of Artificial Sequence: Synthetic oligonucleotide
acauggaaaucgcugauuuguguaguc

SEQ ID NO: 97097 - RNA, 13 nt, Artificial Sequence
  Description of Artificial Sequence: Synthetic oligonucleotide
cuacacaaaucag

SEQ ID NO: 97098 - DNA, 11 bp, Artificial Sequence
  Description of Artificial Sequence: Synthetic oligonucleotide
  Description of Combined DNA/RNA Molecule: Synthetic oligonucleotide
gauuuccaugt

SEQ ID NO: 97099 - DNA, 21 bp, Artificial Sequence
  Description of Artificial Sequence: Synthetic oligonucleotide
  Description of Combined DNA/RNA Molecule: Synthetic oligonucleotide
ggaucuuauuucuucggagtt

SEQ ID NO: 97100 - DNA, 21 bp, Artificial Sequence
  Description of Artificial Sequence: Synthetic oligonucleotide
  Description of Combined DNA/RNA Molecule: Synthetic oligonucleotide
cuccgaagaaauaagaucctt

SEQ ID NO: 97101 - RNA, 11 nt, Artificial Sequence
  Description of Artificial Sequence: Synthetic oligonucleotide
ggaucuuauuu

SEQ ID NO: 97102 - DNA, 10 bp, Artificial Sequence
  Description of Artificial Sequence: Synthetic oligonucleotide
  Description of Combined DNA/RNA Molecule: Synthetic oligonucleotide
cuucggagtt

SEQ ID NO: 97103 - RNA, 27 nt, Artificial Sequence
  Description of Artificial Sequence: Synthetic oligonucleotide
cauugucuccgaagaaauaagauccuu

SEQ ID NO: 97104 - RNA, 8 nt, Artificial Sequence
  Description of Artificial Sequence: Synthetic oligonucleotide
  modified_base (2): LNA-G
ggaucuua

SEQ ID NO: 97105 - DNA, 17 bp, Artificial Sequence
  Description of Artificial Sequence: Synthetic oligonucleotide
  Description of Combined DNA/RNA Molecule: Synthetic oligonucleotide
uuucuucggagacaatg

SEQ ID NO: 97106 - DNA, 16 bp, Artificial Sequence
  Description of Artificial Sequence: Synthetic oligonucleotide
  Description of Combined DNA/RNA Molecule: Synthetic oligonucleotide
uucuucggagacaatg

SEQ ID NO: 97107 - DNA, 15 bp, Artificial Sequence
  Description of Artificial Sequence: Synthetic oligonucleotide
  Description of Combined DNA/RNA Molecule: Synthetic oligonucleotide
ucuucggagacaatg

SEQ ID NO: 97108 - DNA, 14 bp, Artificial Sequence
  Description of Artificial Sequence: Synthetic oligonucleotide
  Description of Combined DNA/RNA Molecule: Synthetic oligonucleotide
cuucggagacaatg

SEQ ID NO: 97109 - DNA, 13 bp, Artificial Sequence
  Description of Artificial Sequence: Synthetic oligonucleotide
  Description of Combined DNA/RNA Molecule: Synthetic oligonucleotide
uucggagacaatg

SEQ ID NO: 97110 - DNA, 12 bp, Artificial Sequence
  Description of Artificial Sequence: Synthetic oligonucleotide
  Description of Combined DNA/RNA Molecule: Synthetic oligonucleotide
ucggagacaatg

SEQ ID NO: 97111 - DNA, 11 bp, Artificial Sequence
  Description of Artificial Sequence: Synthetic oligonucleotide
  Description of Combined DNA/RNA Molecule: Synthetic oligonucleotide
cggagacaatg

SEQ ID NO: 97112 - RNA, 9 nt, Artificial Sequence
  Description of Artificial Sequence: Synthetic oligonucleotide
  modified_base (2): LNA-G
ggaucuuau

SEQ ID NO: 97113 - RNA, 10 nt, Artificial Sequence
  Description of Artificial Sequence: Synthetic oligonucleotide
  modified_base (2): LNA-G
ggaucuuauu

SEQ ID NO: 97114 - RNA, 11 nt, Artificial Sequence
  Description of Artificial Sequence: Synthetic oligonucleotide
  modified_base (2): LNA-G
ggaucuuauuu

SEQ ID NO: 97115 - RNA, 12 nt, Artificial Sequence
  Description of Artificial Sequence: Synthetic oligonucleotide
  modified_base (2): LNA-G
ggaucuuauuuc

SEQ ID NO: 97116 - RNA, 8 nt, Artificial Sequence
  Description of Artificial Sequence: Synthetic oligonucleotide
  modified_base (3): LNA-A
cuacacaa

SEQ ID NO: 97117 - DNA, 13 bp, Artificial Sequence
  Description of Artificial Sequence: Synthetic oligonucleotide
  Description of Combined DNA/RNA Molecule: Synthetic oligonucleotide
  modified_base (8): LNA-A
aucagcgauuutt

SEQ ID NO: 97118 - DNA, 12 bp, Artificial Sequence
  Description of Artificial Sequence: Synthetic oligonucleotide
  Description of Combined DNA/RNA Molecule: Synthetic oligonucleotide
  modified_base (7): LNA-A
ucagcgauuutt

SEQ ID NO: 97119 - DNA, 11 bp, Artificial Sequence
  Description of Artificial Sequence: Synthetic oligonucleotide
  Description of Combined DNA/RNA Molecule: Synthetic oligonucleotide
  modified_base (6): LNA-A
cagcgauuutt

SEQ ID NO: 97120 - DNA, 10 bp, Artificial Sequence
  Description of Artificial Sequence: Synthetic oligonucleotide
  Description of Combined DNA/RNA Molecule: Synthetic oligonucleotide
  modified_base (5): LNA-A
agcgauuutt

SEQ ID NO: 97121 - DNA, 9 bp, Artificial Sequence
  Description of Artificial Sequence: Synthetic oligonucleotide
  Description of Combined DNA/RNA Molecule: Synthetic oligonucleotide
  modified_base (4): LNA-A
gcgauuutt

SEQ ID NO: 97122 - DNA, 8 bp, Artificial Sequence
  Description of Artificial Sequence: Synthetic oligonucleotide
  Description of Combined DNA/RNA Molecule: Synthetic oligonucleotide
  modified_base (3): LNA-A
cgauuutt

SEQ ID NO: 97123 - DNA, 7 bp, Artificial Sequence
  Description of Artificial Sequence: Synthetic oligonucleotide
  Description of Combined DNA/RNA Molecule: Synthetic oligonucleotide
  modified_base (2): LNA-A
gauuutt

SEQ ID NO: 97124 - RNA, 9 nt, Artificial Sequence
  Description of Artificial Sequence: Synthetic oligonucleotide
  modified_base (3): LNA-A
cuacacaaa

SEQ ID NO: 97125 - RNA, 10 nt, Artificial Sequence
  Description of Artificial Sequence: Synthetic oligonucleotide
  modified_base (3): LNA-A
cuacacaaau

SEQ ID NO: 97126 - RNA, 11 nt, Artificial Sequence
  Description of Artificial Sequence: Synthetic oligonucleotide
  modified_base (3): LNA-A
cuacacaaauc

SEQ ID NO: 97127 - RNA, 12 nt, Artificial Sequence
  Description of Artificial Sequence: Synthetic oligonucleotide
  modified_base (3): LNA-A
cuacacaaauca

SEQ ID NO: 97128 - RNA, 13 nt, Artificial Sequence
  Description of Artificial Sequence: Synthetic oligonucleotide
  modified_base (3): LNA-A
cuacacaaaucag

SEQ ID NO: 97129 - RNA, 14 nt, Artificial Sequence
  Description of Artificial Sequence: Synthetic oligonucleotide
  modified_base (3): LNA-A
cuacacaaaucagc

SEQ ID NO: 97130 - RNA, 13 nt, Artificial Sequence
  Description of Artificial Sequence: Synthetic oligonucleotide
  modified_base (2): LNA-G
ggaucuuauuucu

SEQ ID NO: 97131 - RNA, 14 nt, Artificial Sequence
  Description of Artificial Sequence: Synthetic oligonucleotide
  modified_base (2): LNA-G
ggaucuuauuucuu

SEQ ID NO: 97132 - RNA, 8 nt, Artificial Sequence
  Description of Artificial Sequence: Synthetic oligonucleotide
  modified_base (2): LNA-G
  modified_base (8): LNA-A
ggaucuua

SEQ ID NO: 97133 - RNA, 9 nt, Artificial Sequence
  Description of Artificial Sequence: Synthetic oligonucleotide
  modified_base (2): LNA-G
  modified_base (9): LNA-U
ggaucuuau

SEQ ID NO: 97134 - RNA, 10 nt, Artificial Sequence
  Description of Artificial Sequence: Synthetic oligonucleotide
  modified_base (2): LNA-G
  modified_base (10): LNA-U
ggaucuuauu

SEQ ID NO: 97135 - RNA, 11 nt, Artificial Sequence
  Description of Artificial Sequence: Synthetic oligonucleotide
  modified_base (2): LNA-G
  modified_base (11): LNA-U
ggaucuuauuu

SEQ ID NO: 97136 - RNA, 12 nt, Artificial Sequence
  Description of Artificial Sequence: Synthetic oligonucleotide
  modified_base (2): LNA-G
  modified_base (12): LNA-C
ggaucuuauuuc

SEQ ID NO: 97137 - RNA, 13 nt, Artificial Sequence
  Description of Artificial Sequence: Synthetic oligonucleotide
  modified_base (2): LNA-G
  modified_base (13): LNA-U
ggaucuuauuucu

SEQ ID NO: 97138 - RNA, 14 nt, Artificial Sequence
  Description of Artificial Sequence: Synthetic oligonucleotide
  modified_base (2): LNA-G
  modified_base (14): LNA-U
ggaucuuauuucuu

SEQ ID NO: 97139 - DNA, 13 bp, Artificial Sequence
  Description of Artificial Sequence: Synthetic oligonucleotide
  Description of Combined DNA/RNA Molecule: Synthetic oligonucleotide
  modified_base (8): LNA-G
uuucuucggagtt

SEQ ID NO: 97140 - DNA, 12 bp, Artificial Sequence
  Description of Artificial Sequence: Synthetic oligonucleotide
  Description of Combined DNA/RNA Molecule: Synthetic oligonucleotide
  modified_base (7): LNA-G
uucuucggagtt

SEQ ID NO: 97141 - DNA, 11 bp, Artificial Sequence
  Description of Artificial Sequence: Synthetic oligonucleotide
  Description of Combined DNA/RNA Molecule: Synthetic oligonucleotide
  modified_base (6): LNA-G
ucuucggagtt

SEQ ID NO: 97142 - DNA, 10 bp, Artificial Sequence
  Description of Artificial Sequence: Synthetic oligonucleotide
  Description of Combined DNA/RNA Molecule: Synthetic oligonucleotide
  modified_base (5): LNA-G
cuucggagtt

SEQ ID NO: 97143 - DNA, 9 bp, Artificial Sequence
  Description of Artificial Sequence: Synthetic oligonucleotide
  Description of Combined DNA/RNA Molecule: Synthetic oligonucleotide
  modified_base (4): LNA-G
uucggagtt

SEQ ID NO: 97144 - DNA, 8 bp, Artificial Sequence
  Description of Artificial Sequence: Synthetic oligonucleotide
  Description of Combined DNA/RNA Molecule: Synthetic oligonucleotide
  modified_base (3): LNA-G
ucggagtt

SEQ ID NO: 97145 - DNA, 7 bp, Artificial Sequence
  Description of Artificial Sequence: Synthetic oligonucleotide
  Description of Combined DNA/RNA Molecule: Synthetic oligonucleotide
  modified_base (2): LNA-G
cggagtt

SEQ ID NO: 97146 - DNA, 13 bp, Artificial Sequence
  Description of Artificial Sequence: Synthetic oligonucleotide
  Description of Combined DNA/RNA Molecule: Synthetic oligonucleotide
  modified_base (1): LNA-U
  modified_base (8): LNA-G
uuucuucggagtt

SEQ ID NO: 97147 - DNA, 12 bp, Artificial Sequence
  Description of Artificial Sequence: Synthetic oligonucleotide
  Description of Combined DNA/RNA Molecule: Synthetic oligonucleotide
  modified_base (1): LNA-U
  modified_base (7): LNA-G
uucuucggagtt

SEQ ID NO: 97148 - DNA, 11 bp, Artificial Sequence
  Description of Artificial Sequence: Synthetic oligonucleotide
  Description of Combined DNA/RNA Molecule: Synthetic oligonucleotide
  modified_base (1): LNA-U
  modified_base (6): LNA-G
ucuucggagtt

SEQ ID NO: 97149 - DNA, 10 bp, Artificial Sequence
  Description of Artificial Sequence: Synthetic oligonucleotide
  Description of Combined DNA/RNA Molecule: Synthetic oligonucleotide
  modified_base (1): LNA-C
  modified_base (5): LNA-G
cuucggagtt

SEQ ID NO: 97150 - DNA, 9 bp, Artificial Sequence
  Description of Artificial Sequence: Synthetic oligonucleotide
  Description of Combined DNA/RNA Molecule: Synthetic oligonucleotide
  modified_base (1): LNA-U
  modified_base (4): LNA-G
uucggagtt

SEQ ID NO: 97151 - DNA, 8 bp, Artificial Sequence
  Description of Artificial Sequence: Synthetic oligonucleotide
  Description of Combined DNA/RNA Molecule: Synthetic oligonucleotide
  modified_base (1): LNA-U
  modified_base (3): LNA-G
ucggagtt

SEQ ID NO: 97152 - DNA, 7 bp, Artificial Sequence
  Description of Artificial Sequence: Synthetic oligonucleotide
  Description of Combined DNA/RNA Molecule: Synthetic oligonucleotide
  modified_base (1): LNA-C
  modified_base (2): LNA-G
cggagtt

SEQ ID NO: 97153 - DNA, 21 bp, Artificial Sequence
  Description of Artificial Sequence: Synthetic oligonucleotide
  Description of Combined DNA/RNA Molecule: Synthetic oligonucleotide
  modified_base (2): LNA-G
  modified_base (16): LNA-G
ggaucuuauuucuucggagtt

SEQ ID NO: 97154 - DNA, 25 bp, Artificial Sequence
  Description of Artificial Sequence: Synthetic oligonucleotide
  Description of Combined DNA/RNA Molecule: Synthetic oligonucleotide
ggaucuuauuucuucggagacaatg

SEQ ID NO: 97155 - RNA, 25 nt, Artificial Sequence
  Description of Artificial Sequence: Synthetic oligonucleotide
uaagcagaguucaaaagcccuucag

SEQ ID NO: 97156 - RNA, 25 nt, Artificial Sequence
  Description of Artificial Sequence: Synthetic oligonucleotide
agcagaguucaaaagcccuucagcg

SEQ ID NO: 97157 - RNA, 25 nt, Artificial Sequence
  Description of Artificial Sequence: Synthetic oligonucleotide
cucagggucugagugaagccgcucg

SEQ ID NO: 97158 - RNA, 25 nt, Artificial Sequence
  Description of Artificial Sequence: Synthetic oligonucleotide
caagcaacuacaucacgccagucaa

SEQ ID NO: 97159 - RNA, 25 nt, Artificial Sequence
  Description of Artificial Sequence: Synthetic oligonucleotide
aucaauggcagcuucuuggugcgug

SEQ ID NO: 97160 - RNA, 25 nt, Artificial Sequence
  Description of Artificial Sequence: Synthetic oligonucleotide
uuccagcccacauuggauucaucag

SEQ ID NO: 97161 - RNA, 25 nt, Artificial Sequence
  Description of Artificial Sequence: Synthetic oligonucleotide
cagcugagaauguggaauaccuaag

SEQ ID NO: 97162 - RNA, 25 nt, Artificial Sequence
  Description of Artificial Sequence: Synthetic oligonucleotide
aacguaucuccuaauuugaggcuca

SEQ ID NO: 97163 - RNA, 25 nt, Artificial Sequence
  Description of Artificial Sequence: Synthetic oligonucleotide
ccuaaaauaauuucucuacaauugg

SEQ ID NO: 97164 - RNA, 25 nt, Artificial Sequence
  Description of Artificial Sequence: Synthetic oligonucleotide
uggaagauucagcuaguuaggagcc

SEQ ID NO: 97165 - RNA, 25 nt, Artificial Sequence
  Description of Artificial Sequence: Synthetic oligonucleotide
uuaaacucuccuagucaauauccac

SEQ ID NO: 97166 - RNA, 25 nt, Artificial Sequence
  Description of Artificial Sequence: Synthetic oligonucleotide
cagccuacaguuauguucagucaca

SEQ ID NO: 97167 - RNA, 25 nt, Artificial Sequence
  Description of Artificial Sequence: Synthetic oligonucleotide
guuauguucagucacacacacauac

SEQ ID NO: 97168 - RNA, 25 nt, Artificial Sequence
  Description of Artificial Sequence: Synthetic oligonucleotide
cacauacaaaauguuccuuuugcuu

SEQ ID NO: 97169 - RNA, 25 nt, Artificial Sequence
  Description of Artificial Sequence: Synthetic oligonucleotide
uccuuuugcuuuuaaaguaauuuuu

SEQ ID NO: 97170 - RNA, 25 nt, Artificial Sequence
  Description of Artificial Sequence: Synthetic oligonucleotide
ugaccugugaagcaacagucaaugg

SEQ ID NO: 97171 - RNA, 25 nt, Artificial Sequence
  Description of Artificial Sequence: Synthetic oligonucleotide
cuaucucacacaucgacaaaccaau

SEQ ID NO: 97172 - RNA, 25 nt, Artificial Sequence
  Description of Artificial Sequence: Synthetic oligonucleotide
uguccucaauuguacugcuaccacu

SEQ ID NO: 97173 - RNA, 25 nt, Artificial Sequence
  Description of Artificial Sequence: Synthetic oligonucleotide
aaaccguagcuggcaagcggucuua

SEQ ID NO: 97174 - RNA, 25 nt, Artificial Sequence
  Description of Artificial Sequence: Synthetic oligonucleotide
uagcuggcaagcggucuuaccggcu

SEQ ID NO: 97175 - RNA, 25 nt, Artificial Sequence
  Description of Artificial Sequence: Synthetic oligonucleotide
uuguaugguuaaaagauggguuacc

SEQ ID NO: 97176 - RNA, 25 nt, Artificial Sequence
  Description of Artificial Sequence: Synthetic oligonucleotide
ugguuaaaagauggguuaccugcga

SEQ ID NO: 97177 - RNA, 25 nt, Artificial Sequence
  Description of Artificial Sequence: Synthetic oligonucleotide
cagggaauuauacaaucuugcugag

SEQ ID NO: 97178 - RNA, 25 nt, Artificial Sequence
  Description of Artificial Sequence: Synthetic oligonucleotide
acaaucuugcugagcauaaaacagu

SEQ ID NO: 97179 - RNA, 25 nt, Artificial Sequence
  Description of Artificial Sequence: Synthetic oligonucleotide
ccaauaaugaagaguccuuuauccu

SEQ ID NO: 97180 - RNA, 25 nt, Artificial Sequence
  Description of Artificial Sequence: Synthetic oligonucleotide
acuuuggauguuccaacgcaaguug

SEQ ID NO: 97181 - RNA, 25 nt, Artificial Sequence
  Description of Artificial Sequence: Synthetic oligonucleotide
aaugcuuccacuaaacugaaaccau

SEQ ID NO: 97182 - RNA, 25 nt, Artificial Sequence
  Description of Artificial Sequence: Synthetic oligonucleotide
gagaaaguuugacuuuguuaaauau

SEQ ID NO: 97183 - RNA, 25 nt, Artificial Sequence
  Description of Artificial Sequence: Synthetic oligonucleotide
aaagaacuacuguauauuaaaaguu

SEQ ID NO: 97184 - RNA, 25 nt, Artificial Sequence
  Description of Artificial Sequence: Synthetic oligonucleotide
uuagaaauacggguuuugacuuaac

SEQ ID NO: 97185 - RNA, 25 nt, Artificial Sequence
  Description of Artificial Sequence: Synthetic oligonucleotide
aacauggguacagcaaacucagcac

SEQ ID NO: 97186 - RNA, 25 nt, Artificial Sequence
  Description of Artificial Sequence: Synthetic oligonucleotide
aaagacacagaagaugcugaccuca

SEQ ID NO: 97187 - RNA, 25 nt, Artificial Sequence
  Description of Artificial Sequence: Synthetic oligonucleotide
uaguagggagguuuauucagaucgc

SEQ ID NO: 97188 - RNA, 25 nt, Artificial Sequence
  Description of Artificial Sequence: Synthetic oligonucleotide
gccuucugcagcaggguucugggau

SEQ ID NO: 97189 - RNA, 25 nt, Artificial Sequence
  Description of Artificial Sequence: Synthetic oligonucleotide
ggucugguacauauuggaaauuaug

SEQ ID NO: 97190 - RNA, 25 nt, Artificial Sequence
  Description of Artificial Sequence: Synthetic oligonucleotide
cuaguccuuccgauggaagcacuag

SEQ ID NO: 97191 - RNA, 25 nt, Artificial Sequence
  Description of Artificial Sequence: Synthetic oligonucleotide
ccagugaauauuguuuuuaugugga

SEQ ID NO: 97192 - RNA, 25 nt, Artificial Sequence
  Description of Artificial Sequence: Synthetic oligonucleotide
augaauucaaguuggaauugguaga

SEQ ID NO: 97193 - RNA, 25 nt, Artificial Sequence
  Description of Artificial Sequence: Synthetic oligonucleotide
caggacacagauuuagacuuggaga

SEQ ID NO: 97194 - RNA, 25 nt, Artificial Sequence
  Description of Artificial Sequence: Synthetic oligonucleotide
cucaaagcacaguuacaguauucca

SEQ ID NO: 97195 - RNA, 25 nt, Artificial Sequence
  Description of Artificial Sequence: Synthetic oligonucleotide
accacugccaccacugaugaauuaa

SEQ ID NO: 97196 - RNA, 25 nt, Artificial Sequence
  Description of Artificial Sequence: Synthetic oligonucleotide
gaaacuacuagugccacaucaucac

SEQ ID NO: 97197 - RNA, 25 nt, Artificial Sequence
  Description of Artificial Sequence: Synthetic oligonucleotide
aagucggacagccucaccaaacaga

SEQ ID NO: 97198 - RNA, 25 nt, Artificial Sequence
  Description of Artificial Sequence: Synthetic oligonucleotide
gaaagcgaaaaauggaacaugaugg

SEQ ID NO: 97199 - RNA, 25 nt, Artificial Sequence
  Description of Artificial Sequence: Synthetic oligonucleotide
cccucugauuuagcauguagacugc

SEQ ID NO: 97200 - RNA, 25 nt, Artificial Sequence
  Description of Artificial Sequence: Synthetic oligonucleotide
ugagcuauuuaaggaucuauuuaug

SEQ ID NO: 97201 - RNA, 25 nt, Artificial Sequence
  Description of Artificial Sequence: Synthetic oligonucleotide
aaaaggugaaaaagcacuauuauca

SEQ ID NO: 97202 - RNA, 25 nt, Artificial Sequence
  Description of Artificial Sequence: Synthetic oligonucleotide
gaaaaagcacuauuaucaguucugc

SEQ ID NO: 97203 - RNA, 25 nt, Artificial Sequence
  Description of Artificial Sequence: Synthetic oligonucleotide
ggcugaaaagaaagauuaaaccuac

SEQ ID NO: 97204 - RNA, 25 nt, Artificial Sequence
  Description of Artificial Sequence: Synthetic oligonucleotide
uaaacccuuauaauaaaauccuucu

SEQ ID NO: 97205 - RNA, 25 nt, Artificial Sequence
  Description of Artificial Sequence: Synthetic oligonucleotide
cauacuauuagccaaugcuguagac

SEQ ID NO: 97206 - RNA, 25 nt, Artificial Sequence
  Description of Artificial Sequence: Synthetic oligonucleotide
gacagaagcauuuugauaggaauag

SEQ ID NO: 97207 - RNA, 25 nt, Artificial Sequence
  Description of Artificial Sequence: Synthetic oligonucleotide
agagcaaauaagauaauggcccuga

SEQ ID NO: 97208 - RNA, 25 nt, Artificial Sequence
  Description of Artificial Sequence: Synthetic oligonucleotide
ccaacauuuuucucuuccucaagca

SEQ ID NO: 97209 - RNA, 25 nt, Artificial Sequence
  Description of Artificial Sequence: Synthetic oligonucleotide
uuaaguaugagaaaaguucagccca

SEQ ID NO: 97210 - RNA, 25 nt, Artificial Sequence
  Description of Artificial Sequence: Synthetic oligonucleotide
caggaauaaagauggcugcugaacc

SEQ ID NO: 97211 - RNA, 25 nt, Artificial Sequence
  Description of Artificial Sequence: Synthetic oligonucleotide
aauuugaaugaccaaguucucuuca

SEQ ID NO: 97212 - RNA, 25 nt, Artificial Sequence
  Description of Artificial Sequence: Synthetic oligonucleotide
auguauaaagauagccagccuagag

SEQ ID NO: 97213 - RNA, 25 nt, Artificial Sequence
  Description of Artificial Sequence: Synthetic oligonucleotide
ggcuguaacuaucucugugaagugu

SEQ ID NO: 97214 - RNA, 25 nt, Artificial Sequence
  Description of Artificial Sequence: Synthetic oligonucleotide
ucugugaagugugagaaaauuucaa

SEQ ID NO: 97215 - RNA, 25 nt, Artificial Sequence
  Description of Artificial Sequence: Synthetic oligonucleotide
ccuuuaaggaaaugaauccuccuga

SEQ ID NO: 97216 - RNA, 25 nt, Artificial Sequence
  Description of Artificial Sequence: Synthetic oligonucleotide
aaggauacaaaaagugacaucauau

SEQ ID NO: 97217 - RNA, 25 nt, Artificial Sequence
  Description of Artificial Sequence: Synthetic oligonucleotide
agaugcaauuugaaucuucaucaua

SEQ ID NO: 97218 - RNA, 25 nt, Artificial Sequence
  Description of Artificial Sequence: Synthetic oligonucleotide
guucaaaacgaagacuagcuauuaa

SEQ ID NO: 97219 - RNA, 25 nt, Artificial Sequence
  Description of Artificial Sequence: Synthetic oligonucleotide
gugaaaccucaucucuacuaaaaau

SEQ ID NO: 97220 - RNA, 25 nt, Artificial Sequence
  Description of Artificial Sequence: Synthetic oligonucleotide
acgaaagagaagcucuaucucgccu

SEQ ID NO: 97221 - RNA, 25 nt, Artificial Sequence
  Description of Artificial Sequence: Synthetic oligonucleotide
cuccacaagcgccuucgguccaguu

SEQ ID NO: 97222 - RNA, 25 nt, Artificial Sequence
  Description of Artificial Sequence: Synthetic oligonucleotide
gagaagauuccaaagauguagccgc

SEQ ID NO: 97223 - RNA, 25 nt, Artificial Sequence
  Description of Artificial Sequence: Synthetic oligonucleotide
aaucuggauucaaugaggagacuug

SEQ ID NO: 97224 - RNA, 25 nt, Artificial Sequence
  Description of Artificial Sequence: Synthetic oligonucleotide
agaacagauuugagaguagugagga

SEQ ID NO: 97225 - RNA, 25 nt, Artificial Sequence
  Description of Artificial Sequence: Synthetic oligonucleotide
ccagagcugugcagaugaguacaaa

SEQ ID NO: 97226 - RNA, 25 nt, Artificial Sequence
  Description of Artificial Sequence: Synthetic oligonucleotide
ccucagauuguuguuguuaaugggc

SEQ ID NO: 97227 - RNA, 25 nt, Artificial Sequence
  Description of Artificial Sequence: Synthetic oligonucleotide
cuauuuuaauuauuuuuaauuuauu

SEQ ID NO: 97228 - RNA, 25 nt, Artificial Sequence
  Description of Artificial Sequence: Synthetic oligonucleotide
uuuaauuuauuaauauuuaaauaug

SEQ ID NO: 97229 - RNA, 25 nt, Artificial Sequence
  Description of Artificial Sequence: Synthetic oligonucleotide
augcaguuugaauauccuuuguuuc

SEQ ID NO: 97230 - RNA, 25 nt, Artificial Sequence
  Description of Artificial Sequence: Synthetic oligonucleotide
caugcugcuggcgucuaaguguuug

SEQ ID NO: 97231 - RNA, 25 nt, Artificial Sequence
  Description of Artificial Sequence: Synthetic oligonucleotide
agaugugcauuucaccugugacaaa

SEQ ID NO: 97232 - RNA, 25 nt, Artificial Sequence
  Description of Artificial Sequence: Synthetic oligonucleotide
ucaaaaccugugccaggcugaauua

SEQ ID NO: 97233 - RNA, 25 nt, Artificial Sequence
  Description of Artificial Sequence: Synthetic oligonucleotide
gaauguggguagucauucuuacaau

SEQ ID NO: 97234 - RNA, 25 nt, Artificial Sequence
  Description of Artificial Sequence: Synthetic oligonucleotide
auguggguagucauucuuacaauug

SEQ ID NO: 97235 - RNA, 25 nt, Artificial Sequence
  Description of Artificial Sequence: Synthetic oligonucleotide
ugaaaaugagcaucagagaguguac

SEQ ID NO: 97236 - RNA, 25 nt, Artificial Sequence
  Description of Artificial Sequence: Synthetic oligonucleotide
uugcuuuucauguagaacucagcag

SEQ ID NO: 97237 - RNA, 25 nt, Artificial Sequence
  Description of Artificial Sequence: Synthetic oligonucleotide
uguauuucuauauuuauuuucagua

SEQ ID NO: 97238 - RNA, 25 nt, Artificial Sequence
  Description of Artificial Sequence: Synthetic oligonucleotide
uuugauuaauguuucuuaaauggaa

SEQ ID NO: 97239 - RNA, 25 nt, Artificial Sequence
  Description of Artificial Sequence: Synthetic oligonucleotide
caacguguauagugccuaaaauugu

SEQ ID NO: 97240 - RNA, 25 nt, Artificial Sequence
  Description of Artificial Sequence: Synthetic oligonucleotide
cauauccuuggcuacuaacaucugg

SEQ ID NO: 97241 - RNA, 25 nt, Artificial Sequence
  Description of Artificial Sequence: Synthetic oligonucleotide
uacuaacaucuggagacugugagcu

SEQ ID NO: 97242 - RNA, 25 nt, Artificial Sequence
  Description of Artificial Sequence: Synthetic oligonucleotide
cauaaguugugugcuuuuuauuaau

SEQ ID NO: 97243 - RNA, 25 nt, Artificial Sequence
  Description of Artificial Sequence: Synthetic oligonucleotide
gcaucauuuuggcucuucuuacauu

SEQ ID NO: 97244 - RNA, 25 nt, Artificial Sequence
  Description of Artificial Sequence: Synthetic oligonucleotide
gcucuucuuacauuuguaaaaaugu

SEQ ID NO: 97245 - RNA, 25 nt, Artificial Sequence
  Description of Artificial Sequence: Synthetic oligonucleotide
agauuaggucaucuuaauucauauu

SEQ ID NO: 97246 - RNA, 25 nt, Artificial Sequence
  Description of Artificial Sequence: Synthetic oligonucleotide
auggaauugaaagaacuaaucauga

SEQ ID NO: 97247 - RNA, 25 nt, Artificial Sequence
  Description of Artificial Sequence: Synthetic oligonucleotide
cacacucauuccuucugcucuuggg

SEQ ID NO: 97248 - RNA, 25 nt, Artificial Sequence
  Description of Artificial Sequence: Synthetic oligonucleotide
uguagagguaaccaguagcuuugag

SEQ ID NO: 97249 - RNA, 25 nt, Artificial Sequence
  Description of Artificial Sequence: Synthetic oligonucleotide
caaccacaugccacguaauauuuca

SEQ ID NO: 97250 - RNA, 25 nt, Artificial Sequence
  Description of Artificial Sequence: Synthetic oligonucleotide
ucggaaacaaguuauucucuucacu

SEQ ID NO: 97251 - RNA, 25 nt, Artificial Sequence
  Description of Artificial Sequence: Synthetic oligonucleotide
acucccaauaacuaaugcuaagaaa

SEQ ID NO: 97252 - RNA, 25 nt, Artificial Sequence
  Description of Artificial Sequence: Synthetic oligonucleotide
aaugcuaagaaaugcugaaaaucaa

SEQ ID NO: 97253 - RNA, 25 nt, Artificial Sequence
  Description of Artificial Sequence: Synthetic oligonucleotide
gucuuucucuaaauaugauuacuuu

SEQ ID NO: 97254 - RNA, 25 nt, Artificial Sequence
  Description of Artificial Sequence: Synthetic oligonucleotide
ugaauuucaggcauuuuguucuaca

SEQ ID NO: 97255 - RNA, 25 nt, Artificial Sequence
  Description of Artificial Sequence: Synthetic oligonucleotide
cgauucccucucacccgggacucuc

SEQ ID NO: 97256 - RNA, 25 nt, Artificial Sequence
  Description of Artificial Sequence: Synthetic oligonucleotide
aggaaagugaaccuuuaaaguaaag

SEQ ID NO: 97257 - RNA, 25 nt, Artificial Sequence
  Description of Artificial Sequence: Synthetic oligonucleotide
gaggcugcaugcucuggaagccugg

SEQ ID NO: 97258 - RNA, 25 nt, Artificial Sequence
  Description of Artificial Sequence: Synthetic oligonucleotide
ucucugaacagaaaacaaaagagag

SEQ ID NO: 97259 - RNA, 25 nt, Artificial Sequence
  Description of Artificial Sequence: Synthetic oligonucleotide
aacuuggcuguaaucaguuaugccg

SEQ ID NO: 97260 - RNA, 25 nt, Artificial Sequence
  Description of Artificial Sequence: Synthetic oligonucleotide
agaagccaaaauuaaaagaagucca

SEQ ID NO: 97261 - RNA, 25 nt, Artificial Sequence
  Description of Artificial Sequence: Synthetic oligonucleotide
auuaaaagaaguccaggugagguua

SEQ ID NO: 97262 - RNA, 25 nt, Artificial Sequence
  Description of Artificial Sequence: Synthetic oligonucleotide
gaauccggauuaucgggaagaggac

SEQ ID NO: 97263 - RNA, 25 nt, Artificial Sequence
  Description of Artificial Sequence: Synthetic oligonucleotide
aaugugacaucaaagcaaguauugu

SEQ ID NO: 97264 - RNA, 25 nt, Artificial Sequence
  Description of Artificial Sequence: Synthetic oligonucleotide
caucaaagcaaguauuguagcacuc

SEQ ID NO: 97265 - RNA, 25 nt, Artificial Sequence
  Description of Artificial Sequence: Synthetic oligonucleotide
agagagagaaaacaaaaccacaaau

SEQ ID NO: 97266 - RNA, 25 nt, Artificial Sequence
  Description of Artificial Sequence: Synthetic oligonucleotide
ucgcuguaguauuuaagcccauaca

SEQ ID NO: 97267 - RNA, 25 nt, Artificial Sequence
  Description of Artificial Sequence: Synthetic oligonucleotide
cgcuguaguauuuaagcccauacag

SEQ ID NO: 97268 - RNA, 25 nt, Artificial Sequence
  Description of Artificial Sequence: Synthetic oligonucleotide
auuuaagcccauacagaaaccuucc

SEQ ID NO: 97269 - RNA, 25 nt, Artificial Sequence
  Description of Artificial Sequence: Synthetic oligonucleotide
auuaaaauaaacaugguauaccuac

SEQ ID NO: 97270 - RNA, 25 nt, Artificial Sequence
  Description of Artificial Sequence: Synthetic oligonucleotide
cuguucugaucggccaguuuucgga

SEQ ID NO: 97271 - RNA, 25 nt, Artificial Sequence
  Description of Artificial Sequence: Synthetic oligonucleotide
aaauaauuugaacuuuggaacaggg

SEQ ID NO: 97272 - RNA, 25 nt, Artificial Sequence
  Description of Artificial Sequence: Synthetic oligonucleotide
ugcgaccuuaauuuaacuuuccagu

SEQ ID NO: 97273 - RNA, 25 nt, Artificial Sequence
  Description of Artificial Sequence: Synthetic oligonucleotide
cugagaaagcuaaaguuugguuuug

SEQ ID NO: 97274 - RNA, 25 nt, Artificial Sequence
  Description of Artificial Sequence: Synthetic oligonucleotide
aguaaagaugcuacuucccacugua

SEQ ID NO: 97275 - RNA, 25 nt, Artificial Sequence
  Description of Artificial Sequence: Synthetic oligonucleotide
cugcuuaauugcugauaccauauga

SEQ ID NO: 97276 - RNA, 25 nt, Artificial Sequence
  Description of Artificial Sequence: Synthetic oligonucleotide
uaccauaugaaugaaacaugggcug

SEQ ID NO: 97277 - RNA, 25 nt, Artificial Sequence
  Description of Artificial Sequence: Synthetic oligonucleotide
aacuuucuuauccaacuuuuucaua

SEQ ID NO: 97278 - RNA, 25 nt, Artificial Sequence
  Description of Artificial Sequence: Synthetic oligonucleotide
ccuugcaugacaucaugaggccgga

SEQ ID NO: 97279 - RNA, 25 nt, Artificial Sequence
  Description of Artificial Sequence: Synthetic oligonucleotide
ugaauuuguauaugacugcauuugu

SEQ ID NO: 97280 - RNA, 25 nt, Artificial Sequence
  Description of Artificial Sequence: Synthetic oligonucleotide
gaauccuaguagaauguuuacuacc

SEQ ID NO: 97281 - RNA, 25 nt, Artificial Sequence
  Description of Artificial Sequence: Synthetic oligonucleotide
gaaagggaagaauuuuuugaugaaa

SEQ ID NO: 97282 - RNA, 25 nt, Artificial Sequence
  Description of Artificial Sequence: Synthetic oligonucleotide
uaucggcaugccagugugugaauuu

SEQ ID NO: 97283 - RNA, 25 nt, Artificial Sequence
  Description of Artificial Sequence: Synthetic oligonucleotide
caccucauaguagagcaauguaugu

SEQ ID NO: 97284 - RNA, 25 nt, Artificial Sequence
  Description of Artificial Sequence: Synthetic oligonucleotide
ccagaauugccaaagcacauauaua

SEQ ID NO: 97285 - RNA, 25 nt, Artificial Sequence
  Description of Artificial Sequence: Synthetic oligonucleotide
uggugaucuggguaauaguuucucc

SEQ ID NO: 97286 - RNA, 25 nt, Artificial Sequence
  Description of Artificial Sequence: Synthetic oligonucleotide
gaucuggguaauaguuucuccaaau

SEQ ID NO: 97287 - RNA, 25 nt, Artificial Sequence
  Description of Artificial Sequence: Synthetic oligonucleotide
ggaugugaugaauacuuccuagaaa

SEQ ID NO: 97288 - RNA, 25 nt, Artificial Sequence
  Description of Artificial Sequence: Synthetic oligonucleotide
cauuuccacagcuacaccauauaug

SEQ ID NO: 97289 - RNA, 25 nt, Artificial Sequence
  Description of Artificial Sequence: Synthetic oligonucleotide
acagcuacaccauauaugaauggag

SEQ ID NO: 97290 - RNA, 25 nt, Artificial Sequence
  Description of Artificial Sequence: Synthetic oligonucleotide
ugcaguucuuacacgagaagaagau

SEQ ID NO: 97291 - RNA, 25 nt, Artificial Sequence
  Description of Artificial Sequence: Synthetic oligonucleotide
acgagaagaagaucauuuacaggga

SEQ ID NO: 97292 - RNA, 25 nt, Artificial Sequence
  Description of Artificial Sequence: Synthetic oligonucleotide
cgagaagaagaucauuuacagggac

SEQ ID NO: 97293 - RNA, 25 nt, Artificial Sequence
  Description of Artificial Sequence: Synthetic oligonucleotide
aagaagaucauuuacagggaccuga

SEQ ID NO: 97294 - RNA, 25 nt, Artificial Sequence
  Description of Artificial Sequence: Synthetic oligonucleotide
agaggaagagguguuugacugcauc

SEQ ID NO: 97295 - RNA, 25 nt, Artificial Sequence
  Description of Artificial Sequence: Synthetic oligonucleotide
gaggaagagguguuugacugcaucg

SEQ ID NO: 97296 - RNA, 25 nt, Artificial Sequence
  Description of Artificial Sequence: Synthetic oligonucleotide
cuacuuugagggcgaguucacaggg

SEQ ID NO: 97297 - RNA, 25 nt, Artificial Sequence
  Description of Artificial Sequence: Synthetic oligonucleotide
agggcaucuccuggcaccucugucc

SEQ ID NO: 97298 - RNA, 25 nt, Artificial Sequence
  Description of Artificial Sequence: Synthetic oligonucleotide
ggagugauaugguuugucuuuuuaa

SEQ ID NO: 97299 - RNA, 25 nt, Artificial Sequence
  Description of Artificial Sequence: Synthetic oligonucleotide
gagugauaugguuugucuuuuuaag

SEQ ID NO: 97300 - RNA, 25 nt, Artificial Sequence
  Description of Artificial Sequence: Synthetic oligonucleotide
ugcaguaaagauccuaaagguuguc

SEQ ID NO: 97301 - RNA, 25 nt, Artificial Sequence
  Description of Artificial Sequence: Synthetic oligonucleotide
aguaaagauccuaaagguugucgac

SEQ ID NO: 97302 - RNA, 25 nt, Artificial Sequence
  Description of Artificial Sequence: Synthetic oligonucleotide
ugacaaaggacaaccuggcaauugu

SEQ ID NO: 97303 - RNA, 25 nt, Artificial Sequence
  Description of Artificial Sequence: Synthetic oligonucleotide
gcaauugugacccaguggugcgagg

SEQ ID NO: 97304 - RNA, 25 nt, Artificial Sequence
  Description of Artificial Sequence: Synthetic oligonucleotide
aacaucauccauagagacaugaaau

SEQ ID NO: 97305 - RNA, 25 nt, Artificial Sequence
  Description of Artificial Sequence: Synthetic oligonucleotide
ugaaauccaacaauauauuucucca

SEQ ID NO: 97306 - RNA, 25 nt, Artificial Sequence
  Description of Artificial Sequence: Synthetic oligonucleotide
aacaauauauuucuccaugaaggcu

SEQ ID NO: 97307 - RNA, 25 nt, Artificial Sequence
  Description of Artificial Sequence: Synthetic oligonucleotide
aacaguaaagucacgcuggaguggu

SEQ ID NO: 97308 - RNA, 25 nt, Artificial Sequence
  Description of Artificial Sequence: Synthetic oligonucleotide
ugugaagaaaguaaaggaagagagg

SEQ ID NO: 97309 - RNA, 25 nt, Artificial Sequence
  Description of Artificial Sequence: Synthetic oligonucleotide
cuuccgagccauccuugcaucgggc

SEQ ID NO: 97310 - RNA, 25 nt, Artificial Sequence
  Description of Artificial Sequence: Synthetic oligonucleotide
aauggagguugaauauccuacugug

SEQ ID NO: 97311 - RNA, 25 nt, Artificial Sequence
  Description of Artificial Sequence: Synthetic oligonucleotide
ggagguugaauauccuacuguguaa

SEQ ID NO: 97312 - RNA, 25 nt, Artificial Sequence
  Description of Artificial Sequence: Synthetic oligonucleotide
auuuugaguuuucccuuguagugua

SEQ ID NO: 97313 - RNA, 25 nt, Artificial Sequence
  Description of Artificial Sequence: Synthetic oligonucleotide
uauccuguuuguucuuuguugauug

SEQ ID NO: 97314 - RNA, 25 nt, Artificial Sequence
  Description of Artificial Sequence: Synthetic oligonucleotide
ccuguuuguucuuuguugauugaaa

SEQ ID NO: 97315 - RNA, 25 nt, Artificial Sequence
  Description of Artificial Sequence: Synthetic oligonucleotide
cucuacagccuucuuuuucuuccau

SEQ ID NO: 97316 - RNA, 25 nt, Artificial Sequence
  Description of Artificial Sequence: Synthetic oligonucleotide
ucuuccauagcuaaucuuccuucua

SEQ ID NO: 97317 - RNA, 25 nt, Artificial Sequence
  Description of Artificial Sequence: Synthetic oligonucleotide
auaaucuuccuguugaaugcuucau

SEQ ID NO: 97318 - RNA, 25 nt, Artificial Sequence
  Description of Artificial Sequence: Synthetic oligonucleotide
uaaucuuccuguugaaugcuucaug

SEQ ID NO: 97319 - RNA, 25 nt, Artificial Sequence
  Description of Artificial Sequence: Synthetic oligonucleotide
cuucaugacuugaauucuacuuuga

SEQ ID NO: 97320 - RNA, 25 nt, Artificial Sequence
  Description of Artificial Sequence: Synthetic oligonucleotide
aagagggagagaagcaacuacagac

SEQ ID NO: 97321 - RNA, 25 nt, Artificial Sequence
  Description of Artificial Sequence: Synthetic oligonucleotide
cgucuccuaccagaccaaggucaac

SEQ ID NO: 97322 - RNA, 25 nt, Artificial Sequence
  Description of Artificial Sequence: Synthetic oligonucleotide
gaucaaucggcccgacuaucucgac

SEQ ID NO: 97323 - RNA, 25 nt, Artificial Sequence
  Description of Artificial Sequence: Synthetic oligonucleotide
ggacgaacauccaaccuucccaaac

SEQ ID NO: 97324 - RNA, 25 nt, Artificial Sequence
  Description of Artificial Sequence: Synthetic oligonucleotide
agggucggaacccaagcuuagaacu

SEQ ID NO: 97325 - RNA, 25 nt, Artificial Sequence
  Description of Artificial Sequence: Synthetic oligonucleotide
ucggaacccaagcuuagaacuuuaa

SEQ ID NO: 97326 - RNA, 25 nt, Artificial Sequence
  Description of Artificial Sequence: Synthetic oligonucleotide
acccaagcuuagaacuuuaagcaac

SEQ ID NO: 97327 - RNA, 25 nt, Artificial Sequence
  Description of Artificial Sequence: Synthetic oligonucleotide
gaacuuuaagcaacaagaccaccac

SEQ ID NO: 97328 - RNA, 25 nt, Artificial Sequence
  Description of Artificial Sequence: Synthetic oligonucleotide
acuauucaguggcgagaaauaaagu

SEQ ID NO: 97329 - RNA, 25 nt, Artificial Sequence
  Description of Artificial Sequence: Synthetic oligonucleotide
cuauucaguggcgagaaauaaaguu

SEQ ID NO: 97330 - RNA, 25 nt, Artificial Sequence
  Description of Artificial Sequence: Synthetic oligonucleotide
aaacacagauaacaggaaaugaucc

SEQ ID NO: 97331 - RNA, 25 nt, Artificial Sequence
  Description of Artificial Sequence: Synthetic oligonucleotide
cuuaagaaaagagaagaaaugaaac

SEQ ID NO: 97332 - RNA, 25 nt, Artificial Sequence
  Description of Artificial Sequence: Synthetic oligonucleotide
cugaaggaguguguuuccauccucc

SEQ ID NO: 97333 - RNA, 25 nt, Artificial Sequence
  Description of Artificial Sequence: Synthetic oligonucleotide
ucaccgcgggacugaaaaucuuuga

SEQ ID NO: 97334 - RNA, 25 nt, Artificial Sequence
  Description of Artificial Sequence: Synthetic oligonucleotide
agcagaaauaagcgugccguucagg

SEQ ID NO: 97335 - RNA, 25 nt, Artificial Sequence
  Description of Artificial Sequence: Synthetic oligonucleotide
aagcgugccguucaggguccagaag

SEQ ID NO: 97336 - RNA, 25 nt, Artificial Sequence
  Description of Artificial Sequence: Synthetic oligonucleotide
agaaacagucacucaagacugcuug

SEQ ID NO: 97337 - RNA, 25 nt, Artificial Sequence
  Description of Artificial Sequence: Synthetic oligonucleotide
agaggaagaagguccaugucuuugg

SEQ ID NO: 97338 - RNA, 25 nt, Artificial Sequence
  Description of Artificial Sequence: Synthetic oligonucleotide
uguauucaaaauaugccugaaacac

SEQ ID NO: 97339 - RNA, 25 nt, Artificial Sequence
  Description of Artificial Sequence: Synthetic oligonucleotide
auuuuccucccuuucucuguaccuc

SEQ ID NO: 97340 - RNA, 25 nt, Artificial Sequence
  Description of Artificial Sequence: Synthetic oligonucleotide
caaagaaagauagagcaagacaaga

SEQ ID NO: 97341 - RNA, 25 nt, Artificial Sequence
  Description of Artificial Sequence: Synthetic oligonucleotide
aagaaagauagagcaagacaagaaa

SEQ ID NO: 97342 - RNA, 25 nt, Artificial Sequence
  Description of Artificial Sequence: Synthetic oligonucleotide
gaaagcauuuguuuguacaagaucc

SEQ ID NO: 97343 - RNA, 25 nt, Artificial Sequence
  Description of Artificial Sequence: Synthetic oligonucleotide
ugaguuaaacgaacguacuugcaga

SEQ ID NO: 97344 - RNA, 25 nt, Artificial Sequence
  Description of Artificial Sequence: Synthetic oligonucleotide
acugauacagaacgaucgauacaga

SEQ ID NO: 97345 - RNA, 25 nt, Artificial Sequence
  Description of Artificial Sequence: Synthetic oligonucleotide
auauuauauauauauaaaaauaaau

SEQ ID NO: 97346 - RNA, 25 nt, Artificial Sequence
  Description of Artificial Sequence: Synthetic oligonucleotide
auuauauauauauaaaaauaaauau

SEQ ID NO: 97347 - RNA, 25 nt, Artificial Sequence
  Description of Artificial Sequence: Synthetic oligonucleotide
ucacuggauguauuugacugcugug

SEQ ID NO: 97348 - RNA, 25 nt, Artificial Sequence
  Description of Artificial Sequence: Synthetic oligonucleotide
cagggaagaggaggagaugagagac

SEQ ID NO: 97349 - RNA, 25 nt, Artificial Sequence
  Description of Artificial Sequence: Synthetic oligonucleotide
augaucuuuuuuuugucccacuugg

SEQ ID NO: 97350 - RNA, 27 nt, Artificial Sequence
  Description of Artificial Sequence: Synthetic oligonucleotide
ggccgugaacuccucaucaaaauaccu

SEQ ID NO: 97351 - RNA, 27 nt, Artificial Sequence
  Description of Artificial Sequence: Synthetic oligonucleotide
uggugugauggugaucaucugggccgu

SEQ ID NO: 97352 - RNA, 27 nt, Artificial Sequence
  Description of Artificial Sequence: Synthetic oligonucleotide
aaacccgcaggauaguuuucuucccua

SEQ ID NO: 97353 - RNA, 27 nt, Artificial Sequence
  Description of Artificial Sequence: Synthetic oligonucleotide
caaacuggaugaaauaaauuaaaaccc

SEQ ID NO: 97354 - RNA, 27 nt, Artificial Sequence
  Description of Artificial Sequence: Synthetic oligonucleotide
agaaguccuuaacauuucccuacguga

SEQ ID NO: 97355 - RNA, 27 nt, Artificial Sequence
  Description of Artificial Sequence: Synthetic oligonucleotide
cucugucccacuggguaaacccuggcc

SEQ ID NO: 97356 - RNA, 27 nt, Artificial Sequence
  Description of Artificial Sequence: Synthetic oligonucleotide
cacaauaacaaauuuaaaccuugcucc

SEQ ID NO: 97357 - RNA, 27 nt, Artificial Sequence
  Description of Artificial Sequence: Synthetic oligonucleotide
aaaugcauuugaacaacauaauacaca

SEQ ID NO: 97358 - RNA, 27 nt, Artificial Sequence
  Description of Artificial Sequence: Synthetic oligonucleotide
ggcuuuccugucacaaagauuaaaaac

SEQ ID NO: 97359 - RNA, 27 nt, Artificial Sequence
  Description of Artificial Sequence: Synthetic oligonucleotide
agggcuuuccugucacaaagauuaaaa

SEQ ID NO: 97360 - RNA, 27 nt, Artificial Sequence
  Description of Artificial Sequence: Synthetic oligonucleotide
ggccaugcugggagacauaagcagcag

SEQ ID NO: 97361 - RNA, 27 nt, Artificial Sequence
  Description of Artificial Sequence: Synthetic oligonucleotide
ucagggagaagcuucugaaacacuucu

SEQ ID NO: 97362 - RNA, 27 nt, Artificial Sequence
  Description of Artificial Sequence: Synthetic oligonucleotide
aagggcuucuuccuuauugauggucag

SEQ ID NO: 97363 - RNA, 27 nt, Artificial Sequence
  Description of Artificial Sequence: Synthetic oligonucleotide
ugaagggcuucuuccuuauugaugguc

SEQ ID NO: 97364 - RNA, 27 nt, Artificial Sequence
  Description of Artificial Sequence: Synthetic oligonucleotide
cgcugaagggcuucuuccuuauugaug

SEQ ID NO: 97365 - RNA, 27 nt, Artificial Sequence
  Description of Artificial Sequence: Synthetic oligonucleotide
gccgcugaagggcuucuuccuuauuga

SEQ ID NO: 97366 - RNA, 27 nt, Artificial Sequence
  Description of Artificial Sequence: Synthetic oligonucleotide
acuggccgcugaagggcuucuuccuua

SEQ ID NO: 97367 - RNA, 27 nt, Artificial Sequence
  Description of Artificial Sequence: Synthetic oligonucleotide
cggagcuuuucaccuuuaguuaugcuu

SEQ ID NO: 97368 - RNA, 27 nt, Artificial Sequence
  Description of Artificial Sequence: Synthetic oligonucleotide
ccggagcuuuucaccuuuaguuaugcu

SEQ ID NO: 97369 - RNA, 27 nt, Artificial Sequence
  Description of Artificial Sequence: Synthetic oligonucleotide
cagacuguugacuggcgugauguaguu

SEQ ID NO: 97370 - RNA, 27 nt, Artificial Sequence
  Description of Artificial Sequence: Synthetic oligonucleotide
cuuuugaacucugcuuaaauccagugg

SEQ ID NO: 97371 - RNA, 27 nt, Artificial Sequence
  Description of Artificial Sequence: Synthetic oligonucleotide
gcuuuugaacucugcuuaaauccagug

SEQ ID NO: 97372 - RNA, 27 nt, Artificial Sequence
  Description of Artificial Sequence: Synthetic oligonucleotide
agggcuuuugaacucugcuuaaaucca

SEQ ID NO: 97373 - RNA, 27 nt, Artificial Sequence
  Description of Artificial Sequence: Synthetic oligonucleotide
aagggcuuuugaacucugcuuaaaucc

SEQ ID NO: 97374 - RNA, 27 nt, Artificial Sequence
  Description of Artificial Sequence: Synthetic oligonucleotide
ugaagggcuuuugaacucugcuuaaau

SEQ ID NO: 97375 - RNA, 27 nt, Artificial Sequence
  Description of Artificial Sequence: Synthetic oligonucleotide
cugaagggcuuuugaacucugcuuaaa

SEQ ID NO: 97376 - RNA, 27 nt, Artificial Sequence
  Description of Artificial Sequence: Synthetic oligonucleotide
cgcugaagggcuuuugaacucugcuua

SEQ ID NO: 97377 - RNA, 27 nt, Artificial Sequence
  Description of Artificial Sequence: Synthetic oligonucleotide
cgagcggcuucacucagacccugaggc

SEQ ID NO: 97378 - RNA, 27 nt, Artificial Sequence
  Description of Artificial Sequence: Synthetic oligonucleotide
uugacuggcgugauguaguugcuuggg

SEQ ID NO: 97379 - RNA, 27 nt, Artificial Sequence
  Description of Artificial Sequence: Synthetic oligonucleotide
cacgcaccaagaagcugccauugaucc

SEQ ID NO: 97380 - RNA, 27 nt, Artificial Sequence
  Description of Artificial Sequence: Synthetic oligonucleotide
cugaugaauccaaugugggcuggaauc

SEQ ID NO: 97381 - RNA, 27 nt, Artificial Sequence
  Description of Artificial Sequence: Synthetic oligonucleotide
cuuagguauuccacauucucagcugug

SEQ ID NO: 97382 - RNA, 27 nt, Artificial Sequence
  Description of Artificial Sequence: Synthetic oligonucleotide
ugagccucaaauuaggagauacguuuu

SEQ ID NO: 97383 - RNA, 27 nt, Artificial Sequence
  Description of Artificial Sequence: Synthetic oligonucleotide
ccaauuguagagaaauuauuuuaggaa

SEQ ID NO: 97384 - RNA, 27 nt, Artificial Sequence
  Description of Artificial Sequence: Synthetic oligonucleotide
ggcuccuaacuagcugaaucuuccaau

SEQ ID NO: 97385 - RNA, 27 nt, Artificial Sequence
  Description of Artificial Sequence: Synthetic oligonucleotide
guggauauugacuaggagaguuuaaaa

SEQ ID NO: 97386 - RNA, 27 nt, Artificial Sequence
  Description of Artificial Sequence: Synthetic oligonucleotide
ugugacugaacauaacuguaggcugaa

SEQ ID NO: 97387 - RNA, 27 nt, Artificial Sequence
  Description of Artificial Sequence: Synthetic oligonucleotide
guaugugugugugacugaacauaacug

SEQ ID NO: 97388 - RNA, 27 nt, Artificial Sequence
  Description of Artificial Sequence: Synthetic oligonucleotide
aagcaaaaggaacauuuuguaugugug

SEQ ID NO: 97389 - RNA, 27 nt, Artificial Sequence
  Description of Artificial Sequence: Synthetic oligonucleotide
aaaaauuacuuuaaaagcaaaaggaac

SEQ ID NO: 97390 - RNA, 27 nt, Artificial Sequence
  Description of Artificial Sequence: Synthetic oligonucleotide
ccauugacuguugcuucacaggucaga

SEQ ID NO: 97391 - RNA, 27 nt, Artificial Sequence
  Description of Artificial Sequence: Synthetic oligonucleotide
auugguuugucgaugugugagauaguu

SEQ ID NO: 97392 - RNA, 27 nt, Artificial Sequence
  Description of Artificial Sequence: Synthetic oligonucleotide
agugguagcaguacaauugaggacaag

SEQ ID NO: 97393 - RNA, 27 nt, Artificial Sequence
  Description of Artificial Sequence: Synthetic oligonucleotide
uaagaccgcuugccagcuacgguuuca

SEQ ID NO: 97394 - RNA, 27 nt, Artificial Sequence
  Description of Artificial Sequence: Synthetic oligonucleotide
agccgguaagaccgcuugccagcuacg

SEQ ID NO: 97395 - RNA, 27 nt, Artificial Sequence
  Description of Artificial Sequence: Synthetic oligonucleotide
gguaacccaucuuuuaaccauacaacu

SEQ ID NO: 97396 - RNA, 27 nt, Artificial Sequence
  Description of Artificial Sequence: Synthetic oligonucleotide
ucgcagguaacccaucuuuuaaccaua

SEQ ID NO: 97397 - RNA, 27 nt, Artificial Sequence
  Description of Artificial Sequence: Synthetic oligonucleotide
cucagcaagauuguauaauucccugca

SEQ ID NO: 97398 - RNA, 27 nt, Artificial Sequence
  Description of Artificial Sequence: Synthetic oligonucleotide
acuguuuuaugcucagcaagauuguau

SEQ ID NO: 97399 - RNA, 27 nt, Artificial Sequence
  Description of Artificial Sequence: Synthetic oligonucleotide
aggauaaaggacucuucauuauuggaa

SEQ ID NO: 97400 - RNA, 27 nt, Artificial Sequence
  Description of Artificial Sequence: Synthetic oligonucleotide
caacuugcguuggaacauccaaagugu

SEQ ID NO: 97401 - RNA, 27 nt, Artificial Sequence
  Description of Artificial Sequence: Synthetic oligonucleotide
augguuucaguuuaguggaagcauuua

SEQ ID NO: 97402 - RNA, 27 nt, Artificial Sequence
  Description of Artificial Sequence: Synthetic oligonucleotide
auauuuaacaaagucaaacuuucucac

SEQ ID NO: 97403 - RNA, 27 nt, Artificial Sequence
  Description of Artificial Sequence: Synthetic oligonucleotide
aacuuuuaauauacaguaguucuuuuc

SEQ ID NO: 97404 - RNA, 27 nt, Artificial Sequence
  Description of Artificial Sequence: Synthetic oligonucleotide
guuaagucaaaacccguauuucuaaag

SEQ ID NO: 97405 - RNA, 27 nt, Artificial Sequence
  Description of Artificial Sequence: Synthetic oligonucleotide
gugcugaguuugcuguacccauguuga

SEQ ID NO: 97406 - RNA, 27 nt, Artificial Sequence
  Description of Artificial Sequence: Synthetic oligonucleotide
ugaggucagcaucuucugugucuuuac

SEQ ID NO: 97407 - RNA, 27 nt, Artificial Sequence
  Description of Artificial Sequence: Synthetic oligonucleotide
gcgaucugaauaaaccucccuacuagc

SEQ ID NO: 97408 - RNA, 27 nt, Artificial Sequence
  Description of Artificial Sequence: Synthetic oligonucleotide
aucccagaacccugcugcagaaggcca

SEQ ID NO: 97409 - RNA, 27 nt, Artificial Sequence
  Description of Artificial Sequence: Synthetic oligonucleotide
cauaauuuccaauauguaccagaccuu

SEQ ID NO: 97410 - RNA, 27 nt, Artificial Sequence
  Description of Artificial Sequence: Synthetic oligonucleotide
cuagugcuuccaucggaaggacuaggu

SEQ ID NO: 97411 - RNA, 27 nt, Artificial Sequence
  Description of Artificial Sequence: Synthetic oligonucleotide
uccacauaaaaacaauauucacuggga

SEQ ID NO: 97412 - RNA, 27 nt, Artificial Sequence
  Description of Artificial Sequence: Synthetic oligonucleotide
ucuaccaauuccaacuugaauucauug

SEQ ID NO: 97413 - RNA, 27 nt, Artificial Sequence
  Description of Artificial Sequence: Synthetic oligonucleotide
ucuccaagucuaaaucuguguccugag

SEQ ID NO: 97414 - RNA, 27 nt, Artificial Sequence
  Description of Artificial Sequence: Synthetic oligonucleotide
uggaauacuguaacugugcuuugagga

SEQ ID NO: 97415 - RNA, 27 nt, Artificial Sequence
  Description of Artificial Sequence: Synthetic oligonucleotide
uuaauucaucagugguggcagugguag

SEQ ID NO: 97416 - RNA, 27 nt, Artificial Sequence
  Description of Artificial Sequence: Synthetic oligonucleotide
gugaugauguggcacuaguaguuucuu

SEQ ID NO: 97417 - RNA, 27 nt, Artificial Sequence
  Description of Artificial Sequence: Synthetic oligonucleotide
ucuguuuggugaggcuguccgacuuug

SEQ ID NO: 97418 - RNA, 27 nt, Artificial Sequence
  Description of Artificial Sequence: Synthetic oligonucleotide
ccaucauguuccauuuuucgcuuucuc

SEQ ID NO: 97419 - RNA, 27 nt, Artificial Sequence
  Description of Artificial Sequence: Synthetic oligonucleotide
gcagucuacaugcuaaaucagagggua

SEQ ID NO: 97420 - RNA, 27 nt, Artificial Sequence
  Description of Artificial Sequence: Synthetic oligonucleotide
cauaaauagauccuuaaauagcucaaa

SEQ ID NO: 97421 - RNA, 27 nt, Artificial Sequence
  Description of Artificial Sequence: Synthetic oligonucleotide
ugauaauagugcuuuuucaccuuuuuc

SEQ ID NO: 97422 - RNA, 27 nt, Artificial Sequence
  Description of Artificial Sequence: Synthetic oligonucleotide
gcagaacugauaauagugcuuuuucac

SEQ ID NO: 97423 - RNA, 27 nt, Artificial Sequence
  Description of Artificial Sequence: Synthetic oligonucleotide
guagguuuaaucuuucuuuucagccau

SEQ ID NO: 97424 - RNA, 27 nt, Artificial Sequence
  Description of Artificial Sequence: Synthetic oligonucleotide
agaaggauuuuauuauaaggguuuaau

SEQ ID NO: 97425 - RNA, 27 nt, Artificial Sequence
  Description of Artificial Sequence: Synthetic oligonucleotide
gucuacagcauuggcuaauaguaugaa

SEQ ID NO: 97426 - RNA, 27 nt, Artificial Sequence
  Description of Artificial Sequence: Synthetic oligonucleotide
cuauuccuaucaaaaugcuucugucua

SEQ ID NO: 97427 - RNA, 27 nt, Artificial Sequence
  Description of Artificial Sequence: Synthetic oligonucleotide
ucagggccauuaucuuauuugcucuau

SEQ ID NO: 97428 - RNA, 27 nt, Artificial Sequence
  Description of Artificial Sequence: Synthetic oligonucleotide
ugcuugaggaagagaaaaauguugguc

SEQ ID NO: 97429 - RNA, 27 nt, Artificial Sequence
  Description of Artificial Sequence: Synthetic oligonucleotide
ugggcugaacuuuucucauacuuaaag

SEQ ID NO: 97430 - RNA, 27 nt, Artificial Sequence
  Description of Artificial Sequence: Synthetic oligonucleotide
gguucagcagccaucuuuauuccugcg

SEQ ID NO: 97431 - RNA, 27 nt, Artificial Sequence
  Description of Artificial Sequence: Synthetic oligonucleotide
ugaagagaacuuggucauucaaauuuc

SEQ ID NO: 97432 - RNA, 27 nt, Artificial Sequence
  Description of Artificial Sequence: Synthetic oligonucleotide
cucuaggcuggcuaucuuuauacauac

SEQ ID NO: 97433 - RNA, 27 nt, Artificial Sequence
  Description of Artificial Sequence: Synthetic oligonucleotide
acacuucacagagauaguuacagccau

SEQ ID NO: 97434 - RNA, 27 nt, Artificial Sequence
  Description of Artificial Sequence: Synthetic oligonucleotide
uugaaauuuucucacacuucacagaga

SEQ ID NO: 97435 - RNA, 27 nt, Artificial Sequence
  Description of Artificial Sequence: Synthetic oligonucleotide
ucaggaggauucauuuccuuaaaggaa

SEQ ID NO: 97436 - RNA, 27 nt, Artificial Sequence
  Description of Artificial Sequence: Synthetic oligonucleotide
auaugaugucacuuuuuguauccuuga

SEQ ID NO: 97437 - RNA, 27 nt, Artificial Sequence
  Description of Artificial Sequence: Synthetic oligonucleotide
uaugaugaagauucaaauugcaucuua

SEQ ID NO: 97438 - RNA, 27 nt, Artificial Sequence
  Description of Artificial Sequence: Synthetic oligonucleotide
uuaauagcuagucuucguuuugaacag

SEQ ID NO: 97439 - RNA, 27 nt, Artificial Sequence
  Description of Artificial Sequence: Synthetic oligonucleotide
auuuuuaguagagaugagguuucacca

SEQ ID NO: 97440 - RNA, 27 nt, Artificial Sequence
  Description of Artificial Sequence: Synthetic oligonucleotide
aggcgagauagagcuucucuuucguuc

SEQ ID NO: 97441 - RNA, 27 nt, Artificial Sequence
  Description of Artificial Sequence: Synthetic oligonucleotide
aacuggaccgaaggcgcuuguggagaa

SEQ ID NO: 97442 - RNA, 27 nt, Artificial Sequence
  Description of Artificial Sequence: Synthetic oligonucleotide
gcggcuacaucuuuggaaucuucuccu

SEQ ID NO: 97443 - RNA, 27 nt, Artificial Sequence
  Description of Artificial Sequence: Synthetic oligonucleotide
caagucuccucauugaauccagauugg

SEQ ID NO: 97444 - RNA, 27 nt, Artificial Sequence
  Description of Artificial Sequence: Synthetic oligonucleotide
uccucacuacucucaaaucuguucugg

SEQ ID NO: 97445 - RNA, 27 nt, Artificial Sequence
  Description of Artificial Sequence: Synthetic oligonucleotide
uuuguacucaucugcacagcucuggcu

SEQ ID NO: 97446 - RNA, 27 nt, Artificial Sequence
  Description of Artificial Sequence: Synthetic oligonucleotide
gcccauuaacaacaacaaucugaggug

SEQ ID NO: 97447 - RNA, 27 nt, Artificial Sequence
  Description of Artificial Sequence: Synthetic oligonucleotide
aauaaauuaaaaauaauuaaaauagug

SEQ ID NO: 97448 - RNA, 27 nt, Artificial Sequence
  Description of Artificial Sequence: Synthetic oligonucleotide
cauauuuaaauauuaauaaauuaaaaa

SEQ ID NO: 97449 - RNA, 27 nt, Artificial Sequence
  Description of Artificial Sequence: Synthetic oligonucleotide
gaaacaaaggauauucaaacugcauag

SEQ ID NO: 97450 - RNA, 27 nt, Artificial Sequence
  Description of Artificial Sequence: Synthetic oligonucleotide
caaacacuuagacgccagcagcauggg

SEQ ID NO: 97451 - RNA, 27 nt, Artificial Sequence
  Description of Artificial Sequence: Synthetic oligonucleotide
uuugucacaggugaaaugcacaucuga

SEQ ID NO: 97452 - RNA, 27 nt, Artificial Sequence
  Description of Artificial Sequence: Synthetic oligonucleotide
uaauucagccuggcacagguuuugauc

SEQ ID NO: 97453 - RNA, 27 nt, Artificial Sequence
  Description of Artificial Sequence: Synthetic oligonucleotide
auuguaagaaugacuacccacauucac

SEQ ID NO: 97454 - RNA, 27 nt, Artificial Sequence
  Description of Artificial Sequence: Synthetic oligonucleotide
caauuguaagaaugacuacccacauuc

SEQ ID NO: 97455 - RNA, 27 nt, Artificial Sequence
  Description of Artificial Sequence: Synthetic oligonucleotide
guacacucucugaugcucauuuucaua

SEQ ID NO: 97456 - RNA, 27 nt, Artificial Sequence
  Description of Artificial Sequence: Synthetic oligonucleotide
cugcugaguucuacaugaaaagcaaau

SEQ ID NO: 97457 - RNA, 27 nt, Artificial Sequence
  Description of Artificial Sequence: Synthetic oligonucleotide
uacugaaaauaaauauagaaauacaac

SEQ ID NO: 97458 - RNA, 27 nt, Artificial Sequence
  Description of Artificial Sequence: Synthetic oligonucleotide
uuccauuuaagaaacauuaaucaaaac

SEQ ID NO: 97459 - RNA, 27 nt, Artificial Sequence
  Description of Artificial Sequence: Synthetic oligonucleotide
acaauuuuaggcacuauacacguuguu

SEQ ID NO: 97460 - RNA, 27 nt, Artificial Sequence
  Description of Artificial Sequence: Synthetic oligonucleotide
ccagauguuaguagccaaggauauggu

SEQ ID NO: 97461 - RNA, 27 nt, Artificial Sequence
  Description of Artificial Sequence: Synthetic oligonucleotide
agcucacagucuccagauguuaguagc

SEQ ID NO: 97462 - RNA, 27 nt, Artificial Sequence
  Description of Artificial Sequence: Synthetic oligonucleotide
auuaauaaaaagcacacaacuuauggc

SEQ ID NO: 97463 - RNA, 27 nt, Artificial Sequence
  Description of Artificial Sequence: Synthetic oligonucleotide
aauguaagaagagccaaaaugaugcau

SEQ ID NO: 97464 - RNA, 27 nt, Artificial Sequence
  Description of Artificial Sequence: Synthetic oligonucleotide
acauuuuuacaaauguaagaagagcca

SEQ ID NO: 97465 - RNA, 27 nt, Artificial Sequence
  Description of Artificial Sequence: Synthetic oligonucleotide
aauaugaauuaagaugaccuaaucugu

SEQ ID NO: 97466 - RNA, 27 nt, Artificial Sequence
  Description of Artificial Sequence: Synthetic oligonucleotide
ucaugauuaguucuuucaauuccaucc

SEQ ID NO: 97467 - RNA, 27 nt, Artificial Sequence
  Description of Artificial Sequence: Synthetic oligonucleotide
cccaagagcagaaggaaugagugugca

SEQ ID NO: 97468 - RNA, 27 nt, Artificial Sequence
  Description of Artificial Sequence: Synthetic oligonucleotide
cucaaagcuacugguuaccucuacacc

SEQ ID NO: 97469 - RNA, 27 nt, Artificial Sequence
  Description of Artificial Sequence: Synthetic oligonucleotide
ugaaauauuacguggcaugugguuggg

SEQ ID NO: 97470 - RNA, 27 nt, Artificial Sequence
  Description of Artificial Sequence: Synthetic oligonucleotide
agugaagagaauaacuuguuuccgaag

SEQ ID NO: 97471 - RNA, 27 nt, Artificial Sequence
  Description of Artificial Sequence: Synthetic oligonucleotide
uuucuuagcauuaguuauugggaguga

SEQ ID NO: 97472 - RNA, 27 nt, Artificial Sequence
  Description of Artificial Sequence: Synthetic oligonucleotide
uugauuuucagcauuucuuagcauuag

SEQ ID NO: 97473 - RNA, 27 nt, Artificial Sequence
  Description of Artificial Sequence: Synthetic oligonucleotide
aaaguaaucauauuuagagaaagacag

SEQ ID NO: 97474 - RNA, 27 nt, Artificial Sequence
  Description of Artificial Sequence: Synthetic oligonucleotide
uguagaacaaaaugccugaaauucagc

SEQ ID NO: 97475 - RNA, 27 nt, Artificial Sequence
  Description of Artificial Sequence: Synthetic oligonucleotide
gagagucccgggugagagggaaucgcc

SEQ ID NO: 97476 - RNA, 27 nt, Artificial Sequence
  Description of Artificial Sequence: Synthetic oligonucleotide
cuuuacuuuaaagguucacuuuccuug

SEQ ID NO: 97477 - RNA, 27 nt, Artificial Sequence
  Description of Artificial Sequence: Synthetic oligonucleotide
ccaggcuuccagagcaugcagccuccu

SEQ ID NO: 97478 - RNA, 27 nt, Artificial Sequence
  Description of Artificial Sequence: Synthetic oligonucleotide
cucucuuuuguuuucuguucagagaaa

SEQ ID NO: 97479 - RNA, 27 nt, Artificial Sequence
  Description of Artificial Sequence: Synthetic oligonucleotide
cggcauaacugauuacagccaaguuca

SEQ ID NO: 97480 - RNA, 27 nt, Artificial Sequence
  Description of Artificial Sequence: Synthetic oligonucleotide
uggacuucuuuuaauuuuggcuucuuc

SEQ ID NO: 97481 - RNA, 27 nt, Artificial Sequence
  Description of Artificial Sequence: Synthetic oligonucleotide
uaaccucaccuggacuucuuuuaauuu

SEQ ID NO: 97482 - RNA, 27 nt, Artificial Sequence
  Description of Artificial Sequence: Synthetic oligonucleotide
guccucuucccgauaauccggauucag

SEQ ID NO: 97483 - RNA, 27 nt, Artificial Sequence
  Description of Artificial Sequence: Synthetic oligonucleotide
acaauacuugcuuugaugucacauuaa

SEQ ID NO: 97484 - RNA, 27 nt, Artificial Sequence
  Description of Artificial Sequence: Synthetic oligonucleotide
gagugcuacaauacuugcuuugauguc

SEQ ID NO: 97485 - RNA, 27 nt, Artificial Sequence
  Description of Artificial Sequence: Synthetic oligonucleotide
auuugugguuuuguuuucucucucucu

SEQ ID NO: 97486 - RNA, 27 nt, Artificial Sequence
  Description of Artificial Sequence: Synthetic oligonucleotide
uguaugggcuuaaauacuacagcgagg

SEQ ID NO: 97487 - RNA, 27 nt, Artificial Sequence
  Description of Artificial Sequence: Synthetic oligonucleotide
cuguaugggcuuaaauacuacagcgag

SEQ ID NO: 97488 - RNA, 27 nt, Artificial Sequence
  Description of Artificial Sequence: Synthetic oligonucleotide
ggaagguuucuguaugggcuuaaauac

SEQ ID NO: 97489 - RNA, 27 nt, Artificial Sequence
  Description of Artificial Sequence: Synthetic oligonucleotide
guagguauaccauguuuauuuuaauac

SEQ ID NO: 97490 - RNA, 27 nt, Artificial Sequence
  Description of Artificial Sequence: Synthetic oligonucleotide
uccgaaaacuggccgaucagaacagcc

SEQ ID NO: 97491 - RNA, 27 nt, Artificial Sequence
  Description of Artificial Sequence: Synthetic oligonucleotide
cccuguuccaaaguucaaauuauuugu

SEQ ID NO: 97492 - RNA, 27 nt, Artificial Sequence
  Description of Artificial Sequence: Synthetic oligonucleotide
acuggaaaguuaaauuaaggucgcaau

SEQ ID NO: 97493 - RNA, 27 nt, Artificial Sequence
  Description of Artificial Sequence: Synthetic oligonucleotide
caaaaccaaacuuuagcuuucucagcc

SEQ ID NO: 97494 - RNA, 27 nt, Artificial Sequence
  Description of Artificial Sequence: Synthetic oligonucleotide
uacagugggaaguagcaucuuuacuuu

SEQ ID NO: 97495 - RNA, 27 nt, Artificial Sequence
  Description of Artificial Sequence: Synthetic oligonucleotide
ucauaugguaucagcaauuaagcagua

SEQ ID NO: 97496 - RNA, 27 nt, Artificial Sequence
  Description of Artificial Sequence: Synthetic oligonucleotide
cagcccauguuucauucauaugguauc

SEQ ID NO: 97497 - RNA, 27 nt, Artificial Sequence
  Description of Artificial Sequence: Synthetic oligonucleotide
uaugaaaaaguuggauaagaaaguugg

SEQ ID NO: 97498 - RNA, 27 nt, Artificial Sequence
  Description of Artificial Sequence: Synthetic oligonucleotide
uccggccucaugaugucaugcaaggcu

SEQ ID NO: 97499 - RNA, 27 nt, Artificial Sequence
  Description of Artificial Sequence: Synthetic oligonucleotide
acaaaugcagucauauacaaauucagg

SEQ ID NO: 97500 - RNA, 27 nt, Artificial Sequence
  Description of Artificial Sequence: Synthetic oligonucleotide
gguaguaaacauucuacuaggauucuu

SEQ ID NO: 97501 - RNA, 27 nt, Artificial Sequence
  Description of Artificial Sequence: Synthetic oligonucleotide
uuucaucaaaaaauucuucccuuucug

SEQ ID NO: 97502 - RNA, 27 nt, Artificial Sequence
  Description of Artificial Sequence: Synthetic oligonucleotide
aaauucacacacuggcaugccgauagc

SEQ ID NO: 97503 - RNA, 27 nt, Artificial Sequence
  Description of Artificial Sequence: Synthetic oligonucleotide
acauacauugcucuacuaugaggugaa

SEQ ID NO: 97504 - RNA, 27 nt, Artificial Sequence
  Description of Artificial Sequence: Synthetic oligonucleotide
uauauaugugcuuuggcaauucuggug

SEQ ID NO: 97505 - RNA, 27 nt, Artificial Sequence
  Description of Artificial Sequence: Synthetic oligonucleotide
ggagaaacuauuacccagaucaccacu

SEQ ID NO: 97506 - RNA, 27 nt, Artificial Sequence
  Description of Artificial Sequence: Synthetic oligonucleotide
auuuggagaaacuauuacccagaucac

SEQ ID NO: 97507 - RNA, 27 nt, Artificial Sequence
  Description of Artificial Sequence: Synthetic oligonucleotide
uuucuaggaaguauucaucacauccac

SEQ ID NO: 97508 - RNA, 27 nt, Artificial Sequence
  Description of Artificial Sequence: Synthetic oligonucleotide
cauauaugguguagcuguggaaaugcg

SEQ ID NO: 97509 - RNA, 27 nt, Artificial Sequence
  Description of Artificial Sequence: Synthetic oligonucleotide
cuccauucauauaugguguagcugugg

SEQ ID NO: 97510 - RNA, 27 nt, Artificial Sequence
  Description of Artificial Sequence: Synthetic oligonucleotide
aucuucuucucguguaagaacugcagc

SEQ ID NO: 97511 - RNA, 27 nt, Artificial Sequence
  Description of Artificial Sequence: Synthetic oligonucleotide
ucccuguaaaugaucuucuucucgugu

SEQ ID NO: 97512 - RNA, 27 nt, Artificial Sequence
  Description of Artificial Sequence: Synthetic oligonucleotide
gucccuguaaaugaucuucuucucgug

SEQ ID NO: 97513 - RNA, 27 nt, Artificial Sequence
  Description of Artificial Sequence: Synthetic oligonucleotide
ucaggucccuguaaaugaucuucuucu

SEQ ID NO: 97514 - RNA, 27 nt, Artificial Sequence
  Description of Artificial Sequence: Synthetic oligonucleotide
gaugcagucaaacaccucuuccucugu

SEQ ID NO: 97515 - RNA, 27 nt, Artificial Sequence
  Description of Artificial Sequence: Synthetic oligonucleotide
cgaugcagucaaacaccucuuccucug

SEQ ID NO: 97516 - RNA, 27 nt, Artificial Sequence
  Description of Artificial Sequence: Synthetic oligonucleotide
cccugugaacucgcccucaaaguagcg

SEQ ID NO: 97517 - RNA, 27 nt, Artificial Sequence
  Description of Artificial Sequence: Synthetic oligonucleotide
ggacagaggugccaggagaugcccuca

SEQ ID NO: 97518 - RNA, 27 nt, Artificial Sequence
  Description of Artificial Sequence: Synthetic oligonucleotide
uuaaaaagacaaaccauaucacuccuu

SEQ ID NO: 97519 - RNA, 27 nt, Artificial Sequence
  Description of Artificial Sequence: Synthetic oligonucleotide
cuuaaaaagacaaaccauaucacuccu

SEQ ID NO: 97520 - RNA, 27 nt, Artificial Sequence
  Description of Artificial Sequence: Synthetic oligonucleotide
gacaaccuuuaggaucuuuacugcaac

SEQ ID NO: 97521 - RNA, 27 nt, Artificial Sequence
  Description of Artificial Sequence: Synthetic oligonucleotide
gucgacaaccuuuaggaucuuuacugc

SEQ ID NO: 97522 - RNA, 27 nt, Artificial Sequence
  Description of Artificial Sequence: Synthetic oligonucleotide
acaauugccagguuguccuuugucaug

SEQ ID NO: 97523 - RNA, 27 nt, Artificial Sequence
  Description of Artificial Sequence: Synthetic oligonucleotide
ccucgcaccacugggucacaauugcca

SEQ ID NO: 97524 - RNA, 27 nt, Artificial Sequence
  Description of Artificial Sequence: Synthetic oligonucleotide
auuucaugucucuauggaugauguucu

SEQ ID NO: 97525 - RNA, 27 nt, Artificial Sequence
  Description of Artificial Sequence: Synthetic oligonucleotide
uggagaaauauauuguuggauuucaug

SEQ ID NO: 97526 - RNA, 27 nt, Artificial Sequence
  Description of Artificial Sequence: Synthetic oligonucleotide
agccuucauggagaaauauauuguugg

SEQ ID NO: 97527 - RNA, 27 nt, Artificial Sequence
  Description of Artificial Sequence: Synthetic oligonucleotide
accacuccagcgugacuuuacuguugc

SEQ ID NO: 97528 - RNA, 27 nt, Artificial Sequence
  Description of Artificial Sequence: Synthetic oligonucleotide
ccucucuuccuuuacuuucuucacaca

SEQ ID NO: 97529 - RNA, 27 nt, Artificial Sequence
  Description of Artificial Sequence: Synthetic oligonucleotide
gcccgaugcaaggauggcucggaagcg

SEQ ID NO: 97530 - RNA, 27 nt, Artificial Sequence
  Description of Artificial Sequence: Synthetic oligonucleotide
cacaguaggauauucaaccuccauuuc

SEQ ID NO: 97531 - RNA, 27 nt, Artificial Sequence
  Description of Artificial Sequence: Synthetic oligonucleotide
uuacacaguaggauauucaaccuccau

SEQ ID NO: 97532 - RNA, 27 nt, Artificial Sequence
  Description of Artificial Sequence: Synthetic oligonucleotide
uacacuacaagggaaaacucaaaaucu

SEQ ID NO: 97533 - RNA, 27 nt, Artificial Sequence
  Description of Artificial Sequence: Synthetic oligonucleotide
caaucaacaaagaacaaacaggauaaa

SEQ ID NO: 97534 - RNA, 27 nt, Artificial Sequence
  Description of Artificial Sequence: Synthetic oligonucleotide
uuucaaucaacaaagaacaaacaggau

SEQ ID NO: 97535 - RNA, 27 nt, Artificial Sequence
  Description of Artificial Sequence: Synthetic oligonucleotide
auggaagaaaaagaaggcuguagagaa

SEQ ID NO: 97536 - RNA, 27 nt, Artificial Sequence
  Description of Artificial Sequence: Synthetic oligonucleotide
uagaaggaagauuagcuauggaagaaa

SEQ ID NO: 97537 - RNA, 27 nt, Artificial Sequence
  Description of Artificial Sequence: Synthetic oligonucleotide
augaagcauucaacaggaagauuauuu

SEQ ID NO: 97538 - RNA, 27 nt, Artificial Sequence
  Description of Artificial Sequence: Synthetic oligonucleotide
caugaagcauucaacaggaagauuauu

SEQ ID NO: 97539 - RNA, 27 nt, Artificial Sequence
  Description of Artificial Sequence: Synthetic oligonucleotide
ucaaaguagaauucaagucaugaagca

SEQ ID NO: 97540 - RNA, 27 nt, Artificial Sequence
  Description of Artificial Sequence: Synthetic oligonucleotide
gucuguaguugcuucucucccucuuag

SEQ ID NO: 97541 - RNA, 27 nt, Artificial Sequence
  Description of Artificial Sequence: Synthetic oligonucleotide
guugaccuuggucugguaggagacggc

SEQ ID NO: 97542 - RNA, 27 nt, Artificial Sequence
  Description of Artificial Sequence: Synthetic oligonucleotide
gucgagauagucgggccgauugaucuc

SEQ ID NO: 97543 - RNA, 27 nt, Artificial Sequence
  Description of Artificial Sequence: Synthetic oligonucleotide
guuugggaagguuggauguucguccuc

SEQ ID NO: 97544 - RNA, 27 nt, Artificial Sequence
  Description of Artificial Sequence: Synthetic oligonucleotide
aguucuaagcuuggguuccgacccuaa

SEQ ID NO: 97545 - RNA, 27 nt, Artificial Sequence
  Description of Artificial Sequence: Synthetic oligonucleotide
uuaaaguucuaagcuuggguuccgacc

SEQ ID NO: 97546 - RNA, 27 nt, Artificial Sequence
  Description of Artificial Sequence: Synthetic oligonucleotide
guugcuuaaaguucuaagcuuggguuc

SEQ ID NO: 97547 - RNA, 27 nt, Artificial Sequence
  Description of Artificial Sequence: Synthetic oligonucleotide
gugguggucuuguugcuuaaaguucua

SEQ ID NO: 97548 - RNA, 27 nt, Artificial Sequence
  Description of Artificial Sequence: Synthetic oligonucleotide
acuuuauuucucgccacugaauaguag

SEQ ID NO: 97549 - RNA, 27 nt, Artificial Sequence
  Description of Artificial Sequence: Synthetic oligonucleotide
aacuuuauuucucgccacugaauagua

SEQ ID NO: 97550 - RNA, 27 nt, Artificial Sequence
  Description of Artificial Sequence: Synthetic oligonucleotide
ggaucauuuccuguuaucuguguuugu

SEQ ID NO: 97551 - RNA, 27 nt, Artificial Sequence
  Description of Artificial Sequence: Synthetic oligonucleotide
guuucauuucuucucuuuucuuaaggc

SEQ ID NO: 97552 - RNA, 27 nt, Artificial Sequence
  Description of Artificial Sequence: Synthetic oligonucleotide
ggaggauggaaacacacuccuucaguu

SEQ ID NO: 97553 - RNA, 27 nt, Artificial Sequence
  Description of Artificial Sequence: Synthetic oligonucleotide
ucaaagauuuucagucccgcggugaca

SEQ ID NO: 97554 - RNA, 27 nt, Artificial Sequence
  Description of Artificial Sequence: Synthetic oligonucleotide
ccugaacggcacgcuuauuucugcugu

SEQ ID NO: 97555 - RNA, 27 nt, Artificial Sequence
  Description of Artificial Sequence: Synthetic oligonucleotide
cuucuggacccugaacggcacgcuuau

SEQ ID NO: 97556 - RNA, 27 nt, Artificial Sequence
  Description of Artificial Sequence: Synthetic oligonucleotide
caagcagucuugagugacuguuucuuc

SEQ ID NO: 97557 - RNA, 27 nt, Artificial Sequence
  Description of Artificial Sequence: Synthetic oligonucleotide
ccaaagacauggaccuucuuccucuga

SEQ ID NO: 97558 - RNA, 27 nt, Artificial Sequence
  Description of Artificial Sequence: Synthetic oligonucleotide
guguuucaggcauauuuugaauacauc

SEQ ID NO: 97559 - RNA, 27 nt, Artificial Sequence
  Description of Artificial Sequence: Synthetic oligonucleotide
gagguacagagaaagggaggaaaauag

SEQ ID NO: 97560 - RNA, 27 nt, Artificial Sequence
  Description of Artificial Sequence: Synthetic oligonucleotide
ucuugucuugcucuaucuuucuuuggu

SEQ ID NO: 97561 - RNA, 27 nt, Artificial Sequence
  Description of Artificial Sequence: Synthetic oligonucleotide
uuucuugucuugcucuaucuuucuuug

SEQ ID NO: 97562 - RNA, 27 nt, Artificial Sequence
  Description of Artificial Sequence: Synthetic oligonucleotide
ggaucuuguacaaacaaaugcuuucuc

SEQ ID NO: 97563 - RNA, 27 nt, Artificial Sequence
  Description of Artificial Sequence: Synthetic oligonucleotide
ucugcaaguacguucguuuaacucaag

SEQ ID NO: 97564 - RNA, 27 nt, Artificial Sequence
  Description of Artificial Sequence: Synthetic oligonucleotide
ucuguaucgaucguucuguaucagucu

SEQ ID NO: 97565 - RNA, 27 nt, Artificial Sequence
  Description of Artificial Sequence: Synthetic oligonucleotide
auuuauuuuuauauauauauaauauau

SEQ ID NO: 97566 - RNA, 27 nt, Artificial Sequence
  Description of Artificial Sequence: Synthetic oligonucleotide
auauuuauuuuuauauauauauaauau

SEQ ID NO: 97567 - RNA, 27 nt, Artificial Sequence
  Description of Artificial Sequence: Synthetic oligonucleotide
cacagcagucaaauacauccagugaag

SEQ ID NO: 97568 - RNA, 27 nt, Artificial Sequence
  Description of Artificial Sequence: Synthetic oligonucleotide
gucucucaucuccuccucuucccuguc

SEQ ID NO: 97569 - RNA, 27 nt, Artificial Sequence
  Description of Artificial Sequence: Synthetic oligonucleotide
ccaagugggacaaaaaaaagaucaugc

SEQ ID NO: 97570 - RNA, 14 nt, Artificial Sequence
  Description of Artificial Sequence: Synthetic oligonucleotide
guauuuugaugagg

SEQ ID NO: 97571 - RNA, 12 nt, Artificial Sequence
  Description of Artificial Sequence: Synthetic oligonucleotide
ggcccagaugau

SEQ ID NO: 97572 - RNA, 14 nt, Artificial Sequence
  Description of Artificial Sequence: Synthetic oligonucleotide
gggaagaaaacuau

SEQ ID NO: 97573 - RNA, 15 nt, Artificial Sequence
  Description of Artificial Sequence: Synthetic oligonucleotide
guuuuaauuuauuuc

SEQ ID NO: 97574 - RNA, 12 nt, Artificial Sequence
  Description of Artificial Sequence: Synthetic oligonucleotide
acguagggaaau

SEQ ID NO: 97575 - RNA, 12 nt, Artificial Sequence
  Description of Artificial Sequence: Synthetic oligonucleotide
ccaggguuuacc

SEQ ID NO: 97576 - RNA, 11 nt, Artificial Sequence
  Description of Artificial Sequence: Synthetic oligonucleotide
agcaagguuua

SEQ ID NO: 97577 - RNA, 12 nt, Artificial Sequence
  Description of Artificial Sequence: Synthetic oligonucleotide
uguauuauguug

SEQ ID NO: 97578 - RNA, 15 nt, Artificial Sequence
  Description of Artificial Sequence: Synthetic oligonucleotide
uuuuaaucuuuguga

SEQ ID NO: 97579 - RNA, 14 nt, Artificial Sequence
  Description of Artificial Sequence: Synthetic oligonucleotide
uuaaucuuugugac

SEQ ID NO: 97580 - RNA, 13 nt, Artificial Sequence
  Description of Artificial Sequence: Synthetic oligonucleotide
gcugcuuaugucu

SEQ ID NO: 97581 - RNA, 14 nt, Artificial Sequence
  Description of Artificial Sequence: Synthetic oligonucleotide
aaguguuucagaag

SEQ ID NO: 97582 - RNA, 13 nt, Artificial Sequence
  Description of Artificial Sequence: Synthetic oligonucleotide
gaccaucaauaag

SEQ ID NO: 97583 - RNA, 13 nt, Artificial Sequence
  Description of Artificial Sequence: Synthetic oligonucleotide
ccaucaauaagga

SEQ ID NO: 97584 - RNA, 14 nt, Artificial Sequence
  Description of Artificial Sequence: Synthetic oligonucleotide
ucaauaaggaagaa

SEQ ID NO: 97585 - RNA, 14 nt, Artificial Sequence
  Description of Artificial Sequence: Synthetic oligonucleotide
aauaaggaagaagc

SEQ ID NO: 97586 - RNA, 13 nt, Artificial Sequence
  Description of Artificial Sequence: Synthetic oligonucleotide
aggaagaagcccu

SEQ ID NO: 97587 - RNA, 13 nt, Artificial Sequence
  Description of Artificial Sequence: Synthetic oligonucleotide
gcauaacuaaagg

SEQ ID NO: 97588 - RNA, 14 nt, Artificial Sequence
  Description of Artificial Sequence: Synthetic oligonucleotide
cauaacuaaaggug

SEQ ID NO: 97589 - RNA, 12 nt, Artificial Sequence
  Description of Artificial Sequence: Synthetic oligonucleotide
cuacaucacgcc

SEQ ID NO: 97590 - RNA, 12 nt, Artificial Sequence
  Description of Artificial Sequence: Synthetic oligonucleotide
acuggauuuaag

SEQ ID NO: 97591 - RNA, 12 nt, Artificial Sequence
  Description of Artificial Sequence: Synthetic oligonucleotide
cuggauuuaagc

SEQ ID NO: 97592 - RNA, 13 nt, Artificial Sequence
  Description of Artificial Sequence: Synthetic oligonucleotide
gauuuaagcagag

SEQ ID NO: 97593 - RNA, 13 nt, Artificial Sequence
  Description of Artificial Sequence: Synthetic oligonucleotide
auuuaagcagagu

SEQ ID NO: 97594 - RNA, 13 nt, Artificial Sequence
  Description of Artificial Sequence: Synthetic oligonucleotide
uuaagcagaguuc

SEQ ID NO: 97595 - RNA, 13 nt, Artificial Sequence
  Description of Artificial Sequence: Synthetic oligonucleotide
uaagcagaguuca

SEQ ID NO: 97596 - RNA, 14 nt, Artificial Sequence
  Description of Artificial Sequence: Synthetic oligonucleotide
agcagaguucaaaa

SEQ ID NO: 97597 - RNA, 12 nt, Artificial Sequence
  Description of Artificial Sequence: Synthetic oligonucleotide
cucagggucuga

SEQ ID NO: 97598 - RNA, 13 nt, Artificial Sequence
  Description of Artificial Sequence: Synthetic oligonucleotide
caagcaacuacau

SEQ ID NO: 97599 - RNA, 12 nt, Artificial Sequence
  Description of Artificial Sequence: Synthetic oligonucleotide
aucaauggcagc

SEQ ID NO: 97600 - RNA, 11 nt, Artificial Sequence
  Description of Artificial Sequence: Synthetic oligonucleotide
uuccagcccac

SEQ ID NO: 97601 - RNA, 12 nt, Artificial Sequence
  Description of Artificial Sequence: Synthetic oligonucleotide
cagcugagaaug

SEQ ID NO: 97602 - RNA, 13 nt, Artificial Sequence
  Description of Artificial Sequence: Synthetic oligonucleotide
aacguaucuccua

SEQ ID NO: 97603 - RNA, 14 nt, Artificial Sequence
  Description of Artificial Sequence: Synthetic oligonucleotide
ccuaaaauaauuuc

SEQ ID NO: 97604 - RNA, 13 nt, Artificial Sequence
  Description of Artificial Sequence: Synthetic oligonucleotide
uggaagauucagc

SEQ ID NO: 97605 - RNA, 12 nt, Artificial Sequence
  Description of Artificial Sequence: Synthetic oligonucleotide
uuaaacucuccu

SEQ ID NO: 97606 - RNA, 12 nt, Artificial Sequence
  Description of Artificial Sequence: Synthetic oligonucleotide
cagccuacaguu

SEQ ID NO: 97607 - RNA, 13 nt, Artificial Sequence
  Description of Artificial Sequence: Synthetic oligonucleotide
guuauguucaguc

SEQ ID NO: 97608 - RNA, 13 nt, Artificial Sequence
  Description of Artificial Sequence: Synthetic oligonucleotide
cacauacaaaaug

SEQ ID NO: 97609 - RNA, 9 nt, Artificial Sequence
  Description of Artificial Sequence: Synthetic oligonucleotide
uccuuuugc

SEQ ID NO: 97610 - RNA, 12 nt, Artificial Sequence
  Description of Artificial Sequence: Synthetic oligonucleotide
ugaccugugaag

SEQ ID NO: 97611 - RNA, 12 nt, Artificial Sequence
  Description of Artificial Sequence: Synthetic oligonucleotide
cuaucucacaca

SEQ ID NO: 97612 - RNA, 13 nt, Artificial Sequence
  Description of Artificial Sequence: Synthetic oligonucleotide
uguccucaauugu

SEQ ID NO: 97613 - RNA, 12 nt, Artificial Sequence
  Description of Artificial Sequence: Synthetic oligonucleotide
aaaccguagcug

SEQ ID NO: 97614 - RNA, 12 nt, Artificial Sequence
  Description of Artificial Sequence: Synthetic oligonucleotide
uagcuggcaagc

SEQ ID NO: 97615 - RNA, 14 nt, Artificial Sequence
  Description of Artificial Sequence: Synthetic oligonucleotide
uuguaugguuaaaa

SEQ ID NO: 97616 - RNA, 14 nt, Artificial Sequence
  Description of Artificial Sequence: Synthetic oligonucleotide
ugguuaaaagaugg

SEQ ID NO: 97617 - RNA, 13 nt, Artificial Sequence
  Description of Artificial Sequence: Synthetic oligonucleotide
cagggaauuauac

SEQ ID NO: 97618 - RNA, 12 nt, Artificial Sequence
  Description of Artificial Sequence: Synthetic oligonucleotide
acaaucuugcug

SEQ ID NO: 97619 - RNA, 13 nt, Artificial Sequence
  Description of Artificial Sequence: Synthetic oligonucleotide
ccaauaaugaaga

SEQ ID NO: 97620 - RNA, 13 nt, Artificial Sequence
  Description of Artificial Sequence: Synthetic oligonucleotide
acuuuggauguuc

SEQ ID NO: 97621 - RNA, 12 nt, Artificial Sequence
  Description of Artificial Sequence: Synthetic oligonucleotide
aaugcuuccacu

SEQ ID NO: 97622 - RNA, 11 nt, Artificial Sequence
  Description of Artificial Sequence: Synthetic oligonucleotide
gagaaaguuug

SEQ ID NO: 97623 - RNA, 11 nt, Artificial Sequence
  Description of Artificial Sequence: Synthetic oligonucleotide
aaagaacuacu

SEQ ID NO: 97624 - RNA, 12 nt, Artificial Sequence
  Description of Artificial Sequence: Synthetic oligonucleotide
uuagaaauacgg

SEQ ID NO: 97625 - RNA, 12 nt, Artificial Sequence
  Description of Artificial Sequence: Synthetic oligonucleotide
aacauggguaca

SEQ ID NO: 97626 - RNA, 14 nt, Artificial Sequence
  Description of Artificial Sequence: Synthetic oligonucleotide
aaagacacagaaga

SEQ ID NO: 97627 - RNA, 11 nt, Artificial Sequence
  Description of Artificial Sequence: Synthetic oligonucleotide
uaguagggagg

SEQ ID NO: 97628 - RNA, 12 nt, Artificial Sequence
  Description of Artificial Sequence: Synthetic oligonucleotide
gccuucugcagc

SEQ ID NO: 97629 - RNA, 10 nt, Artificial Sequence
  Description of Artificial Sequence: Synthetic oligonucleotide
ggucugguac

SEQ ID NO: 97630 - RNA, 12 nt, Artificial Sequence
  Description of Artificial Sequence: Synthetic oligonucleotide
cuaguccuuccg

SEQ ID NO: 97631 - RNA, 12 nt, Artificial Sequence
  Description of Artificial Sequence: Synthetic oligonucleotide
ccagugaauauu

SEQ ID NO: 97632 - RNA, 13 nt, Artificial Sequence
  Description of Artificial Sequence: Synthetic oligonucleotide
augaauucaaguu

SEQ ID NO: 97633 - RNA, 12 nt, Artificial Sequence
  Description of Artificial Sequence: Synthetic oligonucleotide
caggacacagau

SEQ ID NO: 97634 - RNA, 12 nt, Artificial Sequence
  Description of Artificial Sequence: Synthetic oligonucleotide
cucaaagcacag

SEQ ID NO: 97635 - RNA, 10 nt, Artificial Sequence
  Description of Artificial Sequence: Synthetic oligonucleotide
accacugcca

SEQ ID NO: 97636 - RNA, 13 nt, Artificial Sequence
  Description of Artificial Sequence: Synthetic oligonucleotide
gaaacuacuagug

SEQ ID NO: 97637 - RNA, 12 nt, Artificial Sequence
  Description of Artificial Sequence: Synthetic oligonucleotide
aagucggacagc

SEQ ID NO: 97638 - RNA, 13 nt, Artificial Sequence
  Description of Artificial Sequence: Synthetic oligonucleotide
gaaagcgaaaaau

SEQ ID NO: 97639 - RNA, 13 nt, Artificial Sequence
  Description of Artificial Sequence: Synthetic oligonucleotide
cccucugauuuag

SEQ ID NO: 97640 - RNA, 12 nt, Artificial Sequence
  Description of Artificial Sequence: Synthetic oligonucleotide
ugagcuauuuaa

SEQ ID NO: 97641 - RNA, 13 nt, Artificial Sequence
  Description of Artificial Sequence: Synthetic oligonucleotide
aaaaggugaaaaa

SEQ ID NO: 97642 - RNA, 14 nt, Artificial Sequence
  Description of Artificial Sequence: Synthetic oligonucleotide
gaaaaagcacuauu

SEQ ID NO: 97643 - RNA, 12 nt, Artificial Sequence
  Description of Artificial Sequence: Synthetic oligonucleotide
ggcugaaaagaa

SEQ ID NO: 97644 - RNA, 12 nt, Artificial Sequence
  Description of Artificial Sequence: Synthetic oligonucleotide
uaaacccuuaua

SEQ ID NO: 97645 - RNA, 13 nt, Artificial Sequence
  Description of Artificial Sequence: Synthetic oligonucleotide
cauacuauuagcc

SEQ ID NO: 97646 - RNA, 12 nt, Artificial Sequence
  Description of Artificial Sequence: Synthetic oligonucleotide
gacagaagcauu

SEQ ID NO: 97647 - RNA, 14 nt, Artificial Sequence
  Description of Artificial Sequence: Synthetic oligonucleotide
agagcaaauaagau

SEQ ID NO: 97648 - RNA, 14 nt, Artificial Sequence
  Description of Artificial Sequence: Synthetic oligonucleotide
ccaacauuuuucuc

SEQ ID NO: 97649 - RNA, 15 nt, Artificial Sequence
  Description of Artificial Sequence: Synthetic oligonucleotide
uuaaguaugagaaaa

SEQ ID NO: 97650 - RNA, 14 nt, Artificial Sequence
  Description of Artificial Sequence: Synthetic oligonucleotide
caggaauaaagaug

SEQ ID NO: 97651 - RNA, 13 nt, Artificial Sequence
  Description of Artificial Sequence: Synthetic oligonucleotide
aauuugaaugacc

SEQ ID NO: 97652 - RNA, 14 nt, Artificial Sequence
  Description of Artificial Sequence: Synthetic oligonucleotide
auguauaaagauag

SEQ ID NO: 97653 - RNA, 12 nt, Artificial Sequence
  Description of Artificial Sequence: Synthetic oligonucleotide
ggcuguaacuau

SEQ ID NO: 97654 - RNA, 11 nt, Artificial Sequence
  Description of Artificial Sequence: Synthetic oligonucleotide
ucugugaagug

SEQ ID NO: 97655 - RNA, 14 nt, Artificial Sequence
  Description of Artificial Sequence: Synthetic oligonucleotide
ccuuuaaggaaaug

SEQ ID NO: 97656 - RNA, 13 nt, Artificial Sequence
  Description of Artificial Sequence: Synthetic oligonucleotide
aaggauacaaaaa

SEQ ID NO: 97657 - RNA, 12 nt, Artificial Sequence
  Description of Artificial Sequence: Synthetic oligonucleotide
agaugcaauuug

SEQ ID NO: 97658 - RNA, 12 nt, Artificial Sequence
  Description of Artificial Sequence: Synthetic oligonucleotide
guucaaaacgaa

SEQ ID NO: 97659 - RNA, 11 nt, Artificial Sequence
  Description of Artificial Sequence: Synthetic oligonucleotide
gugaaaccuca

SEQ ID NO: 97660 - RNA, 13 nt, Artificial Sequence
  Description of Artificial Sequence: Synthetic oligonucleotide
acgaaagagaagc

SEQ ID NO: 97661 - RNA, 12 nt, Artificial Sequence
  Description of Artificial Sequence: Synthetic oligonucleotide
cuccacaagcgc

SEQ ID NO: 97662 - RNA, 14 nt, Artificial Sequence
  Description of Artificial Sequence: Synthetic oligonucleotide
gagaagauuccaaa

SEQ ID NO: 97663 - RNA, 13 nt, Artificial Sequence
  Description of Artificial Sequence: Synthetic oligonucleotide
aaucuggauucaa

SEQ ID NO: 97664 - RNA, 13 nt, Artificial Sequence
  Description of Artificial Sequence: Synthetic oligonucleotide
agaacagauuuga

SEQ ID NO: 97665 - RNA, 11 nt, Artificial Sequence
  Description of Artificial Sequence: Synthetic oligonucleotide
ccagagcugug

SEQ ID NO: 97666 - RNA, 12 nt, Artificial Sequence
  Description of Artificial Sequence: Synthetic oligonucleotide
ccucagauuguu

SEQ ID NO: 97667 - RNA, 12 nt, Artificial Sequence
  Description of Artificial Sequence: Synthetic oligonucleotide
cuauuuuaauua

SEQ ID NO: 97668 - RNA, 13 nt, Artificial Sequence
  Description of Artificial Sequence: Synthetic oligonucleotide
uuuaauuuauuaa

SEQ ID NO: 97669 - RNA, 12 nt, Artificial Sequence
  Description of Artificial Sequence: Synthetic oligonucleotide
augcaguuugaa

SEQ ID NO: 97670 - RNA, 11 nt, Artificial Sequence
  Description of Artificial Sequence: Synthetic oligonucleotide
caugcugcugg

SEQ ID NO: 97671 - RNA, 13 nt, Artificial Sequence
  Description of Artificial Sequence: Synthetic oligonucleotide
agaugugcauuuc

SEQ ID NO: 97672 - RNA, 12 nt, Artificial Sequence
  Description of Artificial Sequence: Synthetic oligonucleotide
ucaaaaccugug

SEQ ID NO: 97673 - RNA, 11 nt, Artificial Sequence
  Description of Artificial Sequence: Synthetic oligonucleotide
gaaugugggua

SEQ ID NO: 97674 - RNA, 10 nt, Artificial Sequence
  Description of Artificial Sequence: Synthetic oligonucleotide
auguggguag

SEQ ID NO: 97675 - RNA, 13 nt, Artificial Sequence
  Description of Artificial Sequence: Synthetic oligonucleotide
ugaaaaugagcau

SEQ ID NO: 97676 - RNA, 13 nt, Artificial Sequence
  Description of Artificial Sequence: Synthetic oligonucleotide
uugcuuuucaugu

SEQ ID NO: 97677 - RNA, 12 nt, Artificial Sequence
  Description of Artificial Sequence: Synthetic oligonucleotide
uguauuucuaua

SEQ ID NO: 97678 - RNA, 13 nt, Artificial Sequence
  Description of Artificial Sequence: Synthetic oligonucleotide
uuugauuaauguu

SEQ ID NO: 97679 - RNA, 12 nt, Artificial Sequence
  Description of Artificial Sequence: Synthetic oligonucleotide
caacguguauag

SEQ ID NO: 97680 - RNA, 12 nt, Artificial Sequence
  Description of Artificial Sequence: Synthetic oligonucleotide
cauauccuuggc

SEQ ID NO: 97681 - RNA, 13 nt, Artificial Sequence
  Description of Artificial Sequence: Synthetic oligonucleotide
uacuaacaucugg

SEQ ID NO: 97682 - RNA, 11 nt, Artificial Sequence
  Description of Artificial Sequence: Synthetic oligonucleotide
cauaaguugug

SEQ ID NO: 97683 - RNA, 12 nt, Artificial Sequence
  Description of Artificial Sequence: Synthetic oligonucleotide
gcaucauuuugg

SEQ ID NO: 97684 - RNA, 10 nt, Artificial Sequence
  Description of Artificial Sequence: Synthetic oligonucleotide
gcucuucuua

SEQ ID NO: 97685 - RNA, 10 nt, Artificial Sequence
  Description of Artificial Sequence: Synthetic oligonucleotide
agauuagguc

SEQ ID NO: 97686 - RNA, 12 nt, Artificial Sequence
  Description of Artificial Sequence: Synthetic oligonucleotide
auggaauugaaa

SEQ ID NO: 97687 - RNA, 13 nt, Artificial Sequence
  Description of Artificial Sequence: Synthetic oligonucleotide
cacacucauuccu

SEQ ID NO: 97688 - RNA, 12 nt, Artificial Sequence
  Description of Artificial Sequence: Synthetic oligonucleotide
uguagagguaac

SEQ ID NO: 97689 - RNA, 11 nt, Artificial Sequence
  Description of Artificial Sequence: Synthetic oligonucleotide
caaccacaugc

SEQ ID NO: 97690 - RNA, 12 nt, Artificial Sequence
  Description of Artificial Sequence: Synthetic oligonucleotide
ucggaaacaagu

SEQ ID NO: 97691 - RNA, 11 nt, Artificial Sequence
  Description of Artificial Sequence: Synthetic oligonucleotide
acucccaauaa

SEQ ID NO: 97692 - RNA, 13 nt, Artificial Sequence
  Description of Artificial Sequence: Synthetic oligonucleotide
aaugcuaagaaau

SEQ ID NO: 97693 - RNA, 11 nt, Artificial Sequence
  Description of Artificial Sequence: Synthetic oligonucleotide
gucuuucucua

SEQ ID NO: 97694 - RNA, 11 nt, Artificial Sequence
  Description of Artificial Sequence: Synthetic oligonucleotide
ugaauuucagg

SEQ ID NO: 97695 - RNA, 13 nt, Artificial Sequence
  Description of Artificial Sequence: Synthetic oligonucleotide
cgauucccucuca

SEQ ID NO: 97696 - RNA, 11 nt, Artificial Sequence
  Description of Artificial Sequence: Synthetic oligonucleotide
aggaaagugaa

SEQ ID NO: 97697 - RNA, 12 nt, Artificial Sequence
  Description of Artificial Sequence: Synthetic oligonucleotide
gaggcugcaugc

SEQ ID NO: 97698 - RNA, 11 nt, Artificial Sequence
  Description of Artificial Sequence: Synthetic oligonucleotide
ucucugaacag

SEQ ID NO: 97699 - RNA, 12 nt, Artificial Sequence
  Description of Artificial Sequence: Synthetic oligonucleotide
aacuuggcugua

SEQ ID NO: 97700 - RNA, 12 nt, Artificial Sequence
  Description of Artificial Sequence: Synthetic oligonucleotide
agaagccaaaau

SEQ ID NO: 97701 - RNA, 14 nt, Artificial Sequence
  Description of Artificial Sequence: Synthetic oligonucleotide
auuaaaagaagucc

SEQ ID NO: 97702 - RNA, 14 nt, Artificial Sequence
  Description of Artificial Sequence: Synthetic oligonucleotide
gaauccggauuauc

SEQ ID NO: 97703 - RNA, 12 nt, Artificial Sequence
  Description of Artificial Sequence: Synthetic oligonucleotide
aaugugacauca

SEQ ID NO: 97704 - RNA, 13 nt, Artificial Sequence
  Description of Artificial Sequence: Synthetic oligonucleotide
caucaaagcaagu

SEQ ID NO: 97705 - RNA, 11 nt, Artificial Sequence
  Description of Artificial Sequence: Synthetic oligonucleotide
agagagagaaa

SEQ ID NO: 97706 - RNA, 13 nt, Artificial Sequence
  Description of Artificial Sequence: Synthetic oligonucleotide
ucgcuguaguauu

SEQ ID NO: 97707 - RNA, 14 nt, Artificial Sequence
  Description of Artificial Sequence: Synthetic oligonucleotide
cgcuguaguauuua

SEQ ID NO: 97708 - RNA, 13 nt, Artificial Sequence
  Description of Artificial Sequence: Synthetic oligonucleotide
auuuaagcccaua

SEQ ID NO: 97709 - RNA, 15 nt, Artificial Sequence
  Description of Artificial Sequence: Synthetic oligonucleotide
auuaaaauaaacaug

SEQ ID NO: 97710 - RNA, 12 nt, Artificial Sequence
  Description of Artificial Sequence: Synthetic oligonucleotide
cuguucugaucg

SEQ ID NO: 97711 - RNA, 16 nt, Artificial Sequence
  Description of Artificial Sequence: Synthetic oligonucleotide
aaauaauuugaacuuu

SEQ ID NO: 97712 - RNA, 12 nt, Artificial Sequence
  Description of Artificial Sequence: Synthetic oligonucleotide
ugcgaccuuaau

SEQ ID NO: 97713 - RNA, 11 nt, Artificial Sequence
  Description of Artificial Sequence: Synthetic oligonucleotide
cugagaaagcu

SEQ ID NO: 97714 - RNA, 13 nt, Artificial Sequence
  Description of Artificial Sequence: Synthetic oligonucleotide
aguaaagaugcua

SEQ ID NO: 97715 - RNA, 12 nt, Artificial Sequence
  Description of Artificial Sequence: Synthetic oligonucleotide
cugcuuaauugc

SEQ ID NO: 97716 - RNA, 14 nt, Artificial Sequence
  Description of Artificial Sequence: Synthetic oligonucleotide
uaccauaugaauga

SEQ ID NO: 97717 - RNA, 12 nt, Artificial Sequence
  Description of Artificial Sequence: Synthetic oligonucleotide
aacuuucuuauc

SEQ ID NO: 97718 - RNA, 13 nt, Artificial Sequence
  Description of Artificial Sequence: Synthetic oligonucleotide
ccuugcaugacau

SEQ ID NO: 97719 - RNA, 14 nt, Artificial Sequence
  Description of Artificial Sequence: Synthetic oligonucleotide
ugaauuuguauaug

SEQ ID NO: 97720 - RNA, 12 nt, Artificial Sequence
  Description of Artificial Sequence: Synthetic oligonucleotide
gaauccuaguag

SEQ ID NO: 97721 - RNA, 10 nt, Artificial Sequence
  Description of Artificial Sequence: Synthetic oligonucleotide
gaaagggaag

SEQ ID NO: 97722 - RNA, 11 nt, Artificial Sequence
  Description of Artificial Sequence: Synthetic oligonucleotide
uaucggcaugc

SEQ ID NO: 97723 - RNA, 12 nt, Artificial Sequence
  Description of Artificial Sequence: Synthetic oligonucleotide
caccucauagua

SEQ ID NO: 97724 - RNA, 11 nt, Artificial Sequence
  Description of Artificial Sequence: Synthetic oligonucleotide
ccagaauugcc

SEQ ID NO: 97725 - RNA, 11 nt, Artificial Sequence
  Description of Artificial Sequence: Synthetic oligonucleotide
uggugaucugg

SEQ ID NO: 97726 - RNA, 12 nt, Artificial Sequence
  Description of Artificial Sequence: Synthetic oligonucleotide
gaucuggguaau

SEQ ID NO: 97727 - RNA, 12 nt, Artificial Sequence
  Description of Artificial Sequence: Synthetic oligonucleotide
ggaugugaugaa

SEQ ID NO: 97728 - RNA, 12 nt, Artificial Sequence
  Description of Artificial Sequence: Synthetic oligonucleotide
cauuuccacagc

SEQ ID NO: 97729 - RNA, 11 nt, Artificial Sequence
  Description of Artificial Sequence: Synthetic oligonucleotide
acagcuacacc

SEQ ID NO: 97730 - RNA, 12 nt, Artificial Sequence
  Description of Artificial Sequence: Synthetic oligonucleotide
ugcaguucuuac

SEQ ID NO: 97731 - RNA, 12 nt, Artificial Sequence
  Description of Artificial Sequence: Synthetic oligonucleotide
acgagaagaaga

SEQ ID NO: 97732 - RNA, 12 nt, Artificial Sequence
  Description of Artificial Sequence: Synthetic oligonucleotide
cgagaagaagau

SEQ ID NO: 97733 - RNA, 15 nt, Artificial Sequence
  Description of Artificial Sequence: Synthetic oligonucleotide
aagaagaucauuuac

SEQ ID NO: 97734 - RNA, 11 nt, Artificial Sequence
  Description of Artificial Sequence: Synthetic oligonucleotide
agaggaagagg

SEQ ID NO: 97735 - RNA, 12 nt, Artificial Sequence
  Description of Artificial Sequence: Synthetic oligonucleotide
gaggaagaggug

SEQ ID NO: 97736 - RNA, 13 nt, Artificial Sequence
  Description of Artificial Sequence: Synthetic oligonucleotide
cuacuuugagggc

SEQ ID NO: 97737 - RNA, 12 nt, Artificial Sequence
  Description of Artificial Sequence: Synthetic oligonucleotide
agggcaucuccu

SEQ ID NO: 97738 - RNA, 10 nt, Artificial Sequence
  Description of Artificial Sequence: Synthetic oligonucleotide
ggagugauau

SEQ ID NO: 97739 - RNA, 11 nt, Artificial Sequence
  Description of Artificial Sequence: Synthetic oligonucleotide
gagugauaugg

SEQ ID NO: 97740 - RNA, 12 nt, Artificial Sequence
  Description of Artificial Sequence: Synthetic oligonucleotide
ugcaguaaagau

SEQ ID NO: 97741 - RNA, 13 nt, Artificial Sequence
  Description of Artificial Sequence: Synthetic oligonucleotide
aguaaagauccua

SEQ ID NO: 97742 - RNA, 12 nt, Artificial Sequence
  Description of Artificial Sequence: Synthetic oligonucleotide
ugacaaaggaca

SEQ ID NO: 97743 - RNA, 13 nt, Artificial Sequence
  Description of Artificial Sequence: Synthetic oligonucleotide
gcaauugugaccc

SEQ ID NO: 97744 - RNA, 12 nt, Artificial Sequence
  Description of Artificial Sequence: Synthetic oligonucleotide
aacaucauccau

SEQ ID NO: 97745 - RNA, 12 nt, Artificial Sequence
  Description of Artificial Sequence: Synthetic oligonucleotide
ugaaauccaaca

SEQ ID NO: 97746 - RNA, 15 nt, Artificial Sequence
  Description of Artificial Sequence: Synthetic oligonucleotide
aacaauauauuucuc

SEQ ID NO: 97747 - RNA, 14 nt, Artificial Sequence
  Description of Artificial Sequence: Synthetic oligonucleotide
aacaguaaagucac

SEQ ID NO: 97748 - RNA, 14 nt, Artificial Sequence
  Description of Artificial Sequence: Synthetic oligonucleotide
ugugaagaaaguaa

SEQ ID NO: 97749 - RNA, 13 nt, Artificial Sequence
  Description of Artificial Sequence: Synthetic oligonucleotide
cuuccgagccauc

SEQ ID NO: 97750 - RNA, 12 nt, Artificial Sequence
  Description of Artificial Sequence: Synthetic oligonucleotide
aauggagguuga

SEQ ID NO: 97751 - RNA, 12 nt, Artificial Sequence
  Description of Artificial Sequence: Synthetic oligonucleotide
ggagguugaaua

SEQ ID NO: 97752 - RNA, 13 nt, Artificial Sequence
  Description of Artificial Sequence: Synthetic oligonucleotide
auuuugaguuuuc

SEQ ID NO: 97753 - RNA, 12 nt, Artificial Sequence
  Description of Artificial Sequence: Synthetic oligonucleotide
uauccuguuugu

SEQ ID NO: 97754 - RNA, 11 nt, Artificial Sequence
  Description of Artificial Sequence: Synthetic oligonucleotide
ccuguuuguuc

SEQ ID NO: 97755 - RNA, 10 nt, Artificial Sequence
  Description of Artificial Sequence: Synthetic oligonucleotide
cucuacagcc

SEQ ID NO: 97756 - RNA, 12 nt, Artificial Sequence
  Description of Artificial Sequence: Synthetic oligonucleotide
ucuuccauagcu

SEQ ID NO: 97757 - RNA, 12 nt, Artificial Sequence
  Description of Artificial Sequence: Synthetic oligonucleotide
auaaucuuccug

SEQ ID NO: 97758 - RNA, 12 nt, Artificial Sequence
  Description of Artificial Sequence: Synthetic oligonucleotide
uaaucuuccugu

SEQ ID NO: 97759 - RNA, 12 nt, Artificial Sequence
  Description of Artificial Sequence: Synthetic oligonucleotide
cuucaugacuug

SEQ ID NO: 97760 - RNA, 12 nt, Artificial Sequence
  Description of Artificial Sequence: Synthetic oligonucleotide
aagagggagaga

SEQ ID NO: 97761 - RNA, 12 nt, Artificial Sequence
  Description of Artificial Sequence: Synthetic oligonucleotide
cgucuccuacca

SEQ ID NO: 97762 - RNA, 12 nt, Artificial Sequence
  Description of Artificial Sequence: Synthetic oligonucleotide
gaucaaucggcc

SEQ ID NO: 97763 - RNA, 12 nt, Artificial Sequence
  Description of Artificial Sequence: Synthetic oligonucleotide
ggacgaacaucc

SEQ ID NO: 97764 - RNA, 11 nt, Artificial Sequence
  Description of Artificial Sequence: Synthetic oligonucleotide
agggucggaac

SEQ ID NO: 97765 - RNA, 10 nt, Artificial Sequence
  Description of Artificial Sequence: Synthetic oligonucleotide
ucggaaccca

SEQ ID NO: 97766 - RNA, 11 nt, Artificial Sequence
  Description of Artificial Sequence: Synthetic oligonucleotide
acccaagcuua

SEQ ID NO: 97767 - RNA, 14 nt, Artificial Sequence
  Description of Artificial Sequence: Synthetic oligonucleotide
gaacuuuaagcaac

SEQ ID NO: 97768 - RNA, 11 nt, Artificial Sequence
  Description of Artificial Sequence: Synthetic oligonucleotide
acuauucagug

SEQ ID NO: 97769 - RNA, 11 nt, Artificial Sequence
  Description of Artificial Sequence: Synthetic oligonucleotide
cuauucagugg

SEQ ID NO: 97770 - RNA, 13 nt, Artificial Sequence
  Description of Artificial Sequence: Synthetic oligonucleotide
aaacacagauaac

SEQ ID NO: 97771 - RNA, 12 nt, Artificial Sequence
  Description of Artificial Sequence: Synthetic oligonucleotide
cuuaagaaaaga

SEQ ID NO: 97772 - RNA, 12 nt, Artificial Sequence
  Description of Artificial Sequence: Synthetic oligonucleotide
cugaaggagugu

SEQ ID NO: 97773 - RNA, 10 nt, Artificial Sequence
  Description of Artificial Sequence: Synthetic oligonucleotide
ucaccgcggg

SEQ ID NO: 97774 - RNA, 14 nt, Artificial Sequence
  Description of Artificial Sequence: Synthetic oligonucleotide
agcagaaauaagcg

SEQ ID NO: 97775 - RNA, 12 nt, Artificial Sequence
  Description of Artificial Sequence: Synthetic oligonucleotide
aagcgugccguu

SEQ ID NO: 97776 - RNA, 12 nt, Artificial Sequence
  Description of Artificial Sequence: Synthetic oligonucleotide
agaaacagucac

SEQ ID NO: 97777 - RNA, 12 nt, Artificial Sequence
  Description of Artificial Sequence: Synthetic oligonucleotide
agaggaagaagg

SEQ ID NO: 97778 - RNA, 14 nt, Artificial Sequence
  Description of Artificial Sequence: Synthetic oligonucleotide
uguauucaaaauau

SEQ ID NO: 97779 - RNA, 13 nt, Artificial Sequence
  Description of Artificial Sequence: Synthetic oligonucleotide
auuuuccucccuu

SEQ ID NO: 97780 - RNA, 13 nt, Artificial Sequence
  Description of Artificial Sequence: Synthetic oligonucleotide
caaagaaagauag

SEQ ID NO: 97781 - RNA, 12 nt, Artificial Sequence
  Description of Artificial Sequence: Synthetic oligonucleotide
aagaaagauaga

SEQ ID NO: 97782 - RNA, 13 nt, Artificial Sequence
  Description of Artificial Sequence: Synthetic oligonucleotide
gaaagcauuuguu

SEQ ID NO: 97783 - RNA, 13 nt, Artificial Sequence
  Description of Artificial Sequence: Synthetic oligonucleotide
ugaguuaaacgaa

SEQ ID NO: 97784 - RNA, 12 nt, Artificial Sequence
  Description of Artificial Sequence: Synthetic oligonucleotide
acugauacagaa

SEQ ID NO: 97785 - RNA, 12 nt, Artificial Sequence
  Description of Artificial Sequence: Synthetic oligonucleotide
auauuauauaua

SEQ ID NO: 97786 - RNA, 12 nt, Artificial Sequence
  Description of Artificial Sequence: Synthetic oligonucleotide
auuauauauaua

SEQ ID NO: 97787 - RNA, 12 nt, Artificial Sequence
  Description of Artificial Sequence: Synthetic oligonucleotide
ucacuggaugua

SEQ ID NO: 97788 - RNA, 12 nt, Artificial Sequence
  Description of Artificial Sequence: Synthetic oligonucleotide
cagggaagagga

SEQ ID NO: 97789 - RNA, 15 nt, Artificial Sequence
  Description of Artificial Sequence: Synthetic oligonucleotide
augaucuuuuuuuug

SEQ ID NO: 97790 - RNA, 11 nt, Artificial Sequence
  Description of Artificial Sequence: Synthetic oligonucleotide
aguucacggcc

SEQ ID NO: 97791 - RNA, 13 nt, Artificial Sequence
  Description of Artificial Sequence: Synthetic oligonucleotide
caccaucacacca

SEQ ID NO: 97792 - RNA, 11 nt, Artificial Sequence
  Description of Artificial Sequence: Synthetic oligonucleotide
ccugcggguuu

SEQ ID NO: 97793 - RNA, 10 nt, Artificial Sequence
  Description of Artificial Sequence: Synthetic oligonucleotide
auccaguuug

SEQ ID NO: 97794 - RNA, 13 nt, Artificial Sequence
  Description of Artificial Sequence: Synthetic oligonucleotide
guuaaggacuucu

SEQ ID NO: 97795 - RNA, 13 nt, Artificial Sequence
  Description of Artificial Sequence: Synthetic oligonucleotide
cagugggacagag

SEQ ID NO: 97796 - RNA, 14 nt, Artificial Sequence
  Description of Artificial Sequence: Synthetic oligonucleotide
aauuuguuauugug

SEQ ID NO: 97797 - RNA, 13 nt, Artificial Sequence
  Description of Artificial Sequence: Synthetic oligonucleotide
uucaaaugcauuu

SEQ ID NO: 97798 - RNA, 10 nt, Artificial Sequence
  Description of Artificial Sequence: Synthetic oligonucleotide
caggaaagcc

SEQ ID NO: 97799 - RNA, 11 nt, Artificial Sequence
  Description of Artificial Sequence: Synthetic oligonucleotide
aggaaagcccu

SEQ ID NO: 97800 - RNA, 12 nt, Artificial Sequence
  Description of Artificial Sequence: Synthetic oligonucleotide
cccagcauggcc

SEQ ID NO: 97801 - RNA, 11 nt, Artificial Sequence
  Description of Artificial Sequence: Synthetic oligonucleotide
cuucucccuga

SEQ ID NO: 97802 - RNA, 12 nt, Artificial Sequence
  Description of Artificial Sequence: Synthetic oligonucleotide
gaagaagcccuu

SEQ ID NO: 97803 - RNA, 12 nt, Artificial Sequence
  Description of Artificial Sequence: Synthetic oligonucleotide
agaagcccuuca

SEQ ID NO: 97804 - RNA, 11 nt, Artificial Sequence
  Description of Artificial Sequence: Synthetic oligonucleotide
gcccuucagcg

SEQ ID NO: 97805 - RNA, 11 nt, Artificial Sequence
  Description of Artificial Sequence: Synthetic oligonucleotide
ccuucagcggc

SEQ ID NO: 97806 - RNA, 12 nt, Artificial Sequence
  Description of Artificial Sequence: Synthetic oligonucleotide
ucagcggccagu

SEQ ID NO: 97807 - RNA, 12 nt, Artificial Sequence
  Description of Artificial Sequence: Synthetic oligonucleotide
ugaaaagcuccg

SEQ ID NO: 97808 - RNA, 11 nt, Artificial Sequence
  Description of Artificial Sequence: Synthetic oligonucleotide
aaaagcuccgg

SEQ ID NO: 97809 - RNA, 13 nt, Artificial Sequence
  Description of Artificial Sequence: Synthetic oligonucleotide
agucaacagucug

SEQ ID NO: 97810 - RNA, 13 nt, Artificial Sequence
  Description of Artificial Sequence: Synthetic oligonucleotide
cagaguucaaaag

SEQ ID NO: 97811 - RNA, 13 nt, Artificial Sequence
  Description of Artificial Sequence: Synthetic oligonucleotide
agaguucaaaagc

SEQ ID NO: 97812 - RNA, 12 nt, Artificial Sequence
  Description of Artificial Sequence: Synthetic oligonucleotide
uucaaaagcccu

SEQ ID NO: 97813 - RNA, 12 nt, Artificial Sequence
  Description of Artificial Sequence: Synthetic oligonucleotide
ucaaaagcccuu

SEQ ID NO: 97814 - RNA, 12 nt, Artificial Sequence
  Description of Artificial Sequence: Synthetic oligonucleotide
aaaagcccuuca

SEQ ID NO: 97815 - RNA, 12 nt, Artificial Sequence
  Description of Artificial Sequence: Synthetic oligonucleotide
aaagcccuucag

SEQ ID NO: 97816 - RNA, 13 nt, Artificial Sequence
  Description of Artificial Sequence: Synthetic oligonucleotide
gugaagccgcucg

SEQ ID NO: 97817 - RNA, 12 nt, Artificial Sequence
  Description of Artificial Sequence: Synthetic oligonucleotide
cacgccagucaa

SEQ ID NO: 97818 - RNA, 13 nt, Artificial Sequence
  Description of Artificial Sequence: Synthetic oligonucleotide
uucuuggugcgug

SEQ ID NO: 97819 - RNA, 14 nt, Artificial Sequence
  Description of Artificial Sequence: Synthetic oligonucleotide
auuggauucaucag

SEQ ID NO: 97820 - RNA, 13 nt, Artificial Sequence
  Description of Artificial Sequence: Synthetic oligonucleotide
uggaauaccuaag

SEQ ID NO: 97821 - RNA, 12 nt, Artificial Sequence
  Description of Artificial Sequence: Synthetic oligonucleotide
auuugaggcuca

SEQ ID NO: 97822 - RNA, 11 nt, Artificial Sequence
  Description of Artificial Sequence: Synthetic oligonucleotide
ucuacaauugg

SEQ ID NO: 97823 - RNA, 12 nt, Artificial Sequence
  Description of Artificial Sequence: Synthetic oligonucleotide
uaguuaggagcc

SEQ ID NO: 97824 - RNA, 13 nt, Artificial Sequence
  Description of Artificial Sequence: Synthetic oligonucleotide
agucaauauccac

SEQ ID NO: 97825 - RNA, 13 nt, Artificial Sequence
  Description of Artificial Sequence: Synthetic oligonucleotide
auguucagucaca

SEQ ID NO: 97826 - RNA, 12 nt, Artificial Sequence
  Description of Artificial Sequence: Synthetic oligonucleotide
acacacacauac

SEQ ID NO: 97827 - RNA, 12 nt, Artificial Sequence
  Description of Artificial Sequence: Synthetic oligonucleotide
uuccuuuugcuu

SEQ ID NO: 97828 - RNA, 16 nt, Artificial Sequence
  Description of Artificial Sequence: Synthetic oligonucleotide
uuuuaaaguaauuuuu

SEQ ID NO: 97829 - RNA, 13 nt, Artificial Sequence
  Description of Artificial Sequence: Synthetic oligonucleotide
caacagucaaugg

SEQ ID NO: 97830 - RNA, 13 nt, Artificial Sequence
  Description of Artificial Sequence: Synthetic oligonucleotide
ucgacaaaccaau

SEQ ID NO: 97831 - RNA, 12 nt, Artificial Sequence
  Description of Artificial Sequence: Synthetic oligonucleotide
acugcuaccacu

SEQ ID NO: 97832 - RNA, 13 nt, Artificial Sequence
  Description of Artificial Sequence: Synthetic oligonucleotide
gcaagcggucuua

SEQ ID NO: 97833 - RNA, 13 nt, Artificial Sequence
  Description of Artificial Sequence: Synthetic oligonucleotide
ggucuuaccggcu

SEQ ID NO: 97834 - RNA, 11 nt, Artificial Sequence
  Description of Artificial Sequence: Synthetic oligonucleotide
gauggguuacc

SEQ ID NO: 97835 - RNA, 11 nt, Artificial Sequence
  Description of Artificial Sequence: Synthetic oligonucleotide
guuaccugcga

SEQ ID NO: 97836 - RNA, 12 nt, Artificial Sequence
  Description of Artificial Sequence: Synthetic oligonucleotide
aaucuugcugag

SEQ ID NO: 97837 - RNA, 13 nt, Artificial Sequence
  Description of Artificial Sequence: Synthetic oligonucleotide
agcauaaaacagu

SEQ ID NO: 97838 - RNA, 12 nt, Artificial Sequence
  Description of Artificial Sequence: Synthetic oligonucleotide
guccuuuauccu

SEQ ID NO: 97839 - RNA, 12 nt, Artificial Sequence
  Description of Artificial Sequence: Synthetic oligonucleotide
caacgcaaguug

SEQ ID NO: 97840 - RNA, 13 nt, Artificial Sequence
  Description of Artificial Sequence: Synthetic oligonucleotide
aaacugaaaccau

SEQ ID NO: 97841 - RNA, 14 nt, Artificial Sequence
  Description of Artificial Sequence: Synthetic oligonucleotide
acuuuguuaaauau

SEQ ID NO: 97842 - RNA, 14 nt, Artificial Sequence
  Description of Artificial Sequence: Synthetic oligonucleotide
guauauuaaaaguu

SEQ ID NO: 97843 - RNA, 13 nt, Artificial Sequence
  Description of Artificial Sequence: Synthetic oligonucleotide
guuuugacuuaac

SEQ ID NO: 97844 - RNA, 13 nt, Artificial Sequence
  Description of Artificial Sequence: Synthetic oligonucleotide
gcaaacucagcac

SEQ ID NO: 97845 - RNA, 11 nt, Artificial Sequence
  Description of Artificial Sequence: Synthetic oligonucleotide
ugcugaccuca

SEQ ID NO: 97846 - RNA, 14 nt, Artificial Sequence
  Description of Artificial Sequence: Synthetic oligonucleotide
uuuauucagaucgc

SEQ ID NO: 97847 - RNA, 13 nt, Artificial Sequence
  Description of Artificial Sequence: Synthetic oligonucleotide
aggguucugggau

SEQ ID NO: 97848 - RNA, 15 nt, Artificial Sequence
  Description of Artificial Sequence: Synthetic oligonucleotide
auauuggaaauuaug

SEQ ID NO: 97849 - RNA, 13 nt, Artificial Sequence
  Description of Artificial Sequence: Synthetic oligonucleotide
auggaagcacuag

SEQ ID NO: 97850 - RNA, 13 nt, Artificial Sequence
  Description of Artificial Sequence: Synthetic oligonucleotide
guuuuuaugugga

SEQ ID NO: 97851 - RNA, 12 nt, Artificial Sequence
  Description of Artificial Sequence: Synthetic oligonucleotide
ggaauugguaga

SEQ ID NO: 97852 - RNA, 13 nt, Artificial Sequence
  Description of Artificial Sequence: Synthetic oligonucleotide
uuagacuuggaga

SEQ ID NO: 97853 - RNA, 13 nt, Artificial Sequence
  Description of Artificial Sequence: Synthetic oligonucleotide
uuacaguauucca

SEQ ID NO: 97854 - RNA, 15 nt, Artificial Sequence
  Description of Artificial Sequence: Synthetic oligonucleotide
ccacugaugaauuaa

SEQ ID NO: 97855 - RNA, 12 nt, Artificial Sequence
  Description of Artificial Sequence: Synthetic oligonucleotide
ccacaucaucac

SEQ ID NO: 97856 - RNA, 13 nt, Artificial Sequence
  Description of Artificial Sequence: Synthetic oligonucleotide
cucaccaaacaga

SEQ ID NO: 97857 - RNA, 12 nt, Artificial Sequence
  Description of Artificial Sequence: Synthetic oligonucleotide
ggaacaugaugg

SEQ ID NO: 97858 - RNA, 12 nt, Artificial Sequence
  Description of Artificial Sequence: Synthetic oligonucleotide
cauguagacugc

SEQ ID NO: 97859 - RNA, 13 nt, Artificial Sequence
  Description of Artificial Sequence: Synthetic oligonucleotide
ggaucuauuuaug

SEQ ID NO: 97860 - RNA, 12 nt, Artificial Sequence
  Description of Artificial Sequence: Synthetic oligonucleotide
gcacuauuauca

SEQ ID NO: 97861 - RNA, 11 nt, Artificial Sequence
  Description of Artificial Sequence: Synthetic oligonucleotide
aucaguucugc

SEQ ID NO: 97862 - RNA, 13 nt, Artificial Sequence
  Description of Artificial Sequence: Synthetic oligonucleotide
agauuaaaccuac

SEQ ID NO: 97863 - RNA, 13 nt, Artificial Sequence
  Description of Artificial Sequence: Synthetic oligonucleotide
auaaaauccuucu

SEQ ID NO: 97864 - RNA, 12 nt, Artificial Sequence
  Description of Artificial Sequence: Synthetic oligonucleotide
aaugcuguagac

SEQ ID NO: 97865 - RNA, 13 nt, Artificial Sequence
  Description of Artificial Sequence: Synthetic oligonucleotide
uugauaggaauag

SEQ ID NO: 97866 - RNA, 11 nt, Artificial Sequence
  Description of Artificial Sequence: Synthetic oligonucleotide
aauggcccuga

SEQ ID NO: 97867 - RNA, 11 nt, Artificial Sequence
  Description of Artificial Sequence: Synthetic oligonucleotide
uuccucaagca

SEQ ID NO: 97868 - RNA, 10 nt, Artificial Sequence
  Description of Artificial Sequence: Synthetic oligonucleotide
guucagccca

SEQ ID NO: 97869 - RNA, 11 nt, Artificial Sequence
  Description of Artificial Sequence: Synthetic oligonucleotide
gcugcugaacc

SEQ ID NO: 97870 - RNA, 12 nt, Artificial Sequence
  Description of Artificial Sequence: Synthetic oligonucleotide
aaguucucuuca

SEQ ID NO: 97871 - RNA, 11 nt, Artificial Sequence
  Description of Artificial Sequence: Synthetic oligonucleotide
ccagccuagag

SEQ ID NO: 97872 - RNA, 13 nt, Artificial Sequence
  Description of Artificial Sequence: Synthetic oligonucleotide
cucugugaagugu

SEQ ID NO: 97873 - RNA, 14 nt, Artificial Sequence
  Description of Artificial Sequence: Synthetic oligonucleotide
ugagaaaauuucaa

SEQ ID NO: 97874 - RNA, 11 nt, Artificial Sequence
  Description of Artificial Sequence: Synthetic oligonucleotide
aauccuccuga

SEQ ID NO: 97875 - RNA, 12 nt, Artificial Sequence
  Description of Artificial Sequence: Synthetic oligonucleotide
gugacaucauau

SEQ ID NO: 97876 - RNA, 13 nt, Artificial Sequence
  Description of Artificial Sequence: Synthetic oligonucleotide
aaucuucaucaua

SEQ ID NO: 97877 - RNA, 13 nt, Artificial Sequence
  Description of Artificial Sequence: Synthetic oligonucleotide
gacuagcuauuaa

SEQ ID NO: 97878 - RNA, 14 nt, Artificial Sequence
  Description of Artificial Sequence: Synthetic oligonucleotide
ucucuacuaaaaau

SEQ ID NO: 97879 - RNA, 12 nt, Artificial Sequence
  Description of Artificial Sequence: Synthetic oligonucleotide
ucuaucucgccu

SEQ ID NO: 97880 - RNA, 13 nt, Artificial Sequence
  Description of Artificial Sequence: Synthetic oligonucleotide
cuucgguccaguu

SEQ ID NO: 97881 - RNA, 11 nt, Artificial Sequence
  Description of Artificial Sequence: Synthetic oligonucleotide
gauguagccgc

SEQ ID NO: 97882 - RNA, 12 nt, Artificial Sequence
  Description of Artificial Sequence: Synthetic oligonucleotide
ugaggagacuug

SEQ ID NO: 97883 - RNA, 12 nt, Artificial Sequence
  Description of Artificial Sequence: Synthetic oligonucleotide
gaguagugagga

SEQ ID NO: 97884 - RNA, 14 nt, Artificial Sequence
  Description of Artificial Sequence: Synthetic oligonucleotide
cagaugaguacaaa

SEQ ID NO: 97885 - RNA, 13 nt, Artificial Sequence
  Description of Artificial Sequence: Synthetic oligonucleotide
guuguuaaugggc

SEQ ID NO: 97886 - RNA, 13 nt, Artificial Sequence
  Description of Artificial Sequence: Synthetic oligonucleotide
uuuuuaauuuauu

SEQ ID NO: 97887 - RNA, 12 nt, Artificial Sequence
  Description of Artificial Sequence: Synthetic oligonucleotide
uauuuaaauaug

SEQ ID NO: 97888 - RNA, 13 nt, Artificial Sequence
  Description of Artificial Sequence: Synthetic oligonucleotide
uauccuuuguuuc

SEQ ID NO: 97889 - RNA, 14 nt, Artificial Sequence
  Description of Artificial Sequence: Synthetic oligonucleotide
cgucuaaguguuug

SEQ ID NO: 97890 - RNA, 12 nt, Artificial Sequence
  Description of Artificial Sequence: Synthetic oligonucleotide
accugugacaaa

SEQ ID NO: 97891 - RNA, 13 nt, Artificial Sequence
  Description of Artificial Sequence: Synthetic oligonucleotide
ccaggcugaauua

SEQ ID NO: 97892 - RNA, 14 nt, Artificial Sequence
  Description of Artificial Sequence: Synthetic oligonucleotide
gucauucuuacaau

SEQ ID NO: 97893 - RNA, 15 nt, Artificial Sequence
  Description of Artificial Sequence: Synthetic oligonucleotide
ucauucuuacaauug

SEQ ID NO: 97894 - RNA, 12 nt, Artificial Sequence
  Description of Artificial Sequence: Synthetic oligonucleotide
cagagaguguac

SEQ ID NO: 97895 - RNA, 12 nt, Artificial Sequence
  Description of Artificial Sequence: Synthetic oligonucleotide
agaacucagcag

SEQ ID NO: 97896 - RNA, 13 nt, Artificial Sequence
  Description of Artificial Sequence: Synthetic oligonucleotide
uuuauuuucagua

SEQ ID NO: 97897 - RNA, 12 nt, Artificial Sequence
  Description of Artificial Sequence: Synthetic oligonucleotide
ucuuaaauggaa
